United States Patent Application Publication US 2025/0290144 A1 - sequence listing, part 2

SEQ ID NO: 27156 - DNA, 26 bp, Homo sapiens
  source 1..26: mol_type = genomic DNA
tgaatctgacaacagaggcttacgac

SEQ ID NO: 27157 - DNA, 27 bp, Homo sapiens
  source 1..27: mol_type = genomic DNA
tgaatctgacaacagaggcttacgacc

SEQ ID NO: 27158 - DNA, 28 bp, Homo sapiens
  source 1..28: mol_type = genomic DNA
tgaatctgacaacagaggcttacgaccc

SEQ ID NO: 27159 - DNA, 29 bp, Homo sapiens
  source 1..29: mol_type = genomic DNA
tgaatctgacaacagaggcttacgacccc

SEQ ID NO: 27160 - DNA, 30 bp, Homo sapiens
  source 1..30: mol_type = genomic DNA
tgaatctgacaacagaggcttacgacccct

SEQ ID NO: 27161 - DNA, 31 bp, Homo sapiens
  source 1..31: mol_type = genomic DNA
tgaatctgacaacagaggcttacgacccctt

SEQ ID NO: 27162 - DNA, 32 bp, Homo sapiens
  source 1..32: mol_type = genomic DNA
tgaatctgacaacagaggcttacgacccctta

SEQ ID NO: 27163 - DNA, 33 bp, Homo sapiens
  source 1..33: mol_type = genomic DNA
tgaatctgacaacagaggcttacgaccccttat

SEQ ID NO: 27164 - DNA, 34 bp, Homo sapiens
  source 1..34: mol_type = genomic DNA
tgaatctgacaacagaggcttacgaccccttatt

SEQ ID NO: 27165 - DNA, 35 bp, Homo sapiens
  source 1..35: mol_type = genomic DNA
tgaatctgacaacagaggcttacgaccccttattt

SEQ ID NO: 27166 - DNA, 36 bp, Homo sapiens
  source 1..36: mol_type = genomic DNA
tgaatctgacaacagaggcttacgaccccttattta

SEQ ID NO: 27167 - DNA, 37 bp, Homo sapiens
  source 1..37: mol_type = genomic DNA
tgaatctgacaacagaggcttacgaccccttatttac

SEQ ID NO: 27168 - DNA, 38 bp, Homo sapiens
  source 1..38: mol_type = genomic DNA
tgaatctgacaacagaggcttacgaccccttatttacc

SEQ ID NO: 27169 - DNA, 39 bp, Homo sapiens
  source 1..39: mol_type = genomic DNA
tgaatctgacaacagaggcttacgaccccttatttaccc

SEQ ID NO: 27170 - DNA, 40 bp, Homo sapiens
  source 1..40: mol_type = genomic DNA
tgaatctgacaacagaggcttacgaccccttatttacccc

SEQ ID NO: 27171 - DNA, 41 bp, Homo sapiens
  source 1..41: mol_type = genomic DNA
tgaatctgacaacagaggcttacgaccccttatttacccca

SEQ ID NO: 27172 - DNA, 25 bp, Homo sapiens
  source 1..25: mol_type = genomic DNA
tgaattgcaaattcgaagaagcagc

SEQ ID NO: 27173 - DNA, 26 bp, Homo sapiens
  source 1..26: mol_type = genomic DNA
tgaattgcaaattcgaagaagcagct

SEQ ID NO: 27174 - DNA, 29 bp, Homo sapiens
  source 1..29: mol_type = genomic DNA
tgaattgcaaattcgaagaagcagcttca

SEQ ID NO: 27175 - DNA, 42 bp, Homo sapiens
  source 1..42: mol_type = genomic DNA
tgaattgcaaattcgaagaagcagcttcaaacctgccggggc

SEQ ID NO: 27176 - DNA, 43 bp, Homo sapiens
  source 1..43: mol_type = genomic DNA
tgaattgcaaattcgaagaagcagcttcaaacctgccggggct

SEQ ID NO: 27177 - DNA, 44 bp, Homo sapiens
  source 1..44: mol_type = genomic DNA
tgaattgcaaattcgaagaagcagcttcaaacctgccggggctt

SEQ ID NO: 27178 - DNA, 45 bp, Homo sapiens
  source 1..45: mol_type = genomic DNA
tgaattgcaaattcgaagaagcagcttcaaacctgccggggcttc

SEQ ID NO: 27179 - DNA, 46 bp, Homo sapiens
  source 1..46: mol_type = genomic DNA
tgaattgcaaattcgaagaagcagcttcaaacctgccggggcttcc

SEQ ID NO: 27180 - DNA, 16 bp, Homo sapiens
  source 1..16: mol_type = genomic DNA
tgacaacagaggctta

SEQ ID NO: 27181 - DNA, 17 bp, Homo sapiens
  source 1..17: mol_type = genomic DNA
tgacaacagaggcttac

SEQ ID NO: 27182 - DNA, 18 bp, Homo sapiens
  source 1..18: mol_type = genomic DNA
tgacaacagaggcttacg

SEQ ID NO: 27183 - DNA, 19 bp, Homo sapiens
  source 1..19: mol_type = genomic DNA
tgacaacagaggcttacga

SEQ ID NO: 27184 - DNA, 20 bp, Homo sapiens
  source 1..20: mol_type = genomic DNA
tgacaacagaggcttacgac

SEQ ID NO: 27185 - DNA, 21 bp, Homo sapiens
  source 1..21: mol_type = genomic DNA
tgacaacagaggcttacgacc

SEQ ID NO: 27186 - DNA, 22 bp, Homo sapiens
  source 1..22: mol_type = genomic DNA
tgacaacagaggcttacgaccc

SEQ ID NO: 27187 - DNA, 23 bp, Homo sapiens
  source 1..23: mol_type = genomic DNA
tgacaacagaggcttacgacccc

SEQ ID NO: 27188 - DNA, 24 bp, Homo sapiens
  source 1..24: mol_type = genomic DNA
tgacaacagaggcttacgacccct

SEQ ID NO: 27189 - DNA, 25 bp, Homo sapiens
  source 1..25: mol_type = genomic DNA
tgacaacagaggcttacgacccctt

SEQ ID NO: 27190 - DNA, 26 bp, Homo sapiens
  source 1..26: mol_type = genomic DNA
tgacaacagaggcttacgacccctta

SEQ ID NO: 27191 - DNA, 27 bp, Homo sapiens
  source 1..27: mol_type = genomic DNA
tgacaacagaggcttacgaccccttat

SEQ ID NO: 27192 - DNA, 28 bp, Homo sapiens
  source 1..28: mol_type = genomic DNA
tgacaacagaggcttacgaccccttatt

SEQ ID NO: 27193 - DNA, 29 bp, Homo sapiens
  source 1..29: mol_type = genomic DNA
tgacaacagaggcttacgaccccttattt

SEQ ID NO: 27194 - DNA, 31 bp, Homo sapiens
  source 1..31: mol_type = genomic DNA
tgacaacagaggcttacgaccccttatttac

SEQ ID NO: 27195 - DNA, 32 bp, Homo sapiens
  source 1..32: mol_type = genomic DNA
tgacaacagaggcttacgaccccttatttacc

SEQ ID NO: 27196 - DNA, 33 bp, Homo sapiens
  source 1..33: mol_type = genomic DNA
tgacaacagaggcttacgaccccttatttaccc

SEQ ID NO: 27197 - DNA, 34 bp, Homo sapiens
  source 1..34: mol_type = genomic DNA
tgacaacagaggcttacgaccccttatttacccc

SEQ ID NO: 27198 - DNA, 35 bp, Homo sapiens
  source 1..35: mol_type = genomic DNA
tgacaacagaggcttacgaccccttatttacccca

SEQ ID NO: 27199 - DNA, 18 bp, Homo sapiens
  source 1..18: mol_type = genomic DNA
tgacaacattcaaaaaag

SEQ ID NO: 27200 - DNA, 20 bp, Homo sapiens
  source 1..20: mol_type = genomic DNA
tgacaacattcaaaaaagag

SEQ ID NO: 27201 - DNA, 21 bp, Homo sapiens
  source 1..21: mol_type = genomic DNA
tgacaacattcaaaaaagagt

SEQ ID NO: 27202 - DNA, 22 bp, Homo sapiens
  source 1..22: mol_type = genomic DNA
tgacaacattcaaaaaagagta

SEQ ID NO: 27203 - DNA, 23 bp, Homo sapiens
  source 1..23: mol_type = genomic DNA
tgacaacattcaaaaaagagtac

SEQ ID NO: 27204 - DNA, 24 bp, Homo sapiens
  source 1..24: mol_type = genomic DNA
tgacaacattcaaaaaagagtacc

SEQ ID NO: 27205 - DNA, 25 bp, Homo sapiens
  source 1..25: mol_type = genomic DNA
tgacaacattcaaaaaagagtacca

SEQ ID NO: 27206 - DNA, 22 bp, Homo sapiens
  source 1..22: mol_type = genomic DNA
tgacccgggttcgattcccggc

SEQ ID NO: 27207 - DNA, 31 bp, Homo sapiens
  source 1..31: mol_type = genomic DNA
tgacccgggttcgattcccggccaacgcacc

SEQ ID NO: 27208 - DNA, 32 bp, Homo sapiens
  source 1..32: mol_type = genomic DNA
tgacccgggttcgattcccggccaacgcacca

SEQ ID NO: 27209 - DNA, 20 bp, Homo sapiens
  source 1..20: mol_type = genomic DNA
tgactccagatcagaaggct

SEQ ID NO: 27210 - DNA, 23 bp, Homo sapiens
  source 1..23: mol_type = genomic DNA
tgactccagatcagaaggttgcg

SEQ ID NO: 27211 - DNA, 21 bp, Homo sapiens
  source 1..21: mol_type = genomic DNA
tgactgcagatcaagaggtcc

SEQ ID NO: 27212 - DNA, 22 bp, Homo sapiens
  source 1..22: mol_type = genomic DNA
tgactgcagatcaagaggtccc

SEQ ID NO: 27213 - DNA, 23 bp, Homo sapiens
  source 1..23: mol_type = genomic DNA
tgactgcagatcaagaggtcccc

SEQ ID NO: 27214 - DNA, 24 bp, Homo sapiens
  source 1..24: mol_type = genomic DNA
tgactgcagatcaagaggtccccg

SEQ ID NO: 27215 - DNA, 25 bp, Homo sapiens
  source 1..25: mol_type = genomic DNA
tgactgcagatcaagaggtccccgg

SEQ ID NO: 27216 - DNA, 23 bp, Homo sapiens
  source 1..23: mol_type = genomic DNA
tgactgcagatcaagaggtccct

SEQ ID NO: 27217 - DNA, 24 bp, Homo sapiens
  source 1..24: mol_type = genomic DNA
tgactgcagatcaagaggtccctg

SEQ ID NO: 27218 - DNA, 17 bp, Homo sapiens
  source 1..17: mol_type = genomic DNA
tgacttcggatcagaag

SEQ ID NO: 27219 - DNA, 18 bp, Homo sapiens
  source 1..18: mol_type = genomic DNA
tgacttcggatcagaaga

SEQ ID NO: 27220 - DNA, 22 bp, Homo sapiens
  source 1..22: mol_type = genomic DNA
tgacttcggatcagaagattga

SEQ ID NO: 27221 - DNA, 26 bp, Homo sapiens
  source 1..26: mol_type = genomic DNA
tgacttcggatcagaagattgagggt

SEQ ID NO: 27222 - DNA, 28 bp, Homo sapiens
  source 1..28: mol_type = genomic DNA
tgacttcggatcagaagattgagggttc

SEQ ID NO: 27223 - DNA, 29 bp, Homo sapiens
  source 1..29: mol_type = genomic DNA
tgacttcggatcagaagattgagggttcg

SEQ ID NO: 27224 - DNA, 22 bp, Homo sapiens
  source 1..22: mol_type = genomic DNA
tgacttcggatcagaagattgc

SEQ ID NO: 27225 - DNA, 23 bp, Homo sapiens
  source 1..23: mol_type = genomic DNA
tgacttcggatcagaagattgca

SEQ ID NO: 27226 - DNA, 16 bp, Homo sapiens
  source 1..16: mol_type = genomic DNA
tgagactcttaatctc

SEQ ID NO: 27227 - DNA, 35 bp, Homo sapiens
  source 1..35: mol_type = genomic DNA
tgagaggtcccgggttcaaatcccggacgagcccc

SEQ ID NO: 27228 - DNA, 16 bp, Homo sapiens
  source 1..16: mol_type = genomic DNA
tgagcactctggactc

SEQ ID NO: 27229 - DNA, 18 bp, Homo sapiens
  source 1..18: mol_type = genomic DNA
tgagcactctggactctg

SEQ ID NO: 27230 - DNA, 22 bp, Homo sapiens
  source 1..22: mol_type = genomic DNA
tgagcactctggactctgaatc

SEQ ID NO: 27231 - DNA, 23 bp, Homo sapiens
  source 1..23: mol_type = genomic DNA
tgagcactctggactctgaatcc

SEQ ID NO: 27232 - DNA, 24 bp, Homo sapiens
  source 1..24: mol_type = genomic DNA
tgagcactctggactctgaatcca

SEQ ID NO: 27233 - DNA, 25 bp, Homo sapiens
  source 1..25: mol_type = genomic DNA
tgagcactctggactctgaatccag

SEQ ID NO: 27234 - DNA, 26 bp, Homo sapiens
  source 1..26: mol_type = genomic DNA
tgagcactctggactctgaatccagc

SEQ ID NO: 27235 - DNA, 27 bp, Homo sapiens
  source 1..27: mol_type = genomic DNA
tgagcactctggactctgaatccagcg

SEQ ID NO: 27236 - DNA, 33 bp, Homo sapiens
  source 1..33: mol_type = genomic DNA
tgagcactctggactctgaatccagcgatccga

SEQ ID NO: 27237 - DNA, 34 bp, Homo sapiens
  source 1..34: mol_type = genomic DNA
tgagcactctggactctgaatccagcgatccgag

SEQ ID NO: 27238 - DNA, 35 bp, Homo sapiens
  source 1..35: mol_type = genomic DNA
tgagcactctggactctgaatccagcgatccgagt

SEQ ID NO: 27239 - DNA, 38 bp, Homo sapiens
  source 1..38: mol_type = genomic DNA
tgagcactctggactctgaatccagcgatccgagttcg

SEQ ID NO: 27240 - DNA, 40 bp, Homo sapiens
  source 1..40: mol_type = genomic DNA
tgagcactctggactctgaatccagcgatccgagttcgag

SEQ ID NO: 27241 - DNA, 24 bp, Homo sapiens
  source 1..24: mol_type = genomic DNA
tgagcatagctgccttccaagcag

SEQ ID NO: 27242 - DNA, 33 bp, Homo sapiens
  source 1..33: mol_type = genomic DNA
tgagcatagctgccttccaagcagttgacccgg

SEQ ID NO: 27243 - DNA, 34 bp, Homo sapiens
  source 1..34: mol_type = genomic DNA
tgagcatagctgccttccaagcagttgacccggg

SEQ ID NO: 27244 - DNA, 35 bp, Homo sapiens
  source 1..35: mol_type = genomic DNA
tgagcatagctgccttccaagcagttgacccgggt

SEQ ID NO: 27245 - DNA, 36 bp, Homo sapiens
  source 1..36: mol_type = genomic DNA
tgagcatagctgccttccaagcagttgacccgggtt

SEQ ID NO: 27246 - DNA, 37 bp, Homo sapiens
  source 1..37: mol_type = genomic DNA
tgagcatagctgccttccaagcagttgacccgggttc

SEQ ID NO: 27247 - DNA, 16 bp, Homo sapiens
  source 1..16: mol_type = genomic DNA
tgaggccccgggttca

SEQ ID NO: 27248 - DNA, 22 bp, Homo sapiens
  source 1..22: mol_type = genomic DNA
tgaggccccgggttcaatcccc

SEQ ID NO: 27249 - DNA, 25 bp, Homo sapiens
  source 1..25: mol_type = genomic DNA
tgaggccccgggttcaatccccggc

SEQ ID NO: 27250 - DNA, 26 bp, Homo sapiens
  source 1..26: mol_type = genomic DNA
tgaggccccgggttcaatccccggca

SEQ ID NO: 27251 - DNA, 29 bp, Homo sapiens
  source 1..29: mol_type = genomic DNA
tgaggccccgggttcaatccccggcatct

SEQ ID NO: 27252 - DNA, 30 bp, Homo sapiens
  source 1..30: mol_type = genomic DNA
tgaggccccgggttcaatccccggcatctc

SEQ ID NO: 27253 - DNA, 24 bp, Homo sapiens
  source 1..24: mol_type = genomic DNA
tgaggccccgggttcgatccccgg

SEQ ID NO: 27254 - DNA, 26 bp, Homo sapiens
  source 1..26: mol_type = genomic DNA
tgaggccccgggttcgatccccggca

SEQ ID NO: 27255 - DNA, 28 bp, Homo sapiens
  source 1..28: mol_type = genomic DNA
tgaggccccgggttcgatccccggcatc

SEQ ID NO: 27256 - DNA, 34 bp, Homo sapiens
  source 1..34: mol_type = genomic DNA
tgaggccccgggttcgatccccggcatctccacc

SEQ ID NO: 27257 - DNA, 35 bp, Homo sapiens
  source 1..35: mol_type = genomic DNA
tgaggccccgggttcgatccccggcatctccacca

SEQ ID NO: 27258 - DNA, 16 bp, Homo sapiens
  source 1..16: mol_type = genomic DNA
tgagggtccagggttc

SEQ ID NO: 27259 - DNA, 20 bp, Homo sapiens
  source 1..20: mol_type = genomic DNA
tgagggtccagggttcaagt

SEQ ID NO: 27260 - DNA, 22 bp, Homo sapiens
  source 1..22: mol_type = genomic DNA
tgagggtccagggttcaagtcc

SEQ ID NO: 27261 - DNA, 24 bp, Homo sapiens
  source 1..24: mol_type = genomic DNA
tgagggtccagggttcaagtccct

SEQ ID NO: 27262 - DNA, 35 bp, Homo sapiens
  source 1..35: mol_type = genomic DNA
tgagggtccagggttcaagtccctgtccaggcgcc

SEQ ID NO: 27263 - DNA, 27 bp, Homo sapiens
  source 1..27: mol_type = genomic DNA
tgagggtccagggttcaagtccctgtt

SEQ ID NO: 27264 - DNA, 35 bp, Homo sapiens
  source 1..35: mol_type = genomic DNA
tgagggtccagggttcaagtccctgttcaggcacc

SEQ ID NO: 27265 - DNA, 35 bp, Homo sapiens
  source 1..35: mol_type = genomic DNA
tgagggtccagggttcaagtccctgttcaggcgcc

SEQ ID NO: 27266 - DNA, 30 bp, Homo sapiens
  source 1..30: mol_type = genomic DNA
tgagggtccagggttcaagtccctgttcgg

SEQ ID NO: 27267 - DNA, 31 bp, Homo sapiens
  source 1..31: mol_type = genomic DNA
tgagggtccagggttcaagtccctgttcggg

SEQ ID NO: 27268 - DNA, 32 bp, Homo sapiens
  source 1..32: mol_type = genomic DNA
tgagggtccagggttcaagtccctgttcgggc

SEQ ID NO: 27269 - DNA, 33 bp, Homo sapiens
  source 1..33: mol_type = genomic DNA
tgagggtccagggttcaagtccctgttcgggcg

SEQ ID NO: 27270 - DNA, 34 bp, Homo sapiens
  source 1..34: mol_type = genomic DNA
tgagggtccagggttcaagtccctgttcgggcgc

SEQ ID NO: 27271 - DNA, 35 bp, Homo sapiens
  source 1..35: mol_type = genomic DNA
tgagggtccagggttcaagtccctgttcgggcgcc

SEQ ID NO: 27272 - DNA, 36 bp, Homo sapiens
  source 1..36: mol_type = genomic DNA
tgagggtccagggttcaagtccctgttcgggcgcca

SEQ ID NO: 27273 - DNA, 24 bp, Homo sapiens
  source 1..24: mol_type = genomic DNA
tgagggtccagggttcatgtccct

SEQ ID NO: 27274 - DNA, 26 bp, Homo sapiens
  source 1..26: mol_type = genomic DNA
tgagggttcgaatcccttcgtggttg

SEQ ID NO: 27275 - DNA, 27 bp, Homo sapiens
  source 1..27: mol_type = genomic DNA
tgagggttcgaatcccttcgtggttgc

SEQ ID NO: 27276 - DNA, 28 bp, Homo sapiens
  source 1..28: mol_type = genomic DNA
tgagggttcgaatcccttcgtggttgcc

SEQ ID NO: 27277 - DNA, 20 bp, Homo sapiens
  source 1..20: mol_type = genomic DNA
tgagggttcgagtcccttcg

SEQ ID NO: 27278 - DNA, 25 bp, Homo sapiens
  source 1..25: mol_type = genomic DNA
tgagggttcgagtcccttcgtggtc

SEQ ID NO: 27279 - DNA, 26 bp, Homo sapiens
  source 1..26: mol_type = genomic DNA
tgagggttcgagtcccttcgtggtcg

SEQ ID NO: 27280 - DNA, 27 bp, Homo sapiens
  source 1..27: mol_type = genomic DNA
tgagggttcgagtcccttcgtggtcgc

SEQ ID NO: 27281 - DNA, 28 bp, Homo sapiens
  source 1..28: mol_type = genomic DNA
tgagggttcgagtcccttcgtggtcgcc

SEQ ID NO: 27282 - DNA, 29 bp, Homo sapiens
  source 1..29: mol_type = genomic DNA
tgagggttcgagtcccttcgtggtcgcca

SEQ ID NO: 27283 - DNA, 16 bp, Homo sapiens
  source 1..16: mol_type = genomic DNA
tgaggtcccgggttcg

SEQ ID NO: 27284 - DNA, 30 bp, Homo sapiens
  source 1..30: mol_type = genomic DNA
tgaggtcccgggttcgatccccagcatctc

SEQ ID NO: 27285 - DNA, 33 bp, Homo sapiens
  source 1..33: mol_type = genomic DNA
tgaggtcccgggttcgatccccagcatctccac

SEQ ID NO: 27286 - DNA, 34 bp, Homo sapiens
  source 1..34: mol_type = genomic DNA
tgaggtcccgggttcgatccccagcatctccacc

SEQ ID NO: 27287 - DNA, 24 bp, Homo sapiens
  source 1..24: mol_type = genomic DNA
tgaggtcccgggttcgatccccgg

SEQ ID NO: 27288 - DNA, 16 bp, Homo sapiens
  source 1..16: mol_type = genomic DNA
tgagtatccccgcctg

SEQ ID NO: 27289 - DNA, 17 bp, Homo sapiens
  source 1..17: mol_type = genomic DNA
tgagtatccccgcctgt

SEQ ID NO: 27290 - DNA, 18 bp, Homo sapiens
  source 1..18: mol_type = genomic DNA
tgagtatccccgcctgtc

SEQ ID NO: 27291 - DNA, 20 bp, Homo sapiens
  source 1..20: mol_type = genomic DNA
tgagtatccccgcctgtcac

SEQ ID NO: 27292 - DNA, 34 bp, Homo sapiens
  source 1..34: mol_type = genomic DNA
tgagtatccccgcctgtcacgcgggagaccgggg

SEQ ID NO: 27293 - DNA, 16 bp, Homo sapiens
  source 1..16: mol_type = genomic DNA
tgagtgaagcattgga

SEQ ID NO: 27294 - DNA, 17 bp, Homo sapiens
  source 1..17: mol_type = genomic DNA
tgagtgaagcattggac

SEQ ID NO: 27295 - DNA, 18 bp, Homo sapiens
  source 1..18: mol_type = genomic DNA
tgagtgaagcattggact

SEQ ID NO: 27296 - DNA, 19 bp, Homo sapiens
  source 1..19: mol_type = genomic DNA
tgagtgaagcattggactg

SEQ ID NO: 27297 - DNA, 20 bp, Homo sapiens
  source 1..20: mol_type = genomic DNA
tgagtgaagcattggactgt

SEQ ID NO: 27298 - DNA, 21 bp, Homo sapiens
  source 1..21: mol_type = genomic DNA
tgagtgaagcattggactgta

SEQ ID NO: 27299 - DNA, 22 bp, Homo sapiens
  source 1..22: mol_type = genomic DNA
tgagtgaagcattggactgtaa

SEQ ID NO: 27300 - DNA, 23 bp, Homo sapiens
  source 1..23: mol_type = genomic DNA
tgagtgaagcattggactgtaaa

SEQ ID NO: 27301 - DNA, 24 bp, Homo sapiens
  source 1..24: mol_type = genomic DNA
tgagtgaagcattggactgtaaat

SEQ ID NO: 27302 - DNA, 25 bp, Homo sapiens
  source 1..25: mol_type = genomic DNA
tgagtgaagcattggactgtaaatc

SEQ ID NO: 27303 - DNA, 26 bp, Homo sapiens
  source 1..26: mol_type = genomic DNA
tgagtgaagcattggactgtaaatct

SEQ ID NO: 27304 - DNA, 27 bp, Homo sapiens
  source 1..27: mol_type = genomic DNA
tgagtgaagcattggactgtaaatcta

SEQ ID NO: 27305 - DNA, 28 bp, Homo sapiens
  source 1..28: mol_type = genomic DNA
tgagtgaagcattggactgtaaatctaa

SEQ ID NO: 27306 - DNA, 29 bp, Homo sapiens
  source 1..29: mol_type = genomic DNA
tgagtgaagcattggactgtaaatctaaa

SEQ ID NO: 27307 - DNA, 30 bp, Homo sapiens
  source 1..30: mol_type = genomic DNA
tgagtgaagcattggactgtaaatctaaag

SEQ ID NO: 27308 - DNA, 31 bp, Homo sapiens
  source 1..31: mol_type = genomic DNA
tgagtgaagcattggactgtaaatctaaaga

SEQ ID NO: 27309 - DNA, 33 bp, Homo sapiens
  source 1..33: mol_type = genomic DNA
tgagtgaagcattggactgtaaatctaaagaca

SEQ ID NO: 27310 - DNA, 45 bp, Homo sapiens
  source 1..45: mol_type = genomic DNA
tgagtgaagcattggactgtaaatctaaagacaggggttaggcct

SEQ ID NO: 27311 - DNA, 46 bp, Homo sapiens
  source 1..46: mol_type = genomic DNA
tgagtgaagcattggactgtaaatctaaagacaggggttaggcctc

SEQ ID NO: 27312 - DNA, 21 bp, Homo sapiens
  source 1..21: mol_type = genomic DNA
tgagttcgaacctcagagggg

SEQ ID NO: 27313 - DNA, 23 bp, Homo sapiens
  source 1..23: mol_type = genomic DNA
tgagttcgaacctcagagggggc

SEQ ID NO: 27314 - DNA, 24 bp, Homo sapiens
  source 1..24: mol_type = genomic DNA
tgagttcgaacctcagagggggca

SEQ ID NO: 27315 - DNA, 25 bp, Homo sapiens
  source 1..25: mol_type = genomic DNA
tgagttcgaacctcagagggggcac

SEQ ID NO: 27316 - DNA, 26 bp, Homo sapiens
  source 1..26: mol_type = genomic DNA
tgagttcgaacctcagagggggcacc

SEQ ID NO: 27317 - DNA, 27 bp, Homo sapiens
  source 1..27: mol_type = genomic DNA
tgagttcgaacctcagagggggcacca

SEQ ID NO: 27318 - DNA, 23 bp, Homo sapiens
  source 1..23: mol_type = genomic DNA
tgagttcgatcctcacacggggc

SEQ ID NO: 27319 - DNA, 16 bp, Homo sapiens
  source 1..16: mol_type = genomic DNA
tgataaaagagttact

SEQ ID NO: 27320 - DNA, 20 bp, Homo sapiens
  source 1..20: mol_type = genomic DNA
tgataaaagagttactttga

SEQ ID NO: 27321 - DNA, 21 bp, Homo sapiens
  source 1..21: mol_type = genomic DNA
tgataaaagagttactttgat

SEQ ID NO: 27322 - DNA, 22 bp, Homo sapiens
  source 1..22: mol_type = genomic DNA
tgataaaagagttactttgata

SEQ ID NO: 27323 - DNA, 26 bp, Homo sapiens
  source 1..26: mol_type = genomic DNA
tgataaaagagttactttgatagagt

SEQ ID NO: 27324 - DNA, 39 bp, Homo sapiens
  source 1..39: mol_type = genomic DNA
tgataaaagagttactttgatagagtaaataataggagc

SEQ ID NO: 27325 - DNA, 47 bp, Homo sapiens
  source 1..47: mol_type = genomic DNA
tgataaaagagttactttgatagagtaaataataggagcttaaaccc

SEQ ID NO: 27326 - DNA, 16 bp, Homo sapiens
  source 1..16: mol_type = genomic DNA
tgataatcatatttac

SEQ ID NO: 27327 - DNA, 17 bp, Homo sapiens
  source 1..17: mol_type = genomic DNA
tgataatcatatttacc

SEQ ID NO: 27328 - DNA, 18 bp, Homo sapiens
  source 1..18: mol_type = genomic DNA
tgataatcatatttacca

SEQ ID NO: 27329 - DNA, 19 bp, Homo sapiens
  source 1..19: mol_type = genomic DNA
tgataatcatatttaccaa

SEQ ID NO: 27330 - DNA, 20 bp, Homo sapiens
  source 1..20: mol_type = genomic DNA
tgataatcatatttaccaac

SEQ ID NO: 27331 - DNA, 21 bp, Homo sapiens
  source 1..21: mol_type = genomic DNA
tgataatcatatttaccaacc

SEQ ID NO: 27332 - DNA, 22 bp, Homo sapiens
  source 1..22: mol_type = genomic DNA
tgataatcatatttaccaacca

SEQ ID NO: 27333 - DNA, 16 bp, Homo sapiens
  source 1..16: mol_type = genomic DNA
tgatagagtaaataat

SEQ ID NO: 27334 - DNA, 20 bp, Homo sapiens
  source 1..20: mol_type = genomic DNA
tgatagagtaaataatagga

SEQ ID NO: 27335 - DNA, 21 bp, Homo sapiens
  source 1..21: mol_type = genomic DNA
tgatagagtaaataataggag

SEQ ID NO: 27336 - DNA, 22 bp, Homo sapiens
  source 1..22: mol_type = genomic DNA
tgatagagtaaataataggagc

SEQ ID NO: 27337 - DNA, 23 bp, Homo sapiens
  source 1..23: mol_type = genomic DNA
tgatagagtaaataataggagct

SEQ ID NO: 27338 - DNA, 24 bp, Homo sapiens
  source 1..24: mol_type = genomic DNA
tgatagagtaaataataggagctt

SEQ ID NO: 27339 - DNA, 25 bp, Homo sapiens
  source 1..25: mol_type = genomic DNA
tgatagagtaaataataggagctta

SEQ ID NO: 27340 - DNA, 26 bp, Homo sapiens
  source 1..26: mol_type = genomic DNA
tgatagagtaaataataggagcttaa

SEQ ID NO: 27341 - DNA, 29 bp, Homo sapiens
  source 1..29: mol_type = genomic DNA
tgatagagtaaataataggagcttaaacc

SEQ ID NO: 27342 - DNA, 30 bp, Homo sapiens
  source 1..30: mol_type = genomic DNA
tgatagagtaaataataggagcttaaaccc

SEQ ID NO: 27343 - DNA, 31 bp, Homo sapiens
  source 1..31: mol_type = genomic DNA
tgatagagtaaataataggagcttaaacccc

SEQ ID NO: 27344 - DNA, 32 bp, Homo sapiens
  source 1..32: mol_type = genomic DNA
tgatagagtaaataataggagcttaaaccccc

SEQ ID NO: 27345 - DNA, 33 bp, Homo sapiens
  source 1..33: mol_type = genomic DNA
tgatagagtaaataataggagcttaaaccccct

SEQ ID NO: 27346 - DNA, 34 bp, Homo sapiens
  source 1..34: mol_type = genomic DNA
tgatagagtaaataataggagcttaaaccccctt

SEQ ID NO: 27347 - DNA, 35 bp, Homo sapiens
  source 1..35: mol_type = genomic DNA
tgatagagtaaataataggagcttaaaccccctta

SEQ ID NO: 27348 - DNA, 36 bp, Homo sapiens
  source 1..36: mol_type = genomic DNA
tgatagagtaaataataggagcttaaacccccttat

SEQ ID NO: 27349 - DNA, 37 bp, Homo sapiens
  source 1..37: mol_type = genomic DNA
tgatagagtaaataataggagcttaaacccccttatt

SEQ ID NO: 27350 - DNA, 38 bp, Homo sapiens
  source 1..38: mol_type = genomic DNA
tgatagagtaaataataggagcttaaacccccttattt

SEQ ID NO: 27351 - DNA, 40 bp, Homo sapiens
  source 1..40: mol_type = genomic DNA
tgatagagtaaataataggagcttaaacccccttatttct

SEQ ID NO: 27352 - DNA, 43 bp, Homo sapiens
  source 1..43: mol_type = genomic DNA
tgatagagtaaataataggagcttaaacccccttatttctacc

SEQ ID NO: 27353 - DNA, 17 bp, Homo sapiens
  source 1..17: mol_type = genomic DNA
tgataggtggcacggag

SEQ ID NO: 27354 - DNA, 18 bp, Homo sapiens
  source 1..18: mol_type = genomic DNA
tgataggtggcacggaga

SEQ ID NO: 27355 - DNA, 20 bp, Homo sapiens
  source 1..20: mol_type = genomic DNA
tgataggtggcacggagaat

SEQ ID NO: 27356 - DNA, 22 bp, Homo sapiens
  source 1..22: mol_type = genomic DNA
tgataggtggcacggagaattt

SEQ ID NO: 27357 - DNA, 24 bp, Homo sapiens
  source 1..24: mol_type = genomic DNA
tgataggtggcacggagaattttg

SEQ ID NO: 27358 - DNA, 20 bp, Homo sapiens
  source 1..20: mol_type = genomic DNA
tgatcgtatagtggttagta

SEQ ID NO: 27359 - DNA, 22 bp, Homo sapiens
  source 1..22: mol_type = genomic DNA
tgatcgtatagtggttagtact

SEQ ID NO: 27360 - DNA, 23 bp, Homo sapiens
  source 1..23: mol_type = genomic DNA
tgatcgtatagtggttagtactc

SEQ ID NO: 27361 - DNA, 24 bp, Homo sapiens
  source 1..24: mol_type = genomic DNA
tgatcgtatagtggttagtactct

SEQ ID NO: 27362 - DNA, 25 bp, Homo sapiens
  source 1..25: mol_type = genomic DNA
tgatcgtatagtggttagtactctg

SEQ ID NO: 27363 - DNA, 26 bp, Homo sapiens
  source 1..26: mol_type = genomic DNA
tgatcgtatagtggttagtactctgc

SEQ ID NO: 27364 - DNA, 27 bp, Homo sapiens
  source 1..27: mol_type = genomic DNA
tgatcgtatagtggttagtactctgcg

SEQ ID NO: 27365 - DNA, 28 bp, Homo sapiens
  source 1..28: mol_type = genomic DNA
tgatcgtatagtggttagtactctgcgt

SEQ ID NO: 27366 - DNA, 29 bp, Homo sapiens
  source 1..29: mol_type = genomic DNA
tgatcgtatagtggttagtactctgcgtt

SEQ ID NO: 27367 - DNA, 30 bp, Homo sapiens
  source 1..30: mol_type = genomic DNA
tgatcgtatagtggttagtactctgcgttg

SEQ ID NO: 27368 - DNA, 31 bp, Homo sapiens
  source 1..31: mol_type = genomic DNA
tgatcgtatagtggttagtactctgcgttgt

SEQ ID NO: 27369 - DNA, 32 bp, Homo sapiens
  source 1..32: mol_type = genomic DNA
tgatcgtatagtggttagtactctgcgttgtg

SEQ ID NO: 27370 - DNA, 34 bp, Homo sapiens
  source 1..34: mol_type = genomic DNA
tgatcgtatagtggttagtactctgcgttgtggc

SEQ ID NO: 27371 - DNA, 25 bp, Homo sapiens
  source 1..25: mol_type = genomic DNA
tgatgcagagtggggttttgcagtc

SEQ ID NO: 27372 - DNA, 27 bp, Homo sapiens
  source 1..27: mol_type = genomic DNA
tgatgcagagtggggttttgcagtcct

SEQ ID NO: 27373 - DNA, 28 bp, Homo sapiens
  source 1..28: mol_type = genomic DNA
tgatgcagagtggggttttgcagtcctt

SEQ ID NO: 27374 - DNA, 29 bp, Homo sapiens
  source 1..29: mol_type = genomic DNA
tgatgcagagtggggttttgcagtcctta

SEQ ID NO: 27375 - DNA, 30 bp, Homo sapiens
  source 1..30: mol_type = genomic DNA
tgatgcagagtggggttttgcagtccttac

SEQ ID NO: 27376 - DNA, 31 bp, Homo sapiens
  source 1..31: mol_type = genomic DNA
tgatgcagagtggggttttgcagtccttacc

SEQ ID NO: 27377 - DNA, 32 bp, Homo sapiens
  source 1..32: mol_type = genomic DNA
tgatgcagagtggggttttgcagtccttacca

SEQ ID NO: 27378 - DNA, 16 bp, Homo sapiens
  source 1..16: mol_type = genomic DNA
tgattagggtgcttag

SEQ ID NO: 27379 - DNA, 20 bp, Homo sapiens
  source 1..20: mol_type = genomic DNA
tgattagggtgcttagctgt

SEQ ID NO: 27380 - DNA, 21 bp, Homo sapiens
  source 1..21: mol_type = genomic DNA
tgattagggtgcttagctgtt

SEQ ID NO: 27381 - DNA, 22 bp, Homo sapiens
  source 1..22: mol_type = genomic DNA
tgattagggtgcttagctgtta

SEQ ID NO: 27382 - DNA, 23 bp, Homo sapiens
  source 1..23: mol_type = genomic DNA
tgattagggtgcttagctgttaa

SEQ ID NO: 27383 - DNA, 24 bp, Homo sapiens
  source 1..24: mol_type = genomic DNA
tgattagggtgcttagctgttaac

SEQ ID NO: 27384 - DNA, 25 bp, Homo sapiens
  source 1..25: mol_type = genomic DNA
tgattagggtgcttagctgttaact

SEQ ID NO: 27385 - DNA, 27 bp, Homo sapiens
  source 1..27: mol_type = genomic DNA
tgattagggtgcttagctgttaactaa

SEQ ID NO: 27386 - DNA, 32 bp, Homo sapiens
  source 1..32: mol_type = genomic DNA
tgattagggtgcttagctgttaactaagtgtt

SEQ ID NO: 27387 - DNA, 41 bp, Homo sapiens
  source 1..41: mol_type = genomic DNA
tgattagggtgcttagctgttaactaagtgtttgtgggttt

SEQ ID NO: 27388 - DNA, 43 bp, Homo sapiens
  source 1..43: mol_type = genomic DNA
tgattagggtgcttagctgttaactaagtgtttgtgggtttaa

SEQ ID NO: 27389 - DNA, 17 bp, Homo sapiens
  source 1..17: mol_type = genomic DNA
tgattccggatcagaag

SEQ ID NO: 27390 - DNA, 18 bp, Homo sapiens
  source 1..18: mol_type = genomic DNA
tgattccggatcagaaga

SEQ ID NO: 27391 - DNA, 21 bp, Homo sapiens
  source 1..21: mol_type = genomic DNA
tgattccggatcagaagattg

SEQ ID NO: 27392 - DNA, 22 bp, Homo sapiens
  source 1..22: mol_type = genomic DNA
tgattccggatcagaagattga

SEQ ID NO: 27393 - DNA, 23 bp, Homo sapiens
  source 1..23: mol_type = genomic DNA
tgattccggatcagaagattgag

SEQ ID NO: 27394 - DNA, 26 bp, Homo sapiens
  source 1..26: mol_type = genomic DNA
tgattccggatcagaagattgagggt

SEQ ID NO: 27395 - DNA, 27 bp, Homo sapiens
  source 1..27: mol_type = genomic DNA
tgattccggatcagaagattgagggtt

SEQ ID NO: 27396 - DNA, 29 bp, Homo sapiens
  source 1..29: mol_type = genomic DNA
tgattccggatcagaagattgagggttcg

SEQ ID NO: 27397 - DNA, 47 bp, Homo sapiens
  source 1..47: mol_type = genomic DNA
tgattccggatcagaagattgagggttcgagtcccttcgtggtcgcc

SEQ ID NO: 27398 - DNA, 20 bp, Homo sapiens
  source 1..20: mol_type = genomic DNA
tgattctcgcttcgggtgcg

SEQ ID NO: 27399 - DNA, 22 bp, Homo sapiens
  source 1..22: mol_type = genomic DNA
tgattctcgcttcgggtgcgag

SEQ ID NO: 27400 - DNA, 19 bp, Homo sapiens
  source 1..19: mol_type = genomic DNA
tgattctcgctttgggtgc

SEQ ID NO: 27401 - DNA, 31 bp, Homo sapiens
  source 1..31: mol_type = genomic DNA
tgattctcgctttgggtgcgagaggtcccgg

SEQ ID NO: 27402 - DNA, 19 bp, Homo sapiens
  source 1..19: mol_type = genomic DNA
tgattctcggtttgggtcc

SEQ ID NO: 27403 - DNA, 20 bp, Homo sapiens
  source 1..20: mol_type = genomic DNA
tgattctcggtttgggtccg

SEQ ID NO: 27404 - DNA, 22 bp, Homo sapiens
  source 1..22: mol_type = genomic DNA
tgattctcggtttgggtccgag

SEQ ID NO: 27405 - DNA, 23 bp, Homo sapiens
  source 1..23: mol_type = genomic DNA
tgattctcggtttgggtccgaga

SEQ ID NO: 27406 - DNA, 31 bp, Homo sapiens
  source 1..31: mol_type = genomic DNA
tgattctcggtttgggtccgagaggtcccgg

SEQ ID NO: 27407 - DNA, 17 bp, Homo sapiens
  source 1..17: mol_type = genomic DNA
tgatttcgactcattaa

SEQ ID NO: 27408 - DNA, 18 bp, Homo sapiens
  source 1..18: mol_type = genomic DNA
tgatttcgactcattaaa

SEQ ID NO: 27409 - DNA, 19 bp, Homo sapiens
  source 1..19: mol_type = genomic DNA
tgatttcgactcattaaat

SEQ ID NO: 27410 - DNA, 20 bp, Homo sapiens
  source 1..20: mol_type = genomic DNA
tgatttcgactcattaaatt

SEQ ID NO: 27411 - DNA, 21 bp, Homo sapiens
  source 1..21: mol_type = genomic DNA
tgatttcgactcattaaatta

SEQ ID NO: 27412 - DNA, 22 bp, Homo sapiens
  source 1..22: mol_type = genomic DNA
tgatttcgactcattaaattat

SEQ ID NO: 27413 - DNA, 23 bp, Homo sapiens
  source 1..23: mol_type = genomic DNA
tgatttcgactcattaaattatg

SEQ ID NO: 27414 - DNA, 24 bp, Homo sapiens
  source 1..24: mol_type = genomic DNA
tgatttcgactcattaaattatga

SEQ ID NO: 27415 - DNA, 25 bp, Homo sapiens
  source 1..25: mol_type = genomic DNA
tgatttcgactcattaaattatgat

SEQ ID NO: 27416 - DNA, 26 bp, Homo sapiens
  source 1..26: mol_type = genomic DNA
tgatttcgactcattaaattatgata

SEQ ID NO: 27417 - DNA, 27 bp, Homo sapiens
  source 1..27: mol_type = genomic DNA
tgatttcgactcattaaattatgataa

SEQ ID NO: 27418 - DNA, 28 bp, Homo sapiens
  source 1..28: mol_type = genomic DNA
tgatttcgactcattaaattatgataat

SEQ ID NO: 27419 - DNA, 29 bp, Homo sapiens
  source 1..29: mol_type = genomic DNA
tgatttcgactcattaaattatgataatc

SEQ ID NO: 27420 - DNA, 34 bp, Homo sapiens
  source 1..34: mol_type = genomic DNA
tgatttcgactcattaaattatgataatcatatt

SEQ ID NO: 27421 - DNA, 36 bp, Homo sapiens
  source 1..36: mol_type = genomic DNA
tgatttcgactcattaaattatgataatcatattta

SEQ ID NO: 27422 - DNA, 37 bp, Homo sapiens
  source 1..37: mol_type = genomic DNA
tgatttcgactcattaaattatgataatcatatttac

SEQ ID NO: 27423 - DNA, 38 bp, Homo sapiens
  source 1..38: mol_type = genomic DNA
tgatttcgactcattaaattatgataatcatatttacc

SEQ ID NO: 27424 - DNA, 39 bp, Homo sapiens
  source 1..39: mol_type = genomic DNA
tgatttcgactcattaaattatgataatcatatttacca

SEQ ID NO: 27425 - DNA, 40 bp, Homo sapiens
  source 1..40: mol_type = genomic DNA
tgatttcgactcattaaattatgataatcatatttaccaa

SEQ ID NO: 27426 - DNA, 41 bp, Homo sapiens
  source 1..41: mol_type = genomic DNA
tgatttcgactcattaaattatgataatcatatttaccaac

SEQ ID NO: 27427 - DNA, 42 bp, Homo sapiens
  source 1..42: mol_type = genomic DNA
tgatttcgactcattaaattatgataatcatatttaccaacc

SEQ ID NO: 27428 - DNA, 43 bp, Homo sapiens
  source 1..43: mol_type = genomic DNA
tgatttcgactcattaaattatgataatcatatttaccaacca

SEQ ID NO: 27429 - DNA, 18 bp, Homo sapiens
  source 1..18: mol_type = genomic DNA
tgatttgcgttcagttga

SEQ ID NO: 27430 - DNA, 19 bp, Homo sapiens
  source 1..19: mol_type = genomic DNA
tgatttgcgttcagttgat

SEQ ID NO: 27431 - DNA, 20 bp, Homo sapiens
  source 1..20: mol_type = genomic DNA
tgatttgcgttcagttgatg

SEQ ID NO: 27432 - DNA, 29 bp, Homo sapiens
  source 1..29: mol_type = genomic DNA
tgatttgcgttcagttgatgcagagtggg

SEQ ID NO: 27433 - DNA, 40 bp, Homo sapiens
  source 1..40: mol_type = genomic DNA
tgatttgcgttcagttgatgcagagtggggttttgcagtc

SEQ ID NO: 27434 - DNA, 46 bp, Homo sapiens
  source 1..46: mol_type = genomic DNA
tgatttgcgttcagttgatgcagagtggggttttgcagtccttacc

SEQ ID NO: 27435 - DNA, 21 bp, Homo sapiens
  source 1..21: mol_type = genomic DNA
tgattttcatattgaattgca

SEQ ID NO: 27436 - DNA, 16 bp, Homo sapiens
  source 1..16: mol_type = genomic DNA
tgcaaattcgaagaag

SEQ ID NO: 27437 - DNA, 17 bp, Homo sapiens
  source 1..17: mol_type = genomic DNA
tgcaaattcgaagaagc

SEQ ID NO: 27438 - DNA, 19 bp, Homo sapiens
  source 1..19: mol_type = genomic DNA
tgcaaattcgaagaagcag

SEQ ID NO: 27439 - DNA, 20 bp, Homo sapiens
  source 1..20: mol_type = genomic DNA
tgcaaattcgaagaagcagc

SEQ ID NO: 27440 - DNA, 30 bp, Homo sapiens
  source 1..30: mol_type = genomic DNA
tgcaaattcgaagaagcagcttcaaacctg

SEQ ID NO: 27441 - DNA, 36 bp, Homo sapiens
  source 1..36: mol_type = genomic DNA
tgcaaattcgaagaagcagcttcaaacctgccgggg

SEQ ID NO: 27442 - DNA, 37 bp, Homo sapiens
  source 1..37: mol_type = genomic DNA
tgcaaattcgaagaagcagcttcaaacctgccggggc

SEQ ID NO: 27443 - DNA, 38 bp, Homo sapiens
  source 1..38: mol_type = genomic DNA
tgcaaattcgaagaagcagcttcaaacctgccggggct

SEQ ID NO: 27444 - DNA, 39 bp, Homo sapiens
  source 1..39: mol_type = genomic DNA
tgcaaattcgaagaagcagcttcaaacctgccggggctt

SEQ ID NO: 27445 - DNA, 40 bp, Homo sapiens
  source 1..40: mol_type = genomic DNA
tgcaaattcgaagaagcagcttcaaacctgccggggcttc

SEQ ID NO: 27446 - DNA, 41 bp, Homo sapiens
  source 1..41: mol_type = genomic DNA
tgcaaattcgaagaagcagcttcaaacctgccggggcttcc

SEQ ID NO: 27447 - DNA, 42 bp, Homo sapiens
  source 1..42: mol_type = genomic DNA
tgcaaattcgaagaagcagcttcaaacctgccggggcttcca

SEQ ID NO: 27448 - DNA, 16 bp, Homo sapiens
  source 1..16: mol_type = genomic DNA
tgcaactccaaataaa

SEQ ID NO: 27449 - DNA, 17 bp, Homo sapiens
  source 1..17: mol_type = genomic DNA
tgcaactccaaataaaa

SEQ ID NO: 27450 - DNA, 18 bp, Homo sapiens
  source 1..18: mol_type = genomic DNA
tgcaactccaaataaaag

SEQ ID NO: 27451 - DNA, 19 bp, Homo sapiens
  source 1..19: mol_type = genomic DNA
tgcaactccaaataaaagt

SEQ ID NO: 27452 - DNA, 20 bp, Homo sapiens
  source 1..20: mol_type = genomic DNA
tgcaactccaaataaaagta

SEQ ID NO: 27453 - DNA, 21 bp, Homo sapiens
  source 1..21: mol_type = genomic DNA
tgcaactccaaataaaagtac

SEQ ID NO: 27454 - DNA, 22 bp, Homo sapiens
  source 1..22: mol_type = genomic DNA
tgcaactccaaataaaagtacc

SEQ ID NO: 27455 - DNA, 23 bp, Homo sapiens
  source 1..23: mol_type = genomic DNA
tgcaactccaaataaaagtacca

SEQ ID NO: 27456 - DNA, 16 bp, Homo sapiens
  source 1..16: mol_type = genomic DNA
tgcaatacttaatttc

SEQ ID NO: 27457 - DNA, 18 bp, Homo sapiens
  source 1..18: mol_type = genomic DNA
tgcaatacttaatttctg

SEQ ID NO: 27458 - DNA, 19 bp, Homo sapiens
  source 1..19: mol_type = genomic DNA
tgcaatacttaatttctgc

SEQ ID NO: 27459 - DNA, 20 bp, Homo sapiens
  source 1..20: mol_type = genomic DNA
tgcaatacttaatttctgcc

SEQ ID NO: 27460 - DNA, 21 bp, Homo sapiens
  source 1..21: mol_type = genomic DNA
tgcaatacttaatttctgcca

SEQ ID NO: 27461 - DNA, 33 bp, Homo sapiens
  source 1..33: mol_type = genomic DNA
tgcacacgtgggttcgaatcccatcctcgtcgc

SEQ ID NO: 27462 - DNA, 34 bp, Homo sapiens
  source 1..34: mol_type = genomic DNA
tgcacacgtgggttcgaatcccatcctcgtcgcc

SEQ ID NO: 27463 - DNA, 16 bp, Homo sapiens
  source 1..16: mol_type = genomic DNA
tgcacgaggccccggg

SEQ ID NO: 27464 - DNA, 17 bp, Homo sapiens
  source 1..17: mol_type = genomic DNA
tgcacgaggccccgggt

SEQ ID NO: 27465 - DNA, 19 bp, Homo sapiens
  source 1..19: mol_type = genomic DNA
tgcacgaggccccgggttc

SEQ ID NO: 27466 - DNA, 32 bp, Homo sapiens
  source 1..32: mol_type = genomic DNA
tgcacgaggccccgggttcaatccccggcacc

SEQ ID NO: 27467 - DNA, 33 bp, Homo sapiens
  source 1..33: mol_type = genomic DNA
tgcacgaggccccgggttcaatccccggcacct

SEQ ID NO: 27468 - DNA, 34 bp, Homo sapiens
  source 1..34: mol_type = genomic DNA
tgcacgaggccccgggttcaatccccggcacctc

SEQ ID NO: 27469 - DNA, 35 bp, Homo sapiens
  source 1..35: mol_type = genomic DNA
tgcacgaggccccgggttcaatccccggcacctcc

SEQ ID NO: 27470 - DNA, 37 bp, Homo sapiens
  source 1..37: mol_type = genomic DNA
tgcacgaggccccgggttcaatccccggcacctccac

SEQ ID NO: 27471 - DNA, 38 bp, Homo sapiens
  source 1..38: mol_type = genomic DNA
tgcacgaggccccgggttcaatccccggcacctccacc

SEQ ID NO: 27472 - DNA, 39 bp, Homo sapiens
  source 1..39: mol_type = genomic DNA
tgcacgaggccccgggttcaatccccggcacctccacca

SEQ ID NO: 27473 - DNA, 38 bp, Homo sapiens
  source 1..38: mol_type = genomic DNA
tgcacgaggtcctgggttcgatccccagtacctccacc

SEQ ID NO: 27474 - DNA, 19 bp, Homo sapiens
  source 1..19: mol_type = genomic DNA
tgcacgcgtgggttcgaat

SEQ ID NO: 27475 - DNA, 20 bp, Homo sapiens
  source 1..20: mol_type = genomic DNA
tgcacgcgtgggttcgaatc

SEQ ID NO: 27476 - DNA, 22 bp, Homo sapiens
  source 1..22: mol_type = genomic DNA
tgcacgcgtgggttcgaatccc

SEQ ID NO: 27477 - DNA, 23 bp, Homo sapiens
  source 1..23: mol_type = genomic DNA
tgcacgcgtgggttcgaatccca

SEQ ID NO: 27478 - DNA, 34 bp, Homo sapiens
  source 1..34: mol_type = genomic DNA
tgcacgcgtgggttcgaatcccaccctcgtcgcc

SEQ ID NO: 27479 - DNA, 29 bp, Homo sapiens
  source 1..29: mol_type = genomic DNA
tgcacgcgtgggttcgaatcccatcctcg

SEQ ID NO: 27480 - DNA, 32 bp, Homo sapiens
  source 1..32: mol_type = genomic DNA
tgcacgcgtgggttcgaatcccatcctcgtcg

SEQ ID NO: 27481 - DNA, 33 bp, Homo sapiens
  source 1..33: mol_type = genomic DNA
tgcacgcgtgggttcgaatcccatcctcgtcgc

SEQ ID NO: 27482 - DNA, 34 bp, Homo sapiens
  source 1..34: mol_type = genomic DNA
tgcacgcgtgggttcgaatcccatcctcgtcgcc

SEQ ID NO: 27483 - DNA, 35 bp, Homo sapiens
  source 1..35: mol_type = genomic DNA
tgcacgcgtgggttcgaatcccatcctcgtcgcca

SEQ ID NO: 27484 - DNA, 28 bp, Homo sapiens
  source 1..28: mol_type = genomic DNA
tgcagagtggggttttgcagtccttacc

SEQ ID NO: 27485 - DNA, 29 bp, Homo sapiens
  source 1..29: mol_type = genomic DNA
tgcagagtggggttttgcagtccttacca

SEQ ID NO: 27486 - DNA, 17 bp, Homo sapiens
  source 1..17: mol_type = genomic DNA
tgcaggttcgagtcctg

SEQ ID NO: 27487 - DNA, 24 bp, Homo sapiens
  source 1..24: mol_type = genomic DNA
tgcaggttcgagtcctgccgcggt

SEQ ID NO: 27488 - DNA, 25 bp, Homo sapiens
  source 1..25: mol_type = genomic DNA
tgcaggttcgagtcctgccgcggtc

SEQ ID NO: 27489 - DNA, 26 bp, Homo sapiens
  source 1..26: mol_type = genomic DNA
tgcaggttcgagtcctgccgcggtcg

SEQ ID NO: 27490 - DNA, 27 bp, Homo sapiens
  source 1..27: mol_type = genomic DNA
tgcaggttcgagtcctgccgcggtcgc

SEQ ID NO: 27491 - DNA, 28 bp, Homo sapiens
  source 1..28: mol_type = genomic DNA
tgcaggttcgagtcctgccgcggtcgcc

SEQ ID NO: 27492 - DNA, 29 bp, Homo sapiens
  source 1..29: mol_type = genomic DNA
tgcaggttcgagtcctgccgcggtcgcca

SEQ ID NO: 27493 - DNA, 33 bp, Homo sapiens
  source 1..33: mol_type = genomic DNA
tgcatgaggtcccgggttcgatccccagcatct

SEQ ID NO: 27494 - DNA, 36 bp, Homo sapiens
  source 1..36: mol_type = genomic DNA
tgcatgaggtcccgggttcgatccccagcatctcca

SEQ ID NO: 27495 - DNA, 37 bp, Homo sapiens
  source 1..37: mol_type = genomic DNA
tgcatgaggtcccgggttcgatccccagcatctccac

SEQ ID NO: 27496 - DNA, 38 bp, Homo sapiens
  source 1..38: mol_type = genomic DNA
tgcatgaggtcccgggttcgatccccagcatctccacc

SEQ ID NO: 27497 - DNA, 39 bp, Homo sapiens
  source 1..39: mol_type = genomic DNA
tgcatgaggtcccgggttcgatccccagcatctccacca

SEQ ID NO: 27498 - DNA, 22 bp, Homo sapiens
  source 1..22: mol_type = genomic DNA
tgcatgggtggttcagtggtag

SEQ ID NO: 27499 - DNA, 35 bp, Homo sapiens
  source 1..35: mol_type = genomic DNA
tgcatgggtggttcagtggtagaattctcgcctgc

SEQ ID NO: 27500 - DNA, 33 bp, Homo sapiens
  source 1..33: mol_type = genomic DNA
tgcattggtggttcagtggtagaattctcgcct

SEQ ID NO: 27501 - DNA, 35 bp, Homo sapiens
  source 1..35: mol_type = genomic DNA
tgcattggtggttcagtggtagaattctcgcctgc

SEQ ID NO: 27502 - DNA, 16 bp, Homo sapiens
  source 1..16: mol_type = genomic DNA
tgccacgcgggaggcc

SEQ ID NO: 27503 - DNA, 17 bp, Homo sapiens
  source 1..17: mol_type = genomic DNA
tgccacgcgggaggccc

SEQ ID NO: 27504 - DNA, 18 bp, Homo sapiens
  source 1..18: mol_type = genomic DNA
tgccacgcgggaggcccg

SEQ ID NO: 27505 - DNA, 19 bp, Homo sapiens
  source 1..19: mol_type = genomic DNA
tgccacgcgggaggcccgg

SEQ ID NO: 27506 - DNA, 20 bp, Homo sapiens
  source 1..20: mol_type = genomic DNA
tgccacgcgggaggcccggg

SEQ ID NO: 27507 - DNA, 21 bp, Homo sapiens
  source 1..21: mol_type = genomic DNA
tgccacgcgggaggcccgggt

SEQ ID NO: 27508 - DNA, 24 bp, Homo sapiens
  source 1..24: mol_type = genomic DNA
tgccacgcgggaggcccgggttcg

SEQ ID NO: 27509 - DNA, 26 bp, Homo sapiens
  source 1..26: mol_type = genomic DNA
tgccacgcgggaggcccgggttcgat

SEQ ID NO: 27510 - DNA, 39 bp, Homo sapiens
  source 1..39: mol_type = genomic DNA
tgccacgcgggaggcccgggttcgattcccggccaatgc

SEQ ID NO: 27511 - DNA, 40 bp, Homo sapiens
  source 1..40: mol_type = genomic DNA
tgccacgcgggaggcccgggttcgattcccggccaatgca

SEQ ID NO: 27512 - DNA, 42 bp, Homo sapiens
  source 1..42: mol_type = genomic DNA
tgccacgcgggaggcccgggttcgattcccggccaatgcacc

SEQ ID NO: 27513 - DNA, 43 bp, Homo sapiens
  source 1..43: mol_type = genomic DNA
tgccacgcgggaggcccgggttcgattcccggccaatgcacca

SEQ ID NO: 27514 - DNA, 23 bp, Homo sapiens
  source 1..23: mol_type = genomic DNA
tgccatgatcgtatagtggttag

SEQ ID NO: 27515 - DNA, 27 bp, Homo sapiens
  source 1..27: mol_type = genomic DNA
tgccatgatcgtatagtggttagtact

SEQ ID NO: 27516 - DNA, 30 bp, Homo sapiens
  source 1..30: mol_type = genomic DNA
tgccatgatcgtatagtggttagtactctg

SEQ ID NO: 27517 - DNA, 31 bp, Homo sapiens
  source 1..31: mol_type = genomic DNA
tgccatgatcgtatagtggttagtactctgc

SEQ ID NO: 27518 - DNA, 16 bp, Homo sapiens
  source 1..16: mol_type = genomic DNA
tgcccccatgtctaac

SEQ ID NO: 27519 - DNA, 19 bp, Homo sapiens
  source 1..19: mol_type = genomic DNA
tgcccccatgtctaacaac

SEQ ID NO: 27520 - DNA, 20 bp, Homo sapiens
  source 1..20: mol_type = genomic DNA
tgcccccatgtctaacaaca

SEQ ID NO: 27521 - DNA, 22 bp, Homo sapiens
  source 1..22: mol_type = genomic DNA
tgcccccatgtctaacaacatg

SEQ ID NO: 27522 - DNA, 23 bp, Homo sapiens
  source 1..23: mol_type = genomic DNA
tgcccccatgtctaacaacatgg

SEQ ID NO: 27523 - DNA, 24 bp, Homo sapiens
  source 1..24: mol_type = genomic DNA
tgcccccatgtctaacaacatggc

SEQ ID NO: 27524 - DNA, 25 bp, Homo sapiens
  source 1..25: mol_type = genomic DNA
tgcccccatgtctaacaacatggct

SEQ ID NO: 27525 - DNA, 26 bp, Homo sapiens
  source 1..26: mol_type = genomic DNA
tgcccccatgtctaacaacatggctt

SEQ ID NO: 27526 - DNA, 27 bp, Homo sapiens
  source 1..27: mol_type = genomic DNA
tgcccccatgtctaacaacatggcttt

SEQ ID NO: 27527 - DNA, 28 bp, Homo sapiens
  source 1..28: mol_type = genomic DNA
tgcccccatgtctaacaacatggctttc

SEQ ID NO: 27528 - DNA, 29 bp, Homo sapiens
  source 1..29: mol_type = genomic DNA
tgcccccatgtctaacaacatggctttct

SEQ ID NO: 27529 - DNA, 30 bp, Homo sapiens
  source 1..30: mol_type = genomic DNA
tgcccccatgtctaacaacatggctttctc

SEQ ID NO: 27530 - DNA, 31 bp, Homo sapiens
  source 1..31: mol_type = genomic DNA
tgcccccatgtctaacaacatggctttctca

SEQ ID NO: 27531 - DNA, 32 bp, Homo sapiens
  source 1..32: mol_type = genomic DNA
tgcccccatgtctaacaacatggctttctcac

SEQ ID NO: 27532 - DNA, 33 bp, Homo sapiens
  source 1..33: mol_type = genomic DNA
tgcccccatgtctaacaacatggctttctcacc

SEQ ID NO: 27533 - DNA, 34 bp, Homo sapiens
  source 1..34: mol_type = genomic DNA
tgcccccatgtctaacaacatggctttctcacca

SEQ ID NO: 27534 - DNA, 16 bp, Homo sapiens
  source 1..16: mol_type = genomic DNA
tgcccgcatcctccac

SEQ ID NO: 27535 - DNA, 17 bp, Homo sapiens
  source 1..17: mol_type = genomic DNA
tgcccgcatcctccacc

SEQ ID NO: 27536 - DNA, 18 bp, Homo sapiens
  source 1..18: mol_type = genomic DNA
tgcccgcatcctccacca

SEQ ID NO: 27537 - DNA, 18 bp, Homo sapiens
  source 1..18: mol_type = genomic DNA
tgcccgcattctccacca

SEQ ID NO: 27538 - DNA, 33 bp, Homo sapiens
  source 1..33: mol_type = genomic DNA
tgcccggatagctcagtcggtagagcatcagac

SEQ ID NO: 27539 - DNA, 34 bp, Homo sapiens
  source 1..34: mol_type = genomic DNA
tgcccggctagctcagtcggtagagcatgagact

SEQ ID NO: 27540 - DNA, 35 bp, Homo sapiens
  source 1..35: mol_type = genomic DNA
tgcccggctagctcagtcggtagagcatgagactc

SEQ ID NO: 27541 - DNA, 18 bp, Homo sapiens
  source 1..18: mol_type = genomic DNA
tgccgaggttgtgagttc

SEQ ID NO: 27542 - DNA, 37 bp, Homo sapiens
  source 1..37: mol_type = genomic DNA
tgccgaggttgtgagttcgagcctcacctggagcacc

SEQ ID NO: 27543 - DNA, 37 bp, Homo sapiens
  source 1..37: mol_type = genomic DNA
tgccgaggttgtgagttcgatcctcacctggagcacc

SEQ ID NO: 27544 - DNA, 16 bp, Homo sapiens
  source 1..16: mol_type = genomic DNA
tgccgtgatcgtatag

SEQ ID NO: 27545 - DNA, 17 bp, Homo sapiens
  source 1..17: mol_type = genomic DNA
tgccgtgatcgtatagt

SEQ ID NO: 27546 - DNA, 18 bp, Homo sapiens
  source 1..18: mol_type = genomic DNA
tgccgtgatcgtatagtg

SEQ ID NO: 27547 - DNA, 19 bp, Homo sapiens
  source 1..19: mol_type = genomic DNA
tgccgtgatcgtatagtgg

SEQ ID NO: 27548 - DNA, 20 bp, Homo sapiens
  source 1..20: mol_type = genomic DNA
tgccgtgatcgtatagtggt

SEQ ID NO: 27549 - DNA, 21 bp, Homo sapiens
  source 1..21: mol_type = genomic DNA
tgccgtgatcgtatagtggtt

SEQ ID NO: 27550 - DNA, 22 bp, Homo sapiens
  source 1..22: mol_type = genomic DNA
tgccgtgatcgtatagtggtta

SEQ ID NO: 27551 - DNA, 23 bp, Homo sapiens
  source 1..23: mol_type = genomic DNA
tgccgtgatcgtatagtggttag

SEQ ID NO: 27552 - DNA, 24 bp, Homo sapiens
  source 1..24: mol_type = genomic DNA
tgccgtgatcgtatagtggttagt

SEQ ID NO: 27553 - DNA, 25 bp, Homo sapiens
  source 1..25: mol_type = genomic DNA
tgccgtgatcgtatagtggttagta

SEQ ID NO: 27554 - DNA, 26 bp, Homo sapiens
  source 1..26: mol_type = genomic DNA
tgccgtgatcgtatagtggttagtac

SEQ ID NO: 27555 - DNA, 27 bp, Homo sapiens
  source 1..27: mol_type = genomic DNA
tgccgtgatcgtatagtggttagtact

SEQ ID NO: 27556 - DNA, 28 bp, Homo sapiens
  source 1..28: mol_type = genomic DNA
tgccgtgatcgtatagtggttagtactc

SEQ ID NO: 27557 - DNA, 29 bp, Homo sapiens
  source 1..29: mol_type = genomic DNA
tgccgtgatcgtatagtggttagtactct

SEQ ID NO: 27558 - DNA, 30 bp, Homo sapiens
  source 1..30: mol_type = genomic DNA
tgccgtgatcgtatagtggttagtactctg

SEQ ID NO: 27559 - DNA, 31 bp, Homo sapiens
  source 1..31: mol_type = genomic DNA
tgccgtgatcgtatagtggttagtactctgc

SEQ ID NO: 27560 - DNA, 32 bp, Homo sapiens
  source 1..32: mol_type = genomic DNA
tgccgtgatcgtatagtggttagtactctgcg

SEQ ID NO: 27561 - DNA, 33 bp, Homo sapiens
  source 1..33: mol_type = genomic DNA
tgccgtgatcgtatagtggttagtactctgcgt

SEQ ID NO: 27562 - DNA, 34 bp, Homo sapiens
  source 1..34: mol_type = genomic DNA
tgccgtgatcgtatagtggttagtactctgcgtt

SEQ ID NO: 27563 - DNA, 35 bp, Homo sapiens
  source 1..35: mol_type = genomic DNA
tgccgtgatcgtatagtggttagtactctgcgttg

SEQ ID NO: 27564 - DNA, 36 bp, Homo sapiens
  source 1..36: mol_type = genomic DNA
tgccgtgatcgtatagtggttagtactctgcgttgt

SEQ ID NO: 27565 - DNA, 37 bp, Homo sapiens
  source 1..37: mol_type = genomic DNA
tgccgtgatcgtatagtggttagtactctgcgttgtg

SEQ ID NO: 27566 - DNA, 39 bp, Homo sapiens
  source 1..39: mol_type = genomic DNA
tgccgtgatcgtatagtggttagtactctgcgttgtggc

SEQ ID NO: 27567 - DNA, 40 bp, Homo sapiens
  source 1..40: mol_type = genomic DNA
tgccgtgatcgtatagtggttagtactctgcgttgtggcc

SEQ ID NO: 27568 - DNA, 41 bp, Homo sapiens
  source 1..41: mol_type = genomic DNA
tgccgtgatcgtatagtggttagtactctgcgttgtggccg

SEQ ID NO: 27569 - DNA, 42 bp, Homo sapiens
  source 1..42: mol_type = genomic DNA
tgccgtgatcgtatagtggttagtactctgcgttgtggccgc

SEQ ID NO: 27570 - DNA, 43 bp, Homo sapiens
  source 1..43: mol_type = genomic DNA
tgccgtgatcgtatagtggttagtactctgcgttgtggccgca

SEQ ID NO: 27571 - DNA, 44 bp, Homo sapiens
  source 1..44: mol_type = genomic DNA
tgccgtgatcgtatagtggttagtactctgcgttgtggccgcag

SEQ ID NO: 27572 - DNA, 46 bp, Homo sapiens
  source 1..46: mol_type = genomic DNA
tgccgtgatcgtatagtggttagtactctgcgttgtggccgcagca

SEQ ID NO: 27573 - DNA, 34 bp, Homo sapiens
  source 1..34: mol_type = genomic DNA
tgcctcgttagcgcagtaggtagcgcgtcagtct

SEQ ID NO: 27574 - DNA, 22 bp, Homo sapiens
  source 1..22: mol_type = genomic DNA
tgccttccaagcagttgacccg

SEQ ID NO: 27575 - DNA, 23 bp, Homo sapiens
  source 1..23: mol_type = genomic DNA
tgccttccaagcagttgacccgg

SEQ ID NO: 27576 - DNA, 24 bp, Homo sapiens
  source 1..24: mol_type = genomic DNA
tgccttccaagcagttgacccggg

SEQ ID NO: 27577 - DNA, 25 bp, Homo sapiens
  source 1..25: mol_type = genomic DNA
tgccttccaagcagttgacccgggt

SEQ ID NO: 27578 - DNA, 46 bp, Homo sapiens
  source 1..46: mol_type = genomic DNA
tgccttccaagcagttgacccgggttcgattcccggccaacgcacc

SEQ ID NO: 27579 - DNA, 28 bp, Homo sapiens
  source 1..28: mol_type = genomic DNA
tgcgacccgggttcgattcccgggcggc

SEQ ID NO: 27580 - DNA, 29 bp, Homo sapiens
  source 1..29: mol_type = genomic DNA
tgcgacccgggttcgattcccgggcggcg

SEQ ID NO: 27581 - DNA, 19 bp, Homo sapiens
  source 1..19: mol_type = genomic DNA
tgcgagaggtagcgggatc

SEQ ID NO: 27582 - DNA, 34 bp, Homo sapiens
  source 1..34: mol_type = genomic DNA
tgcgagaggtagcgggatcgatgcccgcattctc

SEQ ID NO: 27583 - DNA, 19 bp, Homo sapiens
  source 1..19: mol_type = genomic DNA
tgcgagaggtcccgggttc

SEQ ID NO: 27584 - DNA, 20 bp, Homo sapiens
  source 1..20: mol_type = genomic DNA
tgcgagaggtcccgggttca

SEQ ID NO: 27585 - DNA, 34 bp, Homo sapiens
  source 1..34: mol_type = genomic DNA
tgcgagaggtcccgggttcaaatcccggacgagc

SEQ ID NO: 27586 - DNA, 35 bp, Homo sapiens
  source 1..35: mol_type = genomic DNA
tgcgagaggtcccgggttcaaatcccggacgagcc

SEQ ID NO: 27587 - DNA, 36 bp, Homo sapiens
  source 1..36: mol_type = genomic DNA
tgcgagaggtcccgggttcaaatcccggacgagccc

SEQ ID NO: 27588 - DNA, 37 bp, Homo sapiens
  source 1..37: mol_type = genomic DNA
tgcgagaggtcccgggttcaaatcccggacgagcccc

SEQ ID NO: 27589 - DNA, 38 bp, Homo sapiens
  source 1..38: mol_type = genomic DNA
tgcgagaggtcccgggttcaaatcccggacgagccccc

SEQ ID NO: 27590 - DNA, 39 bp, Homo sapiens
  source 1..39: mol_type = genomic DNA
tgcgagaggtcccgggttcaaatcccggacgagccccca

SEQ ID NO: 27591 - DNA, 25 bp, Homo sapiens
  source 1..25: mol_type = genomic DNA
tgcgtgttcaaatcacgtcggggtc

SEQ ID NO: 27592 - DNA, 26 bp, Homo sapiens
  source 1..26: mol_type = genomic DNA
tgcgtgttcaaatcacgtcggggtca

SEQ ID NO: 27593 - DNA, 27 bp, Homo sapiens
  source 1..27: mol_type = genomic DNA
tgcgtgttcaaatcacgtcggggtcac

SEQ ID NO: 27594 - DNA, 29 bp, Homo sapiens
  source 1..29: mol_type = genomic DNA
tgcgtgttcaaatcacgtcggggtcacca

SEQ ID NO: 27595 - DNA, 24 bp, Homo sapiens
  source 1..24: mol_type = genomic DNA
tgcgtgttcaagtcacgtcggggt

SEQ ID NO: 27596 - DNA, 25 bp, Homo sapiens
  source 1..25: mol_type = genomic DNA
tgcgtgttcaagtcacgtcggggtc

SEQ ID NO: 27597 - DNA, 26 bp, Homo sapiens
  source 1..26: mol_type = genomic DNA
tgcgtgttcaagtcacgtcggggtca

SEQ ID NO: 27598 - DNA, 27 bp, Homo sapiens
  source 1..27: mol_type = genomic DNA
tgcgtgttcaagtcacgtcggggtcac

SEQ ID NO: 27599 - DNA, 28 bp, Homo sapiens
  source 1..28: mol_type = genomic DNA
tgcgtgttcaagtcacgtcggggtcacc

SEQ ID NO: 27600 - DNA, 29 bp, Homo sapiens
  source 1..29: mol_type = genomic DNA
tgcgtgttcaagtcacgtcggggtcacca

SEQ ID NO: 27601 - DNA, 25 bp, Homo sapiens
  source 1..25: mol_type = genomic DNA
tgcgtgttcgaatcacgtcggggtc

SEQ ID NO: 27602 - DNA, 27 bp, Homo sapiens
  source 1..27: mol_type = genomic DNA
tgcgttcagttgatgcagagtggggtt

SEQ ID NO: 27603 - DNA, 16 bp, Homo sapiens
  source 1..16: mol_type = genomic DNA
tgctaactcatgcccc

SEQ ID NO: 27604 - DNA, 17 bp, Homo sapiens
  source 1..17: mol_type = genomic DNA
tgctaactcatgccccc

SEQ ID NO: 27605 - DNA, 18 bp, Homo sapiens
  source 1..18: mol_type = genomic DNA
tgctaactcatgccccca

SEQ ID NO: 27606 - DNA, 20 bp, Homo sapiens
  source 1..20: mol_type = genomic DNA
tgctaactcatgcccccatg

SEQ ID NO: 27607 - DNA, 21 bp, Homo sapiens
  source 1..21: mol_type = genomic DNA
tgctaactcatgcccccatgt

SEQ ID NO: 27608 - DNA, 22 bp, Homo sapiens
  source 1..22: mol_type = genomic DNA
tgctaactcatgcccccatgtc

SEQ ID NO: 27609 - DNA, 23 bp, Homo sapiens
  source 1..23: mol_type = genomic DNA
tgctaactcatgcccccatgtct

SEQ ID NO: 27610 - DNA, 24 bp, Homo sapiens
  source 1..24: mol_type = genomic DNA
tgctaactcatgcccccatgtcta

SEQ ID NO: 27611 - DNA, 25 bp, Homo sapiens
  source 1..25: mol_type = genomic DNA
tgctaactcatgcccccatgtctaa

SEQ ID NO: 27612 - DNA, 26 bp, Homo sapiens
  source 1..26: mol_type = genomic DNA
tgctaactcatgcccccatgtctaac

SEQ ID NO: 27613 - DNA, 27 bp, Homo sapiens
  source 1..27: mol_type = genomic DNA
tgctaactcatgcccccatgtctaaca

SEQ ID NO: 27614 - DNA, 28 bp, Homo sapiens
  source 1..28: mol_type = genomic DNA
tgctaactcatgcccccatgtctaacaa

SEQ ID NO: 27615 - DNA, 29 bp, Homo sapiens
  source 1..29: mol_type = genomic DNA
tgctaactcatgcccccatgtctaacaac

SEQ ID NO: 27616 - DNA, 30 bp, Homo sapiens
  source 1..30: mol_type = genomic DNA
tgctaactcatgcccccatgtctaacaaca

SEQ ID NO: 27617 - DNA, 31 bp, Homo sapiens
  source 1..31: mol_type = genomic DNA
tgctaactcatgcccccatgtctaacaacat

SEQ ID NO: 27618 - DNA, 32 bp, Homo sapiens
  source 1..32: mol_type = genomic DNA
tgctaactcatgcccccatgtctaacaacatg

SEQ ID NO: 27619 - DNA, 33 bp, Homo sapiens
  source 1..33: mol_type = genomic DNA
tgctaactcatgcccccatgtctaacaacatgg

SEQ ID NO: 27620 - DNA, 34 bp, Homo sapiens
  source 1..34: mol_type = genomic DNA
tgctaactcatgcccccatgtctaacaacatggc

SEQ ID NO: 27621 - DNA, 35 bp, Homo sapiens
  source 1..35: mol_type = genomic DNA
tgctaactcatgcccccatgtctaacaacatggct

SEQ ID NO: 27622 - DNA, 36 bp, Homo sapiens
  source 1..36: mol_type = genomic DNA
tgctaactcatgcccccatgtctaacaacatggctt

SEQ ID NO: 27623 - DNA, 38 bp, Homo sapiens
  source 1..38: mol_type = genomic DNA
tgctaactcatgcccccatgtctaacaacatggctttc

SEQ ID NO: 27624 - DNA, 39 bp, Homo sapiens
  source 1..39: mol_type = genomic DNA
tgctaactcatgcccccatgtctaacaacatggctttct

SEQ ID NO: 27625 - DNA, 40 bp, Homo sapiens
  source 1..40: mol_type = genomic DNA
tgctaactcatgcccccatgtctaacaacatggctttctc

SEQ ID NO: 27626 - DNA, 41 bp, Homo sapiens
  source 1..41: mol_type = genomic DNA
tgctaactcatgcccccatgtctaacaacatggctttctca

SEQ ID NO: 27627 - DNA, 42 bp, Homo sapiens
  source 1..42: mol_type = genomic DNA
tgctaactcatgcccccatgtctaacaacatggctttctcac

SEQ ID NO: 27628 - DNA, 43 bp, Homo sapiens
  source 1..43: mol_type = genomic DNA
tgctaactcatgcccccatgtctaacaacatggctttctcacc

SEQ ID NO: 27629 - DNA, 44 bp, Homo sapiens
  source 1..44: mol_type = genomic DNA
tgctaactcatgcccccatgtctaacaacatggctttctcacca

SEQ ID NO: 27630 - DNA, 26 bp, Homo sapiens
  source 1..26: mol_type = genomic DNA
tgctaataacgccaaggtcgcgggtt

SEQ ID NO: 27631 - DNA, 16 bp, Homo sapiens
  source 1..16: mol_type = genomic DNA
tgctaatccattgtgc

SEQ ID NO: 27632 - DNA, 17 bp, Homo sapiens
  source 1..17: mol_type = genomic DNA
tgctaatccattgtgct

SEQ ID NO: 27633 - DNA, 22 bp, Homo sapiens
  source 1..22: mol_type = genomic DNA
tgctaatccattgtgctctgca

SEQ ID NO: 27634 - DNA, 31 bp, Homo sapiens
  source 1..31: mol_type = genomic DNA
tgctaatccattgtgctctgcacgcgtgggt

SEQ ID NO: 27635 - DNA, 18 bp, Homo sapiens
  source 1..18: mol_type = genomic DNA
tgctaatccattgtgctt

SEQ ID NO: 27636 - DNA, 19 bp, Homo sapiens
  source 1..19: mol_type = genomic DNA
tgctaatccattgtgcttt

SEQ ID NO: 27637 - DNA, 21 bp, Homo sapiens
  source 1..21: mol_type = genomic DNA
tgctaatccattgtgctttgc

SEQ ID NO: 27638 - DNA, 22 bp, Homo sapiens
  source 1..22: mol_type = genomic DNA
tgctaatccattgtgctttgca

SEQ ID NO: 27639 - DNA, 23 bp, Homo sapiens
  source 1..23: mol_type = genomic DNA
tgctaatccattgtgctttgcac

SEQ ID NO: 27640 - DNA, 16 bp, Homo sapiens
  source 1..16: mol_type = genomic DNA
tgctaatggtggagtt

SEQ ID NO: 27641 - DNA, 17 bp, Homo sapiens
  source 1..17: mol_type = genomic DNA
tgctaatggtggagtta

SEQ ID NO: 27642 - DNA, 18 bp, Homo sapiens
  source 1..18: mol_type = genomic DNA
tgctaatggtggagttaa

SEQ ID NO: 27643 - DNA, 19 bp, Homo sapiens
  source 1..19: mol_type = genomic DNA
tgctaatggtggagttaaa

SEQ ID NO: 27644 - DNA, 20 bp, Homo sapiens
  source 1..20: mol_type = genomic DNA
tgctaatggtggagttaaag

SEQ ID NO: 27645 - DNA, 21 bp, Homo sapiens
  source 1..21: mol_type = genomic DNA
tgctaatggtggagttaaaga

SEQ ID NO: 27646 - DNA, 22 bp, Homo sapiens
  source 1..22: mol_type = genomic DNA
tgctaatggtggagttaaagac

SEQ ID NO: 27647 - DNA, 23 bp, Homo sapiens
  source 1..23: mol_type = genomic DNA
tgctaatggtggagttaaagact

SEQ ID NO: 27648 - DNA, 24 bp, Homo sapiens
  source 1..24: mol_type = genomic DNA
tgctaatggtggagttaaagactt

SEQ ID NO: 27649 - DNA, 25 bp, Homo sapiens
  source 1..25: mol_type = genomic DNA
tgctaatggtggagttaaagacttt

SEQ ID NO: 27650 - DNA, 26 bp, Homo sapiens
  source 1..26: mol_type = genomic DNA
tgctaatggtggagttaaagactttt

SEQ ID NO: 27651 - DNA, 27 bp, Homo sapiens
  source 1..27: mol_type = genomic DNA
tgctaatggtggagttaaagacttttt

SEQ ID NO: 27652 - DNA, 28 bp, Homo sapiens
  source 1..28: mol_type = genomic DNA
tgctaatggtggagttaaagactttttc

SEQ ID NO: 27653 - DNA, 29 bp, Homo sapiens
  source 1..29: mol_type = genomic DNA
tgctaatggtggagttaaagactttttct

SEQ ID NO: 27654 - DNA, 30 bp, Homo sapiens
  source 1..30: mol_type = genomic DNA
tgctaatggtggagttaaagactttttctc

SEQ ID NO: 27655 - DNA, 31 bp, Homo sapiens
  source 1..31: mol_type = genomic DNA
tgctaatggtggagttaaagactttttctct

SEQ ID NO: 27656 - DNA, 32 bp, Homo sapiens
  source 1..32: mol_type = genomic DNA
tgctaatggtggagttaaagactttttctctg

SEQ ID NO: 27657 - DNA, 33 bp, Homo sapiens
  source 1..33: mol_type = genomic DNA
tgctaatggtggagttaaagactttttctctga

SEQ ID NO: 27658 - DNA, 34 bp, Homo sapiens
  source 1..34: mol_type = genomic DNA
tgctaatggtggagttaaagactttttctctgac

SEQ ID NO: 27659 - DNA, 35 bp, Homo sapiens
  source 1..35: mol_type = genomic DNA
tgctaatggtggagttaaagactttttctctgacc

SEQ ID NO: 27660 - DNA, 36 bp, Homo sapiens
  source 1..36: mol_type = genomic DNA
tgctaatggtggagttaaagactttttctctgacca

SEQ ID NO: 27661 - DNA, 20 bp, Homo sapiens
  source 1..20: mol_type = genomic DNA
tgctgggcccataacccaga

SEQ ID NO: 27662 - DNA, 28 bp, Homo sapiens
  source 1..28: mol_type = genomic DNA
tgctgggcccataacccagaggtcgatg

SEQ ID NO: 27663 - DNA, 30 bp, Homo sapiens
  source 1..30: mol_type = genomic DNA
tgctgggcccataacccagaggtcgatgga

SEQ ID NO: 27664 - DNA, 31 bp, Homo sapiens
  source 1..31: mol_type = genomic DNA
tgctgggcccataacccagaggtcgatggat

SEQ ID NO: 27665 - DNA, 32 bp, Homo sapiens
  source 1..32: mol_type = genomic DNA
tgctgggcccataacccagaggtcgatggatc

SEQ ID NO: 27666 - DNA, 33 bp, Homo sapiens
  source 1..33: mol_type = genomic DNA
tgctgggcccataacccagaggtcgatggatcg

SEQ ID NO: 27667 - DNA, 31 bp, Homo sapiens
  source 1..31: mol_type = genomic DNA
tgcttagctgttaactaagtgtttgtgggtt

SEQ ID NO: 27668 - DNA, 32 bp, Homo sapiens
  source 1..32: mol_type = genomic DNA
tgcttagctgttaactaagtgtttgtgggttt

SEQ ID NO: 27669 - DNA, 33 bp, Homo sapiens
  source 1..33: mol_type = genomic DNA
tgcttagctgttaactaagtgtttgtgggttta

SEQ ID NO: 27670 - DNA, 26 bp, Homo sapiens
  source 1..26: mol_type = genomic DNA
tgctttacacgcagaaggtcctgggt

SEQ ID NO: 27671 - DNA, 41 bp, Homo sapiens
  source 1..41: mol_type = genomic DNA
tgctttacacgcagaaggtcctgggttcgagccccagtgga

SEQ ID NO: 27672 - DNA, 47 bp, Homo sapiens
  source 1..47: mol_type = genomic DNA
tgctttacacgcagaaggtcctgggttcgagccccagtggaaccacc

SEQ ID NO: 27673 - DNA, 40 bp, Homo sapiens
  source 1..40: mol_type = genomic DNA
tgctttgcacgcgtgggttcgaatcccatcctcgtcgcca

SEQ ID NO: 27674 - DNA, 24 bp, Homo sapiens
  source 1..24: mol_type = genomic DNA
tgctttgcacgtatgaggccccgg

SEQ ID NO: 27675 - DNA, 25 bp, Homo sapiens
  source 1..25: mol_type = genomic DNA
tgctttgcacgtatgaggccccggg

SEQ ID NO: 27676 - DNA, 21 bp, Homo sapiens
  source 1..21: mol_type = genomic DNA
tggaaaccatcctctgctacc

SEQ ID NO: 27677 - DNA, 22 bp, Homo sapiens
  source 1..22: mol_type = genomic DNA
tggacaggtgtccgcgtgggtt

SEQ ID NO: 27678 - DNA, 17 bp, Homo sapiens
  source 1..17: mol_type = genomic DNA
tggacatatgtccgcgt

SEQ ID NO: 27679 - DNA, 20 bp, Homo sapiens
  source 1..20: mol_type = genomic DNA
tggacatatgtccgcgtggg

SEQ ID NO: 27680 - DNA, 21 bp, Homo sapiens
  source 1..21: mol_type = genomic DNA
tggacatatgtccgcgtgggt

SEQ ID NO: 27681 - DNA, 22 bp, Homo sapiens
  source 1..22: mol_type = genomic DNA
tggacatatgtccgcgtgggtt

SEQ ID NO: 27682 - DNA, 23 bp, Homo sapiens
  source 1..23: mol_type = genomic DNA
tggacatatgtccgcgtgggttc

SEQ ID NO: 27683 - DNA, 17 bp, Homo sapiens
  source 1..17: mol_type = genomic DNA
tggacgagcgcgctgga

SEQ ID NO: 27684 - DNA, 19 bp, Homo sapiens
  source 1..19: mol_type = genomic DNA
tggacgagcgcgctggact

SEQ ID NO: 27685 - DNA, 25 bp, Homo sapiens
  source 1..25: mol_type = genomic DNA
tggacgagcgcgctggacttctaat

SEQ ID NO: 27686 - DNA, 27 bp, Homo sapiens
  source 1..27: mol_type = genomic DNA
tggacgagcgcgctggacttctaatcc

SEQ ID NO: 27687 - DNA, 24 bp, Homo sapiens
  source 1..24: mol_type = genomic DNA
tggactcgaaatccaatggggttt

SEQ ID NO: 27688 - DNA, 17 bp, Homo sapiens
  source 1..17: mol_type = genomic DNA
tggactctgaatccagc

SEQ ID NO: 27689 - DNA, 24 bp, Homo sapiens
  source 1..24: mol_type = genomic DNA
tggactctgaatccagcgatccga

SEQ ID NO: 27690 - DNA, 25 bp, Homo sapiens
  source 1..25: mol_type = genomic DNA
tggactctgaatccagcgatccgag

SEQ ID NO: 27691 - DNA, 26 bp, Homo sapiens
  source 1..26: mol_type = genomic DNA
tggactctgaatccagcgatccgagt

SEQ ID NO: 27692 - DNA, 27 bp, Homo sapiens
  source 1..27: mol_type = genomic DNA
tggactctgaatccagcgatccgagtt

SEQ ID NO: 27693 - DNA, 28 bp, Homo sapiens
  source 1..28: mol_type = genomic DNA
tggactctgaatccagcgatccgagttc

SEQ ID NO: 27694 - DNA, 29 bp, Homo sapiens
  source 1..29: mol_type = genomic DNA
tggactctgaatccagcgatccgagttca

SEQ ID NO: 27695 - DNA, 45 bp, Homo sapiens
  source 1..45: mol_type = genomic DNA
tggactctgaatccagcgatccgagttcaaatctcggtggaacct

SEQ ID NO: 27696 - DNA, 48 bp, Homo sapiens
  source 1..48: mol_type = genomic DNA
tggactctgaatccagcgatccgagttcaaatctcggtggaacctcca

SEQ ID NO: 27697 - DNA, 22 bp, Homo sapiens
  source 1..22: mol_type = genomic DNA
tggactgctaatccattgtgct

SEQ ID NO: 27698 - DNA, 29 bp, Homo sapiens
  source 1..29: mol_type = genomic DNA
tggactgtaaatctaaagacaggggttag

SEQ ID NO: 27699 - DNA, 30 bp, Homo sapiens
  source 1..30: mol_type = genomic DNA
tggactgtaaatctaaagacaggggttagg

SEQ ID NO: 27700 - DNA, 45 bp, Homo sapiens
  source 1..45: mol_type = genomic DNA
tggactgtaaatctaaagacaggggttaggcctctttttaccacc

SEQ ID NO: 27701 - DNA, 46 bp, Homo sapiens
  source 1..46: mol_type = genomic DNA
tggactgtaaatctaaagacaggggttaggcctctttttaccacca

SEQ ID NO: 27702 - DNA, 17 bp, Homo sapiens
  source 1..17: mol_type = genomic DNA
tggactttgaatccagc

SEQ ID NO: 27703 - DNA, 16 bp, Homo sapiens
  source 1..16: mol_type = genomic DNA
tggaggccatggggtt

SEQ ID NO: 27704 - DNA, 16 bp, Homo sapiens
  source 1..16: mol_type = genomic DNA
tggaggcgtgggttcg

SEQ ID NO: 27705 - DNA, 21 bp, Homo sapiens
  source 1..21: mol_type = genomic DNA
tggaggcgtgggttcgaatcc

SEQ ID NO: 27706 - DNA, 22 bp, Homo sapiens
  source 1..22: mol_type = genomic DNA
tggaggcgtgggttcgaatccc

SEQ ID NO: 27707 - DNA, 23 bp, Homo sapiens
  source 1..23: mol_type = genomic DNA
tggaggcgtgggttcgaatccca

SEQ ID NO: 27708 - DNA, 25 bp, Homo sapiens
  source 1..25: mol_type = genomic DNA
tggaggcgtgggttcgaatcccact

SEQ ID NO: 27709 - DNA, 29 bp, Homo sapiens
  source 1..29: mol_type = genomic DNA
tggaggcgtgggttcgaatcccacttctg

SEQ ID NO: 27710 - DNA, 32 bp, Homo sapiens
  source 1..32: mol_type = genomic DNA
tggaggcgtgggttcgaatcccacttctgaca

SEQ ID NO: 27711 - DNA, 34 bp, Homo sapiens
  source 1..34: mol_type = genomic DNA
tggaggcgtgggttcgaatcccacttctgacacc

SEQ ID NO: 27712 - DNA, 23 bp, Homo sapiens
  source 1..23: mol_type = genomic DNA
tggagtggttatcacgttcgcct

SEQ ID NO: 27713 - DNA, 16 bp, Homo sapiens
  source 1..16: mol_type = genomic DNA
tggagttaaagacttt

SEQ ID NO: 27714 - DNA, 21 bp, Homo sapiens
  source 1..21: mol_type = genomic DNA
tggagttaaagactttttctc

SEQ ID NO: 27715 - DNA, 23 bp, Homo sapiens
  source 1..23: mol_type = genomic DNA
tggagttaaagactttttctctg

SEQ ID NO: 27716 - DNA, 24 bp, Homo sapiens
  source 1..24: mol_type = genomic DNA
tggagttaaagactttttctctga

SEQ ID NO: 27717 - DNA, 25 bp, Homo sapiens
  source 1..25: mol_type = genomic DNA
tggagttaaagactttttctctgac

SEQ ID NO: 27718 - DNA, 26 bp, Homo sapiens
  source 1..26: mol_type = genomic DNA
tggagttaaagactttttctctgacc

SEQ ID NO: 27719 - DNA, 27 bp, Homo sapiens
  source 1..27: mol_type = genomic DNA
tggagttaaagactttttctctgacca

SEQ ID NO: 27720 - DNA, 16 bp, Homo sapiens
  source 1..16: mol_type = genomic DNA
tggataacgcgtctga

SEQ ID NO: 27721 - DNA, 18 bp, Homo sapiens
  source 1..18: mol_type = genomic DNA
tggataacgcgtctgact

SEQ ID NO: 27722 - DNA, 16 bp, Homo sapiens
  source 1..16: mol_type = genomic DNA
tggataaggcactggc

SEQ ID NO: 27723 - DNA, 16 bp, Homo sapiens
  source 1..16: mol_type = genomic DNA
tggataaggcatcagc

SEQ ID NO: 27724 - DNA, 18 bp, Homo sapiens
  source 1..18: mol_type = genomic DNA
tggataaggcatcagcct

SEQ ID NO: 27725 - DNA, 27 bp, Homo sapiens
  source 1..27: mol_type = genomic DNA
tggataaggcatcagcctccggagctg

SEQ ID NO: 27726 - DNA, 16 bp, Homo sapiens
  source 1..16: mol_type = genomic DNA
tggataaggcattggc

SEQ ID NO: 27727 - DNA, 16 bp, Homo sapiens
  source 1..16: mol_type = genomic DNA
tggataaggcgtctga

SEQ ID NO: 27728 - DNA, 18 bp, Homo sapiens
  source 1..18: mol_type = genomic DNA
tggataaggcgtctgact

SEQ ID NO: 27729 - DNA, 16 bp, Homo sapiens
  source 1..16: mol_type = genomic DNA
tggatagcgcattgga

SEQ ID NO: 27730 - DNA, 17 bp, Homo sapiens
  source 1..17: mol_type = genomic DNA
tggatagcgcattggac

SEQ ID NO: 27731 - DNA, 25 bp, Homo sapiens
  source 1..25: mol_type = genomic DNA
tggatagctcagtcggtagagcatc

SEQ ID NO: 27732 - DNA, 27 bp, Homo sapiens
  source 1..27: mol_type = genomic DNA
tggatagctcagtcggtagagcatcag

SEQ ID NO: 27733 - DNA, 29 bp, Homo sapiens
  source 1..29: mol_type = genomic DNA
tggatagctcagtcggtagagcatcagac

SEQ ID NO: 27734 - DNA, 22 bp, Homo sapiens
  source 1..22: mol_type = genomic DNA
tggatcgaaaccatcctctgct

SEQ ID NO: 27735 - DNA, 39 bp, Homo sapiens
  source 1..39: mol_type = genomic DNA
tggattctcagggatgggttcgattctcatagtcctagc

SEQ ID NO: 27736 - DNA, 40 bp, Homo sapiens
  source 1..40: mol_type = genomic DNA
tggattctcagggatgggttcgattctcatagtcctagcc

SEQ ID NO: 27737 - DNA, 41 bp, Homo sapiens
  source 1..41: mol_type = genomic DNA
tggattctcagggatgggttcgattctcatagtcctagcca

SEQ ID NO: 27738 - DNA, 16 bp, Homo sapiens
  source 1..16: mol_type = genomic DNA
tggcacggagaatttt

SEQ ID NO: 27739 - DNA, 17 bp, Homo sapiens
  source 1..17: mol_type = genomic DNA
tggcacggagaattttg

SEQ ID NO: 27740 - DNA, 32 bp, Homo sapiens
  source 1..32: mol_type = genomic DNA
tggcacggagaattttggattctcagggatgg

SEQ ID NO: 27741 - DNA, 16 bp, Homo sapiens
  source 1..16: mol_type = genomic DNA
tggcagagcccggtaa

SEQ ID NO: 27742 - DNA, 17 bp, Homo sapiens
  source 1..17: mol_type = genomic DNA
tggcagagcccggtaat

SEQ ID NO: 27743 - DNA, 18 bp, Homo sapiens
  source 1..18: mol_type = genomic DNA
tggcagagcccggtaatc

SEQ ID NO: 27744 - DNA, 23 bp, Homo sapiens
  source 1..23: mol_type = genomic DNA
tggcagagcccggtaatcgcata

SEQ ID NO: 27745 - DNA, 24 bp, Homo sapiens
  source 1..24: mol_type = genomic DNA
tggcagagcccggtaatcgcataa

SEQ ID NO: 27746 - DNA, 25 bp, Homo sapiens
  source 1..25: mol_type = genomic DNA
tggcagagcccggtaatcgcataaa

SEQ ID NO: 27747 - DNA, 27 bp, Homo sapiens
  source 1..27: mol_type = genomic DNA
tggcagagcccggtaatcgcataaaac

SEQ ID NO: 27748 - DNA, 30 bp, Homo sapiens
  source 1..30: mol_type = genomic DNA
tggcagagcccggtaatcgcataaaactta

SEQ ID NO: 27749 - DNA, 31 bp, Homo sapiens
  source 1..31: mol_type = genomic DNA
tggcagagcccggtaatcgcataaaacttaa

SEQ ID NO: 27750 - DNA, 34 bp, Homo sapiens
  source 1..34: mol_type = genomic DNA
tggcagagcccggtaatcgcataaaacttaaaac

SEQ ID NO: 27751 - DNA, 35 bp, Homo sapiens
  source 1..35: mol_type = genomic DNA
tggcagagcccggtaatcgcataaaacttaaaact

SEQ ID NO: 27752 - DNA, 36 bp, Homo sapiens
  source 1..36: mol_type = genomic DNA
tggcagagcccggtaatcgcataaaacttaaaactt

SEQ ID NO: 27753 - DNA, 39 bp, Homo sapiens
  source 1..39: mol_type = genomic DNA
tggcagagcccggtaatcgcataaaacttaaaactttac

SEQ ID NO: 27754 - DNA, 19 bp, Homo sapiens
  source 1..19: mol_type = genomic DNA
tggcccgggttcgactccc

SEQ ID NO: 27755 - DNA, 17 bp, Homo sapiens
  source 1..17: mol_type = genomic DNA
tggccgagcggtctaag

SEQ ID NO: 27756 - DNA, 19 bp, Homo sapiens
  source 1..19: mol_type = genomic DNA
tggccgagcggtctaaggc

SEQ ID NO: 27757 - DNA, 23 bp, Homo sapiens
  source 1..23: mol_type = genomic DNA
tggccgagcggtctaaggcgctg

SEQ ID NO: 27758 - DNA, 27 bp, Homo sapiens
  source 1..27: mol_type = genomic DNA
tggccgagcggtctaaggcgctgcgtt

SEQ ID NO: 27759 - DNA, 26 bp, Homo sapiens
  source 1..26: mol_type = genomic DNA
tggccgagtggtctaaggcgctggat

SEQ ID NO: 27760 - DNA, 16 bp, Homo sapiens
  source 1..16: mol_type = genomic DNA
tggccgagtggttaag

SEQ ID NO: 27761 - DNA, 21 bp, Homo sapiens
  source 1..21: mol_type = genomic DNA
tggccgcagcaacctcggttc

SEQ ID NO: 27762 - DNA, 22 bp, Homo sapiens
  source 1..22: mol_type = genomic DNA
tggccgcagcaacctcggttcg

SEQ ID NO: 27763 - DNA, 23 bp, Homo sapiens
  source 1..23: mol_type = genomic DNA
tggccgcagcaacctcggttcga

SEQ ID NO: 27764 - DNA, 35 bp, Homo sapiens
  source 1..35: mol_type = genomic DNA
tggccgcagcaacctcggttcgaatccgagtcacg

SEQ ID NO: 27765 - DNA, 40 bp, Homo sapiens
  source 1..40: mol_type = genomic DNA
tggccgcagcaacctcggttcgaatccgagtcacggcacc

SEQ ID NO: 27766 - DNA, 41 bp, Homo sapiens
  source 1..41: mol_type = genomic DNA
tggccgcagcaacctcggttcgaatccgagtcacggcacca

SEQ ID NO: 27767 - DNA, 29 bp, Homo sapiens
  source 1..29: mol_type = genomic DNA
tggcctaatggataaggcatcagcctccg

SEQ ID NO: 27768 - DNA, 24 bp, Homo sapiens
  source 1..24: mol_type = genomic DNA
tggcctaatggataaggcattggc

SEQ ID NO: 27769 - DNA, 26 bp, Homo sapiens
  source 1..26: mol_type = genomic DNA
tggcctaatggataaggcgtctgact

SEQ ID NO: 27770 - DNA, 26 bp, Homo sapiens
  source 1..26: mol_type = genomic DNA
tggcctaatggataaggcgtctgatt

SEQ ID NO: 27771 - DNA, 28 bp, Homo sapiens
  source 1..28: mol_type = genomic DNA
tggcctaatggataaggcgtctgattcc

SEQ ID NO: 27772 - DNA, 29 bp, Homo sapiens
  source 1..29: mol_type = genomic DNA
tggcctaatggataaggcgtctgattccg

SEQ ID NO: 27773 - DNA, 17 bp, Homo sapiens
  source 1..17: mol_type = genomic DNA
tggcgcaatcggttagc

SEQ ID NO: 27774 - DNA, 24 bp, Homo sapiens
  source 1..24: mol_type = genomic DNA
tggcgcaatggatagcgcattgga

SEQ ID NO: 27775 - DNA, 25 bp, Homo sapiens
  source 1..25: mol_type = genomic DNA
tggcgcaatggatagcgcattggac

SEQ ID NO: 27776 - DNA, 26 bp, Homo sapiens
  source 1..26: mol_type = genomic DNA
tggcgcaatggatagcgcattggact

SEQ ID NO: 27777 - DNA, 23 bp, Homo sapiens
  source 1..23: mol_type = genomic DNA
tggcgcagcggaagcgtgctggg

SEQ ID NO: 27778 - DNA, 24 bp, Homo sapiens
  source 1..24: mol_type = genomic DNA
tggcgcagcggaagcgtgctgggc

SEQ ID NO: 27779 - DNA, 26 bp, Homo sapiens
  source 1..26: mol_type = genomic DNA
tggcgcagcggaagcgtgctgggccc

SEQ ID NO: 27780 - DNA, 33 bp, Homo sapiens
  source 1..33: mol_type = genomic DNA
tggcgcagcggaagcgtgctgggcccataaccc

SEQ ID NO: 27781 - DNA, 16 bp, Homo sapiens
  source 1..16: mol_type = genomic DNA
tggctaggattcggcg

SEQ ID NO: 27782 - DNA, 17 bp, Homo sapiens
  source 1..17: mol_type = genomic DNA
tggctaggattcggcgc

SEQ ID NO: 27783 - DNA, 18 bp, Homo sapiens
  source 1..18: mol_type = genomic DNA
tggctaggattcggcgct

SEQ ID NO: 27784 - DNA, 19 bp, Homo sapiens
  source 1..19: mol_type = genomic DNA
tggctaggattcggcgctt

SEQ ID NO: 27785 - DNA, 21 bp, Homo sapiens
  source 1..21: mol_type = genomic DNA
tggctaggattcggcgctttc

SEQ ID NO: 27786 - DNA, 22 bp, Homo sapiens
  source 1..22: mol_type = genomic DNA
tggctaggattcggcgctttca

SEQ ID NO: 27787 - DNA, 23 bp, Homo sapiens
  source 1..23: mol_type = genomic DNA
tggctaggattcggcgctttcac

SEQ ID NO: 27788 - DNA, 24 bp, Homo sapiens
  source 1..24: mol_type = genomic DNA
tggctaggattcggcgctttcacc

SEQ ID NO: 27789 - DNA, 25 bp, Homo sapiens
  source 1..25: mol_type = genomic DNA
tggctaggattcggcgctttcaccg

SEQ ID NO: 27790 - DNA, 21 bp, Homo sapiens
  source 1..21: mol_type = genomic DNA
tggctgagtgaagcattggac

SEQ ID NO: 27791 - DNA, 22 bp, Homo sapiens
  source 1..22: mol_type = genomic DNA
tggctgagtgaagcattggact

SEQ ID NO: 27792 - DNA, 23 bp, Homo sapiens
  source 1..23: mol_type = genomic DNA
tggctgagtgaagcattggactg

SEQ ID NO: 27793 - DNA, 24 bp, Homo sapiens
  source 1..24: mol_type = genomic DNA
tggctgagtgaagcattggactgt

SEQ ID NO: 27794 - DNA, 25 bp, Homo sapiens
  source 1..25: mol_type = genomic DNA
tggctgagtgaagcattggactgta

SEQ ID NO: 27795 - DNA, 26 bp, Homo sapiens
  source 1..26: mol_type = genomic DNA
tggctgagtgaagcattggactgtaa

SEQ ID NO: 27796 - DNA, 27 bp, Homo sapiens
  source 1..27: mol_type = genomic DNA
tggctgagtgaagcattggactgtaaa

SEQ ID NO: 27797 - DNA, 28 bp, Homo sapiens
  source 1..28: mol_type = genomic DNA
tggctgagtgaagcattggactgtaaat

SEQ ID NO: 27798 - DNA, 29 bp, Homo sapiens
  source 1..29: mol_type = genomic DNA
tggctgagtgaagcattggactgtaaatc

SEQ ID NO: 27799 - DNA, 32 bp, Homo sapiens
  source 1..32: mol_type = genomic DNA
tggctgagtgaagcattggactgtaaatctaa

SEQ ID NO: 27800 - DNA, 16 bp, Homo sapiens
  source 1..16: mol_type = genomic DNA
tgggactcttaatccc

SEQ ID NO: 27801 - DNA, 29 bp, Homo sapiens
  source 1..29: mol_type = genomic DNA
tgggactcttaatcccagggtcgtgggtt

SEQ ID NO: 27802 - DNA, 22 bp, Homo sapiens
  source 1..22: mol_type = genomic DNA
tgggcccataacccagaggtcg

SEQ ID NO: 27803 - DNA, 25 bp, Homo sapiens
  source 1..25: mol_type = genomic DNA
tgggcccataacccagaggtcgatg

SEQ ID NO: 27804 - DNA, 27 bp, Homo sapiens
  source 1..27: mol_type = genomic DNA
tgggcccataacccagaggtcgatgga

SEQ ID NO: 27805 - DNA, 28 bp, Homo sapiens
  source 1..28: mol_type = genomic DNA
tgggcccataacccagaggtcgatggat

SEQ ID NO: 27806 - DNA, 30 bp, Homo sapiens
  source 1..30: mol_type = genomic DNA
tgggcccataacccagaggtcgatggatcg

SEQ ID NO: 27807 - DNA, 17 bp, Homo sapiens
  source 1..17: mol_type = genomic DNA
tgggctggtgcccgcgt

SEQ ID NO: 27808 - DNA, 16 bp, Homo sapiens
  source 1..16: mol_type = genomic DNA
tggggattgtgggttc

SEQ ID NO: 27809 - DNA, 17 bp, Homo sapiens
  source 1..17: mol_type = genomic DNA
tggggattgtgggttcg

SEQ ID NO: 27810 - DNA, 22 bp, Homo sapiens
  source 1..22: mol_type = genomic DNA
tggggattgtgggttcgagtcc

SEQ ID NO: 27811 - DNA, 23 bp, Homo sapiens
  source 1..23: mol_type = genomic DNA
tggggattgtgggttcgagtccc

SEQ ID NO: 27812 - DNA, 24 bp, Homo sapiens
  source 1..24: mol_type = genomic DNA
tggggattgtgggttcgagtccca

SEQ ID NO: 27813 - DNA, 26 bp, Homo sapiens
  source 1..26: mol_type = genomic DNA
tggggattgtgggttcgagtcccatc

SEQ ID NO: 27814 - DNA, 30 bp, Homo sapiens
  source 1..30: mol_type = genomic DNA
tggggattgtgggttcgagtcccatctggg

SEQ ID NO: 27815 - DNA, 33 bp, Homo sapiens
  source 1..33: mol_type = genomic DNA
tggggattgtgggttcgagtcccatctgggtcg

SEQ ID NO: 27816 - DNA, 34 bp, Homo sapiens
  source 1..34: mol_type = genomic DNA
tggggattgtgggttcgagtcccatctgggtcgc

SEQ ID NO: 27817 - DNA, 35 bp, Homo sapiens
  source 1..35: mol_type = genomic DNA
tggggattgtgggttcgagtcccatctgggtcgcc

SEQ ID NO: 27818 - DNA, 36 bp, Homo sapiens
  source 1..36: mol_type = genomic DNA
tggggattgtgggttcgagtcccatctgggtcgcca

SEQ ID NO: 27819 - DNA, 18 bp, Homo sapiens
  source 1..18: mol_type = genomic DNA
tggggggttcgattcctt

SEQ ID NO: 27820 - DNA, 29 bp, Homo sapiens
  source 1..29: mol_type = genomic DNA
tggggggttcgattccttccttttttgcc

SEQ ID NO: 27821 - DNA, 21 bp, Homo sapiens
  source 1..21: mol_type = genomic DNA
tggggtctccccgcgcaggtt

SEQ ID NO: 27822 - DNA, 31 bp, Homo sapiens
  source 1..31: mol_type = genomic DNA
tggggtgtgataggtggcacggagaattttg

SEQ ID NO: 27823 - DNA, 41 bp, Homo sapiens
  source 1..41: mol_type = genomic DNA
tggggtttccccgcacaggttcgaatcctgttcgtgacgcc

SEQ ID NO: 27824 - DNA, 20 bp, Homo sapiens
  source 1..20: mol_type = genomic DNA
tggggtttccccgcgcaggt

SEQ ID NO: 27825 - DNA, 21 bp, Homo sapiens
  source 1..21: mol_type = genomic DNA
tggggtttccccgcgcaggtt

SEQ ID NO: 27826 - DNA, 22 bp, Homo sapiens
  source 1..22: mol_type = genomic DNA
tggggtttccccgcgcaggttc

SEQ ID NO: 27827 - DNA, 16 bp, Homo sapiens
  source 1..16: mol_type = genomic DNA
tggggttttgcagtcc

SEQ ID NO: 27828 - DNA, 21 bp, Homo sapiens
  source 1..21: mol_type = genomic DNA
tggggttttgcagtccttacc

SEQ ID NO: 27829 - DNA, 18 bp, Homo sapiens
  source 1..18: mol_type = genomic DNA
tgggtagagcatttgact

SEQ ID NO: 27830 - DNA, 25 bp, Homo sapiens
  source 1..25: mol_type = genomic DNA
tgggtagctcagtcggtagagcatc

SEQ ID NO: 27831 - DNA, 29 bp, Homo sapiens
  source 1..29: mol_type = genomic DNA
tgggtagctcagtcggtagagcatcagac

SEQ ID NO: 27832 - DNA, 30 bp, Homo sapiens
  source 1..30: mol_type = genomic DNA
tgggtagctcagtcggtagagcatcagact

SEQ ID NO: 27833 - DNA, 33 bp, Homo sapiens
  source 1..33: mol_type = genomic DNA
tgggtagctcagtcggtagagcatcagactttt

SEQ ID NO: 27834 - DNA, 37 bp, Homo sapiens
  source 1..37: mol_type = genomic DNA
tgggtccgagaggtcccgggttcaaatcccggacgag

SEQ ID NO: 27835 - DNA, 17 bp, Homo sapiens
  source 1..17: mol_type = genomic DNA
tgggtgcgagaggtccc

SEQ ID NO: 27836 - DNA, 18 bp, Homo sapiens
  source 1..18: mol_type = genomic DNA
tgggtgcgagaggtcccg

SEQ ID NO: 27837 - DNA, 21 bp, Homo sapiens
  source 1..21: mol_type = genomic DNA
tgggtgctaatggtggagtta

SEQ ID NO: 27838 - DNA, 22 bp, Homo sapiens
  source 1..22: mol_type = genomic DNA
tgggtgctaatggtggagttaa

SEQ ID NO: 27839 - DNA, 23 bp, Homo sapiens
  source 1..23: mol_type = genomic DNA
tgggtgctaatggtggagttaaa

SEQ ID NO: 27840 - DNA, 24 bp, Homo sapiens
  source 1..24: mol_type = genomic DNA
tgggtgctaatggtggagttaaag

SEQ ID NO: 27841 - DNA, 26 bp, Homo sapiens
  source 1..26: mol_type = genomic DNA
tgggtgctaatggtggagttaaagac

SEQ ID NO: 27842 - DNA, 29 bp, Homo sapiens
  source 1..29: mol_type = genomic DNA
tgggtgctaatggtggagttaaagacttt

SEQ ID NO: 27843 - DNA, 38 bp, Homo sapiens
  source 1..38: mol_type = genomic DNA
tgggtgctaatggtggagttaaagactttttctctgac

SEQ ID NO: 27844 - DNA, 39 bp, Homo sapiens
  source 1..39: mol_type = genomic DNA
tgggtgctaatggtggagttaaagactttttctctgacc

SEQ ID NO: 27845 - DNA, 16 bp, Homo sapiens
  source 1..16: mol_type = genomic DNA
tgggtggttcagtggt

SEQ ID NO: 27846 - DNA, 17 bp, Homo sapiens
  source 1..17: mol_type = genomic DNA
tgggtggttcagtggta

SEQ ID NO: 27847 - DNA, 18 bp, Homo sapiens
  source 1..18: mol_type = genomic DNA
tgggtggttcagtggtag

SEQ ID NO: 27848 - DNA, 19 bp, Homo sapiens
  source 1..19: mol_type = genomic DNA
tgggtggttcagtggtaga

SEQ ID NO: 27849 - DNA, 20 bp, Homo sapiens
  source 1..20: mol_type = genomic DNA
tgggtggttcagtggtagaa

SEQ ID NO: 27850 - DNA, 21 bp, Homo sapiens
  source 1..21: mol_type = genomic DNA
tgggtggttcagtggtagaat

SEQ ID NO: 27851 - DNA, 22 bp, Homo sapiens
  source 1..22: mol_type = genomic DNA
tgggtggttcagtggtagaatt

SEQ ID NO: 27852 - DNA, 23 bp, Homo sapiens
  source 1..23: mol_type = genomic DNA
tgggtggttcagtggtagaattc

SEQ ID NO: 27853 - DNA, 24 bp, Homo sapiens
  source 1..24: mol_type = genomic DNA
tgggtggttcagtggtagaattct

SEQ ID NO: 27854 - DNA, 25 bp, Homo sapiens
  source 1..25: mol_type = genomic DNA
tgggtggttcagtggtagaattctc

SEQ ID NO: 27855 - DNA, 26 bp, Homo sapiens
  source 1..26: mol_type = genomic DNA
tgggtggttcagtggtagaattctcg

SEQ ID NO: 27856 - DNA, 27 bp, Homo sapiens
  source 1..27: mol_type = genomic DNA
tgggtggttcagtggtagaattctcgc

SEQ ID NO: 27857 - DNA, 28 bp, Homo sapiens
  source 1..28: mol_type = genomic DNA
tgggtggttcagtggtagaattctcgcc

SEQ ID NO: 27858 - DNA, 29 bp, Homo sapiens
  source 1..29: mol_type = genomic DNA
tgggtggttcagtggtagaattctcgcct

SEQ ID NO: 27859 - DNA, 30 bp, Homo sapiens
  source 1..30: mol_type = genomic DNA
tgggtggttcagtggtagaattctcgcctg

SEQ ID NO: 27860 - DNA, 31 bp, Homo sapiens
  source 1..31: mol_type = genomic DNA
tgggtggttcagtggtagaattctcgcctgc

SEQ ID NO: 27861 - DNA, 32 bp, Homo sapiens
  source 1..32: mol_type = genomic DNA
tgggtggttcagtggtagaattctcgcctgcc

SEQ ID NO: 27862 - DNA, 33 bp, Homo sapiens
  source 1..33: mol_type = genomic DNA
tgggtggttcagtggtagaattctcgcctgcca

SEQ ID NO: 27863 - DNA, 34 bp, Homo sapiens
  source 1..34: mol_type = genomic DNA
tgggtggttcagtggtagaattctcgcctgccac

SEQ ID NO: 27864 - DNA, 35 bp, Homo sapiens
  source 1..35: mol_type = genomic DNA
tgggtggttcagtggtagaattctcgcctgccacg

SEQ ID NO: 27865 - DNA, 38 bp, Homo sapiens
  source 1..38: mol_type = genomic DNA
tgggtggttcagtggtagaattctcgcctgccacgcgg

SEQ ID NO: 27866 - DNA, 40 bp, Homo sapiens
  source 1..40: mol_type = genomic DNA
tgggtggttcagtggtagaattctcgcctgccacgcggga

SEQ ID NO: 27867 - DNA, 41 bp, Homo sapiens
  source 1..41: mol_type = genomic DNA
tgggtggttcagtggtagaattctcgcctgccacgcgggag

SEQ ID NO: 27868 - DNA, 26 bp, Homo sapiens
  source 1..26: mol_type = genomic DNA
tgggttcgaatcccaccttcgtcgcc

SEQ ID NO: 27869 - DNA, 26 bp, Homo sapiens
  source 1..26: mol_type = genomic DNA
tgggttcgaatcccacttctgacacc

SEQ ID NO: 27870 - DNA, 22 bp, Homo sapiens
  source 1..22: mol_type = genomic DNA
tgggttcgaatcccagcggggc

SEQ ID NO: 27871 - DNA, 25 bp, Homo sapiens
  source 1..25: mol_type = genomic DNA
tgggttcgaatcccagcggggcctc

SEQ ID NO: 27872 - DNA, 26 bp, Homo sapiens
  source 1..26: mol_type = genomic DNA
tgggttcgaatcccagcggggcctcc

SEQ ID NO: 27873 - DNA, 21 bp, Homo sapiens
  source 1..21: mol_type = genomic DNA
tgggttcgaatcccagcggtg

SEQ ID NO: 27874 - DNA, 23 bp, Homo sapiens
  source 1..23: mol_type = genomic DNA
tgggttcgaatcccagcggtgcc

SEQ ID NO: 27875 - DNA, 24 bp, Homo sapiens
  source 1..24: mol_type = genomic DNA
tgggttcgaatcccagcggtgcct

SEQ ID NO: 27876 - DNA, 25 bp, Homo sapiens
  source 1..25: mol_type = genomic DNA
tgggttcgaatcccagcggtgcctc

SEQ ID NO: 27877 - DNA, 26 bp, Homo sapiens
  source 1..26: mol_type = genomic DNA
tgggttcgaatcccagcggtgcctcc

SEQ ID NO: 27878 - DNA, 25 bp, Homo sapiens
  source 1..25: mol_type = genomic DNA
tgggttcgaatcccatcctcgtcgc

SEQ ID NO: 27879 - DNA, 26 bp, Homo sapiens
  source 1..26: mol_type = genomic DNA
tgggttcgaatcccatcctcgtcgcc

SEQ ID NO: 27880 - DNA, 27 bp, Homo sapiens
  source 1..27: mol_type = genomic DNA
tgggttcgaatcccatcctcgtcgcca

SEQ ID NO: 27881 - DNA, 23 bp, Homo sapiens
  source 1..23: mol_type = genomic DNA
tgggttcgagccccacgttgggc

SEQ ID NO: 27882 - DNA, 24 bp, Homo sapiens
  source 1..24: mol_type = genomic DNA
tgggttcgagccccacgttgggcg

SEQ ID NO: 27883 - DNA, 25 bp, Homo sapiens
  source 1..25: mol_type = genomic DNA
tgggttcgagccccacgttgggcgc

SEQ ID NO: 27884 - DNA, 27 bp, Homo sapiens
  source 1..27: mol_type = genomic DNA
tgggttcgagccccacgttgggcgcca

SEQ ID NO: 27885 - DNA, 23 bp, Homo sapiens
  source 1..23: mol_type = genomic DNA
tgggttcgagccccagtggaacc

SEQ ID NO: 27886 - DNA, 26 bp, Homo sapiens
  source 1..26: mol_type = genomic DNA
tgggttcgagccccagtggaaccacc

SEQ ID NO: 27887 - DNA, 25 bp, Homo sapiens
  source 1..25: mol_type = genomic DNA
tgggttcgagtcccatctgggtcgc

SEQ ID NO: 27888 - DNA, 24 bp, Homo sapiens
  source 1..24: mol_type = genomic DNA
tgggttcgattctcatagtcctag

SEQ ID NO: 27889 - DNA, 25 bp, Homo sapiens
  source 1..25: mol_type = genomic DNA
tgggttcgattctcatagtcctagc

SEQ ID NO: 27890 - DNA, 26 bp, Homo sapiens
  source 1..26: mol_type = genomic DNA
tgggttcgattctcatagtcctagcc

SEQ ID NO: 27891 - DNA, 27 bp, Homo sapiens
  source 1..27: mol_type = genomic DNA
tgggttcgattctcatagtcctagcca

SEQ ID NO: 27892 - DNA, 21 bp, Homo sapiens
  source 1..21: mol_type = genomic DNA
tgggtttaagtcccattggtc

SEQ ID NO: 27893 - DNA, 22 bp, Homo sapiens
  source 1..22: mol_type = genomic DNA
tgggtttaagtcccattggtct

SEQ ID NO: 27894 - DNA, 23 bp, Homo sapiens
  source 1..23: mol_type = genomic DNA
tgggtttaagtcccattggtcta

SEQ ID NO: 27895 - DNA, 24 bp, Homo sapiens
  source 1..24: mol_type = genomic DNA
tgggtttaagtcccattggtctag

SEQ ID NO: 27896 - DNA, 25 bp, Homo sapiens
  source 1..25: mol_type = genomic DNA
tgggtttaagtcccattggtctagc

SEQ ID NO: 27897 - DNA, 26 bp, Homo sapiens
  source 1..26: mol_type = genomic DNA
tgggtttaagtcccattggtctagcc

SEQ ID NO: 27898 - DNA, 23 bp, Homo sapiens
  source 1..23: mol_type = genomic DNA
tggtaagcactctggactctgaa

SEQ ID NO: 27899 - DNA, 25 bp, Homo sapiens
  source 1..25: mol_type = genomic DNA
tggtaagcactctggactctgaatc

SEQ ID NO: 27900 - DNA, 17 bp, Homo sapiens
  source 1..17: mol_type = genomic DNA
tggtaagcatagctgcc

SEQ ID NO: 27901 - DNA, 16 bp, Homo sapiens
  source 1..16: mol_type = genomic DNA
tggtagaattctcgcc

SEQ ID NO: 27902 - DNA, 17 bp, Homo sapiens
  source 1..17: mol_type = genomic DNA
tggtagaattctcgcct

SEQ ID NO: 27903 - DNA, 19 bp, Homo sapiens
  source 1..19: mol_type = genomic DNA
tggtagaattctcgcctcc

SEQ ID NO: 27904 - DNA, 35 bp, Homo sapiens
  source 1..35: mol_type = genomic DNA
tggtagaattctcgcctcccacgcgggagacccgg

SEQ ID NO: 27905 - DNA, 18 bp, Homo sapiens
  source 1..18: mol_type = genomic DNA
tggtagaattctcgcctg

SEQ ID NO: 27906 - DNA, 19 bp, Homo sapiens
  source 1..19: mol_type = genomic DNA
tggtagaattctcgcctgc

SEQ ID NO: 27907 - DNA, 20 bp, Homo sapiens
  source 1..20: mol_type = genomic DNA
tggtagaattctcgcctgcc

SEQ ID NO: 27908 - DNA, 21 bp, Homo sapiens
  source 1..21: mol_type = genomic DNA
tggtagaattctcgcctgcca

SEQ ID NO: 27909 - DNA, 22 bp, Homo sapiens
  source 1..22: mol_type = genomic DNA
tggtagaattctcgcctgccac

SEQ ID NO: 27910 - DNA, 23 bp, Homo sapiens
  source 1..23: mol_type = genomic DNA
tggtagaattctcgcctgccacg

SEQ ID NO: 27911 - DNA, 24 bp, Homo sapiens
  source 1..24: mol_type = genomic DNA
tggtagaattctcgcctgccacgc

SEQ ID NO: 27912 - DNA, 25 bp, Homo sapiens
  source 1..25: mol_type = genomic DNA
tggtagaattctcgcctgccacgcg

SEQ ID NO: 27913 - DNA, 26 bp, Homo sapiens
  source 1..26: mol_type = genomic DNA
tggtagaattctcgcctgccacgcgg

SEQ ID NO: 27914 - DNA, 27 bp, Homo sapiens
  source 1..27: mol_type = genomic DNA
tggtagaattctcgcctgccacgcggg

SEQ ID NO: 27915 - DNA, 28 bp, Homo sapiens
  source 1..28: mol_type = genomic DNA
tggtagaattctcgcctgccacgcggga

SEQ ID NO: 27916 - DNA, 29 bp, Homo sapiens
  source 1..29: mol_type = genomic DNA
tggtagaattctcgcctgccacgcgggag

SEQ ID NO: 27917 - DNA, 30 bp, Homo sapiens
  source 1..30: mol_type = genomic DNA
tggtagaattctcgcctgccacgcgggagg

SEQ ID NO: 27918 - DNA, 31 bp, Homo sapiens
  source 1..31: mol_type = genomic DNA
tggtagaattctcgcctgccacgcgggaggc

SEQ ID NO: 27919 - DNA, 32 bp, Homo sapiens
  source 1..32: mol_type = genomic DNA
tggtagaattctcgcctgccacgcgggaggcc

SEQ ID NO: 27920 - DNA, 33 bp, Homo sapiens
  source 1..33: mol_type = genomic DNA
tggtagaattctcgcctgccacgcgggaggccc

SEQ ID NO: 27921 - DNA, 34 bp, Homo sapiens
  source 1..34: mol_type = genomic DNA
tggtagaattctcgcctgccacgcgggaggcccg

SEQ ID NO: 27922 - DNA, 35 bp, Homo sapiens
  source 1..35: mol_type = genomic DNA
tggtagaattctcgcctgccacgcgggaggcccgg

SEQ ID NO: 27923 - DNA, 36 bp, Homo sapiens
  source 1..36: mol_type = genomic DNA
tggtagaattctcgcctgccacgcgggaggcccggg

SEQ ID NO: 27924 - DNA, 37 bp, Homo sapiens
  source 1..37: mol_type = genomic DNA
tggtagaattctcgcctgccacgcgggaggcccgggt

SEQ ID NO: 27925 - DNA, 38 bp, Homo sapiens
  source 1..38: mol_type = genomic DNA
tggtagaattctcgcctgccacgcgggaggcccgggtt

SEQ ID NO: 27926 - DNA, 39 bp, Homo sapiens
  source 1..39: mol_type = genomic DNA
tggtagaattctcgcctgccacgcgggaggcccgggttc

SEQ ID NO: 27927 - DNA, 39 bp, Homo sapiens
  source 1..39: mol_type = genomic DNA
tggtagaattctcgcctgccacgcgggaggcccgggttt

SEQ ID NO: 27928 - DNA, 20 bp, Homo sapiens
  source 1..20: mol_type = genomic DNA
tggtagaattcttgcctgcc

SEQ ID NO: 27929 - DNA, 16 bp, Homo sapiens
  source 1..16: mol_type = genomic DNA
tggtagagcatcagac

SEQ ID NO: 27930 - DNA, 17 bp, Homo sapiens
  source 1..17: mol_type = genomic DNA
tggtagagcatcagact

SEQ ID NO: 27931 - DNA, 25 bp, Homo sapiens
  source 1..25: mol_type = genomic DNA
tggtagagcatgggactcttaatcc

SEQ ID NO: 27932 - DNA, 16 bp, Homo sapiens
  source 1..16: mol_type = genomic DNA
tggtagagcatttgac

SEQ ID NO: 27933 - DNA, 17 bp, Homo sapiens
  source 1..17: mol_type = genomic DNA
tggtagagcatttgact

SEQ ID NO: 27934 - DNA, 18 bp, Homo sapiens
  source 1..18: mol_type = genomic DNA
tggtagagcatttgactg

SEQ ID NO: 27935 - DNA, 19 bp, Homo sapiens
  source 1..19: mol_type = genomic DNA
tggtagagcatttgactgc

SEQ ID NO: 27936 - DNA, 20 bp, Homo sapiens
  source 1..20: mol_type = genomic DNA
tggtagagcatttgactgca

SEQ ID NO: 27937 - DNA, 27 bp, Homo sapiens
  source 1..27: mol_type = genomic DNA
tggtagagcatttgactgcagatcaag

SEQ ID NO: 27938 - DNA, 34 bp, Homo sapiens
  source 1..34: mol_type = genomic DNA
tggtagagcatttgactgcagatcaagaggtccc

SEQ ID NO: 27939 - DNA, 16 bp, Homo sapiens
  source 1..16: mol_type = genomic DNA
tggtagagcgcatgct

SEQ ID NO: 27940 - DNA, 17 bp, Homo sapiens
  source 1..17: mol_type = genomic DNA
tggtagagcgcatgctt

SEQ ID NO: 27941 - DNA, 16 bp, Homo sapiens
  source 1..16: mol_type = genomic DNA
tggtagagcgcgtgct

SEQ ID NO: 27942 - DNA, 17 bp, Homo sapiens
  source 1..17: mol_type = genomic DNA
tggtagagcgcgtgctt

SEQ ID NO: 27943 - DNA, 18 bp, Homo sapiens
  source 1..18: mol_type = genomic DNA
tggtagagcgcgtgcttc

SEQ ID NO: 27944 - DNA, 21 bp, Homo sapiens
  source 1..21: mol_type = genomic DNA
tggtagagcgcgtgcttcgca

SEQ ID NO: 27945 - DNA, 16 bp, Homo sapiens
  source 1..16: mol_type = genomic DNA
tggtagagcgctcgct

SEQ ID NO: 27946 - DNA, 16 bp, Homo sapiens
  source 1..16: mol_type = genomic DNA
tggtagagcggaggac

SEQ ID NO: 27947 - DNA, 18 bp, Homo sapiens
  source 1..18: mol_type = genomic DNA
tggtagagcggaggactg

SEQ ID NO: 27948 - DNA, 20 bp, Homo sapiens
  source 1..20: mol_type = genomic DNA
tggtagagcggaggactgta

SEQ ID NO: 27949 - DNA, 18 bp, Homo sapiens
  source 1..18: mol_type = genomic DNA
tggtagtctagtggttag

SEQ ID NO: 27950 - DNA, 23 bp, Homo sapiens
  source 1..23: mol_type = genomic DNA
tggtatagtggtaagcatagctg

SEQ ID NO: 27951 - DNA, 25 bp, Homo sapiens
  source 1..25: mol_type = genomic DNA
tggtatagtggtaagcatagctgcc

SEQ ID NO: 27952 - DNA, 18 bp, Homo sapiens
  source 1..18: mol_type = genomic DNA
tggtatagtggtgagcat

SEQ ID NO: 27953 - DNA, 25 bp, Homo sapiens
  source 1..25: mol_type = genomic DNA
tggtatagtggtgagcatagctgcc

SEQ ID NO: 27954 - DNA, 29 bp, Homo sapiens
  source 1..29: mol_type = genomic DNA
tggtatagtggtgagcatagctgccttcc

SEQ ID NO: 27955 - DNA, 33 bp, Homo sapiens
  source 1..33: mol_type = genomic DNA
tggtatagtggtgagcatagctgccttccaagc

SEQ ID NO: 27956 - DNA, 44 bp, Homo sapiens
  source 1..44: mol_type = genomic DNA
tggtatagtggtgagcatagctgccttccaagcagttgacccgg

SEQ ID NO: 27957 - DNA, 16 bp, Homo sapiens
  source 1..16: mol_type = genomic DNA
tggtatagtggttagc

SEQ ID NO: 27958 - DNA, 21 bp, Homo sapiens
  source 1..21: mol_type = genomic DNA
tggtatagtggttagcatagc

SEQ ID NO: 27959 - DNA, 23 bp, Homo sapiens
  source 1..23: mol_type = genomic DNA
tggtatagtggttagcatagctg

SEQ ID NO: 27960 - DNA, 24 bp, Homo sapiens
  source 1..24: mol_type = genomic DNA
tggtatagtggttagcatagctgc

SEQ ID NO: 27961 - DNA, 44 bp, Homo sapiens
  source 1..44: mol_type = genomic DNA
tggtatagtggttagcatagctgccttccaagcagttgacccgg

SEQ ID NO: 27962 - DNA, 35 bp, Homo sapiens
  source 1..35: mol_type = genomic DNA
tggtatatagtttaaacaaaacgaatgatttcgac

SEQ ID NO: 27963 - DNA, 36 bp, Homo sapiens
  source 1..36: mol_type = genomic DNA
tggtatatagtttaaacaaaacgaatgatttcgact

SEQ ID NO: 27964 - DNA, 37 bp, Homo sapiens
  source 1..37: mol_type = genomic DNA
tggtatatagtttaaacaaaacgaatgatttcgactc

SEQ ID NO: 27965 - DNA, 17 bp, Homo sapiens
  source 1..17: mol_type = genomic DNA
tggtatcatgcaagatt

SEQ ID NO: 27966 - DNA, 18 bp, Homo sapiens
  source 1..18: mol_type = genomic DNA
tggtatcatgcaagattc

SEQ ID NO: 27967 - DNA, 19 bp, Homo sapiens
  source 1..19: mol_type = genomic DNA
tggtatcatgcaagattcc

SEQ ID NO: 27968 - DNA, 21 bp, Homo sapiens
  source 1..21: mol_type = genomic DNA
tggtatcatgcaagattccca

SEQ ID NO: 27969 - DNA, 20 bp, Homo sapiens
  source 1..20: mol_type = genomic DNA
tggtatgattctcgctttgg

SEQ ID NO: 27970 - DNA, 16 bp, Homo sapiens
  source 1..16: mol_type = genomic DNA
tggtcatcacgttcgc

SEQ ID NO: 27971 - DNA, 17 bp, Homo sapiens
  source 1..17: mol_type = genomic DNA
tggtcatcacgttcgcc

SEQ ID NO: 27972 - DNA, 16 bp, Homo sapiens
  source 1..16: mol_type = genomic DNA
tggtcgtggttgtagt

SEQ ID NO: 27973 - DNA, 17 bp, Homo sapiens
  source 1..17: mol_type = genomic DNA
tggtcgtggttgtagtc

SEQ ID NO: 27974 - DNA, 18 bp, Homo sapiens
  source 1..18: mol_type = genomic DNA
tggtcgtggttgtagtcc

SEQ ID NO: 27975 - DNA, 19 bp, Homo sapiens
  source 1..19: mol_type = genomic DNA
tggtcgtggttgtagtccg

SEQ ID NO: 27976 - DNA, 20 bp, Homo sapiens
  source 1..20: mol_type = genomic DNA
tggtcgtggttgtagtccgt

SEQ ID NO: 27977 - DNA, 21 bp, Homo sapiens
  source 1..21: mol_type = genomic DNA
tggtcgtggttgtagtccgtg

SEQ ID NO: 27978 - DNA, 22 bp, Homo sapiens
  source 1..22: mol_type = genomic DNA
tggtcgtggttgtagtccgtgc

SEQ ID NO: 27979 - DNA, 23 bp, Homo sapiens
  source 1..23: mol_type = genomic DNA
tggtcgtggttgtagtccgtgcg

SEQ ID NO: 27980 - DNA, 24 bp, Homo sapiens
  source 1..24: mol_type = genomic DNA
tggtcgtggttgtagtccgtgcga

SEQ ID NO: 27981 - DNA, 25 bp, Homo sapiens
  source 1..25: mol_type = genomic DNA
tggtcgtggttgtagtccgtgcgag

SEQ ID NO: 27982 - DNA, 26 bp, Homo sapiens
  source 1..26: mol_type = genomic DNA
tggtcgtggttgtagtccgtgcgaga

SEQ ID NO: 27983 - DNA, 27 bp, Homo sapiens
  source 1..27: mol_type = genomic DNA
tggtcgtggttgtagtccgtgcgagaa

SEQ ID NO: 27984 - DNA, 28 bp, Homo sapiens
  source 1..28: mol_type = genomic DNA
tggtcgtggttgtagtccgtgcgagaat

SEQ ID NO: 27985 - DNA, 29 bp, Homo sapiens
  source 1..29: mol_type = genomic DNA
tggtcgtggttgtagtccgtgcgagaata

SEQ ID NO: 27986 - DNA, 30 bp, Homo sapiens
  source 1..30: mol_type = genomic DNA
tggtcgtggttgtagtccgtgcgagaatac

SEQ ID NO: 27987 - DNA, 31 bp, Homo sapiens
  source 1..31: mol_type = genomic DNA
tggtcgtggttgtagtccgtgcgagaatacc

SEQ ID NO: 27988 - DNA, 32 bp, Homo sapiens
  source 1..32: mol_type = genomic DNA
tggtcgtggttgtagtccgtgcgagaatacca

SEQ ID NO: 27989 - DNA, 16 bp, Homo sapiens
  source 1..16: mol_type = genomic DNA
tggtctaaggcgccag

SEQ ID NO: 27990 - DNA, 17 bp, Homo sapiens
  source 1..17: mol_type = genomic DNA
tggtctaaggcgccaga

SEQ ID NO: 27991 - DNA, 20 bp, Homo sapiens
  source 1..20: mol_type = genomic DNA
tggtctaaggcgccagactc

SEQ ID NO: 27992 - DNA, 17 bp, Homo sapiens
  source 1..17: mol_type = genomic DNA
tggtctaaggcgctgga

SEQ ID NO: 27993 - DNA, 18 bp, Homo sapiens
  source 1..18: mol_type = genomic DNA
tggtctagcggttaggat

SEQ ID NO: 27994 - DNA, 19 bp, Homo sapiens
  source 1..19: mol_type = genomic DNA
tggtctagcggttaggatt

SEQ ID NO: 27995 - DNA, 20 bp, Homo sapiens
  source 1..20: mol_type = genomic DNA
tggtctagcggttaggattc

SEQ ID NO: 27996 - DNA, 21 bp, Homo sapiens
  source 1..21: mol_type = genomic DNA
tggtctagcggttaggattcc

SEQ ID NO: 27997 - DNA, 22 bp, Homo sapiens
  source 1..22: mol_type = genomic DNA
tggtctagcggttaggattcct

SEQ ID NO: 27998 - DNA, 23 bp, Homo sapiens
  source 1..23: mol_type = genomic DNA
tggtctagcggttaggattcctg

SEQ ID NO: 27999 - DNA, 24 bp, Homo sapiens
  source 1..24: mol_type = genomic DNA
tggtctagcggttaggattcctgg

SEQ ID NO: 28000 - DNA, 25 bp, Homo sapiens
  source 1..25: mol_type = genomic DNA
tggtctagcggttaggattcctggt

SEQ ID NO: 28001 - DNA, 26 bp, Homo sapiens
  source 1..26: mol_type = genomic DNA
tggtctagcggttaggattcctggtt

SEQ ID NO: 28002 - DNA, 27 bp, Homo sapiens
  source 1..27: mol_type = genomic DNA
tggtctagcggttaggattcctggttt

SEQ ID NO: 28003 - DNA, 28 bp, Homo sapiens
  source 1..28: mol_type = genomic DNA
tggtctagcggttaggattcctggtttt

SEQ ID NO: 28004 - DNA, 29 bp, Homo sapiens
  source 1..29: mol_type = genomic DNA
tggtctagcggttaggattcctggttttc

SEQ ID NO: 28005 - DNA, 30 bp, Homo sapiens
  source 1..30: mol_type = genomic DNA
tggtctagcggttaggattcctggttttca

SEQ ID NO: 28006 - DNA, 33 bp, Homo sapiens
  source 1..33: mol_type = genomic DNA
tggtctagcggttaggattcctggttttcaccc

SEQ ID NO: 28007 - DNA, 34 bp, Homo sapiens
  source 1..34: mol_type = genomic DNA
tggtctagcggttaggattcctggttttcaccca

SEQ ID NO: 28008 - DNA, 42 bp, Homo sapiens
  source 1..42: mol_type = genomic DNA
tggtctagcggttaggattcctggttttcacccaggtggccc

SEQ ID NO: 28009 - DNA, 44 bp, Homo sapiens
  source 1..44: mol_type = genomic DNA
tggtctagcggttaggattcctggttttcacccaggtggcccgg

SEQ ID NO: 28010 - DNA, 16 bp, Homo sapiens
  source 1..16: mol_type = genomic DNA
tggtctaggggtatga

SEQ ID NO: 28011 - DNA, 19 bp, Homo sapiens
  source 1..19: mol_type = genomic DNA
tggtctaggggtatgattc

SEQ ID NO: 28012 - DNA, 20 bp, Homo sapiens
  source 1..20: mol_type = genomic DNA
tggtctaggggtatgattct

SEQ ID NO: 28013 - DNA, 21 bp, Homo sapiens
  source 1..21: mol_type = genomic DNA
tggtctaggggtatgattctc

SEQ ID NO: 28014 - DNA, 23 bp, Homo sapiens
  source 1..23: mol_type = genomic DNA
tggtctaggggtatgattctcgc

SEQ ID NO: 28015 - DNA, 24 bp, Homo sapiens
  source 1..24: mol_type = genomic DNA
tggtctaggggtatgattctcgct

SEQ ID NO: 28016 - DNA, 25 bp, Homo sapiens
  source 1..25: mol_type = genomic DNA
tggtctaggggtatgattctcgctt

SEQ ID NO: 28017 - DNA, 24 bp, Homo sapiens
  source 1..24: mol_type = genomic DNA
tggtctaggggtatgattctcggt

SEQ ID NO: 28018 - DNA, 28 bp, Homo sapiens
  source 1..28: mol_type = genomic DNA
tggtctaggggtatgattctcggtttgg

SEQ ID NO: 28019 - DNA, 18 bp, Homo sapiens
  source 1..18: mol_type = genomic DNA
tggtctagtggctaggat

SEQ ID NO: 28020 - DNA, 21 bp, Homo sapiens
  source 1..21: mol_type = genomic DNA
tggtctagtggctaggattcg

SEQ ID NO: 28021 - DNA, 23 bp, Homo sapiens
  source 1..23: mol_type = genomic DNA
tggtctagtggctaggattcggc

SEQ ID NO: 28022 - DNA, 24 bp, Homo sapiens
  source 1..24: mol_type = genomic DNA
tggtctagtggctaggattcggcg

SEQ ID NO: 28023 - DNA, 25 bp, Homo sapiens
  source 1..25: mol_type = genomic DNA
tggtctagtggctaggattcggcgc

SEQ ID NO: 28024 - DNA, 26 bp, Homo sapiens
  source 1..26: mol_type = genomic DNA
tggtctagtggctaggattcggcgct

SEQ ID NO: 28025 - DNA, 29 bp, Homo sapiens
  source 1..29: mol_type = genomic DNA
tggtctagtggctaggattcggcgctttc

SEQ ID NO: 28026 - DNA, 17 bp, Homo sapiens
  source 1..17: mol_type = genomic DNA
tggtctagtggttagga

SEQ ID NO: 28027 - DNA, 18 bp, Homo sapiens
  source 1..18: mol_type = genomic DNA
tggtctagtggttaggat

SEQ ID NO: 28028 - DNA, 19 bp, Homo sapiens
  source 1..19: mol_type = genomic DNA
tggtctagtggttaggatt

SEQ ID NO: 28029 - DNA, 20 bp, Homo sapiens
  source 1..20: mol_type = genomic DNA
tggtctagtggttaggattc

SEQ ID NO: 28030 - DNA, 21 bp, Homo sapiens
  source 1..21: mol_type = genomic DNA
tggtctagtggttaggattcg

SEQ ID NO: 28031 - DNA, 22 bp, Homo sapiens
  source 1..22: mol_type = genomic DNA
tggtctagtggttaggattcgg

SEQ ID NO: 28032 - DNA, 23 bp, Homo sapiens
  source 1..23: mol_type = genomic DNA
tggtctagtggttaggattcggc

SEQ ID NO: 28033 - DNA, 24 bp, Homo sapiens
  source 1..24: mol_type = genomic DNA
tggtctagtggttaggattcggcg

SEQ ID NO: 28034 - DNA, 25 bp, Homo sapiens
  source 1..25: mol_type = genomic DNA
tggtctagtggttaggattcggcgc

SEQ ID NO: 28035 - DNA, 26 bp, Homo sapiens
  source 1..26: mol_type = genomic DNA
tggtctagtggttaggattcggcgct

SEQ ID NO: 28036 - DNA, 27 bp, Homo sapiens
  source 1..27: mol_type = genomic DNA
tggtctagtggttaggattcggcgctc

SEQ ID NO: 28037 - DNA, 28 bp, Homo sapiens
  source 1..28: mol_type = genomic DNA
tggtctagtggttaggattcggcgctct

SEQ ID NO: 28038 - DNA, 29 bp, Homo sapiens
  source 1..29: mol_type = genomic DNA
tggtctagtggttaggattcggcgctctc

SEQ ID NO: 28039 - DNA, 30 bp, Homo sapiens
  source 1..30: mol_type = genomic DNA
tggtctagtggttaggattcggcgctctca

SEQ ID NO: 28040 - DNA, 32 bp, Homo sapiens
  source 1..32: mol_type = genomic DNA
tggtctagtggttaggattcggcgctctcacc

SEQ ID NO: 28041 - DNA, 35 bp, Homo sapiens
  source 1..35: mol_type = genomic DNA
tggtctagtggttaggattcggcgctctcaccgcc

SEQ ID NO: 28042 - DNA, 41 bp, Homo sapiens
  source 1..41: mol_type = genomic DNA
tggtctagtggttaggattcggcgctctcaccgccgcggcc

SEQ ID NO: 28043 - DNA, 42 bp, Homo sapiens
  source 1..42: mol_type = genomic DNA
tggtctagtggttaggattcggcgctctcaccgccgcggccc

SEQ ID NO: 28044 - DNA, 44 bp, Homo sapiens
  source 1..44: mol_type = genomic DNA
tggtctagtggttaggattcggcgctctcaccgccgcggcccgg

SEQ ID NO: 28045 - DNA, 45 bp, Homo sapiens
  source 1..45: mol_type = genomic DNA
tggtctagtggttaggattcggcgctctcaccgccgcggcccggg

SEQ ID NO: 28046 - DNA, 46 bp, Homo sapiens
  source 1..46: mol_type = genomic DNA
tggtctagtggttaggattcggcgctctcaccgccgcggcccgggt

SEQ ID NO: 28047 - DNA, 47 bp, Homo sapiens
  source 1..47: mol_type = genomic DNA
tggtctagtggttaggattcggcgctctcaccgccgcggcccgggtt

SEQ ID NO: 28048 - DNA, 48 bp, Homo sapiens
  source 1..48: mol_type = genomic DNA
tggtctagtggttaggattcggcgctctcaccgccgcggcccgggttc

SEQ ID NO: 28049 - DNA, 23 bp, Homo sapiens
  source 1..23: mol_type = genomic DNA
tggtctccaatggaggcgtgggt

SEQ ID NO: 28050 - DNA, 24 bp, Homo sapiens
  source 1..24: mol_type = genomic DNA
tggtctccaatggaggcgtgggtt

SEQ ID NO: 28051 - DNA, 24 bp, Homo sapiens
  source 1..24: mol_type = genomic DNA
tggtctccggatggaggcgtgggt

SEQ ID NO: 28052 - DNA, 25 bp, Homo sapiens
  source 1..25: mol_type = genomic DNA
tggtctccggatggaggcgtgggtt

SEQ ID NO: 28053 - DNA, 45 bp, Homo sapiens
  source 1..45: mol_type = genomic DNA
tggtctccggatggaggcgtgggttcgaatcccacttctgacacc

SEQ ID NO: 28054 - DNA, 16 bp, Homo sapiens
  source 1..16: mol_type = genomic DNA
tggtgagcactctgga

SEQ ID NO: 28055 - DNA, 17 bp, Homo sapiens
  source 1..17: mol_type = genomic DNA
tggtgagcactctggac

SEQ ID NO: 28056 - DNA, 18 bp, Homo sapiens
  source 1..18: mol_type = genomic DNA
tggtgagcactctggact

SEQ ID NO: 28057 - DNA, 21 bp, Homo sapiens
  source 1..21: mol_type = genomic DNA
tggtgagcactctggactctg

SEQ ID NO: 28058 - DNA, 23 bp, Homo sapiens
  source 1..23: mol_type = genomic DNA
tggtgagcactctggactctgaa

SEQ ID NO: 28059 - DNA, 24 bp, Homo sapiens
  source 1..24: mol_type = genomic DNA
tggtgagcactctggactctgaat

SEQ ID NO: 28060 - DNA, 25 bp, Homo sapiens
  source 1..25: mol_type = genomic DNA
tggtgagcactctggactctgaatc

SEQ ID NO: 28061 - DNA, 26 bp, Homo sapiens
  source 1..26: mol_type = genomic DNA
tggtgagcactctggactctgaatcc

SEQ ID NO: 28062 - DNA, 27 bp, Homo sapiens
  source 1..27: mol_type = genomic DNA
tggtgagcactctggactctgaatcca

SEQ ID NO: 28063 - DNA, 28 bp, Homo sapiens
  source 1..28: mol_type = genomic DNA
tggtgagcactctggactctgaatccag

SEQ ID NO: 28064 - DNA, 29 bp, Homo sapiens
  source 1..29: mol_type = genomic DNA
tggtgagcactctggactctgaatccagc

SEQ ID NO: 28065 - DNA, 30 bp, Homo sapiens
  source 1..30: mol_type = genomic DNA
tggtgagcactctggactctgaatccagcg

SEQ ID NO: 28066 - DNA, 38 bp, Homo sapiens
  source 1..38: mol_type = genomic DNA
tggtgagcactctggactctgaatccagcgatccgagt

SEQ ID NO: 28067 - DNA, 41 bp, Homo sapiens
  source 1..41: mol_type = genomic DNA
tggtgagcactctggactctgaatccagcgatccgagttcg

SEQ ID NO: 28068 - DNA, 43 bp, Homo sapiens
  source 1..43: mol_type = genomic DNA
tggtgagcactctggactctgaatccagcgatccgagttcgag

SEQ ID NO: 28069 - DNA, 16 bp, Homo sapiens
  source 1..16: mol_type = genomic DNA
tggtgagcatagctgc

SEQ ID NO: 28070 - DNA, 17 bp, Homo sapiens
  source 1..17: mol_type = genomic DNA
tggtgagcatagctgcc

SEQ ID NO: 28071 - DNA, 16 bp, Homo sapiens
  source 1..16: mol_type = genomic DNA
tggtgagtatccccgc

SEQ ID NO: 28072 - DNA, 18 bp, Homo sapiens
  source 1..18: mol_type = genomic DNA
tggtgagtatccccgcct

SEQ ID NO: 28073 - DNA, 20 bp, Homo sapiens
  source 1..20: mol_type = genomic DNA
tggtgagtatccccgcctgt

SEQ ID NO: 28074 - DNA, 21 bp, Homo sapiens
  source 1..21: mol_type = genomic DNA
tggtgagtatccccgcctgtc

SEQ ID NO: 28075 - DNA, 20 bp, Homo sapiens
  source 1..20: mol_type = genomic DNA
tggtgcaactccaaataaaa

SEQ ID NO: 28076 - DNA, 21 bp, Homo sapiens
  source 1..21: mol_type = genomic DNA
tggtgcaactccaaataaaag

SEQ ID NO: 28077 - DNA, 22 bp, Homo sapiens
  source 1..22: mol_type = genomic DNA
tggtgcaactccaaataaaagt

SEQ ID NO: 28078 - DNA, 23 bp, Homo sapiens
  source 1..23: mol_type = genomic DNA
tggtgcaactccaaataaaagta

SEQ ID NO: 28079 - DNA, 24 bp, Homo sapiens
  source 1..24: mol_type = genomic DNA
tggtgcaactccaaataaaagtac

SEQ ID NO: 28080 - DNA, 25 bp, Homo sapiens
  source 1..25: mol_type = genomic DNA
tggtgcaactccaaataaaagtacc

SEQ ID NO: 28081 - DNA, 26 bp, Homo sapiens
  source 1..26: mol_type = genomic DNA
tggtgcaactccaaataaaagtacca

SEQ ID NO: 28082 - DNA, 29 bp, Homo sapiens
  source 1..29: mol_type = genomic DNA
tggtgctaataacgccaaggtcgcgggtt

SEQ ID NO: 28083 - DNA, 16 bp, Homo sapiens
  source 1..16: mol_type = genomic DNA
tggtggagttaaagac

SEQ ID NO: 28084 - DNA, 17 bp, Homo sapiens
  source 1..17: mol_type = genomic DNA
tggtggagttaaagact

SEQ ID NO: 28085 - DNA, 18 bp, Homo sapiens
  source 1..18: mol_type = genomic DNA
tggtggagttaaagactt

SEQ ID NO: 28086 - DNA, 19 bp, Homo sapiens
  source 1..19: mol_type = genomic DNA
tggtggagttaaagacttt

SEQ ID NO: 28087 - DNA, 20 bp, Homo sapiens
  source 1..20: mol_type = genomic DNA
tggtggagttaaagactttt

SEQ ID NO: 28088 - DNA, 21 bp, Homo sapiens
  source 1..21: mol_type = genomic DNA
tggtggagttaaagacttttt

SEQ ID NO: 28089 - DNA, 24 bp, Homo sapiens
  source 1..24: mol_type = genomic DNA
tggtggagttaaagactttttctc

SEQ ID NO: 28090 - DNA, 25 bp, Homo sapiens
  source 1..25: mol_type = genomic DNA
tggtggagttaaagactttttctct

SEQ ID NO: 28091 - DNA, 26 bp, Homo sapiens
  source 1..26: mol_type = genomic DNA
tggtggagttaaagactttttctctg

SEQ ID NO: 28092 - DNA, 27 bp, Homo sapiens
  source 1..27: mol_type = genomic DNA
tggtggagttaaagactttttctctga

SEQ ID NO: 28093 - DNA, 28 bp, Homo sapiens
  source 1..28: mol_type = genomic DNA
tggtggagttaaagactttttctctgac

SEQ ID NO: 28094 - DNA, 29 bp, Homo sapiens
  source 1..29: mol_type = genomic DNA
tggtggagttaaagactttttctctgacc

SEQ ID NO: 28095 - DNA, 30 bp, Homo sapiens
  source 1..30: mol_type = genomic DNA
tggtggagttaaagactttttctctgacca

SEQ ID NO: 28096 - DNA, 26 bp, Homo sapiens
  source 1..26: mol_type = genomic DNA
tggtggtatagtggtaagcatagctg

SEQ ID NO: 28097 - DNA, 24 bp, Homo sapiens
  source 1..24: mol_type = genomic DNA
tggtggtatagtggtgagcatagc

SEQ ID NO: 28098 - DNA, 25 bp, Homo sapiens
  source 1..25: mol_type = genomic DNA
tggtggtatagtggtgagcatagct

SEQ ID NO: 28099 - DNA, 27 bp, Homo sapiens
  source 1..27: mol_type = genomic DNA
tggtggtatagtggtgagcatagctgc

SEQ ID NO: 28100 - DNA, 28 bp, Homo sapiens
  source 1..28: mol_type = genomic DNA
tggtggtatagtggtgagcatagctgcc

SEQ ID NO: 28101 - DNA, 47 bp, Homo sapiens
  source 1..47: mol_type = genomic DNA
tggtggtatagtggtgagcatagctgccttccaagcagttgacccgg

SEQ ID NO: 28102 - DNA, 24 bp, Homo sapiens
  source 1..24: mol_type = genomic DNA
tggtggtatagtggttagcatagc

SEQ ID NO: 28103 - DNA, 25 bp, Homo sapiens
  source 1..25: mol_type = genomic DNA
tggtggtatagtggttagcatagct

SEQ ID NO: 28104 - DNA, 27 bp, Homo sapiens
  source 1..27: mol_type = genomic DNA
tggtggtatagtggttagcatagctgc

SEQ ID NO: 28105 - DNA, 28 bp, Homo sapiens
  source 1..28: mol_type = genomic DNA
tggtggtatagtggttagcatagctgcc

SEQ ID NO: 28106 - DNA, 16 bp, Homo sapiens
  source 1..16: mol_type = genomic DNA
tggtggtctagtggct

SEQ ID NO: 28107 - DNA, 21 bp, Homo sapiens
  source 1..21: mol_type = genomic DNA
tggtggtctagtggctaggat

SEQ ID NO: 28108 - DNA, 22 bp, Homo sapiens
  source 1..22: mol_type = genomic DNA
tggtggtctagtggctaggatt

SEQ ID NO: 28109 - DNA, 23 bp, Homo sapiens
  source 1..23: mol_type = genomic DNA
tggtggtctagtggctaggattc

SEQ ID NO: 28110 - DNA, 24 bp, Homo sapiens
  source 1..24: mol_type = genomic DNA
tggtggtctagtggctaggattcg

SEQ ID NO: 28111 - DNA, 25 bp, Homo sapiens
  source 1..25: mol_type = genomic DNA
tggtggtctagtggctaggattcgg

SEQ ID NO: 28112 - DNA, 26 bp, Homo sapiens
  source 1..26: mol_type = genomic DNA
tggtggtctagtggctaggattcggc

SEQ ID NO: 28113 - DNA, 27 bp, Homo sapiens
  source 1..27: mol_type = genomic DNA
tggtggtctagtggctaggattcggcg

SEQ ID NO: 28114 - DNA, 28 bp, Homo sapiens
  source 1..28: mol_type = genomic DNA
tggtggtctagtggctaggattcggcgc

SEQ ID NO: 28115 - DNA, 29 bp, Homo sapiens
  source 1..29: mol_type = genomic DNA
tggtggtctagtggctaggattcggcgct

SEQ ID NO: 28116 - DNA, 30 bp, Homo sapiens
  source 1..30: mol_type = genomic DNA
tggtggtctagtggctaggattcggcgctt

SEQ ID NO: 28117 - DNA, 31 bp, Homo sapiens
  source 1..31: mol_type = genomic DNA
tggtggtctagtggctaggattcggcgcttt

SEQ ID NO: 28118 - DNA, 32 bp, Homo sapiens
  source 1..32: mol_type = genomic DNA
tggtggtctagtggctaggattcggcgctttc

SEQ ID NO: 28119 - DNA, 33 bp, Homo sapiens
  source 1..33: mol_type = genomic DNA
tggtggtctagtggctaggattcggcgctttca

SEQ ID NO: 28120 - DNA, 35 bp, Homo sapiens
  source 1..35: mol_type = genomic DNA
tggtggtctagtggctaggattcggcgctttcacc

SEQ ID NO: 28121 - DNA, 18 bp, Homo sapiens
  source 1..18: mol_type = genomic DNA
tggtggtctagtggttag

SEQ ID NO: 28122 - DNA, 19 bp, Homo sapiens
  source 1..19: mol_type = genomic DNA
tggtggtctagtggttagg

SEQ ID NO: 28123 - DNA, 20 bp, Homo sapiens
  source 1..20: mol_type = genomic DNA
tggtggtctagtggttagga

SEQ ID NO: 28124 - DNA, 21 bp, Homo sapiens
  source 1..21: mol_type = genomic DNA
tggtggtctagtggttaggat

SEQ ID NO: 28125 - DNA, 22 bp, Homo sapiens
  source 1..22: mol_type = genomic DNA
tggtggtctagtggttaggatt

SEQ ID NO: 28126 - DNA, 23 bp, Homo sapiens
  source 1..23: mol_type = genomic DNA
tggtggtctagtggttaggattc

SEQ ID NO: 28127 - DNA, 24 bp, Homo sapiens
  source 1..24: mol_type = genomic DNA
tggtggtctagtggttaggattcg

SEQ ID NO: 28128 - DNA, 25 bp, Homo sapiens
  source 1..25: mol_type = genomic DNA
tggtggtctagtggttaggattcgg

SEQ ID NO: 28129 - DNA, 26 bp, Homo sapiens
  source 1..26: mol_type = genomic DNA
tggtggtctagtggttaggattcggc

SEQ ID NO: 28130 - DNA, 27 bp, Homo sapiens
  source 1..27: mol_type = genomic DNA
tggtggtctagtggttaggattcggcg

SEQ ID NO: 28131 - DNA, 28 bp, Homo sapiens
  source 1..28: mol_type = genomic DNA
tggtggtctagtggttaggattcggcgc

SEQ ID NO: 28132 - DNA, 29 bp, Homo sapiens
  source 1..29: mol_type = genomic DNA
tggtggtctagtggttaggattcggcgct

SEQ ID NO: 28133 - DNA, 30 bp, Homo sapiens
  source 1..30: mol_type = genomic DNA
tggtggtctagtggttaggattcggcgctc

SEQ ID NO: 28134 - DNA, 31 bp, Homo sapiens
  source 1..31: mol_type = genomic DNA
tggtggtctagtggttaggattcggcgctct

SEQ ID NO: 28135 - DNA, 32 bp, Homo sapiens
  source 1..32: mol_type = genomic DNA
tggtggtctagtggttaggattcggcgctctc

SEQ ID NO: 28136 - DNA, 33 bp, Homo sapiens
  source 1..33: mol_type = genomic DNA
tggtggtctagtggttaggattcggcgctctca

SEQ ID NO: 28137 - DNA, 34 bp, Homo sapiens
  source 1..34: mol_type = genomic DNA
tggtggtctagtggttaggattcggcgctctcac

SEQ ID NO: 28138 - DNA, 35 bp, Homo sapiens
  source 1..35: mol_type = genomic DNA
tggtggtctagtggttaggattcggcgctctcacc

SEQ ID NO: 28139 - DNA, 36 bp, Homo sapiens
  source 1..36: mol_type = genomic DNA
tggtggtctagtggttaggattcggcgctctcaccg

SEQ ID NO: 28140 - DNA, 38 bp, Homo sapiens
  source 1..38: mol_type = genomic DNA
tggtggtctagtggttaggattcggcgctctcaccgcc

SEQ ID NO: 28141 - DNA, 45 bp, Homo sapiens
  source 1..45: mol_type = genomic DNA
tggtggtctagtggttaggattcggcgctctcaccgccgcggccc

SEQ ID NO: 28142 - DNA, 47 bp, Homo sapiens
  source 1..47: mol_type = genomic DNA
tggtggtctagtggttaggattcggcgctctcaccgccgcggcccgg

SEQ ID NO: 28143 - DNA, 28 bp, Homo sapiens
  source 1..28: mol_type = genomic DNA
tggtggttcaatggtagaattctcgcct

SEQ ID NO: 28144 - DNA, 16 bp, Homo sapiens
  source 1..16: mol_type = genomic DNA
tggtggttcagtggta

SEQ ID NO: 28145 - DNA, 17 bp, Homo sapiens
  source 1..17: mol_type = genomic DNA
tggtggttcagtggtag

SEQ ID NO: 28146 - DNA, 19 bp, Homo sapiens
  source 1..19: mol_type = genomic DNA
tggtggttcagtggtagaa

SEQ ID NO: 28147 - DNA, 20 bp, Homo sapiens
  source 1..20: mol_type = genomic DNA
tggtggttcagtggtagaat

SEQ ID NO: 28148 - DNA, 21 bp, Homo sapiens
  source 1..21: mol_type = genomic DNA
tggtggttcagtggtagaatt

SEQ ID NO: 28149 - DNA, 22 bp, Homo sapiens
  source 1..22: mol_type = genomic DNA
tggtggttcagtggtagaattc

SEQ ID NO: 28150 - DNA, 23 bp, Homo sapiens
  source 1..23: mol_type = genomic DNA
tggtggttcagtggtagaattct

SEQ ID NO: 28151 - DNA, 24 bp, Homo sapiens
  source 1..24: mol_type = genomic DNA
tggtggttcagtggtagaattctc

SEQ ID NO: 28152 - DNA, 25 bp, Homo sapiens
  source 1..25: mol_type = genomic DNA
tggtggttcagtggtagaattctcg

SEQ ID NO: 28153 - DNA, 26 bp, Homo sapiens
  source 1..26: mol_type = genomic DNA
tggtggttcagtggtagaattctcgc

SEQ ID NO: 28154 - DNA, 27 bp, Homo sapiens
  source 1..27: mol_type = genomic DNA
tggtggttcagtggtagaattctcgcc

SEQ ID NO: 28155 - DNA, 28 bp, Homo sapiens
  source 1..28: mol_type = genomic DNA
tggtggttcagtggtagaattctcgcct

SEQ ID NO: 28156 - DNA, 29 bp, Homo sapiens
  source 1..29: mol_type = genomic DNA
tggtggttcagtggtagaattctcgcctc

SEQ ID NO: 28157 - DNA, 31 bp, Homo sapiens
  source 1..31: mol_type = genomic DNA
tggtggttcagtggtagaattctcgcctccc

SEQ ID NO: 28158 - DNA, 29 bp, Homo sapiens
  source 1..29: mol_type = genomic DNA
tggtggttcagtggtagaattctcgcctg

SEQ ID NO: 28159 - DNA, 30 bp, Homo sapiens
  source 1..30: mol_type = genomic DNA
tggtggttcagtggtagaattctcgcctgc

SEQ ID NO: 28160 - DNA, 31 bp, Homo sapiens
  source 1..31: mol_type = genomic DNA
tggtggttcagtggtagaattctcgcctgcc

SEQ ID NO: 28161 - DNA, 32 bp, Homo sapiens
  source 1..32: mol_type = genomic DNA
tggtggttcagtggtagaattctcgcctgcca

SEQ ID NO: 28162 - DNA, 44 bp, Homo sapiens
  source 1..44: mol_type = genomic DNA
tggtggttcagtggtagaattctcgcctgccacgcgggaggccc

SEQ ID NO: 28163 - DNA, 46 bp, Homo sapiens
  source 1..46: mol_type = genomic DNA
tggtggttcagtggtagaattctcgcctgccacgcgggaggcccgg

SEQ ID NO: 28164 - DNA, 25 bp, Homo sapiens
  source 1..25: mol_type = genomic DNA
tggtggttcgagcccacccagggac

SEQ ID NO: 28165 - DNA, 26 bp, Homo sapiens
  source 1..26: mol_type = genomic DNA
tggtggttcgagcccacccagggacg

SEQ ID NO: 28166 - DNA, 27 bp, Homo sapiens
  source 1..27: mol_type = genomic DNA
tggtggttcgagcccacccagggacgc

SEQ ID NO: 28167 - DNA, 28 bp, Homo sapiens
  source 1..28: mol_type = genomic DNA
tggtggttcgagcccacccagggacgcc

SEQ ID NO: 28168 - DNA, 29 bp, Homo sapiens
  source 1..29: mol_type = genomic DNA
tggtggttcgagcccacccagggacgcca

SEQ ID NO: 28169 - DNA, 25 bp, Homo sapiens
  source 1..25: mol_type = genomic DNA
tggtggttcgatcccacccagggac

SEQ ID NO: 28170 - DNA, 26 bp, Homo sapiens
  source 1..26: mol_type = genomic DNA
tggtggttcgatcccacccagggacg

SEQ ID NO: 28171 - DNA, 28 bp, Homo sapiens
  source 1..28: mol_type = genomic DNA
tggtggttcgatcccacccagggacgcc

SEQ ID NO: 28172 - DNA, 26 bp, Homo sapiens
  source 1..26: mol_type = genomic DNA
tggtgtaatggtaagcactctggact

SEQ ID NO: 28173 - DNA, 16 bp, Homo sapiens
  source 1..16: mol_type = genomic DNA
tggtgtaatggtgagc

SEQ ID NO: 28174 - DNA, 26 bp, Homo sapiens
  source 1..26: mol_type = genomic DNA
tggtgtaatggtgagcactctggact

SEQ ID NO: 28175 - DNA, 27 bp, Homo sapiens
  source 1..27: mol_type = genomic DNA
tggtgtaatggtgagcactctggactc

SEQ ID NO: 28176 - DNA, 28 bp, Homo sapiens
  source 1..28: mol_type = genomic DNA
tggtgtaatggtgagcactctggactct

SEQ ID NO: 28177 - DNA, 31 bp, Homo sapiens
  source 1..31: mol_type = genomic DNA
tggtgtaatggtgagcactctggactctgaa

SEQ ID NO: 28178 - DNA, 33 bp, Homo sapiens
  source 1..33: mol_type = genomic DNA
tggtgtaatggtgagcactctggactctgaatc

SEQ ID NO: 28179 - DNA, 34 bp, Homo sapiens
  source 1..34: mol_type = genomic DNA
tggtgtaatggtgagcactctggactctgaatcc

SEQ ID NO: 28180 - DNA, 45 bp, Homo sapiens
  source 1..45: mol_type = genomic DNA
tggtgtaatggtgagcactctggactctgaatccagcgatccgag

SEQ ID NO: 28181 - DNA, 16 bp, Homo sapiens
  source 1..16: mol_type = genomic DNA
tggtgtaatggttagc

SEQ ID NO: 28182 - DNA, 17 bp, Homo sapiens
  source 1..17: mol_type = genomic DNA
tggtgtaatggttagca

SEQ ID NO: 28183 - DNA, 20 bp, Homo sapiens
  source 1..20: mol_type = genomic DNA
tggtgtaatggttagcactc

SEQ ID NO: 28184 - DNA, 21 bp, Homo sapiens
  source 1..21: mol_type = genomic DNA
tggtgtaatggttagcactct

SEQ ID NO: 28185 - DNA, 22 bp, Homo sapiens
  source 1..22: mol_type = genomic DNA
tggtgtaatggttagcactctg

SEQ ID NO: 28186 - DNA, 23 bp, Homo sapiens
  source 1..23: mol_type = genomic DNA
tggtgtaatggttagcactctgg

SEQ ID NO: 28187 - DNA, 24 bp, Homo sapiens
  source 1..24: mol_type = genomic DNA
tggtgtaatggttagcactctgga

SEQ ID NO: 28188 - DNA, 25 bp, Homo sapiens
  source 1..25: mol_type = genomic DNA
tggtgtaatggttagcactctggac

SEQ ID NO: 28189 - DNA, 26 bp, Homo sapiens
  source 1..26: mol_type = genomic DNA
tggtgtaatggttagcactctggact

SEQ ID NO: 28190 - DNA, 27 bp, Homo sapiens
  source 1..27: mol_type = genomic DNA
tggtgtaatggttagcactctggactc

SEQ ID NO: 28191 - DNA, 28 bp, Homo sapiens
  source 1..28: mol_type = genomic DNA
tggtgtaatggttagcactctggactct

SEQ ID NO: 28192 - DNA, 29 bp, Homo sapiens
  source 1..29: mol_type = genomic DNA
tggtgtaatggttagcactctggactctg

SEQ ID NO: 28193 - DNA, 30 bp, Homo sapiens
  source 1..30: mol_type = genomic DNA
tggtgtaatggttagcactctggactctga

SEQ ID NO: 28194 - DNA, 31 bp, Homo sapiens
  source 1..31: mol_type = genomic DNA
tggtgtaatggttagcactctggactctgaa

SEQ ID NO: 28195 - DNA, 33 bp, Homo sapiens
  source 1..33: mol_type = genomic DNA
tggtgtaatggttagcactctggactctgaatc

SEQ ID NO: 28196 - DNA, 34 bp, Homo sapiens
  source 1..34: mol_type = genomic DNA
tggtgtaatggttagcactctggactctgaatcc

SEQ ID NO: 28197 - DNA, 35 bp, Homo sapiens
  source 1..35: mol_type = genomic DNA
tggtgtaatggttagcactctggactctgaatcca

SEQ ID NO: 28198 - DNA, 44 bp, Homo sapiens
  source 1..44: mol_type = genomic DNA
tggtgtaatggttagcactctggactctgaatccagcgatccga

SEQ ID NO: 28199 - DNA, 45 bp, Homo sapiens
  source 1..45: mol_type = genomic DNA
tggtgtaatggttagcactctggactctgaatccagcgatccgag

SEQ ID NO: 28200 - DNA, 46 bp, Homo sapiens
  source 1..46: mol_type = genomic DNA
tggtgtaatggttagcactctggactctgaatccagcgatccgagt

SEQ ID NO: 28201 - DNA, 47 bp, Homo sapiens
  source 1..47: mol_type = genomic DNA
tggtgtaatggttagcactctggactctgaatccagcgatccgagtt

SEQ ID NO: 28202 - DNA, 29 bp, Homo sapiens
  source 1..29: mol_type = genomic DNA
tggtgtaatggttagcactctggactttg

SEQ ID NO: 28203 - DNA, 32 bp, Homo sapiens
  source 1..32: mol_type = genomic DNA
tggtgtaatggttagcactctggactttgaat

SEQ ID NO: 28204 - DNA, 33 bp, Homo sapiens
  source 1..33: mol_type = genomic DNA
tggtgtaatggttagcactctggactttgaatc

SEQ ID NO: 28205 - DNA, 16 bp, Homo sapiens
  source 1..16: mol_type = genomic DNA
tggtgtagtggtatca

SEQ ID NO: 28206 - DNA, 19 bp, Homo sapiens
  source 1..19: mol_type = genomic DNA
tggtgtagtggtatcatgc

SEQ ID NO: 28207 - DNA, 20 bp, Homo sapiens
  source 1..20: mol_type = genomic DNA
tggtgtagtggtatcatgca

SEQ ID NO: 28208 - DNA, 22 bp, Homo sapiens
  source 1..22: mol_type = genomic DNA
tggtgtagtggtatcatgcaag

SEQ ID NO: 28209 - DNA, 23 bp, Homo sapiens
  source 1..23: mol_type = genomic DNA
tggtgtagtggtatcatgcaaga

SEQ ID NO: 28210 - DNA, 25 bp, Homo sapiens
  source 1..25: mol_type = genomic DNA
tggtgtagtggtatcatgcaagatt

SEQ ID NO: 28211 - DNA, 26 bp, Homo sapiens
  source 1..26: mol_type = genomic DNA
tggtgtagtggtatcatgcaagattc

SEQ ID NO: 28212 - DNA, 27 bp, Homo sapiens
  source 1..27: mol_type = genomic DNA
tggtgtagtggtatcatgcaagattcc

SEQ ID NO: 28213 - DNA, 28 bp, Homo sapiens
  source 1..28: mol_type = genomic DNA
tggtgtagtggtatcatgcaagattccc

SEQ ID NO: 28214 - DNA, 32 bp, Homo sapiens
  source 1..32: mol_type = genomic DNA
tggtgtagtggtatcatgcaagattcccattc

SEQ ID NO: 28215 - DNA, 41 bp, Homo sapiens
  source 1..41: mol_type = genomic DNA
tggtgtagtggtatcatgcaagattcccattcttgcgaccc

SEQ ID NO: 28216 - DNA, 42 bp, Homo sapiens
  source 1..42: mol_type = genomic DNA
tggtgtagtggtatcatgcaagattcccattcttgcgacccg

SEQ ID NO: 28217 - DNA, 43 bp, Homo sapiens
  source 1..43: mol_type = genomic DNA
tggtgtagtggtatcatgcaagattcccattcttgcgacccgg

SEQ ID NO: 28218 - DNA, 44 bp, Homo sapiens
  source 1..44: mol_type = genomic DNA
tggtgtagtggtatcatgcaagattcccattcttgcgacccggg

SEQ ID NO: 28219 - DNA, 45 bp, Homo sapiens
  source 1..45: mol_type = genomic DNA
tggtgtagtggtatcatgcaagattcccattcttgcgacccgggt

SEQ ID NO: 28220 - DNA, 16 bp, Homo sapiens
  source 1..16: mol_type = genomic DNA
tggttaaggcattgga

SEQ ID NO: 28221 - DNA, 17 bp, Homo sapiens
  source 1..17: mol_type = genomic DNA
tggttaaggcattggac

SEQ ID NO: 28222 - DNA, 17 bp, Homo sapiens
  source 1..17: mol_type = genomic DNA
tggttaaggcgttggac

SEQ ID NO: 28223 - DNA, 17 bp, Homo sapiens
  source 1..17: mol_type = genomic DNA
tggttagagcactggtc

SEQ ID NO: 28224 - DNA, 18 bp, Homo sapiens
  source 1..18: mol_type = genomic DNA
tggttagagcactggtct

SEQ ID NO: 28225 - DNA, 19 bp, Homo sapiens
  source 1..19: mol_type = genomic DNA
tggttagagcactggtctt

SEQ ID NO: 28226 - DNA, 16 bp, Homo sapiens
  source 1..16: mol_type = genomic DNA
tggttagcactctgga

SEQ ID NO: 28227 - DNA, 17 bp, Homo sapiens
  source 1..17: mol_type = genomic DNA
tggttagcactctggac

SEQ ID NO: 28228 - DNA, 18 bp, Homo sapiens
  source 1..18: mol_type = genomic DNA
tggttagcactctggact

SEQ ID NO: 28229 - DNA, 19 bp, Homo sapiens
  source 1..19: mol_type = genomic DNA
tggttagcactctggactc

SEQ ID NO: 28230 - DNA, 20 bp, Homo sapiens
  source 1..20: mol_type = genomic DNA
tggttagcactctggactct

SEQ ID NO: 28231 - DNA, 21 bp, Homo sapiens
  source 1..21: mol_type = genomic DNA
tggttagcactctggactctg

SEQ ID NO: 28232 - DNA, 22 bp, Homo sapiens
  source 1..22: mol_type = genomic DNA
tggttagcactctggactctga

SEQ ID NO: 28233 - DNA, 23 bp, Homo sapiens
  source 1..23: mol_type = genomic DNA
tggttagcactctggactctgaa

SEQ ID NO: 28234 - DNA, 24 bp, Homo sapiens
  source 1..24: mol_type = genomic DNA
tggttagcactctggactctgaat

SEQ ID NO: 28235 - DNA, 25 bp, Homo sapiens
  source 1..25: mol_type = genomic DNA
tggttagcactctggactctgaatc

SEQ ID NO: 28236 - DNA, 26 bp, Homo sapiens
  source 1..26: mol_type = genomic DNA
tggttagcactctggactctgaatcc

SEQ ID NO: 28237 - DNA, 27 bp, Homo sapiens
  source 1..27: mol_type = genomic DNA
tggttagcactctggactctgaatcca

SEQ ID NO: 28238 - DNA, 29 bp, Homo sapiens
  source 1..29: mol_type = genomic DNA
tggttagcactctggactctgaatccagc

SEQ ID NO: 28239 - DNA, 30 bp, Homo sapiens
  source 1..30: mol_type = genomic DNA
tggttagcactctggactctgaatccagcg

SEQ ID NO: 28240 - DNA, 34 bp, Homo sapiens
  source 1..34: mol_type = genomic DNA
tggttagcactctggactctgaatccagcgatcc

SEQ ID NO: 28241 - DNA, 36 bp, Homo sapiens
  source 1..36: mol_type = genomic DNA
tggttagcactctggactctgaatccagcgatccga

SEQ ID NO: 28242 - DNA, 37 bp, Homo sapiens
  source 1..37: mol_type = genomic DNA
tggttagcactctggactctgaatccagcgatccgag

SEQ ID NO: 28243 - DNA, 38 bp, Homo sapiens
  source 1..38: mol_type = genomic DNA
tggttagcactctggactctgaatccagcgatccgagt

SEQ ID NO: 28244 - DNA, 39 bp, Homo sapiens
  source 1..39: mol_type = genomic DNA
tggttagcactctggactctgaatccagcgatccgagtt

SEQ ID NO: 28245 - DNA, 40 bp, Homo sapiens
  source 1..40: mol_type = genomic DNA
tggttagcactctggactctgaatccagcgatccgagttc

SEQ ID NO: 28246 - DNA, 41 bp, Homo sapiens
  source 1..41: mol_type = genomic DNA
tggttagcactctggactctgaatccagcgatccgagttca

SEQ ID NO: 28247 - DNA, 21 bp, Homo sapiens
  source 1..21: mol_type = genomic DNA
tggttagcactctggactttg

SEQ ID NO: 28248 - DNA, 22 bp, Homo sapiens
  source 1..22: mol_type = genomic DNA
tggttagcactctggactttga

SEQ ID NO: 28249 - DNA, 23 bp, Homo sapiens
  source 1..23: mol_type = genomic DNA
tggttagcactctggactttgaa

SEQ ID NO: 28250 - DNA, 24 bp, Homo sapiens
  source 1..24: mol_type = genomic DNA
tggttagcactctggactttgaat

SEQ ID NO: 28251 - DNA, 25 bp, Homo sapiens
  source 1..25: mol_type = genomic DNA
tggttagcactctggactttgaatc

SEQ ID NO: 28252 - DNA, 26 bp, Homo sapiens
  source 1..26: mol_type = genomic DNA
tggttagcactctggactttgaatcc

SEQ ID NO: 28253 - DNA, 27 bp, Homo sapiens
  source 1..27: mol_type = genomic DNA
tggttagcactctggactttgaatcca

SEQ ID NO: 28254 - DNA, 29 bp, Homo sapiens
  source 1..29: mol_type = genomic DNA
tggttagcactctggactttgaatccagc

SEQ ID NO: 28255 - DNA, 37 bp, Homo sapiens
  source 1..37: mol_type = genomic DNA
tggttagcactctggactttgaatccagcgatccgag

SEQ ID NO: 28256 - DNA, 38 bp, Homo sapiens
  source 1..38: mol_type = genomic DNA
tggttagcactctggactttgaatccagcgatccgagt

SEQ ID NO: 28257 - DNA, 40 bp, Homo sapiens
  source 1..40: mol_type = genomic DNA
tggttagcactctggactttgaatccagcgatccgagttc

SEQ ID NO: 28258 - DNA, 17 bp, Homo sapiens
  source 1..17: mol_type = genomic DNA
tggttagcatagctgcc

SEQ ID NO: 28259 - DNA, 16 bp, Homo sapiens
  source 1..16: mol_type = genomic DNA
tggttaggattcagcg

SEQ ID NO: 28260 - DNA, 17 bp, Homo sapiens
  source 1..17: mol_type = genomic DNA
tggttaggattcagcgc

SEQ ID NO: 28261 - DNA, 19 bp, Homo sapiens
  source 1..19: mol_type = genomic DNA
tggttaggattcagcgctc

SEQ ID NO: 28262 - DNA, 16 bp, Homo sapiens
  source 1..16: mol_type = genomic DNA
tggttaggattcggcg

SEQ ID NO: 28263 - DNA, 17 bp, Homo sapiens
  source 1..17: mol_type = genomic DNA
tggttaggattcggcgc

SEQ ID NO: 28264 - DNA, 18 bp, Homo sapiens
  source 1..18: mol_type = genomic DNA
tggttaggattcggcgct

SEQ ID NO: 28265 - DNA, 19 bp, Homo sapiens
  source 1..19: mol_type = genomic DNA
tggttaggattcggcgctc

SEQ ID NO: 28266 - DNA, 20 bp, Homo sapiens
  source 1..20: mol_type = genomic DNA
tggttaggattcggcgctct

SEQ ID NO: 28267 - DNA, 21 bp, Homo sapiens
  source 1..21: mol_type = genomic DNA
tggttaggattcggcgctctc

SEQ ID NO: 28268 - DNA, 22 bp, Homo sapiens
  source 1..22: mol_type = genomic DNA
tggttaggattcggcgctctca

SEQ ID NO: 28269 - DNA, 23 bp, Homo sapiens
  source 1..23: mol_type = genomic DNA
tggttaggattcggcgctctcac

SEQ ID NO: 28270 - DNA, 24 bp, Homo sapiens
  source 1..24: mol_type = genomic DNA
tggttaggattcggcgctctcacc

SEQ ID NO: 28271 - DNA, 25 bp, Homo sapiens
  source 1..25: mol_type = genomic DNA
tggttaggattcggcgctctcaccg

SEQ ID NO: 28272 - DNA, 26 bp, Homo sapiens
  source 1..26: mol_type = genomic DNA
tggttaggattcggcgctctcaccgc

SEQ ID NO: 28273 - DNA, 27 bp, Homo sapiens
  source 1..27: mol_type = genomic DNA
tggttaggattcggcgctctcaccgcc

SEQ ID NO: 28274 - DNA, 28 bp, Homo sapiens
  source 1..28: mol_type = genomic DNA
tggttaggattcggcgctctcaccgcca

SEQ ID NO: 28275 - DNA, 28 bp, Homo sapiens
  source 1..28: mol_type = genomic DNA
tggttaggattcggcgctctcaccgccg

SEQ ID NO: 28276 - DNA, 29 bp, Homo sapiens
  source 1..29: mol_type = genomic DNA
tggttaggattcggcgctctcaccgccgc

SEQ ID NO: 28277 - DNA, 30 bp, Homo sapiens
  source 1..30: mol_type = genomic DNA
tggttaggattcggcgctctcaccgccgcg

SEQ ID NO: 28278 - DNA, 32 bp, Homo sapiens
  source 1..32: mol_type = genomic DNA
tggttaggattcggcgctctcaccgccgcggc

SEQ ID NO: 28279 - DNA, 33 bp, Homo sapiens
  source 1..33: mol_type = genomic DNA
tggttaggattcggcgctctcaccgccgcggcc

SEQ ID NO: 28280 - DNA, 34 bp, Homo sapiens
  source 1..34: mol_type = genomic DNA
tggttaggattcggcgctctcaccgccgcggccc

SEQ ID NO: 28281 - DNA, 35 bp, Homo sapiens
  source 1..35: mol_type = genomic DNA
tggttaggattcggcgctctcaccgccgcggcccg

SEQ ID NO: 28282 - DNA, 36 bp, Homo sapiens
  source 1..36: mol_type = genomic DNA
tggttaggattcggcgctctcaccgccgcggcccgg

SEQ ID NO: 28283 - DNA, 37 bp, Homo sapiens
  source 1..37: mol_type = genomic DNA
tggttaggattcggcgctctcaccgccgcggcccggg

SEQ ID NO: 28284 - DNA, 38 bp, Homo sapiens
  source 1..38: mol_type = genomic DNA
tggttaggattcggcgctctcaccgccgcggcccgggt

SEQ ID NO: 28285 - DNA, 39 bp, Homo sapiens
  source 1..39: mol_type = genomic DNA
tggttaggattcggcgctctcaccgccgcggcccgggtt

SEQ ID NO: 28286 - DNA, 40 bp, Homo sapiens
  source 1..40: mol_type = genomic DNA
tggttaggattcggcgctctcaccgccgcggcccgggttc

SEQ ID NO: 28287 - DNA, 44 bp, Homo sapiens
  source 1..44: mol_type = genomic DNA
tggttaggattcggcgctctcaccgccgcggcccgggttcgatt

SEQ ID NO: 28288 - DNA, 16 bp, Homo sapiens
  source 1..16: mol_type = genomic DNA
tggttagtactctgcg

SEQ ID NO: 28289 - DNA, 17 bp, Homo sapiens
  source 1..17: mol_type = genomic DNA
tggttagtactctgcgt

SEQ ID NO: 28290 - DNA, 18 bp, Homo sapiens
  source 1..18: mol_type = genomic DNA
tggttagtactctgcgtt

SEQ ID NO: 28291 - DNA, 19 bp, Homo sapiens
  source 1..19: mol_type = genomic DNA
tggttagtactctgcgttg

SEQ ID NO: 28292 - DNA, 20 bp, Homo sapiens
  source 1..20: mol_type = genomic DNA
tggttagtactctgcgttgt

SEQ ID NO: 28293 - DNA, 21 bp, Homo sapiens
  source 1..21: mol_type = genomic DNA
tggttagtactctgcgttgtg

SEQ ID NO: 28294 - DNA, 23 bp, Homo sapiens
  source 1..23: mol_type = genomic DNA
tggttagtactctgcgttgtggc

SEQ ID NO: 28295 - DNA, 24 bp, Homo sapiens
  source 1..24: mol_type = genomic DNA
tggttagtactctgcgttgtggcc

SEQ ID NO: 28296 - DNA, 25 bp, Homo sapiens
  source 1..25: mol_type = genomic DNA
tggttagtactctgcgttgtggccg

SEQ ID NO: 28297 - DNA, 29 bp, Homo sapiens
  source 1..29: mol_type = genomic DNA
tggttagtactctgcgttgtggccgcagc

SEQ ID NO: 28298 - DNA, 33 bp, Homo sapiens
  source 1..33: mol_type = genomic DNA
tggttagtactctgcgttgtggccgcagcaacc

SEQ ID NO: 28299 - DNA, 34 bp, Homo sapiens
  source 1..34: mol_type = genomic DNA
tggttagtactctgcgttgtggccgcagcaacct

SEQ ID NO: 28300 - DNA, 38 bp, Homo sapiens
  source 1..38: mol_type = genomic DNA
tggttagtactctgcgttgtggccgcagcaacctcggt

SEQ ID NO: 28301 - DNA, 20 bp, Homo sapiens
  source 1..20: mol_type = genomic DNA
tggttagtatccccgcctgt

SEQ ID NO: 28302 - DNA, 23 bp, Homo sapiens
  source 1..23: mol_type = genomic DNA
tggttatacccttcccgtactac

SEQ ID NO: 28303 - DNA, 24 bp, Homo sapiens
  source 1..24: mol_type = genomic DNA
tggttatacccttcccgtactacc

SEQ ID NO: 28304 - DNA, 25 bp, Homo sapiens
  source 1..25: mol_type = genomic DNA
tggttatacccttcccgtactacca

SEQ ID NO: 28305 - DNA, 18 bp, Homo sapiens
  source 1..18: mol_type = genomic DNA
tggttatcacatctgctt

SEQ ID NO: 28306 - DNA, 17 bp, Homo sapiens
  source 1..17: mol_type = genomic DNA
tggttatcacattcgcc

SEQ ID NO: 28307 - DNA, 16 bp, Homo sapiens
  source 1..16: mol_type = genomic DNA
tggttatcacgtctgc

SEQ ID NO: 28308 - DNA, 17 bp, Homo sapiens
  source 1..17: mol_type = genomic DNA
tggttatcacgtctgct

SEQ ID NO: 28309 - DNA, 18 bp, Homo sapiens
  source 1..18: mol_type = genomic DNA
tggttatcacgtctgctt

SEQ ID NO: 28310 - DNA, 19 bp, Homo sapiens
  source 1..19: mol_type = genomic DNA
tggttatcacgtctgcttt

SEQ ID NO: 28311 - DNA, 21 bp, Homo sapiens
  source 1..21: mol_type = genomic DNA
tggttatcacgtctgctttac

SEQ ID NO: 28312 - DNA, 22 bp, Homo sapiens
  source 1..22: mol_type = genomic DNA
tggttatcacgtctgctttaca

SEQ ID NO: 28313 - DNA, 23 bp, Homo sapiens
  source 1..23: mol_type = genomic DNA
tggttatcacgtctgctttacac

SEQ ID NO: 28314 - DNA, 24 bp, Homo sapiens
  source 1..24: mol_type = genomic DNA
tggttatcacgtctgctttacacg

SEQ ID NO: 28315 - DNA, 25 bp, Homo sapiens
  source 1..25: mol_type = genomic DNA
tggttatcacgtctgctttacacgc

SEQ ID NO: 28316 - DNA, 36 bp, Homo sapiens
  source 1..36: mol_type = genomic DNA
tggttatcacgtctgctttacacgcagaaggtcctg

SEQ ID NO: 28317 - DNA, 16 bp, Homo sapiens
  source 1..16: mol_type = genomic DNA
tggttatcacgttcgc

SEQ ID NO: 28318 - DNA, 17 bp, Homo sapiens
  source 1..17: mol_type = genomic DNA
tggttatcacgttcgcc

SEQ ID NO: 28319 - DNA, 18 bp, Homo sapiens
  source 1..18: mol_type = genomic DNA
tggttatcacgttcgcct

SEQ ID NO: 28320 - DNA, 19 bp, Homo sapiens
  source 1..19: mol_type = genomic DNA
tggttatcacgttcgcctc

SEQ ID NO: 28321 - DNA, 20 bp, Homo sapiens
  source 1..20: mol_type = genomic DNA
tggttatcacgttcgcctca

SEQ ID NO: 28322 - DNA, 21 bp, Homo sapiens
  source 1..21: mol_type = genomic DNA
tggttatcacgttcgcctcac

SEQ ID NO: 28323 - DNA, 22 bp, Homo sapiens
  source 1..22: mol_type = genomic DNA
tggttatcacgttcgcctcaca

SEQ ID NO: 28324 - DNA, 25 bp, Homo sapiens
  source 1..25: mol_type = genomic DNA
tggttatcacgttcgcctcacacgc

SEQ ID NO: 28325 - DNA, 28 bp, Homo sapiens
  source 1..28: mol_type = genomic DNA
tggttatcacgttcgcctcacacgcgaa

SEQ ID NO: 28326 - DNA, 23 bp, Homo sapiens
  source 1..23: mol_type = genomic DNA
tggttcaaatccgggtgccccct

SEQ ID NO: 28327 - DNA, 16 bp, Homo sapiens
  source 1..16: mol_type = genomic DNA
tggttcagtggtagaa

SEQ ID NO: 28328 - DNA, 18 bp, Homo sapiens
  source 1..18: mol_type = genomic DNA
tggttcagtggtagaatt

SEQ ID NO: 28329 - DNA, 19 bp, Homo sapiens
  source 1..19: mol_type = genomic DNA
tggttcagtggtagaattc

SEQ ID NO: 28330 - DNA, 20 bp, Homo sapiens
  source 1..20: mol_type = genomic DNA
tggttcagtggtagaattct

SEQ ID NO: 28331 - DNA, 21 bp, Homo sapiens
  source 1..21: mol_type = genomic DNA
tggttcagtggtagaattctc

SEQ ID NO: 28332 - DNA, 23 bp, Homo sapiens
  source 1..23: mol_type = genomic DNA
tggttcagtggtagaattctcgc

SEQ ID NO: 28333 - DNA, 24 bp, Homo sapiens
  source 1..24: mol_type = genomic DNA
tggttcagtggtagaattctcgcc

SEQ ID NO: 28334 - DNA, 25 bp, Homo sapiens
  source 1..25: mol_type = genomic DNA
tggttcagtggtagaattctcgcct

SEQ ID NO: 28335 - DNA, 26 bp, Homo sapiens
  source 1..26: mol_type = genomic DNA
tggttcagtggtagaattctcgcctc

SEQ ID NO: 28336 - DNA, 26 bp, Homo sapiens
  source 1..26: mol_type = genomic DNA
tggttcagtggtagaattctcgcctg

SEQ ID NO: 28337 - DNA, 27 bp, Homo sapiens
  source 1..27: mol_type = genomic DNA
tggttcagtggtagaattctcgcctgc

SEQ ID NO: 28338 - DNA, 28 bp, Homo sapiens
  source 1..28: mol_type = genomic DNA
tggttcagtggtagaattctcgcctgcc

SEQ ID NO: 28339 - DNA, 29 bp, Homo sapiens
  source 1..29: mol_type = genomic DNA
tggttcagtggtagaattctcgcctgcca

SEQ ID NO: 28340 - DNA, 30 bp, Homo sapiens
  source 1..30: mol_type = genomic DNA
tggttcagtggtagaattctcgcctgccac

SEQ ID NO: 28341 - DNA, 31 bp, Homo sapiens
  source 1..31: mol_type = genomic DNA
tggttcagtggtagaattctcgcctgccacg

SEQ ID NO: 28342 - DNA, 32 bp, Homo sapiens
  source 1..32: mol_type = genomic DNA
tggttcagtggtagaattctcgcctgccacgc

SEQ ID NO: 28343 - DNA, 38 bp, Homo sapiens
  source 1..38: mol_type = genomic DNA
tggttcagtggtagaattctcgcctgccacgcgggagg

SEQ ID NO: 28344 - DNA, 40 bp, Homo sapiens
  source 1..40: mol_type = genomic DNA
tggttcagtggtagaattctcgcctgccacgcgggaggcc

SEQ ID NO: 28345 - DNA, 41 bp, Homo sapiens
  source 1..41: mol_type = genomic DNA
tggttcagtggtagaattctcgcctgccacgcgggaggccc

SEQ ID NO: 28346 - DNA, 42 bp, Homo sapiens
  source 1..42: mol_type = genomic DNA
tggttcagtggtagaattctcgcctgccacgcgggaggcccg

SEQ ID NO: 28347 - DNA, 43 bp, Homo sapiens
  source 1..43: mol_type = genomic DNA
tggttcagtggtagaattctcgcctgccacgcgggaggcccgg

SEQ ID NO: 28348 - DNA, 44 bp, Homo sapiens
  source 1..44: mol_type = genomic DNA
tggttcagtggtagaattctcgcctgccacgcgggaggcccggg

SEQ ID NO: 28349 - DNA, 45 bp, Homo sapiens
  source 1..45: mol_type = genomic DNA
tggttcagtggtagaattctcgcctgccacgcgggaggcccgggt

SEQ ID NO: 28350 - DNA, 48 bp, Homo sapiens
  source 1..48: mol_type = genomic DNA
tggttcagtggtagaattctcgcctgccacgcgggaggcccgggttcg

SEQ ID NO: 28351 - DNA, 25 bp, Homo sapiens
  source 1..25: mol_type = genomic DNA
tggttcagtggtagaattcttgcct

SEQ ID NO: 28352 - DNA, 24 bp, Homo sapiens
  source 1..24: mol_type = genomic DNA
tggttcgaatccggctcgaaggac

SEQ ID NO: 28353 - DNA, 25 bp, Homo sapiens
  source 1..25: mol_type = genomic DNA
tggttcgaatccggctcgaaggacc

SEQ ID NO: 28354 - DNA, 20 bp, Homo sapiens
  source 1..20: mol_type = genomic DNA
tggttcgaatccggctcgga

SEQ ID NO: 28355 - DNA, 25 bp, Homo sapiens
  source 1..25: mol_type = genomic DNA
tggttcgaatccggctcggaggacc

SEQ ID NO: 28356 - DNA, 16 bp, Homo sapiens
  source 1..16: mol_type = genomic DNA
tggttcgagcccaccc

SEQ ID NO: 28357 - DNA, 23 bp, Homo sapiens
  source 1..23: mol_type = genomic DNA
tggttcgatcccgggtttcggca

SEQ ID NO: 28358 - DNA, 16 bp, Homo sapiens
  source 1..16: mol_type = genomic DNA
tggttcgattccggct

SEQ ID NO: 28359 - DNA, 23 bp, Homo sapiens
  source 1..23: mol_type = genomic DNA
tggttcgattccggctcgaagga

SEQ ID NO: 28360 - DNA, 24 bp, Homo sapiens
  source 1..24: mol_type = genomic DNA
tggttcgattccggctcgaaggac

SEQ ID NO: 28361 - DNA, 25 bp, Homo sapiens
  source 1..25: mol_type = genomic DNA
tggttcgattccggctcgaaggacc

SEQ ID NO: 28362 - DNA, 26 bp, Homo sapiens
  source 1..26: mol_type = genomic DNA
tggttcgattccggctcgaaggacca

SEQ ID NO: 28363 - DNA, 16 bp, Homo sapiens
  source 1..16: mol_type = genomic DNA
tggttgtagtccgtgc

SEQ ID NO: 28364 - DNA, 17 bp, Homo sapiens
  source 1..17: mol_type = genomic DNA
tggttgtagtccgtgcg

SEQ ID NO: 28365 - DNA, 18 bp, Homo sapiens
  source 1..18: mol_type = genomic DNA
tggttgtagtccgtgcga

SEQ ID NO: 28366 - DNA, 19 bp, Homo sapiens
  source 1..19: mol_type = genomic DNA
tggttgtagtccgtgcgag

SEQ ID NO: 28367 - DNA, 20 bp, Homo sapiens
  source 1..20: mol_type = genomic DNA
tggttgtagtccgtgcgaga

SEQ ID NO: 28368 - DNA, 21 bp, Homo sapiens
  source 1..21: mol_type = genomic DNA
tggttgtagtccgtgcgagaa

SEQ ID NO: 28369 - DNA, 22 bp, Homo sapiens
  source 1..22: mol_type = genomic DNA
tggttgtagtccgtgcgagaat

SEQ ID NO: 28370 - DNA, 23 bp, Homo sapiens
  source 1..23: mol_type = genomic DNA
tggttgtagtccgtgcgagaata

SEQ ID NO: 28371 - DNA, 24 bp, Homo sapiens
  source 1..24: mol_type = genomic DNA
tggttgtagtccgtgcgagaatac

SEQ ID NO: 28372 - DNA, 25 bp, Homo sapiens
  source 1..25: mol_type = genomic DNA
tggttgtagtccgtgcgagaatacc

SEQ ID NO: 28373 - DNA, 26 bp, Homo sapiens
  source 1..26: mol_type = genomic DNA
tggttgtagtccgtgcgagaatacca

SEQ ID NO: 28374 - DNA, 38 bp, Homo sapiens
  source 1..38: mol_type = genomic DNA
tggttttcacccaggcggcccgggttcgactcccggtg

SEQ ID NO: 28375 - DNA, 41 bp, Homo sapiens
  source 1..41: mol_type = genomic DNA
tggttttcacccaggcggcccgggttcgactcccggtgtgg

SEQ ID NO: 28376 - DNA, 45 bp, Homo sapiens
  source 1..45: mol_type = genomic DNA
tggttttcacccaggcggcccgggttcgactcccggtgtgggaac

SEQ ID NO: 28377 - DNA, 46 bp, Homo sapiens
  source 1..46: mol_type = genomic DNA
tggttttcacccaggcggcccgggttcgactcccggtgtgggaacc

SEQ ID NO: 28378 - DNA, 47 bp, Homo sapiens
  source 1..47: mol_type = genomic DNA
tggttttcacccaggcggcccgggttcgactcccggtgtgggaacca

SEQ ID NO: 28379 - DNA, 45 bp, Homo sapiens
  source 1..45: mol_type = genomic DNA
tggttttcacccaggtggcccgggttcgactcccggtatgggaac

SEQ ID NO: 28380 - DNA, 20 bp, Homo sapiens
  source 1..20: mol_type = genomic DNA
tggtttttcatatcattggt

SEQ ID NO: 28381 - DNA, 27 bp, Homo sapiens
  source 1..27: mol_type = genomic DNA
tggtttttcatatcattggtcgtggtt

SEQ ID NO: 28382 - DNA, 28 bp, Homo sapiens
  source 1..28: mol_type = genomic DNA
tggtttttcatatcattggtcgtggttg

SEQ ID NO: 28383 - DNA, 29 bp, Homo sapiens
  source 1..29: mol_type = genomic DNA
tggtttttcatatcattggtcgtggttgt

SEQ ID NO: 28384 - DNA, 30 bp, Homo sapiens
  source 1..30: mol_type = genomic DNA
tggtttttcatatcattggtcgtggttgta

SEQ ID NO: 28385 - DNA, 33 bp, Homo sapiens
  source 1..33: mol_type = genomic DNA
tggtttttcatatcattggtcgtggttgtagtc

SEQ ID NO: 28386 - DNA, 34 bp, Homo sapiens
  source 1..34: mol_type = genomic DNA
tggtttttcatatcattggtcgtggttgtagtcc

SEQ ID NO: 28387 - DNA, 42 bp, Homo sapiens
  source 1..42: mol_type = genomic DNA
tggtttttcatatcattggtcgtggttgtagtccgtgcgaga

SEQ ID NO: 28388 - DNA, 43 bp, Homo sapiens
  source 1..43: mol_type = genomic DNA
tggtttttcatatcattggtcgtggttgtagtccgtgcgagaa

SEQ ID NO: 28389 - DNA, 44 bp, Homo sapiens
  source 1..44: mol_type = genomic DNA
tggtttttcatatcattggtcgtggttgtagtccgtgcgagaat

SEQ ID NO: 28390 - DNA, 45 bp, Homo sapiens
  source 1..45: mol_type = genomic DNA
tggtttttcatatcattggtcgtggttgtagtccgtgcgagaata

SEQ ID NO: 28391 - DNA, 47 bp, Homo sapiens
  source 1..47: mol_type = genomic DNA
tggtttttcatatcattggtcgtggttgtagtccgtgcgagaatacc

SEQ ID NO: 28392 - DNA, 48 bp, Homo sapiens
  source 1..48: mol_type = genomic DNA
tggtttttcatatcattggtcgtggttgtagtccgtgcgagaatacca

SEQ ID NO: 28393 - DNA, 19 bp, Homo sapiens
  source 1..19: mol_type = genomic DNA
tgtaaaccaggggtcgcga

SEQ ID NO: 28394 - DNA, 17 bp, Homo sapiens
  source 1..17: mol_type = genomic DNA
tgtaaaccggagatgaa

SEQ ID NO: 28395 - DNA, 18 bp, Homo sapiens
  source 1..18: mol_type = genomic DNA
tgtaaaccggagatgaaa

SEQ ID NO: 28396 - DNA, 19 bp, Homo sapiens
  source 1..19: mol_type = genomic DNA
tgtaaaccggagatgaaaa

SEQ ID NO: 28397 - DNA, 20 bp, Homo sapiens
  source 1..20: mol_type = genomic DNA
tgtaaaccggagatgaaaac

SEQ ID NO: 28398 - DNA, 21 bp, Homo sapiens
  source 1..21: mol_type = genomic DNA
tgtaaaccggagatgaaaacc

SEQ ID NO: 28399 - DNA, 22 bp, Homo sapiens
  source 1..22: mol_type = genomic DNA
tgtaaaccggagatgaaaacct

SEQ ID NO: 28400 - DNA, 23 bp, Homo sapiens
  source 1..23: mol_type = genomic DNA
tgtaaaccggagatgaaaacctt

SEQ ID NO: 28401 - DNA, 24 bp, Homo sapiens
  source 1..24: mol_type = genomic DNA
tgtaaaccggagatgaaaaccttt

SEQ ID NO: 28402 - DNA, 25 bp, Homo sapiens
  source 1..25: mol_type = genomic DNA
tgtaaaccggagatgaaaacctttt

SEQ ID NO: 28403 - DNA, 26 bp, Homo sapiens
  source 1..26: mol_type = genomic DNA
tgtaaaccggagatgaaaaccttttt

SEQ ID NO: 28404 - DNA, 27 bp, Homo sapiens
  source 1..27: mol_type = genomic DNA
tgtaaaccggagatgaaaacctttttc

SEQ ID NO: 28405 - DNA, 31 bp, Homo sapiens
  source 1..31: mol_type = genomic DNA
tgtaaaccggagatgaaaacctttttccaag

SEQ ID NO: 28406 - DNA, 33 bp, Homo sapiens
  source 1..33: mol_type = genomic DNA
tgtaaaccggagatgaaaacctttttccaagga

SEQ ID NO: 28407 - DNA, 34 bp, Homo sapiens
  source 1..34: mol_type = genomic DNA
tgtaaaccggagatgaaaacctttttccaaggac

SEQ ID NO: 28408 - DNA, 35 bp, Homo sapiens
  source 1..35: mol_type = genomic DNA
tgtaaaccggagatgaaaacctttttccaaggaca

SEQ ID NO: 28409 - DNA, 36 bp, Homo sapiens
  source 1..36: mol_type = genomic DNA
tgtaaaccggagatgaaaacctttttccaaggacac

SEQ ID NO: 28410 - DNA, 37 bp, Homo sapiens
  source 1..37: mol_type = genomic DNA
tgtaaaccggagatgaaaacctttttccaaggacacc

SEQ ID NO: 28411 - DNA, 38 bp, Homo sapiens
  source 1..38: mol_type = genomic DNA
tgtaaaccggagatgaaaacctttttccaaggacacca

SEQ ID NO: 28412 - DNA, 47 bp, Homo sapiens
  source 1..47: mol_type = genomic DNA
tgtaaagctaacttagcattaaccttttaagttaaagattaagagaa

SEQ ID NO: 28413 - DNA, 33 bp, Homo sapiens
  source 1..33: mol_type = genomic DNA
tgtaaatatagtttaaccaaaacatcagattgt

SEQ ID NO: 28414 - DNA, 37 bp, Homo sapiens
  source 1..37: mol_type = genomic DNA
tgtaaatctaaagacaggggttaggcctctttttacc

SEQ ID NO: 28415 - DNA, 40 bp, Homo sapiens
  source 1..40: mol_type = genomic DNA
tgtaaatctaaagacaggggttaggcctctttttaccacc

SEQ ID NO: 28416 - DNA, 41 bp, Homo sapiens
  source 1..41: mol_type = genomic DNA
tgtaaatctaaagacaggggttaggcctctttttaccacca

SEQ ID NO: 28417 - DNA, 26 bp, Homo sapiens
  source 1..26: mol_type = genomic DNA
tgtaatggtaagcactctggactctg

SEQ ID NO: 28418 - DNA, 17 bp, Homo sapiens
  source 1..17: mol_type = genomic DNA
tgtaatggtgagcactc

SEQ ID NO: 28419 - DNA, 20 bp, Homo sapiens
  source 1..20: mol_type = genomic DNA
tgtaatggtgagcactctgg

SEQ ID NO: 28420 - DNA, 21 bp, Homo sapiens
  source 1..21: mol_type = genomic DNA
tgtaatggtgagcactctgga

SEQ ID NO: 28421 - DNA, 23 bp, Homo sapiens
  source 1..23: mol_type = genomic DNA
tgtaatggtgagcactctggact

SEQ ID NO: 28422 - DNA, 28 bp, Homo sapiens
  source 1..28: mol_type = genomic DNA
tgtaatggtgagcactctggactctgaa

SEQ ID NO: 28423 - DNA, 30 bp, Homo sapiens
  source 1..30: mol_type = genomic DNA
tgtaatggtgagcactctggactctgaatc

SEQ ID NO: 28424 - DNA, 31 bp, Homo sapiens
  source 1..31: mol_type = genomic DNA
tgtaatggtgagcactctggactctgaatcc

SEQ ID NO: 28425 - DNA, 32 bp, Homo sapiens
  source 1..32: mol_type = genomic DNA
tgtaatggtgagcactctggactctgaatcca

SEQ ID NO: 28426 - DNA, 16 bp, Homo sapiens
  source 1..16: mol_type = genomic DNA
tgtaatggttagcact

SEQ ID NO: 28427 - DNA, 17 bp, Homo sapiens
  source 1..17: mol_type = genomic DNA
tgtaatggttagcactc

SEQ ID NO: 28428 - DNA, 18 bp, Homo sapiens
  source 1..18: mol_type = genomic DNA
tgtaatggttagcactct

SEQ ID NO: 28429 - DNA, 19 bp, Homo sapiens
  source 1..19: mol_type = genomic DNA
tgtaatggttagcactctg

SEQ ID NO: 28430 - DNA, 20 bp, Homo sapiens
  source 1..20: mol_type = genomic DNA
tgtaatggttagcactctgg

SEQ ID NO: 28431 - DNA, 21 bp, Homo sapiens
  source 1..21: mol_type = genomic DNA
tgtaatggttagcactctgga

SEQ ID NO: 28432 - DNA, 22 bp, Homo sapiens
  source 1..22: mol_type = genomic DNA
tgtaatggttagcactctggac

SEQ ID NO: 28433 - DNA, 23 bp, Homo sapiens
  source 1..23: mol_type = genomic DNA
tgtaatggttagcactctggact

SEQ ID NO: 28434 - DNA, 24 bp, Homo sapiens
  source 1..24: mol_type = genomic DNA
tgtaatggttagcactctggactc

SEQ ID NO: 28435 - DNA, 25 bp, Homo sapiens
  source 1..25: mol_type = genomic DNA
tgtaatggttagcactctggactct

SEQ ID NO: 28436 - DNA, 26 bp, Homo sapiens
  source 1..26: mol_type = genomic DNA
tgtaatggttagcactctggactctg

SEQ ID NO: 28437 - DNA, 27 bp, Homo sapiens
  source 1..27: mol_type = genomic DNA
tgtaatggttagcactctggactctga

SEQ ID NO: 28438 - DNA, 28 bp, Homo sapiens
  source 1..28: mol_type = genomic DNA
tgtaatggttagcactctggactctgaa

SEQ ID NO: 28439 - DNA, 29 bp, Homo sapiens
  source 1..29: mol_type = genomic DNA
tgtaatggttagcactctggactctgaat

SEQ ID NO: 28440 - DNA, 30 bp, Homo sapiens
  source 1..30: mol_type = genomic DNA
tgtaatggttagcactctggactctgaatc

SEQ ID NO: 28441 - DNA, 31 bp, Homo sapiens
  source 1..31: mol_type = genomic DNA
tgtaatggttagcactctggactctgaatcc

SEQ ID NO: 28442 - DNA, 32 bp, Homo sapiens
  source 1..32: mol_type = genomic DNA
tgtaatggttagcactctggactctgaatcca

SEQ ID NO: 28443 - DNA, 43 bp, Homo sapiens
  source 1..43: mol_type = genomic DNA
tgtaatggttagcactctggactctgaatccagcgatccgagt

SEQ ID NO: 28444 - DNA, 44 bp, Homo sapiens
  source 1..44: mol_type = genomic DNA
tgtaatggttagcactctggactctgaatccagcgatccgagtt

SEQ ID NO: 28445 - DNA, 46 bp, Homo sapiens
  source 1..46: mol_type = genomic DNA
tgtaatggttagcactctggactctgaatccagcgatccgagttca

SEQ ID NO: 28446 - DNA, 26 bp, Homo sapiens
  source 1..26: mol_type = genomic DNA
tgtaatggttagcactctggactttg

SEQ ID NO: 28447 - DNA, 28 bp, Homo sapiens
  source 1..28: mol_type = genomic DNA
tgtaatggttagcactctggactttgaa

SEQ ID NO: 28448 - DNA, 29 bp, Homo sapiens
  source 1..29: mol_type = genomic DNA
tgtaatggttagcactctggactttgaat

SEQ ID NO: 28449 - DNA, 30 bp, Homo sapiens
  source 1..30: mol_type = genomic DNA
tgtaatggttagcactctggactttgaatc

SEQ ID NO: 28450 - DNA, 31 bp, Homo sapiens
  source 1..31: mol_type = genomic DNA
tgtaatggttagcactctggactttgaatcc

SEQ ID NO: 28451 - DNA, 43 bp, Homo sapiens
  source 1..43: mol_type = genomic DNA
tgtaatggttagcactctggactttgaatccagcaatccgagt

SEQ ID NO: 28452 - DNA, 42 bp, Homo sapiens
  source 1..42: mol_type = genomic DNA
tgtaatggttagcactctggactttgaatccagcgatccgag

SEQ ID NO: 28453 - DNA, 43 bp, Homo sapiens
  source 1..43: mol_type = genomic DNA
tgtaatggttagcactctggactttgaatccagcgatccgagt

SEQ ID NO: 28454 - DNA, 17 bp, Homo sapiens
  source 1..17: mol_type = genomic DNA
tgtacgaggtcccgggt

SEQ ID NO: 28455 - DNA, 37 bp, Homo sapiens
  source 1..37: mol_type = genomic DNA
tgtacgaggtcccgggttcaatccccggcacctccac

SEQ ID NO: 28456 - DNA, 38 bp, Homo sapiens
  source 1..38: mol_type = genomic DNA
tgtacgaggtcccgggttcaatccccggcacctccacc

SEQ ID NO: 28457 - DNA, 19 bp, Homo sapiens
  source 1..19: mol_type = genomic DNA
tgtagcggttatcacattc

SEQ ID NO: 28458 - DNA, 21 bp, Homo sapiens
  source 1..21: mol_type = genomic DNA
tgtagcggttatcacattcgc

SEQ ID NO: 28459 - DNA, 22 bp, Homo sapiens
  source 1..22: mol_type = genomic DNA
tgtagcggttatcacattcgcc

SEQ ID NO: 28460 - DNA, 23 bp, Homo sapiens
  source 1..23: mol_type = genomic DNA
tgtagcggttatcacattcgcct

SEQ ID NO: 28461 - DNA, 24 bp, Homo sapiens
  source 1..24: mol_type = genomic DNA
tgtagcggttatcacattcgcctc

SEQ ID NO: 28462 - DNA, 40 bp, Homo sapiens
  source 1..40: mol_type = genomic DNA
tgtagcggttatcacgtctgctttacacgcagaaggtcct

SEQ ID NO: 28463 - DNA, 16 bp, Homo sapiens
  source 1..16: mol_type = genomic DNA
tgtagctcagtggtag

SEQ ID NO: 28464 - DNA, 17 bp, Homo sapiens
  source 1..17: mol_type = genomic DNA
tgtagctcagtggtaga

SEQ ID NO: 28465 - DNA, 18 bp, Homo sapiens
  source 1..18: mol_type = genomic DNA
tgtagctcagtggtagag

SEQ ID NO: 28466 - DNA, 28 bp, Homo sapiens
  source 1..28: mol_type = genomic DNA
tgtagctcagtggtagagcatttgactg

SEQ ID NO: 28467 - DNA, 29 bp, Homo sapiens
  source 1..29: mol_type = genomic DNA
tgtagctcagtggtagagcatttgactgc

SEQ ID NO: 28468 - DNA, 45 bp, Homo sapiens
  source 1..45: mol_type = genomic DNA
tgtagctcagtggtagagcgcgtgcttagcatgcacgaggccccg

SEQ ID NO: 28469 - DNA, 21 bp, Homo sapiens
  source 1..21: mol_type = genomic DNA
tgtagcttaacacaaagcacc

SEQ ID NO: 28470 - DNA, 22 bp, Homo sapiens
  source 1..22: mol_type = genomic DNA
tgtagcttaacacaaagcaccc

SEQ ID NO: 28471 - DNA, 23 bp, Homo sapiens
  source 1..23: mol_type = genomic DNA
tgtagcttaacacaaagcaccca

SEQ ID NO: 28472 - DNA, 24 bp, Homo sapiens
  source 1..24: mol_type = genomic DNA
tgtagcttaacacaaagcacccaa

SEQ ID NO: 28473 - DNA, 26 bp, Homo sapiens
  source 1..26: mol_type = genomic DNA
tgtagcttaacacaaagcacccaact

SEQ ID NO: 28474 - DNA, 32 bp, Homo sapiens
  source 1..32: mol_type = genomic DNA
tgtagcttaacacaaagcacccaacttacact

SEQ ID NO: 28475 - DNA, 33 bp, Homo sapiens
  source 1..33: mol_type = genomic DNA
tgtagcttaacacaaagcacccaacttacactt

SEQ ID NO: 28476 - DNA, 34 bp, Homo sapiens
  source 1..34: mol_type = genomic DNA
tgtagcttaacacaaagcacccaacttacactta

SEQ ID NO: 28477 - DNA, 37 bp, Homo sapiens
  source 1..37: mol_type = genomic DNA
tgtagcttaacacaaagcacccaacttacacttagga

SEQ ID NO: 28478 - DNA, 42 bp, Homo sapiens
  source 1..42: mol_type = genomic DNA
tgtagcttaacacaaagcacccaacttacacttaggagattt

SEQ ID NO: 28479 - DNA, 17 bp, Homo sapiens
  source 1..17: mol_type = genomic DNA
tgtagcttacctcctca

SEQ ID NO: 28480 - DNA, 25 bp, Homo sapiens
  source 1..25: mol_type = genomic DNA
tgtagcttacctcctcaaagcaata

SEQ ID NO: 28481 - DNA, 30 bp, Homo sapiens
  source 1..30: mol_type = genomic DNA
tgtagcttacctcctcaaagcaatacactg

SEQ ID NO: 28482 - DNA, 16 bp, Homo sapiens
  source 1..16: mol_type = genomic DNA
tgtagtccgtgcgaga

SEQ ID NO: 28483 - DNA, 17 bp, Homo sapiens
  source 1..17: mol_type = genomic DNA
tgtagtccgtgcgagaa

SEQ ID NO: 28484 - DNA, 18 bp, Homo sapiens
  source 1..18: mol_type = genomic DNA
tgtagtccgtgcgagaat

SEQ ID NO: 28485 - DNA, 19 bp, Homo sapiens
  source 1..19: mol_type = genomic DNA
tgtagtccgtgcgagaata

SEQ ID NO: 28486 - DNA, 20 bp, Homo sapiens
  source 1..20: mol_type = genomic DNA
tgtagtccgtgcgagaatac

SEQ ID NO: 28487 - DNA, 21 bp, Homo sapiens
  source 1..21: mol_type = genomic DNA
tgtagtccgtgcgagaatacc

SEQ ID NO: 28488 - DNA, 22 bp, Homo sapiens
  source 1..22: mol_type = genomic DNA
tgtagtccgtgcgagaatacca

SEQ ID NO: 28489 - DNA, 16 bp, Homo sapiens
  source 1..16: mol_type = genomic DNA
tgtagtcgtggccgag

SEQ ID NO: 28490 - DNA, 21 bp, Homo sapiens
  source 1..21: mol_type = genomic DNA
tgtagtcgtggccgagtggtt

SEQ ID NO: 28491 - DNA, 16 bp, Homo sapiens
  source 1..16: mol_type = genomic DNA
tgtagtggtatcatgc

SEQ ID NO: 28492 - DNA, 17 bp, Homo sapiens
  source 1..17: mol_type = genomic DNA
tgtagtggtatcatgca

SEQ ID NO: 28493 - DNA, 19 bp, Homo sapiens
  source 1..19: mol_type = genomic DNA
tgtagtggtatcatgcaag

SEQ ID NO: 28494 - DNA, 23 bp, Homo sapiens
  source 1..23: mol_type = genomic DNA
tgtagtggtatcatgcaagattc

SEQ ID NO: 28495 - DNA, 24 bp, Homo sapiens
  source 1..24: mol_type = genomic DNA
tgtagtggtatcatgcaagattcc

SEQ ID NO: 28496 - DNA, 25 bp, Homo sapiens
  source 1..25: mol_type = genomic DNA
tgtagtggtatcatgcaagattccc

SEQ ID NO: 28497 - DNA, 27 bp, Homo sapiens
  source 1..27: mol_type = genomic DNA
tgtagtggtatcatgcaagattcccat

SEQ ID NO: 28498 - DNA, 29 bp, Homo sapiens
  source 1..29: mol_type = genomic DNA
tgtagtggtatcatgcaagattcccattc

SEQ ID NO: 28499 - DNA, 40 bp, Homo sapiens
  source 1..40: mol_type = genomic DNA
tgtagtggtatcatgcaagattcccattcttgcgacccgg

SEQ ID NO: 28500 - DNA, 41 bp, Homo sapiens
  source 1..41: mol_type = genomic DNA
tgtagtggtatcatgcaagattcccattcttgcgacccggg

SEQ ID NO: 28501 - DNA, 42 bp, Homo sapiens
  source 1..42: mol_type = genomic DNA
tgtagtggtatcatgcaagattcccattcttgcgacccgggt

SEQ ID NO: 28502 - DNA, 20 bp, Homo sapiens
  source 1..20: mol_type = genomic DNA
tgtagtggtcatcacgttcg

SEQ ID NO: 28503 - DNA, 21 bp, Homo sapiens
  source 1..21: mol_type = genomic DNA
tgtagtggtcatcacgttcgc

SEQ ID NO: 28504 - DNA, 22 bp, Homo sapiens
  source 1..22: mol_type = genomic DNA
tgtagtggtcatcacgttcgcc

SEQ ID NO: 28505 - DNA, 23 bp, Homo sapiens
  source 1..23: mol_type = genomic DNA
tgtagtggtcatcacgttcgcct

SEQ ID NO: 28506 - DNA, 22 bp, Homo sapiens
  source 1..22: mol_type = genomic DNA
tgtagtggttatcacattcgcc

SEQ ID NO: 28507 - DNA, 23 bp, Homo sapiens
  source 1..23: mol_type = genomic DNA
tgtagtggttatcacattcgcct

SEQ ID NO: 28508 - DNA, 21 bp, Homo sapiens
  source 1..21: mol_type = genomic DNA
tgtagtggttatcacgtctgc

SEQ ID NO: 28509 - DNA, 22 bp, Homo sapiens
  source 1..22: mol_type = genomic DNA
tgtagtggttatcacgtctgct

SEQ ID NO: 28510 - DNA, 23 bp, Homo sapiens
  source 1..23: mol_type = genomic DNA
tgtagtggttatcacgtctgctt

SEQ ID NO: 28511 - DNA, 24 bp, Homo sapiens
  source 1..24: mol_type = genomic DNA
tgtagtggttatcacgtctgcttt

SEQ ID NO: 28512 - DNA, 21 bp, Homo sapiens
  source 1..21: mol_type = genomic DNA
tgtagtggttatcacgttcgc

SEQ ID NO: 28513 - DNA, 22 bp, Homo sapiens
  source 1..22: mol_type = genomic DNA
tgtagtggttatcacgttcgcc

SEQ ID NO: 28514 - DNA, 23 bp, Homo sapiens
  source 1..23: mol_type = genomic DNA
tgtagtggttatcacgttcgcct

SEQ ID NO: 28515 - DNA, 24 bp, Homo sapiens
  source 1..24: mol_type = genomic DNA
tgtagtggttatcacgttcgccta

SEQ ID NO: 28516 - DNA, 24 bp, Homo sapiens
  source 1..24: mol_type = genomic DNA
tgtagtggttatcacgttcgcctc

SEQ ID NO: 28517 - DNA, 26 bp, Homo sapiens
  source 1..26: mol_type = genomic DNA
tgtagtggttatcacgttcgcctcac

SEQ ID NO: 28518 - DNA, 28 bp, Homo sapiens
  source 1..28: mol_type = genomic DNA
tgtagtggttatcacgttcgcctcacac

SEQ ID NO: 28519 - DNA, 30 bp, Homo sapiens
  source 1..30: mol_type = genomic DNA
tgtagtggttatcacgttcgcctcacacgc

SEQ ID NO: 28520 - DNA, 23 bp, Homo sapiens
  source 1..23: mol_type = genomic DNA
tgtagtggttatcatgttcgcct

SEQ ID NO: 28521 - DNA, 18 bp, Homo sapiens
  source 1..18: mol_type = genomic DNA
tgtagtgtagtggttatc

SEQ ID NO: 28522 - DNA, 27 bp, Homo sapiens
  source 1..27: mol_type = genomic DNA
tgtagtgtagtggttatcacgttcgcc

SEQ ID NO: 28523 - DNA, 21 bp, Homo sapiens
  source 1..21: mol_type = genomic DNA
tgtagttgaaatacaacgatg

SEQ ID NO: 28524 - DNA, 30 bp, Homo sapiens
  source 1..30: mol_type = genomic DNA
tgtagttgaaatacaacgatggtttttcat

SEQ ID NO: 28525 - DNA, 17 bp, Homo sapiens
  source 1..17: mol_type = genomic DNA
tgtatgaggccccgggt

SEQ ID NO: 28526 - DNA, 28 bp, Homo sapiens
  source 1..28: mol_type = genomic DNA
tgtatgaggccccgggttcgatccccgg

SEQ ID NO: 28527 - DNA, 32 bp, Homo sapiens
  source 1..32: mol_type = genomic DNA
tgtatgaggccccgggttcgatccccggcatc

SEQ ID NO: 28528 - DNA, 33 bp, Homo sapiens
  source 1..33: mol_type = genomic DNA
tgtatgaggccccgggttcgatccccggcatct

SEQ ID NO: 28529 - DNA, 34 bp, Homo sapiens
  source 1..34: mol_type = genomic DNA
tgtatgaggccccgggttcgatccccggcatctc

SEQ ID NO: 28530 - DNA, 35 bp, Homo sapiens
  source 1..35: mol_type = genomic DNA
tgtatgaggccccgggttcgatccccggcatctcc

SEQ ID NO: 28531 - DNA, 36 bp, Homo sapiens
  source 1..36: mol_type = genomic DNA
tgtatgaggccccgggttcgatccccggcatctcca

SEQ ID NO: 28532 - DNA, 37 bp, Homo sapiens
  source 1..37: mol_type = genomic DNA
tgtatgaggccccgggttcgatccccggcatctccac

SEQ ID NO: 28533 - DNA, 38 bp, Homo sapiens
  source 1..38: mol_type = genomic DNA
tgtatgaggccccgggttcgatccccggcatctccacc

SEQ ID NO: 28534 - DNA, 39 bp, Homo sapiens
  source 1..39: mol_type = genomic DNA
tgtatgaggccccgggttcgatccccggcatctccacca

SEQ ID NO: 28535 - DNA, 17 bp, Homo sapiens
  source 1..17: mol_type = genomic DNA
tgtatgaggtcccgggt

SEQ ID NO: 28536 - DNA, 33 bp, Homo sapiens
  source 1..33: mol_type = genomic DNA
tgtatgaggtcccgggttcgatccccggcacct

SEQ ID NO: 28537 - DNA, 37 bp, Homo sapiens
  source 1..37: mol_type = genomic DNA
tgtatgaggtcccgggttcgatccccggcacctccac

SEQ ID NO: 28538 - DNA, 38 bp, Homo sapiens
  source 1..38: mol_type = genomic DNA
tgtatgaggtcccgggttcgatccccggcacctccacc

SEQ ID NO: 28539 - DNA, 33 bp, Homo sapiens
  source 1..33: mol_type = genomic DNA
tgtatgaggtcccgggttcgatccccggcatct

SEQ ID NO: 28540 - DNA, 34 bp, Homo sapiens
  source 1..34: mol_type = genomic DNA
tgtatgaggtcccgggttcgatccccggcatctc

SEQ ID NO: 28541 - DNA, 36 bp, Homo sapiens
  source 1..36: mol_type = genomic DNA
tgtatgaggtcccgggttcgatccccggcatctcca

SEQ ID NO: 28542 - DNA, 37 bp, Homo sapiens
  source 1..37: mol_type = genomic DNA
tgtatgaggtcccgggttcgatccccggcatctccac

SEQ ID NO: 28543 - DNA, 38 bp, Homo sapiens
  source 1..38: mol_type = genomic DNA
tgtatgaggtcccgggttcgatccccggcatctccacc

SEQ ID NO: 28544 - DNA, 22 bp, Homo sapiens
  source 1..22: mol_type = genomic DNA
tgtcaaagttaaattataggct

SEQ ID NO: 28545 - DNA, 24 bp, Homo sapiens
  source 1..24: mol_type = genomic DNA
tgtcaaagttaaattataggctaa

SEQ ID NO: 28546 - DNA, 16 bp, Homo sapiens
  source 1..16: mol_type = genomic DNA
tgtcacgcgggagacc

SEQ ID NO: 28547 - DNA, 17 bp, Homo sapiens
  source 1..17: mol_type = genomic DNA
tgtcacgcgggagaccg

SEQ ID NO: 28548 - DNA, 37 bp, Homo sapiens
  source 1..37: mol_type = genomic DNA
tgtcacgcgggagaccggggttcaattccccgacggg

SEQ ID NO: 28549 - DNA, 38 bp, Homo sapiens
  source 1..38: mol_type = genomic DNA
tgtcacgcgggagaccggggttcaattccccgacgggg

SEQ ID NO: 28550 - DNA, 41 bp, Homo sapiens
  source 1..41: mol_type = genomic DNA
tgtcacgcgggagaccggggttcaattccccgacggggagc

SEQ ID NO: 28551 - DNA, 42 bp, Homo sapiens
  source 1..42: mol_type = genomic DNA
tgtcacgcgggagaccggggttcaattccccgacggggagcc

SEQ ID NO: 28552 - DNA, 43 bp, Homo sapiens
  source 1..43: mol_type = genomic DNA
tgtcacgcgggagaccggggttcaattccccgacggggagcca

SEQ ID NO: 28553 - DNA, 34 bp, Homo sapiens
  source 1..34: mol_type = genomic DNA
tgtcacgcgggagaccggggttcgattccccgac

SEQ ID NO: 28554 - DNA, 37 bp, Homo sapiens
  source 1..37: mol_type = genomic DNA
tgtcacgcgggagaccggggttcgattccccgacggg

SEQ ID NO: 28555 - DNA, 38 bp, Homo sapiens
  source 1..38: mol_type = genomic DNA
tgtcacgcgggagaccggggttcgattccccgacgggg

SEQ ID NO: 28556 - DNA, 40 bp, Homo sapiens
  source 1..40: mol_type = genomic DNA
tgtcacgcgggagaccggggttcgattccccgacggggag

SEQ ID NO: 28557 - DNA, 41 bp, Homo sapiens
  source 1..41: mol_type = genomic DNA
tgtcacgcgggagaccggggttcgattccccgacggggagc

SEQ ID NO: 28558 - DNA, 42 bp, Homo sapiens
  source 1..42: mol_type = genomic DNA
tgtcacgcgggagaccggggttcgattccccgacggggagcc

SEQ ID NO: 28559 - DNA, 43 bp, Homo sapiens
  source 1..43: mol_type = genomic DNA
tgtcacgcgggagaccggggttcgattccccgacggggagcca

SEQ ID NO: 28560 - DNA, 16 bp, Homo sapiens
  source 1..16: mol_type = genomic DNA
tgtcaggatggccgag

SEQ ID NO: 28561 - DNA, 17 bp, Homo sapiens
  source 1..17: mol_type = genomic DNA
tgtccccgtctgtcacg

SEQ ID NO: 28562 - DNA, 16 bp, Homo sapiens
  source 1..16: mol_type = genomic DNA
tgtccgcgtgggttcg

SEQ ID NO: 28563 - DNA, 21 bp, Homo sapiens
  source 1..21: mol_type = genomic DNA
tgtccgcgtgggttcgaaccc

SEQ ID NO: 28564 - DNA, 22 bp, Homo sapiens
  source 1..22: mol_type = genomic DNA
tgtccgcgtgggttcgaacccc

SEQ ID NO: 28565 - DNA, 23 bp, Homo sapiens
  source 1..23: mol_type = genomic DNA
tgtccgcgtgggttcgaacccca

SEQ ID NO: 28566 - DNA, 29 bp, Homo sapiens
  source 1..29: mol_type = genomic DNA
tgtccgcgtgggttcgaaccccactcctg

SEQ ID NO: 28567 - DNA, 30 bp, Homo sapiens
  source 1..30: mol_type = genomic DNA
tgtccgcgtgggttcgaaccccactcctgg

SEQ ID NO: 28568 - DNA, 32 bp, Homo sapiens
  source 1..32: mol_type = genomic DNA
tgtccgcgtgggttcgaaccccactcctggta

SEQ ID NO: 28569 - DNA, 33 bp, Homo sapiens
  source 1..33: mol_type = genomic DNA
tgtccgcgtgggttcgaaccccactcctggtac

SEQ ID NO: 28570 - DNA, 34 bp, Homo sapiens
  source 1..34: mol_type = genomic DNA
tgtccgcgtgggttcgaaccccactcctggtacc

SEQ ID NO: 28571 - DNA, 35 bp, Homo sapiens
  source 1..35: mol_type = genomic DNA
tgtccgcgtgggttcgaaccccactcctggtacca

SEQ ID NO: 28572 - DNA, 16 bp, Homo sapiens
  source 1..16: mol_type = genomic DNA
tgtctaacaacatggc

SEQ ID NO: 28573 - DNA, 17 bp, Homo sapiens
  source 1..17: mol_type = genomic DNA
tgtctaacaacatggct

SEQ ID NO: 28574 - DNA, 18 bp, Homo sapiens
  source 1..18: mol_type = genomic DNA
tgtctaacaacatggctt

SEQ ID NO: 28575 - DNA, 20 bp, Homo sapiens
  source 1..20: mol_type = genomic DNA
tgtctaacaacatggctttc

SEQ ID NO: 28576 - DNA, 21 bp, Homo sapiens
  source 1..21: mol_type = genomic DNA
tgtctaacaacatggctttct

SEQ ID NO: 28577 - DNA, 22 bp, Homo sapiens
  source 1..22: mol_type = genomic DNA
tgtctaacaacatggctttctc

SEQ ID NO: 28578 - DNA, 23 bp, Homo sapiens
  source 1..23: mol_type = genomic DNA
tgtctaacaacatggctttctca

SEQ ID NO: 28579 - DNA, 24 bp, Homo sapiens
  source 1..24: mol_type = genomic DNA
tgtctaacaacatggctttctcac

SEQ ID NO: 28580 - DNA, 25 bp, Homo sapiens
  source 1..25: mol_type = genomic DNA
tgtctaacaacatggctttctcacc

SEQ ID NO: 28581 - DNA, 26 bp, Homo sapiens
  source 1..26: mol_type = genomic DNA
tgtctaacaacatggctttctcacca

SEQ ID NO: 28582 - DNA, 23 bp, Homo sapiens
  source 1..23: mol_type = genomic DNA
tgtctcgtaaacaggagatcctg

SEQ ID NO: 28583 - DNA, 24 bp, Homo sapiens
  source 1..24: mol_type = genomic DNA
tgtctgataaaagagttactttga

SEQ ID NO: 28584 - DNA, 25 bp, Homo sapiens
  source 1..25: mol_type = genomic DNA
tgtctgataaaagagttactttgat

SEQ ID NO: 28585 - DNA, 30 bp, Homo sapiens
  source 1..30: mol_type = genomic DNA
tgtctgataaaagagttactttgatagagt

SEQ ID NO: 28586 - DNA, 16 bp, Homo sapiens
  source 1..16: mol_type = genomic DNA
tgtgaatctgacaaca

SEQ ID NO: 28587 - DNA, 22 bp, Homo sapiens
  source 1..22: mol_type = genomic DNA
tgtgaatctgacaacagaggct

SEQ ID NO: 28588 - DNA, 23 bp, Homo sapiens
  source 1..23: mol_type = genomic DNA
tgtgaatctgacaacagaggctt

SEQ ID NO: 28589 - DNA, 25 bp, Homo sapiens
  source 1..25: mol_type = genomic DNA
tgtgaatctgacaacagaggcttac

SEQ ID NO: 28590 - DNA, 26 bp, Homo sapiens
  source 1..26: mol_type = genomic DNA
tgtgaatctgacaacagaggcttacg

SEQ ID NO: 28591 - DNA, 28 bp, Homo sapiens
  source 1..28: mol_type = genomic DNA
tgtgaatctgacaacagaggcttacgac

SEQ ID NO: 28592 - DNA, 29 bp, Homo sapiens
  source 1..29: mol_type = genomic DNA
tgtgaatctgacaacagaggcttacgacc

SEQ ID NO: 28593 - DNA, 30 bp, Homo sapiens
  source 1..30: mol_type = genomic DNA
tgtgaatctgacaacagaggcttacgaccc

SEQ ID NO: 28594 - DNA, 31 bp, Homo sapiens
  source 1..31: mol_type = genomic DNA
tgtgaatctgacaacagaggcttacgacccc

SEQ ID NO: 28595 - DNA, 32 bp, Homo sapiens
  source 1..32: mol_type = genomic DNA
tgtgaatctgacaacagaggcttacgacccct

SEQ ID NO: 28596 - DNA, 33 bp, Homo sapiens
  source 1..33: mol_type = genomic DNA
tgtgaatctgacaacagaggcttacgacccctt

SEQ ID NO: 28597 - DNA, 34 bp, Homo sapiens
  source 1..34: mol_type = genomic DNA
tgtgaatctgacaacagaggcttacgacccctta

SEQ ID NO: 28598 - DNA, 35 bp, Homo sapiens
  source 1..35: mol_type = genomic DNA
tgtgaatctgacaacagaggcttacgaccccttat

SEQ ID NO: 28599 - DNA, 36 bp, Homo sapiens
  source 1..36: mol_type = genomic DNA
tgtgaatctgacaacagaggcttacgaccccttatt

SEQ ID NO: 28600 - DNA, 40 bp, Homo sapiens
  source 1..40: mol_type = genomic DNA
tgtgaatctgacaacagaggcttacgaccccttatttacc

SEQ ID NO: 28601 - DNA, 41 bp, Homo sapiens
  source 1..41: mol_type = genomic DNA
tgtgaatctgacaacagaggcttacgaccccttatttaccc

SEQ ID NO: 28602 - DNA, 42 bp, Homo sapiens
  source 1..42: mol_type = genomic DNA
tgtgaatctgacaacagaggcttacgaccccttatttacccc

SEQ ID NO: 28603 - DNA, 43 bp, Homo sapiens
  source 1..43: mol_type = genomic DNA
tgtgaatctgacaacagaggcttacgaccccttatttacccca

SEQ ID NO: 28604 - DNA, 21 bp, Homo sapiens
  source 1..21: mol_type = genomic DNA
tgtgatggccgagtggttaag

SEQ ID NO: 28605 - DNA, 19 bp, Homo sapiens
  source 1..19: mol_type = genomic DNA
tgtgctctgcacgcgtggg

SEQ ID NO: 28606 - DNA, 20 bp, Homo sapiens
  source 1..20: mol_type = genomic DNA
tgtgctctgcacgcgtgggt

SEQ ID NO: 28607 - DNA, 19 bp, Homo sapiens
  source 1..19: mol_type = genomic DNA
tgtgctttgcacgcgtggg

SEQ ID NO: 28608 - DNA, 20 bp, Homo sapiens
  source 1..20: mol_type = genomic DNA
tgtgctttgcacgcgtgggt

SEQ ID NO: 28609 - DNA, 22 bp, Homo sapiens
  source 1..22: mol_type = genomic DNA
tgtgctttgcacgcgtgggttc

SEQ ID NO: 28610 - DNA, 41 bp, Homo sapiens
  source 1..41: mol_type = genomic DNA
tgtgctttgcacgcgtgggttcgaatcccatcctcgtcgcc

SEQ ID NO: 28611 - DNA, 42 bp, Homo sapiens
  source 1..42: mol_type = genomic DNA
tgtgctttgcacgcgtgggttcgaatcccatcctcgtcgcca

SEQ ID NO: 28612 - DNA, 34 bp, Homo sapiens
  source 1..34: mol_type = genomic DNA
tgtggccgcagcaacctcggttcgaatccgagtc

SEQ ID NO: 28613 - DNA, 28 bp, Homo sapiens
  source 1..28: mol_type = genomic DNA
tgtgggttcgaatcccaccagagtcgcc

SEQ ID NO: 28614 - DNA, 29 bp, Homo sapiens
  source 1..29: mol_type = genomic DNA
tgtgggttcgaatcccaccagagtcgcca

SEQ ID NO: 28615 - DNA, 27 bp, Homo sapiens
  source 1..27: mol_type = genomic DNA
tgtgggttcgagtcccaccagagtcgc

SEQ ID NO: 28616 - DNA, 28 bp, Homo sapiens
  source 1..28: mol_type = genomic DNA
tgtgggttcgagtcccaccagagtcgcc

SEQ ID NO: 28617 - DNA, 29 bp, Homo sapiens
  source 1..29: mol_type = genomic DNA
tgtgggttcgagtcccaccagagtcgcca

SEQ ID NO: 28618 - DNA, 25 bp, Homo sapiens
  source 1..25: mol_type = genomic DNA
tgtgggttcgagtcccacctggggt

SEQ ID NO: 28619 - DNA, 26 bp, Homo sapiens
  source 1..26: mol_type = genomic DNA
tgtgggttcgagtcccacctggggta

SEQ ID NO: 28620 - DNA, 26 bp, Homo sapiens
  source 1..26: mol_type = genomic DNA
tgtgggttcgagtcccacctggggtg

SEQ ID NO: 28621 - DNA, 27 bp, Homo sapiens
  source 1..27: mol_type = genomic DNA
tgtgggttcgagtcccacctggggtgc

SEQ ID NO: 28622 - DNA, 29 bp, Homo sapiens
  source 1..29: mol_type = genomic DNA
tgtgggttcgagtcccacctggggtgcca

SEQ ID NO: 28623 - DNA, 23 bp, Homo sapiens
  source 1..23: mol_type = genomic DNA
tgtgggttcgagtcccatctggg

SEQ ID NO: 28624 - DNA, 24 bp, Homo sapiens
  source 1..24: mol_type = genomic DNA
tgtgggttcgagtcccatctgggg

SEQ ID NO: 28625 - DNA, 26 bp, Homo sapiens
  source 1..26: mol_type = genomic DNA
tgtgggttcgagtcccatctggggtg

SEQ ID NO: 28626 - DNA, 27 bp, Homo sapiens
  source 1..27: mol_type = genomic DNA
tgtgggttcgagtcccatctggggtgc

SEQ ID NO: 28627 - DNA, 28 bp, Homo sapiens
  source 1..28: mol_type = genomic DNA
tgtgggttcgagtcccatctggggtgcc

SEQ ID NO: 28628 - DNA, 29 bp, Homo sapiens
  source 1..29: mol_type = genomic DNA
tgtgggttcgagtcccatctggggtgcca

SEQ ID NO: 28629 - DNA, 24 bp, Homo sapiens
  source 1..24: mol_type = genomic DNA
tgtgggttcgagtcccatctgggt

SEQ ID NO: 28630 - DNA, 25 bp, Homo sapiens
  source 1..25: mol_type = genomic DNA
tgtgggttcgagtcccatctgggtc

SEQ ID NO: 28631 - DNA, 26 bp, Homo sapiens
  source 1..26: mol_type = genomic DNA
tgtgggttcgagtcccatctgggtcg

SEQ ID NO: 28632 - DNA, 27 bp, Homo sapiens
  source 1..27: mol_type = genomic DNA
tgtgggttcgagtcccatctgggtcgc

SEQ ID NO: 28633 - DNA, 28 bp, Homo sapiens
  source 1..28: mol_type = genomic DNA
tgtgggttcgagtcccatctgggtcgcc

SEQ ID NO: 28634 - DNA, 29 bp, Homo sapiens
  source 1..29: mol_type = genomic DNA
tgtgggttcgagtcccatctgggtcgcca

SEQ ID NO: 28635 - DNA, 23 bp, Homo sapiens
  source 1..23: mol_type = genomic DNA
tgtgggtttaagtcccattggtc

SEQ ID NO: 28636 - DNA, 24 bp, Homo sapiens
  source 1..24: mol_type = genomic DNA
tgtgggtttaagtcccattggtct

SEQ ID NO: 28637 - DNA, 25 bp, Homo sapiens
  source 1..25: mol_type = genomic DNA
tgtgggtttaagtcccattggtcta

SEQ ID NO: 28638 - DNA, 26 bp, Homo sapiens
  source 1..26: mol_type = genomic DNA
tgtgggtttaagtcccattggtctag

SEQ ID NO: 28639 - DNA, 27 bp, Homo sapiens
  source 1..27: mol_type = genomic DNA
tgtgggtttaagtcccattggtctagc

SEQ ID NO: 28640 - DNA, 28 bp, Homo sapiens
  source 1..28: mol_type = genomic DNA
tgtgggtttaagtcccattggtctagcc

SEQ ID NO: 28641 - DNA, 29 bp, Homo sapiens
  source 1..29: mol_type = genomic DNA
tgtgggtttaagtcccattggtctagcca

SEQ ID NO: 28642 - DNA, 17 bp, Homo sapiens
  source 1..17: mol_type = genomic DNA
tgtggtctagtggttag

SEQ ID NO: 28643 - DNA, 18 bp, Homo sapiens
  source 1..18: mol_type = genomic DNA
tgtggtctagtggttagg

SEQ ID NO: 28644 - DNA, 17 bp, Homo sapiens
  source 1..17: mol_type = genomic DNA
tgtgtgaggtcccgggt

SEQ ID NO: 28645 - DNA, 17 bp, Homo sapiens
  source 1..17: mol_type = genomic DNA
tgttaactaagtgtttg

SEQ ID NO: 28646 - DNA, 28 bp, Homo sapiens
  source 1..28: mol_type = genomic DNA
tgttaactaagtgtttgtgggtttaagt

SEQ ID NO: 28647 - DNA, 34 bp, Homo sapiens
  source 1..34: mol_type = genomic DNA
tgttaactaagtgtttgtgggtttaagtcccatt

SEQ ID NO: 28648 - DNA, 38 bp, Homo sapiens
  source 1..38: mol_type = genomic DNA
tgttaactaagtgtttgtgggtttaagtcccattggtc

SEQ ID NO: 28649 - DNA, 39 bp, Homo sapiens
  source 1..39: mol_type = genomic DNA
tgttaactaagtgtttgtgggtttaagtcccattggtct

SEQ ID NO: 28650 - DNA, 40 bp, Homo sapiens
  source 1..40: mol_type = genomic DNA
tgttaactaagtgtttgtgggtttaagtcccattggtcta

SEQ ID NO: 28651 - DNA, 42 bp, Homo sapiens
  source 1..42: mol_type = genomic DNA
tgttaactaagtgtttgtgggtttaagtcccattggtctagc

SEQ ID NO: 28652 - DNA, 43 bp, Homo sapiens
  source 1..43: mol_type = genomic DNA
tgttaactaagtgtttgtgggtttaagtcccattggtctagcc

SEQ ID NO: 28653 - DNA, 44 bp, Homo sapiens
  source 1..44: mol_type = genomic DNA
tgttaactaagtgtttgtgggtttaagtcccattggtctagcca

SEQ ID NO: 28654 - DNA, 36 bp, Homo sapiens
  source 1..36: mol_type = genomic DNA
tgttaagatggcagagcccggtaatcgcataaaact

SEQ ID NO: 28655 - DNA, 21 bp, Homo sapiens
  source 1..21: mol_type = genomic DNA
tgttcaaatcacgtcggggtc

SEQ ID NO: 28656 - DNA, 22 bp, Homo sapiens
  source 1..22: mol_type = genomic DNA
tgttcaaatcacgtcggggtca

SEQ ID NO: 28657 - DNA, 24 bp, Homo sapiens
  source 1..24: mol_type = genomic DNA
tgttcaaatcacgtcggggtcacc

SEQ ID NO: 28658 - DNA, 25 bp, Homo sapiens
  source 1..25: mol_type = genomic DNA
tgttcaaatcacgtcggggtcacca

SEQ ID NO: 28659 - DNA, 21 bp, Homo sapiens
  source 1..21: mol_type = genomic DNA
tgttcaagtcacgtcggggtc

SEQ ID NO: 28660 - DNA, 22 bp, Homo sapiens
  source 1..22: mol_type = genomic DNA
tgttcaagtcacgtcggggtca

SEQ ID NO: 28661 - DNA, 23 bp, Homo sapiens
  source 1..23: mol_type = genomic DNA
tgttcaagtcacgtcggggtcac

SEQ ID NO: 28662 - DNA, 24 bp, Homo sapiens
  source 1..24: mol_type = genomic DNA
tgttcaagtcacgtcggggtcacc

SEQ ID NO: 28663 - DNA, 25 bp, Homo sapiens
  source 1..25: mol_type = genomic DNA
tgttcaagtcacgtcggggtcacca

SEQ ID NO: 28664 - DNA, 18 bp, Homo sapiens
  source 1..18: mol_type = genomic DNA
tgttcgaatcacgtcggg

SEQ ID NO: 28665 - DNA, 20 bp, Homo sapiens
  source 1..20: mol_type = genomic DNA
tgttcgaatcacgtcggggt

SEQ ID NO: 28666 - DNA, 21 bp, Homo sapiens
  source 1..21: mol_type = genomic DNA
tgttcgaatcacgtcggggtc

SEQ ID NO: 28667 - DNA, 22 bp, Homo sapiens
  source 1..22: mol_type = genomic DNA
tgttcgaatcacgtcggggtca

SEQ ID NO: 28668 - DNA, 23 bp, Homo sapiens
  source 1..23: mol_type = genomic DNA
tgttcgaatcacgtcggggtcac

SEQ ID NO: 28669 - DNA, 24 bp, Homo sapiens
  source 1..24: mol_type = genomic DNA
tgttcgaatcacgtcggggtcacc

SEQ ID NO: 28670 - DNA, 25 bp, Homo sapiens
  source 1..25: mol_type = genomic DNA
tgttcgaatcacgtcggggtcacca

SEQ ID NO: 28671 - DNA, 23 bp, Homo sapiens
  source 1..23: mol_type = genomic DNA
tgttggttatacccttcccgtac

SEQ ID NO: 28672 - DNA, 24 bp, Homo sapiens
  source 1..24: mol_type = genomic DNA
tgttggttatacccttcccgtact

SEQ ID NO: 28673 - DNA, 25 bp, Homo sapiens
  source 1..25: mol_type = genomic DNA
tgttggttatacccttcccgtacta

SEQ ID NO: 28674 - DNA, 26 bp, Homo sapiens
  source 1..26: mol_type = genomic DNA
tgttggttatacccttcccgtactac

SEQ ID NO: 28675 - DNA, 27 bp, Homo sapiens
  source 1..27: mol_type = genomic DNA
tgttggttatacccttcccgtactacc

SEQ ID NO: 28676 - DNA, 28 bp, Homo sapiens
  source 1..28: mol_type = genomic DNA
tgttggttatacccttcccgtactacca

SEQ ID NO: 28677 - DNA, 16 bp, Homo sapiens
  source 1..16: mol_type = genomic DNA
tgtttagacgggctca

SEQ ID NO: 28678 - DNA, 17 bp, Homo sapiens
  source 1..17: mol_type = genomic DNA
tgtttagacgggctcac

SEQ ID NO: 28679 - DNA, 18 bp, Homo sapiens
  source 1..18: mol_type = genomic DNA
tgtttagacgggctcaca

SEQ ID NO: 28680 - DNA, 19 bp, Homo sapiens
  source 1..19: mol_type = genomic DNA
tgtttagacgggctcacat

SEQ ID NO: 28681 - DNA, 20 bp, Homo sapiens
  source 1..20: mol_type = genomic DNA
tgtttagacgggctcacatc

SEQ ID NO: 28682 - DNA, 21 bp, Homo sapiens
  source 1..21: mol_type = genomic DNA
tgtttagacgggctcacatca

SEQ ID NO: 28683 - DNA, 22 bp, Homo sapiens
  source 1..22: mol_type = genomic DNA
tgtttagacgggctcacatcac

SEQ ID NO: 28684 - DNA, 23 bp, Homo sapiens
  source 1..23: mol_type = genomic DNA
tgtttagacgggctcacatcacc

SEQ ID NO: 28685 - DNA, 24 bp, Homo sapiens
  source 1..24: mol_type = genomic DNA
tgtttagacgggctcacatcaccc

SEQ ID NO: 28686 - DNA, 25 bp, Homo sapiens
  source 1..25: mol_type = genomic DNA
tgtttagacgggctcacatcacccc

SEQ ID NO: 28687 - DNA, 26 bp, Homo sapiens
  source 1..26: mol_type = genomic DNA
tgtttagacgggctcacatcacccca

SEQ ID NO: 28688 - DNA, 27 bp, Homo sapiens
  source 1..27: mol_type = genomic DNA
tgtttagacgggctcacatcaccccat

SEQ ID NO: 28689 - DNA, 28 bp, Homo sapiens
  source 1..28: mol_type = genomic DNA
tgtttagacgggctcacatcaccccata

SEQ ID NO: 28690 - DNA, 29 bp, Homo sapiens
  source 1..29: mol_type = genomic DNA
tgtttagacgggctcacatcaccccataa

SEQ ID NO: 28691 - DNA, 30 bp, Homo sapiens
  source 1..30: mol_type = genomic DNA
tgtttagacgggctcacatcaccccataaa

SEQ ID NO: 28692 - DNA, 31 bp, Homo sapiens
  source 1..31: mol_type = genomic DNA
tgtttagacgggctcacatcaccccataaac

SEQ ID NO: 28693 - DNA, 32 bp, Homo sapiens
  source 1..32: mol_type = genomic DNA
tgtttagacgggctcacatcaccccataaaca

SEQ ID NO: 28694 - DNA, 33 bp, Homo sapiens
  source 1..33: mol_type = genomic DNA
tgtttagacgggctcacatcaccccataaacac

SEQ ID NO: 28695 - DNA, 34 bp, Homo sapiens
  source 1..34: mol_type = genomic DNA
tgtttagacgggctcacatcaccccataaacacc

SEQ ID NO: 28696 - DNA, 35 bp, Homo sapiens
  source 1..35: mol_type = genomic DNA
tgtttagacgggctcacatcaccccataaacacca

SEQ ID NO: 28697 - DNA, 34 bp, Homo sapiens
  source 1..34: mol_type = genomic DNA
tgtttccgtagtgtagtggttatcacgttcgcct

SEQ ID NO: 28698 - DNA, 16 bp, Homo sapiens
  source 1..16: mol_type = genomic DNA
tgtttgtgggtttaag

SEQ ID NO: 28699 - DNA, 18 bp, Homo sapiens
  source 1..18: mol_type = genomic DNA
tgtttgtgggtttaagtc

SEQ ID NO: 28700 - DNA, 22 bp, Homo sapiens
  source 1..22: mol_type = genomic DNA
tgtttgtgggtttaagtcccat

SEQ ID NO: 28701 - DNA, 23 bp, Homo sapiens
  source 1..23: mol_type = genomic DNA
tgtttgtgggtttaagtcccatt

SEQ ID NO: 28702 - DNA, 27 bp, Homo sapiens
  source 1..27: mol_type = genomic DNA
tgtttgtgggtttaagtcccattggtc

SEQ ID NO: 28703 - DNA, 28 bp, Homo sapiens
  source 1..28: mol_type = genomic DNA
tgtttgtgggtttaagtcccattggtct

SEQ ID NO: 28704 - DNA, 29 bp, Homo sapiens
  source 1..29: mol_type = genomic DNA
tgtttgtgggtttaagtcccattggtcta

SEQ ID NO: 28705 - DNA, 30 bp, Homo sapiens
  source 1..30: mol_type = genomic DNA
tgtttgtgggtttaagtcccattggtctag

SEQ ID NO: 28706 - DNA, 31 bp, Homo sapiens
  source 1..31: mol_type = genomic DNA
tgtttgtgggtttaagtcccattggtctagc

SEQ ID NO: 28707 - DNA, 32 bp, Homo sapiens
  source 1..32: mol_type = genomic DNA
tgtttgtgggtttaagtcccattggtctagcc

SEQ ID NO: 28708 - DNA, 33 bp, Homo sapiens
  source 1..33: mol_type = genomic DNA
tgtttgtgggtttaagtcccattggtctagcca

SEQ ID NO: 28709 - DNA, 20 bp, Homo sapiens
  source 1..20: mol_type = genomic DNA
ttaaaactttacagtcagag

SEQ ID NO: 28710 - DNA, 22 bp, Homo sapiens
  source 1..22: mol_type = genomic DNA
ttaaaactttacagtcagaggt

SEQ ID NO: 28711 - DNA, 23 bp, Homo sapiens
  source 1..23: mol_type = genomic DNA
ttaaaactttacagtcagaggtt

SEQ ID NO: 28712 - DNA, 24 bp, Homo sapiens
  source 1..24: mol_type = genomic DNA
ttaaaactttacagtcagaggttc

SEQ ID NO: 28713 - DNA, 25 bp, Homo sapiens
  source 1..25: mol_type = genomic DNA
ttaaaactttacagtcagaggttca

SEQ ID NO: 28714 - DNA, 35 bp, Homo sapiens
  source 1..35: mol_type = genomic DNA
ttaaaactttacagtcagaggttcaattcctcttc

SEQ ID NO: 28715 - DNA, 18 bp, Homo sapiens
  source 1..18: mol_type = genomic DNA
ttaaacaaaacgaatgat

SEQ ID NO: 28716 - DNA, 19 bp, Homo sapiens
  source 1..19: mol_type = genomic DNA
ttaaacaaaacgaatgatt

SEQ ID NO: 28717 - DNA, 22 bp, Homo sapiens
  source 1..22: mol_type = genomic DNA
ttaaacaaaacgaatgatttcg

SEQ ID NO: 28718 - DNA, 24 bp, Homo sapiens
  source 1..24: mol_type = genomic DNA
ttaaacaaaacgaatgatttcgac

SEQ ID NO: 28719 - DNA, 25 bp, Homo sapiens
  source 1..25: mol_type = genomic DNA
ttaaacaaaacgaatgatttcgact

SEQ ID NO: 28720 - DNA, 26 bp, Homo sapiens
  source 1..26: mol_type = genomic DNA
ttaaacaaaacgaatgatttcgactc

SEQ ID NO: 28721 - DNA, 27 bp, Homo sapiens
  source 1..27: mol_type = genomic DNA
ttaaacaaaacgaatgatttcgactca

SEQ ID NO: 28722 - DNA, 37 bp, Homo sapiens
  source 1..37: mol_type = genomic DNA
ttaaacaaaacgaatgatttcgactcattaaattatg

SEQ ID NO: 28723 - DNA, 39 bp, Homo sapiens
  source 1..39: mol_type = genomic DNA
ttaaacaaaacgaatgatttcgactcattaaattatgat

SEQ ID NO: 28724 - DNA, 17 bp, Homo sapiens
  source 1..17: mol_type = genomic DNA
ttaaacccccttatttc

SEQ ID NO: 28725 - DNA, 18 bp, Homo sapiens
  source 1..18: mol_type = genomic DNA
ttaaacccccttatttct

SEQ ID NO: 28726 - DNA, 19 bp, Homo sapiens
  source 1..19: mol_type = genomic DNA
ttaaacccccttatttcta

SEQ ID NO: 28727 - DNA, 20 bp, Homo sapiens
  source 1..20: mol_type = genomic DNA
ttaaacccccttatttctac

SEQ ID NO: 28728 - DNA, 21 bp, Homo sapiens
  source 1..21: mol_type = genomic DNA
ttaaacccccttatttctacc

SEQ ID NO: 28729 - DNA, 22 bp, Homo sapiens
  source 1..22: mol_type = genomic DNA
ttaaacccccttatttctacca

SEQ ID NO: 28730 - DNA, 16 bp, Homo sapiens
  source 1..16: mol_type = genomic DNA
ttaaagactttttctc

SEQ ID NO: 28731 - DNA, 17 bp, Homo sapiens
  source 1..17: mol_type = genomic DNA
ttaaagactttttctct

SEQ ID NO: 28732 - DNA, 19 bp, Homo sapiens
  source 1..19: mol_type = genomic DNA
ttaaagactttttctctga

SEQ ID NO: 28733 - DNA, 20 bp, Homo sapiens
  source 1..20: mol_type = genomic DNA
ttaaagactttttctctgac

SEQ ID NO: 28734 - DNA, 21 bp, Homo sapiens
  source 1..21: mol_type = genomic DNA
ttaaagactttttctctgacc

SEQ ID NO: 28735 - DNA, 22 bp, Homo sapiens
  source 1..22: mol_type = genomic DNA
ttaaagactttttctctgacca

SEQ ID NO: 28736 - DNA, 16 bp, Homo sapiens
  source 1..16: mol_type = genomic DNA
ttaaagattaagagaa

SEQ ID NO: 28737 - DNA, 17 bp, Homo sapiens
  source 1..17: mol_type = genomic DNA
ttaaagattaagagaac

SEQ ID NO: 28738 - DNA, 18 bp, Homo sapiens
  source 1..18: mol_type = genomic DNA
ttaaagattaagagaacc

SEQ ID NO: 28739 - DNA, 19 bp, Homo sapiens
  source 1..19: mol_type = genomic DNA
ttaaagattaagagaacca

SEQ ID NO: 28740 - DNA, 20 bp, Homo sapiens
  source 1..20: mol_type = genomic DNA
ttaaagattaagagaaccaa

SEQ ID NO: 28741 - DNA, 21 bp, Homo sapiens
  source 1..21: mol_type = genomic DNA
ttaaagattaagagaaccaac

SEQ ID NO: 28742 - DNA, 22 bp, Homo sapiens
  source 1..22: mol_type = genomic DNA
ttaaagattaagagaaccaaca

SEQ ID NO: 28743 - DNA, 23 bp, Homo sapiens
  source 1..23: mol_type = genomic DNA
ttaaagattaagagaaccaacac

SEQ ID NO: 28744 - DNA, 24 bp, Homo sapiens
  source 1..24: mol_type = genomic DNA
ttaaagattaagagaaccaacacc

SEQ ID NO: 28745 - DNA, 25 bp, Homo sapiens
  source 1..25: mol_type = genomic DNA
ttaaagattaagagaaccaacacct

SEQ ID NO: 28746 - DNA, 26 bp, Homo sapiens
  source 1..26: mol_type = genomic DNA
ttaaagattaagagaaccaacacctc

SEQ ID NO: 28747 - DNA, 27 bp, Homo sapiens
  source 1..27: mol_type = genomic DNA
ttaaagattaagagaaccaacacctct

SEQ ID NO: 28748 - DNA, 28 bp, Homo sapiens
  source 1..28: mol_type = genomic DNA
ttaaagattaagagaaccaacacctctt

SEQ ID NO: 28749 - DNA, 29 bp, Homo sapiens
  source 1..29: mol_type = genomic DNA
ttaaagattaagagaaccaacacctcttt

SEQ ID NO: 28750 - DNA, 30 bp, Homo sapiens
  source 1..30: mol_type = genomic DNA
ttaaagattaagagaaccaacacctcttta

SEQ ID NO: 28751 - DNA, 33 bp, Homo sapiens
  source 1..33: mol_type = genomic DNA
ttaaagattaagagaaccaacacctctttacag

SEQ ID NO: 28752 - DNA, 35 bp, Homo sapiens
  source 1..35: mol_type = genomic DNA
ttaaagattaagagaaccaacacctctttacagtg

SEQ ID NO: 28753 - DNA, 36 bp, Homo sapiens
  source 1..36: mol_type = genomic DNA
ttaaagattaagagaaccaacacctctttacagtga

SEQ ID NO: 28754 - DNA, 37 bp, Homo sapiens
  source 1..37: mol_type = genomic DNA
ttaaagattaagagaaccaacacctctttacagtgac

SEQ ID NO: 28755 - DNA, 38 bp, Homo sapiens
  source 1..38: mol_type = genomic DNA
ttaaagattaagagaaccaacacctctttacagtgacc

SEQ ID NO: 28756 - DNA, 39 bp, Homo sapiens
  source 1..39: mol_type = genomic DNA
ttaaagattaagagaaccaacacctctttacagtgacca

SEQ ID NO: 28757 - DNA, 16 bp, Homo sapiens
  source 1..16: mol_type = genomic DNA
ttaaaggataacagct

SEQ ID NO: 28758 - DNA, 22 bp, Homo sapiens
  source 1..22: mol_type = genomic DNA
ttaaaggataacagctatccat

SEQ ID NO: 28759 - DNA, 24 bp, Homo sapiens
  source 1..24: mol_type = genomic DNA
ttaaaggataacagctatccattg

SEQ ID NO: 28760 - DNA, 27 bp, Homo sapiens
  source 1..27: mol_type = genomic DNA
ttaaaggataacagctatccattggtc

SEQ ID NO: 28761 - DNA, 28 bp, Homo sapiens
  source 1..28: mol_type = genomic DNA
ttaaaggataacagctatccattggtct

SEQ ID NO: 28762 - DNA, 29 bp, Homo sapiens
  source 1..29: mol_type = genomic DNA
ttaaaggataacagctatccattggtctt

SEQ ID NO: 28763 - DNA, 30 bp, Homo sapiens
  source 1..30: mol_type = genomic DNA
ttaaaggataacagctatccattggtctta

SEQ ID NO: 28764 - DNA, 31 bp, Homo sapiens
  source 1..31: mol_type = genomic DNA
ttaaaggataacagctatccattggtcttag

SEQ ID NO: 28765 - DNA, 35 bp, Homo sapiens
  source 1..35: mol_type = genomic DNA
ttaaaggataacagctatccattggtcttaggccc

SEQ ID NO: 28766 - DNA, 16 bp, Homo sapiens
  source 1..16: mol_type = genomic DNA
ttaaagtggctgattt

SEQ ID NO: 28767 - DNA, 17 bp, Homo sapiens
  source 1..17: mol_type = genomic DNA
ttaaagtggctgatttg

SEQ ID NO: 28768 - DNA, 18 bp, Homo sapiens
  source 1..18: mol_type = genomic DNA
ttaaagtggctgatttgc

SEQ ID NO: 28769 - DNA, 23 bp, Homo sapiens
  source 1..23: mol_type = genomic DNA
ttaaagtggctgatttgcgttca

SEQ ID NO: 28770 - DNA, 30 bp, Homo sapiens
  source 1..30: mol_type = genomic DNA
ttaaagtggctgatttgcgttcagttgatg

SEQ ID NO: 28771 - DNA, 34 bp, Homo sapiens
  source 1..34: mol_type = genomic DNA
ttaaagtggctgatttgcgttcagttgatgcaga

SEQ ID NO: 28772 - DNA, 35 bp, Homo sapiens
  source 1..35: mol_type = genomic DNA
ttaaagtggctgatttgcgttcagttgatgcagag

SEQ ID NO: 28773 - DNA, 16 bp, Homo sapiens
  source 1..16: mol_type = genomic DNA
ttaaatacagaccaag

SEQ ID NO: 28774 - DNA, 18 bp, Homo sapiens
  source 1..18: mol_type = genomic DNA
ttaaatacagaccaagag

SEQ ID NO: 28775 - DNA, 19 bp, Homo sapiens
  source 1..19: mol_type = genomic DNA
ttaaatacagaccaagagc

SEQ ID NO: 28776 - DNA, 20 bp, Homo sapiens
  source 1..20: mol_type = genomic DNA
ttaaatacagaccaagagcc

SEQ ID NO: 28777 - DNA, 21 bp, Homo sapiens
  source 1..21: mol_type = genomic DNA
ttaaatacagaccaagagcct

SEQ ID NO: 28778 - DNA, 22 bp, Homo sapiens
  source 1..22: mol_type = genomic DNA
ttaaatacagaccaagagcctt

SEQ ID NO: 28779 - DNA, 23 bp, Homo sapiens
  source 1..23: mol_type = genomic DNA
ttaaatacagaccaagagccttc

SEQ ID NO: 28780 - DNA, 24 bp, Homo sapiens
  source 1..24: mol_type = genomic DNA
ttaaatacagaccaagagccttca

SEQ ID NO: 28781 - DNA, 26 bp, Homo sapiens
  source 1..26: mol_type = genomic DNA
ttaaatacagaccaagagccttcaaa

SEQ ID NO: 28782 - DNA, 29 bp, Homo sapiens
  source 1..29: mol_type = genomic DNA
ttaaatacagaccaagagccttcaaagcc

SEQ ID NO: 28783 - DNA, 36 bp, Homo sapiens
  source 1..36: mol_type = genomic DNA
ttaaatacagaccaagagccttcaaagccctcagta

SEQ ID NO: 28784 - DNA, 18 bp, Homo sapiens
  source 1..18: mol_type = genomic DNA
ttaaattagaatcttagc

SEQ ID NO: 28785 - DNA, 19 bp, Homo sapiens
  source 1..19: mol_type = genomic DNA
ttaaattagaatcttagct

SEQ ID NO: 28786 - DNA, 20 bp, Homo sapiens
  source 1..20: mol_type = genomic DNA
ttaaattagaatcttagctt

SEQ ID NO: 28787 - DNA, 21 bp, Homo sapiens
  source 1..21: mol_type = genomic DNA
ttaaattagaatcttagcttt

SEQ ID NO: 28788 - DNA, 22 bp, Homo sapiens
  source 1..22: mol_type = genomic DNA
ttaaattagaatcttagctttg

SEQ ID NO: 28789 - DNA, 23 bp, Homo sapiens
  source 1..23: mol_type = genomic DNA
ttaaattagaatcttagctttgg

SEQ ID NO: 28790 - DNA, 46 bp, Homo sapiens
  source 1..46: mol_type = genomic DNA
ttaaattagaatcttagctttgggtgctaatggtggagttaaagac

SEQ ID NO: 28791 - DNA, 47 bp, Homo sapiens
  source 1..47: mol_type = genomic DNA
ttaaattagaatcttagctttgggtgctaatggtggagttaaagact

SEQ ID NO: 28792 - DNA, 48 bp, Homo sapiens
  source 1..48: mol_type = genomic DNA
ttaaattagaatcttagctttgggtgctaatggtggagttaaagactt

SEQ ID NO: 28793 - DNA, 16 bp, Homo sapiens
  source 1..16: mol_type = genomic DNA
ttaaattataggctaa

SEQ ID NO: 28794 - DNA, 17 bp, Homo sapiens
  source 1..17: mol_type = genomic DNA
ttaaattataggctaaa

SEQ ID NO: 28795 - DNA, 18 bp, Homo sapiens
  source 1..18: mol_type = genomic DNA
ttaaattataggctaaat

SEQ ID NO: 28796 - DNA, 19 bp, Homo sapiens
  source 1..19: mol_type = genomic DNA
ttaaattataggctaaatc

SEQ ID NO: 28797 - DNA, 20 bp, Homo sapiens
  source 1..20: mol_type = genomic DNA
ttaaattataggctaaatcc

SEQ ID NO: 28798 - DNA, 21 bp, Homo sapiens
  source 1..21: mol_type = genomic DNA
ttaaattataggctaaatcct

SEQ ID NO: 28799 - DNA, 23 bp, Homo sapiens
  source 1..23: mol_type = genomic DNA
ttaaattataggctaaatcctat

SEQ ID NO: 28800 - DNA, 25 bp, Homo sapiens
  source 1..25: mol_type = genomic DNA
ttaaattataggctaaatcctatat

SEQ ID NO: 28801 - DNA, 26 bp, Homo sapiens
  source 1..26: mol_type = genomic DNA
ttaaattataggctaaatcctatata

SEQ ID NO: 28802 - DNA, 31 bp, Homo sapiens
  source 1..31: mol_type = genomic DNA
ttaaattataggctaaatcctatatatctta

SEQ ID NO: 28803 - DNA, 33 bp, Homo sapiens
  source 1..33: mol_type = genomic DNA
ttaaattataggctaaatcctatatatcttacc

SEQ ID NO: 28804 - DNA, 34 bp, Homo sapiens
  source 1..34: mol_type = genomic DNA
ttaaattataggctaaatcctatatatcttacca

SEQ ID NO: 28805 - DNA, 16 bp, Homo sapiens
  source 1..16: mol_type = genomic DNA
ttaaattatgataatc

SEQ ID NO: 28806 - DNA, 17 bp, Homo sapiens
  source 1..17: mol_type = genomic DNA
ttaaattatgataatca

SEQ ID NO: 28807 - DNA, 25 bp, Homo sapiens
  source 1..25: mol_type = genomic DNA
ttaaattatgataatcatatttacc

SEQ ID NO: 28808 - DNA, 28 bp, Homo sapiens
  source 1..28: mol_type = genomic DNA
ttaaattatgataatcatatttaccaac

SEQ ID NO: 28809 - DNA, 29 bp, Homo sapiens
  source 1..29: mol_type = genomic DNA
ttaaattatgataatcatatttaccaacc

SEQ ID NO: 28810 - DNA, 30 bp, Homo sapiens
  source 1..30: mol_type = genomic DNA
ttaaattatgataatcatatttaccaacca

SEQ ID NO: 28811 - DNA, 16 bp, Homo sapiens
  source 1..16: mol_type = genomic DNA
ttaacacaaagcaccc

SEQ ID NO: 28812 - DNA, 17 bp, Homo sapiens
  source 1..17: mol_type = genomic DNA
ttaacacaaagcaccca

SEQ ID NO: 28813 - DNA, 18 bp, Homo sapiens
  source 1..18: mol_type = genomic DNA
ttaacacaaagcacccaa

SEQ ID NO: 28814 - DNA, 19 bp, Homo sapiens
  source 1..19: mol_type = genomic DNA
ttaacacaaagcacccaac

SEQ ID NO: 28815 - DNA, 20 bp, Homo sapiens
  source 1..20: mol_type = genomic DNA
ttaacacaaagcacccaact

SEQ ID NO: 28816 - DNA, 21 bp, Homo sapiens
  source 1..21: mol_type = genomic DNA
ttaacacaaagcacccaactt

SEQ ID NO: 28817 - DNA, 22 bp, Homo sapiens
  source 1..22: mol_type = genomic DNA
ttaacacaaagcacccaactta

SEQ ID NO: 28818 - DNA, 23 bp, Homo sapiens
  source 1..23: mol_type = genomic DNA
ttaacacaaagcacccaacttac

SEQ ID NO: 28819 - DNA, 24 bp, Homo sapiens
  source 1..24: mol_type = genomic DNA
ttaacacaaagcacccaacttaca

SEQ ID NO: 28820 - DNA, 25 bp, Homo sapiens
  source 1..25: mol_type = genomic DNA
ttaacacaaagcacccaacttacac

SEQ ID NO: 28821 - DNA, 26 bp, Homo sapiens
  source 1..26: mol_type = genomic DNA
ttaacacaaagcacccaacttacact

SEQ ID NO: 28822 - DNA, 27 bp, Homo sapiens
  source 1..27: mol_type = genomic DNA
ttaacacaaagcacccaacttacactt

SEQ ID NO: 28823 - DNA, 28 bp, Homo sapiens
  source 1..28: mol_type = genomic DNA
ttaacacaaagcacccaacttacactta

SEQ ID NO: 28824 - DNA, 29 bp, Homo sapiens
  source 1..29: mol_type = genomic DNA
ttaacacaaagcacccaacttacacttag

SEQ ID NO: 28825 - DNA, 31 bp, Homo sapiens
  source 1..31: mol_type = genomic DNA
ttaacacaaagcacccaacttacacttagga

SEQ ID NO: 28826 - DNA, 32 bp, Homo sapiens
  source 1..32: mol_type = genomic DNA
ttaacacaaagcacccaacttacacttaggag

SEQ ID NO: 28827 - DNA, 33 bp, Homo sapiens
  source 1..33: mol_type = genomic DNA
ttaacacaaagcacccaacttacacttaggaga

SEQ ID NO: 28828 - DNA, 34 bp, Homo sapiens
  source 1..34: mol_type = genomic DNA
ttaacacaaagcacccaacttacacttaggagat

SEQ ID NO: 28829 - DNA, 38 bp, Homo sapiens
  source 1..38: mol_type = genomic DNA
ttaacacaaagcacccaacttacacttaggagatttca

SEQ ID NO: 28830 - DNA, 39 bp, Homo sapiens
  source 1..39: mol_type = genomic DNA
ttaacacaaagcacccaacttacacttaggagatttcaa

SEQ ID NO: 28831 - DNA, 40 bp, Homo sapiens
  source 1..40: mol_type = genomic DNA
ttaacacaaagcacccaacttacacttaggagatttcaac

SEQ ID NO: 28832 - DNA, 41 bp, Homo sapiens
  source 1..41: mol_type = genomic DNA
ttaacacaaagcacccaacttacacttaggagatttcaact

SEQ ID NO: 28833 - DNA, 42 bp, Homo sapiens
  source 1..42: mol_type = genomic DNA
ttaacacaaagcacccaacttacacttaggagatttcaactt

SEQ ID NO: 28834 - DNA, 44 bp, Homo sapiens
  source 1..44: mol_type = genomic DNA
ttaacacaaagcacccaacttacacttaggagatttcaacttaa

SEQ ID NO: 28835 - DNA, 45 bp, Homo sapiens
  source 1..45: mol_type = genomic DNA
ttaacacaaagcacccaacttacacttaggagatttcaacttaac

SEQ ID NO: 28836 - DNA, 46 bp, Homo sapiens
  source 1..46: mol_type = genomic DNA
ttaacacaaagcacccaacttacacttaggagatttcaacttaact

SEQ ID NO: 28837 - DNA, 18 bp, Homo sapiens
  source 1..18: mol_type = genomic DNA
ttaaccaaaacatcagat

SEQ ID NO: 28838 - DNA, 19 bp, Homo sapiens
  source 1..19: mol_type = genomic DNA
ttaaccaaaacatcagatt

SEQ ID NO: 28839 - DNA, 20 bp, Homo sapiens
  source 1..20: mol_type = genomic DNA
ttaaccaaaacatcagattg

SEQ ID NO: 28840 - DNA, 21 bp, Homo sapiens
  source 1..21: mol_type = genomic DNA
ttaaccaaaacatcagattgt

SEQ ID NO: 28841 - DNA, 22 bp, Homo sapiens
  source 1..22: mol_type = genomic DNA
ttaaccaaaacatcagattgtg

SEQ ID NO: 28842 - DNA, 23 bp, Homo sapiens
  source 1..23: mol_type = genomic DNA
ttaaccaaaacatcagattgtga

SEQ ID NO: 28843 - DNA, 25 bp, Homo sapiens
  source 1..25: mol_type = genomic DNA
ttaaccaaaacatcagattgtgaat

SEQ ID NO: 28844 - DNA, 26 bp, Homo sapiens
  source 1..26: mol_type = genomic DNA
ttaaccaaaacatcagattgtgaatc

SEQ ID NO: 28845 - DNA, 27 bp, Homo sapiens
  source 1..27: mol_type = genomic DNA
ttaaccaaaacatcagattgtgaatct

SEQ ID NO: 28846 - DNA, 28 bp, Homo sapiens
  source 1..28: mol_type = genomic DNA
ttaaccaaaacatcagattgtgaatctg

SEQ ID NO: 28847 - DNA, 29 bp, Homo sapiens
  source 1..29: mol_type = genomic DNA
ttaaccaaaacatcagattgtgaatctga

SEQ ID NO: 28848 - DNA, 30 bp, Homo sapiens
  source 1..30: mol_type = genomic DNA
ttaaccaaaacatcagattgtgaatctgac

SEQ ID NO: 28849 - DNA, 31 bp, Homo sapiens
  source 1..31: mol_type = genomic DNA
ttaaccaaaacatcagattgtgaatctgaca

SEQ ID NO: 28850 - DNA, 33 bp, Homo sapiens
  source 1..33: mol_type = genomic DNA
ttaaccaaaacatcagattgtgaatctgacaac

SEQ ID NO: 28851 - DNA, 34 bp, Homo sapiens
  source 1..34: mol_type = genomic DNA
ttaaccaaaacatcagattgtgaatctgacaaca

SEQ ID NO: 28852 - DNA, 35 bp, Homo sapiens
  source 1..35: mol_type = genomic DNA
ttaaccaaaacatcagattgtgaatctgacaacag

SEQ ID NO: 28853 - DNA, 36 bp, Homo sapiens
  source 1..36: mol_type = genomic DNA
ttaaccaaaacatcagattgtgaatctgacaacaga

SEQ ID NO: 28854 - DNA, 37 bp, Homo sapiens
  source 1..37: mol_type = genomic DNA
ttaaccaaaacatcagattgtgaatctgacaacagag

SEQ ID NO: 28855 - DNA, 38 bp, Homo sapiens
  source 1..38: mol_type = genomic DNA
ttaaccaaaacatcagattgtgaatctgacaacagagg

SEQ ID NO: 28856 - DNA, 39 bp, Homo sapiens
  source 1..39: mol_type = genomic DNA
ttaaccaaaacatcagattgtgaatctgacaacagaggc

SEQ ID NO: 28857 - DNA, 40 bp, Homo sapiens
  source 1..40: mol_type = genomic DNA
ttaaccaaaacatcagattgtgaatctgacaacagaggct

SEQ ID NO: 28858 - DNA, 41 bp, Homo sapiens
  source 1..41: mol_type = genomic DNA
ttaaccaaaacatcagattgtgaatctgacaacagaggctt

SEQ ID NO: 28859 - DNA, 43 bp, Homo sapiens
  source 1..43: mol_type = genomic DNA
ttaaccaaaacatcagattgtgaatctgacaacagaggcttac

SEQ ID NO: 28860 - DNA, 45 bp, Homo sapiens
  source 1..45: mol_type = genomic DNA
ttaaccaaaacatcagattgtgaatctgacaacagaggcttacga

SEQ ID NO: 28861 - DNA, 46 bp, Homo sapiens
  source 1..46: mol_type = genomic DNA
ttaaccaaaacatcagattgtgaatctgacaacagaggcttacgac

SEQ ID NO: 28862 - DNA, 47 bp, Homo sapiens
  source 1..47: mol_type = genomic DNA
ttaaccaaaacatcagattgtgaatctgacaacagaggcttacgacc

SEQ ID NO: 28863 - DNA, 48 bp, Homo sapiens
  source 1..48: mol_type = genomic DNA
ttaaccaaaacatcagattgtgaatctgacaacagaggcttacgaccc

SEQ ID NO: 28864 - DNA, 41 bp, Homo sapiens
  source 1..41: mol_type = genomic DNA
ttaaccgaaagattggtggttcgagcccacccagggacgcc

SEQ ID NO: 28865 - DNA, 21 bp, Homo sapiens
  source 1..21: mol_type = genomic DNA
ttaaccgaaaggttggtggtt

SEQ ID NO: 28866 - DNA, 22 bp, Homo sapiens
  source 1..22: mol_type = genomic DNA
ttaaccgaaaggttggtggttc

SEQ ID NO: 28867 - DNA, 23 bp, Homo sapiens
  source 1..23: mol_type = genomic DNA
ttaaccgaaaggttggtggttcg

SEQ ID NO: 28868 - DNA, 24 bp, Homo sapiens
  source 1..24: mol_type = genomic DNA
ttaaccgaaaggttggtggttcga

SEQ ID NO: 28869 - DNA, 25 bp, Homo sapiens
  source 1..25: mol_type = genomic DNA
ttaaccgaaaggttggtggttcgag

SEQ ID NO: 28870 - DNA, 26 bp, Homo sapiens
  source 1..26: mol_type = genomic DNA
ttaaccgaaaggttggtggttcgagc

SEQ ID NO: 28871 - DNA, 35 bp, Homo sapiens
  source 1..35: mol_type = genomic DNA
ttaaccgaaaggttggtggttcgagcccacccagg

SEQ ID NO: 28872 - DNA, 36 bp, Homo sapiens
  source 1..36: mol_type = genomic DNA
ttaaccgaaaggttggtggttcgagcccacccaggg

SEQ ID NO: 28873 - DNA, 37 bp, Homo sapiens
  source 1..37: mol_type = genomic DNA
ttaaccgaaaggttggtggttcgagcccacccaggga

SEQ ID NO: 28874 - DNA, 38 bp, Homo sapiens
  source 1..38: mol_type = genomic DNA
ttaaccgaaaggttggtggttcgagcccacccagggac

SEQ ID NO: 28875 - DNA, 39 bp, Homo sapiens
  source 1..39: mol_type = genomic DNA
ttaaccgaaaggttggtggttcgagcccacccagggacg

SEQ ID NO: 28876 - DNA, 40 bp, Homo sapiens
  source 1..40: mol_type = genomic DNA
ttaaccgaaaggttggtggttcgagcccacccagggacgc

SEQ ID NO: 28877 - DNA, 41 bp, Homo sapiens
  source 1..41: mol_type = genomic DNA
ttaaccgaaaggttggtggttcgagcccacccagggacgcc

SEQ ID NO: 28878 - DNA, 42 bp, Homo sapiens
  source 1..42: mol_type = genomic DNA
ttaaccgaaaggttggtggttcgagcccacccagggacgcca

SEQ ID NO: 28879 - DNA, 41 bp, Homo sapiens
  source 1..41: mol_type = genomic DNA
ttaaccgaaaggttggtggttcgatcccacccagggacgcc

SEQ ID NO: 28880 - DNA, 25 bp, Homo sapiens
  source 1..25: mol_type = genomic DNA
ttaaccttttaagttaaagattaag

SEQ ID NO: 28881 - DNA, 26 bp, Homo sapiens
  source 1..26: mol_type = genomic DNA
ttaaccttttaagttaaagattaaga

SEQ ID NO: 28882 - DNA, 27 bp, Homo sapiens
  source 1..27: mol_type = genomic DNA
ttaaccttttaagttaaagattaagag

SEQ ID NO: 28883 - DNA, 30 bp, Homo sapiens
  source 1..30: mol_type = genomic DNA
ttaaccttttaagttaaagattaagagaac

SEQ ID NO: 28884 - DNA, 31 bp, Homo sapiens
  source 1..31: mol_type = genomic DNA
ttaaccttttaagttaaagattaagagaacc

SEQ ID NO: 28885 - DNA, 32 bp, Homo sapiens
  source 1..32: mol_type = genomic DNA
ttaaccttttaagttaaagattaagagaacca

SEQ ID NO: 28886 - DNA, 34 bp, Homo sapiens
  source 1..34: mol_type = genomic DNA
ttaaccttttaagttaaagattaagagaaccaac

SEQ ID NO: 28887 - DNA, 36 bp, Homo sapiens
  source 1..36: mol_type = genomic DNA
ttaaccttttaagttaaagattaagagaaccaacac

SEQ ID NO: 28888 - DNA, 37 bp, Homo sapiens
  source 1..37: mol_type = genomic DNA
ttaaccttttaagttaaagattaagagaaccaacacc

SEQ ID NO: 28889 - DNA, 38 bp, Homo sapiens
  source 1..38: mol_type = genomic DNA
ttaaccttttaagttaaagattaagagaaccaacacct

SEQ ID NO: 28890 - DNA, 19 bp, Homo sapiens
  source 1..19: mol_type = genomic DNA
ttaactaagtgtttgtggg

SEQ ID NO: 28891 - DNA, 20 bp, Homo sapiens
  source 1..20: mol_type = genomic DNA
ttaactaagtgtttgtgggt

SEQ ID NO: 28892 - DNA, 21 bp, Homo sapiens
  source 1..21: mol_type = genomic DNA
ttaactaagtgtttgtgggtt

SEQ ID NO: 28893 - DNA, 22 bp, Homo sapiens
  source 1..22: mol_type = genomic DNA
ttaactaagtgtttgtgggttt

SEQ ID NO: 28894 - DNA, 23 bp, Homo sapiens
  source 1..23: mol_type = genomic DNA
ttaactaagtgtttgtgggttta

SEQ ID NO: 28895 - DNA, 24 bp, Homo sapiens
  source 1..24: mol_type = genomic DNA
ttaactaagtgtttgtgggtttaa

SEQ ID NO: 28896 - DNA, 25 bp, Homo sapiens
  source 1..25: mol_type = genomic DNA
ttaactaagtgtttgtgggtttaag

SEQ ID NO: 28897 - DNA, 26 bp, Homo sapiens
  source 1..26: mol_type = genomic DNA
ttaactaagtgtttgtgggtttaagt

SEQ ID NO: 28898 - DNA, 27 bp, Homo sapiens
  source 1..27: mol_type = genomic DNA
ttaactaagtgtttgtgggtttaagtc

SEQ ID NO: 28899 - DNA, 28 bp, Homo sapiens
  source 1..28: mol_type = genomic DNA
ttaactaagtgtttgtgggtttaagtcc

SEQ ID NO: 28900 - DNA, 30 bp, Homo sapiens
  source 1..30: mol_type = genomic DNA
ttaactaagtgtttgtgggtttaagtccca

SEQ ID NO: 28901 - DNA, 31 bp, Homo sapiens
  source 1..31: mol_type = genomic DNA
ttaactaagtgtttgtgggtttaagtcccat

SEQ ID NO: 28902 - DNA, 32 bp, Homo sapiens
  source 1..32: mol_type = genomic DNA
ttaactaagtgtttgtgggtttaagtcccatt

SEQ ID NO: 28903 - DNA, 33 bp, Homo sapiens
  source 1..33: mol_type = genomic DNA
ttaactaagtgtttgtgggtttaagtcccattg

SEQ ID NO: 28904 - DNA, 34 bp, Homo sapiens
  source 1..34: mol_type = genomic DNA
ttaactaagtgtttgtgggtttaagtcccattgg

SEQ ID NO: 28905 - DNA, 35 bp, Homo sapiens
  source 1..35: mol_type = genomic DNA
ttaactaagtgtttgtgggtttaagtcccattggt

SEQ ID NO: 28906 - DNA, 36 bp, Homo sapiens
  source 1..36: mol_type = genomic DNA
ttaactaagtgtttgtgggtttaagtcccattggtc

SEQ ID NO: 28907 - DNA, 37 bp, Homo sapiens
  source 1..37: mol_type = genomic DNA
ttaactaagtgtttgtgggtttaagtcccattggtct

SEQ ID NO: 28908 - DNA, 38 bp, Homo sapiens
  source 1..38: mol_type = genomic DNA
ttaactaagtgtttgtgggtttaagtcccattggtcta

SEQ ID NO: 28909 - DNA, 39 bp, Homo sapiens
  source 1..39: mol_type = genomic DNA
ttaactaagtgtttgtgggtttaagtcccattggtctag

SEQ ID NO: 28910 - DNA, 40 bp, Homo sapiens
  source 1..40: mol_type = genomic DNA
ttaactaagtgtttgtgggtttaagtcccattggtctagc

SEQ ID NO: 28911 - DNA, 41 bp, Homo sapiens
  source 1..41: mol_type = genomic DNA
ttaactaagtgtttgtgggtttaagtcccattggtctagcc

SEQ ID NO: 28912 - DNA, 42 bp, Homo sapiens
  source 1..42: mol_type = genomic DNA
ttaactaagtgtttgtgggtttaagtcccattggtctagcca

SEQ ID NO: 28913 - DNA, 16 bp, Homo sapiens
  source 1..16: mol_type = genomic DNA
ttaactagttttgaca

SEQ ID NO: 28914 - DNA, 17 bp, Homo sapiens
  source 1..17: mol_type = genomic DNA
ttaactagttttgacaa

SEQ ID NO: 28915 - DNA, 18 bp, Homo sapiens
  source 1..18: mol_type = genomic DNA
ttaactagttttgacaac

SEQ ID NO: 28916 - DNA, 19 bp, Homo sapiens
  source 1..19: mol_type = genomic DNA
ttaactagttttgacaaca

SEQ ID NO: 28917 - DNA, 33 bp, Homo sapiens
  source 1..33: mol_type = genomic DNA
ttaactagttttgacaacattcaaaaaagagta

SEQ ID NO: 28918 - DNA, 34 bp, Homo sapiens
  source 1..34: mol_type = genomic DNA
ttaactagttttgacaacattcaaaaaagagtac

SEQ ID NO: 28919 - DNA, 35 bp, Homo sapiens
  source 1..35: mol_type = genomic DNA
ttaactagttttgacaacattcaaaaaagagtacc

SEQ ID NO: 28920 - DNA, 36 bp, Homo sapiens
  source 1..36: mol_type = genomic DNA
ttaactagttttgacaacattcaaaaaagagtacca

SEQ ID NO: 28921 - DNA, 26 bp, Homo sapiens
  source 1..26: mol_type = genomic DNA
ttaacttccaattaactagttttgac

SEQ ID NO: 28922 - DNA, 27 bp, Homo sapiens
  source 1..27: mol_type = genomic DNA
ttaacttccaattaactagttttgaca

SEQ ID NO: 28923 - DNA, 28 bp, Homo sapiens
  source 1..28: mol_type = genomic DNA
ttaacttccaattaactagttttgacaa

SEQ ID NO: 28924 - DNA, 29 bp, Homo sapiens
  source 1..29: mol_type = genomic DNA
ttaacttccaattaactagttttgacaac

SEQ ID NO: 28925 - DNA, 30 bp, Homo sapiens
  source 1..30: mol_type = genomic DNA
ttaacttccaattaactagttttgacaaca

SEQ ID NO: 28926 - DNA, 46 bp, Homo sapiens
  source 1..46: mol_type = genomic DNA
ttaacttccaattaactagttttgacaacattcaaaaaagagtacc

SEQ ID NO: 28927 - DNA, 47 bp, Homo sapiens
  source 1..47: mol_type = genomic DNA
ttaacttccaattaactagttttgacaacattcaaaaaagagtacca

SEQ ID NO: 28928 - DNA, 16 bp, Homo sapiens
  source 1..16: mol_type = genomic DNA
ttaacttgaccgctct

SEQ ID NO: 28929 - DNA, 17 bp, Homo sapiens
  source 1..17: mol_type = genomic DNA
ttaacttgaccgctctg

SEQ ID NO: 28930 - DNA, 18 bp, Homo sapiens
  source 1..18: mol_type = genomic DNA
ttaacttgaccgctctga

SEQ ID NO: 28931 - DNA, 19 bp, Homo sapiens
  source 1..19: mol_type = genomic DNA
ttaacttgaccgctctgac

SEQ ID NO: 28932 - DNA, 20 bp, Homo sapiens
  source 1..20: mol_type = genomic DNA
ttaacttgaccgctctgacc

SEQ ID NO: 28933 - DNA, 21 bp, Homo sapiens
  source 1..21: mol_type = genomic DNA
ttaacttgaccgctctgacca

SEQ ID NO: 28934 - DNA, 16 bp, Homo sapiens
  source 1..16: mol_type = genomic DNA
ttaagagaaccaacac

SEQ ID NO: 28935 - DNA, 17 bp, Homo sapiens
  source 1..17: mol_type = genomic DNA
ttaagagaaccaacacc

SEQ ID NO: 28936 - DNA, 18 bp, Homo sapiens
  source 1..18: mol_type = genomic DNA
ttaagagaaccaacacct

SEQ ID NO: 28937 - DNA, 19 bp, Homo sapiens
  source 1..19: mol_type = genomic DNA
ttaagagaaccaacacctc

SEQ ID NO: 28938 - DNA, 20 bp, Homo sapiens
  source 1..20: mol_type = genomic DNA
ttaagagaaccaacacctct

SEQ ID NO: 28939 - DNA, 23 bp, Homo sapiens
  source 1..23: mol_type = genomic DNA
ttaagagaaccaacacctcttta

SEQ ID NO: 28940 - DNA, 26 bp, Homo sapiens
  source 1..26: mol_type = genomic DNA
ttaagagaaccaacacctctttacag

SEQ ID NO: 28941 - DNA, 28 bp, Homo sapiens
  source 1..28: mol_type = genomic DNA
ttaagagaaccaacacctctttacagtg

SEQ ID NO: 28942 - DNA, 29 bp, Homo sapiens
  source 1..29: mol_type = genomic DNA
ttaagagaaccaacacctctttacagtga

SEQ ID NO: 28943 - DNA, 30 bp, Homo sapiens
  source 1..30: mol_type = genomic DNA
ttaagagaaccaacacctctttacagtgac

SEQ ID NO: 28944 - DNA, 31 bp, Homo sapiens
  source 1..31: mol_type = genomic DNA
ttaagagaaccaacacctctttacagtgacc

SEQ ID NO: 28945 - DNA, 32 bp, Homo sapiens
  source 1..32: mol_type = genomic DNA
ttaagagaaccaacacctctttacagtgacca

SEQ ID NO: 28946 - DNA, 18 bp, Homo sapiens
  source 1..18: mol_type = genomic DNA
ttaagatccaatggacat

SEQ ID NO: 28947 - DNA, 16 bp, Homo sapiens
  source 1..16: mol_type = genomic DNA
ttaagatggcagagcc

SEQ ID NO: 28948 - DNA, 17 bp, Homo sapiens
  source 1..17: mol_type = genomic DNA
ttaagatggcagagccc

SEQ ID NO: 28949 - DNA, 18 bp, Homo sapiens
  source 1..18: mol_type = genomic DNA
ttaagatggcagagcccg

SEQ ID NO: 28950 - DNA, 19 bp, Homo sapiens
  source 1..19: mol_type = genomic DNA
ttaagatggcagagcccgg

SEQ ID NO: 28951 - DNA, 20 bp, Homo sapiens
  source 1..20: mol_type = genomic DNA
ttaagatggcagagcccggt

SEQ ID NO: 28952 - DNA, 21 bp, Homo sapiens
  source 1..21: mol_type = genomic DNA
ttaagatggcagagcccggta

SEQ ID NO: 28953 - DNA, 22 bp, Homo sapiens
  source 1..22: mol_type = genomic DNA
ttaagatggcagagcccggtaa

SEQ ID NO: 28954 - DNA, 23 bp, Homo sapiens
  source 1..23: mol_type = genomic DNA
ttaagatggcagagcccggtaat

SEQ ID NO: 28955 - DNA, 24 bp, Homo sapiens
  source 1..24: mol_type = genomic DNA
ttaagatggcagagcccggtaatc

SEQ ID NO: 28956 - DNA, 25 bp, Homo sapiens
  source 1..25: mol_type = genomic DNA
ttaagatggcagagcccggtaatcg

SEQ ID NO: 28957 - DNA, 28 bp, Homo sapiens
  source 1..28: mol_type = genomic DNA
ttaagatggcagagcccggtaatcgcat

SEQ ID NO: 28958 - DNA, 29 bp, Homo sapiens
  source 1..29: mol_type = genomic DNA
ttaagatggcagagcccggtaatcgcata

SEQ ID NO: 28959 - DNA, 30 bp, Homo sapiens
  source 1..30: mol_type = genomic DNA
ttaagatggcagagcccggtaatcgcataa

SEQ ID NO: 28960 - DNA, 31 bp, Homo sapiens
  source 1..31: mol_type = genomic DNA
ttaagatggcagagcccggtaatcgcataaa

SEQ ID NO: 28961 - DNA, 32 bp, Homo sapiens
  source 1..32: mol_type = genomic DNA
ttaagatggcagagcccggtaatcgcataaaa

SEQ ID NO: 28962 - DNA, 33 bp, Homo sapiens
  source 1..33: mol_type = genomic DNA
ttaagatggcagagcccggtaatcgcataaaac

SEQ ID NO: 28963 - DNA, 34 bp, Homo sapiens
  source 1..34: mol_type = genomic DNA
ttaagatggcagagcccggtaatcgcataaaact

SEQ ID NO: 28964 - DNA, 36 bp, Homo sapiens
  source 1..36: mol_type = genomic DNA
ttaagatggcagagcccggtaatcgcataaaactta

SEQ ID NO: 28965 - DNA, 37 bp, Homo sapiens
  source 1..37: mol_type = genomic DNA
ttaagatggcagagcccggtaatcgcataaaacttaa

SEQ ID NO: 28966 - DNA, 38 bp, Homo sapiens
  source 1..38: mol_type = genomic DNA
ttaagatggcagagcccggtaatcgcataaaacttaaa

SEQ ID NO: 28967 - DNA, 41 bp, Homo sapiens
  source 1..41: mol_type = genomic DNA
ttaagatggcagagcccggtaatcgcataaaacttaaaact

SEQ ID NO: 28968 - DNA, 42 bp, Homo sapiens
  source 1..42: mol_type = genomic DNA
ttaagatggcagagcccggtaatcgcataaaacttaaaactt

SEQ ID NO: 28969 - DNA, 43 bp, Homo sapiens
  source 1..43: mol_type = genomic DNA
ttaagatggcagagcccggtaatcgcataaaacttaaaacttt

SEQ ID NO: 28970 - DNA, 16 bp, Homo sapiens
  source 1..16: mol_type = genomic DNA
ttaaggctccagtctc

SEQ ID NO: 28971 - DNA, 16 bp, Homo sapiens
  source 1..16: mol_type = genomic DNA
ttaagtcccattggtc

SEQ ID NO: 28972 - DNA, 17 bp, Homo sapiens
  source 1..17: mol_type = genomic DNA
ttaagtcccattggtct

SEQ ID NO: 28973 - DNA, 18 bp, Homo sapiens
  source 1..18: mol_type = genomic DNA
ttaagtcccattggtcta

SEQ ID NO: 28974 - DNA, 20 bp, Homo sapiens
  source 1..20: mol_type = genomic DNA
ttaagtcccattggtctagc

SEQ ID NO: 28975 - DNA, 21 bp, Homo sapiens
  source 1..21: mol_type = genomic DNA
ttaagtcccattggtctagcc

SEQ ID NO: 28976 - DNA, 22 bp, Homo sapiens
  source 1..22: mol_type = genomic DNA
ttaagtcccattggtctagcca

SEQ ID NO: 28977 - DNA, 17 bp, Homo sapiens
  source 1..17: mol_type = genomic DNA
ttaagttaaagattaag

SEQ ID NO: 28978 - DNA, 19 bp, Homo sapiens
  source 1..19: mol_type = genomic DNA
ttaagttaaagattaagag

SEQ ID NO: 28979 - DNA, 20 bp, Homo sapiens
  source 1..20: mol_type = genomic DNA
ttaagttaaagattaagaga

SEQ ID NO: 28980 - DNA, 21 bp, Homo sapiens
  source 1..21: mol_type = genomic DNA
ttaagttaaagattaagagaa

SEQ ID NO: 28981 - DNA, 22 bp, Homo sapiens
  source 1..22: mol_type = genomic DNA
ttaagttaaagattaagagaac

SEQ ID NO: 28982 - DNA, 23 bp, Homo sapiens
  source 1..23: mol_type = genomic DNA
ttaagttaaagattaagagaacc

SEQ ID NO: 28983 - DNA, 24 bp, Homo sapiens
  source 1..24: mol_type = genomic DNA
ttaagttaaagattaagagaacca

SEQ ID NO: 28984 - DNA, 25 bp, Homo sapiens
  source 1..25: mol_type = genomic DNA
ttaagttaaagattaagagaaccaa

SEQ ID NO: 28985 - DNA, 26 bp, Homo sapiens
  source 1..26: mol_type = genomic DNA
ttaagttaaagattaagagaaccaac

SEQ ID NO: 28986 - DNA, 27 bp, Homo sapiens
  source 1..27: mol_type = genomic DNA
ttaagttaaagattaagagaaccaaca

SEQ ID NO: 28987 - DNA, 28 bp, Homo sapiens
  source 1..28: mol_type = genomic DNA
ttaagttaaagattaagagaaccaacac

SEQ ID NO: 28988 - DNA, 29 bp, Homo sapiens
  source 1..29: mol_type = genomic DNA
ttaagttaaagattaagagaaccaacacc

SEQ ID NO: 28989 - DNA, 30 bp, Homo sapiens
  source 1..30: mol_type = genomic DNA
ttaagttaaagattaagagaaccaacacct

SEQ ID NO: 28990 - DNA, 31 bp, Homo sapiens
  source 1..31: mol_type = genomic DNA
ttaagttaaagattaagagaaccaacacctc

SEQ ID NO: 28991 - DNA, 32 bp, Homo sapiens
  source 1..32: mol_type = genomic DNA
ttaagttaaagattaagagaaccaacacctct

SEQ ID NO: 28992 - DNA, 33 bp, Homo sapiens
  source 1..33: mol_type = genomic DNA
ttaagttaaagattaagagaaccaacacctctt

SEQ ID NO: 28993 - DNA, 34 bp, Homo sapiens
  source 1..34: mol_type = genomic DNA
ttaagttaaagattaagagaaccaacacctcttt

SEQ ID NO: 28994 - DNA, 35 bp, Homo sapiens
  source 1..35: mol_type = genomic DNA
ttaagttaaagattaagagaaccaacacctcttta

SEQ ID NO: 28995 - DNA, 37 bp, Homo sapiens
  source 1..37: mol_type = genomic DNA
ttaagttaaagattaagagaaccaacacctctttaca

SEQ ID NO: 28996 - DNA, 38 bp, Homo sapiens
  source 1..38: mol_type = genomic DNA
ttaagttaaagattaagagaaccaacacctctttacag

SEQ ID NO: 28997 - DNA, 39 bp, Homo sapiens
  source 1..39: mol_type = genomic DNA
ttaagttaaagattaagagaaccaacacctctttacagt

SEQ ID NO: 28998 - DNA, 40 bp, Homo sapiens
  source 1..40: mol_type = genomic DNA
ttaagttaaagattaagagaaccaacacctctttacagtg

SEQ ID NO: 28999 - DNA, 41 bp, Homo sapiens
  source 1..41: mol_type = genomic DNA
ttaagttaaagattaagagaaccaacacctctttacagtga

SEQ ID NO: 29000 - DNA, 42 bp, Homo sapiens
  source 1..42: mol_type = genomic DNA
ttaagttaaagattaagagaaccaacacctctttacagtgac

SEQ ID NO: 29001 - DNA, 43 bp, Homo sapiens
  source 1..43: mol_type = genomic DNA
ttaagttaaagattaagagaaccaacacctctttacagtgacc

SEQ ID NO: 29002 - DNA, 44 bp, Homo sapiens
  source 1..44: mol_type = genomic DNA
ttaagttaaagattaagagaaccaacacctctttacagtgacca

SEQ ID NO: 29003 - DNA, 16 bp, Homo sapiens
  source 1..16: mol_type = genomic DNA
ttaatcccagggtcgt

SEQ ID NO: 29004 - DNA, 17 bp, Homo sapiens
  source 1..17: mol_type = genomic DNA
ttaatcccagggtcgtg

SEQ ID NO: 29005 - DNA, 18 bp, Homo sapiens
  source 1..18: mol_type = genomic DNA
ttaatcccagggtcgtgg

SEQ ID NO: 29006 - DNA, 35 bp, Homo sapiens
  source 1..35: mol_type = genomic DNA
ttaatcccagggtcgtgggttcgagccccacgttg

SEQ ID NO: 29007 - DNA, 41 bp, Homo sapiens
  source 1..41: mol_type = genomic DNA
ttaatcccagggtcgtgggttcgagccccacgttgggcgcc

SEQ ID NO: 29008 - DNA, 42 bp, Homo sapiens
  source 1..42: mol_type = genomic DNA
ttaatcccagggtcgtgggttcgagccccacgttgggcgcca

SEQ ID NO: 29009 - DNA, 16 bp, Homo sapiens
  source 1..16: mol_type = genomic DNA
ttaatctcagggtcgt

SEQ ID NO: 29010 - DNA, 17 bp, Homo sapiens
  source 1..17: mol_type = genomic DNA
ttaatctcagggtcgtg

SEQ ID NO: 29011 - DNA, 18 bp, Homo sapiens
  source 1..18: mol_type = genomic DNA
ttaatctcagggtcgtgg

SEQ ID NO: 29012 - DNA, 19 bp, Homo sapiens
  source 1..19: mol_type = genomic DNA
ttaatctcagggtcgtggg

SEQ ID NO: 29013 - DNA, 38 bp, Homo sapiens
  source 1..38: mol_type = genomic DNA
ttaatctcagggtcgtgggttcgagccccacgttgggc

SEQ ID NO: 29014 - DNA, 39 bp, Homo sapiens
  source 1..39: mol_type = genomic DNA
ttaatctcagggtcgtgggttcgagccccacgttgggcg

SEQ ID NO: 29015 - DNA, 41 bp, Homo sapiens
  source 1..41: mol_type = genomic DNA
ttaatctcagggtcgtgggttcgagccccacgttgggcgcc

SEQ ID NO: 29016 - DNA, 42 bp, Homo sapiens
  source 1..42: mol_type = genomic DNA
ttaatctcagggtcgtgggttcgagccccacgttgggcgcca

SEQ ID NO: 29017 - DNA, 21 bp, Homo sapiens
  source 1..21: mol_type = genomic DNA
ttaatctgagggtccagggtt

SEQ ID NO: 29018 - DNA, 23 bp, Homo sapiens
  source 1..23: mol_type = genomic DNA
ttaatctgagggtccagggttca

SEQ ID NO: 29019 - DNA, 25 bp, Homo sapiens
  source 1..25: mol_type = genomic DNA
ttaatctgagggtccagggttcaag

SEQ ID NO: 29020 - DNA, 26 bp, Homo sapiens
  source 1..26: mol_type = genomic DNA
ttaatctgagggtccagggttcaagt

SEQ ID NO: 29021 - DNA, 41 bp, Homo sapiens
  source 1..41: mol_type = genomic DNA
ttaatctgagggtccagggttcaagtccctgtccaggcgcc

SEQ ID NO: 29022 - DNA, 42 bp, Homo sapiens
  source 1..42: mol_type = genomic DNA
ttaatctgagggtccagggttcaagtccctgtccaggcgcca

SEQ ID NO: 29023 - DNA, 41 bp, Homo sapiens
  source 1..41: mol_type = genomic DNA
ttaatctgagggtccagggttcaagtccctgttcaggcgcc

SEQ ID NO: 29024 - DNA, 36 bp, Homo sapiens
  source 1..36: mol_type = genomic DNA
ttaatctgagggtccagggttcaagtccctgttcgg

SEQ ID NO: 29025 - DNA, 40 bp, Homo sapiens
  source 1..40: mol_type = genomic DNA
ttaatctgagggtccagggttcaagtccctgttcgggcgc

SEQ ID NO: 29026 - DNA, 41 bp, Homo sapiens
  source 1..41: mol_type = genomic DNA
ttaatctgagggtccagggttcaagtccctgttcgggcgcc

SEQ ID NO: 29027 - DNA, 42 bp, Homo sapiens
  source 1..42: mol_type = genomic DNA
ttaatctgagggtccagggttcaagtccctgttcgggcgcca

SEQ ID NO: 29028 - DNA, 24 bp, Homo sapiens
  source 1..24: mol_type = genomic DNA
ttaatctgagggtccagggttcat

SEQ ID NO: 29029 - DNA, 16 bp, Homo sapiens
  source 1..16: mol_type = genomic DNA
ttaattaaagtggctg

SEQ ID NO: 29030 - DNA, 17 bp, Homo sapiens
  source 1..17: mol_type = genomic DNA
ttaattaaagtggctga

SEQ ID NO: 29031 - DNA, 18 bp, Homo sapiens
  source 1..18: mol_type = genomic DNA
ttaattaaagtggctgat

SEQ ID NO: 29032 - DNA, 19 bp, Homo sapiens
  source 1..19: mol_type = genomic DNA
ttaattaaagtggctgatt

SEQ ID NO: 29033 - DNA, 20 bp, Homo sapiens
  source 1..20: mol_type = genomic DNA
ttaattaaagtggctgattt

SEQ ID NO: 29034 - DNA, 21 bp, Homo sapiens
  source 1..21: mol_type = genomic DNA
ttaattaaagtggctgatttg

SEQ ID NO: 29035 - DNA, 22 bp, Homo sapiens
  source 1..22: mol_type = genomic DNA
ttaattaaagtggctgatttgc

SEQ ID NO: 29036 - DNA, 19 bp, Homo sapiens
  source 1..19: mol_type = genomic DNA
ttacacgcagaaggtcctg

SEQ ID NO: 29037 - DNA, 39 bp, Homo sapiens
  source 1..39: mol_type = genomic DNA
ttacacgcagaaggtcctgggttcgagccccagtggaac

SEQ ID NO: 29038 - DNA, 43 bp, Homo sapiens
  source 1..43: mol_type = genomic DNA
ttacacgcagaaggtcctgggttcgagccccagtggaaccacc

SEQ ID NO: 29039 - DNA, 16 bp, Homo sapiens
  source 1..16: mol_type = genomic DNA
ttacacttaggagatt

SEQ ID NO: 29040 - DNA, 17 bp, Homo sapiens
  source 1..17: mol_type = genomic DNA
ttacacttaggagattt

SEQ ID NO: 29041 - DNA, 18 bp, Homo sapiens
  source 1..18: mol_type = genomic DNA
ttacacttaggagatttc

SEQ ID NO: 29042 - DNA, 19 bp, Homo sapiens
  source 1..19: mol_type = genomic DNA
ttacacttaggagatttca

SEQ ID NO: 29043 - DNA, 20 bp, Homo sapiens
  source 1..20: mol_type = genomic DNA
ttacacttaggagatttcaa

SEQ ID NO: 29044 - DNA, 21 bp, Homo sapiens
  source 1..21: mol_type = genomic DNA
ttacacttaggagatttcaac

SEQ ID NO: 29045 - DNA, 22 bp, Homo sapiens
  source 1..22: mol_type = genomic DNA
ttacacttaggagatttcaact

SEQ ID NO: 29046 - DNA, 23 bp, Homo sapiens
  source 1..23: mol_type = genomic DNA
ttacacttaggagatttcaactt

SEQ ID NO: 29047 - DNA, 24 bp, Homo sapiens
  source 1..24: mol_type = genomic DNA
ttacacttaggagatttcaactta

SEQ ID NO: 29048 - DNA, 25 bp, Homo sapiens
  source 1..25: mol_type = genomic DNA
ttacacttaggagatttcaacttaa

SEQ ID NO: 29049 - DNA, 26 bp, Homo sapiens
  source 1..26: mol_type = genomic DNA
ttacacttaggagatttcaacttaac

SEQ ID NO: 29050 - DNA, 27 bp, Homo sapiens
  source 1..27: mol_type = genomic DNA
ttacacttaggagatttcaacttaact

SEQ ID NO: 29051 - DNA, 28 bp, Homo sapiens
  source 1..28: mol_type = genomic DNA
ttacacttaggagatttcaacttaactt

SEQ ID NO: 29052 - DNA, 29 bp, Homo sapiens
  source 1..29: mol_type = genomic DNA
ttacacttaggagatttcaacttaacttg

SEQ ID NO: 29053 - DNA, 30 bp, Homo sapiens
  source 1..30: mol_type = genomic DNA
ttacacttaggagatttcaacttaacttga

SEQ ID NO: 29054 - DNA, 31 bp, Homo sapiens
  source 1..31: mol_type = genomic DNA
ttacacttaggagatttcaacttaacttgac

SEQ ID NO: 29055 - DNA, 32 bp, Homo sapiens
  source 1..32: mol_type = genomic DNA
ttacacttaggagatttcaacttaacttgacc

SEQ ID NO: 29056 - DNA, 33 bp, Homo sapiens
  source 1..33: mol_type = genomic DNA
ttacacttaggagatttcaacttaacttgaccg

SEQ ID NO: 29057 - DNA, 34 bp, Homo sapiens
  source 1..34: mol_type = genomic DNA
ttacacttaggagatttcaacttaacttgaccgc

SEQ ID NO: 29058 - DNA, 35 bp, Homo sapiens
  source 1..35: mol_type = genomic DNA
ttacacttaggagatttcaacttaacttgaccgct

SEQ ID NO: 29059 - DNA, 36 bp, Homo sapiens
  source 1..36: mol_type = genomic DNA
ttacacttaggagatttcaacttaacttgaccgctc

SEQ ID NO: 29060 - DNA, 37 bp, Homo sapiens
  source 1..37: mol_type = genomic DNA
ttacacttaggagatttcaacttaacttgaccgctct

SEQ ID NO: 29061 - DNA, 38 bp, Homo sapiens
  source 1..38: mol_type = genomic DNA
ttacacttaggagatttcaacttaacttgaccgctctg

SEQ ID NO: 29062 - DNA, 39 bp, Homo sapiens
  source 1..39: mol_type = genomic DNA
ttacacttaggagatttcaacttaacttgaccgctctga

SEQ ID NO: 29063 - DNA, 40 bp, Homo sapiens
  source 1..40: mol_type = genomic DNA
ttacacttaggagatttcaacttaacttgaccgctctgac

SEQ ID NO: 29064 - DNA, 41 bp, Homo sapiens
  source 1..41: mol_type = genomic DNA
ttacacttaggagatttcaacttaacttgaccgctctgacc

SEQ ID NO: 29065 - DNA, 42 bp, Homo sapiens
  source 1..42: mol_type = genomic DNA
ttacacttaggagatttcaacttaacttgaccgctctgacca

SEQ ID NO: 29066 - DNA, 16 bp, Homo sapiens
  source 1..16: mol_type = genomic DNA
ttacagtcagaggttc

SEQ ID NO: 29067 - DNA, 17 bp, Homo sapiens
  source 1..17: mol_type = genomic DNA
ttacagtcagaggttca

SEQ ID NO: 29068 - DNA, 18 bp, Homo sapiens
  source 1..18: mol_type = genomic DNA
ttacagtcagaggttcaa

SEQ ID NO: 29069 - DNA, 21 bp, Homo sapiens
  source 1..21: mol_type = genomic DNA
ttacagtcagaggttcaattc

SEQ ID NO: 29070 - DNA, 22 bp, Homo sapiens
  source 1..22: mol_type = genomic DNA
ttacagtcagaggttcaattcc

SEQ ID NO: 29071 - DNA, 23 bp, Homo sapiens
  source 1..23: mol_type = genomic DNA
ttacagtcagaggttcaattcct

SEQ ID NO: 29072 - DNA, 24 bp, Homo sapiens
  source 1..24: mol_type = genomic DNA
ttacagtcagaggttcaattcctc

SEQ ID NO: 29073 - DNA, 25 bp, Homo sapiens
  source 1..25: mol_type = genomic DNA
ttacagtcagaggttcaattcctct

SEQ ID NO: 29074 - DNA, 27 bp, Homo sapiens
  source 1..27: mol_type = genomic DNA
ttacagtcagaggttcaattcctcttc

SEQ ID NO: 29075 - DNA, 28 bp, Homo sapiens
  source 1..28: mol_type = genomic DNA
ttacagtcagaggttcaattcctcttct

SEQ ID NO: 29076 - DNA, 33 bp, Homo sapiens
  source 1..33: mol_type = genomic DNA
ttacagtcagaggttcaattcctcttcttaaca

SEQ ID NO: 29077 - DNA, 34 bp, Homo sapiens
  source 1..34: mol_type = genomic DNA
ttacagtcagaggttcaattcctcttcttaacac

SEQ ID NO: 29078 - DNA, 35 bp, Homo sapiens
  source 1..35: mol_type = genomic DNA
ttacagtcagaggttcaattcctcttcttaacacc

SEQ ID NO: 29079 - DNA, 16 bp, Homo sapiens
  source 1..16: mol_type = genomic DNA
ttacctcctcaaagca

SEQ ID NO: 29080 - DNA, 19 bp, Homo sapiens
  source 1..19: mol_type = genomic DNA
ttacctcctcaaagcaata

SEQ ID NO: 29081 - DNA, 21 bp, Homo sapiens
  source 1..21: mol_type = genomic DNA
ttacctcctcaaagcaataca

SEQ ID NO: 29082 - DNA, 22 bp, Homo sapiens
  source 1..22: mol_type = genomic DNA
ttacctcctcaaagcaatacac

SEQ ID NO: 29083 - DNA, 23 bp, Homo sapiens
  source 1..23: mol_type = genomic DNA
ttacctcctcaaagcaatacact

SEQ ID NO: 29084 - DNA, 24 bp, Homo sapiens
  source 1..24: mol_type = genomic DNA
ttacctcctcaaagcaatacactg

SEQ ID NO: 29085 - DNA, 25 bp, Homo sapiens
  source 1..25: mol_type = genomic DNA
ttacctcctcaaagcaatacactga

SEQ ID NO: 29086 - DNA, 26 bp, Homo sapiens
  source 1..26: mol_type = genomic DNA
ttacctcctcaaagcaatacactgaa

SEQ ID NO: 29087 - DNA, 42 bp, Homo sapiens
  source 1..42: mol_type = genomic DNA
ttacctcctcaaagcaatacactgaaaatgtttagacgggct

SEQ ID NO: 29088 - DNA, 18 bp, Homo sapiens
  source 1..18: mol_type = genomic DNA
ttacgaccccttatttac

SEQ ID NO: 29089 - DNA, 19 bp, Homo sapiens
  source 1..19: mol_type = genomic DNA
ttacgaccccttatttacc

SEQ ID NO: 29090 - DNA, 20 bp, Homo sapiens
  source 1..20: mol_type = genomic DNA
ttacgaccccttatttaccc

SEQ ID NO: 29091 - DNA, 21 bp, Homo sapiens
  source 1..21: mol_type = genomic DNA
ttacgaccccttatttacccc

SEQ ID NO: 29092 - DNA, 22 bp, Homo sapiens
  source 1..22: mol_type = genomic DNA
ttacgaccccttatttacccca

SEQ ID NO: 29093 - DNA, 26 bp, Homo sapiens
  source 1..26: mol_type = genomic DNA
ttactttgatagagtaaataatagga

SEQ ID NO: 29094 - DNA, 27 bp, Homo sapiens
  source 1..27: mol_type = genomic DNA
ttactttgatagagtaaataataggag

SEQ ID NO: 29095 - DNA, 28 bp, Homo sapiens
  source 1..28: mol_type = genomic DNA
ttactttgatagagtaaataataggagc

SEQ ID NO: 29096 - DNA, 29 bp, Homo sapiens
  source 1..29: mol_type = genomic DNA
ttactttgatagagtaaataataggagct

SEQ ID NO: 29097 - DNA, 30 bp, Homo sapiens
  source 1..30: mol_type = genomic DNA
ttactttgatagagtaaataataggagctt

SEQ ID NO: 29098 - DNA, 31 bp, Homo sapiens
  source 1..31: mol_type = genomic DNA
ttactttgatagagtaaataataggagctta

SEQ ID NO: 29099 - DNA, 32 bp, Homo sapiens
  source 1..32: mol_type = genomic DNA
ttactttgatagagtaaataataggagcttaa

SEQ ID NO: 29100 - DNA, 35 bp, Homo sapiens
  source 1..35: mol_type = genomic DNA
ttactttgatagagtaaataataggagcttaaacc

SEQ ID NO: 29101 - DNA, 36 bp, Homo sapiens
  source 1..36: mol_type = genomic DNA
ttactttgatagagtaaataataggagcttaaaccc

SEQ ID NO: 29102 - DNA, 37 bp, Homo sapiens
  source 1..37: mol_type = genomic DNA
ttactttgatagagtaaataataggagcttaaacccc

SEQ ID NO: 29103 - DNA, 16 bp, Homo sapiens
  source 1..16: mol_type = genomic DNA
ttagaatcttagcttt

SEQ ID NO: 29104 - DNA, 17 bp, Homo sapiens
  source 1..17: mol_type = genomic DNA
ttagaatcttagctttg

SEQ ID NO: 29105 - DNA, 18 bp, Homo sapiens
  source 1..18: mol_type = genomic DNA
ttagaatcttagctttgg

SEQ ID NO: 29106 - DNA, 19 bp, Homo sapiens
  source 1..19: mol_type = genomic DNA
ttagaatcttagctttggg

SEQ ID NO: 29107 - DNA, 21 bp, Homo sapiens
  source 1..21: mol_type = genomic DNA
ttagaatcttagctttgggtg

SEQ ID NO: 29108 - DNA, 22 bp, Homo sapiens
  source 1..22: mol_type = genomic DNA
ttagaatcttagctttgggtgc

SEQ ID NO: 29109 - DNA, 23 bp, Homo sapiens
  source 1..23: mol_type = genomic DNA
ttagaatcttagctttgggtgct

SEQ ID NO: 29110 - DNA, 25 bp, Homo sapiens
  source 1..25: mol_type = genomic DNA
ttagaatcttagctttgggtgctaa

SEQ ID NO: 29111 - DNA, 28 bp, Homo sapiens
  source 1..28: mol_type = genomic DNA
ttagaatcttagctttgggtgctaatgg

SEQ ID NO: 29112 - DNA, 33 bp, Homo sapiens
  source 1..33: mol_type = genomic DNA
ttagaatcttagctttgggtgctaatggtggag

SEQ ID NO: 29113 - DNA, 34 bp, Homo sapiens
  source 1..34: mol_type = genomic DNA
ttagaatcttagctttgggtgctaatggtggagt

SEQ ID NO: 29114 - DNA, 35 bp, Homo sapiens
  source 1..35: mol_type = genomic DNA
ttagaatcttagctttgggtgctaatggtggagtt

SEQ ID NO: 29115 - DNA, 36 bp, Homo sapiens
  source 1..36: mol_type = genomic DNA
ttagaatcttagctttgggtgctaatggtggagtta

SEQ ID NO: 29116 - DNA, 37 bp, Homo sapiens
  source 1..37: mol_type = genomic DNA
ttagaatcttagctttgggtgctaatggtggagttaa

SEQ ID NO: 29117 - DNA, 38 bp, Homo sapiens
  source 1..38: mol_type = genomic DNA
ttagaatcttagctttgggtgctaatggtggagttaaa

SEQ ID NO: 29118 - DNA, 39 bp, Homo sapiens
  source 1..39: mol_type = genomic DNA
ttagaatcttagctttgggtgctaatggtggagttaaag

SEQ ID NO: 29119 - DNA, 40 bp, Homo sapiens
  source 1..40: mol_type = genomic DNA
ttagaatcttagctttgggtgctaatggtggagttaaaga

SEQ ID NO: 29120 - DNA, 41 bp, Homo sapiens
  source 1..41: mol_type = genomic DNA
ttagaatcttagctttgggtgctaatggtggagttaaagac

SEQ ID NO: 29121 - DNA, 42 bp, Homo sapiens
  source 1..42: mol_type = genomic DNA
ttagaatcttagctttgggtgctaatggtggagttaaagact

SEQ ID NO: 29122 - DNA, 43 bp, Homo sapiens
  source 1..43: mol_type = genomic DNA
ttagaatcttagctttgggtgctaatggtggagttaaagactt

SEQ ID NO: 29123 - DNA, 44 bp, Homo sapiens
  source 1..44: mol_type = genomic DNA
ttagaatcttagctttgggtgctaatggtggagttaaagacttt

SEQ ID NO: 29124 - DNA, 47 bp, Homo sapiens
  source 1..47: mol_type = genomic DNA
ttagaatcttagctttgggtgctaatggtggagttaaagactttttc

SEQ ID NO: 29125 - DNA, 48 bp, Homo sapiens
  source 1..48: mol_type = genomic DNA
ttagaatcttagctttgggtgctaatggtggagttaaagactttttct

SEQ ID NO: 29126 - DNA, 16 bp, Homo sapiens
  source 1..16: mol_type = genomic DNA
ttagacgggctcacat

SEQ ID NO: 29127 - DNA, 17 bp, Homo sapiens
  source 1..17: mol_type = genomic DNA
ttagacgggctcacatc

SEQ ID NO: 29128 - DNA, 18 bp, Homo sapiens
  source 1..18: mol_type = genomic DNA
ttagacgggctcacatca

SEQ ID NO: 29129 - DNA, 19 bp, Homo sapiens
  source 1..19: mol_type = genomic DNA
ttagacgggctcacatcac

SEQ ID NO: 29130 - DNA, 20 bp, Homo sapiens
  source 1..20: mol_type = genomic DNA
ttagacgggctcacatcacc

SEQ ID NO: 29131 - DNA, 21 bp, Homo sapiens
  source 1..21: mol_type = genomic DNA
ttagacgggctcacatcaccc

SEQ ID NO: 29132 - DNA, 22 bp, Homo sapiens
  source 1..22: mol_type = genomic DNA
ttagacgggctcacatcacccc

SEQ ID NO: 29133 - DNA, 23 bp, Homo sapiens
  source 1..23: mol_type = genomic DNA
ttagacgggctcacatcacccca

SEQ ID NO: 29134 - DNA, 24 bp, Homo sapiens
  source 1..24: mol_type = genomic DNA
ttagacgggctcacatcaccccat

SEQ ID NO: 29135 - DNA, 25 bp, Homo sapiens
  source 1..25: mol_type = genomic DNA
ttagacgggctcacatcaccccata

SEQ ID NO: 29136 - DNA, 26 bp, Homo sapiens
  source 1..26: mol_type = genomic DNA
ttagacgggctcacatcaccccataa

SEQ ID NO: 29137 - DNA, 27 bp, Homo sapiens
  source 1..27: mol_type = genomic DNA
ttagacgggctcacatcaccccataaa

SEQ ID NO: 29138 - DNA, 28 bp, Homo sapiens
  source 1..28: mol_type = genomic DNA
ttagacgggctcacatcaccccataaac

SEQ ID NO: 29139 - DNA, 29 bp, Homo sapiens
  source 1..29: mol_type = genomic DNA
ttagacgggctcacatcaccccataaaca

SEQ ID NO: 29140 - DNA, 30 bp, Homo sapiens
  source 1..30: mol_type = genomic DNA
ttagacgggctcacatcaccccataaacac

SEQ ID NO: 29141 - DNA, 31 bp, Homo sapiens
  source 1..31: mol_type = genomic DNA
ttagacgggctcacatcaccccataaacacc

SEQ ID NO: 29142 - DNA, 32 bp, Homo sapiens
  source 1..32: mol_type = genomic DNA
ttagacgggctcacatcaccccataaacacca

SEQ ID NO: 29143 - DNA, 16 bp, Homo sapiens
  source 1..16: mol_type = genomic DNA
ttagagccagactgcc

SEQ ID NO: 29144 - DNA, 17 bp, Homo sapiens
  source 1..17: mol_type = genomic DNA
ttagagccagactgcct

SEQ ID NO: 29145 - DNA, 18 bp, Homo sapiens
  source 1..18: mol_type = genomic DNA
ttagagccagactgcctg

SEQ ID NO: 29146 - DNA, 19 bp, Homo sapiens
  source 1..19: mol_type = genomic DNA
ttagagccagactgcctgg

SEQ ID NO: 29147 - DNA, 20 bp, Homo sapiens
  source 1..20: mol_type = genomic DNA
ttagagccagactgcctggg

SEQ ID NO: 29148 - DNA, 21 bp, Homo sapiens
  source 1..21: mol_type = genomic DNA
ttagagccagactgcctgggt

SEQ ID NO: 29149 - DNA, 22 bp, Homo sapiens
  source 1..22: mol_type = genomic DNA
ttagagccagactgcctgggtt

SEQ ID NO: 29150 - DNA, 23 bp, Homo sapiens
  source 1..23: mol_type = genomic DNA
ttagagccagactgcctgggttt

SEQ ID NO: 29151 - DNA, 24 bp, Homo sapiens
  source 1..24: mol_type = genomic DNA
ttagagccagactgcctgggtttg

SEQ ID NO: 29152 - DNA, 25 bp, Homo sapiens
  source 1..25: mol_type = genomic DNA
ttagagccagactgcctgggtttga

SEQ ID NO: 29153 - DNA, 16 bp, Homo sapiens
  source 1..16: mol_type = genomic DNA
ttagcactctggactc

SEQ ID NO: 29154 - DNA, 17 bp, Homo sapiens
  source 1..17: mol_type = genomic DNA
ttagcactctggactct

SEQ ID NO: 29155 - DNA, 18 bp, Homo sapiens
  source 1..18: mol_type = genomic DNA
ttagcactctggactctg

SEQ ID NO: 29156 - DNA, 19 bp, Homo sapiens
  source 1..19: mol_type = genomic DNA
ttagcactctggactctga

SEQ ID NO: 29157 - DNA, 20 bp, Homo sapiens
  source 1..20: mol_type = genomic DNA
ttagcactctggactctgaa

SEQ ID NO: 29158 - DNA, 21 bp, Homo sapiens
  source 1..21: mol_type = genomic DNA
ttagcactctggactctgaat

SEQ ID NO: 29159 - DNA, 22 bp, Homo sapiens
  source 1..22: mol_type = genomic DNA
ttagcactctggactctgaatc

SEQ ID NO: 29160 - DNA, 23 bp, Homo sapiens
  source 1..23: mol_type = genomic DNA
ttagcactctggactctgaatcc

SEQ ID NO: 29161 - DNA, 24 bp, Homo sapiens
  source 1..24: mol_type = genomic DNA
ttagcactctggactctgaatcca

SEQ ID NO: 29162 - DNA, 25 bp, Homo sapiens
  source 1..25: mol_type = genomic DNA
ttagcactctggactctgaatccag

SEQ ID NO: 29163 - DNA, 26 bp, Homo sapiens
  source 1..26: mol_type = genomic DNA
ttagcactctggactctgaatccagc

SEQ ID NO: 29164 - DNA, 27 bp, Homo sapiens
  source 1..27: mol_type = genomic DNA
ttagcactctggactctgaatccagcg

SEQ ID NO: 29165 - DNA, 30 bp, Homo sapiens
  source 1..30: mol_type = genomic DNA
ttagcactctggactctgaatccagcgatc

SEQ ID NO: 29166 - DNA, 31 bp, Homo sapiens
  source 1..31: mol_type = genomic DNA
ttagcactctggactctgaatccagcgatcc

SEQ ID NO: 29167 - DNA, 32 bp, Homo sapiens
  source 1..32: mol_type = genomic DNA
ttagcactctggactctgaatccagcgatccg

SEQ ID NO: 29168 - DNA, 33 bp, Homo sapiens
  source 1..33: mol_type = genomic DNA
ttagcactctggactctgaatccagcgatccga

SEQ ID NO: 29169 - DNA, 34 bp, Homo sapiens
  source 1..34: mol_type = genomic DNA
ttagcactctggactctgaatccagcgatccgag

SEQ ID NO: 29170 - DNA, 35 bp, Homo sapiens
  source 1..35: mol_type = genomic DNA
ttagcactctggactctgaatccagcgatccgagt

SEQ ID NO: 29171 - DNA, 36 bp, Homo sapiens
  source 1..36: mol_type = genomic DNA
ttagcactctggactctgaatccagcgatccgagtt

SEQ ID NO: 29172 - DNA, 37 bp, Homo sapiens
  source 1..37: mol_type = genomic DNA
ttagcactctggactctgaatccagcgatccgagttc

SEQ ID NO: 29173 - DNA, 38 bp, Homo sapiens
  source 1..38: mol_type = genomic DNA
ttagcactctggactctgaatccagcgatccgagttca

SEQ ID NO: 29174 - DNA, 39 bp, Homo sapiens
  source 1..39: mol_type = genomic DNA
ttagcactctggactctgaatccagcgatccgagttcaa

SEQ ID NO: 29175 - DNA, 40 bp, Homo sapiens
  source 1..40: mol_type = genomic DNA
ttagcactctggactctgaatccagcgatccgagttcaaa

SEQ ID NO: 29176 - DNA, 46 bp, Homo sapiens
  source 1..46: mol_type = genomic DNA
ttagcactctggactctgaatccagcgatccgagttcaaatctcgg

SEQ ID NO: 29177 - DNA, 48 bp, Homo sapiens
  source 1..48: mol_type = genomic DNA
ttagcactctggactctgaatccagcgatccgagttcaaatctcggtg

SEQ ID NO: 29178 - DNA, 18 bp, Homo sapiens
  source 1..18: mol_type = genomic DNA
ttagcactctggactttg

SEQ ID NO: 29179 - DNA, 19 bp, Homo sapiens
  source 1..19: mol_type = genomic DNA
ttagcactctggactttga

SEQ ID NO: 29180 - DNA, 20 bp, Homo sapiens
  source 1..20: mol_type = genomic DNA
ttagcactctggactttgaa

SEQ ID NO: 29181 - DNA, 21 bp, Homo sapiens
  source 1..21: mol_type = genomic DNA
ttagcactctggactttgaat

SEQ ID NO: 29182 - DNA, 22 bp, Homo sapiens
  source 1..22: mol_type = genomic DNA
ttagcactctggactttgaatc

SEQ ID NO: 29183 - DNA, 23 bp, Homo sapiens
  source 1..23: mol_type = genomic DNA
ttagcactctggactttgaatcc

SEQ ID NO: 29184 - DNA, 24 bp, Homo sapiens
  source 1..24: mol_type = genomic DNA
ttagcactctggactttgaatcca

SEQ ID NO: 29185 - DNA, 26 bp, Homo sapiens
  source 1..26: mol_type = genomic DNA
ttagcactctggactttgaatccagc

SEQ ID NO: 29186 - DNA, 34 bp, Homo sapiens
  source 1..34: mol_type = genomic DNA
ttagcactctggactttgaatccagcaatccgag

SEQ ID NO: 29187 - DNA, 33 bp, Homo sapiens
  source 1..33: mol_type = genomic DNA
ttagcactctggactttgaatccagcgatccga

SEQ ID NO: 29188 - DNA, 34 bp, Homo sapiens
  source 1..34: mol_type = genomic DNA
ttagcactctggactttgaatccagcgatccgag

SEQ ID NO: 29189 - DNA, 35 bp, Homo sapiens
  source 1..35: mol_type = genomic DNA
ttagcactctggactttgaatccagcgatccgagt

SEQ ID NO: 29190 - DNA, 36 bp, Homo sapiens
  source 1..36: mol_type = genomic DNA
ttagcactctggactttgaatccagcgatccgagtt

SEQ ID NO: 29191 - DNA, 37 bp, Homo sapiens
  source 1..37: mol_type = genomic DNA
ttagcactctggactttgaatccagcgatccgagttc

SEQ ID NO: 29192 - DNA, 38 bp, Homo sapiens
  source 1..38: mol_type = genomic DNA
ttagcactctggactttgaatccagcgatccgagttca

SEQ ID NO: 29193 - DNA, 18 bp, Homo sapiens
  source 1..18: mol_type = genomic DNA
ttagcatagctgccttcc

SEQ ID NO: 29194 - DNA, 33 bp, Homo sapiens
  source 1..33: mol_type = genomic DNA
ttagcatagctgccttccaagcagttgacccgg

SEQ ID NO: 29195 - DNA, 38 bp, Homo sapiens
  source 1..38: mol_type = genomic DNA
ttagcatagctgccttccaagcagttgacccgggttcg

SEQ ID NO: 29196 - DNA, 18 bp, Homo sapiens
  source 1..18: mol_type = genomic DNA
ttagcattaaccttttaa

SEQ ID NO: 29197 - DNA, 19 bp, Homo sapiens
  source 1..19: mol_type = genomic DNA
ttagcattaaccttttaag

SEQ ID NO: 29198 - DNA, 20 bp, Homo sapiens
  source 1..20: mol_type = genomic DNA
ttagcattaaccttttaagt

SEQ ID NO: 29199 - DNA, 21 bp, Homo sapiens
  source 1..21: mol_type = genomic DNA
ttagcattaaccttttaagtt

SEQ ID NO: 29200 - DNA, 36 bp, Homo sapiens
  source 1..36: mol_type = genomic DNA
ttagcattaaccttttaagttaaagattaagagaac

SEQ ID NO: 29201 - DNA, 37 bp, Homo sapiens
  source 1..37: mol_type = genomic DNA
ttagcattaaccttttaagttaaagattaagagaacc

SEQ ID NO: 29202 - DNA, 39 bp, Homo sapiens
  source 1..39: mol_type = genomic DNA
ttagcattaaccttttaagttaaagattaagagaaccaa

SEQ ID NO: 29203 - DNA, 40 bp, Homo sapiens
  source 1..40: mol_type = genomic DNA
ttagcattaaccttttaagttaaagattaagagaaccaac

SEQ ID NO: 29204 - DNA, 42 bp, Homo sapiens
  source 1..42: mol_type = genomic DNA
ttagcattaaccttttaagttaaagattaagagaaccaacac

SEQ ID NO: 29205 - DNA, 43 bp, Homo sapiens
  source 1..43: mol_type = genomic DNA
ttagcattaaccttttaagttaaagattaagagaaccaacacc

SEQ ID NO: 29206 - DNA, 44 bp, Homo sapiens
  source 1..44: mol_type = genomic DNA
ttagcattaaccttttaagttaaagattaagagaaccaacacct

SEQ ID NO: 29207 - DNA, 17 bp, Homo sapiens
  source 1..17: mol_type = genomic DNA
ttagcgcagtaggcagc

SEQ ID NO: 29208 - DNA, 16 bp, Homo sapiens
  source 1..16: mol_type = genomic DNA
ttagcgcagtaggtag

SEQ ID NO: 29209 - DNA, 17 bp, Homo sapiens
  source 1..17: mol_type = genomic DNA
ttagcgcagtaggtagc

SEQ ID NO: 29210 - DNA, 19 bp, Homo sapiens
  source 1..19: mol_type = genomic DNA
ttagcgcagtaggtagcgc

SEQ ID NO: 29211 - DNA, 18 bp, Homo sapiens
  source 1..18: mol_type = genomic DNA
ttagcgcgttcggctgtt

SEQ ID NO: 29212 - DNA, 22 bp, Homo sapiens
  source 1..22: mol_type = genomic DNA
ttagcgcgttcggctgttaacc

SEQ ID NO: 29213 - DNA, 23 bp, Homo sapiens
  source 1..23: mol_type = genomic DNA
ttagcgcgttcggctgttaaccg

SEQ ID NO: 29214 - DNA, 37 bp, Homo sapiens
  source 1..37: mol_type = genomic DNA
ttagcgcgttcggctgttaaccgaaaggttggtggtt

SEQ ID NO: 29215 - DNA, 21 bp, Homo sapiens
  source 1..21: mol_type = genomic DNA
ttagcggtagagcatttgact

SEQ ID NO: 29216 - DNA, 23 bp, Homo sapiens
  source 1..23: mol_type = genomic DNA
ttagcggtagagcatttgactgc

SEQ ID NO: 29217 - DNA, 21 bp, Homo sapiens
  source 1..21: mol_type = genomic DNA
ttagctgttaactaagtgttt

SEQ ID NO: 29218 - DNA, 23 bp, Homo sapiens
  source 1..23: mol_type = genomic DNA
ttagctgttaactaagtgtttgt

SEQ ID NO: 29219 - DNA, 24 bp, Homo sapiens
  source 1..24: mol_type = genomic DNA
ttagctgttaactaagtgtttgtg

SEQ ID NO: 29220 - DNA, 25 bp, Homo sapiens
  source 1..25: mol_type = genomic DNA
ttagctgttaactaagtgtttgtgg

SEQ ID NO: 29221 - DNA, 27 bp, Homo sapiens
  source 1..27: mol_type = genomic DNA
ttagctgttaactaagtgtttgtgggt

SEQ ID NO: 29222 - DNA, 29 bp, Homo sapiens
  source 1..29: mol_type = genomic DNA
ttagctgttaactaagtgtttgtgggttt

SEQ ID NO: 29223 - DNA, 30 bp, Homo sapiens
  source 1..30: mol_type = genomic DNA
ttagctgttaactaagtgtttgtgggttta

SEQ ID NO: 29224 - DNA, 31 bp, Homo sapiens
  source 1..31: mol_type = genomic DNA
ttagctgttaactaagtgtttgtgggtttaa

SEQ ID NO: 29225 - DNA, 39 bp, Homo sapiens
  source 1..39: mol_type = genomic DNA
ttagctgttaactaagtgtttgtgggtttaagtcccatt

SEQ ID NO: 29226 - DNA, 42 bp, Homo sapiens
  source 1..42: mol_type = genomic DNA
ttagctgttaactaagtgtttgtgggtttaagtcccattggt

SEQ ID NO: 29227 - DNA, 43 bp, Homo sapiens
  source 1..43: mol_type = genomic DNA
ttagctgttaactaagtgtttgtgggtttaagtcccattggtc

SEQ ID NO: 29228 - DNA, 44 bp, Homo sapiens
  source 1..44: mol_type = genomic DNA
ttagctgttaactaagtgtttgtgggtttaagtcccattggtct

SEQ ID NO: 29229 - DNA, 45 bp, Homo sapiens
  source 1..45: mol_type = genomic DNA
ttagctgttaactaagtgtttgtgggtttaagtcccattggtcta

SEQ ID NO: 29230 - DNA, 47 bp, Homo sapiens
  source 1..47: mol_type = genomic DNA
ttagctgttaactaagtgtttgtgggtttaagtcccattggtctagc

SEQ ID NO: 29231 - DNA, 48 bp, Homo sapiens
  source 1..48: mol_type = genomic DNA
ttagctgttaactaagtgtttgtgggtttaagtcccattggtctagcc

SEQ ID NO: 29232 - DNA, 24 bp, Homo sapiens
  source 1..24: mol_type = genomic DNA
ttagcttaattaaagtggctgatt

SEQ ID NO: 29233 - DNA, 25 bp, Homo sapiens
  source 1..25: mol_type = genomic DNA
ttagctttgggtgctaatggtggag

SEQ ID NO: 29234 - DNA, 26 bp, Homo sapiens
  source 1..26: mol_type = genomic DNA
ttagctttgggtgctaatggtggagt

SEQ ID NO: 29235 - DNA, 27 bp, Homo sapiens
  source 1..27: mol_type = genomic DNA
ttagctttgggtgctaatggtggagtt

SEQ ID NO: 29236 - DNA, 28 bp, Homo sapiens
  source 1..28: mol_type = genomic DNA
ttagctttgggtgctaatggtggagtta

SEQ ID NO: 29237 - DNA, 31 bp, Homo sapiens
  source 1..31: mol_type = genomic DNA
ttagctttgggtgctaatggtggagttaaag

SEQ ID NO: 29238 - DNA, 33 bp, Homo sapiens
  source 1..33: mol_type = genomic DNA
ttagctttgggtgctaatggtggagttaaagac

SEQ ID NO: 29239 - DNA, 34 bp, Homo sapiens
  source 1..34: mol_type = genomic DNA
ttagctttgggtgctaatggtggagttaaagact

SEQ ID NO: 29240 - DNA, 35 bp, Homo sapiens
  source 1..35: mol_type = genomic DNA
ttagctttgggtgctaatggtggagttaaagactt

SEQ ID NO: 29241 - DNA, 36 bp, Homo sapiens
  source 1..36: mol_type = genomic DNA
ttagctttgggtgctaatggtggagttaaagacttt

SEQ ID NO: 29242 - DNA, 41 bp, Homo sapiens
  source 1..41: mol_type = genomic DNA
ttagctttgggtgctaatggtggagttaaagactttttctc

SEQ ID NO: 29243 - DNA, 44 bp, Homo sapiens
  source 1..44: mol_type = genomic DNA
ttagctttgggtgctaatggtggagttaaagactttttctctga

SEQ ID NO: 29244 - DNA, 45 bp, Homo sapiens
  source 1..45: mol_type = genomic DNA
ttagctttgggtgctaatggtggagttaaagactttttctctgac

SEQ ID NO: 29245 - DNA, 46 bp, Homo sapiens
  source 1..46: mol_type = genomic DNA
ttagctttgggtgctaatggtggagttaaagactttttctctgacc

SEQ ID NO: 29246 - DNA, 47 bp, Homo sapiens
  source 1..47: mol_type = genomic DNA
ttagctttgggtgctaatggtggagttaaagactttttctctgacca

SEQ ID NO: 29247 - DNA, 16 bp, Homo sapiens
  source 1..16: mol_type = genomic DNA
ttaggagatttcaact

SEQ ID NO: 29248 - DNA, 17 bp, Homo sapiens
  source 1..17: mol_type = genomic DNA
ttaggagatttcaactt

SEQ ID NO: 29249 - DNA, 18 bp, Homo sapiens
  source 1..18: mol_type = genomic DNA
ttaggagatttcaactta

SEQ ID NO: 29250 - DNA, 19 bp, Homo sapiens
  source 1..19: mol_type = genomic DNA
ttaggagatttcaacttaa

SEQ ID NO: 29251 - DNA, 20 bp, Homo sapiens
  source 1..20: mol_type = genomic DNA
ttaggagatttcaacttaac

SEQ ID NO: 29252 - DNA, 21 bp, Homo sapiens
  source 1..21: mol_type = genomic DNA
ttaggagatttcaacttaact

SEQ ID NO: 29253 - DNA, 22 bp, Homo sapiens
  source 1..22: mol_type = genomic DNA
ttaggagatttcaacttaactt

SEQ ID NO: 29254 - DNA, 23 bp, Homo sapiens
  source 1..23: mol_type = genomic DNA
ttaggagatttcaacttaacttg

SEQ ID NO: 29255 - DNA, 25 bp, Homo sapiens
  source 1..25: mol_type = genomic DNA
ttaggagatttcaacttaacttgac

SEQ ID NO: 29256 - DNA, 26 bp, Homo sapiens
  source 1..26: mol_type = genomic DNA
ttaggagatttcaacttaacttgacc

SEQ ID NO: 29257 - DNA, 27 bp, Homo sapiens
  source 1..27: mol_type = genomic DNA
ttaggagatttcaacttaacttgaccg

SEQ ID NO: 29258 - DNA, 28 bp, Homo sapiens
  source 1..28: mol_type = genomic DNA
ttaggagatttcaacttaacttgaccgc

SEQ ID NO: 29259 - DNA, 29 bp, Homo sapiens
  source 1..29: mol_type = genomic DNA
ttaggagatttcaacttaacttgaccgct

SEQ ID NO: 29260 - DNA, 30 bp, Homo sapiens
  source 1..30: mol_type = genomic DNA
ttaggagatttcaacttaacttgaccgctc

SEQ ID NO: 29261 - DNA, 31 bp, Homo sapiens
  source 1..31: mol_type = genomic DNA
ttaggagatttcaacttaacttgaccgctct

SEQ ID NO: 29262 - DNA, 32 bp, Homo sapiens
  source 1..32: mol_type = genomic DNA
ttaggagatttcaacttaacttgaccgctctg

SEQ ID NO: 29263 - DNA, 33 bp, Homo sapiens
  source 1..33: mol_type = genomic DNA
ttaggagatttcaacttaacttgaccgctctga

SEQ ID NO: 29264 - DNA, 34 bp, Homo sapiens
  source 1..34: mol_type = genomic DNA
ttaggagatttcaacttaacttgaccgctctgac

SEQ ID NO: 29265 - DNA, 35 bp, Homo sapiens
  source 1..35: mol_type = genomic DNA
ttaggagatttcaacttaacttgaccgctctgacc

SEQ ID NO: 29266 - DNA, 36 bp, Homo sapiens
  source 1..36: mol_type = genomic DNA
ttaggagatttcaacttaacttgaccgctctgacca

SEQ ID NO: 29267 - DNA, 16 bp, Homo sapiens
  source 1..16: mol_type = genomic DNA
ttaggattcctggttt

SEQ ID NO: 29268 - DNA, 17 bp, Homo sapiens
  source 1..17: mol_type = genomic DNA
ttaggattcctggtttt

SEQ ID NO: 29269 - DNA, 18 bp, Homo sapiens
  source 1..18: mol_type = genomic DNA
ttaggattcctggttttc

SEQ ID NO: 29270 - DNA, 26 bp, Homo sapiens
  source 1..26: mol_type = genomic DNA
ttaggattcctggttttcacccaggc

SEQ ID NO: 29271 - DNA, 36 bp, Homo sapiens
  source 1..36: mol_type = genomic DNA
ttaggattcctggttttcacccaggcggcccgggtt

SEQ ID NO: 29272 - DNA, 37 bp, Homo sapiens
  source 1..37: mol_type = genomic DNA
ttaggattcctggttttcacccaggcggcccgggttc

SEQ ID NO: 29273 - DNA, 38 bp, Homo sapiens
  source 1..38: mol_type = genomic DNA
ttaggattcctggttttcacccaggcggcccgggttcg

SEQ ID NO: 29274 - DNA, 41 bp, Homo sapiens
  source 1..41: mol_type = genomic DNA
ttaggattcctggttttcacccaggcggcccgggttcgact

SEQ ID NO: 29275 - DNA, 42 bp, Homo sapiens
  source 1..42: mol_type = genomic DNA
ttaggattcctggttttcacccaggcggcccgggttcgactc

SEQ ID NO: 29276 - DNA, 43 bp, Homo sapiens
  source 1..43: mol_type = genomic DNA
ttaggattcctggttttcacccaggcggcccgggttcgactcc

SEQ ID NO: 29277 - DNA, 47 bp, Homo sapiens
  source 1..47: mol_type = genomic DNA
ttaggattcctggttttcacccaggcggcccgggttcgactcccggt

SEQ ID NO: 29278 - DNA, 48 bp, Homo sapiens
  source 1..48: mol_type = genomic DNA
ttaggattcctggttttcacccaggcggcccgggttcgactcccggtg

SEQ ID NO: 29279 - DNA, 27 bp, Homo sapiens
  source 1..27: mol_type = genomic DNA
ttaggattcctggttttcacccaggtg

SEQ ID NO: 29280 - DNA, 33 bp, Homo sapiens
  source 1..33: mol_type = genomic DNA
ttaggattcctggttttcacccaggtggcccgg

SEQ ID NO: 29281 - DNA, 16 bp, Homo sapiens
  source 1..16: mol_type = genomic DNA
ttaggattcggcgctc

SEQ ID NO: 29282 - DNA, 17 bp, Homo sapiens
  source 1..17: mol_type = genomic DNA
ttaggattcggcgctct

SEQ ID NO: 29283 - DNA, 18 bp, Homo sapiens
  source 1..18: mol_type = genomic DNA
ttaggattcggcgctctc

SEQ ID NO: 29284 - DNA, 19 bp, Homo sapiens
  source 1..19: mol_type = genomic DNA
ttaggattcggcgctctca

SEQ ID NO: 29285 - DNA, 20 bp, Homo sapiens
  source 1..20: mol_type = genomic DNA
ttaggattcggcgctctcac

SEQ ID NO: 29286 - DNA, 21 bp, Homo sapiens
  source 1..21: mol_type = genomic DNA
ttaggattcggcgctctcacc

SEQ ID NO: 29287 - DNA, 22 bp, Homo sapiens
  source 1..22: mol_type = genomic DNA
ttaggattcggcgctctcaccg

SEQ ID NO: 29288 - DNA, 23 bp, Homo sapiens
  source 1..23: mol_type = genomic DNA
ttaggattcggcgctctcaccgc

SEQ ID NO: 29289 - DNA, 24 bp, Homo sapiens
  source 1..24: mol_type = genomic DNA
ttaggattcggcgctctcaccgcc

SEQ ID NO: 29290 - DNA, 26 bp, Homo sapiens
  source 1..26: mol_type = genomic DNA
ttaggattcggcgctctcaccgccgc

SEQ ID NO: 29291 - DNA, 30 bp, Homo sapiens
  source 1..30: mol_type = genomic DNA
ttaggattcggcgctctcaccgccgcggcc

SEQ ID NO: 29292 - DNA, 31 bp, Homo sapiens
  source 1..31: mol_type = genomic DNA
ttaggattcggcgctctcaccgccgcggccc

SEQ ID NO: 29293 - DNA, 32 bp, Homo sapiens
  source 1..32: mol_type = genomic DNA
ttaggattcggcgctctcaccgccgcggcccg

SEQ ID NO: 29294 - DNA, 33 bp, Homo sapiens
  source 1..33: mol_type = genomic DNA
ttaggattcggcgctctcaccgccgcggcccgg

SEQ ID NO: 29295 - DNA, 34 bp, Homo sapiens
  source 1..34: mol_type = genomic DNA
ttaggattcggcgctctcaccgccgcggcccggg

SEQ ID NO: 29296 - DNA, 35 bp, Homo sapiens
  source 1..35: mol_type = genomic DNA
ttaggattcggcgctctcaccgccgcggcccgggt

SEQ ID NO: 29297 - DNA, 36 bp, Homo sapiens
  source 1..36: mol_type = genomic DNA
ttaggattcggcgctctcaccgccgcggcccgggtt

SEQ ID NO: 29298 - DNA, 37 bp, Homo sapiens
  source 1..37: mol_type = genomic DNA
ttaggattcggcgctctcaccgccgcggcccgggttc

SEQ ID NO: 29299 - DNA, 38 bp, Homo sapiens
  source 1..38: mol_type = genomic DNA
ttaggattcggcgctctcaccgccgcggcccgggttcg

SEQ ID NO: 29300 - DNA, 39 bp, Homo sapiens
  source 1..39: mol_type = genomic DNA
ttaggattcggcgctctcaccgccgcggcccgggttcga

SEQ ID NO: 29301 - DNA, 40 bp, Homo sapiens
  source 1..40: mol_type = genomic DNA
ttaggattcggcgctctcaccgccgcggcccgggttcgat

SEQ ID NO: 29302 - DNA, 41 bp, Homo sapiens
  source 1..41: mol_type = genomic DNA
ttaggattcggcgctctcaccgccgcggcccgggttcgatt

SEQ ID NO: 29303 - DNA, 42 bp, Homo sapiens
  source 1..42: mol_type = genomic DNA
ttaggattcggcgctctcaccgccgcggcccgggttcgattc

SEQ ID NO: 29304 - DNA, 47 bp, Homo sapiens
  source 1..47: mol_type = genomic DNA
ttaggattcggcgctctcaccgccgcggcccgggttcgattcccggt

SEQ ID NO: 29305 - DNA, 48 bp, Homo sapiens
  source 1..48: mol_type = genomic DNA
ttaggattcggcgctctcaccgccgcggcccgggttcgattcccggtc

SEQ ID NO: 29306 - DNA, 17 bp, Homo sapiens
  source 1..17: mol_type = genomic DNA
ttaggatttggcactct

SEQ ID NO: 29307 - DNA, 32 bp, Homo sapiens
  source 1..32: mol_type = genomic DNA
ttaggccccaaaaattttggtgcaactccaaa

SEQ ID NO: 29308 - DNA, 34 bp, Homo sapiens
  source 1..34: mol_type = genomic DNA
ttaggccccaaaaattttggtgcaactccaaata

SEQ ID NO: 29309 - DNA, 39 bp, Homo sapiens
  source 1..39: mol_type = genomic DNA
ttaggccccaaaaattttggtgcaactccaaataaaagt

SEQ ID NO: 29310 - DNA, 40 bp, Homo sapiens
  source 1..40: mol_type = genomic DNA
ttaggccccaaaaattttggtgcaactccaaataaaagta

SEQ ID NO: 29311 - DNA, 41 bp, Homo sapiens
  source 1..41: mol_type = genomic DNA
ttaggccccaaaaattttggtgcaactccaaataaaagtac

SEQ ID NO: 29312 - DNA, 42 bp, Homo sapiens
  source 1..42: mol_type = genomic DNA
ttaggccccaaaaattttggtgcaactccaaataaaagtacc

SEQ ID NO: 29313 - DNA, 43 bp, Homo sapiens
  source 1..43: mol_type = genomic DNA
ttaggccccaaaaattttggtgcaactccaaataaaagtacca

SEQ ID NO: 29314 - DNA, 16 bp, Homo sapiens
  source 1..16: mol_type = genomic DNA
ttaggcctctttttac

SEQ ID NO: 29315 - DNA, 17 bp, Homo sapiens
  source 1..17: mol_type = genomic DNA
ttaggcctctttttacc

SEQ ID NO: 29316 - DNA, 18 bp, Homo sapiens
  source 1..18: mol_type = genomic DNA
ttaggcctctttttacca

SEQ ID NO: 29317 - DNA, 19 bp, Homo sapiens
  source 1..19: mol_type = genomic DNA
ttaggcctctttttaccac

SEQ ID NO: 29318 - DNA, 20 bp, Homo sapiens
  source 1..20: mol_type = genomic DNA
ttaggcctctttttaccacc

SEQ ID NO: 29319 - DNA, 21 bp, Homo sapiens
  source 1..21: mol_type = genomic DNA
ttaggcctctttttaccacca

SEQ ID NO: 29320 - DNA, 17 bp, Homo sapiens
  source 1..17: mol_type = genomic DNA
ttagggtgcttagctgt

SEQ ID NO: 29321 - DNA, 18 bp, Homo sapiens
  source 1..18: mol_type = genomic DNA
ttagggtgcttagctgtt

SEQ ID NO: 29322 - DNA, 21 bp, Homo sapiens
  source 1..21: mol_type = genomic DNA
ttagggtgcttagctgttaac

SEQ ID NO: 29323 - DNA, 22 bp, Homo sapiens
  source 1..22: mol_type = genomic DNA
ttagggtgcttagctgttaact

SEQ ID NO: 29324 - DNA, 23 bp, Homo sapiens
  source 1..23: mol_type = genomic DNA
ttagggtgcttagctgttaacta

SEQ ID NO: 29325 - DNA, 24 bp, Homo sapiens
  source 1..24: mol_type = genomic DNA
ttagggtgcttagctgttaactaa

SEQ ID NO: 29326 - DNA, 29 bp, Homo sapiens
  source 1..29: mol_type = genomic DNA
ttagggtgcttagctgttaactaagtgtt

SEQ ID NO: 29327 - DNA, 31 bp, Homo sapiens
  source 1..31: mol_type = genomic DNA
ttagggtgcttagctgttaactaagtgtttg

SEQ ID NO: 29328 - DNA, 32 bp, Homo sapiens
  source 1..32: mol_type = genomic DNA
ttagggtgcttagctgttaactaagtgtttgt

SEQ ID NO: 29329 - DNA, 35 bp, Homo sapiens
  source 1..35: mol_type = genomic DNA
ttagggtgcttagctgttaactaagtgtttgtggg

SEQ ID NO: 29330 - DNA, 36 bp, Homo sapiens
  source 1..36: mol_type = genomic DNA
ttagggtgcttagctgttaactaagtgtttgtgggt

SEQ ID NO: 29331 - DNA, 37 bp, Homo sapiens
  source 1..37: mol_type = genomic DNA
ttagggtgcttagctgttaactaagtgtttgtgggtt

SEQ ID NO: 29332 - DNA, 38 bp, Homo sapiens
  source 1..38: mol_type = genomic DNA
ttagggtgcttagctgttaactaagtgtttgtgggttt

SEQ ID NO: 29333 - DNA, 39 bp, Homo sapiens
  source 1..39: mol_type = genomic DNA
ttagggtgcttagctgttaactaagtgtttgtgggttta

SEQ ID NO: 29334 - DNA, 40 bp, Homo sapiens
  source 1..40: mol_type = genomic DNA
ttagggtgcttagctgttaactaagtgtttgtgggtttaa

SEQ ID NO: 29335 - DNA, 43 bp, Homo sapiens
  source 1..43: mol_type = genomic DNA
ttagggtgcttagctgttaactaagtgtttgtgggtttaagtc

SEQ ID NO: 29336 - DNA, 47 bp, Homo sapiens
  source 1..47: mol_type = genomic DNA
ttagggtgcttagctgttaactaagtgtttgtgggtttaagtcccat

SEQ ID NO: 29337 - DNA, 48 bp, Homo sapiens
  source 1..48: mol_type = genomic DNA
ttagggtgcttagctgttaactaagtgtttgtgggtttaagtcccatt

SEQ ID NO: 29338 - DNA, 16 bp, Homo sapiens
  source 1..16: mol_type = genomic DNA
ttaggtcgctggttcg

SEQ ID NO: 29339 - DNA, 26 bp, Homo sapiens
  source 1..26: mol_type = genomic DNA
ttaggtcgctggttcgaatccggctc

SEQ ID NO: 29340 - DNA, 32 bp, Homo sapiens
  source 1..32: mol_type = genomic DNA
ttaggtcgctggttcgaatccggctcgaagga

SEQ ID NO: 29341 - DNA, 33 bp, Homo sapiens
  source 1..33: mol_type = genomic DNA
ttaggtcgctggttcgaatccggctcgaaggac

SEQ ID NO: 29342 - DNA, 34 bp, Homo sapiens
  source 1..34: mol_type = genomic DNA
ttaggtcgctggttcgaatccggctcgaaggacc

SEQ ID NO: 29343 - DNA, 35 bp, Homo sapiens
  source 1..35: mol_type = genomic DNA
ttaggtcgctggttcgaatccggctcgaaggacca

SEQ ID NO: 29344 - DNA, 30 bp, Homo sapiens
  source 1..30: mol_type = genomic DNA
ttaggtcgctggttcgaatccggctcggag

SEQ ID NO: 29345 - DNA, 33 bp, Homo sapiens
  source 1..33: mol_type = genomic DNA
ttaggtcgctggttcgaatccggctcggaggac

SEQ ID NO: 29346 - DNA, 34 bp, Homo sapiens
  source 1..34: mol_type = genomic DNA
ttaggtcgctggttcgaatccggctcggaggacc

SEQ ID NO: 29347 - DNA, 18 bp, Homo sapiens
  source 1..18: mol_type = genomic DNA
ttaggtcgctggttcgat

SEQ ID NO: 29348 - DNA, 33 bp, Homo sapiens
  source 1..33: mol_type = genomic DNA
ttaggtcgctggttcgattccagctcgaaggac

SEQ ID NO: 29349 - DNA, 34 bp, Homo sapiens
  source 1..34: mol_type = genomic DNA
ttaggtcgctggttcgattccagctcgaaggacc

SEQ ID NO: 29350 - DNA, 24 bp, Homo sapiens
  source 1..24: mol_type = genomic DNA
ttaggtcgctggttcgattccggc

SEQ ID NO: 29351 - DNA, 33 bp, Homo sapiens
  source 1..33: mol_type = genomic DNA
ttaggtcgctggttcgattccggctcgaaggac

SEQ ID NO: 29352 - DNA, 34 bp, Homo sapiens
  source 1..34: mol_type = genomic DNA
ttaggtcgctggttcgattccggctcgaaggacc

SEQ ID NO: 29353 - DNA, 35 bp, Homo sapiens
  source 1..35: mol_type = genomic DNA
ttaggtcgctggttcgattccggctcgaaggacca

SEQ ID NO: 29354 - DNA, 17 bp, Homo sapiens
  source 1..17: mol_type = genomic DNA
ttaggttaaatacagac

SEQ ID NO: 29355 - DNA, 18 bp, Homo sapiens
  source 1..18: mol_type = genomic DNA
ttaggttaaatacagacc

SEQ ID NO: 29356 - DNA, 16 bp, Homo sapiens
  source 1..16: mol_type = genomic DNA
ttagtactctgcgttg

SEQ ID NO: 29357 - DNA, 17 bp, Homo sapiens
  source 1..17: mol_type = genomic DNA
ttagtactctgcgttgt

SEQ ID NO: 29358 - DNA, 18 bp, Homo sapiens
  source 1..18: mol_type = genomic DNA
ttagtactctgcgttgtg

SEQ ID NO: 29359 - DNA, 21 bp, Homo sapiens
  source 1..21: mol_type = genomic DNA
ttagtactctgcgttgtggcc

SEQ ID NO: 29360 - DNA, 22 bp, Homo sapiens
  source 1..22: mol_type = genomic DNA
ttagtactctgcgttgtggccg

SEQ ID NO: 29361 - DNA, 23 bp, Homo sapiens
  source 1..23: mol_type = genomic DNA
ttagtactctgcgttgtggccgc

SEQ ID NO: 29362 - DNA, 24 bp, Homo sapiens
  source 1..24: mol_type = genomic DNA
ttagtactctgcgttgtggccgca

SEQ ID NO: 29363 - DNA, 26 bp, Homo sapiens
  source 1..26: mol_type = genomic DNA
ttagtactctgcgttgtggccgcagc

SEQ ID NO: 29364 - DNA, 30 bp, Homo sapiens
  source 1..30: mol_type = genomic DNA
ttagtactctgcgttgtggccgcagcaacc

SEQ ID NO: 29365 - DNA, 31 bp, Homo sapiens
  source 1..31: mol_type = genomic DNA
ttagtactctgcgttgtggccgcagcaacct

SEQ ID NO: 29366 - DNA, 34 bp, Homo sapiens
  source 1..34: mol_type = genomic DNA
ttagtactctgcgttgtggccgcagcaacctcgg

SEQ ID NO: 29367 - DNA, 35 bp, Homo sapiens
  source 1..35: mol_type = genomic DNA
ttagtactctgcgttgtggccgcagcaacctcggt

SEQ ID NO: 29368 - DNA, 37 bp, Homo sapiens
  source 1..37: mol_type = genomic DNA
ttagtactctgcgttgtggccgcagcaacctcggttc

SEQ ID NO: 29369 - DNA, 47 bp, Homo sapiens
  source 1..47: mol_type = genomic DNA
ttagtactctgcgttgtggccgcagcaacctcggttcgaatccgagt

SEQ ID NO: 29370 - DNA, 24 bp, Homo sapiens
  source 1..24: mol_type = genomic DNA
ttagtataaatagtaccgttaact

SEQ ID NO: 29371 - DNA, 25 bp, Homo sapiens
  source 1..25: mol_type = genomic DNA
ttagtataaatagtaccgttaactt

SEQ ID NO: 29372 - DNA, 27 bp, Homo sapiens
  source 1..27: mol_type = genomic DNA
ttagtataaatagtaccgttaacttcc

SEQ ID NO: 29373 - DNA, 29 bp, Homo sapiens
  source 1..29: mol_type = genomic DNA
ttagtatagtggtgagtatccccgcctgt

SEQ ID NO: 29374 - DNA, 17 bp, Homo sapiens
  source 1..17: mol_type = genomic DNA
ttagtatccccgcctgt

SEQ ID NO: 29375 - DNA, 18 bp, Homo sapiens
  source 1..18: mol_type = genomic DNA
ttagtatccccgcctgtc

SEQ ID NO: 29376 - DNA, 33 bp, Homo sapiens
  source 1..33: mol_type = genomic DNA
ttagtatccccgcctgtcacgcgggagaccggg

SEQ ID NO: 29377 - DNA, 23 bp, Homo sapiens
  source 1..23: mol_type = genomic DNA
ttataatgccgaggttgtgagtt

SEQ ID NO: 29378 - DNA, 24 bp, Homo sapiens
  source 1..24: mol_type = genomic DNA
ttataatgccgaggttgtgagttc

SEQ ID NO: 29379 - DNA, 16 bp, Homo sapiens
  source 1..16: mol_type = genomic DNA
ttatacccttcccgta

SEQ ID NO: 29380 - DNA, 17 bp, Homo sapiens
  source 1..17: mol_type = genomic DNA
ttatacccttcccgtac

SEQ ID NO: 29381 - DNA, 18 bp, Homo sapiens
  source 1..18: mol_type = genomic DNA
ttatacccttcccgtact

SEQ ID NO: 29382 - DNA, 19 bp, Homo sapiens
  source 1..19: mol_type = genomic DNA
ttatacccttcccgtacta

SEQ ID NO: 29383 - DNA, 20 bp, Homo sapiens
  source 1..20: mol_type = genomic DNA
ttatacccttcccgtactac

SEQ ID NO: 29384 - DNA, 21 bp, Homo sapiens
  source 1..21: mol_type = genomic DNA
ttatacccttcccgtactacc

SEQ ID NO: 29385 - DNA, 22 bp, Homo sapiens
  source 1..22: mol_type = genomic DNA
ttatacccttcccgtactacca

SEQ ID NO: 29386 - DNA, 16 bp, Homo sapiens
  source 1..16: mol_type = genomic DNA
ttataggctaaatcct

SEQ ID NO: 29387 - DNA, 29 bp, Homo sapiens
  source 1..29: mol_type = genomic DNA
ttataggctaaatcctatatatcttacca

SEQ ID NO: 29388 - DNA, 21 bp, Homo sapiens
  source 1..21: mol_type = genomic DNA
ttatcacatctgctttacacg

SEQ ID NO: 29389 - DNA, 16 bp, Homo sapiens
  source 1..16: mol_type = genomic DNA
ttatcacgtctgcttt

SEQ ID NO: 29390 - DNA, 18 bp, Homo sapiens
  source 1..18: mol_type = genomic DNA
ttatcacgtctgctttac

SEQ ID NO: 29391 - DNA, 21 bp, Homo sapiens
  source 1..21: mol_type = genomic DNA
ttatcacgtctgctttacacg

SEQ ID NO: 29392 - DNA, 22 bp, Homo sapiens
  source 1..22: mol_type = genomic DNA
ttatcacgtctgctttacacgc

SEQ ID NO: 29393 - DNA, 33 bp, Homo sapiens
  source 1..33: mol_type = genomic DNA
ttatcacgtctgctttacacgcagaaggtcctg

SEQ ID NO: 29394 - DNA, 16 bp, Homo sapiens
  source 1..16: mol_type = genomic DNA
ttatcacgttcgcctc

SEQ ID NO: 29395 - DNA, 18 bp, Homo sapiens
  source 1..18: mol_type = genomic DNA
ttatcacgttcgcctcac

SEQ ID NO: 29396 - DNA, 21 bp, Homo sapiens
  source 1..21: mol_type = genomic DNA
ttatcacgttcgcctcacacg

SEQ ID NO: 29397 - DNA, 20 bp, Homo sapiens
  source 1..20: mol_type = genomic DNA
ttatgataatcatatttacc

SEQ ID NO: 29398 - DNA, 23 bp, Homo sapiens
  source 1..23: mol_type = genomic DNA
ttatgataatcatatttaccaac

SEQ ID NO: 29399 - DNA, 24 bp, Homo sapiens
  source 1..24: mol_type = genomic DNA
ttatgataatcatatttaccaacc

SEQ ID NO: 29400 - DNA, 25 bp, Homo sapiens
  source 1..25: mol_type = genomic DNA
ttatgataatcatatttaccaacca

SEQ ID NO: 29401 - DNA, 16 bp, Homo sapiens
  source 1..16: mol_type = genomic DNA
ttatgtagcttacctc

SEQ ID NO: 29402 - DNA, 17 bp, Homo sapiens
  source 1..17: mol_type = genomic DNA
ttatgtagcttacctcc

SEQ ID NO: 29403 - DNA, 18 bp, Homo sapiens
  source 1..18: mol_type = genomic DNA
ttatgtagcttacctcct

SEQ ID NO: 29404 - DNA, 20 bp, Homo sapiens
  source 1..20: mol_type = genomic DNA
ttatgtagcttacctcctca

SEQ ID NO: 29405 - DNA, 25 bp, Homo sapiens
  source 1..25: mol_type = genomic DNA
ttatgtagcttacctcctcaaagca

SEQ ID NO: 29406 - DNA, 28 bp, Homo sapiens
  source 1..28: mol_type = genomic DNA
ttatgtagcttacctcctcaaagcaata

SEQ ID NO: 29407 - DNA, 30 bp, Homo sapiens
  source 1..30: mol_type = genomic DNA
ttatgtagcttacctcctcaaagcaataca

SEQ ID NO: 29408 - DNA, 32 bp, Homo sapiens
  source 1..32: mol_type = genomic DNA
ttatgtagcttacctcctcaaagcaatacact

SEQ ID NO: 29409 - DNA, 33 bp, Homo sapiens
  source 1..33: mol_type = genomic DNA
ttatgtagcttacctcctcaaagcaatacactg

SEQ ID NO: 29410 - DNA, 34 bp, Homo sapiens
  source 1..34: mol_type = genomic DNA
ttatgtagcttacctcctcaaagcaatacactga

SEQ ID NO: 29411 - DNA, 35 bp, Homo sapiens
  source 1..35: mol_type = genomic DNA
ttatgtagcttacctcctcaaagcaatacactgaa

SEQ ID NO: 29412 - DNA, 16 bp, Homo sapiens
  source 1..16: mol_type = genomic DNA
ttcaaaaaagagtacc

SEQ ID NO: 29413 - DNA, 17 bp, Homo sapiens
  source 1..17: mol_type = genomic DNA
ttcaaaaaagagtacca

SEQ ID NO: 29414 - DNA, 16 bp, Homo sapiens
  source 1..16: mol_type = genomic DNA
ttcaaacctgccgggg

SEQ ID NO: 29415 - DNA, 17 bp, Homo sapiens
  source 1..17: mol_type = genomic DNA
ttcaaacctgccggggc

SEQ ID NO: 29416 - DNA, 18 bp, Homo sapiens
  source 1..18: mol_type = genomic DNA
ttcaaacctgccggggct

SEQ ID NO: 29417 - DNA, 19 bp, Homo sapiens
  source 1..19: mol_type = genomic DNA
ttcaaacctgccggggctt

SEQ ID NO: 29418 - DNA, 20 bp, Homo sapiens
  source 1..20: mol_type = genomic DNA
ttcaaacctgccggggcttc

SEQ ID NO: 29419 - DNA, 21 bp, Homo sapiens
  source 1..21: mol_type = genomic DNA
ttcaaacctgccggggcttcc

SEQ ID NO: 29420 - DNA, 22 bp, Homo sapiens
  source 1..22: mol_type = genomic DNA
ttcaaacctgccggggcttcca

SEQ ID NO: 29421 - DNA, 22 bp, Homo sapiens
  source 1..22: mol_type = genomic DNA
ttcaaagccctcagtaagttgc

SEQ ID NO: 29422 - DNA, 28 bp, Homo sapiens
  source 1..28: mol_type = genomic DNA
ttcaaagccctcagtaagttgcaatact

SEQ ID NO: 29423 - DNA, 37 bp, Homo sapiens
  source 1..37: mol_type = genomic DNA
ttcaaagccctcagtaagttgcaatacttaatttctg

SEQ ID NO: 29424 - DNA, 38 bp, Homo sapiens
  source 1..38: mol_type = genomic DNA
ttcaaagccctcagtaagttgcaatacttaatttctgc

SEQ ID NO: 29425 - DNA, 39 bp, Homo sapiens
  source 1..39: mol_type = genomic DNA
ttcaaagccctcagtaagttgcaatacttaatttctgcc

SEQ ID NO: 29426 - DNA, 40 bp, Homo sapiens
  source 1..40: mol_type = genomic DNA
ttcaaagccctcagtaagttgcaatacttaatttctgcca

SEQ ID NO: 29427 - DNA, 16 bp, Homo sapiens
  source 1..16: mol_type = genomic DNA
ttcaaaggttccgggt

SEQ ID NO: 29428 - DNA, 24 bp, Homo sapiens
  source 1..24: mol_type = genomic DNA
ttcaaaggttccgggttcgagtcc

SEQ ID NO: 29429 - DNA, 34 bp, Homo sapiens
  source 1..34: mol_type = genomic DNA
ttcaaaggttccgggttcgagtcccggcggagtc

SEQ ID NO: 29430 - DNA, 35 bp, Homo sapiens
  source 1..35: mol_type = genomic DNA
ttcaaaggttccgggttcgagtcccggcggagtcg

SEQ ID NO: 29431 - DNA, 36 bp, Homo sapiens
  source 1..36: mol_type = genomic DNA
ttcaaaggttccgggttcgagtcccggcggagtcgc

SEQ ID NO: 29432 - DNA, 37 bp, Homo sapiens
  source 1..37: mol_type = genomic DNA
ttcaaaggttccgggttcgagtcccggcggagtcgcc

SEQ ID NO: 29433 - DNA, 38 bp, Homo sapiens
  source 1..38: mol_type = genomic DNA
ttcaaaggttccgggttcgagtcccggcggagtcgcca

SEQ ID NO: 29434 - DNA, 37 bp, Homo sapiens
  source 1..37: mol_type = genomic DNA
ttcaaaggttgtgggttcgaatcccaccagagtcgcc

SEQ ID NO: 29435 - DNA, 38 bp, Homo sapiens
  source 1..38: mol_type = genomic DNA
ttcaaaggttgtgggttcgaatcccaccagagtcgcca

SEQ ID NO: 29436 - DNA, 37 bp, Homo sapiens
  source 1..37: mol_type = genomic DNA
ttcaaaggttgtgggttcgagtcccaccagagtcgcc

SEQ ID NO: 29437 - DNA, 38 bp, Homo sapiens
  source 1..38: mol_type = genomic DNA
ttcaaaggttgtgggttcgagtcccaccagagtcgcca

SEQ ID NO: 29438 - DNA, 20 bp, Homo sapiens
  source 1..20: mol_type = genomic DNA
ttcaaatcacgtcggggtca

SEQ ID NO: 29439 - DNA, 21 bp, Homo sapiens
  source 1..21: mol_type = genomic DNA
ttcaaatcacgtcggggtcac

SEQ ID NO: 29440 - DNA, 22 bp, Homo sapiens
  source 1..22: mol_type = genomic DNA
ttcaaatcacgtcggggtcacc

SEQ ID NO: 29441 - DNA, 23 bp, Homo sapiens
  source 1..23: mol_type = genomic DNA
ttcaaatcacgtcggggtcacca

SEQ ID NO: 29442 - DNA, 16 bp, Homo sapiens
  source 1..16: mol_type = genomic DNA
ttcaaatcccggacga

SEQ ID NO: 29443 - DNA, 17 bp, Homo sapiens
  source 1..17: mol_type = genomic DNA
ttcaaatcccggacgag

SEQ ID NO: 29444 - DNA, 18 bp, Homo sapiens
  source 1..18: mol_type = genomic DNA
ttcaaatcccggacgagc

SEQ ID NO: 29445 - DNA, 19 bp, Homo sapiens
  source 1..19: mol_type = genomic DNA
ttcaaatcccggacgagcc

SEQ ID NO: 29446 - DNA, 20 bp, Homo sapiens
  source 1..20: mol_type = genomic DNA
ttcaaatcccggacgagccc

SEQ ID NO: 29447 - DNA, 21 bp, Homo sapiens
  source 1..21: mol_type = genomic DNA
ttcaaatcccggacgagcccc

SEQ ID NO: 29448 - DNA, 22 bp, Homo sapiens
  source 1..22: mol_type = genomic DNA
ttcaaatcccggacgagccccc

SEQ ID NO: 29449 - DNA, 23 bp, Homo sapiens
  source 1..23: mol_type = genomic DNA
ttcaaatcccggacgagccccca

SEQ ID NO: 29450 - DNA, 16 bp, Homo sapiens
  source 1..16: mol_type = genomic DNA
ttcaaatccgggtgcc

SEQ ID NO: 29451 - DNA, 17 bp, Homo sapiens
  source 1..17: mol_type = genomic DNA
ttcaaatccgggtgccc

SEQ ID NO: 29452 - DNA, 22 bp, Homo sapiens
  source 1..22: mol_type = genomic DNA
ttcaaatccgggtgccccctcc

SEQ ID NO: 29453 - DNA, 20 bp, Homo sapiens
  source 1..20: mol_type = genomic DNA
ttcaaatctcgctggggcct

SEQ ID NO: 29454 - DNA, 21 bp, Homo sapiens
  source 1..21: mol_type = genomic DNA
ttcaaatctcgctggggcctc

SEQ ID NO: 29455 - DNA, 22 bp, Homo sapiens
  source 1..22: mol_type = genomic DNA
ttcaaatctcgctggggcctcc

SEQ ID NO: 29456 - DNA, 16 bp, Homo sapiens
  source 1..16: mol_type = genomic DNA
ttcaaatctcggtgga

SEQ ID NO: 29457 - DNA, 17 bp, Homo sapiens
  source 1..17: mol_type = genomic DNA
ttcaaatctcggtggaa

SEQ ID NO: 29458 - DNA, 19 bp, Homo sapiens
  source 1..19: mol_type = genomic DNA
ttcaaatctcggtggaacc

SEQ ID NO: 29459 - DNA, 20 bp, Homo sapiens
  source 1..20: mol_type = genomic DNA
ttcaaatctcggtggaacct

SEQ ID NO: 29460 - DNA, 22 bp, Homo sapiens
  source 1..22: mol_type = genomic DNA
ttcaaatctcggtggaacctcc

SEQ ID NO: 29461 - DNA, 23 bp, Homo sapiens
  source 1..23: mol_type = genomic DNA
ttcaaatctcggtggaacctcca

SEQ ID NO: 29462 - DNA, 20 bp, Homo sapiens
  source 1..20: mol_type = genomic DNA
ttcaaatctcggtgggacct

SEQ ID NO: 29463 - DNA, 21 bp, Homo sapiens
  source 1..21: mol_type = genomic DNA
ttcaaatctcggtgggacctc

SEQ ID NO: 29464 - DNA, 22 bp, Homo sapiens
  source 1..22: mol_type = genomic DNA
ttcaaatctcggtgggacctcc

SEQ ID NO: 29465 - DNA, 16 bp, Homo sapiens
  source 1..16: mol_type = genomic DNA
ttcaacttaacttgac

SEQ ID NO: 29466 - DNA, 17 bp, Homo sapiens
  source 1..17: mol_type = genomic DNA
ttcaacttaacttgacc

SEQ ID NO: 29467 - DNA, 18 bp, Homo sapiens
  source 1..18: mol_type = genomic DNA
ttcaacttaacttgaccg

SEQ ID NO: 29468 - DNA, 19 bp, Homo sapiens
  source 1..19: mol_type = genomic DNA
ttcaacttaacttgaccgc

SEQ ID NO: 29469 - DNA, 20 bp, Homo sapiens
  source 1..20: mol_type = genomic DNA
ttcaacttaacttgaccgct

SEQ ID NO: 29470 - DNA, 21 bp, Homo sapiens
  source 1..21: mol_type = genomic DNA
ttcaacttaacttgaccgctc

SEQ ID NO: 29471 - DNA, 22 bp, Homo sapiens
  source 1..22: mol_type = genomic DNA
ttcaacttaacttgaccgctct

SEQ ID NO: 29472 - DNA, 23 bp, Homo sapiens
  source 1..23: mol_type = genomic DNA
ttcaacttaacttgaccgctctg

SEQ ID NO: 29473 - DNA, 24 bp, Homo sapiens
  source 1..24: mol_type = genomic DNA
ttcaacttaacttgaccgctctga

SEQ ID NO: 29474 - DNA, 25 bp, Homo sapiens
  source 1..25: mol_type = genomic DNA
ttcaacttaacttgaccgctctgac

SEQ ID NO: 29475 - DNA, 26 bp, Homo sapiens
  source 1..26: mol_type = genomic DNA
ttcaacttaacttgaccgctctgacc

SEQ ID NO: 29476 - DNA, 27 bp, Homo sapiens
  source 1..27: mol_type = genomic DNA
ttcaacttaacttgaccgctctgacca

SEQ ID NO: 29477 - DNA, 20 bp, Homo sapiens
  source 1..20: mol_type = genomic DNA
ttcaagtcacgtcggggtca

SEQ ID NO: 29478 - DNA, 21 bp, Homo sapiens
  source 1..21: mol_type = genomic DNA
ttcaagtcacgtcggggtcac

SEQ ID NO: 29479 - DNA, 22 bp, Homo sapiens
  source 1..22: mol_type = genomic DNA
ttcaagtcacgtcggggtcacc

SEQ ID NO: 29480 - DNA, 23 bp, Homo sapiens
  source 1..23: mol_type = genomic DNA
ttcaagtcacgtcggggtcacca

SEQ ID NO: 29481 - DNA, 17 bp, Homo sapiens
  source 1..17: mol_type = genomic DNA
ttcaagtccctgttcgg

SEQ ID NO: 29482 - DNA, 19 bp, Homo sapiens
  source 1..19: mol_type = genomic DNA
ttcaagtccctgttcgggc

SEQ ID NO: 29483 - DNA, 20 bp, Homo sapiens
  source 1..20: mol_type = genomic DNA
ttcaagtccctgttcgggcg

SEQ ID NO: 29484 - DNA, 22 bp, Homo sapiens
  source 1..22: mol_type = genomic DNA
ttcaagtccctgttcgggcgcc

SEQ ID NO: 29485 - DNA, 23 bp, Homo sapiens
  source 1..23: mol_type = genomic DNA
ttcaagtccctgttcgggcgcca

SEQ ID NO: 29486 - DNA, 18 bp, Homo sapiens
  source 1..18: mol_type = genomic DNA
ttcaatccccggcacctc

SEQ ID NO: 29487 - DNA, 22 bp, Homo sapiens
  source 1..22: mol_type = genomic DNA
ttcaatccccggcatctccacc

SEQ ID NO: 29488 - DNA, 21 bp, Homo sapiens
  source 1..21: mol_type = genomic DNA
ttcaattccccgacggggagc

SEQ ID NO: 29489 - DNA, 16 bp, Homo sapiens
  source 1..16: mol_type = genomic DNA
ttcacccaggcggccc

SEQ ID NO: 29490 - DNA, 17 bp, Homo sapiens
  source 1..17: mol_type = genomic DNA
ttcacccaggcggcccg

SEQ ID NO: 29491 - DNA, 18 bp, Homo sapiens
  source 1..18: mol_type = genomic DNA
ttcacccaggcggcccgg

SEQ ID NO: 29492 - DNA, 21 bp, Homo sapiens
  source 1..21: mol_type = genomic DNA
ttcacccaggcggcccgggtt

SEQ ID NO: 29493 - DNA, 35 bp, Homo sapiens
  source 1..35: mol_type = genomic DNA
ttcacccaggcggcccgggttcgactcccggtgtg

SEQ ID NO: 29494 - DNA, 36 bp, Homo sapiens
  source 1..36: mol_type = genomic DNA
ttcacccaggcggcccgggttcgactcccggtgtgg

SEQ ID NO: 29495 - DNA, 39 bp, Homo sapiens
  source 1..39: mol_type = genomic DNA
ttcacccaggcggcccgggttcgactcccggtgtgggaa

SEQ ID NO: 29496 - DNA, 40 bp, Homo sapiens
  source 1..40: mol_type = genomic DNA
ttcacccaggcggcccgggttcgactcccggtgtgggaac

SEQ ID NO: 29497 - DNA, 41 bp, Homo sapiens
  source 1..41: mol_type = genomic DNA
ttcacccaggcggcccgggttcgactcccggtgtgggaacc

SEQ ID NO: 29498 - DNA, 42 bp, Homo sapiens
  source 1..42: mol_type = genomic DNA
ttcacccaggcggcccgggttcgactcccggtgtgggaacca

SEQ ID NO: 29499 - DNA, 39 bp, Homo sapiens
  source 1..39: mol_type = genomic DNA
ttcacccaggtggcccgggttcgactcccggtatgggaa

SEQ ID NO: 29500 - DNA, 21 bp, Homo sapiens
  source 1..21: mol_type = genomic DNA
ttcaccgccgcggcccgggtt

SEQ ID NO: 29501 - DNA, 37 bp, Homo sapiens
  source 1..37: mol_type = genomic DNA
ttcaccgccgcggcccgggttcgattcccggtcaggg

SEQ ID NO: 29502 - DNA, 16 bp, Homo sapiens
  source 1..16: mol_type = genomic DNA
ttcaggtcgcagtctc

SEQ ID NO: 29503 - DNA, 17 bp, Homo sapiens
  source 1..17: mol_type = genomic DNA
ttcaggtcgcagtctcc

SEQ ID NO: 29504 - DNA, 18 bp, Homo sapiens
  source 1..18: mol_type = genomic DNA
ttcaggtcgcagtctccc

SEQ ID NO: 29505 - DNA, 19 bp, Homo sapiens
  source 1..19: mol_type = genomic DNA
ttcaggtcgcagtctcccc

SEQ ID NO: 29506 - DNA, 29 bp, Homo sapiens
  source 1..29: mol_type = genomic DNA
ttcaggtcgcagtctcccctggaggcgtg

SEQ ID NO: 29507 - DNA, 30 bp, Homo sapiens
  source 1..30: mol_type = genomic DNA
ttcaggtcgcagtctcccctggaggcgtgg

SEQ ID NO: 29508 - DNA, 16 bp, Homo sapiens
  source 1..16: mol_type = genomic DNA
ttcagtggtagaattc

SEQ ID NO: 29509 - DNA, 17 bp, Homo sapiens
  source 1..17: mol_type = genomic DNA
ttcagtggtagaattct

SEQ ID NO: 29510 - DNA, 18 bp, Homo sapiens
  source 1..18: mol_type = genomic DNA
ttcagtggtagaattctc

SEQ ID NO: 29511 - DNA, 19 bp, Homo sapiens
  source 1..19: mol_type = genomic DNA
ttcagtggtagaattctcg

SEQ ID NO: 29512 - DNA, 20 bp, Homo sapiens
  source 1..20: mol_type = genomic DNA
ttcagtggtagaattctcgc

SEQ ID NO: 29513 - DNA, 21 bp, Homo sapiens
  source 1..21: mol_type = genomic DNA
ttcagtggtagaattctcgcc

SEQ ID NO: 29514 - DNA, 22 bp, Homo sapiens
  source 1..22: mol_type = genomic DNA
ttcagtggtagaattctcgcct

SEQ ID NO: 29515 - DNA, 23 bp, Homo sapiens
  source 1..23: mol_type = genomic DNA
ttcagtggtagaattctcgcctc

SEQ ID NO: 29516 - DNA, 25 bp, Homo sapiens
  source 1..25: mol_type = genomic DNA
ttcagtggtagaattctcgcctccc

SEQ ID NO: 29517 - DNA, 23 bp, Homo sapiens
  source 1..23: mol_type = genomic DNA
ttcagtggtagaattctcgcctg

SEQ ID NO: 29518 - DNA, 24 bp, Homo sapiens
  source 1..24: mol_type = genomic DNA
ttcagtggtagaattctcgcctgc

SEQ ID NO: 29519 - DNA, 25 bp, Homo sapiens
  source 1..25: mol_type = genomic DNA
ttcagtggtagaattctcgcctgcc

SEQ ID NO: 29520 - DNA, 26 bp, Homo sapiens
  source 1..26: mol_type = genomic DNA
ttcagtggtagaattctcgcctgcca

SEQ ID NO: 29521 - DNA, 27 bp, Homo sapiens
  source 1..27: mol_type = genomic DNA
ttcagtggtagaattctcgcctgccac

SEQ ID NO: 29522 - DNA, 28 bp, Homo sapiens
  source 1..28: mol_type = genomic DNA
ttcagtggtagaattctcgcctgccacg

SEQ ID NO: 29523 - DNA, 29 bp, Homo sapiens
  source 1..29: mol_type = genomic DNA
ttcagtggtagaattctcgcctgccacgc

SEQ ID NO: 29524 - DNA, 31 bp, Homo sapiens
  source 1..31: mol_type = genomic DNA
ttcagtggtagaattctcgcctgccacgcgg

SEQ ID NO: 29525 - DNA, 32 bp, Homo sapiens
  source 1..32: mol_type = genomic DNA
ttcagtggtagaattctcgcctgccacgcggg

SEQ ID NO: 29526 - DNA, 33 bp, Homo sapiens
  source 1..33: mol_type = genomic DNA
ttcagtggtagaattctcgcctgccacgcggga

SEQ ID NO: 29527 - DNA, 38 bp, Homo sapiens
  source 1..38: mol_type = genomic DNA
ttcagtggtagaattctcgcctgccacgcgggaggccc

SEQ ID NO: 29528 - DNA, 39 bp, Homo sapiens
  source 1..39: mol_type = genomic DNA
ttcagtggtagaattctcgcctgccacgcgggaggcccg

SEQ ID NO: 29529 - DNA, 40 bp, Homo sapiens
  source 1..40: mol_type = genomic DNA
ttcagtggtagaattctcgcctgccacgcgggaggcccgg

SEQ ID NO: 29530 - DNA, 41 bp, Homo sapiens
  source 1..41: mol_type = genomic DNA
ttcagtggtagaattctcgcctgccacgcgggaggcccggg

SEQ ID NO: 29531 - DNA, 42 bp, Homo sapiens
  source 1..42: mol_type = genomic DNA
ttcagtggtagaattctcgcctgccacgcgggaggcccgggt

SEQ ID NO: 29532 - DNA, 16 bp, Homo sapiens
  source 1..16: mol_type = genomic DNA
ttcagttgatgcagag

SEQ ID NO: 29533 - DNA, 18 bp, Homo sapiens
  source 1..18: mol_type = genomic DNA
ttcagttgatgcagagtg

SEQ ID NO: 29534 - DNA, 19 bp, Homo sapiens
  source 1..19: mol_type = genomic DNA
ttcagttgatgcagagtgg

SEQ ID NO: 29535 - DNA, 20 bp, Homo sapiens
  source 1..20: mol_type = genomic DNA
ttcagttgatgcagagtggg

SEQ ID NO: 29536 - DNA, 21 bp, Homo sapiens
  source 1..21: mol_type = genomic DNA
ttcagttgatgcagagtgggg

SEQ ID NO: 29537 - DNA, 22 bp, Homo sapiens
  source 1..22: mol_type = genomic DNA
ttcagttgatgcagagtggggt

SEQ ID NO: 29538 - DNA, 23 bp, Homo sapiens
  source 1..23: mol_type = genomic DNA
ttcagttgatgcagagtggggtt

SEQ ID NO: 29539 - DNA, 24 bp, Homo sapiens
  source 1..24: mol_type = genomic DNA
ttcagttgatgcagagtggggttt

SEQ ID NO: 29540 - DNA, 25 bp, Homo sapiens
  source 1..25: mol_type = genomic DNA
ttcagttgatgcagagtggggtttt

SEQ ID NO: 29541 - DNA, 26 bp, Homo sapiens
  source 1..26: mol_type = genomic DNA
ttcagttgatgcagagtggggttttg

SEQ ID NO: 29542 - DNA, 27 bp, Homo sapiens
  source 1..27: mol_type = genomic DNA
ttcagttgatgcagagtggggttttgc

SEQ ID NO: 29543 - DNA, 28 bp, Homo sapiens
  source 1..28: mol_type = genomic DNA
ttcagttgatgcagagtggggttttgca

SEQ ID NO: 29544 - DNA, 29 bp, Homo sapiens
  source 1..29: mol_type = genomic DNA
ttcagttgatgcagagtggggttttgcag

SEQ ID NO: 29545 - DNA, 30 bp, Homo sapiens
  source 1..30: mol_type = genomic DNA
ttcagttgatgcagagtggggttttgcagt

SEQ ID NO: 29546 - DNA, 31 bp, Homo sapiens
  source 1..31: mol_type = genomic DNA
ttcagttgatgcagagtggggttttgcagtc

SEQ ID NO: 29547 - DNA, 32 bp, Homo sapiens
  source 1..32: mol_type = genomic DNA
ttcagttgatgcagagtggggttttgcagtcc

SEQ ID NO: 29548 - DNA, 33 bp, Homo sapiens
  source 1..33: mol_type = genomic DNA
ttcagttgatgcagagtggggttttgcagtcct

SEQ ID NO: 29549 - DNA, 34 bp, Homo sapiens
  source 1..34: mol_type = genomic DNA
ttcagttgatgcagagtggggttttgcagtcctt

SEQ ID NO: 29550 - DNA, 35 bp, Homo sapiens
  source 1..35: mol_type = genomic DNA
ttcagttgatgcagagtggggttttgcagtcctta

SEQ ID NO: 29551 - DNA, 36 bp, Homo sapiens
  source 1..36: mol_type = genomic DNA
ttcagttgatgcagagtggggttttgcagtccttac

SEQ ID NO: 29552 - DNA, 37 bp, Homo sapiens
  source 1..37: mol_type = genomic DNA
ttcagttgatgcagagtggggttttgcagtccttacc

SEQ ID NO: 29553 - DNA, 38 bp, Homo sapiens
  source 1..38: mol_type = genomic DNA
ttcagttgatgcagagtggggttttgcagtccttacca

SEQ ID NO: 29554 - DNA, 18 bp, Homo sapiens
  source 1..18: mol_type = genomic DNA
ttcataactttgtcaaag

SEQ ID NO: 29555 - DNA, 31 bp, Homo sapiens
  source 1..31: mol_type = genomic DNA
ttcataactttgtcaaagttaaattataggc

SEQ ID NO: 29556 - DNA, 32 bp, Homo sapiens
  source 1..32: mol_type = genomic DNA
ttcataactttgtcaaagttaaattataggct

SEQ ID NO: 29557 - DNA, 33 bp, Homo sapiens
  source 1..33: mol_type = genomic DNA
ttcataactttgtcaaagttaaattataggcta

SEQ ID NO: 29558 - DNA, 34 bp, Homo sapiens
  source 1..34: mol_type = genomic DNA
ttcataactttgtcaaagttaaattataggctaa

SEQ ID NO: 29559 - DNA, 35 bp, Homo sapiens
  source 1..35: mol_type = genomic DNA
ttcataactttgtcaaagttaaattataggctaaa

SEQ ID NO: 29560 - DNA, 16 bp, Homo sapiens
  source 1..16: mol_type = genomic DNA
ttcatatcattggtcg

SEQ ID NO: 29561 - DNA, 17 bp, Homo sapiens
  source 1..17: mol_type = genomic DNA
ttcatatcattggtcgt

SEQ ID NO: 29562 - DNA, 20 bp, Homo sapiens
  source 1..20: mol_type = genomic DNA
ttcatatcattggtcgtggt

SEQ ID NO: 29563 - DNA, 21 bp, Homo sapiens
  source 1..21: mol_type = genomic DNA
ttcatatcattggtcgtggtt

SEQ ID NO: 29564 - DNA, 22 bp, Homo sapiens
  source 1..22: mol_type = genomic DNA
ttcatatcattggtcgtggttg

SEQ ID NO: 29565 - DNA, 23 bp, Homo sapiens
  source 1..23: mol_type = genomic DNA
ttcatatcattggtcgtggttgt

SEQ ID NO: 29566 - DNA, 24 bp, Homo sapiens
  source 1..24: mol_type = genomic DNA
ttcatatcattggtcgtggttgta

SEQ ID NO: 29567 - DNA, 26 bp, Homo sapiens
  source 1..26: mol_type = genomic DNA
ttcatatcattggtcgtggttgtagt

SEQ ID NO: 29568 - DNA, 27 bp, Homo sapiens
  source 1..27: mol_type = genomic DNA
ttcatatcattggtcgtggttgtagtc

SEQ ID NO: 29569 - DNA, 28 bp, Homo sapiens
  source 1..28: mol_type = genomic DNA
ttcatatcattggtcgtggttgtagtcc

SEQ ID NO: 29570 - DNA, 29 bp, Homo sapiens
  source 1..29: mol_type = genomic DNA
ttcatatcattggtcgtggttgtagtccg

SEQ ID NO: 29571 - DNA, 30 bp, Homo sapiens
  source 1..30: mol_type = genomic DNA
ttcatatcattggtcgtggttgtagtccgt

SEQ ID NO: 29572 - DNA, 31 bp, Homo sapiens
  source 1..31: mol_type = genomic DNA
ttcatatcattggtcgtggttgtagtccgtg

SEQ ID NO: 29573 - DNA, 32 bp, Homo sapiens
  source 1..32: mol_type = genomic DNA
ttcatatcattggtcgtggttgtagtccgtgc

SEQ ID NO: 29574 - DNA, 33 bp, Homo sapiens
  source 1..33: mol_type = genomic DNA
ttcatatcattggtcgtggttgtagtccgtgcg

SEQ ID NO: 29575 - DNA, 34 bp, Homo sapiens
  source 1..34: mol_type = genomic DNA
ttcatatcattggtcgtggttgtagtccgtgcga

SEQ ID NO: 29576 - DNA, 35 bp, Homo sapiens
  source 1..35: mol_type = genomic DNA
ttcatatcattggtcgtggttgtagtccgtgcgag

SEQ ID NO: 29577 - DNA, 36 bp, Homo sapiens
  source 1..36: mol_type = genomic DNA
ttcatatcattggtcgtggttgtagtccgtgcgaga

SEQ ID NO: 29578 - DNA, 37 bp, Homo sapiens
  source 1..37: mol_type = genomic DNA
ttcatatcattggtcgtggttgtagtccgtgcgagaa

SEQ ID NO: 29579 - DNA, 38 bp, Homo sapiens
  source 1..38: mol_type = genomic DNA
ttcatatcattggtcgtggttgtagtccgtgcgagaat

SEQ ID NO: 29580 - DNA, 39 bp, Homo sapiens
  source 1..39: mol_type = genomic DNA
ttcatatcattggtcgtggttgtagtccgtgcgagaata

SEQ ID NO: 29581 - DNA, 40 bp, Homo sapiens
  source 1..40: mol_type = genomic DNA
ttcatatcattggtcgtggttgtagtccgtgcgagaatac

SEQ ID NO: 29582 - DNA, 41 bp, Homo sapiens
  source 1..41: mol_type = genomic DNA
ttcatatcattggtcgtggttgtagtccgtgcgagaatacc

SEQ ID NO: 29583 - DNA, 42 bp, Homo sapiens
  source 1..42: mol_type = genomic DNA
ttcatatcattggtcgtggttgtagtccgtgcgagaatacca

SEQ ID NO: 29584 - DNA, 16 bp, Homo sapiens
  source 1..16: mol_type = genomic DNA
ttcatattgaattgca

SEQ ID NO: 29585 - DNA, 20 bp, Homo sapiens
  source 1..20: mol_type = genomic DNA
ttcatattgaattgcaaatt

SEQ ID NO: 29586 - DNA, 21 bp, Homo sapiens
  source 1..21: mol_type = genomic DNA
ttcatattgaattgcaaattc

SEQ ID NO: 29587 - DNA, 48 bp, Homo sapiens
  source 1..48: mol_type = genomic DNA
ttcatattgaattgcaaattcgaagaagcagcttcaaacctgccgggg

SEQ ID NO: 29588 - DNA, 16 bp, Homo sapiens
  source 1..16: mol_type = genomic DNA
ttccaagcagttgacc

SEQ ID NO: 29589 - DNA, 17 bp, Homo sapiens
  source 1..17: mol_type = genomic DNA
ttccaagcagttgaccc

SEQ ID NO: 29590 - DNA, 18 bp, Homo sapiens
  source 1..18: mol_type = genomic DNA
ttccaagcagttgacccg

SEQ ID NO: 29591 - DNA, 22 bp, Homo sapiens
  source 1..22: mol_type = genomic DNA
ttccaagcagttgacccgggtt

SEQ ID NO: 29592 - DNA, 26 bp, Homo sapiens
  source 1..26: mol_type = genomic DNA
ttccaagcagttgacccgggttcgat

SEQ ID NO: 29593 - DNA, 34 bp, Homo sapiens
  source 1..34: mol_type = genomic DNA
ttccaagcagttgacccgggttcgattcccggcc

SEQ ID NO: 29594 - DNA, 37 bp, Homo sapiens
  source 1..37: mol_type = genomic DNA
ttccaagcagttgacccgggttcgattcccggccaac

SEQ ID NO: 29595 - DNA, 38 bp, Homo sapiens
  source 1..38: mol_type = genomic DNA
ttccaagcagttgacccgggttcgattcccggccaacg

SEQ ID NO: 29596 - DNA, 40 bp, Homo sapiens
  source 1..40: mol_type = genomic DNA
ttccaagcagttgacccgggttcgattcccggccaacgca

SEQ ID NO: 29597 - DNA, 42 bp, Homo sapiens
  source 1..42: mol_type = genomic DNA
ttccaagcagttgacccgggttcgattcccggccaacgcacc

SEQ ID NO: 29598 - DNA, 19 bp, Homo sapiens
  source 1..19: mol_type = genomic DNA
ttccaattaactagttttg

SEQ ID NO: 29599 - DNA, 21 bp, Homo sapiens
  source 1..21: mol_type = genomic DNA
ttccaattaactagttttgac

SEQ ID NO: 29600 - DNA, 22 bp, Homo sapiens
  source 1..22: mol_type = genomic DNA
ttccaattaactagttttgaca

SEQ ID NO: 29601 - DNA, 23 bp, Homo sapiens
  source 1..23: mol_type = genomic DNA
ttccaattaactagttttgacaa

SEQ ID NO: 29602 - DNA, 24 bp, Homo sapiens
  source 1..24: mol_type = genomic DNA
ttccaattaactagttttgacaac

SEQ ID NO: 29603 - DNA, 25 bp, Homo sapiens
  source 1..25: mol_type = genomic DNA
ttccaattaactagttttgacaaca

SEQ ID NO: 29604 - DNA, 29 bp, Homo sapiens
  source 1..29: mol_type = genomic DNA
ttccaattaactagttttgacaacattca

SEQ ID NO: 29605 - DNA, 36 bp, Homo sapiens
  source 1..36: mol_type = genomic DNA
ttccaattaactagttttgacaacattcaaaaaaga

SEQ ID NO: 29606 - DNA, 39 bp, Homo sapiens
  source 1..39: mol_type = genomic DNA
ttccaattaactagttttgacaacattcaaaaaagagta

SEQ ID NO: 29607 - DNA, 40 bp, Homo sapiens
  source 1..40: mol_type = genomic DNA
ttccaattaactagttttgacaacattcaaaaaagagtac

SEQ ID NO: 29608 - DNA, 41 bp, Homo sapiens
  source 1..41: mol_type = genomic DNA
ttccaattaactagttttgacaacattcaaaaaagagtacc

SEQ ID NO: 29609 - DNA, 42 bp, Homo sapiens
  source 1..42: mol_type = genomic DNA
ttccaattaactagttttgacaacattcaaaaaagagtacca

SEQ ID NO: 29610 - DNA, 18 bp, Homo sapiens
  source 1..18: mol_type = genomic DNA
ttccaggttcgactcctg

SEQ ID NO: 29611 - DNA, 26 bp, Homo sapiens
  source 1..26: mol_type = genomic DNA
ttccaggttcgactcctggctggctc

SEQ ID NO: 29612 - DNA, 27 bp, Homo sapiens
  source 1..27: mol_type = genomic DNA
ttccaggttcgactcctggctggctcg

SEQ ID NO: 29613 - DNA, 28 bp, Homo sapiens
  source 1..28: mol_type = genomic DNA
ttccaggttcgactcctggctggctcgc

SEQ ID NO: 29614 - DNA, 29 bp, Homo sapiens
  source 1..29: mol_type = genomic DNA
ttccaggttcgactcctggctggctcgcc

SEQ ID NO: 29615 - DNA, 30 bp, Homo sapiens
  source 1..30: mol_type = genomic DNA
ttccaggttcgactcctggctggctcgcca

SEQ ID NO: 29616 - DNA, 21 bp, Homo sapiens
  source 1..21: mol_type = genomic DNA
ttccatagtgtagcggttatc

SEQ ID NO: 29617 - DNA, 28 bp, Homo sapiens
  source 1..28: mol_type = genomic DNA
ttccatagtgtagcggttatcacgtctg

SEQ ID NO: 29618 - DNA, 29 bp, Homo sapiens
  source 1..29: mol_type = genomic DNA
ttccatagtgtagcggttatcacgtctgc

SEQ ID NO: 29619 - DNA, 30 bp, Homo sapiens
  source 1..30: mol_type = genomic DNA
ttccatagtgtagcggttatcacgtctgct

SEQ ID NO: 29620 - DNA, 31 bp, Homo sapiens
  source 1..31: mol_type = genomic DNA
ttccatagtgtagcggttatcacgtctgctt

SEQ ID NO: 29621 - DNA, 32 bp, Homo sapiens
  source 1..32: mol_type = genomic DNA
ttccatagtgtagcggttatcacgtctgcttt

SEQ ID NO: 29622 - DNA, 34 bp, Homo sapiens
  source 1..34: mol_type = genomic DNA
ttccatagtgtagcggttatcacgtctgctttac

SEQ ID NO: 29623 - DNA, 21 bp, Homo sapiens
  source 1..21: mol_type = genomic DNA
ttccatagtgtagtggttatc

SEQ ID NO: 29624 - DNA, 28 bp, Homo sapiens
  source 1..28: mol_type = genomic DNA
ttccatagtgtagtggttatcacatctg

SEQ ID NO: 29625 - DNA, 30 bp, Homo sapiens
  source 1..30: mol_type = genomic DNA
ttccatagtgtagtggttatcacatctgct

SEQ ID NO: 29626 - DNA, 31 bp, Homo sapiens
  source 1..31: mol_type = genomic DNA
ttccatagtgtagtggttatcacatctgctt

SEQ ID NO: 29627 - DNA, 34 bp, Homo sapiens
  source 1..34: mol_type = genomic DNA
ttccatagtgtagtggttatcacatctgctttac

SEQ ID NO: 29628 - DNA, 27 bp, Homo sapiens
  source 1..27: mol_type = genomic DNA
ttccatagtgtagtggttatcacgtct

SEQ ID NO: 29629 - DNA, 28 bp, Homo sapiens
  source 1..28: mol_type = genomic DNA
ttccatagtgtagtggttatcacgtctg

SEQ ID NO: 29630 - DNA, 29 bp, Homo sapiens
  source 1..29: mol_type = genomic DNA
ttccatagtgtagtggttatcacgtctgc

SEQ ID NO: 29631 - DNA, 30 bp, Homo sapiens
  source 1..30: mol_type = genomic DNA
ttccatagtgtagtggttatcacgtctgct

SEQ ID NO: 29632 - DNA, 31 bp, Homo sapiens
  source 1..31: mol_type = genomic DNA
ttccatagtgtagtggttatcacgtctgctt

SEQ ID NO: 29633 - DNA, 32 bp, Homo sapiens
  source 1..32: mol_type = genomic DNA
ttccatagtgtagtggttatcacgtctgcttt

SEQ ID NO: 29634 - DNA, 33 bp, Homo sapiens
  source 1..33: mol_type = genomic DNA
ttccatagtgtagtggttatcacgtctgcttta

SEQ ID NO: 29635 - DNA, 34 bp, Homo sapiens
  source 1..34: mol_type = genomic DNA
ttccatagtgtagtggttatcacgtctgctttac

SEQ ID NO: 29636 - DNA, 35 bp, Homo sapiens
  source 1..35: mol_type = genomic DNA
ttccatagtgtagtggttatcacgtctgctttaca

SEQ ID NO: 29637 - DNA, 37 bp, Homo sapiens
  source 1..37: mol_type = genomic DNA
ttccatagtgtagtggttatcacgtctgctttacacg

SEQ ID NO: 29638 - DNA, 27 bp, Homo sapiens
  source 1..27: mol_type = genomic DNA
ttccatggtgtaatggtaagcactctg

SEQ ID NO: 29639 - DNA, 33 bp, Homo sapiens
  source 1..33: mol_type = genomic DNA
ttccatggtgtaatggtaagcactctggactct

SEQ ID NO: 29640 - DNA, 25 bp, Homo sapiens
  source 1..25: mol_type = genomic DNA
ttccatggtgtaatggtgagcactc

SEQ ID NO: 29641 - DNA, 26 bp, Homo sapiens
  source 1..26: mol_type = genomic DNA
ttccatggtgtaatggtgagcactct

SEQ ID NO: 29642 - DNA, 27 bp, Homo sapiens
  source 1..27: mol_type = genomic DNA
ttccatggtgtaatggtgagcactctg

SEQ ID NO: 29643 - DNA, 28 bp, Homo sapiens
  source 1..28: mol_type = genomic DNA
ttccatggtgtaatggtgagcactctgg

SEQ ID NO: 29644 - DNA, 29 bp, Homo sapiens
  source 1..29: mol_type = genomic DNA
ttccatggtgtaatggtgagcactctgga

SEQ ID NO: 29645 - DNA, 31 bp, Homo sapiens
  source 1..31: mol_type = genomic DNA
ttccatggtgtaatggtgagcactctggact

SEQ ID NO: 29646 - DNA, 32 bp, Homo sapiens
  source 1..32: mol_type = genomic DNA
ttccatggtgtaatggtgagcactctggactc

SEQ ID NO: 29647 - DNA, 33 bp, Homo sapiens
  source 1..33: mol_type = genomic DNA
ttccatggtgtaatggtgagcactctggactct

SEQ ID NO: 29648 - DNA, 34 bp, Homo sapiens
  source 1..34: mol_type = genomic DNA
ttccatggtgtaatggtgagcactctggactctg

SEQ ID NO: 29649 - DNA, 35 bp, Homo sapiens
  source 1..35: mol_type = genomic DNA
ttccatggtgtaatggtgagcactctggactctga

SEQ ID NO: 29650 - DNA, 39 bp, Homo sapiens
  source 1..39: mol_type = genomic DNA
ttccatggtgtaatggtgagcactctggactctgaatcc

SEQ ID NO: 29651 - DNA, 40 bp, Homo sapiens
  source 1..40: mol_type = genomic DNA
ttccatggtgtaatggtgagcactctggactctgaatcca

SEQ ID NO: 29652 - DNA, 25 bp, Homo sapiens
  source 1..25: mol_type = genomic DNA
ttccatggtgtaatggttagcactc

SEQ ID NO: 29653 - DNA, 26 bp, Homo sapiens
  source 1..26: mol_type = genomic DNA
ttccatggtgtaatggttagcactct

SEQ ID NO: 29654 - DNA, 27 bp, Homo sapiens
  source 1..27: mol_type = genomic DNA
ttccatggtgtaatggttagcactctg

SEQ ID NO: 29655 - DNA, 28 bp, Homo sapiens
  source 1..28: mol_type = genomic DNA
ttccatggtgtaatggttagcactctgg

SEQ ID NO: 29656 - DNA, 29 bp, Homo sapiens
  source 1..29: mol_type = genomic DNA
ttccatggtgtaatggttagcactctgga

SEQ ID NO: 29657 - DNA, 30 bp, Homo sapiens
  source 1..30: mol_type = genomic DNA
ttccatggtgtaatggttagcactctggac

SEQ ID NO: 29658 - DNA, 31 bp, Homo sapiens
  source 1..31: mol_type = genomic DNA
ttccatggtgtaatggttagcactctggact

SEQ ID NO: 29659 - DNA, 32 bp, Homo sapiens
  source 1..32: mol_type = genomic DNA
ttccatggtgtaatggttagcactctggactc

SEQ ID NO: 29660 - DNA, 33 bp, Homo sapiens
  source 1..33: mol_type = genomic DNA
ttccatggtgtaatggttagcactctggactct

SEQ ID NO: 29661 - DNA, 34 bp, Homo sapiens
  source 1..34: mol_type = genomic DNA
ttccatggtgtaatggttagcactctggactctg

SEQ ID NO: 29662 - DNA, 35 bp, Homo sapiens
  source 1..35: mol_type = genomic DNA
ttccatggtgtaatggttagcactctggactctga

SEQ ID NO: 29663 - DNA, 36 bp, Homo sapiens
  source 1..36: mol_type = genomic DNA
ttccatggtgtaatggttagcactctggactctgaa

SEQ ID NO: 29664 - DNA, 37 bp, Homo sapiens
  source 1..37: mol_type = genomic DNA
ttccatggtgtaatggttagcactctggactctgaat

SEQ ID NO: 29665 - DNA, 38 bp, Homo sapiens
  source 1..38: mol_type = genomic DNA
ttccatggtgtaatggttagcactctggactctgaatc

SEQ ID NO: 29666 - DNA, 39 bp, Homo sapiens
  source 1..39: mol_type = genomic DNA
ttccatggtgtaatggttagcactctggactctgaatcc

SEQ ID NO: 29667 - DNA, 40 bp, Homo sapiens
  source 1..40: mol_type = genomic DNA
ttccatggtgtaatggttagcactctggactctgaatcca

SEQ ID NO: 29668 - DNA, 34 bp, Homo sapiens
  source 1..34: mol_type = genomic DNA
ttcccacatggtctagcggttaggattcctggtt

SEQ ID NO: 29669 - DNA, 24 bp, Homo sapiens
  source 1..24: mol_type = genomic DNA
ttcccatatggtctagcggttagg

SEQ ID NO: 29670 - DNA, 33 bp, Homo sapiens
  source 1..33: mol_type = genomic DNA
ttcccatatggtctagcggttaggattcctggt

SEQ ID NO: 29671 - DNA, 34 bp, Homo sapiens
  source 1..34: mol_type = genomic DNA
ttcccatatggtctagcggttaggattcctggtt

SEQ ID NO: 29672 - DNA, 16 bp, Homo sapiens
  source 1..16: mol_type = genomic DNA
ttcccattcttgcgac

SEQ ID NO: 29673 - DNA, 17 bp, Homo sapiens
  source 1..17: mol_type = genomic DNA
ttcccattcttgcgacc

SEQ ID NO: 29674 - DNA, 18 bp, Homo sapiens
  source 1..18: mol_type = genomic DNA
ttcccattcttgcgaccc

SEQ ID NO: 29675 - DNA, 19 bp, Homo sapiens
  source 1..19: mol_type = genomic DNA
ttcccattcttgcgacccg

SEQ ID NO: 29676 - DNA, 20 bp, Homo sapiens
  source 1..20: mol_type = genomic DNA
ttcccattcttgcgacccgg

SEQ ID NO: 29677 - DNA, 21 bp, Homo sapiens
  source 1..21: mol_type = genomic DNA
ttcccattcttgcgacccggg

SEQ ID NO: 29678 - DNA, 22 bp, Homo sapiens
  source 1..22: mol_type = genomic DNA
ttcccattcttgcgacccgggt

SEQ ID NO: 29679 - DNA, 23 bp, Homo sapiens
  source 1..23: mol_type = genomic DNA
ttcccattcttgcgacccgggtt

SEQ ID NO: 29680 - DNA, 25 bp, Homo sapiens
  source 1..25: mol_type = genomic DNA
ttcccattcttgcgacccgggttcg

SEQ ID NO: 29681 - DNA, 28 bp, Homo sapiens
  source 1..28: mol_type = genomic DNA
ttcccattcttgcgacccgggttcgatt

SEQ ID NO: 29682 - DNA, 32 bp, Homo sapiens
  source 1..32: mol_type = genomic DNA
ttcccattcttgcgacccgggttcgattcccg

SEQ ID NO: 29683 - DNA, 37 bp, Homo sapiens
  source 1..37: mol_type = genomic DNA
ttcccattcttgcgacccgggttcgattcccgggcgg

SEQ ID NO: 29684 - DNA, 38 bp, Homo sapiens
  source 1..38: mol_type = genomic DNA
ttcccattcttgcgacccgggttcgattcccgggcggc

SEQ ID NO: 29685 - DNA, 39 bp, Homo sapiens
  source 1..39: mol_type = genomic DNA
ttcccattcttgcgacccgggttcgattcccgggcggcg

SEQ ID NO: 29686 - DNA, 40 bp, Homo sapiens
  source 1..40: mol_type = genomic DNA
ttcccattcttgcgacccgggttcgattcccgggcggcgc

SEQ ID NO: 29687 - DNA, 41 bp, Homo sapiens
  source 1..41: mol_type = genomic DNA
ttcccattcttgcgacccgggttcgattcccgggcggcgca

SEQ ID NO: 29688 - DNA, 42 bp, Homo sapiens
  source 1..42: mol_type = genomic DNA
ttcccattcttgcgacccgggttcgattcccgggcggcgcac

SEQ ID NO: 29689 - DNA, 43 bp, Homo sapiens
  source 1..43: mol_type = genomic DNA
ttcccattcttgcgacccgggttcgattcccgggcggcgcacc

SEQ ID NO: 29690 - DNA, 44 bp, Homo sapiens
  source 1..44: mol_type = genomic DNA
ttcccattcttgcgacccgggttcgattcccgggcggcgcacca

SEQ ID NO: 29691 - DNA, 16 bp, Homo sapiens
  source 1..16: mol_type = genomic DNA
ttccccgacggggagc

SEQ ID NO: 29692 - DNA, 20 bp, Homo sapiens
  source 1..20: mol_type = genomic DNA
ttccccgcacaggttcgaat

SEQ ID NO: 29693 - DNA, 22 bp, Homo sapiens
  source 1..22: mol_type = genomic DNA
ttccccgcacaggttcgaatcc

SEQ ID NO: 29694 - DNA, 23 bp, Homo sapiens
  source 1..23: mol_type = genomic DNA
ttccccgcacaggttcgaatcct

SEQ ID NO: 29695 - DNA, 24 bp, Homo sapiens
  source 1..24: mol_type = genomic DNA
ttccccgcacaggttcgaatcctg

SEQ ID NO: 29696 - DNA, 35 bp, Homo sapiens
  source 1..35: mol_type = genomic DNA
ttccccgcacaggttcgaatcctgttcgtgacgcc

SEQ ID NO: 29697 - DNA, 16 bp, Homo sapiens
  source 1..16: mol_type = genomic DNA
ttccccgcgcaggttc

SEQ ID NO: 29698 - DNA, 23 bp, Homo sapiens
  source 1..23: mol_type = genomic DNA
ttccccgcgcaggttcaaatcct

SEQ ID NO: 29699 - DNA, 21 bp, Homo sapiens
  source 1..21: mol_type = genomic DNA
ttccccgcgcaggttcgaatc

SEQ ID NO: 29700 - DNA, 22 bp, Homo sapiens
  source 1..22: mol_type = genomic DNA
ttccccgcgcaggttcgaatcc

SEQ ID NO: 29701 - DNA, 23 bp, Homo sapiens
  source 1..23: mol_type = genomic DNA
ttccccgcgcaggttcgaatcct

SEQ ID NO: 29702 - DNA, 24 bp, Homo sapiens
  source 1..24: mol_type = genomic DNA
ttccccgcgcaggttcgaatcctg

SEQ ID NO: 29703 - DNA, 35 bp, Homo sapiens
  source 1..35: mol_type = genomic DNA
ttccccgcgcaggttcgaatcctgccgactacgcc

SEQ ID NO: 29704 - DNA, 36 bp, Homo sapiens
  source 1..36: mol_type = genomic DNA
ttccccgcgcaggttcgaatcctgccgactacgcca

SEQ ID NO: 29705 - DNA, 16 bp, Homo sapiens
  source 1..16: mol_type = genomic DNA
ttcccggccaacgcac

SEQ ID NO: 29706 - DNA, 17 bp, Homo sapiens
  source 1..17: mol_type = genomic DNA
ttcccggccaacgcacc

SEQ ID NO: 29707 - DNA, 18 bp, Homo sapiens
  source 1..18: mol_type = genomic DNA
ttcccggccaacgcacca

SEQ ID NO: 29708 - DNA, 16 bp, Homo sapiens
  source 1..16: mol_type = genomic DNA
ttcccggccaatgcac

SEQ ID NO: 29709 - DNA, 17 bp, Homo sapiens
  source 1..17: mol_type = genomic DNA
ttcccggccaatgcacc

SEQ ID NO: 29710 - DNA, 18 bp, Homo sapiens
  source 1..18: mol_type = genomic DNA
ttcccggccaatgcacca

SEQ ID NO: 29711 - DNA, 17 bp, Homo sapiens
  source 1..17: mol_type = genomic DNA
ttcccggccagggaacc

SEQ ID NO: 29712 - DNA, 16 bp, Homo sapiens
  source 1..16: mol_type = genomic DNA
ttcccggcccatgcac

SEQ ID NO: 29713 - DNA, 17 bp, Homo sapiens
  source 1..17: mol_type = genomic DNA
ttcccggcccatgcacc

SEQ ID NO: 29714 - DNA, 18 bp, Homo sapiens
  source 1..18: mol_type = genomic DNA
ttcccggcccatgcacca

SEQ ID NO: 29715 - DNA, 16 bp, Homo sapiens
  source 1..16: mol_type = genomic DNA
ttcccgggcggcgcac

SEQ ID NO: 29716 - DNA, 17 bp, Homo sapiens
  source 1..17: mol_type = genomic DNA
ttcccgggcggcgcacc

SEQ ID NO: 29717 - DNA, 18 bp, Homo sapiens
  source 1..18: mol_type = genomic DNA
ttcccgggcggcgcacca

SEQ ID NO: 29718 - DNA, 16 bp, Homo sapiens
  source 1..16: mol_type = genomic DNA
ttcccggtcaggaaac

SEQ ID NO: 29719 - DNA, 16 bp, Homo sapiens
  source 1..16: mol_type = genomic DNA
ttcccggtcagggaac

SEQ ID NO: 29720 - DNA, 17 bp, Homo sapiens
  source 1..17: mol_type = genomic DNA
ttcccggtcagggaacc

SEQ ID NO: 29721 - DNA, 18 bp, Homo sapiens
  source 1..18: mol_type = genomic DNA
ttcccggtcagggaacca

SEQ ID NO: 29722 - DNA, 16 bp, Homo sapiens
  source 1..16: mol_type = genomic DNA
ttccctggtggtctag

SEQ ID NO: 29723 - DNA, 26 bp, Homo sapiens
  source 1..26: mol_type = genomic DNA
ttccctggtggtctagtggttaggat

SEQ ID NO: 29724 - DNA, 27 bp, Homo sapiens
  source 1..27: mol_type = genomic DNA
ttccctggtggtctagtggttaggatt

SEQ ID NO: 29725 - DNA, 33 bp, Homo sapiens
  source 1..33: mol_type = genomic DNA
ttccctggtggtctagtggttaggattcggcgc

SEQ ID NO: 29726 - DNA, 34 bp, Homo sapiens
  source 1..34: mol_type = genomic DNA
ttccctggtggtctagtggttaggattcggcgct

SEQ ID NO: 29727 - DNA, 35 bp, Homo sapiens
  source 1..35: mol_type = genomic DNA
ttccctggtggtctagtggttaggattcggcgctc

SEQ ID NO: 29728 - DNA, 36 bp, Homo sapiens
  source 1..36: mol_type = genomic DNA
ttccctggtggtctagtggttaggattcggcgctct

SEQ ID NO: 29729 - DNA, 37 bp, Homo sapiens
  source 1..37: mol_type = genomic DNA
ttccctggtggtctagtggttaggattcggcgctctc

SEQ ID NO: 29730 - DNA, 40 bp, Homo sapiens
  source 1..40: mol_type = genomic DNA
ttccctggtggtctagtggttaggattcggcgctctcacc

SEQ ID NO: 29731 - DNA, 16 bp, Homo sapiens
  source 1..16: mol_type = genomic DNA
ttccggatcagaagat

SEQ ID NO: 29732 - DNA, 18 bp, Homo sapiens
  source 1..18: mol_type = genomic DNA
ttccggatcagaagattg

SEQ ID NO: 29733 - DNA, 19 bp, Homo sapiens
  source 1..19: mol_type = genomic DNA
ttccggatcagaagattga

SEQ ID NO: 29734 - DNA, 20 bp, Homo sapiens
  source 1..20: mol_type = genomic DNA
ttccggatcagaagattgag

SEQ ID NO: 29735 - DNA, 21 bp, Homo sapiens
  source 1..21: mol_type = genomic DNA
ttccggatcagaagattgagg

SEQ ID NO: 29736 - DNA, 22 bp, Homo sapiens
  source 1..22: mol_type = genomic DNA
ttccggatcagaagattgaggg

SEQ ID NO: 29737 - DNA, 23 bp, Homo sapiens
  source 1..23: mol_type = genomic DNA
ttccggatcagaagattgagggt

SEQ ID NO: 29738 - DNA, 24 bp, Homo sapiens
  source 1..24: mol_type = genomic DNA
ttccggatcagaagattgagggtt

SEQ ID NO: 29739 - DNA, 25 bp, Homo sapiens
  source 1..25: mol_type = genomic DNA
ttccggatcagaagattgagggttc

SEQ ID NO: 29740 - DNA, 26 bp, Homo sapiens
  source 1..26: mol_type = genomic DNA
ttccggatcagaagattgagggttcg

SEQ ID NO: 29741 - DNA, 33 bp, Homo sapiens
  source 1..33: mol_type = genomic DNA
ttccggatcagaagattgagggttcgagtccct

SEQ ID NO: 29742 - DNA, 36 bp, Homo sapiens
  source 1..36: mol_type = genomic DNA
ttccggatcagaagattgagggttcgagtcccttcg

SEQ ID NO: 29743 - DNA, 43 bp, Homo sapiens
  source 1..43: mol_type = genomic DNA
ttccggatcagaagattgagggttcgagtcccttcgtggtcgc

SEQ ID NO: 29744 - DNA, 44 bp, Homo sapiens
  source 1..44: mol_type = genomic DNA
ttccggatcagaagattgagggttcgagtcccttcgtggtcgcc

SEQ ID NO: 29745 - DNA, 45 bp, Homo sapiens
  source 1..45: mol_type = genomic DNA
ttccggatcagaagattgagggttcgagtcccttcgtggtcgcca

SEQ ID NO: 29746 - DNA, 16 bp, Homo sapiens
  source 1..16: mol_type = genomic DNA
ttccggctcgaaggac

SEQ ID NO: 29747 - DNA, 17 bp, Homo sapiens
  source 1..17: mol_type = genomic DNA
ttccggctcgaaggacc

SEQ ID NO: 29748 - DNA, 18 bp, Homo sapiens
  source 1..18: mol_type = genomic DNA
ttccggctcgaaggacca

SEQ ID NO: 29749 - DNA, 27 bp, Homo sapiens
  source 1..27: mol_type = genomic DNA
ttccgggttcgagtcccggcagagatg

SEQ ID NO: 29750 - DNA, 29 bp, Homo sapiens
  source 1..29: mol_type = genomic DNA
ttccgggttcgagtcccggcagagatgcc

SEQ ID NO: 29751 - DNA, 23 bp, Homo sapiens
  source 1..23: mol_type = genomic DNA
ttccgggttcgagtcccggcgga

SEQ ID NO: 29752 - DNA, 24 bp, Homo sapiens
  source 1..24: mol_type = genomic DNA
ttccgggttcgagtcccggcggag

SEQ ID NO: 29753 - DNA, 25 bp, Homo sapiens
  source 1..25: mol_type = genomic DNA
ttccgggttcgagtcccggcggagt

SEQ ID NO: 29754 - DNA, 26 bp, Homo sapiens
  source 1..26: mol_type = genomic DNA
ttccgggttcgagtcccggcggagtc

SEQ ID NO: 29755 - DNA, 27 bp, Homo sapiens
  source 1..27: mol_type = genomic DNA
ttccgggttcgagtcccggcggagtcg

SEQ ID NO: 29756 - DNA, 28 bp, Homo sapiens
  source 1..28: mol_type = genomic DNA
ttccgggttcgagtcccggcggagtcgc

SEQ ID NO: 29757 - DNA, 29 bp, Homo sapiens
  source 1..29: mol_type = genomic DNA
ttccgggttcgagtcccggcggagtcgcc

SEQ ID NO: 29758 - DNA, 30 bp, Homo sapiens
  source 1..30: mol_type = genomic DNA
ttccgggttcgagtcccggcggagtcgcca

SEQ ID NO: 29759 - DNA, 31 bp, Homo sapiens
  source 1..31: mol_type = genomic DNA
ttccgtagtggagtggttatcacgttcgcct

SEQ ID NO: 29760 - DNA, 21 bp, Homo sapiens
  source 1..21: mol_type = genomic DNA
ttccgtagtgtagcggttatc

SEQ ID NO: 29761 - DNA, 23 bp, Homo sapiens
  source 1..23: mol_type = genomic DNA
ttccgtagtgtagcggttatcac

SEQ ID NO: 29762 - DNA, 24 bp, Homo sapiens
  source 1..24: mol_type = genomic DNA
ttccgtagtgtagcggttatcaca

SEQ ID NO: 29763 - DNA, 26 bp, Homo sapiens
  source 1..26: mol_type = genomic DNA
ttccgtagtgtagcggttatcacatt

SEQ ID NO: 29764 - DNA, 27 bp, Homo sapiens
  source 1..27: mol_type = genomic DNA
ttccgtagtgtagcggttatcacattc

SEQ ID NO: 29765 - DNA, 30 bp, Homo sapiens
  source 1..30: mol_type = genomic DNA
ttccgtagtgtagcggttatcacattcgcc

SEQ ID NO: 29766 - DNA, 31 bp, Homo sapiens
  source 1..31: mol_type = genomic DNA
ttccgtagtgtagcggttatcacattcgcct

SEQ ID NO: 29767 - DNA, 32 bp, Homo sapiens
  source 1..32: mol_type = genomic DNA
ttccgtagtgtagcggttatcacattcgcctc

SEQ ID NO: 29768 - DNA, 33 bp, Homo sapiens
  source 1..33: mol_type = genomic DNA
ttccgtagtgtagcggttatcacattcgcctca

SEQ ID NO: 29769 - DNA, 34 bp, Homo sapiens
  source 1..34: mol_type = genomic DNA
ttccgtagtgtagcggttatcacattcgcctcac

SEQ ID NO: 29770 - DNA, 16 bp, Homo sapiens
  source 1..16: mol_type = genomic DNA
ttccgtagtgtagtgg

SEQ ID NO: 29771 - DNA, 17 bp, Homo sapiens
  source 1..17: mol_type = genomic DNA
ttccgtagtgtagtggt

SEQ ID NO: 29772 - DNA, 18 bp, Homo sapiens
  source 1..18: mol_type = genomic DNA
ttccgtagtgtagtggtc

SEQ ID NO: 29773 - DNA, 19 bp, Homo sapiens
  source 1..19: mol_type = genomic DNA
ttccgtagtgtagtggtca

SEQ ID NO: 29774 - DNA, 21 bp, Homo sapiens
  source 1..21: mol_type = genomic DNA
ttccgtagtgtagtggtcatc

SEQ ID NO: 29775 - DNA, 22 bp, Homo sapiens
  source 1..22: mol_type = genomic DNA
ttccgtagtgtagtggtcatca

SEQ ID NO: 29776 - DNA, 26 bp, Homo sapiens
  source 1..26: mol_type = genomic DNA
ttccgtagtgtagtggtcatcacgtt

SEQ ID NO: 29777 - DNA, 27 bp, Homo sapiens
  source 1..27: mol_type = genomic DNA
ttccgtagtgtagtggtcatcacgttc

SEQ ID NO: 29778 - DNA, 28 bp, Homo sapiens
  source 1..28: mol_type = genomic DNA
ttccgtagtgtagtggtcatcacgttcg

SEQ ID NO: 29779 - DNA, 29 bp, Homo sapiens
  source 1..29: mol_type = genomic DNA
ttccgtagtgtagtggtcatcacgttcgc

SEQ ID NO: 29780 - DNA, 30 bp, Homo sapiens
  source 1..30: mol_type = genomic DNA
ttccgtagtgtagtggtcatcacgttcgcc

SEQ ID NO: 29781 - DNA, 31 bp, Homo sapiens
  source 1..31: mol_type = genomic DNA
ttccgtagtgtagtggtcatcacgttcgcct

SEQ ID NO: 29782 - DNA, 32 bp, Homo sapiens
  source 1..32: mol_type = genomic DNA
ttccgtagtgtagtggtcatcacgttcgccta

SEQ ID NO: 29783 - DNA, 33 bp, Homo sapiens
  source 1..33: mol_type = genomic DNA
ttccgtagtgtagtggtcatcacgttcgcctaa

SEQ ID NO: 29784 - DNA, 34 bp, Homo sapiens
  source 1..34: mol_type = genomic DNA
ttccgtagtgtagtggtcatcacgttcgcctaac

SEQ ID NO: 29785 - DNA, 19 bp, Homo sapiens
  source 1..19: mol_type = genomic DNA
ttccgtagtgtagtggtta

SEQ ID NO: 29786 - DNA, 20 bp, Homo sapiens
  source 1..20: mol_type = genomic DNA
ttccgtagtgtagtggttat

SEQ ID NO: 29787 - DNA, 21 bp, Homo sapiens
  source 1..21: mol_type = genomic DNA
ttccgtagtgtagtggttatc

SEQ ID NO: 29788 - DNA, 22 bp, Homo sapiens
  source 1..22: mol_type = genomic DNA
ttccgtagtgtagtggttatca

SEQ ID NO: 29789 - DNA, 23 bp, Homo sapiens
  source 1..23: mol_type = genomic DNA
ttccgtagtgtagtggttatcac

SEQ ID NO: 29790 - DNA, 24 bp, Homo sapiens
  source 1..24: mol_type = genomic DNA
ttccgtagtgtagtggttatcacg

SEQ ID NO: 29791 - DNA, 27 bp, Homo sapiens
  source 1..27: mol_type = genomic DNA
ttccgtagtgtagtggttatcacgttc

SEQ ID NO: 29792 - DNA, 28 bp, Homo sapiens
  source 1..28: mol_type = genomic DNA
ttccgtagtgtagtggttatcacgttcg

SEQ ID NO: 29793 - DNA, 29 bp, Homo sapiens
  source 1..29: mol_type = genomic DNA
ttccgtagtgtagtggttatcacgttcgc

SEQ ID NO: 29794 - DNA, 30 bp, Homo sapiens
  source 1..30: mol_type = genomic DNA
ttccgtagtgtagtggttatcacgttcgcc

SEQ ID NO: 29795 - DNA, 31 bp, Homo sapiens
  source 1..31: mol_type = genomic DNA
ttccgtagtgtagtggttatcacgttcgcct

SEQ ID NO: 29796 - DNA, 32 bp, Homo sapiens
  source 1..32: mol_type = genomic DNA
ttccgtagtgtagtggttatcacgttcgccta

SEQ ID NO: 29797 - DNA, 33 bp, Homo sapiens
  source 1..33: mol_type = genomic DNA
ttccgtagtgtagtggttatcacgttcgcctaa

SEQ ID NO: 29798 - DNA, 34 bp, Homo sapiens
  source 1..34: mol_type = genomic DNA
ttccgtagtgtagtggttatcacgttcgcctaac

SEQ ID NO: 29799 - DNA, 32 bp, Homo sapiens
  source 1..32: mol_type = genomic DNA
ttccgtagtgtagtggttatcacgttcgcctc

SEQ ID NO: 29800 - DNA, 33 bp, Homo sapiens
  source 1..33: mol_type = genomic DNA
ttccgtagtgtagtggttatcacgttcgcctca

SEQ ID NO: 29801 - DNA, 34 bp, Homo sapiens
  source 1..34: mol_type = genomic DNA
ttccgtagtgtagtggttatcacgttcgcctcac

SEQ ID NO: 29802 - DNA, 35 bp, Homo sapiens
  source 1..35: mol_type = genomic DNA
ttccgtagtgtagtggttatcacgttcgcctcaca

SEQ ID NO: 29803 - DNA, 36 bp, Homo sapiens
  source 1..36: mol_type = genomic DNA
ttccgtagtgtagtggttatcacgttcgcctcacac

SEQ ID NO: 29804 - DNA, 37 bp, Homo sapiens
  source 1..37: mol_type = genomic DNA
ttccgtagtgtagtggttatcacgttcgcctcacacg

SEQ ID NO: 29805 - DNA, 38 bp, Homo sapiens
  source 1..38: mol_type = genomic DNA
ttccgtagtgtagtggttatcacgttcgcctcacacgc

SEQ ID NO: 29806 - DNA, 39 bp, Homo sapiens
  source 1..39: mol_type = genomic DNA
ttccgtagtgtagtggttatcacgttcgcctcacacgcg

SEQ ID NO: 29807 - DNA, 41 bp, Homo sapiens
  source 1..41: mol_type = genomic DNA
ttccgtagtgtagtggttatcacgttcgcctcacacgcgaa

SEQ ID NO: 29808 - DNA, 30 bp, Homo sapiens
  source 1..30: mol_type = genomic DNA
ttccgtagtgtagtggttatcacgtttgcc

SEQ ID NO: 29809 - DNA, 31 bp, Homo sapiens
  source 1..31: mol_type = genomic DNA
ttccgtagtgtagtggttatcacgtttgcct

SEQ ID NO: 29810 - DNA, 16 bp, Homo sapiens
  source 1..16: mol_type = genomic DNA
ttcctcttcttaacac

SEQ ID NO: 29811 - DNA, 17 bp, Homo sapiens
  source 1..17: mol_type = genomic DNA
ttcctcttcttaacacc

SEQ ID NO: 29812 - DNA, 18 bp, Homo sapiens
  source 1..18: mol_type = genomic DNA
ttcctcttcttaacacca

SEQ ID NO: 29813 - DNA, 18 bp, Homo sapiens
  source 1..18: mol_type = genomic DNA
ttcctggccaatgcacca

SEQ ID NO: 29814 - DNA, 26 bp, Homo sapiens
  source 1..26: mol_type = genomic DNA
ttcctggttttcacccaggcggcccg

SEQ ID NO: 29815 - DNA, 31 bp, Homo sapiens
  source 1..31: mol_type = genomic DNA
ttcctggttttcacccaggcggcccgggttc

SEQ ID NO: 29816 - DNA, 40 bp, Homo sapiens
  source 1..40: mol_type = genomic DNA
ttcctggttttcacccaggcggcccgggttcgactcccgg

SEQ ID NO: 29817 - DNA, 44 bp, Homo sapiens
  source 1..44: mol_type = genomic DNA
ttcctggttttcacccaggcggcccgggttcgactcccggtgtg

SEQ ID NO: 29818 - DNA, 36 bp, Homo sapiens
  source 1..36: mol_type = genomic DNA
ttcctggttttcacccaggtggcccgggttcgactc

SEQ ID NO: 29819 - DNA, 17 bp, Homo sapiens
  source 1..17: mol_type = genomic DNA
ttccttccttttttgcc

SEQ ID NO: 29820 - DNA, 18 bp, Homo sapiens
  source 1..18: mol_type = genomic DNA
ttccttccttttttgcca

SEQ ID NO: 29821 - DNA, 17 bp, Homo sapiens
  source 1..17: mol_type = genomic DNA
ttcgaaaccgggcggaa

SEQ ID NO: 29822 - DNA, 19 bp, Homo sapiens
  source 1..19: mol_type = genomic DNA
ttcgaaaccgggcggaaac

SEQ ID NO: 29823 - DNA, 20 bp, Homo sapiens
  source 1..20: mol_type = genomic DNA
ttcgaaaccgggcggaaaca

SEQ ID NO: 29824 - DNA, 22 bp, Homo sapiens
  source 1..22: mol_type = genomic DNA
ttcgaaaccgggcggaaacacc

SEQ ID NO: 29825 - DNA, 23 bp, Homo sapiens
  source 1..23: mol_type = genomic DNA
ttcgaaaccgggcggaaacacca

SEQ ID NO: 29826 - DNA, 17 bp, Homo sapiens
  source 1..17: mol_type = genomic DNA
ttcgaaccccgtccgtg

SEQ ID NO: 29827 - DNA, 20 bp, Homo sapiens
  source 1..20: mol_type = genomic DNA
ttcgaaccccgtccgtgcct

SEQ ID NO: 29828 - DNA, 22 bp, Homo sapiens
  source 1..22: mol_type = genomic DNA
ttcgaaccccgtccgtgcctcc

SEQ ID NO: 29829 - DNA, 21 bp, Homo sapiens
  source 1..21: mol_type = genomic DNA
ttcgaaccctgctcgctgcgc

SEQ ID NO: 29830 - DNA, 22 bp, Homo sapiens
  source 1..22: mol_type = genomic DNA
ttcgaaccctgctcgctgcgcc

SEQ ID NO: 29831 - DNA, 23 bp, Homo sapiens
  source 1..23: mol_type = genomic DNA
ttcgaaccctgctcgctgcgcca

SEQ ID NO: 29832 - DNA, 22 bp, Homo sapiens
  source 1..22: mol_type = genomic DNA
ttcgaacctcagagggggcacc

SEQ ID NO: 29833 - DNA, 16 bp, Homo sapiens
  source 1..16: mol_type = genomic DNA
ttcgaagaagcagctt

SEQ ID NO: 29834 - DNA, 17 bp, Homo sapiens
  source 1..17: mol_type = genomic DNA
ttcgaagaagcagcttc

SEQ ID NO: 29835 - DNA, 22 bp, Homo sapiens
  source 1..22: mol_type = genomic DNA
ttcgaagaagcagcttcaaacc

SEQ ID NO: 29836 - DNA, 24 bp, Homo sapiens
  source 1..24: mol_type = genomic DNA
ttcgaagaagcagcttcaaacctg

SEQ ID NO: 29837 - DNA, 26 bp, Homo sapiens
  source 1..26: mol_type = genomic DNA
ttcgaagaagcagcttcaaacctgcc

SEQ ID NO: 29838 - DNA, 27 bp, Homo sapiens
  source 1..27: mol_type = genomic DNA
ttcgaagaagcagcttcaaacctgccg

SEQ ID NO: 29839 - DNA, 30 bp, Homo sapiens
  source 1..30: mol_type = genomic DNA
ttcgaagaagcagcttcaaacctgccgggg

SEQ ID NO: 29840 - DNA, 31 bp, Homo sapiens
  source 1..31: mol_type = genomic DNA
ttcgaagaagcagcttcaaacctgccggggc

SEQ ID NO: 29841 - DNA, 32 bp, Homo sapiens
  source 1..32: mol_type = genomic DNA
ttcgaagaagcagcttcaaacctgccggggct

SEQ ID NO: 29842 - DNA, 33 bp, Homo sapiens
  source 1..33: mol_type = genomic DNA
ttcgaagaagcagcttcaaacctgccggggctt

SEQ ID NO: 29843 - DNA, 34 bp, Homo sapiens
  source 1..34: mol_type = genomic DNA
ttcgaagaagcagcttcaaacctgccggggcttc

SEQ ID NO: 29844 - DNA, 35 bp, Homo sapiens
  source 1..35: mol_type = genomic DNA
ttcgaagaagcagcttcaaacctgccggggcttcc

SEQ ID NO: 29845 - DNA, 36 bp, Homo sapiens
  source 1..36: mol_type = genomic DNA
ttcgaagaagcagcttcaaacctgccggggcttcca

SEQ ID NO: 29846 - DNA, 21 bp, Homo sapiens
  source 1..21: mol_type = genomic DNA
ttcgaatcacgtcggggtcac

SEQ ID NO: 29847 - DNA, 22 bp, Homo sapiens
  source 1..22: mol_type = genomic DNA
ttcgaatcacgtcggggtcacc

SEQ ID NO: 29848 - DNA, 23 bp, Homo sapiens
  source 1..23: mol_type = genomic DNA
ttcgaatcacgtcggggtcacca

SEQ ID NO: 29849 - DNA, 17 bp, Homo sapiens
  source 1..17: mol_type = genomic DNA
ttcgaatcccaccgctg

SEQ ID NO: 29850 - DNA, 22 bp, Homo sapiens
  source 1..22: mol_type = genomic DNA
ttcgaatcccaccgctgccacc

SEQ ID NO: 29851 - DNA, 23 bp, Homo sapiens
  source 1..23: mol_type = genomic DNA
ttcgaatcccaccgctgccacca

SEQ ID NO: 29852 - DNA, 17 bp, Homo sapiens
  source 1..17: mol_type = genomic DNA
ttcgaatcccactcctg

SEQ ID NO: 29853 - DNA, 22 bp, Homo sapiens
  source 1..22: mol_type = genomic DNA
ttcgaatcccactcctgacacc

SEQ ID NO: 29854 - DNA, 17 bp, Homo sapiens
  source 1..17: mol_type = genomic DNA
ttcgaatcccacttctg

SEQ ID NO: 29855 - DNA, 21 bp, Homo sapiens
  source 1..21: mol_type = genomic DNA
ttcgaatcccacttctgacac

SEQ ID NO: 29856 - DNA, 22 bp, Homo sapiens
  source 1..22: mol_type = genomic DNA
ttcgaatcccacttctgacacc

SEQ ID NO: 29857 - DNA, 23 bp, Homo sapiens
  source 1..23: mol_type = genomic DNA
ttcgaatcccacttctgacacca

SEQ ID NO: 29858 - DNA, 17 bp, Homo sapiens
  source 1..17: mol_type = genomic DNA
ttcgaatcccagcgggg

SEQ ID NO: 29859 - DNA, 22 bp, Homo sapiens
  source 1..22: mol_type = genomic DNA
ttcgaatcccagcggggcctcc

SEQ ID NO: 29860 - DNA, 17 bp, Homo sapiens
  source 1..17: mol_type = genomic DNA
ttcgaatcccagcggtg

SEQ ID NO: 29861 - DNA, 18 bp, Homo sapiens
  source 1..18: mol_type = genomic DNA
ttcgaatcccagcggtgc

SEQ ID NO: 29862 - DNA, 19 bp, Homo sapiens
  source 1..19: mol_type = genomic DNA
ttcgaatcccagcggtgcc

SEQ ID NO: 29863 - DNA, 21 bp, Homo sapiens
  source 1..21: mol_type = genomic DNA
ttcgaatcccagcggtgcctc

SEQ ID NO: 29864 - DNA, 22 bp, Homo sapiens
  source 1..22: mol_type = genomic DNA
ttcgaatcccagcggtgcctcc

SEQ ID NO: 29865 - DNA, 23 bp, Homo sapiens
  source 1..23: mol_type = genomic DNA
ttcgaatcccagcggtgcctcca

SEQ ID NO: 29866 - DNA, 19 bp, Homo sapiens
  source 1..19: mol_type = genomic DNA
ttcgaatcccagtagagcc

SEQ ID NO: 29867 - DNA, 22 bp, Homo sapiens
  source 1..22: mol_type = genomic DNA
ttcgaatcccatcctcgtcgcc

SEQ ID NO: 29868 - DNA, 23 bp, Homo sapiens
  source 1..23: mol_type = genomic DNA
ttcgaatcccatcctcgtcgcca

SEQ ID NO: 29869 - DNA, 17 bp, Homo sapiens
  source 1..17: mol_type = genomic DNA
ttcgaatccgagtcacg

SEQ ID NO: 29870 - DNA, 18 bp, Homo sapiens
  source 1..18: mol_type = genomic DNA
ttcgaatccgagtcacgg

SEQ ID NO: 29871 - DNA, 19 bp, Homo sapiens
  source 1..19: mol_type = genomic DNA
ttcgaatccgagtcacggc

SEQ ID NO: 29872 - DNA, 20 bp, Homo sapiens
  source 1..20: mol_type = genomic DNA
ttcgaatccgagtcacggca

SEQ ID NO: 29873 - DNA, 21 bp, Homo sapiens
  source 1..21: mol_type = genomic DNA
ttcgaatccgagtcacggcac

SEQ ID NO: 29874 - DNA, 22 bp, Homo sapiens
  source 1..22: mol_type = genomic DNA
ttcgaatccggctcgaaggacc

SEQ ID NO: 29875 - DNA, 22 bp, Homo sapiens
  source 1..22: mol_type = genomic DNA
ttcgaatccggctcggaggacc

SEQ ID NO: 29876 - DNA, 17 bp, Homo sapiens
  source 1..17: mol_type = genomic DNA
ttcgaatcctgccgact

SEQ ID NO: 29877 - DNA, 22 bp, Homo sapiens
  source 1..22: mol_type = genomic DNA
ttcgaatcctgccgactacgcc

SEQ ID NO: 29878 - DNA, 23 bp, Homo sapiens
  source 1..23: mol_type = genomic DNA
ttcgaatcctgccgactacgcca

SEQ ID NO: 29879 - DNA, 22 bp, Homo sapiens
  source 1..22: mol_type = genomic DNA
ttcgaatcctgttcgtgacgcc

SEQ ID NO: 29880 - DNA, 23 bp, Homo sapiens
  source 1..23: mol_type = genomic DNA
ttcgaatcctgttcgtgacgcca

SEQ ID NO: 29881 - DNA, 19 bp, Homo sapiens
  source 1..19: mol_type = genomic DNA
ttcgaatctcggtgggacc

SEQ ID NO: 29882 - DNA, 21 bp, Homo sapiens
  source 1..21: mol_type = genomic DNA
ttcgaatctcggtgggacctc

SEQ ID NO: 29883 - DNA, 19 bp, Homo sapiens
  source 1..19: mol_type = genomic DNA
ttcgactcattaaattatg

SEQ ID NO: 29884 - DNA, 20 bp, Homo sapiens
  source 1..20: mol_type = genomic DNA
ttcgactcattaaattatga

SEQ ID NO: 29885 - DNA, 21 bp, Homo sapiens
  source 1..21: mol_type = genomic DNA
ttcgactcattaaattatgat

SEQ ID NO: 29886 - DNA, 23 bp, Homo sapiens
  source 1..23: mol_type = genomic DNA
ttcgactcattaaattatgataa

SEQ ID NO: 29887 - DNA, 24 bp, Homo sapiens
  source 1..24: mol_type = genomic DNA
ttcgactcattaaattatgataat

SEQ ID NO: 29888 - DNA, 25 bp, Homo sapiens
  source 1..25: mol_type = genomic DNA
ttcgactcattaaattatgataatc

SEQ ID NO: 29889 - DNA, 26 bp, Homo sapiens
  source 1..26: mol_type = genomic DNA
ttcgactcattaaattatgataatca

SEQ ID NO: 29890 - DNA, 30 bp, Homo sapiens
  source 1..30: mol_type = genomic DNA
ttcgactcattaaattatgataatcatatt

SEQ ID NO: 29891 - DNA, 31 bp, Homo sapiens
  source 1..31: mol_type = genomic DNA
ttcgactcattaaattatgataatcatattt

SEQ ID NO: 29892 - DNA, 32 bp, Homo sapiens
  source 1..32: mol_type = genomic DNA
ttcgactcattaaattatgataatcatattta

SEQ ID NO: 29893 - DNA, 33 bp, Homo sapiens
  source 1..33: mol_type = genomic DNA
ttcgactcattaaattatgataatcatatttac

SEQ ID NO: 29894 - DNA, 34 bp, Homo sapiens
  source 1..34: mol_type = genomic DNA
ttcgactcattaaattatgataatcatatttacc

SEQ ID NO: 29895 - DNA, 35 bp, Homo sapiens
  source 1..35: mol_type = genomic DNA
ttcgactcattaaattatgataatcatatttacca

SEQ ID NO: 29896 - DNA, 36 bp, Homo sapiens
  source 1..36: mol_type = genomic DNA
ttcgactcattaaattatgataatcatatttaccaa

SEQ ID NO: 29897 - DNA, 37 bp, Homo sapiens
  source 1..37: mol_type = genomic DNA
ttcgactcattaaattatgataatcatatttaccaac

SEQ ID NO: 29898 - DNA, 38 bp, Homo sapiens
  source 1..38: mol_type = genomic DNA
ttcgactcattaaattatgataatcatatttaccaacc

SEQ ID NO: 29899 - DNA, 39 bp, Homo sapiens
  source 1..39: mol_type = genomic DNA
ttcgactcattaaattatgataatcatatttaccaacca

SEQ ID NO: 29900 - DNA, 16 bp, Homo sapiens
  source 1..16: mol_type = genomic DNA
ttcgactcccggtatg

SEQ ID NO: 29901 - DNA, 17 bp, Homo sapiens
  source 1..17: mol_type = genomic DNA
ttcgactcccggtatgg

SEQ ID NO: 29902 - DNA, 21 bp, Homo sapiens
  source 1..21: mol_type = genomic DNA
ttcgactcccggtatgggaac

SEQ ID NO: 29903 - DNA, 22 bp, Homo sapiens
  source 1..22: mol_type = genomic DNA
ttcgactcccggtatgggaacc

SEQ ID NO: 29904 - DNA, 16 bp, Homo sapiens
  source 1..16: mol_type = genomic DNA
ttcgactcccggtgtg

SEQ ID NO: 29905 - DNA, 17 bp, Homo sapiens
  source 1..17: mol_type = genomic DNA
ttcgactcccggtgtgg

SEQ ID NO: 29906 - DNA, 18 bp, Homo sapiens
  source 1..18: mol_type = genomic DNA
ttcgactcccggtgtggg

SEQ ID NO: 29907 - DNA, 19 bp, Homo sapiens
  source 1..19: mol_type = genomic DNA
ttcgactcccggtgtggga

SEQ ID NO: 29908 - DNA, 20 bp, Homo sapiens
  source 1..20: mol_type = genomic DNA
ttcgactcccggtgtgggaa

SEQ ID NO: 29909 - DNA, 21 bp, Homo sapiens
  source 1..21: mol_type = genomic DNA
ttcgactcccggtgtgggaac

SEQ ID NO: 29910 - DNA, 22 bp, Homo sapiens
  source 1..22: mol_type = genomic DNA
ttcgactcccggtgtgggaacc

SEQ ID NO: 29911 - DNA, 23 bp, Homo sapiens
  source 1..23: mol_type = genomic DNA
ttcgactcccggtgtgggaacca

SEQ ID NO: 29912 - DNA, 16 bp, Homo sapiens
  source 1..16: mol_type = genomic DNA
ttcgactcctggctgg

SEQ ID NO: 29913 - DNA, 17 bp, Homo sapiens
  source 1..17: mol_type = genomic DNA
ttcgactcctggctggc

SEQ ID NO: 29914 - DNA, 19 bp, Homo sapiens
  source 1..19: mol_type = genomic DNA
ttcgactcctggctggctc

SEQ ID NO: 29915 - DNA, 20 bp, Homo sapiens
  source 1..20: mol_type = genomic DNA
ttcgactcctggctggctcg

SEQ ID NO: 29916 - DNA, 21 bp, Homo sapiens
  source 1..21: mol_type = genomic DNA
ttcgactcctggctggctcgc

SEQ ID NO: 29917 - DNA, 22 bp, Homo sapiens
  source 1..22: mol_type = genomic DNA
ttcgactcctggctggctcgcc

SEQ ID NO: 29918 - DNA, 23 bp, Homo sapiens
  source 1..23: mol_type = genomic DNA
ttcgactcctggctggctcgcca

SEQ ID NO: 29919 - DNA, 16 bp, Homo sapiens
  source 1..16: mol_type = genomic DNA
ttcgagcccacccagg

SEQ ID NO: 29920 - DNA, 17 bp, Homo sapiens
  source 1..17: mol_type = genomic DNA
ttcgagcccacccaggg

SEQ ID NO: 29921 - DNA, 22 bp, Homo sapiens
  source 1..22: mol_type = genomic DNA
ttcgagcccacccagggacgcc

SEQ ID NO: 29922 - DNA, 23 bp, Homo sapiens
  source 1..23: mol_type = genomic DNA
ttcgagcccacccagggacgcca

SEQ ID NO: 29923 - DNA, 17 bp, Homo sapiens
  source 1..17: mol_type = genomic DNA
ttcgagccccacgttgg

SEQ ID NO: 29924 - DNA, 19 bp, Homo sapiens
  source 1..19: mol_type = genomic DNA
ttcgagccccacgttgggc

SEQ ID NO: 29925 - DNA, 19 bp, Homo sapiens
  source 1..19: mol_type = genomic DNA
ttcgagccccagtggaacc

SEQ ID NO: 29926 - DNA, 20 bp, Homo sapiens
  source 1..20: mol_type = genomic DNA
ttcgagccccagtggaacca

SEQ ID NO: 29927 - DNA, 21 bp, Homo sapiens
  source 1..21: mol_type = genomic DNA
ttcgagccccagtggaaccac

SEQ ID NO: 29928 - DNA, 22 bp, Homo sapiens
  source 1..22: mol_type = genomic DNA
ttcgagccccagtggaaccacc

SEQ ID NO: 29929 - DNA, 23 bp, Homo sapiens
  source 1..23: mol_type = genomic DNA
ttcgagccccagtggaaccacca

SEQ ID NO: 29930 - DNA, 17 bp, Homo sapiens
  source 1..17: mol_type = genomic DNA
ttcgagcctcacctgga

SEQ ID NO: 29931 - DNA, 22 bp, Homo sapiens
  source 1..22: mol_type = genomic DNA
ttcgagcctcacctggagcacc

SEQ ID NO: 29932 - DNA, 23 bp, Homo sapiens
  source 1..23: mol_type = genomic DNA
ttcgagcctcacctggagcacca

SEQ ID NO: 29933 - DNA, 16 bp, Homo sapiens
  source 1..16: mol_type = genomic DNA
ttcgagtcccggcaga

SEQ ID NO: 29934 - DNA, 16 bp, Homo sapiens
  source 1..16: mol_type = genomic DNA
ttcgagtcccggcgga

SEQ ID NO: 29935 - DNA, 17 bp, Homo sapiens
  source 1..17: mol_type = genomic DNA
ttcgagtcccggcggag

SEQ ID NO: 29936 - DNA, 16 bp, Homo sapiens
  source 1..16: mol_type = genomic DNA
ttcgagtcccttcgtg

SEQ ID NO: 29937 - DNA, 19 bp, Homo sapiens
  source 1..19: mol_type = genomic DNA
ttcgagtcctgccgcggtc

SEQ ID NO: 29938 - DNA, 22 bp, Homo sapiens
  source 1..22: mol_type = genomic DNA
ttcgagtcctgccgcggtcgcc

SEQ ID NO: 29939 - DNA, 17 bp, Homo sapiens
  source 1..17: mol_type = genomic DNA
ttcgagtctcggtggaa

SEQ ID NO: 29940 - DNA, 19 bp, Homo sapiens
  source 1..19: mol_type = genomic DNA
ttcgagtctcggtggaacc

SEQ ID NO: 29941 - DNA, 20 bp, Homo sapiens
  source 1..20: mol_type = genomic DNA
ttcgagtctcggtggaacct

SEQ ID NO: 29942 - DNA, 21 bp, Homo sapiens
  source 1..21: mol_type = genomic DNA
ttcgagtctcggtggaacctc

SEQ ID NO: 29943 - DNA, 22 bp, Homo sapiens
  source 1..22: mol_type = genomic DNA
ttcgagtctcggtggaacctcc

SEQ ID NO: 29944 - DNA, 23 bp, Homo sapiens
  source 1..23: mol_type = genomic DNA
ttcgagtctcggtggaacctcca

SEQ ID NO: 29945 - DNA, 16 bp, Homo sapiens
  source 1..16: mol_type = genomic DNA
ttcgatagctcagctg

SEQ ID NO: 29946 - DNA, 17 bp, Homo sapiens
  source 1..17: mol_type = genomic DNA
ttcgatagctcagctgg

SEQ ID NO: 29947 - DNA, 23 bp, Homo sapiens
  source 1..23: mol_type = genomic DNA
ttcgatagctcagctggtagagc

SEQ ID NO: 29948 - DNA, 28 bp, Homo sapiens
  source 1..28: mol_type = genomic DNA
ttcgatagctcagctggtagagcggagg

SEQ ID NO: 29949 - DNA, 31 bp, Homo sapiens
  source 1..31: mol_type = genomic DNA
ttcgatagctcagctggtagagcggaggact

SEQ ID NO: 29950 - DNA, 32 bp, Homo sapiens
  source 1..32: mol_type = genomic DNA
ttcgatagctcagctggtagagcggaggactg

SEQ ID NO: 29951 - DNA, 33 bp, Homo sapiens
  source 1..33: mol_type = genomic DNA
ttcgatagctcagctggtagagcggaggactgt

SEQ ID NO: 29952 - DNA, 34 bp, Homo sapiens
  source 1..34: mol_type = genomic DNA
ttcgatagctcagctggtagagcggaggactgta

SEQ ID NO: 29953 - DNA, 17 bp, Homo sapiens
  source 1..17: mol_type = genomic DNA
ttcgatagctcagttgg

SEQ ID NO: 29954 - DNA, 23 bp, Homo sapiens
  source 1..23: mol_type = genomic DNA
ttcgatagctcagttggtagagc

SEQ ID NO: 29955 - DNA, 31 bp, Homo sapiens
  source 1..31: mol_type = genomic DNA
ttcgatagctcagttggtagagcggaggact

SEQ ID NO: 29956 - DNA, 32 bp, Homo sapiens
  source 1..32: mol_type = genomic DNA
ttcgatagctcagttggtagagcggaggactg

SEQ ID NO: 29957 - DNA, 34 bp, Homo sapiens
  source 1..34: mol_type = genomic DNA
ttcgatagctcagttggtagagcggaggactgta

SEQ ID NO: 29958 - DNA, 16 bp, Homo sapiens
  source 1..16: mol_type = genomic DNA
ttcgatccccggcatc

SEQ ID NO: 29959 - DNA, 17 bp, Homo sapiens
  source 1..17: mol_type = genomic DNA
ttcgatccccggcatct

SEQ ID NO: 29960 - DNA, 18 bp, Homo sapiens
  source 1..18: mol_type = genomic DNA
ttcgatccccggcatctc

SEQ ID NO: 29961 - DNA, 19 bp, Homo sapiens
  source 1..19: mol_type = genomic DNA
ttcgatccccggcatctcc

SEQ ID NO: 29962 - DNA, 20 bp, Homo sapiens
  source 1..20: mol_type = genomic DNA
ttcgatccccggcatctcca

SEQ ID NO: 29963 - DNA, 21 bp, Homo sapiens
  source 1..21: mol_type = genomic DNA
ttcgatccccggcatctccac

SEQ ID NO: 29964 - DNA, 22 bp, Homo sapiens
  source 1..22: mol_type = genomic DNA
ttcgatccccggcatctccacc

SEQ ID NO: 29965 - DNA, 23 bp, Homo sapiens
  source 1..23: mol_type = genomic DNA
ttcgatccccggcatctccacca

SEQ ID NO: 29966 - DNA, 19 bp, Homo sapiens
  source 1..19: mol_type = genomic DNA
ttcgatccccgtacgggcc

SEQ ID NO: 29967 - DNA, 20 bp, Homo sapiens
  source 1..20: mol_type = genomic DNA
ttcgatccccgtacgggcca

SEQ ID NO: 29968 - DNA, 22 bp, Homo sapiens
  source 1..22: mol_type = genomic DNA
ttcgatccccgtacgggccacc

SEQ ID NO: 29969 - DNA, 23 bp, Homo sapiens
  source 1..23: mol_type = genomic DNA
ttcgatccccgtacgggccacca

SEQ ID NO: 29970 - DNA, 22 bp, Homo sapiens
  source 1..22: mol_type = genomic DNA
ttcgatccccgtactggccacc

SEQ ID NO: 29971 - DNA, 22 bp, Homo sapiens
  source 1..22: mol_type = genomic DNA
ttcgatcccgggcggaaacacc

SEQ ID NO: 29972 - DNA, 23 bp, Homo sapiens
  source 1..23: mol_type = genomic DNA
ttcgatcccgggcggaaacacca

SEQ ID NO: 29973 - DNA, 20 bp, Homo sapiens
  source 1..20: mol_type = genomic DNA
ttcgatcccgggtttcggca

SEQ ID NO: 29974 - DNA, 21 bp, Homo sapiens
  source 1..21: mol_type = genomic DNA
ttcgatcccgggtttcggcac

SEQ ID NO: 29975 - DNA, 22 bp, Homo sapiens
  source 1..22: mol_type = genomic DNA
ttcgatcccgggtttcggcacc

SEQ ID NO: 29976 - DNA, 23 bp, Homo sapiens
  source 1..23: mol_type = genomic DNA
ttcgatcccgggtttcggcacca

SEQ ID NO: 29977 - DNA, 19 bp, Homo sapiens
  source 1..19: mol_type = genomic DNA
ttcgatcctcacacggggc

SEQ ID NO: 29978 - DNA, 22 bp, Homo sapiens
  source 1..22: mol_type = genomic DNA
ttcgatcctcacctggagcacc

SEQ ID NO: 29979 - DNA, 23 bp, Homo sapiens
  source 1..23: mol_type = genomic DNA
ttcgatcctcacctggagcacca

SEQ ID NO: 29980 - DNA, 17 bp, Homo sapiens
  source 1..17: mol_type = genomic DNA
ttcgatggcgtgggttc

SEQ ID NO: 29981 - DNA, 28 bp, Homo sapiens
  source 1..28: mol_type = genomic DNA
ttcgatggcgtgggttcgaatcccaccg

SEQ ID NO: 29982 - DNA, 31 bp, Homo sapiens
  source 1..31: mol_type = genomic DNA
ttcgatggcgtgggttcgaatcccaccgctg

SEQ ID NO: 29983 - DNA, 36 bp, Homo sapiens
  source 1..36: mol_type = genomic DNA
ttcgatggcgtgggttcgaatcccaccgctgccacc

SEQ ID NO: 29984 - DNA, 16 bp, Homo sapiens
  source 1..16: mol_type = genomic DNA
ttcgattccccgacgg

SEQ ID NO: 29985 - DNA, 17 bp, Homo sapiens
  source 1..17: mol_type = genomic DNA
ttcgattccccgacggg

SEQ ID NO: 29986 - DNA, 21 bp, Homo sapiens
  source 1..21: mol_type = genomic DNA
ttcgattccccgacggggagc

SEQ ID NO: 29987 - DNA, 22 bp, Homo sapiens
  source 1..22: mol_type = genomic DNA
ttcgattccccgacggggagcc

SEQ ID NO: 29988 - DNA, 23 bp, Homo sapiens
  source 1..23: mol_type = genomic DNA
ttcgattccccgacggggagcca

SEQ ID NO: 29989 - DNA, 17 bp, Homo sapiens
  source 1..17: mol_type = genomic DNA
ttcgattcccggccaac

SEQ ID NO: 29990 - DNA, 18 bp, Homo sapiens
  source 1..18: mol_type = genomic DNA
ttcgattcccggccaacg

SEQ ID NO: 29991 - DNA, 21 bp, Homo sapiens
  source 1..21: mol_type = genomic DNA
ttcgattcccggccaacgcac

SEQ ID NO: 29992 - DNA, 22 bp, Homo sapiens
  source 1..22: mol_type = genomic DNA
ttcgattcccggccaacgcacc

SEQ ID NO: 29993 - DNA, 23 bp, Homo sapiens
  source 1..23: mol_type = genomic DNA
ttcgattcccggccaacgcacca

SEQ ID NO: 29994 - DNA, 17 bp, Homo sapiens
  source 1..17: mol_type = genomic DNA
ttcgattcccggccaat

SEQ ID NO: 29995 - DNA, 18 bp, Homo sapiens
  source 1..18: mol_type = genomic DNA
ttcgattcccggccaatg

SEQ ID NO: 29996 - DNA, 22 bp, Homo sapiens
  source 1..22: mol_type = genomic DNA
ttcgattcccggccaatgcacc

SEQ ID NO: 29997 - DNA, 23 bp, Homo sapiens
  source 1..23: mol_type = genomic DNA
ttcgattcccggccaatgcacca

SEQ ID NO: 29998 - DNA, 22 bp, Homo sapiens
  source 1..22: mol_type = genomic DNA
ttcgattcccggcccatgcacc

SEQ ID NO: 29999 - DNA, 16 bp, Homo sapiens
  source 1..16: mol_type = genomic DNA
ttcgattcccgggcgg

SEQ ID NO: 30000 - DNA, 17 bp, Homo sapiens
  source 1..17: mol_type = genomic DNA
ttcgattcccgggcggc

SEQ ID NO: 30001 - DNA, 18 bp, Homo sapiens
  source 1..18: mol_type = genomic DNA
ttcgattcccgggcggcg

SEQ ID NO: 30002 - DNA, 20 bp, Homo sapiens
  source 1..20: mol_type = genomic DNA
ttcgattcccgggcggcgca

SEQ ID NO: 30003 - DNA, 21 bp, Homo sapiens
  source 1..21: mol_type = genomic DNA
ttcgattcccgggcggcgcac

SEQ ID NO: 30004 - DNA, 22 bp, Homo sapiens
  source 1..22: mol_type = genomic DNA
ttcgattcccgggcggcgcacc

SEQ ID NO: 30005 - DNA, 23 bp, Homo sapiens
  source 1..23: mol_type = genomic DNA
ttcgattcccgggcggcgcacca

SEQ ID NO: 30006 - DNA, 16 bp, Homo sapiens
  source 1..16: mol_type = genomic DNA
ttcgattcccggtcag

SEQ ID NO: 30007 - DNA, 17 bp, Homo sapiens
  source 1..17: mol_type = genomic DNA
ttcgattcccggtcagg

SEQ ID NO: 30008 - DNA, 21 bp, Homo sapiens
  source 1..21: mol_type = genomic DNA
ttcgattcccggtcagggaac

SEQ ID NO: 30009 - DNA, 22 bp, Homo sapiens
  source 1..22: mol_type = genomic DNA
ttcgattcccggtcagggaacc

SEQ ID NO: 30010 - DNA, 23 bp, Homo sapiens
  source 1..23: mol_type = genomic DNA
ttcgattcccggtcagggaacca

SEQ ID NO: 30011 - DNA, 22 bp, Homo sapiens
  source 1..22: mol_type = genomic DNA
ttcgattccggctcgaaggacc

SEQ ID NO: 30012 - DNA, 23 bp, Homo sapiens
  source 1..23: mol_type = genomic DNA
ttcgattccggctcgaaggacca

SEQ ID NO: 30013 - DNA, 22 bp, Homo sapiens
  source 1..22: mol_type = genomic DNA
ttcgattccttccttttttgcc

SEQ ID NO: 30014 - DNA, 23 bp, Homo sapiens
  source 1..23: mol_type = genomic DNA
ttcgattccttccttttttgcca

SEQ ID NO: 30015 - DNA, 18 bp, Homo sapiens
  source 1..18: mol_type = genomic DNA
ttcgattctcatagtcct

SEQ ID NO: 30016 - DNA, 20 bp, Homo sapiens
  source 1..20: mol_type = genomic DNA
ttcgattctcatagtcctag

SEQ ID NO: 30017 - DNA, 21 bp, Homo sapiens
  source 1..21: mol_type = genomic DNA
ttcgattctcatagtcctagc

SEQ ID NO: 30018 - DNA, 22 bp, Homo sapiens
  source 1..22: mol_type = genomic DNA
ttcgattctcatagtcctagcc

SEQ ID NO: 30019 - DNA, 23 bp, Homo sapiens
  source 1..23: mol_type = genomic DNA
ttcgattctcatagtcctagcca

SEQ ID NO: 30020 - DNA, 17 bp, Homo sapiens
  source 1..17: mol_type = genomic DNA
ttcggaggcgtgggttc

SEQ ID NO: 30021 - DNA, 18 bp, Homo sapiens
  source 1..18: mol_type = genomic DNA
ttcggatcagaagattga

SEQ ID NO: 30022 - DNA, 22 bp, Homo sapiens
  source 1..22: mol_type = genomic DNA
ttcggatcagaagattgagggt

SEQ ID NO: 30023 - DNA, 43 bp, Homo sapiens
  source 1..43: mol_type = genomic DNA
ttcggatcagaagattgagggttcgagtcccttcgtggtcgcc

SEQ ID NO: 30024 - DNA, 24 bp, Homo sapiens
  source 1..24: mol_type = genomic DNA
ttcggatcagaagattgcaggttc

SEQ ID NO: 30025 - DNA, 43 bp, Homo sapiens
  source 1..43: mol_type = genomic DNA
ttcggatcagaagattgcaggttcgagtcctgccgcggtcgcc

SEQ ID NO: 30026 - DNA, 16 bp, Homo sapiens
  source 1..16: mol_type = genomic DNA
ttcggcgctctcaccg

SEQ ID NO: 30027 - DNA, 17 bp, Homo sapiens
  source 1..17: mol_type = genomic DNA
ttcggcgctctcaccgc

SEQ ID NO: 30028 - DNA, 18 bp, Homo sapiens
  source 1..18: mol_type = genomic DNA
ttcggcgctctcaccgcc

SEQ ID NO: 30029 - DNA, 23 bp, Homo sapiens
  source 1..23: mol_type = genomic DNA
ttcggcgctctcaccgccgcggc

SEQ ID NO: 30030 - DNA, 25 bp, Homo sapiens
  source 1..25: mol_type = genomic DNA
ttcggcgctctcaccgccgcggccc

SEQ ID NO: 30031 - DNA, 26 bp, Homo sapiens
  source 1..26: mol_type = genomic DNA
ttcggcgctctcaccgccgcggcccg

SEQ ID NO: 30032 - DNA, 27 bp, Homo sapiens
  source 1..27: mol_type = genomic DNA
ttcggcgctctcaccgccgcggcccgg

SEQ ID NO: 30033 - DNA, 28 bp, Homo sapiens
  source 1..28: mol_type = genomic DNA
ttcggcgctctcaccgccgcggcccggg

SEQ ID NO: 30034 - DNA, 29 bp, Homo sapiens
  source 1..29: mol_type = genomic DNA
ttcggcgctctcaccgccgcggcccgggt

SEQ ID NO: 30035 - DNA, 30 bp, Homo sapiens
  source 1..30: mol_type = genomic DNA
ttcggcgctctcaccgccgcggcccgggtt

SEQ ID NO: 30036 - DNA, 31 bp, Homo sapiens
  source 1..31: mol_type = genomic DNA
ttcggcgctctcaccgccgcggcccgggttc

SEQ ID NO: 30037 - DNA, 32 bp, Homo sapiens
  source 1..32: mol_type = genomic DNA
ttcggcgctctcaccgccgcggcccgggttcg

SEQ ID NO: 30038 - DNA, 33 bp, Homo sapiens
  source 1..33: mol_type = genomic DNA
ttcggcgctctcaccgccgcggcccgggttcga

SEQ ID NO: 30039 - DNA, 34 bp, Homo sapiens
  source 1..34: mol_type = genomic DNA
ttcggcgctctcaccgccgcggcccgggttcgat

SEQ ID NO: 30040 - DNA, 35 bp, Homo sapiens
  source 1..35: mol_type = genomic DNA
ttcggcgctctcaccgccgcggcccgggttcgatt

SEQ ID NO: 30041 - DNA, 36 bp, Homo sapiens
  source 1..36: mol_type = genomic DNA
ttcggcgctctcaccgccgcggcccgggttcgattc

SEQ ID NO: 30042 - DNA, 37 bp, Homo sapiens
  source 1..37: mol_type = genomic DNA
ttcggcgctctcaccgccgcggcccgggttcgattcc

SEQ ID NO: 30043 - DNA, 38 bp, Homo sapiens
  source 1..38: mol_type = genomic DNA
ttcggcgctctcaccgccgcggcccgggttcgattccc

SEQ ID NO: 30044 - DNA, 39 bp, Homo sapiens
  source 1..39: mol_type = genomic DNA
ttcggcgctctcaccgccgcggcccgggttcgattcccg

SEQ ID NO: 30045 - DNA, 40 bp, Homo sapiens
  source 1..40: mol_type = genomic DNA
ttcggcgctctcaccgccgcggcccgggttcgattcccgg

SEQ ID NO: 30046 - DNA, 41 bp, Homo sapiens
  source 1..41: mol_type = genomic DNA
ttcggcgctctcaccgccgcggcccgggttcgattcccggt

SEQ ID NO: 30047 - DNA, 48 bp, Homo sapiens
  source 1..48: mol_type = genomic DNA
ttcggcgctctcaccgccgcggcccgggttcgattcccggtcagggaa

SEQ ID NO: 30048 - DNA, 23 bp, Homo sapiens
  source 1..23: mol_type = genomic DNA
ttcggcgctttcaccgccgcggc

SEQ ID NO: 30049 - DNA, 28 bp, Homo sapiens
  source 1..28: mol_type = genomic DNA
ttcggctgttaaccgaaaggttggtggt

SEQ ID NO: 30050 - DNA, 29 bp, Homo sapiens
  source 1..29: mol_type = genomic DNA
ttcggctgttaaccgaaaggttggtggtt

SEQ ID NO: 30051 - DNA, 30 bp, Homo sapiens
  source 1..30: mol_type = genomic DNA
ttcggctgttaaccgaaaggttggtggttc

SEQ ID NO: 30052 - DNA, 16 bp, Homo sapiens
  source 1..16: mol_type = genomic DNA
ttcgggggcgtgggtt

SEQ ID NO: 30053 - DNA, 18 bp, Homo sapiens
  source 1..18: mol_type = genomic DNA
ttcgggggcgtgggttcg

SEQ ID NO: 30054 - DNA, 32 bp, Homo sapiens
  source 1..32: mol_type = genomic DNA
ttcgggggcgtgggttcgaatcccaccgctgc

SEQ ID NO: 30055 - DNA, 17 bp, Homo sapiens
  source 1..17: mol_type = genomic DNA
ttcgggggcgtgggttt

SEQ ID NO: 30056 - DNA, 19 bp, Homo sapiens
  source 1..19: mol_type = genomic DNA
ttcgggtgcgagaggtccc

SEQ ID NO: 30057 - DNA, 20 bp, Homo sapiens
  source 1..20: mol_type = genomic DNA
ttcgggtgcgagaggtcccg

SEQ ID NO: 30058 - DNA, 25 bp, Homo sapiens
  source 1..25: mol_type = genomic DNA
ttcggtgctgaaagcgtcacggccc

SEQ ID NO: 30059 - DNA, 43 bp, Homo sapiens
  source 1..43: mol_type = genomic DNA
ttctaatccagaggttccgggttcgagtcccggcagagatgcc

SEQ ID NO: 30060 - DNA, 44 bp, Homo sapiens
  source 1..44: mol_type = genomic DNA
ttctaatccagaggttccgggttcgagtcccggcagagatgcca

SEQ ID NO: 30061 - DNA, 19 bp, Homo sapiens
  source 1..19: mol_type = genomic DNA
ttctaattcaaaggttccg

SEQ ID NO: 30062 - DNA, 20 bp, Homo sapiens
  source 1..20: mol_type = genomic DNA
ttctaattcaaaggttccgg

SEQ ID NO: 30063 - DNA, 22 bp, Homo sapiens
  source 1..22: mol_type = genomic DNA
ttctaattcaaaggttccgggt

SEQ ID NO: 30064 - DNA, 43 bp, Homo sapiens
  source 1..43: mol_type = genomic DNA
ttctaattcaaaggttccgggttcgagtcccggcggagtcgcc

SEQ ID NO: 30065 - DNA, 44 bp, Homo sapiens
  source 1..44: mol_type = genomic DNA
ttctaattcaaaggttccgggttcgagtcccggcggagtcgcca

SEQ ID NO: 30066 - DNA, 43 bp, Homo sapiens
  source 1..43: mol_type = genomic DNA
ttctaattcaaaggttgtgggttcgaatcccaccagagtcgcc

SEQ ID NO: 30067 - DNA, 26 bp, Homo sapiens
  source 1..26: mol_type = genomic DNA
ttctaggttcgactcctggctggctc

SEQ ID NO: 30068 - DNA, 27 bp, Homo sapiens
  source 1..27: mol_type = genomic DNA
ttctaggttcgactcctggctggctcg

SEQ ID NO: 30069 - DNA, 28 bp, Homo sapiens
  source 1..28: mol_type = genomic DNA
ttctaggttcgactcctggctggctcgc

SEQ ID NO: 30070 - DNA, 29 bp, Homo sapiens
  source 1..29: mol_type = genomic DNA
ttctaggttcgactcctggctggctcgcc

SEQ ID NO: 30071 - DNA, 30 bp, Homo sapiens
  source 1..30: mol_type = genomic DNA
ttctaggttcgactcctggctggctcgcca

SEQ ID NO: 30072 - DNA, 24 bp, Homo sapiens
  source 1..24: mol_type = genomic DNA
ttctcagggatgggttcgattctc

SEQ ID NO: 30073 - DNA, 31 bp, Homo sapiens
  source 1..31: mol_type = genomic DNA
ttctcagggatgggttcgattctcatagtcc

SEQ ID NO: 30074 - DNA, 32 bp, Homo sapiens
  source 1..32: mol_type = genomic DNA
ttctcagggatgggttcgattctcatagtcct

SEQ ID NO: 30075 - DNA, 34 bp, Homo sapiens
  source 1..34: mol_type = genomic DNA
ttctcagggatgggttcgattctcatagtcctag

SEQ ID NO: 30076 - DNA, 35 bp, Homo sapiens
  source 1..35: mol_type = genomic DNA
ttctcagggatgggttcgattctcatagtcctagc

SEQ ID NO: 30077 - DNA, 36 bp, Homo sapiens
  source 1..36: mol_type = genomic DNA
ttctcagggatgggttcgattctcatagtcctagcc

SEQ ID NO: 30078 - DNA, 37 bp, Homo sapiens
  source 1..37: mol_type = genomic DNA
ttctcagggatgggttcgattctcatagtcctagcca

SEQ ID NO: 30079 - DNA, 16 bp, Homo sapiens
  source 1..16: mol_type = genomic DNA
ttctcatagtcctagc

SEQ ID NO: 30080 - DNA, 17 bp, Homo sapiens
  source 1..17: mol_type = genomic DNA
ttctcatagtcctagcc

SEQ ID NO: 30081 - DNA, 18 bp, Homo sapiens
  source 1..18: mol_type = genomic DNA
ttctcatagtcctagcca

SEQ ID NO: 30082 - DNA, 16 bp, Homo sapiens
  source 1..16: mol_type = genomic DNA
ttctcgcctgccacgc

SEQ ID NO: 30083 - DNA, 17 bp, Homo sapiens
  source 1..17: mol_type = genomic DNA
ttctcgcctgccacgcg

SEQ ID NO: 30084 - DNA, 20 bp, Homo sapiens
  source 1..20: mol_type = genomic DNA
ttctcgcctgccacgcggga

SEQ ID NO: 30085 - DNA, 25 bp, Homo sapiens
  source 1..25: mol_type = genomic DNA
ttctcgcctgccacgcgggaggccc

SEQ ID NO: 30086 - DNA, 27 bp, Homo sapiens
  source 1..27: mol_type = genomic DNA
ttctcgcctgccacgcgggaggcccgg

SEQ ID NO: 30087 - DNA, 28 bp, Homo sapiens
  source 1..28: mol_type = genomic DNA
ttctcgcctgccacgcgggaggcccggg

SEQ ID NO: 30088 - DNA, 30 bp, Homo sapiens
  source 1..30: mol_type = genomic DNA
ttctcgcctgccacgcgggaggcccgggtt

SEQ ID NO: 30089 - DNA, 16 bp, Homo sapiens
  source 1..16: mol_type = genomic DNA
ttctcgctggggcctc

SEQ ID NO: 30090 - DNA, 17 bp, Homo sapiens
  source 1..17: mol_type = genomic DNA
ttctcgctggggcctcc

SEQ ID NO: 30091 - DNA, 18 bp, Homo sapiens
  source 1..18: mol_type = genomic DNA
ttctcgctggggcctcca

SEQ ID NO: 30092 - DNA, 20 bp, Homo sapiens
  source 1..20: mol_type = genomic DNA
ttctcggtttgggtccgaga

SEQ ID NO: 30093 - DNA, 19 bp, Homo sapiens
  source 1..19: mol_type = genomic DNA
ttctggtctccaatggagg

SEQ ID NO: 30094 - DNA, 47 bp, Homo sapiens
  source 1..47: mol_type = genomic DNA
ttctggtctccaatggaggcgtgggttcgaatcccacttctgacacc

SEQ ID NO: 30095 - DNA, 16 bp, Homo sapiens
  source 1..16: mol_type = genomic DNA
ttctggtctccggatg

SEQ ID NO: 30096 - DNA, 18 bp, Homo sapiens
  source 1..18: mol_type = genomic DNA
ttctggtctccggatgga

SEQ ID NO: 30097 - DNA, 19 bp, Homo sapiens
  source 1..19: mol_type = genomic DNA
ttctggtctccggatggag

SEQ ID NO: 30098 - DNA, 20 bp, Homo sapiens
  source 1..20: mol_type = genomic DNA
ttctggtctccggatggagg

SEQ ID NO: 30099 - DNA, 22 bp, Homo sapiens
  source 1..22: mol_type = genomic DNA
ttctggtctccggatggaggcg

SEQ ID NO: 30100 - DNA, 44 bp, Homo sapiens
  source 1..44: mol_type = genomic DNA
ttctggtctccggatggaggcgtgggttcgaatcccacttctga

SEQ ID NO: 30101 - DNA, 48 bp, Homo sapiens
  source 1..48: mol_type = genomic DNA
ttctggtctccggatggaggcgtgggttcgaatcccacttctgacacc

SEQ ID NO: 30102 - DNA, 16 bp, Homo sapiens
  source 1..16: mol_type = genomic DNA
ttctgtagtgtagtgg

SEQ ID NO: 30103 - DNA, 21 bp, Homo sapiens
  source 1..21: mol_type = genomic DNA
ttctgtagtgtagtggttatc

SEQ ID NO: 30104 - DNA, 29 bp, Homo sapiens
  source 1..29: mol_type = genomic DNA
ttctgtagtgtagtggttatcacgttcgc

SEQ ID NO: 30105 - DNA, 30 bp, Homo sapiens
  source 1..30: mol_type = genomic DNA
ttctgtagtgtagtggttatcacgttcgcc

SEQ ID NO: 30106 - DNA, 31 bp, Homo sapiens
  source 1..31: mol_type = genomic DNA
ttctgtagtgtagtggttatcacgttcgcct

SEQ ID NO: 30107 - DNA, 32 bp, Homo sapiens
  source 1..32: mol_type = genomic DNA
ttctgtagtgtagtggttatcacgttcgcctc

SEQ ID NO: 30108 - DNA, 33 bp, Homo sapiens
  source 1..33: mol_type = genomic DNA
ttctgtagtgtagtggttatcacgttcgcctca

SEQ ID NO: 30109 - DNA, 34 bp, Homo sapiens
  source 1..34: mol_type = genomic DNA
ttctgtagtgtagtggttatcacgttcgcctcac

SEQ ID NO: 30110 - DNA, 35 bp, Homo sapiens
  source 1..35: mol_type = genomic DNA
ttctgtagtgtagtggttatcacgttcgcctcaca

SEQ ID NO: 30111 - DNA, 36 bp, Homo sapiens
  source 1..36: mol_type = genomic DNA
ttctgtagtgtagtggttatcacgttcgcctcacac

SEQ ID NO: 30112 - DNA, 37 bp, Homo sapiens
  source 1..37: mol_type = genomic DNA
ttctgtagtgtagtggttatcacgttcgcctcacacg

SEQ ID NO: 30113 - DNA, 30 bp, Homo sapiens
  source 1..30: mol_type = genomic DNA
ttcttgcgacccgggttcgattcccgggcg

SEQ ID NO: 30114 - DNA, 31 bp, Homo sapiens
  source 1..31: mol_type = genomic DNA
ttcttgcgacccgggttcgattcccgggcgg

SEQ ID NO: 30115 - DNA, 32 bp, Homo sapiens
  source 1..32: mol_type = genomic DNA
ttcttgcgacccgggttcgattcccgggcggc

SEQ ID NO: 30116 - DNA, 33 bp, Homo sapiens
  source 1..33: mol_type = genomic DNA
ttcttgcgacccgggttcgattcccgggcggcg

SEQ ID NO: 30117 - DNA, 34 bp, Homo sapiens
  source 1..34: mol_type = genomic DNA
ttcttgcgacccgggttcgattcccgggcggcgc

SEQ ID NO: 30118 - DNA, 35 bp, Homo sapiens
  source 1..35: mol_type = genomic DNA
ttcttgcgacccgggttcgattcccgggcggcgca

SEQ ID NO: 30119 - DNA, 36 bp, Homo sapiens
  source 1..36: mol_type = genomic DNA
ttcttgcgacccgggttcgattcccgggcggcgcac

SEQ ID NO: 30120 - DNA, 37 bp, Homo sapiens
  source 1..37: mol_type = genomic DNA
ttcttgcgacccgggttcgattcccgggcggcgcacc

SEQ ID NO: 30121 - DNA, 38 bp, Homo sapiens
  source 1..38: mol_type = genomic DNA
ttcttgcgacccgggttcgattcccgggcggcgcacca

SEQ ID NO: 30122 - DNA, 22 bp, Homo sapiens
  source 1..22: mol_type = genomic DNA
ttgaaaccagctttggggggtt

SEQ ID NO: 30123 - DNA, 23 bp, Homo sapiens
  source 1..23: mol_type = genomic DNA
ttgaaaccagctttggggggttc

SEQ ID NO: 30124 - DNA, 22 bp, Homo sapiens
  source 1..22: mol_type = genomic DNA
ttgaaatacaacgatggttttt

SEQ ID NO: 30125 - DNA, 35 bp, Homo sapiens
  source 1..35: mol_type = genomic DNA
ttgaaatacaacgatggtttttcatatcattggtc

SEQ ID NO: 30126 - DNA, 43 bp, Homo sapiens
  source 1..43: mol_type = genomic DNA
ttgaaatacaacgatggtttttcatatcattggtcgtggttgt

SEQ ID NO: 30127 - DNA, 47 bp, Homo sapiens
  source 1..47: mol_type = genomic DNA
ttgaaatacaacgatggtttttcatatcattggtcgtggttgtagtc

SEQ ID NO: 30128 - DNA, 48 bp, Homo sapiens
  source 1..48: mol_type = genomic DNA
ttgaaatacaacgatggtttttcatatcattggtcgtggttgtagtcc

SEQ ID NO: 30129 - DNA, 18 bp, Homo sapiens
  source 1..18: mol_type = genomic DNA
ttgaaatccaatggggtc

SEQ ID NO: 30130 - DNA, 32 bp, Homo sapiens
  source 1..32: mol_type = genomic DNA
ttgaagccagttgattagggtgcttagctgtt

SEQ ID NO: 30131 - DNA, 19 bp, Homo sapiens
  source 1..19: mol_type = genomic DNA
ttgaatccagcaatccgag

SEQ ID NO: 30132 - DNA, 20 bp, Homo sapiens
  source 1..20: mol_type = genomic DNA
ttgaatccagcaatccgagt

SEQ ID NO: 30133 - DNA, 39 bp, Homo sapiens
  source 1..39: mol_type = genomic DNA
ttgaatccagcaatccgagttcgaatctcggtgggacct

SEQ ID NO: 30134 - DNA, 40 bp, Homo sapiens
  source 1..40: mol_type = genomic DNA
ttgaatccagcaatccgagttcgaatctcggtgggacctc

SEQ ID NO: 30135 - DNA, 41 bp, Homo sapiens
  source 1..41: mol_type = genomic DNA
ttgaatccagcaatccgagttcgaatctcggtgggacctcc

SEQ ID NO: 30136 - DNA, 16 bp, Homo sapiens
  source 1..16: mol_type = genomic DNA
ttgaatccagcgatcc

SEQ ID NO: 30137 - DNA, 17 bp, Homo sapiens
  source 1..17: mol_type = genomic DNA
ttgaatccagcgatccg

SEQ ID NO: 30138 - DNA, 18 bp, Homo sapiens
  source 1..18: mol_type = genomic DNA
ttgaatccagcgatccga

SEQ ID NO: 30139 - DNA, 19 bp, Homo sapiens
  source 1..19: mol_type = genomic DNA
ttgaatccagcgatccgag

SEQ ID NO: 30140 - DNA, 20 bp, Homo sapiens
  source 1..20: mol_type = genomic DNA
ttgaatccagcgatccgagt

SEQ ID NO: 30141 - DNA, 21 bp, Homo sapiens
  source 1..21: mol_type = genomic DNA
ttgaatccagcgatccgagtt

SEQ ID NO: 30142 - DNA, 22 bp, Homo sapiens
  source 1..22: mol_type = genomic DNA
ttgaatccagcgatccgagttc

SEQ ID NO: 30143 - DNA, 23 bp, Homo sapiens
  source 1..23: mol_type = genomic DNA
ttgaatccagcgatccgagttca

SEQ ID NO: 30144 - DNA, 33 bp, Homo sapiens
  source 1..33: mol_type = genomic DNA
ttgaatccagcgatccgagttcaaatctcggtg

SEQ ID NO: 30145 - DNA, 35 bp, Homo sapiens
  source 1..35: mol_type = genomic DNA
ttgaatccagcgatccgagttcaaatctcggtggg

SEQ ID NO: 30146 - DNA, 39 bp, Homo sapiens
  source 1..39: mol_type = genomic DNA
ttgaatccagcgatccgagttcaaatctcggtgggacct

SEQ ID NO: 30147 - DNA, 40 bp, Homo sapiens
  source 1..40: mol_type = genomic DNA
ttgaatccagcgatccgagttcaaatctcggtgggacctc

SEQ ID NO: 30148 - DNA, 41 bp, Homo sapiens
  source 1..41: mol_type = genomic DNA
ttgaatccagcgatccgagttcaaatctcggtgggacctcc

SEQ ID NO: 30149 - DNA, 42 bp, Homo sapiens
  source 1..42: mol_type = genomic DNA
ttgaatccagcgatccgagttcaaatctcggtgggacctcca

SEQ ID NO: 30150 - DNA, 42 bp, Homo sapiens
  source 1..42: mol_type = genomic DNA
ttgaattgcaaattcgaagaagcagcttcaaacctgccgggg

SEQ ID NO: 30151 - DNA, 43 bp, Homo sapiens
  source 1..43: mol_type = genomic DNA
ttgaattgcaaattcgaagaagcagcttcaaacctgccggggc

SEQ ID NO: 30152 - DNA, 44 bp, Homo sapiens
  source 1..44: mol_type = genomic DNA
ttgaattgcaaattcgaagaagcagcttcaaacctgccggggct

SEQ ID NO: 30153 - DNA, 45 bp, Homo sapiens
  source 1..45: mol_type = genomic DNA
ttgaattgcaaattcgaagaagcagcttcaaacctgccggggctt

SEQ ID NO: 30154 - DNA, 46 bp, Homo sapiens
  source 1..46: mol_type = genomic DNA
ttgaattgcaaattcgaagaagcagcttcaaacctgccggggcttc

SEQ ID NO: 30155 - DNA, 47 bp, Homo sapiens
  source 1..47: mol_type = genomic DNA
ttgaattgcaaattcgaagaagcagcttcaaacctgccggggcttcc

SEQ ID NO: 30156 - DNA, 19 bp, Homo sapiens
  source 1..19: mol_type = genomic DNA
ttgacaacattcaaaaaag

SEQ ID NO: 30157 - DNA, 21 bp, Homo sapiens
  source 1..21: mol_type = genomic DNA
ttgacaacattcaaaaaagag

SEQ ID NO: 30158 - DNA, 23 bp, Homo sapiens
  source 1..23: mol_type = genomic DNA
ttgacaacattcaaaaaagagta

SEQ ID NO: 30159 - DNA, 24 bp, Homo sapiens
  source 1..24: mol_type = genomic DNA
ttgacaacattcaaaaaagagtac

SEQ ID NO: 30160 - DNA, 25 bp, Homo sapiens
  source 1..25: mol_type = genomic DNA
ttgacaacattcaaaaaagagtacc

SEQ ID NO: 30161 - DNA, 26 bp, Homo sapiens
  source 1..26: mol_type = genomic DNA
ttgacaacattcaaaaaagagtacca

SEQ ID NO: 30162 - DNA, 24 bp, Homo sapiens
  source 1..24: mol_type = genomic DNA
ttgacccgggttcgattcccggcc

SEQ ID NO: 30163 - DNA, 28 bp, Homo sapiens
  source 1..28: mol_type = genomic DNA
ttgacccgggttcgattcccggccaacg

SEQ ID NO: 30164 - DNA, 31 bp, Homo sapiens
  source 1..31: mol_type = genomic DNA
ttgacccgggttcgattcccggccaacgcac

SEQ ID NO: 30165 - DNA, 32 bp, Homo sapiens
  source 1..32: mol_type = genomic DNA
ttgacccgggttcgattcccggccaacgcacc

SEQ ID NO: 30166 - DNA, 33 bp, Homo sapiens
  source 1..33: mol_type = genomic DNA
ttgacccgggttcgattcccggccaacgcacca

SEQ ID NO: 30167 - DNA, 16 bp, Homo sapiens
  source 1..16: mol_type = genomic DNA
ttgaccgctctgacca

SEQ ID NO: 30168 - DNA, 26 bp, Homo sapiens
  source 1..26: mol_type = genomic DNA
ttgactgcagatcaagaggtccccgg

SEQ ID NO: 30169 - DNA, 27 bp, Homo sapiens
  source 1..27: mol_type = genomic DNA
ttgactgcagatcaagaggtccccggt

SEQ ID NO: 30170 - DNA, 24 bp, Homo sapiens
  source 1..24: mol_type = genomic DNA
ttgactgcagatcaagaggtccct

SEQ ID NO: 30171 - DNA, 27 bp, Homo sapiens
  source 1..27: mol_type = genomic DNA
ttgagggttcgaatcccttcgtggttg

SEQ ID NO: 30172 - DNA, 29 bp, Homo sapiens
  source 1..29: mol_type = genomic DNA
ttgagggttcgaatcccttcgtggttgcc

SEQ ID NO: 30173 - DNA, 27 bp, Homo sapiens
  source 1..27: mol_type = genomic DNA
ttgagggttcgagtcccttcgtggtcg

SEQ ID NO: 30174 - DNA, 28 bp, Homo sapiens
  source 1..28: mol_type = genomic DNA
ttgagggttcgagtcccttcgtggtcgc

SEQ ID NO: 30175 - DNA, 29 bp, Homo sapiens
  source 1..29: mol_type = genomic DNA
ttgagggttcgagtcccttcgtggtcgcc

SEQ ID NO: 30176 - DNA, 30 bp, Homo sapiens
  source 1..30: mol_type = genomic DNA
ttgagggttcgagtcccttcgtggtcgcca

SEQ ID NO: 30177 - DNA, 17 bp, Homo sapiens
  source 1..17: mol_type = genomic DNA
ttgatagagtaaataat

SEQ ID NO: 30178 - DNA, 19 bp, Homo sapiens
  source 1..19: mol_type = genomic DNA
ttgatagagtaaataatag

SEQ ID NO: 30179 - DNA, 20 bp, Homo sapiens
  source 1..20: mol_type = genomic DNA
ttgatagagtaaataatagg

SEQ ID NO: 30180 - DNA, 21 bp, Homo sapiens
  source 1..21: mol_type = genomic DNA
ttgatagagtaaataatagga

SEQ ID NO: 30181 - DNA, 22 bp, Homo sapiens
  source 1..22: mol_type = genomic DNA
ttgatagagtaaataataggag

SEQ ID NO: 30182 - DNA, 23 bp, Homo sapiens
  source 1..23: mol_type = genomic DNA
ttgatagagtaaataataggagc

SEQ ID NO: 30183 - DNA, 24 bp, Homo sapiens
  source 1..24: mol_type = genomic DNA
ttgatagagtaaataataggagct

SEQ ID NO: 30184 - DNA, 25 bp, Homo sapiens
  source 1..25: mol_type = genomic DNA
ttgatagagtaaataataggagctt

SEQ ID NO: 30185 - DNA, 26 bp, Homo sapiens
  source 1..26: mol_type = genomic DNA
ttgatagagtaaataataggagctta

SEQ ID NO: 30186 - DNA, 27 bp, Homo sapiens
  source 1..27: mol_type = genomic DNA
ttgatagagtaaataataggagcttaa

SEQ ID NO: 30187 - DNA, 28 bp, Homo sapiens
  source 1..28: mol_type = genomic DNA
ttgatagagtaaataataggagcttaaa

SEQ ID NO: 30188 - DNA, 29 bp, Homo sapiens
  source 1..29: mol_type = genomic DNA
ttgatagagtaaataataggagcttaaac

SEQ ID NO: 30189 - DNA, 30 bp, Homo sapiens
  source 1..30: mol_type = genomic DNA
ttgatagagtaaataataggagcttaaacc

SEQ ID NO: 30190 - DNA, 31 bp, Homo sapiens
  source 1..31: mol_type = genomic DNA
ttgatagagtaaataataggagcttaaaccc

SEQ ID NO: 30191 - DNA, 32 bp, Homo sapiens
  source 1..32: mol_type = genomic DNA
ttgatagagtaaataataggagcttaaacccc

SEQ ID NO: 30192 - DNA, 33 bp, Homo sapiens
  source 1..33: mol_type = genomic DNA
ttgatagagtaaataataggagcttaaaccccc

SEQ ID NO: 30193 - DNA, 34 bp, Homo sapiens
  source 1..34: mol_type = genomic DNA
ttgatagagtaaataataggagcttaaaccccct

SEQ ID NO: 30194 - DNA, 35 bp, Homo sapiens
  source 1..35: mol_type = genomic DNA
ttgatagagtaaataataggagcttaaaccccctt

SEQ ID NO: 30195 - DNA, 36 bp, Homo sapiens
  source 1..36: mol_type = genomic DNA
ttgatagagtaaataataggagcttaaaccccctta

SEQ ID NO: 30196 - DNA, 37 bp, Homo sapiens
  source 1..37: mol_type = genomic DNA
ttgatagagtaaataataggagcttaaacccccttat

SEQ ID NO: 30197 - DNA, 38 bp, Homo sapiens
  source 1..38: mol_type = genomic DNA
ttgatagagtaaataataggagcttaaacccccttatt

SEQ ID NO: 30198 - DNA, 40 bp, Homo sapiens
  source 1..40: mol_type = genomic DNA
ttgatagagtaaataataggagcttaaacccccttatttc

SEQ ID NO: 30199 - DNA, 44 bp, Homo sapiens
  source 1..44: mol_type = genomic DNA
ttgatagagtaaataataggagcttaaacccccttatttctacc

SEQ ID NO: 30200 - DNA, 16 bp, Homo sapiens
  source 1..16: mol_type = genomic DNA
ttgatgcagagtgggg

SEQ ID NO: 30201 - DNA, 20 bp, Homo sapiens
  source 1..20: mol_type = genomic DNA
ttgatgcagagtggggtttt

SEQ ID NO: 30202 - DNA, 21 bp, Homo sapiens
  source 1..21: mol_type = genomic DNA
ttgatgcagagtggggttttg

SEQ ID NO: 30203 - DNA, 26 bp, Homo sapiens
  source 1..26: mol_type = genomic DNA
ttgatgcagagtggggttttgcagtc

SEQ ID NO: 30204 - DNA, 27 bp, Homo sapiens
  source 1..27: mol_type = genomic DNA
ttgatgcagagtggggttttgcagtcc

SEQ ID NO: 30205 - DNA, 28 bp, Homo sapiens
  source 1..28: mol_type = genomic DNA
ttgatgcagagtggggttttgcagtcct

SEQ ID NO: 30206 - DNA, 29 bp, Homo sapiens
  source 1..29: mol_type = genomic DNA
ttgatgcagagtggggttttgcagtcctt

SEQ ID NO: 30207 - DNA, 30 bp, Homo sapiens
  source 1..30: mol_type = genomic DNA
ttgatgcagagtggggttttgcagtcctta

SEQ ID NO: 30208 - DNA, 31 bp, Homo sapiens
  source 1..31: mol_type = genomic DNA
ttgatgcagagtggggttttgcagtccttac

SEQ ID NO: 30209 - DNA, 32 bp, Homo sapiens
  source 1..32: mol_type = genomic DNA
ttgatgcagagtggggttttgcagtccttacc

SEQ ID NO: 30210 - DNA, 33 bp, Homo sapiens
  source 1..33: mol_type = genomic DNA
ttgatgcagagtggggttttgcagtccttacca

SEQ ID NO: 30211 - DNA, 16 bp, Homo sapiens
  source 1..16: mol_type = genomic DNA
ttgattagggtgctta

SEQ ID NO: 30212 - DNA, 17 bp, Homo sapiens
  source 1..17: mol_type = genomic DNA
ttgattagggtgcttag

SEQ ID NO: 30213 - DNA, 18 bp, Homo sapiens
  source 1..18: mol_type = genomic DNA
ttgattagggtgcttagc

SEQ ID NO: 30214 - DNA, 19 bp, Homo sapiens
  source 1..19: mol_type = genomic DNA
ttgattagggtgcttagct

SEQ ID NO: 30215 - DNA, 20 bp, Homo sapiens
  source 1..20: mol_type = genomic DNA
ttgattagggtgcttagctg

SEQ ID NO: 30216 - DNA, 21 bp, Homo sapiens
  source 1..21: mol_type = genomic DNA
ttgattagggtgcttagctgt

SEQ ID NO: 30217 - DNA, 22 bp, Homo sapiens
  source 1..22: mol_type = genomic DNA
ttgattagggtgcttagctgtt

SEQ ID NO: 30218 - DNA, 23 bp, Homo sapiens
  source 1..23: mol_type = genomic DNA
ttgattagggtgcttagctgtta

SEQ ID NO: 30219 - DNA, 24 bp, Homo sapiens
  source 1..24: mol_type = genomic DNA
ttgattagggtgcttagctgttaa

SEQ ID NO: 30220 - DNA, 25 bp, Homo sapiens
  source 1..25: mol_type = genomic DNA
ttgattagggtgcttagctgttaac

SEQ ID NO: 30221 - DNA, 26 bp, Homo sapiens
  source 1..26: mol_type = genomic DNA
ttgattagggtgcttagctgttaact

SEQ ID NO: 30222 - DNA, 27 bp, Homo sapiens
  source 1..27: mol_type = genomic DNA
ttgattagggtgcttagctgttaacta

SEQ ID NO: 30223 - DNA, 28 bp, Homo sapiens
  source 1..28: mol_type = genomic DNA
ttgattagggtgcttagctgttaactaa

SEQ ID NO: 30224 - DNA, 29 bp, Homo sapiens
  source 1..29: mol_type = genomic DNA
ttgattagggtgcttagctgttaactaag

SEQ ID NO: 30225 - DNA, 40 bp, Homo sapiens
  source 1..40: mol_type = genomic DNA
ttgattagggtgcttagctgttaactaagtgtttgtgggt

SEQ ID NO: 30226 - DNA, 41 bp, Homo sapiens
  source 1..41: mol_type = genomic DNA
ttgattagggtgcttagctgttaactaagtgtttgtgggtt

SEQ ID NO: 30227 - DNA, 42 bp, Homo sapiens
  source 1..42: mol_type = genomic DNA
ttgattagggtgcttagctgttaactaagtgtttgtgggttt

SEQ ID NO: 30228 - DNA, 17 bp, Homo sapiens
  source 1..17: mol_type = genomic DNA
ttgcaaattcgaagaag

SEQ ID NO: 30229 - DNA, 18 bp, Homo sapiens
  source 1..18: mol_type = genomic DNA
ttgcaaattcgaagaagc

SEQ ID NO: 30230 - DNA, 22 bp, Homo sapiens
  source 1..22: mol_type = genomic DNA
ttgcaaattcgaagaagcagct

SEQ ID NO: 30231 - DNA, 24 bp, Homo sapiens
  source 1..24: mol_type = genomic DNA
ttgcaaattcgaagaagcagcttc

SEQ ID NO: 30232 - DNA, 31 bp, Homo sapiens
  source 1..31: mol_type = genomic DNA
ttgcaaattcgaagaagcagcttcaaacctg

SEQ ID NO: 30233 - DNA, 37 bp, Homo sapiens
  source 1..37: mol_type = genomic DNA
ttgcaaattcgaagaagcagcttcaaacctgccgggg

SEQ ID NO: 30234 - DNA, 38 bp, Homo sapiens
  source 1..38: mol_type = genomic DNA
ttgcaaattcgaagaagcagcttcaaacctgccggggc

SEQ ID NO: 30235 - DNA, 39 bp, Homo sapiens
  source 1..39: mol_type = genomic DNA
ttgcaaattcgaagaagcagcttcaaacctgccggggct

SEQ ID NO: 30236 - DNA, 40 bp, Homo sapiens
  source 1..40: mol_type = genomic DNA
ttgcaaattcgaagaagcagcttcaaacctgccggggctt

SEQ ID NO: 30237 - DNA, 41 bp, Homo sapiens
  source 1..41: mol_type = genomic DNA
ttgcaaattcgaagaagcagcttcaaacctgccggggcttc

SEQ ID NO: 30238 - DNA, 42 bp, Homo sapiens
  source 1..42: mol_type = genomic DNA
ttgcaaattcgaagaagcagcttcaaacctgccggggcttcc

SEQ ID NO: 30239 - DNA, 43 bp, Homo sapiens
  source 1..43: mol_type = genomic DNA
ttgcaaattcgaagaagcagcttcaaacctgccggggcttcca

SEQ ID NO: 30240 - DNA, 19 bp, Homo sapiens
  source 1..19: mol_type = genomic DNA
ttgcaatacttaatttctg

SEQ ID NO: 30241 - DNA, 20 bp, Homo sapiens
  source 1..20: mol_type = genomic DNA
ttgcaatacttaatttctgc

SEQ ID NO: 30242 - DNA, 21 bp, Homo sapiens
  source 1..21: mol_type = genomic DNA
ttgcaatacttaatttctgcc

SEQ ID NO: 30243 - DNA, 22 bp, Homo sapiens
  source 1..22: mol_type = genomic DNA
ttgcaatacttaatttctgcca

SEQ ID NO: 30244 - DNA, 22 bp, Homo sapiens
  source 1..22: mol_type = genomic DNA
ttgcacgcgtgggttcgaatcc

SEQ ID NO: 30245 - DNA, 23 bp, Homo sapiens
  source 1..23: mol_type = genomic DNA
ttgcacgcgtgggttcgaatccc

SEQ ID NO: 30246 - DNA, 26 bp, Homo sapiens
  source 1..26: mol_type = genomic DNA
ttgcacgcgtgggttcgaatcccatc

SEQ ID NO: 30247 - DNA, 28 bp, Homo sapiens
  source 1..28: mol_type = genomic DNA
ttgcacgcgtgggttcgaatcccatcct

SEQ ID NO: 30248 - DNA, 30 bp, Homo sapiens
  source 1..30: mol_type = genomic DNA
ttgcacgcgtgggttcgaatcccatcctcg

SEQ ID NO: 30249 - DNA, 34 bp, Homo sapiens
  source 1..34: mol_type = genomic DNA
ttgcacgcgtgggttcgaatcccatcctcgtcgc

SEQ ID NO: 30250 - DNA, 35 bp, Homo sapiens
  source 1..35: mol_type = genomic DNA
ttgcacgcgtgggttcgaatcccatcctcgtcgcc

SEQ ID NO: 30251 - DNA, 36 bp, Homo sapiens
  source 1..36: mol_type = genomic DNA
ttgcacgcgtgggttcgaatcccatcctcgtcgcca

SEQ ID NO: 30252 - DNA, 19 bp, Homo sapiens
  source 1..19: mol_type = genomic DNA
ttgcacgtatgaggccccg

SEQ ID NO: 30253 - DNA, 38 bp, Homo sapiens
  source 1..38: mol_type = genomic DNA
ttgcacgtatgaggccccgggttcaatccccggcatct

SEQ ID NO: 30254 - DNA, 18 bp, Homo sapiens
  source 1..18: mol_type = genomic DNA
ttgcaggttcgagtcctg

SEQ ID NO: 30255 - DNA, 26 bp, Homo sapiens
  source 1..26: mol_type = genomic DNA
ttgcaggttcgagtcctgccgcggtc

SEQ ID NO: 30256 - DNA, 28 bp, Homo sapiens
  source 1..28: mol_type = genomic DNA
ttgcaggttcgagtcctgccgcggtcgc

SEQ ID NO: 30257 - DNA, 29 bp, Homo sapiens
  source 1..29: mol_type = genomic DNA
ttgcaggttcgagtcctgccgcggtcgcc

SEQ ID NO: 30258 - DNA, 30 bp, Homo sapiens
  source 1..30: mol_type = genomic DNA
ttgcaggttcgagtcctgccgcggtcgcca

SEQ ID NO: 30259 - DNA, 16 bp, Homo sapiens
  source 1..16: mol_type = genomic DNA
ttgcgacccgggttcg

SEQ ID NO: 30260 - DNA, 17 bp, Homo sapiens
  source 1..17: mol_type = genomic DNA
ttgcgacccgggttcga

SEQ ID NO: 30261 - DNA, 20 bp, Homo sapiens
  source 1..20: mol_type = genomic DNA
ttgcgacccgggttcgattc

SEQ ID NO: 30262 - DNA, 21 bp, Homo sapiens
  source 1..21: mol_type = genomic DNA
ttgcgacccgggttcgattcc

SEQ ID NO: 30263 - DNA, 23 bp, Homo sapiens
  source 1..23: mol_type = genomic DNA
ttgcgacccgggttcgattcccg

SEQ ID NO: 30264 - DNA, 24 bp, Homo sapiens
  source 1..24: mol_type = genomic DNA
ttgcgacccgggttcgattcccgg

SEQ ID NO: 30265 - DNA, 27 bp, Homo sapiens
  source 1..27: mol_type = genomic DNA
ttgcgacccgggttcgattcccgggcg

SEQ ID NO: 30266 - DNA, 28 bp, Homo sapiens
  source 1..28: mol_type = genomic DNA
ttgcgacccgggttcgattcccgggcgg

SEQ ID NO: 30267 - DNA, 29 bp, Homo sapiens
  source 1..29: mol_type = genomic DNA
ttgcgacccgggttcgattcccgggcggc

SEQ ID NO: 30268 - DNA, 30 bp, Homo sapiens
  source 1..30: mol_type = genomic DNA
ttgcgacccgggttcgattcccgggcggcg

SEQ ID NO: 30269 - DNA, 32 bp, Homo sapiens
  source 1..32: mol_type = genomic DNA
ttgcgacccgggttcgattcccgggcggcgca

SEQ ID NO: 30270 - DNA, 33 bp, Homo sapiens
  source 1..33: mol_type = genomic DNA
ttgcgacccgggttcgattcccgggcggcgcac

SEQ ID NO: 30271 - DNA, 34 bp, Homo sapiens
  source 1..34: mol_type = genomic DNA
ttgcgacccgggttcgattcccgggcggcgcacc

SEQ ID NO: 30272 - DNA, 35 bp, Homo sapiens
  source 1..35: mol_type = genomic DNA
ttgcgacccgggttcgattcccgggcggcgcacca

SEQ ID NO: 30273 - DNA, 25 bp, Homo sapiens
  source 1..25: mol_type = genomic DNA
ttgcgtgttcaaatcacgtcggggt

SEQ ID NO: 30274 - DNA, 26 bp, Homo sapiens
  source 1..26: mol_type = genomic DNA
ttgcgtgttcaaatcacgtcggggtc

SEQ ID NO: 30275 - DNA, 27 bp, Homo sapiens
  source 1..27: mol_type = genomic DNA
ttgcgtgttcaaatcacgtcggggtca

SEQ ID NO: 30276 - DNA, 28 bp, Homo sapiens
  source 1..28: mol_type = genomic DNA
ttgcgtgttcaaatcacgtcggggtcac

SEQ ID NO: 30277 - DNA, 29 bp, Homo sapiens
  source 1..29: mol_type = genomic DNA
ttgcgtgttcaaatcacgtcggggtcacc

SEQ ID NO: 30278 - DNA, 30 bp, Homo sapiens
  source 1..30: mol_type = genomic DNA
ttgcgtgttcaaatcacgtcggggtcacca

SEQ ID NO: 30279 - DNA, 24 bp, Homo sapiens
  source 1..24: mol_type = genomic DNA
ttgcgtgttcaagtcacgtcgggg

SEQ ID NO: 30280 - DNA, 25 bp, Homo sapiens
  source 1..25: mol_type = genomic DNA
ttgcgtgttcaagtcacgtcggggt

SEQ ID NO: 30281 - DNA, 26 bp, Homo sapiens
  source 1..26: mol_type = genomic DNA
ttgcgtgttcaagtcacgtcggggtc

SEQ ID NO: 30282 - DNA, 27 bp, Homo sapiens
  source 1..27: mol_type = genomic DNA
ttgcgtgttcaagtcacgtcggggtca

SEQ ID NO: 30283 - DNA, 28 bp, Homo sapiens
  source 1..28: mol_type = genomic DNA
ttgcgtgttcaagtcacgtcggggtcac

SEQ ID NO: 30284 - DNA, 29 bp, Homo sapiens
  source 1..29: mol_type = genomic DNA
ttgcgtgttcaagtcacgtcggggtcacc

SEQ ID NO: 30285 - DNA, 30 bp, Homo sapiens
  source 1..30: mol_type = genomic DNA
ttgcgtgttcaagtcacgtcggggtcacca

SEQ ID NO: 30286 - DNA, 16 bp, Homo sapiens
  source 1..16: mol_type = genomic DNA
ttgcgttcagttgatg

SEQ ID NO: 30287 - DNA, 17 bp, Homo sapiens
  source 1..17: mol_type = genomic DNA
ttgcgttcagttgatgc

SEQ ID NO: 30288 - DNA, 28 bp, Homo sapiens
  source 1..28: mol_type = genomic DNA
ttgcgttcagttgatgcagagtggggtt

SEQ ID NO: 30289 - DNA, 29 bp, Homo sapiens
  source 1..29: mol_type = genomic DNA
ttgcgttcagttgatgcagagtggggttt

SEQ ID NO: 30290 - DNA, 36 bp, Homo sapiens
  source 1..36: mol_type = genomic DNA
ttgcgttcagttgatgcagagtggggttttgcagtc

SEQ ID NO: 30291 - DNA, 38 bp, Homo sapiens
  source 1..38: mol_type = genomic DNA
ttgcgttcagttgatgcagagtggggttttgcagtcct

SEQ ID NO: 30292 - DNA, 25 bp, Homo sapiens
  source 1..25: mol_type = genomic DNA
ttggactgtaaatctaaagacaggg

SEQ ID NO: 30293 - DNA, 28 bp, Homo sapiens
  source 1..28: mol_type = genomic DNA
ttggactgtaaatctaaagacaggggtt

SEQ ID NO: 30294 - DNA, 31 bp, Homo sapiens
  source 1..31: mol_type = genomic DNA
ttggactgtaaatctaaagacaggggttagg

SEQ ID NO: 30295 - DNA, 34 bp, Homo sapiens
  source 1..34: mol_type = genomic DNA
ttggactgtaaatctaaagacaggggttaggcct

SEQ ID NO: 30296 - DNA, 35 bp, Homo sapiens
  source 1..35: mol_type = genomic DNA
ttggactgtaaatctaaagacaggggttaggcctc

SEQ ID NO: 30297 - DNA, 36 bp, Homo sapiens
  source 1..36: mol_type = genomic DNA
ttggactgtaaatctaaagacaggggttaggcctct

SEQ ID NO: 30298 - DNA, 37 bp, Homo sapiens
  source 1..37: mol_type = genomic DNA
ttggactgtaaatctaaagacaggggttaggcctctt

SEQ ID NO: 30299 - DNA, 38 bp, Homo sapiens
  source 1..38: mol_type = genomic DNA
ttggactgtaaatctaaagacaggggttaggcctcttt

SEQ ID NO: 30300 - DNA, 40 bp, Homo sapiens
  source 1..40: mol_type = genomic DNA
ttggactgtaaatctaaagacaggggttaggcctcttttt

SEQ ID NO: 30301 - DNA, 43 bp, Homo sapiens
  source 1..43: mol_type = genomic DNA
ttggactgtaaatctaaagacaggggttaggcctctttttacc

SEQ ID NO: 30302 - DNA, 46 bp, Homo sapiens
  source 1..46: mol_type = genomic DNA
ttggactgtaaatctaaagacaggggttaggcctctttttaccacc

SEQ ID NO: 30303 - DNA, 47 bp, Homo sapiens
  source 1..47: mol_type = genomic DNA
ttggactgtaaatctaaagacaggggttaggcctctttttaccacca

SEQ ID NO: 30304 - DNA, 25 bp, Homo sapiens
  source 1..25: mol_type = genomic DNA
ttggacttaagatccaatggacata

SEQ ID NO: 30305 - DNA, 29 bp, Homo sapiens
  source 1..29: mol_type = genomic DNA
ttggattctcagggatgggttcgattctc

SEQ ID NO: 30306 - DNA, 40 bp, Homo sapiens
  source 1..40: mol_type = genomic DNA
ttggattctcagggatgggttcgattctcatagtcctagc

SEQ ID NO: 30307 - DNA, 41 bp, Homo sapiens
  source 1..41: mol_type = genomic DNA
ttggattctcagggatgggttcgattctcatagtcctagcc

SEQ ID NO: 30308 - DNA, 42 bp, Homo sapiens
  source 1..42: mol_type = genomic DNA
ttggattctcagggatgggttcgattctcatagtcctagcca

SEQ ID NO: 30309 - DNA, 28 bp, Homo sapiens
  source 1..28: mol_type = genomic DNA
ttggcctcctaagccagggattgtgggt

SEQ ID NO: 30310 - DNA, 16 bp, Homo sapiens
  source 1..16: mol_type = genomic DNA
ttggggggttcgattc

SEQ ID NO: 30311 - DNA, 17 bp, Homo sapiens
  source 1..17: mol_type = genomic DNA
ttggggggttcgattcc

SEQ ID NO: 30312 - DNA, 18 bp, Homo sapiens
  source 1..18: mol_type = genomic DNA
ttggggggttcgattcct

SEQ ID NO: 30313 - DNA, 20 bp, Homo sapiens
  source 1..20: mol_type = genomic DNA
ttggggggttcgattccttc

SEQ ID NO: 30314 - DNA, 21 bp, Homo sapiens
  source 1..21: mol_type = genomic DNA
ttggggggttcgattccttcc

SEQ ID NO: 30315 - DNA, 30 bp, Homo sapiens
  source 1..30: mol_type = genomic DNA
ttggggggttcgattccttccttttttgcc

SEQ ID NO: 30316 - DNA, 17 bp, Homo sapiens
  source 1..17: mol_type = genomic DNA
ttggggtttccccgcgc

SEQ ID NO: 30317 - DNA, 21 bp, Homo sapiens
  source 1..21: mol_type = genomic DNA
ttggggtttccccgcgcaggt

SEQ ID NO: 30318 - DNA, 22 bp, Homo sapiens
  source 1..22: mol_type = genomic DNA
ttggggtttccccgcgcaggtt

SEQ ID NO: 30319 - DNA, 23 bp, Homo sapiens
  source 1..23: mol_type = genomic DNA
ttggggtttccccgcgcaggttc

SEQ ID NO: 30320 - DNA, 24 bp, Homo sapiens
  source 1..24: mol_type = genomic DNA
ttggggtttccccgcgcaggttcg

SEQ ID NO: 30321 - DNA, 20 bp, Homo sapiens
  source 1..20: mol_type = genomic DNA
ttgggtccgagaggtcccgg

SEQ ID NO: 30322 - DNA, 16 bp, Homo sapiens
  source 1..16: mol_type = genomic DNA
ttgggtgcgagaggtc

SEQ ID NO: 30323 - DNA, 17 bp, Homo sapiens
  source 1..17: mol_type = genomic DNA
ttgggtgcgagaggtcc

SEQ ID NO: 30324 - DNA, 18 bp, Homo sapiens
  source 1..18: mol_type = genomic DNA
ttgggtgcgagaggtccc

SEQ ID NO: 30325 - DNA, 19 bp, Homo sapiens
  source 1..19: mol_type = genomic DNA
ttgggtgcgagaggtcccg

SEQ ID NO: 30326 - DNA, 20 bp, Homo sapiens
  source 1..20: mol_type = genomic DNA
ttgggtgcgagaggtcccgg

SEQ ID NO: 30327 - DNA, 21 bp, Homo sapiens
  source 1..21: mol_type = genomic DNA
ttgggtgcgagaggtcccggg

SEQ ID NO: 30328 - DNA, 22 bp, Homo sapiens
  source 1..22: mol_type = genomic DNA
ttgggtgcgagaggtcccgggt

SEQ ID NO: 30329 - DNA, 24 bp, Homo sapiens
  source 1..24: mol_type = genomic DNA
ttgggtgcgagaggtcccgggttc

SEQ ID NO: 30330 - DNA, 38 bp, Homo sapiens
  source 1..38: mol_type = genomic DNA
ttgggtgcgagaggtcccgggttcaaatcccggacgag

SEQ ID NO: 30331 - DNA, 16 bp, Homo sapiens
  source 1..16: mol_type = genomic DNA
ttgggtgctaatggtg

SEQ ID NO: 30332 - DNA, 17 bp, Homo sapiens
  source 1..17: mol_type = genomic DNA
ttgggtgctaatggtgg

SEQ ID NO: 30333 - DNA, 19 bp, Homo sapiens
  source 1..19: mol_type = genomic DNA
ttgggtgctaatggtggag

SEQ ID NO: 30334 - DNA, 20 bp, Homo sapiens
  source 1..20: mol_type = genomic DNA
ttgggtgctaatggtggagt

SEQ ID NO: 30335 - DNA, 21 bp, Homo sapiens
  source 1..21: mol_type = genomic DNA
ttgggtgctaatggtggagtt

SEQ ID NO: 30336 - DNA, 22 bp, Homo sapiens
  source 1..22: mol_type = genomic DNA
ttgggtgctaatggtggagtta

SEQ ID NO: 30337 - DNA, 23 bp, Homo sapiens
  source 1..23: mol_type = genomic DNA
ttgggtgctaatggtggagttaa

SEQ ID NO: 30338 - DNA, 24 bp, Homo sapiens
  source 1..24: mol_type = genomic DNA
ttgggtgctaatggtggagttaaa

SEQ ID NO: 30339 - DNA, 25 bp, Homo sapiens
  source 1..25: mol_type = genomic DNA
ttgggtgctaatggtggagttaaag

SEQ ID NO: 30340 - DNA, 26 bp, Homo sapiens
  source 1..26: mol_type = genomic DNA
ttgggtgctaatggtggagttaaaga

SEQ ID NO: 30341 - DNA, 27 bp, Homo sapiens
  source 1..27: mol_type = genomic DNA
ttgggtgctaatggtggagttaaagac

SEQ ID NO: 30342 - DNA, 28 bp, Homo sapiens
  source 1..28: mol_type = genomic DNA
ttgggtgctaatggtggagttaaagact

SEQ ID NO: 30343 - DNA, 29 bp, Homo sapiens
  source 1..29: mol_type = genomic DNA
ttgggtgctaatggtggagttaaagactt

SEQ ID NO: 30344 - DNA, 30 bp, Homo sapiens
  source 1..30: mol_type = genomic DNA
ttgggtgctaatggtggagttaaagacttt

SEQ ID NO: 30345 - DNA, 31 bp, Homo sapiens
  source 1..31: mol_type = genomic DNA
ttgggtgctaatggtggagttaaagactttt

SEQ ID NO: 30346 - DNA, 32 bp, Homo sapiens
  source 1..32: mol_type = genomic DNA
ttgggtgctaatggtggagttaaagacttttt

SEQ ID NO: 30347 - DNA, 33 bp, Homo sapiens
  source 1..33: mol_type = genomic DNA
ttgggtgctaatggtggagttaaagactttttc

SEQ ID NO: 30348 - DNA, 34 bp, Homo sapiens
  source 1..34: mol_type = genomic DNA
ttgggtgctaatggtggagttaaagactttttct

SEQ ID NO: 30349 - DNA, 35 bp, Homo sapiens
  source 1..35: mol_type = genomic DNA
ttgggtgctaatggtggagttaaagactttttctc

SEQ ID NO: 30350 - DNA, 36 bp, Homo sapiens
  source 1..36: mol_type = genomic DNA
ttgggtgctaatggtggagttaaagactttttctct

SEQ ID NO: 30351 - DNA, 37 bp, Homo sapiens
  source 1..37: mol_type = genomic DNA
ttgggtgctaatggtggagttaaagactttttctctg

SEQ ID NO: 30352 - DNA, 38 bp, Homo sapiens
  source 1..38: mol_type = genomic DNA
ttgggtgctaatggtggagttaaagactttttctctga

SEQ ID NO: 30353 - DNA, 39 bp, Homo sapiens
  source 1..39: mol_type = genomic DNA
ttgggtgctaatggtggagttaaagactttttctctgac

SEQ ID NO: 30354 - DNA, 40 bp, Homo sapiens
  source 1..40: mol_type = genomic DNA
ttgggtgctaatggtggagttaaagactttttctctgacc

SEQ ID NO: 30355 - DNA, 41 bp, Homo sapiens
  source 1..41: mol_type = genomic DNA
ttgggtgctaatggtggagttaaagactttttctctgacca

SEQ ID NO: 30356 - DNA, 17 bp, Homo sapiens
  source 1..17: mol_type = genomic DNA
ttggtagagcatcagac

SEQ ID NO: 30357 - DNA, 18 bp, Homo sapiens
  source 1..18: mol_type = genomic DNA
ttggtagagcatcagact

SEQ ID NO: 30358 - DNA, 26 bp, Homo sapiens
  source 1..26: mol_type = genomic DNA
ttggtagagcatgggactcttaatcc

SEQ ID NO: 30359 - DNA, 16 bp, Homo sapiens
  source 1..16: mol_type = genomic DNA
ttggtagagcggagga

SEQ ID NO: 30360 - DNA, 17 bp, Homo sapiens
  source 1..17: mol_type = genomic DNA
ttggtagagcggaggac

SEQ ID NO: 30361 - DNA, 20 bp, Homo sapiens
  source 1..20: mol_type = genomic DNA
ttggtagagcggaggactgt

SEQ ID NO: 30362 - DNA, 38 bp, Homo sapiens
  source 1..38: mol_type = genomic DNA
ttggtatatagtttaaacaaaacgaatgatttcgactc

SEQ ID NO: 30363 - DNA, 16 bp, Homo sapiens
  source 1..16: mol_type = genomic DNA
ttggtcgtggttgtag

SEQ ID NO: 30364 - DNA, 17 bp, Homo sapiens
  source 1..17: mol_type = genomic DNA
ttggtcgtggttgtagt

SEQ ID NO: 30365 - DNA, 18 bp, Homo sapiens
  source 1..18: mol_type = genomic DNA
ttggtcgtggttgtagtc

SEQ ID NO: 30366 - DNA, 19 bp, Homo sapiens
  source 1..19: mol_type = genomic DNA
ttggtcgtggttgtagtcc

SEQ ID NO: 30367 - DNA, 20 bp, Homo sapiens
  source 1..20: mol_type = genomic DNA
ttggtcgtggttgtagtccg

SEQ ID NO: 30368 - DNA, 21 bp, Homo sapiens
  source 1..21: mol_type = genomic DNA
ttggtcgtggttgtagtccgt

SEQ ID NO: 30369 - DNA, 22 bp, Homo sapiens
  source 1..22: mol_type = genomic DNA
ttggtcgtggttgtagtccgtg

SEQ ID NO: 30370 - DNA, 23 bp, Homo sapiens
  source 1..23: mol_type = genomic DNA
ttggtcgtggttgtagtccgtgc

SEQ ID NO: 30371 - DNA, 24 bp, Homo sapiens
  source 1..24: mol_type = genomic DNA
ttggtcgtggttgtagtccgtgcg

SEQ ID NO: 30372 - DNA, 25 bp, Homo sapiens
  source 1..25: mol_type = genomic DNA
ttggtcgtggttgtagtccgtgcga

SEQ ID NO: 30373 - DNA, 26 bp, Homo sapiens
  source 1..26: mol_type = genomic DNA
ttggtcgtggttgtagtccgtgcgag

SEQ ID NO: 30374 - DNA, 27 bp, Homo sapiens
  source 1..27: mol_type = genomic DNA
ttggtcgtggttgtagtccgtgcgaga

SEQ ID NO: 30375 - DNA, 28 bp, Homo sapiens
  source 1..28: mol_type = genomic DNA
ttggtcgtggttgtagtccgtgcgagaa

SEQ ID NO: 30376 - DNA, 29 bp, Homo sapiens
  source 1..29: mol_type = genomic DNA
ttggtcgtggttgtagtccgtgcgagaat

SEQ ID NO: 30377 - DNA, 30 bp, Homo sapiens
  source 1..30: mol_type = genomic DNA
ttggtcgtggttgtagtccgtgcgagaata

SEQ ID NO: 30378 - DNA, 31 bp, Homo sapiens
  source 1..31: mol_type = genomic DNA
ttggtcgtggttgtagtccgtgcgagaatac

SEQ ID NO: 30379 - DNA, 32 bp, Homo sapiens
  source 1..32: mol_type = genomic DNA
ttggtcgtggttgtagtccgtgcgagaatacc

SEQ ID NO: 30380 - DNA, 33 bp, Homo sapiens
  source 1..33: mol_type = genomic DNA
ttggtcgtggttgtagtccgtgcgagaatacca

SEQ ID NO: 30381 - DNA, 21 bp, Homo sapiens
  source 1..21: mol_type = genomic DNA
ttggtctaggggtatgattct

SEQ ID NO: 30382 - DNA, 22 bp, Homo sapiens
  source 1..22: mol_type = genomic DNA
ttggtctaggggtatgattctc

SEQ ID NO: 30383 - DNA, 23 bp, Homo sapiens
  source 1..23: mol_type = genomic DNA
ttggtctaggggtatgattctcg

SEQ ID NO: 30384 - DNA, 24 bp, Homo sapiens
  source 1..24: mol_type = genomic DNA
ttggtctaggggtatgattctcgc

SEQ ID NO: 30385 - DNA, 25 bp, Homo sapiens
  source 1..25: mol_type = genomic DNA
ttggtctaggggtatgattctcgct

SEQ ID NO: 30386 - DNA, 26 bp, Homo sapiens
  source 1..26: mol_type = genomic DNA
ttggtctaggggtatgattctcgctt

SEQ ID NO: 30387 - DNA, 27 bp, Homo sapiens
  source 1..27: mol_type = genomic DNA
ttggtctaggggtatgattctcgcttc

SEQ ID NO: 30388 - DNA, 29 bp, Homo sapiens
  source 1..29: mol_type = genomic DNA
ttggtctaggggtatgattctcgcttcgg

SEQ ID NO: 30389 - DNA, 28 bp, Homo sapiens
  source 1..28: mol_type = genomic DNA
ttggtctaggggtatgattctcgctttg

SEQ ID NO: 30390 - DNA, 29 bp, Homo sapiens
  source 1..29: mol_type = genomic DNA
ttggtctaggggtatgattctcgctttgg

SEQ ID NO: 30391 - DNA, 26 bp, Homo sapiens
  source 1..26: mol_type = genomic DNA
ttggtctaggggtatgattctcggtt

SEQ ID NO: 30392 - DNA, 28 bp, Homo sapiens
  source 1..28: mol_type = genomic DNA
ttggtctaggggtatgattctcggtttg

SEQ ID NO: 30393 - DNA, 29 bp, Homo sapiens
  source 1..29: mol_type = genomic DNA
ttggtctaggggtatgattctcggtttgg

SEQ ID NO: 30394 - DNA, 23 bp, Homo sapiens
  source 1..23: mol_type = genomic DNA
ttggtctagtggtatgattctcg

SEQ ID NO: 30395 - DNA, 29 bp, Homo sapiens
  source 1..29: mol_type = genomic DNA
ttggtctagtggtatgattctcgctttgg

SEQ ID NO: 30396 - DNA, 35 bp, Homo sapiens
  source 1..35: mol_type = genomic DNA
ttggtcttaggccccaaaaattttggtgcaactcc

SEQ ID NO: 30397 - DNA, 48 bp, Homo sapiens
  source 1..48: mol_type = genomic DNA
ttggtcttaggccccaaaaattttggtgcaactccaaataaaagtacc

SEQ ID NO: 30398 - DNA, 16 bp, Homo sapiens
  source 1..16: mol_type = genomic DNA
ttggtgcaactccaaa

SEQ ID NO: 30399 - DNA, 17 bp, Homo sapiens
  source 1..17: mol_type = genomic DNA
ttggtgcaactccaaat

SEQ ID NO: 30400 - DNA, 18 bp, Homo sapiens
  source 1..18: mol_type = genomic DNA
ttggtgcaactccaaata

SEQ ID NO: 30401 - DNA, 20 bp, Homo sapiens
  source 1..20: mol_type = genomic DNA
ttggtgcaactccaaataaa

SEQ ID NO: 30402 - DNA, 24 bp, Homo sapiens
  source 1..24: mol_type = genomic DNA
ttggtgcaactccaaataaaagta

SEQ ID NO: 30403 - DNA, 25 bp, Homo sapiens
  source 1..25: mol_type = genomic DNA
ttggtgcaactccaaataaaagtac

SEQ ID NO: 30404 - DNA, 26 bp, Homo sapiens
  source 1..26: mol_type = genomic DNA
ttggtgcaactccaaataaaagtacc

SEQ ID NO: 30405 - DNA, 27 bp, Homo sapiens
  source 1..27: mol_type = genomic DNA
ttggtgcaactccaaataaaagtacca

SEQ ID NO: 30406 - DNA, 16 bp, Homo sapiens
  source 1..16: mol_type = genomic DNA
ttggtggtatagtggt

SEQ ID NO: 30407 - DNA, 19 bp, Homo sapiens
  source 1..19: mol_type = genomic DNA
ttggtggtatagtggtaag

SEQ ID NO: 30408 - DNA, 25 bp, Homo sapiens
  source 1..25: mol_type = genomic DNA
ttggtggtatagtggtaagcatagc

SEQ ID NO: 30409 - DNA, 26 bp, Homo sapiens
  source 1..26: mol_type = genomic DNA
ttggtggtatagtggtaagcatagct

SEQ ID NO: 30410 - DNA, 27 bp, Homo sapiens
  source 1..27: mol_type = genomic DNA
ttggtggtatagtggtaagcatagctg

SEQ ID NO: 30411 - DNA, 28 bp, Homo sapiens
  source 1..28: mol_type = genomic DNA
ttggtggtatagtggtaagcatagctgc

SEQ ID NO: 30412 - DNA, 29 bp, Homo sapiens
  source 1..29: mol_type = genomic DNA
ttggtggtatagtggtaagcatagctgcc

SEQ ID NO: 30413 - DNA, 33 bp, Homo sapiens
  source 1..33: mol_type = genomic DNA
ttggtggtatagtggtaagcatagctgccttcc

SEQ ID NO: 30414 - DNA, 19 bp, Homo sapiens
  source 1..19: mol_type = genomic DNA
ttggtggtatagtggtgag

SEQ ID NO: 30415 - DNA, 20 bp, Homo sapiens
  source 1..20: mol_type = genomic DNA
ttggtggtatagtggtgagc

SEQ ID NO: 30416 - DNA, 21 bp, Homo sapiens
  source 1..21: mol_type = genomic DNA
ttggtggtatagtggtgagca

SEQ ID NO: 30417 - DNA, 22 bp, Homo sapiens
  source 1..22: mol_type = genomic DNA
ttggtggtatagtggtgagcat

SEQ ID NO: 30418 - DNA, 25 bp, Homo sapiens
  source 1..25: mol_type = genomic DNA
ttggtggtatagtggtgagcatagc

SEQ ID NO: 30419 - DNA, 26 bp, Homo sapiens
  source 1..26: mol_type = genomic DNA
ttggtggtatagtggtgagcatagct

SEQ ID NO: 30420 - DNA, 27 bp, Homo sapiens
  source 1..27: mol_type = genomic DNA
ttggtggtatagtggtgagcatagctg

SEQ ID NO: 30421 - DNA, 28 bp, Homo sapiens
  source 1..28: mol_type = genomic DNA
ttggtggtatagtggtgagcatagctgc

SEQ ID NO: 30422 - DNA, 29 bp, Homo sapiens
  source 1..29: mol_type = genomic DNA
ttggtggtatagtggtgagcatagctgcc

SEQ ID NO: 30423 - DNA, 30 bp, Homo sapiens
  source 1..30: mol_type = genomic DNA
ttggtggtatagtggtgagcatagctgcct

SEQ ID NO: 30424 - DNA, 32 bp, Homo sapiens
  source 1..32: mol_type = genomic DNA
ttggtggtatagtggtgagcatagctgccttc

SEQ ID NO: 30425 - DNA, 33 bp, Homo sapiens
  source 1..33: mol_type = genomic DNA
ttggtggtatagtggtgagcatagctgccttcc

SEQ ID NO: 30426 - DNA, 48 bp, Homo sapiens
  source 1..48: mol_type = genomic DNA
ttggtggtatagtggtgagcatagctgccttccaagcagttgacccgg

SEQ ID NO: 30427 - DNA, 25 bp, Homo sapiens
  source 1..25: mol_type = genomic DNA
ttggtggtatagtggttagcatagc

SEQ ID NO: 30428 - DNA, 26 bp, Homo sapiens
  source 1..26: mol_type = genomic DNA
ttggtggtatagtggttagcatagct

SEQ ID NO: 30429 - DNA, 27 bp, Homo sapiens
  source 1..27: mol_type = genomic DNA
ttggtggtatagtggttagcatagctg

SEQ ID NO: 30430 - DNA, 28 bp, Homo sapiens
  source 1..28: mol_type = genomic DNA
ttggtggtatagtggttagcatagctgc

SEQ ID NO: 30431 - DNA, 29 bp, Homo sapiens
  source 1..29: mol_type = genomic DNA
ttggtggtatagtggttagcatagctgcc

SEQ ID NO: 30432 - DNA, 30 bp, Homo sapiens
  source 1..30: mol_type = genomic DNA
ttggtggtatagtggttagcatagctgcct

SEQ ID NO: 30433 - DNA, 33 bp, Homo sapiens
  source 1..33: mol_type = genomic DNA
ttggtggtatagtggttagcatagctgccttcc

SEQ ID NO: 30434 - DNA, 22 bp, Homo sapiens
  source 1..22: mol_type = genomic DNA
ttggtggtgcagtggtagaatt

SEQ ID NO: 30435 - DNA, 25 bp, Homo sapiens
  source 1..25: mol_type = genomic DNA
ttggtggtgcagtggtagaattctc

SEQ ID NO: 30436 - DNA, 28 bp, Homo sapiens
  source 1..28: mol_type = genomic DNA
ttggtggtgcagtggtagaattctcgcc

SEQ ID NO: 30437 - DNA, 29 bp, Homo sapiens
  source 1..29: mol_type = genomic DNA
ttggtggtgcagtggtagaattctcgcct

SEQ ID NO: 30438 - DNA, 25 bp, Homo sapiens
  source 1..25: mol_type = genomic DNA
ttggtggttcaatggtagaattctc

SEQ ID NO: 30439 - DNA, 29 bp, Homo sapiens
  source 1..29: mol_type = genomic DNA
ttggtggttcaatggtagaattctcgcct

SEQ ID NO: 30440 - DNA, 16 bp, Homo sapiens
  source 1..16: mol_type = genomic DNA
ttggtggttcagtggt

SEQ ID NO: 30441 - DNA, 17 bp, Homo sapiens
  source 1..17: mol_type = genomic DNA
ttggtggttcagtggta

SEQ ID NO: 30442 - DNA, 18 bp, Homo sapiens
  source 1..18: mol_type = genomic DNA
ttggtggttcagtggtag

SEQ ID NO: 30443 - DNA, 19 bp, Homo sapiens
  source 1..19: mol_type = genomic DNA
ttggtggttcagtggtaga

SEQ ID NO: 30444 - DNA, 20 bp, Homo sapiens
  source 1..20: mol_type = genomic DNA
ttggtggttcagtggtagaa

SEQ ID NO: 30445 - DNA, 21 bp, Homo sapiens
  source 1..21: mol_type = genomic DNA
ttggtggttcagtggtagaat

SEQ ID NO: 30446 - DNA, 22 bp, Homo sapiens
  source 1..22: mol_type = genomic DNA
ttggtggttcagtggtagaatt

SEQ ID NO: 30447 - DNA, 23 bp, Homo sapiens
  source 1..23: mol_type = genomic DNA
ttggtggttcagtggtagaattc

SEQ ID NO: 30448 - DNA, 24 bp, Homo sapiens
  source 1..24: mol_type = genomic DNA
ttggtggttcagtggtagaattct

SEQ ID NO: 30449 - DNA, 25 bp, Homo sapiens
  source 1..25: mol_type = genomic DNA
ttggtggttcagtggtagaattctc

SEQ ID NO: 30450 - DNA, 26 bp, Homo sapiens
  source 1..26: mol_type = genomic DNA
ttggtggttcagtggtagaattctcg

SEQ ID NO: 30451 - DNA, 27 bp, Homo sapiens
  source 1..27: mol_type = genomic DNA
ttggtggttcagtggtagaattctcgc

SEQ ID NO: 30452 - DNA, 28 bp, Homo sapiens
  source 1..28: mol_type = genomic DNA
ttggtggttcagtggtagaattctcgcc

SEQ ID NO: 30453 - DNA, 29 bp, Homo sapiens
  source 1..29: mol_type = genomic DNA
ttggtggttcagtggtagaattctcgcct

SEQ ID NO: 30454 - DNA, 30 bp, Homo sapiens
  source 1..30: mol_type = genomic DNA
ttggtggttcagtggtagaattctcgcctc

SEQ ID NO: 30455 - DNA, 31 bp, Homo sapiens
  source 1..31: mol_type = genomic DNA
ttggtggttcagtggtagaattctcgcctcc

SEQ ID NO: 30456 - DNA, 32 bp, Homo sapiens
  source 1..32: mol_type = genomic DNA
ttggtggttcagtggtagaattctcgcctccc

SEQ ID NO: 30457 - DNA, 33 bp, Homo sapiens
  source 1..33: mol_type = genomic DNA
ttggtggttcagtggtagaattctcgcctccca

SEQ ID NO: 30458 - DNA, 34 bp, Homo sapiens
  source 1..34: mol_type = genomic DNA
ttggtggttcagtggtagaattctcgcctcccac

SEQ ID NO: 30459 - DNA, 30 bp, Homo sapiens
  source 1..30: mol_type = genomic DNA
ttggtggttcagtggtagaattctcgcctg

SEQ ID NO: 30460 - DNA, 31 bp, Homo sapiens
  source 1..31: mol_type = genomic DNA
ttggtggttcagtggtagaattctcgcctgc

SEQ ID NO: 30461 - DNA, 32 bp, Homo sapiens
  source 1..32: mol_type = genomic DNA
ttggtggttcagtggtagaattctcgcctgcc

SEQ ID NO: 30462 - DNA, 33 bp, Homo sapiens
  source 1..33: mol_type = genomic DNA
ttggtggttcagtggtagaattctcgcctgcca

SEQ ID NO: 30463 - DNA, 34 bp, Homo sapiens
  source 1..34: mol_type = genomic DNA
ttggtggttcagtggtagaattctcgcctgccac

SEQ ID NO: 30464 - DNA, 35 bp, Homo sapiens
  source 1..35: mol_type = genomic DNA
ttggtggttcagtggtagaattctcgcctgccacg

SEQ ID NO: 30465 - DNA, 36 bp, Homo sapiens
  source 1..36: mol_type = genomic DNA
ttggtggttcagtggtagaattctcgcctgccacgc

SEQ ID NO: 30466 - DNA, 37 bp, Homo sapiens
  source 1..37: mol_type = genomic DNA
ttggtggttcagtggtagaattctcgcctgccacgcg

SEQ ID NO: 30467 - DNA, 38 bp, Homo sapiens
  source 1..38: mol_type = genomic DNA
ttggtggttcagtggtagaattctcgcctgccacgcgg

SEQ ID NO: 30468 - DNA, 39 bp, Homo sapiens
  source 1..39: mol_type = genomic DNA
ttggtggttcagtggtagaattctcgcctgccacgcggg

SEQ ID NO: 30469 - DNA, 40 bp, Homo sapiens
  source 1..40: mol_type = genomic DNA
ttggtggttcagtggtagaattctcgcctgccacgcggga

SEQ ID NO: 30470 - DNA, 41 bp, Homo sapiens
  source 1..41: mol_type = genomic DNA
ttggtggttcagtggtagaattctcgcctgccacgcgggag

SEQ ID NO: 30471 - DNA, 42 bp, Homo sapiens
  source 1..42: mol_type = genomic DNA
ttggtggttcagtggtagaattctcgcctgccacgcgggagg

SEQ ID NO: 30472 - DNA, 43 bp, Homo sapiens
  source 1..43: mol_type = genomic DNA
ttggtggttcagtggtagaattctcgcctgccacgcgggaggc

SEQ ID NO: 30473 - DNA, 44 bp, Homo sapiens
  source 1..44: mol_type = genomic DNA
ttggtggttcagtggtagaattctcgcctgccacgcgggaggcc

SEQ ID NO: 30474 - DNA, 45 bp, Homo sapiens
  source 1..45: mol_type = genomic DNA
ttggtggttcagtggtagaattctcgcctgccacgcgggaggccc

SEQ ID NO: 30475 - DNA, 46 bp, Homo sapiens
  source 1..46: mol_type = genomic DNA
ttggtggttcagtggtagaattctcgcctgccacgcgggaggcccg

SEQ ID NO: 30476 - DNA, 47 bp, Homo sapiens
  source 1..47: mol_type = genomic DNA
ttggtggttcagtggtagaattctcgcctgccacgcgggaggcccgg

SEQ ID NO: 30477 - DNA, 48 bp, Homo sapiens
  source 1..48: mol_type = genomic DNA
ttggtggttcagtggtagaattctcgcctgccacgcgggaggcccggg

SEQ ID NO: 30478 - DNA, 27 bp, Homo sapiens
  source 1..27: mol_type = genomic DNA
ttggtggttcgaacccacccagaggcg

SEQ ID NO: 30479 - DNA, 23 bp, Homo sapiens
  source 1..23: mol_type = genomic DNA
ttggtggttcgagcccacccagg

SEQ ID NO: 30480 - DNA, 25 bp, Homo sapiens
  source 1..25: mol_type = genomic DNA
ttggtggttcgagcccacccaggga

SEQ ID NO: 30481 - DNA, 26 bp, Homo sapiens
  source 1..26: mol_type = genomic DNA
ttggtggttcgagcccacccagggac

SEQ ID NO: 30482 - DNA, 27 bp, Homo sapiens
  source 1..27: mol_type = genomic DNA
ttggtggttcgagcccacccagggacg

SEQ ID NO: 30483 - DNA, 28 bp, Homo sapiens
  source 1..28: mol_type = genomic DNA
ttggtggttcgagcccacccagggacgc

SEQ ID NO: 30484 - DNA, 29 bp, Homo sapiens
  source 1..29: mol_type = genomic DNA
ttggtggttcgagcccacccagggacgcc

SEQ ID NO: 30485 - DNA, 30 bp, Homo sapiens
  source 1..30: mol_type = genomic DNA
ttggtggttcgagcccacccagggacgcca

SEQ ID NO: 30486 - DNA, 28 bp, Homo sapiens
  source 1..28: mol_type = genomic DNA
ttggtggttcgagcccacccagggatgc

SEQ ID NO: 30487 - DNA, 26 bp, Homo sapiens
  source 1..26: mol_type = genomic DNA
ttggtggttcgatcccacccagggac

SEQ ID NO: 30488 - DNA, 27 bp, Homo sapiens
  source 1..27: mol_type = genomic DNA
ttggtggttcgatcccacccagggacg

SEQ ID NO: 30489 - DNA, 28 bp, Homo sapiens
  source 1..28: mol_type = genomic DNA
ttggtggttcgatcccacccagggacgc

SEQ ID NO: 30490 - DNA, 29 bp, Homo sapiens
  source 1..29: mol_type = genomic DNA
ttggtggttcgatcccacccagggacgcc

SEQ ID NO: 30491 - DNA, 30 bp, Homo sapiens
  source 1..30: mol_type = genomic DNA
ttggtggttcgatcccacccagggacgcca

SEQ ID NO: 30492 - DNA, 27 bp, Homo sapiens
  source 1..27: mol_type = genomic DNA
ttggtggtttagtggtagaattctcgc

SEQ ID NO: 30493 - DNA, 28 bp, Homo sapiens
  source 1..28: mol_type = genomic DNA
ttggtggtttagtggtagaattctcgcc

SEQ ID NO: 30494 - DNA, 29 bp, Homo sapiens
  source 1..29: mol_type = genomic DNA
ttggtggtttagtggtagaattctcgcct

SEQ ID NO: 30495 - DNA, 21 bp, Homo sapiens
  source 1..21: mol_type = genomic DNA
ttggttatacccttcccgtac

SEQ ID NO: 30496 - DNA, 22 bp, Homo sapiens
  source 1..22: mol_type = genomic DNA
ttggttatacccttcccgtact

SEQ ID NO: 30497 - DNA, 23 bp, Homo sapiens
  source 1..23: mol_type = genomic DNA
ttggttatacccttcccgtacta

SEQ ID NO: 30498 - DNA, 24 bp, Homo sapiens
  source 1..24: mol_type = genomic DNA
ttggttatacccttcccgtactac

SEQ ID NO: 30499 - DNA, 25 bp, Homo sapiens
  source 1..25: mol_type = genomic DNA
ttggttatacccttcccgtactacc

SEQ ID NO: 30500 - DNA, 26 bp, Homo sapiens
  source 1..26: mol_type = genomic DNA
ttggttatacccttcccgtactacca

SEQ ID NO: 30501 - DNA, 17 bp, Homo sapiens
  source 1..17: mol_type = genomic DNA
ttgtaaacaggagatcc

SEQ ID NO: 30502 - DNA, 42 bp, Homo sapiens
  source 1..42: mol_type = genomic DNA
ttgtaaacaggagatcctgggttcgaatcccagtagagcctc

SEQ ID NO: 30503 - DNA, 18 bp, Homo sapiens
  source 1..18: mol_type = genomic DNA
ttgtaaaccaggggtcgc

SEQ ID NO: 30504 - DNA, 19 bp, Homo sapiens
  source 1..19: mol_type = genomic DNA
ttgtaaaccaggggtcgcg

SEQ ID NO: 30505 - DNA, 20 bp, Homo sapiens
  source 1..20: mol_type = genomic DNA
ttgtaaaccaggggtcgcga

SEQ ID NO: 30506 - DNA, 22 bp, Homo sapiens
  source 1..22: mol_type = genomic DNA
ttgtaaaccaggggtcgcgagt

SEQ ID NO: 30507 - DNA, 24 bp, Homo sapiens
  source 1..24: mol_type = genomic DNA
ttgtaaaccaggggtcgcgagttc

SEQ ID NO: 30508 - DNA, 41 bp, Homo sapiens
  source 1..41: mol_type = genomic DNA
ttgtaaaccaggggtcgcgagttcaaatctcgctggggcct

SEQ ID NO: 30509 - DNA, 43 bp, Homo sapiens
  source 1..43: mol_type = genomic DNA
ttgtaaaccaggggtcgcgagttcaaatctcgctggggcctcc

SEQ ID NO: 30510 - DNA, 40 bp, Homo sapiens
  source 1..40: mol_type = genomic DNA
ttgtaaaccaggggtcgcgagttcaattctcgctggggcc

SEQ ID NO: 30511 - DNA, 43 bp, Homo sapiens
  source 1..43: mol_type = genomic DNA
ttgtaaaccaggggtcgcgagttcaattctcgctggggcctcc

SEQ ID NO: 30512 - DNA, 16 bp, Homo sapiens
  source 1..16: mol_type = genomic DNA
ttgtaaaccggagatg

SEQ ID NO: 30513 - DNA, 17 bp, Homo sapiens
  source 1..17: mol_type = genomic DNA
ttgtaaaccggagatga

SEQ ID NO: 30514 - DNA, 18 bp, Homo sapiens
  source 1..18: mol_type = genomic DNA
ttgtaaaccggagatgaa

SEQ ID NO: 30515 - DNA, 19 bp, Homo sapiens
  source 1..19: mol_type = genomic DNA
ttgtaaaccggagatgaaa

SEQ ID NO: 30516 - DNA, 20 bp, Homo sapiens
  source 1..20: mol_type = genomic DNA
ttgtaaaccggagatgaaaa

SEQ ID NO: 30517 - DNA, 21 bp, Homo sapiens
  source 1..21: mol_type = genomic DNA
ttgtaaaccggagatgaaaac

SEQ ID NO: 30518 - DNA, 22 bp, Homo sapiens
  source 1..22: mol_type = genomic DNA
ttgtaaaccggagatgaaaacc

SEQ ID NO: 30519 - DNA, 23 bp, Homo sapiens
  source 1..23: mol_type = genomic DNA
ttgtaaaccggagatgaaaacct

SEQ ID NO: 30520 - DNA, 24 bp, Homo sapiens
  source 1..24: mol_type = genomic DNA
ttgtaaaccggagatgaaaacctt

SEQ ID NO: 30521 - DNA, 25 bp, Homo sapiens
  source 1..25: mol_type = genomic DNA
ttgtaaaccggagatgaaaaccttt

SEQ ID NO: 30522 - DNA, 26 bp, Homo sapiens
  source 1..26: mol_type = genomic DNA
ttgtaaaccggagatgaaaacctttt

SEQ ID NO: 30523 - DNA, 27 bp, Homo sapiens
  source 1..27: mol_type = genomic DNA
ttgtaaaccggagatgaaaaccttttt

SEQ ID NO: 30524 - DNA, 28 bp, Homo sapiens
  source 1..28: mol_type = genomic DNA
ttgtaaaccggagatgaaaacctttttc

SEQ ID NO: 30525 - DNA, 29 bp, Homo sapiens
  source 1..29: mol_type = genomic DNA
ttgtaaaccggagatgaaaacctttttcc

SEQ ID NO: 30526 - DNA, 30 bp, Homo sapiens
  source 1..30: mol_type = genomic DNA
ttgtaaaccggagatgaaaacctttttcca

SEQ ID NO: 30527 - DNA, 32 bp, Homo sapiens
  source 1..32: mol_type = genomic DNA
ttgtaaaccggagatgaaaacctttttccaag

SEQ ID NO: 30528 - DNA, 33 bp, Homo sapiens
  source 1..33: mol_type = genomic DNA
ttgtaaaccggagatgaaaacctttttccaagg

SEQ ID NO: 30529 - DNA, 34 bp, Homo sapiens
  source 1..34: mol_type = genomic DNA
ttgtaaaccggagatgaaaacctttttccaagga

SEQ ID NO: 30530 - DNA, 35 bp, Homo sapiens
  source 1..35: mol_type = genomic DNA
ttgtaaaccggagatgaaaacctttttccaaggac

SEQ ID NO: 30531 - DNA, 36 bp, Homo sapiens
  source 1..36: mol_type = genomic DNA
ttgtaaaccggagatgaaaacctttttccaaggaca

SEQ ID NO: 30532 - DNA, 37 bp, Homo sapiens
  source 1..37: mol_type = genomic DNA
ttgtaaaccggagatgaaaacctttttccaaggacac

SEQ ID NO: 30533 - DNA, 38 bp, Homo sapiens
  source 1..38: mol_type = genomic DNA
ttgtaaaccggagatgaaaacctttttccaaggacacc

SEQ ID NO: 30534 - DNA, 39 bp, Homo sapiens
  source 1..39: mol_type = genomic DNA
ttgtaaaccggagatgaaaacctttttccaaggacacca

SEQ ID NO: 30535 - DNA, 24 bp, Homo sapiens
  source 1..24: mol_type = genomic DNA
ttgtagtataaactaatacaccag

SEQ ID NO: 30536 - DNA, 32 bp, Homo sapiens
  source 1..32: mol_type = genomic DNA
ttgtagtataaactaatacaccagtcttgtaa

SEQ ID NO: 30537 - DNA, 16 bp, Homo sapiens
  source 1..16: mol_type = genomic DNA
ttgtagtccgtgcgag

SEQ ID NO: 30538 - DNA, 17 bp, Homo sapiens
  source 1..17: mol_type = genomic DNA
ttgtagtccgtgcgaga

SEQ ID NO: 30539 - DNA, 18 bp, Homo sapiens
  source 1..18: mol_type = genomic DNA
ttgtagtccgtgcgagaa

SEQ ID NO: 30540 - DNA, 19 bp, Homo sapiens
  source 1..19: mol_type = genomic DNA
ttgtagtccgtgcgagaat

SEQ ID NO: 30541 - DNA, 20 bp, Homo sapiens
  source 1..20: mol_type = genomic DNA
ttgtagtccgtgcgagaata

SEQ ID NO: 30542 - DNA, 21 bp, Homo sapiens
  source 1..21: mol_type = genomic DNA
ttgtagtccgtgcgagaatac

SEQ ID NO: 30543 - DNA, 22 bp, Homo sapiens
  source 1..22: mol_type = genomic DNA
ttgtagtccgtgcgagaatacc

SEQ ID NO: 30544 - DNA, 23 bp, Homo sapiens
  source 1..23: mol_type = genomic DNA
ttgtagtccgtgcgagaatacca

SEQ ID NO: 30545 - DNA, 16 bp, Homo sapiens
  source 1..16: mol_type = genomic DNA
ttgtagttgaaataca

SEQ ID NO: 30546 - DNA, 22 bp, Homo sapiens
  source 1..22: mol_type = genomic DNA
ttgtagttgaaatacaacgatg

SEQ ID NO: 30547 - DNA, 27 bp, Homo sapiens
  source 1..27: mol_type = genomic DNA
ttgtagttgaaatacaacgatggtttt

SEQ ID NO: 30548 - DNA, 29 bp, Homo sapiens
  source 1..29: mol_type = genomic DNA
ttgtagttgaaatacaacgatggtttttc

SEQ ID NO: 30549 - DNA, 30 bp, Homo sapiens
  source 1..30: mol_type = genomic DNA
ttgtagttgaaatacaacgatggtttttca

SEQ ID NO: 30550 - DNA, 31 bp, Homo sapiens
  source 1..31: mol_type = genomic DNA
ttgtagttgaaatacaacgatggtttttcat

SEQ ID NO: 30551 - DNA, 32 bp, Homo sapiens
  source 1..32: mol_type = genomic DNA
ttgtagttgaaatacaacgatggtttttcata

SEQ ID NO: 30552 - DNA, 43 bp, Homo sapiens
  source 1..43: mol_type = genomic DNA
ttgtagttgaaatacaacgatggtttttcatatcattggtcgt

SEQ ID NO: 30553 - DNA, 16 bp, Homo sapiens
  source 1..16: mol_type = genomic DNA
ttgtcaaagttaaatt

SEQ ID NO: 30554 - DNA, 20 bp, Homo sapiens
  source 1..20: mol_type = genomic DNA
ttgtcaaagttaaattatag

SEQ ID NO: 30555 - DNA, 21 bp, Homo sapiens
  source 1..21: mol_type = genomic DNA
ttgtcaaagttaaattatagg

SEQ ID NO: 30556 - DNA, 22 bp, Homo sapiens
  source 1..22: mol_type = genomic DNA
ttgtcaaagttaaattataggc

SEQ ID NO: 30557 - DNA, 23 bp, Homo sapiens
  source 1..23: mol_type = genomic DNA
ttgtcaaagttaaattataggct

SEQ ID NO: 30558 - DNA, 24 bp, Homo sapiens
  source 1..24: mol_type = genomic DNA
ttgtcaaagttaaattataggcta

SEQ ID NO: 30559 - DNA, 25 bp, Homo sapiens
  source 1..25: mol_type = genomic DNA
ttgtcaaagttaaattataggctaa

SEQ ID NO: 30560 - DNA, 26 bp, Homo sapiens
  source 1..26: mol_type = genomic DNA
ttgtcaaagttaaattataggctaaa

SEQ ID NO: 30561 - DNA, 30 bp, Homo sapiens
  source 1..30: mol_type = genomic DNA
ttgtcaaagttaaattataggctaaatcct

SEQ ID NO: 30562 - DNA, 33 bp, Homo sapiens
  source 1..33: mol_type = genomic DNA
ttgtcaaagttaaattataggctaaatcctata

SEQ ID NO: 30563 - DNA, 35 bp, Homo sapiens
  source 1..35: mol_type = genomic DNA
ttgtcaaagttaaattataggctaaatcctatata

SEQ ID NO: 30564 - DNA, 37 bp, Homo sapiens
  source 1..37: mol_type = genomic DNA
ttgtcaaagttaaattataggctaaatcctatatatc

SEQ ID NO: 30565 - DNA, 42 bp, Homo sapiens
  source 1..42: mol_type = genomic DNA
ttgtcaaagttaaattataggctaaatcctatatatcttacc

SEQ ID NO: 30566 - DNA, 16 bp, Homo sapiens
  source 1..16: mol_type = genomic DNA
ttgtgaatctgacaac

SEQ ID NO: 30567 - DNA, 17 bp, Homo sapiens
  source 1..17: mol_type = genomic DNA
ttgtgaatctgacaaca

SEQ ID NO: 30568 - DNA, 18 bp, Homo sapiens
  source 1..18: mol_type = genomic DNA
ttgtgaatctgacaacag

SEQ ID NO: 30569 - DNA, 19 bp, Homo sapiens
  source 1..19: mol_type = genomic DNA
ttgtgaatctgacaacaga

SEQ ID NO: 30570 - DNA, 20 bp, Homo sapiens
  source 1..20: mol_type = genomic DNA
ttgtgaatctgacaacagag

SEQ ID NO: 30571 - DNA, 21 bp, Homo sapiens
  source 1..21: mol_type = genomic DNA
ttgtgaatctgacaacagagg

SEQ ID NO: 30572 - DNA, 22 bp, Homo sapiens
  source 1..22: mol_type = genomic DNA
ttgtgaatctgacaacagaggc

SEQ ID NO: 30573 - DNA, 23 bp, Homo sapiens
  source 1..23: mol_type = genomic DNA
ttgtgaatctgacaacagaggct

SEQ ID NO: 30574 - DNA, 24 bp, Homo sapiens
  source 1..24: mol_type = genomic DNA
ttgtgaatctgacaacagaggctt

SEQ ID NO: 30575 - DNA, 25 bp, Homo sapiens
  source 1..25: mol_type = genomic DNA
ttgtgaatctgacaacagaggctta

SEQ ID NO: 30576 - DNA, 26 bp, Homo sapiens
  source 1..26: mol_type = genomic DNA
ttgtgaatctgacaacagaggcttac

SEQ ID NO: 30577 - DNA, 27 bp, Homo sapiens
  source 1..27: mol_type = genomic DNA
ttgtgaatctgacaacagaggcttacg

SEQ ID NO: 30578 - DNA, 28 bp, Homo sapiens
  source 1..28: mol_type = genomic DNA
ttgtgaatctgacaacagaggcttacga

SEQ ID NO: 30579 - DNA, 29 bp, Homo sapiens
  source 1..29: mol_type = genomic DNA
ttgtgaatctgacaacagaggcttacgac

SEQ ID NO: 30580 - DNA, 30 bp, Homo sapiens
  source 1..30: mol_type = genomic DNA
ttgtgaatctgacaacagaggcttacgacc

SEQ ID NO: 30581 - DNA, 31 bp, Homo sapiens
  source 1..31: mol_type = genomic DNA
ttgtgaatctgacaacagaggcttacgaccc

SEQ ID NO: 30582 - DNA, 32 bp, Homo sapiens
  source 1..32: mol_type = genomic DNA
ttgtgaatctgacaacagaggcttacgacccc

SEQ ID NO: 30583 - DNA, 33 bp, Homo sapiens
  source 1..33: mol_type = genomic DNA
ttgtgaatctgacaacagaggcttacgacccct

SEQ ID NO: 30584 - DNA, 34 bp, Homo sapiens
  source 1..34: mol_type = genomic DNA
ttgtgaatctgacaacagaggcttacgacccctt

SEQ ID NO: 30585 - DNA, 35 bp, Homo sapiens
  source 1..35: mol_type = genomic DNA
ttgtgaatctgacaacagaggcttacgacccctta

SEQ ID NO: 30586 - DNA, 36 bp, Homo sapiens
  source 1..36: mol_type = genomic DNA
ttgtgaatctgacaacagaggcttacgaccccttat

SEQ ID NO: 30587 - DNA, 37 bp, Homo sapiens
  source 1..37: mol_type = genomic DNA
ttgtgaatctgacaacagaggcttacgaccccttatt

SEQ ID NO: 30588 - DNA, 38 bp, Homo sapiens
  source 1..38: mol_type = genomic DNA
ttgtgaatctgacaacagaggcttacgaccccttattt

SEQ ID NO: 30589 - DNA, 39 bp, Homo sapiens
  source 1..39: mol_type = genomic DNA
ttgtgaatctgacaacagaggcttacgaccccttattta

SEQ ID NO: 30590 - DNA, 40 bp, Homo sapiens
  source 1..40: mol_type = genomic DNA
ttgtgaatctgacaacagaggcttacgaccccttatttac

SEQ ID NO: 30591 - DNA, 41 bp, Homo sapiens
  source 1..41: mol_type = genomic DNA
ttgtgaatctgacaacagaggcttacgaccccttatttacc

SEQ ID NO: 30592 - DNA, 42 bp, Homo sapiens
  source 1..42: mol_type = genomic DNA
ttgtgaatctgacaacagaggcttacgaccccttatttaccc

SEQ ID NO: 30593 - DNA, 43 bp, Homo sapiens
  source 1..43: mol_type = genomic DNA
ttgtgaatctgacaacagaggcttacgaccccttatttacccc

SEQ ID NO: 30594 - DNA, 44 bp, Homo sapiens
  source 1..44: mol_type = genomic DNA
ttgtgaatctgacaacagaggcttacgaccccttatttacccca

SEQ ID NO: 30595 - DNA, 26 bp, Homo sapiens
  source 1..26: mol_type = genomic DNA
ttgtgagttcgagcctcacctggagc

SEQ ID NO: 30596 - DNA, 27 bp, Homo sapiens
  source 1..27: mol_type = genomic DNA
ttgtgagttcgagcctcacctggagca

SEQ ID NO: 30597 - DNA, 28 bp, Homo sapiens
  source 1..28: mol_type = genomic DNA
ttgtgagttcgagcctcacctggagcac

SEQ ID NO: 30598 - DNA, 29 bp, Homo sapiens
  source 1..29: mol_type = genomic DNA
ttgtgagttcgagcctcacctggagcacc

SEQ ID NO: 30599 - DNA, 30 bp, Homo sapiens
  source 1..30: mol_type = genomic DNA
ttgtgagttcgagcctcacctggagcacca

SEQ ID NO: 30600 - DNA, 25 bp, Homo sapiens
  source 1..25: mol_type = genomic DNA
ttgtgagttcgatcctcacctggag

SEQ ID NO: 30601 - DNA, 26 bp, Homo sapiens
  source 1..26: mol_type = genomic DNA
ttgtgagttcgatcctcacctggagc

SEQ ID NO: 30602 - DNA, 28 bp, Homo sapiens
  source 1..28: mol_type = genomic DNA
ttgtgagttcgatcctcacctggagcac

SEQ ID NO: 30603 - DNA, 17 bp, Homo sapiens
  source 1..17: mol_type = genomic DNA
ttgtgctttgcacgcgt

SEQ ID NO: 30604 - DNA, 21 bp, Homo sapiens
  source 1..21: mol_type = genomic DNA
ttgtgctttgcacgcgtgggt

SEQ ID NO: 30605 - DNA, 23 bp, Homo sapiens
  source 1..23: mol_type = genomic DNA
ttgtgctttgcacgcgtgggttc

SEQ ID NO: 30606 - DNA, 24 bp, Homo sapiens
  source 1..24: mol_type = genomic DNA
ttgtgctttgcacgcgtgggttcg

SEQ ID NO: 30607 - DNA, 42 bp, Homo sapiens
  source 1..42: mol_type = genomic DNA
ttgtgctttgcacgcgtgggttcgaatcccatcctcgtcgcc

SEQ ID NO: 30608 - DNA, 43 bp, Homo sapiens
  source 1..43: mol_type = genomic DNA
ttgtgctttgcacgcgtgggttcgaatcccatcctcgtcgcca

SEQ ID NO: 30609 - DNA, 17 bp, Homo sapiens
  source 1..17: mol_type = genomic DNA
ttgtggccgcagcaacc

SEQ ID NO: 30610 - DNA, 18 bp, Homo sapiens
  source 1..18: mol_type = genomic DNA
ttgtggccgcagcaacct

SEQ ID NO: 30611 - DNA, 35 bp, Homo sapiens
  source 1..35: mol_type = genomic DNA
ttgtggccgcagcaacctcggttcgaatccgagtc

SEQ ID NO: 30612 - DNA, 38 bp, Homo sapiens
  source 1..38: mol_type = genomic DNA
ttgtggccgcagcaacctcggttcgaatccgagtcacg

SEQ ID NO: 30613 - DNA, 27 bp, Homo sapiens
  source 1..27: mol_type = genomic DNA
ttgtgggttcgaatcccaccagagtcg

SEQ ID NO: 30614 - DNA, 28 bp, Homo sapiens
  source 1..28: mol_type = genomic DNA
ttgtgggttcgaatcccaccagagtcgc

SEQ ID NO: 30615 - DNA, 29 bp, Homo sapiens
  source 1..29: mol_type = genomic DNA
ttgtgggttcgaatcccaccagagtcgcc

SEQ ID NO: 30616 - DNA, 30 bp, Homo sapiens
  source 1..30: mol_type = genomic DNA
ttgtgggttcgaatcccaccagagtcgcca

SEQ ID NO: 30617 - DNA, 28 bp, Homo sapiens
  source 1..28: mol_type = genomic DNA
ttgtgggttcgagtcccaccagagtcgc

SEQ ID NO: 30618 - DNA, 29 bp, Homo sapiens
  source 1..29: mol_type = genomic DNA
ttgtgggttcgagtcccaccagagtcgcc

SEQ ID NO: 30619 - DNA, 30 bp, Homo sapiens
  source 1..30: mol_type = genomic DNA
ttgtgggttcgagtcccaccagagtcgcca

SEQ ID NO: 30620 - DNA, 27 bp, Homo sapiens
  source 1..27: mol_type = genomic DNA
ttgtgggttcgagtcccatctggggtg

SEQ ID NO: 30621 - DNA, 28 bp, Homo sapiens
  source 1..28: mol_type = genomic DNA
ttgtgggttcgagtcccatctggggtgc

SEQ ID NO: 30622 - DNA, 26 bp, Homo sapiens
  source 1..26: mol_type = genomic DNA
ttgtgggttcgagtcccatctgggtc

SEQ ID NO: 30623 - DNA, 27 bp, Homo sapiens
  source 1..27: mol_type = genomic DNA
ttgtgggttcgagtcccatctgggtcg

SEQ ID NO: 30624 - DNA, 28 bp, Homo sapiens
  source 1..28: mol_type = genomic DNA
ttgtgggttcgagtcccatctgggtcgc

SEQ ID NO: 30625 - DNA, 29 bp, Homo sapiens
  source 1..29: mol_type = genomic DNA
ttgtgggttcgagtcccatctgggtcgcc

SEQ ID NO: 30626 - DNA, 30 bp, Homo sapiens
  source 1..30: mol_type = genomic DNA
ttgtgggttcgagtcccatctgggtcgcca

SEQ ID NO: 30627 - DNA, 16 bp, Homo sapiens
  source 1..16: mol_type = genomic DNA
ttgtgggtttaagtcc

SEQ ID NO: 30628 - DNA, 17 bp, Homo sapiens
  source 1..17: mol_type = genomic DNA
ttgtgggtttaagtccc

SEQ ID NO: 30629 - DNA, 20 bp, Homo sapiens
  source 1..20: mol_type = genomic DNA
ttgtgggtttaagtcccatt

SEQ ID NO: 30630 - DNA, 21 bp, Homo sapiens
  source 1..21: mol_type = genomic DNA
ttgtgggtttaagtcccattg

SEQ ID NO: 30631 - DNA, 24 bp, Homo sapiens
  source 1..24: mol_type = genomic DNA
ttgtgggtttaagtcccattggtc

SEQ ID NO: 30632 - DNA, 25 bp, Homo sapiens
  source 1..25: mol_type = genomic DNA
ttgtgggtttaagtcccattggtct

SEQ ID NO: 30633 - DNA, 26 bp, Homo sapiens
  source 1..26: mol_type = genomic DNA
ttgtgggtttaagtcccattggtcta

SEQ ID NO: 30634 - DNA, 27 bp, Homo sapiens
  source 1..27: mol_type = genomic DNA
ttgtgggtttaagtcccattggtctag

SEQ ID NO: 30635 - DNA, 28 bp, Homo sapiens
  source 1..28: mol_type = genomic DNA
ttgtgggtttaagtcccattggtctagc

SEQ ID NO: 30636 - DNA, 29 bp, Homo sapiens
  source 1..29: mol_type = genomic DNA
ttgtgggtttaagtcccattggtctagcc

SEQ ID NO: 30637 - DNA, 30 bp, Homo sapiens
  source 1..30: mol_type = genomic DNA
ttgtgggtttaagtcccattggtctagcca

SEQ ID NO: 30638 - DNA, 25 bp, Homo sapiens
  source 1..25: mol_type = genomic DNA
tttaaacaaaacgaatgatttcgac

SEQ ID NO: 30639 - DNA, 26 bp, Homo sapiens
  source 1..26: mol_type = genomic DNA
tttaaacaaaacgaatgatttcgact

SEQ ID NO: 30640 - DNA, 27 bp, Homo sapiens
  source 1..27: mol_type = genomic DNA
tttaaacaaaacgaatgatttcgactc

SEQ ID NO: 30641 - DNA, 29 bp, Homo sapiens
  source 1..29: mol_type = genomic DNA
tttaaacaaaacgaatgatttcgactcat

SEQ ID NO: 30642 - DNA, 16 bp, Homo sapiens
  source 1..16: mol_type = genomic DNA
tttaaaggataacagc

SEQ ID NO: 30643 - DNA, 17 bp, Homo sapiens
  source 1..17: mol_type = genomic DNA
tttaaaggataacagct

SEQ ID NO: 30644 - DNA, 25 bp, Homo sapiens
  source 1..25: mol_type = genomic DNA
tttaaaggataacagctatccattg

SEQ ID NO: 30645 - DNA, 28 bp, Homo sapiens
  source 1..28: mol_type = genomic DNA
tttaaaggataacagctatccattggtc

SEQ ID NO: 30646 - DNA, 29 bp, Homo sapiens
  source 1..29: mol_type = genomic DNA
tttaaaggataacagctatccattggtct

SEQ ID NO: 30647 - DNA, 30 bp, Homo sapiens
  source 1..30: mol_type = genomic DNA
tttaaaggataacagctatccattggtctt

SEQ ID NO: 30648 - DNA, 31 bp, Homo sapiens
  source 1..31: mol_type = genomic DNA
tttaaaggataacagctatccattggtctta

SEQ ID NO: 30649 - DNA, 32 bp, Homo sapiens
  source 1..32: mol_type = genomic DNA
tttaaaggataacagctatccattggtcttag

SEQ ID NO: 30650 - DNA, 19 bp, Homo sapiens
  source 1..19: mol_type = genomic DNA
tttaaattagaatcttagc

SEQ ID NO: 30651 - DNA, 20 bp, Homo sapiens
  source 1..20: mol_type = genomic DNA
tttaaattagaatcttagct

SEQ ID NO: 30652 - DNA, 21 bp, Homo sapiens
  source 1..21: mol_type = genomic DNA
tttaaattagaatcttagctt

SEQ ID NO: 30653 - DNA, 22 bp, Homo sapiens
  source 1..22: mol_type = genomic DNA
tttaaattagaatcttagcttt

SEQ ID NO: 30654 - DNA, 23 bp, Homo sapiens
  source 1..23: mol_type = genomic DNA
tttaaattagaatcttagctttg

SEQ ID NO: 30655 - DNA, 24 bp, Homo sapiens
  source 1..24: mol_type = genomic DNA
tttaaattagaatcttagctttgg

SEQ ID NO: 30656 - DNA, 29 bp, Homo sapiens
  source 1..29: mol_type = genomic DNA
tttaaattagaatcttagctttgggtgct

SEQ ID NO: 30657 - DNA, 31 bp, Homo sapiens
  source 1..31: mol_type = genomic DNA
tttaaattagaatcttagctttgggtgctaa

SEQ ID NO: 30658 - DNA, 41 bp, Homo sapiens
  source 1..41: mol_type = genomic DNA
tttaaattagaatcttagctttgggtgctaatggtggagtt

SEQ ID NO: 30659 - DNA, 42 bp, Homo sapiens
  source 1..42: mol_type = genomic DNA
tttaaattagaatcttagctttgggtgctaatggtggagtta

SEQ ID NO: 30660 - DNA, 19 bp, Homo sapiens
  source 1..19: mol_type = genomic DNA
tttaaccaaaacatcagat

SEQ ID NO: 30661 - DNA, 20 bp, Homo sapiens
  source 1..20: mol_type = genomic DNA
tttaaccaaaacatcagatt

SEQ ID NO: 30662 - DNA, 22 bp, Homo sapiens
  source 1..22: mol_type = genomic DNA
tttaaccaaaacatcagattgt

SEQ ID NO: 30663 - DNA, 23 bp, Homo sapiens
  source 1..23: mol_type = genomic DNA
tttaaccaaaacatcagattgtg

SEQ ID NO: 30664 - DNA, 24 bp, Homo sapiens
  source 1..24: mol_type = genomic DNA
tttaaccaaaacatcagattgtga

SEQ ID NO: 30665 - DNA, 25 bp, Homo sapiens
  source 1..25: mol_type = genomic DNA
tttaaccaaaacatcagattgtgaa

SEQ ID NO: 30666 - DNA, 26 bp, Homo sapiens
  source 1..26: mol_type = genomic DNA
tttaaccaaaacatcagattgtgaat

SEQ ID NO: 30667 - DNA, 27 bp, Homo sapiens
  source 1..27: mol_type = genomic DNA
tttaaccaaaacatcagattgtgaatc

SEQ ID NO: 30668 - DNA, 28 bp, Homo sapiens
  source 1..28: mol_type = genomic DNA
tttaaccaaaacatcagattgtgaatct

SEQ ID NO: 30669 - DNA, 29 bp, Homo sapiens
  source 1..29: mol_type = genomic DNA
tttaaccaaaacatcagattgtgaatctg

SEQ ID NO: 30670 - DNA, 30 bp, Homo sapiens
  source 1..30: mol_type = genomic DNA
tttaaccaaaacatcagattgtgaatctga

SEQ ID NO: 30671 - DNA, 32 bp, Homo sapiens
  source 1..32: mol_type = genomic DNA
tttaaccaaaacatcagattgtgaatctgaca

SEQ ID NO: 30672 - DNA, 33 bp, Homo sapiens
  source 1..33: mol_type = genomic DNA
tttaaccaaaacatcagattgtgaatctgacaa

SEQ ID NO: 30673 - DNA, 34 bp, Homo sapiens
  source 1..34: mol_type = genomic DNA
tttaaccaaaacatcagattgtgaatctgacaac

SEQ ID NO: 30674 - DNA, 35 bp, Homo sapiens
  source 1..35: mol_type = genomic DNA
tttaaccaaaacatcagattgtgaatctgacaaca

SEQ ID NO: 30675 - DNA, 36 bp, Homo sapiens
  source 1..36: mol_type = genomic DNA
tttaaccaaaacatcagattgtgaatctgacaacag

SEQ ID NO: 30676 - DNA, 37 bp, Homo sapiens
  source 1..37: mol_type = genomic DNA
tttaaccaaaacatcagattgtgaatctgacaacaga

SEQ ID NO: 30677 - DNA, 39 bp, Homo sapiens
  source 1..39: mol_type = genomic DNA
tttaaccaaaacatcagattgtgaatctgacaacagagg

SEQ ID NO: 30678 - DNA, 40 bp, Homo sapiens
  source 1..40: mol_type = genomic DNA
tttaaccaaaacatcagattgtgaatctgacaacagaggc

SEQ ID NO: 30679 - DNA, 41 bp, Homo sapiens
  source 1..41: mol_type = genomic DNA
tttaaccaaaacatcagattgtgaatctgacaacagaggct

SEQ ID NO: 30680 - DNA, 44 bp, Homo sapiens
  source 1..44: mol_type = genomic DNA
tttaaccaaaacatcagattgtgaatctgacaacagaggcttac

SEQ ID NO: 30681 - DNA, 17 bp, Homo sapiens
  source 1..17: mol_type = genomic DNA
tttaagtcccattggtc

SEQ ID NO: 30682 - DNA, 18 bp, Homo sapiens
  source 1..18: mol_type = genomic DNA
tttaagtcccattggtct

SEQ ID NO: 30683 - DNA, 19 bp, Homo sapiens
  source 1..19: mol_type = genomic DNA
tttaagtcccattggtcta

SEQ ID NO: 30684 - DNA, 21 bp, Homo sapiens
  source 1..21: mol_type = genomic DNA
tttaagtcccattggtctagc

SEQ ID NO: 30685 - DNA, 22 bp, Homo sapiens
  source 1..22: mol_type = genomic DNA
tttaagtcccattggtctagcc

SEQ ID NO: 30686 - DNA, 23 bp, Homo sapiens
  source 1..23: mol_type = genomic DNA
tttaagtcccattggtctagcca

SEQ ID NO: 30687 - DNA, 17 bp, Homo sapiens
  source 1..17: mol_type = genomic DNA
tttaagttaaagattaa

SEQ ID NO: 30688 - DNA, 18 bp, Homo sapiens
  source 1..18: mol_type = genomic DNA
tttaagttaaagattaag

SEQ ID NO: 30689 - DNA, 19 bp, Homo sapiens
  source 1..19: mol_type = genomic DNA
tttaagttaaagattaaga

SEQ ID NO: 30690 - DNA, 20 bp, Homo sapiens
  source 1..20: mol_type = genomic DNA
tttaagttaaagattaagag

SEQ ID NO: 30691 - DNA, 21 bp, Homo sapiens
  source 1..21: mol_type = genomic DNA
tttaagttaaagattaagaga

SEQ ID NO: 30692 - DNA, 22 bp, Homo sapiens
  source 1..22: mol_type = genomic DNA
tttaagttaaagattaagagaa

SEQ ID NO: 30693 - DNA, 23 bp, Homo sapiens
  source 1..23: mol_type = genomic DNA
tttaagttaaagattaagagaac

SEQ ID NO: 30694 - DNA, 24 bp, Homo sapiens
  source 1..24: mol_type = genomic DNA
tttaagttaaagattaagagaacc

SEQ ID NO: 30695 - DNA, 25 bp, Homo sapiens
  source 1..25: mol_type = genomic DNA
tttaagttaaagattaagagaacca

SEQ ID NO: 30696 - DNA, 26 bp, Homo sapiens
  source 1..26: mol_type = genomic DNA
tttaagttaaagattaagagaaccaa

SEQ ID NO: 30697 - DNA, 27 bp, Homo sapiens
  source 1..27: mol_type = genomic DNA
tttaagttaaagattaagagaaccaac

SEQ ID NO: 30698 - DNA, 28 bp, Homo sapiens
  source 1..28: mol_type = genomic DNA
tttaagttaaagattaagagaaccaaca

SEQ ID NO: 30699 - DNA, 29 bp, Homo sapiens
  source 1..29: mol_type = genomic DNA
tttaagttaaagattaagagaaccaacac

SEQ ID NO: 30700 - DNA, 30 bp, Homo sapiens
  source 1..30: mol_type = genomic DNA
tttaagttaaagattaagagaaccaacacc

SEQ ID NO: 30701 - DNA, 31 bp, Homo sapiens
  source 1..31: mol_type = genomic DNA
tttaagttaaagattaagagaaccaacacct

SEQ ID NO: 30702 - DNA, 32 bp, Homo sapiens
  source 1..32: mol_type = genomic DNA
tttaagttaaagattaagagaaccaacacctc

SEQ ID NO: 30703 - DNA, 33 bp, Homo sapiens
  source 1..33: mol_type = genomic DNA
tttaagttaaagattaagagaaccaacacctct

SEQ ID NO: 30704 - DNA, 34 bp, Homo sapiens
  source 1..34: mol_type = genomic DNA
tttaagttaaagattaagagaaccaacacctctt

SEQ ID NO: 30705 - DNA, 35 bp, Homo sapiens
  source 1..35: mol_type = genomic DNA
tttaagttaaagattaagagaaccaacacctcttt

SEQ ID NO: 30706 - DNA, 39 bp, Homo sapiens
  source 1..39: mol_type = genomic DNA
tttaagttaaagattaagagaaccaacacctctttacag

SEQ ID NO: 30707 - DNA, 40 bp, Homo sapiens
  source 1..40: mol_type = genomic DNA
tttaagttaaagattaagagaaccaacacctctttacagt

SEQ ID NO: 30708 - DNA, 41 bp, Homo sapiens
  source 1..41: mol_type = genomic DNA
tttaagttaaagattaagagaaccaacacctctttacagtg

SEQ ID NO: 30709 - DNA, 42 bp, Homo sapiens
  source 1..42: mol_type = genomic DNA
tttaagttaaagattaagagaaccaacacctctttacagtga

SEQ ID NO: 30710 - DNA, 43 bp, Homo sapiens
  source 1..43: mol_type = genomic DNA
tttaagttaaagattaagagaaccaacacctctttacagtgac

SEQ ID NO: 30711 - DNA, 44 bp, Homo sapiens
  source 1..44: mol_type = genomic DNA
tttaagttaaagattaagagaaccaacacctctttacagtgacc

SEQ ID NO: 30712 - DNA, 45 bp, Homo sapiens
  source 1..45: mol_type = genomic DNA
tttaagttaaagattaagagaaccaacacctctttacagtgacca

SEQ ID NO: 30713 - DNA, 16 bp, Homo sapiens
  source 1..16: mol_type = genomic DNA
tttaatctgagggtcc

SEQ ID NO: 30714 - DNA, 35 bp, Homo sapiens
  source 1..35: mol_type = genomic DNA
tttaatctgagggtccagggttcaagtccctgttc

SEQ ID NO: 30715 - DNA, 43 bp, Homo sapiens
  source 1..43: mol_type = genomic DNA
tttaatctgagggtccagggttcaagtccctgttcgggcgcca

SEQ ID NO: 30716 - DNA, 33 bp, Homo sapiens
  source 1..33: mol_type = genomic DNA
tttaatctgagggtccagggttcatgtccctgt

SEQ ID NO: 30717 - DNA, 16 bp, Homo sapiens
  source 1..16: mol_type = genomic DNA
tttacaatcagaggtt

SEQ ID NO: 30718 - DNA, 18 bp, Homo sapiens
  source 1..18: mol_type = genomic DNA
tttacacgcagaaggtcc

SEQ ID NO: 30719 - DNA, 19 bp, Homo sapiens
  source 1..19: mol_type = genomic DNA
tttacacgcagaaggtcct

SEQ ID NO: 30720 - DNA, 20 bp, Homo sapiens
  source 1..20: mol_type = genomic DNA
tttacacgcagaaggtcctg

SEQ ID NO: 30721 - DNA, 40 bp, Homo sapiens
  source 1..40: mol_type = genomic DNA
tttacacgcagaaggtcctgggttcgagccccagtggaac

SEQ ID NO: 30722 - DNA, 44 bp, Homo sapiens
  source 1..44: mol_type = genomic DNA
tttacacgcagaaggtcctgggttcgagccccagtggaaccacc

SEQ ID NO: 30723 - DNA, 45 bp, Homo sapiens
  source 1..45: mol_type = genomic DNA
tttacacgcagaaggtcctgggttcgagccccagtggaaccacca

SEQ ID NO: 30724 - DNA, 16 bp, Homo sapiens
  source 1..16: mol_type = genomic DNA
tttacagtcagaggtt

SEQ ID NO: 30725 - DNA, 17 bp, Homo sapiens
  source 1..17: mol_type = genomic DNA
tttacagtcagaggttc

SEQ ID NO: 30726 - DNA, 18 bp, Homo sapiens
  source 1..18: mol_type = genomic DNA
tttacagtcagaggttca

SEQ ID NO: 30727 - DNA, 19 bp, Homo sapiens
  source 1..19: mol_type = genomic DNA
tttacagtcagaggttcaa

SEQ ID NO: 30728 - DNA, 20 bp, Homo sapiens
  source 1..20: mol_type = genomic DNA
tttacagtcagaggttcaat

SEQ ID NO: 30729 - DNA, 22 bp, Homo sapiens
  source 1..22: mol_type = genomic DNA
tttacagtcagaggttcaattc

SEQ ID NO: 30730 - DNA, 23 bp, Homo sapiens
  source 1..23: mol_type = genomic DNA
tttacagtcagaggttcaattcc

SEQ ID NO: 30731 - DNA, 24 bp, Homo sapiens
  source 1..24: mol_type = genomic DNA
tttacagtcagaggttcaattcct

SEQ ID NO: 30732 - DNA, 25 bp, Homo sapiens
  source 1..25: mol_type = genomic DNA
tttacagtcagaggttcaattcctc

SEQ ID NO: 30733 - DNA, 26 bp, Homo sapiens
  source 1..26: mol_type = genomic DNA
tttacagtcagaggttcaattcctct

SEQ ID NO: 30734 - DNA, 27 bp, Homo sapiens
  source 1..27: mol_type = genomic DNA
tttacagtcagaggttcaattcctctt

SEQ ID NO: 30735 - DNA, 28 bp, Homo sapiens
  source 1..28: mol_type = genomic DNA
tttacagtcagaggttcaattcctcttc

SEQ ID NO: 30736 - DNA, 29 bp, Homo sapiens
  source 1..29: mol_type = genomic DNA
tttacagtcagaggttcaattcctcttct

SEQ ID NO: 30737 - DNA, 35 bp, Homo sapiens
  source 1..35: mol_type = genomic DNA
tttacagtcagaggttcaattcctcttcttaacac

SEQ ID NO: 30738 - DNA, 16 bp, Homo sapiens
  source 1..16: mol_type = genomic DNA
tttagacgggctcaca

SEQ ID NO: 30739 - DNA, 17 bp, Homo sapiens
  source 1..17: mol_type = genomic DNA
tttagacgggctcacat

SEQ ID NO: 30740 - DNA, 18 bp, Homo sapiens
  source 1..18: mol_type = genomic DNA
tttagacgggctcacatc

SEQ ID NO: 30741 - DNA, 19 bp, Homo sapiens
  source 1..19: mol_type = genomic DNA
tttagacgggctcacatca

SEQ ID NO: 30742 - DNA, 20 bp, Homo sapiens
  source 1..20: mol_type = genomic DNA
tttagacgggctcacatcac

SEQ ID NO: 30743 - DNA, 21 bp, Homo sapiens
  source 1..21: mol_type = genomic DNA
tttagacgggctcacatcacc

SEQ ID NO: 30744 - DNA, 22 bp, Homo sapiens
  source 1..22: mol_type = genomic DNA
tttagacgggctcacatcaccc

SEQ ID NO: 30745 - DNA, 23 bp, Homo sapiens
  source 1..23: mol_type = genomic DNA
tttagacgggctcacatcacccc

SEQ ID NO: 30746 - DNA, 24 bp, Homo sapiens
  source 1..24: mol_type = genomic DNA
tttagacgggctcacatcacccca

SEQ ID NO: 30747 - DNA, 25 bp, Homo sapiens
  source 1..25: mol_type = genomic DNA
tttagacgggctcacatcaccccat

SEQ ID NO: 30748 - DNA, 26 bp, Homo sapiens
  source 1..26: mol_type = genomic DNA
tttagacgggctcacatcaccccata

SEQ ID NO: 30749 - DNA, 27 bp, Homo sapiens
  source 1..27: mol_type = genomic DNA
tttagacgggctcacatcaccccataa

SEQ ID NO: 30750 - DNA, 28 bp, Homo sapiens
  source 1..28: mol_type = genomic DNA
tttagacgggctcacatcaccccataaa

SEQ ID NO: 30751 - DNA, 29 bp, Homo sapiens
  source 1..29: mol_type = genomic DNA
tttagacgggctcacatcaccccataaac

SEQ ID NO: 30752 - DNA, 30 bp, Homo sapiens
  source 1..30: mol_type = genomic DNA
tttagacgggctcacatcaccccataaaca

SEQ ID NO: 30753 - DNA, 31 bp, Homo sapiens
  source 1..31: mol_type = genomic DNA
tttagacgggctcacatcaccccataaacac

SEQ ID NO: 30754 - DNA, 32 bp, Homo sapiens
  source 1..32: mol_type = genomic DNA
tttagacgggctcacatcaccccataaacacc

SEQ ID NO: 30755 - DNA, 33 bp, Homo sapiens
  source 1..33: mol_type = genomic DNA
tttagacgggctcacatcaccccataaacacca

SEQ ID NO: 30756 - DNA, 16 bp, Homo sapiens
  source 1..16: mol_type = genomic DNA
tttagagccagactgc

SEQ ID NO: 30757 - DNA, 17 bp, Homo sapiens
  source 1..17: mol_type = genomic DNA
tttagagccagactgcc

SEQ ID NO: 30758 - DNA, 17 bp, Homo sapiens
  source 1..17: mol_type = genomic DNA
tttaggctccagtcatt

SEQ ID NO: 30759 - DNA, 18 bp, Homo sapiens
  source 1..18: mol_type = genomic DNA
tttaggctccagtcattt

SEQ ID NO: 30760 - DNA, 19 bp, Homo sapiens
  source 1..19: mol_type = genomic DNA
tttaggctccagtcatttc

SEQ ID NO: 30761 - DNA, 20 bp, Homo sapiens
  source 1..20: mol_type = genomic DNA
tttaggctccagtcatttcg

SEQ ID NO: 30762 - DNA, 47 bp, Homo sapiens
  source 1..47: mol_type = genomic DNA
tttaggctccagtcatttcgatggcgtgggttcgaatcccaccgctg

SEQ ID NO: 30763 - DNA, 17 bp, Homo sapiens
  source 1..17: mol_type = genomic DNA
tttaggctccagtctct

SEQ ID NO: 30764 - DNA, 18 bp, Homo sapiens
  source 1..18: mol_type = genomic DNA
tttaggctccagtctctt

SEQ ID NO: 30765 - DNA, 19 bp, Homo sapiens
  source 1..19: mol_type = genomic DNA
tttaggctccagtctcttc

SEQ ID NO: 30766 - DNA, 20 bp, Homo sapiens
  source 1..20: mol_type = genomic DNA
tttaggctccagtctcttcg

SEQ ID NO: 30767 - DNA, 18 bp, Homo sapiens
  source 1..18: mol_type = genomic DNA
tttaggttaaatacagac

SEQ ID NO: 30768 - DNA, 30 bp, Homo sapiens
  source 1..30: mol_type = genomic DNA
tttaggttaaatacagaccaagagccttca

SEQ ID NO: 30769 - DNA, 24 bp, Homo sapiens
  source 1..24: mol_type = genomic DNA
tttagtataaatagtaccgttaac

SEQ ID NO: 30770 - DNA, 25 bp, Homo sapiens
  source 1..25: mol_type = genomic DNA
tttagtataaatagtaccgttaact

SEQ ID NO: 30771 - DNA, 27 bp, Homo sapiens
  source 1..27: mol_type = genomic DNA
tttagtataaatagtaccgttaacttc

SEQ ID NO: 30772 - DNA, 28 bp, Homo sapiens
  source 1..28: mol_type = genomic DNA
tttagtataaatagtaccgttaacttcc

SEQ ID NO: 30773 - DNA, 17 bp, Homo sapiens
  source 1..17: mol_type = genomic DNA
tttatgtagcttacctc

SEQ ID NO: 30774 - DNA, 18 bp, Homo sapiens
  source 1..18: mol_type = genomic DNA
tttatgtagcttacctcc

SEQ ID NO: 30775 - DNA, 19 bp, Homo sapiens
  source 1..19: mol_type = genomic DNA
tttatgtagcttacctcct

SEQ ID NO: 30776 - DNA, 23 bp, Homo sapiens
  source 1..23: mol_type = genomic DNA
tttatgtagcttacctcctcaaa

SEQ ID NO: 30777 - DNA, 24 bp, Homo sapiens
  source 1..24: mol_type = genomic DNA
tttatgtagcttacctcctcaaag

SEQ ID NO: 30778 - DNA, 29 bp, Homo sapiens
  source 1..29: mol_type = genomic DNA
tttatgtagcttacctcctcaaagcaata

SEQ ID NO: 30779 - DNA, 17 bp, Homo sapiens
  source 1..17: mol_type = genomic DNA
tttcaacttaacttgac

SEQ ID NO: 30780 - DNA, 18 bp, Homo sapiens
  source 1..18: mol_type = genomic DNA
tttcaacttaacttgacc

SEQ ID NO: 30781 - DNA, 19 bp, Homo sapiens
  source 1..19: mol_type = genomic DNA
tttcaacttaacttgaccg

SEQ ID NO: 30782 - DNA, 21 bp, Homo sapiens
  source 1..21: mol_type = genomic DNA
tttcaacttaacttgaccgct

SEQ ID NO: 30783 - DNA, 22 bp, Homo sapiens
  source 1..22: mol_type = genomic DNA
tttcaacttaacttgaccgctc

SEQ ID NO: 30784 - DNA, 23 bp, Homo sapiens
  source 1..23: mol_type = genomic DNA
tttcaacttaacttgaccgctct

SEQ ID NO: 30785 - DNA, 24 bp, Homo sapiens
  source 1..24: mol_type = genomic DNA
tttcaacttaacttgaccgctctg

SEQ ID NO: 30786 - DNA, 25 bp, Homo sapiens
  source 1..25: mol_type = genomic DNA
tttcaacttaacttgaccgctctga

SEQ ID NO: 30787 - DNA, 26 bp, Homo sapiens
  source 1..26: mol_type = genomic DNA
tttcaacttaacttgaccgctctgac

SEQ ID NO: 30788 - DNA, 27 bp, Homo sapiens
  source 1..27: mol_type = genomic DNA
tttcaacttaacttgaccgctctgacc

SEQ ID NO: 30789 - DNA, 28 bp, Homo sapiens
  source 1..28: mol_type = genomic DNA
tttcaacttaacttgaccgctctgacca

SEQ ID NO: 30790 - DNA, 36 bp, Homo sapiens
  source 1..36: mol_type = genomic DNA
tttcacccaggcggcccgggttcgactcccggtgtg

SEQ ID NO: 30791 - DNA, 37 bp, Homo sapiens
  source 1..37: mol_type = genomic DNA
tttcacccaggcggcccgggttcgactcccggtgtgg

SEQ ID NO: 30792 - DNA, 38 bp, Homo sapiens
  source 1..38: mol_type = genomic DNA
tttcacccaggcggcccgggttcgactcccggtgtggg

SEQ ID NO: 30793 - DNA, 40 bp, Homo sapiens
  source 1..40: mol_type = genomic DNA
tttcacccaggcggcccgggttcgactcccggtgtgggaa

SEQ ID NO: 30794 - DNA, 41 bp, Homo sapiens
  source 1..41: mol_type = genomic DNA
tttcacccaggcggcccgggttcgactcccggtgtgggaac

SEQ ID NO: 30795 - DNA, 42 bp, Homo sapiens
  source 1..42: mol_type = genomic DNA
tttcacccaggcggcccgggttcgactcccggtgtgggaacc

SEQ ID NO: 30796 - DNA, 43 bp, Homo sapiens
  source 1..43: mol_type = genomic DNA
tttcacccaggcggcccgggttcgactcccggtgtgggaacca

SEQ ID NO: 30797 - DNA, 21 bp, Homo sapiens
  source 1..21: mol_type = genomic DNA
tttcaccgccgcggcccgggt

SEQ ID NO: 30798 - DNA, 43 bp, Homo sapiens
  source 1..43: mol_type = genomic DNA
tttcaccgccgcggcccgggttcgattcccggtcagggaacca

SEQ ID NO: 30799 - DNA, 16 bp, Homo sapiens
  source 1..16: mol_type = genomic DNA
tttcataactttgtca

SEQ ID NO: 30800 - DNA, 17 bp, Homo sapiens
  source 1..17: mol_type = genomic DNA
tttcataactttgtcaa

SEQ ID NO: 30801 - DNA, 19 bp, Homo sapiens
  source 1..19: mol_type = genomic DNA
tttcataactttgtcaaag

SEQ ID NO: 30802 - DNA, 32 bp, Homo sapiens
  source 1..32: mol_type = genomic DNA
tttcataactttgtcaaagttaaattataggc

SEQ ID NO: 30803 - DNA, 33 bp, Homo sapiens
  source 1..33: mol_type = genomic DNA
tttcataactttgtcaaagttaaattataggct

SEQ ID NO: 30804 - DNA, 34 bp, Homo sapiens
  source 1..34: mol_type = genomic DNA
tttcataactttgtcaaagttaaattataggcta

SEQ ID NO: 30805 - DNA, 35 bp, Homo sapiens
  source 1..35: mol_type = genomic DNA
tttcataactttgtcaaagttaaattataggctaa

SEQ ID NO: 30806 - DNA, 36 bp, Homo sapiens
  source 1..36: mol_type = genomic DNA
tttcataactttgtcaaagttaaattataggctaaa

SEQ ID NO: 30807 - DNA, 38 bp, Homo sapiens
  source 1..38: mol_type = genomic DNA
tttcataactttgtcaaagttaaattataggctaaatc

SEQ ID NO: 30808 - DNA, 16 bp, Homo sapiens
  source 1..16: mol_type = genomic DNA
tttcatatcattggtc

SEQ ID NO: 30809 - DNA, 17 bp, Homo sapiens
  source 1..17: mol_type = genomic DNA
tttcatatcattggtcg

SEQ ID NO: 30810 - DNA, 20 bp, Homo sapiens
  source 1..20: mol_type = genomic DNA
tttcatatcattggtcgtgg

SEQ ID NO: 30811 - DNA, 22 bp, Homo sapiens
  source 1..22: mol_type = genomic DNA
tttcatatcattggtcgtggtt

SEQ ID NO: 30812 - DNA, 23 bp, Homo sapiens
  source 1..23: mol_type = genomic DNA
tttcatatcattggtcgtggttg

SEQ ID NO: 30813 - DNA, 25 bp, Homo sapiens
  source 1..25: mol_type = genomic DNA
tttcatatcattggtcgtggttgta

SEQ ID NO: 30814 - DNA, 27 bp, Homo sapiens
  source 1..27: mol_type = genomic DNA
tttcatatcattggtcgtggttgtagt

SEQ ID NO: 30815 - DNA, 28 bp, Homo sapiens
  source 1..28: mol_type = genomic DNA
tttcatatcattggtcgtggttgtagtc

SEQ ID NO: 30816 - DNA, 29 bp, Homo sapiens
  source 1..29: mol_type = genomic DNA
tttcatatcattggtcgtggttgtagtcc

SEQ ID NO: 30817 - DNA, 30 bp, Homo sapiens
  source 1..30: mol_type = genomic DNA
tttcatatcattggtcgtggttgtagtccg

SEQ ID NO: 30818 - DNA, 31 bp, Homo sapiens
  source 1..31: mol_type = genomic DNA
tttcatatcattggtcgtggttgtagtccgt

SEQ ID NO: 30819 - DNA, 32 bp, Homo sapiens
  source 1..32: mol_type = genomic DNA
tttcatatcattggtcgtggttgtagtccgtg

SEQ ID NO: 30820 - DNA, 33 bp, Homo sapiens
  source 1..33: mol_type = genomic DNA
tttcatatcattggtcgtggttgtagtccgtgc

SEQ ID NO: 30821 - DNA, 34 bp, Homo sapiens
  source 1..34: mol_type = genomic DNA
tttcatatcattggtcgtggttgtagtccgtgcg

SEQ ID NO: 30822 - DNA, 35 bp, Homo sapiens
  source 1..35: mol_type = genomic DNA
tttcatatcattggtcgtggttgtagtccgtgcga

SEQ ID NO: 30823 - DNA, 36 bp, Homo sapiens
  source 1..36: mol_type = genomic DNA
tttcatatcattggtcgtggttgtagtccgtgcgag

SEQ ID NO: 30824 - DNA, 37 bp, Homo sapiens
  source 1..37: mol_type = genomic DNA
tttcatatcattggtcgtggttgtagtccgtgcgaga

SEQ ID NO: 30825 - DNA, 38 bp, Homo sapiens
  source 1..38: mol_type = genomic DNA
tttcatatcattggtcgtggttgtagtccgtgcgagaa

SEQ ID NO: 30826 - DNA, 39 bp, Homo sapiens
  source 1..39: mol_type = genomic DNA
tttcatatcattggtcgtggttgtagtccgtgcgagaat

SEQ ID NO: 30827 - DNA, 40 bp, Homo sapiens
  source 1..40: mol_type = genomic DNA
tttcatatcattggtcgtggttgtagtccgtgcgagaata

SEQ ID NO: 30828 - DNA, 41 bp, Homo sapiens
  source 1..41: mol_type = genomic DNA
tttcatatcattggtcgtggttgtagtccgtgcgagaatac

SEQ ID NO: 30829 - DNA, 42 bp, Homo sapiens
  source 1..42: mol_type = genomic DNA
tttcatatcattggtcgtggttgtagtccgtgcgagaatacc

SEQ ID NO: 30830 - DNA, 43 bp, Homo sapiens
  source 1..43: mol_type = genomic DNA
tttcatatcattggtcgtggttgtagtccgtgcgagaatacca

SEQ ID NO: 30831 - DNA, 16 bp, Homo sapiens
  source 1..16: mol_type = genomic DNA
tttcatattgaattgc

SEQ ID NO: 30832 - DNA, 17 bp, Homo sapiens
  source 1..17: mol_type = genomic DNA
tttcatattgaattgca

SEQ ID NO: 30833 - DNA, 18 bp, Homo sapiens
  source 1..18: mol_type = genomic DNA
tttcatattgaattgcaa

SEQ ID NO: 30834 - DNA, 20 bp, Homo sapiens
  source 1..20: mol_type = genomic DNA
tttcatattgaattgcaaat

SEQ ID NO: 30835 - DNA, 22 bp, Homo sapiens
  source 1..22: mol_type = genomic DNA
tttcatattgaattgcaaattc

SEQ ID NO: 30836 - DNA, 23 bp, Homo sapiens
  source 1..23: mol_type = genomic DNA
tttcatattgaattgcaaattcg

SEQ ID NO: 30837 - DNA, 26 bp, Homo sapiens
  source 1..26: mol_type = genomic DNA
tttcatattgaattgcaaattcgaag

SEQ ID NO: 30838 - DNA, 34 bp, Homo sapiens
  source 1..34: mol_type = genomic DNA
tttcatattgaattgcaaattcgaagaagcagct

SEQ ID NO: 30839 - DNA, 20 bp, Homo sapiens
  source 1..20: mol_type = genomic DNA
tttccccgcacaggttcgaa

SEQ ID NO: 30840 - DNA, 21 bp, Homo sapiens
  source 1..21: mol_type = genomic DNA
tttccccgcacaggttcgaat

SEQ ID NO: 30841 - DNA, 22 bp, Homo sapiens
  source 1..22: mol_type = genomic DNA
tttccccgcacaggttcgaatc

SEQ ID NO: 30842 - DNA, 23 bp, Homo sapiens
  source 1..23: mol_type = genomic DNA
tttccccgcacaggttcgaatcc

SEQ ID NO: 30843 - DNA, 24 bp, Homo sapiens
  source 1..24: mol_type = genomic DNA
tttccccgcacaggttcgaatcct

SEQ ID NO: 30844 - DNA, 36 bp, Homo sapiens
  source 1..36: mol_type = genomic DNA
tttccccgcacaggttcgaatcctgttcgtgacgcc

SEQ ID NO: 30845 - DNA, 18 bp, Homo sapiens
  source 1..18: mol_type = genomic DNA
tttccccgcgcaggttcg

SEQ ID NO: 30846 - DNA, 20 bp, Homo sapiens
  source 1..20: mol_type = genomic DNA
tttccccgcgcaggttcgaa

SEQ ID NO: 30847 - DNA, 21 bp, Homo sapiens
  source 1..21: mol_type = genomic DNA
tttccccgcgcaggttcgaat

SEQ ID NO: 30848 - DNA, 22 bp, Homo sapiens
  source 1..22: mol_type = genomic DNA
tttccccgcgcaggttcgaatc

SEQ ID NO: 30849 - DNA, 23 bp, Homo sapiens
  source 1..23: mol_type = genomic DNA
tttccccgcgcaggttcgaatcc

SEQ ID NO: 30850 - DNA, 24 bp, Homo sapiens
  source 1..24: mol_type = genomic DNA
tttccccgcgcaggttcgaatcct

SEQ ID NO: 30851 - DNA, 36 bp, Homo sapiens
  source 1..36: mol_type = genomic DNA
tttccccgcgcaggttcgaatcctgccgactacgcc

SEQ ID NO: 30852 - DNA, 37 bp, Homo sapiens
  source 1..37: mol_type = genomic DNA
tttccccgcgcaggttcgaatcctgccgactacgcca

SEQ ID NO: 30853 - DNA, 32 bp, Homo sapiens
  source 1..32: mol_type = genomic DNA
tttccgtagtggagtggttatcacgttcgcct

SEQ ID NO: 30854 - DNA, 16 bp, Homo sapiens
  source 1..16: mol_type = genomic DNA
tttccgtagtgtagcg

SEQ ID NO: 30855 - DNA, 21 bp, Homo sapiens
  source 1..21: mol_type = genomic DNA
tttccgtagtgtagcggttat

SEQ ID NO: 30856 - DNA, 22 bp, Homo sapiens
  source 1..22: mol_type = genomic DNA
tttccgtagtgtagcggttatc

SEQ ID NO: 30857 - DNA, 25 bp, Homo sapiens
  source 1..25: mol_type = genomic DNA
tttccgtagtgtagcggttatcaca

SEQ ID NO: 30858 - DNA, 27 bp, Homo sapiens
  source 1..27: mol_type = genomic DNA
tttccgtagtgtagcggttatcacatt

SEQ ID NO: 30859 - DNA, 28 bp, Homo sapiens
  source 1..28: mol_type = genomic DNA
tttccgtagtgtagcggttatcacattc

SEQ ID NO: 30860 - DNA, 31 bp, Homo sapiens
  source 1..31: mol_type = genomic DNA
tttccgtagtgtagcggttatcacattcgcc

SEQ ID NO: 30861 - DNA, 32 bp, Homo sapiens
  source 1..32: mol_type = genomic DNA
tttccgtagtgtagcggttatcacattcgcct

SEQ ID NO: 30862 - DNA, 33 bp, Homo sapiens
  source 1..33: mol_type = genomic DNA
tttccgtagtgtagcggttatcacattcgcctc

SEQ ID NO: 30863 - DNA, 34 bp, Homo sapiens
  source 1..34: mol_type = genomic DNA
tttccgtagtgtagcggttatcacattcgcctca

SEQ ID NO: 30864 - DNA, 17 bp, Homo sapiens
  source 1..17: mol_type = genomic DNA
tttccgtagtgtagtgg

SEQ ID NO: 30865 - DNA, 18 bp, Homo sapiens
  source 1..18: mol_type = genomic DNA
tttccgtagtgtagtggt

SEQ ID NO: 30866 - DNA, 21 bp, Homo sapiens
  source 1..21: mol_type = genomic DNA
tttccgtagtgtagtggtcat

SEQ ID NO: 30867 - DNA, 22 bp, Homo sapiens
  source 1..22: mol_type = genomic DNA
tttccgtagtgtagtggtcatc

SEQ ID NO: 30868 - DNA, 23 bp, Homo sapiens
  source 1..23: mol_type = genomic DNA
tttccgtagtgtagtggtcatca

SEQ ID NO: 30869 - DNA, 28 bp, Homo sapiens
  source 1..28: mol_type = genomic DNA
tttccgtagtgtagtggtcatcacgttc

SEQ ID NO: 30870 - DNA, 29 bp, Homo sapiens
  source 1..29: mol_type = genomic DNA
tttccgtagtgtagtggtcatcacgttcg

SEQ ID NO: 30871 - DNA, 30 bp, Homo sapiens
  source 1..30: mol_type = genomic DNA
tttccgtagtgtagtggtcatcacgttcgc

SEQ ID NO: 30872 - DNA, 31 bp, Homo sapiens
  source 1..31: mol_type = genomic DNA
tttccgtagtgtagtggtcatcacgttcgcc

SEQ ID NO: 30873 - DNA, 32 bp, Homo sapiens
  source 1..32: mol_type = genomic DNA
tttccgtagtgtagtggtcatcacgttcgcct

SEQ ID NO: 30874 - DNA, 20 bp, Homo sapiens
  source 1..20: mol_type = genomic DNA
tttccgtagtgtagtggtta

SEQ ID NO: 30875 - DNA, 21 bp, Homo sapiens
  source 1..21: mol_type = genomic DNA
tttccgtagtgtagtggttat

SEQ ID NO: 30876 - DNA, 22 bp, Homo sapiens
  source 1..22: mol_type = genomic DNA
tttccgtagtgtagtggttatc

SEQ ID NO: 30877 - DNA, 23 bp, Homo sapiens
  source 1..23: mol_type = genomic DNA
tttccgtagtgtagtggttatca

SEQ ID NO: 30878 - DNA, 24 bp, Homo sapiens
  source 1..24: mol_type = genomic DNA
tttccgtagtgtagtggttatcac

SEQ ID NO: 30879 - DNA, 25 bp, Homo sapiens
  source 1..25: mol_type = genomic DNA
tttccgtagtgtagtggttatcacg

SEQ ID NO: 30880 - DNA, 27 bp, Homo sapiens
  source 1..27: mol_type = genomic DNA
tttccgtagtgtagtggttatcacgtt

SEQ ID NO: 30881 - DNA, 28 bp, Homo sapiens
  source 1..28: mol_type = genomic DNA
tttccgtagtgtagtggttatcacgttc

SEQ ID NO: 30882 - DNA, 29 bp, Homo sapiens
  source 1..29: mol_type = genomic DNA
tttccgtagtgtagtggttatcacgttcg

SEQ ID NO: 30883 - DNA, 30 bp, Homo sapiens
  source 1..30: mol_type = genomic DNA
tttccgtagtgtagtggttatcacgttcgc

SEQ ID NO: 30884 - DNA, 31 bp, Homo sapiens
  source 1..31: mol_type = genomic DNA
tttccgtagtgtagtggttatcacgttcgcc

SEQ ID NO: 30885 - DNA, 32 bp, Homo sapiens
  source 1..32: mol_type = genomic DNA
tttccgtagtgtagtggttatcacgttcgcct

SEQ ID NO: 30886 - DNA, 34 bp, Homo sapiens
  source 1..34: mol_type = genomic DNA
tttccgtagtgtagtggttatcacgttcgcctaa

SEQ ID NO: 30887 - DNA, 33 bp, Homo sapiens
  source 1..33: mol_type = genomic DNA
tttccgtagtgtagtggttatcacgttcgcctc

SEQ ID NO: 30888 - DNA, 34 bp, Homo sapiens
  source 1..34: mol_type = genomic DNA
tttccgtagtgtagtggttatcacgttcgcctca

SEQ ID NO: 30889 - DNA, 35 bp, Homo sapiens
  source 1..35: mol_type = genomic DNA
tttccgtagtgtagtggttatcacgttcgcctcac

SEQ ID NO: 30890 - DNA, 36 bp, Homo sapiens
  source 1..36: mol_type = genomic DNA
tttccgtagtgtagtggttatcacgttcgcctcaca

SEQ ID NO: 30891 - DNA, 37 bp, Homo sapiens
  source 1..37: mol_type = genomic DNA
tttccgtagtgtagtggttatcacgttcgcctcacac

SEQ ID NO: 30892 - DNA, 38 bp, Homo sapiens
  source 1..38: mol_type = genomic DNA
tttccgtagtgtagtggttatcacgttcgcctcacacg

SEQ ID NO: 30893 - DNA, 39 bp, Homo sapiens
  source 1..39: mol_type = genomic DNA
tttccgtagtgtagtggttatcacgttcgcctcacacgc

SEQ ID NO: 30894 - DNA, 40 bp, Homo sapiens
  source 1..40: mol_type = genomic DNA
tttccgtagtgtagtggttatcacgttcgcctcacacgcg

SEQ ID NO: 30895 - DNA, 41 bp, Homo sapiens
  source 1..41: mol_type = genomic DNA
tttccgtagtgtagtggttatcacgttcgcctcacacgcga

SEQ ID NO: 30896 - DNA, 32 bp, Homo sapiens
  source 1..32: mol_type = genomic DNA
tttccgtagtgtagtggttatcacgtttgcct

SEQ ID NO: 30897 - DNA, 32 bp, Homo sapiens
  source 1..32: mol_type = genomic DNA
tttccgtggtgtagtggttatcacattcgcct

SEQ ID NO: 30898 - DNA, 16 bp, Homo sapiens
  source 1..16: mol_type = genomic DNA
tttcgactcattaaat

SEQ ID NO: 30899 - DNA, 17 bp, Homo sapiens
  source 1..17: mol_type = genomic DNA
tttcgactcattaaatt

SEQ ID NO: 30900 - DNA, 19 bp, Homo sapiens
  source 1..19: mol_type = genomic DNA
tttcgactcattaaattat

SEQ ID NO: 30901 - DNA, 20 bp, Homo sapiens
  source 1..20: mol_type = genomic DNA
tttcgactcattaaattatg

SEQ ID NO: 30902 - DNA, 21 bp, Homo sapiens
  source 1..21: mol_type = genomic DNA
tttcgactcattaaattatga

SEQ ID NO: 30903 - DNA, 22 bp, Homo sapiens
  source 1..22: mol_type = genomic DNA
tttcgactcattaaattatgat

SEQ ID NO: 30904 - DNA, 23 bp, Homo sapiens
  source 1..23: mol_type = genomic DNA
tttcgactcattaaattatgata

SEQ ID NO: 30905 - DNA, 24 bp, Homo sapiens
  source 1..24: mol_type = genomic DNA
tttcgactcattaaattatgataa

SEQ ID NO: 30906 - DNA, 25 bp, Homo sapiens
  source 1..25: mol_type = genomic DNA
tttcgactcattaaattatgataat

SEQ ID NO: 30907 - DNA, 26 bp, Homo sapiens
  source 1..26: mol_type = genomic DNA
tttcgactcattaaattatgataatc

SEQ ID NO: 30908 - DNA, 27 bp, Homo sapiens
  source 1..27: mol_type = genomic DNA
tttcgactcattaaattatgataatca

SEQ ID NO: 30909 - DNA, 28 bp, Homo sapiens
  source 1..28: mol_type = genomic DNA
tttcgactcattaaattatgataatcat

SEQ ID NO: 30910 - DNA, 29 bp, Homo sapiens
  source 1..29: mol_type = genomic DNA
tttcgactcattaaattatgataatcata

SEQ ID NO: 30911 - DNA, 31 bp, Homo sapiens
  source 1..31: mol_type = genomic DNA
tttcgactcattaaattatgataatcatatt

SEQ ID NO: 30912 - DNA, 32 bp, Homo sapiens
  source 1..32: mol_type = genomic DNA
tttcgactcattaaattatgataatcatattt

SEQ ID NO: 30913 - DNA, 33 bp, Homo sapiens
  source 1..33: mol_type = genomic DNA
tttcgactcattaaattatgataatcatattta

SEQ ID NO: 30914 - DNA, 34 bp, Homo sapiens
  source 1..34: mol_type = genomic DNA
tttcgactcattaaattatgataatcatatttac

SEQ ID NO: 30915 - DNA, 35 bp, Homo sapiens
  source 1..35: mol_type = genomic DNA
tttcgactcattaaattatgataatcatatttacc

SEQ ID NO: 30916 - DNA, 36 bp, Homo sapiens
  source 1..36: mol_type = genomic DNA
tttcgactcattaaattatgataatcatatttacca

SEQ ID NO: 30917 - DNA, 37 bp, Homo sapiens
  source 1..37: mol_type = genomic DNA
tttcgactcattaaattatgataatcatatttaccaa

SEQ ID NO: 30918 - DNA, 38 bp, Homo sapiens
  source 1..38: mol_type = genomic DNA
tttcgactcattaaattatgataatcatatttaccaac

SEQ ID NO: 30919 - DNA, 39 bp, Homo sapiens
  source 1..39: mol_type = genomic DNA
tttcgactcattaaattatgataatcatatttaccaacc

SEQ ID NO: 30920 - DNA, 40 bp, Homo sapiens
  source 1..40: mol_type = genomic DNA
tttcgactcattaaattatgataatcatatttaccaacca

SEQ ID NO: 30921 - DNA, 16 bp, Homo sapiens
  source 1..16: mol_type = genomic DNA
tttcgatggcgtgggt

SEQ ID NO: 30922 - DNA, 32 bp, Homo sapiens
  source 1..32: mol_type = genomic DNA
tttcgatggcgtgggttcgaatcccaccgctg

SEQ ID NO: 30923 - DNA, 37 bp, Homo sapiens
  source 1..37: mol_type = genomic DNA
tttcgatggcgtgggttcgaatcccaccgctgccacc

SEQ ID NO: 30924 - DNA, 19 bp, Homo sapiens
  source 1..19: mol_type = genomic DNA
tttgaatccagcgatccga

SEQ ID NO: 30925 - DNA, 20 bp, Homo sapiens
  source 1..20: mol_type = genomic DNA
tttgaatccagcgatccgag

SEQ ID NO: 30926 - DNA, 21 bp, Homo sapiens
  source 1..21: mol_type = genomic DNA
tttgaatccagcgatccgagt

SEQ ID NO: 30927 - DNA, 22 bp, Homo sapiens
  source 1..22: mol_type = genomic DNA
tttgaatccagcgatccgagtt

SEQ ID NO: 30928 - DNA, 23 bp, Homo sapiens
  source 1..23: mol_type = genomic DNA
tttgaatccagcgatccgagttc

SEQ ID NO: 30929 - DNA, 41 bp, Homo sapiens
  source 1..41: mol_type = genomic DNA
tttgaatccagcgatccgagttcaaatctcggtgggacctc

SEQ ID NO: 30930 - DNA, 20 bp, Homo sapiens
  source 1..20: mol_type = genomic DNA
tttgacaacattcaaaaaag

SEQ ID NO: 30931 - DNA, 23 bp, Homo sapiens
  source 1..23: mol_type = genomic DNA
tttgacaacattcaaaaaagagt

SEQ ID NO: 30932 - DNA, 24 bp, Homo sapiens
  source 1..24: mol_type = genomic DNA
tttgacaacattcaaaaaagagta

SEQ ID NO: 30933 - DNA, 25 bp, Homo sapiens
  source 1..25: mol_type = genomic DNA
tttgacaacattcaaaaaagagtac

SEQ ID NO: 30934 - DNA, 26 bp, Homo sapiens
  source 1..26: mol_type = genomic DNA
tttgacaacattcaaaaaagagtacc

SEQ ID NO: 30935 - DNA, 27 bp, Homo sapiens
  source 1..27: mol_type = genomic DNA
tttgacaacattcaaaaaagagtacca

SEQ ID NO: 30936 - DNA, 24 bp, Homo sapiens
  source 1..24: mol_type = genomic DNA
tttgactgcagatcaagaggtccc

SEQ ID NO: 30937 - DNA, 16 bp, Homo sapiens
  source 1..16: mol_type = genomic DNA
tttgatagagtaaata

SEQ ID NO: 30938 - DNA, 18 bp, Homo sapiens
  source 1..18: mol_type = genomic DNA
tttgatagagtaaataat

SEQ ID NO: 30939 - DNA, 20 bp, Homo sapiens
  source 1..20: mol_type = genomic DNA
tttgatagagtaaataatag

SEQ ID NO: 30940 - DNA, 21 bp, Homo sapiens
  source 1..21: mol_type = genomic DNA
tttgatagagtaaataatagg

SEQ ID NO: 30941 - DNA, 22 bp, Homo sapiens
  source 1..22: mol_type = genomic DNA
tttgatagagtaaataatagga

SEQ ID NO: 30942 - DNA, 23 bp, Homo sapiens
  source 1..23: mol_type = genomic DNA
tttgatagagtaaataataggag

SEQ ID NO: 30943 - DNA, 24 bp, Homo sapiens
  source 1..24: mol_type = genomic DNA
tttgatagagtaaataataggagc

SEQ ID NO: 30944 - DNA, 25 bp, Homo sapiens
  source 1..25: mol_type = genomic DNA
tttgatagagtaaataataggagct

SEQ ID NO: 30945 - DNA, 26 bp, Homo sapiens
  source 1..26: mol_type = genomic DNA
tttgatagagtaaataataggagctt

SEQ ID NO: 30946 - DNA, 27 bp, Homo sapiens
  source 1..27: mol_type = genomic DNA
tttgatagagtaaataataggagctta

SEQ ID NO: 30947 - DNA, 28 bp, Homo sapiens
  source 1..28: mol_type = genomic DNA
tttgatagagtaaataataggagcttaa

SEQ ID NO: 30948 - DNA, 29 bp, Homo sapiens
  source 1..29: mol_type = genomic DNA
tttgatagagtaaataataggagcttaaa

SEQ ID NO: 30949 - DNA, 30 bp, Homo sapiens
  source 1..30: mol_type = genomic DNA
tttgatagagtaaataataggagcttaaac

SEQ ID NO: 30950 - DNA, 31 bp, Homo sapiens
  source 1..31: mol_type = genomic DNA
tttgatagagtaaataataggagcttaaacc

SEQ ID NO: 30951 - DNA, 32 bp, Homo sapiens
  source 1..32: mol_type = genomic DNA
tttgatagagtaaataataggagcttaaaccc

SEQ ID NO: 30952 - DNA, 33 bp, Homo sapiens
  source 1..33: mol_type = genomic DNA
tttgatagagtaaataataggagcttaaacccc

SEQ ID NO: 30953 - DNA, 34 bp, Homo sapiens
  source 1..34: mol_type = genomic DNA
tttgatagagtaaataataggagcttaaaccccc

SEQ ID NO: 30954 - DNA, 35 bp, Homo sapiens
  source 1..35: mol_type = genomic DNA
tttgatagagtaaataataggagcttaaaccccct

SEQ ID NO: 30955 - DNA, 36 bp, Homo sapiens
  source 1..36: mol_type = genomic DNA
tttgatagagtaaataataggagcttaaaccccctt

SEQ ID NO: 30956 - DNA, 37 bp, Homo sapiens
  source 1..37: mol_type = genomic DNA
tttgatagagtaaataataggagcttaaaccccctta

SEQ ID NO: 30957 - DNA, 39 bp, Homo sapiens
  source 1..39: mol_type = genomic DNA
tttgatagagtaaataataggagcttaaacccccttatt

SEQ ID NO: 30958 - DNA, 40 bp, Homo sapiens
  source 1..40: mol_type = genomic DNA
tttgatagagtaaataataggagcttaaacccccttattt

SEQ ID NO: 30959 - DNA, 45 bp, Homo sapiens
  source 1..45: mol_type = genomic DNA
tttgatagagtaaataataggagcttaaacccccttatttctacc

SEQ ID NO: 30960 - DNA, 16 bp, Homo sapiens
  source 1..16: mol_type = genomic DNA
tttgattcccggtcag

SEQ ID NO: 30961 - DNA, 16 bp, Homo sapiens
  source 1..16: mol_type = genomic DNA
tttgcacgcgtgggtt

SEQ ID NO: 30962 - DNA, 21 bp, Homo sapiens
  source 1..21: mol_type = genomic DNA
tttgcacgcgtgggttcgaat

SEQ ID NO: 30963 - DNA, 23 bp, Homo sapiens
  source 1..23: mol_type = genomic DNA
tttgcacgcgtgggttcgaatcc

SEQ ID NO: 30964 - DNA, 24 bp, Homo sapiens
  source 1..24: mol_type = genomic DNA
tttgcacgcgtgggttcgaatccc

SEQ ID NO: 30965 - DNA, 27 bp, Homo sapiens
  source 1..27: mol_type = genomic DNA
tttgcacgcgtgggttcgaatcccatc

SEQ ID NO: 30966 - DNA, 31 bp, Homo sapiens
  source 1..31: mol_type = genomic DNA
tttgcacgcgtgggttcgaatcccatcctcg

SEQ ID NO: 30967 - DNA, 35 bp, Homo sapiens
  source 1..35: mol_type = genomic DNA
tttgcacgcgtgggttcgaatcccatcctcgtcgc

SEQ ID NO: 30968 - DNA, 36 bp, Homo sapiens
  source 1..36: mol_type = genomic DNA
tttgcacgcgtgggttcgaatcccatcctcgtcgcc

SEQ ID NO: 30969 - DNA, 37 bp, Homo sapiens
  source 1..37: mol_type = genomic DNA
tttgcacgcgtgggttcgaatcccatcctcgtcgcca

SEQ ID NO: 30970 - DNA, 18 bp, Homo sapiens
  source 1..18: mol_type = genomic DNA
tttgcacgtatgaggccc

SEQ ID NO: 30971 - DNA, 19 bp, Homo sapiens
  source 1..19: mol_type = genomic DNA
tttgcacgtatgaggcccc

SEQ ID NO: 30972 - DNA, 20 bp, Homo sapiens
  source 1..20: mol_type = genomic DNA
tttgcacgtatgaggccccg

SEQ ID NO: 30973 - DNA, 21 bp, Homo sapiens
  source 1..21: mol_type = genomic DNA
tttgcacgtatgaggccccgg

SEQ ID NO: 30974 - DNA, 22 bp, Homo sapiens
  source 1..22: mol_type = genomic DNA
tttgcacgtatgaggccccggg

SEQ ID NO: 30975 - DNA, 23 bp, Homo sapiens
  source 1..23: mol_type = genomic DNA
tttgcacgtatgaggccccgggt

SEQ ID NO: 30976 - DNA, 39 bp, Homo sapiens
  source 1..39: mol_type = genomic DNA
tttgcacgtatgaggccccgggttcaatccccggcatct

SEQ ID NO: 30977 - DNA, 16 bp, Homo sapiens
  source 1..16: mol_type = genomic DNA
tttgcagtccttacca

SEQ ID NO: 30978 - DNA, 17 bp, Homo sapiens
  source 1..17: mol_type = genomic DNA
tttgcgttcagttgatg

SEQ ID NO: 30979 - DNA, 18 bp, Homo sapiens
  source 1..18: mol_type = genomic DNA
tttgcgttcagttgatgc

SEQ ID NO: 30980 - DNA, 18 bp, Homo sapiens
  source 1..18: mol_type = genomic DNA
tttggattctcagggatg

SEQ ID NO: 30981 - DNA, 38 bp, Homo sapiens
  source 1..38: mol_type = genomic DNA
tttggattctcagggatgggttcgattctcatagtcct

SEQ ID NO: 30982 - DNA, 40 bp, Homo sapiens
  source 1..40: mol_type = genomic DNA
tttggattctcagggatgggttcgattctcatagtcctag

SEQ ID NO: 30983 - DNA, 41 bp, Homo sapiens
  source 1..41: mol_type = genomic DNA
tttggattctcagggatgggttcgattctcatagtcctagc

SEQ ID NO: 30984 - DNA, 42 bp, Homo sapiens
  source 1..42: mol_type = genomic DNA
tttggattctcagggatgggttcgattctcatagtcctagcc

SEQ ID NO: 30985 - DNA, 18 bp, Homo sapiens
  source 1..18: mol_type = genomic DNA
tttggggggttcgattcc

SEQ ID NO: 30986 - DNA, 19 bp, Homo sapiens
  source 1..19: mol_type = genomic DNA
tttggggggttcgattcct

SEQ ID NO: 30987 - DNA, 21 bp, Homo sapiens
  source 1..21: mol_type = genomic DNA
tttggggggttcgattccttc

SEQ ID NO: 30988 - DNA, 29 bp, Homo sapiens
  source 1..29: mol_type = genomic DNA
tttggggggttcgattccttccttttttg

SEQ ID NO: 30989 - DNA, 31 bp, Homo sapiens
  source 1..31: mol_type = genomic DNA
tttggggggttcgattccttccttttttgcc

SEQ ID NO: 30990 - DNA, 32 bp, Homo sapiens
  source 1..32: mol_type = genomic DNA
tttggggggttcgattccttccttttttgcca

SEQ ID NO: 30991 - DNA, 18 bp, Homo sapiens
  source 1..18: mol_type = genomic DNA
tttgggtccgagaggtcc

SEQ ID NO: 30992 - DNA, 19 bp, Homo sapiens
  source 1..19: mol_type = genomic DNA
tttgggtccgagaggtccc

SEQ ID NO: 30993 - DNA, 21 bp, Homo sapiens
  source 1..21: mol_type = genomic DNA
tttgggtccgagaggtcccgg

SEQ ID NO: 30994 - DNA, 18 bp, Homo sapiens
  source 1..18: mol_type = genomic DNA
tttgggtgcgagaggtcc

SEQ ID NO: 30995 - DNA, 19 bp, Homo sapiens
  source 1..19: mol_type = genomic DNA
tttgggtgcgagaggtccc

SEQ ID NO: 30996 - DNA, 20 bp, Homo sapiens
  source 1..20: mol_type = genomic DNA
tttgggtgcgagaggtcccg

SEQ ID NO: 30997 - DNA, 21 bp, Homo sapiens
  source 1..21: mol_type = genomic DNA
tttgggtgcgagaggtcccgg

SEQ ID NO: 30998 - DNA, 22 bp, Homo sapiens
  source 1..22: mol_type = genomic DNA
tttgggtgcgagaggtcccggg

SEQ ID NO: 30999 - DNA, 23 bp, Homo sapiens
  source 1..23: mol_type = genomic DNA
tttgggtgcgagaggtcccgggt

SEQ ID NO: 31000 - DNA, 24 bp, Homo sapiens
  source 1..24: mol_type = genomic DNA
tttgggtgcgagaggtcccgggtt

SEQ ID NO: 31001 - DNA, 26 bp, Homo sapiens
  source 1..26: mol_type = genomic DNA
tttgggtgcgagaggtcccgggttca

SEQ ID NO: 31002 - DNA, 22 bp, Homo sapiens
  source 1..22: mol_type = genomic DNA
tttgggtgctaatggtggagtt

SEQ ID NO: 31003 - DNA, 23 bp, Homo sapiens
  source 1..23: mol_type = genomic DNA
tttgggtgctaatggtggagtta

SEQ ID NO: 31004 - DNA, 24 bp, Homo sapiens
  source 1..24: mol_type = genomic DNA
tttgggtgctaatggtggagttaa

SEQ ID NO: 31005 - DNA, 25 bp, Homo sapiens
  source 1..25: mol_type = genomic DNA
tttgggtgctaatggtggagttaaa

SEQ ID NO: 31006 - DNA, 26 bp, Homo sapiens
  source 1..26: mol_type = genomic DNA
tttgggtgctaatggtggagttaaag

SEQ ID NO: 31007 - DNA, 27 bp, Homo sapiens
  source 1..27: mol_type = genomic DNA
tttgggtgctaatggtggagttaaaga

SEQ ID NO: 31008 - DNA, 28 bp, Homo sapiens
  source 1..28: mol_type = genomic DNA
tttgggtgctaatggtggagttaaagac

SEQ ID NO: 31009 - DNA, 29 bp, Homo sapiens
  source 1..29: mol_type = genomic DNA
tttgggtgctaatggtggagttaaagact

SEQ ID NO: 31010 - DNA, 30 bp, Homo sapiens
  source 1..30: mol_type = genomic DNA
tttgggtgctaatggtggagttaaagactt

SEQ ID NO: 31011 - DNA, 31 bp, Homo sapiens
  source 1..31: mol_type = genomic DNA
tttgggtgctaatggtggagttaaagacttt

SEQ ID NO: 31012 - DNA, 32 bp, Homo sapiens
  source 1..32: mol_type = genomic DNA
tttgggtgctaatggtggagttaaagactttt

SEQ ID NO: 31013 - DNA, 35 bp, Homo sapiens
  source 1..35: mol_type = genomic DNA
tttgggtgctaatggtggagttaaagactttttct

SEQ ID NO: 31014 - DNA, 39 bp, Homo sapiens
  source 1..39: mol_type = genomic DNA
tttgggtgctaatggtggagttaaagactttttctctga

SEQ ID NO: 31015 - DNA, 40 bp, Homo sapiens
  source 1..40: mol_type = genomic DNA
tttgggtgctaatggtggagttaaagactttttctctgac

SEQ ID NO: 31016 - DNA, 41 bp, Homo sapiens
  source 1..41: mol_type = genomic DNA
tttgggtgctaatggtggagttaaagactttttctctgacc

SEQ ID NO: 31017 - DNA, 42 bp, Homo sapiens
  source 1..42: mol_type = genomic DNA
tttgggtgctaatggtggagttaaagactttttctctgacca

SEQ ID NO: 31018 - DNA, 18 bp, Homo sapiens
  source 1..18: mol_type = genomic DNA
tttggtgcaactccaaat

SEQ ID NO: 31019 - DNA, 24 bp, Homo sapiens
  source 1..24: mol_type = genomic DNA
tttggtgcaactccaaataaaagt

SEQ ID NO: 31020 - DNA, 25 bp, Homo sapiens
  source 1..25: mol_type = genomic DNA
tttggtgcaactccaaataaaagta

SEQ ID NO: 31021 - DNA, 26 bp, Homo sapiens
  source 1..26: mol_type = genomic DNA
tttggtgcaactccaaataaaagtac

SEQ ID NO: 31022 - DNA, 27 bp, Homo sapiens
  source 1..27: mol_type = genomic DNA
tttggtgcaactccaaataaaagtacc

SEQ ID NO: 31023 - DNA, 28 bp, Homo sapiens
  source 1..28: mol_type = genomic DNA
tttggtgcaactccaaataaaagtacca

SEQ ID NO: 31024 - DNA, 16 bp, Homo sapiens
  source 1..16: mol_type = genomic DNA
tttgtcaaagttaaat

SEQ ID NO: 31025 - DNA, 17 bp, Homo sapiens
  source 1..17: mol_type = genomic DNA
tttgtcaaagttaaatt

SEQ ID NO: 31026 - DNA, 19 bp, Homo sapiens
  source 1..19: mol_type = genomic DNA
tttgtcaaagttaaattat

SEQ ID NO: 31027 - DNA, 20 bp, Homo sapiens
  source 1..20: mol_type = genomic DNA
tttgtcaaagttaaattata

SEQ ID NO: 31028 - DNA, 21 bp, Homo sapiens
  source 1..21: mol_type = genomic DNA
tttgtcaaagttaaattatag

SEQ ID NO: 31029 - DNA, 22 bp, Homo sapiens
  source 1..22: mol_type = genomic DNA
tttgtcaaagttaaattatagg

SEQ ID NO: 31030 - DNA, 23 bp, Homo sapiens
  source 1..23: mol_type = genomic DNA
tttgtcaaagttaaattataggc

SEQ ID NO: 31031 - DNA, 24 bp, Homo sapiens
  source 1..24: mol_type = genomic DNA
tttgtcaaagttaaattataggct

SEQ ID NO: 31032 - DNA, 25 bp, Homo sapiens
  source 1..25: mol_type = genomic DNA
tttgtcaaagttaaattataggcta

SEQ ID NO: 31033 - DNA, 26 bp, Homo sapiens
  source 1..26: mol_type = genomic DNA
tttgtcaaagttaaattataggctaa

SEQ ID NO: 31034 - DNA, 27 bp, Homo sapiens
  source 1..27: mol_type = genomic DNA
tttgtcaaagttaaattataggctaaa

SEQ ID NO: 31035 - DNA, 30 bp, Homo sapiens
  source 1..30: mol_type = genomic DNA
tttgtcaaagttaaattataggctaaatcc

SEQ ID NO: 31036 - DNA, 31 bp, Homo sapiens
  source 1..31: mol_type = genomic DNA
tttgtcaaagttaaattataggctaaatcct

SEQ ID NO: 31037 - DNA, 34 bp, Homo sapiens
  source 1..34: mol_type = genomic DNA
tttgtcaaagttaaattataggctaaatcctata

SEQ ID NO: 31038 - DNA, 36 bp, Homo sapiens
  source 1..36: mol_type = genomic DNA
tttgtcaaagttaaattataggctaaatcctatata

SEQ ID NO: 31039 - DNA, 38 bp, Homo sapiens
  source 1..38: mol_type = genomic DNA
tttgtcaaagttaaattataggctaaatcctatatatc

SEQ ID NO: 31040 - DNA, 39 bp, Homo sapiens
  source 1..39: mol_type = genomic DNA
tttgtcaaagttaaattataggctaaatcctatatatct

SEQ ID NO: 31041 - DNA, 40 bp, Homo sapiens
  source 1..40: mol_type = genomic DNA
tttgtcaaagttaaattataggctaaatcctatatatctt

SEQ ID NO: 31042 - DNA, 42 bp, Homo sapiens
  source 1..42: mol_type = genomic DNA
tttgtcaaagttaaattataggctaaatcctatatatcttac

SEQ ID NO: 31043 - DNA, 43 bp, Homo sapiens
  source 1..43: mol_type = genomic DNA
tttgtcaaagttaaattataggctaaatcctatatatcttacc

SEQ ID NO: 31044 - DNA, 44 bp, Homo sapiens
  source 1..44: mol_type = genomic DNA
tttgtcaaagttaaattataggctaaatcctatatatcttacca

SEQ ID NO: 31045 - DNA, 16 bp, Homo sapiens
  source 1..16: mol_type = genomic DNA
tttgtgggtttaagtc

SEQ ID NO: 31046 - DNA, 17 bp, Homo sapiens
  source 1..17: mol_type = genomic DNA
tttgtgggtttaagtcc

SEQ ID NO: 31047 - DNA, 25 bp, Homo sapiens
  source 1..25: mol_type = genomic DNA
tttgtgggtttaagtcccattggtc

SEQ ID NO: 31048 - DNA, 26 bp, Homo sapiens
  source 1..26: mol_type = genomic DNA
tttgtgggtttaagtcccattggtct

SEQ ID NO: 31049 - DNA, 27 bp, Homo sapiens
  source 1..27: mol_type = genomic DNA
tttgtgggtttaagtcccattggtcta

SEQ ID NO: 31050 - DNA, 28 bp, Homo sapiens
  source 1..28: mol_type = genomic DNA
tttgtgggtttaagtcccattggtctag

SEQ ID NO: 31051 - DNA, 29 bp, Homo sapiens
  source 1..29: mol_type = genomic DNA
tttgtgggtttaagtcccattggtctagc

SEQ ID NO: 31052 - DNA, 30 bp, Homo sapiens
  source 1..30: mol_type = genomic DNA
tttgtgggtttaagtcccattggtctagcc

SEQ ID NO: 31053 - DNA, 31 bp, Homo sapiens
  source 1..31: mol_type = genomic DNA
tttgtgggtttaagtcccattggtctagcca

SEQ ID NO: 31054 - DNA, 16 bp, Homo sapiens
  source 1..16: mol_type = genomic DNA
ttttaaaggataacag

SEQ ID NO: 31055 - DNA, 17 bp, Homo sapiens
  source 1..17: mol_type = genomic DNA
ttttaaaggataacagc

SEQ ID NO: 31056 - DNA, 18 bp, Homo sapiens
  source 1..18: mol_type = genomic DNA
ttttaaaggataacagct

SEQ ID NO: 31057 - DNA, 19 bp, Homo sapiens
  source 1..19: mol_type = genomic DNA
ttttaaaggataacagcta

SEQ ID NO: 31058 - DNA, 24 bp, Homo sapiens
  source 1..24: mol_type = genomic DNA
ttttaaaggataacagctatccat

SEQ ID NO: 31059 - DNA, 25 bp, Homo sapiens
  source 1..25: mol_type = genomic DNA
ttttaaaggataacagctatccatt

SEQ ID NO: 31060 - DNA, 26 bp, Homo sapiens
  source 1..26: mol_type = genomic DNA
ttttaaaggataacagctatccattg

SEQ ID NO: 31061 - DNA, 27 bp, Homo sapiens
  source 1..27: mol_type = genomic DNA
ttttaaaggataacagctatccattgg

SEQ ID NO: 31062 - DNA, 28 bp, Homo sapiens
  source 1..28: mol_type = genomic DNA
ttttaaaggataacagctatccattggt

SEQ ID NO: 31063 - DNA, 29 bp, Homo sapiens
  source 1..29: mol_type = genomic DNA
ttttaaaggataacagctatccattggtc

SEQ ID NO: 31064 - DNA, 30 bp, Homo sapiens
  source 1..30: mol_type = genomic DNA
ttttaaaggataacagctatccattggtct

SEQ ID NO: 31065 - DNA, 31 bp, Homo sapiens
  source 1..31: mol_type = genomic DNA
ttttaaaggataacagctatccattggtctt

SEQ ID NO: 31066 - DNA, 32 bp, Homo sapiens
  source 1..32: mol_type = genomic DNA
ttttaaaggataacagctatccattggtctta

SEQ ID NO: 31067 - DNA, 33 bp, Homo sapiens
  source 1..33: mol_type = genomic DNA
ttttaaaggataacagctatccattggtcttag

SEQ ID NO: 31068 - DNA, 36 bp, Homo sapiens
  source 1..36: mol_type = genomic DNA
ttttaaaggataacagctatccattggtcttaggcc

SEQ ID NO: 31069 - DNA, 37 bp, Homo sapiens
  source 1..37: mol_type = genomic DNA
ttttaaaggataacagctatccattggtcttaggccc

SEQ ID NO: 31070 - DNA, 38 bp, Homo sapiens
  source 1..38: mol_type = genomic DNA
ttttaaaggataacagctatccattggtcttaggcccc

SEQ ID NO: 31071 - DNA, 21 bp, Homo sapiens
  source 1..21: mol_type = genomic DNA
ttttaagttaaagattaagag

SEQ ID NO: 31072 - DNA, 22 bp, Homo sapiens
  source 1..22: mol_type = genomic DNA
ttttaagttaaagattaagaga

SEQ ID NO: 31073 - DNA, 23 bp, Homo sapiens
  source 1..23: mol_type = genomic DNA
ttttaagttaaagattaagagaa

SEQ ID NO: 31074 - DNA, 24 bp, Homo sapiens
  source 1..24: mol_type = genomic DNA
ttttaagttaaagattaagagaac

SEQ ID NO: 31075 - DNA, 25 bp, Homo sapiens
  source 1..25: mol_type = genomic DNA
ttttaagttaaagattaagagaacc

SEQ ID NO: 31076 - DNA, 26 bp, Homo sapiens
  source 1..26: mol_type = genomic DNA
ttttaagttaaagattaagagaacca

SEQ ID NO: 31077 - DNA, 27 bp, Homo sapiens
  source 1..27: mol_type = genomic DNA
ttttaagttaaagattaagagaaccaa

SEQ ID NO: 31078 - DNA, 28 bp, Homo sapiens
  source 1..28: mol_type = genomic DNA
ttttaagttaaagattaagagaaccaac

SEQ ID NO: 31079 - DNA, 29 bp, Homo sapiens
  source 1..29: mol_type = genomic DNA
ttttaagttaaagattaagagaaccaaca

SEQ ID NO: 31080 - DNA, 30 bp, Homo sapiens
  source 1..30: mol_type = genomic DNA
ttttaagttaaagattaagagaaccaacac

SEQ ID NO: 31081 - DNA, 31 bp, Homo sapiens
  source 1..31: mol_type = genomic DNA
ttttaagttaaagattaagagaaccaacacc

SEQ ID NO: 31082 - DNA, 32 bp, Homo sapiens
  source 1..32: mol_type = genomic DNA
ttttaagttaaagattaagagaaccaacacct

SEQ ID NO: 31083 - DNA, 33 bp, Homo sapiens
  source 1..33: mol_type = genomic DNA
ttttaagttaaagattaagagaaccaacacctc

SEQ ID NO: 31084 - DNA, 34 bp, Homo sapiens
  source 1..34: mol_type = genomic DNA
ttttaagttaaagattaagagaaccaacacctct

SEQ ID NO: 31085 - DNA, 35 bp, Homo sapiens
  source 1..35: mol_type = genomic DNA
ttttaagttaaagattaagagaaccaacacctctt

SEQ ID NO: 31086 - DNA, 36 bp, Homo sapiens
  source 1..36: mol_type = genomic DNA
ttttaagttaaagattaagagaaccaacacctcttt

SEQ ID NO: 31087 - DNA, 37 bp, Homo sapiens
  source 1..37: mol_type = genomic DNA
ttttaagttaaagattaagagaaccaacacctcttta

SEQ ID NO: 31088 - DNA, 40 bp, Homo sapiens
  source 1..40: mol_type = genomic DNA
ttttaagttaaagattaagagaaccaacacctctttacag

SEQ ID NO: 31089 - DNA, 41 bp, Homo sapiens
  source 1..41: mol_type = genomic DNA
ttttaagttaaagattaagagaaccaacacctctttacagt

SEQ ID NO: 31090 - DNA, 42 bp, Homo sapiens
  source 1..42: mol_type = genomic DNA
ttttaagttaaagattaagagaaccaacacctctttacagtg

SEQ ID NO: 31091 - DNA, 43 bp, Homo sapiens
  source 1..43: mol_type = genomic DNA
ttttaagttaaagattaagagaaccaacacctctttacagtga

SEQ ID NO: 31092 - DNA, 44 bp, Homo sapiens
  source 1..44: mol_type = genomic DNA
ttttaagttaaagattaagagaaccaacacctctttacagtgac

SEQ ID NO: 31093 - DNA, 45 bp, Homo sapiens
  source 1..45: mol_type = genomic DNA
ttttaagttaaagattaagagaaccaacacctctttacagtgacc

SEQ ID NO: 31094 - DNA, 46 bp, Homo sapiens
  source 1..46: mol_type = genomic DNA
ttttaagttaaagattaagagaaccaacacctctttacagtgacca

SEQ ID NO: 31095 - DNA, 17 bp, Homo sapiens
  source 1..17: mol_type = genomic DNA
ttttaatctgagggtcc

SEQ ID NO: 31096 - DNA, 18 bp, Homo sapiens
  source 1..18: mol_type = genomic DNA
ttttaatctgagggtcca

SEQ ID NO: 31097 - DNA, 33 bp, Homo sapiens
  source 1..33: mol_type = genomic DNA
ttttaatctgagggtccagggttcaagtccctg

SEQ ID NO: 31098 - DNA, 36 bp, Homo sapiens
  source 1..36: mol_type = genomic DNA
ttttaatctgagggtccagggttcatgtccctgttc

SEQ ID NO: 31099 - DNA, 25 bp, Homo sapiens
  source 1..25: mol_type = genomic DNA
ttttagtataaatagtaccgttaac

SEQ ID NO: 31100 - DNA, 26 bp, Homo sapiens
  source 1..26: mol_type = genomic DNA
ttttagtataaatagtaccgttaact

SEQ ID NO: 31101 - DNA, 27 bp, Homo sapiens
  source 1..27: mol_type = genomic DNA
ttttagtataaatagtaccgttaactt

SEQ ID NO: 31102 - DNA, 28 bp, Homo sapiens
  source 1..28: mol_type = genomic DNA
ttttagtataaatagtaccgttaacttc

SEQ ID NO: 31103 - DNA, 29 bp, Homo sapiens
  source 1..29: mol_type = genomic DNA
ttttagtataaatagtaccgttaacttcc

SEQ ID NO: 31104 - DNA, 16 bp, Homo sapiens
  source 1..16: mol_type = genomic DNA
ttttcacccaggcggc

SEQ ID NO: 31105 - DNA, 21 bp, Homo sapiens
  source 1..21: mol_type = genomic DNA
ttttcacccaggcggcccggg

SEQ ID NO: 31106 - DNA, 32 bp, Homo sapiens
  source 1..32: mol_type = genomic DNA
ttttcacccaggcggcccgggttcgactcccg

SEQ ID NO: 31107 - DNA, 35 bp, Homo sapiens
  source 1..35: mol_type = genomic DNA
ttttcacccaggcggcccgggttcgactcccggtg

SEQ ID NO: 31108 - DNA, 36 bp, Homo sapiens
  source 1..36: mol_type = genomic DNA
ttttcacccaggcggcccgggttcgactcccggtgt

SEQ ID NO: 31109 - DNA, 37 bp, Homo sapiens
  source 1..37: mol_type = genomic DNA
ttttcacccaggcggcccgggttcgactcccggtgtg

SEQ ID NO: 31110 - DNA, 38 bp, Homo sapiens
  source 1..38: mol_type = genomic DNA
ttttcacccaggcggcccgggttcgactcccggtgtgg

SEQ ID NO: 31111 - DNA, 40 bp, Homo sapiens
  source 1..40: mol_type = genomic DNA
ttttcacccaggcggcccgggttcgactcccggtgtggga

SEQ ID NO: 31112 - DNA, 41 bp, Homo sapiens
  source 1..41: mol_type = genomic DNA
ttttcacccaggcggcccgggttcgactcccggtgtgggaa

SEQ ID NO: 31113 - DNA, 42 bp, Homo sapiens
  source 1..42: mol_type = genomic DNA
ttttcacccaggcggcccgggttcgactcccggtgtgggaac

SEQ ID NO: 31114 - DNA, 43 bp, Homo sapiens
  source 1..43: mol_type = genomic DNA
ttttcacccaggcggcccgggttcgactcccggtgtgggaacc

SEQ ID NO: 31115 - DNA, 44 bp, Homo sapiens
  source 1..44: mol_type = genomic DNA
ttttcacccaggcggcccgggttcgactcccggtgtgggaacca

SEQ ID NO: 31116 - DNA, 43 bp, Homo sapiens
  source 1..43: mol_type = genomic DNA
ttttcacccaggtggcccgggttcgactcccggtatgggaacc

SEQ ID NO: 31117 - DNA, 16 bp, Homo sapiens
  source 1..16: mol_type = genomic DNA
ttttcatatcattggt

SEQ ID NO: 31118 - DNA, 17 bp, Homo sapiens
  source 1..17: mol_type = genomic DNA
ttttcatatcattggtc

SEQ ID NO: 31119 - DNA, 18 bp, Homo sapiens
  source 1..18: mol_type = genomic DNA
ttttcatatcattggtcg

SEQ ID NO: 31120 - DNA, 19 bp, Homo sapiens
  source 1..19: mol_type = genomic DNA
ttttcatatcattggtcgt

SEQ ID NO: 31121 - DNA, 20 bp, Homo sapiens
  source 1..20: mol_type = genomic DNA
ttttcatatcattggtcgtg

SEQ ID NO: 31122 - DNA, 21 bp, Homo sapiens
  source 1..21: mol_type = genomic DNA
ttttcatatcattggtcgtgg

SEQ ID NO: 31123 - DNA, 22 bp, Homo sapiens
  source 1..22: mol_type = genomic DNA
ttttcatatcattggtcgtggt

SEQ ID NO: 31124 - DNA, 23 bp, Homo sapiens
  source 1..23: mol_type = genomic DNA
ttttcatatcattggtcgtggtt

SEQ ID NO: 31125 - DNA, 24 bp, Homo sapiens
  source 1..24: mol_type = genomic DNA
ttttcatatcattggtcgtggttg

SEQ ID NO: 31126 - DNA, 25 bp, Homo sapiens
  source 1..25: mol_type = genomic DNA
ttttcatatcattggtcgtggttgt

SEQ ID NO: 31127 - DNA, 26 bp, Homo sapiens
  source 1..26: mol_type = genomic DNA
ttttcatatcattggtcgtggttgta

SEQ ID NO: 31128 - DNA, 27 bp, Homo sapiens
  source 1..27: mol_type = genomic DNA
ttttcatatcattggtcgtggttgtag

SEQ ID NO: 31129 - DNA, 28 bp, Homo sapiens
  source 1..28: mol_type = genomic DNA
ttttcatatcattggtcgtggttgtagt

SEQ ID NO: 31130 - DNA, 29 bp, Homo sapiens
  source 1..29: mol_type = genomic DNA
ttttcatatcattggtcgtggttgtagtc

SEQ ID NO: 31131 - DNA, 30 bp, Homo sapiens
  source 1..30: mol_type = genomic DNA
ttttcatatcattggtcgtggttgtagtcc

SEQ ID NO: 31132 - DNA, 31 bp, Homo sapiens
  source 1..31: mol_type = genomic DNA
ttttcatatcattggtcgtggttgtagtccg

SEQ ID NO: 31133 - DNA, 32 bp, Homo sapiens
  source 1..32: mol_type = genomic DNA
ttttcatatcattggtcgtggttgtagtccgt

SEQ ID NO: 31134 - DNA, 33 bp, Homo sapiens
  source 1..33: mol_type = genomic DNA
ttttcatatcattggtcgtggttgtagtccgtg

SEQ ID NO: 31135 - DNA, 34 bp, Homo sapiens
  source 1..34: mol_type = genomic DNA
ttttcatatcattggtcgtggttgtagtccgtgc

SEQ ID NO: 31136 - DNA, 35 bp, Homo sapiens
  source 1..35: mol_type = genomic DNA
ttttcatatcattggtcgtggttgtagtccgtgcg

SEQ ID NO: 31137 - DNA, 36 bp, Homo sapiens
  source 1..36: mol_type = genomic DNA
ttttcatatcattggtcgtggttgtagtccgtgcga

SEQ ID NO: 31138 - DNA, 37 bp, Homo sapiens
  source 1..37: mol_type = genomic DNA
ttttcatatcattggtcgtggttgtagtccgtgcgag

SEQ ID NO: 31139 - DNA, 38 bp, Homo sapiens
  source 1..38: mol_type = genomic DNA
ttttcatatcattggtcgtggttgtagtccgtgcgaga

SEQ ID NO: 31140 - DNA, 39 bp, Homo sapiens
  source 1..39: mol_type = genomic DNA
ttttcatatcattggtcgtggttgtagtccgtgcgagaa

SEQ ID NO: 31141 - DNA, 40 bp, Homo sapiens
  source 1..40: mol_type = genomic DNA
ttttcatatcattggtcgtggttgtagtccgtgcgagaat

SEQ ID NO: 31142 - DNA, 41 bp, Homo sapiens
  source 1..41: mol_type = genomic DNA
ttttcatatcattggtcgtggttgtagtccgtgcgagaata

SEQ ID NO: 31143 - DNA, 42 bp, Homo sapiens
  source 1..42: mol_type = genomic DNA
ttttcatatcattggtcgtggttgtagtccgtgcgagaatac

SEQ ID NO: 31144 - DNA, 43 bp, Homo sapiens
  source 1..43: mol_type = genomic DNA
ttttcatatcattggtcgtggttgtagtccgtgcgagaatacc

SEQ ID NO: 31145 - DNA, 44 bp, Homo sapiens
  source 1..44: mol_type = genomic DNA
ttttcatatcattggtcgtggttgtagtccgtgcgagaatacca

SEQ ID NO: 31146 - DNA, 17 bp, Homo sapiens
  source 1..17: mol_type = genomic DNA
ttttcatattgaattgc

SEQ ID NO: 31147 - DNA, 18 bp, Homo sapiens
  source 1..18: mol_type = genomic DNA
ttttcatattgaattgca

SEQ ID NO: 31148 - DNA, 23 bp, Homo sapiens
  source 1..23: mol_type = genomic DNA
ttttcatattgaattgcaaattc

SEQ ID NO: 31149 - DNA, 25 bp, Homo sapiens
  source 1..25: mol_type = genomic DNA
ttttcatattgaattgcaaattcga

SEQ ID NO: 31150 - DNA, 26 bp, Homo sapiens
  source 1..26: mol_type = genomic DNA
ttttcatattgaattgcaaattcgaa

SEQ ID NO: 31151 - DNA, 16 bp, Homo sapiens
  source 1..16: mol_type = genomic DNA
ttttccaaggacacca

SEQ ID NO: 31152 - DNA, 24 bp, Homo sapiens
  source 1..24: mol_type = genomic DNA
ttttgacaacattcaaaaaagagt

SEQ ID NO: 31153 - DNA, 26 bp, Homo sapiens
  source 1..26: mol_type = genomic DNA
ttttgacaacattcaaaaaagagtac

SEQ ID NO: 31154 - DNA, 27 bp, Homo sapiens
  source 1..27: mol_type = genomic DNA
ttttgacaacattcaaaaaagagtacc

SEQ ID NO: 31155 - DNA, 28 bp, Homo sapiens
  source 1..28: mol_type = genomic DNA
ttttgacaacattcaaaaaagagtacca

SEQ ID NO: 31156 - DNA, 16 bp, Homo sapiens
  source 1..16: mol_type = genomic DNA
ttttgcagtccttacc

SEQ ID NO: 31157 - DNA, 17 bp, Homo sapiens
  source 1..17: mol_type = genomic DNA
ttttgcagtccttacca

SEQ ID NO: 31158 - DNA, 18 bp, Homo sapiens
  source 1..18: mol_type = genomic DNA
ttttggattctcagggat

SEQ ID NO: 31159 - DNA, 41 bp, Homo sapiens
  source 1..41: mol_type = genomic DNA
ttttggattctcagggatgggttcgattctcatagtcctag

SEQ ID NO: 31160 - DNA, 42 bp, Homo sapiens
  source 1..42: mol_type = genomic DNA
ttttggattctcagggatgggttcgattctcatagtcctagc

SEQ ID NO: 31161 - DNA, 43 bp, Homo sapiens
  source 1..43: mol_type = genomic DNA
ttttggattctcagggatgggttcgattctcatagtcctagcc

SEQ ID NO: 31162 - DNA, 16 bp, Homo sapiens
  source 1..16: mol_type = genomic DNA
ttttggtgcaactcca

SEQ ID NO: 31163 - DNA, 20 bp, Homo sapiens
  source 1..20: mol_type = genomic DNA
ttttggtgcaactccaaata

SEQ ID NO: 31164 - DNA, 26 bp, Homo sapiens
  source 1..26: mol_type = genomic DNA
ttttggtgcaactccaaataaaagta

SEQ ID NO: 31165 - DNA, 27 bp, Homo sapiens
  source 1..27: mol_type = genomic DNA
ttttggtgcaactccaaataaaagtac

SEQ ID NO: 31166 - DNA, 28 bp, Homo sapiens
  source 1..28: mol_type = genomic DNA
ttttggtgcaactccaaataaaagtacc

SEQ ID NO: 31167 - DNA, 29 bp, Homo sapiens
  source 1..29: mol_type = genomic DNA
ttttggtgcaactccaaataaaagtacca

SEQ ID NO: 31168 - DNA, 16 bp, Homo sapiens
  source 1..16: mol_type = genomic DNA
tttttcatatcattgg

SEQ ID NO: 31169 - DNA, 17 bp, Homo sapiens
  source 1..17: mol_type = genomic DNA
tttttcatatcattggt

SEQ ID NO: 31170 - DNA, 18 bp, Homo sapiens
  source 1..18: mol_type = genomic DNA
tttttcatatcattggtc

SEQ ID NO: 31171 - DNA, 19 bp, Homo sapiens
  source 1..19: mol_type = genomic DNA
tttttcatatcattggtcg

SEQ ID NO: 31172 - DNA, 20 bp, Homo sapiens
  source 1..20: mol_type = genomic DNA
tttttcatatcattggtcgt

SEQ ID NO: 31173 - DNA, 21 bp, Homo sapiens
  source 1..21: mol_type = genomic DNA
tttttcatatcattggtcgtg

SEQ ID NO: 31174 - DNA, 22 bp, Homo sapiens
  source 1..22: mol_type = genomic DNA
tttttcatatcattggtcgtgg

SEQ ID NO: 31175 - DNA, 23 bp, Homo sapiens
  source 1..23: mol_type = genomic DNA
tttttcatatcattggtcgtggt

SEQ ID NO: 31176 - DNA, 24 bp, Homo sapiens
  source 1..24: mol_type = genomic DNA
tttttcatatcattggtcgtggtt

SEQ ID NO: 31177 - DNA, 25 bp, Homo sapiens
  source 1..25: mol_type = genomic DNA
tttttcatatcattggtcgtggttg

SEQ ID NO: 31178 - DNA, 26 bp, Homo sapiens
  source 1..26: mol_type = genomic DNA
tttttcatatcattggtcgtggttgt

SEQ ID NO: 31179 - DNA, 27 bp, Homo sapiens
  source 1..27: mol_type = genomic DNA
tttttcatatcattggtcgtggttgta

SEQ ID NO: 31180 - DNA, 29 bp, Homo sapiens
  source 1..29: mol_type = genomic DNA
tttttcatatcattggtcgtggttgtagt

SEQ ID NO: 31181 - DNA, 30 bp, Homo sapiens
  source 1..30: mol_type = genomic DNA
tttttcatatcattggtcgtggttgtagtc

SEQ ID NO: 31182 - DNA, 31 bp, Homo sapiens
  source 1..31: mol_type = genomic DNA
tttttcatatcattggtcgtggttgtagtcc

SEQ ID NO: 31183 - DNA, 32 bp, Homo sapiens
  source 1..32: mol_type = genomic DNA
tttttcatatcattggtcgtggttgtagtccg

SEQ ID NO: 31184 - DNA, 33 bp, Homo sapiens
  source 1..33: mol_type = genomic DNA
tttttcatatcattggtcgtggttgtagtccgt

SEQ ID NO: 31185 - DNA, 34 bp, Homo sapiens
  source 1..34: mol_type = genomic DNA
tttttcatatcattggtcgtggttgtagtccgtg

SEQ ID NO: 31186 - DNA, 35 bp, Homo sapiens
  source 1..35: mol_type = genomic DNA
tttttcatatcattggtcgtggttgtagtccgtgc

SEQ ID NO: 31187 - DNA, 36 bp, Homo sapiens
  source 1..36: mol_type = genomic DNA
tttttcatatcattggtcgtggttgtagtccgtgcg

SEQ ID NO: 31188 - DNA, 38 bp, Homo sapiens
  source 1..38: mol_type = genomic DNA
tttttcatatcattggtcgtggttgtagtccgtgcgag

SEQ ID NO: 31189 - DNA, 39 bp, Homo sapiens
  source 1..39: mol_type = genomic DNA
tttttcatatcattggtcgtggttgtagtccgtgcgaga

SEQ ID NO: 31190 - DNA, 40 bp, Homo sapiens
  source 1..40: mol_type = genomic DNA
tttttcatatcattggtcgtggttgtagtccgtgcgagaa

SEQ ID NO: 31191 - DNA, 41 bp, Homo sapiens
  source 1..41: mol_type = genomic DNA
tttttcatatcattggtcgtggttgtagtccgtgcgagaat

SEQ ID NO: 31192 - DNA, 42 bp, Homo sapiens
  source 1..42: mol_type = genomic DNA
tttttcatatcattggtcgtggttgtagtccgtgcgagaata

SEQ ID NO: 31193 - DNA, 43 bp, Homo sapiens
  source 1..43: mol_type = genomic DNA
tttttcatatcattggtcgtggttgtagtccgtgcgagaatac

SEQ ID NO: 31194 - DNA, 44 bp, Homo sapiens
  source 1..44: mol_type = genomic DNA
tttttcatatcattggtcgtggttgtagtccgtgcgagaatacc

SEQ ID NO: 31195 - DNA, 45 bp, Homo sapiens
  source 1..45: mol_type = genomic DNA
tttttcatatcattggtcgtggttgtagtccgtgcgagaatacca

SEQ ID NO: 31196 - DNA, 16 bp, Homo sapiens
  source 1..16: mol_type = genomic DNA
tttttccaaggacacc

SEQ ID NO: 31197 - DNA, 17 bp, Homo sapiens
  source 1..17: mol_type = genomic DNA
tttttccaaggacacca

SEQ ID NO: 31198 - DNA, 16 bp, Homo sapiens
  source 1..16: mol_type = genomic DNA
aaaaagtcatggaggc

SEQ ID NO: 31199 - DNA, 17 bp, Homo sapiens
  source 1..17: mol_type = genomic DNA
aaaaagtcatggaggcc

SEQ ID NO: 31200 - DNA, 19 bp, Homo sapiens
  source 1..19: mol_type = genomic DNA
aaaaattttggtgcaactc

SEQ ID NO: 31201 - DNA, 20 bp, Homo sapiens
  source 1..20: mol_type = genomic DNA
aaaacatcagattgtgaatc

SEQ ID NO: 31202 - DNA, 21 bp, Homo sapiens
  source 1..21: mol_type = genomic DNA
aaaacatcagattgtgaatct

SEQ ID NO: 31203 - DNA, 30 bp, Homo sapiens; identical to SEQ ID NO: 42
  source 1..30: mol_type = genomic DNA

SEQ ID NO: 31204 - DNA, 32 bp, Homo sapiens; identical to SEQ ID NO: 44
  source 1..32: mol_type = genomic DNA

SEQ ID NO: 31205 - DNA, 33 bp, Homo sapiens; identical to SEQ ID NO: 45
  source 1..33: mol_type = genomic DNA

SEQ ID NO: 31206 - DNA, 34 bp, Homo sapiens; identical to SEQ ID NO: 46
  source 1..34: mol_type = genomic DNA

SEQ ID NO: 31207 - DNA, 35 bp, Homo sapiens; identical to SEQ ID NO: 47
  source 1..35: mol_type = genomic DNA

SEQ ID NO: 31208 - DNA, 38 bp, Homo sapiens; identical to SEQ ID NO: 50
  source 1..38: mol_type = genomic DNA

SEQ ID NO: 31209 - DNA, 40 bp, Homo sapiens; identical to SEQ ID NO: 52
  source 1..40: mol_type = genomic DNA

SEQ ID NO: 31210 - DNA, 41 bp, Homo sapiens; identical to SEQ ID NO: 53
  source 1..41: mol_type = genomic DNA

SEQ ID NO: 31211 - DNA, 42 bp, Homo sapiens; identical to SEQ ID NO: 54
  source 1..42: mol_type = genomic DNA

SEQ ID NO: 31212 - DNA, 43 bp, Homo sapiens; identical to SEQ ID NO: 55
  source 1..43: mol_type = genomic DNA

SEQ ID NO: 31213 - DNA, 44 bp, Homo sapiens; identical to SEQ ID NO: 56
  source 1..44: mol_type = genomic DNA

SEQ ID NO: 31214 - DNA, 45 bp, Homo sapiens; identical to SEQ ID NO: 57
  source 1..45: mol_type = genomic DNA

SEQ ID NO: 31215 - DNA, 46 bp, Homo sapiens; identical to SEQ ID NO: 58
  source 1..46: mol_type = genomic DNA

SEQ ID NO: 31216 - DNA, 22 bp, Homo sapiens
  source 1..22: mol_type = genomic DNA
aaaacctttttccaaggacacc

SEQ ID NO: 31217 - DNA, 23 bp, Homo sapiens
  source 1..23: mol_type = genomic DNA
aaaacctttttccaaggacacca

SEQ ID NO: 31218 - DNA, 19 bp, Homo sapiens
  source 1..19: mol_type = genomic DNA
aaaacgaatgatttcgact

SEQ ID NO: 31219 - DNA, 20 bp, Homo sapiens
  source 1..20: mol_type = genomic DNA
aaaacgaatgatttcgactc

SEQ ID NO: 31220 - DNA, 28 bp, Homo sapiens
  source 1..28: mol_type = genomic DNA
aaaacttaaaactttacagtcagaggtt

SEQ ID NO: 31221 - DNA, 36 bp, Homo sapiens; identical to SEQ ID NO: 104
  source 1..36: mol_type = genomic DNA

SEQ ID NO: 31222 - DNA, 16 bp, Homo sapiens
  source 1..16: mol_type = genomic DNA
aaaagtcatggaggcc

SEQ ID NO: 31223 - DNA, 16 bp, Homo sapiens
  source 1..16: mol_type = genomic DNA
aaaatgttggttatac

SEQ ID NO: 31224 - DNA, 17 bp, Homo sapiens
  source 1..17: mol_type = genomic DNA
aaaatgttggttatacc

SEQ ID NO: 31225 - DNA, 18 bp, Homo sapiens
  source 1..18: mol_type = genomic DNA
aaaatgttggttataccc

SEQ ID NO: 31226 - DNA, 21 bp, Homo sapiens
  source 1..21: mol_type = genomic DNA
aaaatgttggttatacccttc

SEQ ID NO: 31227 - DNA, 22 bp, Homo sapiens
  source 1..22: mol_type = genomic DNA
aaaatgttggttatacccttcc

SEQ ID NO: 31228 - DNA, 24 bp, Homo sapiens
  source 1..24: mol_type = genomic DNA
aaaatgttggttatacccttcccg

SEQ ID NO: 31229 - DNA, 28 bp, Homo sapiens
  source 1..28: mol_type = genomic DNA
aaaatgttggttatacccttcccgtact

SEQ ID NO: 31230 - DNA, 29 bp, Homo sapiens
  source 1..29: mol_type = genomic DNA
aaaatgttggttatacccttcccgtacta

SEQ ID NO: 31231 - DNA, 30 bp, Homo sapiens; identical to SEQ ID NO: 130
  source 1..30: mol_type = genomic DNA

SEQ ID NO: 31232 - DNA, 31 bp, Homo sapiens; identical to SEQ ID NO: 131
  source 1..31: mol_type = genomic DNA

SEQ ID NO: 31233 - DNA, 32 bp, Homo sapiens; identical to SEQ ID NO: 132
  source 1..32: mol_type = genomic DNA

SEQ ID NO: 31234 - DNA, 17 bp, Homo sapiens
  source 1..17: mol_type = genomic DNA
aaaatgtttagacgggc

SEQ ID NO: 31235 - DNA, 18 bp, Homo sapiens
  source 1..18: mol_type = genomic DNA
aaaatgtttagacgggct

SEQ ID NO: 31236 - DNA, 19 bp, Homo sapiens
  source 1..19: mol_type = genomic DNA
aaaatgtttagacgggctc

SEQ ID NO: 31237 - DNA, 20 bp, Homo sapiens
  source 1..20: mol_type = genomic DNA
aaaatgtttagacgggctca

SEQ ID NO: 31238 - DNA, 21 bp, Homo sapiens
  source 1..21: mol_type = genomic DNA
aaaatgtttagacgggctcac

SEQ ID NO: 31239 - DNA, 22 bp, Homo sapiens
  source 1..22: mol_type = genomic DNA
aaaatgtttagacgggctcaca

SEQ ID NO: 31240 - DNA, 27 bp, Homo sapiens
  source 1..27: mol_type = genomic DNA
aaaatgtttagacgggctcacatcacc

SEQ ID NO: 31241 - DNA, 28 bp, Homo sapiens
  source 1..28: mol_type = genomic DNA
aaaatgtttagacgggctcacatcaccc

SEQ ID NO: 31242 - DNA, 29 bp, Homo sapiens
  source 1..29: mol_type = genomic DNA
aaaatgtttagacgggctcacatcacccc

SEQ ID NO: 31243 - DNA, 30 bp, Homo sapiens; identical to SEQ ID NO: 147
  source 1..30: mol_type = genomic DNA

SEQ ID NO: 31244 - DNA, 31 bp, Homo sapiens; identical to SEQ ID NO: 148
  source 1..31: mol_type = genomic DNA

SEQ ID NO: 31245 - DNA, 32 bp, Homo sapiens; identical to SEQ ID NO: 149
  source 1..32: mol_type = genomic DNA

SEQ ID NO: 31246 - DNA, 33 bp, Homo sapiens; identical to SEQ ID NO: 150
  source 1..33: mol_type = genomic DNA

SEQ ID NO: 31247 - DNA, 34 bp, Homo sapiens; identical to SEQ ID NO: 151
  source 1..34: mol_type = genomic DNA

SEQ ID NO: 31248 - DNA, 38 bp, Homo sapiens; identical to SEQ ID NO: 154
  source 1..38: mol_type = genomic DNA

SEQ ID NO: 31249 - DNA, 39 bp, Homo sapiens; identical to SEQ ID NO: 155
  source 1..39: mol_type = genomic DNA

SEQ ID NO: 31250 - DNA, 18 bp, Homo sapiens
  source 1..18: mol_type = genomic DNA
aaaattttggtgcaactc

SEQ ID NO: 31251 - DNA, 19 bp, Homo sapiens
  source 1..19: mol_type = genomic DNA
aaacatcagattgtgaatc

SEQ ID NO: 31252 - DNA, 20 bp, Homo sapiens
  source 1..20: mol_type = genomic DNA
aaacatcagattgtgaatct

SEQ ID NO: 31253 - DNA, 21 bp, Homo sapiens
  source 1..21: mol_type = genomic DNA
aaacatcagattgtgaatctg

SEQ ID NO: 31254 - DNA, 30 bp, Homo sapiens; identical to SEQ ID NO: 204
  source 1..30: mol_type = genomic DNA

SEQ ID NO: 31255 - DNA, 31 bp, Homo sapiens; identical to SEQ ID NO: 205
  source 1..31: mol_type = genomic DNA

SEQ ID NO: 31256 - DNA, 32 bp, Homo sapiens; identical to SEQ ID NO: 206
  source 1..32: mol_type = genomic DNA

SEQ ID NO: 31257 - DNA, 33 bp, Homo sapiens; identical to SEQ ID NO: 207
  source 1..33: mol_type = genomic DNA

SEQ ID NO: 31258 - DNA, 34 bp, Homo sapiens; identical to SEQ ID NO: 208
  source 1..34: mol_type = genomic DNA

SEQ ID NO: 31259 - DNA, 35 bp, Homo sapiens; identical to SEQ ID NO: 209
  source 1..35: mol_type = genomic DNA

SEQ ID NO: 31260 - DNA, 37 bp, Homo sapiens; identical to SEQ ID NO: 211
  source 1..37: mol_type = genomic DNA

SEQ ID NO: 31261 - DNA, 38 bp, Homo sapiens; identical to SEQ ID NO: 212
  source 1..38: mol_type = genomic DNA

SEQ ID NO: 31262 - DNA, 39 bp, Homo sapiens; identical to SEQ ID NO: 213
  source 1..39: mol_type = genomic DNA

SEQ ID NO: 31263 - DNA, 40 bp, Homo sapiens; identical to SEQ ID NO: 214
  source 1..40: mol_type = genomic DNA

SEQ ID NO: 31264 - DNA, 41 bp, Homo sapiens; identical to SEQ ID NO: 215
  source 1..41: mol_type = genomic DNA

SEQ ID NO: 31265 - DNA, 42 bp, Homo sapiens; identical to SEQ ID NO: 216
  source 1..42: mol_type = genomic DNA

SEQ ID NO: 31266 - DNA, 43 bp, Homo sapiens; identical to SEQ ID NO: 217
  source 1..43: mol_type = genomic DNA

SEQ ID NO: 31267 - DNA, 44 bp, Homo sapiens; identical to SEQ ID NO: 218
  source 1..44: mol_type = genomic DNA

SEQ ID NO: 31268 - DNA, 45 bp, Homo sapiens; identical to SEQ ID NO: 219
  source 1..45: mol_type = genomic DNA

SEQ ID NO: 31269 - DNA, 16 bp, Homo sapiens
  source 1..16: mol_type = genomic DNA
aaaccatcctctgcta

SEQ ID NO: 31270 - DNA, 17 bp, Homo sapiens
  source 1..17: mol_type = genomic DNA
aaaccatcctctgctac

SEQ ID NO: 31271 - DNA, 18 bp, Homo sapiens
  source 1..18: mol_type = genomic DNA
aaaccatcctctgctacc

SEQ ID NO: 31272 - DNA, 37 bp, Homo sapiens; identical to SEQ ID NO: 252
  source 1..37: mol_type = genomic DNA

SEQ ID NO: 31273 - DNA, 18 bp, Homo sapiens
  source 1..18: mol_type = genomic DNA
aaaccgaagatcgcgggt

SEQ ID NO: 31274 - DNA, 37 bp, Homo sapiens; identical to SEQ ID NO: 262
  source 1..37: mol_type = genomic DNA

SEQ ID NO: 31275 - DNA, 34 bp, Homo sapiens; identical to SEQ ID NO: 273
  source 1..34: mol_type = genomic DNA

SEQ ID NO: 31276 - DNA, 35 bp, Homo sapiens; identical to SEQ ID NO: 274
  source 1..35: mol_type = genomic DNA

SEQ ID NO: 31277 - DNA, 16 bp, Homo sapiens
  source 1..16: mol_type = genomic DNA
aaaccgggcagaagca

SEQ ID NO: 31278 - DNA, 17 bp, Homo sapiens
  source 1..17: mol_type = genomic DNA
aaaccgggcagaagcac

SEQ ID NO: 31279 - DNA, 18 bp, Homo sapiens
  source 1..18: mol_type = genomic DNA
aaaccgggcagaagcacc

SEQ ID NO: 31280 - DNA, 19 bp, Homo sapiens
  source 1..19: mol_type = genomic DNA
aaaccgggcagaagcacca

SEQ ID NO: 31281 - DNA, 16 bp, Homo sapiens
  source 1..16: mol_type = genomic DNA
aaaccgggcggaaaca

SEQ ID NO: 31282 - DNA, 17 bp, Homo sapiens
  source 1..17: mol_type = genomic DNA
aaaccgggcggaaacac

SEQ ID NO: 31283 - DNA, 18 bp, Homo sapiens
  source 1..18: mol_type = genomic DNA
aaaccgggcggaaacacc

SEQ ID NO: 31284 - DNA, 19 bp, Homo sapiens
  source 1..19: mol_type = genomic DNA
aaaccgggcggaaacacca

SEQ ID NO: 31285 - DNA, 16 bp, Homo sapiens
  source 1..16: mol_type = genomic DNA
aaacctgccggggctt

SEQ ID NO: 31286 - DNA, 18 bp, Homo sapiens
  source 1..18: mol_type = genomic DNA
aaacctgccggggcttcc

SEQ ID NO: 31287 - DNA, 19 bp, Homo sapiens
  source 1..19: mol_type = genomic DNA
aaacctgccggggcttcca

SEQ ID NO: 31288 - DNA, 18 bp, Homo sapiens
  source 1..18: mol_type = genomic DNA
aaacgaatgatttcgact

SEQ ID NO: 31289 - DNA, 19 bp, Homo sapiens
  source 1..19: mol_type = genomic DNA
aaacgaatgatttcgactc

SEQ ID NO: 31290 - DNA, 20 bp, Homo sapiens
  source 1..20: mol_type = genomic DNA
aaacgaatgatttcgactca

SEQ ID NO: 31291 - DNA, 17 bp, Homo sapiens
  source 1..17: mol_type = genomic DNA
aaactgggcggaaacac

SEQ ID NO: 31292 - DNA, 18 bp, Homo sapiens
  source 1..18: mol_type = genomic DNA
aaactgggcggaaacacc

SEQ ID NO: 31293 - DNA, 16 bp, Homo sapiens
  source 1..16: mol_type = genomic DNA
aaagactttttctctg

SEQ ID NO: 31294 - DNA, 17 bp, Homo sapiens
  source 1..17: mol_type = genomic DNA
aaagactttttctctga

SEQ ID NO: 31295 - DNA, 18 bp, Homo sapiens
  source 1..18: mol_type = genomic DNA
aaagactttttctctgac

SEQ ID NO: 31296 - DNA, 19 bp, Homo sapiens
  source 1..19: mol_type = genomic DNA
aaagactttttctctgacc

SEQ ID NO: 31297 - DNA, 20 bp, Homo sapiens
  source 1..20: mol_type = genomic DNA
aaagactttttctctgacca

SEQ ID NO: 31298 - DNA, 16 bp, Homo sapiens
  source 1..16: mol_type = genomic DNA
aaagattaagagaacc

SEQ ID NO: 31299 - DNA, 35 bp, Homo sapiens; identical to SEQ ID NO: 362
  source 1..35: mol_type = genomic DNA

SEQ ID NO: 31300 - DNA, 36 bp, Homo sapiens; identical to SEQ ID NO: 363
  source 1..36: mol_type = genomic DNA

SEQ ID NO: 31301 - DNA, 37 bp, Homo sapiens; identical to SEQ ID NO: 364
  source 1..37: mol_type = genomic DNA

SEQ ID NO: 31302 - DNA, 32 bp, Homo sapiens; identical to SEQ ID NO: 370
  source 1..32: mol_type = genomic DNA

SEQ ID NO: 31303 - DNA, 33 bp, Homo sapiens; identical to SEQ ID NO: 371
  source 1..33: mol_type = genomic DNA

SEQ ID NO: 31304 - DNA, 43 bp, Homo sapiens; identical to SEQ ID NO: 380
  source 1..43: mol_type = genomic DNA

SEQ ID NO: 31305 - DNA, 17 bp, Homo sapiens
  source 1..17: mol_type = genomic DNA
aaagctcacaagaactg

SEQ ID NO: 31306 - DNA, 16 bp, Homo sapiens
  source 1..16: mol_type = genomic DNA
aaaggtccccggttcg

SEQ ID NO: 31307 - DNA, 31 bp, Homo sapiens; identical to SEQ ID NO: 438
  source 1..31: mol_type = genomic DNA

SEQ ID NO: 31308 - DNA, 32 bp, Homo sapiens
  source 1..32: mol_type = genomic DNA
aaaggtccccggttcgaaaccgggcggaaaca

SEQ ID NO: 31309 - DNA, 33 bp, Homo sapiens
  source 1..33: mol_type = genomic DNA
aaaggtccccggttcgaaaccgggcggaaacac

SEQ ID NO: 31310 - DNA, 34 bp, Homo sapiens; identical to SEQ ID NO: 439
  source 1..34: mol_type = genomic DNA

SEQ ID NO: 31311 - DNA, 16 bp, Homo sapiens
  source 1..16: mol_type = genomic DNA
aaaggtccctggttcg

SEQ ID NO: 31312 - DNA, 33 bp, Homo sapiens; identical to SEQ ID NO: 444
  source 1..33: mol_type = genomic DNA

SEQ ID NO: 31313 - DNA, 33 bp, Homo sapiens; identical to SEQ ID NO: 449
  source 1..33: mol_type = genomic DNA

SEQ ID NO: 31314 - DNA, 34 bp, Homo sapiens; identical to SEQ ID NO: 450
  source 1..34: mol_type = genomic DNA

SEQ ID NO: 31315 - DNA, 16 bp, Homo sapiens
  source 1..16: mol_type = genomic DNA
aaaggttggtggttcg

SEQ ID NO: 31316 - DNA, 31 bp, Homo sapiens; identical to SEQ ID NO: 453
  source 1..31: mol_type = genomic DNA

SEQ ID NO: 31317 - DNA, 33 bp, Homo sapiens; identical to SEQ ID NO: 454
  source 1..33: mol_type = genomic DNA

SEQ ID NO: 31318 - DNA, 34 bp, Homo sapiens; identical to SEQ ID NO: 455
  source 1..34: mol_type = genomic DNA

SEQ ID NO: 31319 - DNA, 34 bp, Homo sapiens; identical to SEQ ID NO: 457
  source 1..34: mol_type = genomic DNA

SEQ ID NO: 31320 - DNA, 33 bp, Homo sapiens; identical to SEQ ID NO: 458
  source 1..33: mol_type = genomic DNA

SEQ ID NO: 31321 - DNA, 34 bp, Homo sapiens; identical to SEQ ID NO: 459
  source 1..34: mol_type = genomic DNA

SEQ ID NO: 31322 - DNA, 33 bp, Homo sapiens; identical to SEQ ID NO: 461
  source 1..33: mol_type = genomic DNA

SEQ ID NO: 31323 - DNA, 34 bp, Homo sapiens; identical to SEQ ID NO: 462
  source 1..34: mol_type = genomic DNA

SEQ ID NO: 31324 - DNA, 16 bp, Homo sapiens
  source 1..16: mol_type = genomic DNA
aaataagctatcgggc

SEQ ID NO: 31325 - DNA, 17 bp, Homo sapiens
  source 1..17: mol_type = genomic DNA
aaataagctatcgggcc

SEQ ID NO: 31326 - DNA, 18 bp, Homo sapiens
  source 1..18: mol_type = genomic DNA
aaataagctatcgggccc

SEQ ID NO: 31327 - DNA, 19 bp, Homo sapiens
  source 1..19: mol_type = genomic DNA
aaataagctatcgggccca

SEQ ID NO: 31328 - DNA, 28 bp, Homo sapiens
  source 1..28: mol_type = genomic DNA
aaataagctatcgggcccataccccgaa

SEQ ID NO: 31329 - DNA, 29 bp, Homo sapiens
  source 1..29: mol_type = genomic DNA
aaataagctatcgggcccataccccgaaa

SEQ ID NO: 31330 - DNA, 39 bp, Homo sapiens; identical to SEQ ID NO: 509
  source 1..39: mol_type = genomic DNA

SEQ ID NO: 31331 - DNA, 34 bp, Homo sapiens; identical to SEQ ID NO: 528
  source 1..34: mol_type = genomic DNA

SEQ ID NO: 31332 - DNA, 35 bp, Homo sapiens; identical to SEQ ID NO: 529
  source 1..35: mol_type = genomic DNA

SEQ ID NO: 31333 - DNA, 44 bp, Homo sapiens; identical to SEQ ID NO: 541
  source 1..44: mol_type = genomic DNA

SEQ ID NO: 31334 - DNA, 45 bp, Homo sapiens; identical to SEQ ID NO: 542
  source 1..45: mol_type = genomic DNA

SEQ ID NO: 31335 - DNA, 17 bp, Homo sapiens
  source 1..17: mol_type = genomic DNA
aaatcacgtcggggtca

SEQ ID NO: 31336 - DNA, 18 bp, Homo sapiens
  source 1..18: mol_type = genomic DNA
aaatcacgtcggggtcac

SEQ ID NO: 31337 - DNA, 19 bp, Homo sapiens
  source 1..19: mol_type = genomic DNA
aaatcacgtcggggtcacc

SEQ ID NO: 31338 - DNA, 16 bp, Homo sapiens
  source 1..16: mol_type = genomic DNA
aaatcccggacgagcc

SEQ ID NO: 31339 - DNA, 17 bp, Homo sapiens
  source 1..17: mol_type = genomic DNA
aaatcccggacgagccc

SEQ ID NO: 31340 - DNA, 18 bp, Homo sapiens
  source 1..18: mol_type = genomic DNA
aaatcccggacgagcccc

SEQ ID NO: 31341 - DNA, 19 bp, Homo sapiens
  source 1..19: mol_type = genomic DNA
aaatcccggacgagccccc

SEQ ID NO: 31342 - DNA, 20 bp, Homo sapiens
  source 1..20: mol_type = genomic DNA
aaatcccggacgagccccca

SEQ ID NO: 31343 - DNA, 18 bp, Homo sapiens
  source 1..18: mol_type = genomic DNA
aaatccgggtgccccctc

SEQ ID NO: 31344 - DNA, 17 bp, Homo sapiens
  source 1..17: mol_type = genomic DNA
aaatctcgctggggcct

SEQ ID NO: 31345 - DNA, 18 bp, Homo sapiens
  source 1..18: mol_type = genomic DNA
aaatctcgctggggcctc

SEQ ID NO: 31346 - DNA, 19 bp, Homo sapiens
  source 1..19: mol_type = genomic DNA
aaatctcgctggggcctcc

SEQ ID NO: 31347 - DNA, 16 bp, Homo sapiens
  source 1..16: mol_type = genomic DNA
aaatctcggtggaacc

SEQ ID NO: 31348 - DNA, 17 bp, Homo sapiens
  source 1..17: mol_type = genomic DNA
aaatctcggtggaacct

SEQ ID NO: 31349 - DNA, 18 bp, Homo sapiens
  source 1..18: mol_type = genomic DNA
aaatctcggtggaacctc

SEQ ID NO: 31350 - DNA, 19 bp, Homo sapiens
  source 1..19: mol_type = genomic DNA
aaatctcggtggaacctcc

SEQ ID NO: 31351 - DNA, 17 bp, Homo sapiens
  source 1..17: mol_type = genomic DNA
aaatctcggtgggacct

SEQ ID NO: 31352 - DNA, 18 bp, Homo sapiens
  source 1..18: mol_type = genomic DNA
aaatctcggtgggacctc

SEQ ID NO: 31353 - DNA, 19 bp, Homo sapiens
  source 1..19: mol_type = genomic DNA
aaatctcggtgggacctcc

SEQ ID NO: 31354 - DNA, 25 bp, Homo sapiens
  source 1..25: mol_type = genomic DNA
aaatggctgagtgaagcattggact

SEQ ID NO: 31355 - DNA, 16 bp, Homo sapiens
  source 1..16: mol_type = genomic DNA
aaatggtagagcgctc

SEQ ID NO: 31356 - DNA, 18 bp, Homo sapiens
  source 1..18: mol_type = genomic DNA
aaatggtagagcgctcgc

SEQ ID NO: 31357 - DNA, 16 bp, Homo sapiens
  source 1..16: mol_type = genomic DNA
aaatgttggttatacc

SEQ ID NO: 31358 - DNA, 23 bp, Homo sapiens
  source 1..23: mol_type = genomic DNA
aaatgttggttatacccttcccg

SEQ ID NO: 31359 - DNA, 28 bp, Homo sapiens
  source 1..28: mol_type = genomic DNA
aaatgttggttatacccttcccgtacta

SEQ ID NO: 31360 - DNA, 30 bp, Homo sapiens; identical to SEQ ID NO: 627
  source 1..30: mol_type = genomic DNA

SEQ ID NO: 31361 - DNA, 31 bp, Homo sapiens; identical to SEQ ID NO: 628
  source 1..31: mol_type = genomic DNA

SEQ ID NO: 31362 - DNA, 16 bp, Homo sapiens
  source 1..16: mol_type = genomic DNA
aaatgtttagacgggc

SEQ ID NO: 31363 - DNA, 17 bp, Homo sapiens
  source 1..17: mol_type = genomic DNA
aaatgtttagacgggct

SEQ ID NO: 31364 - DNA, 18 bp, Homo sapiens
  source 1..18: mol_type = genomic DNA
aaatgtttagacgggctc

SEQ ID NO: 31365 - DNA, 19 bp, Homo sapiens
  source 1..19: mol_type = genomic DNA
aaatgtttagacgggctca

SEQ ID NO: 31366 - DNA, 20 bp, Homo sapiens
  source 1..20: mol_type = genomic DNA
aaatgtttagacgggctcac

SEQ ID NO: 31367 - DNA, 37 bp, Homo sapiens; identical to SEQ ID NO: 647
  source 1..37: mol_type = genomic DNA

SEQ ID NO: 31368 - DNA, 35 bp, Homo sapiens; identical to SEQ ID NO: 680
  source 1..35: mol_type = genomic DNA

SEQ ID NO: 31369 - DNA, 36 bp, Homo sapiens; identical to SEQ ID NO: 681
  source 1..36: mol_type = genomic DNA

SEQ ID NO: 31370 - DNA, 20 bp, Homo sapiens
  source 1..20: mol_type = genomic DNA
aacaacatggctttctcacc

SEQ ID NO: 31371 - DNA, 21 bp, Homo sapiens
  source 1..21: mol_type = genomic DNA
aacaacatggctttctcacca

SEQ ID NO: 31372 - DNA, 16 bp, Homo sapiens
  source 1..16: mol_type = genomic DNA
aacacaaagcacccaa

SEQ ID NO: 31373 - DNA, 18 bp, Homo sapiens
  source 1..18: mol_type = genomic DNA
aacacctctttacagtga

SEQ ID NO: 31374 - DNA, 19 bp, Homo sapiens
  source 1..19: mol_type = genomic DNA
aacacctctttacagtgac

SEQ ID NO: 31375 - DNA, 21 bp, Homo sapiens
  source 1..21: mol_type = genomic DNA
aacacctctttacagtgacca

SEQ ID NO: 31376 - DNA, 16 bp, Homo sapiens
  source 1..16: mol_type = genomic DNA
aacagaggcttacgac

SEQ ID NO: 31377 - DNA, 17 bp, Homo sapiens
  source 1..17: mol_type = genomic DNA
aacagaggcttacgacc

SEQ ID NO: 31378 - DNA, 30 bp, Homo sapiens; identical to SEQ ID NO: 746
  source 1..30: mol_type = genomic DNA

SEQ ID NO: 31379 - DNA, 31 bp, Homo sapiens; identical to SEQ ID NO: 747
  source 1..31: mol_type = genomic DNA

SEQ ID NO: 31380 - DNA, 18 bp, Homo sapiens
  source 1..18: mol_type = genomic DNA
aacagctatccattggtc

SEQ ID NO: 31381 - DNA, 19 bp, Homo sapiens
  source 1..19: mol_type = genomic DNA
aacagctatccattggtct

SEQ ID NO: 31382 - DNA, 36 bp, Homo sapiens; identical to SEQ ID NO: 773
  source 1..36: mol_type = genomic DNA

SEQ ID NO: 31383 - DNA, 37 bp, Homo sapiens; identical to SEQ ID NO: 774
  source 1..37: mol_type = genomic DNA

SEQ ID NO: 31384 - DNA, 38 bp, Homo sapiens; identical to SEQ ID NO: 775
  source 1..38: mol_type = genomic DNA

SEQ ID NO: 31385 - DNA, 36 bp, Homo sapiens; identical to SEQ ID NO: 779
  source 1..36: mol_type = genomic DNA

SEQ ID NO: 31386 - DNA, 37 bp, Homo sapiens; identical to SEQ ID NO: 780
  source 1..37: mol_type = genomic DNA

SEQ ID NO: 31387 - DNA, 38 bp, Homo sapiens; identical to SEQ ID NO: 781
  source 1..38: mol_type = genomic DNA

SEQ ID NO: 31388 - DNA, 18 bp, Homo sapiens
  source 1..18: mol_type = genomic DNA
aacatcagattgtgaatc

SEQ ID NO: 31389 - DNA, 20 bp, Homo sapiens
  source 1..20: mol_type = genomic DNA
aacatcagattgtgaatctg

SEQ ID NO: 31390 - DNA, 31 bp, Homo sapiens; identical to SEQ ID NO: 800
  source 1..31: mol_type = genomic DNA

SEQ ID NO: 31391 - DNA, 32 bp, Homo sapiens; identical to SEQ ID NO: 801
  source 1..32: mol_type = genomic DNA

SEQ ID NO: 31392 - DNA, 33 bp, Homo sapiens; identical to SEQ ID NO: 802
  source 1..33: mol_type = genomic DNA

SEQ ID NO: 31393 - DNA, 36 bp, Homo sapiens; identical to SEQ ID NO: 805
  source 1..36: mol_type = genomic DNA

SEQ ID NO: 31394 - DNA, 37 bp, Homo sapiens; identical to SEQ ID NO: 806
  source 1..37: mol_type = genomic DNA

SEQ ID NO: 31395 - DNA, 38 bp, Homo sapiens; identical to SEQ ID NO: 807
  source 1..38: mol_type = genomic DNA

SEQ ID NO: 31396 - DNA, 39 bp, Homo sapiens; identical to SEQ ID NO: 808
  source 1..39: mol_type = genomic DNA

SEQ ID NO: 31397 - DNA, 40 bp, Homo sapiens; identical to SEQ ID NO: 809
  source 1..40: mol_type = genomic DNA

SEQ ID NO: 31398 - DNA, 41 bp, Homo sapiens; identical to SEQ ID NO: 810
  source 1..41: mol_type = genomic DNA

SEQ ID NO: 31399 - DNA, 42 bp, Homo sapiens; identical to SEQ ID NO: 811
  source 1..42: mol_type = genomic DNA

SEQ ID NO: 31400 - DNA, 43 bp, Homo sapiens; identical to SEQ ID NO: 812
  source 1..43: mol_type = genomic DNA

SEQ ID NO: 31401 - DNA, 44 bp, Homo sapiens; identical to SEQ ID NO: 813
  source 1..44: mol_type = genomic DNA

SEQ ID NO: 31402 - DNA, 18 bp, Homo sapiens
  source 1..18: mol_type = genomic DNA
aacatggctttctcacca

SEQ ID NO: 31403 - DNA, 19 bp, Homo sapiens
  source 1..19: mol_type = genomic DNA
aaccaaaacatcagattgt

SEQ ID NO: 31404 - DNA, 23 bp, Homo sapiens
  source 1..23: mol_type = genomic DNA
aaccaaaacatcagattgtgaat

SEQ ID NO: 31405 - DNA, 24 bp, Homo sapiens
  source 1..24: mol_type = genomic DNA
aaccaaaacatcagattgtgaatc

SEQ ID NO: 31406 - DNA, 37 bp, Homo sapiens; identical to SEQ ID NO: 841
  source 1..37: mol_type = genomic DNA

SEQ ID NO: 31407 - DNA, 38 bp, Homo sapiens; identical to SEQ ID NO: 842
  source 1..38: mol_type = genomic DNA

SEQ ID NO: 31408 - DNA, 22 bp, Homo sapiens
  source 1..22: mol_type = genomic DNA
aaccaacacctctttacagtga

SEQ ID NO: 31409 - DNA, 23 bp, Homo sapiens
  source 1..23: mol_type = genomic DNA
aaccaacacctctttacagtgac

SEQ ID NO: 31410 - DNA, 16 bp, Homo sapiens
  source 1..16: mol_type = genomic DNA
aaccaggcggaaacac

SEQ ID NO: 31411 - DNA, 17 bp, Homo sapiens
  source 1..17: mol_type = genomic DNA
aaccaggcggaaacacc

SEQ ID NO: 31412 - DNA, 36 bp, Homo sapiens; identical to SEQ ID NO: 869
  source 1..36: mol_type = genomic DNA

SEQ ID NO: 31413 - DNA, 38 bp, Homo sapiens; identical to SEQ ID NO: 871
  source 1..38: mol_type = genomic DNA

SEQ ID NO: 31414 - DNA, 39 bp, Homo sapiens
  source 1..39: mol_type = genomic DNA
aaccaggggtcgcgagttcaaatctcgctggggcctcca

SEQ ID NO: 31415 - DNA, 36 bp, Homo sapiens
  source 1..36: mol_type = genomic DNA
aaccaggggtcgcgagttcgatcctcgctggggcct

SEQ ID NO: 31416 - DNA, 16 bp, Homo sapiens
  source 1..16: mol_type = genomic DNA
aaccatcctctgctac

SEQ ID NO: 31417 - DNA, 17 bp, Homo sapiens
  source 1..17: mol_type = genomic DNA
aaccatcctctgctacc

SEQ ID NO: 31418 - DNA, 18 bp, Homo sapiens
  source 1..18: mol_type = genomic DNA
aaccatcctctgctacca

SEQ ID NO: 31419 - DNA, 20 bp, Homo sapiens
  source 1..20: mol_type = genomic DNA
aacccagaggtcgatggatc

SEQ ID NO: 31420 - DNA, 21 bp, Homo sapiens
  source 1..21: mol_type = genomic DNA
aacccagaggtcgatggatcg

SEQ ID NO: 31421 - DNA, 19 bp, Homo sapiens
  source 1..19: mol_type = genomic DNA
aaccccactcctggtacca

SEQ ID NO: 31422 - DNA, 16 bp, Homo sapiens
  source 1..16: mol_type = genomic DNA
aaccccgtccgtgcct

SEQ ID NO: 31423 - DNA, 17 bp, Homo sapiens
  source 1..17: mol_type = genomic DNA
aaccccgtccgtgcctc

SEQ ID NO: 31424 - DNA, 18 bp, Homo sapiens
  source 1..18: mol_type = genomic DNA
aaccctgctcgctgcgcc

SEQ ID NO: 31425 - DNA, 19 bp, Homo sapiens
  source 1..19: mol_type = genomic DNA
aaccctgctcgctgcgcca

SEQ ID NO: 31426 - DNA, 35 bp, Homo sapiens
  source 1..35: mol_type = genomic DNA
aaccgaagatcacgggttcgaaccccgtccgtgcc

SEQ ID NO: 31427 - DNA, 36 bp, Homo sapiens; identical to SEQ ID NO: 918
  source 1..36: mol_type = genomic DNA

SEQ ID NO: 31428 - DNA, 37 bp, Homo sapiens; identical to SEQ ID NO: 919
  source 1..37: mol_type = genomic DNA

SEQ ID NO: 31429 - DNA, 38 bp, Homo sapiens; identical to SEQ ID NO: 920
  source 1..38: mol_type = genomic DNA

SEQ ID NO: 31430 - DNA, 19 bp, Homo sapiens
  source 1..19: mol_type = genomic DNA
aaccgaagatcgcgggttc

SEQ ID NO: 31431 - DNA, 20 bp, Homo sapiens
  source 1..20: mol_type = genomic DNA
aaccgaagatcgcgggttcg

SEQ ID NO: 31432 - DNA, 23 bp, Homo sapiens
  source 1..23: mol_type = genomic DNA
aaccgaagatcgcgggttcgaac

SEQ ID NO: 31433 - DNA, 36 bp, Homo sapiens; identical to SEQ ID NO: 929
  source 1..36: mol_type = genomic DNA

SEQ ID NO: 31434 - DNA, 37 bp, Homo sapiens; identical to SEQ ID NO: 930
  source 1..37: mol_type = genomic DNA

SEQ ID NO: 31435 - DNA, 38 bp, Homo sapiens; identical to SEQ ID NO: 931
  source 1..38: mol_type = genomic DNA

SEQ ID NO: 31436 - DNA, 16 bp, Homo sapiens
  source 1..16: mol_type = genomic DNA
aaccggagatgaaaac

SEQ ID NO: 31437 - DNA, 17 bp, Homo sapiens
  source 1..17: mol_type = genomic DNA
aaccggagatgaaaacc

SEQ ID NO: 31438 - DNA, 30 bp, Homo sapiens; identical to SEQ ID NO: 946
  source 1..30: mol_type = genomic DNA

SEQ ID NO: 31439 - DNA, 32 bp, Homo sapiens; identical to SEQ ID NO: 948
  source 1..32: mol_type = genomic DNA

SEQ ID NO: 31440 - DNA, 33 bp, Homo sapiens; identical to SEQ ID NO: 949
  source 1..33: mol_type = genomic DNA

SEQ ID NO: 31441 - DNA, 34 bp, Homo sapiens; identical to SEQ ID NO: 950
  source 1..34: mol_type = genomic DNA

SEQ ID NO: 31442 - DNA, 16 bp, Homo sapiens
  source 1..16: mol_type = genomic DNA
aaccgggcagaaacac

SEQ ID NO: 31443 - DNA, 17 bp, Homo sapiens
  source 1..17: mol_type = genomic DNA
aaccgggcagaaacacc

SEQ ID NO: 31444 - DNA, 16 bp, Homo sapiens
  source 1..16: mol_type = genomic DNA
aaccgggcagaagcac

SEQ ID NO: 31445 - DNA, 17 bp, Homo sapiens
  source 1..17: mol_type = genomic DNA
aaccgggcagaagcacc

SEQ ID NO: 31446 - DNA, 18 bp, Homo sapiens
  source 1..18: mol_type = genomic DNA
aaccgggcagaagcacca

SEQ ID NO: 31447 - DNA, 16 bp, Homo sapiens
  source 1..16: mol_type = genomic DNA
aaccgggcggaaacac

SEQ ID NO: 31448 - DNA, 17 bp, Homo sapiens
  source 1..17: mol_type = genomic DNA
aaccgggcggaaacacc

SEQ ID NO: 31449 - DNA, 18 bp, Homo sapiens
  source 1..18: mol_type = genomic DNA
aaccgggcggaaacacca

SEQ ID NO: 31450 - DNA, 27 bp, Homo sapiens
  source 1..27: mol_type = genomic DNA
aacctcggttcgaatccgagtcacggc

SEQ ID NO: 31451 - DNA, 29 bp, Homo sapiens
  source 1..29: mol_type = genomic DNA
aacctcggttcgaatccgagtcacggcac

SEQ ID NO: 31452 - DNA, 17 bp, Homo sapiens
  source 1..17: mol_type = genomic DNA
aacctgccggggcttcc

SEQ ID NO: 31453 - DNA, 18 bp, Homo sapiens
  source 1..18: mol_type = genomic DNA
aacctgccggggcttcca

SEQ ID NO: 31454 - DNA, 17 bp, Homo sapiens
  source 1..17: mol_type = genomic DNA
aacgaatgatttcgact

SEQ ID NO: 31455 - DNA, 18 bp, Homo sapiens
  source 1..18: mol_type = genomic DNA
aacgaatgatttcgactc

SEQ ID NO: 31456 - DNA, 38 bp, Homo sapiens; identical to SEQ ID NO: 1011
  source 1..38: mol_type = genomic DNA

SEQ ID NO: 31457 - DNA, 39 bp, Homo sapiens; identical to SEQ ID NO: 1012
  source 1..39: mol_type = genomic DNA

SEQ ID NO: 31458 - DNA, 17 bp, Homo sapiens
  source 1..17: mol_type = genomic DNA
aactaagtgtttgtggg

SEQ ID NO: 31459 - DNA, 31 bp, Homo sapiens; identical to SEQ ID NO: 1069
  source 1..31: mol_type = genomic DNA

SEQ ID NO: 31460 - DNA, 32 bp, Homo sapiens; identical to SEQ ID NO: 1070
  source 1..32: mol_type = genomic DNA

SEQ ID NO: 31461 - DNA, 39 bp, Homo sapiens; identical to SEQ ID NO: 1077
  source 1..39: mol_type = genomic DNA

SEQ ID NO: 31462 - DNA, 40 bp, Homo sapiens; identical to SEQ ID NO: 1078
  source 1..40: mol_type = genomic DNA

SEQ ID NO: 31463 - DNA, 20 bp, Homo sapiens
  source 1..20: mol_type = genomic DNA
aactgctaactcatgccccc

SEQ ID NO: 31464 - DNA, 38 bp, Homo sapiens; identical to SEQ ID NO: 1105
  source 1..38: mol_type = genomic DNA

SEQ ID NO: 31465 - DNA, 46 bp, Homo sapiens; identical to SEQ ID NO: 1113
  source 1..46: mol_type = genomic DNA

SEQ ID NO: 31466 - DNA, 47 bp, Homo sapiens; identical to SEQ ID NO: 1114
  source 1..47: mol_type = genomic DNA

SEQ ID NO: 31467 - DNA, 16 bp, Homo sapiens
  source 1..16: mol_type = genomic DNA
aactgggcggaaacac

SEQ ID NO: 31468 - DNA, 17 bp, Homo sapiens
  source 1..17: mol_type = genomic DNA
aactgggcggaaacacc

SEQ ID NO: 31469 - DNA, 38 bp, Homo sapiens; identical to SEQ ID NO: 1126
  source 1..38: mol_type = genomic DNA

SEQ ID NO: 31470 - DNA, 17 bp, Homo sapiens
  source 1..17: mol_type = genomic DNA
aacttaacttgaccgct

SEQ ID NO: 31471 - DNA, 20 bp, Homo sapiens
  source 1..20: mol_type = genomic DNA
aacttaacttgaccgctctg

SEQ ID NO: 31472 - DNA, 21 bp, Homo sapiens
  source 1..21: mol_type = genomic DNA
aacttaacttgaccgctctga

SEQ ID NO: 31473 - DNA, 22 bp, Homo sapiens
  source 1..22: mol_type = genomic DNA
aacttaacttgaccgctctgac

SEQ ID NO: 31474 - DNA, 23 bp, Homo sapiens
  source 1..23: mol_type = genomic DNA
aacttaacttgaccgctctgacc

SEQ ID NO: 31475 - DNA, 24 bp, Homo sapiens
  source 1..24: mol_type = genomic DNA
aacttaacttgaccgctctgacca

SEQ ID NO: 31476 - DNA, 16 bp, Homo sapiens
  source 1..16: mol_type = genomic DNA
aacttacacttaggag

SEQ ID NO: 31477 - DNA, 35 bp, Homo sapiens; identical to SEQ ID NO: 1156
  source 1..35: mol_type = genomic DNA

SEQ ID NO: 31478 - DNA, 38 bp, Homo sapiens; identical to SEQ ID NO: 1159
  source 1..38: mol_type = genomic DNA

SEQ ID NO: 31479 - DNA, 39 bp, Homo sapiens; identical to SEQ ID NO: 1160
  source 1..39: mol_type = genomic DNA

SEQ ID NO: 31480 - DNA, 40 bp, Homo sapiens; identical to SEQ ID NO: 1161
  source 1..40: mol_type = genomic DNA

SEQ ID NO: 31481 - DNA, 41 bp, Homo sapiens; identical to SEQ ID NO: 1162
  source 1..41: mol_type = genomic DNA

SEQ ID NO: 31482 - DNA, 42 bp, Homo sapiens; identical to SEQ ID NO: 1163
  source 1..42: mol_type = genomic DNA

SEQ ID NO: 31483 - DNA, 43 bp, Homo sapiens; identical to SEQ ID NO: 1164
  source 1..43: mol_type = genomic DNA

SEQ ID NO: 31484 - DNA, 44 bp, Homo sapiens; identical to SEQ ID NO: 1165
  source 1..44: mol_type = genomic DNA

SEQ ID NO: 31485 - DNA, 45 bp, Homo sapiens; identical to SEQ ID NO: 1166
  source 1..45: mol_type = genomic DNA

SEQ ID NO: 31486 - DNA, 16 bp, Homo sapiens
  source 1..16: mol_type = genomic DNA
aacttgaccgctctga

SEQ ID NO: 31487 - DNA, 17 bp, Homo sapiens
  source 1..17: mol_type = genomic DNA
aacttgaccgctctgac

SEQ ID NO: 31488 - DNA, 18 bp, Homo sapiens
  source 1..18: mol_type = genomic DNA
aacttgaccgctctgacc

SEQ ID NO: 31489 - DNA, 19 bp, Homo sapiens
  source 1..19: mol_type = genomic DNA
aacttgaccgctctgacca

SEQ ID NO: 31490 - DNA, 19 bp, Homo sapiens
  source 1..19: mol_type = genomic DNA
aactttacagtcagaggtt

SEQ ID NO: 31491 - DNA, 27 bp, Homo sapiens
  source 1..27: mol_type = genomic DNA
aactttgtcaaagttaaattataggct

SEQ ID NO: 31492 - DNA, 18 bp, Homo sapiens
  source 1..18: mol_type = genomic DNA
aagaactgctaactcatg

SEQ ID NO: 31493 - DNA, 19 bp, Homo sapiens
  source 1..19: mol_type = genomic DNA
aagaactgctaactcatgc

SEQ ID NO: 31494 - DNA, 20 bp, Homo sapiens
  source 1..20: mol_type = genomic DNA
aagaactgctaactcatgcc

SEQ ID NO: 31495 - DNA, 21 bp, Homo sapiens
  source 1..21: mol_type = genomic DNA
aagaactgctaactcatgccc

SEQ ID NO: 31496 - DNA, 23 bp, Homo sapiens
  source 1..23: mol_type = genomic DNA
aagaactgctaactcatgccccc

SEQ ID NO: 31497 - DNA, 26 bp, Homo sapiens
  source 1..26: mol_type = genomic DNA
aagaactgctaactcatgcccccatg

SEQ ID NO: 31498 - DNA, 27 bp, Homo sapiens
  source 1..27: mol_type = genomic DNA
aagaactgctaactcatgcccccatgt

SEQ ID NO: 31499 - DNA, 28 bp, Homo sapiens
  source 1..28: mol_type = genomic DNA
aagaactgctaactcatgcccccatgtc

SEQ ID NO: 31500 - DNA, 29 bp, Homo sapiens
  source 1..29: mol_type = genomic DNA
aagaactgctaactcatgcccccatgtct

SEQ ID NO: 31501 - DNA, 33 bp, Homo sapiens; identical to SEQ ID NO: 1230
  source 1..33: mol_type = genomic DNA

SEQ ID NO: 31502 - DNA, 36 bp, Homo sapiens; identical to SEQ ID NO: 1233
  source 1..36: mol_type = genomic DNA

SEQ ID NO: 31503 - DNA, 39 bp, Homo sapiens; identical to SEQ ID NO: 1236
  source 1..39: mol_type = genomic DNA

SEQ ID NO: 31504 - DNA, 40 bp, Homo sapiens; identical to SEQ ID NO: 1237
  source 1..40: mol_type = genomic DNA

SEQ ID NO: 31505 - DNA, 41 bp, Homo sapiens; identical to SEQ ID NO: 1238
  source 1..41: mol_type = genomic DNA

SEQ ID NO: 31506 - DNA, 42 bp, Homo sapiens; identical to SEQ ID NO: 1239
  source 1..42: mol_type = genomic DNA

SEQ ID NO: 31507 - DNA, 44 bp, Homo sapiens; identical to SEQ ID NO: 1241
  source 1..44: mol_type = genomic DNA

SEQ ID NO: 31508 - DNA, 45 bp, Homo sapiens; identical to SEQ ID NO: 1242
  source 1..45: mol_type = genomic DNA

SEQ ID NO: 31509 - DNA, 46 bp, Homo sapiens; identical to SEQ ID NO: 1243
  source 1..46: mol_type = genomic DNA

SEQ ID NO: 31510 - DNA, 47 bp, Homo sapiens; identical to SEQ ID NO: 1244
  source 1..47: mol_type = genomic DNA

SEQ ID NO: 31511 - DNA, 20 bp, Homo sapiens
  source 1..20: mol_type = genomic DNA
aagaagcagcttcaaacctg

SEQ ID NO: 31512 - DNA, 26 bp, Homo sapiens
  source 1..26: mol_type = genomic DNA
aagaagcagcttcaaacctgccgggg

SEQ ID NO: 31513 - DNA, 27 bp, Homo sapiens
  source 1..27: mol_type = genomic DNA
aagaagcagcttcaaacctgccggggc

SEQ ID NO: 31514 - DNA, 28 bp, Homo sapiens
  source 1..28: mol_type = genomic DNA
aagaagcagcttcaaacctgccggggct

SEQ ID NO: 31515 - DNA, 29 bp, Homo sapiens
  source 1..29: mol_type = genomic DNA
aagaagcagcttcaaacctgccggggctt

SEQ ID NO: 31516 - DNA, 30 bp, Homo sapiens; identical to SEQ ID NO: 1254
  source 1..30: mol_type = genomic DNA

SEQ ID NO: 31517 - DNA, 31 bp, Homo sapiens; identical to SEQ ID NO: 1255
  source 1..31: mol_type = genomic DNA

SEQ ID NO: 31518 - DNA, 31 bp, Homo sapiens; identical to SEQ ID NO: 1269
  source 1..31: mol_type = genomic DNA

SEQ ID NO: 31519 - DNA, 16 bp, Homo sapiens
  source 1..16: mol_type = genomic DNA
aagactttttctctga

SEQ ID NO: 31520 - DNA, 17 bp, Homo sapiens
  source 1..17: mol_type = genomic DNA
aagactttttctctgac

SEQ ID NO: 31521 - DNA, 18 bp, Homo sapiens
  source 1..18: mol_type = genomic DNA
aagactttttctctgacc

SEQ ID NO: 31522 - DNA, 19 bp, Homo sapiens
  source 1..19: mol_type = genomic DNA
aagactttttctctgacca

SEQ ID NO: 31523 - DNA, 28 bp, Homo sapiens
  source 1..28: mol_type = genomic DNA
aagagaaccaacacctctttacagtgac

SEQ ID NO: 31524 - DNA, 29 bp, Homo sapiens
  source 1..29: mol_type = genomic DNA
aagagaaccaacacctctttacagtgacc

SEQ ID NO: 31525 - DNA, 30 bp, Homo sapiens; identical to SEQ ID NO: 1283
  source 1..30: mol_type = genomic DNA

SEQ ID NO: 31526 - DNA, 17 bp, Homo sapiens
  source 1..17: mol_type = genomic DNA
aagaggtccccggttca

SEQ ID NO: 31527 - DNA, 33 bp, Homo sapiens; identical to SEQ ID NO: 1293
  source 1..33: mol_type = genomic DNA

SEQ ID NO: 31528 - DNA, 34 bp, Homo sapiens; identical to SEQ ID NO: 1294
  source 1..34: mol_type = genomic DNA

SEQ ID NO: 31529 - DNA, 35 bp, Homo sapiens; identical to SEQ ID NO: 1295
  source 1..35: mol_type = genomic DNA

SEQ ID NO: 31530 - DNA, 35 bp, Homo sapiens; identical to SEQ ID NO: 1297
  source 1..35: mol_type = genomic DNA

SEQ ID NO: 31531 - DNA, 32 bp, Homo sapiens
  source 1..32: mol_type = genomic DNA
aagatcacgggttcgaaccccgtccgtgcctc

SEQ ID NO: 31532 - DNA, 19 bp, Homo sapiens
  source 1..19: mol_type = genomic DNA
aagatcgcgggttcgaacc

SEQ ID NO: 31533 - DNA, 32 bp, Homo sapiens
  source 1..32: mol_type = genomic DNA
aagatcgcgggttcgaaccccgtccgtgcctc

SEQ ID NO: 31534 - DNA, 21 bp, Homo sapiens
  source 1..21: mol_type = genomic DNA
aagattaagagaaccaacacc

SEQ ID NO: 31535 - DNA, 34 bp, Homo sapiens; identical to SEQ ID NO: 1345
  source 1..34: mol_type = genomic DNA

SEQ ID NO: 31536 - DNA, 35 bp, Homo sapiens; identical to SEQ ID NO: 1346
  source 1..35: mol_type = genomic DNA

SEQ ID NO: 31537 - DNA, 36 bp, Homo sapiens; identical to SEQ ID NO: 1347
  source 1..36: mol_type = genomic DNA

SEQ ID NO: 31538 - DNA, 26 bp, Homo sapiens
  source 1..26: mol_type = genomic DNA
aagattccaggttcgactcctggctg

SEQ ID NO: 31539 - DNA, 28 bp, Homo sapiens
  source 1..28: mol_type = genomic DNA
aagattccaggttcgactcctggctggc

SEQ ID NO: 31540 - DNA, 29 bp, Homo sapiens
  source 1..29: mol_type = genomic DNA
aagattccaggttcgactcctggctggct

SEQ ID NO: 31541 - DNA, 30 bp, Homo sapiens; identical to SEQ ID NO: 1352
  source 1..30: mol_type = genomic DNA

SEQ ID NO: 31542 - DNA, 31 bp, Homo sapiens; identical to SEQ ID NO: 1353
  source 1..31: mol_type = genomic DNA

SEQ ID NO: 31543 - DNA, 33 bp, Homo sapiens; identical to SEQ ID NO: 1355
  source 1..33: mol_type = genomic DNA

SEQ ID NO: 31544 - DNA, 28 bp, Homo sapiens
  source 1..28: mol_type = genomic DNA
aagattctaggttcgactcctggctggc

SEQ ID NO: 31545 - DNA, 30 bp, Homo sapiens; identical to SEQ ID NO: 1359
  source 1..30: mol_type = genomic DNA

SEQ ID NO: 31546 - DNA, 31 bp, Homo sapiens; identical to SEQ ID NO: 1360
  source 1..31: mol_type = genomic DNA

SEQ ID NO: 31547 - DNA, 33 bp, Homo sapiens; identical to SEQ ID NO: 1362
  source 1..33: mol_type = genomic DNA

SEQ ID NO: 31548 - DNA, 31 bp, Homo sapiens
  source 1..31: mol_type = genomic DNA
aagattgagggttcgaatcccttcgtggttg

SEQ ID NO: 31549 - DNA, 32 bp, Homo sapiens
  source 1..32: mol_type = genomic DNA
aagattgagggttcgaatcccttcgtggttgc

SEQ ID NO: 31550 - DNA, 19 bp, Homo sapiens
  source 1..19: mol_type = genomic DNA
aagattgagggttcgagtc

SEQ ID NO: 31551 - DNA, 22 bp, Homo sapiens
  source 1..22: mol_type = genomic DNA
aagattgagggttcgagtccct

SEQ ID NO: 31552 - DNA, 31 bp, Homo sapiens; identical to SEQ ID NO: 1370
  source 1..31: mol_type = genomic DNA

SEQ ID NO: 31553 - DNA, 32 bp, Homo sapiens; identical to SEQ ID NO: 1371
  source 1..32: mol_type = genomic DNA

SEQ ID NO: 31554 - DNA, 33 bp, Homo sapiens; identical to SEQ ID NO: 1372
  source 1..33: mol_type = genomic DNA

SEQ ID NO: 31555 - DNA, 34 bp, Homo sapiens; identical to SEQ ID NO: 1373
  source 1..34: mol_type = genomic DNA

SEQ ID NO: 31556 - DNA, 22 bp, Homo sapiens
  source 1..22: mol_type = genomic DNA
aagattgcaggttcgagtcctg

SEQ ID NO: 31557 - DNA, 30 bp, Homo sapiens; identical to SEQ ID NO: 1376
  source 1..30: mol_type = genomic DNA

SEQ ID NO: 31558 - DNA, 32 bp, Homo sapiens; identical to SEQ ID NO: 1378
  source 1..32: mol_type = genomic DNA

SEQ ID NO: 31559 - DNA, 33 bp, Homo sapiens; identical to SEQ ID NO: 1379
  source 1..33: mol_type = genomic DNA

SEQ ID NO: 31560 - DNA, 34 bp, Homo sapiens; identical to SEQ ID NO: 1380
  source 1..34: mol_type = genomic DNA

SEQ ID NO: 31561 - DNA, 31 bp, Homo sapiens; identical to SEQ ID NO: 1382
  source 1..31: mol_type = genomic DNA

SEQ ID NO: 31562 - DNA, 30 bp, Homo sapiens; identical to SEQ ID NO: 1397
  source 1..30: mol_type = genomic DNA

SEQ ID NO: 31563 - DNA, 17 bp, Homo sapiens
  source 1..17: mol_type = genomic DNA
aagcagcttcaaacctg

SEQ ID NO: 31564 - DNA, 23 bp, Homo sapiens
  source 1..23: mol_type = genomic DNA
aagcagcttcaaacctgccgggg

SEQ ID NO: 31565 - DNA, 24 bp, Homo sapiens
  source 1..24: mol_type = genomic DNA
aagcagcttcaaacctgccggggc

SEQ ID NO: 31566 - DNA, 25 bp, Homo sapiens
  source 1..25: mol_type = genomic DNA
aagcagcttcaaacctgccggggct

SEQ ID NO: 31567 - DNA, 26 bp, Homo sapiens
  source 1..26: mol_type = genomic DNA
aagcagcttcaaacctgccggggctt

SEQ ID NO: 31568 - DNA, 27 bp, Homo sapiens
  source 1..27: mol_type = genomic DNA
aagcagcttcaaacctgccggggcttc

SEQ ID NO: 31569 - DNA, 28 bp, Homo sapiens
  source 1..28: mol_type = genomic DNA
aagcagcttcaaacctgccggggcttcc

SEQ ID NO: 31570 - DNA, 20 bp, Homo sapiens
  source 1..20: mol_type = genomic DNA
aagccagggattgtgggttc

SEQ ID NO: 31571 - DNA, 21 bp, Homo sapiens
  source 1..21: mol_type = genomic DNA
aagccagggattgtgggttcg

SEQ ID NO: 31572 - DNA, 37 bp, Homo sapiens; identical to SEQ ID NO: 1465
  source 1..37: mol_type = genomic DNA

SEQ ID NO: 31573 - DNA, 39 bp, Homo sapiens; identical to SEQ ID NO: 1471
  source 1..39: mol_type = genomic DNA

SEQ ID NO: 31574 - DNA, 40 bp, Homo sapiens; identical to SEQ ID NO: 1476
  source 1..40: mol_type = genomic DNA

SEQ ID NO: 31575 - DNA, 30 bp, Homo sapiens; identical to SEQ ID NO: 1477
  source 1..30: mol_type = genomic DNA

SEQ ID NO: 31576 - DNA, 37 bp, Homo sapiens; identical to SEQ ID NO: 1482
  source 1..37: mol_type = genomic DNA

SEQ ID NO: 31577 - DNA, 38 bp, Homo sapiens; identical to SEQ ID NO: 1483
  source 1..38: mol_type = genomic DNA

SEQ ID NO: 31578 - DNA, 39 bp, Homo sapiens; identical to SEQ ID NO: 1484
  source 1..39: mol_type = genomic DNA

SEQ ID NO: 31579 - DNA, 40 bp, Homo sapiens; identical to SEQ ID NO: 1485
  source 1..40: mol_type = genomic DNA

SEQ ID NO: 31580 - DNA, 20 bp, Homo sapiens
  source 1..20: mol_type = genomic DNA
aagctatcgggcccataccc

SEQ ID NO: 31581 - DNA, 24 bp, Homo sapiens
  source 1..24: mol_type = genomic DNA
aagctatcgggcccataccccgaa

SEQ ID NO: 31582 - DNA, 25 bp, Homo sapiens
  source 1..25: mol_type = genomic DNA
aagctatcgggcccataccccgaaa

SEQ ID NO: 31583 - DNA, 21 bp, Homo sapiens
  source 1..21: mol_type = genomic DNA
aagctcacaagaactgctaac

SEQ ID NO: 31584 - DNA, 22 bp, Homo sapiens
  source 1..22: mol_type = genomic DNA
aagctcacaagaactgctaact

SEQ ID NO: 31585 - DNA, 31 bp, Homo sapiens; identical to SEQ ID NO: 1539
  source 1..31: mol_type = genomic DNA

SEQ ID NO: 31586 - DNA, 34 bp, Homo sapiens; identical to SEQ ID NO: 1542
  source 1..34: mol_type = genomic DNA

SEQ ID NO: 31587 - DNA, 24 bp, Homo sapiens
  source 1..24: mol_type = genomic DNA
aaggataacagctatccattggtc

SEQ ID NO: 31588 - DNA, 25 bp, Homo sapiens
  source 1..25: mol_type = genomic DNA
aaggataacagctatccattggtct

SEQ ID NO: 31589 - DNA, 30 bp, Homo sapiens; identical to SEQ ID NO: 1566
  source 1..30: mol_type = genomic DNA

SEQ ID NO: 31590 - DNA, 19 bp, Homo sapiens
  source 1..19: mol_type = genomic DNA
aaggctgcgtgttcgaatc

SEQ ID NO: 31591 - DNA, 22 bp, Homo sapiens
  source 1..22: mol_type = genomic DNA
aaggctgcgtgttcgaatcacg

SEQ ID NO: 31592 - DNA, 24 bp, Homo sapiens
  source 1..24: mol_type = genomic DNA
aaggctgcgtgttcgaatcacgtc

SEQ ID NO: 31593 - DNA, 28 bp, Homo sapiens
  source 1..28: mol_type = genomic DNA
aaggctgcgtgttcgaatcacgtcgggg

SEQ ID NO: 31594 - DNA, 30 bp, Homo sapiens; identical to SEQ ID NO: 1575
  source 1..30: mol_type = genomic DNA

SEQ ID NO: 31595 - DNA, 33 bp, Homo sapiens; identical to SEQ ID NO: 1576
  source 1..33: mol_type = genomic DNA

SEQ ID NO: 31596 - DNA, 16 bp, Homo sapiens
  source 1..16: mol_type = genomic DNA
aagggcttagcttaat

SEQ ID NO: 31597 - DNA, 17 bp, Homo sapiens
  source 1..17: mol_type = genomic DNA
aagggcttagcttaatt

SEQ ID NO: 31598 - DNA, 23 bp, Homo sapiens
  source 1..23: mol_type = genomic DNA
aagggcttagcttaattaaagtg

SEQ ID NO: 31599 - DNA, 25 bp, Homo sapiens
  source 1..25: mol_type = genomic DNA
aagggcttagcttaattaaagtggc

SEQ ID NO: 31600 - DNA, 30 bp, Homo sapiens; identical to SEQ ID NO: 1592
  source 1..30: mol_type = genomic DNA

SEQ ID NO: 31601 - DNA, 33 bp, Homo sapiens; identical to SEQ ID NO: 1595
  source 1..33: mol_type = genomic DNA

SEQ ID NO: 31602 - DNA, 41 bp, Homo sapiens; identical to SEQ ID NO: 1602
  source 1..41: mol_type = genomic DNA

SEQ ID NO: 31603 - DNA, 40 bp, Homo sapiens; identical to SEQ ID NO: 1615
  source 1..40: mol_type = genomic DNA

SEQ ID NO: 31604 - DNA, 24 bp, Homo sapiens
  source 1..24: mol_type = genomic DNA
aaggtccccggttcgaaaccgggc

SEQ ID NO: 31605 - DNA, 27 bp, Homo sapiens
  source 1..27: mol_type = genomic DNA
aaggtccccggttcgaaaccgggcgga

SEQ ID NO: 31606 - DNA, 30 bp, Homo sapiens; identical to SEQ ID NO: 1632
  source 1..30: mol_type = genomic DNA

SEQ ID NO: 31607 - DNA, 31 bp, Homo sapiens
  source 1..31: mol_type = genomic DNA
aaggtccccggttcgaaaccgggcggaaaca

SEQ ID NO: 31608 - DNA, 32 bp, Homo sapiens; identical to SEQ ID NO: 1633
  source 1..32: mol_type = genomic DNA

SEQ ID NO: 31609 - DNA, 33 bp, Homo sapiens
  source 1..33: mol_type = genomic DNA
aaggtccccggttcgaaaccgggcggaaacacc

SEQ ID NO: 31610 - DNA, 30 bp, Homo sapiens
  source 1..30: mol_type = genomic DNA
aaggtccctggttcgatcccgggtttcggc

SEQ ID NO: 31611 - DNA, 32 bp, Homo sapiens; identical to SEQ ID NO: 1634
  source 1..32: mol_type = genomic DNA

SEQ ID NO: 31612 - DNA, 33 bp, Homo sapiens
  source 1..33: mol_type = genomic DNA
aaggtccctggttcgatcccgggtttcggcacc

SEQ ID NO: 31613 - DNA, 20 bp, Homo sapiens
  source 1..20: mol_type = genomic DNA
aaggtcctgggttcgagccc

SEQ ID NO: 31614 - DNA, 30 bp, Homo sapiens; identical to SEQ ID NO: 1644
  source 1..30: mol_type = genomic DNA

SEQ ID NO: 31615 - DNA, 31 bp, Homo sapiens
  source 1..31: mol_type = genomic DNA
aaggtcctgggttcgagccccagtggaacca

SEQ ID NO: 31616 - DNA, 32 bp, Homo sapiens
  source 1..32: mol_type = genomic DNA
aaggtcctgggttcgagccccagtggaaccac

SEQ ID NO: 31617 - DNA, 33 bp, Homo sapiens; identical to SEQ ID NO: 1645
  source 1..33: mol_type = genomic DNA

SEQ ID NO: 31618 - DNA, 34 bp, Homo sapiens; identical to SEQ ID NO: 1646
  source 1..34: mol_type = genomic DNA

SEQ ID NO: 31619 - DNA, 29 bp, Homo sapiens
  source 1..29: mol_type = genomic DNA
aaggtcgcgggttcgatccccgtacgggc

SEQ ID NO: 31620 - DNA, 30 bp, Homo sapiens; identical to SEQ ID NO: 1651
  source 1..30: mol_type = genomic DNA

SEQ ID NO: 31621 - DNA, 31 bp, Homo sapiens; identical to SEQ ID NO: 1652
  source 1..31: mol_type = genomic DNA

SEQ ID NO: 31622 - DNA, 32 bp, Homo sapiens; identical to SEQ ID NO: 1653
  source 1..32: mol_type = genomic DNA

SEQ ID NO: 31623 - DNA, 33 bp, Homo sapiens; identical to SEQ ID NO: 1654
  source 1..33: mol_type = genomic DNA

SEQ ID NO: 31624 - DNA, 24 bp, Homo sapiens
  source 1..24: mol_type = genomic DNA
aaggttccgggttcgagtcccggc

SEQ ID NO: 31625 - DNA, 28 bp, Homo sapiens
  source 1..28: mol_type = genomic DNA
aaggttccgggttcgagtcccggcggag

SEQ ID NO: 31626 - DNA, 29 bp, Homo sapiens
  source 1..29: mol_type = genomic DNA
aaggttccgggttcgagtcccggcggagt

SEQ ID NO: 31627 - DNA, 30 bp, Homo sapiens; identical to SEQ ID NO: 1661
  source 1..30: mol_type = genomic DNA

SEQ ID NO: 31628 - DNA, 31 bp, Homo sapiens; identical to SEQ ID NO: 1662
  source 1..31: mol_type = genomic DNA

SEQ ID NO: 31629 - DNA, 32 bp, Homo sapiens; identical to SEQ ID NO: 1663
  source 1..32: mol_type = genomic DNA

SEQ ID NO: 31630 - DNA, 33 bp, Homo sapiens; identical to SEQ ID NO: 1664
  source 1..33: mol_type = genomic DNA

SEQ ID NO: 31631 - DNA, 34 bp, Homo sapiens; identical to SEQ ID NO: 1665
  source 1..34: mol_type = genomic DNA

SEQ ID NO: 31632 - DNA, 32 bp, Homo sapiens; identical to SEQ ID NO: 1669
  source 1..32: mol_type = genomic DNA

SEQ ID NO: 31633 - DNA, 33 bp, Homo sapiens; identical to SEQ ID NO: 1670
  source 1..33: mol_type = genomic DNA

SEQ ID NO: 31634 - DNA, 33 bp, Homo sapiens
  source 1..33: mol_type = genomic DNA
aaggttggtggttcgatcccacccagggacgcc

SEQ ID NO: 31635 - DNA, 32 bp, Homo sapiens
  source 1..32: mol_type = genomic DNA
aaggttgtgggttcgaatcccaccagagtcgc

SEQ ID NO: 31636 - DNA, 33 bp, Homo sapiens; identical to SEQ ID NO: 1671
  source 1..33: mol_type = genomic DNA

SEQ ID NO: 31637 - DNA, 32 bp, Homo sapiens; identical to SEQ ID NO: 1673
  source 1..32: mol_type = genomic DNA

SEQ ID NO: 31638 - DNA, 33 bp, Homo sapiens; identical to SEQ ID NO: 1674
  source 1..33: mol_type = genomic DNA

SEQ ID NO: 31639 - DNA, 18 bp, Homo sapiens
  source 1..18: mol_type = genomic DNA
aagtcacgtcggggtcac

SEQ ID NO: 31640 - DNA, 19 bp, Homo sapiens
  source 1..19: mol_type = genomic DNA
aagtcacgtcggggtcacc

SEQ ID NO: 31641 - DNA, 17 bp, Homo sapiens
  source 1..17: mol_type = genomic DNA
aagtcatggaggccatg

SEQ ID NO: 31642 - DNA, 16 bp, Homo sapiens
  source 1..16: mol_type = genomic DNA
aagtccctgttcgggc

SEQ ID NO: 31643 - DNA, 17 bp, Homo sapiens
  source 1..17: mol_type = genomic DNA
aagtccctgttcgggcg

SEQ ID NO: 31644 - DNA, 18 bp, Homo sapiens
  source 1..18: mol_type = genomic DNA
aagtccctgttcgggcgc

SEQ ID NO: 31645 - DNA, 19 bp, Homo sapiens
  source 1..19: mol_type = genomic DNA
aagtccctgttcgggcgcc

SEQ ID NO: 31646 - DNA, 19 bp, Homo sapiens
  source 1..19: mol_type = genomic DNA
aagtggctgatttgcgttc

SEQ ID NO: 31647 - DNA, 27 bp, Homo sapiens
  source 1..27: mol_type = genomic DNA
aagtggctgatttgcgttcagttgatg

SEQ ID NO: 31648 - DNA, 34 bp, Homo sapiens; identical to SEQ ID NO: 1712
  source 1..34: mol_type = genomic DNA

SEQ ID NO: 31649 - DNA, 35 bp, Homo sapiens; identical to SEQ ID NO: 1713
  source 1..35: mol_type = genomic DNA

SEQ ID NO: 31650 - DNA, 36 bp, Homo sapiens; identical to SEQ ID NO: 1714
  source 1..36: mol_type = genomic DNA

SEQ ID NO: 31651 - DNA, 21 bp, Homo sapiens
  source 1..21: mol_type = genomic DNA
aagttaaagattaagagaacc

SEQ ID NO: 31652 - DNA, 33 bp, Homo sapiens; identical to SEQ ID NO: 1729
  source 1..33: mol_type = genomic DNA

SEQ ID NO: 31653 - DNA, 25 bp, Homo sapiens
  source 1..25: mol_type = genomic DNA
aagttgcaatacttaatttctgcca

SEQ ID NO: 31654 - DNA, 20 bp, Homo sapiens
  source 1..20: mol_type = genomic DNA
aataataggagcttaaaccc

SEQ ID NO: 31655 - DNA, 21 bp, Homo sapiens
  source 1..21: mol_type = genomic DNA
aataataggagcttaaacccc

SEQ ID NO: 31656 - DNA, 22 bp, Homo sapiens
  source 1..22: mol_type = genomic DNA
aataataggagcttaaaccccc

SEQ ID NO: 31657 - DNA, 44 bp, Homo sapiens; identical to SEQ ID NO: 1801
  source 1..44: mol_type = genomic DNA

SEQ ID NO: 31658 - DNA, 27 bp, Homo sapiens
  source 1..27: mol_type = genomic DNA
aatacactgaaaatgtttagacgggct

SEQ ID NO: 31659 - DNA, 28 bp, Homo sapiens
  source 1..28: mol_type = genomic DNA
aatacactgaaaatgtttagacgggctc

SEQ ID NO: 31660 - DNA, 16 bp, Homo sapiens
  source 1..16: mol_type = genomic DNA
aatacagaccaagagc

SEQ ID NO: 31661 - DNA, 17 bp, Homo sapiens
  source 1..17: mol_type = genomic DNA
aatacttaatttctgcc

SEQ ID NO: 31662 - DNA, 18 bp, Homo sapiens
  source 1..18: mol_type = genomic DNA
aatacttaatttctgcca

SEQ ID NO: 31663 - DNA, 17 bp, Homo sapiens
  source 1..17: mol_type = genomic DNA
aatagctcagttgggag

SEQ ID NO: 31664 - DNA, 30 bp, Homo sapiens; identical to SEQ ID NO: 1852
  source 1..30: mol_type = genomic DNA

SEQ ID NO: 31665 - DNA, 16 bp, Homo sapiens
  source 1..16: mol_type = genomic DNA
aatcacgtcggggtca

SEQ ID NO: 31666 - DNA, 17 bp, Homo sapiens
  source 1..17: mol_type = genomic DNA
aatcacgtcggggtcac

SEQ ID NO: 31667 - DNA, 18 bp, Homo sapiens
  source 1..18: mol_type = genomic DNA
aatcacgtcggggtcacc

SEQ ID NO: 31668 - DNA, 19 bp, Homo sapiens
  source 1..19: mol_type = genomic DNA
aatcacgtcggggtcacca

SEQ ID NO: 31669 - DNA, 39 bp, Homo sapiens; identical to SEQ ID NO: 1892
  source 1..39: mol_type = genomic DNA

SEQ ID NO: 31670 - DNA, 40 bp, Homo sapiens; identical to SEQ ID NO: 1893
  source 1..40: mol_type = genomic DNA

SEQ ID NO: 31671 - DNA, 17 bp, Homo sapiens
  source 1..17: mol_type = genomic DNA
aatccagcgatccgagt

SEQ ID NO: 31672 - DNA, 19 bp, Homo sapiens
  source 1..19: mol_type = genomic DNA
aatccagcgatccgagttc

SEQ ID NO: 31673 - DNA, 20 bp, Homo sapiens
  source 1..20: mol_type = genomic DNA
aatccagcgatccgagttca

SEQ ID NO: 31674 - DNA, 21 bp, Homo sapiens
  source 1..21: mol_type = genomic DNA
aatccagcgatccgagttcaa

SEQ ID NO: 31675 - DNA, 22 bp, Homo sapiens
  source 1..22: mol_type = genomic DNA
aatccagcgatccgagttcaaa

SEQ ID NO: 31676 - DNA, 23 bp, Homo sapiens
  source 1..23: mol_type = genomic DNA
aatccagcgatccgagttcaaat

SEQ ID NO: 31677 - DNA, 37 bp, Homo sapiens; identical to SEQ ID NO: 1914
  source 1..37: mol_type = genomic DNA

SEQ ID NO: 31678 - DNA, 39 bp, Homo sapiens; identical to SEQ ID NO: 1916
  source 1..39: mol_type = genomic DNA

SEQ ID NO: 31679 - DNA, 21 bp, Homo sapiens
  source 1..21: mol_type = genomic DNA
aatccattggggtttccccgc

SEQ ID NO: 31680 - DNA, 22 bp, Homo sapiens
  source 1..22: mol_type = genomic DNA
aatccattggggtttccccgcg

SEQ ID NO: 31681 - DNA, 23 bp, Homo sapiens
  source 1..23: mol_type = genomic DNA
aatccattggggtttccccgcgc

SEQ ID NO: 31682 - DNA, 24 bp, Homo sapiens
  source 1..24: mol_type = genomic DNA
aatccattggggtttccccgcgca

SEQ ID NO: 31683 - DNA, 25 bp, Homo sapiens
  source 1..25: mol_type = genomic DNA
aatccattggggtttccccgcgcag

SEQ ID NO: 31684 - DNA, 26 bp, Homo sapiens
  source 1..26: mol_type = genomic DNA
aatccattggggtttccccgcgcagg

SEQ ID NO: 31685 - DNA, 27 bp, Homo sapiens
  source 1..27: mol_type = genomic DNA
aatccattggggtttccccgcgcaggt

SEQ ID NO: 31686 - DNA, 29 bp, Homo sapiens
  source 1..29: mol_type = genomic DNA
aatccattggggtttccccgcgcaggttc

SEQ ID NO: 31687 - DNA, 41 bp, Homo sapiens; identical to SEQ ID NO: 1957
  source 1..41: mol_type = genomic DNA

SEQ ID NO: 31688 - DNA, 42 bp, Homo sapiens; identical to SEQ ID NO: 1958
  source 1..42: mol_type = genomic DNA

SEQ ID NO: 31689 - DNA, 43 bp, Homo sapiens; identical to SEQ ID NO: 1959
  source 1..43: mol_type = genomic DNA

SEQ ID NO: 31690 - DNA, 47 bp, Homo sapiens
  source 1..47: mol_type = genomic DNA
aatccattggggtttccccgcgcaggttcgaatcctgccgactacgc

SEQ ID NO: 31691 - DNA, 18 bp, Homo sapiens
  source 1..18: mol_type = genomic DNA
aatcccaccactgccacc

SEQ ID NO: 31692 - DNA, 18 bp, Homo sapiens
  source 1..18: mol_type = genomic DNA
aatcccaccagagtcgcc

SEQ ID NO: 31693 - DNA, 18 bp, Homo sapiens
  source 1..18: mol_type = genomic DNA
aatcccaccctcgtcgcc

SEQ ID NO: 31694 - DNA, 17 bp, Homo sapiens
  source 1..17: mol_type = genomic DNA
aatcccaccgctgccac

SEQ ID NO: 31695 - DNA, 18 bp, Homo sapiens
  source 1..18: mol_type = genomic DNA
aatcccaccgctgccacc

SEQ ID NO: 31696 - DNA, 18 bp, Homo sapiens
  source 1..18: mol_type = genomic DNA
aatcccaccttcgtcgcc

SEQ ID NO: 31697 - DNA, 16 bp, Homo sapiens
  source 1..16: mol_type = genomic DNA
aatcccactcctgaca

SEQ ID NO: 31698 - DNA, 17 bp, Homo sapiens
  source 1..17: mol_type = genomic DNA
aatcccactcctgacac

SEQ ID NO: 31699 - DNA, 18 bp, Homo sapiens
  source 1..18: mol_type = genomic DNA
aatcccactcctgacacc

SEQ ID NO: 31700 - DNA, 19 bp, Homo sapiens
  source 1..19: mol_type = genomic DNA
aatcccactcctgacacca

SEQ ID NO: 31701 - DNA, 16 bp, Homo sapiens
  source 1..16: mol_type = genomic DNA
aatcccacttctgaca

SEQ ID NO: 31702 - DNA, 17 bp, Homo sapiens
  source 1..17: mol_type = genomic DNA
aatcccacttctgacac

SEQ ID NO: 31703 - DNA, 18 bp, Homo sapiens
  source 1..18: mol_type = genomic DNA
aatcccacttctgacacc

SEQ ID NO: 31704 - DNA, 19 bp, Homo sapiens
  source 1..19: mol_type = genomic DNA
aatcccacttctgacacca

SEQ ID NO: 31705 - DNA, 17 bp, Homo sapiens
  source 1..17: mol_type = genomic DNA
aatcccagcggggcctc

SEQ ID NO: 31706 - DNA, 19 bp, Homo sapiens
  source 1..19: mol_type = genomic DNA
aatcccagcggggcctcca

SEQ ID NO: 31707 - DNA, 16 bp, Homo sapiens
  source 1..16: mol_type = genomic DNA
aatcccagcggtgcct

SEQ ID NO: 31708 - DNA, 17 bp, Homo sapiens
  source 1..17: mol_type = genomic DNA
aatcccagcggtgcctc

SEQ ID NO: 31709 - DNA, 18 bp, Homo sapiens
  source 1..18: mol_type = genomic DNA
aatcccagcggtgcctcc

SEQ ID NO: 31710 - DNA, 39 bp, Homo sapiens; identical to SEQ ID NO: 1989
  source 1..39: mol_type = genomic DNA

SEQ ID NO: 31711 - DNA, 16 bp, Homo sapiens
  source 1..16: mol_type = genomic DNA
aatcccagtagagcct

SEQ ID NO: 31712 - DNA, 17 bp, Homo sapiens
  source 1..17: mol_type = genomic DNA
aatcccagtagagcctc

SEQ ID NO: 31713 - DNA, 17 bp, Homo sapiens
  source 1..17: mol_type = genomic DNA
aatcccatcctcgtcgc

SEQ ID NO: 31714 - DNA, 18 bp, Homo sapiens
  source 1..18: mol_type = genomic DNA
aatcccatcctcgtcgcc

SEQ ID NO: 31715 - DNA, 19 bp, Homo sapiens
  source 1..19: mol_type = genomic DNA
aatcccatcctcgtcgcca

SEQ ID NO: 31716 - DNA, 18 bp, Homo sapiens
  source 1..18: mol_type = genomic DNA
aatccccggcacctccac

SEQ ID NO: 31717 - DNA, 19 bp, Homo sapiens
  source 1..19: mol_type = genomic DNA
aatccccggcacctccacc

SEQ ID NO: 31718 - DNA, 20 bp, Homo sapiens
  source 1..20: mol_type = genomic DNA
aatccccggcacctccacca

SEQ ID NO: 31719 - DNA, 19 bp, Homo sapiens
  source 1..19: mol_type = genomic DNA
aatccccggcatctccacc

SEQ ID NO: 31720 - DNA, 16 bp, Homo sapiens
  source 1..16: mol_type = genomic DNA
aatcccggacgagccc

SEQ ID NO: 31721 - DNA, 17 bp, Homo sapiens
  source 1..17: mol_type = genomic DNA
aatcccggacgagcccc

SEQ ID NO: 31722 - DNA, 18 bp, Homo sapiens
  source 1..18: mol_type = genomic DNA
aatcccggacgagccccc

SEQ ID NO: 31723 - DNA, 19 bp, Homo sapiens
  source 1..19: mol_type = genomic DNA
aatcccggacgagccccca

SEQ ID NO: 31724 - DNA, 18 bp, Homo sapiens
  source 1..18: mol_type = genomic DNA
aatcccgggtttcggcac

SEQ ID NO: 31725 - DNA, 16 bp, Homo sapiens
  source 1..16: mol_type = genomic DNA
aatccgagtcacggca

SEQ ID NO: 31726 - DNA, 17 bp, Homo sapiens
  source 1..17: mol_type = genomic DNA
aatccgagtcacggcac

SEQ ID NO: 31727 - DNA, 18 bp, Homo sapiens
  source 1..18: mol_type = genomic DNA
aatccgagtcacggcacc

SEQ ID NO: 31728 - DNA, 19 bp, Homo sapiens
  source 1..19: mol_type = genomic DNA
aatccgagtcacggcacca

SEQ ID NO: 31729 - DNA, 16 bp, Homo sapiens
  source 1..16: mol_type = genomic DNA
aatccggctcgaagga

SEQ ID NO: 31730 - DNA, 17 bp, Homo sapiens
  source 1..17: mol_type = genomic DNA
aatccggctcgaaggac

SEQ ID NO: 31731 - DNA, 18 bp, Homo sapiens
  source 1..18: mol_type = genomic DNA
aatccggctcgaaggacc

SEQ ID NO: 31732 - DNA, 17 bp, Homo sapiens
  source 1..17: mol_type = genomic DNA
aatccggctcggaggac

SEQ ID NO: 31733 - DNA, 18 bp, Homo sapiens
  source 1..18: mol_type = genomic DNA
aatccggctcggaggacc

SEQ ID NO: 31734 - DNA, 16 bp, Homo sapiens
  source 1..16: mol_type = genomic DNA
aatccgggtgccccct

SEQ ID NO: 31735 - DNA, 17 bp, Homo sapiens
  source 1..17: mol_type = genomic DNA
aatccgggtgccccctc

SEQ ID NO: 31736 - DNA, 18 bp, Homo sapiens
  source 1..18: mol_type = genomic DNA
aatccgggtgccccctcc

SEQ ID NO: 31737 - DNA, 16 bp, Homo sapiens
  source 1..16: mol_type = genomic DNA
aatcctgccgactacg

SEQ ID NO: 31738 - DNA, 17 bp, Homo sapiens
  source 1..17: mol_type = genomic DNA
aatcctgccgactacgc

SEQ ID NO: 31739 - DNA, 18 bp, Homo sapiens
  source 1..18: mol_type = genomic DNA
aatcctgccgactacgcc

SEQ ID NO: 31740 - DNA, 19 bp, Homo sapiens
  source 1..19: mol_type = genomic DNA
aatcctgccgactacgcca

SEQ ID NO: 31741 - DNA, 18 bp, Homo sapiens
  source 1..18: mol_type = genomic DNA
aatcctgctcacagcgcc

SEQ ID NO: 31742 - DNA, 17 bp, Homo sapiens
  source 1..17: mol_type = genomic DNA
aatcctgtcggctacgc

SEQ ID NO: 31743 - DNA, 18 bp, Homo sapiens
  source 1..18: mol_type = genomic DNA
aatcctgtcggctacgcc

SEQ ID NO: 31744 - DNA, 16 bp, Homo sapiens
  source 1..16: mol_type = genomic DNA
aatcctgttcgtgacg

SEQ ID NO: 31745 - DNA, 17 bp, Homo sapiens
  source 1..17: mol_type = genomic DNA
aatcctgttcgtgacgc

SEQ ID NO: 31746 - DNA, 18 bp, Homo sapiens
  source 1..18: mol_type = genomic DNA
aatcctgttcgtgacgcc

SEQ ID NO: 31747 - DNA, 19 bp, Homo sapiens
  source 1..19: mol_type = genomic DNA
aatcctgttcgtgacgcca

SEQ ID NO: 31748 - DNA, 37 bp, Homo sapiens; identical to SEQ ID NO: 2042
  source 1..37: mol_type = genomic DNA

SEQ ID NO: 31749 - DNA, 39 bp, Homo sapiens; identical to SEQ ID NO: 2048
  source 1..39: mol_type = genomic DNA

SEQ ID NO: 31750 - DNA, 40 bp, Homo sapiens; identical to SEQ ID NO: 2049
  source 1..40: mol_type = genomic DNA

SEQ ID NO: 31751 - DNA, 16 bp, Homo sapiens
  source 1..16: mol_type = genomic DNA
aatctcgctggggcct

SEQ ID NO: 31752 - DNA, 17 bp, Homo sapiens
  source 1..17: mol_type = genomic DNA
aatctcgctggggcctc

SEQ ID NO: 31753 - DNA, 18 bp, Homo sapiens
  source 1..18: mol_type = genomic DNA
aatctcgctggggcctcc

SEQ ID NO: 31754 - DNA, 16 bp, Homo sapiens
  source 1..16: mol_type = genomic DNA
aatctcggtggaacct

SEQ ID NO: 31755 - DNA, 17 bp, Homo sapiens
  source 1..17: mol_type = genomic DNA
aatctcggtggaacctc

SEQ ID NO: 31756 - DNA, 18 bp, Homo sapiens
  source 1..18: mol_type = genomic DNA
aatctcggtggaacctcc

SEQ ID NO: 31757 - DNA, 19 bp, Homo sapiens
  source 1..19: mol_type = genomic DNA
aatctcggtggaacctcca

SEQ ID NO: 31758 - DNA, 16 bp, Homo sapiens
  source 1..16: mol_type = genomic DNA
aatctcggtgggacct

SEQ ID NO: 31759 - DNA, 17 bp, Homo sapiens
  source 1..17: mol_type = genomic DNA
aatctcggtgggacctc

SEQ ID NO: 31760 - DNA, 18 bp, Homo sapiens
  source 1..18: mol_type = genomic DNA
aatctcggtgggacctcc

SEQ ID NO: 31761 - DNA, 39 bp, Homo sapiens; identical to SEQ ID NO: 2072
  source 1..39: mol_type = genomic DNA

SEQ ID NO: 31762 - DNA, 40 bp, Homo sapiens; identical to SEQ ID NO: 2073
  source 1..40: mol_type = genomic DNA

SEQ ID NO: 31763 - DNA, 37 bp, Homo sapiens; identical to SEQ ID NO: 2084
  source 1..37: mol_type = genomic DNA

SEQ ID NO: 31764 - DNA, 39 bp, Homo sapiens; identical to SEQ ID NO: 2086
  source 1..39: mol_type = genomic DNA

SEQ ID NO: 31765 - DNA, 40 bp, Homo sapiens; identical to SEQ ID NO: 2087
  source 1..40: mol_type = genomic DNA

SEQ ID NO: 31766 - DNA, 39 bp, Homo sapiens; identical to SEQ ID NO: 2094
  source 1..39: mol_type = genomic DNA

SEQ ID NO: 31767 - DNA, 36 bp, Homo sapiens; identical to SEQ ID NO: 2109
  source 1..36: mol_type = genomic DNA

SEQ ID NO: 31768 - DNA, 37 bp, Homo sapiens; identical to SEQ ID NO: 2110
  source 1..37: mol_type = genomic DNA

SEQ ID NO: 31769 - DNA, 38 bp, Homo sapiens; identical to SEQ ID NO: 2111
  source 1..38: mol_type = genomic DNA

SEQ ID NO: 31770 - DNA, 39 bp, Homo sapiens; identical to SEQ ID NO: 2112
  source 1..39: mol_type = genomic DNA

SEQ ID NO: 31771 - DNA, 20 bp, Homo sapiens
  source 1..20: mol_type = genomic DNA
aatgccgaggttgtgagttc

SEQ ID NO: 31772 - DNA, 16 bp, Homo sapiens
  source 1..16: mol_type = genomic DNA
aatggacgagcgcgct

SEQ ID NO: 31773 - DNA, 19 bp, Homo sapiens
  source 1..19: mol_type = genomic DNA
aatggacgagcgcgctgga

SEQ ID NO: 31774 - DNA, 34 bp, Homo sapiens; identical to SEQ ID NO: 2160
  source 1..34: mol_type = genomic DNA

SEQ ID NO: 31775 - DNA, 35 bp, Homo sapiens; identical to SEQ ID NO: 2161
  source 1..35: mol_type = genomic DNA

SEQ ID NO: 31776 - DNA, 36 bp, Homo sapiens; identical to SEQ ID NO: 2162
  source 1..36: mol_type = genomic DNA

SEQ ID NO: 31777 - DNA, 20 bp, Homo sapiens
  source 1..20: mol_type = genomic DNA
aatggataacgcgtctgact

SEQ ID NO: 31778 - DNA, 16 bp, Homo sapiens
  source 1..16: mol_type = genomic DNA
aatggataaggcactg

SEQ ID NO: 31779 - DNA, 20 bp, Homo sapiens
  source 1..20: mol_type = genomic DNA
aatggataaggcatcagcct

SEQ ID NO: 31780 - DNA, 22 bp, Homo sapiens
  source 1..22: mol_type = genomic DNA
aatggataaggcatcagcctcc

SEQ ID NO: 31781 - DNA, 29 bp, Homo sapiens
  source 1..29: mol_type = genomic DNA
aatggataaggcatcagcctccggagctg

SEQ ID NO: 31782 - DNA, 37 bp, Homo sapiens
  source 1..37: mol_type = genomic DNA
aatggataaggcatcagcctccggagctggggattgt

SEQ ID NO: 31783 - DNA, 16 bp, Homo sapiens
  source 1..16: mol_type = genomic DNA
aatggataaggcattg

SEQ ID NO: 31784 - DNA, 18 bp, Homo sapiens
  source 1..18: mol_type = genomic DNA
aatggataaggcgtctga

SEQ ID NO: 31785 - DNA, 20 bp, Homo sapiens
  source 1..20: mol_type = genomic DNA
aatggataaggcgtctgact

SEQ ID NO: 31786 - DNA, 22 bp, Homo sapiens
  source 1..22: mol_type = genomic DNA
aatggataaggcgtctgattcc

SEQ ID NO: 31787 - DNA, 18 bp, Homo sapiens
  source 1..18: mol_type = genomic DNA
aatggatagcgcattgga

SEQ ID NO: 31788 - DNA, 19 bp, Homo sapiens
  source 1..19: mol_type = genomic DNA
aatggatagcgcattggac

SEQ ID NO: 31789 - DNA, 20 bp, Homo sapiens
  source 1..20: mol_type = genomic DNA
aatggatagcgcattggact

SEQ ID NO: 31790 - DNA, 22 bp, Homo sapiens
  source 1..22: mol_type = genomic DNA
aatggatagcgcattggacttc

SEQ ID NO: 31791 - DNA, 40 bp, Homo sapiens
  source 1..40: mol_type = genomic DNA
aatggatagcgcattggacttctaattcaaaggttccggg

SEQ ID NO: 31792 - DNA, 24 bp, Homo sapiens
  source 1..24: mol_type = genomic DNA
aatggctgagtgaagcattggact

SEQ ID NO: 31793 - DNA, 19 bp, Homo sapiens
  source 1..19: mol_type = genomic DNA
aatggtagaattctcgcct

SEQ ID NO: 31794 - DNA, 17 bp, Homo sapiens
  source 1..17: mol_type = genomic DNA
aatggtagagcgctcgc

SEQ ID NO: 31795 - DNA, 19 bp, Homo sapiens
  source 1..19: mol_type = genomic DNA
aatggtagagcgctcgctt

SEQ ID NO: 31796 - DNA, 22 bp, Homo sapiens
  source 1..22: mol_type = genomic DNA
aatggtgagcactttggactct

SEQ ID NO: 31797 - DNA, 19 bp, Homo sapiens
  source 1..19: mol_type = genomic DNA
aatggtggagttaaagact

SEQ ID NO: 31798 - DNA, 29 bp, Homo sapiens
  source 1..29: mol_type = genomic DNA
aatggtggagttaaagactttttctctga

SEQ ID NO: 31799 - DNA, 30 bp, Homo sapiens; identical to SEQ ID NO: 2232
  source 1..30: mol_type = genomic DNA

SEQ ID NO: 31800 - DNA, 31 bp, Homo sapiens; identical to SEQ ID NO: 2233
  source 1..31: mol_type = genomic DNA

SEQ ID NO: 31801 - DNA, 32 bp, Homo sapiens; identical to SEQ ID NO: 2234
  source 1..32: mol_type = genomic DNA

SEQ ID NO: 31802 - DNA, 16 bp, Homo sapiens
  source 1..16: mol_type = genomic DNA
aatggtggttcagtgg

SEQ ID NO: 31803 - DNA, 28 bp, Homo sapiens
  source 1..28: mol_type = genomic DNA
aatggtggttcagtggtagaattctcgc

SEQ ID NO: 31804 - DNA, 29 bp, Homo sapiens
  source 1..29: mol_type = genomic DNA
aatggtggttcagtggtagaattctcgcc

SEQ ID NO: 31805 - DNA, 30 bp, Homo sapiens; identical to SEQ ID NO: 2236
  source 1..30: mol_type = genomic DNA

SEQ ID NO: 31806 - DNA, 16 bp, Homo sapiens
  source 1..16: mol_type = genomic DNA
aatggttagcactctg

SEQ ID NO: 31807 - DNA, 17 bp, Homo sapiens
  source 1..17: mol_type = genomic DNA
aatggttagcactctgg

SEQ ID NO: 31808 - DNA, 18 bp, Homo sapiens
  source 1..18: mol_type = genomic DNA
aatggttagcactctgga

SEQ ID NO: 31809 - DNA, 20 bp, Homo sapiens
  source 1..20: mol_type = genomic DNA
aatggttagcactctggact

SEQ ID NO: 31810 - DNA, 21 bp, Homo sapiens
  source 1..21: mol_type = genomic DNA
aatggttagcactctggactc

SEQ ID NO: 31811 - DNA, 22 bp, Homo sapiens
  source 1..22: mol_type = genomic DNA
aatggttagcactctggactct

SEQ ID NO: 31812 - DNA, 23 bp, Homo sapiens
  source 1..23: mol_type = genomic DNA
aatggttagcactctggactctg

SEQ ID NO: 31813 - DNA, 24 bp, Homo sapiens
  source 1..24: mol_type = genomic DNA
aatggttagcactctggactctga

SEQ ID NO: 31814 - DNA, 25 bp, Homo sapiens
  source 1..25: mol_type = genomic DNA
aatggttagcactctggactctgaa

SEQ ID NO: 31815 - DNA, 26 bp, Homo sapiens
  source 1..26: mol_type = genomic DNA
aatggttagcactctggactctgaat

SEQ ID NO: 31816 - DNA, 27 bp, Homo sapiens
  source 1..27: mol_type = genomic DNA
aatggttagcactctggactctgaatc

SEQ ID NO: 31817 - DNA, 28 bp, Homo sapiens
  source 1..28: mol_type = genomic DNA
aatggttagcactctggactctgaatcc

SEQ ID NO: 31818 - DNA, 29 bp, Homo sapiens
  source 1..29: mol_type = genomic DNA
aatggttagcactctggactctgaatcca

SEQ ID NO: 31819 - DNA, 31 bp, Homo sapiens; identical to SEQ ID NO: 2251
  source 1..31: mol_type = genomic DNA

SEQ ID NO: 31820 - DNA, 32 bp, Homo sapiens; identical to SEQ ID NO: 2252
  source 1..32: mol_type = genomic DNA

SEQ ID NO: 31821 - DNA, 39 bp, Homo sapiens; identical to SEQ ID NO: 2253
  source 1..39: mol_type = genomic DNA

SEQ ID NO: 31822 - DNA, 40 bp, Homo sapiens; identical to SEQ ID NO: 2254
  source 1..40: mol_type = genomic DNA

SEQ ID NO: 31823 - DNA, 41 bp, Homo sapiens
  source 1..41: mol_type = genomic DNA
aatggttagcactctggactctgaatccagcgatccgagtt

SEQ ID NO: 31824 - DNA, 43 bp, Homo sapiens; identical to SEQ ID NO: 2255
  source 1..43: mol_type = genomic DNA

SEQ ID NO: 31825 - DNA, 27 bp, Homo sapiens
  source 1..27: mol_type = genomic DNA
aatggttagcactctggactttgaatc

SEQ ID NO: 31826 - DNA, 31 bp, Homo sapiens; identical to SEQ ID NO: 2258
  source 1..31: mol_type = genomic DNA

SEQ ID NO: 31827 - DNA, 39 bp, Homo sapiens; identical to SEQ ID NO: 2259
  source 1..39: mol_type = genomic DNA

SEQ ID NO: 31828 - DNA, 40 bp, Homo sapiens; identical to SEQ ID NO: 2260
  source 1..40: mol_type = genomic DNA

SEQ ID NO: 31829 - DNA, 29 bp, Homo sapiens
  source 1..29: mol_type = genomic DNA
aatgttggttatacccttcccgtactacc

SEQ ID NO: 31830 - DNA, 30 bp, Homo sapiens; identical to SEQ ID NO: 2272
  source 1..30: mol_type = genomic DNA

SEQ ID NO: 31831 - DNA, 16 bp, Homo sapiens
  source 1..16: mol_type = genomic DNA
aatgtttagacgggct

SEQ ID NO: 31832 - DNA, 17 bp, Homo sapiens
  source 1..17: mol_type = genomic DNA
aatgtttagacgggctc

SEQ ID NO: 31833 - DNA, 18 bp, Homo sapiens
  source 1..18: mol_type = genomic DNA
aatgtttagacgggctca

SEQ ID NO: 31834 - DNA, 19 bp, Homo sapiens
  source 1..19: mol_type = genomic DNA
aatgtttagacgggctcac

SEQ ID NO: 31835 - DNA, 20 bp, Homo sapiens
  source 1..20: mol_type = genomic DNA
aatgtttagacgggctcaca

SEQ ID NO: 31836 - DNA, 25 bp, Homo sapiens
  source 1..25: mol_type = genomic DNA
aatgtttagacgggctcacatcacc

SEQ ID NO: 31837 - DNA, 26 bp, Homo sapiens
  source 1..26: mol_type = genomic DNA
aatgtttagacgggctcacatcaccc

SEQ ID NO: 31838 - DNA, 27 bp, Homo sapiens
  source 1..27: mol_type = genomic DNA
aatgtttagacgggctcacatcacccc

SEQ ID NO: 31839 - DNA, 28 bp, Homo sapiens
  source 1..28: mol_type = genomic DNA
aatgtttagacgggctcacatcacccca

SEQ ID NO: 31840 - DNA, 29 bp, Homo sapiens
  source 1..29: mol_type = genomic DNA
aatgtttagacgggctcacatcaccccat

SEQ ID NO: 31841 - DNA, 30 bp, Homo sapiens; identical to SEQ ID NO: 2287
  source 1..30: mol_type = genomic DNA

SEQ ID NO: 31842 - DNA, 31 bp, Homo sapiens; identical to SEQ ID NO: 2288
  source 1..31: mol_type = genomic DNA

SEQ ID NO: 31843 - DNA, 32 bp, Homo sapiens; identical to SEQ ID NO: 2289
  source 1..32: mol_type = genomic DNA

SEQ ID NO: 31844 - DNA, 36 bp, Homo sapiens; identical to SEQ ID NO: 2292
  source 1..36: mol_type = genomic DNA

SEQ ID NO: 31845 - DNA, 37 bp, Homo sapiens; identical to SEQ ID NO: 2293
  source 1..37: mol_type = genomic DNA

SEQ ID NO: 31846 - DNA, 17 bp, Homo sapiens
  source 1..17: mol_type = genomic DNA
aattaactagttttgac

SEQ ID NO: 31847 - DNA, 44 bp, Homo sapiens; identical to SEQ ID NO: 2327
  source 1..44: mol_type = genomic DNA

SEQ ID NO: 31848 - DNA, 18 bp, Homo sapiens
  source 1..18: mol_type = genomic DNA
aattcaaaggttccgggt

SEQ ID NO: 31849 - DNA, 39 bp, Homo sapiens; identical to SEQ ID NO: 2341
  source 1..39: mol_type = genomic DNA

SEQ ID NO: 31850 - DNA, 39 bp, Homo sapiens; identical to SEQ ID NO: 2343
  source 1..39: mol_type = genomic DNA

SEQ ID NO: 31851 - DNA, 40 bp, Homo sapiens; identical to SEQ ID NO: 2344
  source 1..40: mol_type = genomic DNA

SEQ ID NO: 31852 - DNA, 39 bp, Homo sapiens; identical to SEQ ID NO: 2345
  source 1..39: mol_type = genomic DNA

SEQ ID NO: 31853 - DNA, 17 bp, Homo sapiens
  source 1..17: mol_type = genomic DNA
aattccccgacggggag

SEQ ID NO: 31854 - DNA, 18 bp, Homo sapiens
  source 1..18: mol_type = genomic DNA
aattccccgacggggagc

SEQ ID NO: 31855 - DNA, 19 bp, Homo sapiens
  source 1..19: mol_type = genomic DNA
aattccccgacggggagcc

SEQ ID NO: 31856 - DNA, 33 bp, Homo sapiens; identical to SEQ ID NO: 2353
  source 1..33: mol_type = genomic DNA

SEQ ID NO: 31857 - DNA, 34 bp, Homo sapiens; identical to SEQ ID NO: 2354
  source 1..34: mol_type = genomic DNA

SEQ ID NO: 31858 - DNA, 35 bp, Homo sapiens; identical to SEQ ID NO: 2355
  source 1..35: mol_type = genomic DNA

SEQ ID NO: 31859 - DNA, 16 bp, Homo sapiens
  source 1..16: mol_type = genomic DNA
aattctcgcctgccac

SEQ ID NO: 31860 - DNA, 17 bp, Homo sapiens
  source 1..17: mol_type = genomic DNA
aattctcgcctgccacg

SEQ ID NO: 31861 - DNA, 29 bp, Homo sapiens
  source 1..29: mol_type = genomic DNA
aattctcgcctgccacgcgggaggcccgg

SEQ ID NO: 31862 - DNA, 18 bp, Homo sapiens
  source 1..18: mol_type = genomic DNA
aattctcgctggggcctc

SEQ ID NO: 31863 - DNA, 41 bp, Homo sapiens; identical to SEQ ID NO: 2376
  source 1..41: mol_type = genomic DNA

SEQ ID NO: 31864 - DNA, 42 bp, Homo sapiens; identical to SEQ ID NO: 2377
  source 1..42: mol_type = genomic DNA

SEQ ID NO: 31865 - DNA, 45 bp, Homo sapiens; identical to SEQ ID NO: 2380
  source 1..45: mol_type = genomic DNA

SEQ ID NO: 31866 - DNA, 20 bp, Homo sapiens
  source 1..20: mol_type = genomic DNA
aattttggattctcagggat

SEQ ID NO: 31867 - DNA, 43 bp, Homo sapiens
  source 1..43: mol_type = genomic DNA
aattttggattctcagggatgggttcgattctcatagtcctag

SEQ ID NO: 31868 - DNA, 44 bp, Homo sapiens
  source 1..44: mol_type = genomic DNA
aattttggattctcagggatgggttcgattctcatagtcctagc

SEQ ID NO: 31869 - DNA, 16 bp, Homo sapiens
  source 1..16: mol_type = genomic DNA
aattttggtgcaactc

SEQ ID NO: 31870 - DNA, 17 bp, Homo sapiens
  source 1..17: mol_type = genomic DNA
aattttggtgcaactcc

SEQ ID NO: 31871 - DNA, 22 bp, Homo sapiens
  source 1..22: mol_type = genomic DNA
acaaaacgaatgatttcgactc

SEQ ID NO: 31872 - DNA, 23 bp, Homo sapiens
  source 1..23: mol_type = genomic DNA
acaaaacgaatgatttcgactca

SEQ ID NO: 31873 - DNA, 34 bp, Homo sapiens; identical to SEQ ID NO: 2416
  source 1..34: mol_type = genomic DNA

SEQ ID NO: 31874 - DNA, 32 bp, Homo sapiens; identical to SEQ ID NO: 2433
  source 1..32: mol_type = genomic DNA

SEQ ID NO: 31875 - DNA, 17 bp, Homo sapiens
  source 1..17: mol_type = genomic DNA
acaacatggctttctca

SEQ ID NO: 31876 - DNA, 19 bp, Homo sapiens
  source 1..19: mol_type = genomic DNA
acaacatggctttctcacc

SEQ ID NO: 31877 - DNA, 20 bp, Homo sapiens
  source 1..20: mol_type = genomic DNA
acaacatggctttctcacca

SEQ ID NO: 31878 - DNA, 16 bp, Homo sapiens
  source 1..16: mol_type = genomic DNA
acaagaactgctaact

SEQ ID NO: 31879 - DNA, 17 bp, Homo sapiens
  source 1..17: mol_type = genomic DNA
acaagaactgctaactc

SEQ ID NO: 31880 - DNA, 21 bp, Homo sapiens
  source 1..21: mol_type = genomic DNA
acaagaactgctaactcatgc

SEQ ID NO: 31881 - DNA, 22 bp, Homo sapiens
  source 1..22: mol_type = genomic DNA
acaagaactgctaactcatgcc

SEQ ID NO: 31882 - DNA, 25 bp, Homo sapiens
  source 1..25: mol_type = genomic DNA
acaagaactgctaactcatgccccc

SEQ ID NO: 31883 - DNA, 28 bp, Homo sapiens
  source 1..28: mol_type = genomic DNA
acaagaactgctaactcatgcccccatg

SEQ ID NO: 31884 - DNA, 35 bp, Homo sapiens; identical to SEQ ID NO: 2478
  source 1..35: mol_type = genomic DNA

SEQ ID NO: 31885 - DNA, 38 bp, Homo sapiens; identical to SEQ ID NO: 2481
  source 1..38: mol_type = genomic DNA

SEQ ID NO: 31886 - DNA, 41 bp, Homo sapiens; identical to SEQ ID NO: 2484
  source 1..41: mol_type = genomic DNA

SEQ ID NO: 31887 - DNA, 42 bp, Homo sapiens; identical to SEQ ID NO: 2485
  source 1..42: mol_type = genomic DNA

SEQ ID NO: 31888 - DNA, 43 bp, Homo sapiens; identical to SEQ ID NO: 2486
  source 1..43: mol_type = genomic DNA

SEQ ID NO: 31889 - DNA, 44 bp, Homo sapiens; identical to SEQ ID NO: 2487
  source 1..44: mol_type = genomic DNA

SEQ ID NO: 31890 - DNA, 46 bp, Homo sapiens; identical to SEQ ID NO: 2489
  source 1..46: mol_type = genomic DNA

SEQ ID NO: 31891 - DNA, 47 bp, Homo sapiens; identical to SEQ ID NO: 2490
  source 1..47: mol_type = genomic DNA

SEQ ID NO: 31892 - DNA, 18 bp, Homo sapiens
  source 1..18: mol_type = genomic DNA
acacctctttacagtgac

SEQ ID NO: 31893 - DNA, 19 bp, Homo sapiens
  source 1..19: mol_type = genomic DNA
acacctctttacagtgacc

SEQ ID NO: 31894 - DNA, 17 bp, Homo sapiens
  source 1..17: mol_type = genomic DNA
acacgcagaaggtcctg

SEQ ID NO: 31895 - DNA, 41 bp, Homo sapiens; identical to SEQ ID NO: 2508
  source 1..41: mol_type = genomic DNA

SEQ ID NO: 31896 - DNA, 20 bp, Homo sapiens
  source 1..20: mol_type = genomic DNA
acacgcgaaaggtccccggt

SEQ ID NO: 31897 - DNA, 39 bp, Homo sapiens
  source 1..39: mol_type = genomic DNA
acacgcgaaaggtccccggttcgaaaccgggcggaaaca

SEQ ID NO: 31898 - DNA, 40 bp, Homo sapiens; identical to SEQ ID NO: 2513
  source 1..40: mol_type = genomic DNA

SEQ ID NO: 31899 - DNA, 41 bp, Homo sapiens; identical to SEQ ID NO: 2514
  source 1..41: mol_type = genomic DNA

SEQ ID NO: 31900 - DNA, 30 bp, Homo sapiens
  source 1..30: mol_type = genomic DNA
acacgtgggttcgaatcccatcctcgtcgc

SEQ ID NO: 31901 - DNA, 31 bp, Homo sapiens; identical to SEQ ID NO: 2517
  source 1..31: mol_type = genomic DNA

SEQ ID NO: 31902 - DNA, 45 bp, Homo sapiens; identical to SEQ ID NO: 2534
  source 1..45: mol_type = genomic DNA

SEQ ID NO: 31903 - DNA, 36 bp, Homo sapiens; identical to SEQ ID NO: 2554
  source 1..36: mol_type = genomic DNA

SEQ ID NO: 31904 - DNA, 37 bp, Homo sapiens; identical to SEQ ID NO: 2555
  source 1..37: mol_type = genomic DNA

SEQ ID NO: 31905 - DNA, 38 bp, Homo sapiens; identical to SEQ ID NO: 2556
  source 1..38: mol_type = genomic DNA

SEQ ID NO: 31906 - DNA, 39 bp, Homo sapiens; identical to SEQ ID NO: 2557
  source 1..39: mol_type = genomic DNA

SEQ ID NO: 31907 - DNA, 40 bp, Homo sapiens; identical to SEQ ID NO: 2558
  source 1..40: mol_type = genomic DNA

SEQ ID NO: 31908 - DNA, 16 bp, Homo sapiens
  source 1..16: mol_type = genomic DNA
acagaggcttacgacc

SEQ ID NO: 31909 - DNA, 29 bp, Homo sapiens
  source 1..29: mol_type = genomic DNA
acagaggcttacgaccccttatttacccc

SEQ ID NO: 31910 - DNA, 30 bp, Homo sapiens; identical to SEQ ID NO: 2590
  source 1..30: mol_type = genomic DNA

SEQ ID NO: 31911 - DNA, 17 bp, Homo sapiens
  source 1..17: mol_type = genomic DNA
acagctatccattggtc

SEQ ID NO: 31912 - DNA, 35 bp, Homo sapiens; identical to SEQ ID NO: 2611
  source 1..35: mol_type = genomic DNA

SEQ ID NO: 31913 - DNA, 32 bp, Homo sapiens; identical to SEQ ID NO: 2614
  source 1..32: mol_type = genomic DNA

SEQ ID NO: 31914 - DNA, 33 bp, Homo sapiens; identical to SEQ ID NO: 2615
  source 1..33: mol_type = genomic DNA

SEQ ID NO: 31915 - DNA, 34 bp, Homo sapiens; identical to SEQ ID NO: 2616
  source 1..34: mol_type = genomic DNA

SEQ ID NO: 31916 - DNA, 35 bp, Homo sapiens; identical to SEQ ID NO: 2617
  source 1..35: mol_type = genomic DNA

SEQ ID NO: 31917 - DNA, 36 bp, Homo sapiens; identical to SEQ ID NO: 2618
  source 1..36: mol_type = genomic DNA

SEQ ID NO: 31918 - DNA, 37 bp, Homo sapiens; identical to SEQ ID NO: 2619
  source 1..37: mol_type = genomic DNA

SEQ ID NO: 31919 - DNA, 38 bp, Homo sapiens; identical to SEQ ID NO: 2620
  source 1..38: mol_type = genomic DNA

SEQ ID NO: 31920 - DNA, 33 bp, Homo sapiens; identical to SEQ ID NO: 2623
  source 1..33: mol_type = genomic DNA

SEQ ID NO: 31921 - DNA, 34 bp, Homo sapiens; identical to SEQ ID NO: 2624
  source 1..34: mol_type = genomic DNA

SEQ ID NO: 31922 - DNA, 35 bp, Homo sapiens; identical to SEQ ID NO: 2625
  source 1..35: mol_type = genomic DNA

SEQ ID NO: 31923 - DNA, 36 bp, Homo sapiens; identical to SEQ ID NO: 2626
  source 1..36: mol_type = genomic DNA

SEQ ID NO: 31924 - DNA, 37 bp, Homo sapiens; identical to SEQ ID NO: 2627
  source 1..37: mol_type = genomic DNA

SEQ ID NO: 31925 - DNA, 38 bp, Homo sapiens; identical to SEQ ID NO: 2628
  source 1..38: mol_type = genomic DNA

SEQ ID NO: 31926 - DNA, 35 bp, Homo sapiens; identical to SEQ ID NO: 2629
  source 1..35: mol_type = genomic DNA

SEQ ID NO: 31927 - DNA, 27 bp, Homo sapiens
  source 1..27: mol_type = genomic DNA
acaggggttaggcctctttttaccacc

SEQ ID NO: 31928 - DNA, 25 bp, Homo sapiens
  source 1..25: mol_type = genomic DNA
acaggttcgaatcctgttcgtgacg

SEQ ID NO: 31929 - DNA, 26 bp, Homo sapiens
  source 1..26: mol_type = genomic DNA
acaggttcgaatcctgttcgtgacgc

SEQ ID NO: 31930 - DNA, 27 bp, Homo sapiens
  source 1..27: mol_type = genomic DNA
acaggttcgaatcctgttcgtgacgcc

SEQ ID NO: 31931 - DNA, 17 bp, Homo sapiens
  source 1..17: mol_type = genomic DNA
acatcagattgtgaatc

SEQ ID NO: 31932 - DNA, 19 bp, Homo sapiens
  source 1..19: mol_type = genomic DNA
acatcagattgtgaatctg

SEQ ID NO: 31933 - DNA, 30 bp, Homo sapiens; identical to SEQ ID NO: 2675
  source 1..30: mol_type = genomic DNA

SEQ ID NO: 31934 - DNA, 31 bp, Homo sapiens; identical to SEQ ID NO: 2676
  source 1..31: mol_type = genomic DNA

SEQ ID NO: 31935 - DNA, 32 bp, Homo sapiens; identical to SEQ ID NO: 2677
  source 1..32: mol_type = genomic DNA

SEQ ID NO: 31936 - DNA, 37 bp, Homo sapiens; identical to SEQ ID NO: 2682
  source 1..37: mol_type = genomic DNA

SEQ ID NO: 31937 - DNA, 38 bp, Homo sapiens; identical to SEQ ID NO: 2683
  source 1..38: mol_type = genomic DNA

SEQ ID NO: 31938 - DNA, 16 bp, Homo sapiens
  source 1..16: mol_type = genomic DNA
acatggctttctcacc

SEQ ID NO: 31939 - DNA, 17 bp, Homo sapiens
  source 1..17: mol_type = genomic DNA
acatggctttctcacca

SEQ ID NO: 31940 - DNA, 22 bp, Homo sapiens
  source 1..22: mol_type = genomic DNA
acatggtctagcggttaggatt

SEQ ID NO: 31941 - DNA, 24 bp, Homo sapiens
  source 1..24: mol_type = genomic DNA
acatggtctagcggttaggattcc

SEQ ID NO: 31942 - DNA, 25 bp, Homo sapiens
  source 1..25: mol_type = genomic DNA
acatggtctagcggttaggattcct

SEQ ID NO: 31943 - DNA, 26 bp, Homo sapiens
  source 1..26: mol_type = genomic DNA
acatggtctagcggttaggattcctg

SEQ ID NO: 31944 - DNA, 28 bp, Homo sapiens
  source 1..28: mol_type = genomic DNA
acatggtctagcggttaggattcctggt

SEQ ID NO: 31945 - DNA, 29 bp, Homo sapiens
  source 1..29: mol_type = genomic DNA
acatggtctagcggttaggattcctggtt

SEQ ID NO: 31946 - DNA, 30 bp, Homo sapiens; identical to SEQ ID NO: 2704
  source 1..30: mol_type = genomic DNA

SEQ ID NO: 31947 - DNA, 31 bp, Homo sapiens; identical to SEQ ID NO: 2705
  source 1..31: mol_type = genomic DNA

SEQ ID NO: 31948 - DNA, 32 bp, Homo sapiens; identical to SEQ ID NO: 2706
  source 1..32: mol_type = genomic DNA

SEQ ID NO: 31949 - DNA, 38 bp, Homo sapiens; identical to SEQ ID NO: 2710
  source 1..38: mol_type = genomic DNA

SEQ ID NO: 31950 - DNA, 18 bp, Homo sapiens
  source 1..18: mol_type = genomic DNA
accaaaacatcagattgt

SEQ ID NO: 31951 - DNA, 22 bp, Homo sapiens
  source 1..22: mol_type = genomic DNA
accaaaacatcagattgtgaat

SEQ ID NO: 31952 - DNA, 23 bp, Homo sapiens
  source 1..23: mol_type = genomic DNA
accaaaacatcagattgtgaatc

SEQ ID NO: 31953 - DNA, 44 bp, Homo sapiens; identical to SEQ ID NO: 2736
  source 1..44: mol_type = genomic DNA

SEQ ID NO: 31954 - DNA, 22 bp, Homo sapiens
  source 1..22: mol_type = genomic DNA
accaacacctctttacagtgac

SEQ ID NO: 31955 - DNA, 16 bp, Homo sapiens
  source 1..16: mol_type = genomic DNA
accagaatggccgagt

SEQ ID NO: 31956 - DNA, 17 bp, Homo sapiens
  source 1..17: mol_type = genomic DNA
accagaatggccgagtg

SEQ ID NO: 31957 - DNA, 18 bp, Homo sapiens
  source 1..18: mol_type = genomic DNA
accagaatggccgagtgg

SEQ ID NO: 31958 - DNA, 19 bp, Homo sapiens
  source 1..19: mol_type = genomic DNA
accagaatggccgagtggt

SEQ ID NO: 31959 - DNA, 25 bp, Homo sapiens
  source 1..25: mol_type = genomic DNA
accagaatggccgagtggttaaggc

SEQ ID NO: 31960 - DNA, 16 bp, Homo sapiens
  source 1..16: mol_type = genomic DNA
accaggatggccgagt

SEQ ID NO: 31961 - DNA, 17 bp, Homo sapiens
  source 1..17: mol_type = genomic DNA
accaggatggccgagtg

SEQ ID NO: 31962 - DNA, 18 bp, Homo sapiens
  source 1..18: mol_type = genomic DNA
accaggatggccgagtgg

SEQ ID NO: 31963 - DNA, 19 bp, Homo sapiens
  source 1..19: mol_type = genomic DNA
accaggatggccgagtggt

SEQ ID NO: 31964 - DNA, 20 bp, Homo sapiens
  source 1..20: mol_type = genomic DNA
accaggatggccgagtggtt

SEQ ID NO: 31965 - DNA, 21 bp, Homo sapiens
  source 1..21: mol_type = genomic DNA
accaggatggccgagtggtta

SEQ ID NO: 31966 - DNA, 22 bp, Homo sapiens
  source 1..22: mol_type = genomic DNA
accaggatggccgagtggttaa

SEQ ID NO: 31967 - DNA, 23 bp, Homo sapiens
  source 1..23: mol_type = genomic DNA
accaggatggccgagtggttaag

SEQ ID NO: 31968 - DNA, 24 bp, Homo sapiens
  source 1..24: mol_type = genomic DNA
accaggatggccgagtggttaagg

SEQ ID NO: 31969 - DNA, 25 bp, Homo sapiens
  source 1..25: mol_type = genomic DNA
accaggatggccgagtggttaaggc

SEQ ID NO: 31970 - DNA, 32 bp, Homo sapiens; identical to SEQ ID NO: 2781
  source 1..32: mol_type = genomic DNA

SEQ ID NO: 31971 - DNA, 33 bp, Homo sapiens; identical to SEQ ID NO: 2782
  source 1..33: mol_type = genomic DNA

SEQ ID NO: 31972 - DNA, 43 bp, Homo sapiens
  source 1..43: mol_type = genomic DNA
accaggatggccgagtggttaaggcgttggacttaagatccaa

SEQ ID NO: 31973 - DNA, 16 bp, Homo sapiens
  source 1..16: mol_type = genomic DNA
accaggcggaaacacc

SEQ ID NO: 31974 - DNA, 18 bp, Homo sapiens
  source 1..18: mol_type = genomic DNA
accaggggtcgcgagttc

SEQ ID NO: 31975 - DNA, 19 bp, Homo sapiens
  source 1..19: mol_type = genomic DNA
accaggggtcgcgagttca

SEQ ID NO: 31976 - DNA, 32 bp, Homo sapiens; identical to SEQ ID NO: 2790
  source 1..32: mol_type = genomic DNA

SEQ ID NO: 31977 - DNA, 35 bp, Homo sapiens; identical to SEQ ID NO: 2793
  source 1..35: mol_type = genomic DNA

SEQ ID NO: 31978 - DNA, 36 bp, Homo sapiens; identical to SEQ ID NO: 2794
  source 1..36: mol_type = genomic DNA

SEQ ID NO: 31979 - DNA, 37 bp, Homo sapiens; identical to SEQ ID NO: 2795
  source 1..37: mol_type = genomic DNA

SEQ ID NO: 31980 - DNA, 35 bp, Homo sapiens; identical to SEQ ID NO: 2797
  source 1..35: mol_type = genomic DNA

SEQ ID NO: 31981 - DNA, 35 bp, Homo sapiens; identical to SEQ ID NO: 2800
  source 1..35: mol_type = genomic DNA

SEQ ID NO: 31982 - DNA, 37 bp, Homo sapiens; identical to SEQ ID NO: 2801
  source 1..37: mol_type = genomic DNA

SEQ ID NO: 31983 - DNA, 16 bp, Homo sapiens
  source 1..16: mol_type = genomic DNA
accatcctctgctacc

SEQ ID NO: 31984 - DNA, 17 bp, Homo sapiens
  source 1..17: mol_type = genomic DNA
accatcctctgctacca

SEQ ID NO: 31985 - DNA, 29 bp, Homo sapiens
  source 1..29: mol_type = genomic DNA
acccaacttacacttaggagatttcaact

SEQ ID NO: 31986 - DNA, 43 bp, Homo sapiens; identical to SEQ ID NO: 2831
  source 1..43: mol_type = genomic DNA

SEQ ID NO: 31987 - DNA, 45 bp, Homo sapiens; identical to SEQ ID NO: 2833
  source 1..45: mol_type = genomic DNA

SEQ ID NO: 31988 - DNA, 46 bp, Homo sapiens; identical to SEQ ID NO: 2834
  source 1..46: mol_type = genomic DNA

SEQ ID NO: 31989 - DNA, 47 bp, Homo sapiens; identical to SEQ ID NO: 2835
  source 1..47: mol_type = genomic DNA

SEQ ID NO: 31990 - DNA, 18 bp, Homo sapiens
  source 1..18: mol_type = genomic DNA
acccagaggtcgatggat

SEQ ID NO: 31991 - DNA, 19 bp, Homo sapiens
  source 1..19: mol_type = genomic DNA
acccagaggtcgatggatc

SEQ ID NO: 31992 - DNA, 20 bp, Homo sapiens
  source 1..20: mol_type = genomic DNA
acccagaggtcgatggatcg

SEQ ID NO: 31993 - DNA, 34 bp, Homo sapiens
  source 1..34: mol_type = genomic DNA
acccagaggtcgatggatcgaaaccatcctctgc

SEQ ID NO: 31994 - DNA, 35 bp, Homo sapiens; identical to SEQ ID NO: 2845
  source 1..35: mol_type = genomic DNA

SEQ ID NO: 31995 - DNA, 38 bp, Homo sapiens
  source 1..38: mol_type = genomic DNA
acccagaggtcgatggatcgaaaccatcctctgctacc

SEQ ID NO: 31996 - DNA, 39 bp, Homo sapiens
  source 1..39: mol_type = genomic DNA
acccagaggtcgatggatcgaaaccatcctctgctacca

SEQ ID NO: 31997 - DNA, 32 bp, Homo sapiens; identical to SEQ ID NO: 2851
  source 1..32: mol_type = genomic DNA

SEQ ID NO: 31998 - DNA, 33 bp, Homo sapiens; identical to SEQ ID NO: 2852
  source 1..33: mol_type = genomic DNA

SEQ ID NO: 31999 - DNA, 34 bp, Homo sapiens; identical to SEQ ID NO: 2853
  source 1..34: mol_type = genomic DNA

SEQ ID NO: 32000 - DNA, 35 bp, Homo sapiens; identical to SEQ ID NO: 2854
  source 1..35: mol_type = genomic DNA

SEQ ID NO: 32001 - DNA, 36 bp, Homo sapiens; identical to SEQ ID NO: 2855
  source 1..36: mol_type = genomic DNA

SEQ ID NO: 32002 - DNA, 37 bp, Homo sapiens; identical to SEQ ID NO: 2856
  source 1..37: mol_type = genomic DNA

SEQ ID NO: 32003 - DNA, 38 bp, Homo sapiens; identical to SEQ ID NO: 2857
  source 1..38: mol_type = genomic DNA

SEQ ID NO: 32004 - DNA, 39 bp, Homo sapiens; identical to SEQ ID NO: 2858
  source 1..39: mol_type = genomic DNA

SEQ ID NO: 32005 - DNA, 36 bp, Homo sapiens; identical to SEQ ID NO: 2864
  source 1..36: mol_type = genomic DNA

SEQ ID NO: 32006 - DNA, 37 bp, Homo sapiens; identical to SEQ ID NO: 2865
  source 1..37: mol_type = genomic DNA

SEQ ID NO: 32007 - DNA, 16 bp, Homo sapiens
  source 1..16: mol_type = genomic DNA
accccactcctggtac

SEQ ID NO: 32008 - DNA, 17 bp, Homo sapiens
  source 1..17: mol_type = genomic DNA
accccactcctggtacc

SEQ ID NO: 32009 - DNA, 18 bp, Homo sapiens
  source 1..18: mol_type = genomic DNA
accccactcctggtacca

SEQ ID NO: 32010 - DNA, 17 bp, Homo sapiens
  source 1..17: mol_type = genomic DNA
acccccttatttctacc

SEQ ID NO: 32011 - DNA, 38 bp, Homo sapiens; identical to SEQ ID NO: 2890
  source 1..38: mol_type = genomic DNA

SEQ ID NO: 32012 - DNA, 16 bp, Homo sapiens
  source 1..16: mol_type = genomic DNA
accccgtacgggccac

SEQ ID NO: 32013 - DNA, 17 bp, Homo sapiens
  source 1..17: mol_type = genomic DNA
accccgtacgggccacc

SEQ ID NO: 32014 - DNA, 16 bp, Homo sapiens
  source 1..16: mol_type = genomic DNA
accccgtccgtgcctc

SEQ ID NO: 32015 - DNA, 17 bp, Homo sapiens
  source 1..17: mol_type = genomic DNA
accccgtccgtgcctcc

SEQ ID NO: 32016 - DNA, 18 bp, Homo sapiens
  source 1..18: mol_type = genomic DNA
accccgtccgtgcctcca

SEQ ID NO: 32017 - DNA, 16 bp, Homo sapiens
  source 1..16: mol_type = genomic DNA
accccttatttacccc

SEQ ID NO: 32018 - DNA, 17 bp, Homo sapiens
  source 1..17: mol_type = genomic DNA
accccttatttacccca

SEQ ID NO: 32019 - DNA, 28 bp, Homo sapiens
  source 1..28: mol_type = genomic DNA
acccgggttcgattcccgggcggcgcac

SEQ ID NO: 32020 - DNA, 16 bp, Homo sapiens
  source 1..16: mol_type = genomic DNA
accctgctcgctgcgc

SEQ ID NO: 32021 - DNA, 17 bp, Homo sapiens
  source 1..17: mol_type = genomic DNA
accctgctcgctgcgcc

SEQ ID NO: 32022 - DNA, 18 bp, Homo sapiens
  source 1..18: mol_type = genomic DNA
accctgctcgctgcgcca

SEQ ID NO: 32023 - DNA, 17 bp, Homo sapiens
  source 1..17: mol_type = genomic DNA
accctggactctgaatc

SEQ ID NO: 32024 - DNA, 18 bp, Homo sapiens
  source 1..18: mol_type = genomic DNA
accgaaaggttggtggtt

SEQ ID NO: 32025 - DNA, 23 bp, Homo sapiens
  source 1..23: mol_type = genomic DNA
accgaaaggttggtggttcgagc

SEQ ID NO: 32026 - DNA, 38 bp, Homo sapiens; identical to SEQ ID NO: 2912
  source 1..38: mol_type = genomic DNA

SEQ ID NO: 32027 - DNA, 34 bp, Homo sapiens; identical to SEQ ID NO: 2916
  source 1..34: mol_type = genomic DNA

SEQ ID NO: 32028 - DNA, 35 bp, Homo sapiens; identical to SEQ ID NO: 2917
  source 1..35: mol_type = genomic DNA

SEQ ID NO: 32029 - DNA, 36 bp, Homo sapiens; identical to SEQ ID NO: 2918
  source 1..36: mol_type = genomic DNA

SEQ ID NO: 32030 - DNA, 37 bp, Homo sapiens; identical to SEQ ID NO: 2919
  source 1..37: mol_type = genomic DNA

SEQ ID NO: 32031 - DNA, 38 bp, Homo sapiens; identical to SEQ ID NO: 2920
  source 1..38: mol_type = genomic DNA

SEQ ID NO: 32032 - DNA, 16 bp, Homo sapiens
  source 1..16: mol_type = genomic DNA
accgaagatcgcgggt

SEQ ID NO: 32033 - DNA, 19 bp, Homo sapiens
  source 1..19: mol_type = genomic DNA
accgaagatcgcgggttcg

SEQ ID NO: 32034 - DNA, 34 bp, Homo sapiens; identical to SEQ ID NO: 2926
  source 1..34: mol_type = genomic DNA

SEQ ID NO: 32035 - DNA, 35 bp, Homo sapiens; identical to SEQ ID NO: 2927
  source 1..35: mol_type = genomic DNA

SEQ ID NO: 32036 - DNA, 36 bp, Homo sapiens; identical to SEQ ID NO: 2928
  source 1..36: mol_type = genomic DNA

SEQ ID NO: 32037 - DNA, 37 bp, Homo sapiens; identical to SEQ ID NO: 2929
  source 1..37: mol_type = genomic DNA

SEQ ID NO: 32038 - DNA, 38 bp, Homo sapiens; identical to SEQ ID NO: 2930
  source 1..38: mol_type = genomic DNA

SEQ ID NO: 32039 - DNA, 16 bp, Homo sapiens
  source 1..16: mol_type = genomic DNA
accgagcggaaacacc

SEQ ID NO: 32040 - DNA, 36 bp, Homo sapiens; identical to SEQ ID NO: 2957
  source 1..36: mol_type = genomic DNA

SEQ ID NO: 32041 - DNA, 37 bp, Homo sapiens; identical to SEQ ID NO: 2958
  source 1..37: mol_type = genomic DNA

SEQ ID NO: 32042 - DNA, 38 bp, Homo sapiens; identical to SEQ ID NO: 2959
  source 1..38: mol_type = genomic DNA

SEQ ID NO: 32043 - DNA, 39 bp, Homo sapiens; identical to SEQ ID NO: 2960
  source 1..39: mol_type = genomic DNA

SEQ ID NO: 32044 - DNA, 29 bp, Homo sapiens
  source 1..29: mol_type = genomic DNA
accggagatgaaaacctttttccaaggac

SEQ ID NO: 32045 - DNA, 31 bp, Homo sapiens; identical to SEQ ID NO: 2978
  source 1..31: mol_type = genomic DNA

SEQ ID NO: 32046 - DNA, 32 bp, Homo sapiens; identical to SEQ ID NO: 2979
  source 1..32: mol_type = genomic DNA

SEQ ID NO: 32047 - DNA, 33 bp, Homo sapiens; identical to SEQ ID NO: 2980
  source 1..33: mol_type = genomic DNA

SEQ ID NO: 32048 - DNA, 16 bp, Homo sapiens
  source 1..16: mol_type = genomic DNA
accgggatggccgagt

SEQ ID NO: 32049 - DNA, 18 bp, Homo sapiens
  source 1..18: mol_type = genomic DNA
accgggatggccgagtgg

SEQ ID NO: 32050 - DNA, 33 bp, Homo sapiens
  source 1..33: mol_type = genomic DNA
accgggatggccgagtggttaaggcgttggact

SEQ ID NO: 32051 - DNA, 16 bp, Homo sapiens
  source 1..16: mol_type = genomic DNA
accgggcagaagcacc

SEQ ID NO: 32052 - DNA, 17 bp, Homo sapiens
  source 1..17: mol_type = genomic DNA
accgggcagaagcacca

SEQ ID NO: 32053 - DNA, 16 bp, Homo sapiens
  source 1..16: mol_type = genomic DNA
accgggcggaaacacc

SEQ ID NO: 32054 - DNA, 17 bp, Homo sapiens
  source 1..17: mol_type = genomic DNA
accgggcggaaacacca

SEQ ID NO: 32055 - DNA, 28 bp, Homo sapiens
  source 1..28: mol_type = genomic DNA
accggggttcaattccccgacggggagc

SEQ ID NO: 32056 - DNA, 29 bp, Homo sapiens
  source 1..29: mol_type = genomic DNA
accggggttcaattccccgacggggagcc

SEQ ID NO: 32057 - DNA, 27 bp, Homo sapiens
  source 1..27: mol_type = genomic DNA
accggggttcgattccccgacggggag

SEQ ID NO: 32058 - DNA, 28 bp, Homo sapiens
  source 1..28: mol_type = genomic DNA
accggggttcgattccccgacggggagc

SEQ ID NO: 32059 - DNA, 29 bp, Homo sapiens
  source 1..29: mol_type = genomic DNA
accggggttcgattccccgacggggagcc

SEQ ID NO: 32060 - DNA, 30 bp, Homo sapiens; identical to SEQ ID NO: 2992
  source 1..30: mol_type = genomic DNA

SEQ ID NO: 32061 - DNA, 17 bp, Homo sapiens
  source 1..17: mol_type = genomic DNA
acctcagagggggcacc

SEQ ID NO: 32062 - DNA, 18 bp, Homo sapiens
  source 1..18: mol_type = genomic DNA
acctcagagggggcacca

SEQ ID NO: 32063 - DNA, 26 bp, Homo sapiens
  source 1..26: mol_type = genomic DNA
acctcggttcgaatccgagtcacggc

SEQ ID NO: 32064 - DNA, 28 bp, Homo sapiens
  source 1..28: mol_type = genomic DNA
acctcggttcgaatccgagtcacggcac

SEQ ID NO: 32065 - DNA, 16 bp, Homo sapiens
  source 1..16: mol_type = genomic DNA
acctcgtggcgcaacg

SEQ ID NO: 32066 - DNA, 16 bp, Homo sapiens
  source 1..16: mol_type = genomic DNA
acctctttacagtgac

SEQ ID NO: 32067 - DNA, 17 bp, Homo sapiens
  source 1..17: mol_type = genomic DNA
acctctttacagtgacc

SEQ ID NO: 32068 - DNA, 18 bp, Homo sapiens
  source 1..18: mol_type = genomic DNA
acctctttacagtgacca

SEQ ID NO: 32069 - DNA, 16 bp, Homo sapiens
  source 1..16: mol_type = genomic DNA
acctgccggggcttcc

SEQ ID NO: 32070 - DNA, 17 bp, Homo sapiens
  source 1..17: mol_type = genomic DNA
acctgccggggcttcca

SEQ ID NO: 32071 - DNA, 28 bp, Homo sapiens
  source 1..28: mol_type = genomic DNA
accttttaagttaaagattaagagaacc

SEQ ID NO: 32072 - DNA, 16 bp, Homo sapiens
  source 1..16: mol_type = genomic DNA
acgaatgatttcgact

SEQ ID NO: 32073 - DNA, 17 bp, Homo sapiens
  source 1..17: mol_type = genomic DNA
acgaatgatttcgactc

SEQ ID NO: 32074 - DNA, 18 bp, Homo sapiens
  source 1..18: mol_type = genomic DNA
acgaatgatttcgactca

SEQ ID NO: 32075 - DNA, 19 bp, Homo sapiens
  source 1..19: mol_type = genomic DNA
acgaccccttatttacccc

SEQ ID NO: 32076 - DNA, 20 bp, Homo sapiens
  source 1..20: mol_type = genomic DNA
acgaccccttatttacccca

SEQ ID NO: 32077 - DNA, 29 bp, Homo sapiens
  source 1..29: mol_type = genomic DNA
acgaggccccgggttcaatccccggcacc

SEQ ID NO: 32078 - DNA, 34 bp, Homo sapiens
  source 1..34: mol_type = genomic DNA
acgaggccccgggttcaatccccggcacctccac

SEQ ID NO: 32079 - DNA, 35 bp, Homo sapiens; identical to SEQ ID NO: 3066
  source 1..35: mol_type = genomic DNA

SEQ ID NO: 32080 - DNA, 17 bp, Homo sapiens
  source 1..17: mol_type = genomic DNA
acgaggtggccgagtgg

SEQ ID NO: 32081 - DNA, 32 bp, Homo sapiens; identical to SEQ ID NO: 3076
  source 1..32: mol_type = genomic DNA

SEQ ID NO: 32082 - DNA, 36 bp, Homo sapiens; identical to SEQ ID NO: 3080
  source 1..36: mol_type = genomic DNA

SEQ ID NO: 32083 - DNA, 37 bp, Homo sapiens; identical to SEQ ID NO: 3081
  source 1..37: mol_type = genomic DNA

SEQ ID NO: 32084 - DNA, 38 bp, Homo sapiens; identical to SEQ ID NO: 3082
  source 1..38: mol_type = genomic DNA

SEQ ID NO: 32085 - DNA, 40 bp, Homo sapiens; identical to SEQ ID NO: 3084
  source 1..40: mol_type = genomic DNA

SEQ ID NO: 32086 - DNA, 46 bp, Homo sapiens; identical to SEQ ID NO: 3089
  source 1..46: mol_type = genomic DNA

SEQ ID NO: 32087 - DNA, 47 bp, Homo sapiens; identical to SEQ ID NO: 3090
  source 1..47: mol_type = genomic DNA

SEQ ID NO: 32088 - DNA, 37 bp, Homo sapiens; identical to SEQ ID NO: 3098
  source 1..37: mol_type = genomic DNA

SEQ ID NO: 32089 - DNA, 38 bp, Homo sapiens; identical to SEQ ID NO: 3099
  source 1..38: mol_type = genomic DNA

SEQ ID NO: 32090 - DNA, 39 bp, Homo sapiens; identical to SEQ ID NO: 3100
  source 1..39: mol_type = genomic DNA

SEQ ID NO: 32091 - DNA, 40 bp, Homo sapiens; identical to SEQ ID NO: 3101
  source 1..40: mol_type = genomic DNA

SEQ ID NO: 32092 - DNA, 17 bp, Homo sapiens
  source 1..17: mol_type = genomic DNA
acgccaaggtcgcgggt

SEQ ID NO: 32093 - DNA, 18 bp, Homo sapiens
  source 1..18: mol_type = genomic DNA
acgccaaggtcgcgggtt

SEQ ID NO: 32094 - DNA, 19 bp, Homo sapiens
  source 1..19: mol_type = genomic DNA
acgccaaggtcgcgggttc

SEQ ID NO: 32095 - DNA, 33 bp, Homo sapiens; identical to SEQ ID NO: 3112
  source 1..33: mol_type = genomic DNA

SEQ ID NO: 32096 - DNA, 34 bp, Homo sapiens; identical to SEQ ID NO: 3113
  source 1..34: mol_type = genomic DNA

SEQ ID NO: 32097 - DNA, 38 bp, Homo sapiens; identical to SEQ ID NO: 3115
  source 1..38: mol_type = genomic DNA

SEQ ID NO: 32098 - DNA, 16 bp, Homo sapiens
  source 1..16: mol_type = genomic DNA
acgcgaaaggtccccg

SEQ ID NO: 32099 - DNA, 17 bp, Homo sapiens
  source 1..17: mol_type = genomic DNA
acgcgaaaggtccccgg

SEQ ID NO: 32100 - DNA, 18 bp, Homo sapiens
  source 1..18: mol_type = genomic DNA
acgcgaaaggtccccggt

SEQ ID NO: 32101 - DNA, 37 bp, Homo sapiens; identical to SEQ ID NO: 3128
  source 1..37: mol_type = genomic DNA

SEQ ID NO: 32102 - DNA, 38 bp, Homo sapiens; identical to SEQ ID NO: 3129
  source 1..38: mol_type = genomic DNA

SEQ ID NO: 32103 - DNA, 39 bp, Homo sapiens; identical to SEQ ID NO: 3130
  source 1..39: mol_type = genomic DNA

SEQ ID NO: 32104 - DNA, 36 bp, Homo sapiens; identical to SEQ ID NO: 3145
  source 1..36: mol_type = genomic DNA

SEQ ID NO: 32105 - DNA, 37 bp, Homo sapiens; identical to SEQ ID NO: 3146
  source 1..37: mol_type = genomic DNA

SEQ ID NO: 32106 - DNA, 38 bp, Homo sapiens; identical to SEQ ID NO: 3147
  source 1..38: mol_type = genomic DNA

SEQ ID NO: 32107 - DNA, 39 bp, Homo sapiens; identical to SEQ ID NO: 3148
  source 1..39: mol_type = genomic DNA

SEQ ID NO: 32108 - DNA, 30 bp, Homo sapiens; identical to SEQ ID NO: 3155
  source 1..30: mol_type = genomic DNA

SEQ ID NO: 32109 - DNA, 32 bp, Homo sapiens; identical to SEQ ID NO: 3157
  source 1..32: mol_type = genomic DNA

SEQ ID NO: 32110 - DNA, 33 bp, Homo sapiens; identical to SEQ ID NO: 3158
  source 1..33: mol_type = genomic DNA

SEQ ID NO: 32111 - DNA, 34 bp, Homo sapiens; identical to SEQ ID NO: 3159
  source 1..34: mol_type = genomic DNA

SEQ ID NO: 32112 - DNA, 35 bp, Homo sapiens; identical to SEQ ID NO: 3160
  source 1..35: mol_type = genomic DNA

SEQ ID NO: 32113 - DNA, 36 bp, Homo sapiens; identical to SEQ ID NO: 3161
  source 1..36: mol_type = genomic DNA

SEQ ID NO: 32114 - DNA, 37 bp, Homo sapiens; identical to SEQ ID NO: 3162
  source 1..37: mol_type = genomic DNA

SEQ ID NO: 32115 - DNA, 38 bp, Homo sapiens; identical to SEQ ID NO: 3163
  source 1..38: mol_type = genomic DNA

SEQ ID NO: 32116 - DNA, 39 bp, Homo sapiens; identical to SEQ ID NO: 3164
  source 1..39: mol_type = genomic DNA

SEQ ID NO: 32117 - DNA, 17 bp, Homo sapiens
  source 1..17: mol_type = genomic DNA
acgcgggaggcccgggt

SEQ ID NO: 32118 - DNA, 34 bp, Homo sapiens; identical to SEQ ID NO: 3172
  source 1..34: mol_type = genomic DNA

SEQ ID NO: 32119 - DNA, 38 bp, Homo sapiens; identical to SEQ ID NO: 3176
  source 1..38: mol_type = genomic DNA

SEQ ID NO: 32120 - DNA, 39 bp, Homo sapiens; identical to SEQ ID NO: 3177
  source 1..39: mol_type = genomic DNA

SEQ ID NO: 32121 - DNA, 31 bp, Homo sapiens
  source 1..31: mol_type = genomic DNA
acgcgtgggttcgaatcccaccttcgtcgcc

SEQ ID NO: 32122 - DNA, 30 bp, Homo sapiens; identical to SEQ ID NO: 3185
  source 1..30: mol_type = genomic DNA

SEQ ID NO: 32123 - DNA, 31 bp, Homo sapiens; identical to SEQ ID NO: 3186
  source 1..31: mol_type = genomic DNA

SEQ ID NO: 32124 - DNA, 27 bp, Homo sapiens
  source 1..27: mol_type = genomic DNA
acgggctcacatcaccccataaacacc

SEQ ID NO: 32125 - DNA, 28 bp, Homo sapiens
  source 1..28: mol_type = genomic DNA
acgggctcacatcaccccataaacacca

SEQ ID NO: 32126 - DNA, 25 bp, Homo sapiens
  source 1..25: mol_type = genomic DNA
acgggttcgaaccccgtccgtgcct

SEQ ID NO: 32127 - DNA, 18 bp, Homo sapiens
  source 1..18: mol_type = genomic DNA
acggtagcgcgtctgact

SEQ ID NO: 32128 - DNA, 20 bp, Homo sapiens
  source 1..20: mol_type = genomic DNA
acggtagcgcgtctgactcc

SEQ ID NO: 32129 - DNA, 38 bp, Homo sapiens
  source 1..38: mol_type = genomic DNA
acgtatgaggccccgggttcaatccccggcatctccac

SEQ ID NO: 32130 - DNA, 39 bp, Homo sapiens; identical to SEQ ID NO: 3206
  source 1..39: mol_type = genomic DNA

SEQ ID NO: 32131 - DNA, 28 bp, Homo sapiens
  source 1..28: mol_type = genomic DNA
acgtgggttcgaatcccatcctcgtcgc

SEQ ID NO: 32132 - DNA, 29 bp, Homo sapiens
  source 1..29: mol_type = genomic DNA
acgtgggttcgaatcccatcctcgtcgcc

SEQ ID NO: 32133 - DNA, 19 bp, Homo sapiens
  source 1..19: mol_type = genomic DNA
actaagtgtttgtgggttt

SEQ ID NO: 32134 - DNA, 16 bp, Homo sapiens
  source 1..16: mol_type = genomic DNA
actcaagttctggtct

SEQ ID NO: 32135 - DNA, 17 bp, Homo sapiens
  source 1..17: mol_type = genomic DNA
actcaagttctggtctc

SEQ ID NO: 32136 - DNA, 18 bp, Homo sapiens
  source 1..18: mol_type = genomic DNA
actcaagttctggtctcc

SEQ ID NO: 32137 - DNA, 30 bp, Homo sapiens; identical to SEQ ID NO: 3258
  source 1..30: mol_type = genomic DNA

SEQ ID NO: 32138 - DNA, 18 bp, Homo sapiens
  source 1..18: mol_type = genomic DNA
actccagatcagaaggct

SEQ ID NO: 32139 - DNA, 20 bp, Homo sapiens
  source 1..20: mol_type = genomic DNA
actccagatcagaaggctgc

SEQ ID NO: 32140 - DNA, 45 bp, Homo sapiens
  source 1..45: mol_type = genomic DNA
actccagatcagaaggctgcgtgttcgaatcacgtcggggtcacc

SEQ ID NO: 32141 - DNA, 20 bp, Homo sapiens
  source 1..20: mol_type = genomic DNA
actccagatcagaaggttgc

SEQ ID NO: 32142 - DNA, 16 bp, Homo sapiens
  source 1..16: mol_type = genomic DNA
actcccggtatgggaa

SEQ ID NO: 32143 - DNA, 17 bp, Homo sapiens
  source 1..17: mol_type = genomic DNA
actcccggtatgggaac

SEQ ID NO: 32144 - DNA, 18 bp, Homo sapiens
  source 1..18: mol_type = genomic DNA
actcccggtatgggaacc

SEQ ID NO: 32145 - DNA, 16 bp, Homo sapiens
  source 1..16: mol_type = genomic DNA
actcccggtgtgggaa

SEQ ID NO: 32146 - DNA, 17 bp, Homo sapiens
  source 1..17: mol_type = genomic DNA
actcccggtgtgggaac

SEQ ID NO: 32147 - DNA, 18 bp, Homo sapiens
  source 1..18: mol_type = genomic DNA
actcccggtgtgggaacc

SEQ ID NO: 32148 - DNA, 16 bp, Homo sapiens
  source 1..16: mol_type = genomic DNA
actcctggctggctcg

SEQ ID NO: 32149 - DNA, 17 bp, Homo sapiens
  source 1..17: mol_type = genomic DNA
actcctggctggctcgc

SEQ ID NO: 32150 - DNA, 18 bp, Homo sapiens
  source 1..18: mol_type = genomic DNA
actcctggctggctcgcc

SEQ ID NO: 32151 - DNA, 19 bp, Homo sapiens
  source 1..19: mol_type = genomic DNA
actcctggctggctcgcca

SEQ ID NO: 32152 - DNA, 21 bp, Homo sapiens
  source 1..21: mol_type = genomic DNA
actctgaatccagcgatccga

SEQ ID NO: 32153 - DNA, 22 bp, Homo sapiens
  source 1..22: mol_type = genomic DNA
actctgaatccagcgatccgag

SEQ ID NO: 32154 - DNA, 17 bp, Homo sapiens
  source 1..17: mol_type = genomic DNA
actctgcgttgtggccg

SEQ ID NO: 32155 - DNA, 18 bp, Homo sapiens
  source 1..18: mol_type = genomic DNA
actctgcgttgtggccgc

SEQ ID NO: 32156 - DNA, 16 bp, Homo sapiens
  source 1..16: mol_type = genomic DNA
actctggactctgaat

SEQ ID NO: 32157 - DNA, 17 bp, Homo sapiens
  source 1..17: mol_type = genomic DNA
actctggactctgaatc

SEQ ID NO: 32158 - DNA, 18 bp, Homo sapiens
  source 1..18: mol_type = genomic DNA
actctggactctgaatcc

SEQ ID NO: 32159 - DNA, 19 bp, Homo sapiens
  source 1..19: mol_type = genomic DNA
actctggactctgaatcca

SEQ ID NO: 32160 - DNA, 20 bp, Homo sapiens
  source 1..20: mol_type = genomic DNA
actctggactctgaatccag

SEQ ID NO: 32161 - DNA, 21 bp, Homo sapiens
  source 1..21: mol_type = genomic DNA
actctggactctgaatccagc

SEQ ID NO: 32162 - DNA, 26 bp, Homo sapiens
  source 1..26: mol_type = genomic DNA
actctggactctgaatccagcgatcc

SEQ ID NO: 32163 - DNA, 27 bp, Homo sapiens
  source 1..27: mol_type = genomic DNA
actctggactctgaatccagcgatccg

SEQ ID NO: 32164 - DNA, 28 bp, Homo sapiens
  source 1..28: mol_type = genomic DNA
actctggactctgaatccagcgatccga

SEQ ID NO: 32165 - DNA, 29 bp, Homo sapiens
  source 1..29: mol_type = genomic DNA
actctggactctgaatccagcgatccgag

SEQ ID NO: 32166 - DNA, 30 bp, Homo sapiens; identical to SEQ ID NO: 3319
  source 1..30: mol_type = genomic DNA

SEQ ID NO: 32167 - DNA, 31 bp, Homo sapiens; identical to SEQ ID NO: 3320
  source 1..31: mol_type = genomic DNA

SEQ ID NO: 32168 - DNA, 32 bp, Homo sapiens; identical to SEQ ID NO: 3321
  source 1..32: mol_type = genomic DNA

SEQ ID NO: 32169 - DNA, 33 bp, Homo sapiens; identical to SEQ ID NO: 3322
  source 1..33: mol_type = genomic DNA

SEQ ID NO: 32170 - DNA, 17 bp, Homo sapiens
  source 1..17: mol_type = genomic DNA
actctggactttgaatc

SEQ ID NO: 32171 - DNA, 18 bp, Homo sapiens
  source 1..18: mol_type = genomic DNA
actctggactttgaatcc

SEQ ID NO: 32172 - DNA, 29 bp, Homo sapiens
  source 1..29: mol_type = genomic DNA
actcttttagtataaatagtaccgttaac

SEQ ID NO: 32173 - DNA, 30 bp, Homo sapiens; identical to SEQ ID NO: 3341
  source 1..30: mol_type = genomic DNA

SEQ ID NO: 32174 - DNA, 31 bp, Homo sapiens; identical to SEQ ID NO: 3342
  source 1..31: mol_type = genomic DNA

SEQ ID NO: 32175 - DNA, 22 bp, Homo sapiens
  source 1..22: mol_type = genomic DNA
actgaaaatgtttagacgggct

SEQ ID NO: 32176 - DNA, 19 bp, Homo sapiens
  source 1..19: mol_type = genomic DNA
actgctaactcatgccccc

SEQ ID NO: 32177 - DNA, 45 bp, Homo sapiens; identical to SEQ ID NO: 3397
  source 1..45: mol_type = genomic DNA

SEQ ID NO: 32178 - DNA, 46 bp, Homo sapiens; identical to SEQ ID NO: 3398
  source 1..46: mol_type = genomic DNA

SEQ ID NO: 32179 - DNA, 16 bp, Homo sapiens
  source 1..16: mol_type = genomic DNA
actgggcggaaacacc

SEQ ID NO: 32180 - DNA, 16 bp, Homo sapiens
  source 1..16: mol_type = genomic DNA
actggtggttcagtgg

SEQ ID NO: 32181 - DNA, 28 bp, Homo sapiens
  source 1..28: mol_type = genomic DNA
actggtggttcagtggtagaattctcgc

SEQ ID NO: 32182 - DNA, 29 bp, Homo sapiens
  source 1..29: mol_type = genomic DNA
actggtggttcagtggtagaattctcgcc

SEQ ID NO: 32183 - DNA, 30 bp, Homo sapiens; identical to SEQ ID NO: 3403
  source 1..30: mol_type = genomic DNA

SEQ ID NO: 32184 - DNA, 20 bp, Homo sapiens
  source 1..20: mol_type = genomic DNA
actgtagatccttaggtcgc

SEQ ID NO: 32185 - DNA, 22 bp, Homo sapiens
  source 1..22: mol_type = genomic DNA
actgtagatccttaggtcgctg

SEQ ID NO: 32186 - DNA, 16 bp, Homo sapiens
  source 1..16: mol_type = genomic DNA
acttaacttgaccgct

SEQ ID NO: 32187 - DNA, 17 bp, Homo sapiens
  source 1..17: mol_type = genomic DNA
acttaacttgaccgctc

SEQ ID NO: 32188 - DNA, 19 bp, Homo sapiens
  source 1..19: mol_type = genomic DNA
acttaacttgaccgctctg

SEQ ID NO: 32189 - DNA, 20 bp, Homo sapiens
  source 1..20: mol_type = genomic DNA
acttaacttgaccgctctga

SEQ ID NO: 32190 - DNA, 21 bp, Homo sapiens
  source 1..21: mol_type = genomic DNA
acttaacttgaccgctctgac

SEQ ID NO: 32191 - DNA, 22 bp, Homo sapiens
  source 1..22: mol_type = genomic DNA
acttaacttgaccgctctgacc

SEQ ID NO: 32192 - DNA, 23 bp, Homo sapiens
  source 1..23: mol_type = genomic DNA
acttaacttgaccgctctgacca

SEQ ID NO: 32193 - DNA, 18 bp, Homo sapiens
  source 1..18: mol_type = genomic DNA
acttaagatccaatggac

SEQ ID NO: 32194 - DNA, 20 bp, Homo sapiens
  source 1..20: mol_type = genomic DNA
acttaagatccaatggacat

SEQ ID NO: 32195 - DNA, 34 bp, Homo sapiens; identical to SEQ ID NO: 3447
  source 1..34: mol_type = genomic DNA

SEQ ID NO: 32196 - DNA, 40 bp, Homo sapiens; identical to SEQ ID NO: 3453
  source 1..40: mol_type = genomic DNA

SEQ ID NO: 32197 - DNA, 41 bp, Homo sapiens; identical to SEQ ID NO: 3454
  source 1..41: mol_type = genomic DNA

SEQ ID NO: 32198 - DNA, 42 bp, Homo sapiens; identical to SEQ ID NO: 3455
  source 1..42: mol_type = genomic DNA

SEQ ID NO: 32199 - DNA, 43 bp, Homo sapiens; identical to SEQ ID NO: 3456
  source 1..43: mol_type = genomic DNA

SEQ ID NO: 32200 - DNA, 44 bp, Homo sapiens; identical to SEQ ID NO: 3457
  source 1..44: mol_type = genomic DNA

SEQ ID NO: 32201 - DNA, 34 bp, Homo sapiens; identical to SEQ ID NO: 3482
  source 1..34: mol_type = genomic DNA

SEQ ID NO: 32202 - DNA, 35 bp, Homo sapiens; identical to SEQ ID NO: 3483
  source 1..35: mol_type = genomic DNA

SEQ ID NO: 32203 - DNA, 36 bp, Homo sapiens; identical to SEQ ID NO: 3484
  source 1..36: mol_type = genomic DNA

SEQ ID NO: 32204 - DNA, 37 bp, Homo sapiens; identical to SEQ ID NO: 3485
  source 1..37: mol_type = genomic DNA

SEQ ID NO: 32205 - DNA, 38 bp, Homo sapiens; identical to SEQ ID NO: 3486
  source 1..38: mol_type = genomic DNA

SEQ ID NO: 32206 - DNA, 45 bp, Homo sapiens
  source 1..45: mol_type = genomic DNA
acttcggatcagaagattgagggttcgaatcccttcgtggttgcc

SEQ ID NO: 32207 - DNA, 26 bp, Homo sapiens
  source 1..26: mol_type = genomic DNA
acttcggatcagaagattgcaggttc

SEQ ID NO: 32208 - DNA, 45 bp, Homo sapiens; identical to SEQ ID NO: 3509
  source 1..45: mol_type = genomic DNA

SEQ ID NO: 32209 - DNA, 16 bp, Homo sapiens
  source 1..16: mol_type = genomic DNA
acttgaccgctctgac

SEQ ID NO: 32210 - DNA, 17 bp, Homo sapiens
  source 1..17: mol_type = genomic DNA
acttgaccgctctgacc

SEQ ID NO: 32211 - DNA, 18 bp, Homo sapiens
  source 1..18: mol_type = genomic DNA
acttgaccgctctgacca

SEQ ID NO: 32212 - DNA, 18 bp, Homo sapiens
  source 1..18: mol_type = genomic DNA
actttacagtcagaggtt

SEQ ID NO: 32213 - DNA, 21 bp, Homo sapiens
  source 1..21: mol_type = genomic DNA
actttgaatccagcgatccga

SEQ ID NO: 32214 - DNA, 22 bp, Homo sapiens
  source 1..22: mol_type = genomic DNA
actttgaatccagcgatccgag

SEQ ID NO: 32215 - DNA, 34 bp, Homo sapiens; identical to SEQ ID NO: 3547
  source 1..34: mol_type = genomic DNA

SEQ ID NO: 32216 - DNA, 35 bp, Homo sapiens; identical to SEQ ID NO: 3548
  source 1..35: mol_type = genomic DNA

SEQ ID NO: 32217 - DNA, 36 bp, Homo sapiens; identical to SEQ ID NO: 3549
  source 1..36: mol_type = genomic DNA

SEQ ID NO: 32218 - DNA, 38 bp, Homo sapiens; identical to SEQ ID NO: 3551
  source 1..38: mol_type = genomic DNA

SEQ ID NO: 32219 - DNA, 39 bp, Homo sapiens; identical to SEQ ID NO: 3552
  source 1..39: mol_type = genomic DNA

SEQ ID NO: 32220 - DNA, 26 bp, Homo sapiens
  source 1..26: mol_type = genomic DNA
actttgtcaaagttaaattataggct

SEQ ID NO: 32221 - DNA, 16 bp, Homo sapiens
  source 1..16: mol_type = genomic DNA
acttttaaaggataac

SEQ ID NO: 32222 - DNA, 28 bp, Homo sapiens
  source 1..28: mol_type = genomic DNA
acttttaaaggataacagctatccattg

SEQ ID NO: 32223 - DNA, 31 bp, Homo sapiens; identical to SEQ ID NO: 3591
  source 1..31: mol_type = genomic DNA

SEQ ID NO: 32224 - DNA, 32 bp, Homo sapiens; identical to SEQ ID NO: 3592
  source 1..32: mol_type = genomic DNA

SEQ ID NO: 32225 - DNA, 33 bp, Homo sapiens; identical to SEQ ID NO: 3593
  source 1..33: mol_type = genomic DNA

SEQ ID NO: 32226 - DNA, 16 bp, Homo sapiens
  source 1..16: mol_type = genomic DNA
actttttctctgacca

SEQ ID NO: 32227 - DNA, 26 bp, Homo sapiens
  source 1..26: mol_type = genomic DNA
agaaagctcacaagaactgctaactc

SEQ ID NO: 32228 - DNA, 47 bp, Homo sapiens; identical to SEQ ID NO: 3633
  source 1..47: mol_type = genomic DNA

SEQ ID NO: 32229 - DNA, 23 bp, Homo sapiens
  source 1..23: mol_type = genomic DNA
agaaatttaggttaaatacagac

SEQ ID NO: 32230 - DNA, 17 bp, Homo sapiens
  source 1..17: mol_type = genomic DNA
agaactgctaactcatg

SEQ ID NO: 32231 - DNA, 18 bp, Homo sapiens
  source 1..18: mol_type = genomic DNA
agaactgctaactcatgc

SEQ ID NO: 32232 - DNA, 19 bp, Homo sapiens
  source 1..19: mol_type = genomic DNA
agaactgctaactcatgcc

SEQ ID NO: 32233 - DNA, 22 bp, Homo sapiens
  source 1..22: mol_type = genomic DNA
agaactgctaactcatgccccc

SEQ ID NO: 32234 - DNA, 25 bp, Homo sapiens
  source 1..25: mol_type = genomic DNA
agaactgctaactcatgcccccatg

SEQ ID NO: 32235 - DNA, 26 bp, Homo sapiens
  source 1..26: mol_type = genomic DNA
agaactgctaactcatgcccccatgt

SEQ ID NO: 32236 - DNA, 27 bp, Homo sapiens
  source 1..27: mol_type = genomic DNA
agaactgctaactcatgcccccatgtc

SEQ ID NO: 32237 - DNA, 28 bp, Homo sapiens
  source 1..28: mol_type = genomic DNA
agaactgctaactcatgcccccatgtct

SEQ ID NO: 32238 - DNA, 35 bp, Homo sapiens; identical to SEQ ID NO: 3707
  source 1..35: mol_type = genomic DNA

SEQ ID NO: 32239 - DNA, 39 bp, Homo sapiens; identical to SEQ ID NO: 3711
  source 1..39: mol_type = genomic DNA

SEQ ID NO: 32240 - DNA, 40 bp, Homo sapiens; identical to SEQ ID NO: 3712
  source 1..40: mol_type = genomic DNA

SEQ ID NO: 32241 - DNA, 41 bp, Homo sapiens; identical to SEQ ID NO: 3713
  source 1..41: mol_type = genomic DNA

SEQ ID NO: 32242 - DNA, 43 bp, Homo sapiens; identical to SEQ ID NO: 3715
  source 1..43: mol_type = genomic DNA

SEQ ID NO: 32243 - DNA, 44 bp, Homo sapiens; identical to SEQ ID NO: 3716
  source 1..44: mol_type = genomic DNA

SEQ ID NO: 32244 - DNA, 46 bp, Homo sapiens; identical to SEQ ID NO: 3718
  source 1..46: mol_type = genomic DNA

SEQ ID NO: 32245 - DNA, 28 bp, Homo sapiens
  source 1..28: mol_type = genomic DNA
agaagattccaggttcgactcctggctg

SEQ ID NO: 32246 - DNA, 33 bp, Homo sapiens; identical to SEQ ID NO: 3729
  source 1..33: mol_type = genomic DNA

SEQ ID NO: 32247 - DNA, 34 bp, Homo sapiens; identical to SEQ ID NO: 3730
  source 1..34: mol_type = genomic DNA

SEQ ID NO: 32248 - DNA, 35 bp, Homo sapiens; identical to SEQ ID NO: 3731
  source 1..35: mol_type = genomic DNA

SEQ ID NO: 32249 - DNA, 16 bp, Homo sapiens
  source 1..16: mol_type = genomic DNA
agaagattctaggttc

SEQ ID NO: 32250 - DNA, 17 bp, Homo sapiens
  source 1..17: mol_type = genomic DNA
agaagattctaggttcg

SEQ ID NO: 32251 - DNA, 32 bp, Homo sapiens; identical to SEQ ID NO: 3738
  source 1..32: mol_type = genomic DNA

SEQ ID NO: 32252 - DNA, 33 bp, Homo sapiens; identical to SEQ ID NO: 3739
  source 1..33: mol_type = genomic DNA

SEQ ID NO: 32253 - DNA, 34 bp, Homo sapiens; identical to SEQ ID NO: 3740
  source 1..34: mol_type = genomic DNA

SEQ ID NO: 32254 - DNA, 35 bp, Homo sapiens; identical to SEQ ID NO: 3741
  source 1..35: mol_type = genomic DNA

SEQ ID NO: 32255 - DNA, 36 bp, Homo sapiens; identical to SEQ ID NO: 3742
  source 1..36: mol_type = genomic DNA

SEQ ID NO: 32256 - DNA, 16 bp, Homo sapiens
  source 1..16: mol_type = genomic DNA
agaagattgagggttc

SEQ ID NO: 32257 - DNA, 17 bp, Homo sapiens
  source 1..17: mol_type = genomic DNA
agaagattgagggttcg

SEQ ID NO: 32258 - DNA, 24 bp, Homo sapiens
  source 1..24: mol_type = genomic DNA
agaagattgagggttcgaatccct

SEQ ID NO: 32259 - DNA, 33 bp, Homo sapiens
  source 1..33: mol_type = genomic DNA
agaagattgagggttcgaatccctccgtggtta

SEQ ID NO: 32260 - DNA, 35 bp, Homo sapiens
  source 1..35: mol_type = genomic DNA
agaagattgagggttcgaatccctccgtggttacc

SEQ ID NO: 32261 - DNA, 33 bp, Homo sapiens
  source 1..33: mol_type = genomic DNA
agaagattgagggttcgaatcccttcgtggtta

SEQ ID NO: 32262 - DNA, 33 bp, Homo sapiens; identical to SEQ ID NO: 3746
  source 1..33: mol_type = genomic DNA

SEQ ID NO: 32263 - DNA, 34 bp, Homo sapiens; identical to SEQ ID NO: 3747
  source 1..34: mol_type = genomic DNA

SEQ ID NO: 32264 - DNA, 35 bp, Homo sapiens; identical to SEQ ID NO: 3748
  source 1..35: mol_type = genomic DNA

SEQ ID NO: 32265 - DNA, 36 bp, Homo sapiens; identical to SEQ ID NO: 3749
  source 1..36: mol_type = genomic DNA

SEQ ID NO: 32266 - DNA, 33 bp, Homo sapiens; identical to SEQ ID NO: 3751
  source 1..33: mol_type = genomic DNA

SEQ ID NO: 32267 - DNA, 34 bp, Homo sapiens; identical to SEQ ID NO: 3752
  source 1..34: mol_type = genomic DNA

SEQ ID NO: 32268 - DNA, 35 bp, Homo sapiens; identical to SEQ ID NO: 3753
  source 1..35: mol_type = genomic DNA

SEQ ID NO: 32269 - DNA, 36 bp, Homo sapiens; identical to SEQ ID NO: 3754
  source 1..36: mol_type = genomic DNA

SEQ ID NO: 32270 - DNA, 16 bp, Homo sapiens
  source 1..16: mol_type = genomic DNA
agaagattgcaggttc

SEQ ID NO: 32271 - DNA, 24 bp, Homo sapiens
  source 1..24: mol_type = genomic DNA
agaagattgcaggttcgagtcctg

SEQ ID NO: 32272 - DNA, 32 bp, Homo sapiens; identical to SEQ ID NO: 3758
  source 1..32: mol_type = genomic DNA

SEQ ID NO: 32273 - DNA, 33 bp, Homo sapiens; identical to SEQ ID NO: 3759
  source 1..33: mol_type = genomic DNA

SEQ ID NO: 32274 - DNA, 34 bp, Homo sapiens; identical to SEQ ID NO: 3760
  source 1..34: mol_type = genomic DNA

SEQ ID NO: 32275 - DNA, 35 bp, Homo sapiens; identical to SEQ ID NO: 3761
  source 1..35: mol_type = genomic DNA

SEQ ID NO: 32276 - DNA, 36 bp, Homo sapiens; identical to SEQ ID NO: 3762
  source 1..36: mol_type = genomic DNA

SEQ ID NO: 32277 - DNA, 19 bp, Homo sapiens
  source 1..19: mol_type = genomic DNA
agaagcagcttcaaacctg

SEQ ID NO: 32278 - DNA, 26 bp, Homo sapiens
  source 1..26: mol_type = genomic DNA
agaagcagcttcaaacctgccggggc

SEQ ID NO: 32279 - DNA, 27 bp, Homo sapiens
  source 1..27: mol_type = genomic DNA
agaagcagcttcaaacctgccggggct

SEQ ID NO: 32280 - DNA, 28 bp, Homo sapiens
  source 1..28: mol_type = genomic DNA
agaagcagcttcaaacctgccggggctt

SEQ ID NO: 32281 - DNA, 16 bp, Homo sapiens
  source 1..16: mol_type = genomic DNA
agaaggctgcgtgttc

SEQ ID NO: 32282 - DNA, 17 bp, Homo sapiens
  source 1..17: mol_type = genomic DNA
agaaggctgcgtgttcg

SEQ ID NO: 32283 - DNA, 21 bp, Homo sapiens
  source 1..21: mol_type = genomic DNA
agaaggctgcgtgttcgaatc

SEQ ID NO: 32284 - DNA, 32 bp, Homo sapiens; identical to SEQ ID NO: 3777
  source 1..32: mol_type = genomic DNA

SEQ ID NO: 32285 - DNA, 33 bp, Homo sapiens
  source 1..33: mol_type = genomic DNA
agaaggctgcgtgttcgaatcacgtcggggtca

SEQ ID NO: 32286 - DNA, 34 bp, Homo sapiens; identical to SEQ ID NO: 3778
  source 1..34: mol_type = genomic DNA

SEQ ID NO: 32287 - DNA, 35 bp, Homo sapiens; identical to SEQ ID NO: 3779
  source 1..35: mol_type = genomic DNA

SEQ ID NO: 32288 - DNA, 31 bp, Homo sapiens; identical to SEQ ID NO: 3783
  source 1..31: mol_type = genomic DNA

SEQ ID NO: 32289 - DNA, 34 bp, Homo sapiens; identical to SEQ ID NO: 3786
  source 1..34: mol_type = genomic DNA

SEQ ID NO: 32290 - DNA, 35 bp, Homo sapiens; identical to SEQ ID NO: 3787
  source 1..35: mol_type = genomic DNA

SEQ ID NO: 32291 - DNA, 36 bp, Homo sapiens; identical to SEQ ID NO: 3788
  source 1..36: mol_type = genomic DNA

SEQ ID NO: 32292 - DNA, 16 bp, Homo sapiens
  source 1..16: mol_type = genomic DNA
agaaggttgcgtgttc

SEQ ID NO: 32293 - DNA, 17 bp, Homo sapiens
  source 1..17: mol_type = genomic DNA
agaaggttgcgtgttca

SEQ ID NO: 32294 - DNA, 33 bp, Homo sapiens; identical to SEQ ID NO: 3790
  source 1..33: mol_type = genomic DNA

SEQ ID NO: 32295 - DNA, 34 bp, Homo sapiens
  source 1..34: mol_type = genomic DNA
agaaggttgcgtgttcaaatcacgtcggggtcac

SEQ ID NO: 32296 - DNA, 35 bp, Homo sapiens; identical to SEQ ID NO: 3791
  source 1..35: mol_type = genomic DNA

SEQ ID NO: 32297 - DNA, 33 bp, Homo sapiens; identical to SEQ ID NO: 3794
  source 1..33: mol_type = genomic DNA

SEQ ID NO: 32298 - DNA, 34 bp, Homo sapiens; identical to SEQ ID NO: 3795
  source 1..34: mol_type = genomic DNA

SEQ ID NO: 32299 - DNA, 35 bp, Homo sapiens; identical to SEQ ID NO: 3796
  source 1..35: mol_type = genomic DNA

SEQ ID NO: 32300 - DNA, 39 bp, Homo sapiens; identical to SEQ ID NO: 3813
  source 1..39: mol_type = genomic DNA

SEQ ID NO: 32301 - DNA, 18 bp, Homo sapiens
  source 1..18: mol_type = genomic DNA
agaattctcgcctgccac

SEQ ID NO: 32302 - DNA, 19 bp, Homo sapiens
  source 1..19: mol_type = genomic DNA
agaattctcgcctgccacg

SEQ ID NO: 32303 - DNA, 31 bp, Homo sapiens; identical to SEQ ID NO: 3827
  source 1..31: mol_type = genomic DNA

SEQ ID NO: 32304 - DNA, 30 bp, Homo sapiens; identical to SEQ ID NO: 3851
  source 1..30: mol_type = genomic DNA

SEQ ID NO: 32305 - DNA, 31 bp, Homo sapiens; identical to SEQ ID NO: 3852
  source 1..31: mol_type = genomic DNA

SEQ ID NO: 32306 - DNA, 27 bp, Homo sapiens
  source 1..27: mol_type = genomic DNA
agaccggggttcgattccccgacgggg

SEQ ID NO: 32307 - DNA, 29 bp, Homo sapiens
  source 1..29: mol_type = genomic DNA
agaccggggttcgattccccgacggggag

SEQ ID NO: 32308 - DNA, 30 bp, Homo sapiens; identical to SEQ ID NO: 3861
  source 1..30: mol_type = genomic DNA

SEQ ID NO: 32309 - DNA, 31 bp, Homo sapiens; identical to SEQ ID NO: 3862
  source 1..31: mol_type = genomic DNA

SEQ ID NO: 32310 - DNA, 32 bp, Homo sapiens; identical to SEQ ID NO: 3863
  source 1..32: mol_type = genomic DNA

SEQ ID NO: 32311 - DNA, 17 bp, Homo sapiens
  source 1..17: mol_type = genomic DNA
agacgggctcacatcac

SEQ ID NO: 32312 - DNA, 18 bp, Homo sapiens
  source 1..18: mol_type = genomic DNA
agacgggctcacatcacc

SEQ ID NO: 32313 - DNA, 29 bp, Homo sapiens
  source 1..29: mol_type = genomic DNA
agacgggctcacatcaccccataaacacc

SEQ ID NO: 32314 - DNA, 30 bp, Homo sapiens; identical to SEQ ID NO: 3877
  source 1..30: mol_type = genomic DNA

SEQ ID NO: 32315 - DNA, 20 bp, Homo sapiens
  source 1..20: mol_type = genomic DNA
agactcaagttctggtctcc

SEQ ID NO: 32316 - DNA, 23 bp, Homo sapiens
  source 1..23: mol_type = genomic DNA
agactcaagttctggtctccgga

SEQ ID NO: 32317 - DNA, 24 bp, Homo sapiens
  source 1..24: mol_type = genomic DNA
agactcaagttctggtctccggat

SEQ ID NO: 32318 - DNA, 16 bp, Homo sapiens
  source 1..16: mol_type = genomic DNA
agactttttctctgac

SEQ ID NO: 32319 - DNA, 17 bp, Homo sapiens
  source 1..17: mol_type = genomic DNA
agactttttctctgacc

SEQ ID NO: 32320 - DNA, 18 bp, Homo sapiens
  source 1..18: mol_type = genomic DNA
agactttttctctgacca

SEQ ID NO: 32321 - DNA, 27 bp, Homo sapiens
  source 1..27: mol_type = genomic DNA
agagaaccaacacctctttacagtgac

SEQ ID NO: 32322 - DNA, 35 bp, Homo sapiens; identical to SEQ ID NO: 3913
  source 1..35: mol_type = genomic DNA

SEQ ID NO: 32323 - DNA, 21 bp, Homo sapiens
  source 1..21: mol_type = genomic DNA
agagcatgggactcttaatcc

SEQ ID NO: 32324 - DNA, 32 bp, Homo sapiens; identical to SEQ ID NO: 3921
  source 1..32: mol_type = genomic DNA

SEQ ID NO: 32325 - DNA, 35 bp, Homo sapiens; identical to SEQ ID NO: 3924
  source 1..35: mol_type = genomic DNA

SEQ ID NO: 32326 - DNA, 47 bp, Homo sapiens; identical to SEQ ID NO: 3928
  source 1..47: mol_type = genomic DNA

SEQ ID NO: 32327 - DNA, 32 bp, Homo sapiens
  source 1..32: mol_type = genomic DNA
agagcatttgactgcagatcaagaggtccccg

SEQ ID NO: 32328 - DNA, 27 bp, Homo sapiens
  source 1..27: mol_type = genomic DNA
agaggcttacgaccccttatttacccc

SEQ ID NO: 32329 - DNA, 28 bp, Homo sapiens
  source 1..28: mol_type = genomic DNA
agaggcttacgaccccttatttacccca

SEQ ID NO: 32330 - DNA, 32 bp, Homo sapiens; identical to SEQ ID NO: 3960
  source 1..32: mol_type = genomic DNA

SEQ ID NO: 32331 - DNA, 33 bp, Homo sapiens; identical to SEQ ID NO: 3961
  source 1..33: mol_type = genomic DNA

SEQ ID NO: 32332 - DNA, 16 bp, Homo sapiens
  source 1..16: mol_type = genomic DNA
agaggtcgatggatcg

SEQ ID NO: 32333 - DNA, 19 bp, Homo sapiens
  source 1..19: mol_type = genomic DNA
agaggtcgatggatcgaaa

SEQ ID NO: 32334 - DNA, 20 bp, Homo sapiens
  source 1..20: mol_type = genomic DNA
agaggtcgatggatcgaaac

SEQ ID NO: 32335 - DNA, 21 bp, Homo sapiens
  source 1..21: mol_type = genomic DNA
agaggtcgatggatcgaaacc

SEQ ID NO: 32336 - DNA, 22 bp, Homo sapiens
  source 1..22: mol_type = genomic DNA
agaggtcgatggatcgaaacca

SEQ ID NO: 32337 - DNA, 23 bp, Homo sapiens
  source 1..23: mol_type = genomic DNA
agaggtcgatggatcgaaaccat

SEQ ID NO: 32338 - DNA, 25 bp, Homo sapiens
  source 1..25: mol_type = genomic DNA
agaggttccgggttcgagtcccggc

SEQ ID NO: 32339 - DNA, 32 bp, Homo sapiens; identical to SEQ ID NO: 3977
  source 1..32: mol_type = genomic DNA

SEQ ID NO: 32340 - DNA, 34 bp, Homo sapiens; identical to SEQ ID NO: 3979
  source 1..34: mol_type = genomic DNA

SEQ ID NO: 32341 - DNA, 35 bp, Homo sapiens; identical to SEQ ID NO: 3980
  source 1..35: mol_type = genomic DNA

SEQ ID NO: 32342 - DNA, 18 bp, Homo sapiens
  source 1..18: mol_type = genomic DNA
agagtggcgcagcggaag

SEQ ID NO: 32343 - DNA, 28 bp, Homo sapiens
  source 1..28: mol_type = genomic DNA
agagtggcgcagcggaagcgtgctgggc

SEQ ID NO: 32344 - DNA, 29 bp, Homo sapiens
  source 1..29: mol_type = genomic DNA
agagtggcgcagcggaagcgtgctgggcc

SEQ ID NO: 32345 - DNA, 30 bp, Homo sapiens; identical to SEQ ID NO: 4009
  source 1..30: mol_type = genomic DNA

SEQ ID NO: 32346 - DNA, 32 bp, Homo sapiens; identical to SEQ ID NO: 4011
  source 1..32: mol_type = genomic DNA

SEQ ID NO: 32347 - DNA, 30 bp, Homo sapiens
  source 1..30: mol_type = genomic DNA
agatcacgggttcgaaccccgtccgtgcct

SEQ ID NO: 32348 - DNA, 20 bp, Homo sapiens
  source 1..20: mol_type = genomic DNA
agatcagaaggctgcgtgtt

SEQ ID NO: 32349 - DNA, 21 bp, Homo sapiens
  source 1..21: mol_type = genomic DNA
agatcagaaggctgcgtgttc

SEQ ID NO: 32350 - DNA, 31 bp, Homo sapiens; identical to SEQ ID NO: 4049
  source 1..31: mol_type = genomic DNA

SEQ ID NO: 32351 - DNA, 32 bp, Homo sapiens; identical to SEQ ID NO: 4053
  source 1..32: mol_type = genomic DNA

SEQ ID NO: 32352 - DNA, 18 bp, Homo sapiens
  source 1..18: mol_type = genomic DNA
agatcgcgggttcgaacc

SEQ ID NO: 32353 - DNA, 25 bp, Homo sapiens
  source 1..25: mol_type = genomic DNA
agatgaaaacctttttccaaggaca

SEQ ID NO: 32354 - DNA, 26 bp, Homo sapiens
  source 1..26: mol_type = genomic DNA
agatgaaaacctttttccaaggacac

SEQ ID NO: 32355 - DNA, 27 bp, Homo sapiens
  source 1..27: mol_type = genomic DNA
agatgaaaacctttttccaaggacacc

SEQ ID NO: 32356 - DNA, 28 bp, Homo sapiens
  source 1..28: mol_type = genomic DNA
agatgaaaacctttttccaaggacacca

SEQ ID NO: 32357 - DNA, 17 bp, Homo sapiens
  source 1..17: mol_type = genomic DNA
agattaagagaaccaac

SEQ ID NO: 32358 - DNA, 20 bp, Homo sapiens
  source 1..20: mol_type = genomic DNA
agattaagagaaccaacacc

SEQ ID NO: 32359 - DNA, 33 bp, Homo sapiens; identical to SEQ ID NO: 4092
  source 1..33: mol_type = genomic DNA

SEQ ID NO: 32360 - DNA, 35 bp, Homo sapiens; identical to SEQ ID NO: 4094
  source 1..35: mol_type = genomic DNA

SEQ ID NO: 32361 - DNA, 21 bp, Homo sapiens
  source 1..21: mol_type = genomic DNA
agattccaggttcgactcctg

SEQ ID NO: 32362 - DNA, 30 bp, Homo sapiens; identical to SEQ ID NO: 4098
  source 1..30: mol_type = genomic DNA

SEQ ID NO: 32363 - DNA, 31 bp, Homo sapiens; identical to SEQ ID NO: 4099
  source 1..31: mol_type = genomic DNA

SEQ ID NO: 32364 - DNA, 25 bp, Homo sapiens
  source 1..25: mol_type = genomic DNA
agattcccattcttgcgacccgggt

SEQ ID NO: 32365 - DNA, 31 bp, Homo sapiens; identical to SEQ ID NO: 4111
  source 1..31: mol_type = genomic DNA

SEQ ID NO: 32366 - DNA, 32 bp, Homo sapiens; identical to SEQ ID NO: 4112
  source 1..32: mol_type = genomic DNA

SEQ ID NO: 32367 - DNA, 30 bp, Homo sapiens; identical to SEQ ID NO: 4115
  source 1..30: mol_type = genomic DNA

SEQ ID NO: 32368 - DNA, 31 bp, Homo sapiens; identical to SEQ ID NO: 4116
  source 1..31: mol_type = genomic DNA

SEQ ID NO: 32369 - DNA, 32 bp, Homo sapiens; identical to SEQ ID NO: 4117
  source 1..32: mol_type = genomic DNA

SEQ ID NO: 32370 - DNA, 18 bp, Homo sapiens
  source 1..18: mol_type = genomic DNA
agattgagggttcgagtc

SEQ ID NO: 32371 - DNA, 21 bp, Homo sapiens
  source 1..21: mol_type = genomic DNA
agattgagggttcgagtccct

SEQ ID NO: 32372 - DNA, 30 bp, Homo sapiens; identical to SEQ ID NO: 4122
  source 1..30: mol_type = genomic DNA

SEQ ID NO: 32373 - DNA, 31 bp, Homo sapiens; identical to SEQ ID NO: 4123
  source 1..31: mol_type = genomic DNA

SEQ ID NO: 32374 - DNA, 32 bp, Homo sapiens; identical to SEQ ID NO: 4124
  source 1..32: mol_type = genomic DNA

SEQ ID NO: 32375 - DNA, 33 bp, Homo sapiens; identical to SEQ ID NO: 4125
  source 1..33: mol_type = genomic DNA

SEQ ID NO: 32376 - DNA, 21 bp, Homo sapiens
  source 1..21: mol_type = genomic DNA
agattgcaggttcgagtcctg

SEQ ID NO: 32377 - DNA, 29 bp, Homo sapiens
  source 1..29: mol_type = genomic DNA
agattgcaggttcgagtcctgccgcggtc

SEQ ID NO: 32378 - DNA, 30 bp, Homo sapiens; identical to SEQ ID NO: 4130
  source 1..30: mol_type = genomic DNA

SEQ ID NO: 32379 - DNA, 31 bp, Homo sapiens; identical to SEQ ID NO: 4131
  source 1..31: mol_type = genomic DNA

SEQ ID NO: 32380 - DNA, 32 bp, Homo sapiens; identical to SEQ ID NO: 4132
  source 1..32: mol_type = genomic DNA

SEQ ID NO: 32381 - DNA, 16 bp, Homo sapiens
  source 1..16: mol_type = genomic DNA
agattgtgaatctgac

SEQ ID NO: 32382 - DNA, 17 bp, Homo sapiens
  source 1..17: mol_type = genomic DNA
agattgtgaatctgaca

SEQ ID NO: 32383 - DNA, 19 bp, Homo sapiens
  source 1..19: mol_type = genomic DNA
agattgtgaatctgacaac

SEQ ID NO: 32384 - DNA, 20 bp, Homo sapiens
  source 1..20: mol_type = genomic DNA
agattgtgaatctgacaaca

SEQ ID NO: 32385 - DNA, 21 bp, Homo sapiens
  source 1..21: mol_type = genomic DNA
agattgtgaatctgacaacag

SEQ ID NO: 32386 - DNA, 22 bp, Homo sapiens
  source 1..22: mol_type = genomic DNA
agattgtgaatctgacaacaga

SEQ ID NO: 32387 - DNA, 23 bp, Homo sapiens
  source 1..23: mol_type = genomic DNA
agattgtgaatctgacaacagag

SEQ ID NO: 32388 - DNA, 24 bp, Homo sapiens
  source 1..24: mol_type = genomic DNA
agattgtgaatctgacaacagagg

SEQ ID NO: 32389 - DNA, 25 bp, Homo sapiens
  source 1..25: mol_type = genomic DNA
agattgtgaatctgacaacagaggc

SEQ ID NO: 32390 - DNA, 26 bp, Homo sapiens
  source 1..26: mol_type = genomic DNA
agattgtgaatctgacaacagaggct

SEQ ID NO: 32391 - DNA, 27 bp, Homo sapiens
  source 1..27: mol_type = genomic DNA
agattgtgaatctgacaacagaggctt

SEQ ID NO: 32392 - DNA, 29 bp, Homo sapiens
  source 1..29: mol_type = genomic DNA
agattgtgaatctgacaacagaggcttac

SEQ ID NO: 32393 - DNA, 30 bp, Homo sapiens; identical to SEQ ID NO: 4148
  source 1..30: mol_type = genomic DNA

SEQ ID NO: 32394 - DNA, 32 bp, Homo sapiens; identical to SEQ ID NO: 4150
  source 1..32: mol_type = genomic DNA

SEQ ID NO: 32395 - DNA, 33 bp, Homo sapiens; identical to SEQ ID NO: 4151
  source 1..33: mol_type = genomic DNA

SEQ ID NO: 32396 - DNA, 34 bp, Homo sapiens; identical to SEQ ID NO: 4152
  source 1..34: mol_type = genomic DNA

SEQ ID NO: 32397 - DNA, 35 bp, Homo sapiens; identical to SEQ ID NO: 4153
  source 1..35: mol_type = genomic DNA

SEQ ID NO: 32398 - DNA, 36 bp, Homo sapiens; identical to SEQ ID NO: 4154
  source 1..36: mol_type = genomic DNA

SEQ ID NO: 32399 - DNA, 37 bp, Homo sapiens; identical to SEQ ID NO: 4155
  source 1..37: mol_type = genomic DNA

SEQ ID NO: 32400 - DNA, 38 bp, Homo sapiens; identical to SEQ ID NO: 4156
  source 1..38: mol_type = genomic DNA

SEQ ID NO: 32401 - DNA, 39 bp, Homo sapiens; identical to SEQ ID NO: 4157
  source 1..39: mol_type = genomic DNA

SEQ ID NO: 32402 - DNA, 40 bp, Homo sapiens; identical to SEQ ID NO: 4158
  source 1..40: mol_type = genomic DNA

SEQ ID NO: 32403 - DNA, 41 bp, Homo sapiens; identical to SEQ ID NO: 4159
  source 1..41: mol_type = genomic DNA

SEQ ID NO: 32404 - DNA, 42 bp, Homo sapiens; identical to SEQ ID NO: 4160
  source 1..42: mol_type = genomic DNA

SEQ ID NO: 32405 - DNA, 43 bp, Homo sapiens; identical to SEQ ID NO: 4161
  source 1..43: mol_type = genomic DNA

SEQ ID NO: 32406 - DNA, 44 bp, Homo sapiens; identical to SEQ ID NO: 4162
  source 1..44: mol_type = genomic DNA

SEQ ID NO: 32407 - DNA, 45 bp, Homo sapiens; identical to SEQ ID NO: 4163
  source 1..45: mol_type = genomic DNA

SEQ ID NO: 32408 - DNA, 46 bp, Homo sapiens; identical to SEQ ID NO: 4164
  source 1..46: mol_type = genomic DNA

SEQ ID NO: 32409 - DNA, 47 bp, Homo sapiens; identical to SEQ ID NO: 4165
  source 1..47: mol_type = genomic DNA

SEQ ID NO: 32410 - DNA, 25 bp, Homo sapiens
  source 1..25: mol_type = genomic DNA
agatttcaacttaacttgaccgctc

SEQ ID NO: 32411 - DNA, 27 bp, Homo sapiens
  source 1..27: mol_type = genomic DNA
agatttcaacttaacttgaccgctctg

SEQ ID NO: 32412 - DNA, 28 bp, Homo sapiens
  source 1..28: mol_type = genomic DNA
agatttcaacttaacttgaccgctctga

SEQ ID NO: 32413 - DNA, 29 bp, Homo sapiens
  source 1..29: mol_type = genomic DNA
agatttcaacttaacttgaccgctctgac

SEQ ID NO: 32414 - DNA, 30 bp, Homo sapiens; identical to SEQ ID NO: 4178
  source 1..30: mol_type = genomic DNA

SEQ ID NO: 32415 - DNA, 31 bp, Homo sapiens; identical to SEQ ID NO: 4179
  source 1..31: mol_type = genomic DNA

SEQ ID NO: 32416 - DNA, 30 bp, Homo sapiens; identical to SEQ ID NO: 4181
  source 1..30: mol_type = genomic DNA

SEQ ID NO: 32417 - DNA, 32 bp, Homo sapiens; identical to SEQ ID NO: 4183
  source 1..32: mol_type = genomic DNA

SEQ ID NO: 32418 - DNA, 32 bp, Homo sapiens; identical to SEQ ID NO: 4191
  source 1..32: mol_type = genomic DNA

SEQ ID NO: 32419 - DNA, 33 bp, Homo sapiens; identical to SEQ ID NO: 4192
  source 1..33: mol_type = genomic DNA

SEQ ID NO: 32420 - DNA, 16 bp, Homo sapiens
  source 1..16: mol_type = genomic DNA
agcactctggactctg

SEQ ID NO: 32421 - DNA, 17 bp, Homo sapiens
  source 1..17: mol_type = genomic DNA
agcactctggactctga

SEQ ID NO: 32422 - DNA, 18 bp, Homo sapiens
  source 1..18: mol_type = genomic DNA
agcactctggactctgaa

SEQ ID NO: 32423 - DNA, 19 bp, Homo sapiens
  source 1..19: mol_type = genomic DNA
agcactctggactctgaat

SEQ ID NO: 32424 - DNA, 20 bp, Homo sapiens
  source 1..20: mol_type = genomic DNA
agcactctggactctgaatc

SEQ ID NO: 32425 - DNA, 21 bp, Homo sapiens
  source 1..21: mol_type = genomic DNA
agcactctggactctgaatcc

SEQ ID NO: 32426 - DNA, 22 bp, Homo sapiens
  source 1..22: mol_type = genomic DNA
agcactctggactctgaatcca

SEQ ID NO: 32427 - DNA, 23 bp, Homo sapiens
  source 1..23: mol_type = genomic DNA
agcactctggactctgaatccag

SEQ ID NO: 32428 - DNA, 24 bp, Homo sapiens
  source 1..24: mol_type = genomic DNA
agcactctggactctgaatccagc

SEQ ID NO: 32429 - DNA, 25 bp, Homo sapiens
  source 1..25: mol_type = genomic DNA
agcactctggactctgaatccagcg

SEQ ID NO: 32430 - DNA, 26 bp, Homo sapiens
  source 1..26: mol_type = genomic DNA
agcactctggactctgaatccagcga

SEQ ID NO: 32431 - DNA, 29 bp, Homo sapiens
  source 1..29: mol_type = genomic DNA
agcactctggactctgaatccagcgatcc

SEQ ID NO: 32432 - DNA, 30 bp, Homo sapiens; identical to SEQ ID NO: 4232
  source 1..30: mol_type = genomic DNA

SEQ ID NO: 32433 - DNA, 31 bp, Homo sapiens; identical to SEQ ID NO: 4233
  source 1..31: mol_type = genomic DNA

SEQ ID NO: 32434 - DNA, 32 bp, Homo sapiens; identical to SEQ ID NO: 4234
  source 1..32: mol_type = genomic DNA

SEQ ID NO: 32435 - DNA, 33 bp, Homo sapiens; identical to SEQ ID NO: 4235
  source 1..33: mol_type = genomic DNA

SEQ ID NO: 32436 - DNA, 34 bp, Homo sapiens; identical to SEQ ID NO: 4236
  source 1..34: mol_type = genomic DNA

SEQ ID NO: 32437 - DNA, 35 bp, Homo sapiens; identical to SEQ ID NO: 4237
  source 1..35: mol_type = genomic DNA

SEQ ID NO: 32438 - DNA, 36 bp, Homo sapiens; identical to SEQ ID NO: 4238
  source 1..36: mol_type = genomic DNA

SEQ ID NO: 32439 - DNA, 41 bp, Homo sapiens
  source 1..41: mol_type = genomic DNA
agcactctggactctgaatccagcgatccgagttcaaatct

SEQ ID NO: 32440 - DNA, 44 bp, Homo sapiens; identical to SEQ ID NO: 4242
  source 1..44: mol_type = genomic DNA

SEQ ID NO: 32441 - DNA, 17 bp, Homo sapiens
  source 1..17: mol_type = genomic DNA
agcactctggactttga

SEQ ID NO: 32442 - DNA, 18 bp, Homo sapiens
  source 1..18: mol_type = genomic DNA
agcactctggactttgaa

SEQ ID NO: 32443 - DNA, 19 bp, Homo sapiens
  source 1..19: mol_type = genomic DNA
agcactctggactttgaat

SEQ ID NO: 32444 - DNA, 20 bp, Homo sapiens
  source 1..20: mol_type = genomic DNA
agcactctggactttgaatc

SEQ ID NO: 32445 - DNA, 21 bp, Homo sapiens
  source 1..21: mol_type = genomic DNA
agcactctggactttgaatcc

SEQ ID NO: 32446 - DNA, 32 bp, Homo sapiens; identical to SEQ ID NO: 4261
  source 1..32: mol_type = genomic DNA

SEQ ID NO: 32447 - DNA, 36 bp, Homo sapiens; identical to SEQ ID NO: 4265
  source 1..36: mol_type = genomic DNA

SEQ ID NO: 32448 - DNA, 16 bp, Homo sapiens
  source 1..16: mol_type = genomic DNA
agcagagtggcgcagc

SEQ ID NO: 32449 - DNA, 17 bp, Homo sapiens
  source 1..17: mol_type = genomic DNA
agcagagtggcgcagcg

SEQ ID NO: 32450 - DNA, 18 bp, Homo sapiens
  source 1..18: mol_type = genomic DNA
agcagagtggcgcagcgg

SEQ ID NO: 32451 - DNA, 19 bp, Homo sapiens
  source 1..19: mol_type = genomic DNA
agcagagtggcgcagcgga

SEQ ID NO: 32452 - DNA, 20 bp, Homo sapiens
  source 1..20: mol_type = genomic DNA
agcagagtggcgcagcggaa

SEQ ID NO: 32453 - DNA, 21 bp, Homo sapiens
  source 1..21: mol_type = genomic DNA
agcagagtggcgcagcggaag

SEQ ID NO: 32454 - DNA, 22 bp, Homo sapiens
  source 1..22: mol_type = genomic DNA
agcagagtggcgcagcggaagc

SEQ ID NO: 32455 - DNA, 23 bp, Homo sapiens
  source 1..23: mol_type = genomic DNA
agcagagtggcgcagcggaagcg

SEQ ID NO: 32456 - DNA, 24 bp, Homo sapiens
  source 1..24: mol_type = genomic DNA
agcagagtggcgcagcggaagcgt

SEQ ID NO: 32457 - DNA, 26 bp, Homo sapiens
  source 1..26: mol_type = genomic DNA
agcagagtggcgcagcggaagcgtgc

SEQ ID NO: 32458 - DNA, 27 bp, Homo sapiens
  source 1..27: mol_type = genomic DNA
agcagagtggcgcagcggaagcgtgct

SEQ ID NO: 32459 - DNA, 28 bp, Homo sapiens
  source 1..28: mol_type = genomic DNA
agcagagtggcgcagcggaagcgtgctg

SEQ ID NO: 32460 - DNA, 29 bp, Homo sapiens
  source 1..29: mol_type = genomic DNA
agcagagtggcgcagcggaagcgtgctgg

SEQ ID NO: 32461 - DNA, 30 bp, Homo sapiens; identical to SEQ ID NO: 4283
  source 1..30: mol_type = genomic DNA

SEQ ID NO: 32462 - DNA, 31 bp, Homo sapiens; identical to SEQ ID NO: 4284
  source 1..31: mol_type = genomic DNA

SEQ ID NO: 32463 - DNA, 32 bp, Homo sapiens; identical to SEQ ID NO: 4285
  source 1..32: mol_type = genomic DNA

SEQ ID NO: 32464 - DNA, 33 bp, Homo sapiens; identical to SEQ ID NO: 4286
  source 1..33: mol_type = genomic DNA

SEQ ID NO: 32465 - DNA, 34 bp, Homo sapiens; identical to SEQ ID NO: 4287
  source 1..34: mol_type = genomic DNA

SEQ ID NO: 32466 - DNA, 39 bp, Homo sapiens; identical to SEQ ID NO: 4290
  source 1..39: mol_type = genomic DNA

SEQ ID NO: 32467 - DNA, 42 bp, Homo sapiens; identical to SEQ ID NO: 4291
  source 1..42: mol_type = genomic DNA

SEQ ID NO: 32468 - DNA, 16 bp, Homo sapiens
  source 1..16: mol_type = genomic DNA
agcagcttcaaacctg

SEQ ID NO: 32469 - DNA, 22 bp, Homo sapiens
  source 1..22: mol_type = genomic DNA
agcagcttcaaacctgccgggg

SEQ ID NO: 32470 - DNA, 23 bp, Homo sapiens
  source 1..23: mol_type = genomic DNA
agcagcttcaaacctgccggggc

SEQ ID NO: 32471 - DNA, 24 bp, Homo sapiens
  source 1..24: mol_type = genomic DNA
agcagcttcaaacctgccggggct

SEQ ID NO: 32472 - DNA, 25 bp, Homo sapiens
  source 1..25: mol_type = genomic DNA
agcagcttcaaacctgccggggctt

SEQ ID NO: 32473 - DNA, 26 bp, Homo sapiens
  source 1..26: mol_type = genomic DNA
agcagcttcaaacctgccggggcttc

SEQ ID NO: 32474 - DNA, 27 bp, Homo sapiens
  source 1..27: mol_type = genomic DNA
agcagcttcaaacctgccggggcttcc

SEQ ID NO: 32475 - DNA, 18 bp, Homo sapiens
  source 1..18: mol_type = genomic DNA
agcagttgacccgggttc

SEQ ID NO: 32476 - DNA, 19 bp, Homo sapiens
  source 1..19: mol_type = genomic DNA
agcagttgacccgggttcg

SEQ ID NO: 32477 - DNA, 31 bp, Homo sapiens; identical to SEQ ID NO: 4307
  source 1..31: mol_type = genomic DNA

SEQ ID NO: 32478 - DNA, 33 bp, Homo sapiens; identical to SEQ ID NO: 4309
  source 1..33: mol_type = genomic DNA

SEQ ID NO: 32479 - DNA, 37 bp, Homo sapiens; identical to SEQ ID NO: 4311
  source 1..37: mol_type = genomic DNA

SEQ ID NO: 32480 - DNA, 31 bp, Homo sapiens; identical to SEQ ID NO: 4314
  source 1..31: mol_type = genomic DNA

SEQ ID NO: 32481 - DNA, 19 bp, Homo sapiens
  source 1..19: mol_type = genomic DNA
agcatgagactcttaatct

SEQ ID NO: 32482 - DNA, 33 bp, Homo sapiens; identical to SEQ ID NO: 4327
  source 1..33: mol_type = genomic DNA

SEQ ID NO: 32483 - DNA, 17 bp, Homo sapiens
  source 1..17: mol_type = genomic DNA
agcatgggactcttaat

SEQ ID NO: 32484 - DNA, 18 bp, Homo sapiens
  source 1..18: mol_type = genomic DNA
agcatgggactcttaatc

SEQ ID NO: 32485 - DNA, 19 bp, Homo sapiens
  source 1..19: mol_type = genomic DNA
agcatgggactcttaatcc

SEQ ID NO: 32486 - DNA, 20 bp, Homo sapiens
  source 1..20: mol_type = genomic DNA
agcatgggactcttaatccc

SEQ ID NO: 32487 - DNA, 28 bp, Homo sapiens
  source 1..28: mol_type = genomic DNA
agcatgggactcttaatcccagggtcgt

SEQ ID NO: 32488 - DNA, 33 bp, Homo sapiens; identical to SEQ ID NO: 4337
  source 1..33: mol_type = genomic DNA

SEQ ID NO: 32489 - DNA, 34 bp, Homo sapiens; identical to SEQ ID NO: 4338
  source 1..34: mol_type = genomic DNA

SEQ ID NO: 32490 - DNA, 19 bp, Homo sapiens
  source 1..19: mol_type = genomic DNA
agcatgggactcttcatcc

SEQ ID NO: 32491 - DNA, 33 bp, Homo sapiens; identical to SEQ ID NO: 4342
  source 1..33: mol_type = genomic DNA

SEQ ID NO: 32492 - DNA, 16 bp, Homo sapiens
  source 1..16: mol_type = genomic DNA
agcattggtggttcag

SEQ ID NO: 32493 - DNA, 31 bp, Homo sapiens; identical to SEQ ID NO: 4369
  source 1..31: mol_type = genomic DNA

SEQ ID NO: 32494 - DNA, 32 bp, Homo sapiens; identical to SEQ ID NO: 4370
  source 1..32: mol_type = genomic DNA

SEQ ID NO: 32495 - DNA, 33 bp, Homo sapiens; identical to SEQ ID NO: 4371
  source 1..33: mol_type = genomic DNA

SEQ ID NO: 32496 - DNA, 18 bp, Homo sapiens
  source 1..18: mol_type = genomic DNA
agccagggattgtgggtt

SEQ ID NO: 32497 - DNA, 19 bp, Homo sapiens
  source 1..19: mol_type = genomic DNA
agccagggattgtgggttc

SEQ ID NO: 32498 - DNA, 20 bp, Homo sapiens
  source 1..20: mol_type = genomic DNA
agccagggattgtgggttcg

SEQ ID NO: 32499 - DNA, 36 bp, Homo sapiens; identical to SEQ ID NO: 4386
  source 1..36: mol_type = genomic DNA

SEQ ID NO: 32500 - DNA, 38 bp, Homo sapiens; identical to SEQ ID NO: 4393
  source 1..38: mol_type = genomic DNA

SEQ ID NO: 32501 - DNA, 38 bp, Homo sapiens; identical to SEQ ID NO: 4397
  source 1..38: mol_type = genomic DNA

SEQ ID NO: 32502 - DNA, 36 bp, Homo sapiens; identical to SEQ ID NO: 4403
  source 1..36: mol_type = genomic DNA

SEQ ID NO: 32503 - DNA, 37 bp, Homo sapiens; identical to SEQ ID NO: 4404
  source 1..37: mol_type = genomic DNA

SEQ ID NO: 32504 - DNA, 38 bp, Homo sapiens; identical to SEQ ID NO: 4405
  source 1..38: mol_type = genomic DNA

SEQ ID NO: 32505 - DNA, 39 bp, Homo sapiens; identical to SEQ ID NO: 4406
  source 1..39: mol_type = genomic DNA

SEQ ID NO: 32506 - DNA, 18 bp, Homo sapiens
  source 1..18: mol_type = genomic DNA
agcccacccagggacgcc

SEQ ID NO: 32507 - DNA, 17 bp, Homo sapiens
  source 1..17: mol_type = genomic DNA
agccccagtggaaccac

SEQ ID NO: 32508 - DNA, 18 bp, Homo sapiens
  source 1..18: mol_type = genomic DNA
agccccagtggaaccacc

SEQ ID NO: 32509 - DNA, 16 bp, Homo sapiens
  source 1..16: mol_type = genomic DNA
agccgtgatcgtatag

SEQ ID NO: 32510 - DNA, 17 bp, Homo sapiens
  source 1..17: mol_type = genomic DNA
agccgtgatcgtatagt

SEQ ID NO: 32511 - DNA, 18 bp, Homo sapiens
  source 1..18: mol_type = genomic DNA
agccgtgatcgtatagtg

SEQ ID NO: 32512 - DNA, 19 bp, Homo sapiens
  source 1..19: mol_type = genomic DNA
agccgtgatcgtatagtgg

SEQ ID NO: 32513 - DNA, 21 bp, Homo sapiens
  source 1..21: mol_type = genomic DNA
agccgtgatcgtatagtggtt

SEQ ID NO: 32514 - DNA, 22 bp, Homo sapiens
  source 1..22: mol_type = genomic DNA
agccgtgatcgtatagtggtta

SEQ ID NO: 32515 - DNA, 23 bp, Homo sapiens
  source 1..23: mol_type = genomic DNA
agccgtgatcgtatagtggttag

SEQ ID NO: 32516 - DNA, 24 bp, Homo sapiens
  source 1..24: mol_type = genomic DNA
agccgtgatcgtatagtggttagt

SEQ ID NO: 32517 - DNA, 25 bp, Homo sapiens
  source 1..25: mol_type = genomic DNA
agccgtgatcgtatagtggttagta

SEQ ID NO: 32518 - DNA, 26 bp, Homo sapiens
  source 1..26: mol_type = genomic DNA
agccgtgatcgtatagtggttagtac

SEQ ID NO: 32519 - DNA, 27 bp, Homo sapiens
  source 1..27: mol_type = genomic DNA
agccgtgatcgtatagtggttagtact

SEQ ID NO: 32520 - DNA, 28 bp, Homo sapiens
  source 1..28: mol_type = genomic DNA
agccgtgatcgtatagtggttagtactc

SEQ ID NO: 32521 - DNA, 29 bp, Homo sapiens
  source 1..29: mol_type = genomic DNA
agccgtgatcgtatagtggttagtactct

SEQ ID NO: 32522 - DNA, 30 bp, Homo sapiens; identical to SEQ ID NO: 4451
  source 1..30: mol_type = genomic DNA

SEQ ID NO: 32523 - DNA, 31 bp, Homo sapiens; identical to SEQ ID NO: 4452
  source 1..31: mol_type = genomic DNA

SEQ ID NO: 32524 - DNA, 32 bp, Homo sapiens; identical to SEQ ID NO: 4453
  source 1..32: mol_type = genomic DNA

SEQ ID NO: 32525 - DNA, 33 bp, Homo sapiens; identical to SEQ ID NO: 4454
  source 1..33: mol_type = genomic DNA

SEQ ID NO: 32526 - DNA, 34 bp, Homo sapiens; identical to SEQ ID NO: 4455
  source 1..34: mol_type = genomic DNA

SEQ ID NO: 32527 - DNA, 35 bp, Homo sapiens; identical to SEQ ID NO: 4456
  source 1..35: mol_type = genomic DNA

SEQ ID NO: 32528 - DNA, 36 bp, Homo sapiens; identical to SEQ ID NO: 4457
  source 1..36: mol_type = genomic DNA

SEQ ID NO: 32529 - DNA, 37 bp, Homo sapiens; identical to SEQ ID NO: 4458
  source 1..37: mol_type = genomic DNA

SEQ ID NO: 32530 - DNA, 18 bp, Homo sapiens
  source 1..18: mol_type = genomic DNA
agcctcacctggagcacc

SEQ ID NO: 32531 - DNA, 44 bp, Homo sapiens; identical to SEQ ID NO: 4465
  source 1..44: mol_type = genomic DNA

SEQ ID NO: 32532 - DNA, 29 bp, Homo sapiens
  source 1..29: mol_type = genomic DNA
agcgatccgagttcaaatctcggtggaac

SEQ ID NO: 32533 - DNA, 30 bp, Homo sapiens; identical to SEQ ID NO: 4469
  source 1..30: mol_type = genomic DNA

SEQ ID NO: 32534 - DNA, 31 bp, Homo sapiens; identical to SEQ ID NO: 4470
  source 1..31: mol_type = genomic DNA

SEQ ID NO: 32535 - DNA, 32 bp, Homo sapiens; identical to SEQ ID NO: 4471
  source 1..32: mol_type = genomic DNA

SEQ ID NO: 32536 - DNA, 33 bp, Homo sapiens; identical to SEQ ID NO: 4472
  source 1..33: mol_type = genomic DNA

SEQ ID NO: 32537 - DNA, 29 bp, Homo sapiens
  source 1..29: mol_type = genomic DNA
agcgatccgagttcaaatctcggtgggac

SEQ ID NO: 32538 - DNA, 30 bp, Homo sapiens; identical to SEQ ID NO: 4474
  source 1..30: mol_type = genomic DNA

SEQ ID NO: 32539 - DNA, 31 bp, Homo sapiens; identical to SEQ ID NO: 4475
  source 1..31: mol_type = genomic DNA

SEQ ID NO: 32540 - DNA, 32 bp, Homo sapiens; identical to SEQ ID NO: 4476
  source 1..32: mol_type = genomic DNA

SEQ ID NO: 32541 - DNA, 32 bp, Homo sapiens; identical to SEQ ID NO: 4478
  source 1..32: mol_type = genomic DNA

SEQ ID NO: 32542 - DNA, 32 bp, Homo sapiens; identical to SEQ ID NO: 4484
  source 1..32: mol_type = genomic DNA

SEQ ID NO: 32543 - DNA, 17 bp, Homo sapiens
  source 1..17: mol_type = genomic DNA
agcggaagcgtgctggg

SEQ ID NO: 32544 - DNA, 18 bp, Homo sapiens
  source 1..18: mol_type = genomic DNA
agcggaagcgtgctgggc

SEQ ID NO: 32545 - DNA, 19 bp, Homo sapiens
  source 1..19: mol_type = genomic DNA
agcggaagcgtgctgggcc

SEQ ID NO: 32546 - DNA, 20 bp, Homo sapiens
  source 1..20: mol_type = genomic DNA
agcggaagcgtgctgggccc

SEQ ID NO: 32547 - DNA, 26 bp, Homo sapiens
  source 1..26: mol_type = genomic DNA
agcggaagcgtgctgggcccataacc

SEQ ID NO: 32548 - DNA, 17 bp, Homo sapiens
  source 1..17: mol_type = genomic DNA
agcggtctaaggcgctg

SEQ ID NO: 32549 - DNA, 19 bp, Homo sapiens
  source 1..19: mol_type = genomic DNA
agcggttaggattcctggt

SEQ ID NO: 32550 - DNA, 22 bp, Homo sapiens
  source 1..22: mol_type = genomic DNA
agcggttaggattcctggtttt

SEQ ID NO: 32551 - DNA, 24 bp, Homo sapiens
  source 1..24: mol_type = genomic DNA
agcgtgctgggcccataacccaga

SEQ ID NO: 32552 - DNA, 16 bp, Homo sapiens
  source 1..16: mol_type = genomic DNA
agctatccattggtct

SEQ ID NO: 32553 - DNA, 18 bp, Homo sapiens
  source 1..18: mol_type = genomic DNA
agctatcgggcccatacc

SEQ ID NO: 32554 - DNA, 33 bp, Homo sapiens; identical to SEQ ID NO: 4582
  source 1..33: mol_type = genomic DNA

SEQ ID NO: 32555 - DNA, 16 bp, Homo sapiens
  source 1..16: mol_type = genomic DNA
agctcacaagaactgc

SEQ ID NO: 32556 - DNA, 20 bp, Homo sapiens
  source 1..20: mol_type = genomic DNA
agctcacaagaactgctaac

SEQ ID NO: 32557 - DNA, 21 bp, Homo sapiens
  source 1..21: mol_type = genomic DNA
agctcacaagaactgctaact

SEQ ID NO: 32558 - DNA, 22 bp, Homo sapiens
  source 1..22: mol_type = genomic DNA
agctcacaagaactgctaactc

SEQ ID NO: 32559 - DNA, 25 bp, Homo sapiens
  source 1..25: mol_type = genomic DNA
agctcacaagaactgctaactcatg

SEQ ID NO: 32560 - DNA, 27 bp, Homo sapiens
  source 1..27: mol_type = genomic DNA
agctcacaagaactgctaactcatgcc

SEQ ID NO: 32561 - DNA, 30 bp, Homo sapiens; identical to SEQ ID NO: 4604
  source 1..30: mol_type = genomic DNA

SEQ ID NO: 32562 - DNA, 33 bp, Homo sapiens; identical to SEQ ID NO: 4606
  source 1..33: mol_type = genomic DNA

SEQ ID NO: 32563 - DNA, 16 bp, Homo sapiens
  source 1..16: mol_type = genomic DNA
agctcagtcggtagag

SEQ ID NO: 32564 - DNA, 17 bp, Homo sapiens
  source 1..17: mol_type = genomic DNA
agctcagtcggtagagc

SEQ ID NO: 32565 - DNA, 24 bp, Homo sapiens
  source 1..24: mol_type = genomic DNA
agctcagtcggtagagcatcagac

SEQ ID NO: 32566 - DNA, 25 bp, Homo sapiens
  source 1..25: mol_type = genomic DNA
agctcagtcggtagagcatcagact

SEQ ID NO: 32567 - DNA, 24 bp, Homo sapiens
  source 1..24: mol_type = genomic DNA
agctcagtcggtagagcatgagac

SEQ ID NO: 32568 - DNA, 25 bp, Homo sapiens
  source 1..25: mol_type = genomic DNA
agctcagtcggtagagcatgagact

SEQ ID NO: 32569 - DNA, 26 bp, Homo sapiens
  source 1..26: mol_type = genomic DNA
agctcagtcggtagagcatgagactc

SEQ ID NO: 32570 - DNA, 24 bp, Homo sapiens
  source 1..24: mol_type = genomic DNA
agctcagtcggtagagcatgggac

SEQ ID NO: 32571 - DNA, 25 bp, Homo sapiens
  source 1..25: mol_type = genomic DNA
agctcagtcggtagagcatgggact

SEQ ID NO: 32572 - DNA, 26 bp, Homo sapiens
  source 1..26: mol_type = genomic DNA
agctcagtcggtagagcatgggactc

SEQ ID NO: 32573 - DNA, 27 bp, Homo sapiens
  source 1..27: mol_type = genomic DNA
agctcagtcggtagagcatgggactct

SEQ ID NO: 32574 - DNA, 28 bp, Homo sapiens
  source 1..28: mol_type = genomic DNA
agctcagtcggtagagcatgggactctt

SEQ ID NO: 32575 - DNA, 24 bp, Homo sapiens
  source 1..24: mol_type = genomic DNA
agctcagtggtagagcatttgact

SEQ ID NO: 32576 - DNA, 26 bp, Homo sapiens
  source 1..26: mol_type = genomic DNA
agctcagttggtagagcggaggactg

SEQ ID NO: 32577 - DNA, 21 bp, Homo sapiens
  source 1..21: mol_type = genomic DNA
agctccgaggtgattttcata

SEQ ID NO: 32578 - DNA, 24 bp, Homo sapiens
  source 1..24: mol_type = genomic DNA
agctccgaggtgattttcatattg

SEQ ID NO: 32579 - DNA, 29 bp, Homo sapiens
  source 1..29: mol_type = genomic DNA
agctccgaggtgattttcatattgaattg

SEQ ID NO: 32580 - DNA, 30 bp, Homo sapiens; identical to SEQ ID NO: 4685
  source 1..30: mol_type = genomic DNA

SEQ ID NO: 32581 - DNA, 31 bp, Homo sapiens; identical to SEQ ID NO: 4686
  source 1..31: mol_type = genomic DNA

SEQ ID NO: 32582 - DNA, 38 bp, Homo sapiens; identical to SEQ ID NO: 4693
  source 1..38: mol_type = genomic DNA

SEQ ID NO: 32583 - DNA, 39 bp, Homo sapiens; identical to SEQ ID NO: 4694
  source 1..39: mol_type = genomic DNA

SEQ ID NO: 32584 - DNA, 45 bp, Homo sapiens; identical to SEQ ID NO: 4700
  source 1..45: mol_type = genomic DNA

SEQ ID NO: 32585 - DNA, 18 bp, Homo sapiens
  source 1..18: mol_type = genomic DNA
agctggggattgtgggtt

SEQ ID NO: 32586 - DNA, 20 bp, Homo sapiens
  source 1..20: mol_type = genomic DNA
agctggggattgtgggttcg

SEQ ID NO: 32587 - DNA, 37 bp, Homo sapiens; identical to SEQ ID NO: 4717
  source 1..37: mol_type = genomic DNA

SEQ ID NO: 32588 - DNA, 38 bp, Homo sapiens; identical to SEQ ID NO: 4718
  source 1..38: mol_type = genomic DNA

SEQ ID NO: 32589 - DNA, 39 bp, Homo sapiens; identical to SEQ ID NO: 4719
  source 1..39: mol_type = genomic DNA

SEQ ID NO: 32590 - DNA, 18 bp, Homo sapiens
  source 1..18: mol_type = genomic DNA
agcttcaaacctgccggg

SEQ ID NO: 32591 - DNA, 19 bp, Homo sapiens
  source 1..19: mol_type = genomic DNA
agcttcaaacctgccgggg

SEQ ID NO: 32592 - DNA, 20 bp, Homo sapiens
  source 1..20: mol_type = genomic DNA
agcttcaaacctgccggggc

SEQ ID NO: 32593 - DNA, 21 bp, Homo sapiens
  source 1..21: mol_type = genomic DNA
agcttcaaacctgccggggct

SEQ ID NO: 32594 - DNA, 22 bp, Homo sapiens
  source 1..22: mol_type = genomic DNA
agcttcaaacctgccggggctt

SEQ ID NO: 32595 - DNA, 25 bp, Homo sapiens
  source 1..25: mol_type = genomic DNA
agcttcaaacctgccggggcttcca

SEQ ID NO: 32596 - DNA, 16 bp, Homo sapiens
  source 1..16: mol_type = genomic DNA
agctttggggggttcg

SEQ ID NO: 32597 - DNA, 21 bp, Homo sapiens
  source 1..21: mol_type = genomic DNA
agctttggggggttcgattcc

SEQ ID NO: 32598 - DNA, 26 bp, Homo sapiens
  source 1..26: mol_type = genomic DNA
agctttggggggttcgattccttcct

SEQ ID NO: 32599 - DNA, 35 bp, Homo sapiens; identical to SEQ ID NO: 4781
  source 1..35: mol_type = genomic DNA

SEQ ID NO: 32600 - DNA, 24 bp, Homo sapiens
  source 1..24: mol_type = genomic DNA
aggactgtagatccttaggtcgct

SEQ ID NO: 32601 - DNA, 16 bp, Homo sapiens
  source 1..16: mol_type = genomic DNA
aggagatcctgggttc

SEQ ID NO: 32602 - DNA, 17 bp, Homo sapiens
  source 1..17: mol_type = genomic DNA
aggagatcctgggttcg

SEQ ID NO: 32603 - DNA, 27 bp, Homo sapiens
  source 1..27: mol_type = genomic DNA
aggagatcctgggttcgaatcccagcg

SEQ ID NO: 32604 - DNA, 30 bp, Homo sapiens
  source 1..30: mol_type = genomic DNA
aggagatcctgggttcgaatcccagcgggg

SEQ ID NO: 32605 - DNA, 31 bp, Homo sapiens; identical to SEQ ID NO: 4805
  source 1..31: mol_type = genomic DNA

SEQ ID NO: 32606 - DNA, 33 bp, Homo sapiens; identical to SEQ ID NO: 4807
  source 1..33: mol_type = genomic DNA

SEQ ID NO: 32607 - DNA, 34 bp, Homo sapiens; identical to SEQ ID NO: 4808
  source 1..34: mol_type = genomic DNA

SEQ ID NO: 32608 - DNA, 35 bp, Homo sapiens; identical to SEQ ID NO: 4809
  source 1..35: mol_type = genomic DNA

SEQ ID NO: 32609 - DNA, 30 bp, Homo sapiens; identical to SEQ ID NO: 4810
  source 1..30: mol_type = genomic DNA

SEQ ID NO: 32610 - DNA, 31 bp, Homo sapiens; identical to SEQ ID NO: 4811
  source 1..31: mol_type = genomic DNA

SEQ ID NO: 32611 - DNA, 33 bp, Homo sapiens; identical to SEQ ID NO: 4813
  source 1..33: mol_type = genomic DNA

SEQ ID NO: 32612 - DNA, 35 bp, Homo sapiens; identical to SEQ ID NO: 4815
  source 1..35: mol_type = genomic DNA

SEQ ID NO: 32613 - DNA, 31 bp, Homo sapiens
  source 1..31: mol_type = genomic DNA
aggagatcctgggttcgactcccagtggggc

SEQ ID NO: 32614 - DNA, 24 bp, Homo sapiens
  source 1..24: mol_type = genomic DNA
aggagatttcaacttaacttgacc

SEQ ID NO: 32615 - DNA, 28 bp, Homo sapiens
  source 1..28: mol_type = genomic DNA
aggagatttcaacttaacttgaccgctc

SEQ ID NO: 32616 - DNA, 30 bp, Homo sapiens; identical to SEQ ID NO: 4838
  source 1..30: mol_type = genomic DNA

SEQ ID NO: 32617 - DNA, 31 bp, Homo sapiens; identical to SEQ ID NO: 4839
  source 1..31: mol_type = genomic DNA

SEQ ID NO: 32618 - DNA, 32 bp, Homo sapiens; identical to SEQ ID NO: 4840
  source 1..32: mol_type = genomic DNA

SEQ ID NO: 32619 - DNA, 33 bp, Homo sapiens; identical to SEQ ID NO: 4841
  source 1..33: mol_type = genomic DNA

SEQ ID NO: 32620 - DNA, 34 bp, Homo sapiens; identical to SEQ ID NO: 4842
  source 1..34: mol_type = genomic DNA

SEQ ID NO: 32621 - DNA, 27 bp, Homo sapiens
  source 1..27: mol_type = genomic DNA
aggagcttaaacccccttatttctacc

SEQ ID NO: 32622 - DNA, 23 bp, Homo sapiens
  source 1..23: mol_type = genomic DNA
aggataacagctatccattggtc

SEQ ID NO: 32623 - DNA, 18 bp, Homo sapiens
  source 1..18: mol_type = genomic DNA
aggatggccgagcggtct

SEQ ID NO: 32624 - DNA, 19 bp, Homo sapiens
  source 1..19: mol_type = genomic DNA
aggatggccgagcggtcta

SEQ ID NO: 32625 - DNA, 21 bp, Homo sapiens
  source 1..21: mol_type = genomic DNA
aggatggccgagcggtctaag

SEQ ID NO: 32626 - DNA, 23 bp, Homo sapiens
  source 1..23: mol_type = genomic DNA
aggatggccgagcggtctaaggc

SEQ ID NO: 32627 - DNA, 31 bp, Homo sapiens; identical to SEQ ID NO: 4870
  source 1..31: mol_type = genomic DNA

SEQ ID NO: 32628 - DNA, 21 bp, Homo sapiens
  source 1..21: mol_type = genomic DNA
aggatggccgagtggtctaag

SEQ ID NO: 32629 - DNA, 23 bp, Homo sapiens
  source 1..23: mol_type = genomic DNA
aggatggccgagtggtctaaggc

SEQ ID NO: 32630 - DNA, 26 bp, Homo sapiens
  source 1..26: mol_type = genomic DNA
aggatggccgagtggtctaaggcgcc

SEQ ID NO: 32631 - DNA, 22 bp, Homo sapiens
  source 1..22: mol_type = genomic DNA
aggatggccgagtggttaaggc

SEQ ID NO: 32632 - DNA, 23 bp, Homo sapiens
  source 1..23: mol_type = genomic DNA
aggatggggtgtgataggtggca

SEQ ID NO: 32633 - DNA, 24 bp, Homo sapiens
  source 1..24: mol_type = genomic DNA
aggatggggtgtgataggtggcac

SEQ ID NO: 32634 - DNA, 27 bp, Homo sapiens
  source 1..27: mol_type = genomic DNA
aggatggggtgtgataggtggcacgga

SEQ ID NO: 32635 - DNA, 29 bp, Homo sapiens
  source 1..29: mol_type = genomic DNA
aggatggggtgtgataggtggcacggaga

SEQ ID NO: 32636 - DNA, 30 bp, Homo sapiens; identical to SEQ ID NO: 4890
  source 1..30: mol_type = genomic DNA

SEQ ID NO: 32637 - DNA, 31 bp, Homo sapiens; identical to SEQ ID NO: 4891
  source 1..31: mol_type = genomic DNA

SEQ ID NO: 32638 - DNA, 32 bp, Homo sapiens; identical to SEQ ID NO: 4892
  source 1..32: mol_type = genomic DNA

SEQ ID NO: 32639 - DNA, 35 bp, Homo sapiens; identical to SEQ ID NO: 4895
  source 1..35: mol_type = genomic DNA

SEQ ID NO: 32640 - DNA, 38 bp, Homo sapiens
  source 1..38: mol_type = genomic DNA
aggattcctggttttcacccaggcggcccgggttcgac

SEQ ID NO: 32641 - DNA, 46 bp, Homo sapiens
  source 1..46: mol_type = genomic DNA
aggattcctggttttcacccaggcggcccgggttcgactcccggtg

SEQ ID NO: 32642 - DNA, 25 bp, Homo sapiens
  source 1..25: mol_type = genomic DNA
aggattcctggttttcacccaggtg

SEQ ID NO: 32643 - DNA, 16 bp, Homo sapiens
  source 1..16: mol_type = genomic DNA
aggattcggcgctctc

SEQ ID NO: 32644 - DNA, 17 bp, Homo sapiens
  source 1..17: mol_type = genomic DNA
aggattcggcgctctca

SEQ ID NO: 32645 - DNA, 18 bp, Homo sapiens
  source 1..18: mol_type = genomic DNA
aggattcggcgctctcac

SEQ ID NO: 32646 - DNA, 19 bp, Homo sapiens
  source 1..19: mol_type = genomic DNA
aggattcggcgctctcacc

SEQ ID NO: 32647 - DNA, 20 bp, Homo sapiens
  source 1..20: mol_type = genomic DNA
aggattcggcgctctcaccg

SEQ ID NO: 32648 - DNA, 21 bp, Homo sapiens
  source 1..21: mol_type = genomic DNA
aggattcggcgctctcaccgc

SEQ ID NO: 32649 - DNA, 22 bp, Homo sapiens
  source 1..22: mol_type = genomic DNA
aggattcggcgctctcaccgcc

SEQ ID NO: 32650 - DNA, 27 bp, Homo sapiens
  source 1..27: mol_type = genomic DNA
aggattcggcgctctcaccgccgcggc

SEQ ID NO: 32651 - DNA, 28 bp, Homo sapiens
  source 1..28: mol_type = genomic DNA
aggattcggcgctctcaccgccgcggcc

SEQ ID NO: 32652 - DNA, 29 bp, Homo sapiens
  source 1..29: mol_type = genomic DNA
aggattcggcgctctcaccgccgcggccc

SEQ ID NO: 32653 - DNA, 31 bp, Homo sapiens; identical to SEQ ID NO: 4919
  source 1..31: mol_type = genomic DNA

SEQ ID NO: 32654 - DNA, 32 bp, Homo sapiens; identical to SEQ ID NO: 4920
  source 1..32: mol_type = genomic DNA

SEQ ID NO: 32655 - DNA, 34 bp, Homo sapiens; identical to SEQ ID NO: 4922
  source 1..34: mol_type = genomic DNA

SEQ ID NO: 32656 - DNA, 35 bp, Homo sapiens; identical to SEQ ID NO: 4923
  source 1..35: mol_type = genomic DNA

SEQ ID NO: 32657 - DNA, 20 bp, Homo sapiens
  source 1..20: mol_type = genomic DNA
aggcatcagcctccggagct

SEQ ID NO: 32658 - DNA, 21 bp, Homo sapiens
  source 1..21: mol_type = genomic DNA
aggcatcagcctccggagctg

SEQ ID NO: 32659 - DNA, 25 bp, Homo sapiens
  source 1..25: mol_type = genomic DNA
aggcatcagcctccggagctgggga

SEQ ID NO: 32660 - DNA, 28 bp, Homo sapiens
  source 1..28: mol_type = genomic DNA
aggcatcagcctccggagctggggattg

SEQ ID NO: 32661 - DNA, 29 bp, Homo sapiens
  source 1..29: mol_type = genomic DNA
aggcatcagcctccggagctggggattgt

SEQ ID NO: 32662 - DNA, 36 bp, Homo sapiens; identical to SEQ ID NO: 4943
  source 1..36: mol_type = genomic DNA

SEQ ID NO: 32663 - DNA, 32 bp, Homo sapiens; identical to SEQ ID NO: 4949
  source 1..32: mol_type = genomic DNA

SEQ ID NO: 32664 - DNA, 32 bp, Homo sapiens
  source 1..32: mol_type = genomic DNA
aggccccgggttcaatccccggcatctccacc

SEQ ID NO: 32665 - DNA, 32 bp, Homo sapiens; identical to SEQ ID NO: 4951
  source 1..32: mol_type = genomic DNA

SEQ ID NO: 32666 - DNA, 33 bp, Homo sapiens; identical to SEQ ID NO: 4953
  source 1..33: mol_type = genomic DNA

SEQ ID NO: 32667 - DNA, 20 bp, Homo sapiens
  source 1..20: mol_type = genomic DNA
aggcgctggatttaggctcc

SEQ ID NO: 32668 - DNA, 18 bp, Homo sapiens
  source 1..18: mol_type = genomic DNA
aggcggcccgggttcgac

SEQ ID NO: 32669 - DNA, 20 bp, Homo sapiens
  source 1..20: mol_type = genomic DNA
aggcggcccgggttcgactc

SEQ ID NO: 32670 - DNA, 21 bp, Homo sapiens
  source 1..21: mol_type = genomic DNA
aggcggcccgggttcgactcc

SEQ ID NO: 32671 - DNA, 22 bp, Homo sapiens
  source 1..22: mol_type = genomic DNA
aggcggcccgggttcgactccc

SEQ ID NO: 32672 - DNA, 24 bp, Homo sapiens
  source 1..24: mol_type = genomic DNA
aggcggcccgggttcgactcccgg

SEQ ID NO: 32673 - DNA, 25 bp, Homo sapiens
  source 1..25: mol_type = genomic DNA
aggcggcccgggttcgactcccggt

SEQ ID NO: 32674 - DNA, 26 bp, Homo sapiens
  source 1..26: mol_type = genomic DNA
aggcggcccgggttcgactcccggtg

SEQ ID NO: 32675 - DNA, 27 bp, Homo sapiens
  source 1..27: mol_type = genomic DNA
aggcggcccgggttcgactcccggtgt

SEQ ID NO: 32676 - DNA, 28 bp, Homo sapiens
  source 1..28: mol_type = genomic DNA
aggcggcccgggttcgactcccggtgtg

SEQ ID NO: 32677 - DNA, 29 bp, Homo sapiens
  source 1..29: mol_type = genomic DNA
aggcggcccgggttcgactcccggtgtgg

SEQ ID NO: 32678 - DNA, 30 bp, Homo sapiens; identical to SEQ ID NO: 4967
  source 1..30: mol_type = genomic DNA

SEQ ID NO: 32679 - DNA, 31 bp, Homo sapiens; identical to SEQ ID NO: 4968
  source 1..31: mol_type = genomic DNA

SEQ ID NO: 32680 - DNA, 32 bp, Homo sapiens; identical to SEQ ID NO: 4969
  source 1..32: mol_type = genomic DNA

SEQ ID NO: 32681 - DNA, 33 bp, Homo sapiens; identical to SEQ ID NO: 4970
  source 1..33: mol_type = genomic DNA

SEQ ID NO: 32682 - DNA, 34 bp, Homo sapiens; identical to SEQ ID NO: 4971
  source 1..34: mol_type = genomic DNA

SEQ ID NO: 32683 - DNA, 35 bp, Homo sapiens; identical to SEQ ID NO: 4972
  source 1..35: mol_type = genomic DNA

SEQ ID NO: 32684 - DNA, 19 bp, Homo sapiens
  source 1..19: mol_type = genomic DNA
aggcgtctgacttcggatc

SEQ ID NO: 32685 - DNA, 47 bp, Homo sapiens
  source 1..47: mol_type = genomic DNA
aggctccagtctcttcgggggcgtgggttcgaatcccaccgctgcca

SEQ ID NO: 32686 - DNA, 31 bp, Homo sapiens
  source 1..31: mol_type = genomic DNA
aggctgcgtgttcgaatcacgtcggggtcac

SEQ ID NO: 32687 - DNA, 32 bp, Homo sapiens; identical to SEQ ID NO: 4985
  source 1..32: mol_type = genomic DNA

SEQ ID NO: 32688 - DNA, 26 bp, Homo sapiens
  source 1..26: mol_type = genomic DNA
aggcttacgaccccttatttacccca

SEQ ID NO: 32689 - DNA, 17 bp, Homo sapiens
  source 1..17: mol_type = genomic DNA
agggatgggttcgattc

SEQ ID NO: 32690 - DNA, 20 bp, Homo sapiens
  source 1..20: mol_type = genomic DNA
agggatgggttcgattctca

SEQ ID NO: 32691 - DNA, 26 bp, Homo sapiens
  source 1..26: mol_type = genomic DNA
agggatgggttcgattctcatagtcc

SEQ ID NO: 32692 - DNA, 30 bp, Homo sapiens; identical to SEQ ID NO: 5003
  source 1..30: mol_type = genomic DNA

SEQ ID NO: 32693 - DNA, 16 bp, Homo sapiens
  source 1..16: mol_type = genomic DNA
agggattgtgggttcg

SEQ ID NO: 32694 - DNA, 21 bp, Homo sapiens
  source 1..21: mol_type = genomic DNA
agggattgtgggttcgagtcc

SEQ ID NO: 32695 - DNA, 22 bp, Homo sapiens
  source 1..22: mol_type = genomic DNA
agggattgtgggttcgagtccc

SEQ ID NO: 32696 - DNA, 23 bp, Homo sapiens
  source 1..23: mol_type = genomic DNA
agggattgtgggttcgagtccca

SEQ ID NO: 32697 - DNA, 25 bp, Homo sapiens
  source 1..25: mol_type = genomic DNA
agggattgtgggttcgagtcccacc

SEQ ID NO: 32698 - DNA, 28 bp, Homo sapiens
  source 1..28: mol_type = genomic DNA
agggattgtgggttcgagtcccacccgg

SEQ ID NO: 32699 - DNA, 30 bp, Homo sapiens; identical to SEQ ID NO: 5013
  source 1..30: mol_type = genomic DNA

SEQ ID NO: 32700 - DNA, 31 bp, Homo sapiens; identical to SEQ ID NO: 5014
  source 1..31: mol_type = genomic DNA

SEQ ID NO: 32701 - DNA, 32 bp, Homo sapiens; identical to SEQ ID NO: 5015
  source 1..32: mol_type = genomic DNA

SEQ ID NO: 32702 - DNA, 33 bp, Homo sapiens; identical to SEQ ID NO: 5016
  source 1..33: mol_type = genomic DNA

SEQ ID NO: 32703 - DNA, 34 bp, Homo sapiens; identical to SEQ ID NO: 5017
  source 1..34: mol_type = genomic DNA

SEQ ID NO: 32704 - DNA, 32 bp, Homo sapiens; identical to SEQ ID NO: 5020
  source 1..32: mol_type = genomic DNA

SEQ ID NO: 32705 - DNA, 33 bp, Homo sapiens; identical to SEQ ID NO: 5021
  source 1..33: mol_type = genomic DNA

SEQ ID NO: 32706 - DNA, 34 bp, Homo sapiens; identical to SEQ ID NO: 5026
  source 1..34: mol_type = genomic DNA

SEQ ID NO: 32707 - DNA, 35 bp, Homo sapiens; identical to SEQ ID NO: 5027
  source 1..35: mol_type = genomic DNA

SEQ ID NO: 32708 - DNA, 25 bp, Homo sapiens
  source 1..25: mol_type = genomic DNA
agggattgtgggttcgagtcccatc

SEQ ID NO: 32709 - DNA, 26 bp, Homo sapiens
  source 1..26: mol_type = genomic DNA
agggattgtgggttcgagtcccatct

SEQ ID NO: 32710 - DNA, 30 bp, Homo sapiens; identical to SEQ ID NO: 5031
  source 1..30: mol_type = genomic DNA

SEQ ID NO: 32711 - DNA, 31 bp, Homo sapiens; identical to SEQ ID NO: 5032
  source 1..31: mol_type = genomic DNA

SEQ ID NO: 32712 - DNA, 32 bp, Homo sapiens; identical to SEQ ID NO: 5033
  source 1..32: mol_type = genomic DNA

SEQ ID NO: 32713 - DNA, 33 bp, Homo sapiens; identical to SEQ ID NO: 5034
  source 1..33: mol_type = genomic DNA

SEQ ID NO: 32714 - DNA, 34 bp, Homo sapiens; identical to SEQ ID NO: 5035
  source 1..34: mol_type = genomic DNA

SEQ ID NO: 32715 - DNA, 35 bp, Homo sapiens; identical to SEQ ID NO: 5036
  source 1..35: mol_type = genomic DNA

SEQ ID NO: 32716 - DNA, 19 bp, Homo sapiens
  source 1..19: mol_type = genomic DNA
aggggtagagcatttgact

SEQ ID NO: 32717 - DNA, 21 bp, Homo sapiens
  source 1..21: mol_type = genomic DNA
aggggtagagcatttgactgc

SEQ ID NO: 32718 - DNA, 17 bp, Homo sapiens
  source 1..17: mol_type = genomic DNA
aggggtatgattctcgc

SEQ ID NO: 32719 - DNA, 18 bp, Homo sapiens
  source 1..18: mol_type = genomic DNA
aggggtatgattctcgct

SEQ ID NO: 32720 - DNA, 19 bp, Homo sapiens
  source 1..19: mol_type = genomic DNA
aggggtatgattctcgctt

SEQ ID NO: 32721 - DNA, 22 bp, Homo sapiens
  source 1..22: mol_type = genomic DNA
aggggtatgattctcgctttgg

SEQ ID NO: 32722 - DNA, 18 bp, Homo sapiens
  source 1..18: mol_type = genomic DNA
aggggtatgattctcggt

SEQ ID NO: 32723 - DNA, 19 bp, Homo sapiens
  source 1..19: mol_type = genomic DNA
aggggtatgattctcggtt

SEQ ID NO: 32724 - DNA, 32 bp, Homo sapiens; identical to SEQ ID NO: 5056
  source 1..32: mol_type = genomic DNA

SEQ ID NO: 32725 - DNA, 33 bp, Homo sapiens; identical to SEQ ID NO: 5057
  source 1..33: mol_type = genomic DNA

SEQ ID NO: 32726 - DNA, 34 bp, Homo sapiens; identical to SEQ ID NO: 5058
  source 1..34: mol_type = genomic DNA

SEQ ID NO: 32727 - DNA, 33 bp, Homo sapiens; identical to SEQ ID NO: 5060
  source 1..33: mol_type = genomic DNA

SEQ ID NO: 32728 - DNA, 32 bp, Homo sapiens; identical to SEQ ID NO: 5062
  source 1..32: mol_type = genomic DNA

SEQ ID NO: 32729 - DNA, 33 bp, Homo sapiens; identical to SEQ ID NO: 5063
  source 1..33: mol_type = genomic DNA

SEQ ID NO: 32730 - DNA, 30 bp, Homo sapiens; identical to SEQ ID NO: 5073
  source 1..30: mol_type = genomic DNA

SEQ ID NO: 32731 - DNA, 31 bp, Homo sapiens; identical to SEQ ID NO: 5074
  source 1..31: mol_type = genomic DNA

SEQ ID NO: 32732 - DNA, 32 bp, Homo sapiens; identical to SEQ ID NO: 5075
  source 1..32: mol_type = genomic DNA

SEQ ID NO: 32733 - DNA, 33 bp, Homo sapiens; identical to SEQ ID NO: 5076
  source 1..33: mol_type = genomic DNA

SEQ ID NO: 32734 - DNA, 19 bp, Homo sapiens
  source 1..19: mol_type = genomic DNA
agggtcgtgggttcgagcc

SEQ ID NO: 32735 - DNA, 21 bp, Homo sapiens
  source 1..21: mol_type = genomic DNA
agggtcgtgggttcgagcccc

SEQ ID NO: 32736 - DNA, 22 bp, Homo sapiens
  source 1..22: mol_type = genomic DNA
agggtcgtgggttcgagcccca

SEQ ID NO: 32737 - DNA, 24 bp, Homo sapiens
  source 1..24: mol_type = genomic DNA
agggtcgtgggttcgagccccacg

SEQ ID NO: 32738 - DNA, 25 bp, Homo sapiens
  source 1..25: mol_type = genomic DNA
agggtcgtgggttcgagccccacgt

SEQ ID NO: 32739 - DNA, 30 bp, Homo sapiens; identical to SEQ ID NO: 5086
  source 1..30: mol_type = genomic DNA

SEQ ID NO: 32740 - DNA, 31 bp, Homo sapiens; identical to SEQ ID NO: 5087
  source 1..31: mol_type = genomic DNA

SEQ ID NO: 32741 - DNA, 32 bp, Homo sapiens; identical to SEQ ID NO: 5088
  source 1..32: mol_type = genomic DNA

SEQ ID NO: 32742 - DNA, 33 bp, Homo sapiens; identical to SEQ ID NO: 5089
  source 1..33: mol_type = genomic DNA

SEQ ID NO: 32743 - DNA, 34 bp, Homo sapiens; identical to SEQ ID NO: 5090
  source 1..34: mol_type = genomic DNA

SEQ ID NO: 32744 - DNA, 23 bp, Homo sapiens
  source 1..23: mol_type = genomic DNA
agggttcaagtccctgttcgggc

SEQ ID NO: 32745 - DNA, 24 bp, Homo sapiens
  source 1..24: mol_type = genomic DNA
agggttcaagtccctgttcgggcg

SEQ ID NO: 32746 - DNA, 25 bp, Homo sapiens
  source 1..25: mol_type = genomic DNA
agggttcaagtccctgttcgggcgc

SEQ ID NO: 32747 - DNA, 26 bp, Homo sapiens
  source 1..26: mol_type = genomic DNA
agggttcaagtccctgttcgggcgcc

SEQ ID NO: 32748 - DNA, 27 bp, Homo sapiens
  source 1..27: mol_type = genomic DNA
agggttcaagtccctgttcgggcgcca

SEQ ID NO: 32749 - DNA, 25 bp, Homo sapiens
  source 1..25: mol_type = genomic DNA
agggttcgaatcccttcgtggttgc

SEQ ID NO: 32750 - DNA, 26 bp, Homo sapiens
  source 1..26: mol_type = genomic DNA
agggttcgaatcccttcgtggttgcc

SEQ ID NO: 32751 - DNA, 25 bp, Homo sapiens
  source 1..25: mol_type = genomic DNA
agggttcgagtcccttcgtggtcgc

SEQ ID NO: 32752 - DNA, 26 bp, Homo sapiens
  source 1..26: mol_type = genomic DNA
agggttcgagtcccttcgtggtcgcc

SEQ ID NO: 32753 - DNA, 24 bp, Homo sapiens
  source 1..24: mol_type = genomic DNA
aggtcagctaaataagctatcggg

SEQ ID NO: 32754 - DNA, 18 bp, Homo sapiens
  source 1..18: mol_type = genomic DNA
aggtccccggttcgaaac

SEQ ID NO: 32755 - DNA, 19 bp, Homo sapiens
  source 1..19: mol_type = genomic DNA
aggtccccggttcgaaacc

SEQ ID NO: 32756 - DNA, 20 bp, Homo sapiens
  source 1..20: mol_type = genomic DNA
aggtccccggttcgaaaccg

SEQ ID NO: 32757 - DNA, 21 bp, Homo sapiens
  source 1..21: mol_type = genomic DNA
aggtccccggttcgaaaccgg

SEQ ID NO: 32758 - DNA, 23 bp, Homo sapiens
  source 1..23: mol_type = genomic DNA
aggtccccggttcgaaaccgggc

SEQ ID NO: 32759 - DNA, 30 bp, Homo sapiens; identical to SEQ ID NO: 5130
  source 1..30: mol_type = genomic DNA

SEQ ID NO: 32760 - DNA, 32 bp, Homo sapiens
  source 1..32: mol_type = genomic DNA
aggtccccggttcgaaaccgggcggaaacacc

SEQ ID NO: 32761 - DNA, 24 bp, Homo sapiens
  source 1..24: mol_type = genomic DNA
aggtcccgggttcaaatcccggac

SEQ ID NO: 32762 - DNA, 30 bp, Homo sapiens
  source 1..30: mol_type = genomic DNA
aggtcccgggttcaaatcccggacgagccc

SEQ ID NO: 32763 - DNA, 31 bp, Homo sapiens; identical to SEQ ID NO: 5133
  source 1..31: mol_type = genomic DNA

SEQ ID NO: 32764 - DNA, 32 bp, Homo sapiens; identical to SEQ ID NO: 5134
  source 1..32: mol_type = genomic DNA

SEQ ID NO: 32765 - DNA, 19 bp, Homo sapiens
  source 1..19: mol_type = genomic DNA
aggtccctggttcgatccc

SEQ ID NO: 32766 - DNA, 21 bp, Homo sapiens
  source 1..21: mol_type = genomic DNA
aggtccctggttcgatcccgg

SEQ ID NO: 32767 - DNA, 31 bp, Homo sapiens; identical to SEQ ID NO: 5138
  source 1..31: mol_type = genomic DNA

SEQ ID NO: 32768 - DNA, 32 bp, Homo sapiens
  source 1..32: mol_type = genomic DNA
aggtccctggttcgatcccgggtttcggcacc

SEQ ID NO: 32769 - DNA, 17 bp, Homo sapiens
  source 1..17: mol_type = genomic DNA
aggtcctgagttcgaac

SEQ ID NO: 32770 - DNA, 19 bp, Homo sapiens
  source 1..19: mol_type = genomic DNA
aggtcctgagttcgaacct

SEQ ID NO: 32771 - DNA, 29 bp, Homo sapiens
  source 1..29: mol_type = genomic DNA
aggtcctgagttcgaacctcagagggggc

SEQ ID NO: 32772 - DNA, 30 bp, Homo sapiens
  source 1..30: mol_type = genomic DNA
aggtcctgggttcgagccccagtggaacca

SEQ ID NO: 32773 - DNA, 31 bp, Homo sapiens; identical to SEQ ID NO: 5149
  source 1..31: mol_type = genomic DNA

SEQ ID NO: 32774 - DNA, 32 bp, Homo sapiens; identical to SEQ ID NO: 5150
  source 1..32: mol_type = genomic DNA

SEQ ID NO: 32775 - DNA, 33 bp, Homo sapiens; identical to SEQ ID NO: 5151
  source 1..33: mol_type = genomic DNA

SEQ ID NO: 32776 - DNA, 17 bp, Homo sapiens
  source 1..17: mol_type = genomic DNA
aggtcgatggatcgaaa

SEQ ID NO: 32777 - DNA, 18 bp, Homo sapiens
  source 1..18: mol_type = genomic DNA
aggtcgatggatcgaaac

SEQ ID NO: 32778 - DNA, 19 bp, Homo sapiens
  source 1..19: mol_type = genomic DNA
aggtcgatggatcgaaacc

SEQ ID NO: 32779 - DNA, 20 bp, Homo sapiens
  source 1..20: mol_type = genomic DNA
aggtcgatggatcgaaacca

SEQ ID NO: 32780 - DNA, 21 bp, Homo sapiens
  source 1..21: mol_type = genomic DNA
aggtcgatggatcgaaaccat

SEQ ID NO: 32781 - DNA, 32 bp, Homo sapiens; identical to SEQ ID NO: 5157
  source 1..32: mol_type = genomic DNA

SEQ ID NO: 32782 - DNA, 18 bp, Homo sapiens
  source 1..18: mol_type = genomic DNA
aggtcgcgggttcgaacc

SEQ ID NO: 32783 - DNA, 19 bp, Homo sapiens
  source 1..19: mol_type = genomic DNA
aggtcgcgggttcgaaccc

SEQ ID NO: 32784 - DNA, 28 bp, Homo sapiens
  source 1..28: mol_type = genomic DNA
aggtcgcgggttcgaaccccgtacgggc

SEQ ID NO: 32785 - DNA, 29 bp, Homo sapiens
  source 1..29: mol_type = genomic DNA
aggtcgcgggttcgaaccccgtacgggcc

SEQ ID NO: 32786 - DNA, 30 bp, Homo sapiens; identical to SEQ ID NO: 5159
  source 1..30: mol_type = genomic DNA

SEQ ID NO: 32787 - DNA, 18 bp, Homo sapiens
  source 1..18: mol_type = genomic DNA
aggtcgcgggttcgatcc

SEQ ID NO: 32788 - DNA, 19 bp, Homo sapiens
  source 1..19: mol_type = genomic DNA
aggtcgcgggttcgatccc

SEQ ID NO: 32789 - DNA, 20 bp, Homo sapiens
  source 1..20: mol_type = genomic DNA
aggtcgcgggttcgatcccc

SEQ ID NO: 32790 - DNA, 21 bp, Homo sapiens
  source 1..21: mol_type = genomic DNA
aggtcgcgggttcgatccccg

SEQ ID NO: 32791 - DNA, 23 bp, Homo sapiens
  source 1..23: mol_type = genomic DNA
aggtcgcgggttcgatccccgta

SEQ ID NO: 32792 - DNA, 28 bp, Homo sapiens
  source 1..28: mol_type = genomic DNA
aggtcgcgggttcgatccccgtacgggc

SEQ ID NO: 32793 - DNA, 29 bp, Homo sapiens
  source 1..29: mol_type = genomic DNA
aggtcgcgggttcgatccccgtacgggcc

SEQ ID NO: 32794 - DNA, 30 bp, Homo sapiens; identical to SEQ ID NO: 5165
  source 1..30: mol_type = genomic DNA

SEQ ID NO: 32795 - DNA, 31 bp, Homo sapiens; identical to SEQ ID NO: 5166
  source 1..31: mol_type = genomic DNA

SEQ ID NO: 32796 - DNA, 32 bp, Homo sapiens; identical to SEQ ID NO: 5167
  source 1..32: mol_type = genomic DNA

SEQ ID NO: 32797 - DNA, 33 bp, Homo sapiens; identical to SEQ ID NO: 5168
  source 1..33: mol_type = genomic DNA

SEQ ID NO: 32798 - DNA, 31 bp, Homo sapiens; identical to SEQ ID NO: 5170
  source 1..31: mol_type = genomic DNA

SEQ ID NO: 32799 - DNA, 32 bp, Homo sapiens; identical to SEQ ID NO: 5171
  source 1..32: mol_type = genomic DNA

SEQ ID NO: 32800 - DNA, 31 bp, Homo sapiens; identical to SEQ ID NO: 5173
  source 1..31: mol_type = genomic DNA

SEQ ID NO: 32801 - DNA, 32 bp, Homo sapiens; identical to SEQ ID NO: 5174
  source 1..32: mol_type = genomic DNA

SEQ ID NO: 32802 - DNA, 31 bp, Homo sapiens; identical to SEQ ID NO: 5179
  source 1..31: mol_type = genomic DNA

SEQ ID NO: 32803 - DNA, 32 bp, Homo sapiens; identical to SEQ ID NO: 5180
  source 1..32: mol_type = genomic DNA

SEQ ID NO: 32804 - DNA, 17 bp, Homo sapiens
  source 1..17: mol_type = genomic DNA
aggtcgtgagttcgagc

SEQ ID NO: 32805 - DNA, 18 bp, Homo sapiens
  source 1..18: mol_type = genomic DNA
aggtcgtgagttcgagcc

SEQ ID NO: 32806 - DNA, 20 bp, Homo sapiens
  source 1..20: mol_type = genomic DNA
aggtcgtgagttcgagcctc

SEQ ID NO: 32807 - DNA, 18 bp, Homo sapiens
  source 1..18: mol_type = genomic DNA
aggtcgtgagttcgatcc

SEQ ID NO: 32808 - DNA, 20 bp, Homo sapiens
  source 1..20: mol_type = genomic DNA
aggtcgtgagttcgatcctc

SEQ ID NO: 32809 - DNA, 29 bp, Homo sapiens
  source 1..29: mol_type = genomic DNA
aggtcgtgagttcgatcctcacacggggc

SEQ ID NO: 32810 - DNA, 18 bp, Homo sapiens
  source 1..18: mol_type = genomic DNA
aggtgattttcatattga

SEQ ID NO: 32811 - DNA, 22 bp, Homo sapiens
  source 1..22: mol_type = genomic DNA
aggtgattttcatattgaattg

SEQ ID NO: 32812 - DNA, 18 bp, Homo sapiens
  source 1..18: mol_type = genomic DNA
aggtggcccgggttcgac

SEQ ID NO: 32813 - DNA, 21 bp, Homo sapiens
  source 1..21: mol_type = genomic DNA
aggtggcccgggttcgactcc

SEQ ID NO: 32814 - DNA, 22 bp, Homo sapiens
  source 1..22: mol_type = genomic DNA
aggtggcccgggttcgactccc

SEQ ID NO: 32815 - DNA, 26 bp, Homo sapiens
  source 1..26: mol_type = genomic DNA
aggtggcccgggttcgactcccggta

SEQ ID NO: 32816 - DNA, 31 bp, Homo sapiens; identical to SEQ ID NO: 5215
  source 1..31: mol_type = genomic DNA

SEQ ID NO: 32817 - DNA, 32 bp, Homo sapiens; identical to SEQ ID NO: 5216
  source 1..32: mol_type = genomic DNA

SEQ ID NO: 32818 - DNA, 33 bp, Homo sapiens; identical to SEQ ID NO: 5217
  source 1..33: mol_type = genomic DNA

SEQ ID NO: 32819 - DNA, 34 bp, Homo sapiens; identical to SEQ ID NO: 5218
  source 1..34: mol_type = genomic DNA

SEQ ID NO: 32820 - DNA, 20 bp, Homo sapiens
  source 1..20: mol_type = genomic DNA
aggttccgggttcgagtccc

SEQ ID NO: 32821 - DNA, 21 bp, Homo sapiens
  source 1..21: mol_type = genomic DNA
aggttccgggttcgagtcccg

SEQ ID NO: 32822 - DNA, 23 bp, Homo sapiens
  source 1..23: mol_type = genomic DNA
aggttccgggttcgagtcccggc

SEQ ID NO: 32823 - DNA, 27 bp, Homo sapiens
  source 1..27: mol_type = genomic DNA
aggttccgggttcgagtcccggcggag

SEQ ID NO: 32824 - DNA, 29 bp, Homo sapiens
  source 1..29: mol_type = genomic DNA
aggttccgggttcgagtcccggcggagtc

SEQ ID NO: 32825 - DNA, 30 bp, Homo sapiens
  source 1..30: mol_type = genomic DNA
aggttccgggttcgagtcccggcggagtcg

SEQ ID NO: 32826 - DNA, 31 bp, Homo sapiens; identical to SEQ ID NO: 5228
  source 1..31: mol_type = genomic DNA

SEQ ID NO: 32827 - DNA, 32 bp, Homo sapiens; identical to SEQ ID NO: 5229
  source 1..32: mol_type = genomic DNA

SEQ ID NO: 32828 - DNA, 25 bp, Homo sapiens
  source 1..25: mol_type = genomic DNA
aggttcgaaccctgctcgctgcgcc

SEQ ID NO: 32829 - DNA, 25 bp, Homo sapiens
  source 1..25: mol_type = genomic DNA
aggttcgaatcctgccgactacgcc

SEQ ID NO: 32830 - DNA, 23 bp, Homo sapiens
  source 1..23: mol_type = genomic DNA
aggttcgaatcctgttcgtgacg

SEQ ID NO: 32831 - DNA, 24 bp, Homo sapiens
  source 1..24: mol_type = genomic DNA
aggttcgaatcctgttcgtgacgc

SEQ ID NO: 32832 - DNA, 25 bp, Homo sapiens
  source 1..25: mol_type = genomic DNA
aggttcgaatcctgttcgtgacgcc

SEQ ID NO: 32833 - DNA, 16 bp, Homo sapiens
  source 1..16: mol_type = genomic DNA
aggttcgactcctggc

SEQ ID NO: 32834 - DNA, 20 bp, Homo sapiens
  source 1..20: mol_type = genomic DNA
aggttcgactcctggctggc

SEQ ID NO: 32835 - DNA, 22 bp, Homo sapiens
  source 1..22: mol_type = genomic DNA
aggttcgactcctggctggctc

SEQ ID NO: 32836 - DNA, 23 bp, Homo sapiens
  source 1..23: mol_type = genomic DNA
aggttcgactcctggctggctcg

SEQ ID NO: 32837 - DNA, 24 bp, Homo sapiens
  source 1..24: mol_type = genomic DNA
aggttcgactcctggctggctcgc

SEQ ID NO: 32838 - DNA, 25 bp, Homo sapiens
  source 1..25: mol_type = genomic DNA
aggttcgactcctggctggctcgcc

SEQ ID NO: 32839 - DNA, 26 bp, Homo sapiens
  source 1..26: mol_type = genomic DNA
aggttcgactcctggctggctcgcca

SEQ ID NO: 32840 - DNA, 23 bp, Homo sapiens
  source 1..23: mol_type = genomic DNA
aggttcgagtcctgccgcggtcg

SEQ ID NO: 32841 - DNA, 24 bp, Homo sapiens
  source 1..24: mol_type = genomic DNA
aggttcgagtcctgccgcggtcgc

SEQ ID NO: 32842 - DNA, 29 bp, Homo sapiens
  source 1..29: mol_type = genomic DNA
aggttgcgtgttcaaatcacgtcggggtc

SEQ ID NO: 32843 - DNA, 31 bp, Homo sapiens
  source 1..31: mol_type = genomic DNA
aggttgcgtgttcaaatcacgtcggggtcac

SEQ ID NO: 32844 - DNA, 32 bp, Homo sapiens
  source 1..32: mol_type = genomic DNA
aggttgcgtgttcaagtcacgtcggggtcacc

SEQ ID NO: 32845 - DNA, 17 bp, Homo sapiens
  source 1..17: mol_type = genomic DNA
aggttggtggttcgagc

SEQ ID NO: 32846 - DNA, 32 bp, Homo sapiens; identical to SEQ ID NO: 5257
  source 1..32: mol_type = genomic DNA

SEQ ID NO: 32847 - DNA, 17 bp, Homo sapiens
  source 1..17: mol_type = genomic DNA
aggttgtgagttcgagc

SEQ ID NO: 32848 - DNA, 18 bp, Homo sapiens
  source 1..18: mol_type = genomic DNA
aggttgtgagttcgagcc

SEQ ID NO: 32849 - DNA, 20 bp, Homo sapiens
  source 1..20: mol_type = genomic DNA
aggttgtgagttcgagcctc

SEQ ID NO: 32850 - DNA, 32 bp, Homo sapiens
  source 1..32: mol_type = genomic DNA
aggttgtgagttcgagcctcacctggagcacc

SEQ ID NO: 32851 - DNA, 23 bp, Homo sapiens
  source 1..23: mol_type = genomic DNA
aggttgtgggttcgaatcccacc

SEQ ID NO: 32852 - DNA, 31 bp, Homo sapiens
  source 1..31: mol_type = genomic DNA
aggttgtgggttcgaatcccaccagagtcgc

SEQ ID NO: 32853 - DNA, 32 bp, Homo sapiens; identical to SEQ ID NO: 5263
  source 1..32: mol_type = genomic DNA

SEQ ID NO: 32854 - DNA, 23 bp, Homo sapiens
  source 1..23: mol_type = genomic DNA
aggttgtgggttcgagtcccacc

SEQ ID NO: 32855 - DNA, 32 bp, Homo sapiens; identical to SEQ ID NO: 5266
  source 1..32: mol_type = genomic DNA

SEQ ID NO: 32856 - DNA, 16 bp, Homo sapiens
  source 1..16: mol_type = genomic DNA
agtaaggtcagctaaa

SEQ ID NO: 32857 - DNA, 17 bp, Homo sapiens
  source 1..17: mol_type = genomic DNA
agtaaggtcagctaaat

SEQ ID NO: 32858 - DNA, 18 bp, Homo sapiens
  source 1..18: mol_type = genomic DNA
agtaaggtcagctaaata

SEQ ID NO: 32859 - DNA, 20 bp, Homo sapiens
  source 1..20: mol_type = genomic DNA
agtaaggtcagctaaataag

SEQ ID NO: 32860 - DNA, 21 bp, Homo sapiens
  source 1..21: mol_type = genomic DNA
agtaaggtcagctaaataagc

SEQ ID NO: 32861 - DNA, 22 bp, Homo sapiens
  source 1..22: mol_type = genomic DNA
agtaaggtcagctaaataagct

SEQ ID NO: 32862 - DNA, 28 bp, Homo sapiens
  source 1..28: mol_type = genomic DNA
agtaaggtcagctaaataagctatcggg

SEQ ID NO: 32863 - DNA, 29 bp, Homo sapiens
  source 1..29: mol_type = genomic DNA
agtaaggtcagctaaataagctatcgggc

SEQ ID NO: 32864 - DNA, 30 bp, Homo sapiens; identical to SEQ ID NO: 5300
  source 1..30: mol_type = genomic DNA

SEQ ID NO: 32865 - DNA, 31 bp, Homo sapiens; identical to SEQ ID NO: 5301
  source 1..31: mol_type = genomic DNA

SEQ ID NO: 32866 - DNA, 32 bp, Homo sapiens; identical to SEQ ID NO: 5302
  source 1..32: mol_type = genomic DNA

SEQ ID NO: 32867 - DNA, 33 bp, Homo sapiens; identical to SEQ ID NO: 5303
  source 1..33: mol_type = genomic DNA

SEQ ID NO: 32868 - DNA, 34 bp, Homo sapiens; identical to SEQ ID NO: 5304
  source 1..34: mol_type = genomic DNA

SEQ ID NO: 32869 - DNA, 35 bp, Homo sapiens; identical to SEQ ID NO: 5305
  source 1..35: mol_type = genomic DNA

SEQ ID NO: 32870 - DNA, 36 bp, Homo sapiens; identical to SEQ ID NO: 5306
  source 1..36: mol_type = genomic DNA

SEQ ID NO: 32871 - DNA, 37 bp, Homo sapiens; identical to SEQ ID NO: 5307
  source 1..37: mol_type = genomic DNA

SEQ ID NO: 32872 - DNA, 38 bp, Homo sapiens; identical to SEQ ID NO: 5308
  source 1..38: mol_type = genomic DNA

SEQ ID NO: 32873 - DNA, 39 bp, Homo sapiens; identical to SEQ ID NO: 5309
  source 1..39: mol_type = genomic DNA

SEQ ID NO: 32874 - DNA, 40 bp, Homo sapiens; identical to SEQ ID NO: 5310
  source 1..40: mol_type = genomic DNA

SEQ ID NO: 32875 - DNA, 41 bp, Homo sapiens; identical to SEQ ID NO: 5311
  source 1..41: mol_type = genomic DNA

SEQ ID NO: 32876 - DNA, 42 bp, Homo sapiens; identical to SEQ ID NO: 5312
  source 1..42: mol_type = genomic DNA

SEQ ID NO: 32877 - DNA, 43 bp, Homo sapiens; identical to SEQ ID NO: 5313
  source 1..43: mol_type = genomic DNA

SEQ ID NO: 32878 - DNA, 45 bp, Homo sapiens; identical to SEQ ID NO: 5315
  source 1..45: mol_type = genomic DNA

SEQ ID NO: 32879 - DNA, 46 bp, Homo sapiens; identical to SEQ ID NO: 5316
  source 1..46: mol_type = genomic DNA

SEQ ID NO: 32880 - DNA, 47 bp, Homo sapiens; identical to SEQ ID NO: 5317
  source 1..47: mol_type = genomic DNA

SEQ ID NO: 32881 - DNA, 19 bp, Homo sapiens
  source 1..19: mol_type = genomic DNA
agtactctgcgttgtggcc

SEQ ID NO: 32882 - DNA, 20 bp, Homo sapiens
  source 1..20: mol_type = genomic DNA
agtactctgcgttgtggccg

SEQ ID NO: 32883 - DNA, 33 bp, Homo sapiens; identical to SEQ ID NO: 5335
  source 1..33: mol_type = genomic DNA

SEQ ID NO: 32884 - DNA, 20 bp, Homo sapiens
  source 1..20: mol_type = genomic DNA
agtaggcagcgcgtcagtct

SEQ ID NO: 32885 - DNA, 19 bp, Homo sapiens
  source 1..19: mol_type = genomic DNA
agtaggtagcgcatcagtc

SEQ ID NO: 32886 - DNA, 20 bp, Homo sapiens
  source 1..20: mol_type = genomic DNA
agtaggtagcgcatcagtct

SEQ ID NO: 32887 - DNA, 16 bp, Homo sapiens
  source 1..16: mol_type = genomic DNA
agtcacgtcggggtca

SEQ ID NO: 32888 - DNA, 17 bp, Homo sapiens
  source 1..17: mol_type = genomic DNA
agtcacgtcggggtcac

SEQ ID NO: 32889 - DNA, 18 bp, Homo sapiens
  source 1..18: mol_type = genomic DNA
agtcacgtcggggtcacc

SEQ ID NO: 32890 - DNA, 19 bp, Homo sapiens
  source 1..19: mol_type = genomic DNA
agtcacgtcggggtcacca

SEQ ID NO: 32891 - DNA, 16 bp, Homo sapiens
  source 1..16: mol_type = genomic DNA
agtcatggaggccatg

SEQ ID NO: 32892 - DNA, 18 bp, Homo sapiens
  source 1..18: mol_type = genomic DNA
agtcccatctgggtcgcc

SEQ ID NO: 32893 - DNA, 16 bp, Homo sapiens
  source 1..16: mol_type = genomic DNA
agtcccggcggagtcg

SEQ ID NO: 32894 - DNA, 17 bp, Homo sapiens
  source 1..17: mol_type = genomic DNA
agtcccggcggagtcgc

SEQ ID NO: 32895 - DNA, 18 bp, Homo sapiens
  source 1..18: mol_type = genomic DNA
agtcccggcggagtcgcc

SEQ ID NO: 32896 - DNA, 16 bp, Homo sapiens
  source 1..16: mol_type = genomic DNA
agtccctgttcgggcg

SEQ ID NO: 32897 - DNA, 17 bp, Homo sapiens
  source 1..17: mol_type = genomic DNA
agtccctgttcgggcgc

SEQ ID NO: 32898 - DNA, 18 bp, Homo sapiens
  source 1..18: mol_type = genomic DNA
agtccctgttcgggcgcc

SEQ ID NO: 32899 - DNA, 19 bp, Homo sapiens
  source 1..19: mol_type = genomic DNA
agtccctgttcgggcgcca

SEQ ID NO: 32900 - DNA, 17 bp, Homo sapiens
  source 1..17: mol_type = genomic DNA
agtcctgccgcggtcgc

SEQ ID NO: 32901 - DNA, 18 bp, Homo sapiens
  source 1..18: mol_type = genomic DNA
agtcctgccgcggtcgcc

SEQ ID NO: 32902 - DNA, 16 bp, Homo sapiens
  source 1..16: mol_type = genomic DNA
agtcggtagagcatca

SEQ ID NO: 32903 - DNA, 18 bp, Homo sapiens
  source 1..18: mol_type = genomic DNA
agtcggtagagcatcaga

SEQ ID NO: 32904 - DNA, 19 bp, Homo sapiens
  source 1..19: mol_type = genomic DNA
agtcggtagagcatcagac

SEQ ID NO: 32905 - DNA, 20 bp, Homo sapiens
  source 1..20: mol_type = genomic DNA
agtcggtagagcatcagact

SEQ ID NO: 32906 - DNA, 23 bp, Homo sapiens
  source 1..23: mol_type = genomic DNA
agtcggtagagcatcagactttt

SEQ ID NO: 32907 - DNA, 18 bp, Homo sapiens
  source 1..18: mol_type = genomic DNA
agtcggtagagcatgaga

SEQ ID NO: 32908 - DNA, 19 bp, Homo sapiens
  source 1..19: mol_type = genomic DNA
agtcggtagagcatgagac

SEQ ID NO: 32909 - DNA, 20 bp, Homo sapiens
  source 1..20: mol_type = genomic DNA
agtcggtagagcatgagacc

SEQ ID NO: 32910 - DNA, 21 bp, Homo sapiens
  source 1..21: mol_type = genomic DNA
agtcggtagagcatgagaccc

SEQ ID NO: 32911 - DNA, 28 bp, Homo sapiens
  source 1..28: mol_type = genomic DNA
agtcggtagagcatgagacccttaatct

SEQ ID NO: 32912 - DNA, 20 bp, Homo sapiens
  source 1..20: mol_type = genomic DNA
agtcggtagagcatgagact

SEQ ID NO: 32913 - DNA, 21 bp, Homo sapiens
  source 1..21: mol_type = genomic DNA
agtcggtagagcatgagactc

SEQ ID NO: 32914 - DNA, 22 bp, Homo sapiens
  source 1..22: mol_type = genomic DNA
agtcggtagagcatgagactct

SEQ ID NO: 32915 - DNA, 26 bp, Homo sapiens
  source 1..26: mol_type = genomic DNA
agtcggtagagcatgagactcttaat

SEQ ID NO: 32916 - DNA, 27 bp, Homo sapiens
  source 1..27: mol_type = genomic DNA
agtcggtagagcatgagactcttaatc

SEQ ID NO: 32917 - DNA, 28 bp, Homo sapiens
  source 1..28: mol_type = genomic DNA
agtcggtagagcatgagactcttaatct

SEQ ID NO: 32918 - DNA, 29 bp, Homo sapiens
  source 1..29: mol_type = genomic DNA
agtcggtagagcatgagactcttaatctc

SEQ ID NO: 32919 - DNA, 30 bp, Homo sapiens; identical to SEQ ID NO: 5417
  source 1..30: mol_type = genomic DNA

SEQ ID NO: 32920 - DNA, 42 bp, Homo sapiens; identical to SEQ ID NO: 5424
  source 1..42: mol_type = genomic DNA

SEQ ID NO: 32921 - DNA, 17 bp, Homo sapiens
  source 1..17: mol_type = genomic DNA
agtcggtagagcatggg

SEQ ID NO: 32922 - DNA, 18 bp, Homo sapiens
  source 1..18: mol_type = genomic DNA
agtcggtagagcatggga

SEQ ID NO: 32923 - DNA, 19 bp, Homo sapiens
  source 1..19: mol_type = genomic DNA
agtcggtagagcatgggac

SEQ ID NO: 32924 - DNA, 20 bp, Homo sapiens
  source 1..20: mol_type = genomic DNA
agtcggtagagcatgggact

SEQ ID NO: 32925 - DNA, 21 bp, Homo sapiens
  source 1..21: mol_type = genomic DNA
agtcggtagagcatgggactc

SEQ ID NO: 32926 - DNA, 22 bp, Homo sapiens
  source 1..22: mol_type = genomic DNA
agtcggtagagcatgggactct

SEQ ID NO: 32927 - DNA, 26 bp, Homo sapiens
  source 1..26: mol_type = genomic DNA
agtcggtagagcatgggactcttaat

SEQ ID NO: 32928 - DNA, 27 bp, Homo sapiens
  source 1..27: mol_type = genomic DNA
agtcggtagagcatgggactcttaatc

SEQ ID NO: 32929 - DNA, 28 bp, Homo sapiens
  source 1..28: mol_type = genomic DNA
agtcggtagagcatgggactcttaatcc

SEQ ID NO: 32930 - DNA, 29 bp, Homo sapiens
  source 1..29: mol_type = genomic DNA
agtcggtagagcatgggactcttaatccc

SEQ ID NO: 32931 - DNA, 39 bp, Homo sapiens; identical to SEQ ID NO: 5444
  source 1..39: mol_type = genomic DNA

SEQ ID NO: 32932 - DNA, 42 bp, Homo sapiens; identical to SEQ ID NO: 5446
  source 1..42: mol_type = genomic DNA

SEQ ID NO: 32933 - DNA, 16 bp, Homo sapiens
  source 1..16: mol_type = genomic DNA
agtcgtggccgagtgg

SEQ ID NO: 32934 - DNA, 22 bp, Homo sapiens
  source 1..22: mol_type = genomic DNA
agtcgtggccgagtggttaagg

SEQ ID NO: 32935 - DNA, 22 bp, Homo sapiens
  source 1..22: mol_type = genomic DNA
agtctcataatctgaaggtcct

SEQ ID NO: 32936 - DNA, 16 bp, Homo sapiens
  source 1..16: mol_type = genomic DNA
agtctcggtggaacct

SEQ ID NO: 32937 - DNA, 17 bp, Homo sapiens
  source 1..17: mol_type = genomic DNA
agtctcggtggaacctc

SEQ ID NO: 32938 - DNA, 41 bp, Homo sapiens
  source 1..41: mol_type = genomic DNA
agtctcttcgggggcgtgggttcgaatcccaccgctgccac

SEQ ID NO: 32939 - DNA, 19 bp, Homo sapiens
  source 1..19: mol_type = genomic DNA
agtggcgcaatggataacg

SEQ ID NO: 32940 - DNA, 16 bp, Homo sapiens
  source 1..16: mol_type = genomic DNA
agtggcgcagcggaag

SEQ ID NO: 32941 - DNA, 17 bp, Homo sapiens
  source 1..17: mol_type = genomic DNA
agtggcgcagcggaagc

SEQ ID NO: 32942 - DNA, 18 bp, Homo sapiens
  source 1..18: mol_type = genomic DNA
agtggcgcagcggaagcg

SEQ ID NO: 32943 - DNA, 26 bp, Homo sapiens
  source 1..26: mol_type = genomic DNA
agtggcgcagcggaagcgtgctgggc

SEQ ID NO: 32944 - DNA, 28 bp, Homo sapiens
  source 1..28: mol_type = genomic DNA
agtggcgcagcggaagcgtgctgggccc

SEQ ID NO: 32945 - DNA, 17 bp, Homo sapiens
  source 1..17: mol_type = genomic DNA
agtggctaggattcggc

SEQ ID NO: 32946 - DNA, 18 bp, Homo sapiens
  source 1..18: mol_type = genomic DNA
agtggctaggattcggcg

SEQ ID NO: 32947 - DNA, 18 bp, Homo sapiens
  source 1..18: mol_type = genomic DNA
agtggctgatttgcgttc

SEQ ID NO: 32948 - DNA, 17 bp, Homo sapiens
  source 1..17: mol_type = genomic DNA
agtggggttttgcagtc

SEQ ID NO: 32949 - DNA, 19 bp, Homo sapiens
  source 1..19: mol_type = genomic DNA
agtgggtagagcatcagac

SEQ ID NO: 32950 - DNA, 16 bp, Homo sapiens
  source 1..16: mol_type = genomic DNA
agtggtagaattctcg

SEQ ID NO: 32951 - DNA, 17 bp, Homo sapiens
  source 1..17: mol_type = genomic DNA
agtggtagaattctcgc

SEQ ID NO: 32952 - DNA, 18 bp, Homo sapiens
  source 1..18: mol_type = genomic DNA
agtggtagaattctcgcc

SEQ ID NO: 32953 - DNA, 19 bp, Homo sapiens
  source 1..19: mol_type = genomic DNA
agtggtagaattctcgcct

SEQ ID NO: 32954 - DNA, 20 bp, Homo sapiens
  source 1..20: mol_type = genomic DNA
agtggtagaattctcgcctg

SEQ ID NO: 32955 - DNA, 21 bp, Homo sapiens
  source 1..21: mol_type = genomic DNA
agtggtagaattctcgcctgc

SEQ ID NO: 32956 - DNA, 22 bp, Homo sapiens
  source 1..22: mol_type = genomic DNA
agtggtagaattctcgcctgcc

SEQ ID NO: 32957 - DNA, 23 bp, Homo sapiens
  source 1..23: mol_type = genomic DNA
agtggtagaattctcgcctgcca

SEQ ID NO: 32958 - DNA, 24 bp, Homo sapiens
  source 1..24: mol_type = genomic DNA
agtggtagaattctcgcctgccac

SEQ ID NO: 32959 - DNA, 30 bp, Homo sapiens; identical to SEQ ID NO: 5546
  source 1..30: mol_type = genomic DNA

SEQ ID NO: 32960 - DNA, 34 bp, Homo sapiens; identical to SEQ ID NO: 5547
  source 1..34: mol_type = genomic DNA

SEQ ID NO: 32961 - DNA, 35 bp, Homo sapiens; identical to SEQ ID NO: 5548
  source 1..35: mol_type = genomic DNA

SEQ ID NO: 32962 - DNA, 37 bp, Homo sapiens; identical to SEQ ID NO: 5550
  source 1..37: mol_type = genomic DNA

SEQ ID NO: 32963 - DNA, 39 bp, Homo sapiens; identical to SEQ ID NO: 5552
  source 1..39: mol_type = genomic DNA

SEQ ID NO: 32964 - DNA, 17 bp, Homo sapiens
  source 1..17: mol_type = genomic DNA
agtggtagagcatttga

SEQ ID NO: 32965 - DNA, 18 bp, Homo sapiens
  source 1..18: mol_type = genomic DNA
agtggtagagcatttgac

SEQ ID NO: 32966 - DNA, 19 bp, Homo sapiens
  source 1..19: mol_type = genomic DNA
agtggtagagcatttgact

SEQ ID NO: 32967 - DNA, 20 bp, Homo sapiens
  source 1..20: mol_type = genomic DNA
agtggtagagcatttgactg

SEQ ID NO: 32968 - DNA, 21 bp, Homo sapiens
  source 1..21: mol_type = genomic DNA
agtggtagagcatttgactgc

SEQ ID NO: 32969 - DNA, 26 bp, Homo sapiens
  source 1..26: mol_type = genomic DNA
agtggtagagcatttgactgcagatc

SEQ ID NO: 32970 - DNA, 29 bp, Homo sapiens
  source 1..29: mol_type = genomic DNA
agtggtagagcatttgactgcagatcaag

SEQ ID NO: 32971 - DNA, 36 bp, Homo sapiens; identical to SEQ ID NO: 5568
  source 1..36: mol_type = genomic DNA

SEQ ID NO: 32972 - DNA, 18 bp, Homo sapiens
  source 1..18: mol_type = genomic DNA
agtggtagagcgcatgct

SEQ ID NO: 32973 - DNA, 17 bp, Homo sapiens
  source 1..17: mol_type = genomic DNA
agtggtagagcgcgtgc

SEQ ID NO: 32974 - DNA, 18 bp, Homo sapiens
  source 1..18: mol_type = genomic DNA
agtggtagagcgcgtgct

SEQ ID NO: 32975 - DNA, 19 bp, Homo sapiens
  source 1..19: mol_type = genomic DNA
agtggtatcatgcaagatt

SEQ ID NO: 32976 - DNA, 20 bp, Homo sapiens
  source 1..20: mol_type = genomic DNA
agtggtatcatgcaagattc

SEQ ID NO: 32977 - DNA, 19 bp, Homo sapiens
  source 1..19: mol_type = genomic DNA
agtggtctaaggcgctgga

SEQ ID NO: 32978 - DNA, 20 bp, Homo sapiens
  source 1..20: mol_type = genomic DNA
agtggttaaggcgttggact

SEQ ID NO: 32979 - DNA, 17 bp, Homo sapiens
  source 1..17: mol_type = genomic DNA
agtggttaggattcggc

SEQ ID NO: 32980 - DNA, 18 bp, Homo sapiens
  source 1..18: mol_type = genomic DNA
agtggttaggattcggcg

SEQ ID NO: 32981 - DNA, 19 bp, Homo sapiens
  source 1..19: mol_type = genomic DNA
agtggttaggattcggcgc

SEQ ID NO: 32982 - DNA, 20 bp, Homo sapiens
  source 1..20: mol_type = genomic DNA
agtggttaggattcggcgct

SEQ ID NO: 32983 - DNA, 21 bp, Homo sapiens
  source 1..21: mol_type = genomic DNA
agtggttaggattcggcgctc

SEQ ID NO: 32984 - DNA, 22 bp, Homo sapiens
  source 1..22: mol_type = genomic DNA
agtggttaggattcggcgctct

SEQ ID NO: 32985 - DNA, 24 bp, Homo sapiens
  source 1..24: mol_type = genomic DNA
agtggttaggattcggcgctctca

SEQ ID NO: 32986 - DNA, 26 bp, Homo sapiens
  source 1..26: mol_type = genomic DNA
agtggttaggattcggcgctctcacc

SEQ ID NO: 32987 - DNA, 29 bp, Homo sapiens
  source 1..29: mol_type = genomic DNA
agtggttaggattcggcgctctcaccgcc

SEQ ID NO: 32988 - DNA, 36 bp, Homo sapiens; identical to SEQ ID NO: 5616
  source 1..36: mol_type = genomic DNA

SEQ ID NO: 32989 - DNA, 38 bp, Homo sapiens; identical to SEQ ID NO: 5618
  source 1..38: mol_type = genomic DNA

SEQ ID NO: 32990 - DNA, 39 bp, Homo sapiens; identical to SEQ ID NO: 5619
  source 1..39: mol_type = genomic DNA

SEQ ID NO: 32991 - DNA, 41 bp, Homo sapiens; identical to SEQ ID NO: 5621
  source 1..41: mol_type = genomic DNA

SEQ ID NO: 32992 - DNA, 17 bp, Homo sapiens
  source 1..17: mol_type = genomic DNA
agtggttagtactctgc

SEQ ID NO: 32993 - DNA, 18 bp, Homo sapiens
  source 1..18: mol_type = genomic DNA
agtggttagtactctgcg

SEQ ID NO: 32994 - DNA, 19 bp, Homo sapiens
  source 1..19: mol_type = genomic DNA
agtggttagtactctgcgt

SEQ ID NO: 32995 - DNA, 20 bp, Homo sapiens
  source 1..20: mol_type = genomic DNA
agtggttagtactctgcgtt

SEQ ID NO: 32996 - DNA, 21 bp, Homo sapiens
  source 1..21: mol_type = genomic DNA
agtggttagtactctgcgttg

SEQ ID NO: 32997 - DNA, 22 bp, Homo sapiens
  source 1..22: mol_type = genomic DNA
agtggttagtactctgcgttgt

SEQ ID NO: 32998 - DNA, 26 bp, Homo sapiens
  source 1..26: mol_type = genomic DNA
agtggttagtactctgcgttgtggcc

SEQ ID NO: 32999 - DNA, 35 bp, Homo sapiens; identical to SEQ ID NO: 5634
  source 1..35: mol_type = genomic DNA

SEQ ID NO: 33000 - DNA, 36 bp, Homo sapiens; identical to SEQ ID NO: 5635
  source 1..36: mol_type = genomic DNA

SEQ ID NO: 33001 - DNA, 18 bp, Homo sapiens
  source 1..18: mol_type = genomic DNA
agtggttatcacgtctgc

SEQ ID NO: 33002 - DNA, 19 bp, Homo sapiens
  source 1..19: mol_type = genomic DNA
agtggttatcacgtctgct

SEQ ID NO: 33003 - DNA, 20 bp, Homo sapiens
  source 1..20: mol_type = genomic DNA
agtggttatcacgtctgctt

SEQ ID NO: 33004 - DNA, 17 bp, Homo sapiens
  source 1..17: mol_type = genomic DNA
agtggttatcacgttcg

SEQ ID NO: 33005 - DNA, 18 bp, Homo sapiens
  source 1..18: mol_type = genomic DNA
agtggttatcacgttcgc

SEQ ID NO: 33006 - DNA, 19 bp, Homo sapiens
  source 1..19: mol_type = genomic DNA
agtggttatcacgttcgcc

SEQ ID NO: 33007 - DNA, 20 bp, Homo sapiens
  source 1..20: mol_type = genomic DNA
agtggttatcacgttcgcct

SEQ ID NO: 33008 - DNA, 25 bp, Homo sapiens
  source 1..25: mol_type = genomic DNA
agtgtagtggtcatcacgttcgcct

SEQ ID NO: 33009 - DNA, 25 bp, Homo sapiens
  source 1..25: mol_type = genomic DNA
agtgtagtggttatcacgttcgcct

SEQ ID NO: 33010 - DNA, 44 bp, Homo sapiens
  source 1..44: mol_type = genomic DNA
agtgtagtggttatcacgttcgcctcacacgcgaaaggtccccg

SEQ ID NO: 33011 - DNA, 33 bp, Homo sapiens; identical to SEQ ID NO: 5677
  source 1..33: mol_type = genomic DNA

SEQ ID NO: 33012 - DNA, 34 bp, Homo sapiens; identical to SEQ ID NO: 5678
  source 1..34: mol_type = genomic DNA

SEQ ID NO: 33013 - DNA, 35 bp, Homo sapiens; identical to SEQ ID NO: 5679
  source 1..35: mol_type = genomic DNA

SEQ ID NO: 33014 - DNA, 21 bp, Homo sapiens
  source 1..21: mol_type = genomic DNA
agttaaagactttttctctga

SEQ ID NO: 33015 - DNA, 22 bp, Homo sapiens
  source 1..22: mol_type = genomic DNA
agttaaagactttttctctgac

SEQ ID NO: 33016 - DNA, 23 bp, Homo sapiens
  source 1..23: mol_type = genomic DNA
agttaaagactttttctctgacc

SEQ ID NO: 33017 - DNA, 24 bp, Homo sapiens
  source 1..24: mol_type = genomic DNA
agttaaagactttttctctgacca

SEQ ID NO: 33018 - DNA, 20 bp, Homo sapiens
  source 1..20: mol_type = genomic DNA
agttaaagattaagagaacc

SEQ ID NO: 33019 - DNA, 39 bp, Homo sapiens; identical to SEQ ID NO: 5705
  source 1..39: mol_type = genomic DNA

SEQ ID NO: 33020 - DNA, 22 bp, Homo sapiens
  source 1..22: mol_type = genomic DNA
agttcaaatctcgctggggcct

SEQ ID NO: 33021 - DNA, 23 bp, Homo sapiens
  source 1..23: mol_type = genomic DNA
agttcaaatctcgctggggcctc

SEQ ID NO: 33022 - DNA, 24 bp, Homo sapiens
  source 1..24: mol_type = genomic DNA
agttcaaatctcgctggggcctcc

SEQ ID NO: 33023 - DNA, 22 bp, Homo sapiens
  source 1..22: mol_type = genomic DNA
agttcaaatctcggtggaacct

SEQ ID NO: 33024 - DNA, 23 bp, Homo sapiens
  source 1..23: mol_type = genomic DNA
agttcaaatctcggtggaacctc

SEQ ID NO: 33025 - DNA, 24 bp, Homo sapiens
  source 1..24: mol_type = genomic DNA
agttcaaatctcggtggaacctcc

SEQ ID NO: 33026 - DNA, 19 bp, Homo sapiens
  source 1..19: mol_type = genomic DNA
agttcaaatctcggtggga

SEQ ID NO: 33027 - DNA, 22 bp, Homo sapiens
  source 1..22: mol_type = genomic DNA
agttcaaatctcggtgggacct

SEQ ID NO: 33028 - DNA, 23 bp, Homo sapiens
  source 1..23: mol_type = genomic DNA
agttcaaatctcggtgggacctc

SEQ ID NO: 33029 - DNA, 24 bp, Homo sapiens
  source 1..24: mol_type = genomic DNA
agttcaaatctcggtgggacctcc

SEQ ID NO: 33030 - DNA, 24 bp, Homo sapiens
  source 1..24: mol_type = genomic DNA
agttcgaacctcagagggggcacc

SEQ ID NO: 33031 - DNA, 23 bp, Homo sapiens
  source 1..23: mol_type = genomic DNA
agttcgaatctcggtgggacctc

SEQ ID NO: 33032 - DNA, 22 bp, Homo sapiens
  source 1..22: mol_type = genomic DNA
agttcgagcctcacacggggca

SEQ ID NO: 33033 - DNA, 23 bp, Homo sapiens
  source 1..23: mol_type = genomic DNA
agttcgagcctcacacggggcac

SEQ ID NO: 33034 - DNA, 24 bp, Homo sapiens
  source 1..24: mol_type = genomic DNA
agttcgagcctcacacggggcacc

SEQ ID NO: 33035 - DNA, 24 bp, Homo sapiens
  source 1..24: mol_type = genomic DNA
agttcgagcctcacctggagcacc

SEQ ID NO: 33036 - DNA, 22 bp, Homo sapiens
  source 1..22: mol_type = genomic DNA
agttcgagcctcagagagggca

SEQ ID NO: 33037 - DNA, 24 bp, Homo sapiens
  source 1..24: mol_type = genomic DNA
agttcgatcctcacacggggcacc

SEQ ID NO: 33038 - DNA, 22 bp, Homo sapiens
  source 1..22: mol_type = genomic DNA
agttcgatcctcgctggggcct

SEQ ID NO: 33039 - DNA, 16 bp, Homo sapiens
  source 1..16: mol_type = genomic DNA
agttctggtctccaat

SEQ ID NO: 33040 - DNA, 16 bp, Homo sapiens
  source 1..16: mol_type = genomic DNA
agttctggtctccgga

SEQ ID NO: 33041 - DNA, 17 bp, Homo sapiens
  source 1..17: mol_type = genomic DNA
agttctggtctccggat

SEQ ID NO: 33042 - DNA, 20 bp, Homo sapiens
  source 1..20: mol_type = genomic DNA
agttctggtctccggatgga

SEQ ID NO: 33043 - DNA, 16 bp, Homo sapiens
  source 1..16: mol_type = genomic DNA
agttgacccgggttcg

SEQ ID NO: 33044 - DNA, 25 bp, Homo sapiens
  source 1..25: mol_type = genomic DNA
agttgacccgggttcgattcccggc

SEQ ID NO: 33045 - DNA, 34 bp, Homo sapiens; identical to SEQ ID NO: 5772
  source 1..34: mol_type = genomic DNA

SEQ ID NO: 33046 - DNA, 21 bp, Homo sapiens
  source 1..21: mol_type = genomic DNA
agttgcaatacttaatttctg

SEQ ID NO: 33047 - DNA, 24 bp, Homo sapiens
  source 1..24: mol_type = genomic DNA
agttgcaatacttaatttctgcca

SEQ ID NO: 33048 - DNA, 22 bp, Homo sapiens
  source 1..22: mol_type = genomic DNA
agttgggagagcgttagactga

SEQ ID NO: 33049 - DNA, 23 bp, Homo sapiens
  source 1..23: mol_type = genomic DNA
agttgggagagcgttagactgaa

SEQ ID NO: 33050 - DNA, 31 bp, Homo sapiens
  source 1..31: mol_type = genomic DNA
agttgggagagcgttagactgaagatctaaa

SEQ ID NO: 33051 - DNA, 19 bp, Homo sapiens
  source 1..19: mol_type = genomic DNA
agttggtagagcggaggac

SEQ ID NO: 33052 - DNA, 33 bp, Homo sapiens
  source 1..33: mol_type = genomic DNA
agtttccgtagtgtagtggttatcacgttcgcc

SEQ ID NO: 33053 - DNA, 34 bp, Homo sapiens; identical to SEQ ID NO: 5860
  source 1..34: mol_type = genomic DNA

SEQ ID NO: 33054 - DNA, 17 bp, Homo sapiens
  source 1..17: mol_type = genomic DNA
ataacccagaggtcgat

SEQ ID NO: 33055 - DNA, 18 bp, Homo sapiens
  source 1..18: mol_type = genomic DNA
ataacccagaggtcgatg

SEQ ID NO: 33056 - DNA, 20 bp, Homo sapiens
  source 1..20: mol_type = genomic DNA
ataacccagaggtcgatgga

SEQ ID NO: 33057 - DNA, 21 bp, Homo sapiens
  source 1..21: mol_type = genomic DNA
ataacccagaggtcgatggat

SEQ ID NO: 33058 - DNA, 22 bp, Homo sapiens
  source 1..22: mol_type = genomic DNA
ataacccagaggtcgatggatc

SEQ ID NO: 33059 - DNA, 23 bp, Homo sapiens
  source 1..23: mol_type = genomic DNA
ataacccagaggtcgatggatcg

SEQ ID NO: 33060 - DNA, 22 bp, Homo sapiens
  source 1..22: mol_type = genomic DNA
ataacgccaaggtcgcgggttc

SEQ ID NO: 33061 - DNA, 41 bp, Homo sapiens; identical to SEQ ID NO: 5913
  source 1..41: mol_type = genomic DNA

SEQ ID NO: 33062 - DNA, 29 bp, Homo sapiens
  source 1..29: mol_type = genomic DNA
ataactttgtcaaagttaaattataggct

SEQ ID NO: 33063 - DNA, 32 bp, Homo sapiens
  source 1..32: mol_type = genomic DNA
ataaggcatcagcctccggagctggggattgt

SEQ ID NO: 33064 - DNA, 32 bp, Homo sapiens; identical to SEQ ID NO: 5956
  source 1..32: mol_type = genomic DNA

SEQ ID NO: 33065 - DNA, 20 bp, Homo sapiens
  source 1..20: mol_type = genomic DNA
ataatctgaaggtcctgagt

SEQ ID NO: 33066 - DNA, 22 bp, Homo sapiens
  source 1..22: mol_type = genomic DNA
ataatctgaaggtcctgagttc

SEQ ID NO: 33067 - DNA, 40 bp, Homo sapiens; identical to SEQ ID NO: 5966
  source 1..40: mol_type = genomic DNA

SEQ ID NO: 33068 - DNA, 41 bp, Homo sapiens; identical to SEQ ID NO: 5967
  source 1..41: mol_type = genomic DNA

SEQ ID NO: 33069 - DNA, 40 bp, Homo sapiens; identical to SEQ ID NO: 5975
  source 1..40: mol_type = genomic DNA

SEQ ID NO: 33070 - DNA, 41 bp, Homo sapiens; identical to SEQ ID NO: 5976
  source 1..41: mol_type = genomic DNA

SEQ ID NO: 33071 - DNA, 40 bp, Homo sapiens; identical to SEQ ID NO: 5978
  source 1..40: mol_type = genomic DNA

SEQ ID NO: 33072 - DNA, 41 bp, Homo sapiens; identical to SEQ ID NO: 5979
  source 1..41: mol_type = genomic DNA

SEQ ID NO: 33073 - DNA, 16 bp, Homo sapiens
  source 1..16: mol_type = genomic DNA
ataatgccgaggttgt

SEQ ID NO: 33074 - DNA, 17 bp, Homo sapiens
  source 1..17: mol_type = genomic DNA
ataatgccgaggttgtg

SEQ ID NO: 33075 - DNA, 22 bp, Homo sapiens
  source 1..22: mol_type = genomic DNA
ataatgccgaggttgtgagttc

SEQ ID NO: 33076 - DNA, 41 bp, Homo sapiens; identical to SEQ ID NO: 5988
  source 1..41: mol_type = genomic DNA

SEQ ID NO: 33077 - DNA, 42 bp, Homo sapiens; identical to SEQ ID NO: 6000
  source 1..42: mol_type = genomic DNA

SEQ ID NO: 33078 - DNA, 43 bp, Homo sapiens; identical to SEQ ID NO: 6001
  source 1..43: mol_type = genomic DNA

SEQ ID NO: 33079 - DNA, 26 bp, Homo sapiens
  source 1..26: mol_type = genomic DNA
atacactgaaaatgtttagacgggct

SEQ ID NO: 33080 - DNA, 27 bp, Homo sapiens
  source 1..27: mol_type = genomic DNA
atacactgaaaatgtttagacgggctc

SEQ ID NO: 33081 - DNA, 39 bp, Homo sapiens; identical to SEQ ID NO: 6035
  source 1..39: mol_type = genomic DNA

SEQ ID NO: 33082 - DNA, 40 bp, Homo sapiens; identical to SEQ ID NO: 6036
  source 1..40: mol_type = genomic DNA

SEQ ID NO: 33083 - DNA, 20 bp, Homo sapiens
  source 1..20: mol_type = genomic DNA
atacccttcccgtactacca

SEQ ID NO: 33084 - DNA, 16 bp, Homo sapiens
  source 1..16: mol_type = genomic DNA
atacttaatttctgcc

SEQ ID NO: 33085 - DNA, 17 bp, Homo sapiens
  source 1..17: mol_type = genomic DNA
atacttaatttctgcca

SEQ ID NO: 33086 - DNA, 38 bp, Homo sapiens; identical to SEQ ID NO: 6063
  source 1..38: mol_type = genomic DNA

SEQ ID NO: 33087 - DNA, 17 bp, Homo sapiens
  source 1..17: mol_type = genomic DNA
atagctcagtcggtaga

SEQ ID NO: 33088 - DNA, 18 bp, Homo sapiens
  source 1..18: mol_type = genomic DNA
atagctcagtcggtagag

SEQ ID NO: 33089 - DNA, 22 bp, Homo sapiens
  source 1..22: mol_type = genomic DNA
atagctcagtcggtagagcatc

SEQ ID NO: 33090 - DNA, 26 bp, Homo sapiens
  source 1..26: mol_type = genomic DNA
atagctcagtcggtagagcatcagac

SEQ ID NO: 33091 - DNA, 27 bp, Homo sapiens
  source 1..27: mol_type = genomic DNA
atagctcagtcggtagagcatcagact

SEQ ID NO: 33092 - DNA, 29 bp, Homo sapiens
  source 1..29: mol_type = genomic DNA
atagctcagtcggtagagcatcagacttt

SEQ ID NO: 33093 - DNA, 29 bp, Homo sapiens
  source 1..29: mol_type = genomic DNA
ataggagcttaaacccccttatttctacc

SEQ ID NO: 33094 - DNA, 30 bp, Homo sapiens; identical to SEQ ID NO: 6115
  source 1..30: mol_type = genomic DNA

SEQ ID NO: 33095 - DNA, 38 bp, Homo sapiens
  source 1..38: mol_type = genomic DNA
ataggtggcacggagaattttggattctcagggatggg

SEQ ID NO: 33096 - DNA, 16 bp, Homo sapiens
  source 1..16: mol_type = genomic DNA
ataggtggttcagtgg

SEQ ID NO: 33097 - DNA, 19 bp, Homo sapiens
  source 1..19: mol_type = genomic DNA
atagtggttagtactctgc

SEQ ID NO: 33098 - DNA, 20 bp, Homo sapiens
  source 1..20: mol_type = genomic DNA
atagtggttagtactctgcg

SEQ ID NO: 33099 - DNA, 21 bp, Homo sapiens
  source 1..21: mol_type = genomic DNA
atagtggttagtactctgcgt

SEQ ID NO: 33100 - DNA, 22 bp, Homo sapiens
  source 1..22: mol_type = genomic DNA
atagtggttagtactctgcgtt

SEQ ID NO: 33101 - DNA, 23 bp, Homo sapiens
  source 1..23: mol_type = genomic DNA
atagtggttagtactctgcgttg

SEQ ID NO: 33102 - DNA, 24 bp, Homo sapiens
  source 1..24: mol_type = genomic DNA
atagtggttagtactctgcgttgt

SEQ ID NO: 33103 - DNA, 28 bp, Homo sapiens
  source 1..28: mol_type = genomic DNA
atagtggttagtactctgcgttgtggcc

SEQ ID NO: 33104 - DNA, 29 bp, Homo sapiens
  source 1..29: mol_type = genomic DNA
atagtggttagtactctgcgttgtggccg

SEQ ID NO: 33105 - DNA, 37 bp, Homo sapiens
  source 1..37: mol_type = genomic DNA
atagtggttagtactctgcgttgtggccgcagcaacc

SEQ ID NO: 33106 - DNA, 38 bp, Homo sapiens; identical to SEQ ID NO: 6160
  source 1..38: mol_type = genomic DNA

SEQ ID NO: 33107 - DNA, 26 bp, Homo sapiens
  source 1..26: mol_type = genomic DNA
atagtgtagtggttatcacgtctgct

SEQ ID NO: 33108 - DNA, 27 bp, Homo sapiens
  source 1..27: mol_type = genomic DNA
atagtgtagtggttatcacgtctgctt

SEQ ID NO: 33109 - DNA, 28 bp, Homo sapiens
  source 1..28: mol_type = genomic DNA
atagtgtagtggttatcacgtctgcttt

SEQ ID NO: 33110 - DNA, 24 bp, Homo sapiens
  source 1..24: mol_type = genomic DNA
atatcattggtcgtggttgtagtc

SEQ ID NO: 33111 - DNA, 27 bp, Homo sapiens
  source 1..27: mol_type = genomic DNA
atatcattggtcgtggttgtagtccgt

SEQ ID NO: 33112 - DNA, 30 bp, Homo sapiens; identical to SEQ ID NO: 6208
  source 1..30: mol_type = genomic DNA

SEQ ID NO: 33113 - DNA, 31 bp, Homo sapiens; identical to SEQ ID NO: 6209
  source 1..31: mol_type = genomic DNA

SEQ ID NO: 33114 - DNA, 32 bp, Homo sapiens; identical to SEQ ID NO: 6210
  source 1..32: mol_type = genomic DNA

SEQ ID NO: 33115 - DNA, 33 bp, Homo sapiens; identical to SEQ ID NO: 6211
  source 1..33: mol_type = genomic DNA

SEQ ID NO: 33116 - DNA, 34 bp, Homo sapiens; identical to SEQ ID NO: 6212
  source 1..34: mol_type = genomic DNA

SEQ ID NO: 33117 - DNA, 35 bp, Homo sapiens; identical to SEQ ID NO: 6213
  source 1..35: mol_type = genomic DNA

SEQ ID NO: 33118 - DNA, 36 bp, Homo sapiens; identical to SEQ ID NO: 6214
  source 1..36: mol_type = genomic DNA

SEQ ID NO: 33119 - DNA, 38 bp, Homo sapiens; identical to SEQ ID NO: 6216
  source 1..38: mol_type = genomic DNA

SEQ ID NO: 33120 - DNA, 39 bp, Homo sapiens; identical to SEQ ID NO: 6217
  source 1..39: mol_type = genomic DNA

SEQ ID NO: 33121 - DNA, 22 bp, Homo sapiens
  source 1..22: mol_type = genomic DNA
atatggtctagcggttaggatt

SEQ ID NO: 33122 - DNA, 24 bp, Homo sapiens
  source 1..24: mol_type = genomic DNA
atatggtctagcggttaggattcc

SEQ ID NO: 33123 - DNA, 25 bp, Homo sapiens
  source 1..25: mol_type = genomic DNA
atatggtctagcggttaggattcct

SEQ ID NO: 33124 - DNA, 28 bp, Homo sapiens
  source 1..28: mol_type = genomic DNA
atatggtctagcggttaggattcctggt

SEQ ID NO: 33125 - DNA, 29 bp, Homo sapiens
  source 1..29: mol_type = genomic DNA
atatggtctagcggttaggattcctggtt

SEQ ID NO: 33126 - DNA, 31 bp, Homo sapiens; identical to SEQ ID NO: 6227
  source 1..31: mol_type = genomic DNA

SEQ ID NO: 33127 - DNA, 32 bp, Homo sapiens; identical to SEQ ID NO: 6228
  source 1..32: mol_type = genomic DNA

SEQ ID NO: 33128 - DNA, 16 bp, Homo sapiens
  source 1..16: mol_type = genomic DNA
atatgtccgcgtgggt

SEQ ID NO: 33129 - DNA, 17 bp, Homo sapiens
  source 1..17: mol_type = genomic DNA
atatgtccgcgtgggtt

SEQ ID NO: 33130 - DNA, 36 bp, Homo sapiens; identical to SEQ ID NO: 6259
  source 1..36: mol_type = genomic DNA

SEQ ID NO: 33131 - DNA, 37 bp, Homo sapiens; identical to SEQ ID NO: 6260
  source 1..37: mol_type = genomic DNA

SEQ ID NO: 33132 - DNA, 38 bp, Homo sapiens; identical to SEQ ID NO: 6261
  source 1..38: mol_type = genomic DNA

SEQ ID NO: 33133 - DNA, 17 bp, Homo sapiens
  source 1..17: mol_type = genomic DNA
atcaccccataaacacc

SEQ ID NO: 33134 - DNA, 18 bp, Homo sapiens
  source 1..18: mol_type = genomic DNA
atcaccccataaacacca

SEQ ID NO: 33135 - DNA, 16 bp, Homo sapiens
  source 1..16: mol_type = genomic DNA
atcacgtcggggtcac

SEQ ID NO: 33136 - DNA, 17 bp, Homo sapiens
  source 1..17: mol_type = genomic DNA
atcacgtcggggtcacc

SEQ ID NO: 33137 - DNA, 18 bp, Homo sapiens
  source 1..18: mol_type = genomic DNA
atcacgtcggggtcacca

SEQ ID NO: 33138 - DNA, 19 bp, Homo sapiens
  source 1..19: mol_type = genomic DNA
atcacgtctgctttacacg

SEQ ID NO: 33139 - DNA, 19 bp, Homo sapiens
  source 1..19: mol_type = genomic DNA
atcacgttcgcctcacacg

SEQ ID NO: 33140 - DNA, 37 bp, Homo sapiens; identical to SEQ ID NO: 6288
  source 1..37: mol_type = genomic DNA

SEQ ID NO: 33141 - DNA, 38 bp, Homo sapiens; identical to SEQ ID NO: 6289
  source 1..38: mol_type = genomic DNA

SEQ ID NO: 33142 - DNA, 39 bp, Homo sapiens; identical to SEQ ID NO: 6290
  source 1..39: mol_type = genomic DNA

SEQ ID NO: 33143 - DNA, 38 bp, Homo sapiens; identical to SEQ ID NO: 6301
  source 1..38: mol_type = genomic DNA

SEQ ID NO: 33144 - DNA, 39 bp, Homo sapiens; identical to SEQ ID NO: 6302
  source 1..39: mol_type = genomic DNA

SEQ ID NO: 33145 - DNA, 36 bp, Homo sapiens
  source 1..36: mol_type = genomic DNA
atcagaagattgagggttcgaatccctccgtggtta

SEQ ID NO: 33146 - DNA, 38 bp, Homo sapiens; identical to SEQ ID NO: 6306
  source 1..38: mol_type = genomic DNA

SEQ ID NO: 33147 - DNA, 36 bp, Homo sapiens
  source 1..36: mol_type = genomic DNA
atcagaagattgagggttcgaatcccttcgtggtta

SEQ ID NO: 33148 - DNA, 37 bp, Homo sapiens; identical to SEQ ID NO: 6309
  source 1..37: mol_type = genomic DNA

SEQ ID NO: 33149 - DNA, 38 bp, Homo sapiens; identical to SEQ ID NO: 6310
  source 1..38: mol_type = genomic DNA

SEQ ID NO: 33150 - DNA, 39 bp, Homo sapiens; identical to SEQ ID NO: 6311
  source 1..39: mol_type = genomic DNA

SEQ ID NO: 33151 - DNA, 37 bp, Homo sapiens; identical to SEQ ID NO: 6316
  source 1..37: mol_type = genomic DNA

SEQ ID NO: 33152 - DNA, 38 bp, Homo sapiens; identical to SEQ ID NO: 6317
  source 1..38: mol_type = genomic DNA

SEQ ID NO: 33153 - DNA, 39 bp, Homo sapiens; identical to SEQ ID NO: 6318
  source 1..39: mol_type = genomic DNA

SEQ ID NO: 33154 - DNA, 19 bp, Homo sapiens
  source 1..19: mol_type = genomic DNA
atcagaagattgcaggttc

SEQ ID NO: 33155 - DNA, 37 bp, Homo sapiens; identical to SEQ ID NO: 6325
  source 1..37: mol_type = genomic DNA

SEQ ID NO: 33156 - DNA, 38 bp, Homo sapiens; identical to SEQ ID NO: 6326
  source 1..38: mol_type = genomic DNA

SEQ ID NO: 33157 - DNA, 39 bp, Homo sapiens; identical to SEQ ID NO: 6327
  source 1..39: mol_type = genomic DNA

SEQ ID NO: 33158 - DNA, 35 bp, Homo sapiens; identical to SEQ ID NO: 6333
  source 1..35: mol_type = genomic DNA

SEQ ID NO: 33159 - DNA, 37 bp, Homo sapiens; identical to SEQ ID NO: 6335
  source 1..37: mol_type = genomic DNA

SEQ ID NO: 33160 - DNA, 38 bp, Homo sapiens; identical to SEQ ID NO: 6336
  source 1..38: mol_type = genomic DNA

SEQ ID NO: 33161 - DNA, 36 bp, Homo sapiens; identical to SEQ ID NO: 6344
  source 1..36: mol_type = genomic DNA

SEQ ID NO: 33162 - DNA, 38 bp, Homo sapiens; identical to SEQ ID NO: 6346
  source 1..38: mol_type = genomic DNA

SEQ ID NO: 33163 - DNA, 22 bp, Homo sapiens
  source 1..22: mol_type = genomic DNA
atcattggtcgtggttgtagtc

SEQ ID NO: 33164 - DNA, 26 bp, Homo sapiens
  source 1..26: mol_type = genomic DNA
atcattggtcgtggttgtagtccgtg

SEQ ID NO: 33165 - DNA, 27 bp, Homo sapiens
  source 1..27: mol_type = genomic DNA
atcattggtcgtggttgtagtccgtgc

SEQ ID NO: 33166 - DNA, 30 bp, Homo sapiens; identical to SEQ ID NO: 6404
  source 1..30: mol_type = genomic DNA

SEQ ID NO: 33167 - DNA, 31 bp, Homo sapiens; identical to SEQ ID NO: 6405
  source 1..31: mol_type = genomic DNA

SEQ ID NO: 33168 - DNA, 32 bp, Homo sapiens; identical to SEQ ID NO: 6406
  source 1..32: mol_type = genomic DNA

SEQ ID NO: 33169 - DNA, 33 bp, Homo sapiens; identical to SEQ ID NO: 6407
  source 1..33: mol_type = genomic DNA

SEQ ID NO: 33170 - DNA, 34 bp, Homo sapiens; identical to SEQ ID NO: 6408
  source 1..34: mol_type = genomic DNA

SEQ ID NO: 33171 - DNA, 36 bp, Homo sapiens; identical to SEQ ID NO: 6410
  source 1..36: mol_type = genomic DNA

SEQ ID NO: 33172 - DNA, 37 bp, Homo sapiens; identical to SEQ ID NO: 6411
  source 1..37: mol_type = genomic DNA

SEQ ID NO: 33173 - DNA, 47 bp, Homo sapiens
  source 1..47: mol_type = genomic DNA
atccaatggggtttccccgcacaggttcgaatcctgttcgtgacgcc

SEQ ID NO: 33174 - DNA, 38 bp, Homo sapiens; identical to SEQ ID NO: 6419
  source 1..38: mol_type = genomic DNA

SEQ ID NO: 33175 - DNA, 39 bp, Homo sapiens; identical to SEQ ID NO: 6420
  source 1..39: mol_type = genomic DNA

SEQ ID NO: 33176 - DNA, 18 bp, Homo sapiens
  source 1..18: mol_type = genomic DNA
atccagcgatccgagttc

SEQ ID NO: 33177 - DNA, 19 bp, Homo sapiens
  source 1..19: mol_type = genomic DNA
atccagcgatccgagttca

SEQ ID NO: 33178 - DNA, 36 bp, Homo sapiens; identical to SEQ ID NO: 6429
  source 1..36: mol_type = genomic DNA

SEQ ID NO: 33179 - DNA, 21 bp, Homo sapiens
  source 1..21: mol_type = genomic DNA
atccagcgatccgagttcgag

SEQ ID NO: 33180 - DNA, 16 bp, Homo sapiens
  source 1..16: mol_type = genomic DNA
atccaggtgccccctc

SEQ ID NO: 33181 - DNA, 45 bp, Homo sapiens
  source 1..45: mol_type = genomic DNA
atccattggggtttccccgcgcaggttcgaatcctgccgactacg

SEQ ID NO: 33182 - DNA, 46 bp, Homo sapiens; identical to SEQ ID NO: 6454
  source 1..46: mol_type = genomic DNA

SEQ ID NO: 33183 - DNA, 47 bp, Homo sapiens; identical to SEQ ID NO: 6455
  source 1..47: mol_type = genomic DNA

SEQ ID NO: 33184 - DNA, 47 bp, Homo sapiens; identical to SEQ ID NO: 6484
  source 1..47: mol_type = genomic DNA

SEQ ID NO: 33185 - DNA, 16 bp, Homo sapiens
  source 1..16: mol_type = genomic DNA
atcccaccactgccac

SEQ ID NO: 33186 - DNA, 17 bp, Homo sapiens
  source 1..17: mol_type = genomic DNA
atcccaccactgccacc

SEQ ID NO: 33187 - DNA, 18 bp, Homo sapiens
  source 1..18: mol_type = genomic DNA
atcccaccactgccacca

SEQ ID NO: 33188 - DNA, 16 bp, Homo sapiens
  source 1..16: mol_type = genomic DNA
atcccaccagagtcgc

SEQ ID NO: 33189 - DNA, 17 bp, Homo sapiens
  source 1..17: mol_type = genomic DNA
atcccaccagagtcgcc

SEQ ID NO: 33190 - DNA, 18 bp, Homo sapiens
  source 1..18: mol_type = genomic DNA
atcccacccagggacgcc

SEQ ID NO: 33191 - DNA, 17 bp, Homo sapiens
  source 1..17: mol_type = genomic DNA
atcccaccctcgtcgcc

SEQ ID NO: 33192 - DNA, 16 bp, Homo sapiens
  source 1..16: mol_type = genomic DNA
atcccaccgctgccac

SEQ ID NO: 33193 - DNA, 17 bp, Homo sapiens
  source 1..17: mol_type = genomic DNA
atcccaccgctgccacc

SEQ ID NO: 33194 - DNA, 18 bp, Homo sapiens
  source 1..18: mol_type = genomic DNA
atcccaccgctgccacca

SEQ ID NO: 33195 - DNA, 16 bp, Homo sapiens
  source 1..16: mol_type = genomic DNA
atcccaccttcgtcgc

SEQ ID NO: 33196 - DNA, 17 bp, Homo sapiens
  source 1..17: mol_type = genomic DNA
atcccaccttcgtcgcc

SEQ ID NO: 33197 - DNA, 16 bp, Homo sapiens
  source 1..16: mol_type = genomic DNA
atcccactcctgacac

SEQ ID NO: 33198 - DNA, 17 bp, Homo sapiens
  source 1..17: mol_type = genomic DNA
atcccactcctgacacc

SEQ ID NO: 33199 - DNA, 18 bp, Homo sapiens
  source 1..18: mol_type = genomic DNA
atcccactcctgacacca

SEQ ID NO: 33200 - DNA, 16 bp, Homo sapiens
  source 1..16: mol_type = genomic DNA
atcccacttctgacac

SEQ ID NO: 33201 - DNA, 17 bp, Homo sapiens
  source 1..17: mol_type = genomic DNA
atcccacttctgacacc

SEQ ID NO: 33202 - DNA, 18 bp, Homo sapiens
  source 1..18: mol_type = genomic DNA
atcccacttctgacacca

SEQ ID NO: 33203 - DNA, 16 bp, Homo sapiens
  source 1..16: mol_type = genomic DNA
atcccagcggggcctc

SEQ ID NO: 33204 - DNA, 17 bp, Homo sapiens
  source 1..17: mol_type = genomic DNA
atcccagcggggcctcc

SEQ ID NO: 33205 - DNA, 16 bp, Homo sapiens
  source 1..16: mol_type = genomic DNA
atcccagcggtgcctc

SEQ ID NO: 33206 - DNA, 17 bp, Homo sapiens
  source 1..17: mol_type = genomic DNA
atcccagcggtgcctcc

SEQ ID NO: 33207 - DNA, 18 bp, Homo sapiens
  source 1..18: mol_type = genomic DNA
atcccagcggtgcctcca

SEQ ID NO: 33208 - DNA, 38 bp, Homo sapiens; identical to SEQ ID NO: 6513
  source 1..38: mol_type = genomic DNA

SEQ ID NO: 33209 - DNA, 16 bp, Homo sapiens
  source 1..16: mol_type = genomic DNA
atcccagtagagcctc

SEQ ID NO: 33210 - DNA, 17 bp, Homo sapiens
  source 1..17: mol_type = genomic DNA
atcccagtagagcctcc

SEQ ID NO: 33211 - DNA, 16 bp, Homo sapiens
  source 1..16: mol_type = genomic DNA
atcccatcctcgtcgc

SEQ ID NO: 33212 - DNA, 17 bp, Homo sapiens
  source 1..17: mol_type = genomic DNA
atcccatcctcgtcgcc

SEQ ID NO: 33213 - DNA, 18 bp, Homo sapiens
  source 1..18: mol_type = genomic DNA
atcccatcctcgtcgcca

SEQ ID NO: 33214 - DNA, 18 bp, Homo sapiens
  source 1..18: mol_type = genomic DNA
atccccagcatctccacc

SEQ ID NO: 33215 - DNA, 38 bp, Homo sapiens
  source 1..38: mol_type = genomic DNA
atccccgcctgtcacgcgggagaccggggttcgattcc

SEQ ID NO: 33216 - DNA, 16 bp, Homo sapiens
  source 1..16: mol_type = genomic DNA
atccccggcacctcca

SEQ ID NO: 33217 - DNA, 17 bp, Homo sapiens
  source 1..17: mol_type = genomic DNA
atccccggcacctccac

SEQ ID NO: 33218 - DNA, 18 bp, Homo sapiens
  source 1..18: mol_type = genomic DNA
atccccggcacctccacc

SEQ ID NO: 33219 - DNA, 19 bp, Homo sapiens
  source 1..19: mol_type = genomic DNA
atccccggcacctccacca

SEQ ID NO: 33220 - DNA, 17 bp, Homo sapiens
  source 1..17: mol_type = genomic DNA
atccccggcatctccac

SEQ ID NO: 33221 - DNA, 18 bp, Homo sapiens
  source 1..18: mol_type = genomic DNA
atccccggcatctccacc

SEQ ID NO: 33222 - DNA, 19 bp, Homo sapiens
  source 1..19: mol_type = genomic DNA
atccccggcatctccacca

SEQ ID NO: 33223 - DNA, 16 bp, Homo sapiens
  source 1..16: mol_type = genomic DNA
atccccgtacgggcca

SEQ ID NO: 33224 - DNA, 17 bp, Homo sapiens
  source 1..17: mol_type = genomic DNA
atccccgtacgggccac

SEQ ID NO: 33225 - DNA, 18 bp, Homo sapiens
  source 1..18: mol_type = genomic DNA
atccccgtacgggccacc

SEQ ID NO: 33226 - DNA, 16 bp, Homo sapiens
  source 1..16: mol_type = genomic DNA
atcccggacgagcccc

SEQ ID NO: 33227 - DNA, 17 bp, Homo sapiens
  source 1..17: mol_type = genomic DNA
atcccggacgagccccc

SEQ ID NO: 33228 - DNA, 18 bp, Homo sapiens
  source 1..18: mol_type = genomic DNA
atcccggacgagccccca

SEQ ID NO: 33229 - DNA, 16 bp, Homo sapiens
  source 1..16: mol_type = genomic DNA
atcccgggcggaaaca

SEQ ID NO: 33230 - DNA, 17 bp, Homo sapiens
  source 1..17: mol_type = genomic DNA
atcccgggcggaaacac

SEQ ID NO: 33231 - DNA, 18 bp, Homo sapiens
  source 1..18: mol_type = genomic DNA
atcccgggcggaaacacc

SEQ ID NO: 33232 - DNA, 16 bp, Homo sapiens
  source 1..16: mol_type = genomic DNA
atcccgggtttcggca

SEQ ID NO: 33233 - DNA, 17 bp, Homo sapiens
  source 1..17: mol_type = genomic DNA
atcccgggtttcggcac

SEQ ID NO: 33234 - DNA, 18 bp, Homo sapiens
  source 1..18: mol_type = genomic DNA
atcccgggtttcggcacc

SEQ ID NO: 33235 - DNA, 19 bp, Homo sapiens
  source 1..19: mol_type = genomic DNA
atcccgggtttcggcacca

SEQ ID NO: 33236 - DNA, 33 bp, Homo sapiens
  source 1..33: mol_type = genomic DNA
atccctggtggtctagtggttaggattcggcgc

SEQ ID NO: 33237 - DNA, 34 bp, Homo sapiens; identical to SEQ ID NO: 6546
  source 1..34: mol_type = genomic DNA

SEQ ID NO: 33238 - DNA, 16 bp, Homo sapiens
  source 1..16: mol_type = genomic DNA
atcccttcgtggttgc

SEQ ID NO: 33239 - DNA, 17 bp, Homo sapiens
  source 1..17: mol_type = genomic DNA
atcccttcgtggttgcc

SEQ ID NO: 33240 - DNA, 16 bp, Homo sapiens
  source 1..16: mol_type = genomic DNA
atccgagtcacggcac

SEQ ID NO: 33241 - DNA, 17 bp, Homo sapiens
  source 1..17: mol_type = genomic DNA
atccgagtcacggcacc

SEQ ID NO: 33242 - DNA, 18 bp, Homo sapiens
  source 1..18: mol_type = genomic DNA
atccgagtcacggcacca

SEQ ID NO: 33243 - DNA, 28 bp, Homo sapiens
  source 1..28: mol_type = genomic DNA
atccgagttcaaatctcggtggaacctc

SEQ ID NO: 33244 - DNA, 27 bp, Homo sapiens
  source 1..27: mol_type = genomic DNA
atccgagttcaaatctcggtgggacct

SEQ ID NO: 33245 - DNA, 28 bp, Homo sapiens
  source 1..28: mol_type = genomic DNA
atccgagttcaaatctcggtgggacctc

SEQ ID NO: 33246 - DNA, 16 bp, Homo sapiens
  source 1..16: mol_type = genomic DNA
atccggctcgaaggac

SEQ ID NO: 33247 - DNA, 17 bp, Homo sapiens
  source 1..17: mol_type = genomic DNA
atccggctcgaaggacc

SEQ ID NO: 33248 - DNA, 18 bp, Homo sapiens
  source 1..18: mol_type = genomic DNA
atccggctcgaaggacca

SEQ ID NO: 33249 - DNA, 16 bp, Homo sapiens
  source 1..16: mol_type = genomic DNA
atccggctcggaggac

SEQ ID NO: 33250 - DNA, 17 bp, Homo sapiens
  source 1..17: mol_type = genomic DNA
atccggctcggaggacc

SEQ ID NO: 33251 - DNA, 18 bp, Homo sapiens
  source 1..18: mol_type = genomic DNA
atccggctcggaggacca

SEQ ID NO: 33252 - DNA, 16 bp, Homo sapiens
  source 1..16: mol_type = genomic DNA
atccgggtgccccctc

SEQ ID NO: 33253 - DNA, 17 bp, Homo sapiens
  source 1..17: mol_type = genomic DNA
atccgggtgccccctcc

SEQ ID NO: 33254 - DNA, 18 bp, Homo sapiens
  source 1..18: mol_type = genomic DNA
atccgggtgccccctcca

SEQ ID NO: 33255 - DNA, 18 bp, Homo sapiens
  source 1..18: mol_type = genomic DNA
atcctcacacggggcacc

SEQ ID NO: 33256 - DNA, 19 bp, Homo sapiens
  source 1..19: mol_type = genomic DNA
atcctcacacggggcacca

SEQ ID NO: 33257 - DNA, 17 bp, Homo sapiens
  source 1..17: mol_type = genomic DNA
atcctcacctggagcac

SEQ ID NO: 33258 - DNA, 18 bp, Homo sapiens
  source 1..18: mol_type = genomic DNA
atcctcacctggagcacc

SEQ ID NO: 33259 - DNA, 17 bp, Homo sapiens
  source 1..17: mol_type = genomic DNA
atcctcgctggggcctc

SEQ ID NO: 33260 - DNA, 18 bp, Homo sapiens
  source 1..18: mol_type = genomic DNA
atcctcgctggggcctcc

SEQ ID NO: 33261 - DNA, 16 bp, Homo sapiens
  source 1..16: mol_type = genomic DNA
atcctgccgactacgc

SEQ ID NO: 33262 - DNA, 17 bp, Homo sapiens
  source 1..17: mol_type = genomic DNA
atcctgccgactacgcc

SEQ ID NO: 33263 - DNA, 18 bp, Homo sapiens
  source 1..18: mol_type = genomic DNA
atcctgccgactacgcca

SEQ ID NO: 33264 - DNA, 16 bp, Homo sapiens
  source 1..16: mol_type = genomic DNA
atcctgctcacagcgc

SEQ ID NO: 33265 - DNA, 17 bp, Homo sapiens
  source 1..17: mol_type = genomic DNA
atcctgctcacagcgcc

SEQ ID NO: 33266 - DNA, 18 bp, Homo sapiens
  source 1..18: mol_type = genomic DNA
atcctgctcacagcgcca

SEQ ID NO: 33267 - DNA, 29 bp, Homo sapiens
  source 1..29: mol_type = genomic DNA
atcctgggttcgaatcccagcggggcctc

SEQ ID NO: 33268 - DNA, 29 bp, Homo sapiens
  source 1..29: mol_type = genomic DNA
atcctgggttcgaatcccagcggtgcctc

SEQ ID NO: 33269 - DNA, 16 bp, Homo sapiens
  source 1..16: mol_type = genomic DNA
atcctgtcggctacgc

SEQ ID NO: 33270 - DNA, 17 bp, Homo sapiens
  source 1..17: mol_type = genomic DNA
atcctgtcggctacgcc

SEQ ID NO: 33271 - DNA, 18 bp, Homo sapiens
  source 1..18: mol_type = genomic DNA
atcctgtcggctacgcca

SEQ ID NO: 33272 - DNA, 16 bp, Homo sapiens
  source 1..16: mol_type = genomic DNA
atcctgttcgtgacgc

SEQ ID NO: 33273 - DNA, 17 bp, Homo sapiens
  source 1..17: mol_type = genomic DNA
atcctgttcgtgacgcc

SEQ ID NO: 33274 - DNA, 18 bp, Homo sapiens
  source 1..18: mol_type = genomic DNA
atcctgttcgtgacgcca

SEQ ID NO: 33275 - DNA, 19 bp, Homo sapiens
  source 1..19: mol_type = genomic DNA
atcgaaaccatcctctgct

SEQ ID NO: 33276 - DNA, 20 bp, Homo sapiens
  source 1..20: mol_type = genomic DNA
atcgaaaccatcctctgcta

SEQ ID NO: 33277 - DNA, 21 bp, Homo sapiens
  source 1..21: mol_type = genomic DNA
atcgaaaccatcctctgctac

SEQ ID NO: 33278 - DNA, 22 bp, Homo sapiens
  source 1..22: mol_type = genomic DNA
atcgaaaccatcctctgctacc

SEQ ID NO: 33279 - DNA, 23 bp, Homo sapiens
  source 1..23: mol_type = genomic DNA
atcgaaaccatcctctgctacca

SEQ ID NO: 33280 - DNA, 22 bp, Homo sapiens
  source 1..22: mol_type = genomic DNA
atcgatgcccgcatcctccacc

SEQ ID NO: 33281 - DNA, 24 bp, Homo sapiens
  source 1..24: mol_type = genomic DNA
atcgtatagtggttagtactctgc

SEQ ID NO: 33282 - DNA, 25 bp, Homo sapiens
  source 1..25: mol_type = genomic DNA
atcgtatagtggttagtactctgcg

SEQ ID NO: 33283 - DNA, 26 bp, Homo sapiens
  source 1..26: mol_type = genomic DNA
atcgtatagtggttagtactctgcgt

SEQ ID NO: 33284 - DNA, 27 bp, Homo sapiens
  source 1..27: mol_type = genomic DNA
atcgtatagtggttagtactctgcgtt

SEQ ID NO: 33285 - DNA, 43 bp, Homo sapiens; identical to SEQ ID NO: 6646
  source 1..43: mol_type = genomic DNA

SEQ ID NO: 33286 - DNA, 22 bp, Homo sapiens
  source 1..22: mol_type = genomic DNA
atctaaaccatcctctgctacc

SEQ ID NO: 33287 - DNA, 37 bp, Homo sapiens; identical to SEQ ID NO: 6660
  source 1..37: mol_type = genomic DNA

SEQ ID NO: 33288 - DNA, 38 bp, Homo sapiens; identical to SEQ ID NO: 6661
  source 1..38: mol_type = genomic DNA

SEQ ID NO: 33289 - DNA, 39 bp, Homo sapiens; identical to SEQ ID NO: 6662
  source 1..39: mol_type = genomic DNA

SEQ ID NO: 33290 - DNA, 23 bp, Homo sapiens
  source 1..23: mol_type = genomic DNA
atctaaaggtccctggttcgatc

SEQ ID NO: 33291 - DNA, 34 bp, Homo sapiens; identical to SEQ ID NO: 6671
  source 1..34: mol_type = genomic DNA

SEQ ID NO: 33292 - DNA, 36 bp, Homo sapiens; identical to SEQ ID NO: 6673
  source 1..36: mol_type = genomic DNA

SEQ ID NO: 33293 - DNA, 37 bp, Homo sapiens; identical to SEQ ID NO: 6674
  source 1..37: mol_type = genomic DNA

SEQ ID NO: 33294 - DNA, 38 bp, Homo sapiens; identical to SEQ ID NO: 6675
  source 1..38: mol_type = genomic DNA

SEQ ID NO: 33295 - DNA, 39 bp, Homo sapiens; identical to SEQ ID NO: 6676
  source 1..39: mol_type = genomic DNA

SEQ ID NO: 33296 - DNA, 37 bp, Homo sapiens; identical to SEQ ID NO: 6680
  source 1..37: mol_type = genomic DNA

SEQ ID NO: 33297 - DNA, 38 bp, Homo sapiens; identical to SEQ ID NO: 6681
  source 1..38: mol_type = genomic DNA

SEQ ID NO: 33298 - DNA, 39 bp, Homo sapiens; identical to SEQ ID NO: 6682
  source 1..39: mol_type = genomic DNA

SEQ ID NO: 33299 - DNA, 16 bp, Homo sapiens
  source 1..16: mol_type = genomic DNA
atctcgctggggcctc

SEQ ID NO: 33300 - DNA, 17 bp, Homo sapiens
  source 1..17: mol_type = genomic DNA
atctcgctggggcctcc

SEQ ID NO: 33301 - DNA, 18 bp, Homo sapiens
  source 1..18: mol_type = genomic DNA
atctcgctggggcctcca

SEQ ID NO: 33302 - DNA, 16 bp, Homo sapiens
  source 1..16: mol_type = genomic DNA
atctcggtggaacctc

SEQ ID NO: 33303 - DNA, 17 bp, Homo sapiens
  source 1..17: mol_type = genomic DNA
atctcggtggaacctcc

SEQ ID NO: 33304 - DNA, 18 bp, Homo sapiens
  source 1..18: mol_type = genomic DNA
atctcggtggaacctcca

SEQ ID NO: 33305 - DNA, 16 bp, Homo sapiens
  source 1..16: mol_type = genomic DNA
atctcggtgggacccc

SEQ ID NO: 33306 - DNA, 16 bp, Homo sapiens
  source 1..16: mol_type = genomic DNA
atctcggtgggacctc

SEQ ID NO: 33307 - DNA, 17 bp, Homo sapiens
  source 1..17: mol_type = genomic DNA
atctcggtgggacctcc

SEQ ID NO: 33308 - DNA, 18 bp, Homo sapiens
  source 1..18: mol_type = genomic DNA
atctcggtgggacctcca

SEQ ID NO: 33309 - DNA, 16 bp, Homo sapiens
  source 1..16: mol_type = genomic DNA
atctcggtggtacctc

SEQ ID NO: 33310 - DNA, 36 bp, Homo sapiens; identical to SEQ ID NO: 6702
  source 1..36: mol_type = genomic DNA

SEQ ID NO: 33311 - DNA, 37 bp, Homo sapiens; identical to SEQ ID NO: 6703
  source 1..37: mol_type = genomic DNA

SEQ ID NO: 33312 - DNA, 38 bp, Homo sapiens; identical to SEQ ID NO: 6704
  source 1..38: mol_type = genomic DNA

SEQ ID NO: 33313 - DNA, 39 bp, Homo sapiens; identical to SEQ ID NO: 6705
  source 1..39: mol_type = genomic DNA

SEQ ID NO: 33314 - DNA, 37 bp, Homo sapiens; identical to SEQ ID NO: 6708
  source 1..37: mol_type = genomic DNA

SEQ ID NO: 33315 - DNA, 38 bp, Homo sapiens; identical to SEQ ID NO: 6709
  source 1..38: mol_type = genomic DNA

SEQ ID NO: 33316 - DNA, 36 bp, Homo sapiens; identical to SEQ ID NO: 6716
  source 1..36: mol_type = genomic DNA

SEQ ID NO: 33317 - DNA, 37 bp, Homo sapiens; identical to SEQ ID NO: 6717
  source 1..37: mol_type = genomic DNA

SEQ ID NO: 33318 - DNA, 38 bp, Homo sapiens; identical to SEQ ID NO: 6718
  source 1..38: mol_type = genomic DNA

SEQ ID NO: 33319 - DNA, 39 bp, Homo sapiens; identical to SEQ ID NO: 6719
  source 1..39: mol_type = genomic DNA

SEQ ID NO: 33320 - DNA, 36 bp, Homo sapiens; identical to SEQ ID NO: 6723
  source 1..36: mol_type = genomic DNA

SEQ ID NO: 33321 - DNA, 37 bp, Homo sapiens; identical to SEQ ID NO: 6724
  source 1..37: mol_type = genomic DNA

SEQ ID NO: 33322 - DNA, 38 bp, Homo sapiens; identical to SEQ ID NO: 6725
  source 1..38: mol_type = genomic DNA

SEQ ID NO: 33323 - DNA, 39 bp, Homo sapiens; identical to SEQ ID NO: 6726
  source 1..39: mol_type = genomic DNA

SEQ ID NO: 33324 - DNA, 37 bp, Homo sapiens; identical to SEQ ID NO: 6739
  source 1..37: mol_type = genomic DNA

SEQ ID NO: 33325 - DNA, 38 bp, Homo sapiens; identical to SEQ ID NO: 6740
  source 1..38: mol_type = genomic DNA

SEQ ID NO: 33326 - DNA, 18 bp, Homo sapiens
  source 1..18: mol_type = genomic DNA
atctgagggtccagggtt

SEQ ID NO: 33327 - DNA, 37 bp, Homo sapiens
  source 1..37: mol_type = genomic DNA
atctgagggtccagggttcaagtccctgtccaggcgc

SEQ ID NO: 33328 - DNA, 38 bp, Homo sapiens; identical to SEQ ID NO: 6743
  source 1..38: mol_type = genomic DNA

SEQ ID NO: 33329 - DNA, 37 bp, Homo sapiens; identical to SEQ ID NO: 6752
  source 1..37: mol_type = genomic DNA

SEQ ID NO: 33330 - DNA, 38 bp, Homo sapiens; identical to SEQ ID NO: 6753
  source 1..38: mol_type = genomic DNA

SEQ ID NO: 33331 - DNA, 39 bp, Homo sapiens; identical to SEQ ID NO: 6754
  source 1..39: mol_type = genomic DNA

SEQ ID NO: 33332 - DNA, 16 bp, Homo sapiens
  source 1..16: mol_type = genomic DNA
atcttggtgggacctc

SEQ ID NO: 33333 - DNA, 19 bp, Homo sapiens
  source 1..19: mol_type = genomic DNA
atgaaaacctttttccaag

SEQ ID NO: 33334 - DNA, 21 bp, Homo sapiens
  source 1..21: mol_type = genomic DNA
atgaaaacctttttccaagga

SEQ ID NO: 33335 - DNA, 22 bp, Homo sapiens
  source 1..22: mol_type = genomic DNA
atgaaaacctttttccaaggac

SEQ ID NO: 33336 - DNA, 23 bp, Homo sapiens
  source 1..23: mol_type = genomic DNA
atgaaaacctttttccaaggaca

SEQ ID NO: 33337 - DNA, 24 bp, Homo sapiens
  source 1..24: mol_type = genomic DNA
atgaaaacctttttccaaggacac

SEQ ID NO: 33338 - DNA, 25 bp, Homo sapiens
  source 1..25: mol_type = genomic DNA
atgaaaacctttttccaaggacacc

SEQ ID NO: 33339 - DNA, 26 bp, Homo sapiens
  source 1..26: mol_type = genomic DNA
atgaaaacctttttccaaggacacca

SEQ ID NO: 33340 - DNA, 16 bp, Homo sapiens
  source 1..16: mol_type = genomic DNA
atgagactcttaatct

SEQ ID NO: 33341 - DNA, 34 bp, Homo sapiens
  source 1..34: mol_type = genomic DNA
atgaggccccgggttcgatccccggcatctccac

SEQ ID NO: 33342 - DNA, 35 bp, Homo sapiens; identical to SEQ ID NO: 6789
  source 1..35: mol_type = genomic DNA

SEQ ID NO: 33343 - DNA, 16 bp, Homo sapiens
  source 1..16: mol_type = genomic DNA
atgaggtcccgggttc

SEQ ID NO: 33344 - DNA, 34 bp, Homo sapiens
  source 1..34: mol_type = genomic DNA
atgaggtcccgggttcgatccccagcatctccac

SEQ ID NO: 33345 - DNA, 35 bp, Homo sapiens; identical to SEQ ID NO: 6796
  source 1..35: mol_type = genomic DNA

SEQ ID NO: 33346 - DNA, 19 bp, Homo sapiens
  source 1..19: mol_type = genomic DNA
atgattctcgctttgggtg

SEQ ID NO: 33347 - DNA, 21 bp, Homo sapiens
  source 1..21: mol_type = genomic DNA
atgattctcggtttgggtccg

SEQ ID NO: 33348 - DNA, 24 bp, Homo sapiens
  source 1..24: mol_type = genomic DNA
atgattctcggtttgggtccgaga

SEQ ID NO: 33349 - DNA, 25 bp, Homo sapiens
  source 1..25: mol_type = genomic DNA
atgcccccatgtctaacaacatggc

SEQ ID NO: 33350 - DNA, 26 bp, Homo sapiens
  source 1..26: mol_type = genomic DNA
atgcccccatgtctaacaacatggct

SEQ ID NO: 33351 - DNA, 27 bp, Homo sapiens
  source 1..27: mol_type = genomic DNA
atgcccccatgtctaacaacatggctt

SEQ ID NO: 33352 - DNA, 32 bp, Homo sapiens; identical to SEQ ID NO: 6849
  source 1..32: mol_type = genomic DNA

SEQ ID NO: 33353 - DNA, 18 bp, Homo sapiens
  source 1..18: mol_type = genomic DNA
atgcccgcatcctccacc

SEQ ID NO: 33354 - DNA, 19 bp, Homo sapiens
  source 1..19: mol_type = genomic DNA
atgccgaggttgtgagttc

SEQ ID NO: 33355 - DNA, 38 bp, Homo sapiens; identical to SEQ ID NO: 6858
  source 1..38: mol_type = genomic DNA

SEQ ID NO: 33356 - DNA, 21 bp, Homo sapiens
  source 1..21: mol_type = genomic DNA
atgctttgcacgtatgaggcc

SEQ ID NO: 33357 - DNA, 22 bp, Homo sapiens
  source 1..22: mol_type = genomic DNA
atgctttgcacgtatgaggccc

SEQ ID NO: 33358 - DNA, 23 bp, Homo sapiens
  source 1..23: mol_type = genomic DNA
atgctttgcacgtatgaggcccc

SEQ ID NO: 33359 - DNA, 24 bp, Homo sapiens
  source 1..24: mol_type = genomic DNA
atgctttgcacgtatgaggccccg

SEQ ID NO: 33360 - DNA, 43 bp, Homo sapiens
  source 1..43: mol_type = genomic DNA
atgctttgcacgtatgaggccccgggttcaatccccggcatct

SEQ ID NO: 33361 - DNA, 43 bp, Homo sapiens
  source 1..43: mol_type = genomic DNA
atggacatatgtccgcgtgggttcgaaccccactcctggtacc

SEQ ID NO: 33362 - DNA, 16 bp, Homo sapiens
  source 1..16: mol_type = genomic DNA
atggacgagcgcgctg

SEQ ID NO: 33363 - DNA, 18 bp, Homo sapiens
  source 1..18: mol_type = genomic DNA
atggacgagcgcgctgga

SEQ ID NO: 33364 - DNA, 33 bp, Homo sapiens; identical to SEQ ID NO: 6890
  source 1..33: mol_type = genomic DNA

SEQ ID NO: 33365 - DNA, 34 bp, Homo sapiens; identical to SEQ ID NO: 6891
  source 1..34: mol_type = genomic DNA

SEQ ID NO: 33366 - DNA, 35 bp, Homo sapiens; identical to SEQ ID NO: 6892
  source 1..35: mol_type = genomic DNA

SEQ ID NO: 33367 - DNA, 16 bp, Homo sapiens
  source 1..16: mol_type = genomic DNA
atggataacgcgtctg

SEQ ID NO: 33368 - DNA, 19 bp, Homo sapiens
  source 1..19: mol_type = genomic DNA
atggataacgcgtctgact

SEQ ID NO: 33369 - DNA, 17 bp, Homo sapiens
  source 1..17: mol_type = genomic DNA
atggataaggcactggc

SEQ ID NO: 33370 - DNA, 17 bp, Homo sapiens
  source 1..17: mol_type = genomic DNA
atggataaggcatcagc

SEQ ID NO: 33371 - DNA, 19 bp, Homo sapiens
  source 1..19: mol_type = genomic DNA
atggataaggcatcagcct

SEQ ID NO: 33372 - DNA, 21 bp, Homo sapiens
  source 1..21: mol_type = genomic DNA
atggataaggcatcagcctcc

SEQ ID NO: 33373 - DNA, 28 bp, Homo sapiens
  source 1..28: mol_type = genomic DNA
atggataaggcatcagcctccggagctg

SEQ ID NO: 33374 - DNA, 29 bp, Homo sapiens
  source 1..29: mol_type = genomic DNA
atggataaggcatcagcctccggagctgg

SEQ ID NO: 33375 - DNA, 36 bp, Homo sapiens; identical to SEQ ID NO: 6910
  source 1..36: mol_type = genomic DNA

SEQ ID NO: 33376 - DNA, 17 bp, Homo sapiens
  source 1..17: mol_type = genomic DNA
atggataaggcattggc

SEQ ID NO: 33377 - DNA, 18 bp, Homo sapiens
  source 1..18: mol_type = genomic DNA
atggataaggcattggcc

SEQ ID NO: 33378 - DNA, 16 bp, Homo sapiens
  source 1..16: mol_type = genomic DNA
atggataaggcgtctg

SEQ ID NO: 33379 - DNA, 17 bp, Homo sapiens
  source 1..17: mol_type = genomic DNA
atggataaggcgtctga

SEQ ID NO: 33380 - DNA, 19 bp, Homo sapiens
  source 1..19: mol_type = genomic DNA
atggataaggcgtctgact

SEQ ID NO: 33381 - DNA, 21 bp, Homo sapiens
  source 1..21: mol_type = genomic DNA
atggataaggcgtctgattcc

SEQ ID NO: 33382 - DNA, 16 bp, Homo sapiens
  source 1..16: mol_type = genomic DNA
atggatagcgcattgg

SEQ ID NO: 33383 - DNA, 17 bp, Homo sapiens
  source 1..17: mol_type = genomic DNA
atggatagcgcattgga

SEQ ID NO: 33384 - DNA, 18 bp, Homo sapiens
  source 1..18: mol_type = genomic DNA
atggatagcgcattggac

SEQ ID NO: 33385 - DNA, 22 bp, Homo sapiens
  source 1..22: mol_type = genomic DNA
atggatcgaaaccatcctctgc

SEQ ID NO: 33386 - DNA, 23 bp, Homo sapiens
  source 1..23: mol_type = genomic DNA
atggatcgaaaccatcctctgct

SEQ ID NO: 33387 - DNA, 24 bp, Homo sapiens
  source 1..24: mol_type = genomic DNA
atggatcgaaaccatcctctgcta

SEQ ID NO: 33388 - DNA, 25 bp, Homo sapiens
  source 1..25: mol_type = genomic DNA
atggatcgaaaccatcctctgctac

SEQ ID NO: 33389 - DNA, 26 bp, Homo sapiens
  source 1..26: mol_type = genomic DNA
atggatcgaaaccatcctctgctacc

SEQ ID NO: 33390 - DNA, 27 bp, Homo sapiens
  source 1..27: mol_type = genomic DNA
atggatcgaaaccatcctctgctacca

SEQ ID NO: 33391 - DNA, 24 bp, Homo sapiens
  source 1..24: mol_type = genomic DNA
atggccgagcggtctaaggcgctg

SEQ ID NO: 33392 - DNA, 18 bp, Homo sapiens
  source 1..18: mol_type = genomic DNA
atggccgagtggttaagg

SEQ ID NO: 33393 - DNA, 22 bp, Homo sapiens
  source 1..22: mol_type = genomic DNA
atggctgagtgaagcattggac

SEQ ID NO: 33394 - DNA, 16 bp, Homo sapiens
  source 1..16: mol_type = genomic DNA
atgggactcttaatcc

SEQ ID NO: 33395 - DNA, 27 bp, Homo sapiens
  source 1..27: mol_type = genomic DNA
atggggtgtgataggtggcacggagaa

SEQ ID NO: 33396 - DNA, 16 bp, Homo sapiens
  source 1..16: mol_type = genomic DNA
atgggtggttcagtgg

SEQ ID NO: 33397 - DNA, 23 bp, Homo sapiens
  source 1..23: mol_type = genomic DNA
atgggtggttcagtggtagaatt

SEQ ID NO: 33398 - DNA, 24 bp, Homo sapiens
  source 1..24: mol_type = genomic DNA
atgggtggttcagtggtagaattc

SEQ ID NO: 33399 - DNA, 26 bp, Homo sapiens
  source 1..26: mol_type = genomic DNA
atgggtggttcagtggtagaattctc

SEQ ID NO: 33400 - DNA, 27 bp, Homo sapiens
  source 1..27: mol_type = genomic DNA
atgggtggttcagtggtagaattctcg

SEQ ID NO: 33401 - DNA, 28 bp, Homo sapiens
  source 1..28: mol_type = genomic DNA
atgggtggttcagtggtagaattctcgc

SEQ ID NO: 33402 - DNA, 29 bp, Homo sapiens
  source 1..29: mol_type = genomic DNA
atgggtggttcagtggtagaattctcgcc

SEQ ID NO: 33403 - DNA, 30 bp, Homo sapiens; identical to SEQ ID NO: 6995
  source 1..30: mol_type = genomic DNA

SEQ ID NO: 33404 - DNA, 31 bp, Homo sapiens; identical to SEQ ID NO: 6996
  source 1..31: mol_type = genomic DNA

SEQ ID NO: 33405 - DNA, 32 bp, Homo sapiens; identical to SEQ ID NO: 6997
  source 1..32: mol_type = genomic DNA

SEQ ID NO: 33406 - DNA, 33 bp, Homo sapiens; identical to SEQ ID NO: 6998
  source 1..33: mol_type = genomic DNA

SEQ ID NO: 33407 - DNA, 34 bp, Homo sapiens; identical to SEQ ID NO: 6999
  source 1..34: mol_type = genomic DNA

SEQ ID NO: 33408 - DNA, 25 bp, Homo sapiens
  source 1..25: mol_type = genomic DNA
atgggttcgattctcatagtcctag

SEQ ID NO: 33409 - DNA, 26 bp, Homo sapiens
  source 1..26: mol_type = genomic DNA
atgggttcgattctcatagtcctagc

SEQ ID NO: 33410 - DNA, 16 bp, Homo sapiens
  source 1..16: mol_type = genomic DNA
atggtagagcgctcgc

SEQ ID NO: 33411 - DNA, 17 bp, Homo sapiens
  source 1..17: mol_type = genomic DNA
atggtagagcgctcgct

SEQ ID NO: 33412 - DNA, 20 bp, Homo sapiens
  source 1..20: mol_type = genomic DNA
atggtctagcggttaggatt

SEQ ID NO: 33413 - DNA, 22 bp, Homo sapiens
  source 1..22: mol_type = genomic DNA
atggtctagcggttaggattcc

SEQ ID NO: 33414 - DNA, 23 bp, Homo sapiens
  source 1..23: mol_type = genomic DNA
atggtctagcggttaggattcct

SEQ ID NO: 33415 - DNA, 26 bp, Homo sapiens
  source 1..26: mol_type = genomic DNA
atggtctagcggttaggattcctggt

SEQ ID NO: 33416 - DNA, 27 bp, Homo sapiens
  source 1..27: mol_type = genomic DNA
atggtctagcggttaggattcctggtt

SEQ ID NO: 33417 - DNA, 28 bp, Homo sapiens
  source 1..28: mol_type = genomic DNA
atggtctagcggttaggattcctggttt

SEQ ID NO: 33418 - DNA, 29 bp, Homo sapiens
  source 1..29: mol_type = genomic DNA
atggtctagcggttaggattcctggtttt

SEQ ID NO: 33419 - DNA, 30 bp, Homo sapiens; identical to SEQ ID NO: 7036
  source 1..30: mol_type = genomic DNA

SEQ ID NO: 33420 - DNA, 31 bp, Homo sapiens; identical to SEQ ID NO: 7037
  source 1..31: mol_type = genomic DNA

SEQ ID NO: 33421 - DNA, 35 bp, Homo sapiens; identical to SEQ ID NO: 7039
  source 1..35: mol_type = genomic DNA

SEQ ID NO: 33422 - DNA, 36 bp, Homo sapiens
  source 1..36: mol_type = genomic DNA
atggtctagcggttaggattcctggttttcacccag

SEQ ID NO: 33423 - DNA, 19 bp, Homo sapiens
  source 1..19: mol_type = genomic DNA
atggtgagcactctggact

SEQ ID NO: 33424 - DNA, 27 bp, Homo sapiens
  source 1..27: mol_type = genomic DNA
atggtgagcactctggactctgaatcc

SEQ ID NO: 33425 - DNA, 30 bp, Homo sapiens; identical to SEQ ID NO: 7052
  source 1..30: mol_type = genomic DNA

SEQ ID NO: 33426 - DNA, 29 bp, Homo sapiens
  source 1..29: mol_type = genomic DNA
atggtggagttaaagactttttctctgac

SEQ ID NO: 33427 - DNA, 30 bp, Homo sapiens; identical to SEQ ID NO: 7068
  source 1..30: mol_type = genomic DNA

SEQ ID NO: 33428 - DNA, 27 bp, Homo sapiens
  source 1..27: mol_type = genomic DNA
atggtggttcagtggtagaattctcgc

SEQ ID NO: 33429 - DNA, 29 bp, Homo sapiens
  source 1..29: mol_type = genomic DNA
atggtggttcagtggtagaattctcgcct

SEQ ID NO: 33430 - DNA, 27 bp, Homo sapiens
  source 1..27: mol_type = genomic DNA
atggtgtaatggtgagcactctggact

SEQ ID NO: 33431 - DNA, 28 bp, Homo sapiens
  source 1..28: mol_type = genomic DNA
atggtgtaatggtgagcactctggactc

SEQ ID NO: 33432 - DNA, 29 bp, Homo sapiens
  source 1..29: mol_type = genomic DNA
atggtgtaatggtgagcactctggactct

SEQ ID NO: 33433 - DNA, 30 bp, Homo sapiens; identical to SEQ ID NO: 7080
  source 1..30: mol_type = genomic DNA

SEQ ID NO: 33434 - DNA, 24 bp, Homo sapiens
  source 1..24: mol_type = genomic DNA
atggtgtaatggttagcactctgg

SEQ ID NO: 33435 - DNA, 25 bp, Homo sapiens
  source 1..25: mol_type = genomic DNA
atggtgtaatggttagcactctgga

SEQ ID NO: 33436 - DNA, 26 bp, Homo sapiens
  source 1..26: mol_type = genomic DNA
atggtgtaatggttagcactctggac

SEQ ID NO: 33437 - DNA, 27 bp, Homo sapiens
  source 1..27: mol_type = genomic DNA
atggtgtaatggttagcactctggact

SEQ ID NO: 33438 - DNA, 28 bp, Homo sapiens
  source 1..28: mol_type = genomic DNA
atggtgtaatggttagcactctggactc

SEQ ID NO: 33439 - DNA, 29 bp, Homo sapiens
  source 1..29: mol_type = genomic DNA
atggtgtaatggttagcactctggactct

SEQ ID NO: 33440 - DNA, 30 bp, Homo sapiens; identical to SEQ ID NO: 7092
  source 1..30: mol_type = genomic DNA

SEQ ID NO: 33441 - DNA, 31 bp, Homo sapiens; identical to SEQ ID NO: 7093
  source 1..31: mol_type = genomic DNA

SEQ ID NO: 33442 - DNA, 34 bp, Homo sapiens; identical to SEQ ID NO: 7095
  source 1..34: mol_type = genomic DNA

SEQ ID NO: 33443 - DNA, 46 bp, Homo sapiens
  source 1..46: mol_type = genomic DNA
atggtgtaatggttagcactctggactctgaatccagcgatccgag

SEQ ID NO: 33444 - DNA, 47 bp, Homo sapiens
  source 1..47: mol_type = genomic DNA
atggtgtaatggttagcactctggactctgaatccagcgatccgagt

SEQ ID NO: 33445 - DNA, 30 bp, Homo sapiens; identical to SEQ ID NO: 7097
  source 1..30: mol_type = genomic DNA

SEQ ID NO: 33446 - DNA, 16 bp, Homo sapiens
  source 1..16: mol_type = genomic DNA
atggttagcactctgg

SEQ ID NO: 33447 - DNA, 17 bp, Homo sapiens
  source 1..17: mol_type = genomic DNA
atggttagcactctgga

SEQ ID NO: 33448 - DNA, 18 bp, Homo sapiens
  source 1..18: mol_type = genomic DNA
atggttagcactctggac

SEQ ID NO: 33449 - DNA, 19 bp, Homo sapiens
  source 1..19: mol_type = genomic DNA
atggttagcactctggact

SEQ ID NO: 33450 - DNA, 20 bp, Homo sapiens
  source 1..20: mol_type = genomic DNA
atggttagcactctggactc

SEQ ID NO: 33451 - DNA, 21 bp, Homo sapiens
  source 1..21: mol_type = genomic DNA
atggttagcactctggactct

SEQ ID NO: 33452 - DNA, 22 bp, Homo sapiens
  source 1..22: mol_type = genomic DNA
atggttagcactctggactctg

SEQ ID NO: 33453 - DNA, 23 bp, Homo sapiens
  source 1..23: mol_type = genomic DNA
atggttagcactctggactctga

SEQ ID NO: 33454 - DNA, 24 bp, Homo sapiens
  source 1..24: mol_type = genomic DNA
atggttagcactctggactctgaa

SEQ ID NO: 33455 - DNA, 25 bp, Homo sapiens
  source 1..25: mol_type = genomic DNA
atggttagcactctggactctgaat

SEQ ID NO: 33456 - DNA, 26 bp, Homo sapiens
  source 1..26: mol_type = genomic DNA
atggttagcactctggactctgaatc

SEQ ID NO: 33457 - DNA, 27 bp, Homo sapiens
  source 1..27: mol_type = genomic DNA
atggttagcactctggactctgaatcc

SEQ ID NO: 33458 - DNA, 28 bp, Homo sapiens
  source 1..28: mol_type = genomic DNA
atggttagcactctggactctgaatcca

SEQ ID NO: 33459 - DNA, 29 bp, Homo sapiens
  source 1..29: mol_type = genomic DNA
atggttagcactctggactctgaatccag

SEQ ID NO: 33460 - DNA, 30 bp, Homo sapiens; identical to SEQ ID NO: 7111
  source 1..30: mol_type = genomic DNA

SEQ ID NO: 33461 - DNA, 31 bp, Homo sapiens; identical to SEQ ID NO: 7112
  source 1..31: mol_type = genomic DNA

SEQ ID NO: 33462 - DNA, 35 bp, Homo sapiens; identical to SEQ ID NO: 7114
  source 1..35: mol_type = genomic DNA

SEQ ID NO: 33463 - DNA, 38 bp, Homo sapiens; identical to SEQ ID NO: 7116
  source 1..38: mol_type = genomic DNA

SEQ ID NO: 33464 - DNA, 39 bp, Homo sapiens; identical to SEQ ID NO: 7117
  source 1..39: mol_type = genomic DNA

SEQ ID NO: 33465 - DNA, 40 bp, Homo sapiens
  source 1..40: mol_type = genomic DNA
atggttagcactctggactctgaatccagcgatccgagtt

SEQ ID NO: 33466 - DNA, 41 bp, Homo sapiens; identical to SEQ ID NO: 7118
  source 1..41: mol_type = genomic DNA

SEQ ID NO: 33467 - DNA, 42 bp, Homo sapiens; identical to SEQ ID NO: 7119
  source 1..42: mol_type = genomic DNA

SEQ ID NO: 33468 - DNA, 22 bp, Homo sapiens
  source 1..22: mol_type = genomic DNA
atggttagcactctggactttg

SEQ ID NO: 33469 - DNA, 23 bp, Homo sapiens
  source 1..23: mol_type = genomic DNA
atggttagcactctggactttga

SEQ ID NO: 33470 - DNA, 24 bp, Homo sapiens
  source 1..24: mol_type = genomic DNA
atggttagcactctggactttgaa

SEQ ID NO: 33471 - DNA, 25 bp, Homo sapiens
  source 1..25: mol_type = genomic DNA
atggttagcactctggactttgaat

SEQ ID NO: 33472 - DNA, 26 bp, Homo sapiens
  source 1..26: mol_type = genomic DNA
atggttagcactctggactttgaatc

SEQ ID NO: 33473 - DNA, 27 bp, Homo sapiens
  source 1..27: mol_type = genomic DNA
atggttagcactctggactttgaatcc

SEQ ID NO: 33474 - DNA, 30 bp, Homo sapiens; identical to SEQ ID NO: 7128
  source 1..30: mol_type = genomic DNA

SEQ ID NO: 33475 - DNA, 39 bp, Homo sapiens
  source 1..39: mol_type = genomic DNA
atggttagcactctggactttgaatccagcgatccgagt

SEQ ID NO: 33476 - DNA, 23 bp, Homo sapiens
  source 1..23: mol_type = genomic DNA
atggtttttcatatcattggtcg

SEQ ID NO: 33477 - DNA, 30 bp, Homo sapiens; identical to SEQ ID NO: 7138
  source 1..30: mol_type = genomic DNA

SEQ ID NO: 33478 - DNA, 34 bp, Homo sapiens; identical to SEQ ID NO: 7142
  source 1..34: mol_type = genomic DNA

SEQ ID NO: 33479 - DNA, 38 bp, Homo sapiens; identical to SEQ ID NO: 7146
  source 1..38: mol_type = genomic DNA

SEQ ID NO: 33480 - DNA, 39 bp, Homo sapiens; identical to SEQ ID NO: 7147
  source 1..39: mol_type = genomic DNA

SEQ ID NO: 33481 - DNA, 40 bp, Homo sapiens; identical to SEQ ID NO: 7148
  source 1..40: mol_type = genomic DNA

SEQ ID NO: 33482 - DNA, 41 bp, Homo sapiens; identical to SEQ ID NO: 7149
  source 1..41: mol_type = genomic DNA

SEQ ID NO: 33483 - DNA, 42 bp, Homo sapiens; identical to SEQ ID NO: 7150
  source 1..42: mol_type = genomic DNA

SEQ ID NO: 33484 - DNA, 43 bp, Homo sapiens; identical to SEQ ID NO: 7151
  source 1..43: mol_type = genomic DNA

SEQ ID NO: 33485 - DNA, 44 bp, Homo sapiens; identical to SEQ ID NO: 7152
  source 1..44: mol_type = genomic DNA

SEQ ID NO: 33486 - DNA, 45 bp, Homo sapiens; identical to SEQ ID NO: 7153
  source 1..45: mol_type = genomic DNA

SEQ ID NO: 33487 - DNA, 46 bp, Homo sapiens; identical to SEQ ID NO: 7154
  source 1..46: mol_type = genomic DNA

SEQ ID NO: 33488 - DNA, 17 bp, Homo sapiens
  source 1..17: mol_type = genomic DNA
atgtagctcagtggtag

SEQ ID NO: 33489 - DNA, 18 bp, Homo sapiens
  source 1..18: mol_type = genomic DNA
atgtagctcagtggtaga

SEQ ID NO: 33490 - DNA, 19 bp, Homo sapiens
  source 1..19: mol_type = genomic DNA
atgtagctcagtggtagag

SEQ ID NO: 33491 - DNA, 39 bp, Homo sapiens
  source 1..39: mol_type = genomic DNA
atgtatgaggtcccgggttcgatccccggcatctccacc

SEQ ID NO: 33492 - DNA, 16 bp, Homo sapiens
  source 1..16: mol_type = genomic DNA
atgtccgcgtgggttc

SEQ ID NO: 33493 - DNA, 30 bp, Homo sapiens; identical to SEQ ID NO: 7173
  source 1..30: mol_type = genomic DNA

SEQ ID NO: 33494 - DNA, 33 bp, Homo sapiens; identical to SEQ ID NO: 7176
  source 1..33: mol_type = genomic DNA

SEQ ID NO: 33495 - DNA, 27 bp, Homo sapiens
  source 1..27: mol_type = genomic DNA
atgtctaacaacatggctttctcacca

SEQ ID NO: 33496 - DNA, 28 bp, Homo sapiens
  source 1..28: mol_type = genomic DNA
atgttggttatacccttcccgtactacc

SEQ ID NO: 33497 - DNA, 29 bp, Homo sapiens
  source 1..29: mol_type = genomic DNA
atgttggttatacccttcccgtactacca

SEQ ID NO: 33498 - DNA, 16 bp, Homo sapiens
  source 1..16: mol_type = genomic DNA
atgtttagacgggctc

SEQ ID NO: 33499 - DNA, 17 bp, Homo sapiens
  source 1..17: mol_type = genomic DNA
atgtttagacgggctca

SEQ ID NO: 33500 - DNA, 18 bp, Homo sapiens
  source 1..18: mol_type = genomic DNA
atgtttagacgggctcac

SEQ ID NO: 33501 - DNA, 19 bp, Homo sapiens
  source 1..19: mol_type = genomic DNA
atgtttagacgggctcaca

SEQ ID NO: 33502 - DNA, 21 bp, Homo sapiens
  source 1..21: mol_type = genomic DNA
atgtttagacgggctcacatc

SEQ ID NO: 33503 - DNA, 24 bp, Homo sapiens
  source 1..24: mol_type = genomic DNA
atgtttagacgggctcacatcacc

SEQ ID NO: 33504 - DNA, 25 bp, Homo sapiens
  source 1..25: mol_type = genomic DNA
atgtttagacgggctcacatcaccc

SEQ ID NO: 33505 - DNA, 26 bp, Homo sapiens
  source 1..26: mol_type = genomic DNA
atgtttagacgggctcacatcacccc

SEQ ID NO: 33506 - DNA, 27 bp, Homo sapiens
  source 1..27: mol_type = genomic DNA
atgtttagacgggctcacatcacccca

SEQ ID NO: 33507 - DNA, 28 bp, Homo sapiens
  source 1..28: mol_type = genomic DNA
atgtttagacgggctcacatcaccccat

SEQ ID NO: 33508 - DNA, 29 bp, Homo sapiens
  source 1..29: mol_type = genomic DNA
atgtttagacgggctcacatcaccccata

SEQ ID NO: 33509 - DNA, 30 bp, Homo sapiens; identical to SEQ ID NO: 7219
  source 1..30: mol_type = genomic DNA

SEQ ID NO: 33510 - DNA, 31 bp, Homo sapiens; identical to SEQ ID NO: 7220
  source 1..31: mol_type = genomic DNA

SEQ ID NO: 33511 - DNA, 35 bp, Homo sapiens; identical to SEQ ID NO: 7224
  source 1..35: mol_type = genomic DNA

SEQ ID NO: 33512 - DNA, 36 bp, Homo sapiens; identical to SEQ ID NO: 7225
  source 1..36: mol_type = genomic DNA

SEQ ID NO: 33513 - DNA, 16 bp, Homo sapiens
  source 1..16: mol_type = genomic DNA
attaactagttttgac

SEQ ID NO: 33514 - DNA, 31 bp, Homo sapiens; identical to SEQ ID NO: 7262
  source 1..31: mol_type = genomic DNA

SEQ ID NO: 33515 - DNA, 32 bp, Homo sapiens; identical to SEQ ID NO: 7263
  source 1..32: mol_type = genomic DNA

SEQ ID NO: 33516 - DNA, 33 bp, Homo sapiens; identical to SEQ ID NO: 7264
  source 1..33: mol_type = genomic DNA

SEQ ID NO: 33517 - DNA, 16 bp, Homo sapiens
  source 1..16: mol_type = genomic DNA
attagaatcttagctt

SEQ ID NO: 33518 - DNA, 18 bp, Homo sapiens
  source 1..18: mol_type = genomic DNA
attagaatcttagctttg

SEQ ID NO: 33519 - DNA, 42 bp, Homo sapiens; identical to SEQ ID NO: 7277
  source 1..42: mol_type = genomic DNA

SEQ ID NO: 33520 - DNA, 43 bp, Homo sapiens; identical to SEQ ID NO: 7278
  source 1..43: mol_type = genomic DNA

SEQ ID NO: 33521 - DNA, 37 bp, Homo sapiens; identical to SEQ ID NO: 7313
  source 1..37: mol_type = genomic DNA

SEQ ID NO: 33522 - DNA, 38 bp, Homo sapiens; identical to SEQ ID NO: 7314
  source 1..38: mol_type = genomic DNA

SEQ ID NO: 33523 - DNA, 39 bp, Homo sapiens; identical to SEQ ID NO: 7315
  source 1..39: mol_type = genomic DNA

SEQ ID NO: 33524 - DNA, 37 bp, Homo sapiens; identical to SEQ ID NO: 7318
  source 1..37: mol_type = genomic DNA

SEQ ID NO: 33525 - DNA, 38 bp, Homo sapiens; identical to SEQ ID NO: 7319
  source 1..38: mol_type = genomic DNA

SEQ ID NO: 33526 - DNA, 39 bp, Homo sapiens; identical to SEQ ID NO: 7320
  source 1..39: mol_type = genomic DNA

SEQ ID NO: 33527 - DNA, 37 bp, Homo sapiens; identical to SEQ ID NO: 7321
  source 1..37: mol_type = genomic DNA

SEQ ID NO: 33528 - DNA, 38 bp, Homo sapiens; identical to SEQ ID NO: 7322
  source 1..38: mol_type = genomic DNA

SEQ ID NO: 33529 - DNA, 37 bp, Homo sapiens
  source 1..37: mol_type = genomic DNA
attcatatccgcgtgggttcgaaccccacttctggta

SEQ ID NO: 33530 - DNA, 17 bp, Homo sapiens
  source 1..17: mol_type = genomic DNA
attccagctcgaaggac

SEQ ID NO: 33531 - DNA, 18 bp, Homo sapiens
  source 1..18: mol_type = genomic DNA
attccagctcgaaggacc

SEQ ID NO: 33532 - DNA, 19 bp, Homo sapiens
  source 1..19: mol_type = genomic DNA
attccaggttcgactcctg

SEQ ID NO: 33533 - DNA, 30 bp, Homo sapiens; identical to SEQ ID NO: 7329
  source 1..30: mol_type = genomic DNA

SEQ ID NO: 33534 - DNA, 17 bp, Homo sapiens
  source 1..17: mol_type = genomic DNA
attcccattcttgcgac

SEQ ID NO: 33535 - DNA, 23 bp, Homo sapiens
  source 1..23: mol_type = genomic DNA
attcccattcttgcgacccgggt

SEQ ID NO: 33536 - DNA, 43 bp, Homo sapiens
  source 1..43: mol_type = genomic DNA
attcccattcttgcgacccgggttcgattcccgggcggcgcac

SEQ ID NO: 33537 - DNA, 44 bp, Homo sapiens; identical to SEQ ID NO: 7333
  source 1..44: mol_type = genomic DNA

SEQ ID NO: 33538 - DNA, 16 bp, Homo sapiens
  source 1..16: mol_type = genomic DNA
attccccgacggggag

SEQ ID NO: 33539 - DNA, 17 bp, Homo sapiens
  source 1..17: mol_type = genomic DNA
attccccgacggggagc

SEQ ID NO: 33540 - DNA, 18 bp, Homo sapiens
  source 1..18: mol_type = genomic DNA
attccccgacggggagcc

SEQ ID NO: 33541 - DNA, 17 bp, Homo sapiens
  source 1..17: mol_type = genomic DNA
attcccggccaacgcac

SEQ ID NO: 33542 - DNA, 18 bp, Homo sapiens
  source 1..18: mol_type = genomic DNA
attcccggccaacgcacc

SEQ ID NO: 33543 - DNA, 19 bp, Homo sapiens
  source 1..19: mol_type = genomic DNA
attcccggccaacgcacca

SEQ ID NO: 33544 - DNA, 16 bp, Homo sapiens
  source 1..16: mol_type = genomic DNA
attcccggccaatgca

SEQ ID NO: 33545 - DNA, 17 bp, Homo sapiens
  source 1..17: mol_type = genomic DNA
attcccggccaatgcac

SEQ ID NO: 33546 - DNA, 18 bp, Homo sapiens
  source 1..18: mol_type = genomic DNA
attcccggccaatgcacc

SEQ ID NO: 33547 - DNA, 19 bp, Homo sapiens
  source 1..19: mol_type = genomic DNA
attcccggccaatgcacca

SEQ ID NO: 33548 - DNA, 17 bp, Homo sapiens
  source 1..17: mol_type = genomic DNA
attcccggcccatgcac

SEQ ID NO: 33549 - DNA, 17 bp, Homo sapiens
  source 1..17: mol_type = genomic DNA
attcccgggcggcgcac

SEQ ID NO: 33550 - DNA, 18 bp, Homo sapiens
  source 1..18: mol_type = genomic DNA
attcccgggcggcgcacc

SEQ ID NO: 33551 - DNA, 16 bp, Homo sapiens
  source 1..16: mol_type = genomic DNA
attcccggtcagggaa

SEQ ID NO: 33552 - DNA, 17 bp, Homo sapiens
  source 1..17: mol_type = genomic DNA
attcccggtcagggaac

SEQ ID NO: 33553 - DNA, 18 bp, Homo sapiens
  source 1..18: mol_type = genomic DNA
attcccggtcagggaacc

SEQ ID NO: 33554 - DNA, 17 bp, Homo sapiens
  source 1..17: mol_type = genomic DNA
attcccggtcatggaac

SEQ ID NO: 33555 - DNA, 17 bp, Homo sapiens
  source 1..17: mol_type = genomic DNA
attccctgacggggagc

SEQ ID NO: 33556 - DNA, 20 bp, Homo sapiens
  source 1..20: mol_type = genomic DNA
attccggatcagaagattga

SEQ ID NO: 33557 - DNA, 45 bp, Homo sapiens; identical to SEQ ID NO: 7361
  source 1..45: mol_type = genomic DNA

SEQ ID NO: 33558 - DNA, 17 bp, Homo sapiens
  source 1..17: mol_type = genomic DNA
attccggctcgaaggac

SEQ ID NO: 33559 - DNA, 18 bp, Homo sapiens
  source 1..18: mol_type = genomic DNA
attccggctcgaaggacc

SEQ ID NO: 33560 - DNA, 19 bp, Homo sapiens
  source 1..19: mol_type = genomic DNA
attccggctcgaaggacca

SEQ ID NO: 33561 - DNA, 17 bp, Homo sapiens
  source 1..17: mol_type = genomic DNA
attcctggttttcaccc

SEQ ID NO: 33562 - DNA, 36 bp, Homo sapiens
  source 1..36: mol_type = genomic DNA
attcctggttttcacccaggcggcccgggttcgact

SEQ ID NO: 33563 - DNA, 32 bp, Homo sapiens; identical to SEQ ID NO: 7379
  source 1..32: mol_type = genomic DNA

SEQ ID NO: 33564 - DNA, 33 bp, Homo sapiens; identical to SEQ ID NO: 7380
  source 1..33: mol_type = genomic DNA

SEQ ID NO: 33565 - DNA, 34 bp, Homo sapiens; identical to SEQ ID NO: 7381
  source 1..34: mol_type = genomic DNA

SEQ ID NO: 33566 - DNA, 16 bp, Homo sapiens
  source 1..16: mol_type = genomic DNA
attcggcgctctcacc

SEQ ID NO: 33567 - DNA, 17 bp, Homo sapiens
  source 1..17: mol_type = genomic DNA
attcggcgctctcaccg

SEQ ID NO: 33568 - DNA, 18 bp, Homo sapiens
  source 1..18: mol_type = genomic DNA
attcggcgctctcaccgc

SEQ ID NO: 33569 - DNA, 19 bp, Homo sapiens
  source 1..19: mol_type = genomic DNA
attcggcgctctcaccgcc

SEQ ID NO: 33570 - DNA, 25 bp, Homo sapiens
  source 1..25: mol_type = genomic DNA
attcggcgctctcaccgccgcggcc

SEQ ID NO: 33571 - DNA, 26 bp, Homo sapiens
  source 1..26: mol_type = genomic DNA
attcggcgctctcaccgccgcggccc

SEQ ID NO: 33572 - DNA, 27 bp, Homo sapiens
  source 1..27: mol_type = genomic DNA
attcggcgctctcaccgccgcggcccg

SEQ ID NO: 33573 - DNA, 28 bp, Homo sapiens
  source 1..28: mol_type = genomic DNA
attcggcgctctcaccgccgcggcccgg

SEQ ID NO: 33574 - DNA, 29 bp, Homo sapiens
  source 1..29: mol_type = genomic DNA
attcggcgctctcaccgccgcggcccggg

SEQ ID NO: 33575 - DNA, 30 bp, Homo sapiens; identical to SEQ ID NO: 7417
  source 1..30: mol_type = genomic DNA

SEQ ID NO: 33576 - DNA, 31 bp, Homo sapiens; identical to SEQ ID NO: 7418
  source 1..31: mol_type = genomic DNA

SEQ ID NO: 33577 - DNA, 38 bp, Homo sapiens; identical to SEQ ID NO: 7427
  source 1..38: mol_type = genomic DNA

SEQ ID NO: 33578 - DNA, 16 bp, Homo sapiens
  source 1..16: mol_type = genomic DNA
attctcatagtcctag

SEQ ID NO: 33579 - DNA, 17 bp, Homo sapiens
  source 1..17: mol_type = genomic DNA
attctcatagtcctagc

SEQ ID NO: 33580 - DNA, 18 bp, Homo sapiens
  source 1..18: mol_type = genomic DNA
attctcatagtcctagcc

SEQ ID NO: 33581 - DNA, 28 bp, Homo sapiens
  source 1..28: mol_type = genomic DNA
attctcgcctgccacgcgggaggcccgg

SEQ ID NO: 33582 - DNA, 17 bp, Homo sapiens
  source 1..17: mol_type = genomic DNA
attctcgctggggcctc

SEQ ID NO: 33583 - DNA, 17 bp, Homo sapiens
  source 1..17: mol_type = genomic DNA
attctcggtttgggtcc

SEQ ID NO: 33584 - DNA, 18 bp, Homo sapiens
  source 1..18: mol_type = genomic DNA
attctcggtttgggtccg

SEQ ID NO: 33585 - DNA, 16 bp, Homo sapiens
  source 1..16: mol_type = genomic DNA
attcttgcgacccggg

SEQ ID NO: 33586 - DNA, 17 bp, Homo sapiens
  source 1..17: mol_type = genomic DNA
attcttgcgacccgggt

SEQ ID NO: 33587 - DNA, 32 bp, Homo sapiens; identical to SEQ ID NO: 7454
  source 1..32: mol_type = genomic DNA

SEQ ID NO: 33588 - DNA, 33 bp, Homo sapiens; identical to SEQ ID NO: 7455
  source 1..33: mol_type = genomic DNA

SEQ ID NO: 33589 - DNA, 34 bp, Homo sapiens; identical to SEQ ID NO: 7456
  source 1..34: mol_type = genomic DNA

SEQ ID NO: 33590 - DNA, 35 bp, Homo sapiens; identical to SEQ ID NO: 7457
  source 1..35: mol_type = genomic DNA

SEQ ID NO: 33591 - DNA, 36 bp, Homo sapiens; identical to SEQ ID NO: 7458
  source 1..36: mol_type = genomic DNA

SEQ ID NO: 33592 - DNA, 37 bp, Homo sapiens; identical to SEQ ID NO: 7459
  source 1..37: mol_type = genomic DNA

SEQ ID NO: 33593 - DNA, 38 bp, Homo sapiens; identical to SEQ ID NO: 7460
  source 1..38: mol_type = genomic DNA

SEQ ID NO: 33594 - DNA, 29 bp, Homo sapiens
  source 1..29: mol_type = genomic DNA
attgagggttcgaatcccttcgtggttgc

SEQ ID NO: 33595 - DNA, 30 bp, Homo sapiens; identical to SEQ ID NO: 7470
  source 1..30: mol_type = genomic DNA

SEQ ID NO: 33596 - DNA, 19 bp, Homo sapiens
  source 1..19: mol_type = genomic DNA
attgagggttcgagtccct

SEQ ID NO: 33597 - DNA, 22 bp, Homo sapiens
  source 1..22: mol_type = genomic DNA
attgagggttcgagtcccttcg

SEQ ID NO: 33598 - DNA, 28 bp, Homo sapiens
  source 1..28: mol_type = genomic DNA
attgagggttcgagtcccttcgtggtcg

SEQ ID NO: 33599 - DNA, 29 bp, Homo sapiens
  source 1..29: mol_type = genomic DNA
attgagggttcgagtcccttcgtggtcgc

SEQ ID NO: 33600 - DNA, 30 bp, Homo sapiens; identical to SEQ ID NO: 7477
  source 1..30: mol_type = genomic DNA

SEQ ID NO: 33601 - DNA, 31 bp, Homo sapiens; identical to SEQ ID NO: 7478
  source 1..31: mol_type = genomic DNA

SEQ ID NO: 33602 - DNA, 40 bp, Homo sapiens; identical to SEQ ID NO: 7483
  source 1..40: mol_type = genomic DNA

SEQ ID NO: 33603 - DNA, 41 bp, Homo sapiens; identical to SEQ ID NO: 7484
  source 1..41: mol_type = genomic DNA

SEQ ID NO: 33604 - DNA, 19 bp, Homo sapiens
  source 1..19: mol_type = genomic DNA
attgcaggttcgagtcctg

SEQ ID NO: 33605 - DNA, 29 bp, Homo sapiens
  source 1..29: mol_type = genomic DNA
attgcaggttcgagtcctgccgcggtcgc

SEQ ID NO: 33606 - DNA, 30 bp, Homo sapiens; identical to SEQ ID NO: 7490
  source 1..30: mol_type = genomic DNA

SEQ ID NO: 33607 - DNA, 36 bp, Homo sapiens; identical to SEQ ID NO: 7501
  source 1..36: mol_type = genomic DNA

SEQ ID NO: 33608 - DNA, 18 bp, Homo sapiens
  source 1..18: mol_type = genomic DNA
attggtcgtggttgtagt

SEQ ID NO: 33609 - DNA, 19 bp, Homo sapiens
  source 1..19: mol_type = genomic DNA
attggtcgtggttgtagtc

SEQ ID NO: 33610 - DNA, 20 bp, Homo sapiens
  source 1..20: mol_type = genomic DNA
attggtcgtggttgtagtcc

SEQ ID NO: 33611 - DNA, 21 bp, Homo sapiens
  source 1..21: mol_type = genomic DNA
attggtcgtggttgtagtccg

SEQ ID NO: 33612 - DNA, 23 bp, Homo sapiens
  source 1..23: mol_type = genomic DNA
attggtcgtggttgtagtccgtg

SEQ ID NO: 33613 - DNA, 24 bp, Homo sapiens
  source 1..24: mol_type = genomic DNA
attggtcgtggttgtagtccgtgc

SEQ ID NO: 33614 - DNA, 25 bp, Homo sapiens
  source 1..25: mol_type = genomic DNA
attggtcgtggttgtagtccgtgcg

SEQ ID NO: 33615 - DNA, 26 bp, Homo sapiens
  source 1..26: mol_type = genomic DNA
attggtcgtggttgtagtccgtgcga

SEQ ID NO: 33616 - DNA, 27 bp, Homo sapiens
  source 1..27: mol_type = genomic DNA
attggtcgtggttgtagtccgtgcgag

SEQ ID NO: 33617 - DNA, 28 bp, Homo sapiens
  source 1..28: mol_type = genomic DNA
attggtcgtggttgtagtccgtgcgaga

SEQ ID NO: 33618 - DNA, 29 bp, Homo sapiens
  source 1..29: mol_type = genomic DNA
attggtcgtggttgtagtccgtgcgagaa

SEQ ID NO: 33619 - DNA, 30 bp, Homo sapiens; identical to SEQ ID NO: 7529
  source 1..30: mol_type = genomic DNA

SEQ ID NO: 33620 - DNA, 31 bp, Homo sapiens; identical to SEQ ID NO: 7530
  source 1..31: mol_type = genomic DNA

SEQ ID NO: 33621 - DNA, 32 bp, Homo sapiens; identical to SEQ ID NO: 7531
  source 1..32: mol_type = genomic DNA

SEQ ID NO: 33622 - DNA, 33 bp, Homo sapiens; identical to SEQ ID NO: 7532
  source 1..33: mol_type = genomic DNA

SEQ ID NO: 33623 - DNA, 34 bp, Homo sapiens; identical to SEQ ID NO: 7533
  source 1..34: mol_type = genomic DNA

SEQ ID NO: 33624 - DNA, 16 bp, Homo sapiens
  source 1..16: mol_type = genomic DNA
attggtggttcagtgg

SEQ ID NO: 33625 - DNA, 18 bp, Homo sapiens
  source 1..18: mol_type = genomic DNA
attggtggttcagtggta

SEQ ID NO: 33626 - DNA, 23 bp, Homo sapiens
  source 1..23: mol_type = genomic DNA
attggtggttcagtggtagaatt

SEQ ID NO: 33627 - DNA, 24 bp, Homo sapiens
  source 1..24: mol_type = genomic DNA
attggtggttcagtggtagaattc

SEQ ID NO: 33628 - DNA, 25 bp, Homo sapiens
  source 1..25: mol_type = genomic DNA
attggtggttcagtggtagaattct

SEQ ID NO: 33629 - DNA, 26 bp, Homo sapiens
  source 1..26: mol_type = genomic DNA
attggtggttcagtggtagaattctc

SEQ ID NO: 33630 - DNA, 27 bp, Homo sapiens
  source 1..27: mol_type = genomic DNA
attggtggttcagtggtagaattctcg

SEQ ID NO: 33631 - DNA, 28 bp, Homo sapiens
  source 1..28: mol_type = genomic DNA
attggtggttcagtggtagaattctcgc

SEQ ID NO: 33632 - DNA, 29 bp, Homo sapiens
  source 1..29: mol_type = genomic DNA
attggtggttcagtggtagaattctcgcc

SEQ ID NO: 33633 - DNA, 30 bp, Homo sapiens; identical to SEQ ID NO: 7557
  source 1..30: mol_type = genomic DNA

SEQ ID NO: 33634 - DNA, 31 bp, Homo sapiens; identical to SEQ ID NO: 7558
  source 1..31: mol_type = genomic DNA

SEQ ID NO: 33635 - DNA, 33 bp, Homo sapiens; identical to SEQ ID NO: 7560
  source 1..33: mol_type = genomic DNA

SEQ ID NO: 33636 - DNA, 31 bp, Homo sapiens; identical to SEQ ID NO: 7563
  source 1..31: mol_type = genomic DNA

SEQ ID NO: 33637 - DNA, 32 bp, Homo sapiens; identical to SEQ ID NO: 7564
  source 1..32: mol_type = genomic DNA

SEQ ID NO: 33638 - DNA, 33 bp, Homo sapiens; identical to SEQ ID NO: 7565
  source 1..33: mol_type = genomic DNA

SEQ ID NO: 33639 - DNA, 34 bp, Homo sapiens; identical to SEQ ID NO: 7566
  source 1..34: mol_type = genomic DNA

SEQ ID NO: 33640 - DNA, 35 bp, Homo sapiens; identical to SEQ ID NO: 7567
  source 1..35: mol_type = genomic DNA

SEQ ID NO: 33641 - DNA, 36 bp, Homo sapiens; identical to SEQ ID NO: 7568
  source 1..36: mol_type = genomic DNA

SEQ ID NO: 33642 - DNA, 37 bp, Homo sapiens; identical to SEQ ID NO: 7569
  source 1..37: mol_type = genomic DNA

SEQ ID NO: 33643 - DNA, 46 bp, Homo sapiens; identical to SEQ ID NO: 7578
  source 1..46: mol_type = genomic DNA

SEQ ID NO: 33644 - DNA, 16 bp, Homo sapiens
  source 1..16: mol_type = genomic DNA
attgtgaatctgacaa

SEQ ID NO: 33645 - DNA, 17 bp, Homo sapiens
  source 1..17: mol_type = genomic DNA
attgtgaatctgacaac

SEQ ID NO: 33646 - DNA, 18 bp, Homo sapiens
  source 1..18: mol_type = genomic DNA
attgtgaatctgacaaca

SEQ ID NO: 33647 - DNA, 19 bp, Homo sapiens
  source 1..19: mol_type = genomic DNA
attgtgaatctgacaacag

SEQ ID NO: 33648 - DNA, 20 bp, Homo sapiens
  source 1..20: mol_type = genomic DNA
attgtgaatctgacaacaga

SEQ ID NO: 33649 - DNA, 23 bp, Homo sapiens
  source 1..23: mol_type = genomic DNA
attgtgaatctgacaacagaggc

SEQ ID NO: 33650 - DNA, 24 bp, Homo sapiens
  source 1..24: mol_type = genomic DNA
attgtgaatctgacaacagaggct

SEQ ID NO: 33651 - DNA, 25 bp, Homo sapiens
  source 1..25: mol_type = genomic DNA
attgtgaatctgacaacagaggctt

SEQ ID NO: 33652 - DNA, 26 bp, Homo sapiens
  source 1..26: mol_type = genomic DNA
attgtgaatctgacaacagaggctta

SEQ ID NO: 33653 - DNA, 28 bp, Homo sapiens
  source 1..28: mol_type = genomic DNA
attgtgaatctgacaacagaggcttacg

SEQ ID NO: 33654 - DNA, 30 bp, Homo sapiens; identical to SEQ ID NO: 7596
  source 1..30: mol_type = genomic DNA

SEQ ID NO: 33655 - DNA, 31 bp, Homo sapiens; identical to SEQ ID NO: 7597
  source 1..31: mol_type = genomic DNA

SEQ ID NO: 33656 - DNA, 32 bp, Homo sapiens; identical to SEQ ID NO: 7598
  source 1..32: mol_type = genomic DNA

SEQ ID NO: 33657 - DNA, 33 bp, Homo sapiens; identical to SEQ ID NO: 7599
  source 1..33: mol_type = genomic DNA

SEQ ID NO: 33658 - DNA, 34 bp, Homo sapiens; identical to SEQ ID NO: 7600
  source 1..34: mol_type = genomic DNA

SEQ ID NO: 33659 - DNA, 42 bp, Homo sapiens; identical to SEQ ID NO: 7608
  source 1..42: mol_type = genomic DNA

SEQ ID NO: 33660 - DNA, 43 bp, Homo sapiens; identical to SEQ ID NO: 7609
  source 1..43: mol_type = genomic DNA

SEQ ID NO: 33661 - DNA, 44 bp, Homo sapiens; identical to SEQ ID NO: 7610
  source 1..44: mol_type = genomic DNA

SEQ ID NO: 33662 - DNA, 45 bp, Homo sapiens; identical to SEQ ID NO: 7611
  source 1..45: mol_type = genomic DNA

SEQ ID NO: 33663 - DNA, 24 bp, Homo sapiens
  source 1..24: mol_type = genomic DNA
attgtgctttgcacgcgtgggttc

SEQ ID NO: 33664 - DNA, 42 bp, Homo sapiens; identical to SEQ ID NO: 7620
  source 1..42: mol_type = genomic DNA

SEQ ID NO: 33665 - DNA, 43 bp, Homo sapiens; identical to SEQ ID NO: 7621
  source 1..43: mol_type = genomic DNA

SEQ ID NO: 33666 - DNA, 28 bp, Homo sapiens
  source 1..28: mol_type = genomic DNA
attgtgggttcgagtcccatctggggtg

SEQ ID NO: 33667 - DNA, 29 bp, Homo sapiens
  source 1..29: mol_type = genomic DNA
attgtgggttcgagtcccatctggggtgc

SEQ ID NO: 33668 - DNA, 30 bp, Homo sapiens; identical to SEQ ID NO: 7626
  source 1..30: mol_type = genomic DNA

SEQ ID NO: 33669 - DNA, 29 bp, Homo sapiens
  source 1..29: mol_type = genomic DNA
attgtgggttcgagtcccatctgggtcgc

SEQ ID NO: 33670 - DNA, 30 bp, Homo sapiens; identical to SEQ ID NO: 7630
  source 1..30: mol_type = genomic DNA

SEQ ID NO: 33671 - DNA, 16 bp, Homo sapiens
  source 1..16: mol_type = genomic DNA
atttcaacttaacttg

SEQ ID NO: 33672 - DNA, 18 bp, Homo sapiens
  source 1..18: mol_type = genomic DNA
atttcaacttaacttgac

SEQ ID NO: 33673 - DNA, 19 bp, Homo sapiens
  source 1..19: mol_type = genomic DNA
atttcaacttaacttgacc

SEQ ID NO: 33674 - DNA, 21 bp, Homo sapiens
  source 1..21: mol_type = genomic DNA
atttcaacttaacttgaccgc

SEQ ID NO: 33675 - DNA, 23 bp, Homo sapiens
  source 1..23: mol_type = genomic DNA
atttcaacttaacttgaccgctc

SEQ ID NO: 33676 - DNA, 25 bp, Homo sapiens
  source 1..25: mol_type = genomic DNA
atttcaacttaacttgaccgctctg

SEQ ID NO: 33677 - DNA, 26 bp, Homo sapiens
  source 1..26: mol_type = genomic DNA
atttcaacttaacttgaccgctctga

SEQ ID NO: 33678 - DNA, 27 bp, Homo sapiens
  source 1..27: mol_type = genomic DNA
atttcaacttaacttgaccgctctgac

SEQ ID NO: 33679 - DNA, 28 bp, Homo sapiens
  source 1..28: mol_type = genomic DNA
atttcaacttaacttgaccgctctgacc

SEQ ID NO: 33680 - DNA, 29 bp, Homo sapiens
  source 1..29: mol_type = genomic DNA
atttcaacttaacttgaccgctctgacca

SEQ ID NO: 33681 - DNA, 33 bp, Homo sapiens; identical to SEQ ID NO: 7683
  source 1..33: mol_type = genomic DNA

SEQ ID NO: 33682 - DNA, 38 bp, Homo sapiens; identical to SEQ ID NO: 7684
  source 1..38: mol_type = genomic DNA

SEQ ID NO: 33683 - DNA, 42 bp, Homo sapiens
  source 1..42: mol_type = genomic DNA
attttggattctcagggatgggttcgattctcatagtcctag

SEQ ID NO: 33684 - DNA, 43 bp, Homo sapiens; identical to SEQ ID NO: 7692
  source 1..43: mol_type = genomic DNA

SEQ ID NO: 33685 - DNA, 44 bp, Homo sapiens; identical to SEQ ID NO: 7693
  source 1..44: mol_type = genomic DNA

SEQ ID NO: 33686 - DNA, 45 bp, Homo sapiens; identical to SEQ ID NO: 7694
  source 1..45: mol_type = genomic DNA

SEQ ID NO: 33687 - DNA, 16 bp, Homo sapiens
  source 1..16: mol_type = genomic DNA
caaaacatcagattgt

SEQ ID NO: 33688 - DNA, 18 bp, Homo sapiens
  source 1..18: mol_type = genomic DNA
caaaacatcagattgtga

SEQ ID NO: 33689 - DNA, 20 bp, Homo sapiens
  source 1..20: mol_type = genomic DNA
caaaacatcagattgtgaat

SEQ ID NO: 33690 - DNA, 21 bp, Homo sapiens
  source 1..21: mol_type = genomic DNA
caaaacatcagattgtgaatc

SEQ ID NO: 33691 - DNA, 22 bp, Homo sapiens
  source 1..22: mol_type = genomic DNA
caaaacatcagattgtgaatct

SEQ ID NO: 33692 - DNA, 23 bp, Homo sapiens
  source 1..23: mol_type = genomic DNA
caaaacatcagattgtgaatctg

SEQ ID NO: 33693 - DNA, 28 bp, Homo sapiens
  source 1..28: mol_type = genomic DNA
caaaacatcagattgtgaatctgacaac

SEQ ID NO: 33694 - DNA, 31 bp, Homo sapiens; identical to SEQ ID NO: 7731
  source 1..31: mol_type = genomic DNA

SEQ ID NO: 33695 - DNA, 33 bp, Homo sapiens; identical to SEQ ID NO: 7733
  source 1..33: mol_type = genomic DNA

SEQ ID NO: 33696 - DNA, 34 bp, Homo sapiens; identical to SEQ ID NO: 7734
  source 1..34: mol_type = genomic DNA

SEQ ID NO: 33697 - DNA, 35 bp, Homo sapiens; identical to SEQ ID NO: 7735
  source 1..35: mol_type = genomic DNA

SEQ ID NO: 33698 - DNA, 36 bp, Homo sapiens; identical to SEQ ID NO: 7736
  source 1..36: mol_type = genomic DNA

SEQ ID NO: 33699 - DNA, 37 bp, Homo sapiens; identical to SEQ ID NO: 7737
  source 1..37: mol_type = genomic DNA

SEQ ID NO: 33700 - DNA, 39 bp, Homo sapiens; identical to SEQ ID NO: 7739
  source 1..39: mol_type = genomic DNA

SEQ ID NO: 33701 - DNA, 40 bp, Homo sapiens; identical to SEQ ID NO: 7740
  source 1..40: mol_type = genomic DNA

SEQ ID NO: 33702 - DNA, 41 bp, Homo sapiens; identical to SEQ ID NO: 7741
  source 1..41: mol_type = genomic DNA

SEQ ID NO: 33703 - DNA, 42 bp, Homo sapiens; identical to SEQ ID NO: 7742
  source 1..42: mol_type = genomic DNA

SEQ ID NO: 33704 - DNA, 43 bp, Homo sapiens; identical to SEQ ID NO: 7743
  source 1..43: mol_type = genomic DNA

SEQ ID NO: 33705 - DNA, 44 bp, Homo sapiens; identical to SEQ ID NO: 7744
  source 1..44: mol_type = genomic DNA

SEQ ID NO: 33706 - DNA, 45 bp, Homo sapiens; identical to SEQ ID NO: 7745
  source 1..45: mol_type = genomic DNA

SEQ ID NO: 33707 - DNA, 46 bp, Homo sapiens; identical to SEQ ID NO: 7746
  source 1..46: mol_type = genomic DNA

SEQ ID NO: 33708 - DNA, 47 bp, Homo sapiens; identical to SEQ ID NO: 7747
  source 1..47: mol_type = genomic DNA

SEQ ID NO: 33709 - DNA, 21 bp, Homo sapiens
  source 1..21: mol_type = genomic DNA
caaaacgaatgatttcgactc

SEQ ID NO: 33710 - DNA, 22 bp, Homo sapiens
  source 1..22: mol_type = genomic DNA
caaaacgaatgatttcgactca

SEQ ID NO: 33711 - DNA, 16 bp, Homo sapiens
  source 1..16: mol_type = genomic DNA
caaacctgccggggct

SEQ ID NO: 33712 - DNA, 17 bp, Homo sapiens
  source 1..17: mol_type = genomic DNA
caaacctgccggggctt

SEQ ID NO: 33713 - DNA, 18 bp, Homo sapiens
  source 1..18: mol_type = genomic DNA
caaacctgccggggcttc

SEQ ID NO: 33714 - DNA, 19 bp, Homo sapiens
  source 1..19: mol_type = genomic DNA
caaacctgccggggcttcc

SEQ ID NO: 33715 - DNA, 33 bp, Homo sapiens; identical to SEQ ID NO: 7776
  source 1..33: mol_type = genomic DNA

SEQ ID NO: 33716 - DNA, 36 bp, Homo sapiens; identical to SEQ ID NO: 7779
  source 1..36: mol_type = genomic DNA

SEQ ID NO: 33717 - DNA, 33 bp, Homo sapiens; identical to SEQ ID NO: 7799
  source 1..33: mol_type = genomic DNA

SEQ ID NO: 33718 - DNA, 34 bp, Homo sapiens; identical to SEQ ID NO: 7815
  source 1..34: mol_type = genomic DNA

SEQ ID NO: 33719 - DNA, 35 bp, Homo sapiens; identical to SEQ ID NO: 7816
  source 1..35: mol_type = genomic DNA

SEQ ID NO: 33720 - DNA, 36 bp, Homo sapiens; identical to SEQ ID NO: 7817
  source 1..36: mol_type = genomic DNA

SEQ ID NO: 33721 - DNA, 34 bp, Homo sapiens; identical to SEQ ID NO: 7818
  source 1..34: mol_type = genomic DNA

SEQ ID NO: 33722 - DNA, 35 bp, Homo sapiens; identical to SEQ ID NO: 7819
  source 1..35: mol_type = genomic DNA

SEQ ID NO: 33723 - DNA, 36 bp, Homo sapiens; identical to SEQ ID NO: 7820
  source 1..36: mol_type = genomic DNA

SEQ ID NO: 33724 - DNA, 34 bp, Homo sapiens
  source 1..34: mol_type = genomic DNA
caaaggttgtgggttcgagtcccaccagagtcgc

SEQ ID NO: 33725 - DNA, 35 bp, Homo sapiens; identical to SEQ ID NO: 7821
  source 1..35: mol_type = genomic DNA

SEQ ID NO: 33726 - DNA, 18 bp, Homo sapiens
  source 1..18: mol_type = genomic DNA
caaatcacgtcggggtca

SEQ ID NO: 33727 - DNA, 19 bp, Homo sapiens
  source 1..19: mol_type = genomic DNA
caaatcacgtcggggtcac

SEQ ID NO: 33728 - DNA, 20 bp, Homo sapiens
  source 1..20: mol_type = genomic DNA
caaatcacgtcggggtcacc

SEQ ID NO: 33729 - DNA, 21 bp, Homo sapiens
  source 1..21: mol_type = genomic DNA
caaatcacgtcggggtcacca

SEQ ID NO: 33730 - DNA, 16 bp, Homo sapiens
  source 1..16: mol_type = genomic DNA
caaatcccggacgagc

SEQ ID NO: 33731 - DNA, 17 bp, Homo sapiens
  source 1..17: mol_type = genomic DNA
caaatcccggacgagcc

SEQ ID NO: 33732 - DNA, 18 bp, Homo sapiens
  source 1..18: mol_type = genomic DNA
caaatcccggacgagccc

SEQ ID NO: 33733 - DNA, 19 bp, Homo sapiens
  source 1..19: mol_type = genomic DNA
caaatcccggacgagcccc

SEQ ID NO: 33734 - DNA, 20 bp, Homo sapiens
  source 1..20: mol_type = genomic DNA
caaatcccggacgagccccc

SEQ ID NO: 33735 - DNA, 21 bp, Homo sapiens
  source 1..21: mol_type = genomic DNA
caaatcccggacgagccccca

SEQ ID NO: 33736 - DNA, 19 bp, Homo sapiens
  source 1..19: mol_type = genomic DNA
caaatccgggtgccccctc

SEQ ID NO: 33737 - DNA, 20 bp, Homo sapiens
  source 1..20: mol_type = genomic DNA
caaatccgggtgccccctcc

SEQ ID NO: 33738 - DNA, 18 bp, Homo sapiens
  source 1..18: mol_type = genomic DNA
caaatctcgctggggcct

SEQ ID NO: 33739 - DNA, 19 bp, Homo sapiens
  source 1..19: mol_type = genomic DNA
caaatctcgctggggcctc

SEQ ID NO: 33740 - DNA, 20 bp, Homo sapiens
  source 1..20: mol_type = genomic DNA
caaatctcgctggggcctcc

SEQ ID NO: 33741 - DNA, 17 bp, Homo sapiens
  source 1..17: mol_type = genomic DNA
caaatctcggtggaacc

SEQ ID NO: 33742 - DNA, 18 bp, Homo sapiens
  source 1..18: mol_type = genomic DNA
caaatctcggtggaacct

SEQ ID NO: 33743 - DNA, 19 bp, Homo sapiens
  source 1..19: mol_type = genomic DNA
caaatctcggtggaacctc

SEQ ID NO: 33744 - DNA, 20 bp, Homo sapiens
  source 1..20: mol_type = genomic DNA
caaatctcggtggaacctcc

SEQ ID NO: 33745 - DNA, 21 bp, Homo sapiens
  source 1..21: mol_type = genomic DNA
caaatctcggtggaacctcca

SEQ ID NO: 33746 - DNA, 17 bp, Homo sapiens
  source 1..17: mol_type = genomic DNA
caaatctcggtgggacc

SEQ ID NO: 33747 - DNA, 18 bp, Homo sapiens
  source 1..18: mol_type = genomic DNA
caaatctcggtgggacct

SEQ ID NO: 33748 - DNA, 19 bp, Homo sapiens
  source 1..19: mol_type = genomic DNA
caaatctcggtgggacctc

SEQ ID NO: 33749 - DNA, 20 bp, Homo sapiens
  source 1..20: mol_type = genomic DNA
caaatctcggtgggacctcc

SEQ ID NO: 33750 - DNA, 21 bp, Homo sapiens
  source 1..21: mol_type = genomic DNA
caaatggtagagcgctcgctt

SEQ ID NO: 33751 - DNA, 35 bp, Homo sapiens; identical to SEQ ID NO: 7862
  source 1..35: mol_type = genomic DNA

SEQ ID NO: 33752 - DNA, 36 bp, Homo sapiens; identical to SEQ ID NO: 7863
  source 1..36: mol_type = genomic DNA

SEQ ID NO: 33753 - DNA, 37 bp, Homo sapiens; identical to SEQ ID NO: 7864
  source 1..37: mol_type = genomic DNA

SEQ ID NO: 33754 - DNA, 38 bp, Homo sapiens; identical to SEQ ID NO: 7865
  source 1..38: mol_type = genomic DNA

SEQ ID NO: 33755 - DNA, 40 bp, Homo sapiens; identical to SEQ ID NO: 7867
  source 1..40: mol_type = genomic DNA

SEQ ID NO: 33756 - DNA, 30 bp, Homo sapiens; identical to SEQ ID NO: 7881
  source 1..30: mol_type = genomic DNA

SEQ ID NO: 33757 - DNA, 31 bp, Homo sapiens; identical to SEQ ID NO: 7882
  source 1..31: mol_type = genomic DNA

SEQ ID NO: 33758 - DNA, 32 bp, Homo sapiens; identical to SEQ ID NO: 7883
  source 1..32: mol_type = genomic DNA

SEQ ID NO: 33759 - DNA, 18 bp, Homo sapiens
  source 1..18: mol_type = genomic DNA
caacatggctttctcacc

SEQ ID NO: 33760 - DNA, 19 bp, Homo sapiens
  source 1..19: mol_type = genomic DNA
caacatggctttctcacca

SEQ ID NO: 33761 - DNA, 28 bp, Homo sapiens
  source 1..28: mol_type = genomic DNA
caacctcggttcgaatccgagtcacggc

SEQ ID NO: 33762 - DNA, 29 bp, Homo sapiens
  source 1..29: mol_type = genomic DNA
caacctcggttcgaatccgagtcacggca

SEQ ID NO: 33763 - DNA, 30 bp, Homo sapiens; identical to SEQ ID NO: 7895
  source 1..30: mol_type = genomic DNA

SEQ ID NO: 33764 - DNA, 20 bp, Homo sapiens
  source 1..20: mol_type = genomic DNA
caacggtagcgcgtctgact

SEQ ID NO: 33765 - DNA, 16 bp, Homo sapiens
  source 1..16: mol_type = genomic DNA
caacttaacttgaccg

SEQ ID NO: 33766 - DNA, 19 bp, Homo sapiens
  source 1..19: mol_type = genomic DNA
caacttaacttgaccgctc

SEQ ID NO: 33767 - DNA, 21 bp, Homo sapiens
  source 1..21: mol_type = genomic DNA
caacttaacttgaccgctctg

SEQ ID NO: 33768 - DNA, 22 bp, Homo sapiens
  source 1..22: mol_type = genomic DNA
caacttaacttgaccgctctga

SEQ ID NO: 33769 - DNA, 23 bp, Homo sapiens
  source 1..23: mol_type = genomic DNA
caacttaacttgaccgctctgac

SEQ ID NO: 33770 - DNA, 24 bp, Homo sapiens
  source 1..24: mol_type = genomic DNA
caacttaacttgaccgctctgacc

SEQ ID NO: 33771 - DNA, 25 bp, Homo sapiens
  source 1..25: mol_type = genomic DNA
caacttaacttgaccgctctgacca

SEQ ID NO: 33772 - DNA, 17 bp, Homo sapiens
  source 1..17: mol_type = genomic DNA
caacttacacttaggag

SEQ ID NO: 33773 - DNA, 26 bp, Homo sapiens
  source 1..26: mol_type = genomic DNA
caacttacacttaggagatttcaact

SEQ ID NO: 33774 - DNA, 27 bp, Homo sapiens
  source 1..27: mol_type = genomic DNA
caacttacacttaggagatttcaactt

SEQ ID NO: 33775 - DNA, 34 bp, Homo sapiens; identical to SEQ ID NO: 7952
  source 1..34: mol_type = genomic DNA

SEQ ID NO: 33776 - DNA, 35 bp, Homo sapiens; identical to SEQ ID NO: 7953
  source 1..35: mol_type = genomic DNA

SEQ ID NO: 33777 - DNA, 36 bp, Homo sapiens; identical to SEQ ID NO: 7954
  source 1..36: mol_type = genomic DNA

SEQ ID NO: 33778 - DNA, 37 bp, Homo sapiens; identical to SEQ ID NO: 7955
  source 1..37: mol_type = genomic DNA

SEQ ID NO: 33779 - DNA, 38 bp, Homo sapiens; identical to SEQ ID NO: 7956
  source 1..38: mol_type = genomic DNA

SEQ ID NO: 33780 - DNA, 39 bp, Homo sapiens; identical to SEQ ID NO: 7957
  source 1..39: mol_type = genomic DNA

SEQ ID NO: 33781 - DNA, 40 bp, Homo sapiens; identical to SEQ ID NO: 7958
  source 1..40: mol_type = genomic DNA

SEQ ID NO: 33782 - DNA, 41 bp, Homo sapiens; identical to SEQ ID NO: 7959
  source 1..41: mol_type = genomic DNA

SEQ ID NO: 33783 - DNA, 42 bp, Homo sapiens; identical to SEQ ID NO: 7960
  source 1..42: mol_type = genomic DNA

SEQ ID NO: 33784 - DNA, 43 bp, Homo sapiens; identical to SEQ ID NO: 7961
  source 1..43: mol_type = genomic DNA

SEQ ID NO: 33785 - DNA, 44 bp, Homo sapiens; identical to SEQ ID NO: 7962
  source 1..44: mol_type = genomic DNA

SEQ ID NO: 33786 - DNA, 45 bp, Homo sapiens; identical to SEQ ID NO: 7963
  source 1..45: mol_type = genomic DNA

SEQ ID NO: 33787 - DNA, 46 bp, Homo sapiens; identical to SEQ ID NO: 7964
  source 1..46: mol_type = genomic DNA

SEQ ID NO: 33788 - DNA, 19 bp, Homo sapiens
  source 1..19: mol_type = genomic DNA
caagaactgctaactcatg

SEQ ID NO: 33789 - DNA, 20 bp, Homo sapiens
  source 1..20: mol_type = genomic DNA
caagaactgctaactcatgc

SEQ ID NO: 33790 - DNA, 21 bp, Homo sapiens
  source 1..21: mol_type = genomic DNA
caagaactgctaactcatgcc

SEQ ID NO: 33791 - DNA, 24 bp, Homo sapiens
  source 1..24: mol_type = genomic DNA
caagaactgctaactcatgccccc

SEQ ID NO: 33792 - DNA, 37 bp, Homo sapiens; identical to SEQ ID NO: 7986
  source 1..37: mol_type = genomic DNA

SEQ ID NO: 33793 - DNA, 41 bp, Homo sapiens; identical to SEQ ID NO: 7990
  source 1..41: mol_type = genomic DNA

SEQ ID NO: 33794 - DNA, 42 bp, Homo sapiens; identical to SEQ ID NO: 7991
  source 1..42: mol_type = genomic DNA

SEQ ID NO: 33795 - DNA, 46 bp, Homo sapiens; identical to SEQ ID NO: 7995
  source 1..46: mol_type = genomic DNA

SEQ ID NO: 33796 - DNA, 33 bp, Homo sapiens
  source 1..33: mol_type = genomic DNA
caagaggtccccggttcaaatccgggtgccccc

SEQ ID NO: 33797 - DNA, 34 bp, Homo sapiens; identical to SEQ ID NO: 8006
  source 1..34: mol_type = genomic DNA

SEQ ID NO: 33798 - DNA, 35 bp, Homo sapiens; identical to SEQ ID NO: 8007
  source 1..35: mol_type = genomic DNA

SEQ ID NO: 33799 - DNA, 36 bp, Homo sapiens; identical to SEQ ID NO: 8008
  source 1..36: mol_type = genomic DNA

SEQ ID NO: 33800 - DNA, 34 bp, Homo sapiens
  source 1..34: mol_type = genomic DNA
caagaggtccctggttcaaatccaggtgccccct

SEQ ID NO: 33801 - DNA, 35 bp, Homo sapiens
  source 1..35: mol_type = genomic DNA
caagaggtccctggttcaaatccaggtgccccctc

SEQ ID NO: 33802 - DNA, 36 bp, Homo sapiens
  source 1..36: mol_type = genomic DNA
caagaggtccctggttcaaatccaggtgccccctcc

SEQ ID NO: 33803 - DNA, 34 bp, Homo sapiens; identical to SEQ ID NO: 8012
  source 1..34: mol_type = genomic DNA

SEQ ID NO: 33804 - DNA, 35 bp, Homo sapiens
  source 1..35: mol_type = genomic DNA
caagaggtccctggttcaaatccgggtgccccctc

SEQ ID NO: 33805 - DNA, 36 bp, Homo sapiens
  source 1..36: mol_type = genomic DNA
caagaggtccctggttcaaatccgggtgccccctcc

SEQ ID NO: 33806 - DNA, 31 bp, Homo sapiens; identical to SEQ ID NO: 8025
  source 1..31: mol_type = genomic DNA

SEQ ID NO: 33807 - DNA, 34 bp, Homo sapiens; identical to SEQ ID NO: 8034
  source 1..34: mol_type = genomic DNA

SEQ ID NO: 33808 - DNA, 30 bp, Homo sapiens; identical to SEQ ID NO: 8036
  source 1..30: mol_type = genomic DNA

SEQ ID NO: 33809 - DNA, 33 bp, Homo sapiens
  source 1..33: mol_type = genomic DNA
caaggtcgcgggttcgatccccgtacgggccac

SEQ ID NO: 33810 - DNA, 34 bp, Homo sapiens; identical to SEQ ID NO: 8039
  source 1..34: mol_type = genomic DNA

SEQ ID NO: 33811 - DNA, 19 bp, Homo sapiens
  source 1..19: mol_type = genomic DNA
caagtcacgtcggggtcac

SEQ ID NO: 33812 - DNA, 20 bp, Homo sapiens
  source 1..20: mol_type = genomic DNA
caagtcacgtcggggtcacc

SEQ ID NO: 33813 - DNA, 20 bp, Homo sapiens
  source 1..20: mol_type = genomic DNA
caagtccctgtccaggcgcc

SEQ ID NO: 33814 - DNA, 18 bp, Homo sapiens
  source 1..18: mol_type = genomic DNA
caagtccctgttcgggcg

SEQ ID NO: 33815 - DNA, 19 bp, Homo sapiens
  source 1..19: mol_type = genomic DNA
caagtccctgttcgggcgc

SEQ ID NO: 33816 - DNA, 20 bp, Homo sapiens
  source 1..20: mol_type = genomic DNA
caagtccctgttcgggcgcc

SEQ ID NO: 33817 - DNA, 19 bp, Homo sapiens
  source 1..19: mol_type = genomic DNA
caagtctcggtggaacctc

SEQ ID NO: 33818 - DNA, 18 bp, Homo sapiens
  source 1..18: mol_type = genomic DNA
caagttctggtctccgga

SEQ ID NO: 33819 - DNA, 28 bp, Homo sapiens
  source 1..28: mol_type = genomic DNA
caatacactgaaaatgtttagacgggct

SEQ ID NO: 33820 - DNA, 29 bp, Homo sapiens
  source 1..29: mol_type = genomic DNA
caatacactgaaaatgtttagacgggctc

SEQ ID NO: 33821 - DNA, 30 bp, Homo sapiens; identical to SEQ ID NO: 8070
  source 1..30: mol_type = genomic DNA

SEQ ID NO: 33822 - DNA, 31 bp, Homo sapiens; identical to SEQ ID NO: 8071
  source 1..31: mol_type = genomic DNA

SEQ ID NO: 33823 - DNA, 16 bp, Homo sapiens
  source 1..16: mol_type = genomic DNA
caatacttaatttctg

SEQ ID NO: 33824 - DNA, 17 bp, Homo sapiens
  source 1..17: mol_type = genomic DNA
caatacttaatttctgc

SEQ ID NO: 33825 - DNA, 18 bp, Homo sapiens
  source 1..18: mol_type = genomic DNA
caatacttaatttctgcc

SEQ ID NO: 33826 - DNA, 19 bp, Homo sapiens
  source 1..19: mol_type = genomic DNA
caatacttaatttctgcca

SEQ ID NO: 33827 - DNA, 19 bp, Homo sapiens
  source 1..19: mol_type = genomic DNA
caatccccggcacctccac

SEQ ID NO: 33828 - DNA, 20 bp, Homo sapiens
  source 1..20: mol_type = genomic DNA
caatccccggcacctccacc

SEQ ID NO: 33829 - DNA, 20 bp, Homo sapiens
  source 1..20: mol_type = genomic DNA
caatccccggcatctccacc

SEQ ID NO: 33830 - DNA, 19 bp, Homo sapiens
  source 1..19: mol_type = genomic DNA
caatcccgggtttcggcac

SEQ ID NO: 33831 - DNA, 17 bp, Homo sapiens
  source 1..17: mol_type = genomic DNA
caatggacgagcgcgct

SEQ ID NO: 33832 - DNA, 35 bp, Homo sapiens; identical to SEQ ID NO: 8105
  source 1..35: mol_type = genomic DNA

SEQ ID NO: 33833 - DNA, 36 bp, Homo sapiens; identical to SEQ ID NO: 8106
  source 1..36: mol_type = genomic DNA

SEQ ID NO: 33834 - DNA, 37 bp, Homo sapiens; identical to SEQ ID NO: 8107
  source 1..37: mol_type = genomic DNA

SEQ ID NO: 33835 - DNA, 21 bp, Homo sapiens
  source 1..21: mol_type = genomic DNA
caatggataacgcgtctgact

SEQ ID NO: 33836 - DNA, 17 bp, Homo sapiens
  source 1..17: mol_type = genomic DNA
caatggatagcgcattg

SEQ ID NO: 33837 - DNA, 18 bp, Homo sapiens
  source 1..18: mol_type = genomic DNA
caatggatagcgcattgg

SEQ ID NO: 33838 - DNA, 19 bp, Homo sapiens
  source 1..19: mol_type = genomic DNA
caatggatagcgcattgga

SEQ ID NO: 33839 - DNA, 42 bp, Homo sapiens
  source 1..42: mol_type = genomic DNA
caatggatagcgcattggacttctaattcaaaggttccgggt

SEQ ID NO: 33840 - DNA, 43 bp, Homo sapiens
  source 1..43: mol_type = genomic DNA
caatggatagcgcattggacttctaattcaaaggttccgggtt

SEQ ID NO: 33841 - DNA, 44 bp, Homo sapiens
  source 1..44: mol_type = genomic DNA
caatggggtttccccgcacaggttcgaatcctgttcgtgacgcc

SEQ ID NO: 33842 - DNA, 31 bp, Homo sapiens
  source 1..31: mol_type = genomic DNA
caatggtggttcagtggtagaattctcgcct

SEQ ID NO: 33843 - DNA, 18 bp, Homo sapiens
  source 1..18: mol_type = genomic DNA
caattaactagttttgac

SEQ ID NO: 33844 - DNA, 38 bp, Homo sapiens; identical to SEQ ID NO: 8134
  source 1..38: mol_type = genomic DNA

SEQ ID NO: 33845 - DNA, 18 bp, Homo sapiens
  source 1..18: mol_type = genomic DNA
caattccccgacggggag

SEQ ID NO: 33846 - DNA, 19 bp, Homo sapiens
  source 1..19: mol_type = genomic DNA
caattccccgacggggagc

SEQ ID NO: 33847 - DNA, 20 bp, Homo sapiens
  source 1..20: mol_type = genomic DNA
caattccccgacggggagcc

SEQ ID NO: 33848 - DNA, 20 bp, Homo sapiens
  source 1..20: mol_type = genomic DNA
caattccggctcgaaggacc

SEQ ID NO: 33849 - DNA, 19 bp, Homo sapiens
  source 1..19: mol_type = genomic DNA
caattctcgctggggcctc

SEQ ID NO: 33850 - DNA, 16 bp, Homo sapiens
  source 1..16: mol_type = genomic DNA
cacaagaactgctaac

SEQ ID NO: 33851 - DNA, 17 bp, Homo sapiens
  source 1..17: mol_type = genomic DNA
cacaagaactgctaact

SEQ ID NO: 33852 - DNA, 18 bp, Homo sapiens
  source 1..18: mol_type = genomic DNA
cacaagaactgctaactc

SEQ ID NO: 33853 - DNA, 22 bp, Homo sapiens
  source 1..22: mol_type = genomic DNA
cacaagaactgctaactcatgc

SEQ ID NO: 33854 - DNA, 26 bp, Homo sapiens
  source 1..26: mol_type = genomic DNA
cacaagaactgctaactcatgccccc

SEQ ID NO: 33855 - DNA, 29 bp, Homo sapiens
  source 1..29: mol_type = genomic DNA
cacaagaactgctaactcatgcccccatg

SEQ ID NO: 33856 - DNA, 43 bp, Homo sapiens; identical to SEQ ID NO: 8196
  source 1..43: mol_type = genomic DNA

SEQ ID NO: 33857 - DNA, 44 bp, Homo sapiens; identical to SEQ ID NO: 8197
  source 1..44: mol_type = genomic DNA

SEQ ID NO: 33858 - DNA, 45 bp, Homo sapiens; identical to SEQ ID NO: 8198
  source 1..45: mol_type = genomic DNA

SEQ ID NO: 33859 - DNA, 40 bp, Homo sapiens
  source 1..40: mol_type = genomic DNA
cacacgcgaaaggtccccggttcgaaaccgggcggaaaca

SEQ ID NO: 33860 - DNA, 41 bp, Homo sapiens
  source 1..41: mol_type = genomic DNA
cacacgcgaaaggtccccggttcgaaaccgggcggaaacac

SEQ ID NO: 33861 - DNA, 42 bp, Homo sapiens; identical to SEQ ID NO: 8203
  source 1..42: mol_type = genomic DNA

SEQ ID NO: 33862 - DNA, 31 bp, Homo sapiens
  source 1..31: mol_type = genomic DNA
cacacgtgggttcgaatcccatcctcgtcgc

SEQ ID NO: 33863 - DNA, 32 bp, Homo sapiens; identical to SEQ ID NO: 8204
  source 1..32: mol_type = genomic DNA

SEQ ID NO: 33864 - DNA, 27 bp, Homo sapiens
  source 1..27: mol_type = genomic DNA
cacaggttcgaatcctgttcgtgacgc

SEQ ID NO: 33865 - DNA, 28 bp, Homo sapiens
  source 1..28: mol_type = genomic DNA
cacaggttcgaatcctgttcgtgacgcc

SEQ ID NO: 33866 - DNA, 20 bp, Homo sapiens
  source 1..20: mol_type = genomic DNA
cacatcaccccataaacacc

SEQ ID NO: 33867 - DNA, 21 bp, Homo sapiens
  source 1..21: mol_type = genomic DNA
cacatcaccccataaacacca

SEQ ID NO: 33868 - DNA, 23 bp, Homo sapiens
  source 1..23: mol_type = genomic DNA
cacatggtctagcggttaggatt

SEQ ID NO: 33869 - DNA, 25 bp, Homo sapiens
  source 1..25: mol_type = genomic DNA
cacatggtctagcggttaggattcc

SEQ ID NO: 33870 - DNA, 26 bp, Homo sapiens
  source 1..26: mol_type = genomic DNA
cacatggtctagcggttaggattcct

SEQ ID NO: 33871 - DNA, 27 bp, Homo sapiens
  source 1..27: mol_type = genomic DNA
cacatggtctagcggttaggattcctg

SEQ ID NO: 33872 - DNA, 28 bp, Homo sapiens
  source 1..28: mol_type = genomic DNA
cacatggtctagcggttaggattcctgg

SEQ ID NO: 33873 - DNA, 29 bp, Homo sapiens
  source 1..29: mol_type = genomic DNA
cacatggtctagcggttaggattcctggt

SEQ ID NO: 33874 - DNA, 30 bp, Homo sapiens; identical to SEQ ID NO: 8223
  source 1..30: mol_type = genomic DNA

SEQ ID NO: 33875 - DNA, 31 bp, Homo sapiens; identical to SEQ ID NO: 8224
  source 1..31: mol_type = genomic DNA

SEQ ID NO: 33876 - DNA, 32 bp, Homo sapiens; identical to SEQ ID NO: 8225
  source 1..32: mol_type = genomic DNA

SEQ ID NO: 33877 - DNA, 33 bp, Homo sapiens; identical to SEQ ID NO: 8226
  source 1..33: mol_type = genomic DNA

SEQ ID NO: 33878 - DNA, 34 bp, Homo sapiens; identical to SEQ ID NO: 8227
  source 1..34: mol_type = genomic DNA

SEQ ID NO: 33879 - DNA, 37 bp, Homo sapiens; identical to SEQ ID NO: 8230
  source 1..37: mol_type = genomic DNA

SEQ ID NO: 33880 - DNA, 47 bp, Homo sapiens; identical to SEQ ID NO: 8258
  source 1..47: mol_type = genomic DNA

SEQ ID NO: 33881 - DNA, 31 bp, Homo sapiens; identical to SEQ ID NO: 8268
  source 1..31: mol_type = genomic DNA

SEQ ID NO: 33882 - DNA, 32 bp, Homo sapiens
  source 1..32: mol_type = genomic DNA
cacccaggcggcccgggttcgactcccggtgt

SEQ ID NO: 33883 - DNA, 33 bp, Homo sapiens; identical to SEQ ID NO: 8269
  source 1..33: mol_type = genomic DNA

SEQ ID NO: 33884 - DNA, 34 bp, Homo sapiens; identical to SEQ ID NO: 8270
  source 1..34: mol_type = genomic DNA

SEQ ID NO: 33885 - DNA, 35 bp, Homo sapiens; identical to SEQ ID NO: 8271
  source 1..35: mol_type = genomic DNA

SEQ ID NO: 33886 - DNA, 36 bp, Homo sapiens; identical to SEQ ID NO: 8272
  source 1..36: mol_type = genomic DNA

SEQ ID NO: 33887 - DNA, 37 bp, Homo sapiens; identical to SEQ ID NO: 8273
  source 1..37: mol_type = genomic DNA

SEQ ID NO: 33888 - DNA, 38 bp, Homo sapiens; identical to SEQ ID NO: 8274
  source 1..38: mol_type = genomic DNA

SEQ ID NO: 33889 - DNA, 39 bp, Homo sapiens; identical to SEQ ID NO: 8275
  source 1..39: mol_type = genomic DNA

SEQ ID NO: 33890 - DNA, 40 bp, Homo sapiens; identical to SEQ ID NO: 8276
  source 1..40: mol_type = genomic DNA

SEQ ID NO: 33891 - DNA, 35 bp, Homo sapiens; identical to SEQ ID NO: 8282
  source 1..35: mol_type = genomic DNA

SEQ ID NO: 33892 - DNA, 36 bp, Homo sapiens
  source 1..36: mol_type = genomic DNA
cacccaggtggcccgggttcgactcccggtatggga

SEQ ID NO: 33893 - DNA, 37 bp, Homo sapiens; identical to SEQ ID NO: 8283
  source 1..37: mol_type = genomic DNA

SEQ ID NO: 33894 - DNA, 38 bp, Homo sapiens; identical to SEQ ID NO: 8284
  source 1..38: mol_type = genomic DNA

SEQ ID NO: 33895 - DNA, 39 bp, Homo sapiens; identical to SEQ ID NO: 8285
  source 1..39: mol_type = genomic DNA

SEQ ID NO: 33896 - DNA, 16 bp, Homo sapiens
  source 1..16: mol_type = genomic DNA
caccccataaacacca

SEQ ID NO: 33897 - DNA, 19 bp, Homo sapiens
  source 1..19: mol_type = genomic DNA
caccgccgcggcccgggtt

SEQ ID NO: 33898 - DNA, 36 bp, Homo sapiens; identical to SEQ ID NO: 8311
  source 1..36: mol_type = genomic DNA

SEQ ID NO: 33899 - DNA, 37 bp, Homo sapiens; identical to SEQ ID NO: 8312
  source 1..37: mol_type = genomic DNA

SEQ ID NO: 33900 - DNA, 38 bp, Homo sapiens; identical to SEQ ID NO: 8313
  source 1..38: mol_type = genomic DNA

SEQ ID NO: 33901 - DNA, 39 bp, Homo sapiens; identical to SEQ ID NO: 8314
  source 1..39: mol_type = genomic DNA

SEQ ID NO: 33902 - DNA, 40 bp, Homo sapiens; identical to SEQ ID NO: 8315
  source 1..40: mol_type = genomic DNA

SEQ ID NO: 33903 - DNA, 17 bp, Homo sapiens
  source 1..17: mol_type = genomic DNA
cacctctttacagtgac

SEQ ID NO: 33904 - DNA, 18 bp, Homo sapiens
  source 1..18: mol_type = genomic DNA
cacctctttacagtgacc

SEQ ID NO: 33905 - DNA, 19 bp, Homo sapiens
  source 1..19: mol_type = genomic DNA
cacctctttacagtgacca

SEQ ID NO: 33906 - DNA, 33 bp, Homo sapiens
  source 1..33: mol_type = genomic DNA
cacgaggccccgggttcaatccccggcacctcc

SEQ ID NO: 33907 - DNA, 34 bp, Homo sapiens
  source 1..34: mol_type = genomic DNA
cacgaggccccgggttcaatccccggcacctcca

SEQ ID NO: 33908 - DNA, 35 bp, Homo sapiens
  source 1..35: mol_type = genomic DNA
cacgaggccccgggttcaatccccggcacctccac

SEQ ID NO: 33909 - DNA, 36 bp, Homo sapiens; identical to SEQ ID NO: 8323
  source 1..36: mol_type = genomic DNA

SEQ ID NO: 33910 - DNA, 16 bp, Homo sapiens
  source 1..16: mol_type = genomic DNA
cacgcagaaggtcctg

SEQ ID NO: 33911 - DNA, 38 bp, Homo sapiens
  source 1..38: mol_type = genomic DNA
cacgcagaaggtcctgggttcgagccccagtggaacca

SEQ ID NO: 33912 - DNA, 39 bp, Homo sapiens; identical to SEQ ID NO: 8328
  source 1..39: mol_type = genomic DNA

SEQ ID NO: 33913 - DNA, 40 bp, Homo sapiens; identical to SEQ ID NO: 8329
  source 1..40: mol_type = genomic DNA

SEQ ID NO: 33914 - DNA, 41 bp, Homo sapiens; identical to SEQ ID NO: 8330
  source 1..41: mol_type = genomic DNA

SEQ ID NO: 33915 - DNA, 19 bp, Homo sapiens
  source 1..19: mol_type = genomic DNA
cacgcgaaaggtccccggt

SEQ ID NO: 33916 - DNA, 22 bp, Homo sapiens
  source 1..22: mol_type = genomic DNA
cacgcgaaaggtccccggttcg

SEQ ID NO: 33917 - DNA, 38 bp, Homo sapiens
  source 1..38: mol_type = genomic DNA
cacgcgaaaggtccccggttcgaaaccgggcggaaaca

SEQ ID NO: 33918 - DNA, 39 bp, Homo sapiens
  source 1..39: mol_type = genomic DNA
cacgcgaaaggtccccggttcgaaaccgggcggaaacac

SEQ ID NO: 33919 - DNA, 40 bp, Homo sapiens; identical to SEQ ID NO: 8340
  source 1..40: mol_type = genomic DNA

SEQ ID NO: 33920 - DNA, 34 bp, Homo sapiens; identical to SEQ ID NO: 8353
  source 1..34: mol_type = genomic DNA

SEQ ID NO: 33921 - DNA, 35 bp, Homo sapiens; identical to SEQ ID NO: 8354
  source 1..35: mol_type = genomic DNA

SEQ ID NO: 33922 - DNA, 36 bp, Homo sapiens; identical to SEQ ID NO: 8355
  source 1..36: mol_type = genomic DNA

SEQ ID NO: 33923 - DNA, 37 bp, Homo sapiens; identical to SEQ ID NO: 8356
  source 1..37: mol_type = genomic DNA

SEQ ID NO: 33924 - DNA, 38 bp, Homo sapiens; identical to SEQ ID NO: 8357
  source 1..38: mol_type = genomic DNA

SEQ ID NO: 33925 - DNA, 39 bp, Homo sapiens; identical to SEQ ID NO: 8358
  source 1..39: mol_type = genomic DNA

SEQ ID NO: 33926 - DNA, 40 bp, Homo sapiens; identical to SEQ ID NO: 8359
  source 1..40: mol_type = genomic DNA

SEQ ID NO: 33927 - DNA, 38 bp, Homo sapiens
  source 1..38: mol_type = genomic DNA
cacgcgggagaccggggttcgattccccaacggggagc

SEQ ID NO: 33928 - DNA, 39 bp, Homo sapiens
  source 1..39: mol_type = genomic DNA
cacgcgggagaccggggttcgattccccaacggggagcc

SEQ ID NO: 33929 - DNA, 31 bp, Homo sapiens; identical to SEQ ID NO: 8366
  source 1..31: mol_type = genomic DNA

SEQ ID NO: 33930 - DNA, 32 bp, Homo sapiens; identical to SEQ ID NO: 8367
  source 1..32: mol_type = genomic DNA

SEQ ID NO: 33931 - DNA, 33 bp, Homo sapiens; identical to SEQ ID NO: 8368
  source 1..33: mol_type = genomic DNA

SEQ ID NO: 33932 - DNA, 34 bp, Homo sapiens; identical to SEQ ID NO: 8369
  source 1..34: mol_type = genomic DNA

SEQ ID NO: 33933 - DNA, 35 bp, Homo sapiens; identical to SEQ ID NO: 8370
  source 1..35: mol_type = genomic DNA

SEQ ID NO: 33934 - DNA, 36 bp, Homo sapiens; identical to SEQ ID NO: 8371
  source 1..36: mol_type = genomic DNA

SEQ ID NO: 33935 - DNA, 37 bp, Homo sapiens; identical to SEQ ID NO: 8372
  source 1..37: mol_type = genomic DNA

SEQ ID NO: 33936 - DNA, 38 bp, Homo sapiens; identical to SEQ ID NO: 8373
  source 1..38: mol_type = genomic DNA

SEQ ID NO: 33937 - DNA, 39 bp, Homo sapiens; identical to SEQ ID NO: 8374
  source 1..39: mol_type = genomic DNA

SEQ ID NO: 33938 - DNA, 40 bp, Homo sapiens; identical to SEQ ID NO: 8375
  source 1..40: mol_type = genomic DNA

SEQ ID NO: 33939 - DNA, 18 bp, Homo sapiens
  source 1..18: mol_type = genomic DNA
cacgcgggaggcccgggt

SEQ ID NO: 33940 - DNA, 35 bp, Homo sapiens; identical to SEQ ID NO: 8385
  source 1..35: mol_type = genomic DNA

SEQ ID NO: 33941 - DNA, 37 bp, Homo sapiens; identical to SEQ ID NO: 8387
  source 1..37: mol_type = genomic DNA

SEQ ID NO: 33942 - DNA, 38 bp, Homo sapiens; identical to SEQ ID NO: 8388
  source 1..38: mol_type = genomic DNA

SEQ ID NO: 33943 - DNA, 39 bp, Homo sapiens; identical to SEQ ID NO: 8389
  source 1..39: mol_type = genomic DNA

SEQ ID NO: 33944 - DNA, 37 bp, Homo sapiens
  source 1..37: mol_type = genomic DNA
cacgcgggaggcccgggttcgattcccggcccatgca

SEQ ID NO: 33945 - DNA, 32 bp, Homo sapiens; identical to SEQ ID NO: 8393
  source 1..32: mol_type = genomic DNA

SEQ ID NO: 33946 - DNA, 32 bp, Homo sapiens; identical to SEQ ID NO: 8394
  source 1..32: mol_type = genomic DNA

SEQ ID NO: 33947 - DNA, 31 bp, Homo sapiens; identical to SEQ ID NO: 8397
  source 1..31: mol_type = genomic DNA

SEQ ID NO: 33948 - DNA, 32 bp, Homo sapiens; identical to SEQ ID NO: 8398
  source 1..32: mol_type = genomic DNA

SEQ ID NO: 33949 - DNA, 33 bp, Homo sapiens; identical to SEQ ID NO: 8399
  source 1..33: mol_type = genomic DNA

SEQ ID NO: 33950 - DNA, 40 bp, Homo sapiens
  source 1..40: mol_type = genomic DNA
cacgtatgaggccccgggttcaatccccggcatctccacc

SEQ ID NO: 33951 - DNA, 16 bp, Homo sapiens
  source 1..16: mol_type = genomic DNA
cacgtcggggtcacca

SEQ ID NO: 33952 - DNA, 17 bp, Homo sapiens
  source 1..17: mol_type = genomic DNA
cacgtctgctttacacg

SEQ ID NO: 33953 - DNA, 28 bp, Homo sapiens
  source 1..28: mol_type = genomic DNA
cacgtgggttcgaatcccatcctcgtcg

SEQ ID NO: 33954 - DNA, 29 bp, Homo sapiens
  source 1..29: mol_type = genomic DNA
cacgtgggttcgaatcccatcctcgtcgc

SEQ ID NO: 33955 - DNA, 30 bp, Homo sapiens
  source 1..30: mol_type = genomic DNA
cacgtgggttcgaatcccatcctcgtcgcc

SEQ ID NO: 33956 - DNA, 16 bp, Homo sapiens
  source 1..16: mol_type = genomic DNA
cactctggactctgaa

SEQ ID NO: 33957 - DNA, 17 bp, Homo sapiens
  source 1..17: mol_type = genomic DNA
cactctggactctgaat

SEQ ID NO: 33958 - DNA, 18 bp, Homo sapiens
  source 1..18: mol_type = genomic DNA
cactctggactctgaatc

SEQ ID NO: 33959 - DNA, 19 bp, Homo sapiens
  source 1..19: mol_type = genomic DNA
cactctggactctgaatcc

SEQ ID NO: 33960 - DNA, 20 bp, Homo sapiens
  source 1..20: mol_type = genomic DNA
cactctggactctgaatcca

SEQ ID NO: 33961 - DNA, 21 bp, Homo sapiens
  source 1..21: mol_type = genomic DNA
cactctggactctgaatccag

SEQ ID NO: 33962 - DNA, 22 bp, Homo sapiens
  source 1..22: mol_type = genomic DNA
cactctggactctgaatccagc

SEQ ID NO: 33963 - DNA, 23 bp, Homo sapiens
  source 1..23: mol_type = genomic DNA
cactctggactctgaatccagcg

SEQ ID NO: 33964 - DNA, 26 bp, Homo sapiens
  source 1..26: mol_type = genomic DNA
cactctggactctgaatccagcgatc

SEQ ID NO: 33965 - DNA, 27 bp, Homo sapiens
  source 1..27: mol_type = genomic DNA
cactctggactctgaatccagcgatcc

SEQ ID NO: 33966 - DNA, 28 bp, Homo sapiens
  source 1..28: mol_type = genomic DNA
cactctggactctgaatccagcgatccg

SEQ ID NO: 33967 - DNA, 29 bp, Homo sapiens
  source 1..29: mol_type = genomic DNA
cactctggactctgaatccagcgatccga

SEQ ID NO: 33968 - DNA, 30 bp, Homo sapiens; identical to SEQ ID NO: 8428
  source 1..30: mol_type = genomic DNA

SEQ ID NO: 33969 - DNA, 31 bp, Homo sapiens; identical to SEQ ID NO: 8429
  source 1..31: mol_type = genomic DNA

SEQ ID NO: 33970 - DNA, 32 bp, Homo sapiens; identical to SEQ ID NO: 8430
  source 1..32: mol_type = genomic DNA

SEQ ID NO: 33971 - DNA, 33 bp, Homo sapiens; identical to SEQ ID NO: 8431
  source 1..33: mol_type = genomic DNA

SEQ ID NO: 33972 - DNA, 34 bp, Homo sapiens; identical to SEQ ID NO: 8432
  source 1..34: mol_type = genomic DNA

SEQ ID NO: 33973 - DNA, 16 bp, Homo sapiens
  source 1..16: mol_type = genomic DNA
cactctggactttgaa

SEQ ID NO: 33974 - DNA, 18 bp, Homo sapiens
  source 1..18: mol_type = genomic DNA
cactctggactttgaatc

SEQ ID NO: 33975 - DNA, 19 bp, Homo sapiens
  source 1..19: mol_type = genomic DNA
cactctggactttgaatcc

SEQ ID NO: 33976 - DNA, 20 bp, Homo sapiens
  source 1..20: mol_type = genomic DNA
cactctggactttgaatcca

SEQ ID NO: 33977 - DNA, 29 bp, Homo sapiens
  source 1..29: mol_type = genomic DNA
cactctggactttgaatccagcgatccga

SEQ ID NO: 33978 - DNA, 30 bp, Homo sapiens; identical to SEQ ID NO: 8442
  source 1..30: mol_type = genomic DNA

SEQ ID NO: 33979 - DNA, 44 bp, Homo sapiens; identical to SEQ ID NO: 8462
  source 1..44: mol_type = genomic DNA

SEQ ID NO: 33980 - DNA, 16 bp, Homo sapiens
  source 1..16: mol_type = genomic DNA
cactgtaaagctaact

SEQ ID NO: 33981 - DNA, 17 bp, Homo sapiens
  source 1..17: mol_type = genomic DNA
cactgtaaagctaactt

SEQ ID NO: 33982 - DNA, 20 bp, Homo sapiens
  source 1..20: mol_type = genomic DNA
cactgtaaagctaacttagc

SEQ ID NO: 33983 - DNA, 21 bp, Homo sapiens
  source 1..21: mol_type = genomic DNA
cactgtaaagctaacttagca

SEQ ID NO: 33984 - DNA, 23 bp, Homo sapiens
  source 1..23: mol_type = genomic DNA
cactgtaaagctaacttagcatt

SEQ ID NO: 33985 - DNA, 24 bp, Homo sapiens
  source 1..24: mol_type = genomic DNA
cactgtaaagctaacttagcatta

SEQ ID NO: 33986 - DNA, 27 bp, Homo sapiens
  source 1..27: mol_type = genomic DNA
cactgtaaagctaacttagcattaacc

SEQ ID NO: 33987 - DNA, 28 bp, Homo sapiens
  source 1..28: mol_type = genomic DNA
cactgtaaagctaacttagcattaacct

SEQ ID NO: 33988 - DNA, 29 bp, Homo sapiens
  source 1..29: mol_type = genomic DNA
cactgtaaagctaacttagcattaacctt

SEQ ID NO: 33989 - DNA, 30 bp, Homo sapiens; identical to SEQ ID NO: 8478
  source 1..30: mol_type = genomic DNA

SEQ ID NO: 33990 - DNA, 31 bp, Homo sapiens; identical to SEQ ID NO: 8479
  source 1..31: mol_type = genomic DNA

SEQ ID NO: 33991 - DNA, 32 bp, Homo sapiens; identical to SEQ ID NO: 8480
  source 1..32: mol_type = genomic DNA

SEQ ID NO: 33992 - DNA, 33 bp, Homo sapiens; identical to SEQ ID NO: 8481
  source 1..33: mol_type = genomic DNA

SEQ ID NO: 33993 - DNA, 34 bp, Homo sapiens; identical to SEQ ID NO: 8482
  source 1..34: mol_type = genomic DNA

SEQ ID NO: 33994 - DNA, 35 bp, Homo sapiens; identical to SEQ ID NO: 8483
  source 1..35: mol_type = genomic DNA

SEQ ID NO: 33995 - DNA, 38 bp, Homo sapiens; identical to SEQ ID NO: 8486
  source 1..38: mol_type = genomic DNA

SEQ ID NO: 33996 - DNA, 45 bp, Homo sapiens; identical to SEQ ID NO: 8493
  source 1..45: mol_type = genomic DNA

SEQ ID NO: 33997 - DNA, 46 bp, Homo sapiens; identical to SEQ ID NO: 8494
  source 1..46: mol_type = genomic DNA

SEQ ID NO: 33998 - DNA, 47 bp, Homo sapiens; identical to SEQ ID NO: 8495
  source 1..47: mol_type = genomic DNA

SEQ ID NO: 33999 - DNA, 18 bp, Homo sapiens
  source 1..18: mol_type = genomic DNA
cacttaggagatttcaac

SEQ ID NO: 34000 - DNA, 19 bp, Homo sapiens
  source 1..19: mol_type = genomic DNA
cacttaggagatttcaact

SEQ ID NO: 34001 - DNA, 20 bp, Homo sapiens
  source 1..20: mol_type = genomic DNA
cacttaggagatttcaactt

SEQ ID NO: 34002 - DNA, 27 bp, Homo sapiens
  source 1..27: mol_type = genomic DNA
cacttaggagatttcaacttaacttga

SEQ ID NO: 34003 - DNA, 28 bp, Homo sapiens
  source 1..28: mol_type = genomic DNA
cacttaggagatttcaacttaacttgac

SEQ ID NO: 34004 - DNA, 29 bp, Homo sapiens
  source 1..29: mol_type = genomic DNA
cacttaggagatttcaacttaacttgacc

SEQ ID NO: 34005 - DNA, 30 bp, Homo sapiens; identical to SEQ ID NO: 8511
  source 1..30: mol_type = genomic DNA

SEQ ID NO: 34006 - DNA, 32 bp, Homo sapiens; identical to SEQ ID NO: 8513
  source 1..32: mol_type = genomic DNA

SEQ ID NO: 34007 - DNA, 33 bp, Homo sapiens; identical to SEQ ID NO: 8514
  source 1..33: mol_type = genomic DNA

SEQ ID NO: 34008 - DNA, 34 bp, Homo sapiens; identical to SEQ ID NO: 8515
  source 1..34: mol_type = genomic DNA

SEQ ID NO: 34009 - DNA, 35 bp, Homo sapiens; identical to SEQ ID NO: 8516
  source 1..35: mol_type = genomic DNA

SEQ ID NO: 34010 - DNA, 36 bp, Homo sapiens; identical to SEQ ID NO: 8517
  source 1..36: mol_type = genomic DNA

SEQ ID NO: 34011 - DNA, 37 bp, Homo sapiens; identical to SEQ ID NO: 8518
  source 1..37: mol_type = genomic DNA

SEQ ID NO: 34012 - DNA, 38 bp, Homo sapiens; identical to SEQ ID NO: 8519
  source 1..38: mol_type = genomic DNA

SEQ ID NO: 34013 - DNA, 39 bp, Homo sapiens; identical to SEQ ID NO: 8520
  source 1..39: mol_type = genomic DNA

SEQ ID NO: 34014 - DNA, 25 bp, Homo sapiens
  source 1..25: mol_type = genomic DNA
cagaagattccaggttcgactcctg

SEQ ID NO: 34015 - DNA, 27 bp, Homo sapiens
  source 1..27: mol_type = genomic DNA
cagaagattccaggttcgactcctggc

SEQ ID NO: 34016 - DNA, 32 bp, Homo sapiens; identical to SEQ ID NO: 8528
  source 1..32: mol_type = genomic DNA

SEQ ID NO: 34017 - DNA, 33 bp, Homo sapiens; identical to SEQ ID NO: 8529
  source 1..33: mol_type = genomic DNA

SEQ ID NO: 34018 - DNA, 34 bp, Homo sapiens; identical to SEQ ID NO: 8530
  source 1..34: mol_type = genomic DNA

SEQ ID NO: 34019 - DNA, 35 bp, Homo sapiens; identical to SEQ ID NO: 8531
  source 1..35: mol_type = genomic DNA

SEQ ID NO: 34020 - DNA, 36 bp, Homo sapiens; identical to SEQ ID NO: 8532
  source 1..36: mol_type = genomic DNA

SEQ ID NO: 34021 - DNA, 37 bp, Homo sapiens; identical to SEQ ID NO: 8533
  source 1..37: mol_type = genomic DNA

SEQ ID NO: 34022 - DNA, 17 bp, Homo sapiens
  source 1..17: mol_type = genomic DNA
cagaagattctaggttc

SEQ ID NO: 34023 - DNA, 18 bp, Homo sapiens
  source 1..18: mol_type = genomic DNA
cagaagattctaggttcg

SEQ ID NO: 34024 - DNA, 32 bp, Homo sapiens; identical to SEQ ID NO: 8542
  source 1..32: mol_type = genomic DNA

SEQ ID NO: 34025 - DNA, 33 bp, Homo sapiens; identical to SEQ ID NO: 8543
  source 1..33: mol_type = genomic DNA

SEQ ID NO: 34026 - DNA, 34 bp, Homo sapiens; identical to SEQ ID NO: 8544
  source 1..34: mol_type = genomic DNA

SEQ ID NO: 34027 - DNA, 35 bp, Homo sapiens; identical to SEQ ID NO: 8545
  source 1..35: mol_type = genomic DNA

SEQ ID NO: 34028 - DNA, 36 bp, Homo sapiens; identical to SEQ ID NO: 8546
  source 1..36: mol_type = genomic DNA

SEQ ID NO: 34029 - DNA, 37 bp, Homo sapiens; identical to SEQ ID NO: 8547
  source 1..37: mol_type = genomic DNA

SEQ ID NO: 34030 - DNA, 16 bp, Homo sapiens
  source 1..16: mol_type = genomic DNA
cagaagattgagggtt

SEQ ID NO: 34031 - DNA, 17 bp, Homo sapiens
  source 1..17: mol_type = genomic DNA
cagaagattgagggttc

SEQ ID NO: 34032 - DNA, 18 bp, Homo sapiens
  source 1..18: mol_type = genomic DNA
cagaagattgagggttcg

SEQ ID NO: 34033 - DNA, 34 bp, Homo sapiens; identical to SEQ ID NO: 8551
  source 1..34: mol_type = genomic DNA

SEQ ID NO: 34034 - DNA, 35 bp, Homo sapiens
  source 1..35: mol_type = genomic DNA
cagaagattgagggttcgaatccctccgtggttac

SEQ ID NO: 34035 - DNA, 36 bp, Homo sapiens; identical to SEQ ID NO: 8552
  source 1..36: mol_type = genomic DNA

SEQ ID NO: 34036 - DNA, 34 bp, Homo sapiens; identical to SEQ ID NO: 8553
  source 1..34: mol_type = genomic DNA

SEQ ID NO: 34037 - DNA, 35 bp, Homo sapiens
  source 1..35: mol_type = genomic DNA
cagaagattgagggttcgaatcccttcgtggttac

SEQ ID NO: 34038 - DNA, 36 bp, Homo sapiens; identical to SEQ ID NO: 8554
  source 1..36: mol_type = genomic DNA

SEQ ID NO: 34039 - DNA, 34 bp, Homo sapiens; identical to SEQ ID NO: 8555
  source 1..34: mol_type = genomic DNA

SEQ ID NO: 34040 - DNA, 35 bp, Homo sapiens; identical to SEQ ID NO: 8556
  source 1..35: mol_type = genomic DNA

SEQ ID NO: 34041 - DNA, 36 bp, Homo sapiens; identical to SEQ ID NO: 8557
  source 1..36: mol_type = genomic DNA

SEQ ID NO: 34042 - DNA, 37 bp, Homo sapiens; identical to SEQ ID NO: 8558
  source 1..37: mol_type = genomic DNA

SEQ ID NO: 34043 - DNA, 25 bp, Homo sapiens
  source 1..25: mol_type = genomic DNA
cagaagattgagggttcgagtccct

SEQ ID NO: 34044 - DNA, 28 bp, Homo sapiens
  source 1..28: mol_type = genomic DNA
cagaagattgagggttcgagtcccttcg

SEQ ID NO: 34045 - DNA, 32 bp, Homo sapiens; identical to SEQ ID NO: 8562
  source 1..32: mol_type = genomic DNA

SEQ ID NO: 34046 - DNA, 33 bp, Homo sapiens; identical to SEQ ID NO: 8563
  source 1..33: mol_type = genomic DNA

SEQ ID NO: 34047 - DNA, 34 bp, Homo sapiens; identical to SEQ ID NO: 8564
  source 1..34: mol_type = genomic DNA

SEQ ID NO: 34048 - DNA, 35 bp, Homo sapiens; identical to SEQ ID NO: 8565
  source 1..35: mol_type = genomic DNA

SEQ ID NO: 34049 - DNA, 36 bp, Homo sapiens; identical to SEQ ID NO: 8566
  source 1..36: mol_type = genomic DNA

SEQ ID NO: 34050 - DNA, 37 bp, Homo sapiens; identical to SEQ ID NO: 8567
  source 1..37: mol_type = genomic DNA

SEQ ID NO: 34051 - DNA, 16 bp, Homo sapiens
  source 1..16: mol_type = genomic DNA
cagaagattgcaggtt

SEQ ID NO: 34052 - DNA, 17 bp, Homo sapiens
  source 1..17: mol_type = genomic DNA
cagaagattgcaggttc

SEQ ID NO: 34053 - DNA, 28 bp, Homo sapiens
  source 1..28: mol_type = genomic DNA
cagaagattgcaggttcgagtcctgccg

SEQ ID NO: 34054 - DNA, 31 bp, Homo sapiens
  source 1..31: mol_type = genomic DNA
cagaagattgcaggttcgagtcctgccgcgg

SEQ ID NO: 34055 - DNA, 32 bp, Homo sapiens
  source 1..32: mol_type = genomic DNA
cagaagattgcaggttcgagtcctgccgcggt

SEQ ID NO: 34056 - DNA, 33 bp, Homo sapiens; identical to SEQ ID NO: 8573
  source 1..33: mol_type = genomic DNA

SEQ ID NO: 34057 - DNA, 34 bp, Homo sapiens; identical to SEQ ID NO: 8574
  source 1..34: mol_type = genomic DNA

SEQ ID NO: 34058 - DNA, 35 bp, Homo sapiens; identical to SEQ ID NO: 8575
  source 1..35: mol_type = genomic DNA

SEQ ID NO: 34059 - DNA, 36 bp, Homo sapiens; identical to SEQ ID NO: 8576
  source 1..36: mol_type = genomic DNA

SEQ ID NO: 34060 - DNA, 37 bp, Homo sapiens; identical to SEQ ID NO: 8577
  source 1..37: mol_type = genomic DNA

SEQ ID NO: 34061 - DNA, 17 bp, Homo sapiens
  source 1..17: mol_type = genomic DNA
cagaaggctgcgtgttc

SEQ ID NO: 34062 - DNA, 33 bp, Homo sapiens; identical to SEQ ID NO: 8581
  source 1..33: mol_type = genomic DNA

SEQ ID NO: 34063 - DNA, 34 bp, Homo sapiens
  source 1..34: mol_type = genomic DNA
cagaaggctgcgtgttcgaatcacgtcggggtca

SEQ ID NO: 34064 - DNA, 35 bp, Homo sapiens; identical to SEQ ID NO: 8582
  source 1..35: mol_type = genomic DNA

SEQ ID NO: 34065 - DNA, 36 bp, Homo sapiens; identical to SEQ ID NO: 8583
  source 1..36: mol_type = genomic DNA

SEQ ID NO: 34066 - DNA, 26 bp, Homo sapiens
  source 1..26: mol_type = genomic DNA
cagaaggtcctgggttcgagccccag

SEQ ID NO: 34067 - DNA, 32 bp, Homo sapiens; identical to SEQ ID NO: 8587
  source 1..32: mol_type = genomic DNA

SEQ ID NO: 34068 - DNA, 33 bp, Homo sapiens; identical to SEQ ID NO: 8588
  source 1..33: mol_type = genomic DNA

SEQ ID NO: 34069 - DNA, 34 bp, Homo sapiens; identical to SEQ ID NO: 8589
  source 1..34: mol_type = genomic DNA

SEQ ID NO: 34070 - DNA, 35 bp, Homo sapiens; identical to SEQ ID NO: 8590
  source 1..35: mol_type = genomic DNA

SEQ ID NO: 34071 - DNA, 36 bp, Homo sapiens; identical to SEQ ID NO: 8591
  source 1..36: mol_type = genomic DNA

SEQ ID NO: 34072 - DNA, 37 bp, Homo sapiens; identical to SEQ ID NO: 8592
  source 1..37: mol_type = genomic DNA

SEQ ID NO: 34073 - DNA, 34 bp, Homo sapiens; identical to SEQ ID NO: 8594
  source 1..34: mol_type = genomic DNA

SEQ ID NO: 34074 - DNA, 35 bp, Homo sapiens; identical to SEQ ID NO: 8595
  source 1..35: mol_type = genomic DNA

SEQ ID NO: 34075 - DNA, 36 bp, Homo sapiens; identical to SEQ ID NO: 8596
  source 1..36: mol_type = genomic DNA

SEQ ID NO: 34076 - DNA, 34 bp, Homo sapiens
  source 1..34: mol_type = genomic DNA
cagaaggttgcgtgttcaagtcacgtcggggtca

SEQ ID NO: 34077 - DNA, 35 bp, Homo sapiens; identical to SEQ ID NO: 8600
  source 1..35: mol_type = genomic DNA

SEQ ID NO: 34078 - DNA, 36 bp, Homo sapiens; identical to SEQ ID NO: 8601
  source 1..36: mol_type = genomic DNA

SEQ ID NO: 34079 - DNA, 16 bp, Homo sapiens
  source 1..16: mol_type = genomic DNA
cagaccaagagccttc

SEQ ID NO: 34080 - DNA, 17 bp, Homo sapiens
  source 1..17: mol_type = genomic DNA
cagaccaagagccttca

SEQ ID NO: 34081 - DNA, 25 bp, Homo sapiens
  source 1..25: mol_type = genomic DNA
cagaccaagagccttcaaagccctc

SEQ ID NO: 34082 - DNA, 23 bp, Homo sapiens
  source 1..23: mol_type = genomic DNA
cagagaatagtttaaattagaat

SEQ ID NO: 34083 - DNA, 24 bp, Homo sapiens
  source 1..24: mol_type = genomic DNA
cagagaatagtttaaattagaatc

SEQ ID NO: 34084 - DNA, 31 bp, Homo sapiens; identical to SEQ ID NO: 8638
  source 1..31: mol_type = genomic DNA

SEQ ID NO: 34085 - DNA, 32 bp, Homo sapiens; identical to SEQ ID NO: 8639
  source 1..32: mol_type = genomic DNA

SEQ ID NO: 34086 - DNA, 33 bp, Homo sapiens; identical to SEQ ID NO: 8640
  source 1..33: mol_type = genomic DNA

SEQ ID NO: 34087 - DNA, 34 bp, Homo sapiens; identical to SEQ ID NO: 8641
  source 1..34: mol_type = genomic DNA

SEQ ID NO: 34088 - DNA, 16 bp, Homo sapiens
  source 1..16: mol_type = genomic DNA
cagagcatttgactgc

SEQ ID NO: 34089 - DNA, 27 bp, Homo sapiens
  source 1..27: mol_type = genomic DNA
cagaggcttacgaccccttatttaccc

SEQ ID NO: 34090 - DNA, 28 bp, Homo sapiens
  source 1..28: mol_type = genomic DNA
cagaggcttacgaccccttatttacccc

SEQ ID NO: 34091 - DNA, 29 bp, Homo sapiens
  source 1..29: mol_type = genomic DNA
cagaggcttacgaccccttatttacccca

SEQ ID NO: 34092 - DNA, 16 bp, Homo sapiens
  source 1..16: mol_type = genomic DNA
cagaggtcgatggatc

SEQ ID NO: 34093 - DNA, 17 bp, Homo sapiens
  source 1..17: mol_type = genomic DNA
cagaggtcgatggatcg

SEQ ID NO: 34094 - DNA, 20 bp, Homo sapiens
  source 1..20: mol_type = genomic DNA
cagaggtcgatggatcgaaa

SEQ ID NO: 34095 - DNA, 21 bp, Homo sapiens
  source 1..21: mol_type = genomic DNA
cagaggtcgatggatcgaaac

SEQ ID NO: 34096 - DNA, 22 bp, Homo sapiens
  source 1..22: mol_type = genomic DNA
cagaggtcgatggatcgaaacc

SEQ ID NO: 34097 - DNA, 23 bp, Homo sapiens
  source 1..23: mol_type = genomic DNA
cagaggtcgatggatcgaaacca

SEQ ID NO: 34098 - DNA, 24 bp, Homo sapiens
  source 1..24: mol_type = genomic DNA
cagaggtcgatggatcgaaaccat

SEQ ID NO: 34099 - DNA, 28 bp, Homo sapiens
  source 1..28: mol_type = genomic DNA
cagaggtcgatggatcgaaaccatcctc

SEQ ID NO: 34100 - DNA, 35 bp, Homo sapiens
  source 1..35: mol_type = genomic DNA
cagaggtcgatggatcgaaaccatcctctgctacc

SEQ ID NO: 34101 - DNA, 16 bp, Homo sapiens
  source 1..16: mol_type = genomic DNA
cagaggttccgggttc

SEQ ID NO: 34102 - DNA, 17 bp, Homo sapiens
  source 1..17: mol_type = genomic DNA
cagaggttccgggttcg

SEQ ID NO: 34103 - DNA, 26 bp, Homo sapiens
  source 1..26: mol_type = genomic DNA
cagaggttccgggttcgagtcccggc

SEQ ID NO: 34104 - DNA, 31 bp, Homo sapiens
  source 1..31: mol_type = genomic DNA
cagaggttccgggttcgagtcccggcagaga

SEQ ID NO: 34105 - DNA, 33 bp, Homo sapiens; identical to SEQ ID NO: 8699
  source 1..33: mol_type = genomic DNA

SEQ ID NO: 34106 - DNA, 35 bp, Homo sapiens; identical to SEQ ID NO: 8701
  source 1..35: mol_type = genomic DNA

SEQ ID NO: 34107 - DNA, 36 bp, Homo sapiens; identical to SEQ ID NO: 8702
  source 1..36: mol_type = genomic DNA

SEQ ID NO: 34108 - DNA, 17 bp, Homo sapiens
  source 1..17: mol_type = genomic DNA
cagagtggcgcagcgga

SEQ ID NO: 34109 - DNA, 19 bp, Homo sapiens
  source 1..19: mol_type = genomic DNA
cagagtggcgcagcggaag

SEQ ID NO: 34110 - DNA, 24 bp, Homo sapiens
  source 1..24: mol_type = genomic DNA
cagagtggcgcagcggaagcgtgc

SEQ ID NO: 34111 - DNA, 25 bp, Homo sapiens
  source 1..25: mol_type = genomic DNA
cagagtggcgcagcggaagcgtgct

SEQ ID NO: 34112 - DNA, 29 bp, Homo sapiens
  source 1..29: mol_type = genomic DNA
cagagtggcgcagcggaagcgtgctgggc

SEQ ID NO: 34113 - DNA, 30 bp, Homo sapiens; identical to SEQ ID NO: 8713
  source 1..30: mol_type = genomic DNA

SEQ ID NO: 34114 - DNA, 31 bp, Homo sapiens; identical to SEQ ID NO: 8714
  source 1..31: mol_type = genomic DNA

SEQ ID NO: 34115 - DNA, 32 bp, Homo sapiens; identical to SEQ ID NO: 8715
  source 1..32: mol_type = genomic DNA

SEQ ID NO: 34116 - DNA, 33 bp, Homo sapiens; identical to SEQ ID NO: 8716
  source 1..33: mol_type = genomic DNA

SEQ ID NO: 34117 - DNA, 37 bp, Homo sapiens
  source 1..37: mol_type = genomic DNA
cagagtggcgcagcggaagcgtgctgggcccataacc

SEQ ID NO: 34118 - DNA, 38 bp, Homo sapiens; identical to SEQ ID NO: 8718
  source 1..38: mol_type = genomic DNA

SEQ ID NO: 34119 - DNA, 40 bp, Homo sapiens; identical to SEQ ID NO: 8719
  source 1..40: mol_type = genomic DNA

SEQ ID NO: 34120 - DNA, 47 bp, Homo sapiens; identical to SEQ ID NO: 8720
  source 1..47: mol_type = genomic DNA

SEQ ID NO: 34121 - DNA, 23 bp, Homo sapiens
  source 1..23: mol_type = genomic DNA
cagagtggggttttgcagtcctt

SEQ ID NO: 34122 - DNA, 26 bp, Homo sapiens
  source 1..26: mol_type = genomic DNA
cagagtggggttttgcagtccttacc

SEQ ID NO: 34123 - DNA, 27 bp, Homo sapiens
  source 1..27: mol_type = genomic DNA
cagagtggggttttgcagtccttacca

SEQ ID NO: 34124 - DNA, 16 bp, Homo sapiens
  source 1..16: mol_type = genomic DNA
cagagtgtagcttaac

SEQ ID NO: 34125 - DNA, 26 bp, Homo sapiens
  source 1..26: mol_type = genomic DNA
cagagtgtagcttaacacaaagcacc

SEQ ID NO: 34126 - DNA, 27 bp, Homo sapiens
  source 1..27: mol_type = genomic DNA
cagagtgtagcttaacacaaagcaccc

SEQ ID NO: 34127 - DNA, 28 bp, Homo sapiens
  source 1..28: mol_type = genomic DNA
cagagtgtagcttaacacaaagcaccca

SEQ ID NO: 34128 - DNA, 29 bp, Homo sapiens
  source 1..29: mol_type = genomic DNA
cagagtgtagcttaacacaaagcacccaa

SEQ ID NO: 34129 - DNA, 30 bp, Homo sapiens; identical to SEQ ID NO: 8746
  source 1..30: mol_type = genomic DNA

SEQ ID NO: 34130 - DNA, 31 bp, Homo sapiens; identical to SEQ ID NO: 8747
  source 1..31: mol_type = genomic DNA

SEQ ID NO: 34131 - DNA, 35 bp, Homo sapiens; identical to SEQ ID NO: 8751
  source 1..35: mol_type = genomic DNA

SEQ ID NO: 34132 - DNA, 36 bp, Homo sapiens; identical to SEQ ID NO: 8752
  source 1..36: mol_type = genomic DNA

SEQ ID NO: 34133 - DNA, 37 bp, Homo sapiens; identical to SEQ ID NO: 8753
  source 1..37: mol_type = genomic DNA

SEQ ID NO: 34134 - DNA, 38 bp, Homo sapiens; identical to SEQ ID NO: 8754
  source 1..38: mol_type = genomic DNA

SEQ ID NO: 34135 - DNA, 39 bp, Homo sapiens; identical to SEQ ID NO: 8755
  source 1..39: mol_type = genomic DNA

SEQ ID NO: 34136 - DNA, 41 bp, Homo sapiens; identical to SEQ ID NO: 8757
  source 1..41: mol_type = genomic DNA

SEQ ID NO: 34137 - DNA, 42 bp, Homo sapiens; identical to SEQ ID NO: 8758
  source 1..42: mol_type = genomic DNA

SEQ ID NO: 34138 - DNA, 43 bp, Homo sapiens; identical to SEQ ID NO: 8759
  source 1..43: mol_type = genomic DNA

SEQ ID NO: 34139 - DNA, 44 bp, Homo sapiens; identical to SEQ ID NO: 8760
  source 1..44: mol_type = genomic DNA

SEQ ID NO: 34140 - DNA, 45 bp, Homo sapiens; identical to SEQ ID NO: 8761
  source 1..45: mol_type = genomic DNA

SEQ ID NO: 34141 - DNA, 47 bp, Homo sapiens; identical to SEQ ID NO: 8763
  source 1..47: mol_type = genomic DNA

SEQ ID NO: 34142 - DNA, 22 bp, Homo sapiens
  source 1..22: mol_type = genomic DNA
cagatcagaaggctgcgtgttc

SEQ ID NO: 34143 - DNA, 41 bp, Homo sapiens; identical to SEQ ID NO: 8767
  source 1..41: mol_type = genomic DNA

SEQ ID NO: 34144 - DNA, 16 bp, Homo sapiens
  source 1..16: mol_type = genomic DNA
cagatcagaaggttgc

SEQ ID NO: 34145 - DNA, 17 bp, Homo sapiens
  source 1..17: mol_type = genomic DNA
cagattgtgaatctgac

SEQ ID NO: 34146 - DNA, 26 bp, Homo sapiens
  source 1..26: mol_type = genomic DNA
cagattgtgaatctgacaacagaggc

SEQ ID NO: 34147 - DNA, 27 bp, Homo sapiens
  source 1..27: mol_type = genomic DNA
cagattgtgaatctgacaacagaggct

SEQ ID NO: 34148 - DNA, 28 bp, Homo sapiens
  source 1..28: mol_type = genomic DNA
cagattgtgaatctgacaacagaggctt

SEQ ID NO: 34149 - DNA, 30 bp, Homo sapiens; identical to SEQ ID NO: 8783
  source 1..30: mol_type = genomic DNA

SEQ ID NO: 34150 - DNA, 33 bp, Homo sapiens; identical to SEQ ID NO: 8786
  source 1..33: mol_type = genomic DNA

SEQ ID NO: 34151 - DNA, 34 bp, Homo sapiens; identical to SEQ ID NO: 8787
  source 1..34: mol_type = genomic DNA

SEQ ID NO: 34152 - DNA, 35 bp, Homo sapiens; identical to SEQ ID NO: 8788
  source 1..35: mol_type = genomic DNA

SEQ ID NO: 34153 - DNA, 36 bp, Homo sapiens; identical to SEQ ID NO: 8789
  source 1..36: mol_type = genomic DNA

SEQ ID NO: 34154 - DNA, 37 bp, Homo sapiens; identical to SEQ ID NO: 8790
  source 1..37: mol_type = genomic DNA

SEQ ID NO: 34155 - DNA, 40 bp, Homo sapiens; identical to SEQ ID NO: 8793
  source 1..40: mol_type = genomic DNA

SEQ ID NO: 34156 - DNA, 44 bp, Homo sapiens; identical to SEQ ID NO: 8797
  source 1..44: mol_type = genomic DNA

SEQ ID NO: 34157 - DNA, 45 bp, Homo sapiens; identical to SEQ ID NO: 8798
  source 1..45: mol_type = genomic DNA

SEQ ID NO: 34158 - DNA, 46 bp, Homo sapiens; identical to SEQ ID NO: 8799
  source 1..46: mol_type = genomic DNA

SEQ ID NO: 34159 - DNA, 47 bp, Homo sapiens; identical to SEQ ID NO: 8800
  source 1..47: mol_type = genomic DNA

SEQ ID NO: 34160 - DNA, 16 bp, Homo sapiens
  source 1..16: mol_type = genomic DNA
cagcaacctcggttcg

SEQ ID NO: 34161 - DNA, 31 bp, Homo sapiens; identical to SEQ ID NO: 8805
  source 1..31: mol_type = genomic DNA

SEQ ID NO: 34162 - DNA, 32 bp, Homo sapiens; identical to SEQ ID NO: 8806
  source 1..32: mol_type = genomic DNA

SEQ ID NO: 34163 - DNA, 33 bp, Homo sapiens; identical to SEQ ID NO: 8807
  source 1..33: mol_type = genomic DNA

SEQ ID NO: 34164 - DNA, 34 bp, Homo sapiens; identical to SEQ ID NO: 8808
  source 1..34: mol_type = genomic DNA

SEQ ID NO: 34165 - DNA, 35 bp, Homo sapiens; identical to SEQ ID NO: 8809
  source 1..35: mol_type = genomic DNA

SEQ ID NO: 34166 - DNA, 31 bp, Homo sapiens; identical to SEQ ID NO: 8811
  source 1..31: mol_type = genomic DNA

SEQ ID NO: 34167 - DNA, 32 bp, Homo sapiens; identical to SEQ ID NO: 8812
  source 1..32: mol_type = genomic DNA

SEQ ID NO: 34168 - DNA, 33 bp, Homo sapiens; identical to SEQ ID NO: 8819
  source 1..33: mol_type = genomic DNA

SEQ ID NO: 34169 - DNA, 32 bp, Homo sapiens; identical to SEQ ID NO: 8821
  source 1..32: mol_type = genomic DNA

SEQ ID NO: 34170 - DNA, 23 bp, Homo sapiens
  source 1..23: mol_type = genomic DNA
cagcctccggagctggggattgt

SEQ ID NO: 34171 - DNA, 16 bp, Homo sapiens
  source 1..16: mol_type = genomic DNA
cagcgatccgagttca

SEQ ID NO: 34172 - DNA, 31 bp, Homo sapiens; identical to SEQ ID NO: 8830
  source 1..31: mol_type = genomic DNA

SEQ ID NO: 34173 - DNA, 32 bp, Homo sapiens; identical to SEQ ID NO: 8831
  source 1..32: mol_type = genomic DNA

SEQ ID NO: 34174 - DNA, 33 bp, Homo sapiens; identical to SEQ ID NO: 8832
  source 1..33: mol_type = genomic DNA

SEQ ID NO: 34175 - DNA, 34 bp, Homo sapiens; identical to SEQ ID NO: 8833
  source 1..34: mol_type = genomic DNA

SEQ ID NO: 34176 - DNA, 30 bp, Homo sapiens; identical to SEQ ID NO: 8835
  source 1..30: mol_type = genomic DNA

SEQ ID NO: 34177 - DNA, 31 bp, Homo sapiens; identical to SEQ ID NO: 8836
  source 1..31: mol_type = genomic DNA

SEQ ID NO: 34178 - DNA, 32 bp, Homo sapiens; identical to SEQ ID NO: 8837
  source 1..32: mol_type = genomic DNA

SEQ ID NO: 34179 - DNA, 33 bp, Homo sapiens; identical to SEQ ID NO: 8838
  source 1..33: mol_type = genomic DNA

SEQ ID NO: 34180 - DNA, 33 bp, Homo sapiens
  source 1..33: mol_type = genomic DNA
cagcgatccgagttcaagtctcggtggaacctc

SEQ ID NO: 34181 - DNA, 33 bp, Homo sapiens; identical to SEQ ID NO: 8846
  source 1..33: mol_type = genomic DNA

SEQ ID NO: 34182 - DNA, 17 bp, Homo sapiens
  source 1..17: mol_type = genomic DNA
cagcgatggccgagtgg

SEQ ID NO: 34183 - DNA, 18 bp, Homo sapiens
  source 1..18: mol_type = genomic DNA
cagcggaagcgtgctggg

SEQ ID NO: 34184 - DNA, 19 bp, Homo sapiens
  source 1..19: mol_type = genomic DNA
cagcggaagcgtgctgggc

SEQ ID NO: 34185 - DNA, 20 bp, Homo sapiens
  source 1..20: mol_type = genomic DNA
cagcggaagcgtgctgggcc

SEQ ID NO: 34186 - DNA, 21 bp, Homo sapiens
  source 1..21: mol_type = genomic DNA
cagcggaagcgtgctgggccc

SEQ ID NO: 34187 - DNA, 22 bp, Homo sapiens
  source 1..22: mol_type = genomic DNA
cagcggaagcgtgctgggccca

SEQ ID NO: 34188 - DNA, 28 bp, Homo sapiens
  source 1..28: mol_type = genomic DNA
cagcggaagcgtgctgggcccataaccc

SEQ ID NO: 34189 - DNA, 20 bp, Homo sapiens
  source 1..20: mol_type = genomic DNA
cagctaaataagctatcggg

SEQ ID NO: 34190 - DNA, 24 bp, Homo sapiens
  source 1..24: mol_type = genomic DNA
cagctaaataagctatcgggccca

SEQ ID NO: 34191 - DNA, 30 bp, Homo sapiens; identical to SEQ ID NO: 8885
  source 1..30: mol_type = genomic DNA

SEQ ID NO: 34192 - DNA, 16 bp, Homo sapiens
  source 1..16: mol_type = genomic DNA
cagctatccattggtc

SEQ ID NO: 34193 - DNA, 17 bp, Homo sapiens
  source 1..17: mol_type = genomic DNA
cagctatccattggtct

SEQ ID NO: 34194 - DNA, 20 bp, Homo sapiens
  source 1..20: mol_type = genomic DNA
cagcttcaaacctgccgggg

SEQ ID NO: 34195 - DNA, 21 bp, Homo sapiens
  source 1..21: mol_type = genomic DNA
cagcttcaaacctgccggggc

SEQ ID NO: 34196 - DNA, 22 bp, Homo sapiens
  source 1..22: mol_type = genomic DNA
cagcttcaaacctgccggggct

SEQ ID NO: 34197 - DNA, 23 bp, Homo sapiens
  source 1..23: mol_type = genomic DNA
cagcttcaaacctgccggggctt

SEQ ID NO: 34198 - DNA, 34 bp, Homo sapiens; identical to SEQ ID NO: 8925
  source 1..34: mol_type = genomic DNA

SEQ ID NO: 34199 - DNA, 35 bp, Homo sapiens; identical to SEQ ID NO: 8926
  source 1..35: mol_type = genomic DNA

SEQ ID NO: 34200 - DNA, 17 bp, Homo sapiens
  source 1..17: mol_type = genomic DNA
caggagatcctgggttc

SEQ ID NO: 34201 - DNA, 18 bp, Homo sapiens
  source 1..18: mol_type = genomic DNA
caggagatcctgggttcg

SEQ ID NO: 34202 - DNA, 34 bp, Homo sapiens; identical to SEQ ID NO: 8933
  source 1..34: mol_type = genomic DNA

SEQ ID NO: 34203 - DNA, 29 bp, Homo sapiens
  source 1..29: mol_type = genomic DNA
caggagatcctgggttcgaatcccagcgg

SEQ ID NO: 34204 - DNA, 31 bp, Homo sapiens; identical to SEQ ID NO: 8938
  source 1..31: mol_type = genomic DNA

SEQ ID NO: 34205 - DNA, 32 bp, Homo sapiens; identical to SEQ ID NO: 8939
  source 1..32: mol_type = genomic DNA

SEQ ID NO: 34206 - DNA, 33 bp, Homo sapiens; identical to SEQ ID NO: 8940
  source 1..33: mol_type = genomic DNA

SEQ ID NO: 34207 - DNA, 34 bp, Homo sapiens; identical to SEQ ID NO: 8941
  source 1..34: mol_type = genomic DNA

SEQ ID NO: 34208 - DNA, 35 bp, Homo sapiens; identical to SEQ ID NO: 8942
  source 1..35: mol_type = genomic DNA

SEQ ID NO: 34209 - DNA, 36 bp, Homo sapiens; identical to SEQ ID NO: 8943
  source 1..36: mol_type = genomic DNA

SEQ ID NO: 34210 - DNA, 37 bp, Homo sapiens; identical to SEQ ID NO: 8944
  source 1..37: mol_type = genomic DNA

SEQ ID NO: 34211 - DNA, 31 bp, Homo sapiens; identical to SEQ ID NO: 8946
  source 1..31: mol_type = genomic DNA

SEQ ID NO: 34212 - DNA, 32 bp, Homo sapiens; identical to SEQ ID NO: 8947
  source 1..32: mol_type = genomic DNA

SEQ ID NO: 34213 - DNA, 33 bp, Homo sapiens; identical to SEQ ID NO: 8948
  source 1..33: mol_type = genomic DNA

SEQ ID NO: 34214 - DNA, 34 bp, Homo sapiens; identical to SEQ ID NO: 8949
  source 1..34: mol_type = genomic DNA

SEQ ID NO: 34215 - DNA, 35 bp, Homo sapiens; identical to SEQ ID NO: 8950
  source 1..35: mol_type = genomic DNA

SEQ ID NO: 34216 - DNA, 36 bp, Homo sapiens; identical to SEQ ID NO: 8951
  source 1..36: mol_type = genomic DNA

SEQ ID NO: 34217 - DNA, 37 bp, Homo sapiens; identical to SEQ ID NO: 8952
  source 1..37: mol_type = genomic DNA

SEQ ID NO: 34218 - DNA, 34 bp, Homo sapiens; identical to SEQ ID NO: 8953
  source 1..34: mol_type = genomic DNA

SEQ ID NO: 34219 - DNA, 35 bp, Homo sapiens; identical to SEQ ID NO: 8954
  source 1..35: mol_type = genomic DNA

SEQ ID NO: 34220 - DNA, 36 bp, Homo sapiens; identical to SEQ ID NO: 8955
  source 1..36: mol_type = genomic DNA

SEQ ID NO: 34221 - DNA, 16 bp, Homo sapiens
  source 1..16: mol_type = genomic DNA
caggatggccgagcgg

SEQ ID NO: 34222 - DNA, 20 bp, Homo sapiens
  source 1..20: mol_type = genomic DNA
caggatggccgagcggtcta

SEQ ID NO: 34223 - DNA, 22 bp, Homo sapiens
  source 1..22: mol_type = genomic DNA
caggatggccgagcggtctaag

SEQ ID NO: 34224 - DNA, 24 bp, Homo sapiens
  source 1..24: mol_type = genomic DNA
caggatggccgagcggtctaaggc

SEQ ID NO: 34225 - DNA, 22 bp, Homo sapiens
  source 1..22: mol_type = genomic DNA
caggatggccgagtggtctaag

SEQ ID NO: 34226 - DNA, 24 bp, Homo sapiens
  source 1..24: mol_type = genomic DNA
caggatggccgagtggtctaaggc

SEQ ID NO: 34227 - DNA, 23 bp, Homo sapiens
  source 1..23: mol_type = genomic DNA
caggatggccgagtggttaaggc

SEQ ID NO: 34228 - DNA, 21 bp, Homo sapiens
  source 1..21: mol_type = genomic DNA
caggcggcccgggttcgactc

SEQ ID NO: 34229 - DNA, 22 bp, Homo sapiens
  source 1..22: mol_type = genomic DNA
caggcggcccgggttcgactcc

SEQ ID NO: 34230 - DNA, 23 bp, Homo sapiens
  source 1..23: mol_type = genomic DNA
caggcggcccgggttcgactccc

SEQ ID NO: 34231 - DNA, 25 bp, Homo sapiens
  source 1..25: mol_type = genomic DNA
caggcggcccgggttcgactcccgg

SEQ ID NO: 34232 - DNA, 26 bp, Homo sapiens
  source 1..26: mol_type = genomic DNA
caggcggcccgggttcgactcccggt

SEQ ID NO: 34233 - DNA, 27 bp, Homo sapiens
  source 1..27: mol_type = genomic DNA
caggcggcccgggttcgactcccggtg

SEQ ID NO: 34234 - DNA, 28 bp, Homo sapiens
  source 1..28: mol_type = genomic DNA
caggcggcccgggttcgactcccggtgt

SEQ ID NO: 34235 - DNA, 29 bp, Homo sapiens
  source 1..29: mol_type = genomic DNA
caggcggcccgggttcgactcccggtgtg

SEQ ID NO: 34236 - DNA, 30 bp, Homo sapiens; identical to SEQ ID NO: 9004
  source 1..30: mol_type = genomic DNA

SEQ ID NO: 34237 - DNA, 31 bp, Homo sapiens; identical to SEQ ID NO: 9005
  source 1..31: mol_type = genomic DNA

SEQ ID NO: 34238 - DNA, 32 bp, Homo sapiens; identical to SEQ ID NO: 9006
  source 1..32: mol_type = genomic DNA

SEQ ID NO: 34239 - DNA, 33 bp, Homo sapiens; identical to SEQ ID NO: 9007
  source 1..33: mol_type = genomic DNA

SEQ ID NO: 34240 - DNA, 34 bp, Homo sapiens; identical to SEQ ID NO: 9008
  source 1..34: mol_type = genomic DNA

SEQ ID NO: 34241 - DNA, 35 bp, Homo sapiens; identical to SEQ ID NO: 9009
  source 1..35: mol_type = genomic DNA

SEQ ID NO: 34242 - DNA, 36 bp, Homo sapiens; identical to SEQ ID NO: 9010
  source 1..36: mol_type = genomic DNA

SEQ ID NO: 34243 - DNA, 26 bp, Homo sapiens
  source 1..26: mol_type = genomic DNA
cagggattgtgggttcgagtcccacc

SEQ ID NO: 34244 - DNA, 33 bp, Homo sapiens; identical to SEQ ID NO: 9029
  source 1..33: mol_type = genomic DNA

SEQ ID NO: 34245 - DNA, 34 bp, Homo sapiens; identical to SEQ ID NO: 9030
  source 1..34: mol_type = genomic DNA

SEQ ID NO: 34246 - DNA, 35 bp, Homo sapiens; identical to SEQ ID NO: 9031
  source 1..35: mol_type = genomic DNA

SEQ ID NO: 34247 - DNA, 33 bp, Homo sapiens; identical to SEQ ID NO: 9045
  source 1..33: mol_type = genomic DNA

SEQ ID NO: 34248 - DNA, 34 bp, Homo sapiens; identical to SEQ ID NO: 9046
  source 1..34: mol_type = genomic DNA

SEQ ID NO: 34249 - DNA, 35 bp, Homo sapiens; identical to SEQ ID NO: 9047
  source 1..35: mol_type = genomic DNA

SEQ ID NO: 34250 - DNA, 36 bp, Homo sapiens; identical to SEQ ID NO: 9048
  source 1..36: mol_type = genomic DNA

SEQ ID NO: 34251 - DNA, 20 bp, Homo sapiens
  source 1..20: mol_type = genomic DNA
caggggtagagcatttgact

SEQ ID NO: 34252 - DNA, 33 bp, Homo sapiens; identical to SEQ ID NO: 9058
  source 1..33: mol_type = genomic DNA

SEQ ID NO: 34253 - DNA, 34 bp, Homo sapiens; identical to SEQ ID NO: 9059
  source 1..34: mol_type = genomic DNA

SEQ ID NO: 34254 - DNA, 35 bp, Homo sapiens; identical to SEQ ID NO: 9060
  source 1..35: mol_type = genomic DNA

SEQ ID NO: 34255 - DNA, 34 bp, Homo sapiens; identical to SEQ ID NO: 9064
  source 1..34: mol_type = genomic DNA

SEQ ID NO: 34256 - DNA, 21 bp, Homo sapiens
  source 1..21: mol_type = genomic DNA
caggggttagagcactggtct

SEQ ID NO: 34257 - DNA, 29 bp, Homo sapiens
  source 1..29: mol_type = genomic DNA
caggggttagagcactggtcttgtaaacc

SEQ ID NO: 34258 - DNA, 26 bp, Homo sapiens
  source 1..26: mol_type = genomic DNA
caggggttaggcctctttttaccacc

SEQ ID NO: 34259 - DNA, 16 bp, Homo sapiens
  source 1..16: mol_type = genomic DNA
cagggtcgtgggttcg

SEQ ID NO: 34260 - DNA, 31 bp, Homo sapiens; identical to SEQ ID NO: 9085
  source 1..31: mol_type = genomic DNA

SEQ ID NO: 34261 - DNA, 32 bp, Homo sapiens; identical to SEQ ID NO: 9086
  source 1..32: mol_type = genomic DNA

SEQ ID NO: 34262 - DNA, 33 bp, Homo sapiens; identical to SEQ ID NO: 9087
  source 1..33: mol_type = genomic DNA

SEQ ID NO: 34263 - DNA, 34 bp, Homo sapiens; identical to SEQ ID NO: 9088
  source 1..34: mol_type = genomic DNA

SEQ ID NO: 34264 - DNA, 35 bp, Homo sapiens; identical to SEQ ID NO: 9089
  source 1..35: mol_type = genomic DNA

SEQ ID NO: 34265 - DNA, 24 bp, Homo sapiens
  source 1..24: mol_type = genomic DNA
cagggttcaagtccctgttcgggc

SEQ ID NO: 34266 - DNA, 25 bp, Homo sapiens
  source 1..25: mol_type = genomic DNA
cagggttcaagtccctgttcgggcg

SEQ ID NO: 34267 - DNA, 26 bp, Homo sapiens
  source 1..26: mol_type = genomic DNA
cagggttcaagtccctgttcgggcgc

SEQ ID NO: 34268 - DNA, 27 bp, Homo sapiens
  source 1..27: mol_type = genomic DNA
cagggttcaagtccctgttcgggcgcc

SEQ ID NO: 34269 - DNA, 28 bp, Homo sapiens
  source 1..28: mol_type = genomic DNA
cagggttcaagtccctgttcgggcgcca

SEQ ID NO: 34270 - DNA, 16 bp, Homo sapiens
  source 1..16: mol_type = genomic DNA
caggtcgcagtctccc

SEQ ID NO: 34271 - DNA, 27 bp, Homo sapiens
  source 1..27: mol_type = genomic DNA
caggtggcccgggttcgactcccggta

SEQ ID NO: 34272 - DNA, 29 bp, Homo sapiens
  source 1..29: mol_type = genomic DNA
caggtggcccgggttcgactcccggtatg

SEQ ID NO: 34273 - DNA, 30 bp, Homo sapiens; identical to SEQ ID NO: 9098
  source 1..30: mol_type = genomic DNA

SEQ ID NO: 34274 - DNA, 31 bp, Homo sapiens; identical to SEQ ID NO: 9099
  source 1..31: mol_type = genomic DNA

SEQ ID NO: 34275 - DNA, 32 bp, Homo sapiens; identical to SEQ ID NO: 9100
  source 1..32: mol_type = genomic DNA

SEQ ID NO: 34276 - DNA, 33 bp, Homo sapiens; identical to SEQ ID NO: 9101
  source 1..33: mol_type = genomic DNA

SEQ ID NO: 34277 - DNA, 34 bp, Homo sapiens; identical to SEQ ID NO: 9102
  source 1..34: mol_type = genomic DNA

SEQ ID NO: 34278 - DNA, 35 bp, Homo sapiens; identical to SEQ ID NO: 9103
  source 1..35: mol_type = genomic DNA

SEQ ID NO: 34279 - DNA, 26 bp, Homo sapiens
  source 1..26: mol_type = genomic DNA
caggttcgaaccctgctcgctgcgcc

SEQ ID NO: 34280 - DNA, 25 bp, Homo sapiens
  source 1..25: mol_type = genomic DNA
caggttcgaatcctgccgactacgc

SEQ ID NO: 34281 - DNA, 26 bp, Homo sapiens
  source 1..26: mol_type = genomic DNA
caggttcgaatcctgccgactacgcc

SEQ ID NO: 34282 - DNA, 26 bp, Homo sapiens
  source 1..26: mol_type = genomic DNA
caggttcgaatcctgctcacagcgcc

SEQ ID NO: 34283 - DNA, 24 bp, Homo sapiens
  source 1..24: mol_type = genomic DNA
caggttcgaatcctgttcgtgacg

SEQ ID NO: 34284 - DNA, 25 bp, Homo sapiens
  source 1..25: mol_type = genomic DNA
caggttcgaatcctgttcgtgacgc

SEQ ID NO: 34285 - DNA, 26 bp, Homo sapiens
  source 1..26: mol_type = genomic DNA
caggttcgaatcctgttcgtgacgcc

SEQ ID NO: 34286 - DNA, 26 bp, Homo sapiens
  source 1..26: mol_type = genomic DNA
caggttcgactcctggctggctcgcc

SEQ ID NO: 34287 - DNA, 25 bp, Homo sapiens
  source 1..25: mol_type = genomic DNA
caggttcgagtcctgccgcggtcgc

SEQ ID NO: 34288 - DNA, 26 bp, Homo sapiens
  source 1..26: mol_type = genomic DNA
caggttcgagtcctgccgcggtcgcc

SEQ ID NO: 34289 - DNA, 28 bp, Homo sapiens
  source 1..28: mol_type = genomic DNA
cagtaagttgcaatacttaatttctgcc

SEQ ID NO: 34290 - DNA, 29 bp, Homo sapiens
  source 1..29: mol_type = genomic DNA
cagtaagttgcaatacttaatttctgcca

SEQ ID NO: 34291 - DNA, 16 bp, Homo sapiens
  source 1..16: mol_type = genomic DNA
cagtagagcatcagac

SEQ ID NO: 34292 - DNA, 16 bp, Homo sapiens
  source 1..16: mol_type = genomic DNA
cagtcagtagagcatc

SEQ ID NO: 34293 - DNA, 42 bp, Homo sapiens; identical to SEQ ID NO: 9150
  source 1..42: mol_type = genomic DNA

SEQ ID NO: 34294 - DNA, 43 bp, Homo sapiens; identical to SEQ ID NO: 9151
  source 1..43: mol_type = genomic DNA

SEQ ID NO: 34295 - DNA, 16 bp, Homo sapiens
  source 1..16: mol_type = genomic DNA
cagtcggtagagcata

SEQ ID NO: 34296 - DNA, 20 bp, Homo sapiens
  source 1..20: mol_type = genomic DNA
cagtcggtagagcataagac

SEQ ID NO: 34297 - DNA, 16 bp, Homo sapiens
  source 1..16: mol_type = genomic DNA
cagtcggtagagcatc

SEQ ID NO: 34298 - DNA, 17 bp, Homo sapiens
  source 1..17: mol_type = genomic DNA
cagtcggtagagcatca

SEQ ID NO: 34299 - DNA, 18 bp, Homo sapiens
  source 1..18: mol_type = genomic DNA
cagtcggtagagcatcag

SEQ ID NO: 34300 - DNA, 19 bp, Homo sapiens
  source 1..19: mol_type = genomic DNA
cagtcggtagagcatcaga

SEQ ID NO: 34301 - DNA, 20 bp, Homo sapiens
  source 1..20: mol_type = genomic DNA
cagtcggtagagcatcagac

SEQ ID NO: 34302 - DNA, 21 bp, Homo sapiens
  source 1..21: mol_type = genomic DNA
cagtcggtagagcatcagact

SEQ ID NO: 34303 - DNA, 23 bp, Homo sapiens
  source 1..23: mol_type = genomic DNA
cagtcggtagagcatcagacttt

SEQ ID NO: 34304 - DNA, 24 bp, Homo sapiens
  source 1..24: mol_type = genomic DNA
cagtcggtagagcatcagactttt

SEQ ID NO: 34305 - DNA, 16 bp, Homo sapiens
  source 1..16: mol_type = genomic DNA
cagtcggtagagcatg

SEQ ID NO: 34306 - DNA, 17 bp, Homo sapiens
  source 1..17: mol_type = genomic DNA
cagtcggtagagcatga

SEQ ID NO: 34307 - DNA, 18 bp, Homo sapiens
  source 1..18: mol_type = genomic DNA
cagtcggtagagcatgag

SEQ ID NO: 34308 - DNA, 19 bp, Homo sapiens
  source 1..19: mol_type = genomic DNA
cagtcggtagagcatgaga

SEQ ID NO: 34309 - DNA, 20 bp, Homo sapiens
  source 1..20: mol_type = genomic DNA
cagtcggtagagcatgagac

SEQ ID NO: 34310 - DNA, 21 bp, Homo sapiens
  source 1..21: mol_type = genomic DNA
cagtcggtagagcatgagacc

SEQ ID NO: 34311 - DNA, 22 bp, Homo sapiens
  source 1..22: mol_type = genomic DNA
cagtcggtagagcatgagaccc

SEQ ID NO: 34312 - DNA, 27 bp, Homo sapiens
  source 1..27: mol_type = genomic DNA
cagtcggtagagcatgagacccttaat

SEQ ID NO: 34313 - DNA, 28 bp, Homo sapiens
  source 1..28: mol_type = genomic DNA
cagtcggtagagcatgagacccttaatc

SEQ ID NO: 34314 - DNA, 30 bp, Homo sapiens; identical to SEQ ID NO: 9182
  source 1..30: mol_type = genomic DNA

SEQ ID NO: 34315 - DNA, 21 bp, Homo sapiens
  source 1..21: mol_type = genomic DNA
cagtcggtagagcatgagact

SEQ ID NO: 34316 - DNA, 22 bp, Homo sapiens
  source 1..22: mol_type = genomic DNA
cagtcggtagagcatgagactc

SEQ ID NO: 34317 - DNA, 23 bp, Homo sapiens
  source 1..23: mol_type = genomic DNA
cagtcggtagagcatgagactct

SEQ ID NO: 34318 - DNA, 24 bp, Homo sapiens
  source 1..24: mol_type = genomic DNA
cagtcggtagagcatgagactctt

SEQ ID NO: 34319 - DNA, 26 bp, Homo sapiens
  source 1..26: mol_type = genomic DNA
cagtcggtagagcatgagactcttaa

SEQ ID NO: 34320 - DNA, 27 bp, Homo sapiens
  source 1..27: mol_type = genomic DNA
cagtcggtagagcatgagactcttaat

SEQ ID NO: 34321 - DNA, 28 bp, Homo sapiens
  source 1..28: mol_type = genomic DNA
cagtcggtagagcatgagactcttaatc

SEQ ID NO: 34322 - DNA, 29 bp, Homo sapiens
  source 1..29: mol_type = genomic DNA
cagtcggtagagcatgagactcttaatct

SEQ ID NO: 34323 - DNA, 30 bp, Homo sapiens; identical to SEQ ID NO: 9193
  source 1..30: mol_type = genomic DNA

SEQ ID NO: 34324 - DNA, 31 bp, Homo sapiens; identical to SEQ ID NO: 9194
  source 1..31: mol_type = genomic DNA

SEQ ID NO: 34325 - DNA, 37 bp, Homo sapiens; identical to SEQ ID NO: 9195
  source 1..37: mol_type = genomic DNA

SEQ ID NO: 34326 - DNA, 38 bp, Homo sapiens; identical to SEQ ID NO: 9196
  source 1..38: mol_type = genomic DNA

SEQ ID NO: 34327 - DNA, 39 bp, Homo sapiens; identical to SEQ ID NO: 9197
  source 1..39: mol_type = genomic DNA

SEQ ID NO: 34328 - DNA, 40 bp, Homo sapiens; identical to SEQ ID NO: 9198
  source 1..40: mol_type = genomic DNA

SEQ ID NO: 34329 - DNA, 41 bp, Homo sapiens; identical to SEQ ID NO: 9199
  source 1..41: mol_type = genomic DNA

SEQ ID NO: 34330 - DNA, 42 bp, Homo sapiens; identical to SEQ ID NO: 9200
  source 1..42: mol_type = genomic DNA

SEQ ID NO: 34331 - DNA, 43 bp, Homo sapiens; identical to SEQ ID NO: 9201
  source 1..43: mol_type = genomic DNA

SEQ ID NO: 34332 - DNA, 45 bp, Homo sapiens; identical to SEQ ID NO: 9203
  source 1..45: mol_type = genomic DNA

SEQ ID NO: 34333 - DNA, 17 bp, Homo sapiens
  source 1..17: mol_type = genomic DNA
cagtcggtagagcatgg

SEQ ID NO: 34334 - DNA, 18 bp, Homo sapiens
  source 1..18: mol_type = genomic DNA
cagtcggtagagcatggg

SEQ ID NO: 34335 - DNA, 19 bp, Homo sapiens
  source 1..19: mol_type = genomic DNA
cagtcggtagagcatggga

SEQ ID NO: 34336 - DNA, 20 bp, Homo sapiens
  source 1..20: mol_type = genomic DNA
cagtcggtagagcatgggac

SEQ ID NO: 34337 - DNA, 21 bp, Homo sapiens
  source 1..21: mol_type = genomic DNA
cagtcggtagagcatgggact

SEQ ID NO: 34338 - DNA, 22 bp, Homo sapiens
  source 1..22: mol_type = genomic DNA
cagtcggtagagcatgggactc

SEQ ID NO: 34339 - DNA, 23 bp, Homo sapiens
  source 1..23: mol_type = genomic DNA
cagtcggtagagcatgggactct

SEQ ID NO: 34340 - DNA, 24 bp, Homo sapiens
  source 1..24: mol_type = genomic DNA
cagtcggtagagcatgggactctt

SEQ ID NO: 34341 - DNA, 27 bp, Homo sapiens
  source 1..27: mol_type = genomic DNA
cagtcggtagagcatgggactcttaat

SEQ ID NO: 34342 - DNA, 28 bp, Homo sapiens
  source 1..28: mol_type = genomic DNA
cagtcggtagagcatgggactcttaatc

SEQ ID NO: 34343 - DNA, 29 bp, Homo sapiens
  source 1..29: mol_type = genomic DNA
cagtcggtagagcatgggactcttaatcc

SEQ ID NO: 34344 - DNA, 30 bp, Homo sapiens; identical to SEQ ID NO: 9217
  source 1..30: mol_type = genomic DNA

SEQ ID NO: 34345 - DNA, 31 bp, Homo sapiens; identical to SEQ ID NO: 9218
  source 1..31: mol_type = genomic DNA

SEQ ID NO: 34346 - DNA, 38 bp, Homo sapiens; identical to SEQ ID NO: 9220
  source 1..38: mol_type = genomic DNA

SEQ ID NO: 34347 - DNA, 39 bp, Homo sapiens; identical to SEQ ID NO: 9221
  source 1..39: mol_type = genomic DNA

SEQ ID NO: 34348 - DNA, 40 bp, Homo sapiens; identical to SEQ ID NO: 9222
  source 1..40: mol_type = genomic DNA

SEQ ID NO: 34349 - DNA, 43 bp, Homo sapiens; identical to SEQ ID NO: 9225
  source 1..43: mol_type = genomic DNA

SEQ ID NO: 34350 - DNA, 24 bp, Homo sapiens
  source 1..24: mol_type = genomic DNA
cagtctcataatctgaaggtcctg

SEQ ID NO: 34351 - DNA, 41 bp, Homo sapiens
  source 1..41: mol_type = genomic DNA
cagtctcttcggaggcgtgggttcgaatcccaccgctgcca

SEQ ID NO: 34352 - DNA, 42 bp, Homo sapiens
  source 1..42: mol_type = genomic DNA
cagtctcttcggaggcgtgggttcgaatcccaccgctgccac

SEQ ID NO: 34353 - DNA, 43 bp, Homo sapiens; identical to SEQ ID NO: 9250
  source 1..43: mol_type = genomic DNA

SEQ ID NO: 34354 - DNA, 41 bp, Homo sapiens; identical to SEQ ID NO: 9259
  source 1..41: mol_type = genomic DNA

SEQ ID NO: 34355 - DNA, 42 bp, Homo sapiens; identical to SEQ ID NO: 9260
  source 1..42: mol_type = genomic DNA

SEQ ID NO: 34356 - DNA, 43 bp, Homo sapiens; identical to SEQ ID NO: 9261
  source 1..43: mol_type = genomic DNA

SEQ ID NO: 34357 - DNA, 27 bp, Homo sapiens
  source 1..27: mol_type = genomic DNA
cagtggcctaatggataaggcatcagc

SEQ ID NO: 34358 - DNA, 29 bp, Homo sapiens
  source 1..29: mol_type = genomic DNA
cagtggcctaatggataaggcatcagcct

SEQ ID NO: 34359 - DNA, 16 bp, Homo sapiens
  source 1..16: mol_type = genomic DNA
cagtgggtagagcatc

SEQ ID NO: 34360 - DNA, 16 bp, Homo sapiens
  source 1..16: mol_type = genomic DNA
cagtggtagaattctc

SEQ ID NO: 34361 - DNA, 17 bp, Homo sapiens
  source 1..17: mol_type = genomic DNA
cagtggtagaattctcg

SEQ ID NO: 34362 - DNA, 18 bp, Homo sapiens
  source 1..18: mol_type = genomic DNA
cagtggtagaattctcgc

SEQ ID NO: 34363 - DNA, 19 bp, Homo sapiens
  source 1..19: mol_type = genomic DNA
cagtggtagaattctcgcc

SEQ ID NO: 34364 - DNA, 20 bp, Homo sapiens
  source 1..20: mol_type = genomic DNA
cagtggtagaattctcgcct

SEQ ID NO: 34365 - DNA, 24 bp, Homo sapiens
  source 1..24: mol_type = genomic DNA
cagtggtagaattctcgcctccca

SEQ ID NO: 34366 - DNA, 21 bp, Homo sapiens
  source 1..21: mol_type = genomic DNA
cagtggtagaattctcgcctg

SEQ ID NO: 34367 - DNA, 22 bp, Homo sapiens
  source 1..22: mol_type = genomic DNA
cagtggtagaattctcgcctgc

SEQ ID NO: 34368 - DNA, 23 bp, Homo sapiens
  source 1..23: mol_type = genomic DNA
cagtggtagaattctcgcctgcc

SEQ ID NO: 34369 - DNA, 24 bp, Homo sapiens
  source 1..24: mol_type = genomic DNA
cagtggtagaattctcgcctgcca

SEQ ID NO: 34370 - DNA, 25 bp, Homo sapiens
  source 1..25: mol_type = genomic DNA
cagtggtagaattctcgcctgccac

SEQ ID NO: 34371 - DNA, 26 bp, Homo sapiens
  source 1..26: mol_type = genomic DNA
cagtggtagaattctcgcctgccacg

SEQ ID NO: 34372 - DNA, 31 bp, Homo sapiens; identical to SEQ ID NO: 9295
  source 1..31: mol_type = genomic DNA

SEQ ID NO: 34373 - DNA, 34 bp, Homo sapiens; identical to SEQ ID NO: 9297
  source 1..34: mol_type = genomic DNA

SEQ ID NO: 34374 - DNA, 35 bp, Homo sapiens; identical to SEQ ID NO: 9298
  source 1..35: mol_type = genomic DNA

SEQ ID NO: 34375 - DNA, 36 bp, Homo sapiens; identical to SEQ ID NO: 9299
  source 1..36: mol_type = genomic DNA

SEQ ID NO: 34376 - DNA, 39 bp, Homo sapiens; identical to SEQ ID NO: 9301
  source 1..39: mol_type = genomic DNA

SEQ ID NO: 34377 - DNA, 40 bp, Homo sapiens; identical to SEQ ID NO: 9302
  source 1..40: mol_type = genomic DNA

SEQ ID NO: 34378 - DNA, 21 bp, Homo sapiens
  source 1..21: mol_type = genomic DNA
cagtggtagaattctcgcctt

SEQ ID NO: 34379 - DNA, 20 bp, Homo sapiens
  source 1..20: mol_type = genomic DNA
cagtggtagagcatttgact

SEQ ID NO: 34380 - DNA, 22 bp, Homo sapiens
  source 1..22: mol_type = genomic DNA
cagtggtagagcatttgactgc

SEQ ID NO: 34381 - DNA, 30 bp, Homo sapiens; identical to SEQ ID NO: 9313
  source 1..30: mol_type = genomic DNA

SEQ ID NO: 34382 - DNA, 16 bp, Homo sapiens
  source 1..16: mol_type = genomic DNA
cagtggtagagcgcat

SEQ ID NO: 34383 - DNA, 18 bp, Homo sapiens
  source 1..18: mol_type = genomic DNA
cagtggtagagcgcatgc

SEQ ID NO: 34384 - DNA, 19 bp, Homo sapiens
  source 1..19: mol_type = genomic DNA
cagtggtagagcgcatgct

SEQ ID NO: 34385 - DNA, 20 bp, Homo sapiens
  source 1..20: mol_type = genomic DNA
cagtggtagagcgcatgctt

SEQ ID NO: 34386 - DNA, 18 bp, Homo sapiens
  source 1..18: mol_type = genomic DNA
cagtggtagagcgcgtgc

SEQ ID NO: 34387 - DNA, 20 bp, Homo sapiens
  source 1..20: mol_type = genomic DNA
cagtggtagagcgcgtgctt

SEQ ID NO: 34388 - DNA, 16 bp, Homo sapiens
  source 1..16: mol_type = genomic DNA
cagttgacccgggttc

SEQ ID NO: 34389 - DNA, 17 bp, Homo sapiens
  source 1..17: mol_type = genomic DNA
cagttgacccgggttcg

SEQ ID NO: 34390 - DNA, 26 bp, Homo sapiens
  source 1..26: mol_type = genomic DNA
cagttgacccgggttcgattcccggc

SEQ ID NO: 34391 - DNA, 29 bp, Homo sapiens
  source 1..29: mol_type = genomic DNA
cagttgacccgggttcgattcccggccaa

SEQ ID NO: 34392 - DNA, 35 bp, Homo sapiens; identical to SEQ ID NO: 9330
  source 1..35: mol_type = genomic DNA

SEQ ID NO: 34393 - DNA, 35 bp, Homo sapiens; identical to SEQ ID NO: 9344
  source 1..35: mol_type = genomic DNA

SEQ ID NO: 34394 - DNA, 36 bp, Homo sapiens; identical to SEQ ID NO: 9345
  source 1..36: mol_type = genomic DNA

SEQ ID NO: 34395 - DNA, 16 bp, Homo sapiens
  source 1..16: mol_type = genomic DNA
cagttggtagagcatc

SEQ ID NO: 34396 - DNA, 22 bp, Homo sapiens
  source 1..22: mol_type = genomic DNA
cataacccagaggtcgatggat

SEQ ID NO: 34397 - DNA, 23 bp, Homo sapiens
  source 1..23: mol_type = genomic DNA
cataacccagaggtcgatggatc

SEQ ID NO: 34398 - DNA, 24 bp, Homo sapiens
  source 1..24: mol_type = genomic DNA
cataacccagaggtcgatggatcg

SEQ ID NO: 34399 - DNA, 30 bp, Homo sapiens; identical to SEQ ID NO: 9394
  source 1..30: mol_type = genomic DNA

SEQ ID NO: 34400 - DNA, 16 bp, Homo sapiens
  source 1..16: mol_type = genomic DNA
cataatctgaaggtcc

SEQ ID NO: 34401 - DNA, 17 bp, Homo sapiens
  source 1..17: mol_type = genomic DNA
cataatctgaaggtcct

SEQ ID NO: 34402 - DNA, 18 bp, Homo sapiens
  source 1..18: mol_type = genomic DNA
cataatctgaaggtcctg

SEQ ID NO: 34403 - DNA, 19 bp, Homo sapiens
  source 1..19: mol_type = genomic DNA
cataatctgaaggtcctga

SEQ ID NO: 34404 - DNA, 21 bp, Homo sapiens
  source 1..21: mol_type = genomic DNA
cataatctgaaggtcctgagt

SEQ ID NO: 34405 - DNA, 23 bp, Homo sapiens
  source 1..23: mol_type = genomic DNA
cataatctgaaggtcctgagttc

SEQ ID NO: 34406 - DNA, 24 bp, Homo sapiens
  source 1..24: mol_type = genomic DNA
cataatctgaaggtcctgagttcg

SEQ ID NO: 34407 - DNA, 41 bp, Homo sapiens; identical to SEQ ID NO: 9414
  source 1..41: mol_type = genomic DNA

SEQ ID NO: 34408 - DNA, 42 bp, Homo sapiens; identical to SEQ ID NO: 9415
  source 1..42: mol_type = genomic DNA

SEQ ID NO: 34409 - DNA, 43 bp, Homo sapiens; identical to SEQ ID NO: 9416
  source 1..43: mol_type = genomic DNA

SEQ ID NO: 34410 - DNA, 16 bp, Homo sapiens
  source 1..16: mol_type = genomic DNA
cataatctgaaggtcg

SEQ ID NO: 34411 - DNA, 18 bp, Homo sapiens
  source 1..18: mol_type = genomic DNA
cataatctgaaggtcgtg

SEQ ID NO: 34412 - DNA, 23 bp, Homo sapiens
  source 1..23: mol_type = genomic DNA
cataatctgaaggtcgtgagttc

SEQ ID NO: 34413 - DNA, 24 bp, Homo sapiens
  source 1..24: mol_type = genomic DNA
cataatctgaaggtcgtgagttcg

SEQ ID NO: 34414 - DNA, 40 bp, Homo sapiens; identical to SEQ ID NO: 9429
  source 1..40: mol_type = genomic DNA

SEQ ID NO: 34415 - DNA, 41 bp, Homo sapiens; identical to SEQ ID NO: 9430
  source 1..41: mol_type = genomic DNA

SEQ ID NO: 34416 - DNA, 42 bp, Homo sapiens; identical to SEQ ID NO: 9431
  source 1..42: mol_type = genomic DNA

SEQ ID NO: 34417 - DNA, 41 bp, Homo sapiens; identical to SEQ ID NO: 9434
  source 1..41: mol_type = genomic DNA

SEQ ID NO: 34418 - DNA, 42 bp, Homo sapiens; identical to SEQ ID NO: 9435
  source 1..42: mol_type = genomic DNA

SEQ ID NO: 34419 - DNA, 41 bp, Homo sapiens; identical to SEQ ID NO: 9443
  source 1..41: mol_type = genomic DNA

SEQ ID NO: 34420 - DNA, 27 bp, Homo sapiens
  source 1..27: mol_type = genomic DNA
catagtgtagtggttatcacgtctgct

SEQ ID NO: 34421 - DNA, 28 bp, Homo sapiens
  source 1..28: mol_type = genomic DNA
catagtgtagtggttatcacgtctgctt

SEQ ID NO: 34422 - DNA, 29 bp, Homo sapiens
  source 1..29: mol_type = genomic DNA
catatcattggtcgtggttgtagtccgtg

SEQ ID NO: 34423 - DNA, 31 bp, Homo sapiens; identical to SEQ ID NO: 9467
  source 1..31: mol_type = genomic DNA

SEQ ID NO: 34424 - DNA, 32 bp, Homo sapiens; identical to SEQ ID NO: 9468
  source 1..32: mol_type = genomic DNA

SEQ ID NO: 34425 - DNA, 34 bp, Homo sapiens; identical to SEQ ID NO: 9470
  source 1..34: mol_type = genomic DNA

SEQ ID NO: 34426 - DNA, 35 bp, Homo sapiens; identical to SEQ ID NO: 9471
  source 1..35: mol_type = genomic DNA

SEQ ID NO: 34427 - DNA, 36 bp, Homo sapiens; identical to SEQ ID NO: 9472
  source 1..36: mol_type = genomic DNA

SEQ ID NO: 34428 - DNA, 37 bp, Homo sapiens; identical to SEQ ID NO: 9473
  source 1..37: mol_type = genomic DNA

SEQ ID NO: 34429 - DNA, 39 bp, Homo sapiens; identical to SEQ ID NO: 9475
  source 1..39: mol_type = genomic DNA

SEQ ID NO: 34430 - DNA, 40 bp, Homo sapiens; identical to SEQ ID NO: 9476
  source 1..40: mol_type = genomic DNA

SEQ ID NO: 34431 - DNA, 25 bp, Homo sapiens
  source 1..25: mol_type = genomic DNA
catatggtctagcggttaggattcc

SEQ ID NO: 34432 - DNA, 26 bp, Homo sapiens
  source 1..26: mol_type = genomic DNA
catatggtctagcggttaggattcct

SEQ ID NO: 34433 - DNA, 29 bp, Homo sapiens
  source 1..29: mol_type = genomic DNA
catatggtctagcggttaggattcctggt

SEQ ID NO: 34434 - DNA, 30 bp, Homo sapiens; identical to SEQ ID NO: 9484
  source 1..30: mol_type = genomic DNA

SEQ ID NO: 34435 - DNA, 31 bp, Homo sapiens; identical to SEQ ID NO: 9485
  source 1..31: mol_type = genomic DNA

SEQ ID NO: 34436 - DNA, 32 bp, Homo sapiens; identical to SEQ ID NO: 9486
  source 1..32: mol_type = genomic DNA

SEQ ID NO: 34437 - DNA, 33 bp, Homo sapiens; identical to SEQ ID NO: 9487
  source 1..33: mol_type = genomic DNA

SEQ ID NO: 34438 - DNA, 37 bp, Homo sapiens; identical to SEQ ID NO: 9491
  source 1..37: mol_type = genomic DNA

SEQ ID NO: 34439 - DNA, 18 bp, Homo sapiens
  source 1..18: mol_type = genomic DNA
catatgtccgcgtgggtt

SEQ ID NO: 34440 - DNA, 18 bp, Homo sapiens
  source 1..18: mol_type = genomic DNA
catcaccccataaacacc

SEQ ID NO: 34441 - DNA, 16 bp, Homo sapiens
  source 1..16: mol_type = genomic DNA
catcagattgtgaatc

SEQ ID NO: 34442 - DNA, 29 bp, Homo sapiens
  source 1..29: mol_type = genomic DNA
catcagattgtgaatctgacaacagaggc

SEQ ID NO: 34443 - DNA, 30 bp, Homo sapiens; identical to SEQ ID NO: 9532
  source 1..30: mol_type = genomic DNA

SEQ ID NO: 34444 - DNA, 31 bp, Homo sapiens; identical to SEQ ID NO: 9533
  source 1..31: mol_type = genomic DNA

SEQ ID NO: 34445 - DNA, 36 bp, Homo sapiens; identical to SEQ ID NO: 9538
  source 1..36: mol_type = genomic DNA

SEQ ID NO: 34446 - DNA, 37 bp, Homo sapiens; identical to SEQ ID NO: 9539
  source 1..37: mol_type = genomic DNA

SEQ ID NO: 34447 - DNA, 26 bp, Homo sapiens
  source 1..26: mol_type = genomic DNA
catcagcctccggagctggggattgt

SEQ ID NO: 34448 - DNA, 16 bp, Homo sapiens
  source 1..16: mol_type = genomic DNA
catgagactcttaatc

SEQ ID NO: 34449 - DNA, 17 bp, Homo sapiens
  source 1..17: mol_type = genomic DNA
catgagactcttaatct

SEQ ID NO: 34450 - DNA, 33 bp, Homo sapiens; identical to SEQ ID NO: 9557
  source 1..33: mol_type = genomic DNA

SEQ ID NO: 34451 - DNA, 34 bp, Homo sapiens
  source 1..34: mol_type = genomic DNA
catgaggtcccgggttcgatccccagcatctcca

SEQ ID NO: 34452 - DNA, 35 bp, Homo sapiens; identical to SEQ ID NO: 9558
  source 1..35: mol_type = genomic DNA

SEQ ID NO: 34453 - DNA, 36 bp, Homo sapiens; identical to SEQ ID NO: 9559
  source 1..36: mol_type = genomic DNA

SEQ ID NO: 34454 - DNA, 31 bp, Homo sapiens; identical to SEQ ID NO: 9565
  source 1..31: mol_type = genomic DNA

SEQ ID NO: 34455 - DNA, 26 bp, Homo sapiens
  source 1..26: mol_type = genomic DNA
catgcccccatgtctaacaacatggc

SEQ ID NO: 34456 - DNA, 27 bp, Homo sapiens
  source 1..27: mol_type = genomic DNA
catgcccccatgtctaacaacatggct

SEQ ID NO: 34457 - DNA, 28 bp, Homo sapiens
  source 1..28: mol_type = genomic DNA
catgcccccatgtctaacaacatggctt

SEQ ID NO: 34458 - DNA, 31 bp, Homo sapiens; identical to SEQ ID NO: 9580
  source 1..31: mol_type = genomic DNA

SEQ ID NO: 34459 - DNA, 33 bp, Homo sapiens; identical to SEQ ID NO: 9582
  source 1..33: mol_type = genomic DNA

SEQ ID NO: 34460 - DNA, 35 bp, Homo sapiens; identical to SEQ ID NO: 9584
  source 1..35: mol_type = genomic DNA

SEQ ID NO: 34461 - DNA, 36 bp, Homo sapiens; identical to SEQ ID NO: 9585
  source 1..36: mol_type = genomic DNA

SEQ ID NO: 34462 - DNA, 34 bp, Homo sapiens; identical to SEQ ID NO: 9592
  source 1..34: mol_type = genomic DNA

SEQ ID NO: 34463 - DNA, 36 bp, Homo sapiens; identical to SEQ ID NO: 9593
  source 1..36: mol_type = genomic DNA

SEQ ID NO: 34464 - DNA, 16 bp, Homo sapiens
  source 1..16: mol_type = genomic DNA
catggctttctcacca

SEQ ID NO: 34465 - DNA, 16 bp, Homo sapiens
  source 1..16: mol_type = genomic DNA
catgggactcttaatc

SEQ ID NO: 34466 - DNA, 17 bp, Homo sapiens
  source 1..17: mol_type = genomic DNA
catgggactcttaatcc

SEQ ID NO: 34467 - DNA, 17 bp, Homo sapiens
  source 1..17: mol_type = genomic DNA
catgggactcttcatcc

SEQ ID NO: 34468 - DNA, 16 bp, Homo sapiens
  source 1..16: mol_type = genomic DNA
catgggtggttcagtg

SEQ ID NO: 34469 - DNA, 17 bp, Homo sapiens
  source 1..17: mol_type = genomic DNA
catgggtggttcagtgg

SEQ ID NO: 34470 - DNA, 19 bp, Homo sapiens
  source 1..19: mol_type = genomic DNA
catgggtggttcagtggta

SEQ ID NO: 34471 - DNA, 28 bp, Homo sapiens
  source 1..28: mol_type = genomic DNA
catgggtggttcagtggtagaattctcg

SEQ ID NO: 34472 - DNA, 29 bp, Homo sapiens
  source 1..29: mol_type = genomic DNA
catgggtggttcagtggtagaattctcgc

SEQ ID NO: 34473 - DNA, 30 bp, Homo sapiens; identical to SEQ ID NO: 9620
  source 1..30: mol_type = genomic DNA

SEQ ID NO: 34474 - DNA, 31 bp, Homo sapiens; identical to SEQ ID NO: 9621
  source 1..31: mol_type = genomic DNA

SEQ ID NO: 34475 - DNA, 32 bp, Homo sapiens; identical to SEQ ID NO: 9622
  source 1..32: mol_type = genomic DNA

SEQ ID NO: 34476 - DNA, 33 bp, Homo sapiens; identical to SEQ ID NO: 9623
  source 1..33: mol_type = genomic DNA

SEQ ID NO: 34477 - DNA, 34 bp, Homo sapiens; identical to SEQ ID NO: 9624
  source 1..34: mol_type = genomic DNA

SEQ ID NO: 34478 - DNA, 21 bp, Homo sapiens
  source 1..21: mol_type = genomic DNA
catggtctagcggttaggatt

SEQ ID NO: 34479 - DNA, 23 bp, Homo sapiens
  source 1..23: mol_type = genomic DNA
catggtctagcggttaggattcc

SEQ ID NO: 34480 - DNA, 24 bp, Homo sapiens
  source 1..24: mol_type = genomic DNA
catggtctagcggttaggattcct

SEQ ID NO: 34481 - DNA, 25 bp, Homo sapiens
  source 1..25: mol_type = genomic DNA
catggtctagcggttaggattcctg

SEQ ID NO: 34482 - DNA, 26 bp, Homo sapiens
  source 1..26: mol_type = genomic DNA
catggtctagcggttaggattcctgg

SEQ ID NO: 34483 - DNA, 27 bp, Homo sapiens
  source 1..27: mol_type = genomic DNA
catggtctagcggttaggattcctggt

SEQ ID NO: 34484 - DNA, 28 bp, Homo sapiens
  source 1..28: mol_type = genomic DNA
catggtctagcggttaggattcctggtt

SEQ ID NO: 34485 - DNA, 29 bp, Homo sapiens
  source 1..29: mol_type = genomic DNA
catggtctagcggttaggattcctggttt

SEQ ID NO: 34486 - DNA, 30 bp, Homo sapiens; identical to SEQ ID NO: 9642
  source 1..30: mol_type = genomic DNA

SEQ ID NO: 34487 - DNA, 31 bp, Homo sapiens; identical to SEQ ID NO: 9643
  source 1..31: mol_type = genomic DNA

SEQ ID NO: 34488 - DNA, 32 bp, Homo sapiens; identical to SEQ ID NO: 9644
  source 1..32: mol_type = genomic DNA

SEQ ID NO: 34489 - DNA, 35 bp, Homo sapiens
  source 1..35: mol_type = genomic DNA
catggtctagcggttaggattcctggttttcaccc

SEQ ID NO: 34490 - DNA, 36 bp, Homo sapiens
  source 1..36: mol_type = genomic DNA
catggtctagcggttaggattcctggttttcaccca

SEQ ID NO: 34491 - DNA, 37 bp, Homo sapiens
  source 1..37: mol_type = genomic DNA
catggtctagcggttaggattcctggttttcacccag

SEQ ID NO: 34492 - DNA, 29 bp, Homo sapiens
  source 1..29: mol_type = genomic DNA
catggtgtaatggtgagcactctggactc

SEQ ID NO: 34493 - DNA, 31 bp, Homo sapiens; identical to SEQ ID NO: 9649
  source 1..31: mol_type = genomic DNA

SEQ ID NO: 34494 - DNA, 26 bp, Homo sapiens
  source 1..26: mol_type = genomic DNA
catggtgtaatggttagcactctgga

SEQ ID NO: 34495 - DNA, 28 bp, Homo sapiens
  source 1..28: mol_type = genomic DNA
catggtgtaatggttagcactctggact

SEQ ID NO: 34496 - DNA, 29 bp, Homo sapiens
  source 1..29: mol_type = genomic DNA
catggtgtaatggttagcactctggactc

SEQ ID NO: 34497 - DNA, 30 bp, Homo sapiens; identical to SEQ ID NO: 9655
  source 1..30: mol_type = genomic DNA

SEQ ID NO: 34498 - DNA, 31 bp, Homo sapiens; identical to SEQ ID NO: 9656
  source 1..31: mol_type = genomic DNA

SEQ ID NO: 34499 - DNA, 36 bp, Homo sapiens
  source 1..36: mol_type = genomic DNA
catggtgtaatggttagcactctggactctgaatcc

SEQ ID NO: 34500 - DNA, 31 bp, Homo sapiens; identical to SEQ ID NO: 9659
  source 1..31: mol_type = genomic DNA

SEQ ID NO: 34501 - DNA, 18 bp, Homo sapiens
  source 1..18: mol_type = genomic DNA
cattcaaaaaagagtacc

SEQ ID NO: 34502 - DNA, 19 bp, Homo sapiens
  source 1..19: mol_type = genomic DNA
cattcaaaaaagagtacca

SEQ ID NO: 34503 - DNA, 16 bp, Homo sapiens
  source 1..16: mol_type = genomic DNA
cattcggctgttaacc

SEQ ID NO: 34504 - DNA, 16 bp, Homo sapiens
  source 1..16: mol_type = genomic DNA
cattcttgcgacccgg

SEQ ID NO: 34505 - DNA, 17 bp, Homo sapiens
  source 1..17: mol_type = genomic DNA
cattcttgcgacccggg

SEQ ID NO: 34506 - DNA, 18 bp, Homo sapiens
  source 1..18: mol_type = genomic DNA
cattcttgcgacccgggt

SEQ ID NO: 34507 - DNA, 19 bp, Homo sapiens
  source 1..19: mol_type = genomic DNA
cattcttgcgacccgggtt

SEQ ID NO: 34508 - DNA, 22 bp, Homo sapiens
  source 1..22: mol_type = genomic DNA
cattcttgcgacccgggttcga

SEQ ID NO: 34509 - DNA, 23 bp, Homo sapiens
  source 1..23: mol_type = genomic DNA
cattcttgcgacccgggttcgat

SEQ ID NO: 34510 - DNA, 39 bp, Homo sapiens; identical to SEQ ID NO: 9713
  source 1..39: mol_type = genomic DNA

SEQ ID NO: 34511 - DNA, 40 bp, Homo sapiens; identical to SEQ ID NO: 9714
  source 1..40: mol_type = genomic DNA

SEQ ID NO: 34512 - DNA, 37 bp, Homo sapiens; identical to SEQ ID NO: 9726
  source 1..37: mol_type = genomic DNA

SEQ ID NO: 34513 - DNA, 22 bp, Homo sapiens
  source 1..22: mol_type = genomic DNA
cattggggtttccccgcgcagg

SEQ ID NO: 34514 - DNA, 23 bp, Homo sapiens
  source 1..23: mol_type = genomic DNA
cattggggtttccccgcgcaggt

SEQ ID NO: 34515 - DNA, 24 bp, Homo sapiens
  source 1..24: mol_type = genomic DNA
cattggggtttccccgcgcaggtt

SEQ ID NO: 34516 - DNA, 44 bp, Homo sapiens; identical to SEQ ID NO: 9748
  source 1..44: mol_type = genomic DNA

SEQ ID NO: 34517 - DNA, 16 bp, Homo sapiens
  source 1..16: mol_type = genomic DNA
cattggtcgtggttgt

SEQ ID NO: 34518 - DNA, 19 bp, Homo sapiens
  source 1..19: mol_type = genomic DNA
cattggtcgtggttgtagt

SEQ ID NO: 34519 - DNA, 20 bp, Homo sapiens
  source 1..20: mol_type = genomic DNA
cattggtcgtggttgtagtc

SEQ ID NO: 34520 - DNA, 21 bp, Homo sapiens
  source 1..21: mol_type = genomic DNA
cattggtcgtggttgtagtcc

SEQ ID NO: 34521 - DNA, 24 bp, Homo sapiens
  source 1..24: mol_type = genomic DNA
cattggtcgtggttgtagtccgtg

SEQ ID NO: 34522 - DNA, 25 bp, Homo sapiens
  source 1..25: mol_type = genomic DNA
cattggtcgtggttgtagtccgtgc

SEQ ID NO: 34523 - DNA, 26 bp, Homo sapiens
  source 1..26: mol_type = genomic DNA
cattggtcgtggttgtagtccgtgcg

SEQ ID NO: 34524 - DNA, 28 bp, Homo sapiens
  source 1..28: mol_type = genomic DNA
cattggtcgtggttgtagtccgtgcgag

SEQ ID NO: 34525 - DNA, 29 bp, Homo sapiens
  source 1..29: mol_type = genomic DNA
cattggtcgtggttgtagtccgtgcgaga

SEQ ID NO: 34526 - DNA, 30 bp, Homo sapiens; identical to SEQ ID NO: 9763
  source 1..30: mol_type = genomic DNA

SEQ ID NO: 34527 - DNA, 31 bp, Homo sapiens; identical to SEQ ID NO: 9764
  source 1..31: mol_type = genomic DNA

SEQ ID NO: 34528 - DNA, 32 bp, Homo sapiens; identical to SEQ ID NO: 9765
  source 1..32: mol_type = genomic DNA

SEQ ID NO: 34529 - DNA, 33 bp, Homo sapiens; identical to SEQ ID NO: 9766
  source 1..33: mol_type = genomic DNA

SEQ ID NO: 34530 - DNA, 34 bp, Homo sapiens; identical to SEQ ID NO: 9767
  source 1..34: mol_type = genomic DNA

SEQ ID NO: 34531 - DNA, 35 bp, Homo sapiens; identical to SEQ ID NO: 9768
  source 1..35: mol_type = genomic DNA

SEQ ID NO: 34532 - DNA, 16 bp, Homo sapiens
  source 1..16: mol_type = genomic DNA
cattggtggttcagtg

SEQ ID NO: 34533 - DNA, 17 bp, Homo sapiens
  source 1..17: mol_type = genomic DNA
cattggtggttcagtgg

SEQ ID NO: 34534 - DNA, 19 bp, Homo sapiens
  source 1..19: mol_type = genomic DNA
cattggtggttcagtggta

SEQ ID NO: 34535 - DNA, 20 bp, Homo sapiens
  source 1..20: mol_type = genomic DNA
cattggtggttcagtggtag

SEQ ID NO: 34536 - DNA, 21 bp, Homo sapiens
  source 1..21: mol_type = genomic DNA
cattggtggttcagtggtaga

SEQ ID NO: 34537 - DNA, 22 bp, Homo sapiens
  source 1..22: mol_type = genomic DNA
cattggtggttcagtggtagaa

SEQ ID NO: 34538 - DNA, 24 bp, Homo sapiens
  source 1..24: mol_type = genomic DNA
cattggtggttcagtggtagaatt

SEQ ID NO: 34539 - DNA, 25 bp, Homo sapiens
  source 1..25: mol_type = genomic DNA
cattggtggttcagtggtagaattc

SEQ ID NO: 34540 - DNA, 26 bp, Homo sapiens
  source 1..26: mol_type = genomic DNA
cattggtggttcagtggtagaattct

SEQ ID NO: 34541 - DNA, 27 bp, Homo sapiens
  source 1..27: mol_type = genomic DNA
cattggtggttcagtggtagaattctc

SEQ ID NO: 34542 - DNA, 28 bp, Homo sapiens
  source 1..28: mol_type = genomic DNA
cattggtggttcagtggtagaattctcg

SEQ ID NO: 34543 - DNA, 29 bp, Homo sapiens
  source 1..29: mol_type = genomic DNA
cattggtggttcagtggtagaattctcgc

SEQ ID NO: 34544 - DNA, 30 bp, Homo sapiens; identical to SEQ ID NO: 9797
  source 1..30: mol_type = genomic DNA

SEQ ID NO: 34545 - DNA, 31 bp, Homo sapiens; identical to SEQ ID NO: 9798
  source 1..31: mol_type = genomic DNA

SEQ ID NO: 34546 - DNA, 32 bp, Homo sapiens; identical to SEQ ID NO: 9804
  source 1..32: mol_type = genomic DNA

SEQ ID NO: 34547 - DNA, 33 bp, Homo sapiens; identical to SEQ ID NO: 9805
  source 1..33: mol_type = genomic DNA

SEQ ID NO: 34548 - DNA, 34 bp, Homo sapiens; identical to SEQ ID NO: 9806
  source 1..34: mol_type = genomic DNA

SEQ ID NO: 34549 - DNA, 35 bp, Homo sapiens; identical to SEQ ID NO: 9807
  source 1..35: mol_type = genomic DNA

SEQ ID NO: 34550 - DNA, 36 bp, Homo sapiens; identical to SEQ ID NO: 9808
  source 1..36: mol_type = genomic DNA

SEQ ID NO: 34551 - DNA, 37 bp, Homo sapiens; identical to SEQ ID NO: 9809
  source 1..37: mol_type = genomic DNA

SEQ ID NO: 34552 - DNA, 42 bp, Homo sapiens; identical to SEQ ID NO: 9812
  source 1..42: mol_type = genomic DNA

SEQ ID NO: 34553 - DNA, 47 bp, Homo sapiens; identical to SEQ ID NO: 9814
  source 1..47: mol_type = genomic DNA

SEQ ID NO: 34554 - DNA, 43 bp, Homo sapiens; identical to SEQ ID NO: 9821
  source 1..43: mol_type = genomic DNA

SEQ ID NO: 34555 - DNA, 44 bp, Homo sapiens; identical to SEQ ID NO: 9822
  source 1..44: mol_type = genomic DNA

SEQ ID NO: 34556 - DNA, 45 bp, Homo sapiens; identical to SEQ ID NO: 9823
  source 1..45: mol_type = genomic DNA

SEQ ID NO: 34557 - DNA, 34 bp, Homo sapiens; identical to SEQ ID NO: 9833
  source 1..34: mol_type = genomic DNA

SEQ ID NO: 34558 - DNA, 35 bp, Homo sapiens; identical to SEQ ID NO: 9834
  source 1..35: mol_type = genomic DNA

SEQ ID NO: 34559 - DNA, 36 bp, Homo sapiens; identical to SEQ ID NO: 9835
  source 1..36: mol_type = genomic DNA

SEQ ID NO: 34560 - DNA, 26 bp, Homo sapiens
  source 1..26: mol_type = genomic DNA
catttgactgcagatcaagaggtccc

SEQ ID NO: 34561 - DNA, 35 bp, Homo sapiens; identical to SEQ ID NO: 9861
  source 1..35: mol_type = genomic DNA

SEQ ID NO: 34562 - DNA, 17 bp, Homo sapiens
  source 1..17: mol_type = genomic DNA
ccaaaacatcagattgt

SEQ ID NO: 34563 - DNA, 21 bp, Homo sapiens
  source 1..21: mol_type = genomic DNA
ccaaaacatcagattgtgaat

SEQ ID NO: 34564 - DNA, 22 bp, Homo sapiens
  source 1..22: mol_type = genomic DNA
ccaaaacatcagattgtgaatc

SEQ ID NO: 34565 - DNA, 23 bp, Homo sapiens
  source 1..23: mol_type = genomic DNA
ccaaaacatcagattgtgaatct

SEQ ID NO: 34566 - DNA, 29 bp, Homo sapiens
  source 1..29: mol_type = genomic DNA
ccaaaacatcagattgtgaatctgacaac

SEQ ID NO: 34567 - DNA, 31 bp, Homo sapiens; identical to SEQ ID NO: 9877
  source 1..31: mol_type = genomic DNA

SEQ ID NO: 34568 - DNA, 32 bp, Homo sapiens; identical to SEQ ID NO: 9878
  source 1..32: mol_type = genomic DNA

SEQ ID NO: 34569 - DNA, 33 bp, Homo sapiens; identical to SEQ ID NO: 9879
  source 1..33: mol_type = genomic DNA

SEQ ID NO: 34570 - DNA, 34 bp, Homo sapiens; identical to SEQ ID NO: 9880
  source 1..34: mol_type = genomic DNA

SEQ ID NO: 34571 - DNA, 35 bp, Homo sapiens; identical to SEQ ID NO: 9881
  source 1..35: mol_type = genomic DNA

SEQ ID NO: 34572 - DNA, 36 bp, Homo sapiens; identical to SEQ ID NO: 9882
  source 1..36: mol_type = genomic DNA

SEQ ID NO: 34573 - DNA, 37 bp, Homo sapiens; identical to SEQ ID NO: 9883
  source 1..37: mol_type = genomic DNA

SEQ ID NO: 34574 - DNA, 40 bp, Homo sapiens; identical to SEQ ID NO: 9886
  source 1..40: mol_type = genomic DNA

SEQ ID NO: 34575 - DNA, 42 bp, Homo sapiens; identical to SEQ ID NO: 9888
  source 1..42: mol_type = genomic DNA

SEQ ID NO: 34576 - DNA, 43 bp, Homo sapiens; identical to SEQ ID NO: 9889
  source 1..43: mol_type = genomic DNA

SEQ ID NO: 34577 - DNA, 44 bp, Homo sapiens; identical to SEQ ID NO: 9890
  source 1..44: mol_type = genomic DNA

SEQ ID NO: 34578 - DNA, 45 bp, Homo sapiens; identical to SEQ ID NO: 9891
  source 1..45: mol_type = genomic DNA

SEQ ID NO: 34579 - DNA, 46 bp, Homo sapiens; identical to SEQ ID NO: 9892
  source 1..46: mol_type = genomic DNA

SEQ ID NO: 34580 - DNA, 18 bp, Homo sapiens
  source 1..18: mol_type = genomic DNA
ccaacttacacttaggag

SEQ ID NO: 34581 - DNA, 19 bp, Homo sapiens
  source 1..19: mol_type = genomic DNA
ccaacttacacttaggaga

SEQ ID NO: 34582 - DNA, 27 bp, Homo sapiens
  source 1..27: mol_type = genomic DNA
ccaacttacacttaggagatttcaact

SEQ ID NO: 34583 - DNA, 28 bp, Homo sapiens
  source 1..28: mol_type = genomic DNA
ccaacttacacttaggagatttcaactt

SEQ ID NO: 34584 - DNA, 32 bp, Homo sapiens; identical to SEQ ID NO: 9920
  source 1..32: mol_type = genomic DNA

SEQ ID NO: 34585 - DNA, 35 bp, Homo sapiens; identical to SEQ ID NO: 9923
  source 1..35: mol_type = genomic DNA

SEQ ID NO: 34586 - DNA, 36 bp, Homo sapiens; identical to SEQ ID NO: 9924
  source 1..36: mol_type = genomic DNA

SEQ ID NO: 34587 - DNA, 38 bp, Homo sapiens; identical to SEQ ID NO: 9926
  source 1..38: mol_type = genomic DNA

SEQ ID NO: 34588 - DNA, 40 bp, Homo sapiens; identical to SEQ ID NO: 9928
  source 1..40: mol_type = genomic DNA

SEQ ID NO: 34589 - DNA, 41 bp, Homo sapiens; identical to SEQ ID NO: 9929
  source 1..41: mol_type = genomic DNA

SEQ ID NO: 34590 - DNA, 42 bp, Homo sapiens; identical to SEQ ID NO: 9930
  source 1..42: mol_type = genomic DNA

SEQ ID NO: 34591 - DNA, 43 bp, Homo sapiens; identical to SEQ ID NO: 9931
  source 1..43: mol_type = genomic DNA

SEQ ID NO: 34592 - DNA, 44 bp, Homo sapiens; identical to SEQ ID NO: 9932
  source 1..44: mol_type = genomic DNA

SEQ ID NO: 34593 - DNA, 45 bp, Homo sapiens; identical to SEQ ID NO: 9933
  source 1..45: mol_type = genomic DNA

SEQ ID NO: 34594 - DNA, 46 bp, Homo sapiens; identical to SEQ ID NO: 9934
  source 1..46: mol_type = genomic DNA

SEQ ID NO: 34595 - DNA, 47 bp, Homo sapiens; identical to SEQ ID NO: 9935
  source 1..47: mol_type = genomic DNA

SEQ ID NO: 34596 - DNA, 36 bp, Homo sapiens; identical to SEQ ID NO: 9937
  source 1..36: mol_type = genomic DNA

SEQ ID NO: 34597 - DNA, 40 bp, Homo sapiens; identical to SEQ ID NO: 9946
  source 1..40: mol_type = genomic DNA

SEQ ID NO: 34598 - DNA, 16 bp, Homo sapiens
  source 1..16: mol_type = genomic DNA
ccaaggtcgcgggttc

SEQ ID NO: 34599 - DNA, 31 bp, Homo sapiens; identical to SEQ ID NO: 9952
  source 1..31: mol_type = genomic DNA

SEQ ID NO: 34600 - DNA, 35 bp, Homo sapiens; identical to SEQ ID NO: 9956
  source 1..35: mol_type = genomic DNA

SEQ ID NO: 34601 - DNA, 36 bp, Homo sapiens; identical to SEQ ID NO: 9965
  source 1..36: mol_type = genomic DNA

SEQ ID NO: 34602 - DNA, 37 bp, Homo sapiens; identical to SEQ ID NO: 9966
  source 1..37: mol_type = genomic DNA

SEQ ID NO: 34603 - DNA, 38 bp, Homo sapiens; identical to SEQ ID NO: 9967
  source 1..38: mol_type = genomic DNA

SEQ ID NO: 34604 - DNA, 19 bp, Homo sapiens
  source 1..19: mol_type = genomic DNA
ccaattaactagttttgac

SEQ ID NO: 34605 - DNA, 36 bp, Homo sapiens
  source 1..36: mol_type = genomic DNA
ccaattaactagttttgacaacattcaaaaaagagt

SEQ ID NO: 34606 - DNA, 37 bp, Homo sapiens; identical to SEQ ID NO: 9973
  source 1..37: mol_type = genomic DNA

SEQ ID NO: 34607 - DNA, 38 bp, Homo sapiens; identical to SEQ ID NO: 9974
  source 1..38: mol_type = genomic DNA

SEQ ID NO: 34608 - DNA, 39 bp, Homo sapiens; identical to SEQ ID NO: 9975
  source 1..39: mol_type = genomic DNA

SEQ ID NO: 34609 - DNA, 40 bp, Homo sapiens; identical to SEQ ID NO: 9976
  source 1..40: mol_type = genomic DNA

SEQ ID NO: 34610 - DNA, 16 bp, Homo sapiens
  source 1..16: mol_type = genomic DNA
ccacatggtctagcgg

SEQ ID NO: 34611 - DNA, 24 bp, Homo sapiens
  source 1..24: mol_type = genomic DNA
ccacatggtctagcggttaggatt

SEQ ID NO: 34612 - DNA, 26 bp, Homo sapiens
  source 1..26: mol_type = genomic DNA
ccacatggtctagcggttaggattcc

SEQ ID NO: 34613 - DNA, 27 bp, Homo sapiens
  source 1..27: mol_type = genomic DNA
ccacatggtctagcggttaggattcct

SEQ ID NO: 34614 - DNA, 28 bp, Homo sapiens
  source 1..28: mol_type = genomic DNA
ccacatggtctagcggttaggattcctg

SEQ ID NO: 34615 - DNA, 30 bp, Homo sapiens; identical to SEQ ID NO: 9987
  source 1..30: mol_type = genomic DNA

SEQ ID NO: 34616 - DNA, 31 bp, Homo sapiens; identical to SEQ ID NO: 9988
  source 1..31: mol_type = genomic DNA

SEQ ID NO: 34617 - DNA, 32 bp, Homo sapiens; identical to SEQ ID NO: 9989
  source 1..32: mol_type = genomic DNA

SEQ ID NO: 34618 - DNA, 33 bp, Homo sapiens; identical to SEQ ID NO: 9990
  source 1..33: mol_type = genomic DNA

SEQ ID NO: 34619 - DNA, 34 bp, Homo sapiens; identical to SEQ ID NO: 9991
  source 1..34: mol_type = genomic DNA

SEQ ID NO: 34620 - DNA, 16 bp, Homo sapiens
  source 1..16: mol_type = genomic DNA
ccacccagggacgcca

SEQ ID NO: 34621 - DNA, 16 bp, Homo sapiens
  source 1..16: mol_type = genomic DNA
ccacgcgggaggcccg

SEQ ID NO: 34622 - DNA, 38 bp, Homo sapiens; identical to SEQ ID NO: 10011
  source 1..38: mol_type = genomic DNA

SEQ ID NO: 34623 - DNA, 40 bp, Homo sapiens; identical to SEQ ID NO: 10012
  source 1..40: mol_type = genomic DNA

SEQ ID NO: 34624 - DNA, 41 bp, Homo sapiens; identical to SEQ ID NO: 10013
  source 1..41: mol_type = genomic DNA

SEQ ID NO: 34625 - DNA, 16 bp, Homo sapiens
  source 1..16: mol_type = genomic DNA
ccagaggtcgatggat

SEQ ID NO: 34626 - DNA, 17 bp, Homo sapiens
  source 1..17: mol_type = genomic DNA
ccagaggtcgatggatc

SEQ ID NO: 34627 - DNA, 18 bp, Homo sapiens
  source 1..18: mol_type = genomic DNA
ccagaggtcgatggatcg

SEQ ID NO: 34628 - DNA, 23 bp, Homo sapiens
  source 1..23: mol_type = genomic DNA
ccagaggtcgatggatcgaaacc

SEQ ID NO: 34629 - DNA, 33 bp, Homo sapiens
  source 1..33: mol_type = genomic DNA
ccagaggtcgatggatcgaaaccatcctctgct

SEQ ID NO: 34630 - DNA, 36 bp, Homo sapiens
  source 1..36: mol_type = genomic DNA
ccagaggtcgatggatcgaaaccatcctctgctacc

SEQ ID NO: 34631 - DNA, 35 bp, Homo sapiens; identical to SEQ ID NO: 10049
  source 1..35: mol_type = genomic DNA

SEQ ID NO: 34632 - DNA, 36 bp, Homo sapiens; identical to SEQ ID NO: 10050
  source 1..36: mol_type = genomic DNA

SEQ ID NO: 34633 - DNA, 37 bp, Homo sapiens; identical to SEQ ID NO: 10051
  source 1..37: mol_type = genomic DNA

SEQ ID NO: 34634 - DNA, 16 bp, Homo sapiens
  source 1..16: mol_type = genomic DNA
ccagatcagaaggctg

SEQ ID NO: 34635 - DNA, 17 bp, Homo sapiens
  source 1..17: mol_type = genomic DNA
ccagatcagaaggctgc

SEQ ID NO: 34636 - DNA, 18 bp, Homo sapiens
  source 1..18: mol_type = genomic DNA
ccagatcagaaggctgcg

SEQ ID NO: 34637 - DNA, 22 bp, Homo sapiens
  source 1..22: mol_type = genomic DNA
ccagatcagaaggctgcgtgtt

SEQ ID NO: 34638 - DNA, 23 bp, Homo sapiens
  source 1..23: mol_type = genomic DNA
ccagatcagaaggctgcgtgttc

SEQ ID NO: 34639 - DNA, 24 bp, Homo sapiens
  source 1..24: mol_type = genomic DNA
ccagatcagaaggctgcgtgttcg

SEQ ID NO: 34640 - DNA, 42 bp, Homo sapiens
  source 1..42: mol_type = genomic DNA
ccagatcagaaggctgcgtgttcgaatcacgtcggggtcacc

SEQ ID NO: 34641 - DNA, 17 bp, Homo sapiens
  source 1..17: mol_type = genomic DNA
ccagatcagaaggttgc

SEQ ID NO: 34642 - DNA, 23 bp, Homo sapiens
  source 1..23: mol_type = genomic DNA
ccagatcagaaggttgcgtgttc

SEQ ID NO: 34643 - DNA, 16 bp, Homo sapiens
  source 1..16: mol_type = genomic DNA
ccagcgatccgagttc

SEQ ID NO: 34644 - DNA, 33 bp, Homo sapiens; identical to SEQ ID NO: 10088
  source 1..33: mol_type = genomic DNA

SEQ ID NO: 34645 - DNA, 34 bp, Homo sapiens; identical to SEQ ID NO: 10089
  source 1..34: mol_type = genomic DNA

SEQ ID NO: 34646 - DNA, 35 bp, Homo sapiens; identical to SEQ ID NO: 10090
  source 1..35: mol_type = genomic DNA

SEQ ID NO: 34647 - DNA, 33 bp, Homo sapiens; identical to SEQ ID NO: 10094
  source 1..33: mol_type = genomic DNA

SEQ ID NO: 34648 - DNA, 34 bp, Homo sapiens; identical to SEQ ID NO: 10095
  source 1..34: mol_type = genomic DNA

SEQ ID NO: 34649 - DNA, 34 bp, Homo sapiens; identical to SEQ ID NO: 10101
  source 1..34: mol_type = genomic DNA

SEQ ID NO: 34650 - DNA, 26 bp, Homo sapiens
  source 1..26: mol_type = genomic DNA
ccaggcggcccgggttcgactcccgg

SEQ ID NO: 34651 - DNA, 27 bp, Homo sapiens
  source 1..27: mol_type = genomic DNA
ccaggcggcccgggttcgactcccggt

SEQ ID NO: 34652 - DNA, 28 bp, Homo sapiens
  source 1..28: mol_type = genomic DNA
ccaggcggcccgggttcgactcccggtg

SEQ ID NO: 34653 - DNA, 29 bp, Homo sapiens
  source 1..29: mol_type = genomic DNA
ccaggcggcccgggttcgactcccggtgt

SEQ ID NO: 34654 - DNA, 30 bp, Homo sapiens; identical to SEQ ID NO: 10129
  source 1..30: mol_type = genomic DNA

SEQ ID NO: 34655 - DNA, 31 bp, Homo sapiens; identical to SEQ ID NO: 10130
  source 1..31: mol_type = genomic DNA

SEQ ID NO: 34656 - DNA, 32 bp, Homo sapiens; identical to SEQ ID NO: 10131
  source 1..32: mol_type = genomic DNA

SEQ ID NO: 34657 - DNA, 33 bp, Homo sapiens; identical to SEQ ID NO: 10132
  source 1..33: mol_type = genomic DNA

SEQ ID NO: 34658 - DNA, 34 bp, Homo sapiens; identical to SEQ ID NO: 10133
  source 1..34: mol_type = genomic DNA

SEQ ID NO: 34659 - DNA, 35 bp, Homo sapiens; identical to SEQ ID NO: 10134
  source 1..35: mol_type = genomic DNA

SEQ ID NO: 34660 - DNA, 36 bp, Homo sapiens; identical to SEQ ID NO: 10135
  source 1..36: mol_type = genomic DNA

SEQ ID NO: 34661 - DNA, 37 bp, Homo sapiens; identical to SEQ ID NO: 10136
  source 1..37: mol_type = genomic DNA

SEQ ID NO: 34662 - DNA, 36 bp, Homo sapiens; identical to SEQ ID NO: 10143
  source 1..36: mol_type = genomic DNA

SEQ ID NO: 34663 - DNA, 36 bp, Homo sapiens; identical to SEQ ID NO: 10144
  source 1..36: mol_type = genomic DNA

SEQ ID NO: 34664 - DNA, 34 bp, Homo sapiens; identical to SEQ ID NO: 10147
  source 1..34: mol_type = genomic DNA

SEQ ID NO: 34665 - DNA, 35 bp, Homo sapiens; identical to SEQ ID NO: 10148
  source 1..35: mol_type = genomic DNA

SEQ ID NO: 34666 - DNA, 36 bp, Homo sapiens; identical to SEQ ID NO: 10149
  source 1..36: mol_type = genomic DNA

SEQ ID NO: 34667 - DNA, 37 bp, Homo sapiens; identical to SEQ ID NO: 10150
  source 1..37: mol_type = genomic DNA

SEQ ID NO: 34668 - DNA, 32 bp, Homo sapiens; identical to SEQ ID NO: 10154
  source 1..32: mol_type = genomic DNA

SEQ ID NO: 34669 - DNA, 33 bp, Homo sapiens; identical to SEQ ID NO: 10155
  source 1..33: mol_type = genomic DNA

SEQ ID NO: 34670 - DNA, 34 bp, Homo sapiens; identical to SEQ ID NO: 10156
  source 1..34: mol_type = genomic DNA

SEQ ID NO: 34671 - DNA, 35 bp, Homo sapiens; identical to SEQ ID NO: 10157
  source 1..35: mol_type = genomic DNA

SEQ ID NO: 34672 - DNA, 36 bp, Homo sapiens; identical to SEQ ID NO: 10158
  source 1..36: mol_type = genomic DNA

SEQ ID NO: 34673 - DNA, 34 bp, Homo sapiens; identical to SEQ ID NO: 10160
  source 1..34: mol_type = genomic DNA

SEQ ID NO: 34674 - DNA, 34 bp, Homo sapiens; identical to SEQ ID NO: 10164
  source 1..34: mol_type = genomic DNA

SEQ ID NO: 34675 - DNA, 35 bp, Homo sapiens; identical to SEQ ID NO: 10172
  source 1..35: mol_type = genomic DNA

SEQ ID NO: 34676 - DNA, 25 bp, Homo sapiens
  source 1..25: mol_type = genomic DNA
ccagggttcaagtccctgttcgggc

SEQ ID NO: 34677 - DNA, 26 bp, Homo sapiens
  source 1..26: mol_type = genomic DNA
ccagggttcaagtccctgttcgggcg

SEQ ID NO: 34678 - DNA, 27 bp, Homo sapiens
  source 1..27: mol_type = genomic DNA
ccagggttcaagtccctgttcgggcgc

SEQ ID NO: 34679 - DNA, 28 bp, Homo sapiens
  source 1..28: mol_type = genomic DNA
ccagggttcaagtccctgttcgggcgcc

SEQ ID NO: 34680 - DNA, 29 bp, Homo sapiens
  source 1..29: mol_type = genomic DNA
ccagggttcaagtccctgttcgggcgcca

SEQ ID NO: 34681 - DNA, 28 bp, Homo sapiens
  source 1..28: mol_type = genomic DNA
ccaggtggcccgggttcgactcccggta

SEQ ID NO: 34682 - DNA, 30 bp, Homo sapiens; identical to SEQ ID NO: 10187
  source 1..30: mol_type = genomic DNA

SEQ ID NO: 34683 - DNA, 32 bp, Homo sapiens; identical to SEQ ID NO: 10189
  source 1..32: mol_type = genomic DNA

SEQ ID NO: 34684 - DNA, 33 bp, Homo sapiens; identical to SEQ ID NO: 10190
  source 1..33: mol_type = genomic DNA

SEQ ID NO: 34685 - DNA, 34 bp, Homo sapiens; identical to SEQ ID NO: 10191
  source 1..34: mol_type = genomic DNA

SEQ ID NO: 34686 - DNA, 35 bp, Homo sapiens; identical to SEQ ID NO: 10192
  source 1..35: mol_type = genomic DNA

SEQ ID NO: 34687 - DNA, 36 bp, Homo sapiens; identical to SEQ ID NO: 10193
  source 1..36: mol_type = genomic DNA

SEQ ID NO: 34688 - DNA, 27 bp, Homo sapiens
  source 1..27: mol_type = genomic DNA
ccaggttcgactcctggctggctcgcc

SEQ ID NO: 34689 - DNA, 44 bp, Homo sapiens; identical to SEQ ID NO: 10204
  source 1..44: mol_type = genomic DNA

SEQ ID NO: 34690 - DNA, 20 bp, Homo sapiens
  source 1..20: mol_type = genomic DNA
ccataacccagaggtcgatg

SEQ ID NO: 34691 - DNA, 23 bp, Homo sapiens
  source 1..23: mol_type = genomic DNA
ccataacccagaggtcgatggat

SEQ ID NO: 34692 - DNA, 42 bp, Homo sapiens; identical to SEQ ID NO: 10222
  source 1..42: mol_type = genomic DNA

SEQ ID NO: 34693 - DNA, 28 bp, Homo sapiens
  source 1..28: mol_type = genomic DNA
ccatagtgtagcggttatcacgtctgct

SEQ ID NO: 34694 - DNA, 27 bp, Homo sapiens
  source 1..27: mol_type = genomic DNA
ccatagtgtagtggttatcacgtctgc

SEQ ID NO: 34695 - DNA, 28 bp, Homo sapiens
  source 1..28: mol_type = genomic DNA
ccatagtgtagtggttatcacgtctgct

SEQ ID NO: 34696 - DNA, 29 bp, Homo sapiens
  source 1..29: mol_type = genomic DNA
ccatagtgtagtggttatcacgtctgctt

SEQ ID NO: 34697 - DNA, 30 bp, Homo sapiens; identical to SEQ ID NO: 10237
  source 1..30: mol_type = genomic DNA

SEQ ID NO: 34698 - DNA, 16 bp, Homo sapiens
  source 1..16: mol_type = genomic DNA
ccatatggtctagcgg

SEQ ID NO: 34699 - DNA, 24 bp, Homo sapiens
  source 1..24: mol_type = genomic DNA
ccatatggtctagcggttaggatt

SEQ ID NO: 34700 - DNA, 26 bp, Homo sapiens
  source 1..26: mol_type = genomic DNA
ccatatggtctagcggttaggattcc

SEQ ID NO: 34701 - DNA, 27 bp, Homo sapiens
  source 1..27: mol_type = genomic DNA
ccatatggtctagcggttaggattcct

SEQ ID NO: 34702 - DNA, 28 bp, Homo sapiens
  source 1..28: mol_type = genomic DNA
ccatatggtctagcggttaggattcctg

SEQ ID NO: 34703 - DNA, 30 bp, Homo sapiens; identical to SEQ ID NO: 10247
  source 1..30: mol_type = genomic DNA

SEQ ID NO: 34704 - DNA, 31 bp, Homo sapiens; identical to SEQ ID NO: 10248
  source 1..31: mol_type = genomic DNA

SEQ ID NO: 34705 - DNA, 32 bp, Homo sapiens; identical to SEQ ID NO: 10249
  source 1..32: mol_type = genomic DNA

SEQ ID NO: 34706 - DNA, 33 bp, Homo sapiens; identical to SEQ ID NO: 10250
  source 1..33: mol_type = genomic DNA

SEQ ID NO: 34707 - DNA, 34 bp, Homo sapiens; identical to SEQ ID NO: 10251
  source 1..34: mol_type = genomic DNA

SEQ ID NO: 34708 - DNA, 16 bp, Homo sapiens
  source 1..16: mol_type = genomic DNA
ccatcctctgctacca

SEQ ID NO: 34709 - DNA, 29 bp, Homo sapiens
  source 1..29: mol_type = genomic DNA
ccatgatcgtatagtggttagtactctgc

SEQ ID NO: 34710 - DNA, 32 bp, Homo sapiens; identical to SEQ ID NO: 10267
  source 1..32: mol_type = genomic DNA

SEQ ID NO: 34711 - DNA, 25 bp, Homo sapiens
  source 1..25: mol_type = genomic DNA
ccatggtgtaatggttagcactctg

SEQ ID NO: 34712 - DNA, 28 bp, Homo sapiens
  source 1..28: mol_type = genomic DNA
ccatggtgtaatggttagcactctggac

SEQ ID NO: 34713 - DNA, 29 bp, Homo sapiens
  source 1..29: mol_type = genomic DNA
ccatggtgtaatggttagcactctggact

SEQ ID NO: 34714 - DNA, 30 bp, Homo sapiens; identical to SEQ ID NO: 10275
  source 1..30: mol_type = genomic DNA

SEQ ID NO: 34715 - DNA, 31 bp, Homo sapiens; identical to SEQ ID NO: 10276
  source 1..31: mol_type = genomic DNA

SEQ ID NO: 34716 - DNA, 32 bp, Homo sapiens; identical to SEQ ID NO: 10277
  source 1..32: mol_type = genomic DNA

SEQ ID NO: 34717 - DNA, 33 bp, Homo sapiens; identical to SEQ ID NO: 10278
  source 1..33: mol_type = genomic DNA

SEQ ID NO: 34718 - DNA, 36 bp, Homo sapiens
  source 1..36: mol_type = genomic DNA
ccatggtgtaatggttagcactctggactctgaatc

SEQ ID NO: 34719 - DNA, 37 bp, Homo sapiens
  source 1..37: mol_type = genomic DNA
ccatggtgtaatggttagcactctggactctgaatcc

SEQ ID NO: 34720 - DNA, 32 bp, Homo sapiens; identical to SEQ ID NO: 10280
  source 1..32: mol_type = genomic DNA

SEQ ID NO: 34721 - DNA, 37 bp, Homo sapiens; identical to SEQ ID NO: 10281
  source 1..37: mol_type = genomic DNA

SEQ ID NO: 34722 - DNA, 16 bp, Homo sapiens
  source 1..16: mol_type = genomic DNA
ccattcttgcgacccg

SEQ ID NO: 34723 - DNA, 17 bp, Homo sapiens
  source 1..17: mol_type = genomic DNA
ccattcttgcgacccgg

SEQ ID NO: 34724 - DNA, 19 bp, Homo sapiens
  source 1..19: mol_type = genomic DNA
ccattcttgcgacccgggt

SEQ ID NO: 34725 - DNA, 38 bp, Homo sapiens; identical to SEQ ID NO: 10295
  source 1..38: mol_type = genomic DNA

SEQ ID NO: 34726 - DNA, 40 bp, Homo sapiens; identical to SEQ ID NO: 10297
  source 1..40: mol_type = genomic DNA

SEQ ID NO: 34727 - DNA, 45 bp, Homo sapiens; identical to SEQ ID NO: 10317
  source 1..45: mol_type = genomic DNA

SEQ ID NO: 34728 - DNA, 46 bp, Homo sapiens; identical to SEQ ID NO: 10318
  source 1..46: mol_type = genomic DNA

SEQ ID NO: 34729 - DNA, 27 bp, Homo sapiens
  source 1..27: mol_type = genomic DNA
cccaaaaattttggtgcaactccaaat

SEQ ID NO: 34730 - DNA, 28 bp, Homo sapiens
  source 1..28: mol_type = genomic DNA
cccaaaaattttggtgcaactccaaata

SEQ ID NO: 34731 - DNA, 33 bp, Homo sapiens; identical to SEQ ID NO: 10334
  source 1..33: mol_type = genomic DNA

SEQ ID NO: 34732 - DNA, 34 bp, Homo sapiens; identical to SEQ ID NO: 10335
  source 1..34: mol_type = genomic DNA

SEQ ID NO: 34733 - DNA, 35 bp, Homo sapiens; identical to SEQ ID NO: 10336
  source 1..35: mol_type = genomic DNA

SEQ ID NO: 34734 - DNA, 36 bp, Homo sapiens; identical to SEQ ID NO: 10337
  source 1..36: mol_type = genomic DNA

SEQ ID NO: 34735 - DNA, 37 bp, Homo sapiens; identical to SEQ ID NO: 10338
  source 1..37: mol_type = genomic DNA

SEQ ID NO: 34736 - DNA, 19 bp, Homo sapiens
  source 1..19: mol_type = genomic DNA
cccaacttacacttaggag

SEQ ID NO: 34737 - DNA, 28 bp, Homo sapiens
  source 1..28: mol_type = genomic DNA
cccaacttacacttaggagatttcaact

SEQ ID NO: 34738 - DNA, 29 bp, Homo sapiens
  source 1..29: mol_type = genomic DNA
cccaacttacacttaggagatttcaactt

SEQ ID NO: 34739 - DNA, 36 bp, Homo sapiens
  source 1..36: mol_type = genomic DNA
cccaacttacacttaggagatttcaacttaacttga

SEQ ID NO: 34740 - DNA, 37 bp, Homo sapiens; identical to SEQ ID NO: 10356
  source 1..37: mol_type = genomic DNA

SEQ ID NO: 34741 - DNA, 39 bp, Homo sapiens; identical to SEQ ID NO: 10358
  source 1..39: mol_type = genomic DNA

SEQ ID NO: 34742 - DNA, 40 bp, Homo sapiens; identical to SEQ ID NO: 10359
  source 1..40: mol_type = genomic DNA

SEQ ID NO: 34743 - DNA, 41 bp, Homo sapiens; identical to SEQ ID NO: 10360
  source 1..41: mol_type = genomic DNA

SEQ ID NO: 34744 - DNA, 42 bp, Homo sapiens; identical to SEQ ID NO: 10361
  source 1..42: mol_type = genomic DNA

SEQ ID NO: 34745 - DNA, 43 bp, Homo sapiens; identical to SEQ ID NO: 10362
  source 1..43: mol_type = genomic DNA

SEQ ID NO: 34746 - DNA, 44 bp, Homo sapiens; identical to SEQ ID NO: 10363
  source 1..44: mol_type = genomic DNA

SEQ ID NO: 34747 - DNA, 45 bp, Homo sapiens; identical to SEQ ID NO: 10364
  source 1..45: mol_type = genomic DNA

SEQ ID NO: 34748 - DNA, 46 bp, Homo sapiens; identical to SEQ ID NO: 10365
  source 1..46: mol_type = genomic DNA

SEQ ID NO: 34749 - DNA, 47 bp, Homo sapiens; identical to SEQ ID NO: 10366
  source 1..47: mol_type = genomic DNA

SEQ ID NO: 34750 - DNA, 16 bp, Homo sapiens
  source 1..16: mol_type = genomic DNA
cccacatggtctagcg

SEQ ID NO: 34751 - DNA, 17 bp, Homo sapiens
  source 1..17: mol_type = genomic DNA
cccacatggtctagcgg

SEQ ID NO: 34752 - DNA, 18 bp, Homo sapiens
  source 1..18: mol_type = genomic DNA
cccacatggtctagcggt

SEQ ID NO: 34753 - DNA, 25 bp, Homo sapiens
  source 1..25: mol_type = genomic DNA
cccacatggtctagcggttaggatt

SEQ ID NO: 34754 - DNA, 27 bp, Homo sapiens
  source 1..27: mol_type = genomic DNA
cccacatggtctagcggttaggattcc

SEQ ID NO: 34755 - DNA, 31 bp, Homo sapiens; identical to SEQ ID NO: 10376
  source 1..31: mol_type = genomic DNA

SEQ ID NO: 34756 - DNA, 32 bp, Homo sapiens; identical to SEQ ID NO: 10377
  source 1..32: mol_type = genomic DNA

SEQ ID NO: 34757 - DNA, 33 bp, Homo sapiens; identical to SEQ ID NO: 10378
  source 1..33: mol_type = genomic DNA

SEQ ID NO: 34758 - DNA, 34 bp, Homo sapiens; identical to SEQ ID NO: 10379
  source 1..34: mol_type = genomic DNA

SEQ ID NO: 34759 - DNA, 16 bp, Homo sapiens
  source 1..16: mol_type = genomic DNA
cccacccagggacgcc

SEQ ID NO: 34760 - DNA, 17 bp, Homo sapiens
  source 1..17: mol_type = genomic DNA
cccacccagggacgcca

SEQ ID NO: 34761 - DNA, 16 bp, Homo sapiens
  source 1..16: mol_type = genomic DNA
cccaccgctgccacca

SEQ ID NO: 34762 - DNA, 16 bp, Homo sapiens
  source 1..16: mol_type = genomic DNA
cccacctggggtacca

SEQ ID NO: 34763 - DNA, 16 bp, Homo sapiens
  source 1..16: mol_type = genomic DNA
cccacgttgggcgcca

SEQ ID NO: 34764 - DNA, 16 bp, Homo sapiens
  source 1..16: mol_type = genomic DNA
cccactcctgacacca

SEQ ID NO: 34765 - DNA, 16 bp, Homo sapiens
  source 1..16: mol_type = genomic DNA
cccactcctggtacca

SEQ ID NO: 34766 - DNA, 16 bp, Homo sapiens
  source 1..16: mol_type = genomic DNA
cccacttctgacacca

SEQ ID NO: 34767 - DNA, 16 bp, Homo sapiens
  source 1..16: mol_type = genomic DNA
cccagaggtcgatgga

SEQ ID NO: 34768 - DNA, 17 bp, Homo sapiens
  source 1..17: mol_type = genomic DNA
cccagaggtcgatggat

SEQ ID NO: 34769 - DNA, 18 bp, Homo sapiens
  source 1..18: mol_type = genomic DNA
cccagaggtcgatggatc

SEQ ID NO: 34770 - DNA, 19 bp, Homo sapiens
  source 1..19: mol_type = genomic DNA
cccagaggtcgatggatcg

SEQ ID NO: 34771 - DNA, 36 bp, Homo sapiens
  source 1..36: mol_type = genomic DNA
cccagaggtcgatggatcgaaaccatcctctgctac

SEQ ID NO: 34772 - DNA, 37 bp, Homo sapiens
  source 1..37: mol_type = genomic DNA
cccagaggtcgatggatcgaaaccatcctctgctacc

SEQ ID NO: 34773 - DNA, 16 bp, Homo sapiens
  source 1..16: mol_type = genomic DNA
cccagcatctccacca

SEQ ID NO: 34774 - DNA, 16 bp, Homo sapiens
  source 1..16: mol_type = genomic DNA
cccagcggggcctcca

SEQ ID NO: 34775 - DNA, 16 bp, Homo sapiens
  source 1..16: mol_type = genomic DNA
cccagcggtgcctcca

SEQ ID NO: 34776 - DNA, 31 bp, Homo sapiens; identical to SEQ ID NO: 10416
  source 1..31: mol_type = genomic DNA

SEQ ID NO: 34777 - DNA, 32 bp, Homo sapiens; identical to SEQ ID NO: 10417
  source 1..32: mol_type = genomic DNA

SEQ ID NO: 34778 - DNA, 33 bp, Homo sapiens; identical to SEQ ID NO: 10418
  source 1..33: mol_type = genomic DNA

SEQ ID NO: 34779 - DNA, 35 bp, Homo sapiens; identical to SEQ ID NO: 10420
  source 1..35: mol_type = genomic DNA

SEQ ID NO: 34780 - DNA, 36 bp, Homo sapiens; identical to SEQ ID NO: 10421
  source 1..36: mol_type = genomic DNA

SEQ ID NO: 34781 - DNA, 37 bp, Homo sapiens; identical to SEQ ID NO: 10422
  source 1..37: mol_type = genomic DNA

SEQ ID NO: 34782 - DNA, 38 bp, Homo sapiens; identical to SEQ ID NO: 10423
  source 1..38: mol_type = genomic DNA

SEQ ID NO: 34783 - DNA, 34 bp, Homo sapiens; identical to SEQ ID NO: 10425
  source 1..34: mol_type = genomic DNA

SEQ ID NO: 34784 - DNA, 35 bp, Homo sapiens
  source 1..35: mol_type = genomic DNA
cccagggtcgtgggttcgagccccacgttgggcgc

SEQ ID NO: 34785 - DNA, 36 bp, Homo sapiens; identical to SEQ ID NO: 10426
  source 1..36: mol_type = genomic DNA

SEQ ID NO: 34786 - DNA, 35 bp, Homo sapiens; identical to SEQ ID NO: 10430
  source 1..35: mol_type = genomic DNA

SEQ ID NO: 34787 - DNA, 36 bp, Homo sapiens; identical to SEQ ID NO: 10431
  source 1..36: mol_type = genomic DNA

SEQ ID NO: 34788 - DNA, 16 bp, Homo sapiens
  source 1..16: mol_type = genomic DNA
cccagtggaaccacca

SEQ ID NO: 34789 - DNA, 19 bp, Homo sapiens
  source 1..19: mol_type = genomic DNA
cccataacccagaggtcga

SEQ ID NO: 34790 - DNA, 20 bp, Homo sapiens
  source 1..20: mol_type = genomic DNA
cccataacccagaggtcgat

SEQ ID NO: 34791 - DNA, 21 bp, Homo sapiens
  source 1..21: mol_type = genomic DNA
cccataacccagaggtcgatg

SEQ ID NO: 34792 - DNA, 24 bp, Homo sapiens
  source 1..24: mol_type = genomic DNA
cccataacccagaggtcgatggat

SEQ ID NO: 34793 - DNA, 26 bp, Homo sapiens
  source 1..26: mol_type = genomic DNA
cccataacccagaggtcgatggatcg

SEQ ID NO: 34794 - DNA, 32 bp, Homo sapiens
  source 1..32: mol_type = genomic DNA
cccataacccagaggtcgatggatcgaaacca

SEQ ID NO: 34795 - DNA, 33 bp, Homo sapiens
  source 1..33: mol_type = genomic DNA
cccataacccagaggtcgatggatcgaaaccat

SEQ ID NO: 34796 - DNA, 37 bp, Homo sapiens
  source 1..37: mol_type = genomic DNA
cccataacccagaggtcgatggatcgaaaccatcctc

SEQ ID NO: 34797 - DNA, 16 bp, Homo sapiens
  source 1..16: mol_type = genomic DNA
cccatatggtctagcg

SEQ ID NO: 34798 - DNA, 17 bp, Homo sapiens
  source 1..17: mol_type = genomic DNA
cccatatggtctagcgg

SEQ ID NO: 34799 - DNA, 25 bp, Homo sapiens
  source 1..25: mol_type = genomic DNA
cccatatggtctagcggttaggatt

SEQ ID NO: 34800 - DNA, 27 bp, Homo sapiens
  source 1..27: mol_type = genomic DNA
cccatatggtctagcggttaggattcc

SEQ ID NO: 34801 - DNA, 31 bp, Homo sapiens; identical to SEQ ID NO: 10480
  source 1..31: mol_type = genomic DNA

SEQ ID NO: 34802 - DNA, 32 bp, Homo sapiens; identical to SEQ ID NO: 10481
  source 1..32: mol_type = genomic DNA

SEQ ID NO: 34803 - DNA, 34 bp, Homo sapiens; identical to SEQ ID NO: 10483
  source 1..34: mol_type = genomic DNA

SEQ ID NO: 34804 - DNA, 16 bp, Homo sapiens
  source 1..16: mol_type = genomic DNA
cccatcctcgtcgcca

SEQ ID NO: 34805 - DNA, 16 bp, Homo sapiens
  source 1..16: mol_type = genomic DNA
cccatctggggtgcca

SEQ ID NO: 34806 - DNA, 16 bp, Homo sapiens
  source 1..16: mol_type = genomic DNA
cccatctgggtcgcca

SEQ ID NO: 34807 - DNA, 30 bp, Homo sapiens; identical to SEQ ID NO: 10495
  source 1..30: mol_type = genomic DNA

SEQ ID NO: 34808 - DNA, 33 bp, Homo sapiens; identical to SEQ ID NO: 10496
  source 1..33: mol_type = genomic DNA

SEQ ID NO: 34809 - DNA, 38 bp, Homo sapiens; identical to SEQ ID NO: 10499
  source 1..38: mol_type = genomic DNA

SEQ ID NO: 34810 - DNA, 21 bp, Homo sapiens
  source 1..21: mol_type = genomic DNA
cccatgtctaacaacatggct

SEQ ID NO: 34811 - DNA, 29 bp, Homo sapiens
  source 1..29: mol_type = genomic DNA
cccatgtctaacaacatggctttctcacc

SEQ ID NO: 34812 - DNA, 16 bp, Homo sapiens
  source 1..16: mol_type = genomic DNA
cccattcttgcgaccc

SEQ ID NO: 34813 - DNA, 17 bp, Homo sapiens
  source 1..17: mol_type = genomic DNA
cccattcttgcgacccg

SEQ ID NO: 34814 - DNA, 18 bp, Homo sapiens
  source 1..18: mol_type = genomic DNA
cccattcttgcgacccgg

SEQ ID NO: 34815 - DNA, 19 bp, Homo sapiens
  source 1..19: mol_type = genomic DNA
cccattcttgcgacccggg

SEQ ID NO: 34816 - DNA, 20 bp, Homo sapiens
  source 1..20: mol_type = genomic DNA
cccattcttgcgacccgggt

SEQ ID NO: 34817 - DNA, 21 bp, Homo sapiens
  source 1..21: mol_type = genomic DNA
cccattcttgcgacccgggtt

SEQ ID NO: 34818 - DNA, 22 bp, Homo sapiens
  source 1..22: mol_type = genomic DNA
cccattcttgcgacccgggttc

SEQ ID NO: 34819 - DNA, 23 bp, Homo sapiens
  source 1..23: mol_type = genomic DNA
cccattcttgcgacccgggttcg

SEQ ID NO: 34820 - DNA, 24 bp, Homo sapiens
  source 1..24: mol_type = genomic DNA
cccattcttgcgacccgggttcga

SEQ ID NO: 34821 - DNA, 35 bp, Homo sapiens; identical to SEQ ID NO: 10520
  source 1..35: mol_type = genomic DNA

SEQ ID NO: 34822 - DNA, 36 bp, Homo sapiens; identical to SEQ ID NO: 10521
  source 1..36: mol_type = genomic DNA

SEQ ID NO: 34823 - DNA, 37 bp, Homo sapiens; identical to SEQ ID NO: 10522
  source 1..37: mol_type = genomic DNA

SEQ ID NO: 34824 - DNA, 38 bp, Homo sapiens; identical to SEQ ID NO: 10523
  source 1..38: mol_type = genomic DNA

SEQ ID NO: 34825 - DNA, 39 bp, Homo sapiens; identical to SEQ ID NO: 10524
  source 1..39: mol_type = genomic DNA

SEQ ID NO: 34826 - DNA, 40 bp, Homo sapiens; identical to SEQ ID NO: 10525
  source 1..40: mol_type = genomic DNA

SEQ ID NO: 34827 - DNA, 41 bp, Homo sapiens; identical to SEQ ID NO: 10526
  source 1..41: mol_type = genomic DNA

SEQ ID NO: 34828 - DNA, 42 bp, Homo sapiens; identical to SEQ ID NO: 10527
  source 1..42: mol_type = genomic DNA

SEQ ID NO: 34829 - DNA, 16 bp, Homo sapiens
  source 1..16: mol_type = genomic DNA
cccattggtctagcca

SEQ ID NO: 34830 - DNA, 29 bp, Homo sapiens
  source 1..29: mol_type = genomic DNA
ccccaaaaattttggtgcaactccaaata

SEQ ID NO: 34831 - DNA, 37 bp, Homo sapiens; identical to SEQ ID NO: 10539
  source 1..37: mol_type = genomic DNA

SEQ ID NO: 34832 - DNA, 38 bp, Homo sapiens; identical to SEQ ID NO: 10540
  source 1..38: mol_type = genomic DNA

SEQ ID NO: 34833 - DNA, 16 bp, Homo sapiens
  source 1..16: mol_type = genomic DNA
ccccacattgggcgcc

SEQ ID NO: 34834 - DNA, 16 bp, Homo sapiens
  source 1..16: mol_type = genomic DNA
ccccacgttgggcgcc

SEQ ID NO: 34835 - DNA, 17 bp, Homo sapiens
  source 1..17: mol_type = genomic DNA
ccccacgttgggcgcca

SEQ ID NO: 34836 - DNA, 16 bp, Homo sapiens
  source 1..16: mol_type = genomic DNA
ccccactcctggtacc

SEQ ID NO: 34837 - DNA, 17 bp, Homo sapiens
  source 1..17: mol_type = genomic DNA
ccccactcctggtacca

SEQ ID NO: 34838 - DNA, 16 bp, Homo sapiens
  source 1..16: mol_type = genomic DNA
ccccagcatctccacc

SEQ ID NO: 34839 - DNA, 17 bp, Homo sapiens
  source 1..17: mol_type = genomic DNA
ccccagcatctccacca

SEQ ID NO: 34840 - DNA, 16 bp, Homo sapiens
  source 1..16: mol_type = genomic DNA
ccccagtggaaccacc

SEQ ID NO: 34841 - DNA, 17 bp, Homo sapiens
  source 1..17: mol_type = genomic DNA
ccccagtggaaccacca

SEQ ID NO: 34842 - DNA, 34 bp, Homo sapiens; identical to SEQ ID NO: 10561
  source 1..34: mol_type = genomic DNA

SEQ ID NO: 34843 - DNA, 20 bp, Homo sapiens
  source 1..20: mol_type = genomic DNA
ccccatgtctaacaacatgg

SEQ ID NO: 34844 - DNA, 21 bp, Homo sapiens
  source 1..21: mol_type = genomic DNA
ccccatgtctaacaacatggc

SEQ ID NO: 34845 - DNA, 22 bp, Homo sapiens
  source 1..22: mol_type = genomic DNA
ccccatgtctaacaacatggct

SEQ ID NO: 34846 - DNA, 23 bp, Homo sapiens
  source 1..23: mol_type = genomic DNA
ccccatgtctaacaacatggctt

SEQ ID NO: 34847 - DNA, 30 bp, Homo sapiens; identical to SEQ ID NO: 10569
  source 1..30: mol_type = genomic DNA

SEQ ID NO: 34848 - DNA, 31 bp, Homo sapiens; identical to SEQ ID NO: 10570
  source 1..31: mol_type = genomic DNA

SEQ ID NO: 34849 - DNA, 22 bp, Homo sapiens
  source 1..22: mol_type = genomic DNA
cccccatgtctaacaacatggc

SEQ ID NO: 34850 - DNA, 23 bp, Homo sapiens
  source 1..23: mol_type = genomic DNA
cccccatgtctaacaacatggct

SEQ ID NO: 34851 - DNA, 31 bp, Homo sapiens; identical to SEQ ID NO: 10581
  source 1..31: mol_type = genomic DNA

SEQ ID NO: 34852 - DNA, 32 bp, Homo sapiens; identical to SEQ ID NO: 10582
  source 1..32: mol_type = genomic DNA

SEQ ID NO: 34853 - DNA, 16 bp, Homo sapiens
  source 1..16: mol_type = genomic DNA
cccccggctcctccac

SEQ ID NO: 34854 - DNA, 17 bp, Homo sapiens
  source 1..17: mol_type = genomic DNA
cccccggctcctccacc

SEQ ID NO: 34855 - DNA, 16 bp, Homo sapiens
  source 1..16: mol_type = genomic DNA
cccccttatttctacc

SEQ ID NO: 34856 - DNA, 36 bp, Homo sapiens; identical to SEQ ID NO: 10599
  source 1..36: mol_type = genomic DNA

SEQ ID NO: 34857 - DNA, 37 bp, Homo sapiens; identical to SEQ ID NO: 10600
  source 1..37: mol_type = genomic DNA

SEQ ID NO: 34858 - DNA, 16 bp, Homo sapiens
  source 1..16: mol_type = genomic DNA
ccccgacggggagcca

SEQ ID NO: 34859 - DNA, 26 bp, Homo sapiens
  source 1..26: mol_type = genomic DNA
ccccgcacaggttcgaatcctgttcg

SEQ ID NO: 34860 - DNA, 30 bp, Homo sapiens
  source 1..30: mol_type = genomic DNA
ccccgcacaggttcgaatcctgttcgtgac

SEQ ID NO: 34861 - DNA, 31 bp, Homo sapiens
  source 1..31: mol_type = genomic DNA
ccccgcacaggttcgaatcctgttcgtgacg

SEQ ID NO: 34862 - DNA, 32 bp, Homo sapiens
  source 1..32: mol_type = genomic DNA
ccccgcacaggttcgaatcctgttcgtgacgc

SEQ ID NO: 34863 - DNA, 33 bp, Homo sapiens
  source 1..33: mol_type = genomic DNA
ccccgcacaggttcgaatcctgttcgtgacgcc

SEQ ID NO: 34864 - DNA, 34 bp, Homo sapiens
  source 1..34: mol_type = genomic DNA
ccccgcacaggttcgaatcctgttcgtgacgcca

SEQ ID NO: 34865 - DNA, 33 bp, Homo sapiens
  source 1..33: mol_type = genomic DNA
ccccgcgcaggttcaaatcctgctcacagcgcc

SEQ ID NO: 34866 - DNA, 26 bp, Homo sapiens
  source 1..26: mol_type = genomic DNA
ccccgcgcaggttcgaaccctgctcg

SEQ ID NO: 34867 - DNA, 27 bp, Homo sapiens
  source 1..27: mol_type = genomic DNA
ccccgcgcaggttcgaaccctgctcgc

SEQ ID NO: 34868 - DNA, 28 bp, Homo sapiens
  source 1..28: mol_type = genomic DNA
ccccgcgcaggttcgaaccctgctcgct

SEQ ID NO: 34869 - DNA, 29 bp, Homo sapiens
  source 1..29: mol_type = genomic DNA
ccccgcgcaggttcgaaccctgctcgctg

SEQ ID NO: 34870 - DNA, 30 bp, Homo sapiens
  source 1..30: mol_type = genomic DNA
ccccgcgcaggttcgaaccctgctcgctgc

SEQ ID NO: 34871 - DNA, 31 bp, Homo sapiens
  source 1..31: mol_type = genomic DNA
ccccgcgcaggttcgaaccctgctcgctgcg

SEQ ID NO: 34872 - DNA, 32 bp, Homo sapiens
  source 1..32: mol_type = genomic DNA
ccccgcgcaggttcgaaccctgctcgctgcgc

SEQ ID NO: 34873 - DNA, 33 bp, Homo sapiens; identical to SEQ ID NO: 10606
  source 1..33: mol_type = genomic DNA

SEQ ID NO: 34874 - DNA, 34 bp, Homo sapiens
  source 1..34: mol_type = genomic DNA
ccccgcgcaggttcgaaccctgctcgctgcgcca

SEQ ID NO: 34875 - DNA, 21 bp, Homo sapiens
  source 1..21: mol_type = genomic DNA
ccccgcgcaggttcgaatcct

SEQ ID NO: 34876 - DNA, 22 bp, Homo sapiens
  source 1..22: mol_type = genomic DNA
ccccgcgcaggttcgaatcctg

SEQ ID NO: 34877 - DNA, 24 bp, Homo sapiens
  source 1..24: mol_type = genomic DNA
ccccgcgcaggttcgaatcctgcc

SEQ ID NO: 34878 - DNA, 25 bp, Homo sapiens
  source 1..25: mol_type = genomic DNA
ccccgcgcaggttcgaatcctgccg

SEQ ID NO: 34879 - DNA, 26 bp, Homo sapiens
  source 1..26: mol_type = genomic DNA
ccccgcgcaggttcgaatcctgccga

SEQ ID NO: 34880 - DNA, 27 bp, Homo sapiens
  source 1..27: mol_type = genomic DNA
ccccgcgcaggttcgaatcctgccgac

SEQ ID NO: 34881 - DNA, 28 bp, Homo sapiens
  source 1..28: mol_type = genomic DNA
ccccgcgcaggttcgaatcctgccgact

SEQ ID NO: 34882 - DNA, 29 bp, Homo sapiens
  source 1..29: mol_type = genomic DNA
ccccgcgcaggttcgaatcctgccgacta

SEQ ID NO: 34883 - DNA, 30 bp, Homo sapiens
  source 1..30: mol_type = genomic DNA
ccccgcgcaggttcgaatcctgccgactac

SEQ ID NO: 34884 - DNA, 31 bp, Homo sapiens
  source 1..31: mol_type = genomic DNA
ccccgcgcaggttcgaatcctgccgactacg

SEQ ID NO: 34885 - DNA, 32 bp, Homo sapiens
  source 1..32: mol_type = genomic DNA
ccccgcgcaggttcgaatcctgccgactacgc

SEQ ID NO: 34886 - DNA, 33 bp, Homo sapiens; identical to SEQ ID NO: 10615
  source 1..33: mol_type = genomic DNA

SEQ ID NO: 34887 - DNA, 34 bp, Homo sapiens; identical to SEQ ID NO: 10616
  source 1..34: mol_type = genomic DNA

SEQ ID NO: 34888 - DNA, 29 bp, Homo sapiens
  source 1..29: mol_type = genomic DNA
ccccgcgcaggttcgaatcctgctcacag

SEQ ID NO: 34889 - DNA, 30 bp, Homo sapiens
  source 1..30: mol_type = genomic DNA
ccccgcgcaggttcgaatcctgctcacagc

SEQ ID NO: 34890 - DNA, 31 bp, Homo sapiens
  source 1..31: mol_type = genomic DNA
ccccgcgcaggttcgaatcctgctcacagcg

SEQ ID NO: 34891 - DNA, 32 bp, Homo sapiens
  source 1..32: mol_type = genomic DNA
ccccgcgcaggttcgaatcctgctcacagcgc

SEQ ID NO: 34892 - DNA, 33 bp, Homo sapiens; identical to SEQ ID NO: 10618
  source 1..33: mol_type = genomic DNA

SEQ ID NO: 34893 - DNA, 34 bp, Homo sapiens; identical to SEQ ID NO: 10619
  source 1..34: mol_type = genomic DNA

SEQ ID NO: 34894 - DNA, 31 bp, Homo sapiens
  source 1..31: mol_type = genomic DNA
ccccgcgcaggttcgaatcctgtcggctacg

SEQ ID NO: 34895 - DNA, 32 bp, Homo sapiens
  source 1..32: mol_type = genomic DNA
ccccgcgcaggttcgaatcctgtcggctacgc

SEQ ID NO: 34896 - DNA, 33 bp, Homo sapiens
  source 1..33: mol_type = genomic DNA
ccccgcgcaggttcgaatcctgtcggctacgcc

SEQ ID NO: 34897 - DNA, 16 bp, Homo sapiens
  source 1..16: mol_type = genomic DNA
ccccggcacctccacc

SEQ ID NO: 34898 - DNA, 17 bp, Homo sapiens
  source 1..17: mol_type = genomic DNA
ccccggcacctccacca

SEQ ID NO: 34899 - DNA, 16 bp, Homo sapiens
  source 1..16: mol_type = genomic DNA
ccccggcatctccacc

SEQ ID NO: 34900 - DNA, 17 bp, Homo sapiens
  source 1..17: mol_type = genomic DNA
ccccggcatctccacca

SEQ ID NO: 34901 - DNA, 16 bp, Homo sapiens
  source 1..16: mol_type = genomic DNA
ccccggctcctccacc

SEQ ID NO: 34902 - DNA, 29 bp, Homo sapiens
  source 1..29: mol_type = genomic DNA
ccccgggttcaatccccggcacctccacc

SEQ ID NO: 34903 - DNA, 29 bp, Homo sapiens
  source 1..29: mol_type = genomic DNA
ccccgggttcgatccccggcatctccacc

SEQ ID NO: 34904 - DNA, 26 bp, Homo sapiens
  source 1..26: mol_type = genomic DNA
ccccggttcgaaaccgggcggaaaca

SEQ ID NO: 34905 - DNA, 28 bp, Homo sapiens
  source 1..28: mol_type = genomic DNA
ccccggttcgaaaccgggcggaaacacc

SEQ ID NO: 34906 - DNA, 16 bp, Homo sapiens
  source 1..16: mol_type = genomic DNA
ccccgtacgggccacc

SEQ ID NO: 34907 - DNA, 17 bp, Homo sapiens
  source 1..17: mol_type = genomic DNA
ccccgtacgggccacca

SEQ ID NO: 34908 - DNA, 16 bp, Homo sapiens
  source 1..16: mol_type = genomic DNA
ccccgtactggccacc

SEQ ID NO: 34909 - DNA, 16 bp, Homo sapiens
  source 1..16: mol_type = genomic DNA
ccccgtccgtgcctcc

SEQ ID NO: 34910 - DNA, 17 bp, Homo sapiens
  source 1..17: mol_type = genomic DNA
ccccgtccgtgcctcca

SEQ ID NO: 34911 - DNA, 16 bp, Homo sapiens
  source 1..16: mol_type = genomic DNA
ccccttatttacccca

SEQ ID NO: 34912 - DNA, 16 bp, Homo sapiens
  source 1..16: mol_type = genomic DNA
ccccttatttctacca

SEQ ID NO: 34913 - DNA, 16 bp, Homo sapiens
  source 1..16: mol_type = genomic DNA
cccgaaaatgttggtt

SEQ ID NO: 34914 - DNA, 17 bp, Homo sapiens
  source 1..17: mol_type = genomic DNA
cccgaaaatgttggtta

SEQ ID NO: 34915 - DNA, 23 bp, Homo sapiens
  source 1..23: mol_type = genomic DNA
cccgaaaatgttggttataccct

SEQ ID NO: 34916 - DNA, 25 bp, Homo sapiens
  source 1..25: mol_type = genomic DNA
cccgaaaatgttggttatacccttc

SEQ ID NO: 34917 - DNA, 26 bp, Homo sapiens
  source 1..26: mol_type = genomic DNA
cccgaaaatgttggttatacccttcc

SEQ ID NO: 34918 - DNA, 28 bp, Homo sapiens
  source 1..28: mol_type = genomic DNA
cccgaaaatgttggttatacccttcccg

SEQ ID NO: 34919 - DNA, 31 bp, Homo sapiens; identical to SEQ ID NO: 10669
  source 1..31: mol_type = genomic DNA

SEQ ID NO: 34920 - DNA, 32 bp, Homo sapiens; identical to SEQ ID NO: 10670
  source 1..32: mol_type = genomic DNA

SEQ ID NO: 34921 - DNA, 33 bp, Homo sapiens; identical to SEQ ID NO: 10671
  source 1..33: mol_type = genomic DNA

SEQ ID NO: 34922 - DNA, 34 bp, Homo sapiens; identical to SEQ ID NO: 10672
  source 1..34: mol_type = genomic DNA

SEQ ID NO: 34923 - DNA, 35 bp, Homo sapiens; identical to SEQ ID NO: 10673
  source 1..35: mol_type = genomic DNA

SEQ ID NO: 34924 - DNA, 36 bp, Homo sapiens; identical to SEQ ID NO: 10674
  source 1..36: mol_type = genomic DNA

SEQ ID NO: 34925 - DNA, 30 bp, Homo sapiens
  source 1..30: mol_type = genomic DNA
cccgcacaggttcgaatcctgttcgtgacg

SEQ ID NO: 34926 - DNA, 31 bp, Homo sapiens
  source 1..31: mol_type = genomic DNA
cccgcacaggttcgaatcctgttcgtgacgc

SEQ ID NO: 34927 - DNA, 32 bp, Homo sapiens
  source 1..32: mol_type = genomic DNA
cccgcacaggttcgaatcctgttcgtgacgcc

SEQ ID NO: 34928 - DNA, 16 bp, Homo sapiens
  source 1..16: mol_type = genomic DNA
cccgcatcctccacca

SEQ ID NO: 34929 - DNA, 47 bp, Homo sapiens
  source 1..47: mol_type = genomic DNA
cccgcctgtcacgcgggagaccggggttcgattccccgacggggagc

SEQ ID NO: 34930 - DNA, 30 bp, Homo sapiens
  source 1..30: mol_type = genomic DNA
cccgcgcaggttcgaaccctgctcgctgcg

SEQ ID NO: 34931 - DNA, 31 bp, Homo sapiens
  source 1..31: mol_type = genomic DNA
cccgcgcaggttcgaaccctgctcgctgcgc

SEQ ID NO: 34932 - DNA, 32 bp, Homo sapiens; identical to SEQ ID NO: 10683
  source 1..32: mol_type = genomic DNA

SEQ ID NO: 34933 - DNA, 27 bp, Homo sapiens
  source 1..27: mol_type = genomic DNA
cccgcgcaggttcgaatcctgccgact

SEQ ID NO: 34934 - DNA, 30 bp, Homo sapiens
  source 1..30: mol_type = genomic DNA
cccgcgcaggttcgaatcctgccgactacg

SEQ ID NO: 34935 - DNA, 31 bp, Homo sapiens
  source 1..31: mol_type = genomic DNA
cccgcgcaggttcgaatcctgccgactacgc

SEQ ID NO: 34936 - DNA, 32 bp, Homo sapiens; identical to SEQ ID NO: 10685
  source 1..32: mol_type = genomic DNA

SEQ ID NO: 34937 - DNA, 33 bp, Homo sapiens; identical to SEQ ID NO: 10686
  source 1..33: mol_type = genomic DNA

SEQ ID NO: 34938 - DNA, 30 bp, Homo sapiens
  source 1..30: mol_type = genomic DNA
cccgcgcaggttcgaatcctgctcacagcg

SEQ ID NO: 34939 - DNA, 31 bp, Homo sapiens
  source 1..31: mol_type = genomic DNA
cccgcgcaggttcgaatcctgctcacagcgc

SEQ ID NO: 34940 - DNA, 32 bp, Homo sapiens; identical to SEQ ID NO: 10687
  source 1..32: mol_type = genomic DNA

SEQ ID NO: 34941 - DNA, 16 bp, Homo sapiens
  source 1..16: mol_type = genomic DNA
cccggacgagccccca

SEQ ID NO: 34942 - DNA, 18 bp, Homo sapiens
  source 1..18: mol_type = genomic DNA
cccggatagctcagtcgg

SEQ ID NO: 34943 - DNA, 22 bp, Homo sapiens
  source 1..22: mol_type = genomic DNA
cccggatagctcagtcggtaga

SEQ ID NO: 34944 - DNA, 23 bp, Homo sapiens
  source 1..23: mol_type = genomic DNA
cccggatagctcagtcggtagag

SEQ ID NO: 34945 - DNA, 29 bp, Homo sapiens
  source 1..29: mol_type = genomic DNA
cccggatagctcagtcggtagagcatcag

SEQ ID NO: 34946 - DNA, 31 bp, Homo sapiens; identical to SEQ ID NO: 10702
  source 1..31: mol_type = genomic DNA

SEQ ID NO: 34947 - DNA, 32 bp, Homo sapiens; identical to SEQ ID NO: 10703
  source 1..32: mol_type = genomic DNA

SEQ ID NO: 34948 - DNA, 16 bp, Homo sapiens
  source 1..16: mol_type = genomic DNA
cccggcacctccacca

SEQ ID NO: 34949 - DNA, 16 bp, Homo sapiens
  source 1..16: mol_type = genomic DNA
cccggcatctccacca

SEQ ID NO: 34950 - DNA, 16 bp, Homo sapiens
  source 1..16: mol_type = genomic DNA
cccggccaacgcacca

SEQ ID NO: 34951 - DNA, 16 bp, Homo sapiens
  source 1..16: mol_type = genomic DNA
cccggccaatgcacca

SEQ ID NO: 34952 - DNA, 16 bp, Homo sapiens
  source 1..16: mol_type = genomic DNA
cccggccagtgcacca

SEQ ID NO: 34953 - DNA, 16 bp, Homo sapiens
  source 1..16: mol_type = genomic DNA
cccggcccatgcacca

SEQ ID NO: 34954 - DNA, 17 bp, Homo sapiens
  source 1..17: mol_type = genomic DNA
cccggctagctcagtcg

SEQ ID NO: 34955 - DNA, 18 bp, Homo sapiens
  source 1..18: mol_type = genomic DNA
cccggctagctcagtcgg

SEQ ID NO: 34956 - DNA, 25 bp, Homo sapiens
  source 1..25: mol_type = genomic DNA
cccggctagctcagtcggtagagca

SEQ ID NO: 34957 - DNA, 27 bp, Homo sapiens
  source 1..27: mol_type = genomic DNA
cccggctagctcagtcggtagagcatg

SEQ ID NO: 34958 - DNA, 31 bp, Homo sapiens; identical to SEQ ID NO: 10724
  source 1..31: mol_type = genomic DNA

SEQ ID NO: 34959 - DNA, 32 bp, Homo sapiens; identical to SEQ ID NO: 10728
  source 1..32: mol_type = genomic DNA

SEQ ID NO: 34960 - DNA, 33 bp, Homo sapiens; identical to SEQ ID NO: 10729
  source 1..33: mol_type = genomic DNA

SEQ ID NO: 34961 - DNA, 40 bp, Homo sapiens; identical to SEQ ID NO: 10736
  source 1..40: mol_type = genomic DNA

SEQ ID NO: 34962 - DNA, 28 bp, Homo sapiens
  source 1..28: mol_type = genomic DNA
cccggctagctcagtcggtagagcatgg

SEQ ID NO: 34963 - DNA, 31 bp, Homo sapiens; identical to SEQ ID NO: 10743
  source 1..31: mol_type = genomic DNA

SEQ ID NO: 34964 - DNA, 32 bp, Homo sapiens; identical to SEQ ID NO: 10744
  source 1..32: mol_type = genomic DNA

SEQ ID NO: 34965 - DNA, 33 bp, Homo sapiens; identical to SEQ ID NO: 10745
  source 1..33: mol_type = genomic DNA

SEQ ID NO: 34966 - DNA, 34 bp, Homo sapiens; identical to SEQ ID NO: 10746
  source 1..34: mol_type = genomic DNA

SEQ ID NO: 34967 - DNA, 40 bp, Homo sapiens; identical to SEQ ID NO: 10749
  source 1..40: mol_type = genomic DNA

SEQ ID NO: 34968 - DNA, 41 bp, Homo sapiens; identical to SEQ ID NO: 10750
  source 1..41: mol_type = genomic DNA

SEQ ID NO: 34969 - DNA, 16 bp, Homo sapiens
  source 1..16: mol_type = genomic DNA
cccgggcggaaacacc

SEQ ID NO: 34970 - DNA, 17 bp, Homo sapiens
  source 1..17: mol_type = genomic DNA
cccgggcggaaacacca

SEQ ID NO: 34971 - DNA, 16 bp, Homo sapiens
  source 1..16: mol_type = genomic DNA
cccgggcggcgcacca

SEQ ID NO: 34972 - DNA, 28 bp, Homo sapiens
  source 1..28: mol_type = genomic DNA
cccgggttcaatccccggcacctccacc

SEQ ID NO: 34973 - DNA, 26 bp, Homo sapiens
  source 1..26: mol_type = genomic DNA
cccgggttcgactcccggtatgggaa

SEQ ID NO: 34974 - DNA, 27 bp, Homo sapiens
  source 1..27: mol_type = genomic DNA
cccgggttcgactcccggtatgggaac

SEQ ID NO: 34975 - DNA, 25 bp, Homo sapiens
  source 1..25: mol_type = genomic DNA
cccgggttcgactcccggtgtggga

SEQ ID NO: 34976 - DNA, 26 bp, Homo sapiens
  source 1..26: mol_type = genomic DNA
cccgggttcgactcccggtgtgggaa

SEQ ID NO: 34977 - DNA, 27 bp, Homo sapiens
  source 1..27: mol_type = genomic DNA
cccgggttcgactcccggtgtgggaac

SEQ ID NO: 34978 - DNA, 28 bp, Homo sapiens
  source 1..28: mol_type = genomic DNA
cccgggttcgactcccggtgtgggaacc

SEQ ID NO: 34979 - DNA, 27 bp, Homo sapiens
  source 1..27: mol_type = genomic DNA
cccgggttcgatccccagcatctccac

SEQ ID NO: 34980 - DNA, 28 bp, Homo sapiens
  source 1..28: mol_type = genomic DNA
cccgggttcgatccccagcatctccacc

SEQ ID NO: 34981 - DNA, 28 bp, Homo sapiens
  source 1..28: mol_type = genomic DNA
cccgggttcgatccccggcatctccacc

SEQ ID NO: 34982 - DNA, 24 bp, Homo sapiens
  source 1..24: mol_type = genomic DNA
cccgggttcgattcccggccaatg

SEQ ID NO: 34983 - DNA, 26 bp, Homo sapiens
  source 1..26: mol_type = genomic DNA
cccgggttcgattcccggtcagggaa

SEQ ID NO: 34984 - DNA, 27 bp, Homo sapiens
  source 1..27: mol_type = genomic DNA
cccgggttcgattcccggtcagggaac

SEQ ID NO: 34985 - DNA, 16 bp, Homo sapiens
  source 1..16: mol_type = genomic DNA
cccgggtttcggcacc

SEQ ID NO: 34986 - DNA, 17 bp, Homo sapiens
  source 1..17: mol_type = genomic DNA
cccgggtttcggcacca

SEQ ID NO: 34987 - DNA, 16 bp, Homo sapiens
  source 1..16: mol_type = genomic DNA
cccggtatgggaacca

SEQ ID NO: 34988 - DNA, 16 bp, Homo sapiens
  source 1..16: mol_type = genomic DNA
cccggtcagggaacca

SEQ ID NO: 34989 - DNA, 16 bp, Homo sapiens
  source 1..16: mol_type = genomic DNA
cccggtgtgggaacca

SEQ ID NO: 34990 - DNA, 27 bp, Homo sapiens
  source 1..27: mol_type = genomic DNA
cccggttcgaaaccgggcggaaacacc

SEQ ID NO: 34991 - DNA, 16 bp, Homo sapiens
  source 1..16: mol_type = genomic DNA
cccgtacgggccacca

SEQ ID NO: 34992 - DNA, 16 bp, Homo sapiens
  source 1..16: mol_type = genomic DNA
cccgtccgtgcctcca

SEQ ID NO: 34993 - DNA, 16 bp, Homo sapiens
  source 1..16: mol_type = genomic DNA
ccctacgttgggcgcc

SEQ ID NO: 34994 - DNA, 32 bp, Homo sapiens; identical to SEQ ID NO: 10829
  source 1..32: mol_type = genomic DNA

SEQ ID NO: 34995 - DNA, 33 bp, Homo sapiens; identical to SEQ ID NO: 10830
  source 1..33: mol_type = genomic DNA

SEQ ID NO: 34996 - DNA, 16 bp, Homo sapiens
  source 1..16: mol_type = genomic DNA
ccctgctcgctgcgcc

SEQ ID NO: 34997 - DNA, 17 bp, Homo sapiens
  source 1..17: mol_type = genomic DNA
ccctgctcgctgcgcca

SEQ ID NO: 34998 - DNA, 16 bp, Homo sapiens
  source 1..16: mol_type = genomic DNA
ccctggtggtctagtg

SEQ ID NO: 34999 - DNA, 17 bp, Homo sapiens
  source 1..17: mol_type = genomic DNA
ccctggtggtctagtgg

SEQ ID NO: 35000 - DNA, 18 bp, Homo sapiens
  source 1..18: mol_type = genomic DNA
ccctggtggtctagtggc

SEQ ID NO: 35001 - DNA, 19 bp, Homo sapiens
  source 1..19: mol_type = genomic DNA
ccctggtggtctagtggct

SEQ ID NO: 35002 - DNA, 31 bp, Homo sapiens; identical to SEQ ID NO: 10845
  source 1..31: mol_type = genomic DNA

SEQ ID NO: 35003 - DNA, 32 bp, Homo sapiens; identical to SEQ ID NO: 10846
  source 1..32: mol_type = genomic DNA

SEQ ID NO: 35004 - DNA, 33 bp, Homo sapiens; identical to SEQ ID NO: 10847
  source 1..33: mol_type = genomic DNA

SEQ ID NO: 35005 - DNA, 24 bp, Homo sapiens
  source 1..24: mol_type = genomic DNA
ccctggtggtctagtggttaggat

SEQ ID NO: 35006 - DNA, 25 bp, Homo sapiens
  source 1..25: mol_type = genomic DNA
ccctggtggtctagtggttaggatt

SEQ ID NO: 35007 - DNA, 26 bp, Homo sapiens
  source 1..26: mol_type = genomic DNA
ccctggtggtctagtggttaggattc

SEQ ID NO: 35008 - DNA, 27 bp, Homo sapiens
  source 1..27: mol_type = genomic DNA
ccctggtggtctagtggttaggattcg

SEQ ID NO: 35009 - DNA, 29 bp, Homo sapiens
  source 1..29: mol_type = genomic DNA
ccctggtggtctagtggttaggattcggc

SEQ ID NO: 35010 - DNA, 30 bp, Homo sapiens; identical to SEQ ID NO: 10862
  source 1..30: mol_type = genomic DNA

SEQ ID NO: 35011 - DNA, 31 bp, Homo sapiens; identical to SEQ ID NO: 10863
  source 1..31: mol_type = genomic DNA

SEQ ID NO: 35012 - DNA, 32 bp, Homo sapiens; identical to SEQ ID NO: 10864
  source 1..32: mol_type = genomic DNA

SEQ ID NO: 35013 - DNA, 33 bp, Homo sapiens; identical to SEQ ID NO: 10865
  source 1..33: mol_type = genomic DNA

SEQ ID NO: 35014 - DNA, 34 bp, Homo sapiens; identical to SEQ ID NO: 10866
  source 1..34: mol_type = genomic DNA

SEQ ID NO: 35015 - DNA, 35 bp, Homo sapiens; identical to SEQ ID NO: 10867
  source 1..35: mol_type = genomic DNA

SEQ ID NO: 35016 - DNA, 27 bp, Homo sapiens
  source 1..27: mol_type = genomic DNA
ccctggttcaatcccgggtttcggcac

SEQ ID NO: 35017 - DNA, 25 bp, Homo sapiens
  source 1..25: mol_type = genomic DNA
ccctggttcgatcccgggtttcggc

SEQ ID NO: 35018 - DNA, 26 bp, Homo sapiens
  source 1..26: mol_type = genomic DNA
ccctggttcgatcccgggtttcggca

SEQ ID NO: 35019 - DNA, 27 bp, Homo sapiens
  source 1..27: mol_type = genomic DNA
ccctggttcgatcccgggtttcggcac

SEQ ID NO: 35020 - DNA, 28 bp, Homo sapiens
  source 1..28: mol_type = genomic DNA
ccctggttcgatcccgggtttcggcacc

SEQ ID NO: 35021 - DNA, 29 bp, Homo sapiens
  source 1..29: mol_type = genomic DNA
ccctggttcgatcccgggtttcggcacca

SEQ ID NO: 35022 - DNA, 16 bp, Homo sapiens
  source 1..16: mol_type = genomic DNA
ccctgttcgggcgcca

SEQ ID NO: 35023 - DNA, 16 bp, Homo sapiens
  source 1..16: mol_type = genomic DNA
cccttcgtggtcgcca

SEQ ID NO: 35024 - DNA, 19 bp, Homo sapiens
  source 1..19: mol_type = genomic DNA
ccgaaaatgttggttatac

SEQ ID NO: 35025 - DNA, 27 bp, Homo sapiens
  source 1..27: mol_type = genomic DNA
ccgaaaatgttggttatacccttcccg

SEQ ID NO: 35026 - DNA, 34 bp, Homo sapiens; identical to SEQ ID NO: 10908
  source 1..34: mol_type = genomic DNA

SEQ ID NO: 35027 - DNA, 35 bp, Homo sapiens; identical to SEQ ID NO: 10909
  source 1..35: mol_type = genomic DNA

SEQ ID NO: 35028 - DNA, 37 bp, Homo sapiens; identical to SEQ ID NO: 10910
  source 1..37: mol_type = genomic DNA

SEQ ID NO: 35029 - DNA, 17 bp, Homo sapiens
  source 1..17: mol_type = genomic DNA
ccgaaaggttggtggtt

SEQ ID NO: 35030 - DNA, 18 bp, Homo sapiens
  source 1..18: mol_type = genomic DNA
ccgaaaggttggtggttc

SEQ ID NO: 35031 - DNA, 19 bp, Homo sapiens
  source 1..19: mol_type = genomic DNA
ccgaaaggttggtggttcg

SEQ ID NO: 35032 - DNA, 35 bp, Homo sapiens; identical to SEQ ID NO: 10915
  source 1..35: mol_type = genomic DNA

SEQ ID NO: 35033 - DNA, 36 bp, Homo sapiens; identical to SEQ ID NO: 10916
  source 1..36: mol_type = genomic DNA

SEQ ID NO: 35034 - DNA, 37 bp, Homo sapiens; identical to SEQ ID NO: 10917
  source 1..37: mol_type = genomic DNA

SEQ ID NO: 35035 - DNA, 38 bp, Homo sapiens; identical to SEQ ID NO: 10918
  source 1..38: mol_type = genomic DNA

SEQ ID NO: 35036 - DNA, 37 bp, Homo sapiens; identical to SEQ ID NO: 10919
  source 1..37: mol_type = genomic DNA

SEQ ID NO: 35037 - DNA, 20 bp, Homo sapiens
  source 1..20: mol_type = genomic DNA
ccgaaatagctcagttggga

SEQ ID NO: 35038 - DNA, 22 bp, Homo sapiens
  source 1..22: mol_type = genomic DNA
ccgaaatagctcagttgggaga

SEQ ID NO: 35039 - DNA, 16 bp, Homo sapiens
  source 1..16: mol_type = genomic DNA
ccgaagatcacgggtt

SEQ ID NO: 35040 - DNA, 28 bp, Homo sapiens
  source 1..28: mol_type = genomic DNA
ccgaagatcacgggttcgaaccccgtcc

SEQ ID NO: 35041 - DNA, 34 bp, Homo sapiens; identical to SEQ ID NO: 10924
  source 1..34: mol_type = genomic DNA

SEQ ID NO: 35042 - DNA, 35 bp, Homo sapiens; identical to SEQ ID NO: 10925
  source 1..35: mol_type = genomic DNA

SEQ ID NO: 35043 - DNA, 36 bp, Homo sapiens; identical to SEQ ID NO: 10926
  source 1..36: mol_type = genomic DNA

SEQ ID NO: 35044 - DNA, 16 bp, Homo sapiens
  source 1..16: mol_type = genomic DNA
ccgaagatcgcgggtt

SEQ ID NO: 35045 - DNA, 17 bp, Homo sapiens
  source 1..17: mol_type = genomic DNA
ccgaagatcgcgggttc

SEQ ID NO: 35046 - DNA, 18 bp, Homo sapiens
  source 1..18: mol_type = genomic DNA
ccgaagatcgcgggttcg

SEQ ID NO: 35047 - DNA, 23 bp, Homo sapiens
  source 1..23: mol_type = genomic DNA
ccgaagatcgcgggttcgaaccc

SEQ ID NO: 35048 - DNA, 31 bp, Homo sapiens; identical to SEQ ID NO: 10931
  source 1..31: mol_type = genomic DNA

SEQ ID NO: 35049 - DNA, 34 bp, Homo sapiens; identical to SEQ ID NO: 10933
  source 1..34: mol_type = genomic DNA

SEQ ID NO: 35050 - DNA, 35 bp, Homo sapiens; identical to SEQ ID NO: 10934
  source 1..35: mol_type = genomic DNA

SEQ ID NO: 35051 - DNA, 36 bp, Homo sapiens; identical to SEQ ID NO: 10935
  source 1..36: mol_type = genomic DNA

SEQ ID NO: 35052 - DNA, 32 bp, Homo sapiens
  source 1..32: mol_type = genomic DNA
ccgagaggtcccgggttcaaatcccggacgag

SEQ ID NO: 35053 - DNA, 33 bp, Homo sapiens; identical to SEQ ID NO: 10937
  source 1..33: mol_type = genomic DNA

SEQ ID NO: 35054 - DNA, 34 bp, Homo sapiens
  source 1..34: mol_type = genomic DNA
ccgagaggtcccgggttcaaatcccggacgagcc

SEQ ID NO: 35055 - DNA, 35 bp, Homo sapiens; identical to SEQ ID NO: 10938
  source 1..35: mol_type = genomic DNA

SEQ ID NO: 35056 - DNA, 36 bp, Homo sapiens; identical to SEQ ID NO: 10939
  source 1..36: mol_type = genomic DNA

SEQ ID NO: 35057 - DNA, 37 bp, Homo sapiens; identical to SEQ ID NO: 10940
  source 1..37: mol_type = genomic DNA

SEQ ID NO: 35058 - DNA, 38 bp, Homo sapiens; identical to SEQ ID NO: 10941
  source 1..38: mol_type = genomic DNA

SEQ ID NO: 35059 - DNA, 34 bp, Homo sapiens
  source 1..34: mol_type = genomic DNA
ccgagatagctcagttgggagagcgttagactga

SEQ ID NO: 35060 - DNA, 39 bp, Homo sapiens
  source 1..39: mol_type = genomic DNA
ccgagatagctcagttgggagagcgttagactgaagatc

SEQ ID NO: 35061 - DNA, 16 bp, Homo sapiens
  source 1..16: mol_type = genomic DNA
ccgagcggtctaaggc

SEQ ID NO: 35062 - DNA, 16 bp, Homo sapiens
  source 1..16: mol_type = genomic DNA
ccgaggttgtgagttc

SEQ ID NO: 35063 - DNA, 17 bp, Homo sapiens
  source 1..17: mol_type = genomic DNA
ccgaggttgtgagttcg

SEQ ID NO: 35064 - DNA, 16 bp, Homo sapiens
  source 1..16: mol_type = genomic DNA
ccgagtcacggcacca

SEQ ID NO: 35065 - DNA, 16 bp, Homo sapiens
  source 1..16: mol_type = genomic DNA
ccgagtggtctaaggc

SEQ ID NO: 35066 - DNA, 18 bp, Homo sapiens
  source 1..18: mol_type = genomic DNA
ccgagtggtctaaggcgc

SEQ ID NO: 35067 - DNA, 26 bp, Homo sapiens
  source 1..26: mol_type = genomic DNA
ccgagttcaaatctcggtggaacctc

SEQ ID NO: 35068 - DNA, 25 bp, Homo sapiens
  source 1..25: mol_type = genomic DNA
ccgagttcaaatctcggtgggacct

SEQ ID NO: 35069 - DNA, 26 bp, Homo sapiens
  source 1..26: mol_type = genomic DNA
ccgagttcaaatctcggtgggacctc

SEQ ID NO: 35070 - DNA, 26 bp, Homo sapiens
  source 1..26: mol_type = genomic DNA
ccgagttcgaatctcggtgggacctc

SEQ ID NO: 35071 - DNA, 31 bp, Homo sapiens
  source 1..31: mol_type = genomic DNA
ccgcacaggttcgaatcctgttcgtgacgcc

SEQ ID NO: 35072 - DNA, 16 bp, Homo sapiens
  source 1..16: mol_type = genomic DNA
ccgcacgttgggcgcc

SEQ ID NO: 35073 - DNA, 17 bp, Homo sapiens
  source 1..17: mol_type = genomic DNA
ccgcacgttgggcgcca

SEQ ID NO: 35074 - DNA, 19 bp, Homo sapiens
  source 1..19: mol_type = genomic DNA
ccgcagcaacctcggttcg

SEQ ID NO: 35075 - DNA, 36 bp, Homo sapiens; identical to SEQ ID NO: 10989
  source 1..36: mol_type = genomic DNA

SEQ ID NO: 35076 - DNA, 37 bp, Homo sapiens; identical to SEQ ID NO: 10990
  source 1..37: mol_type = genomic DNA

SEQ ID NO: 35077 - DNA, 38 bp, Homo sapiens; identical to SEQ ID NO: 10991
  source 1..38: mol_type = genomic DNA

SEQ ID NO: 35078 - DNA, 38 bp, Homo sapiens
  source 1..38: mol_type = genomic DNA
ccgcatggaggcgtgggttcgaatcccacttctgacac

SEQ ID NO: 35079 - DNA, 17 bp, Homo sapiens
  source 1..17: mol_type = genomic DNA
ccgccgcggcccgggtt

SEQ ID NO: 35080 - DNA, 18 bp, Homo sapiens
  source 1..18: mol_type = genomic DNA
ccgccgcggcccgggttc

SEQ ID NO: 35081 - DNA, 19 bp, Homo sapiens
  source 1..19: mol_type = genomic DNA
ccgccgcggcccgggttcg

SEQ ID NO: 35082 - DNA, 28 bp, Homo sapiens
  source 1..28: mol_type = genomic DNA
ccgccgcggcccgggttcgattcccggt

SEQ ID NO: 35083 - DNA, 30 bp, Homo sapiens; identical to SEQ ID NO: 11008
  source 1..30: mol_type = genomic DNA

SEQ ID NO: 35084 - DNA, 31 bp, Homo sapiens; identical to SEQ ID NO: 11009
  source 1..31: mol_type = genomic DNA

SEQ ID NO: 35085 - DNA, 32 bp, Homo sapiens; identical to SEQ ID NO: 11010
  source 1..32: mol_type = genomic DNA

SEQ ID NO: 35086 - DNA, 33 bp, Homo sapiens; identical to SEQ ID NO: 11011
  source 1..33: mol_type = genomic DNA

SEQ ID NO: 35087 - DNA, 34 bp, Homo sapiens; identical to SEQ ID NO: 11012
  source 1..34: mol_type = genomic DNA

SEQ ID NO: 35088 - DNA, 35 bp, Homo sapiens; identical to SEQ ID NO: 11013
  source 1..35: mol_type = genomic DNA

SEQ ID NO: 35089 - DNA, 36 bp, Homo sapiens; identical to SEQ ID NO: 11014
  source 1..36: mol_type = genomic DNA

SEQ ID NO: 35090 - DNA, 37 bp, Homo sapiens; identical to SEQ ID NO: 11015
  source 1..37: mol_type = genomic DNA

SEQ ID NO: 35091 - DNA, 38 bp, Homo sapiens; identical to SEQ ID NO: 11016
  source 1..38: mol_type = genomic DNA

SEQ ID NO: 35092 - DNA, 26 bp, Homo sapiens
  source 1..26: mol_type = genomic DNA
ccgcctgtcacgcgggagaccggggt

SEQ ID NO: 35093 - DNA, 46 bp, Homo sapiens; identical to SEQ ID NO: 11018
  source 1..46: mol_type = genomic DNA

SEQ ID NO: 35094 - DNA, 47 bp, Homo sapiens; identical to SEQ ID NO: 11019
  source 1..47: mol_type = genomic DNA

SEQ ID NO: 35095 - DNA, 37 bp, Homo sapiens
  source 1..37: mol_type = genomic DNA
ccgcctgtcacgcgggagaccggggttcgattccccg

SEQ ID NO: 35096 - DNA, 45 bp, Homo sapiens; identical to SEQ ID NO: 11023
  source 1..45: mol_type = genomic DNA

SEQ ID NO: 35097 - DNA, 46 bp, Homo sapiens; identical to SEQ ID NO: 11024
  source 1..46: mol_type = genomic DNA

SEQ ID NO: 35098 - DNA, 47 bp, Homo sapiens; identical to SEQ ID NO: 11025
  source 1..47: mol_type = genomic DNA

SEQ ID NO: 35099 - DNA, 22 bp, Homo sapiens
  source 1..22: mol_type = genomic DNA
ccgcgcaggttcgaatcctgcc

SEQ ID NO: 35100 - DNA, 16 bp, Homo sapiens
  source 1..16: mol_type = genomic DNA
ccgcggcccgggttcg

SEQ ID NO: 35101 - DNA, 18 bp, Homo sapiens
  source 1..18: mol_type = genomic DNA
ccgcggcccgggttcgat

SEQ ID NO: 35102 - DNA, 19 bp, Homo sapiens
  source 1..19: mol_type = genomic DNA
ccgcggcccgggttcgatt

SEQ ID NO: 35103 - DNA, 20 bp, Homo sapiens
  source 1..20: mol_type = genomic DNA
ccgcggcccgggttcgattc

SEQ ID NO: 35104 - DNA, 21 bp, Homo sapiens
  source 1..21: mol_type = genomic DNA
ccgcggcccgggttcgattcc

SEQ ID NO: 35105 - DNA, 22 bp, Homo sapiens
  source 1..22: mol_type = genomic DNA
ccgcggcccgggttcgattccc

SEQ ID NO: 35106 - DNA, 25 bp, Homo sapiens
  source 1..25: mol_type = genomic DNA
ccgcggcccgggttcgattcccggt

SEQ ID NO: 35107 - DNA, 26 bp, Homo sapiens
  source 1..26: mol_type = genomic DNA
ccgcggcccgggttcgattcccggtc

SEQ ID NO: 35108 - DNA, 27 bp, Homo sapiens
  source 1..27: mol_type = genomic DNA
ccgcggcccgggttcgattcccggtca

SEQ ID NO: 35109 - DNA, 28 bp, Homo sapiens
  source 1..28: mol_type = genomic DNA
ccgcggcccgggttcgattcccggtcag

SEQ ID NO: 35110 - DNA, 29 bp, Homo sapiens
  source 1..29: mol_type = genomic DNA
ccgcggcccgggttcgattcccggtcagg

SEQ ID NO: 35111 - DNA, 32 bp, Homo sapiens; identical to SEQ ID NO: 11046
  source 1..32: mol_type = genomic DNA

SEQ ID NO: 35112 - DNA, 33 bp, Homo sapiens; identical to SEQ ID NO: 11047
  source 1..33: mol_type = genomic DNA

SEQ ID NO: 35113 - DNA, 34 bp, Homo sapiens; identical to SEQ ID NO: 11048
  source 1..34: mol_type = genomic DNA

SEQ ID NO: 35114 - DNA, 35 bp, Homo sapiens; identical to SEQ ID NO: 11049
  source 1..35: mol_type = genomic DNA

SEQ ID NO: 35115 - DNA, 29 bp, Homo sapiens
  source 1..29: mol_type = genomic DNA
ccgcgtggcctaatggataaggcgtctga

SEQ ID NO: 35116 - DNA, 26 bp, Homo sapiens
  source 1..26: mol_type = genomic DNA
ccgctggtgtagtggtatcatgcaag

SEQ ID NO: 35117 - DNA, 27 bp, Homo sapiens
  source 1..27: mol_type = genomic DNA
ccgctggtgtagtggtatcatgcaaga

SEQ ID NO: 35118 - DNA, 29 bp, Homo sapiens
  source 1..29: mol_type = genomic DNA
ccgctggtgtagtggtatcatgcaagatt

SEQ ID NO: 35119 - DNA, 30 bp, Homo sapiens; identical to SEQ ID NO: 11070
  source 1..30: mol_type = genomic DNA

SEQ ID NO: 35120 - DNA, 31 bp, Homo sapiens; identical to SEQ ID NO: 11071
  source 1..31: mol_type = genomic DNA

SEQ ID NO: 35121 - DNA, 32 bp, Homo sapiens; identical to SEQ ID NO: 11072
  source 1..32: mol_type = genomic DNA

SEQ ID NO: 35122 - DNA, 36 bp, Homo sapiens; identical to SEQ ID NO: 11075
  source 1..36: mol_type = genomic DNA

SEQ ID NO: 35123 - DNA, 47 bp, Homo sapiens; identical to SEQ ID NO: 11080
  source 1..47: mol_type = genomic DNA

SEQ ID NO: 35124 - DNA, 16 bp, Homo sapiens
  source 1..16: mol_type = genomic DNA
ccggagatgaaaacct

SEQ ID NO: 35125 - DNA, 28 bp, Homo sapiens
  source 1..28: mol_type = genomic DNA
ccggagatgaaaacctttttccaaggac

SEQ ID NO: 35126 - DNA, 29 bp, Homo sapiens
  source 1..29: mol_type = genomic DNA
ccggagatgaaaacctttttccaaggaca

SEQ ID NO: 35127 - DNA, 30 bp, Homo sapiens; identical to SEQ ID NO: 11096
  source 1..30: mol_type = genomic DNA

SEQ ID NO: 35128 - DNA, 31 bp, Homo sapiens; identical to SEQ ID NO: 11097
  source 1..31: mol_type = genomic DNA

SEQ ID NO: 35129 - DNA, 32 bp, Homo sapiens; identical to SEQ ID NO: 11098
  source 1..32: mol_type = genomic DNA

SEQ ID NO: 35130 - DNA, 16 bp, Homo sapiens
  source 1..16: mol_type = genomic DNA
ccggagctggggattg

SEQ ID NO: 35131 - DNA, 17 bp, Homo sapiens
  source 1..17: mol_type = genomic DNA
ccggagctggggattgt

SEQ ID NO: 35132 - DNA, 21 bp, Homo sapiens
  source 1..21: mol_type = genomic DNA
ccggagctggggattgtgggt

SEQ ID NO: 35133 - DNA, 31 bp, Homo sapiens; identical to SEQ ID NO: 11100
  source 1..31: mol_type = genomic DNA

SEQ ID NO: 35134 - DNA, 41 bp, Homo sapiens
  source 1..41: mol_type = genomic DNA
ccggagctggggattgtgggttcgagtcccatctgggtcgc

SEQ ID NO: 35135 - DNA, 42 bp, Homo sapiens
  source 1..42: mol_type = genomic DNA
ccggagctggggattgtgggttcgagtcccatctgggtcgcc

SEQ ID NO: 35136 - DNA, 16 bp, Homo sapiens
  source 1..16: mol_type = genomic DNA
ccggatagctcagtcg

SEQ ID NO: 35137 - DNA, 17 bp, Homo sapiens
  source 1..17: mol_type = genomic DNA
ccggatagctcagtcgg

SEQ ID NO: 35138 - DNA, 20 bp, Homo sapiens
  source 1..20: mol_type = genomic DNA
ccggatagctcagtcggtag

SEQ ID NO: 35139 - DNA, 21 bp, Homo sapiens
  source 1..21: mol_type = genomic DNA
ccggatagctcagtcggtaga

SEQ ID NO: 35140 - DNA, 22 bp, Homo sapiens
  source 1..22: mol_type = genomic DNA
ccggatagctcagtcggtagag

SEQ ID NO: 35141 - DNA, 23 bp, Homo sapiens
  source 1..23: mol_type = genomic DNA
ccggatagctcagtcggtagagc

SEQ ID NO: 35142 - DNA, 24 bp, Homo sapiens
  source 1..24: mol_type = genomic DNA
ccggatagctcagtcggtagagca

SEQ ID NO: 35143 - DNA, 25 bp, Homo sapiens
  source 1..25: mol_type = genomic DNA
ccggatagctcagtcggtagagcat

SEQ ID NO: 35144 - DNA, 26 bp, Homo sapiens
  source 1..26: mol_type = genomic DNA
ccggatagctcagtcggtagagcatc

SEQ ID NO: 35145 - DNA, 27 bp, Homo sapiens
  source 1..27: mol_type = genomic DNA
ccggatagctcagtcggtagagcatca

SEQ ID NO: 35146 - DNA, 28 bp, Homo sapiens
  source 1..28: mol_type = genomic DNA
ccggatagctcagtcggtagagcatcag

SEQ ID NO: 35147 - DNA, 30 bp, Homo sapiens; identical to SEQ ID NO: 11116
  source 1..30: mol_type = genomic DNA

SEQ ID NO: 35148 - DNA, 31 bp, Homo sapiens; identical to SEQ ID NO: 11117
  source 1..31: mol_type = genomic DNA

SEQ ID NO: 35149 - DNA, 33 bp, Homo sapiens; identical to SEQ ID NO: 11119
  source 1..33: mol_type = genomic DNA

SEQ ID NO: 35150 - DNA, 34 bp, Homo sapiens; identical to SEQ ID NO: 11120
  source 1..34: mol_type = genomic DNA

SEQ ID NO: 35151 - DNA, 16 bp, Homo sapiens
  source 1..16: mol_type = genomic DNA
ccggatcagaagattg

SEQ ID NO: 35152 - DNA, 17 bp, Homo sapiens
  source 1..17: mol_type = genomic DNA
ccggatcagaagattga

SEQ ID NO: 35153 - DNA, 18 bp, Homo sapiens
  source 1..18: mol_type = genomic DNA
ccggatcagaagattgag

SEQ ID NO: 35154 - DNA, 19 bp, Homo sapiens
  source 1..19: mol_type = genomic DNA
ccggatcagaagattgagg

SEQ ID NO: 35155 - DNA, 20 bp, Homo sapiens
  source 1..20: mol_type = genomic DNA
ccggatcagaagattgaggg

SEQ ID NO: 35156 - DNA, 21 bp, Homo sapiens
  source 1..21: mol_type = genomic DNA
ccggatcagaagattgagggt

SEQ ID NO: 35157 - DNA, 23 bp, Homo sapiens
  source 1..23: mol_type = genomic DNA
ccggatcagaagattgagggttc

SEQ ID NO: 35158 - DNA, 31 bp, Homo sapiens; identical to SEQ ID NO: 11132
  source 1..31: mol_type = genomic DNA

SEQ ID NO: 35159 - DNA, 41 bp, Homo sapiens
  source 1..41: mol_type = genomic DNA
ccggatcagaagattgagggttcgagtcccttcgtggtcgc

SEQ ID NO: 35160 - DNA, 42 bp, Homo sapiens; identical to SEQ ID NO: 11133
  source 1..42: mol_type = genomic DNA

SEQ ID NO: 35161 - DNA, 18 bp, Homo sapiens
  source 1..18: mol_type = genomic DNA
ccggatggaggcgtgggt

SEQ ID NO: 35162 - DNA, 37 bp, Homo sapiens; identical to SEQ ID NO: 11143
  source 1..37: mol_type = genomic DNA

SEQ ID NO: 35163 - DNA, 38 bp, Homo sapiens; identical to SEQ ID NO: 11144
  source 1..38: mol_type = genomic DNA

SEQ ID NO: 35164 - DNA, 39 bp, Homo sapiens; identical to SEQ ID NO: 11145
  source 1..39: mol_type = genomic DNA

SEQ ID NO: 35165 - DNA, 16 bp, Homo sapiens
  source 1..16: mol_type = genomic DNA
ccggctagctcagtcg

SEQ ID NO: 35166 - DNA, 23 bp, Homo sapiens
  source 1..23: mol_type = genomic DNA
ccggctagctcagtcggtagagc

SEQ ID NO: 35167 - DNA, 24 bp, Homo sapiens
  source 1..24: mol_type = genomic DNA
ccggctagctcagtcggtagagca

SEQ ID NO: 35168 - DNA, 25 bp, Homo sapiens
  source 1..25: mol_type = genomic DNA
ccggctagctcagtcggtagagcat

SEQ ID NO: 35169 - DNA, 26 bp, Homo sapiens
  source 1..26: mol_type = genomic DNA
ccggctagctcagtcggtagagcatg

SEQ ID NO: 35170 - DNA, 27 bp, Homo sapiens
  source 1..27: mol_type = genomic DNA
ccggctagctcagtcggtagagcatga

SEQ ID NO: 35171 - DNA, 28 bp, Homo sapiens
  source 1..28: mol_type = genomic DNA
ccggctagctcagtcggtagagcatgag

SEQ ID NO: 35172 - DNA, 29 bp, Homo sapiens
  source 1..29: mol_type = genomic DNA
ccggctagctcagtcggtagagcatgaga

SEQ ID NO: 35173 - DNA, 30 bp, Homo sapiens; identical to SEQ ID NO: 11159
  source 1..30: mol_type = genomic DNA

SEQ ID NO: 35174 - DNA, 31 bp, Homo sapiens; identical to SEQ ID NO: 11160
  source 1..31: mol_type = genomic DNA

SEQ ID NO: 35175 - DNA, 32 bp, Homo sapiens; identical to SEQ ID NO: 11161
  source 1..32: mol_type = genomic DNA

SEQ ID NO: 35176 - DNA, 33 bp, Homo sapiens; identical to SEQ ID NO: 11162
  source 1..33: mol_type = genomic DNA

SEQ ID NO: 35177 - DNA, 31 bp, Homo sapiens; identical to SEQ ID NO: 11165
  source 1..31: mol_type = genomic DNA

SEQ ID NO: 35178 - DNA, 32 bp, Homo sapiens; identical to SEQ ID NO: 11166
  source 1..32: mol_type = genomic DNA

SEQ ID NO: 35179 - DNA, 33 bp, Homo sapiens; identical to SEQ ID NO: 11167
  source 1..33: mol_type = genomic DNA

SEQ ID NO: 35180 - DNA, 34 bp, Homo sapiens; identical to SEQ ID NO: 11168
  source 1..34: mol_type = genomic DNA

SEQ ID NO: 35181 - DNA, 36 bp, Homo sapiens; identical to SEQ ID NO: 11170
  source 1..36: mol_type = genomic DNA

SEQ ID NO: 35182 - DNA, 37 bp, Homo sapiens; identical to SEQ ID NO: 11171
  source 1..37: mol_type = genomic DNA

SEQ ID NO: 35183 - DNA, 38 bp, Homo sapiens; identical to SEQ ID NO: 11172
  source 1..38: mol_type = genomic DNA

SEQ ID NO: 35184 - DNA, 39 bp, Homo sapiens; identical to SEQ ID NO: 11173
  source 1..39: mol_type = genomic DNA

SEQ ID NO: 35185 - DNA, 40 bp, Homo sapiens; identical to SEQ ID NO: 11174
  source 1..40: mol_type = genomic DNA

SEQ ID NO: 35186 - DNA, 41 bp, Homo sapiens; identical to SEQ ID NO: 11175
  source 1..41: mol_type = genomic DNA

SEQ ID NO: 35187 - DNA, 47 bp, Homo sapiens
  source 1..47: mol_type = genomic DNA
ccggctagctcagtcggtagagcatgagactcttaatctcagggtcg

SEQ ID NO: 35188 - DNA, 27 bp, Homo sapiens
  source 1..27: mol_type = genomic DNA
ccggctagctcagtcggtagagcatgg

SEQ ID NO: 35189 - DNA, 28 bp, Homo sapiens
  source 1..28: mol_type = genomic DNA
ccggctagctcagtcggtagagcatggg

SEQ ID NO: 35190 - DNA, 29 bp, Homo sapiens
  source 1..29: mol_type = genomic DNA
ccggctagctcagtcggtagagcatggga

SEQ ID NO: 35191 - DNA, 30 bp, Homo sapiens; identical to SEQ ID NO: 11179
  source 1..30: mol_type = genomic DNA

SEQ ID NO: 35192 - DNA, 31 bp, Homo sapiens; identical to SEQ ID NO: 11180
  source 1..31: mol_type = genomic DNA

SEQ ID NO: 35193 - DNA, 32 bp, Homo sapiens; identical to SEQ ID NO: 11181
  source 1..32: mol_type = genomic DNA

SEQ ID NO: 35194 - DNA, 33 bp, Homo sapiens; identical to SEQ ID NO: 11182
  source 1..33: mol_type = genomic DNA

SEQ ID NO: 35195 - DNA, 34 bp, Homo sapiens; identical to SEQ ID NO: 11183
  source 1..34: mol_type = genomic DNA

SEQ ID NO: 35196 - DNA, 37 bp, Homo sapiens; identical to SEQ ID NO: 11186
  source 1..37: mol_type = genomic DNA

SEQ ID NO: 35197 - DNA, 38 bp, Homo sapiens; identical to SEQ ID NO: 11187
  source 1..38: mol_type = genomic DNA

SEQ ID NO: 35198 - DNA, 39 bp, Homo sapiens; identical to SEQ ID NO: 11188
  source 1..39: mol_type = genomic DNA

SEQ ID NO: 35199 - DNA, 40 bp, Homo sapiens; identical to SEQ ID NO: 11189
  source 1..40: mol_type = genomic DNA

SEQ ID NO: 35200 - DNA, 41 bp, Homo sapiens; identical to SEQ ID NO: 11190
  source 1..41: mol_type = genomic DNA

SEQ ID NO: 35201 - DNA, 47 bp, Homo sapiens; identical to SEQ ID NO: 11191
  source 1..47: mol_type = genomic DNA

SEQ ID NO: 35202 - DNA, 16 bp, Homo sapiens
  source 1..16: mol_type = genomic DNA
ccggctcgaaggacca

SEQ ID NO: 35203 - DNA, 16 bp, Homo sapiens
  source 1..16: mol_type = genomic DNA
ccggctcggaggacca

SEQ ID NO: 35204 - DNA, 16 bp, Homo sapiens
  source 1..16: mol_type = genomic DNA
ccgggcagaagcacca

SEQ ID NO: 35205 - DNA, 16 bp, Homo sapiens
  source 1..16: mol_type = genomic DNA
ccgggcggaaacacca

SEQ ID NO: 35206 - DNA, 27 bp, Homo sapiens
  source 1..27: mol_type = genomic DNA
ccggggttcaagtccctgttcgggcgc

SEQ ID NO: 35207 - DNA, 28 bp, Homo sapiens
  source 1..28: mol_type = genomic DNA
ccggggttcaagtccctgttcgggcgcc

SEQ ID NO: 35208 - DNA, 27 bp, Homo sapiens
  source 1..27: mol_type = genomic DNA
ccggggttcaattccccgacggggagc

SEQ ID NO: 35209 - DNA, 28 bp, Homo sapiens
  source 1..28: mol_type = genomic DNA
ccggggttcaattccccgacggggagcc

SEQ ID NO: 35210 - DNA, 26 bp, Homo sapiens
  source 1..26: mol_type = genomic DNA
ccggggttcgattccccgacggggag

SEQ ID NO: 35211 - DNA, 27 bp, Homo sapiens
  source 1..27: mol_type = genomic DNA
ccggggttcgattccccgacggggagc

SEQ ID NO: 35212 - DNA, 28 bp, Homo sapiens
  source 1..28: mol_type = genomic DNA
ccggggttcgattccccgacggggagcc

SEQ ID NO: 35213 - DNA, 29 bp, Homo sapiens
  source 1..29: mol_type = genomic DNA
ccggggttcgattccccgacggggagcca

SEQ ID NO: 35214 - DNA, 16 bp, Homo sapiens
  source 1..16: mol_type = genomic DNA
ccgggtgccccctcca

SEQ ID NO: 35215 - DNA, 27 bp, Homo sapiens
  source 1..27: mol_type = genomic DNA
ccgggttcaatccccggcacctccacc

SEQ ID NO: 35216 - DNA, 26 bp, Homo sapiens
  source 1..26: mol_type = genomic DNA
ccgggttcgactcccggtatgggaac

SEQ ID NO: 35217 - DNA, 24 bp, Homo sapiens
  source 1..24: mol_type = genomic DNA
ccgggttcgactcccggtgtggga

SEQ ID NO: 35218 - DNA, 25 bp, Homo sapiens
  source 1..25: mol_type = genomic DNA
ccgggttcgactcccggtgtgggaa

SEQ ID NO: 35219 - DNA, 26 bp, Homo sapiens
  source 1..26: mol_type = genomic DNA
ccgggttcgactcccggtgtgggaac

SEQ ID NO: 35220 - DNA, 27 bp, Homo sapiens
  source 1..27: mol_type = genomic DNA
ccgggttcgactcccggtgtgggaacc

SEQ ID NO: 35221 - DNA, 26 bp, Homo sapiens
  source 1..26: mol_type = genomic DNA
ccgggttcgagtcccggcggagtcgc

SEQ ID NO: 35222 - DNA, 27 bp, Homo sapiens
  source 1..27: mol_type = genomic DNA
ccgggttcgagtcccggcggagtcgcc

SEQ ID NO: 35223 - DNA, 27 bp, Homo sapiens
  source 1..27: mol_type = genomic DNA
ccgggttcgatccccagcatctccacc

SEQ ID NO: 35224 - DNA, 26 bp, Homo sapiens
  source 1..26: mol_type = genomic DNA
ccgggttcgatccccggcatctccac

SEQ ID NO: 35225 - DNA, 27 bp, Homo sapiens
  source 1..27: mol_type = genomic DNA
ccgggttcgatccccggcatctccacc

SEQ ID NO: 35226 - DNA, 26 bp, Homo sapiens
  source 1..26: mol_type = genomic DNA
ccgggttcgattcccggccaacgcac

SEQ ID NO: 35227 - DNA, 22 bp, Homo sapiens
  source 1..22: mol_type = genomic DNA
ccgggttcgattcccgggcggc

SEQ ID NO: 35228 - DNA, 25 bp, Homo sapiens
  source 1..25: mol_type = genomic DNA
ccgggttcgattcccgggcggcgca

SEQ ID NO: 35229 - DNA, 26 bp, Homo sapiens
  source 1..26: mol_type = genomic DNA
ccgggttcgattcccgggcggcgcac

SEQ ID NO: 35230 - DNA, 25 bp, Homo sapiens
  source 1..25: mol_type = genomic DNA
ccgggttcgattcccggtcagggaa

SEQ ID NO: 35231 - DNA, 26 bp, Homo sapiens
  source 1..26: mol_type = genomic DNA
ccgggttcgattcccggtcagggaac

SEQ ID NO: 35232 - DNA, 16 bp, Homo sapiens
  source 1..16: mol_type = genomic DNA
ccgggtttcggcacca

SEQ ID NO: 35233 - DNA, 17 bp, Homo sapiens
  source 1..17: mol_type = genomic DNA
ccggttcgaaaccgggc

SEQ ID NO: 35234 - DNA, 23 bp, Homo sapiens
  source 1..23: mol_type = genomic DNA
ccggttcgaaaccgggcggaaac

SEQ ID NO: 35235 - DNA, 24 bp, Homo sapiens
  source 1..24: mol_type = genomic DNA
ccggttcgaaaccgggcggaaaca

SEQ ID NO: 35236 - DNA, 26 bp, Homo sapiens
  source 1..26: mol_type = genomic DNA
ccggttcgaaaccgggcggaaacacc

SEQ ID NO: 35237 - DNA, 29 bp, Homo sapiens
  source 1..29: mol_type = genomic DNA
ccgtagtgtagcggttatcacattcgcct

SEQ ID NO: 35238 - DNA, 19 bp, Homo sapiens
  source 1..19: mol_type = genomic DNA
ccgtagtgtagtggtcatc

SEQ ID NO: 35239 - DNA, 27 bp, Homo sapiens
  source 1..27: mol_type = genomic DNA
ccgtagtgtagtggtcatcacgttcgc

SEQ ID NO: 35240 - DNA, 28 bp, Homo sapiens
  source 1..28: mol_type = genomic DNA
ccgtagtgtagtggtcatcacgttcgcc

SEQ ID NO: 35241 - DNA, 29 bp, Homo sapiens
  source 1..29: mol_type = genomic DNA
ccgtagtgtagtggtcatcacgttcgcct

SEQ ID NO: 35242 - DNA, 19 bp, Homo sapiens
  source 1..19: mol_type = genomic DNA
ccgtagtgtagtggttatc

SEQ ID NO: 35243 - DNA, 20 bp, Homo sapiens
  source 1..20: mol_type = genomic DNA
ccgtagtgtagtggttatca

SEQ ID NO: 35244 - DNA, 28 bp, Homo sapiens
  source 1..28: mol_type = genomic DNA
ccgtagtgtagtggttatcacgttcgcc

SEQ ID NO: 35245 - DNA, 29 bp, Homo sapiens
  source 1..29: mol_type = genomic DNA
ccgtagtgtagtggttatcacgttcgcct

SEQ ID NO: 35246 - DNA, 32 bp, Homo sapiens; identical to SEQ ID NO: 11297
  source 1..32: mol_type = genomic DNA

SEQ ID NO: 35247 - DNA, 47 bp, Homo sapiens
  source 1..47: mol_type = genomic DNA
ccgtagtgtagtggttatcacgttcgcctcacacgcgaaaggtcccc

SEQ ID NO: 35248 - DNA, 18 bp, Homo sapiens
  source 1..18: mol_type = genomic DNA
ccgtatggaggcgtgggt

SEQ ID NO: 35249 - DNA, 37 bp, Homo sapiens
  source 1..37: mol_type = genomic DNA
ccgtatggaggcgtgggttcgaatcccacttctgaca

SEQ ID NO: 35250 - DNA, 38 bp, Homo sapiens
  source 1..38: mol_type = genomic DNA
ccgtatggaggcgtgggttcgaatcccacttctgacac

SEQ ID NO: 35251 - DNA, 39 bp, Homo sapiens
  source 1..39: mol_type = genomic DNA
ccgtatggaggcgtgggttcgaatcccacttctgacacc

SEQ ID NO: 35252 - DNA, 16 bp, Homo sapiens
  source 1..16: mol_type = genomic DNA
ccgtgatcgtatagtg

SEQ ID NO: 35253 - DNA, 20 bp, Homo sapiens
  source 1..20: mol_type = genomic DNA
ccgtgatcgtatagtggtta

SEQ ID NO: 35254 - DNA, 21 bp, Homo sapiens
  source 1..21: mol_type = genomic DNA
ccgtgatcgtatagtggttag

SEQ ID NO: 35255 - DNA, 22 bp, Homo sapiens
  source 1..22: mol_type = genomic DNA
ccgtgatcgtatagtggttagt

SEQ ID NO: 35256 - DNA, 23 bp, Homo sapiens
  source 1..23: mol_type = genomic DNA
ccgtgatcgtatagtggttagta

SEQ ID NO: 35257 - DNA, 24 bp, Homo sapiens
  source 1..24: mol_type = genomic DNA
ccgtgatcgtatagtggttagtac

SEQ ID NO: 35258 - DNA, 25 bp, Homo sapiens
  source 1..25: mol_type = genomic DNA
ccgtgatcgtatagtggttagtact

SEQ ID NO: 35259 - DNA, 26 bp, Homo sapiens
  source 1..26: mol_type = genomic DNA
ccgtgatcgtatagtggttagtactc

SEQ ID NO: 35260 - DNA, 27 bp, Homo sapiens
  source 1..27: mol_type = genomic DNA
ccgtgatcgtatagtggttagtactct

SEQ ID NO: 35261 - DNA, 28 bp, Homo sapiens
  source 1..28: mol_type = genomic DNA
ccgtgatcgtatagtggttagtactctg

SEQ ID NO: 35262 - DNA, 29 bp, Homo sapiens
  source 1..29: mol_type = genomic DNA
ccgtgatcgtatagtggttagtactctgc

SEQ ID NO: 35263 - DNA, 30 bp, Homo sapiens; identical to SEQ ID NO: 11315
  source 1..30: mol_type = genomic DNA

SEQ ID NO: 35264 - DNA, 31 bp, Homo sapiens; identical to SEQ ID NO: 11316
  source 1..31: mol_type = genomic DNA

SEQ ID NO: 35265 - DNA, 32 bp, Homo sapiens; identical to SEQ ID NO: 11317
  source 1..32: mol_type = genomic DNA

SEQ ID NO: 35266 - DNA, 33 bp, Homo sapiens; identical to SEQ ID NO: 11318
  source 1..33: mol_type = genomic DNA

SEQ ID NO: 35267 - DNA, 34 bp, Homo sapiens; identical to SEQ ID NO: 11319
  source 1..34: mol_type = genomic DNA

SEQ ID NO: 35268 - DNA, 35 bp, Homo sapiens; identical to SEQ ID NO: 11320
  source 1..35: mol_type = genomic DNA

SEQ ID NO: 35269 - DNA, 37 bp, Homo sapiens; identical to SEQ ID NO: 11322
  source 1..37: mol_type = genomic DNA

SEQ ID NO: 35270 - DNA, 43 bp, Homo sapiens
  source 1..43: mol_type = genomic DNA
ccgtgatcgtatagtggttagtactctgcgttgtggccgcagc

SEQ ID NO: 35271 - DNA, 47 bp, Homo sapiens; identical to SEQ ID NO: 11328
  source 1..47: mol_type = genomic DNA

SEQ ID NO: 35272 - DNA, 16 bp, Homo sapiens
  source 1..16: mol_type = genomic DNA
ccgtgcgagaatacca

SEQ ID NO: 35273 - DNA, 16 bp, Homo sapiens
  source 1..16: mol_type = genomic DNA
cctaagccagggattg

SEQ ID NO: 35274 - DNA, 42 bp, Homo sapiens
  source 1..42: mol_type = genomic DNA
cctaagccagggattgtgggttcgagtcccacctggggtacc

SEQ ID NO: 35275 - DNA, 41 bp, Homo sapiens
  source 1..41: mol_type = genomic DNA
cctaagccagggattgtgggttcgagtcccatctggggtgc

SEQ ID NO: 35276 - DNA, 42 bp, Homo sapiens; identical to SEQ ID NO: 11347
  source 1..42: mol_type = genomic DNA

SEQ ID NO: 35277 - DNA, 43 bp, Homo sapiens; identical to SEQ ID NO: 11348
  source 1..43: mol_type = genomic DNA

SEQ ID NO: 35278 - DNA, 40 bp, Homo sapiens
  source 1..40: mol_type = genomic DNA
cctaatggataaggcatcagcctccggagctggggattgt

SEQ ID NO: 35279 - DNA, 16 bp, Homo sapiens
  source 1..16: mol_type = genomic DNA
cctacccagggacgcc

SEQ ID NO: 35280 - DNA, 16 bp, Homo sapiens
  source 1..16: mol_type = genomic DNA
cctacgttgggcgcca

SEQ ID NO: 35281 - DNA, 16 bp, Homo sapiens
  source 1..16: mol_type = genomic DNA
cctcacacggggcacc

SEQ ID NO: 35282 - DNA, 17 bp, Homo sapiens
  source 1..17: mol_type = genomic DNA
cctcacacggggcacca

SEQ ID NO: 35283 - DNA, 16 bp, Homo sapiens
  source 1..16: mol_type = genomic DNA
cctcacctggagcacc

SEQ ID NO: 35284 - DNA, 17 bp, Homo sapiens
  source 1..17: mol_type = genomic DNA
cctcacctggagcacca

SEQ ID NO: 35285 - DNA, 16 bp, Homo sapiens
  source 1..16: mol_type = genomic DNA
cctcagagagggcacc

SEQ ID NO: 35286 - DNA, 16 bp, Homo sapiens
  source 1..16: mol_type = genomic DNA
cctcagagggggcacc

SEQ ID NO: 35287 - DNA, 17 bp, Homo sapiens
  source 1..17: mol_type = genomic DNA
cctcagagggggcacca

SEQ ID NO: 35288 - DNA, 29 bp, Homo sapiens
  source 1..29: mol_type = genomic DNA
cctcagtaagttgcaatacttaatttctg

SEQ ID NO: 35289 - DNA, 31 bp, Homo sapiens; identical to SEQ ID NO: 11385
  source 1..31: mol_type = genomic DNA

SEQ ID NO: 35290 - DNA, 32 bp, Homo sapiens; identical to SEQ ID NO: 11386
  source 1..32: mol_type = genomic DNA

SEQ ID NO: 35291 - DNA, 45 bp, Homo sapiens
  source 1..45: mol_type = genomic DNA
cctccggagctggggattgtgggttcgagtcccatctgggtcgcc

SEQ ID NO: 35292 - DNA, 16 bp, Homo sapiens
  source 1..16: mol_type = genomic DNA
cctcgctggggcctcc

SEQ ID NO: 35293 - DNA, 26 bp, Homo sapiens
  source 1..26: mol_type = genomic DNA
cctcggttcgaatccgagtcacggca

SEQ ID NO: 35294 - DNA, 27 bp, Homo sapiens
  source 1..27: mol_type = genomic DNA
cctcggttcgaatccgagtcacggcac

SEQ ID NO: 35295 - DNA, 19 bp, Homo sapiens
  source 1..19: mol_type = genomic DNA
cctcttagcgcagtgggca

SEQ ID NO: 35296 - DNA, 16 bp, Homo sapiens
  source 1..16: mol_type = genomic DNA
cctctttacagtgacc

SEQ ID NO: 35297 - DNA, 17 bp, Homo sapiens
  source 1..17: mol_type = genomic DNA
cctctttacagtgacca

SEQ ID NO: 35298 - DNA, 16 bp, Homo sapiens
  source 1..16: mol_type = genomic DNA
cctctttttaccacca

SEQ ID NO: 35299 - DNA, 28 bp, Homo sapiens
  source 1..28: mol_type = genomic DNA
cctgagttcgagcctcagagagggcacc

SEQ ID NO: 35300 - DNA, 19 bp, Homo sapiens
  source 1..19: mol_type = genomic DNA
cctgccacgcgggaggccc

SEQ ID NO: 35301 - DNA, 21 bp, Homo sapiens
  source 1..21: mol_type = genomic DNA
cctgccacgcgggaggcccgg

SEQ ID NO: 35302 - DNA, 16 bp, Homo sapiens
  source 1..16: mol_type = genomic DNA
cctgccgactacgcca

SEQ ID NO: 35303 - DNA, 16 bp, Homo sapiens
  source 1..16: mol_type = genomic DNA
cctgccgcggtcgcca

SEQ ID NO: 35304 - DNA, 16 bp, Homo sapiens
  source 1..16: mol_type = genomic DNA
cctgctcacagcgcca

SEQ ID NO: 35305 - DNA, 16 bp, Homo sapiens
  source 1..16: mol_type = genomic DNA
cctgctcgctgcgcca

SEQ ID NO: 35306 - DNA, 16 bp, Homo sapiens
  source 1..16: mol_type = genomic DNA
cctggctggctcgcca

SEQ ID NO: 35307 - DNA, 27 bp, Homo sapiens
  source 1..27: mol_type = genomic DNA
cctgggttcgaatcccagcggggcctc

SEQ ID NO: 35308 - DNA, 27 bp, Homo sapiens
  source 1..27: mol_type = genomic DNA
cctgggttcgaatcccagcggtgcctc

SEQ ID NO: 35309 - DNA, 27 bp, Homo sapiens
  source 1..27: mol_type = genomic DNA
cctgggttcgagccccagtggaaccac

SEQ ID NO: 35310 - DNA, 28 bp, Homo sapiens
  source 1..28: mol_type = genomic DNA
cctgggttcgagccccagtggaaccacc

SEQ ID NO: 35311 - DNA, 28 bp, Homo sapiens
  source 1..28: mol_type = genomic DNA
cctggtggtctagtggctaggattcggc

SEQ ID NO: 35312 - DNA, 30 bp, Homo sapiens; identical to SEQ ID NO: 11478
  source 1..30: mol_type = genomic DNA

SEQ ID NO: 35313 - DNA, 31 bp, Homo sapiens; identical to SEQ ID NO: 11479
  source 1..31: mol_type = genomic DNA

SEQ ID NO: 35314 - DNA, 32 bp, Homo sapiens; identical to SEQ ID NO: 11480
  source 1..32: mol_type = genomic DNA

SEQ ID NO: 35315 - DNA, 34 bp, Homo sapiens; identical to SEQ ID NO: 11482
  source 1..34: mol_type = genomic DNA

SEQ ID NO: 35316 - DNA, 23 bp, Homo sapiens
  source 1..23: mol_type = genomic DNA
cctggtggtctagtggttaggat

SEQ ID NO: 35317 - DNA, 24 bp, Homo sapiens
  source 1..24: mol_type = genomic DNA
cctggtggtctagtggttaggatt

SEQ ID NO: 35318 - DNA, 26 bp, Homo sapiens
  source 1..26: mol_type = genomic DNA
cctggtggtctagtggttaggattcg

SEQ ID NO: 35319 - DNA, 28 bp, Homo sapiens
  source 1..28: mol_type = genomic DNA
cctggtggtctagtggttaggattcggc

SEQ ID NO: 35320 - DNA, 29 bp, Homo sapiens
  source 1..29: mol_type = genomic DNA
cctggtggtctagtggttaggattcggcg

SEQ ID NO: 35321 - DNA, 30 bp, Homo sapiens; identical to SEQ ID NO: 11496
  source 1..30: mol_type = genomic DNA

SEQ ID NO: 35322 - DNA, 31 bp, Homo sapiens; identical to SEQ ID NO: 11497
  source 1..31: mol_type = genomic DNA

SEQ ID NO: 35323 - DNA, 32 bp, Homo sapiens; identical to SEQ ID NO: 11498
  source 1..32: mol_type = genomic DNA

SEQ ID NO: 35324 - DNA, 33 bp, Homo sapiens; identical to SEQ ID NO: 11499
  source 1..33: mol_type = genomic DNA

SEQ ID NO: 35325 - DNA, 34 bp, Homo sapiens; identical to SEQ ID NO: 11500
  source 1..34: mol_type = genomic DNA

SEQ ID NO: 35326 - DNA, 35 bp, Homo sapiens; identical to SEQ ID NO: 11501
  source 1..35: mol_type = genomic DNA

SEQ ID NO: 35327 - DNA, 40 bp, Homo sapiens; identical to SEQ ID NO: 11506
  source 1..40: mol_type = genomic DNA

SEQ ID NO: 35328 - DNA, 26 bp, Homo sapiens
  source 1..26: mol_type = genomic DNA
cctggttcaatcccgggtttcggcac

SEQ ID NO: 35329 - DNA, 25 bp, Homo sapiens
  source 1..25: mol_type = genomic DNA
cctggttcgatcccgggtttcggca

SEQ ID NO: 35330 - DNA, 26 bp, Homo sapiens
  source 1..26: mol_type = genomic DNA
cctggttcgatcccgggtttcggcac

SEQ ID NO: 35331 - DNA, 27 bp, Homo sapiens
  source 1..27: mol_type = genomic DNA
cctggttcgatcccgggtttcggcacc

SEQ ID NO: 35332 - DNA, 46 bp, Homo sapiens
  source 1..46: mol_type = genomic DNA
cctggttttcacccaggcggcccgggttcgactcccggtgtgggaa

SEQ ID NO: 35333 - DNA, 47 bp, Homo sapiens
  source 1..47: mol_type = genomic DNA
cctggttttcacccaggcggcccgggttcgactcccggtgtgggaac

SEQ ID NO: 35334 - DNA, 16 bp, Homo sapiens
  source 1..16: mol_type = genomic DNA
cctgtcacgcgggaga

SEQ ID NO: 35335 - DNA, 18 bp, Homo sapiens
  source 1..18: mol_type = genomic DNA
cctgtcacgcgggagacc

SEQ ID NO: 35336 - DNA, 19 bp, Homo sapiens
  source 1..19: mol_type = genomic DNA
cctgtcacgcgggagaccg

SEQ ID NO: 35337 - DNA, 20 bp, Homo sapiens
  source 1..20: mol_type = genomic DNA
cctgtcacgcgggagaccgg

SEQ ID NO: 35338 - DNA, 21 bp, Homo sapiens
  source 1..21: mol_type = genomic DNA
cctgtcacgcgggagaccggg

SEQ ID NO: 35339 - DNA, 23 bp, Homo sapiens
  source 1..23: mol_type = genomic DNA
cctgtcacgcgggagaccggggt

SEQ ID NO: 35340 - DNA, 41 bp, Homo sapiens
  source 1..41: mol_type = genomic DNA
cctgtcacgcgggagaccggggttcaattccccgacgggga

SEQ ID NO: 35341 - DNA, 43 bp, Homo sapiens; identical to SEQ ID NO: 11522
  source 1..43: mol_type = genomic DNA

SEQ ID NO: 35342 - DNA, 44 bp, Homo sapiens; identical to SEQ ID NO: 11523
  source 1..44: mol_type = genomic DNA

SEQ ID NO: 35343 - DNA, 35 bp, Homo sapiens
  source 1..35: mol_type = genomic DNA
cctgtcacgcgggagaccggggttcgattccccga

SEQ ID NO: 35344 - DNA, 37 bp, Homo sapiens
  source 1..37: mol_type = genomic DNA
cctgtcacgcgggagaccggggttcgattccccgacg

SEQ ID NO: 35345 - DNA, 38 bp, Homo sapiens; identical to SEQ ID NO: 11526
  source 1..38: mol_type = genomic DNA

SEQ ID NO: 35346 - DNA, 39 bp, Homo sapiens; identical to SEQ ID NO: 11527
  source 1..39: mol_type = genomic DNA

SEQ ID NO: 35347 - DNA, 41 bp, Homo sapiens; identical to SEQ ID NO: 11529
  source 1..41: mol_type = genomic DNA

SEQ ID NO: 35348 - DNA, 42 bp, Homo sapiens; identical to SEQ ID NO: 11530
  source 1..42: mol_type = genomic DNA

SEQ ID NO: 35349 - DNA, 43 bp, Homo sapiens; identical to SEQ ID NO: 11531
  source 1..43: mol_type = genomic DNA

SEQ ID NO: 35350 - DNA, 44 bp, Homo sapiens; identical to SEQ ID NO: 11532
  source 1..44: mol_type = genomic DNA

SEQ ID NO: 35351 - DNA, 45 bp, Homo sapiens; identical to SEQ ID NO: 11533
  source 1..45: mol_type = genomic DNA

SEQ ID NO: 35352 - DNA, 16 bp, Homo sapiens
  source 1..16: mol_type = genomic DNA
cctgttcgtgacgcca

SEQ ID NO: 35353 - DNA, 19 bp, Homo sapiens
  source 1..19: mol_type = genomic DNA
ccttagcgcagtaggcagc

SEQ ID NO: 35354 - DNA, 17 bp, Homo sapiens
  source 1..17: mol_type = genomic DNA
ccttaggtcgctggttc

SEQ ID NO: 35355 - DNA, 35 bp, Homo sapiens; identical to SEQ ID NO: 11540
  source 1..35: mol_type = genomic DNA

SEQ ID NO: 35356 - DNA, 36 bp, Homo sapiens; identical to SEQ ID NO: 11541
  source 1..36: mol_type = genomic DNA

SEQ ID NO: 35357 - DNA, 35 bp, Homo sapiens; identical to SEQ ID NO: 11542
  source 1..35: mol_type = genomic DNA

SEQ ID NO: 35358 - DNA, 35 bp, Homo sapiens; identical to SEQ ID NO: 11545
  source 1..35: mol_type = genomic DNA

SEQ ID NO: 35359 - DNA, 36 bp, Homo sapiens; identical to SEQ ID NO: 11546
  source 1..36: mol_type = genomic DNA

SEQ ID NO: 35360 - DNA, 18 bp, Homo sapiens
  source 1..18: mol_type = genomic DNA
ccttccaagcagttgacc

SEQ ID NO: 35361 - DNA, 19 bp, Homo sapiens
  source 1..19: mol_type = genomic DNA
ccttccaagcagttgaccc

SEQ ID NO: 35362 - DNA, 20 bp, Homo sapiens
  source 1..20: mol_type = genomic DNA
ccttccaagcagttgacccg

SEQ ID NO: 35363 - DNA, 21 bp, Homo sapiens
  source 1..21: mol_type = genomic DNA
ccttccaagcagttgacccgg

SEQ ID NO: 35364 - DNA, 22 bp, Homo sapiens
  source 1..22: mol_type = genomic DNA
ccttccaagcagttgacccggg

SEQ ID NO: 35365 - DNA, 23 bp, Homo sapiens
  source 1..23: mol_type = genomic DNA
ccttccaagcagttgacccgggt

SEQ ID NO: 35366 - DNA, 42 bp, Homo sapiens
  source 1..42: mol_type = genomic DNA
ccttccaagcagttgacccgggttcgattcccggccaacgca

SEQ ID NO: 35367 - DNA, 16 bp, Homo sapiens
  source 1..16: mol_type = genomic DNA
ccttcgatagctcagc

SEQ ID NO: 35368 - DNA, 17 bp, Homo sapiens
  source 1..17: mol_type = genomic DNA
ccttcgatagctcagct

SEQ ID NO: 35369 - DNA, 18 bp, Homo sapiens
  source 1..18: mol_type = genomic DNA
ccttcgatagctcagctg

SEQ ID NO: 35370 - DNA, 19 bp, Homo sapiens
  source 1..19: mol_type = genomic DNA
ccttcgatagctcagctgg

SEQ ID NO: 35371 - DNA, 25 bp, Homo sapiens
  source 1..25: mol_type = genomic DNA
ccttcgatagctcagctggtagagc

SEQ ID NO: 35372 - DNA, 35 bp, Homo sapiens; identical to SEQ ID NO: 11573
  source 1..35: mol_type = genomic DNA

SEQ ID NO: 35373 - DNA, 16 bp, Homo sapiens
  source 1..16: mol_type = genomic DNA
ccttcgatagctcagt

SEQ ID NO: 35374 - DNA, 18 bp, Homo sapiens
  source 1..18: mol_type = genomic DNA
ccttcgatagctcagttg

SEQ ID NO: 35375 - DNA, 19 bp, Homo sapiens
  source 1..19: mol_type = genomic DNA
ccttcgatagctcagttgg

SEQ ID NO: 35376 - DNA, 25 bp, Homo sapiens
  source 1..25: mol_type = genomic DNA
ccttcgatagctcagttggtagagc

SEQ ID NO: 35377 - DNA, 33 bp, Homo sapiens; identical to SEQ ID NO: 11581
  source 1..33: mol_type = genomic DNA

SEQ ID NO: 35378 - DNA, 35 bp, Homo sapiens; identical to SEQ ID NO: 11583
  source 1..35: mol_type = genomic DNA

SEQ ID NO: 35379 - DNA, 27 bp, Homo sapiens
  source 1..27: mol_type = genomic DNA
ccttttaagttaaagattaagagaacc

SEQ ID NO: 35380 - DNA, 33 bp, Homo sapiens; identical to SEQ ID NO: 11596
  source 1..33: mol_type = genomic DNA

SEQ ID NO: 35381 - DNA, 46 bp, Homo sapiens; identical to SEQ ID NO: 11604
  source 1..46: mol_type = genomic DNA

SEQ ID NO: 35382 - DNA, 16 bp, Homo sapiens
  source 1..16: mol_type = genomic DNA
cctttttccaaggaca

SEQ ID NO: 35383 - DNA, 17 bp, Homo sapiens
  source 1..17: mol_type = genomic DNA
cctttttccaaggacac

SEQ ID NO: 35384 - DNA, 18 bp, Homo sapiens
  source 1..18: mol_type = genomic DNA
cctttttccaaggacacc

SEQ ID NO: 35385 - DNA, 19 bp, Homo sapiens
  source 1..19: mol_type = genomic DNA
cctttttccaaggacacca

SEQ ID NO: 35386 - DNA, 19 bp, Homo sapiens
  source 1..19: mol_type = genomic DNA
cgaaaatgttggttatacc

SEQ ID NO: 35387 - DNA, 26 bp, Homo sapiens
  source 1..26: mol_type = genomic DNA
cgaaaatgttggttatacccttcccg

SEQ ID NO: 35388 - DNA, 29 bp, Homo sapiens
  source 1..29: mol_type = genomic DNA
cgaaaatgttggttatacccttcccgtac

SEQ ID NO: 35389 - DNA, 31 bp, Homo sapiens; identical to SEQ ID NO: 11628
  source 1..31: mol_type = genomic DNA

SEQ ID NO: 35390 - DNA, 32 bp, Homo sapiens; identical to SEQ ID NO: 11629
  source 1..32: mol_type = genomic DNA

SEQ ID NO: 35391 - DNA, 33 bp, Homo sapiens; identical to SEQ ID NO: 11630
  source 1..33: mol_type = genomic DNA

SEQ ID NO: 35392 - DNA, 34 bp, Homo sapiens; identical to SEQ ID NO: 11631
  source 1..34: mol_type = genomic DNA

SEQ ID NO: 35393 - DNA, 17 bp, Homo sapiens
  source 1..17: mol_type = genomic DNA
cgaaaccatcctctgct

SEQ ID NO: 35394 - DNA, 18 bp, Homo sapiens
  source 1..18: mol_type = genomic DNA
cgaaaccatcctctgcta

SEQ ID NO: 35395 - DNA, 20 bp, Homo sapiens
  source 1..20: mol_type = genomic DNA
cgaaaccatcctctgctacc

SEQ ID NO: 35396 - DNA, 18 bp, Homo sapiens
  source 1..18: mol_type = genomic DNA
cgaaaccgggcagaagca

SEQ ID NO: 35397 - DNA, 19 bp, Homo sapiens
  source 1..19: mol_type = genomic DNA
cgaaaccgggcagaagcac

SEQ ID NO: 35398 - DNA, 20 bp, Homo sapiens
  source 1..20: mol_type = genomic DNA
cgaaaccgggcagaagcacc

SEQ ID NO: 35399 - DNA, 16 bp, Homo sapiens
  source 1..16: mol_type = genomic DNA
cgaaaccgggcggaaa

SEQ ID NO: 35400 - DNA, 17 bp, Homo sapiens
  source 1..17: mol_type = genomic DNA
cgaaaccgggcggaaac

SEQ ID NO: 35401 - DNA, 18 bp, Homo sapiens
  source 1..18: mol_type = genomic DNA
cgaaaccgggcggaaaca

SEQ ID NO: 35402 - DNA, 19 bp, Homo sapiens
  source 1..19: mol_type = genomic DNA
cgaaaccgggcggaaacac

SEQ ID NO: 35403 - DNA, 20 bp, Homo sapiens
  source 1..20: mol_type = genomic DNA
cgaaaccgggcggaaacacc

SEQ ID NO: 35404 - DNA, 21 bp, Homo sapiens
  source 1..21: mol_type = genomic DNA
cgaaaccgggcggaaacacca

SEQ ID NO: 35405 - DNA, 25 bp, Homo sapiens
  source 1..25: mol_type = genomic DNA
cgaaaggtccccggttcgaaaccgg

SEQ ID NO: 35406 - DNA, 35 bp, Homo sapiens
  source 1..35: mol_type = genomic DNA
cgaaaggtccccggttcgaaaccgggcagaagcac

SEQ ID NO: 35407 - DNA, 36 bp, Homo sapiens; identical to SEQ ID NO: 11645
  source 1..36: mol_type = genomic DNA

SEQ ID NO: 35408 - DNA, 32 bp, Homo sapiens
  source 1..32: mol_type = genomic DNA
cgaaaggtccccggttcgaaaccgggcggaaa

SEQ ID NO: 35409 - DNA, 33 bp, Homo sapiens; identical to SEQ ID NO: 11647
  source 1..33: mol_type = genomic DNA

SEQ ID NO: 35410 - DNA, 34 bp, Homo sapiens; identical to SEQ ID NO: 11648
  source 1..34: mol_type = genomic DNA

SEQ ID NO: 35411 - DNA, 35 bp, Homo sapiens; identical to SEQ ID NO: 11649
  source 1..35: mol_type = genomic DNA

SEQ ID NO: 35412 - DNA, 36 bp, Homo sapiens; identical to SEQ ID NO: 11650
  source 1..36: mol_type = genomic DNA

SEQ ID NO: 35413 - DNA, 34 bp, Homo sapiens
  source 1..34: mol_type = genomic DNA
cgaaaggtccccggttcgatcccgggcggaaaca

SEQ ID NO: 35414 - DNA, 36 bp, Homo sapiens
  source 1..36: mol_type = genomic DNA
cgaaaggtccccggttcgatcccgggcggaaacacc

SEQ ID NO: 35415 - DNA, 36 bp, Homo sapiens
  source 1..36: mol_type = genomic DNA
cgaaaggtccctggatcaaaaccaggcggaaacacc

SEQ ID NO: 35416 - DNA, 16 bp, Homo sapiens
  source 1..16: mol_type = genomic DNA
cgaaaggttggtggtt

SEQ ID NO: 35417 - DNA, 18 bp, Homo sapiens
  source 1..18: mol_type = genomic DNA
cgaaaggttggtggttcg

SEQ ID NO: 35418 - DNA, 34 bp, Homo sapiens; identical to SEQ ID NO: 11656
  source 1..34: mol_type = genomic DNA

SEQ ID NO: 35419 - DNA, 35 bp, Homo sapiens; identical to SEQ ID NO: 11657
  source 1..35: mol_type = genomic DNA

SEQ ID NO: 35420 - DNA, 36 bp, Homo sapiens; identical to SEQ ID NO: 11658
  source 1..36: mol_type = genomic DNA

SEQ ID NO: 35421 - DNA, 37 bp, Homo sapiens; identical to SEQ ID NO: 11659
  source 1..37: mol_type = genomic DNA

SEQ ID NO: 35422 - DNA, 36 bp, Homo sapiens; identical to SEQ ID NO: 11660
  source 1..36: mol_type = genomic DNA

SEQ ID NO: 35423 - DNA, 20 bp, Homo sapiens
  source 1..20: mol_type = genomic DNA
cgaaccccactcctggtacc

SEQ ID NO: 35424 - DNA, 20 bp, Homo sapiens
  source 1..20: mol_type = genomic DNA
cgaaccccgtacgggccacc

SEQ ID NO: 35425 - DNA, 18 bp, Homo sapiens
  source 1..18: mol_type = genomic DNA
cgaaccccgtccgtgcct

SEQ ID NO: 35426 - DNA, 19 bp, Homo sapiens
  source 1..19: mol_type = genomic DNA
cgaaccccgtccgtgcctc

SEQ ID NO: 35427 - DNA, 20 bp, Homo sapiens
  source 1..20: mol_type = genomic DNA
cgaaccccgtccgtgcctcc

SEQ ID NO: 35428 - DNA, 20 bp, Homo sapiens
  source 1..20: mol_type = genomic DNA
cgaaccctgctcgctgcgcc

SEQ ID NO: 35429 - DNA, 21 bp, Homo sapiens
  source 1..21: mol_type = genomic DNA
cgaagaagcagcttcaaacct

SEQ ID NO: 35430 - DNA, 27 bp, Homo sapiens
  source 1..27: mol_type = genomic DNA
cgaagaagcagcttcaaacctgccggg

SEQ ID NO: 35431 - DNA, 28 bp, Homo sapiens
  source 1..28: mol_type = genomic DNA
cgaagaagcagcttcaaacctgccgggg

SEQ ID NO: 35432 - DNA, 29 bp, Homo sapiens
  source 1..29: mol_type = genomic DNA
cgaagaagcagcttcaaacctgccggggc

SEQ ID NO: 35433 - DNA, 30 bp, Homo sapiens; identical to SEQ ID NO: 11673
  source 1..30: mol_type = genomic DNA

SEQ ID NO: 35434 - DNA, 31 bp, Homo sapiens; identical to SEQ ID NO: 11674
  source 1..31: mol_type = genomic DNA

SEQ ID NO: 35435 - DNA, 32 bp, Homo sapiens; identical to SEQ ID NO: 11675
  source 1..32: mol_type = genomic DNA

SEQ ID NO: 35436 - DNA, 33 bp, Homo sapiens; identical to SEQ ID NO: 11676
  source 1..33: mol_type = genomic DNA

SEQ ID NO: 35437 - DNA, 34 bp, Homo sapiens; identical to SEQ ID NO: 11677
  source 1..34: mol_type = genomic DNA

SEQ ID NO: 35438 - DNA, 33 bp, Homo sapiens; identical to SEQ ID NO: 11681
  source 1..33: mol_type = genomic DNA

SEQ ID NO: 35439 - DNA, 34 bp, Homo sapiens; identical to SEQ ID NO: 11682
  source 1..34: mol_type = genomic DNA

SEQ ID NO: 35440 - DNA, 16 bp, Homo sapiens
  source 1..16: mol_type = genomic DNA
cgaagatcgcgggttc

SEQ ID NO: 35441 - DNA, 33 bp, Homo sapiens; identical to SEQ ID NO: 11687
  source 1..33: mol_type = genomic DNA

SEQ ID NO: 35442 - DNA, 17 bp, Homo sapiens
  source 1..17: mol_type = genomic DNA
cgaatcacgtcggggtc

SEQ ID NO: 35443 - DNA, 18 bp, Homo sapiens
  source 1..18: mol_type = genomic DNA
cgaatcacgtcggggtca

SEQ ID NO: 35444 - DNA, 19 bp, Homo sapiens
  source 1..19: mol_type = genomic DNA
cgaatcacgtcggggtcac

SEQ ID NO: 35445 - DNA, 20 bp, Homo sapiens
  source 1..20: mol_type = genomic DNA
cgaatcacgtcggggtcacc

SEQ ID NO: 35446 - DNA, 21 bp, Homo sapiens
  source 1..21: mol_type = genomic DNA
cgaatcacgtcggggtcacca

SEQ ID NO: 35447 - DNA, 20 bp, Homo sapiens
  source 1..20: mol_type = genomic DNA
cgaatcccaccactgccacc

SEQ ID NO: 35448 - DNA, 20 bp, Homo sapiens
  source 1..20: mol_type = genomic DNA
cgaatcccaccagagtcgcc

SEQ ID NO: 35449 - DNA, 20 bp, Homo sapiens
  source 1..20: mol_type = genomic DNA
cgaatcccaccctcgtcgcc

SEQ ID NO: 35450 - DNA, 17 bp, Homo sapiens
  source 1..17: mol_type = genomic DNA
cgaatcccaccgctgcc

SEQ ID NO: 35451 - DNA, 18 bp, Homo sapiens
  source 1..18: mol_type = genomic DNA
cgaatcccaccgctgcca

SEQ ID NO: 35452 - DNA, 19 bp, Homo sapiens
  source 1..19: mol_type = genomic DNA
cgaatcccaccgctgccac

SEQ ID NO: 35453 - DNA, 20 bp, Homo sapiens
  source 1..20: mol_type = genomic DNA
cgaatcccaccgctgccacc

SEQ ID NO: 35454 - DNA, 20 bp, Homo sapiens
  source 1..20: mol_type = genomic DNA
cgaatcccaccttcgtcgcc

SEQ ID NO: 35455 - DNA, 18 bp, Homo sapiens
  source 1..18: mol_type = genomic DNA
cgaatcccactcctgaca

SEQ ID NO: 35456 - DNA, 19 bp, Homo sapiens
  source 1..19: mol_type = genomic DNA
cgaatcccactcctgacac

SEQ ID NO: 35457 - DNA, 20 bp, Homo sapiens
  source 1..20: mol_type = genomic DNA
cgaatcccactcctgacacc

SEQ ID NO: 35458 - DNA, 18 bp, Homo sapiens
  source 1..18: mol_type = genomic DNA
cgaatcccacttctgaca

SEQ ID NO: 35459 - DNA, 19 bp, Homo sapiens
  source 1..19: mol_type = genomic DNA
cgaatcccacttctgacac

SEQ ID NO: 35460 - DNA, 20 bp, Homo sapiens
  source 1..20: mol_type = genomic DNA
cgaatcccacttctgacacc

SEQ ID NO: 35461 - DNA, 18 bp, Homo sapiens
  source 1..18: mol_type = genomic DNA
cgaatcccagcggggcct

SEQ ID NO: 35462 - DNA, 19 bp, Homo sapiens
  source 1..19: mol_type = genomic DNA
cgaatcccagcggggcctc

SEQ ID NO: 35463 - DNA, 20 bp, Homo sapiens
  source 1..20: mol_type = genomic DNA
cgaatcccagcggggcctcc

SEQ ID NO: 35464 - DNA, 18 bp, Homo sapiens
  source 1..18: mol_type = genomic DNA
cgaatcccagcggtgcct

SEQ ID NO: 35465 - DNA, 19 bp, Homo sapiens
  source 1..19: mol_type = genomic DNA
cgaatcccagcggtgcctc

SEQ ID NO: 35466 - DNA, 20 bp, Homo sapiens
  source 1..20: mol_type = genomic DNA
cgaatcccagcggtgcctcc

SEQ ID NO: 35467 - DNA, 18 bp, Homo sapiens
  source 1..18: mol_type = genomic DNA
cgaatcccagtagagcct

SEQ ID NO: 35468 - DNA, 19 bp, Homo sapiens
  source 1..19: mol_type = genomic DNA
cgaatcccagtagagcctc

SEQ ID NO: 35469 - DNA, 20 bp, Homo sapiens
  source 1..20: mol_type = genomic DNA
cgaatcccagtagagcctcc

SEQ ID NO: 35470 - DNA, 18 bp, Homo sapiens
  source 1..18: mol_type = genomic DNA
cgaatcccatcctcgtcg

SEQ ID NO: 35471 - DNA, 19 bp, Homo sapiens
  source 1..19: mol_type = genomic DNA
cgaatcccatcctcgtcgc

SEQ ID NO: 35472 - DNA, 20 bp, Homo sapiens
  source 1..20: mol_type = genomic DNA
cgaatcccatcctcgtcgcc

SEQ ID NO: 35473 - DNA, 21 bp, Homo sapiens
  source 1..21: mol_type = genomic DNA
cgaatcccatcctcgtcgcca

SEQ ID NO: 35474 - DNA, 19 bp, Homo sapiens
  source 1..19: mol_type = genomic DNA
cgaatcccttcgtggttgc

SEQ ID NO: 35475 - DNA, 17 bp, Homo sapiens
  source 1..17: mol_type = genomic DNA
cgaatccgagtcacggc

SEQ ID NO: 35476 - DNA, 18 bp, Homo sapiens
  source 1..18: mol_type = genomic DNA
cgaatccgagtcacggca

SEQ ID NO: 35477 - DNA, 19 bp, Homo sapiens
  source 1..19: mol_type = genomic DNA
cgaatccgagtcacggcac

SEQ ID NO: 35478 - DNA, 20 bp, Homo sapiens
  source 1..20: mol_type = genomic DNA
cgaatccgagtcacggcacc

SEQ ID NO: 35479 - DNA, 21 bp, Homo sapiens
  source 1..21: mol_type = genomic DNA
cgaatccgagtcacggcacca

SEQ ID NO: 35480 - DNA, 18 bp, Homo sapiens
  source 1..18: mol_type = genomic DNA
cgaatccggctcgaagga

SEQ ID NO: 35481 - DNA, 19 bp, Homo sapiens
  source 1..19: mol_type = genomic DNA
cgaatccggctcgaaggac

SEQ ID NO: 35482 - DNA, 20 bp, Homo sapiens
  source 1..20: mol_type = genomic DNA
cgaatccggctcgaaggacc

SEQ ID NO: 35483 - DNA, 19 bp, Homo sapiens
  source 1..19: mol_type = genomic DNA
cgaatccggctcggaggac

SEQ ID NO: 35484 - DNA, 20 bp, Homo sapiens
  source 1..20: mol_type = genomic DNA
cgaatccggctcggaggacc

SEQ ID NO: 35485 - DNA, 19 bp, Homo sapiens
  source 1..19: mol_type = genomic DNA
cgaatcctgccgactacgc

SEQ ID NO: 35486 - DNA, 20 bp, Homo sapiens
  source 1..20: mol_type = genomic DNA
cgaatcctgccgactacgcc

SEQ ID NO: 35487 - DNA, 20 bp, Homo sapiens
  source 1..20: mol_type = genomic DNA
cgaatcctgctcacagcgcc

SEQ ID NO: 35488 - DNA, 20 bp, Homo sapiens
  source 1..20: mol_type = genomic DNA
cgaatcctgtcggctacgcc

SEQ ID NO: 35489 - DNA, 18 bp, Homo sapiens
  source 1..18: mol_type = genomic DNA
cgaatcctgttcgtgacg

SEQ ID NO: 35490 - DNA, 19 bp, Homo sapiens
  source 1..19: mol_type = genomic DNA
cgaatcctgttcgtgacgc

SEQ ID NO: 35491 - DNA, 20 bp, Homo sapiens
  source 1..20: mol_type = genomic DNA
cgaatcctgttcgtgacgcc

SEQ ID NO: 35492 - DNA, 18 bp, Homo sapiens
  source 1..18: mol_type = genomic DNA
cgaatctcggtgggacct

SEQ ID NO: 35493 - DNA, 19 bp, Homo sapiens
  source 1..19: mol_type = genomic DNA
cgaatctcggtgggacctc

SEQ ID NO: 35494 - DNA, 18 bp, Homo sapiens
  source 1..18: mol_type = genomic DNA
cgaccccttatttacccc

SEQ ID NO: 35495 - DNA, 19 bp, Homo sapiens
  source 1..19: mol_type = genomic DNA
cgaccccttatttacccca

SEQ ID NO: 35496 - DNA, 18 bp, Homo sapiens
  source 1..18: mol_type = genomic DNA
cgactcccggtatgggaa

SEQ ID NO: 35497 - DNA, 19 bp, Homo sapiens
  source 1..19: mol_type = genomic DNA
cgactcccggtatgggaac

SEQ ID NO: 35498 - DNA, 20 bp, Homo sapiens
  source 1..20: mol_type = genomic DNA
cgactcccggtatgggaacc

SEQ ID NO: 35499 - DNA, 16 bp, Homo sapiens
  source 1..16: mol_type = genomic DNA
cgactcccggtgtggg

SEQ ID NO: 35500 - DNA, 17 bp, Homo sapiens
  source 1..17: mol_type = genomic DNA
cgactcccggtgtggga

SEQ ID NO: 35501 - DNA, 18 bp, Homo sapiens
  source 1..18: mol_type = genomic DNA
cgactcccggtgtgggaa

SEQ ID NO: 35502 - DNA, 19 bp, Homo sapiens
  source 1..19: mol_type = genomic DNA
cgactcccggtgtgggaac

SEQ ID NO: 35503 - DNA, 20 bp, Homo sapiens
  source 1..20: mol_type = genomic DNA
cgactcccggtgtgggaacc

SEQ ID NO: 35504 - DNA, 21 bp, Homo sapiens
  source 1..21: mol_type = genomic DNA
cgactcccggtgtgggaacca

SEQ ID NO: 35505 - DNA, 17 bp, Homo sapiens
  source 1..17: mol_type = genomic DNA
cgactcctggctggctc

SEQ ID NO: 35506 - DNA, 18 bp, Homo sapiens
  source 1..18: mol_type = genomic DNA
cgactcctggctggctcg

SEQ ID NO: 35507 - DNA, 19 bp, Homo sapiens
  source 1..19: mol_type = genomic DNA
cgactcctggctggctcgc

SEQ ID NO: 35508 - DNA, 20 bp, Homo sapiens
  source 1..20: mol_type = genomic DNA
cgactcctggctggctcgcc

SEQ ID NO: 35509 - DNA, 21 bp, Homo sapiens
  source 1..21: mol_type = genomic DNA
cgactcctggctggctcgcca

SEQ ID NO: 35510 - DNA, 32 bp, Homo sapiens; identical to SEQ ID NO: 11786
  source 1..32: mol_type = genomic DNA

SEQ ID NO: 35511 - DNA, 33 bp, Homo sapiens; identical to SEQ ID NO: 11787
  source 1..33: mol_type = genomic DNA

SEQ ID NO: 35512 - DNA, 34 bp, Homo sapiens; identical to SEQ ID NO: 11788
  source 1..34: mol_type = genomic DNA

SEQ ID NO: 35513 - DNA, 35 bp, Homo sapiens; identical to SEQ ID NO: 11789
  source 1..35: mol_type = genomic DNA

SEQ ID NO: 35514 - DNA, 36 bp, Homo sapiens; identical to SEQ ID NO: 11790
  source 1..36: mol_type = genomic DNA

SEQ ID NO: 35515 - DNA, 37 bp, Homo sapiens; identical to SEQ ID NO: 11791
  source 1..37: mol_type = genomic DNA

SEQ ID NO: 35516 - DNA, 20 bp, Homo sapiens
  source 1..20: mol_type = genomic DNA
cgagcccacccagggacgcc

SEQ ID NO: 35517 - DNA, 18 bp, Homo sapiens
  source 1..18: mol_type = genomic DNA
cgagccccacgttgggcg

SEQ ID NO: 35518 - DNA, 19 bp, Homo sapiens
  source 1..19: mol_type = genomic DNA
cgagccccacgttgggcgc

SEQ ID NO: 35519 - DNA, 20 bp, Homo sapiens
  source 1..20: mol_type = genomic DNA
cgagccccacgttgggcgcc

SEQ ID NO: 35520 - DNA, 17 bp, Homo sapiens
  source 1..17: mol_type = genomic DNA
cgagccccagtggaacc

SEQ ID NO: 35521 - DNA, 18 bp, Homo sapiens
  source 1..18: mol_type = genomic DNA
cgagccccagtggaacca

SEQ ID NO: 35522 - DNA, 19 bp, Homo sapiens
  source 1..19: mol_type = genomic DNA
cgagccccagtggaaccac

SEQ ID NO: 35523 - DNA, 20 bp, Homo sapiens
  source 1..20: mol_type = genomic DNA
cgagccccagtggaaccacc

SEQ ID NO: 35524 - DNA, 18 bp, Homo sapiens
  source 1..18: mol_type = genomic DNA
cgagcctcacacggggca

SEQ ID NO: 35525 - DNA, 20 bp, Homo sapiens
  source 1..20: mol_type = genomic DNA
cgagcctcacctggagcacc

SEQ ID NO: 35526 - DNA, 18 bp, Homo sapiens
  source 1..18: mol_type = genomic DNA
cgagcctcagagagggca

SEQ ID NO: 35527 - DNA, 16 bp, Homo sapiens
  source 1..16: mol_type = genomic DNA
cgaggccccgggttca

SEQ ID NO: 35528 - DNA, 33 bp, Homo sapiens
  source 1..33: mol_type = genomic DNA
cgaggccccgggttcaatccccggcacctccac

SEQ ID NO: 35529 - DNA, 34 bp, Homo sapiens
  source 1..34: mol_type = genomic DNA
cgaggccccgggttcaatccccggcacctccacc

SEQ ID NO: 35530 - DNA, 24 bp, Homo sapiens
  source 1..24: mol_type = genomic DNA
cgaggtgattttcatattgaattg

SEQ ID NO: 35531 - DNA, 16 bp, Homo sapiens
  source 1..16: mol_type = genomic DNA
cgaggtggccgagtgg

SEQ ID NO: 35532 - DNA, 22 bp, Homo sapiens
  source 1..22: mol_type = genomic DNA
cgaggtggccgagtggttaagg

SEQ ID NO: 35533 - DNA, 16 bp, Homo sapiens
  source 1..16: mol_type = genomic DNA
cgagtcccacccgggg

SEQ ID NO: 35534 - DNA, 20 bp, Homo sapiens
  source 1..20: mol_type = genomic DNA
cgagtcccatctgggtcgcc

SEQ ID NO: 35535 - DNA, 18 bp, Homo sapiens
  source 1..18: mol_type = genomic DNA
cgagtcccggcggagtcg

SEQ ID NO: 35536 - DNA, 20 bp, Homo sapiens
  source 1..20: mol_type = genomic DNA
cgagtcccggcggagtcgcc

SEQ ID NO: 35537 - DNA, 19 bp, Homo sapiens
  source 1..19: mol_type = genomic DNA
cgagtcctgccgcggtcgc

SEQ ID NO: 35538 - DNA, 20 bp, Homo sapiens
  source 1..20: mol_type = genomic DNA
cgagtcctgccgcggtcgcc

SEQ ID NO: 35539 - DNA, 17 bp, Homo sapiens
  source 1..17: mol_type = genomic DNA
cgagtggtctaaggcgc

SEQ ID NO: 35540 - DNA, 25 bp, Homo sapiens
  source 1..25: mol_type = genomic DNA
cgagttcaaatctcgctggggcctc

SEQ ID NO: 35541 - DNA, 24 bp, Homo sapiens
  source 1..24: mol_type = genomic DNA
cgagttcaaatctcggtggaacct

SEQ ID NO: 35542 - DNA, 25 bp, Homo sapiens
  source 1..25: mol_type = genomic DNA
cgagttcaaatctcggtggaacctc

SEQ ID NO: 35543 - DNA, 26 bp, Homo sapiens
  source 1..26: mol_type = genomic DNA
cgagttcaaatctcggtggaacctcc

SEQ ID NO: 35544 - DNA, 24 bp, Homo sapiens
  source 1..24: mol_type = genomic DNA
cgagttcaaatctcggtgggacct

SEQ ID NO: 35545 - DNA, 25 bp, Homo sapiens
  source 1..25: mol_type = genomic DNA
cgagttcaaatctcggtgggacctc

SEQ ID NO: 35546 - DNA, 26 bp, Homo sapiens
  source 1..26: mol_type = genomic DNA
cgagttcaaatctcggtgggacctcc

SEQ ID NO: 35547 - DNA, 24 bp, Homo sapiens
  source 1..24: mol_type = genomic DNA
cgagttcgaatctcggtgggacct

SEQ ID NO: 35548 - DNA, 25 bp, Homo sapiens
  source 1..25: mol_type = genomic DNA
cgagttcgaatctcggtgggacctc

SEQ ID NO: 35549 - DNA, 25 bp, Homo sapiens
  source 1..25: mol_type = genomic DNA
cgagttcgatcctcgctggggcctc

SEQ ID NO: 35550 - DNA, 19 bp, Homo sapiens
  source 1..19: mol_type = genomic DNA
cgatccccagcatctccac

SEQ ID NO: 35551 - DNA, 20 bp, Homo sapiens
  source 1..20: mol_type = genomic DNA
cgatccccagcatctccacc

SEQ ID NO: 35552 - DNA, 19 bp, Homo sapiens
  source 1..19: mol_type = genomic DNA
cgatccccggcatctccac

SEQ ID NO: 35553 - DNA, 20 bp, Homo sapiens
  source 1..20: mol_type = genomic DNA
cgatccccggcatctccacc

SEQ ID NO: 35554 - DNA, 16 bp, Homo sapiens
  source 1..16: mol_type = genomic DNA
cgatccccgtacgggc

SEQ ID NO: 35555 - DNA, 17 bp, Homo sapiens
  source 1..17: mol_type = genomic DNA
cgatccccgtacgggcc

SEQ ID NO: 35556 - DNA, 18 bp, Homo sapiens
  source 1..18: mol_type = genomic DNA
cgatccccgtacgggcca

SEQ ID NO: 35557 - DNA, 19 bp, Homo sapiens
  source 1..19: mol_type = genomic DNA
cgatccccgtacgggccac

SEQ ID NO: 35558 - DNA, 20 bp, Homo sapiens
  source 1..20: mol_type = genomic DNA
cgatccccgtacgggccacc

SEQ ID NO: 35559 - DNA, 19 bp, Homo sapiens
  source 1..19: mol_type = genomic DNA
cgatcccgggcggaaacac

SEQ ID NO: 35560 - DNA, 17 bp, Homo sapiens
  source 1..17: mol_type = genomic DNA
cgatcccgggtttcggc

SEQ ID NO: 35561 - DNA, 18 bp, Homo sapiens
  source 1..18: mol_type = genomic DNA
cgatcccgggtttcggca

SEQ ID NO: 35562 - DNA, 19 bp, Homo sapiens
  source 1..19: mol_type = genomic DNA
cgatcccgggtttcggcac

SEQ ID NO: 35563 - DNA, 20 bp, Homo sapiens
  source 1..20: mol_type = genomic DNA
cgatcccgggtttcggcacc

SEQ ID NO: 35564 - DNA, 30 bp, Homo sapiens
  source 1..30: mol_type = genomic DNA
cgatccgagttcaaatctcggtggaacctc

SEQ ID NO: 35565 - DNA, 29 bp, Homo sapiens
  source 1..29: mol_type = genomic DNA
cgatccgagttcaaatctcggtgggacct

SEQ ID NO: 35566 - DNA, 30 bp, Homo sapiens; identical to SEQ ID NO: 11877
  source 1..30: mol_type = genomic DNA

SEQ ID NO: 35567 - DNA, 20 bp, Homo sapiens
  source 1..20: mol_type = genomic DNA
cgatcctcacacggggcacc

SEQ ID NO: 35568 - DNA, 19 bp, Homo sapiens
  source 1..19: mol_type = genomic DNA
cgatcctcacctggagcac

SEQ ID NO: 35569 - DNA, 20 bp, Homo sapiens
  source 1..20: mol_type = genomic DNA
cgatcctcacctggagcacc

SEQ ID NO: 35570 - DNA, 19 bp, Homo sapiens
  source 1..19: mol_type = genomic DNA
cgatcctcgctggggcctc

SEQ ID NO: 35571 - DNA, 20 bp, Homo sapiens
  source 1..20: mol_type = genomic DNA
cgatgcccgcatcctccacc

SEQ ID NO: 35572 - DNA, 20 bp, Homo sapiens
  source 1..20: mol_type = genomic DNA
cgatgcccgcattctccacc

SEQ ID NO: 35573 - DNA, 28 bp, Homo sapiens
  source 1..28: mol_type = genomic DNA
cgatggatcgaaaccatcctctgctacc

SEQ ID NO: 35574 - DNA, 29 bp, Homo sapiens
  source 1..29: mol_type = genomic DNA
cgatggatcgaaaccatcctctgctacca

SEQ ID NO: 35575 - DNA, 34 bp, Homo sapiens
  source 1..34: mol_type = genomic DNA
cgatggcgtgggttcgaatcccaccgctgccacc

SEQ ID NO: 35576 - DNA, 19 bp, Homo sapiens
  source 1..19: mol_type = genomic DNA
cgattccagctcgaaggac

SEQ ID NO: 35577 - DNA, 18 bp, Homo sapiens
  source 1..18: mol_type = genomic DNA
cgattccccgacggggag

SEQ ID NO: 35578 - DNA, 19 bp, Homo sapiens
  source 1..19: mol_type = genomic DNA
cgattccccgacggggagc

SEQ ID NO: 35579 - DNA, 20 bp, Homo sapiens
  source 1..20: mol_type = genomic DNA
cgattccccgacggggagcc

SEQ ID NO: 35580 - DNA, 21 bp, Homo sapiens
  source 1..21: mol_type = genomic DNA
cgattccccgacggggagcca

SEQ ID NO: 35581 - DNA, 16 bp, Homo sapiens
  source 1..16: mol_type = genomic DNA
cgattcccggccaacg

SEQ ID NO: 35582 - DNA, 18 bp, Homo sapiens
  source 1..18: mol_type = genomic DNA
cgattcccggccaacgca

SEQ ID NO: 35583 - DNA, 19 bp, Homo sapiens
  source 1..19: mol_type = genomic DNA
cgattcccggccaacgcac

SEQ ID NO: 35584 - DNA, 20 bp, Homo sapiens
  source 1..20: mol_type = genomic DNA
cgattcccggccaacgcacc

SEQ ID NO: 35585 - DNA, 21 bp, Homo sapiens
  source 1..21: mol_type = genomic DNA
cgattcccggccaacgcacca

SEQ ID NO: 35586 - DNA, 18 bp, Homo sapiens
  source 1..18: mol_type = genomic DNA
cgattcccggccaatgca

SEQ ID NO: 35587 - DNA, 19 bp, Homo sapiens
  source 1..19: mol_type = genomic DNA
cgattcccggccaatgcac

SEQ ID NO: 35588 - DNA, 20 bp, Homo sapiens
  source 1..20: mol_type = genomic DNA
cgattcccggccaatgcacc

SEQ ID NO: 35589 - DNA, 21 bp, Homo sapiens
  source 1..21: mol_type = genomic DNA
cgattcccggccaatgcacca

SEQ ID NO: 35590 - DNA, 20 bp, Homo sapiens
  source 1..20: mol_type = genomic DNA
cgattcccggcccatgcacc

SEQ ID NO: 35591 - DNA, 16 bp, Homo sapiens
  source 1..16: mol_type = genomic DNA
cgattcccgggcggcg

SEQ ID NO: 35592 - DNA, 17 bp, Homo sapiens
  source 1..17: mol_type = genomic DNA
cgattcccgggcggcgc

SEQ ID NO: 35593 - DNA, 18 bp, Homo sapiens
  source 1..18: mol_type = genomic DNA
cgattcccgggcggcgca

SEQ ID NO: 35594 - DNA, 19 bp, Homo sapiens
  source 1..19: mol_type = genomic DNA
cgattcccgggcggcgcac

SEQ ID NO: 35595 - DNA, 20 bp, Homo sapiens
  source 1..20: mol_type = genomic DNA
cgattcccgggcggcgcacc

SEQ ID NO: 35596 - DNA, 16 bp, Homo sapiens
  source 1..16: mol_type = genomic DNA
cgattcccggtcaggg

SEQ ID NO: 35597 - DNA, 18 bp, Homo sapiens
  source 1..18: mol_type = genomic DNA
cgattcccggtcagggaa

SEQ ID NO: 35598 - DNA, 19 bp, Homo sapiens
  source 1..19: mol_type = genomic DNA
cgattcccggtcagggaac

SEQ ID NO: 35599 - DNA, 20 bp, Homo sapiens
  source 1..20: mol_type = genomic DNA
cgattcccggtcagggaacc

SEQ ID NO: 35600 - DNA, 19 bp, Homo sapiens
  source 1..19: mol_type = genomic DNA
cgattccggctcgaaggac

SEQ ID NO: 35601 - DNA, 20 bp, Homo sapiens
  source 1..20: mol_type = genomic DNA
cgattccggctcgaaggacc

SEQ ID NO: 35602 - DNA, 21 bp, Homo sapiens
  source 1..21: mol_type = genomic DNA
cgattccggctcgaaggacca

SEQ ID NO: 35603 - DNA, 20 bp, Homo sapiens
  source 1..20: mol_type = genomic DNA
cgattctcatagtcctagcc

SEQ ID NO: 35604 - DNA, 21 bp, Homo sapiens
  source 1..21: mol_type = genomic DNA
cgattctcatagtcctagcca

SEQ ID NO: 35605 - DNA, 22 bp, Homo sapiens
  source 1..22: mol_type = genomic DNA
cgcaacggtagcgcgtctgact

SEQ ID NO: 35606 - DNA, 23 bp, Homo sapiens
  source 1..23: mol_type = genomic DNA
cgcaatggataacgcgtctgact

SEQ ID NO: 35607 - DNA, 17 bp, Homo sapiens
  source 1..17: mol_type = genomic DNA
cgcaatggatagcgcat

SEQ ID NO: 35608 - DNA, 25 bp, Homo sapiens
  source 1..25: mol_type = genomic DNA
cgcaatggatagcgcattggacttc

SEQ ID NO: 35609 - DNA, 22 bp, Homo sapiens
  source 1..22: mol_type = genomic DNA
cgcaatggtagcgcgtctgact

SEQ ID NO: 35610 - DNA, 16 bp, Homo sapiens
  source 1..16: mol_type = genomic DNA
cgcacgttgggcgcca

SEQ ID NO: 35611 - DNA, 19 bp, Homo sapiens
  source 1..19: mol_type = genomic DNA
cgcagaaggtcctgggttc

SEQ ID NO: 35612 - DNA, 28 bp, Homo sapiens
  source 1..28: mol_type = genomic DNA
cgcagaaggtcctgggttcgagccccag

SEQ ID NO: 35613 - DNA, 35 bp, Homo sapiens; identical to SEQ ID NO: 11952
  source 1..35: mol_type = genomic DNA

SEQ ID NO: 35614 - DNA, 36 bp, Homo sapiens; identical to SEQ ID NO: 11953
  source 1..36: mol_type = genomic DNA

SEQ ID NO: 35615 - DNA, 37 bp, Homo sapiens; identical to SEQ ID NO: 11954
  source 1..37: mol_type = genomic DNA

SEQ ID NO: 35616 - DNA, 38 bp, Homo sapiens; identical to SEQ ID NO: 11955
  source 1..38: mol_type = genomic DNA

SEQ ID NO: 35617 - DNA, 39 bp, Homo sapiens; identical to SEQ ID NO: 11956
  source 1..39: mol_type = genomic DNA

SEQ ID NO: 35618 - DNA, 18 bp, Homo sapiens
  source 1..18: mol_type = genomic DNA
cgcagcaacctcggttcg

SEQ ID NO: 35619 - DNA, 31 bp, Homo sapiens; identical to SEQ ID NO: 11962
  source 1..31: mol_type = genomic DNA

SEQ ID NO: 35620 - DNA, 32 bp, Homo sapiens; identical to SEQ ID NO: 11963
  source 1..32: mol_type = genomic DNA

SEQ ID NO: 35621 - DNA, 33 bp, Homo sapiens; identical to SEQ ID NO: 11964
  source 1..33: mol_type = genomic DNA

SEQ ID NO: 35622 - DNA, 34 bp, Homo sapiens; identical to SEQ ID NO: 11965
  source 1..34: mol_type = genomic DNA

SEQ ID NO: 35623 - DNA, 35 bp, Homo sapiens; identical to SEQ ID NO: 11966
  source 1..35: mol_type = genomic DNA

SEQ ID NO: 35624 - DNA, 36 bp, Homo sapiens; identical to SEQ ID NO: 11967
  source 1..36: mol_type = genomic DNA

SEQ ID NO: 35625 - DNA, 37 bp, Homo sapiens; identical to SEQ ID NO: 11968
  source 1..37: mol_type = genomic DNA

SEQ ID NO: 35626 - DNA, 21 bp, Homo sapiens
  source 1..21: mol_type = genomic DNA
cgcagcggaagcgtgctgggc

SEQ ID NO: 35627 - DNA, 16 bp, Homo sapiens
  source 1..16: mol_type = genomic DNA
cgcaggttcgaatcct

SEQ ID NO: 35628 - DNA, 17 bp, Homo sapiens
  source 1..17: mol_type = genomic DNA
cgcaggttcgaatcctg

SEQ ID NO: 35629 - DNA, 31 bp, Homo sapiens
  source 1..31: mol_type = genomic DNA
cgcatgggtggttcagtggtagaattctcgc

SEQ ID NO: 35630 - DNA, 32 bp, Homo sapiens; identical to SEQ ID NO: 11998
  source 1..32: mol_type = genomic DNA

SEQ ID NO: 35631 - DNA, 33 bp, Homo sapiens; identical to SEQ ID NO: 11999
  source 1..33: mol_type = genomic DNA

SEQ ID NO: 35632 - DNA, 17 bp, Homo sapiens
  source 1..17: mol_type = genomic DNA
cgcattggacttctaat

SEQ ID NO: 35633 - DNA, 16 bp, Homo sapiens
  source 1..16: mol_type = genomic DNA
cgcattggtggttcag

SEQ ID NO: 35634 - DNA, 19 bp, Homo sapiens
  source 1..19: mol_type = genomic DNA
cgcattggtggttcagtgg

SEQ ID NO: 35635 - DNA, 31 bp, Homo sapiens; identical to SEQ ID NO: 12010
  source 1..31: mol_type = genomic DNA

SEQ ID NO: 35636 - DNA, 32 bp, Homo sapiens; identical to SEQ ID NO: 12011
  source 1..32: mol_type = genomic DNA

SEQ ID NO: 35637 - DNA, 33 bp, Homo sapiens; identical to SEQ ID NO: 12012
  source 1..33: mol_type = genomic DNA

SEQ ID NO: 35638 - DNA, 35 bp, Homo sapiens; identical to SEQ ID NO: 12014
  source 1..35: mol_type = genomic DNA

SEQ ID NO: 35639 - DNA, 16 bp, Homo sapiens
  source 1..16: mol_type = genomic DNA
cgccaaggtcgcgggt

SEQ ID NO: 35640 - DNA, 17 bp, Homo sapiens
  source 1..17: mol_type = genomic DNA
cgccaaggtcgcgggtt

SEQ ID NO: 35641 - DNA, 18 bp, Homo sapiens
  source 1..18: mol_type = genomic DNA
cgccaaggtcgcgggttc

SEQ ID NO: 35642 - DNA, 37 bp, Homo sapiens; identical to SEQ ID NO: 12023
  source 1..37: mol_type = genomic DNA

SEQ ID NO: 35643 - DNA, 32 bp, Homo sapiens; identical to SEQ ID NO: 12027
  source 1..32: mol_type = genomic DNA

SEQ ID NO: 35644 - DNA, 33 bp, Homo sapiens; identical to SEQ ID NO: 12028
  source 1..33: mol_type = genomic DNA

SEQ ID NO: 35645 - DNA, 36 bp, Homo sapiens
  source 1..36: mol_type = genomic DNA
cgccaaggtcgcgggttcgatccccgtacgggccac

SEQ ID NO: 35646 - DNA, 37 bp, Homo sapiens; identical to SEQ ID NO: 12030
  source 1..37: mol_type = genomic DNA

SEQ ID NO: 35647 - DNA, 33 bp, Homo sapiens; identical to SEQ ID NO: 12041
  source 1..33: mol_type = genomic DNA

SEQ ID NO: 35648 - DNA, 34 bp, Homo sapiens; identical to SEQ ID NO: 12048
  source 1..34: mol_type = genomic DNA

SEQ ID NO: 35649 - DNA, 34 bp, Homo sapiens; identical to SEQ ID NO: 12054
  source 1..34: mol_type = genomic DNA

SEQ ID NO: 35650 - DNA, 36 bp, Homo sapiens; identical to SEQ ID NO: 12056
  source 1..36: mol_type = genomic DNA

SEQ ID NO: 35651 - DNA, 37 bp, Homo sapiens; identical to SEQ ID NO: 12057
  source 1..37: mol_type = genomic DNA

SEQ ID NO: 35652 - DNA, 16 bp, Homo sapiens
  source 1..16: mol_type = genomic DNA
cgccgcggcccgggtt

SEQ ID NO: 35653 - DNA, 34 bp, Homo sapiens
  source 1..34: mol_type = genomic DNA
cgccgcggcccgggttcgattcccggccagggaa

SEQ ID NO: 35654 - DNA, 35 bp, Homo sapiens
  source 1..35: mol_type = genomic DNA
cgccgcggcccgggttcgattcccggccagggaac

SEQ ID NO: 35655 - DNA, 27 bp, Homo sapiens
  source 1..27: mol_type = genomic DNA
cgccgcggcccgggttcgattcccggt

SEQ ID NO: 35656 - DNA, 28 bp, Homo sapiens
  source 1..28: mol_type = genomic DNA
cgccgcggcccgggttcgattcccggtc

SEQ ID NO: 35657 - DNA, 29 bp, Homo sapiens
  source 1..29: mol_type = genomic DNA
cgccgcggcccgggttcgattcccggtca

SEQ ID NO: 35658 - DNA, 30 bp, Homo sapiens; identical to SEQ ID NO: 12073
  source 1..30: mol_type = genomic DNA

SEQ ID NO: 35659 - DNA, 31 bp, Homo sapiens; identical to SEQ ID NO: 12074
  source 1..31: mol_type = genomic DNA

SEQ ID NO: 35660 - DNA, 32 bp, Homo sapiens; identical to SEQ ID NO: 12076
  source 1..32: mol_type = genomic DNA

SEQ ID NO: 35661 - DNA, 33 bp, Homo sapiens; identical to SEQ ID NO: 12077
  source 1..33: mol_type = genomic DNA

SEQ ID NO: 35662 - DNA, 34 bp, Homo sapiens; identical to SEQ ID NO: 12078
  source 1..34: mol_type = genomic DNA

SEQ ID NO: 35663 - DNA, 35 bp, Homo sapiens; identical to SEQ ID NO: 12079
  source 1..35: mol_type = genomic DNA

SEQ ID NO: 35664 - DNA, 36 bp, Homo sapiens; identical to SEQ ID NO: 12080
  source 1..36: mol_type = genomic DNA

SEQ ID NO: 35665 - DNA, 37 bp, Homo sapiens; identical to SEQ ID NO: 12081
  source 1..37: mol_type = genomic DNA

SEQ ID NO: 35666 - DNA, 17 bp, Homo sapiens
  source 1..17: mol_type = genomic DNA
cgccgctggtgtagtgg

SEQ ID NO: 35667 - DNA, 19 bp, Homo sapiens
  source 1..19: mol_type = genomic DNA
cgccgctggtgtagtggta

SEQ ID NO: 35668 - DNA, 24 bp, Homo sapiens
  source 1..24: mol_type = genomic DNA
cgccgctggtgtagtggtatcatg

SEQ ID NO: 35669 - DNA, 28 bp, Homo sapiens
  source 1..28: mol_type = genomic DNA
cgccgctggtgtagtggtatcatgcaag

SEQ ID NO: 35670 - DNA, 29 bp, Homo sapiens
  source 1..29: mol_type = genomic DNA
cgccgctggtgtagtggtatcatgcaaga

SEQ ID NO: 35671 - DNA, 31 bp, Homo sapiens; identical to SEQ ID NO: 12092
  source 1..31: mol_type = genomic DNA

SEQ ID NO: 35672 - DNA, 34 bp, Homo sapiens; identical to SEQ ID NO: 12095
  source 1..34: mol_type = genomic DNA

SEQ ID NO: 35673 - DNA, 27 bp, Homo sapiens
  source 1..27: mol_type = genomic DNA
cgccgtgatcgtatagtggttagtact

SEQ ID NO: 35674 - DNA, 32 bp, Homo sapiens; identical to SEQ ID NO: 12107
  source 1..32: mol_type = genomic DNA

SEQ ID NO: 35675 - DNA, 33 bp, Homo sapiens; identical to SEQ ID NO: 12108
  source 1..33: mol_type = genomic DNA

SEQ ID NO: 35676 - DNA, 34 bp, Homo sapiens; identical to SEQ ID NO: 12109
  source 1..34: mol_type = genomic DNA

SEQ ID NO: 35677 - DNA, 35 bp, Homo sapiens; identical to SEQ ID NO: 12110
  source 1..35: mol_type = genomic DNA

SEQ ID NO: 35678 - DNA, 41 bp, Homo sapiens; identical to SEQ ID NO: 12129
  source 1..41: mol_type = genomic DNA

SEQ ID NO: 35679 - DNA, 45 bp, Homo sapiens; identical to SEQ ID NO: 12132
  source 1..45: mol_type = genomic DNA

SEQ ID NO: 35680 - DNA, 41 bp, Homo sapiens; identical to SEQ ID NO: 12139
  source 1..41: mol_type = genomic DNA

SEQ ID NO: 35681 - DNA, 44 bp, Homo sapiens; identical to SEQ ID NO: 12142
  source 1..44: mol_type = genomic DNA

SEQ ID NO: 35682 - DNA, 45 bp, Homo sapiens; identical to SEQ ID NO: 12143
  source 1..45: mol_type = genomic DNA

SEQ ID NO: 35683 - DNA, 46 bp, Homo sapiens; identical to SEQ ID NO: 12144
  source 1..46: mol_type = genomic DNA

SEQ ID NO: 35684 - DNA, 47 bp, Homo sapiens; identical to SEQ ID NO: 12145
  source 1..47: mol_type = genomic DNA

SEQ ID NO: 35685 - DNA, 20 bp, Homo sapiens
  source 1..20: mol_type = genomic DNA
cgcgaaaggtccccggttcg

SEQ ID NO: 35686 - DNA, 38 bp, Homo sapiens; identical to SEQ ID NO: 12151
  source 1..38: mol_type = genomic DNA

SEQ ID NO: 35687 - DNA, 36 bp, Homo sapiens; identical to SEQ ID NO: 12156
  source 1..36: mol_type = genomic DNA

SEQ ID NO: 35688 - DNA, 37 bp, Homo sapiens; identical to SEQ ID NO: 12157
  source 1..37: mol_type = genomic DNA

SEQ ID NO: 35689 - DNA, 38 bp, Homo sapiens; identical to SEQ ID NO: 12158
  source 1..38: mol_type = genomic DNA

SEQ ID NO: 35690 - DNA, 39 bp, Homo sapiens; identical to SEQ ID NO: 12159
  source 1..39: mol_type = genomic DNA

SEQ ID NO: 35691 - DNA, 36 bp, Homo sapiens; identical to SEQ ID NO: 12163
  source 1..36: mol_type = genomic DNA

SEQ ID NO: 35692 - DNA, 38 bp, Homo sapiens; identical to SEQ ID NO: 12164
  source 1..38: mol_type = genomic DNA

SEQ ID NO: 35693 - DNA, 27 bp, Homo sapiens
  source 1..27: mol_type = genomic DNA
cgcgagttcaaatctcgctggggcctc

SEQ ID NO: 35694 - DNA, 24 bp, Homo sapiens
  source 1..24: mol_type = genomic DNA
cgcggcccgggttcgattcccggt

SEQ ID NO: 35695 - DNA, 27 bp, Homo sapiens
  source 1..27: mol_type = genomic DNA
cgcggcccgggttcgattcccggtcag

SEQ ID NO: 35696 - DNA, 31 bp, Homo sapiens; identical to SEQ ID NO: 12193
  source 1..31: mol_type = genomic DNA

SEQ ID NO: 35697 - DNA, 32 bp, Homo sapiens; identical to SEQ ID NO: 12194
  source 1..32: mol_type = genomic DNA

SEQ ID NO: 35698 - DNA, 33 bp, Homo sapiens; identical to SEQ ID NO: 12195
  source 1..33: mol_type = genomic DNA

SEQ ID NO: 35699 - DNA, 32 bp, Homo sapiens; identical to SEQ ID NO: 12207
  source 1..32: mol_type = genomic DNA

SEQ ID NO: 35700 - DNA, 35 bp, Homo sapiens; identical to SEQ ID NO: 12210
  source 1..35: mol_type = genomic DNA

SEQ ID NO: 35701 - DNA, 36 bp, Homo sapiens; identical to SEQ ID NO: 12211
  source 1..36: mol_type = genomic DNA

SEQ ID NO: 35702 - DNA, 37 bp, Homo sapiens; identical to SEQ ID NO: 12212
  source 1..37: mol_type = genomic DNA

SEQ ID NO: 35703 - DNA, 38 bp, Homo sapiens; identical to SEQ ID NO: 12213
  source 1..38: mol_type = genomic DNA

SEQ ID NO: 35704 - DNA, 37 bp, Homo sapiens; identical to SEQ ID NO: 12217
  source 1..37: mol_type = genomic DNA

SEQ ID NO: 35705 - DNA, 28 bp, Homo sapiens
  source 1..28: mol_type = genomic DNA
cgcgggagaccggggttcgattccccga

SEQ ID NO: 35706 - DNA, 29 bp, Homo sapiens
  source 1..29: mol_type = genomic DNA
cgcgggagaccggggttcgattccccgac

SEQ ID NO: 35707 - DNA, 31 bp, Homo sapiens; identical to SEQ ID NO: 12223
  source 1..31: mol_type = genomic DNA

SEQ ID NO: 35708 - DNA, 32 bp, Homo sapiens; identical to SEQ ID NO: 12224
  source 1..32: mol_type = genomic DNA

SEQ ID NO: 35709 - DNA, 33 bp, Homo sapiens; identical to SEQ ID NO: 12225
  source 1..33: mol_type = genomic DNA

SEQ ID NO: 35710 - DNA, 34 bp, Homo sapiens; identical to SEQ ID NO: 12226
  source 1..34: mol_type = genomic DNA

SEQ ID NO: 35711 - DNA, 35 bp, Homo sapiens; identical to SEQ ID NO: 12227
  source 1..35: mol_type = genomic DNA

SEQ ID NO: 35712 - DNA, 36 bp, Homo sapiens; identical to SEQ ID NO: 12228
  source 1..36: mol_type = genomic DNA

SEQ ID NO: 35713 - DNA, 37 bp, Homo sapiens; identical to SEQ ID NO: 12229
  source 1..37: mol_type = genomic DNA

SEQ ID NO: 35714 - DNA, 38 bp, Homo sapiens; identical to SEQ ID NO: 12230
  source 1..38: mol_type = genomic DNA

SEQ ID NO: 35715 - DNA, 16 bp, Homo sapiens
  source 1..16: mol_type = genomic DNA
cgcgggaggcccgggt

SEQ ID NO: 35716 - DNA, 18 bp, Homo sapiens
  source 1..18: mol_type = genomic DNA
cgcgggaggcccgggttc

SEQ ID NO: 35717 - DNA, 33 bp, Homo sapiens; identical to SEQ ID NO: 12241
  source 1..33: mol_type = genomic DNA

SEQ ID NO: 35718 - DNA, 35 bp, Homo sapiens; identical to SEQ ID NO: 12243
  source 1..35: mol_type = genomic DNA

SEQ ID NO: 35719 - DNA, 37 bp, Homo sapiens; identical to SEQ ID NO: 12245
  source 1..37: mol_type = genomic DNA

SEQ ID NO: 35720 - DNA, 38 bp, Homo sapiens; identical to SEQ ID NO: 12246
  source 1..38: mol_type = genomic DNA

SEQ ID NO: 35721 - DNA, 26 bp, Homo sapiens
  source 1..26: mol_type = genomic DNA
cgcgggttcgaaccccgtccgtgcct

SEQ ID NO: 35722 - DNA, 24 bp, Homo sapiens
  source 1..24: mol_type = genomic DNA
cgcgggttcgatccccgtacgggc

SEQ ID NO: 35723 - DNA, 25 bp, Homo sapiens
  source 1..25: mol_type = genomic DNA
cgcgggttcgatccccgtacgggcc

SEQ ID NO: 35724 - DNA, 26 bp, Homo sapiens
  source 1..26: mol_type = genomic DNA
cgcgggttcgatccccgtacgggcca

SEQ ID NO: 35725 - DNA, 27 bp, Homo sapiens
  source 1..27: mol_type = genomic DNA
cgcgggttcgatccccgtacgggccac

SEQ ID NO: 35726 - DNA, 28 bp, Homo sapiens
  source 1..28: mol_type = genomic DNA
cgcgggttcgatccccgtacgggccacc

SEQ ID NO: 35727 - DNA, 30 bp, Homo sapiens; identical to SEQ ID NO: 12286
  source 1..30: mol_type = genomic DNA

SEQ ID NO: 35728 - DNA, 30 bp, Homo sapiens
  source 1..30: mol_type = genomic DNA
cgcgtgggttcgaatcccaccttcgtcgcc

SEQ ID NO: 35729 - DNA, 26 bp, Homo sapiens
  source 1..26: mol_type = genomic DNA
cgcgtgggttcgaatcccatcctcgt

SEQ ID NO: 35730 - DNA, 28 bp, Homo sapiens
  source 1..28: mol_type = genomic DNA
cgcgtgggttcgaatcccatcctcgtcg

SEQ ID NO: 35731 - DNA, 29 bp, Homo sapiens
  source 1..29: mol_type = genomic DNA
cgcgtgggttcgaatcccatcctcgtcgc

SEQ ID NO: 35732 - DNA, 30 bp, Homo sapiens; identical to SEQ ID NO: 12289
  source 1..30: mol_type = genomic DNA

SEQ ID NO: 35733 - DNA, 31 bp, Homo sapiens; identical to SEQ ID NO: 12290
  source 1..31: mol_type = genomic DNA

SEQ ID NO: 35734 - DNA, 25 bp, Homo sapiens
  source 1..25: mol_type = genomic DNA
cgcgttcgattcccggtcagggaac

SEQ ID NO: 35735 - DNA, 18 bp, Homo sapiens
  source 1..18: mol_type = genomic DNA
cgctctcaccgccgcggc

SEQ ID NO: 35736 - DNA, 43 bp, Homo sapiens; identical to SEQ ID NO: 12305
  source 1..43: mol_type = genomic DNA

SEQ ID NO: 35737 - DNA, 44 bp, Homo sapiens; identical to SEQ ID NO: 12306
  source 1..44: mol_type = genomic DNA

SEQ ID NO: 35738 - DNA, 45 bp, Homo sapiens; identical to SEQ ID NO: 12307
  source 1..45: mol_type = genomic DNA

SEQ ID NO: 35739 - DNA, 21 bp, Homo sapiens
  source 1..21: mol_type = genomic DNA
cgctggtgtagtggtatcatg

SEQ ID NO: 35740 - DNA, 25 bp, Homo sapiens
  source 1..25: mol_type = genomic DNA
cgctggtgtagtggtatcatgcaag

SEQ ID NO: 35741 - DNA, 28 bp, Homo sapiens
  source 1..28: mol_type = genomic DNA
cgctggtgtagtggtatcatgcaagatt

SEQ ID NO: 35742 - DNA, 46 bp, Homo sapiens; identical to SEQ ID NO: 12319
  source 1..46: mol_type = genomic DNA

SEQ ID NO: 35743 - DNA, 47 bp, Homo sapiens; identical to SEQ ID NO: 12320
  source 1..47: mol_type = genomic DNA

SEQ ID NO: 35744 - DNA, 27 bp, Homo sapiens
  source 1..27: mol_type = genomic DNA
cgctggttcgaatccggctcgaaggac

SEQ ID NO: 35745 - DNA, 28 bp, Homo sapiens
  source 1..28: mol_type = genomic DNA
cgctggttcgaatccggctcgaaggacc

SEQ ID NO: 35746 - DNA, 27 bp, Homo sapiens
  source 1..27: mol_type = genomic DNA
cgctggttcgaatccggctcggaggac

SEQ ID NO: 35747 - DNA, 28 bp, Homo sapiens
  source 1..28: mol_type = genomic DNA
cgctggttcgaatccggctcggaggacc

SEQ ID NO: 35748 - DNA, 27 bp, Homo sapiens
  source 1..27: mol_type = genomic DNA
cgctggttcgattccagctcgaaggac

SEQ ID NO: 35749 - DNA, 28 bp, Homo sapiens
  source 1..28: mol_type = genomic DNA
cgctggttcgattccagctcgaaggacc

SEQ ID NO: 35750 - DNA, 27 bp, Homo sapiens
  source 1..27: mol_type = genomic DNA
cgctggttcgattccggctcgaaggac

SEQ ID NO: 35751 - DNA, 28 bp, Homo sapiens
  source 1..28: mol_type = genomic DNA
cgctggttcgattccggctcgaaggacc

SEQ ID NO: 35752 - DNA, 29 bp, Homo sapiens
  source 1..29: mol_type = genomic DNA
cgctggttcgattccggctcgaaggacca

SEQ ID NO: 35753 - DNA, 33 bp, Homo sapiens; identical to SEQ ID NO: 12341
  source 1..33: mol_type = genomic DNA

SEQ ID NO: 35754 - DNA, 34 bp, Homo sapiens; identical to SEQ ID NO: 12342
  source 1..34: mol_type = genomic DNA

SEQ ID NO: 35755 - DNA, 16 bp, Homo sapiens
  source 1..16: mol_type = genomic DNA
cggaagcgtgctgggc

SEQ ID NO: 35756 - DNA, 17 bp, Homo sapiens
  source 1..17: mol_type = genomic DNA
cggaagcgtgctgggcc

SEQ ID NO: 35757 - DNA, 18 bp, Homo sapiens
  source 1..18: mol_type = genomic DNA
cggaagcgtgctgggccc

SEQ ID NO: 35758 - DNA, 19 bp, Homo sapiens
  source 1..19: mol_type = genomic DNA
cggaagcgtgctgggccca

SEQ ID NO: 35759 - DNA, 20 bp, Homo sapiens
  source 1..20: mol_type = genomic DNA
cggaagcgtgctgggcccat

SEQ ID NO: 35760 - DNA, 21 bp, Homo sapiens
  source 1..21: mol_type = genomic DNA
cggaagcgtgctgggcccata

SEQ ID NO: 35761 - DNA, 22 bp, Homo sapiens
  source 1..22: mol_type = genomic DNA
cggaagcgtgctgggcccataa

SEQ ID NO: 35762 - DNA, 23 bp, Homo sapiens
  source 1..23: mol_type = genomic DNA
cggaagcgtgctgggcccataac

SEQ ID NO: 35763 - DNA, 24 bp, Homo sapiens
  source 1..24: mol_type = genomic DNA
cggaagcgtgctgggcccataacc

SEQ ID NO: 35764 - DNA, 25 bp, Homo sapiens
  source 1..25: mol_type = genomic DNA
cggaagcgtgctgggcccataaccc

SEQ ID NO: 35765 - DNA, 26 bp, Homo sapiens
  source 1..26: mol_type = genomic DNA
cggaagcgtgctgggcccataaccca

SEQ ID NO: 35766 - DNA, 27 bp, Homo sapiens
  source 1..27: mol_type = genomic DNA
cggaagcgtgctgggcccataacccag

SEQ ID NO: 35767 - DNA, 28 bp, Homo sapiens
  source 1..28: mol_type = genomic DNA
cggaagcgtgctgggcccataacccaga

SEQ ID NO: 35768 - DNA, 29 bp, Homo sapiens
  source 1..29: mol_type = genomic DNA
cggaagcgtgctgggcccataacccagag

SEQ ID NO: 35769 - DNA, 32 bp, Homo sapiens; identical to SEQ ID NO: 12358
  source 1..32: mol_type = genomic DNA

SEQ ID NO: 35770 - DNA, 33 bp, Homo sapiens; identical to SEQ ID NO: 12359
  source 1..33: mol_type = genomic DNA

SEQ ID NO: 35771 - DNA, 34 bp, Homo sapiens; identical to SEQ ID NO: 12360
  source 1..34: mol_type = genomic DNA

SEQ ID NO: 35772 - DNA, 35 bp, Homo sapiens; identical to SEQ ID NO: 12361
  source 1..35: mol_type = genomic DNA

SEQ ID NO: 35773 - DNA, 36 bp, Homo sapiens; identical to SEQ ID NO: 12362
  source 1..36: mol_type = genomic DNA

SEQ ID NO: 35774 - DNA, 37 bp, Homo sapiens; identical to SEQ ID NO: 12363
  source 1..37: mol_type = genomic DNA

SEQ ID NO: 35775 - DNA, 38 bp, Homo sapiens; identical to SEQ ID NO: 12364
  source 1..38: mol_type = genomic DNA

SEQ ID NO: 35776 - DNA, 39 bp, Homo sapiens; identical to SEQ ID NO: 12365
  source 1..39: mol_type = genomic DNA

SEQ ID NO: 35777 - DNA, 40 bp, Homo sapiens; identical to SEQ ID NO: 12366
  source 1..40: mol_type = genomic DNA

SEQ ID NO: 35778 - DNA, 41 bp, Homo sapiens; identical to SEQ ID NO: 12367
  source 1..41: mol_type = genomic DNA

SEQ ID NO: 35779 - DNA, 44 bp, Homo sapiens
  source 1..44: mol_type = genomic DNA
cggaagcgtgctgggcccataacccagaggtcgatggatcgaaa

SEQ ID NO: 35780 - DNA, 45 bp, Homo sapiens
  source 1..45: mol_type = genomic DNA
cggaagcgtgctgggcccataacccagaggtcgatggatcgaaac

SEQ ID NO: 35781 - DNA, 46 bp, Homo sapiens
  source 1..46: mol_type = genomic DNA
cggaagcgtgctgggcccataacccagaggtcgatggatcgaaacc

SEQ ID NO: 35782 - DNA, 47 bp, Homo sapiens
  source 1..47: mol_type = genomic DNA
cggaagcgtgctgggcccataacccagaggtcgatggatcgaaacca

SEQ ID NO: 35783 - DNA, 17 bp, Homo sapiens
  source 1..17: mol_type = genomic DNA
cggagaattttggattc

SEQ ID NO: 35784 - DNA, 25 bp, Homo sapiens
  source 1..25: mol_type = genomic DNA
cggagaattttggattctcagggat

SEQ ID NO: 35785 - DNA, 26 bp, Homo sapiens
  source 1..26: mol_type = genomic DNA
cggagaattttggattctcagggatg

SEQ ID NO: 35786 - DNA, 30 bp, Homo sapiens
  source 1..30: mol_type = genomic DNA
cggagaattttggattctcagggatgggtt

SEQ ID NO: 35787 - DNA, 32 bp, Homo sapiens; identical to SEQ ID NO: 12369
  source 1..32: mol_type = genomic DNA

SEQ ID NO: 35788 - DNA, 34 bp, Homo sapiens; identical to SEQ ID NO: 12370
  source 1..34: mol_type = genomic DNA

SEQ ID NO: 35789 - DNA, 35 bp, Homo sapiens
  source 1..35: mol_type = genomic DNA
cggagaattttggattctcagggatgggttcgatt

SEQ ID NO: 35790 - DNA, 47 bp, Homo sapiens
  source 1..47: mol_type = genomic DNA
cggagaattttggattctcagggatgggttcgattctcatagtccta

SEQ ID NO: 35791 - DNA, 27 bp, Homo sapiens
  source 1..27: mol_type = genomic DNA
cggagatgaaaacctttttccaaggac

SEQ ID NO: 35792 - DNA, 28 bp, Homo sapiens
  source 1..28: mol_type = genomic DNA
cggagatgaaaacctttttccaaggaca

SEQ ID NO: 35793 - DNA, 29 bp, Homo sapiens
  source 1..29: mol_type = genomic DNA
cggagatgaaaacctttttccaaggacac

SEQ ID NO: 35794 - DNA, 30 bp, Homo sapiens; identical to SEQ ID NO: 12384
  source 1..30: mol_type = genomic DNA

SEQ ID NO: 35795 - DNA, 31 bp, Homo sapiens; identical to SEQ ID NO: 12385
  source 1..31: mol_type = genomic DNA

SEQ ID NO: 35796 - DNA, 16 bp, Homo sapiens
  source 1..16: mol_type = genomic DNA
cggagctggggattgt

SEQ ID NO: 35797 - DNA, 20 bp, Homo sapiens
  source 1..20: mol_type = genomic DNA
cggagctggggattgtgggt

SEQ ID NO: 35798 - DNA, 32 bp, Homo sapiens; identical to SEQ ID NO: 12389
  source 1..32: mol_type = genomic DNA

SEQ ID NO: 35799 - DNA, 41 bp, Homo sapiens; identical to SEQ ID NO: 12391
  source 1..41: mol_type = genomic DNA

SEQ ID NO: 35800 - DNA, 34 bp, Homo sapiens
  source 1..34: mol_type = genomic DNA
cggaggcgtgggttcgaatcccaccgctgccacc

SEQ ID NO: 35801 - DNA, 16 bp, Homo sapiens
  source 1..16: mol_type = genomic DNA
cggatagctcagtcgg

SEQ ID NO: 35802 - DNA, 17 bp, Homo sapiens
  source 1..17: mol_type = genomic DNA
cggatagctcagtcggt

SEQ ID NO: 35803 - DNA, 18 bp, Homo sapiens
  source 1..18: mol_type = genomic DNA
cggatagctcagtcggta

SEQ ID NO: 35804 - DNA, 19 bp, Homo sapiens
  source 1..19: mol_type = genomic DNA
cggatagctcagtcggtag

SEQ ID NO: 35805 - DNA, 20 bp, Homo sapiens
  source 1..20: mol_type = genomic DNA
cggatagctcagtcggtaga

SEQ ID NO: 35806 - DNA, 21 bp, Homo sapiens
  source 1..21: mol_type = genomic DNA
cggatagctcagtcggtagag

SEQ ID NO: 35807 - DNA, 22 bp, Homo sapiens
  source 1..22: mol_type = genomic DNA
cggatagctcagtcggtagagc

SEQ ID NO: 35808 - DNA, 23 bp, Homo sapiens
  source 1..23: mol_type = genomic DNA
cggatagctcagtcggtagagca

SEQ ID NO: 35809 - DNA, 24 bp, Homo sapiens
  source 1..24: mol_type = genomic DNA
cggatagctcagtcggtagagcat

SEQ ID NO: 35810 - DNA, 25 bp, Homo sapiens
  source 1..25: mol_type = genomic DNA
cggatagctcagtcggtagagcatc

SEQ ID NO: 35811 - DNA, 27 bp, Homo sapiens
  source 1..27: mol_type = genomic DNA
cggatagctcagtcggtagagcatcag

SEQ ID NO: 35812 - DNA, 28 bp, Homo sapiens
  source 1..28: mol_type = genomic DNA
cggatagctcagtcggtagagcatcaga

SEQ ID NO: 35813 - DNA, 29 bp, Homo sapiens
  source 1..29: mol_type = genomic DNA
cggatagctcagtcggtagagcatcagac

SEQ ID NO: 35814 - DNA, 30 bp, Homo sapiens; identical to SEQ ID NO: 12409
  source 1..30: mol_type = genomic DNA

SEQ ID NO: 35815 - DNA, 31 bp, Homo sapiens; identical to SEQ ID NO: 12410
  source 1..31: mol_type = genomic DNA

SEQ ID NO: 35816 - DNA, 32 bp, Homo sapiens; identical to SEQ ID NO: 12411
  source 1..32: mol_type = genomic DNA

SEQ ID NO: 35817 - DNA, 33 bp, Homo sapiens; identical to SEQ ID NO: 12412
  source 1..33: mol_type = genomic DNA

SEQ ID NO: 35818 - DNA, 19 bp, Homo sapiens
  source 1..19: mol_type = genomic DNA
cggatcagaagattccagg

SEQ ID NO: 35819 - DNA, 41 bp, Homo sapiens
  source 1..41: mol_type = genomic DNA
cggatcagaagattccaggttcgactcctggctggctcgcc

SEQ ID NO: 35820 - DNA, 22 bp, Homo sapiens
  source 1..22: mol_type = genomic DNA
cggatcagaagattctaggttc

SEQ ID NO: 35821 - DNA, 41 bp, Homo sapiens; identical to SEQ ID NO: 12419
  source 1..41: mol_type = genomic DNA

SEQ ID NO: 35822 - DNA, 16 bp, Homo sapiens
  source 1..16: mol_type = genomic DNA
cggatcagaagattga

SEQ ID NO: 35823 - DNA, 20 bp, Homo sapiens
  source 1..20: mol_type = genomic DNA
cggatcagaagattgagggt

SEQ ID NO: 35824 - DNA, 22 bp, Homo sapiens
  source 1..22: mol_type = genomic DNA
cggatcagaagattgagggttc

SEQ ID NO: 35825 - DNA, 19 bp, Homo sapiens
  source 1..19: mol_type = genomic DNA
cggatcagaagattgcagg

SEQ ID NO: 35826 - DNA, 22 bp, Homo sapiens
  source 1..22: mol_type = genomic DNA
cggatcagaagattgcaggttc

SEQ ID NO: 35827 - DNA, 17 bp, Homo sapiens
  source 1..17: mol_type = genomic DNA
cggatggaggcgtgggt

SEQ ID NO: 35828 - DNA, 18 bp, Homo sapiens
  source 1..18: mol_type = genomic DNA
cggatggaggcgtgggtt

SEQ ID NO: 35829 - DNA, 27 bp, Homo sapiens
  source 1..27: mol_type = genomic DNA
cggatggaggcgtgggttcgaatccca

SEQ ID NO: 35830 - DNA, 29 bp, Homo sapiens
  source 1..29: mol_type = genomic DNA
cggatggaggcgtgggttcgaatcccact

SEQ ID NO: 35831 - DNA, 31 bp, Homo sapiens; identical to SEQ ID NO: 12439
  source 1..31: mol_type = genomic DNA

SEQ ID NO: 35832 - DNA, 36 bp, Homo sapiens; identical to SEQ ID NO: 12442
  source 1..36: mol_type = genomic DNA

SEQ ID NO: 35833 - DNA, 37 bp, Homo sapiens; identical to SEQ ID NO: 12443
  source 1..37: mol_type = genomic DNA

SEQ ID NO: 35834 - DNA, 38 bp, Homo sapiens; identical to SEQ ID NO: 12444
  source 1..38: mol_type = genomic DNA

SEQ ID NO: 35835 - DNA, 17 bp, Homo sapiens
  source 1..17: mol_type = genomic DNA
cggcccgggttcgactc

SEQ ID NO: 35836 - DNA, 18 bp, Homo sapiens
  source 1..18: mol_type = genomic DNA
cggcccgggttcgactcc

SEQ ID NO: 35837 - DNA, 19 bp, Homo sapiens
  source 1..19: mol_type = genomic DNA
cggcccgggttcgactccc

SEQ ID NO: 35838 - DNA, 22 bp, Homo sapiens
  source 1..22: mol_type = genomic DNA
cggcccgggttcgactcccggt

SEQ ID NO: 35839 - DNA, 23 bp, Homo sapiens
  source 1..23: mol_type = genomic DNA
cggcccgggttcgactcccggtg

SEQ ID NO: 35840 - DNA, 25 bp, Homo sapiens
  source 1..25: mol_type = genomic DNA
cggcccgggttcgactcccggtgtg

SEQ ID NO: 35841 - DNA, 26 bp, Homo sapiens
  source 1..26: mol_type = genomic DNA
cggcccgggttcgactcccggtgtgg

SEQ ID NO: 35842 - DNA, 27 bp, Homo sapiens
  source 1..27: mol_type = genomic DNA
cggcccgggttcgactcccggtgtggg

SEQ ID NO: 35843 - DNA, 28 bp, Homo sapiens
  source 1..28: mol_type = genomic DNA
cggcccgggttcgactcccggtgtggga

SEQ ID NO: 35844 - DNA, 29 bp, Homo sapiens
  source 1..29: mol_type = genomic DNA
cggcccgggttcgactcccggtgtgggaa

SEQ ID NO: 35845 - DNA, 30 bp, Homo sapiens; identical to SEQ ID NO: 12456
  source 1..30: mol_type = genomic DNA

SEQ ID NO: 35846 - DNA, 31 bp, Homo sapiens; identical to SEQ ID NO: 12457
  source 1..31: mol_type = genomic DNA

SEQ ID NO: 35847 - DNA, 32 bp, Homo sapiens; identical to SEQ ID NO: 12458
  source 1..32: mol_type = genomic DNA

SEQ ID NO: 35848 - DNA, 20 bp, Homo sapiens
  source 1..20: mol_type = genomic DNA
cggcccgggttcgattcccg

SEQ ID NO: 35849 - DNA, 22 bp, Homo sapiens
  source 1..22: mol_type = genomic DNA
cggcccgggttcgattcccggt

SEQ ID NO: 35850 - DNA, 29 bp, Homo sapiens
  source 1..29: mol_type = genomic DNA
cggcccgggttcgattcccggtcagggaa

SEQ ID NO: 35851 - DNA, 30 bp, Homo sapiens; identical to SEQ ID NO: 12467
  source 1..30: mol_type = genomic DNA

SEQ ID NO: 35852 - DNA, 46 bp, Homo sapiens; identical to SEQ ID NO: 12481
  source 1..46: mol_type = genomic DNA

SEQ ID NO: 35853 - DNA, 47 bp, Homo sapiens; identical to SEQ ID NO: 12482
  source 1..47: mol_type = genomic DNA

SEQ ID NO: 35854 - DNA, 16 bp, Homo sapiens
  source 1..16: mol_type = genomic DNA
cggctagctcagtcgg

SEQ ID NO: 35855 - DNA, 22 bp, Homo sapiens
  source 1..22: mol_type = genomic DNA
cggctagctcagtcggtagagc

SEQ ID NO: 35856 - DNA, 23 bp, Homo sapiens
  source 1..23: mol_type = genomic DNA
cggctagctcagtcggtagagca

SEQ ID NO: 35857 - DNA, 24 bp, Homo sapiens
  source 1..24: mol_type = genomic DNA
cggctagctcagtcggtagagcat

SEQ ID NO: 35858 - DNA, 25 bp, Homo sapiens
  source 1..25: mol_type = genomic DNA
cggctagctcagtcggtagagcatg

SEQ ID NO: 35859 - DNA, 26 bp, Homo sapiens
  source 1..26: mol_type = genomic DNA
cggctagctcagtcggtagagcatga

SEQ ID NO: 35860 - DNA, 27 bp, Homo sapiens
  source 1..27: mol_type = genomic DNA
cggctagctcagtcggtagagcatgag

SEQ ID NO: 35861 - DNA, 29 bp, Homo sapiens
  source 1..29: mol_type = genomic DNA
cggctagctcagtcggtagagcatgagac

SEQ ID NO: 35862 - DNA, 30 bp, Homo sapiens; identical to SEQ ID NO: 12500
  source 1..30: mol_type = genomic DNA

SEQ ID NO: 35863 - DNA, 31 bp, Homo sapiens; identical to SEQ ID NO: 12501
  source 1..31: mol_type = genomic DNA

SEQ ID NO: 35864 - DNA, 30 bp, Homo sapiens; identical to SEQ ID NO: 12504
  source 1..30: mol_type = genomic DNA

SEQ ID NO: 35865 - DNA, 31 bp, Homo sapiens; identical to SEQ ID NO: 12505
  source 1..31: mol_type = genomic DNA

SEQ ID NO: 35866 - DNA, 32 bp, Homo sapiens; identical to SEQ ID NO: 12506
  source 1..32: mol_type = genomic DNA

SEQ ID NO: 35867 - DNA, 33 bp, Homo sapiens; identical to SEQ ID NO: 12507
  source 1..33: mol_type = genomic DNA

SEQ ID NO: 35868 - DNA, 35 bp, Homo sapiens; identical to SEQ ID NO: 12509
  source 1..35: mol_type = genomic DNA

SEQ ID NO: 35869 - DNA, 36 bp, Homo sapiens; identical to SEQ ID NO: 12510
  source 1..36: mol_type = genomic DNA

SEQ ID NO: 35870 - DNA, 37 bp, Homo sapiens; identical to SEQ ID NO: 12511
  source 1..37: mol_type = genomic DNA

SEQ ID NO: 35871 - DNA, 38 bp, Homo sapiens; identical to SEQ ID NO: 12512
  source 1..38: mol_type = genomic DNA

SEQ ID NO: 35872 - DNA, 39 bp, Homo sapiens; identical to SEQ ID NO: 12513
  source 1..39: mol_type = genomic DNA

SEQ ID NO: 35873 - DNA, 46 bp, Homo sapiens; identical to SEQ ID NO: 12515
  source 1..46: mol_type = genomic DNA

SEQ ID NO: 35874 - DNA, 47 bp, Homo sapiens
  source 1..47: mol_type = genomic DNA
cggctagctcagtcggtagagcatgagactcttaatctcagggtcgt

SEQ ID NO: 35875 - DNA, 26 bp, Homo sapiens
  source 1..26: mol_type = genomic DNA
cggctagctcagtcggtagagcatgg

SEQ ID NO: 35876 - DNA, 27 bp, Homo sapiens
  source 1..27: mol_type = genomic DNA
cggctagctcagtcggtagagcatggg

SEQ ID NO: 35877 - DNA, 28 bp, Homo sapiens
  source 1..28: mol_type = genomic DNA
cggctagctcagtcggtagagcatggga

SEQ ID NO: 35878 - DNA, 29 bp, Homo sapiens
  source 1..29: mol_type = genomic DNA
cggctagctcagtcggtagagcatgggac

SEQ ID NO: 35879 - DNA, 30 bp, Homo sapiens; identical to SEQ ID NO: 12521
  source 1..30: mol_type = genomic DNA

SEQ ID NO: 35880 - DNA, 31 bp, Homo sapiens; identical to SEQ ID NO: 12522
  source 1..31: mol_type = genomic DNA

SEQ ID NO: 35881 - DNA, 32 bp, Homo sapiens; identical to SEQ ID NO: 12523
  source 1..32: mol_type = genomic DNA

SEQ ID NO: 35882 - DNA, 33 bp, Homo sapiens; identical to SEQ ID NO: 12524
  source 1..33: mol_type = genomic DNA

SEQ ID NO: 35883 - DNA, 36 bp, Homo sapiens; identical to SEQ ID NO: 12527
  source 1..36: mol_type = genomic DNA

SEQ ID NO: 35884 - DNA, 38 bp, Homo sapiens; identical to SEQ ID NO: 12529
  source 1..38: mol_type = genomic DNA

SEQ ID NO: 35885 - DNA, 39 bp, Homo sapiens; identical to SEQ ID NO: 12530
  source 1..39: mol_type = genomic DNA

SEQ ID NO: 35886 - DNA, 46 bp, Homo sapiens
  source 1..46: mol_type = genomic DNA
cggctagctcagtcggtagagcatgggactcttaatcccagggtcg

SEQ ID NO: 35887 - DNA, 22 bp, Homo sapiens
  source 1..22: mol_type = genomic DNA
cggctgttaaccgaaaggttgg

SEQ ID NO: 35888 - DNA, 24 bp, Homo sapiens
  source 1..24: mol_type = genomic DNA
cggctgttaaccgaaaggttggtg

SEQ ID NO: 35889 - DNA, 25 bp, Homo sapiens
  source 1..25: mol_type = genomic DNA
cggctgttaaccgaaaggttggtgg

SEQ ID NO: 35890 - DNA, 27 bp, Homo sapiens
  source 1..27: mol_type = genomic DNA
cggctgttaaccgaaaggttggtggtt

SEQ ID NO: 35891 - DNA, 46 bp, Homo sapiens; identical to SEQ ID NO: 12539
  source 1..46: mol_type = genomic DNA

SEQ ID NO: 35892 - DNA, 47 bp, Homo sapiens; identical to SEQ ID NO: 12540
  source 1..47: mol_type = genomic DNA

SEQ ID NO: 35893 - DNA, 47 bp, Homo sapiens
  source 1..47: mol_type = genomic DNA
cggctgttaaccgaaaggttggtggttcgatcccacccagggacgcc

SEQ ID NO: 35894 - DNA, 30 bp, Homo sapiens; identical to SEQ ID NO: 12546
  source 1..30: mol_type = genomic DNA

SEQ ID NO: 35895 - DNA, 32 bp, Homo sapiens; identical to SEQ ID NO: 12548
  source 1..32: mol_type = genomic DNA

SEQ ID NO: 35896 - DNA, 33 bp, Homo sapiens; identical to SEQ ID NO: 12549
  source 1..33: mol_type = genomic DNA

SEQ ID NO: 35897 - DNA, 34 bp, Homo sapiens; identical to SEQ ID NO: 12550
  source 1..34: mol_type = genomic DNA

SEQ ID NO: 35898 - DNA, 35 bp, Homo sapiens; identical to SEQ ID NO: 12551
  source 1..35: mol_type = genomic DNA

SEQ ID NO: 35899 - DNA, 36 bp, Homo sapiens; identical to SEQ ID NO: 12552
  source 1..36: mol_type = genomic DNA

SEQ ID NO: 35900 - DNA, 17 bp, Homo sapiens
  source 1..17: mol_type = genomic DNA
cgggagaccggggttcg

SEQ ID NO: 35901 - DNA, 20 bp, Homo sapiens
  source 1..20: mol_type = genomic DNA
cgggagaccggggttcgatt

SEQ ID NO: 35902 - DNA, 34 bp, Homo sapiens
  source 1..34: mol_type = genomic DNA
cgggagaccggggttcgattccccaacggggagc

SEQ ID NO: 35903 - DNA, 35 bp, Homo sapiens
  source 1..35: mol_type = genomic DNA
cgggagaccggggttcgattccccaacggggagcc

SEQ ID NO: 35904 - DNA, 26 bp, Homo sapiens
  source 1..26: mol_type = genomic DNA
cgggagaccggggttcgattccccga

SEQ ID NO: 35905 - DNA, 27 bp, Homo sapiens
  source 1..27: mol_type = genomic DNA
cgggagaccggggttcgattccccgac

SEQ ID NO: 35906 - DNA, 28 bp, Homo sapiens
  source 1..28: mol_type = genomic DNA
cgggagaccggggttcgattccccgacg

SEQ ID NO: 35907 - DNA, 29 bp, Homo sapiens
  source 1..29: mol_type = genomic DNA
cgggagaccggggttcgattccccgacgg

SEQ ID NO: 35908 - DNA, 30 bp, Homo sapiens; identical to SEQ ID NO: 12559
  source 1..30: mol_type = genomic DNA

SEQ ID NO: 35909 - DNA, 31 bp, Homo sapiens; identical to SEQ ID NO: 12560
  source 1..31: mol_type = genomic DNA

SEQ ID NO: 35910 - DNA, 32 bp, Homo sapiens; identical to SEQ ID NO: 12561
  source 1..32: mol_type = genomic DNA

SEQ ID NO: 35911 - DNA, 33 bp, Homo sapiens; identical to SEQ ID NO: 12562
  source 1..33: mol_type = genomic DNA

SEQ ID NO: 35912 - DNA, 34 bp, Homo sapiens; identical to SEQ ID NO: 12563
  source 1..34: mol_type = genomic DNA

SEQ ID NO: 35913 - DNA, 35 bp, Homo sapiens; identical to SEQ ID NO: 12564
  source 1..35: mol_type = genomic DNA

SEQ ID NO: 35914 - DNA, 36 bp, Homo sapiens; identical to SEQ ID NO: 12565
  source 1..36: mol_type = genomic DNA

SEQ ID NO: 35915 - DNA, 17 bp, Homo sapiens
  source 1..17: mol_type = genomic DNA
cgggaggcccgggttcg

SEQ ID NO: 35916 - DNA, 29 bp, Homo sapiens
  source 1..29: mol_type = genomic DNA
cgggaggcccgggttcgattcccggccaa

SEQ ID NO: 35917 - DNA, 31 bp, Homo sapiens; identical to SEQ ID NO: 12573
  source 1..31: mol_type = genomic DNA

SEQ ID NO: 35918 - DNA, 32 bp, Homo sapiens; identical to SEQ ID NO: 12574
  source 1..32: mol_type = genomic DNA

SEQ ID NO: 35919 - DNA, 33 bp, Homo sapiens; identical to SEQ ID NO: 12575
  source 1..33: mol_type = genomic DNA

SEQ ID NO: 35920 - DNA, 34 bp, Homo sapiens; identical to SEQ ID NO: 12576
  source 1..34: mol_type = genomic DNA

SEQ ID NO: 35921 - DNA, 35 bp, Homo sapiens; identical to SEQ ID NO: 12577
  source 1..35: mol_type = genomic DNA

SEQ ID NO: 35922 - DNA, 36 bp, Homo sapiens; identical to SEQ ID NO: 12578
  source 1..36: mol_type = genomic DNA

SEQ ID NO: 35923 - DNA, 31 bp, Homo sapiens; identical to SEQ ID NO: 12580
  source 1..31: mol_type = genomic DNA

SEQ ID NO: 35924 - DNA, 26 bp, Homo sapiens
  source 1..26: mol_type = genomic DNA
cgggatcgatgcccgcattctccacc

SEQ ID NO: 35925 - DNA, 18 bp, Homo sapiens
  source 1..18: mol_type = genomic DNA
cgggcccataccccgaaa

SEQ ID NO: 35926 - DNA, 47 bp, Homo sapiens; identical to SEQ ID NO: 12606
  source 1..47: mol_type = genomic DNA

SEQ ID NO: 35927 - DNA, 27 bp, Homo sapiens
  source 1..27: mol_type = genomic DNA
cgggctcacatcaccccataaacacca

SEQ ID NO: 35928 - DNA, 23 bp, Homo sapiens
  source 1..23: mol_type = genomic DNA
cggggatgtagctcagtggtaga

SEQ ID NO: 35929 - DNA, 34 bp, Homo sapiens
  source 1..34: mol_type = genomic DNA
cgggggattagctcaaatggtagagcgctcgctt

SEQ ID NO: 35930 - DNA, 34 bp, Homo sapiens
  source 1..34: mol_type = genomic DNA
cgggggcgtgggttcgaatcccaccgctgccacc

SEQ ID NO: 35931 - DNA, 26 bp, Homo sapiens
  source 1..26: mol_type = genomic DNA
cggggttcaagtccctgttcgggcgc

SEQ ID NO: 35932 - DNA, 26 bp, Homo sapiens
  source 1..26: mol_type = genomic DNA
cggggttcaattccccgacggggagc

SEQ ID NO: 35933 - DNA, 24 bp, Homo sapiens
  source 1..24: mol_type = genomic DNA
cggggttcgattccccgacgggga

SEQ ID NO: 35934 - DNA, 25 bp, Homo sapiens
  source 1..25: mol_type = genomic DNA
cggggttcgattccccgacggggag

SEQ ID NO: 35935 - DNA, 26 bp, Homo sapiens
  source 1..26: mol_type = genomic DNA
cggggttcgattccccgacggggagc

SEQ ID NO: 35936 - DNA, 27 bp, Homo sapiens
  source 1..27: mol_type = genomic DNA
cggggttcgattccccgacggggagcc

SEQ ID NO: 35937 - DNA, 24 bp, Homo sapiens
  source 1..24: mol_type = genomic DNA
cgggttcaaatcccggacgagccc

SEQ ID NO: 35938 - DNA, 25 bp, Homo sapiens
  source 1..25: mol_type = genomic DNA
cgggttcaaatcccggacgagcccc

SEQ ID NO: 35939 - DNA, 25 bp, Homo sapiens
  source 1..25: mol_type = genomic DNA
cgggttcaatccccggcacctccac

SEQ ID NO: 35940 - DNA, 26 bp, Homo sapiens
  source 1..26: mol_type = genomic DNA
cgggttcaatccccggcacctccacc

SEQ ID NO: 35941 - DNA, 25 bp, Homo sapiens
  source 1..25: mol_type = genomic DNA
cgggttcaatccccggcatctccac

SEQ ID NO: 35942 - DNA, 24 bp, Homo sapiens
  source 1..24: mol_type = genomic DNA
cgggttcgaaccccgtacgggcca

SEQ ID NO: 35943 - DNA, 25 bp, Homo sapiens
  source 1..25: mol_type = genomic DNA
cgggttcgaaccccgtacgggccac

SEQ ID NO: 35944 - DNA, 26 bp, Homo sapiens
  source 1..26: mol_type = genomic DNA
cgggttcgaaccccgtacgggccacc

SEQ ID NO: 35945 - DNA, 24 bp, Homo sapiens
  source 1..24: mol_type = genomic DNA
cgggttcgaaccccgtccgtgcct

SEQ ID NO: 35946 - DNA, 25 bp, Homo sapiens
  source 1..25: mol_type = genomic DNA
cgggttcgaaccccgtccgtgcctc

SEQ ID NO: 35947 - DNA, 22 bp, Homo sapiens
  source 1..22: mol_type = genomic DNA
cgggttcgactcccggtatggg

SEQ ID NO: 35948 - DNA, 23 bp, Homo sapiens
  source 1..23: mol_type = genomic DNA
cgggttcgactcccggtatggga

SEQ ID NO: 35949 - DNA, 24 bp, Homo sapiens
  source 1..24: mol_type = genomic DNA
cgggttcgactcccggtatgggaa

SEQ ID NO: 35950 - DNA, 25 bp, Homo sapiens
  source 1..25: mol_type = genomic DNA
cgggttcgactcccggtatgggaac

SEQ ID NO: 35951 - DNA, 26 bp, Homo sapiens
  source 1..26: mol_type = genomic DNA
cgggttcgactcccggtatgggaacc

SEQ ID NO: 35952 - DNA, 18 bp, Homo sapiens
  source 1..18: mol_type = genomic DNA
cgggttcgactcccggtg

SEQ ID NO: 35953 - DNA, 20 bp, Homo sapiens
  source 1..20: mol_type = genomic DNA
cgggttcgactcccggtgtg

SEQ ID NO: 35954 - DNA, 21 bp, Homo sapiens
  source 1..21: mol_type = genomic DNA
cgggttcgactcccggtgtgg

SEQ ID NO: 35955 - DNA, 22 bp, Homo sapiens
  source 1..22: mol_type = genomic DNA
cgggttcgactcccggtgtggg

SEQ ID NO: 35956 - DNA, 23 bp, Homo sapiens
  source 1..23: mol_type = genomic DNA
cgggttcgactcccggtgtggga

SEQ ID NO: 35957 - DNA, 24 bp, Homo sapiens
  source 1..24: mol_type = genomic DNA
cgggttcgactcccggtgtgggaa

SEQ ID NO: 35958 - DNA, 25 bp, Homo sapiens
  source 1..25: mol_type = genomic DNA
cgggttcgactcccggtgtgggaac

SEQ ID NO: 35959 - DNA, 26 bp, Homo sapiens
  source 1..26: mol_type = genomic DNA
cgggttcgactcccggtgtgggaacc

SEQ ID NO: 35960 - DNA, 27 bp, Homo sapiens
  source 1..27: mol_type = genomic DNA
cgggttcgactcccggtgtgggaacca

SEQ ID NO: 35961 - DNA, 26 bp, Homo sapiens
  source 1..26: mol_type = genomic DNA
cgggttcgagtcccggcggagtcgcc

SEQ ID NO: 35962 - DNA, 25 bp, Homo sapiens
  source 1..25: mol_type = genomic DNA
cgggttcgatccccagcatctccac

SEQ ID NO: 35963 - DNA, 26 bp, Homo sapiens
  source 1..26: mol_type = genomic DNA
cgggttcgatccccagcatctccacc

SEQ ID NO: 35964 - DNA, 25 bp, Homo sapiens
  source 1..25: mol_type = genomic DNA
cgggttcgatccccggcatctccac

SEQ ID NO: 35965 - DNA, 26 bp, Homo sapiens
  source 1..26: mol_type = genomic DNA
cgggttcgatccccggcatctccacc

SEQ ID NO: 35966 - DNA, 27 bp, Homo sapiens
  source 1..27: mol_type = genomic DNA
cgggttcgatccccggcatctccacca

SEQ ID NO: 35967 - DNA, 22 bp, Homo sapiens
  source 1..22: mol_type = genomic DNA
cgggttcgatccccgtacgggc

SEQ ID NO: 35968 - DNA, 23 bp, Homo sapiens
  source 1..23: mol_type = genomic DNA
cgggttcgatccccgtacgggcc

SEQ ID NO: 35969 - DNA, 24 bp, Homo sapiens
  source 1..24: mol_type = genomic DNA
cgggttcgatccccgtacgggcca

SEQ ID NO: 35970 - DNA, 25 bp, Homo sapiens
  source 1..25: mol_type = genomic DNA
cgggttcgatccccgtacgggccac

SEQ ID NO: 35971 - DNA, 26 bp, Homo sapiens
  source 1..26: mol_type = genomic DNA
cgggttcgatccccgtacgggccacc

SEQ ID NO: 35972 - DNA, 25 bp, Homo sapiens
  source 1..25: mol_type = genomic DNA
cgggttcgattcccggccagggaac

SEQ ID NO: 35973 - DNA, 21 bp, Homo sapiens
  source 1..21: mol_type = genomic DNA
cgggttcgattcccgggcggc

SEQ ID NO: 35974 - DNA, 22 bp, Homo sapiens
  source 1..22: mol_type = genomic DNA
cgggttcgattcccgggcggcg

SEQ ID NO: 35975 - DNA, 23 bp, Homo sapiens
  source 1..23: mol_type = genomic DNA
cgggttcgattcccgggcggcgc

SEQ ID NO: 35976 - DNA, 24 bp, Homo sapiens
  source 1..24: mol_type = genomic DNA
cgggttcgattcccgggcggcgca

SEQ ID NO: 35977 - DNA, 25 bp, Homo sapiens
  source 1..25: mol_type = genomic DNA
cgggttcgattcccgggcggcgcac

SEQ ID NO: 35978 - DNA, 21 bp, Homo sapiens
  source 1..21: mol_type = genomic DNA
cgggttcgattcccggtcagg

SEQ ID NO: 35979 - DNA, 22 bp, Homo sapiens
  source 1..22: mol_type = genomic DNA
cgggttcgattcccggtcaggg

SEQ ID NO: 35980 - DNA, 23 bp, Homo sapiens
  source 1..23: mol_type = genomic DNA
cgggttcgattcccggtcaggga

SEQ ID NO: 35981 - DNA, 24 bp, Homo sapiens
  source 1..24: mol_type = genomic DNA
cgggttcgattcccggtcagggaa

SEQ ID NO: 35982 - DNA, 25 bp, Homo sapiens
  source 1..25: mol_type = genomic DNA
cgggttcgattcccggtcagggaac

SEQ ID NO: 35983 - DNA, 26 bp, Homo sapiens
  source 1..26: mol_type = genomic DNA
cgggttcgattcccggtcagggaacc

SEQ ID NO: 35984 - DNA, 27 bp, Homo sapiens
  source 1..27: mol_type = genomic DNA
cgggttcgattcccggtcagggaacca

SEQ ID NO: 35985 - DNA, 25 bp, Homo sapiens
  source 1..25: mol_type = genomic DNA
cgggttcgattcccggtcatggaac

SEQ ID NO: 35986 - DNA, 26 bp, Homo sapiens
  source 1..26: mol_type = genomic DNA
cggtaatcgcataaaacttaaaactt

SEQ ID NO: 35987 - DNA, 27 bp, Homo sapiens
  source 1..27: mol_type = genomic DNA
cggtaatcgcataaaacttaaaacttt

SEQ ID NO: 35988 - DNA, 30 bp, Homo sapiens; identical to SEQ ID NO: 12717
  source 1..30: mol_type = genomic DNA

SEQ ID NO: 35989 - DNA, 16 bp, Homo sapiens
  source 1..16: mol_type = genomic DNA
cggtagagcatcagac

SEQ ID NO: 35990 - DNA, 17 bp, Homo sapiens
  source 1..17: mol_type = genomic DNA
cggtagagcatcagact

SEQ ID NO: 35991 - DNA, 19 bp, Homo sapiens
  source 1..19: mol_type = genomic DNA
cggtagagcatcagacttt

SEQ ID NO: 35992 - DNA, 16 bp, Homo sapiens
  source 1..16: mol_type = genomic DNA
cggtagagcatgagac

SEQ ID NO: 35993 - DNA, 17 bp, Homo sapiens
  source 1..17: mol_type = genomic DNA
cggtagagcatgagacc

SEQ ID NO: 35994 - DNA, 18 bp, Homo sapiens
  source 1..18: mol_type = genomic DNA
cggtagagcatgagaccc

SEQ ID NO: 35995 - DNA, 17 bp, Homo sapiens
  source 1..17: mol_type = genomic DNA
cggtagagcatgagact

SEQ ID NO: 35996 - DNA, 18 bp, Homo sapiens
  source 1..18: mol_type = genomic DNA
cggtagagcatgagactc

SEQ ID NO: 35997 - DNA, 19 bp, Homo sapiens
  source 1..19: mol_type = genomic DNA
cggtagagcatgagactct

SEQ ID NO: 35998 - DNA, 24 bp, Homo sapiens
  source 1..24: mol_type = genomic DNA
cggtagagcatgagactcttaatc

SEQ ID NO: 35999 - DNA, 25 bp, Homo sapiens
  source 1..25: mol_type = genomic DNA
cggtagagcatgagactcttaatct

SEQ ID NO: 36000 - DNA, 26 bp, Homo sapiens
  source 1..26: mol_type = genomic DNA
cggtagagcatgagactcttaatctc

SEQ ID NO: 36001 - DNA, 36 bp, Homo sapiens; identical to SEQ ID NO: 12751
  source 1..36: mol_type = genomic DNA

SEQ ID NO: 36002 - DNA, 39 bp, Homo sapiens; identical to SEQ ID NO: 12753
  source 1..39: mol_type = genomic DNA

SEQ ID NO: 36003 - DNA, 16 bp, Homo sapiens
  source 1..16: mol_type = genomic DNA
cggtagagcatgggac

SEQ ID NO: 36004 - DNA, 17 bp, Homo sapiens
  source 1..17: mol_type = genomic DNA
cggtagagcatgggact

SEQ ID NO: 36005 - DNA, 18 bp, Homo sapiens
  source 1..18: mol_type = genomic DNA
cggtagagcatgggactc

SEQ ID NO: 36006 - DNA, 19 bp, Homo sapiens
  source 1..19: mol_type = genomic DNA
cggtagagcatgggactct

SEQ ID NO: 36007 - DNA, 25 bp, Homo sapiens
  source 1..25: mol_type = genomic DNA
cggtagagcatgggactcttaatcc

SEQ ID NO: 36008 - DNA, 26 bp, Homo sapiens
  source 1..26: mol_type = genomic DNA
cggtagagcatgggactcttaatccc

SEQ ID NO: 36009 - DNA, 36 bp, Homo sapiens; identical to SEQ ID NO: 12766
  source 1..36: mol_type = genomic DNA

SEQ ID NO: 36010 - DNA, 39 bp, Homo sapiens; identical to SEQ ID NO: 12767
  source 1..39: mol_type = genomic DNA

SEQ ID NO: 36011 - DNA, 19 bp, Homo sapiens
  source 1..19: mol_type = genomic DNA
cggtagagcatttgactgc

SEQ ID NO: 36012 - DNA, 16 bp, Homo sapiens
  source 1..16: mol_type = genomic DNA
cggtagcgcgtctgac

SEQ ID NO: 36013 - DNA, 17 bp, Homo sapiens
  source 1..17: mol_type = genomic DNA
cggtagcgcgtctgact

SEQ ID NO: 36014 - DNA, 19 bp, Homo sapiens
  source 1..19: mol_type = genomic DNA
cggtagcgcgtctgactcc

SEQ ID NO: 36015 - DNA, 24 bp, Homo sapiens
  source 1..24: mol_type = genomic DNA
cggtagcgcgtctgactccagatc

SEQ ID NO: 36016 - DNA, 16 bp, Homo sapiens
  source 1..16: mol_type = genomic DNA
cggtctaaggcgctgc

SEQ ID NO: 36017 - DNA, 17 bp, Homo sapiens
  source 1..17: mol_type = genomic DNA
cggtctaaggcgctgcg

SEQ ID NO: 36018 - DNA, 17 bp, Homo sapiens
  source 1..17: mol_type = genomic DNA
cggtctaaggcgctgga

SEQ ID NO: 36019 - DNA, 19 bp, Homo sapiens
  source 1..19: mol_type = genomic DNA
cggtctaaggcgctggatt

SEQ ID NO: 36020 - DNA, 17 bp, Homo sapiens
  source 1..17: mol_type = genomic DNA
cggttagcgcgcggtac

SEQ ID NO: 36021 - DNA, 19 bp, Homo sapiens
  source 1..19: mol_type = genomic DNA
cggttagcgcgcggtactt

SEQ ID NO: 36022 - DNA, 24 bp, Homo sapiens
  source 1..24: mol_type = genomic DNA
cggttagcgcgttcggctgttaac

SEQ ID NO: 36023 - DNA, 17 bp, Homo sapiens
  source 1..17: mol_type = genomic DNA
cggttagctcagtcggc

SEQ ID NO: 36024 - DNA, 17 bp, Homo sapiens
  source 1..17: mol_type = genomic DNA
cggttaggattcctggt

SEQ ID NO: 36025 - DNA, 18 bp, Homo sapiens
  source 1..18: mol_type = genomic DNA
cggttaggattcctggtt

SEQ ID NO: 36026 - DNA, 20 bp, Homo sapiens
  source 1..20: mol_type = genomic DNA
cggttaggattcctggtttt

SEQ ID NO: 36027 - DNA, 21 bp, Homo sapiens
  source 1..21: mol_type = genomic DNA
cggttaggattcctggttttc

SEQ ID NO: 36028 - DNA, 22 bp, Homo sapiens
  source 1..22: mol_type = genomic DNA
cggttaggattcctggttttca

SEQ ID NO: 36029 - DNA, 23 bp, Homo sapiens
  source 1..23: mol_type = genomic DNA
cggttaggattcctggttttcac

SEQ ID NO: 36030 - DNA, 24 bp, Homo sapiens
  source 1..24: mol_type = genomic DNA
cggttaggattcctggttttcacc

SEQ ID NO: 36031 - DNA, 27 bp, Homo sapiens
  source 1..27: mol_type = genomic DNA
cggttaggattcctggttttcacccag

SEQ ID NO: 36032 - DNA, 28 bp, Homo sapiens
  source 1..28: mol_type = genomic DNA
cggttaggattcctggttttcacccagg

SEQ ID NO: 36033 - DNA, 29 bp, Homo sapiens
  source 1..29: mol_type = genomic DNA
cggttaggattcctggttttcacccaggc

SEQ ID NO: 36034 - DNA, 43 bp, Homo sapiens
  source 1..43: mol_type = genomic DNA
cggttaggattcctggttttcacccaggcggcccgggttcgac

SEQ ID NO: 36035 - DNA, 30 bp, Homo sapiens; identical to SEQ ID NO: 12805
  source 1..30: mol_type = genomic DNA

SEQ ID NO: 36036 - DNA, 16 bp, Homo sapiens
  source 1..16: mol_type = genomic DNA
cggttatcacgtctgc

SEQ ID NO: 36037 - DNA, 19 bp, Homo sapiens
  source 1..19: mol_type = genomic DNA
cggttcaaatccgggtgcc

SEQ ID NO: 36038 - DNA, 20 bp, Homo sapiens
  source 1..20: mol_type = genomic DNA
cggttcaaatccgggtgccc

SEQ ID NO: 36039 - DNA, 23 bp, Homo sapiens
  source 1..23: mol_type = genomic DNA
cggttcaaatccgggtgccccct

SEQ ID NO: 36040 - DNA, 16 bp, Homo sapiens
  source 1..16: mol_type = genomic DNA
cggttcgaaaccgggc

SEQ ID NO: 36041 - DNA, 22 bp, Homo sapiens
  source 1..22: mol_type = genomic DNA
cggttcgaaaccgggcggaaac

SEQ ID NO: 36042 - DNA, 23 bp, Homo sapiens
  source 1..23: mol_type = genomic DNA
cggttcgaaaccgggcggaaaca

SEQ ID NO: 36043 - DNA, 24 bp, Homo sapiens
  source 1..24: mol_type = genomic DNA
cggttcgaaaccgggcggaaacac

SEQ ID NO: 36044 - DNA, 25 bp, Homo sapiens
  source 1..25: mol_type = genomic DNA
cggttcgaaaccgggcggaaacacc

SEQ ID NO: 36045 - DNA, 22 bp, Homo sapiens
  source 1..22: mol_type = genomic DNA
cggttcgaatccgagtcacggc

SEQ ID NO: 36046 - DNA, 23 bp, Homo sapiens
  source 1..23: mol_type = genomic DNA
cggttcgaatccgagtcacggca

SEQ ID NO: 36047 - DNA, 24 bp, Homo sapiens
  source 1..24: mol_type = genomic DNA
cggttcgaatccgagtcacggcac

SEQ ID NO: 36048 - DNA, 25 bp, Homo sapiens
  source 1..25: mol_type = genomic DNA
cggttcgaatccgagtcacggcacc

SEQ ID NO: 36049 - DNA, 26 bp, Homo sapiens
  source 1..26: mol_type = genomic DNA
cggttcgaatccgagtcacggcacca

SEQ ID NO: 36050 - DNA, 21 bp, Homo sapiens
  source 1..21: mol_type = genomic DNA
cgtaaaccgaagatcgcgggt

SEQ ID NO: 36051 - DNA, 16 bp, Homo sapiens
  source 1..16: mol_type = genomic DNA
cgtagtcgtggccgag

SEQ ID NO: 36052 - DNA, 17 bp, Homo sapiens
  source 1..17: mol_type = genomic DNA
cgtagtcgtggccgagt

SEQ ID NO: 36053 - DNA, 19 bp, Homo sapiens
  source 1..19: mol_type = genomic DNA
cgtagtcgtggccgagtgg

SEQ ID NO: 36054 - DNA, 24 bp, Homo sapiens
  source 1..24: mol_type = genomic DNA
cgtagtcgtggccgagtggttaag

SEQ ID NO: 36055 - DNA, 28 bp, Homo sapiens
  source 1..28: mol_type = genomic DNA
cgtagtgtagtggtcatcacgttcgcct

SEQ ID NO: 36056 - DNA, 18 bp, Homo sapiens
  source 1..18: mol_type = genomic DNA
cgtagtgtagtggttatc

SEQ ID NO: 36057 - DNA, 27 bp, Homo sapiens
  source 1..27: mol_type = genomic DNA
cgtagtgtagtggttatcacgttcgcc

SEQ ID NO: 36058 - DNA, 28 bp, Homo sapiens
  source 1..28: mol_type = genomic DNA
cgtagtgtagtggttatcacgttcgcct

SEQ ID NO: 36059 - DNA, 47 bp, Homo sapiens
  source 1..47: mol_type = genomic DNA
cgtagtgtagtggttatcacgttcgcctcacacgcgaaaggtccccg

SEQ ID NO: 36060 - DNA, 19 bp, Homo sapiens
  source 1..19: mol_type = genomic DNA
cgtatagtggttagtactc

SEQ ID NO: 36061 - DNA, 21 bp, Homo sapiens
  source 1..21: mol_type = genomic DNA
cgtatagtggttagtactctg

SEQ ID NO: 36062 - DNA, 22 bp, Homo sapiens
  source 1..22: mol_type = genomic DNA
cgtatagtggttagtactctgc

SEQ ID NO: 36063 - DNA, 23 bp, Homo sapiens
  source 1..23: mol_type = genomic DNA
cgtatagtggttagtactctgcg

SEQ ID NO: 36064 - DNA, 24 bp, Homo sapiens
  source 1..24: mol_type = genomic DNA
cgtatagtggttagtactctgcgt

SEQ ID NO: 36065 - DNA, 25 bp, Homo sapiens
  source 1..25: mol_type = genomic DNA
cgtatagtggttagtactctgcgtt

SEQ ID NO: 36066 - DNA, 31 bp, Homo sapiens; identical to SEQ ID NO: 12890
  source 1..31: mol_type = genomic DNA

SEQ ID NO: 36067 - DNA, 36 bp, Homo sapiens
  source 1..36: mol_type = genomic DNA
cgtatagtggttagtactctgcgttgtggccgcagc

SEQ ID NO: 36068 - DNA, 40 bp, Homo sapiens; identical to SEQ ID NO: 12892
  source 1..40: mol_type = genomic DNA

SEQ ID NO: 36069 - DNA, 41 bp, Homo sapiens; identical to SEQ ID NO: 12893
  source 1..41: mol_type = genomic DNA

SEQ ID NO: 36070 - DNA, 37 bp, Homo sapiens; identical to SEQ ID NO: 12903
  source 1..37: mol_type = genomic DNA

SEQ ID NO: 36071 - DNA, 38 bp, Homo sapiens; identical to SEQ ID NO: 12904
  source 1..38: mol_type = genomic DNA

SEQ ID NO: 36072 - DNA, 19 bp, Homo sapiens
  source 1..19: mol_type = genomic DNA
cgtgatcgtatagtggtta

SEQ ID NO: 36073 - DNA, 22 bp, Homo sapiens
  source 1..22: mol_type = genomic DNA
cgtgatcgtatagtggttagta

SEQ ID NO: 36074 - DNA, 23 bp, Homo sapiens
  source 1..23: mol_type = genomic DNA
cgtgatcgtatagtggttagtac

SEQ ID NO: 36075 - DNA, 24 bp, Homo sapiens
  source 1..24: mol_type = genomic DNA
cgtgatcgtatagtggttagtact

SEQ ID NO: 36076 - DNA, 25 bp, Homo sapiens
  source 1..25: mol_type = genomic DNA
cgtgatcgtatagtggttagtactc

SEQ ID NO: 36077 - DNA, 26 bp, Homo sapiens
  source 1..26: mol_type = genomic DNA
cgtgatcgtatagtggttagtactct

SEQ ID NO: 36078 - DNA, 27 bp, Homo sapiens
  source 1..27: mol_type = genomic DNA
cgtgatcgtatagtggttagtactctg

SEQ ID NO: 36079 - DNA, 28 bp, Homo sapiens
  source 1..28: mol_type = genomic DNA
cgtgatcgtatagtggttagtactctgc

SEQ ID NO: 36080 - DNA, 29 bp, Homo sapiens
  source 1..29: mol_type = genomic DNA
cgtgatcgtatagtggttagtactctgcg

SEQ ID NO: 36081 - DNA, 30 bp, Homo sapiens; identical to SEQ ID NO: 12928
  source 1..30: mol_type = genomic DNA

SEQ ID NO: 36082 - DNA, 31 bp, Homo sapiens; identical to SEQ ID NO: 12929
  source 1..31: mol_type = genomic DNA

SEQ ID NO: 36083 - DNA, 32 bp, Homo sapiens; identical to SEQ ID NO: 12930
  source 1..32: mol_type = genomic DNA

SEQ ID NO: 36084 - DNA, 33 bp, Homo sapiens; identical to SEQ ID NO: 12931
  source 1..33: mol_type = genomic DNA

SEQ ID NO: 36085 - DNA, 34 bp, Homo sapiens; identical to SEQ ID NO: 12932
  source 1..34: mol_type = genomic DNA

SEQ ID NO: 36086 - DNA, 36 bp, Homo sapiens; identical to SEQ ID NO: 12934
  source 1..36: mol_type = genomic DNA

SEQ ID NO: 36087 - DNA, 46 bp, Homo sapiens; identical to SEQ ID NO: 12938
  source 1..46: mol_type = genomic DNA

SEQ ID NO: 36088 - DNA, 47 bp, Homo sapiens; identical to SEQ ID NO: 12939
  source 1..47: mol_type = genomic DNA

SEQ ID NO: 36089 - DNA, 18 bp, Homo sapiens
  source 1..18: mol_type = genomic DNA
cgtgctgggcccataacc

SEQ ID NO: 36090 - DNA, 19 bp, Homo sapiens
  source 1..19: mol_type = genomic DNA
cgtgctgggcccataaccc

SEQ ID NO: 36091 - DNA, 22 bp, Homo sapiens
  source 1..22: mol_type = genomic DNA
cgtgctgggcccataacccaga

SEQ ID NO: 36092 - DNA, 27 bp, Homo sapiens
  source 1..27: mol_type = genomic DNA
cgtgctgggcccataacccagaggtcg

SEQ ID NO: 36093 - DNA, 29 bp, Homo sapiens
  source 1..29: mol_type = genomic DNA
cgtgctgggcccataacccagaggtcgat

SEQ ID NO: 36094 - DNA, 30 bp, Homo sapiens; identical to SEQ ID NO: 12946
  source 1..30: mol_type = genomic DNA

SEQ ID NO: 36095 - DNA, 32 bp, Homo sapiens; identical to SEQ ID NO: 12948
  source 1..32: mol_type = genomic DNA

SEQ ID NO: 36096 - DNA, 33 bp, Homo sapiens; identical to SEQ ID NO: 12949
  source 1..33: mol_type = genomic DNA

SEQ ID NO: 36097 - DNA, 35 bp, Homo sapiens; identical to SEQ ID NO: 12951
  source 1..35: mol_type = genomic DNA

SEQ ID NO: 36098 - DNA, 19 bp, Homo sapiens
  source 1..19: mol_type = genomic DNA
cgtggccgagcggtctaag

SEQ ID NO: 36099 - DNA, 19 bp, Homo sapiens
  source 1..19: mol_type = genomic DNA
cgtggccgagtggttaagg

SEQ ID NO: 36100 - DNA, 20 bp, Homo sapiens
  source 1..20: mol_type = genomic DNA
cgtggccgagtggttaaggc

SEQ ID NO: 36101 - DNA, 28 bp, Homo sapiens
  source 1..28: mol_type = genomic DNA
cgtgggttcgaatcccaccctcgtcgcc

SEQ ID NO: 36102 - DNA, 26 bp, Homo sapiens
  source 1..26: mol_type = genomic DNA
cgtgggttcgaatcccaccgctgcca

SEQ ID NO: 36103 - DNA, 28 bp, Homo sapiens
  source 1..28: mol_type = genomic DNA
cgtgggttcgaatcccaccgctgccacc

SEQ ID NO: 36104 - DNA, 28 bp, Homo sapiens
  source 1..28: mol_type = genomic DNA
cgtgggttcgaatcccaccttcgtcgcc

SEQ ID NO: 36105 - DNA, 26 bp, Homo sapiens
  source 1..26: mol_type = genomic DNA
cgtgggttcgaatcccatcctcgtcg

SEQ ID NO: 36106 - DNA, 27 bp, Homo sapiens
  source 1..27: mol_type = genomic DNA
cgtgggttcgaatcccatcctcgtcgc

SEQ ID NO: 36107 - DNA, 28 bp, Homo sapiens
  source 1..28: mol_type = genomic DNA
cgtgggttcgaatcccatcctcgtcgcc

SEQ ID NO: 36108 - DNA, 29 bp, Homo sapiens
  source 1..29: mol_type = genomic DNA
cgtgggttcgaatcccatcctcgtcgcca

SEQ ID NO: 36109 - DNA, 25 bp, Homo sapiens
  source 1..25: mol_type = genomic DNA
cgtgggttcgagccccacgttgggc

SEQ ID NO: 36110 - DNA, 26 bp, Homo sapiens
  source 1..26: mol_type = genomic DNA
cgtgggttcgagccccacgttgggcg

SEQ ID NO: 36111 - DNA, 27 bp, Homo sapiens
  source 1..27: mol_type = genomic DNA
cgtgggttcgagccccacgttgggcgc

SEQ ID NO: 36112 - DNA, 28 bp, Homo sapiens
  source 1..28: mol_type = genomic DNA
cgtgggttcgagccccacgttgggcgcc

SEQ ID NO: 36113 - DNA, 29 bp, Homo sapiens
  source 1..29: mol_type = genomic DNA
cgtgggttcgagccccacgttgggcgcca

SEQ ID NO: 36114 - DNA, 22 bp, Homo sapiens
  source 1..22: mol_type = genomic DNA
cgtggttgtagtccgtgcgaga

SEQ ID NO: 36115 - DNA, 23 bp, Homo sapiens
  source 1..23: mol_type = genomic DNA
cgtggttgtagtccgtgcgagaa

SEQ ID NO: 36116 - DNA, 24 bp, Homo sapiens
  source 1..24: mol_type = genomic DNA
cgtggttgtagtccgtgcgagaat

SEQ ID NO: 36117 - DNA, 25 bp, Homo sapiens
  source 1..25: mol_type = genomic DNA
cgtggttgtagtccgtgcgagaata

SEQ ID NO: 36118 - DNA, 27 bp, Homo sapiens
  source 1..27: mol_type = genomic DNA
cgtggttgtagtccgtgcgagaatacc

SEQ ID NO: 36119 - DNA, 28 bp, Homo sapiens
  source 1..28: mol_type = genomic DNA
cgtggttgtagtccgtgcgagaatacca

SEQ ID NO: 36120 - DNA, 24 bp, Homo sapiens
  source 1..24: mol_type = genomic DNA
cgtgttcaaatcacgtcggggtca

SEQ ID NO: 36121 - DNA, 25 bp, Homo sapiens
  source 1..25: mol_type = genomic DNA
cgtgttcaaatcacgtcggggtcac

SEQ ID NO: 36122 - DNA, 26 bp, Homo sapiens
  source 1..26: mol_type = genomic DNA
cgtgttcaaatcacgtcggggtcacc

SEQ ID NO: 36123 - DNA, 25 bp, Homo sapiens
  source 1..25: mol_type = genomic DNA
cgtgttcaagtcacgtcggggtcac

SEQ ID NO: 36124 - DNA, 26 bp, Homo sapiens
  source 1..26: mol_type = genomic DNA
cgtgttcaagtcacgtcggggtcacc

SEQ ID NO: 36125 - DNA, 24 bp, Homo sapiens
  source 1..24: mol_type = genomic DNA
cgtgttcgaatcacgtcggggtca

SEQ ID NO: 36126 - DNA, 25 bp, Homo sapiens
  source 1..25: mol_type = genomic DNA
cgtgttcgaatcacgtcggggtcac

SEQ ID NO: 36127 - DNA, 26 bp, Homo sapiens
  source 1..26: mol_type = genomic DNA
cgtgttcgaatcacgtcggggtcacc

SEQ ID NO: 36128 - DNA, 28 bp, Homo sapiens
  source 1..28: mol_type = genomic DNA
cgttaacttccaattaactagttttgac

SEQ ID NO: 36129 - DNA, 16 bp, Homo sapiens
  source 1..16: mol_type = genomic DNA
cgttcaggtcgcagtc

SEQ ID NO: 36130 - DNA, 18 bp, Homo sapiens
  source 1..18: mol_type = genomic DNA
cgttcaggtcgcagtctc

SEQ ID NO: 36131 - DNA, 19 bp, Homo sapiens
  source 1..19: mol_type = genomic DNA
cgttcaggtcgcagtctcc

SEQ ID NO: 36132 - DNA, 20 bp, Homo sapiens
  source 1..20: mol_type = genomic DNA
cgttcaggtcgcagtctccc

SEQ ID NO: 36133 - DNA, 16 bp, Homo sapiens
  source 1..16: mol_type = genomic DNA
cgttcggctgttaacc

SEQ ID NO: 36134 - DNA, 27 bp, Homo sapiens
  source 1..27: mol_type = genomic DNA
cgttggtctaggggtatgattctcgct

SEQ ID NO: 36135 - DNA, 28 bp, Homo sapiens
  source 1..28: mol_type = genomic DNA
cgttggtctaggggtatgattctcgctt

SEQ ID NO: 36136 - DNA, 22 bp, Homo sapiens
  source 1..22: mol_type = genomic DNA
cgttggtggtatagtggtgagc

SEQ ID NO: 36137 - DNA, 34 bp, Homo sapiens; identical to SEQ ID NO: 13076
  source 1..34: mol_type = genomic DNA

SEQ ID NO: 36138 - DNA, 33 bp, Homo sapiens; identical to SEQ ID NO: 13077
  source 1..33: mol_type = genomic DNA

SEQ ID NO: 36139 - DNA, 34 bp, Homo sapiens; identical to SEQ ID NO: 13078
  source 1..34: mol_type = genomic DNA

SEQ ID NO: 36140 - DNA, 37 bp, Homo sapiens
  source 1..37: mol_type = genomic DNA
ctaaaaggttggtggttcgaacccacccagaggcgcc

SEQ ID NO: 36141 - DNA, 20 bp, Homo sapiens
  source 1..20: mol_type = genomic DNA
ctaaaccatcctctgctacc

SEQ ID NO: 36142 - DNA, 33 bp, Homo sapiens; identical to SEQ ID NO: 13094
  source 1..33: mol_type = genomic DNA

SEQ ID NO: 36143 - DNA, 34 bp, Homo sapiens; identical to SEQ ID NO: 13095
  source 1..34: mol_type = genomic DNA

SEQ ID NO: 36144 - DNA, 35 bp, Homo sapiens; identical to SEQ ID NO: 13097
  source 1..35: mol_type = genomic DNA

SEQ ID NO: 36145 - DNA, 36 bp, Homo sapiens
  source 1..36: mol_type = genomic DNA
ctaaaggtccctggttcaatcccgggtttcggcacc

SEQ ID NO: 36146 - DNA, 32 bp, Homo sapiens
  source 1..32: mol_type = genomic DNA
ctaaaggtccctggttcgatcccgggtttcgg

SEQ ID NO: 36147 - DNA, 33 bp, Homo sapiens; identical to SEQ ID NO: 13099
  source 1..33: mol_type = genomic DNA

SEQ ID NO: 36148 - DNA, 34 bp, Homo sapiens; identical to SEQ ID NO: 13100
  source 1..34: mol_type = genomic DNA

SEQ ID NO: 36149 - DNA, 35 bp, Homo sapiens; identical to SEQ ID NO: 13101
  source 1..35: mol_type = genomic DNA

SEQ ID NO: 36150 - DNA, 36 bp, Homo sapiens; identical to SEQ ID NO: 13102
  source 1..36: mol_type = genomic DNA

SEQ ID NO: 36151 - DNA, 37 bp, Homo sapiens; identical to SEQ ID NO: 13103
  source 1..37: mol_type = genomic DNA

SEQ ID NO: 36152 - DNA, 17 bp, Homo sapiens
  source 1..17: mol_type = genomic DNA
ctaaataagctatcggg

SEQ ID NO: 36153 - DNA, 20 bp, Homo sapiens
  source 1..20: mol_type = genomic DNA
ctaacaacatggctttctca

SEQ ID NO: 36154 - DNA, 22 bp, Homo sapiens
  source 1..22: mol_type = genomic DNA
ctaacaacatggctttctcacc

SEQ ID NO: 36155 - DNA, 23 bp, Homo sapiens
  source 1..23: mol_type = genomic DNA
ctaacaacatggctttctcacca

SEQ ID NO: 36156 - DNA, 42 bp, Homo sapiens; identical to SEQ ID NO: 13161
  source 1..42: mol_type = genomic DNA

SEQ ID NO: 36157 - DNA, 16 bp, Homo sapiens
  source 1..16: mol_type = genomic DNA
ctaagccagggattgt

SEQ ID NO: 36158 - DNA, 17 bp, Homo sapiens
  source 1..17: mol_type = genomic DNA
ctaagccagggattgtg

SEQ ID NO: 36159 - DNA, 18 bp, Homo sapiens
  source 1..18: mol_type = genomic DNA
ctaagccagggattgtgg

SEQ ID NO: 36160 - DNA, 20 bp, Homo sapiens
  source 1..20: mol_type = genomic DNA
ctaagccagggattgtgggt

SEQ ID NO: 36161 - DNA, 22 bp, Homo sapiens
  source 1..22: mol_type = genomic DNA
ctaagccagggattgtgggttc

SEQ ID NO: 36162 - DNA, 23 bp, Homo sapiens
  source 1..23: mol_type = genomic DNA
ctaagccagggattgtgggttcg

SEQ ID NO: 36163 - DNA, 30 bp, Homo sapiens; identical to SEQ ID NO: 13176
  source 1..30: mol_type = genomic DNA

SEQ ID NO: 36164 - DNA, 41 bp, Homo sapiens; identical to SEQ ID NO: 13186
  source 1..41: mol_type = genomic DNA

SEQ ID NO: 36165 - DNA, 42 bp, Homo sapiens; identical to SEQ ID NO: 13187
  source 1..42: mol_type = genomic DNA

SEQ ID NO: 36166 - DNA, 17 bp, Homo sapiens
  source 1..17: mol_type = genomic DNA
ctaatccagaggttccg

SEQ ID NO: 36167 - DNA, 18 bp, Homo sapiens
  source 1..18: mol_type = genomic DNA
ctaatccagaggttccgg

SEQ ID NO: 36168 - DNA, 42 bp, Homo sapiens; identical to SEQ ID NO: 13215
  source 1..42: mol_type = genomic DNA

SEQ ID NO: 36169 - DNA, 16 bp, Homo sapiens
  source 1..16: mol_type = genomic DNA
ctaatccattgtgctt

SEQ ID NO: 36170 - DNA, 17 bp, Homo sapiens
  source 1..17: mol_type = genomic DNA
ctaatccattgtgcttt

SEQ ID NO: 36171 - DNA, 16 bp, Homo sapiens
  source 1..16: mol_type = genomic DNA
ctaatggataaggcac

SEQ ID NO: 36172 - DNA, 18 bp, Homo sapiens
  source 1..18: mol_type = genomic DNA
ctaatggataaggcactg

SEQ ID NO: 36173 - DNA, 16 bp, Homo sapiens
  source 1..16: mol_type = genomic DNA
ctaatggataaggcat

SEQ ID NO: 36174 - DNA, 17 bp, Homo sapiens
  source 1..17: mol_type = genomic DNA
ctaatggataaggcatc

SEQ ID NO: 36175 - DNA, 22 bp, Homo sapiens
  source 1..22: mol_type = genomic DNA
ctaatggataaggcatcagcct

SEQ ID NO: 36176 - DNA, 31 bp, Homo sapiens; identical to SEQ ID NO: 13229
  source 1..31: mol_type = genomic DNA

SEQ ID NO: 36177 - DNA, 18 bp, Homo sapiens
  source 1..18: mol_type = genomic DNA
ctaatggataaggcattg

SEQ ID NO: 36178 - DNA, 22 bp, Homo sapiens
  source 1..22: mol_type = genomic DNA
ctaatggataaggcgtctgact

SEQ ID NO: 36179 - DNA, 32 bp, Homo sapiens; identical to SEQ ID NO: 13255
  source 1..32: mol_type = genomic DNA

SEQ ID NO: 36180 - DNA, 33 bp, Homo sapiens; identical to SEQ ID NO: 13256
  source 1..33: mol_type = genomic DNA

SEQ ID NO: 36181 - DNA, 17 bp, Homo sapiens
  source 1..17: mol_type = genomic DNA
ctaattcaaaggttccg

SEQ ID NO: 36182 - DNA, 18 bp, Homo sapiens
  source 1..18: mol_type = genomic DNA
ctaattcaaaggttccgg

SEQ ID NO: 36183 - DNA, 20 bp, Homo sapiens
  source 1..20: mol_type = genomic DNA
ctaattcaaaggttccgggt

SEQ ID NO: 36184 - DNA, 30 bp, Homo sapiens
  source 1..30: mol_type = genomic DNA
ctaattcaaaggttccgggttcgagtcccg

SEQ ID NO: 36185 - DNA, 40 bp, Homo sapiens
  source 1..40: mol_type = genomic DNA
ctaattcaaaggttccgggttcgagtcccggcggagtcgc

SEQ ID NO: 36186 - DNA, 41 bp, Homo sapiens; identical to SEQ ID NO: 13261
  source 1..41: mol_type = genomic DNA

SEQ ID NO: 36187 - DNA, 40 bp, Homo sapiens
  source 1..40: mol_type = genomic DNA
ctaattcaaaggttgtgggttcgaatcccaccagagtcgc

SEQ ID NO: 36188 - DNA, 41 bp, Homo sapiens; identical to SEQ ID NO: 13263
  source 1..41: mol_type = genomic DNA

SEQ ID NO: 36189 - DNA, 42 bp, Homo sapiens; identical to SEQ ID NO: 13264
  source 1..42: mol_type = genomic DNA

SEQ ID NO: 36190 - DNA, 41 bp, Homo sapiens; identical to SEQ ID NO: 13265
  source 1..41: mol_type = genomic DNA

SEQ ID NO: 36191 - DNA, 16 bp, Homo sapiens
  source 1..16: mol_type = genomic DNA
ctagcggttaggattc

SEQ ID NO: 36192 - DNA, 17 bp, Homo sapiens
  source 1..17: mol_type = genomic DNA
ctagcggttaggattcc

SEQ ID NO: 36193 - DNA, 18 bp, Homo sapiens
  source 1..18: mol_type = genomic DNA
ctagcggttaggattcct

SEQ ID NO: 36194 - DNA, 19 bp, Homo sapiens
  source 1..19: mol_type = genomic DNA
ctagcggttaggattcctg

SEQ ID NO: 36195 - DNA, 21 bp, Homo sapiens
  source 1..21: mol_type = genomic DNA
ctagcggttaggattcctggt

SEQ ID NO: 36196 - DNA, 22 bp, Homo sapiens
  source 1..22: mol_type = genomic DNA
ctagcggttaggattcctggtt

SEQ ID NO: 36197 - DNA, 24 bp, Homo sapiens
  source 1..24: mol_type = genomic DNA
ctagcggttaggattcctggtttt

SEQ ID NO: 36198 - DNA, 31 bp, Homo sapiens
  source 1..31: mol_type = genomic DNA
ctagcggttaggattcctggttttcacccag

SEQ ID NO: 36199 - DNA, 32 bp, Homo sapiens
  source 1..32: mol_type = genomic DNA
ctagcggttaggattcctggttttcacccagg

SEQ ID NO: 36200 - DNA, 16 bp, Homo sapiens
  source 1..16: mol_type = genomic DNA
ctagctcagtcggtag

SEQ ID NO: 36201 - DNA, 17 bp, Homo sapiens
  source 1..17: mol_type = genomic DNA
ctagctcagtcggtaga

SEQ ID NO: 36202 - DNA, 18 bp, Homo sapiens
  source 1..18: mol_type = genomic DNA
ctagctcagtcggtagag

SEQ ID NO: 36203 - DNA, 26 bp, Homo sapiens
  source 1..26: mol_type = genomic DNA
ctagctcagtcggtagagcatgagac

SEQ ID NO: 36204 - DNA, 27 bp, Homo sapiens
  source 1..27: mol_type = genomic DNA
ctagctcagtcggtagagcatgagact

SEQ ID NO: 36205 - DNA, 26 bp, Homo sapiens
  source 1..26: mol_type = genomic DNA
ctagctcagtcggtagagcatgggac

SEQ ID NO: 36206 - DNA, 27 bp, Homo sapiens
  source 1..27: mol_type = genomic DNA
ctagctcagtcggtagagcatgggact

SEQ ID NO: 36207 - DNA, 28 bp, Homo sapiens
  source 1..28: mol_type = genomic DNA
ctagctcagtcggtagagcatgggactc

SEQ ID NO: 36208 - DNA, 29 bp, Homo sapiens
  source 1..29: mol_type = genomic DNA
ctagctcagtcggtagagcatgggactct

SEQ ID NO: 36209 - DNA, 46 bp, Homo sapiens; identical to SEQ ID NO: 13307
  source 1..46: mol_type = genomic DNA

SEQ ID NO: 36210 - DNA, 34 bp, Homo sapiens; identical to SEQ ID NO: 13313
  source 1..34: mol_type = genomic DNA

SEQ ID NO: 36211 - DNA, 21 bp, Homo sapiens
  source 1..21: mol_type = genomic DNA
ctaggattcggcgctttcacc

SEQ ID NO: 36212 - DNA, 17 bp, Homo sapiens
  source 1..17: mol_type = genomic DNA
ctaggggtatgattctc

SEQ ID NO: 36213 - DNA, 20 bp, Homo sapiens
  source 1..20: mol_type = genomic DNA
ctaggggtatgattctcgct

SEQ ID NO: 36214 - DNA, 21 bp, Homo sapiens
  source 1..21: mol_type = genomic DNA
ctaggggtatgattctcgctt

SEQ ID NO: 36215 - DNA, 20 bp, Homo sapiens
  source 1..20: mol_type = genomic DNA
ctaggggtatgattctcggt

SEQ ID NO: 36216 - DNA, 21 bp, Homo sapiens
  source 1..21: mol_type = genomic DNA
ctaggggtatgattctcggtt

SEQ ID NO: 36217 - DNA, 27 bp, Homo sapiens
  source 1..27: mol_type = genomic DNA
ctaggttcgactcctggctggctcgcc

SEQ ID NO: 36218 - DNA, 20 bp, Homo sapiens
  source 1..20: mol_type = genomic DNA
ctagtggtatgattctcgct

SEQ ID NO: 36219 - DNA, 21 bp, Homo sapiens
  source 1..21: mol_type = genomic DNA
ctagtggtatgattctcgctt

SEQ ID NO: 36220 - DNA, 17 bp, Homo sapiens
  source 1..17: mol_type = genomic DNA
ctagtggttaggattcg

SEQ ID NO: 36221 - DNA, 19 bp, Homo sapiens
  source 1..19: mol_type = genomic DNA
ctagtggttaggattcggc

SEQ ID NO: 36222 - DNA, 20 bp, Homo sapiens
  source 1..20: mol_type = genomic DNA
ctagtggttaggattcggcg

SEQ ID NO: 36223 - DNA, 21 bp, Homo sapiens
  source 1..21: mol_type = genomic DNA
ctagtggttaggattcggcgc

SEQ ID NO: 36224 - DNA, 22 bp, Homo sapiens
  source 1..22: mol_type = genomic DNA
ctagtggttaggattcggcgct

SEQ ID NO: 36225 - DNA, 23 bp, Homo sapiens
  source 1..23: mol_type = genomic DNA
ctagtggttaggattcggcgctc

SEQ ID NO: 36226 - DNA, 24 bp, Homo sapiens
  source 1..24: mol_type = genomic DNA
ctagtggttaggattcggcgctct

SEQ ID NO: 36227 - DNA, 28 bp, Homo sapiens
  source 1..28: mol_type = genomic DNA
ctagtggttaggattcggcgctctcacc

SEQ ID NO: 36228 - DNA, 31 bp, Homo sapiens; identical to SEQ ID NO: 13363
  source 1..31: mol_type = genomic DNA

SEQ ID NO: 36229 - DNA, 38 bp, Homo sapiens; identical to SEQ ID NO: 13365
  source 1..38: mol_type = genomic DNA

SEQ ID NO: 36230 - DNA, 16 bp, Homo sapiens
  source 1..16: mol_type = genomic DNA
ctatcgggcccatacc

SEQ ID NO: 36231 - DNA, 31 bp, Homo sapiens; identical to SEQ ID NO: 13414
  source 1..31: mol_type = genomic DNA

SEQ ID NO: 36232 - DNA, 32 bp, Homo sapiens; identical to SEQ ID NO: 13415
  source 1..32: mol_type = genomic DNA

SEQ ID NO: 36233 - DNA, 16 bp, Homo sapiens
  source 1..16: mol_type = genomic DNA
ctcaagttctggtctc

SEQ ID NO: 36234 - DNA, 17 bp, Homo sapiens
  source 1..17: mol_type = genomic DNA
ctcaagttctggtctcc

SEQ ID NO: 36235 - DNA, 20 bp, Homo sapiens
  source 1..20: mol_type = genomic DNA
ctcaagttctggtctccgga

SEQ ID NO: 36236 - DNA, 17 bp, Homo sapiens
  source 1..17: mol_type = genomic DNA
ctcacaagaactgctaa

SEQ ID NO: 36237 - DNA, 18 bp, Homo sapiens
  source 1..18: mol_type = genomic DNA
ctcacaagaactgctaac

SEQ ID NO: 36238 - DNA, 19 bp, Homo sapiens
  source 1..19: mol_type = genomic DNA
ctcacaagaactgctaact

SEQ ID NO: 36239 - DNA, 28 bp, Homo sapiens
  source 1..28: mol_type = genomic DNA
ctcacaagaactgctaactcatgccccc

SEQ ID NO: 36240 - DNA, 46 bp, Homo sapiens; identical to SEQ ID NO: 13478
  source 1..46: mol_type = genomic DNA

SEQ ID NO: 36241 - DNA, 16 bp, Homo sapiens
  source 1..16: mol_type = genomic DNA
ctcacacggggcacca

SEQ ID NO: 36242 - DNA, 17 bp, Homo sapiens
  source 1..17: mol_type = genomic DNA
ctcaccgccgcggcccg

SEQ ID NO: 36243 - DNA, 21 bp, Homo sapiens
  source 1..21: mol_type = genomic DNA
ctcaccgccgcggcccgggtt

SEQ ID NO: 36244 - DNA, 39 bp, Homo sapiens; identical to SEQ ID NO: 13508
  source 1..39: mol_type = genomic DNA

SEQ ID NO: 36245 - DNA, 40 bp, Homo sapiens; identical to SEQ ID NO: 13509
  source 1..40: mol_type = genomic DNA

SEQ ID NO: 36246 - DNA, 41 bp, Homo sapiens; identical to SEQ ID NO: 13510
  source 1..41: mol_type = genomic DNA

SEQ ID NO: 36247 - DNA, 42 bp, Homo sapiens; identical to SEQ ID NO: 13511
  source 1..42: mol_type = genomic DNA

SEQ ID NO: 36248 - DNA, 16 bp, Homo sapiens
  source 1..16: mol_type = genomic DNA
ctcacctggagcacca

SEQ ID NO: 36249 - DNA, 16 bp, Homo sapiens
  source 1..16: mol_type = genomic DNA
ctcagagggggcacca

SEQ ID NO: 36250 - DNA, 30 bp, Homo sapiens; identical to SEQ ID NO: 13523
  source 1..30: mol_type = genomic DNA

SEQ ID NO: 36251 - DNA, 32 bp, Homo sapiens; identical to SEQ ID NO: 13524
  source 1..32: mol_type = genomic DNA

SEQ ID NO: 36252 - DNA, 33 bp, Homo sapiens; identical to SEQ ID NO: 13525
  source 1..33: mol_type = genomic DNA

SEQ ID NO: 36253 - DNA, 34 bp, Homo sapiens; identical to SEQ ID NO: 13526
  source 1..34: mol_type = genomic DNA

SEQ ID NO: 36254 - DNA, 35 bp, Homo sapiens; identical to SEQ ID NO: 13527
  source 1..35: mol_type = genomic DNA

SEQ ID NO: 36255 - DNA, 22 bp, Homo sapiens
  source 1..22: mol_type = genomic DNA
ctcaggggtagagcatttgact

SEQ ID NO: 36256 - DNA, 34 bp, Homo sapiens; identical to SEQ ID NO: 13539
  source 1..34: mol_type = genomic DNA

SEQ ID NO: 36257 - DNA, 35 bp, Homo sapiens; identical to SEQ ID NO: 13540
  source 1..35: mol_type = genomic DNA

SEQ ID NO: 36258 - DNA, 36 bp, Homo sapiens; identical to SEQ ID NO: 13541
  source 1..36: mol_type = genomic DNA

SEQ ID NO: 36259 - DNA, 37 bp, Homo sapiens; identical to SEQ ID NO: 13542
  source 1..37: mol_type = genomic DNA

SEQ ID NO: 36260 - DNA, 28 bp, Homo sapiens
  source 1..28: mol_type = genomic DNA
ctcagtaagttgcaatacttaatttctg

SEQ ID NO: 36261 - DNA, 30 bp, Homo sapiens; identical to SEQ ID NO: 13557
  source 1..30: mol_type = genomic DNA

SEQ ID NO: 36262 - DNA, 31 bp, Homo sapiens; identical to SEQ ID NO: 13558
  source 1..31: mol_type = genomic DNA

SEQ ID NO: 36263 - DNA, 16 bp, Homo sapiens
  source 1..16: mol_type = genomic DNA
ctcagtcggtagagca

SEQ ID NO: 36264 - DNA, 18 bp, Homo sapiens
  source 1..18: mol_type = genomic DNA
ctcagtcggtagagcatc

SEQ ID NO: 36265 - DNA, 19 bp, Homo sapiens
  source 1..19: mol_type = genomic DNA
ctcagtcggtagagcatca

SEQ ID NO: 36266 - DNA, 22 bp, Homo sapiens
  source 1..22: mol_type = genomic DNA
ctcagtcggtagagcatcagac

SEQ ID NO: 36267 - DNA, 23 bp, Homo sapiens
  source 1..23: mol_type = genomic DNA
ctcagtcggtagagcatcagact

SEQ ID NO: 36268 - DNA, 25 bp, Homo sapiens
  source 1..25: mol_type = genomic DNA
ctcagtcggtagagcatcagacttt

SEQ ID NO: 36269 - DNA, 26 bp, Homo sapiens
  source 1..26: mol_type = genomic DNA
ctcagtcggtagagcatcagactttt

SEQ ID NO: 36270 - DNA, 18 bp, Homo sapiens
  source 1..18: mol_type = genomic DNA
ctcagtcggtagagcatg

SEQ ID NO: 36271 - DNA, 22 bp, Homo sapiens
  source 1..22: mol_type = genomic DNA
ctcagtcggtagagcatgagac

SEQ ID NO: 36272 - DNA, 23 bp, Homo sapiens
  source 1..23: mol_type = genomic DNA
ctcagtcggtagagcatgagact

SEQ ID NO: 36273 - DNA, 25 bp, Homo sapiens
  source 1..25: mol_type = genomic DNA
ctcagtcggtagagcatgagactct

SEQ ID NO: 36274 - DNA, 31 bp, Homo sapiens; identical to SEQ ID NO: 13586
  source 1..31: mol_type = genomic DNA

SEQ ID NO: 36275 - DNA, 32 bp, Homo sapiens; identical to SEQ ID NO: 13587
  source 1..32: mol_type = genomic DNA

SEQ ID NO: 36276 - DNA, 45 bp, Homo sapiens; identical to SEQ ID NO: 13589
  source 1..45: mol_type = genomic DNA

SEQ ID NO: 36277 - DNA, 22 bp, Homo sapiens
  source 1..22: mol_type = genomic DNA
ctcagtcggtagagcatgggac

SEQ ID NO: 36278 - DNA, 23 bp, Homo sapiens
  source 1..23: mol_type = genomic DNA
ctcagtcggtagagcatgggact

SEQ ID NO: 36279 - DNA, 24 bp, Homo sapiens
  source 1..24: mol_type = genomic DNA
ctcagtcggtagagcatgggactc

SEQ ID NO: 36280 - DNA, 25 bp, Homo sapiens
  source 1..25: mol_type = genomic DNA
ctcagtcggtagagcatgggactct

SEQ ID NO: 36281 - DNA, 26 bp, Homo sapiens
  source 1..26: mol_type = genomic DNA
ctcagtcggtagagcatgggactctt

SEQ ID NO: 36282 - DNA, 29 bp, Homo sapiens
  source 1..29: mol_type = genomic DNA
ctcagtcggtagagcatgggactcttaat

SEQ ID NO: 36283 - DNA, 30 bp, Homo sapiens
  source 1..30: mol_type = genomic DNA
ctcagtcggtagagcatgggactcttaatc

SEQ ID NO: 36284 - DNA, 31 bp, Homo sapiens; identical to SEQ ID NO: 13601
  source 1..31: mol_type = genomic DNA

SEQ ID NO: 36285 - DNA, 32 bp, Homo sapiens; identical to SEQ ID NO: 13602
  source 1..32: mol_type = genomic DNA

SEQ ID NO: 36286 - DNA, 45 bp, Homo sapiens; identical to SEQ ID NO: 13604
  source 1..45: mol_type = genomic DNA

SEQ ID NO: 36287 - DNA, 22 bp, Homo sapiens
  source 1..22: mol_type = genomic DNA
ctcagtggtagagcatttgact

SEQ ID NO: 36288 - DNA, 17 bp, Homo sapiens
  source 1..17: mol_type = genomic DNA
ctcataatctgaaggtc

SEQ ID NO: 36289 - DNA, 19 bp, Homo sapiens
  source 1..19: mol_type = genomic DNA
ctcataatctgaaggtcct

SEQ ID NO: 36290 - DNA, 20 bp, Homo sapiens
  source 1..20: mol_type = genomic DNA
ctcataatctgaaggtcctg

SEQ ID NO: 36291 - DNA, 43 bp, Homo sapiens
  source 1..43: mol_type = genomic DNA
ctcataatctgaaggtcctgagttcgaacctcagagggggcac

SEQ ID NO: 36292 - DNA, 44 bp, Homo sapiens; identical to SEQ ID NO: 13624
  source 1..44: mol_type = genomic DNA

SEQ ID NO: 36293 - DNA, 20 bp, Homo sapiens
  source 1..20: mol_type = genomic DNA
ctcataatctgaaggtcgtg

SEQ ID NO: 36294 - DNA, 44 bp, Homo sapiens
  source 1..44: mol_type = genomic DNA
ctcataatctgaaggtcgtgagttcgagcctcacacggggcacc

SEQ ID NO: 36295 - DNA, 43 bp, Homo sapiens
  source 1..43: mol_type = genomic DNA
ctcataatctgaaggtcgtgagttcgatcctcacacggggcac

SEQ ID NO: 36296 - DNA, 44 bp, Homo sapiens; identical to SEQ ID NO: 13630
  source 1..44: mol_type = genomic DNA

SEQ ID NO: 36297 - DNA, 29 bp, Homo sapiens
  source 1..29: mol_type = genomic DNA
ctcatgcccccatgtctaacaacatggct

SEQ ID NO: 36298 - DNA, 30 bp, Homo sapiens; identical to SEQ ID NO: 13645
  source 1..30: mol_type = genomic DNA

SEQ ID NO: 36299 - DNA, 38 bp, Homo sapiens
  source 1..38: mol_type = genomic DNA
ctccaatggaggcgtgggttcgaatcccacttctgaca

SEQ ID NO: 36300 - DNA, 39 bp, Homo sapiens
  source 1..39: mol_type = genomic DNA
ctccaatggaggcgtgggttcgaatcccacttctgacac

SEQ ID NO: 36301 - DNA, 17 bp, Homo sapiens
  source 1..17: mol_type = genomic DNA
ctccagatcagaaggct

SEQ ID NO: 36302 - DNA, 18 bp, Homo sapiens
  source 1..18: mol_type = genomic DNA
ctccagatcagaaggctg

SEQ ID NO: 36303 - DNA, 19 bp, Homo sapiens
  source 1..19: mol_type = genomic DNA
ctccagatcagaaggctgc

SEQ ID NO: 36304 - DNA, 24 bp, Homo sapiens
  source 1..24: mol_type = genomic DNA
ctccagatcagaaggctgcgtgtt

SEQ ID NO: 36305 - DNA, 25 bp, Homo sapiens
  source 1..25: mol_type = genomic DNA
ctccagatcagaaggctgcgtgttc

SEQ ID NO: 36306 - DNA, 44 bp, Homo sapiens; identical to SEQ ID NO: 13672
  source 1..44: mol_type = genomic DNA

SEQ ID NO: 36307 - DNA, 19 bp, Homo sapiens
  source 1..19: mol_type = genomic DNA
ctccagatcagaaggttgc

SEQ ID NO: 36308 - DNA, 25 bp, Homo sapiens
  source 1..25: mol_type = genomic DNA
ctccagatcagaaggttgcgtgttc

SEQ ID NO: 36309 - DNA, 44 bp, Homo sapiens
  source 1..44: mol_type = genomic DNA
ctccagtcatttcgatggcgtgggttcgaatcccaccgctgcca

SEQ ID NO: 36310 - DNA, 45 bp, Homo sapiens
  source 1..45: mol_type = genomic DNA
ctccagtcatttcgatggcgtgggttcgaatcccaccgctgccac

SEQ ID NO: 36311 - DNA, 46 bp, Homo sapiens; identical to SEQ ID NO: 13677
  source 1..46: mol_type = genomic DNA

SEQ ID NO: 36312 - DNA, 44 bp, Homo sapiens
  source 1..44: mol_type = genomic DNA
ctccagtctcttcggaggcgtgggttcgaatcccaccgctgcca

SEQ ID NO: 36313 - DNA, 45 bp, Homo sapiens; identical to SEQ ID NO: 13680
  source 1..45: mol_type = genomic DNA

SEQ ID NO: 36314 - DNA, 46 bp, Homo sapiens; identical to SEQ ID NO: 13681
  source 1..46: mol_type = genomic DNA

SEQ ID NO: 36315 - DNA, 44 bp, Homo sapiens
  source 1..44: mol_type = genomic DNA
ctccagtctcttcgggggcgtgggttcgaatcccaccactgcca

SEQ ID NO: 36316 - DNA, 46 bp, Homo sapiens
  source 1..46: mol_type = genomic DNA
ctccagtctcttcgggggcgtgggttcgaatcccaccactgccacc

SEQ ID NO: 36317 - DNA, 44 bp, Homo sapiens; identical to SEQ ID NO: 13687
  source 1..44: mol_type = genomic DNA

SEQ ID NO: 36318 - DNA, 45 bp, Homo sapiens; identical to SEQ ID NO: 13688
  source 1..45: mol_type = genomic DNA

SEQ ID NO: 36319 - DNA, 46 bp, Homo sapiens; identical to SEQ ID NO: 13689
  source 1..46: mol_type = genomic DNA

SEQ ID NO: 36320 - DNA, 16 bp, Homo sapiens
  source 1..16: mol_type = genomic DNA
ctcccggtatgggaac

SEQ ID NO: 36321 - DNA, 17 bp, Homo sapiens
  source 1..17: mol_type = genomic DNA
ctcccggtatgggaacc

SEQ ID NO: 36322 - DNA, 16 bp, Homo sapiens
  source 1..16: mol_type = genomic DNA
ctcccggtgtgggaac

SEQ ID NO: 36323 - DNA, 17 bp, Homo sapiens
  source 1..17: mol_type = genomic DNA
ctcccggtgtgggaacc

SEQ ID NO: 36324 - DNA, 18 bp, Homo sapiens
  source 1..18: mol_type = genomic DNA
ctcccggtgtgggaacca

SEQ ID NO: 36325 - DNA, 33 bp, Homo sapiens; identical to SEQ ID NO: 13726
  source 1..33: mol_type = genomic DNA

SEQ ID NO: 36326 - DNA, 34 bp, Homo sapiens; identical to SEQ ID NO: 13727
  source 1..34: mol_type = genomic DNA

SEQ ID NO: 36327 - DNA, 35 bp, Homo sapiens; identical to SEQ ID NO: 13728
  source 1..35: mol_type = genomic DNA

SEQ ID NO: 36328 - DNA, 36 bp, Homo sapiens; identical to SEQ ID NO: 13729
  source 1..36: mol_type = genomic DNA

SEQ ID NO: 36329 - DNA, 27 bp, Homo sapiens
  source 1..27: mol_type = genomic DNA
ctccgaggtgattttcatattgaattg

SEQ ID NO: 36330 - DNA, 28 bp, Homo sapiens
  source 1..28: mol_type = genomic DNA
ctccgaggtgattttcatattgaattgc

SEQ ID NO: 36331 - DNA, 29 bp, Homo sapiens
  source 1..29: mol_type = genomic DNA
ctccgaggtgattttcatattgaattgca

SEQ ID NO: 36332 - DNA, 19 bp, Homo sapiens
  source 1..19: mol_type = genomic DNA
ctccggagctggggattgt

SEQ ID NO: 36333 - DNA, 44 bp, Homo sapiens
  source 1..44: mol_type = genomic DNA
ctccggagctggggattgtgggttcgagtcccatctgggtcgcc

SEQ ID NO: 36334 - DNA, 39 bp, Homo sapiens
  source 1..39: mol_type = genomic DNA
ctccggatggaggcgtgggttcgaatcccacttctgaca

SEQ ID NO: 36335 - DNA, 40 bp, Homo sapiens
  source 1..40: mol_type = genomic DNA
ctccggatggaggcgtgggttcgaatcccacttctgacac

SEQ ID NO: 36336 - DNA, 41 bp, Homo sapiens
  source 1..41: mol_type = genomic DNA
ctccggatggaggcgtgggttcgaatcccacttctgacacc

SEQ ID NO: 36337 - DNA, 16 bp, Homo sapiens
  source 1..16: mol_type = genomic DNA
ctcctggctggctcac

SEQ ID NO: 36338 - DNA, 16 bp, Homo sapiens
  source 1..16: mol_type = genomic DNA
ctcctggctggctcgc

SEQ ID NO: 36339 - DNA, 17 bp, Homo sapiens
  source 1..17: mol_type = genomic DNA
ctcctggctggctcgcc

SEQ ID NO: 36340 - DNA, 18 bp, Homo sapiens
  source 1..18: mol_type = genomic DNA
ctcctggctggctcgcca

SEQ ID NO: 36341 - DNA, 16 bp, Homo sapiens
  source 1..16: mol_type = genomic DNA
ctcgctggggcctcca

SEQ ID NO: 36342 - DNA, 16 bp, Homo sapiens
  source 1..16: mol_type = genomic DNA
ctcggtggaacctcca

SEQ ID NO: 36343 - DNA, 16 bp, Homo sapiens
  source 1..16: mol_type = genomic DNA
ctcggtgggacctcca

SEQ ID NO: 36344 - DNA, 26 bp, Homo sapiens
  source 1..26: mol_type = genomic DNA
ctcggttcgaatccgagtcacggcac

SEQ ID NO: 36345 - DNA, 34 bp, Homo sapiens; identical to SEQ ID NO: 13830
  source 1..34: mol_type = genomic DNA

SEQ ID NO: 36346 - DNA, 16 bp, Homo sapiens
  source 1..16: mol_type = genomic DNA
ctctcaccgccgcggc

SEQ ID NO: 36347 - DNA, 17 bp, Homo sapiens
  source 1..17: mol_type = genomic DNA
ctctcaccgccgcggcc

SEQ ID NO: 36348 - DNA, 18 bp, Homo sapiens
  source 1..18: mol_type = genomic DNA
ctctcaccgccgcggccc

SEQ ID NO: 36349 - DNA, 41 bp, Homo sapiens; identical to SEQ ID NO: 13880
  source 1..41: mol_type = genomic DNA

SEQ ID NO: 36350 - DNA, 42 bp, Homo sapiens; identical to SEQ ID NO: 13881
  source 1..42: mol_type = genomic DNA

SEQ ID NO: 36351 - DNA, 44 bp, Homo sapiens; identical to SEQ ID NO: 13883
  source 1..44: mol_type = genomic DNA

SEQ ID NO: 36352 - DNA, 18 bp, Homo sapiens
  source 1..18: mol_type = genomic DNA
ctctgaatccagcgatcc

SEQ ID NO: 36353 - DNA, 19 bp, Homo sapiens
  source 1..19: mol_type = genomic DNA
ctctgaatccagcgatccg

SEQ ID NO: 36354 - DNA, 20 bp, Homo sapiens
  source 1..20: mol_type = genomic DNA
ctctgaatccagcgatccga

SEQ ID NO: 36355 - DNA, 21 bp, Homo sapiens
  source 1..21: mol_type = genomic DNA
ctctgaatccagcgatccgag

SEQ ID NO: 36356 - DNA, 22 bp, Homo sapiens
  source 1..22: mol_type = genomic DNA
ctctgaatccagcgatccgagt

SEQ ID NO: 36357 - DNA, 25 bp, Homo sapiens
  source 1..25: mol_type = genomic DNA
ctctgaatccagcgatccgagttca

SEQ ID NO: 36358 - DNA, 41 bp, Homo sapiens; identical to SEQ ID NO: 13897
  source 1..41: mol_type = genomic DNA

SEQ ID NO: 36359 - DNA, 42 bp, Homo sapiens
  source 1..42: mol_type = genomic DNA
ctctgaatccagcgatccgagttcaaatctcggtggaacctc

SEQ ID NO: 36360 - DNA, 16 bp, Homo sapiens
  source 1..16: mol_type = genomic DNA
ctctgcgttgtggccg

SEQ ID NO: 36361 - DNA, 17 bp, Homo sapiens
  source 1..17: mol_type = genomic DNA
ctctgcgttgtggccgc

SEQ ID NO: 36362 - DNA, 16 bp, Homo sapiens
  source 1..16: mol_type = genomic DNA
ctctggactctgaatc

SEQ ID NO: 36363 - DNA, 17 bp, Homo sapiens
  source 1..17: mol_type = genomic DNA
ctctggactctgaatcc

SEQ ID NO: 36364 - DNA, 18 bp, Homo sapiens
  source 1..18: mol_type = genomic DNA
ctctggactctgaatcca

SEQ ID NO: 36365 - DNA, 19 bp, Homo sapiens
  source 1..19: mol_type = genomic DNA
ctctggactctgaatccag

SEQ ID NO: 36366 - DNA, 20 bp, Homo sapiens
  source 1..20: mol_type = genomic DNA
ctctggactctgaatccagc

SEQ ID NO: 36367 - DNA, 21 bp, Homo sapiens
  source 1..21: mol_type = genomic DNA
ctctggactctgaatccagcg

SEQ ID NO: 36368 - DNA, 23 bp, Homo sapiens
  source 1..23: mol_type = genomic DNA
ctctggactctgaatccagcgat

SEQ ID NO: 36369 - DNA, 25 bp, Homo sapiens
  source 1..25: mol_type = genomic DNA
ctctggactctgaatccagcgatcc

SEQ ID NO: 36370 - DNA, 26 bp, Homo sapiens
  source 1..26: mol_type = genomic DNA
ctctggactctgaatccagcgatccg

SEQ ID NO: 36371 - DNA, 27 bp, Homo sapiens
  source 1..27: mol_type = genomic DNA
ctctggactctgaatccagcgatccga

SEQ ID NO: 36372 - DNA, 28 bp, Homo sapiens
  source 1..28: mol_type = genomic DNA
ctctggactctgaatccagcgatccgag

SEQ ID NO: 36373 - DNA, 29 bp, Homo sapiens
  source 1..29: mol_type = genomic DNA
ctctggactctgaatccagcgatccgagt

SEQ ID NO: 36374 - DNA, 30 bp, Homo sapiens; identical to SEQ ID NO: 13916
  source 1..30: mol_type = genomic DNA

SEQ ID NO: 36375 - DNA, 31 bp, Homo sapiens; identical to SEQ ID NO: 13917
  source 1..31: mol_type = genomic DNA

SEQ ID NO: 36376 - DNA, 32 bp, Homo sapiens; identical to SEQ ID NO: 13918
  source 1..32: mol_type = genomic DNA

SEQ ID NO: 36377 - DNA, 16 bp, Homo sapiens
  source 1..16: mol_type = genomic DNA
ctctggactttgaatc

SEQ ID NO: 36378 - DNA, 17 bp, Homo sapiens
  source 1..17: mol_type = genomic DNA
ctctggactttgaatcc

SEQ ID NO: 36379 - DNA, 16 bp, Homo sapiens
  source 1..16: mol_type = genomic DNA
ctctgtggaacctcca

SEQ ID NO: 36380 - DNA, 18 bp, Homo sapiens
  source 1..18: mol_type = genomic DNA
ctctgtggcgcaatggac

SEQ ID NO: 36381 - DNA, 19 bp, Homo sapiens
  source 1..19: mol_type = genomic DNA
ctcttaatcccagggtcgt

SEQ ID NO: 36382 - DNA, 19 bp, Homo sapiens
  source 1..19: mol_type = genomic DNA
ctcttaatctcagggtcgt

SEQ ID NO: 36383 - DNA, 24 bp, Homo sapiens
  source 1..24: mol_type = genomic DNA
ctcttaatctcagggtcgtgggtt

SEQ ID NO: 36384 - DNA, 44 bp, Homo sapiens
  source 1..44: mol_type = genomic DNA
ctcttaatctcagggtcgtgggttcgagccccacgttgggcgcc

SEQ ID NO: 36385 - DNA, 39 bp, Homo sapiens
  source 1..39: mol_type = genomic DNA
ctcttcggaggcgtgggttcgaatcccaccgctgccacc

SEQ ID NO: 36386 - DNA, 39 bp, Homo sapiens
  source 1..39: mol_type = genomic DNA
ctcttcgggggcgtgggttcgaatcccaccgctgccacc

SEQ ID NO: 36387 - DNA, 16 bp, Homo sapiens
  source 1..16: mol_type = genomic DNA
ctctttacagtgacca

SEQ ID NO: 36388 - DNA, 16 bp, Homo sapiens
  source 1..16: mol_type = genomic DNA
ctgaaaatgtttagac

SEQ ID NO: 36389 - DNA, 18 bp, Homo sapiens
  source 1..18: mol_type = genomic DNA
ctgaaaatgtttagacgg

SEQ ID NO: 36390 - DNA, 20 bp, Homo sapiens
  source 1..20: mol_type = genomic DNA
ctgaaaatgtttagacgggc

SEQ ID NO: 36391 - DNA, 21 bp, Homo sapiens
  source 1..21: mol_type = genomic DNA
ctgaaaatgtttagacgggct

SEQ ID NO: 36392 - DNA, 22 bp, Homo sapiens
  source 1..22: mol_type = genomic DNA
ctgaaaatgtttagacgggctc

SEQ ID NO: 36393 - DNA, 23 bp, Homo sapiens
  source 1..23: mol_type = genomic DNA
ctgaaaatgtttagacgggctca

SEQ ID NO: 36394 - DNA, 37 bp, Homo sapiens; identical to SEQ ID NO: 13968
  source 1..37: mol_type = genomic DNA

SEQ ID NO: 36395 - DNA, 16 bp, Homo sapiens
  source 1..16: mol_type = genomic DNA
ctgaaggtcctgagtt

SEQ ID NO: 36396 - DNA, 17 bp, Homo sapiens
  source 1..17: mol_type = genomic DNA
ctgaaggtcctgagttc

SEQ ID NO: 36397 - DNA, 18 bp, Homo sapiens
  source 1..18: mol_type = genomic DNA
ctgaaggtcctgagttcg

SEQ ID NO: 36398 - DNA, 34 bp, Homo sapiens; identical to SEQ ID NO: 13983
  source 1..34: mol_type = genomic DNA

SEQ ID NO: 36399 - DNA, 35 bp, Homo sapiens; identical to SEQ ID NO: 13984
  source 1..35: mol_type = genomic DNA

SEQ ID NO: 36400 - DNA, 36 bp, Homo sapiens; identical to SEQ ID NO: 13985
  source 1..36: mol_type = genomic DNA

SEQ ID NO: 36401 - DNA, 37 bp, Homo sapiens; identical to SEQ ID NO: 13986
  source 1..37: mol_type = genomic DNA

SEQ ID NO: 36402 - DNA, 34 bp, Homo sapiens; identical to SEQ ID NO: 13989
  source 1..34: mol_type = genomic DNA

SEQ ID NO: 36403 - DNA, 35 bp, Homo sapiens; identical to SEQ ID NO: 13990
  source 1..35: mol_type = genomic DNA

SEQ ID NO: 36404 - DNA, 36 bp, Homo sapiens; identical to SEQ ID NO: 13991
  source 1..36: mol_type = genomic DNA

SEQ ID NO: 36405 - DNA, 16 bp, Homo sapiens
  source 1..16: mol_type = genomic DNA
ctgaaggtcgtgagtt

SEQ ID NO: 36406 - DNA, 17 bp, Homo sapiens
  source 1..17: mol_type = genomic DNA
ctgaaggtcgtgagttc

SEQ ID NO: 36407 - DNA, 18 bp, Homo sapiens
  source 1..18: mol_type = genomic DNA
ctgaaggtcgtgagttcg

SEQ ID NO: 36408 - DNA, 24 bp, Homo sapiens
  source 1..24: mol_type = genomic DNA
ctgaaggtcgtgagttcgagcctc

SEQ ID NO: 36409 - DNA, 31 bp, Homo sapiens; identical to SEQ ID NO: 14000
  source 1..31: mol_type = genomic DNA

SEQ ID NO: 36410 - DNA, 32 bp, Homo sapiens
  source 1..32: mol_type = genomic DNA
ctgaaggtcgtgagttcgagcctcacacgggg

SEQ ID NO: 36411 - DNA, 33 bp, Homo sapiens; identical to SEQ ID NO: 14001
  source 1..33: mol_type = genomic DNA

SEQ ID NO: 36412 - DNA, 34 bp, Homo sapiens; identical to SEQ ID NO: 14002
  source 1..34: mol_type = genomic DNA

SEQ ID NO: 36413 - DNA, 35 bp, Homo sapiens; identical to SEQ ID NO: 14003
  source 1..35: mol_type = genomic DNA

SEQ ID NO: 36414 - DNA, 36 bp, Homo sapiens; identical to SEQ ID NO: 14004
  source 1..36: mol_type = genomic DNA

SEQ ID NO: 36415 - DNA, 37 bp, Homo sapiens; identical to SEQ ID NO: 14005
  source 1..37: mol_type = genomic DNA

SEQ ID NO: 36416 - DNA, 31 bp, Homo sapiens
  source 1..31: mol_type = genomic DNA
ctgaaggtcgtgagttcgatcctcacacggg

SEQ ID NO: 36417 - DNA, 34 bp, Homo sapiens; identical to SEQ ID NO: 14008
  source 1..34: mol_type = genomic DNA

SEQ ID NO: 36418 - DNA, 35 bp, Homo sapiens; identical to SEQ ID NO: 14009
  source 1..35: mol_type = genomic DNA

SEQ ID NO: 36419 - DNA, 36 bp, Homo sapiens; identical to SEQ ID NO: 14010
  source 1..36: mol_type = genomic DNA

SEQ ID NO: 36420 - DNA, 37 bp, Homo sapiens; identical to SEQ ID NO: 14011
  source 1..37: mol_type = genomic DNA

SEQ ID NO: 36421 - DNA, 16 bp, Homo sapiens
  source 1..16: mol_type = genomic DNA
ctgaatccagcgatcc

SEQ ID NO: 36422 - DNA, 17 bp, Homo sapiens
  source 1..17: mol_type = genomic DNA
ctgaatccagcgatccg

SEQ ID NO: 36423 - DNA, 18 bp, Homo sapiens
  source 1..18: mol_type = genomic DNA
ctgaatccagcgatccga

SEQ ID NO: 36424 - DNA, 19 bp, Homo sapiens
  source 1..19: mol_type = genomic DNA
ctgaatccagcgatccgag

SEQ ID NO: 36425 - DNA, 20 bp, Homo sapiens
  source 1..20: mol_type = genomic DNA
ctgaatccagcgatccgagt

SEQ ID NO: 36426 - DNA, 21 bp, Homo sapiens
  source 1..21: mol_type = genomic DNA
ctgaatccagcgatccgagtt

SEQ ID NO: 36427 - DNA, 22 bp, Homo sapiens
  source 1..22: mol_type = genomic DNA
ctgaatccagcgatccgagttc

SEQ ID NO: 36428 - DNA, 23 bp, Homo sapiens
  source 1..23: mol_type = genomic DNA
ctgaatccagcgatccgagttca

SEQ ID NO: 36429 - DNA, 39 bp, Homo sapiens; identical to SEQ ID NO: 14031
  source 1..39: mol_type = genomic DNA

SEQ ID NO: 36430 - DNA, 40 bp, Homo sapiens; identical to SEQ ID NO: 14032
  source 1..40: mol_type = genomic DNA

SEQ ID NO: 36431 - DNA, 41 bp, Homo sapiens; identical to SEQ ID NO: 14033
  source 1..41: mol_type = genomic DNA

SEQ ID NO: 36432 - DNA, 16 bp, Homo sapiens
  source 1..16: mol_type = genomic DNA
ctgacaacagaggctt

SEQ ID NO: 36433 - DNA, 21 bp, Homo sapiens
  source 1..21: mol_type = genomic DNA
ctgacaacagaggcttacgac

SEQ ID NO: 36434 - DNA, 24 bp, Homo sapiens
  source 1..24: mol_type = genomic DNA
ctgacaacagaggcttacgacccc

SEQ ID NO: 36435 - DNA, 33 bp, Homo sapiens; identical to SEQ ID NO: 14063
  source 1..33: mol_type = genomic DNA

SEQ ID NO: 36436 - DNA, 34 bp, Homo sapiens; identical to SEQ ID NO: 14064
  source 1..34: mol_type = genomic DNA

SEQ ID NO: 36437 - DNA, 35 bp, Homo sapiens; identical to SEQ ID NO: 14065
  source 1..35: mol_type = genomic DNA

SEQ ID NO: 36438 - DNA, 36 bp, Homo sapiens; identical to SEQ ID NO: 14066
  source 1..36: mol_type = genomic DNA

SEQ ID NO: 36439 - DNA, 21 bp, Homo sapiens
  source 1..21: mol_type = genomic DNA
ctgactccagatcagaaggct

SEQ ID NO: 36440 - DNA, 23 bp, Homo sapiens
  source 1..23: mol_type = genomic DNA
ctgactccagatcagaaggctgc

SEQ ID NO: 36441 - DNA, 29 bp, Homo sapiens
  source 1..29: mol_type = genomic DNA
ctgactccagatcagaaggctgcgtgttc

SEQ ID NO: 36442 - DNA, 16 bp, Homo sapiens
  source 1..16: mol_type = genomic DNA
ctgacttcggatcaga

SEQ ID NO: 36443 - DNA, 34 bp, Homo sapiens
  source 1..34: mol_type = genomic DNA
ctgacttcggatcagaagattgagggttcgaatc

SEQ ID NO: 36444 - DNA, 17 bp, Homo sapiens
  source 1..17: mol_type = genomic DNA
ctgagggtccagggttc

SEQ ID NO: 36445 - DNA, 36 bp, Homo sapiens; identical to SEQ ID NO: 14075
  source 1..36: mol_type = genomic DNA

SEQ ID NO: 36446 - DNA, 31 bp, Homo sapiens; identical to SEQ ID NO: 14077
  source 1..31: mol_type = genomic DNA

SEQ ID NO: 36447 - DNA, 34 bp, Homo sapiens; identical to SEQ ID NO: 14080
  source 1..34: mol_type = genomic DNA

SEQ ID NO: 36448 - DNA, 35 bp, Homo sapiens; identical to SEQ ID NO: 14081
  source 1..35: mol_type = genomic DNA

SEQ ID NO: 36449 - DNA, 36 bp, Homo sapiens; identical to SEQ ID NO: 14082
  source 1..36: mol_type = genomic DNA

SEQ ID NO: 36450 - DNA, 37 bp, Homo sapiens; identical to SEQ ID NO: 14083
  source 1..37: mol_type = genomic DNA

SEQ ID NO: 36451 - DNA, 36 bp, Homo sapiens
  source 1..36: mol_type = genomic DNA
ctgagggtccggggttcaagtccctgttcgggcgcc

SEQ ID NO: 36452 - DNA, 17 bp, Homo sapiens
  source 1..17: mol_type = genomic DNA
ctgagtgaagcattgga

SEQ ID NO: 36453 - DNA, 18 bp, Homo sapiens
  source 1..18: mol_type = genomic DNA
ctgagtgaagcattggac

SEQ ID NO: 36454 - DNA, 22 bp, Homo sapiens
  source 1..22: mol_type = genomic DNA
ctgagtgaagcattggactgta

SEQ ID NO: 36455 - DNA, 18 bp, Homo sapiens
  source 1..18: mol_type = genomic DNA
ctgcagatcaagaggtcc

SEQ ID NO: 36456 - DNA, 19 bp, Homo sapiens
  source 1..19: mol_type = genomic DNA
ctgcagatcaagaggtccc

SEQ ID NO: 36457 - DNA, 20 bp, Homo sapiens
  source 1..20: mol_type = genomic DNA
ctgcagatcaagaggtcccc

SEQ ID NO: 36458 - DNA, 21 bp, Homo sapiens
  source 1..21: mol_type = genomic DNA
ctgcagatcaagaggtccccg

SEQ ID NO: 36459 - DNA, 18 bp, Homo sapiens
  source 1..18: mol_type = genomic DNA
ctgccacgcgggaggccc

SEQ ID NO: 36460 - DNA, 20 bp, Homo sapiens
  source 1..20: mol_type = genomic DNA
ctgccacgcgggaggcccgg

SEQ ID NO: 36461 - DNA, 22 bp, Homo sapiens
  source 1..22: mol_type = genomic DNA
ctgccacgcgggaggcccgggt

SEQ ID NO: 36462 - DNA, 24 bp, Homo sapiens
  source 1..24: mol_type = genomic DNA
ctgccttccaagcagttgacccgg

SEQ ID NO: 36463 - DNA, 26 bp, Homo sapiens
  source 1..26: mol_type = genomic DNA
ctgcgtgttcgaatcacgtcggggtc

SEQ ID NO: 36464 - DNA, 27 bp, Homo sapiens
  source 1..27: mol_type = genomic DNA
ctgcgtgttcgaatcacgtcggggtca

SEQ ID NO: 36465 - DNA, 28 bp, Homo sapiens
  source 1..28: mol_type = genomic DNA
ctgcgtgttcgaatcacgtcggggtcac

SEQ ID NO: 36466 - DNA, 29 bp, Homo sapiens
  source 1..29: mol_type = genomic DNA
ctgcgtgttcgaatcacgtcggggtcacc

SEQ ID NO: 36467 - DNA, 18 bp, Homo sapiens
  source 1..18: mol_type = genomic DNA
ctgctaactcatgccccc

SEQ ID NO: 36468 - DNA, 21 bp, Homo sapiens
  source 1..21: mol_type = genomic DNA
ctgctaactcatgcccccatg

SEQ ID NO: 36469 - DNA, 36 bp, Homo sapiens; identical to SEQ ID NO: 14151
  source 1..36: mol_type = genomic DNA

SEQ ID NO: 36470 - DNA, 16 bp, Homo sapiens
  source 1..16: mol_type = genomic DNA
ctggactctgaatcca

SEQ ID NO: 36471 - DNA, 17 bp, Homo sapiens
  source 1..17: mol_type = genomic DNA
ctggactctgaatccag

SEQ ID NO: 36472 - DNA, 18 bp, Homo sapiens
  source 1..18: mol_type = genomic DNA
ctggactctgaatccagc

SEQ ID NO: 36473 - DNA, 19 bp, Homo sapiens
  source 1..19: mol_type = genomic DNA
ctggactctgaatccagcg

SEQ ID NO: 36474 - DNA, 21 bp, Homo sapiens
  source 1..21: mol_type = genomic DNA
ctggactctgaatccagcgat

SEQ ID NO: 36475 - DNA, 23 bp, Homo sapiens
  source 1..23: mol_type = genomic DNA
ctggactctgaatccagcgatcc

SEQ ID NO: 36476 - DNA, 25 bp, Homo sapiens
  source 1..25: mol_type = genomic DNA
ctggactctgaatccagcgatccga

SEQ ID NO: 36477 - DNA, 26 bp, Homo sapiens
  source 1..26: mol_type = genomic DNA
ctggactctgaatccagcgatccgag

SEQ ID NO: 36478 - DNA, 27 bp, Homo sapiens
  source 1..27: mol_type = genomic DNA
ctggactctgaatccagcgatccgagt

SEQ ID NO: 36479 - DNA, 28 bp, Homo sapiens
  source 1..28: mol_type = genomic DNA
ctggactctgaatccagcgatccgagtt

SEQ ID NO: 36480 - DNA, 29 bp, Homo sapiens
  source 1..29: mol_type = genomic DNA
ctggactctgaatccagcgatccgagttc

SEQ ID NO: 36481 - DNA, 30 bp, Homo sapiens; identical to SEQ ID NO: 14179
  source 1..30: mol_type = genomic DNA

SEQ ID NO: 36482 - DNA, 46 bp, Homo sapiens; identical to SEQ ID NO: 14184
  source 1..46: mol_type = genomic DNA

SEQ ID NO: 36483 - DNA, 35 bp, Homo sapiens; identical to SEQ ID NO: 14192
  source 1..35: mol_type = genomic DNA

SEQ ID NO: 36484 - DNA, 16 bp, Homo sapiens
  source 1..16: mol_type = genomic DNA
ctggggattgtgggtt

SEQ ID NO: 36485 - DNA, 17 bp, Homo sapiens
  source 1..17: mol_type = genomic DNA
ctggggattgtgggttc

SEQ ID NO: 36486 - DNA, 24 bp, Homo sapiens
  source 1..24: mol_type = genomic DNA
ctggggattgtgggttcgagtccc

SEQ ID NO: 36487 - DNA, 27 bp, Homo sapiens
  source 1..27: mol_type = genomic DNA
ctggggattgtgggttcgagtcccatc

SEQ ID NO: 36488 - DNA, 33 bp, Homo sapiens; identical to SEQ ID NO: 14220
  source 1..33: mol_type = genomic DNA

SEQ ID NO: 36489 - DNA, 34 bp, Homo sapiens; identical to SEQ ID NO: 14221
  source 1..34: mol_type = genomic DNA

SEQ ID NO: 36490 - DNA, 35 bp, Homo sapiens; identical to SEQ ID NO: 14222
  source 1..35: mol_type = genomic DNA

SEQ ID NO: 36491 - DNA, 36 bp, Homo sapiens; identical to SEQ ID NO: 14223
  source 1..36: mol_type = genomic DNA

SEQ ID NO: 36492 - DNA, 37 bp, Homo sapiens; identical to SEQ ID NO: 14224
  source 1..37: mol_type = genomic DNA

SEQ ID NO: 36493 - DNA, 26 bp, Homo sapiens
  source 1..26: mol_type = genomic DNA
ctgggttcgaatcccagcggggcctc

SEQ ID NO: 36494 - DNA, 25 bp, Homo sapiens
  source 1..25: mol_type = genomic DNA
ctgggttcgaatcccagcggtgcct

SEQ ID NO: 36495 - DNA, 26 bp, Homo sapiens
  source 1..26: mol_type = genomic DNA
ctgggttcgaatcccagcggtgcctc

SEQ ID NO: 36496 - DNA, 26 bp, Homo sapiens
  source 1..26: mol_type = genomic DNA
ctgggttcgagccccagtggaaccac

SEQ ID NO: 36497 - DNA, 27 bp, Homo sapiens
  source 1..27: mol_type = genomic DNA
ctgggttcgagccccagtggaaccacc

SEQ ID NO: 36498 - DNA, 19 bp, Homo sapiens
  source 1..19: mol_type = genomic DNA
ctggtctccaatggaggcg

SEQ ID NO: 36499 - DNA, 43 bp, Homo sapiens
  source 1..43: mol_type = genomic DNA
ctggtctccaatggaggcgtgggttcgaatcccacttctgaca

SEQ ID NO: 36500 - DNA, 44 bp, Homo sapiens
  source 1..44: mol_type = genomic DNA
ctggtctccaatggaggcgtgggttcgaatcccacttctgacac

SEQ ID NO: 36501 - DNA, 45 bp, Homo sapiens; identical to SEQ ID NO: 14245
  source 1..45: mol_type = genomic DNA

SEQ ID NO: 36502 - DNA, 44 bp, Homo sapiens
  source 1..44: mol_type = genomic DNA
ctggtctccggatggaggcgtgggttcgaatcccacttctgaca

SEQ ID NO: 36503 - DNA, 45 bp, Homo sapiens
  source 1..45: mol_type = genomic DNA
ctggtctccggatggaggcgtgggttcgaatcccacttctgacac

SEQ ID NO: 36504 - DNA, 46 bp, Homo sapiens; identical to SEQ ID NO: 14247
  source 1..46: mol_type = genomic DNA

SEQ ID NO: 36505 - DNA, 16 bp, Homo sapiens
  source 1..16: mol_type = genomic DNA
ctggtggtctagtggc

SEQ ID NO: 36506 - DNA, 27 bp, Homo sapiens
  source 1..27: mol_type = genomic DNA
ctggtggtctagtggctaggattcggc

SEQ ID NO: 36507 - DNA, 30 bp, Homo sapiens; identical to SEQ ID NO: 14258
  source 1..30: mol_type = genomic DNA

SEQ ID NO: 36508 - DNA, 33 bp, Homo sapiens; identical to SEQ ID NO: 14261
  source 1..33: mol_type = genomic DNA

SEQ ID NO: 36509 - DNA, 22 bp, Homo sapiens
  source 1..22: mol_type = genomic DNA
ctggtggtctagtggttaggat

SEQ ID NO: 36510 - DNA, 23 bp, Homo sapiens
  source 1..23: mol_type = genomic DNA
ctggtggtctagtggttaggatt

SEQ ID NO: 36511 - DNA, 24 bp, Homo sapiens
  source 1..24: mol_type = genomic DNA
ctggtggtctagtggttaggattc

SEQ ID NO: 36512 - DNA, 25 bp, Homo sapiens
  source 1..25: mol_type = genomic DNA
ctggtggtctagtggttaggattcg

SEQ ID NO: 36513 - DNA, 27 bp, Homo sapiens
  source 1..27: mol_type = genomic DNA
ctggtggtctagtggttaggattcggc

SEQ ID NO: 36514 - DNA, 28 bp, Homo sapiens
  source 1..28: mol_type = genomic DNA
ctggtggtctagtggttaggattcggcg

SEQ ID NO: 36515 - DNA, 29 bp, Homo sapiens
  source 1..29: mol_type = genomic DNA
ctggtggtctagtggttaggattcggcgc

SEQ ID NO: 36516 - DNA, 30 bp, Homo sapiens; identical to SEQ ID NO: 14277
  source 1..30: mol_type = genomic DNA

SEQ ID NO: 36517 - DNA, 31 bp, Homo sapiens; identical to SEQ ID NO: 14278
  source 1..31: mol_type = genomic DNA

SEQ ID NO: 36518 - DNA, 32 bp, Homo sapiens; identical to SEQ ID NO: 14279
  source 1..32: mol_type = genomic DNA

SEQ ID NO: 36519 - DNA, 33 bp, Homo sapiens; identical to SEQ ID NO: 14280
  source 1..33: mol_type = genomic DNA

SEQ ID NO: 36520 - DNA, 39 bp, Homo sapiens; identical to SEQ ID NO: 14284
  source 1..39: mol_type = genomic DNA

SEQ ID NO: 36521 - DNA, 16 bp, Homo sapiens
  source 1..16: mol_type = genomic DNA
ctggtgtagtggtatc

SEQ ID NO: 36522 - DNA, 19 bp, Homo sapiens
  source 1..19: mol_type = genomic DNA
ctggtgtagtggtatcatg

SEQ ID NO: 36523 - DNA, 21 bp, Homo sapiens
  source 1..21: mol_type = genomic DNA
ctggtgtagtggtatcatgca

SEQ ID NO: 36524 - DNA, 23 bp, Homo sapiens
  source 1..23: mol_type = genomic DNA
ctggtgtagtggtatcatgcaag

SEQ ID NO: 36525 - DNA, 24 bp, Homo sapiens
  source 1..24: mol_type = genomic DNA
ctggtgtagtggtatcatgcaaga

SEQ ID NO: 36526 - DNA, 26 bp, Homo sapiens
  source 1..26: mol_type = genomic DNA
ctggtgtagtggtatcatgcaagatt

SEQ ID NO: 36527 - DNA, 44 bp, Homo sapiens; identical to SEQ ID NO: 14302
  source 1..44: mol_type = genomic DNA

SEQ ID NO: 36528 - DNA, 46 bp, Homo sapiens; identical to SEQ ID NO: 14304
  source 1..46: mol_type = genomic DNA

SEQ ID NO: 36529 - DNA, 23 bp, Homo sapiens
  source 1..23: mol_type = genomic DNA
ctggttcaaatccgggtgccccc

SEQ ID NO: 36530 - DNA, 25 bp, Homo sapiens
  source 1..25: mol_type = genomic DNA
ctggttcaatcccgggtttcggcac

SEQ ID NO: 36531 - DNA, 25 bp, Homo sapiens
  source 1..25: mol_type = genomic DNA
ctggttcgaatccggctcgaaggac

SEQ ID NO: 36532 - DNA, 26 bp, Homo sapiens
  source 1..26: mol_type = genomic DNA
ctggttcgaatccggctcgaaggacc

SEQ ID NO: 36533 - DNA, 25 bp, Homo sapiens
  source 1..25: mol_type = genomic DNA
ctggttcgaatccggctcggaggac

SEQ ID NO: 36534 - DNA, 26 bp, Homo sapiens
  source 1..26: mol_type = genomic DNA
ctggttcgaatccggctcggaggacc

SEQ ID NO: 36535 - DNA, 23 bp, Homo sapiens
  source 1..23: mol_type = genomic DNA
ctggttcgatcccgggtttcggc

SEQ ID NO: 36536 - DNA, 24 bp, Homo sapiens
  source 1..24: mol_type = genomic DNA
ctggttcgatcccgggtttcggca

SEQ ID NO: 36537 - DNA, 25 bp, Homo sapiens
  source 1..25: mol_type = genomic DNA
ctggttcgatcccgggtttcggcac

SEQ ID NO: 36538 - DNA, 26 bp, Homo sapiens
  source 1..26: mol_type = genomic DNA
ctggttcgatcccgggtttcggcacc

SEQ ID NO: 36539 - DNA, 25 bp, Homo sapiens
  source 1..25: mol_type = genomic DNA
ctggttcgattccggctcgaaggac

SEQ ID NO: 36540 - DNA, 26 bp, Homo sapiens
  source 1..26: mol_type = genomic DNA
ctggttcgattccggctcgaaggacc

SEQ ID NO: 36541 - DNA, 45 bp, Homo sapiens
  source 1..45: mol_type = genomic DNA
ctggttttcacccaggcggcccgggttcgactcccggtgtgggaa

SEQ ID NO: 36542 - DNA, 46 bp, Homo sapiens
  source 1..46: mol_type = genomic DNA
ctggttttcacccaggcggcccgggttcgactcccggtgtgggaac

SEQ ID NO: 36543 - DNA, 47 bp, Homo sapiens; identical to SEQ ID NO: 14328
  source 1..47: mol_type = genomic DNA

SEQ ID NO: 36544 - DNA, 21 bp, Homo sapiens
  source 1..21: mol_type = genomic DNA
ctgtagatccttaggtcgctg

SEQ ID NO: 36545 - DNA, 29 bp, Homo sapiens
  source 1..29: mol_type = genomic DNA
ctgtagtgtagtggttatcacgttcgcct

SEQ ID NO: 36546 - DNA, 16 bp, Homo sapiens
  source 1..16: mol_type = genomic DNA
ctgtcacgcgggagac

SEQ ID NO: 36547 - DNA, 17 bp, Homo sapiens
  source 1..17: mol_type = genomic DNA
ctgtcacgcgggagacc

SEQ ID NO: 36548 - DNA, 18 bp, Homo sapiens
  source 1..18: mol_type = genomic DNA
ctgtcacgcgggagaccg

SEQ ID NO: 36549 - DNA, 19 bp, Homo sapiens
  source 1..19: mol_type = genomic DNA
ctgtcacgcgggagaccgg

SEQ ID NO: 36550 - DNA, 20 bp, Homo sapiens
  source 1..20: mol_type = genomic DNA
ctgtcacgcgggagaccggg

SEQ ID NO: 36551 - DNA, 21 bp, Homo sapiens
  source 1..21: mol_type = genomic DNA
ctgtcacgcgggagaccgggg

SEQ ID NO: 36552 - DNA, 22 bp, Homo sapiens
  source 1..22: mol_type = genomic DNA
ctgtcacgcgggagaccggggt

SEQ ID NO: 36553 - DNA, 23 bp, Homo sapiens
  source 1..23: mol_type = genomic DNA
ctgtcacgcgggagaccggggtt

SEQ ID NO: 36554 - DNA, 24 bp, Homo sapiens
  source 1..24: mol_type = genomic DNA
ctgtcacgcgggagaccggggttc

SEQ ID NO: 36555 - DNA, 25 bp, Homo sapiens
  source 1..25: mol_type = genomic DNA
ctgtcacgcgggagaccggggttca

SEQ ID NO: 36556 - DNA, 36 bp, Homo sapiens
  source 1..36: mol_type = genomic DNA
ctgtcacgcgggagaccggggttcaattccccgacg

SEQ ID NO: 36557 - DNA, 38 bp, Homo sapiens; identical to SEQ ID NO: 14360
  source 1..38: mol_type = genomic DNA

SEQ ID NO: 36558 - DNA, 39 bp, Homo sapiens
  source 1..39: mol_type = genomic DNA
ctgtcacgcgggagaccggggttcaattccccgacgggg

SEQ ID NO: 36559 - DNA, 41 bp, Homo sapiens
  source 1..41: mol_type = genomic DNA
ctgtcacgcgggagaccggggttcaattccccgacggggag

SEQ ID NO: 36560 - DNA, 42 bp, Homo sapiens; identical to SEQ ID NO: 14362
  source 1..42: mol_type = genomic DNA

SEQ ID NO: 36561 - DNA, 43 bp, Homo sapiens; identical to SEQ ID NO: 14363
  source 1..43: mol_type = genomic DNA

SEQ ID NO: 36562 - DNA, 25 bp, Homo sapiens
  source 1..25: mol_type = genomic DNA
ctgtcacgcgggagaccggggttcg

SEQ ID NO: 36563 - DNA, 26 bp, Homo sapiens
  source 1..26: mol_type = genomic DNA
ctgtcacgcgggagaccggggttcga

SEQ ID NO: 36564 - DNA, 30 bp, Homo sapiens
  source 1..30: mol_type = genomic DNA
ctgtcacgcgggagaccggggttcgattcc

SEQ ID NO: 36565 - DNA, 34 bp, Homo sapiens; identical to SEQ ID NO: 14368
  source 1..34: mol_type = genomic DNA

SEQ ID NO: 36566 - DNA, 35 bp, Homo sapiens; identical to SEQ ID NO: 14369
  source 1..35: mol_type = genomic DNA

SEQ ID NO: 36567 - DNA, 36 bp, Homo sapiens; identical to SEQ ID NO: 14370
  source 1..36: mol_type = genomic DNA

SEQ ID NO: 36568 - DNA, 37 bp, Homo sapiens; identical to SEQ ID NO: 14371
  source 1..37: mol_type = genomic DNA

SEQ ID NO: 36569 - DNA, 38 bp, Homo sapiens; identical to SEQ ID NO: 14372
  source 1..38: mol_type = genomic DNA

SEQ ID NO: 36570 - DNA, 39 bp, Homo sapiens; identical to SEQ ID NO: 14373
  source 1..39: mol_type = genomic DNA

SEQ ID NO: 36571 - DNA, 41 bp, Homo sapiens; identical to SEQ ID NO: 14374
  source 1..41: mol_type = genomic DNA

SEQ ID NO: 36572 - DNA, 42 bp, Homo sapiens; identical to SEQ ID NO: 14375
  source 1..42: mol_type = genomic DNA

SEQ ID NO: 36573 - DNA, 43 bp, Homo sapiens; identical to SEQ ID NO: 14376
  source 1..43: mol_type = genomic DNA

SEQ ID NO: 36574 - DNA, 44 bp, Homo sapiens; identical to SEQ ID NO: 14377
  source 1..44: mol_type = genomic DNA

SEQ ID NO: 36575 - DNA, 17 bp, Homo sapiens
  source 1..17: mol_type = genomic DNA
ctgtgatggccgagtgg

SEQ ID NO: 36576 - DNA, 16 bp, Homo sapiens
  source 1..16: mol_type = genomic DNA
ctgtggcgcaatggac

SEQ ID NO: 36577 - DNA, 44 bp, Homo sapiens
  source 1..44: mol_type = genomic DNA
ctgttaaccgaaaggttggtggttcgagcccacccagggacgcc

SEQ ID NO: 36578 - DNA, 19 bp, Homo sapiens
  source 1..19: mol_type = genomic DNA
ctgttaactaagtgtttgt

SEQ ID NO: 36579 - DNA, 16 bp, Homo sapiens
  source 1..16: mol_type = genomic DNA
cttaacttgaccgctc

SEQ ID NO: 36580 - DNA, 18 bp, Homo sapiens
  source 1..18: mol_type = genomic DNA
cttaacttgaccgctctg

SEQ ID NO: 36581 - DNA, 19 bp, Homo sapiens
  source 1..19: mol_type = genomic DNA
cttaacttgaccgctctga

SEQ ID NO: 36582 - DNA, 20 bp, Homo sapiens
  source 1..20: mol_type = genomic DNA
cttaacttgaccgctctgac

SEQ ID NO: 36583 - DNA, 21 bp, Homo sapiens
  source 1..21: mol_type = genomic DNA
cttaacttgaccgctctgacc

SEQ ID NO: 36584 - DNA, 22 bp, Homo sapiens
  source 1..22: mol_type = genomic DNA
cttaacttgaccgctctgacca

SEQ ID NO: 36585 - DNA, 16 bp, Homo sapiens
  source 1..16: mol_type = genomic DNA
cttaagatccaatgga

SEQ ID NO: 36586 - DNA, 17 bp, Homo sapiens
  source 1..17: mol_type = genomic DNA
cttaagatccaatggac

SEQ ID NO: 36587 - DNA, 18 bp, Homo sapiens
  source 1..18: mol_type = genomic DNA
cttaagatccaatggaca

SEQ ID NO: 36588 - DNA, 19 bp, Homo sapiens
  source 1..19: mol_type = genomic DNA
cttaagatccaatggacat

SEQ ID NO: 36589 - DNA, 20 bp, Homo sapiens
  source 1..20: mol_type = genomic DNA
cttaagatccaatggacata

SEQ ID NO: 36590 - DNA, 17 bp, Homo sapiens
  source 1..17: mol_type = genomic DNA
cttaagatccaatggat

SEQ ID NO: 36591 - DNA, 18 bp, Homo sapiens
  source 1..18: mol_type = genomic DNA
cttaagatccaatggatt

SEQ ID NO: 36592 - DNA, 17 bp, Homo sapiens
  source 1..17: mol_type = genomic DNA
cttaagatccaatgggc

SEQ ID NO: 36593 - DNA, 16 bp, Homo sapiens
  source 1..16: mol_type = genomic DNA
cttaatcccagggtcg

SEQ ID NO: 36594 - DNA, 17 bp, Homo sapiens
  source 1..17: mol_type = genomic DNA
cttaatcccagggtcgt

SEQ ID NO: 36595 - DNA, 42 bp, Homo sapiens; identical to SEQ ID NO: 14469
  source 1..42: mol_type = genomic DNA

SEQ ID NO: 36596 - DNA, 16 bp, Homo sapiens
  source 1..16: mol_type = genomic DNA
cttaatctcagggtcg

SEQ ID NO: 36597 - DNA, 17 bp, Homo sapiens
  source 1..17: mol_type = genomic DNA
cttaatctcagggtcgt

SEQ ID NO: 36598 - DNA, 42 bp, Homo sapiens; identical to SEQ ID NO: 14476
  source 1..42: mol_type = genomic DNA

SEQ ID NO: 36599 - DNA, 17 bp, Homo sapiens
  source 1..17: mol_type = genomic DNA
cttacacttaggagatt

SEQ ID NO: 36600 - DNA, 40 bp, Homo sapiens; identical to SEQ ID NO: 14507
  source 1..40: mol_type = genomic DNA

SEQ ID NO: 36601 - DNA, 41 bp, Homo sapiens; identical to SEQ ID NO: 14508
  source 1..41: mol_type = genomic DNA

SEQ ID NO: 36602 - DNA, 42 bp, Homo sapiens; identical to SEQ ID NO: 14509
  source 1..42: mol_type = genomic DNA

SEQ ID NO: 36603 - DNA, 43 bp, Homo sapiens; identical to SEQ ID NO: 14510
  source 1..43: mol_type = genomic DNA

SEQ ID NO: 36604 - DNA, 21 bp, Homo sapiens
  source 1..21: mol_type = genomic DNA
cttacgaccccttatttaccc

SEQ ID NO: 36605 - DNA, 22 bp, Homo sapiens
  source 1..22: mol_type = genomic DNA
cttacgaccccttatttacccc

SEQ ID NO: 36606 - DNA, 23 bp, Homo sapiens
  source 1..23: mol_type = genomic DNA
cttacgaccccttatttacccca

SEQ ID NO: 36607 - DNA, 34 bp, Homo sapiens; identical to SEQ ID NO: 14560
  source 1..34: mol_type = genomic DNA

SEQ ID NO: 36608 - DNA, 47 bp, Homo sapiens; identical to SEQ ID NO: 14567
  source 1..47: mol_type = genomic DNA

SEQ ID NO: 36609 - DNA, 18 bp, Homo sapiens
  source 1..18: mol_type = genomic DNA
cttaggagatttcaactt

SEQ ID NO: 36610 - DNA, 26 bp, Homo sapiens
  source 1..26: mol_type = genomic DNA
cttaggagatttcaacttaacttgac

SEQ ID NO: 36611 - DNA, 28 bp, Homo sapiens
  source 1..28: mol_type = genomic DNA
cttaggagatttcaacttaacttgaccg

SEQ ID NO: 36612 - DNA, 30 bp, Homo sapiens; identical to SEQ ID NO: 14583
  source 1..30: mol_type = genomic DNA

SEQ ID NO: 36613 - DNA, 33 bp, Homo sapiens; identical to SEQ ID NO: 14586
  source 1..33: mol_type = genomic DNA

SEQ ID NO: 36614 - DNA, 34 bp, Homo sapiens; identical to SEQ ID NO: 14587
  source 1..34: mol_type = genomic DNA

SEQ ID NO: 36615 - DNA, 35 bp, Homo sapiens; identical to SEQ ID NO: 14588
  source 1..35: mol_type = genomic DNA

SEQ ID NO: 36616 - DNA, 36 bp, Homo sapiens; identical to SEQ ID NO: 14589
  source 1..36: mol_type = genomic DNA

SEQ ID NO: 36617 - DNA, 37 bp, Homo sapiens; identical to SEQ ID NO: 14590
  source 1..37: mol_type = genomic DNA

SEQ ID NO: 36618 - DNA, 16 bp, Homo sapiens
  source 1..16: mol_type = genomic DNA
cttaggtcgctggttc

SEQ ID NO: 36619 - DNA, 34 bp, Homo sapiens; identical to SEQ ID NO: 14594
  source 1..34: mol_type = genomic DNA

SEQ ID NO: 36620 - DNA, 35 bp, Homo sapiens; identical to SEQ ID NO: 14595
  source 1..35: mol_type = genomic DNA

SEQ ID NO: 36621 - DNA, 35 bp, Homo sapiens; identical to SEQ ID NO: 14597
  source 1..35: mol_type = genomic DNA

SEQ ID NO: 36622 - DNA, 34 bp, Homo sapiens; identical to SEQ ID NO: 14599
  source 1..34: mol_type = genomic DNA

SEQ ID NO: 36623 - DNA, 35 bp, Homo sapiens; identical to SEQ ID NO: 14600
  source 1..35: mol_type = genomic DNA

SEQ ID NO: 36624 - DNA, 16 bp, Homo sapiens
  source 1..16: mol_type = genomic DNA
cttcaaacctgccggg

SEQ ID NO: 36625 - DNA, 17 bp, Homo sapiens
  source 1..17: mol_type = genomic DNA
cttcaaacctgccgggg

SEQ ID NO: 36626 - DNA, 18 bp, Homo sapiens
  source 1..18: mol_type = genomic DNA
cttcaaacctgccggggc

SEQ ID NO: 36627 - DNA, 19 bp, Homo sapiens
  source 1..19: mol_type = genomic DNA
cttcaaacctgccggggct

SEQ ID NO: 36628 - DNA, 20 bp, Homo sapiens
  source 1..20: mol_type = genomic DNA
cttcaaacctgccggggctt

SEQ ID NO: 36629 - DNA, 21 bp, Homo sapiens
  source 1..21: mol_type = genomic DNA
cttcaaacctgccggggcttc

SEQ ID NO: 36630 - DNA, 17 bp, Homo sapiens
  source 1..17: mol_type = genomic DNA
cttccaagcagttgacc

SEQ ID NO: 36631 - DNA, 18 bp, Homo sapiens
  source 1..18: mol_type = genomic DNA
cttccaagcagttgaccc

SEQ ID NO: 36632 - DNA, 19 bp, Homo sapiens
  source 1..19: mol_type = genomic DNA
cttccaagcagttgacccg

SEQ ID NO: 36633 - DNA, 20 bp, Homo sapiens
  source 1..20: mol_type = genomic DNA
cttccaagcagttgacccgg

SEQ ID NO: 36634 - DNA, 37 bp, Homo sapiens
  source 1..37: mol_type = genomic DNA
cttcggaggcgtgggttcgaatcccaccgctgccacc

SEQ ID NO: 36635 - DNA, 19 bp, Homo sapiens
  source 1..19: mol_type = genomic DNA
cttcggatcagaagattga

SEQ ID NO: 36636 - DNA, 20 bp, Homo sapiens
  source 1..20: mol_type = genomic DNA
cttcggatcagaagattgag

SEQ ID NO: 36637 - DNA, 25 bp, Homo sapiens
  source 1..25: mol_type = genomic DNA
cttcggatcagaagattgagggttc

SEQ ID NO: 36638 - DNA, 44 bp, Homo sapiens
  source 1..44: mol_type = genomic DNA
cttcggatcagaagattgagggttcgaatcccttcgtggttgcc

SEQ ID NO: 36639 - DNA, 19 bp, Homo sapiens
  source 1..19: mol_type = genomic DNA
cttcggatcagaagattgc

SEQ ID NO: 36640 - DNA, 22 bp, Homo sapiens
  source 1..22: mol_type = genomic DNA
cttcggatcagaagattgcagg

SEQ ID NO: 36641 - DNA, 25 bp, Homo sapiens
  source 1..25: mol_type = genomic DNA
cttcggatcagaagattgcaggttc

SEQ ID NO: 36642 - DNA, 44 bp, Homo sapiens
  source 1..44: mol_type = genomic DNA
cttcggatcagaagattgcaggttcgagtcctgccgcggtcgcc

SEQ ID NO: 36643 - DNA, 37 bp, Homo sapiens; identical to SEQ ID NO: 14666
  source 1..37: mol_type = genomic DNA

SEQ ID NO: 36644 - DNA, 44 bp, Homo sapiens; identical to SEQ ID NO: 14668
  source 1..44: mol_type = genomic DNA

SEQ ID NO: 36645 - DNA, 32 bp, Homo sapiens; identical to SEQ ID NO: 14673
  source 1..32: mol_type = genomic DNA

SEQ ID NO: 36646 - DNA, 16 bp, Homo sapiens
  source 1..16: mol_type = genomic DNA
cttgaccgctctgacc

SEQ ID NO: 36647 - DNA, 17 bp, Homo sapiens
  source 1..17: mol_type = genomic DNA
cttgaccgctctgacca

SEQ ID NO: 36648 - DNA, 35 bp, Homo sapiens; identical to SEQ ID NO: 14685
  source 1..35: mol_type = genomic DNA

SEQ ID NO: 36649 - DNA, 45 bp, Homo sapiens; identical to SEQ ID NO: 14698
  source 1..45: mol_type = genomic DNA

SEQ ID NO: 36650 - DNA, 17 bp, Homo sapiens
  source 1..17: mol_type = genomic DNA
ctttacagtcagaggtt

SEQ ID NO: 36651 - DNA, 18 bp, Homo sapiens
  source 1..18: mol_type = genomic DNA
ctttacagtcagaggttc

SEQ ID NO: 36652 - DNA, 25 bp, Homo sapiens
  source 1..25: mol_type = genomic DNA
ctttcgatagctcagttggtagagc

SEQ ID NO: 36653 - DNA, 21 bp, Homo sapiens
  source 1..21: mol_type = genomic DNA
ctttgaatccagcaatccgag

SEQ ID NO: 36654 - DNA, 18 bp, Homo sapiens
  source 1..18: mol_type = genomic DNA
ctttgaatccagcgatcc

SEQ ID NO: 36655 - DNA, 19 bp, Homo sapiens
  source 1..19: mol_type = genomic DNA
ctttgaatccagcgatccg

SEQ ID NO: 36656 - DNA, 20 bp, Homo sapiens
  source 1..20: mol_type = genomic DNA
ctttgaatccagcgatccga

SEQ ID NO: 36657 - DNA, 21 bp, Homo sapiens
  source 1..21: mol_type = genomic DNA
ctttgaatccagcgatccgag

SEQ ID NO: 36658 - DNA, 22 bp, Homo sapiens
  source 1..22: mol_type = genomic DNA
ctttgaatccagcgatccgagt

SEQ ID NO: 36659 - DNA, 23 bp, Homo sapiens
  source 1..23: mol_type = genomic DNA
ctttgaatccagcgatccgagtt

SEQ ID NO: 36660 - DNA, 24 bp, Homo sapiens
  source 1..24: mol_type = genomic DNA
ctttgaatccagcgatccgagttc

SEQ ID NO: 36661 - DNA, 25 bp, Homo sapiens
  source 1..25: mol_type = genomic DNA
ctttgaatccagcgatccgagttca

SEQ ID NO: 36662 - DNA, 36 bp, Homo sapiens
  source 1..36: mol_type = genomic DNA
ctttgcacgcgtgggttcgaatcccatcctcgtcgc

SEQ ID NO: 36663 - DNA, 37 bp, Homo sapiens; identical to SEQ ID NO: 14763
  source 1..37: mol_type = genomic DNA

SEQ ID NO: 36664 - DNA, 45 bp, Homo sapiens
  source 1..45: mol_type = genomic DNA
ctttgcacgtatgaggccccgggttcaatccccggcatctccacc

SEQ ID NO: 36665 - DNA, 20 bp, Homo sapiens
  source 1..20: mol_type = genomic DNA
ctttgggtgcgagaggtccc

SEQ ID NO: 36666 - DNA, 44 bp, Homo sapiens; identical to SEQ ID NO: 14776
  source 1..44: mol_type = genomic DNA

SEQ ID NO: 36667 - DNA, 42 bp, Homo sapiens; identical to SEQ ID NO: 14797
  source 1..42: mol_type = genomic DNA

SEQ ID NO: 36668 - DNA, 43 bp, Homo sapiens; identical to SEQ ID NO: 14798
  source 1..43: mol_type = genomic DNA

SEQ ID NO: 36669 - DNA, 25 bp, Homo sapiens
  source 1..25: mol_type = genomic DNA
ctttgtcaaagttaaattataggct

SEQ ID NO: 36670 - DNA, 26 bp, Homo sapiens
  source 1..26: mol_type = genomic DNA
cttttaagttaaagattaagagaacc

SEQ ID NO: 36671 - DNA, 18 bp, Homo sapiens
  source 1..18: mol_type = genomic DNA
cttttaatctgagggtcc

SEQ ID NO: 36672 - DNA, 16 bp, Homo sapiens
  source 1..16: mol_type = genomic DNA
ctttttccaaggacac

SEQ ID NO: 36673 - DNA, 17 bp, Homo sapiens
  source 1..17: mol_type = genomic DNA
ctttttccaaggacacc

SEQ ID NO: 36674 - DNA, 18 bp, Homo sapiens
  source 1..18: mol_type = genomic DNA
ctttttccaaggacacca

SEQ ID NO: 36675 - DNA, 16 bp, Homo sapiens
  source 1..16: mol_type = genomic DNA
gaaaaagtcatggagg

SEQ ID NO: 36676 - DNA, 17 bp, Homo sapiens
  source 1..17: mol_type = genomic DNA
gaaaaagtcatggaggc

SEQ ID NO: 36677 - DNA, 18 bp, Homo sapiens
  source 1..18: mol_type = genomic DNA
gaaaaagtcatggaggcc

SEQ ID NO: 36678 - DNA, 19 bp, Homo sapiens
  source 1..19: mol_type = genomic DNA
gaaaaagtcatggaggcca

SEQ ID NO: 36679 - DNA, 21 bp, Homo sapiens
  source 1..21: mol_type = genomic DNA
gaaaaagtcatggaggccatg

SEQ ID NO: 36680 - DNA, 24 bp, Homo sapiens
  source 1..24: mol_type = genomic DNA
gaaaaagtcatggaggccatgggg

SEQ ID NO: 36681 - DNA, 25 bp, Homo sapiens
  source 1..25: mol_type = genomic DNA
gaaaaagtcatggaggccatggggt

SEQ ID NO: 36682 - DNA, 26 bp, Homo sapiens
  source 1..26: mol_type = genomic DNA
gaaaaagtcatggaggccatggggtt

SEQ ID NO: 36683 - DNA, 27 bp, Homo sapiens
  source 1..27: mol_type = genomic DNA
gaaaaagtcatggaggccatggggttg

SEQ ID NO: 36684 - DNA, 28 bp, Homo sapiens
  source 1..28: mol_type = genomic DNA
gaaaaagtcatggaggccatggggttgg

SEQ ID NO: 36685 - DNA, 30 bp, Homo sapiens; identical to SEQ ID NO: 14877
  source 1..30: mol_type = genomic DNA

SEQ ID NO: 36686 - DNA, 23 bp, Homo sapiens
  source 1..23: mol_type = genomic DNA
gaaaacctttttccaaggacacc

SEQ ID NO: 36687 - DNA, 24 bp, Homo sapiens
  source 1..24: mol_type = genomic DNA
gaaaacctttttccaaggacacca

SEQ ID NO: 36688 - DNA, 17 bp, Homo sapiens
  source 1..17: mol_type = genomic DNA
gaaaatgttggttatac

SEQ ID NO: 36689 - DNA, 18 bp, Homo sapiens
  source 1..18: mol_type = genomic DNA
gaaaatgttggttatacc

SEQ ID NO: 36690 - DNA, 25 bp, Homo sapiens
  source 1..25: mol_type = genomic DNA
gaaaatgttggttatacccttcccg

SEQ ID NO: 36691 - DNA, 29 bp, Homo sapiens
  source 1..29: mol_type = genomic DNA
gaaaatgttggttatacccttcccgtact

SEQ ID NO: 36692 - DNA, 30 bp, Homo sapiens; identical to SEQ ID NO: 14908
  source 1..30: mol_type = genomic DNA

SEQ ID NO: 36693 - DNA, 32 bp, Homo sapiens; identical to SEQ ID NO: 14910
  source 1..32: mol_type = genomic DNA

SEQ ID NO: 36694 - DNA, 33 bp, Homo sapiens; identical to SEQ ID NO: 14911
  source 1..33: mol_type = genomic DNA

SEQ ID NO: 36695 - DNA, 18 bp, Homo sapiens
  source 1..18: mol_type = genomic DNA
gaaaatgtttagacgggc

SEQ ID NO: 36696 - DNA, 19 bp, Homo sapiens
  source 1..19: mol_type = genomic DNA
gaaaatgtttagacgggct

SEQ ID NO: 36697 - DNA, 20 bp, Homo sapiens
  source 1..20: mol_type = genomic DNA
gaaaatgtttagacgggctc

SEQ ID NO: 36698 - DNA, 21 bp, Homo sapiens
  source 1..21: mol_type = genomic DNA
gaaaatgtttagacgggctca

SEQ ID NO: 36699 - DNA, 22 bp, Homo sapiens
  source 1..22: mol_type = genomic DNA
gaaaatgtttagacgggctcac

SEQ ID NO: 36700 - DNA, 23 bp, Homo sapiens
  source 1..23: mol_type = genomic DNA
gaaaatgtttagacgggctcaca

SEQ ID NO: 36701 - DNA, 28 bp, Homo sapiens
  source 1..28: mol_type = genomic DNA
gaaaatgtttagacgggctcacatcacc

SEQ ID NO: 36702 - DNA, 29 bp, Homo sapiens
  source 1..29: mol_type = genomic DNA
gaaaatgtttagacgggctcacatcaccc

SEQ ID NO: 36703 - DNA, 30 bp, Homo sapiens; identical to SEQ ID NO: 14926
  source 1..30: mol_type = genomic DNA

SEQ ID NO: 36704 - DNA, 31 bp, Homo sapiens; identical to SEQ ID NO: 14927
  source 1..31: mol_type = genomic DNA

SEQ ID NO: 36705 - DNA, 32 bp, Homo sapiens; identical to SEQ ID NO: 14928
  source 1..32: mol_type = genomic DNA

SEQ ID NO: 36706 - DNA, 33 bp, Homo sapiens; identical to SEQ ID NO: 14929
  source 1..33: mol_type = genomic DNA

SEQ ID NO: 36707 - DNA, 34 bp, Homo sapiens; identical to SEQ ID NO: 14930
  source 1..34: mol_type = genomic DNA

SEQ ID NO: 36708 - DNA, 35 bp, Homo sapiens; identical to SEQ ID NO: 14931
  source 1..35: mol_type = genomic DNA

SEQ ID NO: 36709 - DNA, 39 bp, Homo sapiens; identical to SEQ ID NO: 14934
  source 1..39: mol_type = genomic DNA

SEQ ID NO: 36710 - DNA, 40 bp, Homo sapiens; identical to SEQ ID NO: 14935
  source 1..40: mol_type = genomic DNA

SEQ ID NO: 36711 - DNA, 19 bp, Homo sapiens
  source 1..19: mol_type = genomic DNA
gaaaccatcctctgctacc

SEQ ID NO: 36712 - DNA, 18 bp, Homo sapiens
  source 1..18: mol_type = genomic DNA
gaaaccgggcagaagcac

SEQ ID NO: 36713 - DNA, 19 bp, Homo sapiens
  source 1..19: mol_type = genomic DNA
gaaaccgggcagaagcacc

SEQ ID NO: 36714 - DNA, 16 bp, Homo sapiens
  source 1..16: mol_type = genomic DNA
gaaaccgggcggaaac

SEQ ID NO: 36715 - DNA, 17 bp, Homo sapiens
  source 1..17: mol_type = genomic DNA
gaaaccgggcggaaaca

SEQ ID NO: 36716 - DNA, 18 bp, Homo sapiens
  source 1..18: mol_type = genomic DNA
gaaaccgggcggaaacac

SEQ ID NO: 36717 - DNA, 19 bp, Homo sapiens
  source 1..19: mol_type = genomic DNA
gaaaccgggcggaaacacc

SEQ ID NO: 36718 - DNA, 20 bp, Homo sapiens
  source 1..20: mol_type = genomic DNA
gaaaccgggcggaaacacca

SEQ ID NO: 36719 - DNA, 18 bp, Homo sapiens
  source 1..18: mol_type = genomic DNA
gaaagctcacaagaactg

SEQ ID NO: 36720 - DNA, 23 bp, Homo sapiens
  source 1..23: mol_type = genomic DNA
gaaagctcacaagaactgctaac

SEQ ID NO: 36721 - DNA, 25 bp, Homo sapiens
  source 1..25: mol_type = genomic DNA
gaaagctcacaagaactgctaactc

SEQ ID NO: 36722 - DNA, 33 bp, Homo sapiens
  source 1..33: mol_type = genomic DNA
gaaaggtccccggttcgaaaccgggcggaaaca

SEQ ID NO: 36723 - DNA, 34 bp, Homo sapiens
  source 1..34: mol_type = genomic DNA
gaaaggtccccggttcgaaaccgggcggaaacac

SEQ ID NO: 36724 - DNA, 35 bp, Homo sapiens; identical to SEQ ID NO: 14984
  source 1..35: mol_type = genomic DNA

SEQ ID NO: 36725 - DNA, 33 bp, Homo sapiens
  source 1..33: mol_type = genomic DNA
gaaaggtccccggttcgatcccgggcggaaaca

SEQ ID NO: 36726 - DNA, 16 bp, Homo sapiens
  source 1..16: mol_type = genomic DNA
gaaaggttggtggttc

SEQ ID NO: 36727 - DNA, 32 bp, Homo sapiens; identical to SEQ ID NO: 14988
  source 1..32: mol_type = genomic DNA

SEQ ID NO: 36728 - DNA, 34 bp, Homo sapiens; identical to SEQ ID NO: 14990
  source 1..34: mol_type = genomic DNA

SEQ ID NO: 36729 - DNA, 35 bp, Homo sapiens; identical to SEQ ID NO: 14991
  source 1..35: mol_type = genomic DNA

SEQ ID NO: 36730 - DNA, 35 bp, Homo sapiens
  source 1..35: mol_type = genomic DNA
gaaaggttggtggttcgatcccacccagggacgcc

SEQ ID NO: 36731 - DNA, 45 bp, Homo sapiens; identical to SEQ ID NO: 15005
  source 1..45: mol_type = genomic DNA

SEQ ID NO: 36732 - DNA, 19 bp, Homo sapiens
  source 1..19: mol_type = genomic DNA
gaaatagctcagttgggag

SEQ ID NO: 36733 - DNA, 17 bp, Homo sapiens
  source 1..17: mol_type = genomic DNA
gaaccccgtccgtgcct

SEQ ID NO: 36734 - DNA, 18 bp, Homo sapiens
  source 1..18: mol_type = genomic DNA
gaaccccgtccgtgcctc

SEQ ID NO: 36735 - DNA, 19 bp, Homo sapiens
  source 1..19: mol_type = genomic DNA
gaaccctgctcgctgcgcc

SEQ ID NO: 36736 - DNA, 39 bp, Homo sapiens; identical to SEQ ID NO: 15049
  source 1..39: mol_type = genomic DNA

SEQ ID NO: 36737 - DNA, 45 bp, Homo sapiens; identical to SEQ ID NO: 15055
  source 1..45: mol_type = genomic DNA

SEQ ID NO: 36738 - DNA, 47 bp, Homo sapiens; identical to SEQ ID NO: 15057
  source 1..47: mol_type = genomic DNA

SEQ ID NO: 36739 - DNA, 28 bp, Homo sapiens
  source 1..28: mol_type = genomic DNA
gaagaagcagcttcaaacctgccggggc

SEQ ID NO: 36740 - DNA, 29 bp, Homo sapiens
  source 1..29: mol_type = genomic DNA
gaagaagcagcttcaaacctgccggggct

SEQ ID NO: 36741 - DNA, 30 bp, Homo sapiens; identical to SEQ ID NO: 15062
  source 1..30: mol_type = genomic DNA

SEQ ID NO: 36742 - DNA, 33 bp, Homo sapiens; identical to SEQ ID NO: 15065
  source 1..33: mol_type = genomic DNA

SEQ ID NO: 36743 - DNA, 32 bp, Homo sapiens
  source 1..32: mol_type = genomic DNA
gaagatcacgggttcgaaccccgtccgtgcct

SEQ ID NO: 36744 - DNA, 33 bp, Homo sapiens
  source 1..33: mol_type = genomic DNA
gaagatcacgggttcgaaccccgtccgtgcctc

SEQ ID NO: 36745 - DNA, 34 bp, Homo sapiens; identical to SEQ ID NO: 15067
  source 1..34: mol_type = genomic DNA

SEQ ID NO: 36746 - DNA, 32 bp, Homo sapiens; identical to SEQ ID NO: 15070
  source 1..32: mol_type = genomic DNA

SEQ ID NO: 36747 - DNA, 33 bp, Homo sapiens; identical to SEQ ID NO: 15071
  source 1..33: mol_type = genomic DNA

SEQ ID NO: 36748 - DNA, 34 bp, Homo sapiens; identical to SEQ ID NO: 15072
  source 1..34: mol_type = genomic DNA

SEQ ID NO: 36749 - DNA, 31 bp, Homo sapiens; identical to SEQ ID NO: 15076
  source 1..31: mol_type = genomic DNA

SEQ ID NO: 36750 - DNA, 35 bp, Homo sapiens; identical to SEQ ID NO: 15080
  source 1..35: mol_type = genomic DNA

SEQ ID NO: 36751 - DNA, 31 bp, Homo sapiens; identical to SEQ ID NO: 15086
  source 1..31: mol_type = genomic DNA

SEQ ID NO: 36752 - DNA, 33 bp, Homo sapiens; identical to SEQ ID NO: 15088
  source 1..33: mol_type = genomic DNA

SEQ ID NO: 36753 - DNA, 34 bp, Homo sapiens; identical to SEQ ID NO: 15089
  source 1..34: mol_type = genomic DNA

SEQ ID NO: 36754 - DNA, 35 bp, Homo sapiens; identical to SEQ ID NO: 15090
  source 1..35: mol_type = genomic DNA

SEQ ID NO: 36755 - DNA, 32 bp, Homo sapiens; identical to SEQ ID NO: 15092
  source 1..32: mol_type = genomic DNA

SEQ ID NO: 36756 - DNA, 33 bp, Homo sapiens; identical to SEQ ID NO: 15093
  source 1..33: mol_type = genomic DNA

SEQ ID NO: 36757 - DNA, 34 bp, Homo sapiens; identical to SEQ ID NO: 15094
  source 1..34: mol_type = genomic DNA

SEQ ID NO: 36758 - DNA, 33 bp, Homo sapiens; identical to SEQ ID NO: 15098
  source 1..33: mol_type = genomic DNA

SEQ ID NO: 36759 - DNA, 34 bp, Homo sapiens; identical to SEQ ID NO: 15099
  source 1..34: mol_type = genomic DNA

SEQ ID NO: 36760 - DNA, 35 bp, Homo sapiens; identical to SEQ ID NO: 15100
  source 1..35: mol_type = genomic DNA

SEQ ID NO: 36761 - DNA, 23 bp, Homo sapiens
  source 1..23: mol_type = genomic DNA
gaagattgcaggttcgagtcctg

SEQ ID NO: 36762 - DNA, 33 bp, Homo sapiens; identical to SEQ ID NO: 15104
  source 1..33: mol_type = genomic DNA

SEQ ID NO: 36763 - DNA, 34 bp, Homo sapiens; identical to SEQ ID NO: 15105
  source 1..34: mol_type = genomic DNA

SEQ ID NO: 36764 - DNA, 35 bp, Homo sapiens; identical to SEQ ID NO: 15106
  source 1..35: mol_type = genomic DNA

SEQ ID NO: 36765 - DNA, 18 bp, Homo sapiens
  source 1..18: mol_type = genomic DNA
gaagcagcttcaaacctg

SEQ ID NO: 36766 - DNA, 25 bp, Homo sapiens
  source 1..25: mol_type = genomic DNA
gaagcagcttcaaacctgccggggc

SEQ ID NO: 36767 - DNA, 26 bp, Homo sapiens
  source 1..26: mol_type = genomic DNA
gaagcagcttcaaacctgccggggct

SEQ ID NO: 36768 - DNA, 27 bp, Homo sapiens
  source 1..27: mol_type = genomic DNA
gaagcagcttcaaacctgccggggctt

SEQ ID NO: 36769 - DNA, 16 bp, Homo sapiens
  source 1..16: mol_type = genomic DNA
gaagcgtgctgggccc

SEQ ID NO: 36770 - DNA, 31 bp, Homo sapiens; identical to SEQ ID NO: 15143
  source 1..31: mol_type = genomic DNA

SEQ ID NO: 36771 - DNA, 32 bp, Homo sapiens; identical to SEQ ID NO: 15144
  source 1..32: mol_type = genomic DNA

SEQ ID NO: 36772 - DNA, 33 bp, Homo sapiens; identical to SEQ ID NO: 15145
  source 1..33: mol_type = genomic DNA

SEQ ID NO: 36773 - DNA, 34 bp, Homo sapiens; identical to SEQ ID NO: 15146
  source 1..34: mol_type = genomic DNA

SEQ ID NO: 36774 - DNA, 33 bp, Homo sapiens; identical to SEQ ID NO: 15154
  source 1..33: mol_type = genomic DNA

SEQ ID NO: 36775 - DNA, 34 bp, Homo sapiens; identical to SEQ ID NO: 15155
  source 1..34: mol_type = genomic DNA

SEQ ID NO: 36776 - DNA, 32 bp, Homo sapiens; identical to SEQ ID NO: 15161
  source 1..32: mol_type = genomic DNA

SEQ ID NO: 36777 - DNA, 33 bp, Homo sapiens; identical to SEQ ID NO: 15162
  source 1..33: mol_type = genomic DNA

SEQ ID NO: 36778 - DNA, 34 bp, Homo sapiens; identical to SEQ ID NO: 15163
  source 1..34: mol_type = genomic DNA

SEQ ID NO: 36779 - DNA, 35 bp, Homo sapiens; identical to SEQ ID NO: 15164
  source 1..35: mol_type = genomic DNA

SEQ ID NO: 36780 - DNA, 34 bp, Homo sapiens; identical to SEQ ID NO: 15168
  source 1..34: mol_type = genomic DNA

SEQ ID NO: 36781 - DNA, 34 bp, Homo sapiens; identical to SEQ ID NO: 15173
  source 1..34: mol_type = genomic DNA

SEQ ID NO: 36782 - DNA, 16 bp, Homo sapiens
  source 1..16: mol_type = genomic DNA
gaaggttgcgtgttca

SEQ ID NO: 36783 - DNA, 31 bp, Homo sapiens; identical to SEQ ID NO: 15176
  source 1..31: mol_type = genomic DNA

SEQ ID NO: 36784 - DNA, 33 bp, Homo sapiens
  source 1..33: mol_type = genomic DNA
gaaggttgcgtgttcaaatcacgtcggggtcac

SEQ ID NO: 36785 - DNA, 34 bp, Homo sapiens; identical to SEQ ID NO: 15177
  source 1..34: mol_type = genomic DNA

SEQ ID NO: 36786 - DNA, 33 bp, Homo sapiens; identical to SEQ ID NO: 15179
  source 1..33: mol_type = genomic DNA

SEQ ID NO: 36787 - DNA, 34 bp, Homo sapiens; identical to SEQ ID NO: 15180
  source 1..34: mol_type = genomic DNA

SEQ ID NO: 36788 - DNA, 17 bp, Homo sapiens
  source 1..17: mol_type = genomic DNA
gaatcacgtcggggtca

SEQ ID NO: 36789 - DNA, 18 bp, Homo sapiens
  source 1..18: mol_type = genomic DNA
gaatcacgtcggggtcac

SEQ ID NO: 36790 - DNA, 19 bp, Homo sapiens
  source 1..19: mol_type = genomic DNA
gaatcacgtcggggtcacc

SEQ ID NO: 36791 - DNA, 20 bp, Homo sapiens
  source 1..20: mol_type = genomic DNA
gaatcacgtcggggtcacca

SEQ ID NO: 36792 - DNA, 20 bp, Homo sapiens
  source 1..20: mol_type = genomic DNA
gaatccagcgatccgagttc

SEQ ID NO: 36793 - DNA, 38 bp, Homo sapiens; identical to SEQ ID NO: 15198
  source 1..38: mol_type = genomic DNA

SEQ ID NO: 36794 - DNA, 19 bp, Homo sapiens
  source 1..19: mol_type = genomic DNA
gaatcccaccactgccacc

SEQ ID NO: 36795 - DNA, 19 bp, Homo sapiens
  source 1..19: mol_type = genomic DNA
gaatcccaccgctgccacc

SEQ ID NO: 36796 - DNA, 19 bp, Homo sapiens
  source 1..19: mol_type = genomic DNA
gaatcccaccttcgtcgcc

SEQ ID NO: 36797 - DNA, 19 bp, Homo sapiens
  source 1..19: mol_type = genomic DNA
gaatcccactcctgacacc

SEQ ID NO: 36798 - DNA, 18 bp, Homo sapiens
  source 1..18: mol_type = genomic DNA
gaatcccacttctgacac

SEQ ID NO: 36799 - DNA, 19 bp, Homo sapiens
  source 1..19: mol_type = genomic DNA
gaatcccacttctgacacc

SEQ ID NO: 36800 - DNA, 17 bp, Homo sapiens
  source 1..17: mol_type = genomic DNA
gaatcccagcggtgcct

SEQ ID NO: 36801 - DNA, 18 bp, Homo sapiens
  source 1..18: mol_type = genomic DNA
gaatcccagcggtgcctc

SEQ ID NO: 36802 - DNA, 19 bp, Homo sapiens
  source 1..19: mol_type = genomic DNA
gaatcccagcggtgcctcc

SEQ ID NO: 36803 - DNA, 18 bp, Homo sapiens
  source 1..18: mol_type = genomic DNA
gaatcccatcctcgtcgc

SEQ ID NO: 36804 - DNA, 19 bp, Homo sapiens
  source 1..19: mol_type = genomic DNA
gaatcccatcctcgtcgcc

SEQ ID NO: 36805 - DNA, 20 bp, Homo sapiens
  source 1..20: mol_type = genomic DNA
gaatcccatcctcgtcgcca

SEQ ID NO: 36806 - DNA, 16 bp, Homo sapiens
  source 1..16: mol_type = genomic DNA
gaatccgagtcacggc

SEQ ID NO: 36807 - DNA, 17 bp, Homo sapiens
  source 1..17: mol_type = genomic DNA
gaatccgagtcacggca

SEQ ID NO: 36808 - DNA, 18 bp, Homo sapiens
  source 1..18: mol_type = genomic DNA
gaatccgagtcacggcac

SEQ ID NO: 36809 - DNA, 19 bp, Homo sapiens
  source 1..19: mol_type = genomic DNA
gaatccgagtcacggcacc

SEQ ID NO: 36810 - DNA, 18 bp, Homo sapiens
  source 1..18: mol_type = genomic DNA
gaatccggctcgaaggac

SEQ ID NO: 36811 - DNA, 19 bp, Homo sapiens
  source 1..19: mol_type = genomic DNA
gaatccggctcgaaggacc

SEQ ID NO: 36812 - DNA, 18 bp, Homo sapiens
  source 1..18: mol_type = genomic DNA
gaatccggctcggaggac

SEQ ID NO: 36813 - DNA, 19 bp, Homo sapiens
  source 1..19: mol_type = genomic DNA
gaatccggctcggaggacc

SEQ ID NO: 36814 - DNA, 19 bp, Homo sapiens
  source 1..19: mol_type = genomic DNA
gaatcctgccgactacgcc

SEQ ID NO: 36815 - DNA, 19 bp, Homo sapiens
  source 1..19: mol_type = genomic DNA
gaatcctgctcacagcgcc

SEQ ID NO: 36816 - DNA, 18 bp, Homo sapiens
  source 1..18: mol_type = genomic DNA
gaatcctgttcgtgacgc

SEQ ID NO: 36817 - DNA, 19 bp, Homo sapiens
  source 1..19: mol_type = genomic DNA
gaatcctgttcgtgacgcc

SEQ ID NO: 36818 - DNA, 38 bp, Homo sapiens; identical to SEQ ID NO: 15233
  source 1..38: mol_type = genomic DNA

SEQ ID NO: 36819 - DNA, 39 bp, Homo sapiens; identical to SEQ ID NO: 15234
  source 1..39: mol_type = genomic DNA

SEQ ID NO: 36820 - DNA, 40 bp, Homo sapiens; identical to SEQ ID NO: 15235
  source 1..40: mol_type = genomic DNA

SEQ ID NO: 36821 - DNA, 16 bp, Homo sapiens
  source 1..16: mol_type = genomic DNA
gaatgatttcgactca

SEQ ID NO: 36822 - DNA, 17 bp, Homo sapiens
  source 1..17: mol_type = genomic DNA
gaattctcgcctgccac

SEQ ID NO: 36823 - DNA, 18 bp, Homo sapiens
  source 1..18: mol_type = genomic DNA
gaattctcgcctgccacg

SEQ ID NO: 36824 - DNA, 34 bp, Homo sapiens; identical to SEQ ID NO: 15264
  source 1..34: mol_type = genomic DNA

SEQ ID NO: 36825 - DNA, 41 bp, Homo sapiens; identical to SEQ ID NO: 15266
  source 1..41: mol_type = genomic DNA

SEQ ID NO: 36826 - DNA, 42 bp, Homo sapiens; identical to SEQ ID NO: 15267
  source 1..42: mol_type = genomic DNA

SEQ ID NO: 36827 - DNA, 43 bp, Homo sapiens; identical to SEQ ID NO: 15268
  source 1..43: mol_type = genomic DNA

SEQ ID NO: 36828 - DNA, 19 bp, Homo sapiens
  source 1..19: mol_type = genomic DNA
gacaacagaggcttacgac

SEQ ID NO: 36829 - DNA, 32 bp, Homo sapiens; identical to SEQ ID NO: 15286
  source 1..32: mol_type = genomic DNA

SEQ ID NO: 36830 - DNA, 33 bp, Homo sapiens; identical to SEQ ID NO: 15287
  source 1..33: mol_type = genomic DNA

SEQ ID NO: 36831 - DNA, 17 bp, Homo sapiens
  source 1..17: mol_type = genomic DNA
gaccacccagggacgcc

SEQ ID NO: 36832 - DNA, 19 bp, Homo sapiens
  source 1..19: mol_type = genomic DNA
gaccacgtggcctaatgga

SEQ ID NO: 36833 - DNA, 32 bp, Homo sapiens; identical to SEQ ID NO: 15308
  source 1..32: mol_type = genomic DNA

SEQ ID NO: 36834 - DNA, 33 bp, Homo sapiens; identical to SEQ ID NO: 15309
  source 1..33: mol_type = genomic DNA

SEQ ID NO: 36835 - DNA, 36 bp, Homo sapiens; identical to SEQ ID NO: 15310
  source 1..36: mol_type = genomic DNA

SEQ ID NO: 36836 - DNA, 18 bp, Homo sapiens
  source 1..18: mol_type = genomic DNA
gacccagtggcctaatgg

SEQ ID NO: 36837 - DNA, 19 bp, Homo sapiens
  source 1..19: mol_type = genomic DNA
gacccagtggcctaatgga

SEQ ID NO: 36838 - DNA, 20 bp, Homo sapiens
  source 1..20: mol_type = genomic DNA
gacccagtggcctaatggat

SEQ ID NO: 36839 - DNA, 23 bp, Homo sapiens
  source 1..23: mol_type = genomic DNA
gacccagtggcctaatggataag

SEQ ID NO: 36840 - DNA, 28 bp, Homo sapiens
  source 1..28: mol_type = genomic DNA
gacccagtggcctaatggataaggcatc

SEQ ID NO: 36841 - DNA, 31 bp, Homo sapiens; identical to SEQ ID NO: 15319
  source 1..31: mol_type = genomic DNA

SEQ ID NO: 36842 - DNA, 32 bp, Homo sapiens; identical to SEQ ID NO: 15320
  source 1..32: mol_type = genomic DNA

SEQ ID NO: 36843 - DNA, 33 bp, Homo sapiens; identical to SEQ ID NO: 15321
  source 1..33: mol_type = genomic DNA

SEQ ID NO: 36844 - DNA, 34 bp, Homo sapiens; identical to SEQ ID NO: 15322
  source 1..34: mol_type = genomic DNA

SEQ ID NO: 36845 - DNA, 35 bp, Homo sapiens; identical to SEQ ID NO: 15323
  source 1..35: mol_type = genomic DNA

SEQ ID NO: 36846 - DNA, 36 bp, Homo sapiens; identical to SEQ ID NO: 15324
  source 1..36: mol_type = genomic DNA

SEQ ID NO: 36847 - DNA, 16 bp, Homo sapiens
  source 1..16: mol_type = genomic DNA
gaccccttatttaccc

SEQ ID NO: 36848 - DNA, 17 bp, Homo sapiens
  source 1..17: mol_type = genomic DNA
gaccccttatttacccc

SEQ ID NO: 36849 - DNA, 30 bp, Homo sapiens; identical to SEQ ID NO: 15331
  source 1..30: mol_type = genomic DNA

SEQ ID NO: 36850 - DNA, 31 bp, Homo sapiens; identical to SEQ ID NO: 15332
  source 1..31: mol_type = genomic DNA

SEQ ID NO: 36851 - DNA, 18 bp, Homo sapiens
  source 1..18: mol_type = genomic DNA
gaccgcgtggcctaatgg

SEQ ID NO: 36852 - DNA, 19 bp, Homo sapiens
  source 1..19: mol_type = genomic DNA
gaccgcgtggcctaatgga

SEQ ID NO: 36853 - DNA, 20 bp, Homo sapiens
  source 1..20: mol_type = genomic DNA
gaccgcgtggcctaatggat

SEQ ID NO: 36854 - DNA, 30 bp, Homo sapiens; identical to SEQ ID NO: 15337
  source 1..30: mol_type = genomic DNA

SEQ ID NO: 36855 - DNA, 32 bp, Homo sapiens; identical to SEQ ID NO: 15338
  source 1..32: mol_type = genomic DNA

SEQ ID NO: 36856 - DNA, 33 bp, Homo sapiens; identical to SEQ ID NO: 15339
  source 1..33: mol_type = genomic DNA

SEQ ID NO: 36857 - DNA, 34 bp, Homo sapiens; identical to SEQ ID NO: 15340
  source 1..34: mol_type = genomic DNA

SEQ ID NO: 36858 - DNA, 36 bp, Homo sapiens; identical to SEQ ID NO: 15342
  source 1..36: mol_type = genomic DNA

SEQ ID NO: 36859 - DNA, 29 bp, Homo sapiens
  source 1..29: mol_type = genomic DNA
gaccggggttcaattccccgacggggagc

SEQ ID NO: 36860 - DNA, 30 bp, Homo sapiens; identical to SEQ ID NO: 15344
  source 1..30: mol_type = genomic DNA

SEQ ID NO: 36861 - DNA, 25 bp, Homo sapiens
  source 1..25: mol_type = genomic DNA
gaccggggttcgattccccgacggg

SEQ ID NO: 36862 - DNA, 28 bp, Homo sapiens
  source 1..28: mol_type = genomic DNA
gaccggggttcgattccccgacggggag

SEQ ID NO: 36863 - DNA, 29 bp, Homo sapiens
  source 1..29: mol_type = genomic DNA
gaccggggttcgattccccgacggggagc

SEQ ID NO: 36864 - DNA, 30 bp, Homo sapiens; identical to SEQ ID NO: 15351
  source 1..30: mol_type = genomic DNA

SEQ ID NO: 36865 - DNA, 16 bp, Homo sapiens
  source 1..16: mol_type = genomic DNA
gacctcgtggcgcaac

SEQ ID NO: 36866 - DNA, 17 bp, Homo sapiens
  source 1..17: mol_type = genomic DNA
gacctcgtggcgcaacg

SEQ ID NO: 36867 - DNA, 18 bp, Homo sapiens
  source 1..18: mol_type = genomic DNA
gacctcgtggcgcaacgg

SEQ ID NO: 36868 - DNA, 19 bp, Homo sapiens
  source 1..19: mol_type = genomic DNA
gacctcgtggcgcaacggt

SEQ ID NO: 36869 - DNA, 22 bp, Homo sapiens
  source 1..22: mol_type = genomic DNA
gacctcgtggcgcaacggtagc

SEQ ID NO: 36870 - DNA, 31 bp, Homo sapiens; identical to SEQ ID NO: 15357
  source 1..31: mol_type = genomic DNA

SEQ ID NO: 36871 - DNA, 32 bp, Homo sapiens; identical to SEQ ID NO: 15358
  source 1..32: mol_type = genomic DNA

SEQ ID NO: 36872 - DNA, 33 bp, Homo sapiens; identical to SEQ ID NO: 15359
  source 1..33: mol_type = genomic DNA

SEQ ID NO: 36873 - DNA, 17 bp, Homo sapiens
  source 1..17: mol_type = genomic DNA
gacctcgtggcgcaatg

SEQ ID NO: 36874 - DNA, 18 bp, Homo sapiens
  source 1..18: mol_type = genomic DNA
gacctcgtggcgcaatgg

SEQ ID NO: 36875 - DNA, 32 bp, Homo sapiens; identical to SEQ ID NO: 15365
  source 1..32: mol_type = genomic DNA

SEQ ID NO: 36876 - DNA, 16 bp, Homo sapiens
  source 1..16: mol_type = genomic DNA
gacgaggtggccgagt

SEQ ID NO: 36877 - DNA, 18 bp, Homo sapiens
  source 1..18: mol_type = genomic DNA
gacgaggtggccgagtgg

SEQ ID NO: 36878 - DNA, 19 bp, Homo sapiens
  source 1..19: mol_type = genomic DNA
gacgaggtggccgagtggt

SEQ ID NO: 36879 - DNA, 20 bp, Homo sapiens
  source 1..20: mol_type = genomic DNA
gacgaggtggccgagtggtt

SEQ ID NO: 36880 - DNA, 22 bp, Homo sapiens
  source 1..22: mol_type = genomic DNA
gacgaggtggccgagtggttaa

SEQ ID NO: 36881 - DNA, 23 bp, Homo sapiens
  source 1..23: mol_type = genomic DNA
gacgaggtggccgagtggttaag

SEQ ID NO: 36882 - DNA, 24 bp, Homo sapiens
  source 1..24: mol_type = genomic DNA
gacgaggtggccgagtggttaagg

SEQ ID NO: 36883 - DNA, 25 bp, Homo sapiens
  source 1..25: mol_type = genomic DNA
gacgaggtggccgagtggttaaggc

SEQ ID NO: 36884 - DNA, 32 bp, Homo sapiens; identical to SEQ ID NO: 15378
  source 1..32: mol_type = genomic DNA

SEQ ID NO: 36885 - DNA, 33 bp, Homo sapiens; identical to SEQ ID NO: 15379
  source 1..33: mol_type = genomic DNA

SEQ ID NO: 36886 - DNA, 36 bp, Homo sapiens; identical to SEQ ID NO: 15381
  source 1..36: mol_type = genomic DNA

SEQ ID NO: 36887 - DNA, 29 bp, Homo sapiens
  source 1..29: mol_type = genomic DNA
gacgggctcacatcaccccataaacacca

SEQ ID NO: 36888 - DNA, 21 bp, Homo sapiens
  source 1..21: mol_type = genomic DNA
gactccagatcagaaggctgc

SEQ ID NO: 36889 - DNA, 21 bp, Homo sapiens
  source 1..21: mol_type = genomic DNA
gactccagatcagaaggttgc

SEQ ID NO: 36890 - DNA, 17 bp, Homo sapiens
  source 1..17: mol_type = genomic DNA
gactcccggtatgggaa

SEQ ID NO: 36891 - DNA, 18 bp, Homo sapiens
  source 1..18: mol_type = genomic DNA
gactcccggtatgggaac

SEQ ID NO: 36892 - DNA, 17 bp, Homo sapiens
  source 1..17: mol_type = genomic DNA
gactcccggtgtgggaa

SEQ ID NO: 36893 - DNA, 18 bp, Homo sapiens
  source 1..18: mol_type = genomic DNA
gactcccggtgtgggaac

SEQ ID NO: 36894 - DNA, 19 bp, Homo sapiens
  source 1..19: mol_type = genomic DNA
gactcccggtgtgggaacc

SEQ ID NO: 36895 - DNA, 16 bp, Homo sapiens
  source 1..16: mol_type = genomic DNA
gactcctggctggctc

SEQ ID NO: 36896 - DNA, 18 bp, Homo sapiens
  source 1..18: mol_type = genomic DNA
gactcctggctggctcgc

SEQ ID NO: 36897 - DNA, 19 bp, Homo sapiens
  source 1..19: mol_type = genomic DNA
gactcctggctggctcgcc

SEQ ID NO: 36898 - DNA, 22 bp, Homo sapiens
  source 1..22: mol_type = genomic DNA
gactctgaatccagcgatccga

SEQ ID NO: 36899 - DNA, 43 bp, Homo sapiens; identical to SEQ ID NO: 15425
  source 1..43: mol_type = genomic DNA

SEQ ID NO: 36900 - DNA, 44 bp, Homo sapiens; identical to SEQ ID NO: 15426
  source 1..44: mol_type = genomic DNA

SEQ ID NO: 36901 - DNA, 19 bp, Homo sapiens
  source 1..19: mol_type = genomic DNA
gacttaagatccaatggac

SEQ ID NO: 36902 - DNA, 21 bp, Homo sapiens
  source 1..21: mol_type = genomic DNA
gacttaagatccaatggacat

SEQ ID NO: 36903 - DNA, 17 bp, Homo sapiens
  source 1..17: mol_type = genomic DNA
gacttcggatcagaaga

SEQ ID NO: 36904 - DNA, 16 bp, Homo sapiens
  source 1..16: mol_type = genomic DNA
gactttttctctgacc

SEQ ID NO: 36905 - DNA, 17 bp, Homo sapiens
  source 1..17: mol_type = genomic DNA
gactttttctctgacca

SEQ ID NO: 36906 - DNA, 16 bp, Homo sapiens
  source 1..16: mol_type = genomic DNA
gagaaagctcacaaga

SEQ ID NO: 36907 - DNA, 18 bp, Homo sapiens
  source 1..18: mol_type = genomic DNA
gagaaagctcacaagaac

SEQ ID NO: 36908 - DNA, 19 bp, Homo sapiens
  source 1..19: mol_type = genomic DNA
gagaaagctcacaagaact

SEQ ID NO: 36909 - DNA, 20 bp, Homo sapiens
  source 1..20: mol_type = genomic DNA
gagaaagctcacaagaactg

SEQ ID NO: 36910 - DNA, 21 bp, Homo sapiens
  source 1..21: mol_type = genomic DNA
gagaaagctcacaagaactgc

SEQ ID NO: 36911 - DNA, 22 bp, Homo sapiens
  source 1..22: mol_type = genomic DNA
gagaaagctcacaagaactgct

SEQ ID NO: 36912 - DNA, 23 bp, Homo sapiens
  source 1..23: mol_type = genomic DNA
gagaaagctcacaagaactgcta

SEQ ID NO: 36913 - DNA, 24 bp, Homo sapiens
  source 1..24: mol_type = genomic DNA
gagaaagctcacaagaactgctaa

SEQ ID NO: 36914 - DNA, 25 bp, Homo sapiens
  source 1..25: mol_type = genomic DNA
gagaaagctcacaagaactgctaac

SEQ ID NO: 36915 - DNA, 26 bp, Homo sapiens
  source 1..26: mol_type = genomic DNA
gagaaagctcacaagaactgctaact

SEQ ID NO: 36916 - DNA, 27 bp, Homo sapiens
  source 1..27: mol_type = genomic DNA
gagaaagctcacaagaactgctaactc

SEQ ID NO: 36917 - DNA, 28 bp, Homo sapiens
  source 1..28: mol_type = genomic DNA
gagaaagctcacaagaactgctaactca

SEQ ID NO: 36918 - DNA, 30 bp, Homo sapiens; identical to SEQ ID NO: 15485
  source 1..30: mol_type = genomic DNA

SEQ ID NO: 36919 - DNA, 32 bp, Homo sapiens; identical to SEQ ID NO: 15487
  source 1..32: mol_type = genomic DNA

SEQ ID NO: 36920 - DNA, 33 bp, Homo sapiens; identical to SEQ ID NO: 15488
  source 1..33: mol_type = genomic DNA

SEQ ID NO: 36921 - DNA, 34 bp, Homo sapiens; identical to SEQ ID NO: 15489
  source 1..34: mol_type = genomic DNA

SEQ ID NO: 36922 - DNA, 35 bp, Homo sapiens; identical to SEQ ID NO: 15490
  source 1..35: mol_type = genomic DNA

SEQ ID NO: 36923 - DNA, 36 bp, Homo sapiens; identical to SEQ ID NO: 15491
  source 1..36: mol_type = genomic DNA

SEQ ID NO: 36924 - DNA, 38 bp, Homo sapiens; identical to SEQ ID NO: 15493
  source 1..38: mol_type = genomic DNA

SEQ ID NO: 36925 - DNA, 41 bp, Homo sapiens; identical to SEQ ID NO: 15496
  source 1..41: mol_type = genomic DNA

SEQ ID NO: 36926 - DNA, 44 bp, Homo sapiens; identical to SEQ ID NO: 15499
  source 1..44: mol_type = genomic DNA

SEQ ID NO: 36927 - DNA, 26 bp, Homo sapiens
  source 1..26: mol_type = genomic DNA
gagaaccaacacctctttacagtgac

SEQ ID NO: 36928 - DNA, 31 bp, Homo sapiens; identical to SEQ ID NO: 15532
  source 1..31: mol_type = genomic DNA

SEQ ID NO: 36929 - DNA, 32 bp, Homo sapiens; identical to SEQ ID NO: 15533
  source 1..32: mol_type = genomic DNA

SEQ ID NO: 36930 - DNA, 27 bp, Homo sapiens
  source 1..27: mol_type = genomic DNA
gagaccggggttcgattccccgacggg

SEQ ID NO: 36931 - DNA, 28 bp, Homo sapiens
  source 1..28: mol_type = genomic DNA
gagaccggggttcgattccccgacgggg

SEQ ID NO: 36932 - DNA, 29 bp, Homo sapiens
  source 1..29: mol_type = genomic DNA
gagaccggggttcgattccccgacgggga

SEQ ID NO: 36933 - DNA, 30 bp, Homo sapiens; identical to SEQ ID NO: 15542
  source 1..30: mol_type = genomic DNA

SEQ ID NO: 36934 - DNA, 31 bp, Homo sapiens; identical to SEQ ID NO: 15543
  source 1..31: mol_type = genomic DNA

SEQ ID NO: 36935 - DNA, 32 bp, Homo sapiens; identical to SEQ ID NO: 15544
  source 1..32: mol_type = genomic DNA

SEQ ID NO: 36936 - DNA, 33 bp, Homo sapiens; identical to SEQ ID NO: 15545
  source 1..33: mol_type = genomic DNA

SEQ ID NO: 36937 - DNA, 16 bp, Homo sapiens
  source 1..16: mol_type = genomic DNA
gagagcattagactga

SEQ ID NO: 36938 - DNA, 16 bp, Homo sapiens
  source 1..16: mol_type = genomic DNA
gagagcgttagactga

SEQ ID NO: 36939 - DNA, 16 bp, Homo sapiens
  source 1..16: mol_type = genomic DNA
gagaggtcccgggttc

SEQ ID NO: 36940 - DNA, 31 bp, Homo sapiens; identical to SEQ ID NO: 15554
  source 1..31: mol_type = genomic DNA

SEQ ID NO: 36941 - DNA, 32 bp, Homo sapiens; identical to SEQ ID NO: 15555
  source 1..32: mol_type = genomic DNA

SEQ ID NO: 36942 - DNA, 33 bp, Homo sapiens; identical to SEQ ID NO: 15556
  source 1..33: mol_type = genomic DNA

SEQ ID NO: 36943 - DNA, 34 bp, Homo sapiens; identical to SEQ ID NO: 15557
  source 1..34: mol_type = genomic DNA

SEQ ID NO: 36944 - DNA, 36 bp, Homo sapiens
  source 1..36: mol_type = genomic DNA
gagaggtcccgggttcaaatcccggacgagccccca

SEQ ID NO: 36945 - DNA, 29 bp, Homo sapiens
  source 1..29: mol_type = genomic DNA
gagatcctgggttcgaatcccagcggggc

SEQ ID NO: 36946 - DNA, 33 bp, Homo sapiens; identical to SEQ ID NO: 15562
  source 1..33: mol_type = genomic DNA

SEQ ID NO: 36947 - DNA, 25 bp, Homo sapiens
  source 1..25: mol_type = genomic DNA
gagatgaaaacctttttccaaggac

SEQ ID NO: 36948 - DNA, 26 bp, Homo sapiens
  source 1..26: mol_type = genomic DNA
gagatgaaaacctttttccaaggaca

SEQ ID NO: 36949 - DNA, 27 bp, Homo sapiens
  source 1..27: mol_type = genomic DNA
gagatgaaaacctttttccaaggacac

SEQ ID NO: 36950 - DNA, 28 bp, Homo sapiens
  source 1..28: mol_type = genomic DNA
gagatgaaaacctttttccaaggacacc

SEQ ID NO: 36951 - DNA, 29 bp, Homo sapiens
  source 1..29: mol_type = genomic DNA
gagatgaaaacctttttccaaggacacca

SEQ ID NO: 36952 - DNA, 28 bp, Homo sapiens
  source 1..28: mol_type = genomic DNA
gagatttcaacttaacttgaccgctctg

SEQ ID NO: 36953 - DNA, 29 bp, Homo sapiens
  source 1..29: mol_type = genomic DNA
gagatttcaacttaacttgaccgctctga

SEQ ID NO: 36954 - DNA, 30 bp, Homo sapiens; identical to SEQ ID NO: 15583
  source 1..30: mol_type = genomic DNA

SEQ ID NO: 36955 - DNA, 31 bp, Homo sapiens; identical to SEQ ID NO: 15584
  source 1..31: mol_type = genomic DNA

SEQ ID NO: 36956 - DNA, 32 bp, Homo sapiens; identical to SEQ ID NO: 15585
  source 1..32: mol_type = genomic DNA

SEQ ID NO: 36957 - DNA, 32 bp, Homo sapiens; identical to SEQ ID NO: 15595
  source 1..32: mol_type = genomic DNA

SEQ ID NO: 36958 - DNA, 33 bp, Homo sapiens
  source 1..33: mol_type = genomic DNA
gagcatagctgccttccaagcagttgacccggg

SEQ ID NO: 36959 - DNA, 20 bp, Homo sapiens
  source 1..20: mol_type = genomic DNA
gagcatgggactcttaatcc

SEQ ID NO: 36960 - DNA, 21 bp, Homo sapiens
  source 1..21: mol_type = genomic DNA
gagcatgggactcttaatccc

SEQ ID NO: 36961 - DNA, 34 bp, Homo sapiens; identical to SEQ ID NO: 15608
  source 1..34: mol_type = genomic DNA

SEQ ID NO: 36962 - DNA, 36 bp, Homo sapiens; identical to SEQ ID NO: 15610
  source 1..36: mol_type = genomic DNA

SEQ ID NO: 36963 - DNA, 19 bp, Homo sapiens
  source 1..19: mol_type = genomic DNA
gagcccacccagggacgcc

SEQ ID NO: 36964 - DNA, 16 bp, Homo sapiens
  source 1..16: mol_type = genomic DNA
gagccccacgttgggc

SEQ ID NO: 36965 - DNA, 16 bp, Homo sapiens
  source 1..16: mol_type = genomic DNA
gagccccagtggaacc

SEQ ID NO: 36966 - DNA, 17 bp, Homo sapiens
  source 1..17: mol_type = genomic DNA
gagccccagtggaacca

SEQ ID NO: 36967 - DNA, 18 bp, Homo sapiens
  source 1..18: mol_type = genomic DNA
gagccccagtggaaccac

SEQ ID NO: 36968 - DNA, 19 bp, Homo sapiens
  source 1..19: mol_type = genomic DNA
gagccccagtggaaccacc

SEQ ID NO: 36969 - DNA, 17 bp, Homo sapiens
  source 1..17: mol_type = genomic DNA
gagcggtctaaggcgct

SEQ ID NO: 36970 - DNA, 18 bp, Homo sapiens
  source 1..18: mol_type = genomic DNA
gagcggtctaaggcgctg

SEQ ID NO: 36971 - DNA, 22 bp, Homo sapiens
  source 1..22: mol_type = genomic DNA
gagcggtctaaggcgctggatt

SEQ ID NO: 36972 - DNA, 21 bp, Homo sapiens
  source 1..21: mol_type = genomic DNA
gagctggggattgtgggttcg

SEQ ID NO: 36973 - DNA, 38 bp, Homo sapiens; identical to SEQ ID NO: 15643
  source 1..38: mol_type = genomic DNA

SEQ ID NO: 36974 - DNA, 39 bp, Homo sapiens; identical to SEQ ID NO: 15644
  source 1..39: mol_type = genomic DNA

SEQ ID NO: 36975 - DNA, 32 bp, Homo sapiens
  source 1..32: mol_type = genomic DNA
gaggccccgggttcgatccccggcatctccac

SEQ ID NO: 36976 - DNA, 33 bp, Homo sapiens
  source 1..33: mol_type = genomic DNA
gaggccccgggttcgatccccggcatctccacc

SEQ ID NO: 36977 - DNA, 25 bp, Homo sapiens
  source 1..25: mol_type = genomic DNA
gaggcttacgaccccttatttaccc

SEQ ID NO: 36978 - DNA, 26 bp, Homo sapiens
  source 1..26: mol_type = genomic DNA
gaggcttacgaccccttatttacccc

SEQ ID NO: 36979 - DNA, 27 bp, Homo sapiens
  source 1..27: mol_type = genomic DNA
gaggcttacgaccccttatttacccca

SEQ ID NO: 36980 - DNA, 34 bp, Homo sapiens
  source 1..34: mol_type = genomic DNA
gagggtccagggttcaagtccctgtccaggcgcc

SEQ ID NO: 36981 - DNA, 31 bp, Homo sapiens; identical to SEQ ID NO: 15682
  source 1..31: mol_type = genomic DNA

SEQ ID NO: 36982 - DNA, 32 bp, Homo sapiens; identical to SEQ ID NO: 15683
  source 1..32: mol_type = genomic DNA

SEQ ID NO: 36983 - DNA, 33 bp, Homo sapiens; identical to SEQ ID NO: 15684
  source 1..33: mol_type = genomic DNA

SEQ ID NO: 36984 - DNA, 34 bp, Homo sapiens; identical to SEQ ID NO: 15685
  source 1..34: mol_type = genomic DNA

SEQ ID NO: 36985 - DNA, 27 bp, Homo sapiens
  source 1..27: mol_type = genomic DNA
gagggttcgaatcccttcgtggttgcc

SEQ ID NO: 36986 - DNA, 26 bp, Homo sapiens
  source 1..26: mol_type = genomic DNA
gagggttcgagtcccttcgtggtcgc

SEQ ID NO: 36987 - DNA, 27 bp, Homo sapiens
  source 1..27: mol_type = genomic DNA
gagggttcgagtcccttcgtggtcgcc

SEQ ID NO: 36988 - DNA, 31 bp, Homo sapiens
  source 1..31: mol_type = genomic DNA
gaggtcccgggttcaaatcccggacgagccc

SEQ ID NO: 36989 - DNA, 32 bp, Homo sapiens
  source 1..32: mol_type = genomic DNA
gaggtcccgggttcaaatcccggacgagcccc

SEQ ID NO: 36990 - DNA, 32 bp, Homo sapiens
  source 1..32: mol_type = genomic DNA
gaggtcccgggttcgatccccagcatctccac

SEQ ID NO: 36991 - DNA, 19 bp, Homo sapiens
  source 1..19: mol_type = genomic DNA
gaggtcgatggatcgaaac

SEQ ID NO: 36992 - DNA, 20 bp, Homo sapiens
  source 1..20: mol_type = genomic DNA
gaggtcgatggatcgaaacc

SEQ ID NO: 36993 - DNA, 21 bp, Homo sapiens
  source 1..21: mol_type = genomic DNA
gaggtcgatggatcgaaacca

SEQ ID NO: 36994 - DNA, 33 bp, Homo sapiens
  source 1..33: mol_type = genomic DNA
gaggtcgatggatcgaaaccatcctctgctacc

SEQ ID NO: 36995 - DNA, 21 bp, Homo sapiens
  source 1..21: mol_type = genomic DNA
gaggtggccgagtggttaagg

SEQ ID NO: 36996 - DNA, 24 bp, Homo sapiens
  source 1..24: mol_type = genomic DNA
gaggttccgggttcgagtcccggc

SEQ ID NO: 36997 - DNA, 17 bp, Homo sapiens
  source 1..17: mol_type = genomic DNA
gagtcccggcggagtcg

SEQ ID NO: 36998 - DNA, 18 bp, Homo sapiens
  source 1..18: mol_type = genomic DNA
gagtcccggcggagtcgc

SEQ ID NO: 36999 - DNA, 18 bp, Homo sapiens
  source 1..18: mol_type = genomic DNA
gagtcctgccgcggtcgc

SEQ ID NO: 37000 - DNA, 19 bp, Homo sapiens
  source 1..19: mol_type = genomic DNA
gagtcctgccgcggtcgcc

SEQ ID NO: 37001 - DNA, 16 bp, Homo sapiens
  source 1..16: mol_type = genomic DNA
gagtgaagcattggac

SEQ ID NO: 37002 - DNA, 17 bp, Homo sapiens
  source 1..17: mol_type = genomic DNA
gagtgaagcattggact

SEQ ID NO: 37003 - DNA, 19 bp, Homo sapiens
  source 1..19: mol_type = genomic DNA
gagtgaagcattggactgt

SEQ ID NO: 37004 - DNA, 20 bp, Homo sapiens
  source 1..20: mol_type = genomic DNA
gagtgaagcattggactgta

SEQ ID NO: 37005 - DNA, 22 bp, Homo sapiens
  source 1..22: mol_type = genomic DNA
gagtgaagcattggactgtaaa

SEQ ID NO: 37006 - DNA, 28 bp, Homo sapiens
  source 1..28: mol_type = genomic DNA
gagtgaagcattggactgtaaatctaaa

SEQ ID NO: 37007 - DNA, 44 bp, Homo sapiens; identical to SEQ ID NO: 15765
  source 1..44: mol_type = genomic DNA

SEQ ID NO: 37008 - DNA, 45 bp, Homo sapiens; identical to SEQ ID NO: 15766
  source 1..45: mol_type = genomic DNA

SEQ ID NO: 37009 - DNA, 17 bp, Homo sapiens
  source 1..17: mol_type = genomic DNA
gagtggcgcagcggaag

SEQ ID NO: 37010 - DNA, 18 bp, Homo sapiens
  source 1..18: mol_type = genomic DNA
gagtggcgcagcggaagc

SEQ ID NO: 37011 - DNA, 19 bp, Homo sapiens
  source 1..19: mol_type = genomic DNA
gagtggcgcagcggaagcg

SEQ ID NO: 37012 - DNA, 23 bp, Homo sapiens
  source 1..23: mol_type = genomic DNA
gagtggcgcagcggaagcgtgct

SEQ ID NO: 37013 - DNA, 27 bp, Homo sapiens
  source 1..27: mol_type = genomic DNA
gagtggcgcagcggaagcgtgctgggc

SEQ ID NO: 37014 - DNA, 29 bp, Homo sapiens
  source 1..29: mol_type = genomic DNA
gagtggcgcagcggaagcgtgctgggccc

SEQ ID NO: 37015 - DNA, 35 bp, Homo sapiens; identical to SEQ ID NO: 15776
  source 1..35: mol_type = genomic DNA

SEQ ID NO: 37016 - DNA, 18 bp, Homo sapiens
  source 1..18: mol_type = genomic DNA
gagtggggttttgcagtc

SEQ ID NO: 37017 - DNA, 16 bp, Homo sapiens
  source 1..16: mol_type = genomic DNA
gagtggtctaaggcgc

SEQ ID NO: 37018 - DNA, 23 bp, Homo sapiens
  source 1..23: mol_type = genomic DNA
gagtggtctaaggcgccagactc

SEQ ID NO: 37019 - DNA, 17 bp, Homo sapiens
  source 1..17: mol_type = genomic DNA
gagtggtctaaggcgct

SEQ ID NO: 37020 - DNA, 20 bp, Homo sapiens
  source 1..20: mol_type = genomic DNA
gagtggttaaggcattggac

SEQ ID NO: 37021 - DNA, 23 bp, Homo sapiens
  source 1..23: mol_type = genomic DNA
gagttaaagactttttctctgac

SEQ ID NO: 37022 - DNA, 24 bp, Homo sapiens
  source 1..24: mol_type = genomic DNA
gagttaaagactttttctctgacc

SEQ ID NO: 37023 - DNA, 25 bp, Homo sapiens
  source 1..25: mol_type = genomic DNA
gagttaaagactttttctctgacca

SEQ ID NO: 37024 - DNA, 24 bp, Homo sapiens
  source 1..24: mol_type = genomic DNA
gagttcaaatctcgctggggcctc

SEQ ID NO: 37025 - DNA, 23 bp, Homo sapiens
  source 1..23: mol_type = genomic DNA
gagttcaaatctcggtggaacct

SEQ ID NO: 37026 - DNA, 24 bp, Homo sapiens
  source 1..24: mol_type = genomic DNA
gagttcaaatctcggtggaacctc

SEQ ID NO: 37027 - DNA, 25 bp, Homo sapiens
  source 1..25: mol_type = genomic DNA
gagttcaaatctcggtggaacctcc

SEQ ID NO: 37028 - DNA, 21 bp, Homo sapiens
  source 1..21: mol_type = genomic DNA
gagttcaaatctcggtgggac

SEQ ID NO: 37029 - DNA, 23 bp, Homo sapiens
  source 1..23: mol_type = genomic DNA
gagttcaaatctcggtgggacct

SEQ ID NO: 37030 - DNA, 24 bp, Homo sapiens
  source 1..24: mol_type = genomic DNA
gagttcaaatctcggtgggacctc

SEQ ID NO: 37031 - DNA, 21 bp, Homo sapiens
  source 1..21: mol_type = genomic DNA
gagttcgaatctcggtgggac

SEQ ID NO: 37032 - DNA, 23 bp, Homo sapiens
  source 1..23: mol_type = genomic DNA
gagttcgaatctcggtgggacct

SEQ ID NO: 37033 - DNA, 24 bp, Homo sapiens
  source 1..24: mol_type = genomic DNA
gagttcgaatctcggtgggacctc

SEQ ID NO: 37034 - DNA, 23 bp, Homo sapiens
  source 1..23: mol_type = genomic DNA
gagttcgagtctcggtggaacct

SEQ ID NO: 37035 - DNA, 24 bp, Homo sapiens
  source 1..24: mol_type = genomic DNA
gagttcgatcctcgctggggcctc

SEQ ID NO: 37036 - DNA, 39 bp, Homo sapiens; identical to SEQ ID NO: 15835
  source 1..39: mol_type = genomic DNA

SEQ ID NO: 37037 - DNA, 46 bp, Homo sapiens
  source 1..46: mol_type = genomic DNA
gataaaagagttactttgatagagtaaataataggagcttaaaccc

SEQ ID NO: 37038 - DNA, 16 bp, Homo sapiens
  source 1..16: mol_type = genomic DNA
gataacgcgtctgact

SEQ ID NO: 37039 - DNA, 16 bp, Homo sapiens
  source 1..16: mol_type = genomic DNA
gataaggcgtctgatt

SEQ ID NO: 37040 - DNA, 17 bp, Homo sapiens
  source 1..17: mol_type = genomic DNA
gatagctcagtcggtag

SEQ ID NO: 37041 - DNA, 18 bp, Homo sapiens
  source 1..18: mol_type = genomic DNA
gatagctcagtcggtaga

SEQ ID NO: 37042 - DNA, 19 bp, Homo sapiens
  source 1..19: mol_type = genomic DNA
gatagctcagtcggtagag

SEQ ID NO: 37043 - DNA, 27 bp, Homo sapiens
  source 1..27: mol_type = genomic DNA
gatagctcagtcggtagagcatcagac

SEQ ID NO: 37044 - DNA, 28 bp, Homo sapiens
  source 1..28: mol_type = genomic DNA
gatagctcagtcggtagagcatcagact

SEQ ID NO: 37045 - DNA, 29 bp, Homo sapiens
  source 1..29: mol_type = genomic DNA
gatcacgggttcgaaccccgtccgtgcct

SEQ ID NO: 37046 - DNA, 20 bp, Homo sapiens
  source 1..20: mol_type = genomic DNA
gatcagaagattctaggttc

SEQ ID NO: 37047 - DNA, 21 bp, Homo sapiens
  source 1..21: mol_type = genomic DNA
gatcagaagattctaggttcg

SEQ ID NO: 37048 - DNA, 39 bp, Homo sapiens; identical to SEQ ID NO: 15914
  source 1..39: mol_type = genomic DNA

SEQ ID NO: 37049 - DNA, 40 bp, Homo sapiens; identical to SEQ ID NO: 15915
  source 1..40: mol_type = genomic DNA

SEQ ID NO: 37050 - DNA, 19 bp, Homo sapiens
  source 1..19: mol_type = genomic DNA
gatcagaagattgagggtt

SEQ ID NO: 37051 - DNA, 38 bp, Homo sapiens; identical to SEQ ID NO: 15923
  source 1..38: mol_type = genomic DNA

SEQ ID NO: 37052 - DNA, 39 bp, Homo sapiens; identical to SEQ ID NO: 15924
  source 1..39: mol_type = genomic DNA

SEQ ID NO: 37053 - DNA, 20 bp, Homo sapiens
  source 1..20: mol_type = genomic DNA
gatcagaagattgcaggttc

SEQ ID NO: 37054 - DNA, 39 bp, Homo sapiens; identical to SEQ ID NO: 15929
  source 1..39: mol_type = genomic DNA

SEQ ID NO: 37055 - DNA, 20 bp, Homo sapiens
  source 1..20: mol_type = genomic DNA
gatcagaaggctgcgtgttc

SEQ ID NO: 37056 - DNA, 38 bp, Homo sapiens; identical to SEQ ID NO: 15936
  source 1..38: mol_type = genomic DNA

SEQ ID NO: 37057 - DNA, 39 bp, Homo sapiens; identical to SEQ ID NO: 15937
  source 1..39: mol_type = genomic DNA

SEQ ID NO: 37058 - DNA, 38 bp, Homo sapiens; identical to SEQ ID NO: 15951
  source 1..38: mol_type = genomic DNA

SEQ ID NO: 37059 - DNA, 19 bp, Homo sapiens
  source 1..19: mol_type = genomic DNA
gatccccagcatctccacc

SEQ ID NO: 37060 - DNA, 18 bp, Homo sapiens
  source 1..18: mol_type = genomic DNA
gatccccggcatctccac

SEQ ID NO: 37061 - DNA, 19 bp, Homo sapiens
  source 1..19: mol_type = genomic DNA
gatccccggcatctccacc

SEQ ID NO: 37062 - DNA, 16 bp, Homo sapiens
  source 1..16: mol_type = genomic DNA
gatccccgtacgggcc

SEQ ID NO: 37063 - DNA, 19 bp, Homo sapiens
  source 1..19: mol_type = genomic DNA
gatccccgtacgggccacc

SEQ ID NO: 37064 - DNA, 18 bp, Homo sapiens
  source 1..18: mol_type = genomic DNA
gatcccgggcggaaacac

SEQ ID NO: 37065 - DNA, 19 bp, Homo sapiens
  source 1..19: mol_type = genomic DNA
gatcccgggcggaaacacc

SEQ ID NO: 37066 - DNA, 18 bp, Homo sapiens
  source 1..18: mol_type = genomic DNA
gatcccgggtttcggcac

SEQ ID NO: 37067 - DNA, 19 bp, Homo sapiens
  source 1..19: mol_type = genomic DNA
gatcccgggtttcggcacc

SEQ ID NO: 37068 - DNA, 29 bp, Homo sapiens
  source 1..29: mol_type = genomic DNA
gatccgagttcaaatctcggtgggacctc

SEQ ID NO: 37069 - DNA, 18 bp, Homo sapiens
  source 1..18: mol_type = genomic DNA
gatcctcgctggggcctc

SEQ ID NO: 37070 - DNA, 30 bp, Homo sapiens
  source 1..30: mol_type = genomic DNA
gatcctgggttcgaatcccagcggggcctc

SEQ ID NO: 37071 - DNA, 31 bp, Homo sapiens; identical to SEQ ID NO: 15971
  source 1..31: mol_type = genomic DNA

SEQ ID NO: 37072 - DNA, 16 bp, Homo sapiens
  source 1..16: mol_type = genomic DNA
gatccttaggtcgctg

SEQ ID NO: 37073 - DNA, 20 bp, Homo sapiens
  source 1..20: mol_type = genomic DNA
gatccttaggtcgctggttc

SEQ ID NO: 37074 - DNA, 21 bp, Homo sapiens
  source 1..21: mol_type = genomic DNA
gatccttaggtcgctggttcg

SEQ ID NO: 37075 - DNA, 23 bp, Homo sapiens
  source 1..23: mol_type = genomic DNA
gatcgaaaccatcctctgctacc

SEQ ID NO: 37076 - DNA, 23 bp, Homo sapiens
  source 1..23: mol_type = genomic DNA
gatcgatgcccgcatcctccacc

SEQ ID NO: 37077 - DNA, 27 bp, Homo sapiens
  source 1..27: mol_type = genomic DNA
gatcgtatagtggttagtactctgcgt

SEQ ID NO: 37078 - DNA, 28 bp, Homo sapiens
  source 1..28: mol_type = genomic DNA
gatcgtatagtggttagtactctgcgtt

SEQ ID NO: 37079 - DNA, 20 bp, Homo sapiens
  source 1..20: mol_type = genomic DNA
gatgaaaacctttttccaag

SEQ ID NO: 37080 - DNA, 22 bp, Homo sapiens
  source 1..22: mol_type = genomic DNA
gatgaaaacctttttccaagga

SEQ ID NO: 37081 - DNA, 23 bp, Homo sapiens
  source 1..23: mol_type = genomic DNA
gatgaaaacctttttccaaggac

SEQ ID NO: 37082 - DNA, 24 bp, Homo sapiens
  source 1..24: mol_type = genomic DNA
gatgaaaacctttttccaaggaca

SEQ ID NO: 37083 - DNA, 25 bp, Homo sapiens
  source 1..25: mol_type = genomic DNA
gatgaaaacctttttccaaggacac

SEQ ID NO: 37084 - DNA, 26 bp, Homo sapiens
  source 1..26: mol_type = genomic DNA
gatgaaaacctttttccaaggacacc

SEQ ID NO: 37085 - DNA, 27 bp, Homo sapiens
  source 1..27: mol_type = genomic DNA
gatgaaaacctttttccaaggacacca

SEQ ID NO: 37086 - DNA, 39 bp, Homo sapiens
  source 1..39: mol_type = genomic DNA
gatgcgagaggtcccgggttcaaatcccggacgagcccc

SEQ ID NO: 37087 - DNA, 34 bp, Homo sapiens; identical to SEQ ID NO: 16006
  source 1..34: mol_type = genomic DNA

SEQ ID NO: 37088 - DNA, 35 bp, Homo sapiens
  source 1..35: mol_type = genomic DNA
gatggaggcgtgggttcgaatcccacttctgacac

SEQ ID NO: 37089 - DNA, 36 bp, Homo sapiens; identical to SEQ ID NO: 16007
  source 1..36: mol_type = genomic DNA

SEQ ID NO: 37090 - DNA, 27 bp, Homo sapiens
  source 1..27: mol_type = genomic DNA
gatggatcgaaaccatcctctgctacc

SEQ ID NO: 37091 - DNA, 21 bp, Homo sapiens
  source 1..21: mol_type = genomic DNA
gatggccgagcggtctaaggc

SEQ ID NO: 37092 - DNA, 25 bp, Homo sapiens
  source 1..25: mol_type = genomic DNA
gatggccgagcggtctaaggcgctg

SEQ ID NO: 37093 - DNA, 33 bp, Homo sapiens
  source 1..33: mol_type = genomic DNA
gatggcgtgggttcgaatcccaccgctgccacc

SEQ ID NO: 37094 - DNA, 27 bp, Homo sapiens
  source 1..27: mol_type = genomic DNA
gatggggtgtgataggtggcacggaga

SEQ ID NO: 37095 - DNA, 33 bp, Homo sapiens; identical to SEQ ID NO: 16040
  source 1..33: mol_type = genomic DNA

SEQ ID NO: 37096 - DNA, 26 bp, Homo sapiens
  source 1..26: mol_type = genomic DNA
gatgggttcgattctcatagtcctag

SEQ ID NO: 37097 - DNA, 32 bp, Homo sapiens; identical to SEQ ID NO: 16055
  source 1..32: mol_type = genomic DNA

SEQ ID NO: 37098 - DNA, 41 bp, Homo sapiens; identical to SEQ ID NO: 16064
  source 1..41: mol_type = genomic DNA

SEQ ID NO: 37099 - DNA, 45 bp, Homo sapiens; identical to SEQ ID NO: 16068
  source 1..45: mol_type = genomic DNA

SEQ ID NO: 37100 - DNA, 47 bp, Homo sapiens; identical to SEQ ID NO: 16070
  source 1..47: mol_type = genomic DNA

SEQ ID NO: 37101 - DNA, 19 bp, Homo sapiens
  source 1..19: mol_type = genomic DNA
gatgtagctcagtggtaga

SEQ ID NO: 37102 - DNA, 20 bp, Homo sapiens
  source 1..20: mol_type = genomic DNA
gatgtagctcagtggtagag

SEQ ID NO: 37103 - DNA, 32 bp, Homo sapiens; identical to SEQ ID NO: 16090
  source 1..32: mol_type = genomic DNA

SEQ ID NO: 37104 - DNA, 18 bp, Homo sapiens
  source 1..18: mol_type = genomic DNA
gattccagctcgaaggac

SEQ ID NO: 37105 - DNA, 20 bp, Homo sapiens
  source 1..20: mol_type = genomic DNA
gattccaggttcgactcctg

SEQ ID NO: 37106 - DNA, 29 bp, Homo sapiens
  source 1..29: mol_type = genomic DNA
gattccaggttcgactcctggctggctcg

SEQ ID NO: 37107 - DNA, 18 bp, Homo sapiens
  source 1..18: mol_type = genomic DNA
gattcccattcttgcgac

SEQ ID NO: 37108 - DNA, 22 bp, Homo sapiens
  source 1..22: mol_type = genomic DNA
gattcccattcttgcgacccgg

SEQ ID NO: 37109 - DNA, 24 bp, Homo sapiens
  source 1..24: mol_type = genomic DNA
gattcccattcttgcgacccgggt

SEQ ID NO: 37110 - DNA, 17 bp, Homo sapiens
  source 1..17: mol_type = genomic DNA
gattccccgacggggag

SEQ ID NO: 37111 - DNA, 18 bp, Homo sapiens
  source 1..18: mol_type = genomic DNA
gattccccgacggggagc

SEQ ID NO: 37112 - DNA, 19 bp, Homo sapiens
  source 1..19: mol_type = genomic DNA
gattccccgacggggagcc

SEQ ID NO: 37113 - DNA, 20 bp, Homo sapiens
  source 1..20: mol_type = genomic DNA
gattccccgacggggagcca

SEQ ID NO: 37114 - DNA, 18 bp, Homo sapiens
  source 1..18: mol_type = genomic DNA
gattcccggccaacgcac

SEQ ID NO: 37115 - DNA, 19 bp, Homo sapiens
  source 1..19: mol_type = genomic DNA
gattcccggccaacgcacc

SEQ ID NO: 37116 - DNA, 17 bp, Homo sapiens
  source 1..17: mol_type = genomic DNA
gattcccggccaatgca

SEQ ID NO: 37117 - DNA, 18 bp, Homo sapiens
  source 1..18: mol_type = genomic DNA
gattcccggccaatgcac

SEQ ID NO: 37118 - DNA, 19 bp, Homo sapiens
  source 1..19: mol_type = genomic DNA
gattcccggccaatgcacc

SEQ ID NO: 37119 - DNA, 18 bp, Homo sapiens
  source 1..18: mol_type = genomic DNA
gattcccgggcggcgcac

SEQ ID NO: 37120 - DNA, 19 bp, Homo sapiens
  source 1..19: mol_type = genomic DNA
gattcccgggcggcgcacc

SEQ ID NO: 37121 - DNA, 16 bp, Homo sapiens
  source 1..16: mol_type = genomic DNA
gattcccggtcaggga

SEQ ID NO: 37122 - DNA, 17 bp, Homo sapiens
  source 1..17: mol_type = genomic DNA
gattcccggtcagggaa

SEQ ID NO: 37123 - DNA, 18 bp, Homo sapiens
  source 1..18: mol_type = genomic DNA
gattcccggtcagggaac

SEQ ID NO: 37124 - DNA, 19 bp, Homo sapiens
  source 1..19: mol_type = genomic DNA
gattcccggtcagggaacc

SEQ ID NO: 37125 - DNA, 17 bp, Homo sapiens
  source 1..17: mol_type = genomic DNA
gattccggatcagaaga

SEQ ID NO: 37126 - DNA, 21 bp, Homo sapiens
  source 1..21: mol_type = genomic DNA
gattccggatcagaagattga

SEQ ID NO: 37127 - DNA, 18 bp, Homo sapiens
  source 1..18: mol_type = genomic DNA
gattccggctcgaaggac

SEQ ID NO: 37128 - DNA, 19 bp, Homo sapiens
  source 1..19: mol_type = genomic DNA
gattccggctcgaaggacc

SEQ ID NO: 37129 - DNA, 20 bp, Homo sapiens
  source 1..20: mol_type = genomic DNA
gattccggctcgaaggacca

SEQ ID NO: 37130 - DNA, 44 bp, Homo sapiens
  source 1..44: mol_type = genomic DNA
gattcctggttttcacccaggcggcccgggttcgactcccggtg

SEQ ID NO: 37131 - DNA, 17 bp, Homo sapiens
  source 1..17: mol_type = genomic DNA
gattcggcgctctcacc

SEQ ID NO: 37132 - DNA, 18 bp, Homo sapiens
  source 1..18: mol_type = genomic DNA
gattcggcgctctcaccg

SEQ ID NO: 37133 - DNA, 19 bp, Homo sapiens
  source 1..19: mol_type = genomic DNA
gattcggcgctctcaccgc

SEQ ID NO: 37134 - DNA, 20 bp, Homo sapiens
  source 1..20: mol_type = genomic DNA
gattcggcgctctcaccgcc

SEQ ID NO: 37135 - DNA, 27 bp, Homo sapiens
  source 1..27: mol_type = genomic DNA
gattcggcgctctcaccgccgcggccc

SEQ ID NO: 37136 - DNA, 28 bp, Homo sapiens
  source 1..28: mol_type = genomic DNA
gattcggcgctctcaccgccgcggcccg

SEQ ID NO: 37137 - DNA, 29 bp, Homo sapiens
  source 1..29: mol_type = genomic DNA
gattcggcgctctcaccgccgcggcccgg

SEQ ID NO: 37138 - DNA, 30 bp, Homo sapiens; identical to SEQ ID NO: 16156
  source 1..30: mol_type = genomic DNA

SEQ ID NO: 37139 - DNA, 29 bp, Homo sapiens
  source 1..29: mol_type = genomic DNA
gattctaggttcgactcctggctggctcg

SEQ ID NO: 37140 - DNA, 31 bp, Homo sapiens; identical to SEQ ID NO: 16171
  source 1..31: mol_type = genomic DNA

SEQ ID NO: 37141 - DNA, 19 bp, Homo sapiens
  source 1..19: mol_type = genomic DNA
gattctcgcttcgggtgcg

SEQ ID NO: 37142 - DNA, 17 bp, Homo sapiens
  source 1..17: mol_type = genomic DNA
gattctcgctttgggtg

SEQ ID NO: 37143 - DNA, 18 bp, Homo sapiens
  source 1..18: mol_type = genomic DNA
gattctcggtttgggtcc

SEQ ID NO: 37144 - DNA, 30 bp, Homo sapiens
  source 1..30: mol_type = genomic DNA
gattgagggttcgaatcccttcgtggttgc

SEQ ID NO: 37145 - DNA, 31 bp, Homo sapiens; identical to SEQ ID NO: 16187
  source 1..31: mol_type = genomic DNA

SEQ ID NO: 37146 - DNA, 17 bp, Homo sapiens
  source 1..17: mol_type = genomic DNA
gattgagggttcgagtc

SEQ ID NO: 37147 - DNA, 29 bp, Homo sapiens
  source 1..29: mol_type = genomic DNA
gattgagggttcgagtcccttcgtggtcg

SEQ ID NO: 37148 - DNA, 30 bp, Homo sapiens; identical to SEQ ID NO: 16191
  source 1..30: mol_type = genomic DNA

SEQ ID NO: 37149 - DNA, 31 bp, Homo sapiens; identical to SEQ ID NO: 16192
  source 1..31: mol_type = genomic DNA

SEQ ID NO: 37150 - DNA, 32 bp, Homo sapiens; identical to SEQ ID NO: 16193
  source 1..32: mol_type = genomic DNA

SEQ ID NO: 37151 - DNA, 20 bp, Homo sapiens
  source 1..20: mol_type = genomic DNA
gattgcaggttcgagtcctg

SEQ ID NO: 37152 - DNA, 30 bp, Homo sapiens; identical to SEQ ID NO: 16195
  source 1..30: mol_type = genomic DNA

SEQ ID NO: 37153 - DNA, 31 bp, Homo sapiens; identical to SEQ ID NO: 16196
  source 1..31: mol_type = genomic DNA

SEQ ID NO: 37154 - DNA, 32 bp, Homo sapiens; identical to SEQ ID NO: 16197
  source 1..32: mol_type = genomic DNA

SEQ ID NO: 37155 - DNA, 16 bp, Homo sapiens
  source 1..16: mol_type = genomic DNA
gattgtgaatctgaca

SEQ ID NO: 37156 - DNA, 18 bp, Homo sapiens
  source 1..18: mol_type = genomic DNA
gattgtgaatctgacaac

SEQ ID NO: 37157 - DNA, 19 bp, Homo sapiens
  source 1..19: mol_type = genomic DNA
gattgtgaatctgacaaca

SEQ ID NO: 37158 - DNA, 21 bp, Homo sapiens
  source 1..21: mol_type = genomic DNA
gattgtgaatctgacaacaga

SEQ ID NO: 37159 - DNA, 25 bp, Homo sapiens
  source 1..25: mol_type = genomic DNA
gattgtgaatctgacaacagaggct

SEQ ID NO: 37160 - DNA, 33 bp, Homo sapiens; identical to SEQ ID NO: 16215
  source 1..33: mol_type = genomic DNA

SEQ ID NO: 37161 - DNA, 34 bp, Homo sapiens; identical to SEQ ID NO: 16216
  source 1..34: mol_type = genomic DNA

SEQ ID NO: 37162 - DNA, 35 bp, Homo sapiens; identical to SEQ ID NO: 16217
  source 1..35: mol_type = genomic DNA

SEQ ID NO: 37163 - DNA, 38 bp, Homo sapiens; identical to SEQ ID NO: 16220
  source 1..38: mol_type = genomic DNA

SEQ ID NO: 37164 - DNA, 39 bp, Homo sapiens; identical to SEQ ID NO: 16221
  source 1..39: mol_type = genomic DNA

SEQ ID NO: 37165 - DNA, 42 bp, Homo sapiens; identical to SEQ ID NO: 16224
  source 1..42: mol_type = genomic DNA

SEQ ID NO: 37166 - DNA, 43 bp, Homo sapiens; identical to SEQ ID NO: 16225
  source 1..43: mol_type = genomic DNA

SEQ ID NO: 37167 - DNA, 44 bp, Homo sapiens; identical to SEQ ID NO: 16226
  source 1..44: mol_type = genomic DNA

SEQ ID NO: 37168 - DNA, 45 bp, Homo sapiens; identical to SEQ ID NO: 16227
  source 1..45: mol_type = genomic DNA

SEQ ID NO: 37169 - DNA, 46 bp, Homo sapiens; identical to SEQ ID NO: 16228
  source 1..46: mol_type = genomic DNA

SEQ ID NO: 37170 - DNA, 29 bp, Homo sapiens
  source 1..29: mol_type = genomic DNA
gattgtgggttcgagtcccatctggggtg

SEQ ID NO: 37171 - DNA, 30 bp, Homo sapiens; identical to SEQ ID NO: 16232
  source 1..30: mol_type = genomic DNA

SEQ ID NO: 37172 - DNA, 31 bp, Homo sapiens; identical to SEQ ID NO: 16233
  source 1..31: mol_type = genomic DNA

SEQ ID NO: 37173 - DNA, 30 bp, Homo sapiens; identical to SEQ ID NO: 16237
  source 1..30: mol_type = genomic DNA

SEQ ID NO: 37174 - DNA, 31 bp, Homo sapiens; identical to SEQ ID NO: 16238
  source 1..31: mol_type = genomic DNA

SEQ ID NO: 37175 - DNA, 19 bp, Homo sapiens
  source 1..19: mol_type = genomic DNA
gatttcaacttaacttgac

SEQ ID NO: 37176 - DNA, 20 bp, Homo sapiens
  source 1..20: mol_type = genomic DNA
gatttcaacttaacttgacc

SEQ ID NO: 37177 - DNA, 24 bp, Homo sapiens
  source 1..24: mol_type = genomic DNA
gatttcaacttaacttgaccgctc

SEQ ID NO: 37178 - DNA, 26 bp, Homo sapiens
  source 1..26: mol_type = genomic DNA
gatttcaacttaacttgaccgctctg

SEQ ID NO: 37179 - DNA, 27 bp, Homo sapiens
  source 1..27: mol_type = genomic DNA
gatttcaacttaacttgaccgctctga

SEQ ID NO: 37180 - DNA, 28 bp, Homo sapiens
  source 1..28: mol_type = genomic DNA
gatttcaacttaacttgaccgctctgac

SEQ ID NO: 37181 - DNA, 29 bp, Homo sapiens
  source 1..29: mol_type = genomic DNA
gatttcaacttaacttgaccgctctgacc

SEQ ID NO: 37182 - DNA, 30 bp, Homo sapiens; identical to SEQ ID NO: 16253
  source 1..30: mol_type = genomic DNA

SEQ ID NO: 37183 - DNA, 29 bp, Homo sapiens
  source 1..29: mol_type = genomic DNA
gcaaattcgaagaagcagcttcaaacctg

SEQ ID NO: 37184 - DNA, 36 bp, Homo sapiens; identical to SEQ ID NO: 16289
  source 1..36: mol_type = genomic DNA

SEQ ID NO: 37185 - DNA, 37 bp, Homo sapiens; identical to SEQ ID NO: 16290
  source 1..37: mol_type = genomic DNA

SEQ ID NO: 37186 - DNA, 38 bp, Homo sapiens; identical to SEQ ID NO: 16291
  source 1..38: mol_type = genomic DNA

SEQ ID NO: 37187 - DNA, 29 bp, Homo sapiens
  source 1..29: mol_type = genomic DNA
gcaacctcggttcgaatccgagtcacggc

SEQ ID NO: 37188 - DNA, 31 bp, Homo sapiens; identical to SEQ ID NO: 16297
  source 1..31: mol_type = genomic DNA

SEQ ID NO: 37189 - DNA, 32 bp, Homo sapiens; identical to SEQ ID NO: 16298
  source 1..32: mol_type = genomic DNA

SEQ ID NO: 37190 - DNA, 29 bp, Homo sapiens
  source 1..29: mol_type = genomic DNA
gcaatacactgaaaatgtttagacgggct

SEQ ID NO: 37191 - DNA, 30 bp, Homo sapiens; identical to SEQ ID NO: 16311
  source 1..30: mol_type = genomic DNA

SEQ ID NO: 37192 - DNA, 31 bp, Homo sapiens; identical to SEQ ID NO: 16312
  source 1..31: mol_type = genomic DNA

SEQ ID NO: 37193 - DNA, 32 bp, Homo sapiens; identical to SEQ ID NO: 16313
  source 1..32: mol_type = genomic DNA

SEQ ID NO: 37194 - DNA, 19 bp, Homo sapiens
  source 1..19: mol_type = genomic DNA
gcaatggacgagcgcgctg

SEQ ID NO: 37195 - DNA, 22 bp, Homo sapiens
  source 1..22: mol_type = genomic DNA
gcaatggataacgcgtctgact

SEQ ID NO: 37196 - DNA, 16 bp, Homo sapiens
  source 1..16: mol_type = genomic DNA
gcaatggatagcgcat

SEQ ID NO: 37197 - DNA, 18 bp, Homo sapiens
  source 1..18: mol_type = genomic DNA
gcaatggatagcgcattg

SEQ ID NO: 37198 - DNA, 19 bp, Homo sapiens
  source 1..19: mol_type = genomic DNA
gcaatggatagcgcattgg

SEQ ID NO: 37199 - DNA, 20 bp, Homo sapiens
  source 1..20: mol_type = genomic DNA
gcaatggatagcgcattgga

SEQ ID NO: 37200 - DNA, 21 bp, Homo sapiens
  source 1..21: mol_type = genomic DNA
gcaatggatagcgcattggac

SEQ ID NO: 37201 - DNA, 24 bp, Homo sapiens
  source 1..24: mol_type = genomic DNA
gcaatggatagcgcattggacttc

SEQ ID NO: 37202 - DNA, 44 bp, Homo sapiens
  source 1..44: mol_type = genomic DNA
gcaatggatagcgcattggacttctaattcaaaggttccgggtt

SEQ ID NO: 37203 - DNA, 21 bp, Homo sapiens
  source 1..21: mol_type = genomic DNA
gcaatggtagcgcgtctgact

SEQ ID NO: 37204 - DNA, 18 bp, Homo sapiens
  source 1..18: mol_type = genomic DNA
gcaatggtggttcagtgg

SEQ ID NO: 37205 - DNA, 29 bp, Homo sapiens
  source 1..29: mol_type = genomic DNA
gcaatggtggttcagtggtagaattctcg

SEQ ID NO: 37206 - DNA, 30 bp, Homo sapiens; identical to SEQ ID NO: 16339
  source 1..30: mol_type = genomic DNA

SEQ ID NO: 37207 - DNA, 31 bp, Homo sapiens; identical to SEQ ID NO: 16340
  source 1..31: mol_type = genomic DNA

SEQ ID NO: 37208 - DNA, 32 bp, Homo sapiens; identical to SEQ ID NO: 16341
  source 1..32: mol_type = genomic DNA

SEQ ID NO: 37209 - DNA, 33 bp, Homo sapiens
  source 1..33: mol_type = genomic DNA
gcaatggtggttcagtggtagaattctcgcctt

SEQ ID NO: 37210 - DNA, 32 bp, Homo sapiens
  source 1..32: mol_type = genomic DNA
gcacacgtgggttcgaatcccatcctcgtcgc

SEQ ID NO: 37211 - DNA, 33 bp, Homo sapiens
  source 1..33: mol_type = genomic DNA
gcacacgtgggttcgaatcccatcctcgtcgcc

SEQ ID NO: 37212 - DNA, 27 bp, Homo sapiens
  source 1..27: mol_type = genomic DNA
gcacaggttcgaatcctgttcgtgacg

SEQ ID NO: 37213 - DNA, 31 bp, Homo sapiens; identical to SEQ ID NO: 16353
  source 1..31: mol_type = genomic DNA

SEQ ID NO: 37214 - DNA, 34 bp, Homo sapiens
  source 1..34: mol_type = genomic DNA
gcacgaggccccgggttcaatccccggcacctcc

SEQ ID NO: 37215 - DNA, 35 bp, Homo sapiens
  source 1..35: mol_type = genomic DNA
gcacgaggccccgggttcaatccccggcacctcca

SEQ ID NO: 37216 - DNA, 36 bp, Homo sapiens; identical to SEQ ID NO: 16356
  source 1..36: mol_type = genomic DNA

SEQ ID NO: 37217 - DNA, 37 bp, Homo sapiens; identical to SEQ ID NO: 16357
  source 1..37: mol_type = genomic DNA

SEQ ID NO: 37218 - DNA, 38 bp, Homo sapiens; identical to SEQ ID NO: 16358
  source 1..38: mol_type = genomic DNA

SEQ ID NO: 37219 - DNA, 32 bp, Homo sapiens; identical to SEQ ID NO: 16360
  source 1..32: mol_type = genomic DNA

SEQ ID NO: 37220 - DNA, 33 bp, Homo sapiens; identical to SEQ ID NO: 16361
  source 1..33: mol_type = genomic DNA

SEQ ID NO: 37221 - DNA, 41 bp, Homo sapiens
  source 1..41: mol_type = genomic DNA
gcacgtatgaggccccgggttcaatccccggcatctccacc

SEQ ID NO: 37222 - DNA, 16 bp, Homo sapiens
  source 1..16: mol_type = genomic DNA
gcactctggactctga

SEQ ID NO: 37223 - DNA, 17 bp, Homo sapiens
  source 1..17: mol_type = genomic DNA
gcactctggactctgaa

SEQ ID NO: 37224 - DNA, 18 bp, Homo sapiens
  source 1..18: mol_type = genomic DNA
gcactctggactctgaat

SEQ ID NO: 37225 - DNA, 19 bp, Homo sapiens
  source 1..19: mol_type = genomic DNA
gcactctggactctgaatc

SEQ ID NO: 37226 - DNA, 20 bp, Homo sapiens
  source 1..20: mol_type = genomic DNA
gcactctggactctgaatcc

SEQ ID NO: 37227 - DNA, 21 bp, Homo sapiens
  source 1..21: mol_type = genomic DNA
gcactctggactctgaatcca

SEQ ID NO: 37228 - DNA, 22 bp, Homo sapiens
  source 1..22: mol_type = genomic DNA
gcactctggactctgaatccag

SEQ ID NO: 37229 - DNA, 23 bp, Homo sapiens
  source 1..23: mol_type = genomic DNA
gcactctggactctgaatccagc

SEQ ID NO: 37230 - DNA, 24 bp, Homo sapiens
  source 1..24: mol_type = genomic DNA
gcactctggactctgaatccagcg

SEQ ID NO: 37231 - DNA, 28 bp, Homo sapiens
  source 1..28: mol_type = genomic DNA
gcactctggactctgaatccagcgatcc

SEQ ID NO: 37232 - DNA, 29 bp, Homo sapiens
  source 1..29: mol_type = genomic DNA
gcactctggactctgaatccagcgatccg

SEQ ID NO: 37233 - DNA, 30 bp, Homo sapiens; identical to SEQ ID NO: 16375
  source 1..30: mol_type = genomic DNA

SEQ ID NO: 37234 - DNA, 31 bp, Homo sapiens; identical to SEQ ID NO: 16376
  source 1..31: mol_type = genomic DNA

SEQ ID NO: 37235 - DNA, 32 bp, Homo sapiens; identical to SEQ ID NO: 16377
  source 1..32: mol_type = genomic DNA

SEQ ID NO: 37236 - DNA, 33 bp, Homo sapiens; identical to SEQ ID NO: 16378
  source 1..33: mol_type = genomic DNA

SEQ ID NO: 37237 - DNA, 34 bp, Homo sapiens; identical to SEQ ID NO: 16379
  source 1..34: mol_type = genomic DNA

SEQ ID NO: 37238 - DNA, 35 bp, Homo sapiens; identical to SEQ ID NO: 16380
  source 1..35: mol_type = genomic DNA

SEQ ID NO: 37239 - DNA, 40 bp, Homo sapiens
  source 1..40: mol_type = genomic DNA
gcactctggactctgaatccagcgatccgagttcaaatct

SEQ ID NO: 37240 - DNA, 43 bp, Homo sapiens
  source 1..43: mol_type = genomic DNA
gcactctggactctgaatccagcgatccgagttcaaatctcgg

SEQ ID NO: 37241 - DNA, 16 bp, Homo sapiens
  source 1..16: mol_type = genomic DNA
gcactctggactttga

SEQ ID NO: 37242 - DNA, 17 bp, Homo sapiens
  source 1..17: mol_type = genomic DNA
gcactctggactttgaa

SEQ ID NO: 37243 - DNA, 18 bp, Homo sapiens
  source 1..18: mol_type = genomic DNA
gcactctggactttgaat

SEQ ID NO: 37244 - DNA, 19 bp, Homo sapiens
  source 1..19: mol_type = genomic DNA
gcactctggactttgaatc

SEQ ID NO: 37245 - DNA, 20 bp, Homo sapiens
  source 1..20: mol_type = genomic DNA
gcactctggactttgaatcc

SEQ ID NO: 37246 - DNA, 31 bp, Homo sapiens; identical to SEQ ID NO: 16395
  source 1..31: mol_type = genomic DNA

SEQ ID NO: 37247 - DNA, 34 bp, Homo sapiens
  source 1..34: mol_type = genomic DNA
gcactctggactttgaatccagcgatccgagttc

SEQ ID NO: 37248 - DNA, 17 bp, Homo sapiens
  source 1..17: mol_type = genomic DNA
gcactggtggttcagtg

SEQ ID NO: 37249 - DNA, 18 bp, Homo sapiens
  source 1..18: mol_type = genomic DNA
gcactggtggttcagtgg

SEQ ID NO: 37250 - DNA, 29 bp, Homo sapiens
  source 1..29: mol_type = genomic DNA
gcactggtggttcagtggtagaattctcg

SEQ ID NO: 37251 - DNA, 30 bp, Homo sapiens; identical to SEQ ID NO: 16401
  source 1..30: mol_type = genomic DNA

SEQ ID NO: 37252 - DNA, 31 bp, Homo sapiens; identical to SEQ ID NO: 16402
  source 1..31: mol_type = genomic DNA

SEQ ID NO: 37253 - DNA, 32 bp, Homo sapiens; identical to SEQ ID NO: 16403
  source 1..32: mol_type = genomic DNA

SEQ ID NO: 37254 - DNA, 33 bp, Homo sapiens; identical to SEQ ID NO: 16404
  source 1..33: mol_type = genomic DNA

SEQ ID NO: 37255 - DNA, 27 bp, Homo sapiens
  source 1..27: mol_type = genomic DNA
gcagaaggtcctgggttcgagccccag

SEQ ID NO: 37256 - DNA, 34 bp, Homo sapiens; identical to SEQ ID NO: 16415
  source 1..34: mol_type = genomic DNA

SEQ ID NO: 37257 - DNA, 35 bp, Homo sapiens; identical to SEQ ID NO: 16416
  source 1..35: mol_type = genomic DNA

SEQ ID NO: 37258 - DNA, 36 bp, Homo sapiens; identical to SEQ ID NO: 16417
  source 1..36: mol_type = genomic DNA

SEQ ID NO: 37259 - DNA, 37 bp, Homo sapiens; identical to SEQ ID NO: 16418
  source 1..37: mol_type = genomic DNA

SEQ ID NO: 37260 - DNA, 38 bp, Homo sapiens; identical to SEQ ID NO: 16419
  source 1..38: mol_type = genomic DNA

SEQ ID NO: 37261 - DNA, 16 bp, Homo sapiens
  source 1..16: mol_type = genomic DNA
gcagagcatttgactg

SEQ ID NO: 37262 - DNA, 18 bp, Homo sapiens
  source 1..18: mol_type = genomic DNA
gcagagtggcgcagcgga

SEQ ID NO: 37263 - DNA, 20 bp, Homo sapiens
  source 1..20: mol_type = genomic DNA
gcagagtggcgcagcggaag

SEQ ID NO: 37264 - DNA, 30 bp, Homo sapiens; identical to SEQ ID NO: 16440
  source 1..30: mol_type = genomic DNA

SEQ ID NO: 37265 - DNA, 32 bp, Homo sapiens; identical to SEQ ID NO: 16442
  source 1..32: mol_type = genomic DNA

SEQ ID NO: 37266 - DNA, 16 bp, Homo sapiens
  source 1..16: mol_type = genomic DNA
gcagcaacctcggttc

SEQ ID NO: 37267 - DNA, 17 bp, Homo sapiens
  source 1..17: mol_type = genomic DNA
gcagcaacctcggttcg

SEQ ID NO: 37268 - DNA, 31 bp, Homo sapiens; identical to SEQ ID NO: 16460
  source 1..31: mol_type = genomic DNA

SEQ ID NO: 37269 - DNA, 32 bp, Homo sapiens; identical to SEQ ID NO: 16461
  source 1..32: mol_type = genomic DNA

SEQ ID NO: 37270 - DNA, 33 bp, Homo sapiens; identical to SEQ ID NO: 16462
  source 1..33: mol_type = genomic DNA

SEQ ID NO: 37271 - DNA, 34 bp, Homo sapiens; identical to SEQ ID NO: 16463
  source 1..34: mol_type = genomic DNA

SEQ ID NO: 37272 - DNA, 35 bp, Homo sapiens; identical to SEQ ID NO: 16464
  source 1..35: mol_type = genomic DNA

SEQ ID NO: 37273 - DNA, 36 bp, Homo sapiens; identical to SEQ ID NO: 16465
  source 1..36: mol_type = genomic DNA

SEQ ID NO: 37274 - DNA, 16 bp, Homo sapiens
  source 1..16: mol_type = genomic DNA
gcagcgatggccgagt

SEQ ID NO: 37275 - DNA, 17 bp, Homo sapiens
  source 1..17: mol_type = genomic DNA
gcagcgatggccgagtg

SEQ ID NO: 37276 - DNA, 18 bp, Homo sapiens
  source 1..18: mol_type = genomic DNA
gcagcgatggccgagtgg

SEQ ID NO: 37277 - DNA, 19 bp, Homo sapiens
  source 1..19: mol_type = genomic DNA
gcagcgatggccgagtggt

SEQ ID NO: 37278 - DNA, 20 bp, Homo sapiens
  source 1..20: mol_type = genomic DNA
gcagcgatggccgagtggtt

SEQ ID NO: 37279 - DNA, 22 bp, Homo sapiens
  source 1..22: mol_type = genomic DNA
gcagcgatggccgagtggttaa

SEQ ID NO: 37280 - DNA, 23 bp, Homo sapiens
  source 1..23: mol_type = genomic DNA
gcagcgatggccgagtggttaag

SEQ ID NO: 37281 - DNA, 24 bp, Homo sapiens
  source 1..24: mol_type = genomic DNA
gcagcgatggccgagtggttaagg

SEQ ID NO: 37282 - DNA, 25 bp, Homo sapiens
  source 1..25: mol_type = genomic DNA
gcagcgatggccgagtggttaaggc

SEQ ID NO: 37283 - DNA, 33 bp, Homo sapiens; identical to SEQ ID NO: 16477
  source 1..33: mol_type = genomic DNA

SEQ ID NO: 37284 - DNA, 20 bp, Homo sapiens
  source 1..20: mol_type = genomic DNA
gcagcggaagcgtgctgggc

SEQ ID NO: 37285 - DNA, 21 bp, Homo sapiens
  source 1..21: mol_type = genomic DNA
gcagcggaagcgtgctgggcc

SEQ ID NO: 37286 - DNA, 22 bp, Homo sapiens
  source 1..22: mol_type = genomic DNA
gcagcggaagcgtgctgggccc

SEQ ID NO: 37287 - DNA, 22 bp, Homo sapiens
  source 1..22: mol_type = genomic DNA
gcagcttcaaacctgccggggc

SEQ ID NO: 37288 - DNA, 23 bp, Homo sapiens
  source 1..23: mol_type = genomic DNA
gcagcttcaaacctgccggggct

SEQ ID NO: 37289 - DNA, 24 bp, Homo sapiens
  source 1..24: mol_type = genomic DNA
gcagcttcaaacctgccggggctt

SEQ ID NO: 37290 - DNA, 26 bp, Homo sapiens
  source 1..26: mol_type = genomic DNA
gcagcttcaaacctgccggggcttcc

SEQ ID NO: 37291 - DNA, 16 bp, Homo sapiens
  source 1..16: mol_type = genomic DNA
gcaggttcgaatcctg

SEQ ID NO: 37292 - DNA, 27 bp, Homo sapiens
  source 1..27: mol_type = genomic DNA
gcaggttcgaatcctgccgactacgcc

SEQ ID NO: 37293 - DNA, 16 bp, Homo sapiens
  source 1..16: mol_type = genomic DNA
gcaggttcgagtcctg

SEQ ID NO: 37294 - DNA, 26 bp, Homo sapiens
  source 1..26: mol_type = genomic DNA
gcaggttcgagtcctgccgcggtcgc

SEQ ID NO: 37295 - DNA, 27 bp, Homo sapiens
  source 1..27: mol_type = genomic DNA
gcaggttcgagtcctgccgcggtcgcc

SEQ ID NO: 37296 - DNA, 19 bp, Homo sapiens
  source 1..19: mol_type = genomic DNA
gcagtggtagaattctcgc

SEQ ID NO: 37297 - DNA, 21 bp, Homo sapiens
  source 1..21: mol_type = genomic DNA
gcagtggtagaattctcgcct

SEQ ID NO: 37298 - DNA, 18 bp, Homo sapiens
  source 1..18: mol_type = genomic DNA
gcagttgacccgggttcg

SEQ ID NO: 37299 - DNA, 36 bp, Homo sapiens; identical to SEQ ID NO: 16504
  source 1..36: mol_type = genomic DNA

SEQ ID NO: 37300 - DNA, 30 bp, Homo sapiens
  source 1..30: mol_type = genomic DNA
gcatagctgccttccaagcagttgacccgg

SEQ ID NO: 37301 - DNA, 18 bp, Homo sapiens
  source 1..18: mol_type = genomic DNA
gcataggtggttcagtgg

SEQ ID NO: 37302 - DNA, 19 bp, Homo sapiens
  source 1..19: mol_type = genomic DNA
gcatcagcctccggagctg

SEQ ID NO: 37303 - DNA, 27 bp, Homo sapiens
  source 1..27: mol_type = genomic DNA
gcatcagcctccggagctggggattgt

SEQ ID NO: 37304 - DNA, 17 bp, Homo sapiens
  source 1..17: mol_type = genomic DNA
gcatgagactcttaatc

SEQ ID NO: 37305 - DNA, 18 bp, Homo sapiens
  source 1..18: mol_type = genomic DNA
gcatgagactcttaatct

SEQ ID NO: 37306 - DNA, 33 bp, Homo sapiens; identical to SEQ ID NO: 16530
  source 1..33: mol_type = genomic DNA

SEQ ID NO: 37307 - DNA, 35 bp, Homo sapiens; identical to SEQ ID NO: 16532
  source 1..35: mol_type = genomic DNA

SEQ ID NO: 37308 - DNA, 36 bp, Homo sapiens; identical to SEQ ID NO: 16533
  source 1..36: mol_type = genomic DNA

SEQ ID NO: 37309 - DNA, 37 bp, Homo sapiens; identical to SEQ ID NO: 16534
  source 1..37: mol_type = genomic DNA

SEQ ID NO: 37310 - DNA, 16 bp, Homo sapiens
  source 1..16: mol_type = genomic DNA
gcatgggactcttaat

SEQ ID NO: 37311 - DNA, 17 bp, Homo sapiens
  source 1..17: mol_type = genomic DNA
gcatgggactcttaatc

SEQ ID NO: 37312 - DNA, 18 bp, Homo sapiens
  source 1..18: mol_type = genomic DNA
gcatgggactcttaatcc

SEQ ID NO: 37313 - DNA, 19 bp, Homo sapiens
  source 1..19: mol_type = genomic DNA
gcatgggactcttaatccc

SEQ ID NO: 37314 - DNA, 18 bp, Homo sapiens
  source 1..18: mol_type = genomic DNA
gcatgggtgattcagtgg

SEQ ID NO: 37315 - DNA, 16 bp, Homo sapiens
  source 1..16: mol_type = genomic DNA
gcatgggtggttcagt

SEQ ID NO: 37316 - DNA, 17 bp, Homo sapiens
  source 1..17: mol_type = genomic DNA
gcatgggtggttcagtg

SEQ ID NO: 37317 - DNA, 18 bp, Homo sapiens
  source 1..18: mol_type = genomic DNA
gcatgggtggttcagtgg

SEQ ID NO: 37318 - DNA, 19 bp, Homo sapiens
  source 1..19: mol_type = genomic DNA
gcatgggtggttcagtggt

SEQ ID NO: 37319 - DNA, 20 bp, Homo sapiens
  source 1..20: mol_type = genomic DNA
gcatgggtggttcagtggta

SEQ ID NO: 37320 - DNA, 21 bp, Homo sapiens
  source 1..21: mol_type = genomic DNA
gcatgggtggttcagtggtag

SEQ ID NO: 37321 - DNA, 22 bp, Homo sapiens
  source 1..22: mol_type = genomic DNA
gcatgggtggttcagtggtaga

SEQ ID NO: 37322 - DNA, 23 bp, Homo sapiens
  source 1..23: mol_type = genomic DNA
gcatgggtggttcagtggtagaa

SEQ ID NO: 37323 - DNA, 24 bp, Homo sapiens
  source 1..24: mol_type = genomic DNA
gcatgggtggttcagtggtagaat

SEQ ID NO: 37324 - DNA, 25 bp, Homo sapiens
  source 1..25: mol_type = genomic DNA
gcatgggtggttcagtggtagaatt

SEQ ID NO: 37325 - DNA, 26 bp, Homo sapiens
  source 1..26: mol_type = genomic DNA
gcatgggtggttcagtggtagaattc

SEQ ID NO: 37326 - DNA, 27 bp, Homo sapiens
  source 1..27: mol_type = genomic DNA
gcatgggtggttcagtggtagaattct

SEQ ID NO: 37327 - DNA, 28 bp, Homo sapiens
  source 1..28: mol_type = genomic DNA
gcatgggtggttcagtggtagaattctc

SEQ ID NO: 37328 - DNA, 29 bp, Homo sapiens
  source 1..29: mol_type = genomic DNA
gcatgggtggttcagtggtagaattctcg

SEQ ID NO: 37329 - DNA, 30 bp, Homo sapiens; identical to SEQ ID NO: 16559
  source 1..30: mol_type = genomic DNA

SEQ ID NO: 37330 - DNA, 31 bp, Homo sapiens; identical to SEQ ID NO: 16560
  source 1..31: mol_type = genomic DNA

SEQ ID NO: 37331 - DNA, 32 bp, Homo sapiens; identical to SEQ ID NO: 16561
  source 1..32: mol_type = genomic DNA

SEQ ID NO: 37332 - DNA, 33 bp, Homo sapiens; identical to SEQ ID NO: 16562
  source 1..33: mol_type = genomic DNA

SEQ ID NO: 37333 - DNA, 34 bp, Homo sapiens; identical to SEQ ID NO: 16563
  source 1..34: mol_type = genomic DNA

SEQ ID NO: 37334 - DNA, 35 bp, Homo sapiens; identical to SEQ ID NO: 16564
  source 1..35: mol_type = genomic DNA

SEQ ID NO: 37335 - DNA, 36 bp, Homo sapiens; identical to SEQ ID NO: 16565
  source 1..36: mol_type = genomic DNA

SEQ ID NO: 37336 - DNA, 38 bp, Homo sapiens; identical to SEQ ID NO: 16567
  source 1..38: mol_type = genomic DNA

SEQ ID NO: 37337 - DNA, 40 bp, Homo sapiens; identical to SEQ ID NO: 16569
  source 1..40: mol_type = genomic DNA

SEQ ID NO: 37338 - DNA, 43 bp, Homo sapiens; identical to SEQ ID NO: 16572
  source 1..43: mol_type = genomic DNA

SEQ ID NO: 37339 - DNA, 44 bp, Homo sapiens; identical to SEQ ID NO: 16573
  source 1..44: mol_type = genomic DNA

SEQ ID NO: 37340 - DNA, 16 bp, Homo sapiens
  source 1..16: mol_type = genomic DNA
gcattcggctgttaac

SEQ ID NO: 37341 - DNA, 17 bp, Homo sapiens
  source 1..17: mol_type = genomic DNA
gcattcggctgttaacc

SEQ ID NO: 37342 - DNA, 18 bp, Homo sapiens
  source 1..18: mol_type = genomic DNA
gcattggtggttcaatgg

SEQ ID NO: 37343 - DNA, 30 bp, Homo sapiens; identical to SEQ ID NO: 16612
  source 1..30: mol_type = genomic DNA

SEQ ID NO: 37344 - DNA, 31 bp, Homo sapiens; identical to SEQ ID NO: 16613
  source 1..31: mol_type = genomic DNA

SEQ ID NO: 37345 - DNA, 32 bp, Homo sapiens; identical to SEQ ID NO: 16614
  source 1..32: mol_type = genomic DNA

SEQ ID NO: 37346 - DNA, 16 bp, Homo sapiens
  source 1..16: mol_type = genomic DNA
gcattggtggttcagt

SEQ ID NO: 37347 - DNA, 17 bp, Homo sapiens
  source 1..17: mol_type = genomic DNA
gcattggtggttcagtg

SEQ ID NO: 37348 - DNA, 18 bp, Homo sapiens
  source 1..18: mol_type = genomic DNA
gcattggtggttcagtgg

SEQ ID NO: 37349 - DNA, 19 bp, Homo sapiens
  source 1..19: mol_type = genomic DNA
gcattggtggttcagtggt

SEQ ID NO: 37350 - DNA, 20 bp, Homo sapiens
  source 1..20: mol_type = genomic DNA
gcattggtggttcagtggta

SEQ ID NO: 37351 - DNA, 21 bp, Homo sapiens
  source 1..21: mol_type = genomic DNA
gcattggtggttcagtggtag

SEQ ID NO: 37352 - DNA, 22 bp, Homo sapiens
  source 1..22: mol_type = genomic DNA
gcattggtggttcagtggtaga

SEQ ID NO: 37353 - DNA, 23 bp, Homo sapiens
  source 1..23: mol_type = genomic DNA
gcattggtggttcagtggtagaa

SEQ ID NO: 37354 - DNA, 24 bp, Homo sapiens
  source 1..24: mol_type = genomic DNA
gcattggtggttcagtggtagaat

SEQ ID NO: 37355 - DNA, 25 bp, Homo sapiens
  source 1..25: mol_type = genomic DNA
gcattggtggttcagtggtagaatt

SEQ ID NO: 37356 - DNA, 26 bp, Homo sapiens
  source 1..26: mol_type = genomic DNA
gcattggtggttcagtggtagaattc

SEQ ID NO: 37357 - DNA, 27 bp, Homo sapiens
  source 1..27: mol_type = genomic DNA
gcattggtggttcagtggtagaattct

SEQ ID NO: 37358 - DNA, 28 bp, Homo sapiens
  source 1..28: mol_type = genomic DNA
gcattggtggttcagtggtagaattctc

SEQ ID NO: 37359 - DNA, 29 bp, Homo sapiens
  source 1..29: mol_type = genomic DNA
gcattggtggttcagtggtagaattctcg

SEQ ID NO: 37360 - DNA, 30 bp, Homo sapiens; identical to SEQ ID NO: 16630
  source 1..30: mol_type = genomic DNA

SEQ ID NO: 37361 - DNA, 31 bp, Homo sapiens; identical to SEQ ID NO: 16631
  source 1..31: mol_type = genomic DNA

SEQ ID NO: 37362 - DNA, 32 bp, Homo sapiens; identical to SEQ ID NO: 16632
  source 1..32: mol_type = genomic DNA

SEQ ID NO: 37363 - DNA, 33 bp, Homo sapiens; identical to SEQ ID NO: 16633
  source 1..33: mol_type = genomic DNA

SEQ ID NO: 37364 - DNA, 34 bp, Homo sapiens; identical to SEQ ID NO: 16634
  source 1..34: mol_type = genomic DNA

SEQ ID NO: 37365 - DNA, 35 bp, Homo sapiens; identical to SEQ ID NO: 16635
  source 1..35: mol_type = genomic DNA

SEQ ID NO: 37366 - DNA, 36 bp, Homo sapiens; identical to SEQ ID NO: 16636
  source 1..36: mol_type = genomic DNA

SEQ ID NO: 37367 - DNA, 38 bp, Homo sapiens; identical to SEQ ID NO: 16638
  source 1..38: mol_type = genomic DNA

SEQ ID NO: 37368 - DNA, 33 bp, Homo sapiens; identical to SEQ ID NO: 16640
  source 1..33: mol_type = genomic DNA

SEQ ID NO: 37369 - DNA, 34 bp, Homo sapiens; identical to SEQ ID NO: 16641
  source 1..34: mol_type = genomic DNA

SEQ ID NO: 37370 - DNA, 35 bp, Homo sapiens; identical to SEQ ID NO: 16642
  source 1..35: mol_type = genomic DNA

SEQ ID NO: 37371 - DNA, 36 bp, Homo sapiens; identical to SEQ ID NO: 16643
  source 1..36: mol_type = genomic DNA

SEQ ID NO: 37372 - DNA, 37 bp, Homo sapiens; identical to SEQ ID NO: 16644
  source 1..37: mol_type = genomic DNA

SEQ ID NO: 37373 - DNA, 38 bp, Homo sapiens; identical to SEQ ID NO: 16645
  source 1..38: mol_type = genomic DNA

SEQ ID NO: 37374 - DNA, 39 bp, Homo sapiens; identical to SEQ ID NO: 16646
  source 1..39: mol_type = genomic DNA

SEQ ID NO: 37375 - DNA, 40 bp, Homo sapiens; identical to SEQ ID NO: 16647
  source 1..40: mol_type = genomic DNA

SEQ ID NO: 37376 - DNA, 41 bp, Homo sapiens; identical to SEQ ID NO: 16648
  source 1..41: mol_type = genomic DNA

SEQ ID NO: 37377 - DNA, 42 bp, Homo sapiens; identical to SEQ ID NO: 16649
  source 1..42: mol_type = genomic DNA

SEQ ID NO: 37378 - DNA, 43 bp, Homo sapiens; identical to SEQ ID NO: 16650
  source 1..43: mol_type = genomic DNA

SEQ ID NO: 37379 - DNA, 44 bp, Homo sapiens; identical to SEQ ID NO: 16651
  source 1..44: mol_type = genomic DNA

SEQ ID NO: 37380 - DNA, 45 bp, Homo sapiens; identical to SEQ ID NO: 16652
  source 1..45: mol_type = genomic DNA

SEQ ID NO: 37381 - DNA, 46 bp, Homo sapiens; identical to SEQ ID NO: 16653
  source 1..46: mol_type = genomic DNA

SEQ ID NO: 37382 - DNA, 47 bp, Homo sapiens; identical to SEQ ID NO: 16654
  source 1..47: mol_type = genomic DNA

SEQ ID NO: 37383 - DNA, 16 bp, Homo sapiens
  source 1..16: mol_type = genomic DNA
gccaaggtcgcgggtt

SEQ ID NO: 37384 - DNA, 17 bp, Homo sapiens
  source 1..17: mol_type = genomic DNA
gccaaggtcgcgggttc

SEQ ID NO: 37385 - DNA, 36 bp, Homo sapiens; identical to SEQ ID NO: 16663
  source 1..36: mol_type = genomic DNA

SEQ ID NO: 37386 - DNA, 31 bp, Homo sapiens
  source 1..31: mol_type = genomic DNA
gccaaggtcgcgggttcgatccccgtacggg

SEQ ID NO: 37387 - DNA, 35 bp, Homo sapiens; identical to SEQ ID NO: 16665
  source 1..35: mol_type = genomic DNA

SEQ ID NO: 37388 - DNA, 36 bp, Homo sapiens; identical to SEQ ID NO: 16666
  source 1..36: mol_type = genomic DNA

SEQ ID NO: 37389 - DNA, 16 bp, Homo sapiens
  source 1..16: mol_type = genomic DNA
gccacgcgggaggccc

SEQ ID NO: 37390 - DNA, 17 bp, Homo sapiens
  source 1..17: mol_type = genomic DNA
gccacgcgggaggcccg

SEQ ID NO: 37391 - DNA, 19 bp, Homo sapiens
  source 1..19: mol_type = genomic DNA
gccacgcgggaggcccggg

SEQ ID NO: 37392 - DNA, 20 bp, Homo sapiens
  source 1..20: mol_type = genomic DNA
gccacgcgggaggcccgggt

SEQ ID NO: 37393 - DNA, 33 bp, Homo sapiens
  source 1..33: mol_type = genomic DNA
gccacggcccgggttcgattcccggtcagggaa

SEQ ID NO: 37394 - DNA, 18 bp, Homo sapiens
  source 1..18: mol_type = genomic DNA
gccagggattgtgggttc

SEQ ID NO: 37395 - DNA, 35 bp, Homo sapiens; identical to SEQ ID NO: 16687
  source 1..35: mol_type = genomic DNA

SEQ ID NO: 37396 - DNA, 37 bp, Homo sapiens; identical to SEQ ID NO: 16693
  source 1..37: mol_type = genomic DNA

SEQ ID NO: 37397 - DNA, 35 bp, Homo sapiens; identical to SEQ ID NO: 16699
  source 1..35: mol_type = genomic DNA

SEQ ID NO: 37398 - DNA, 36 bp, Homo sapiens; identical to SEQ ID NO: 16700
  source 1..36: mol_type = genomic DNA

SEQ ID NO: 37399 - DNA, 37 bp, Homo sapiens; identical to SEQ ID NO: 16701
  source 1..37: mol_type = genomic DNA

SEQ ID NO: 37400 - DNA, 38 bp, Homo sapiens; identical to SEQ ID NO: 16702
  source 1..38: mol_type = genomic DNA

SEQ ID NO: 37401 - DNA, 31 bp, Homo sapiens; identical to SEQ ID NO: 16710
  source 1..31: mol_type = genomic DNA

SEQ ID NO: 37402 - DNA, 16 bp, Homo sapiens
  source 1..16: mol_type = genomic DNA
gcccacccagggacgc

SEQ ID NO: 37403 - DNA, 17 bp, Homo sapiens
  source 1..17: mol_type = genomic DNA
gcccacccagggacgcc

SEQ ID NO: 37404 - DNA, 18 bp, Homo sapiens
  source 1..18: mol_type = genomic DNA
gcccacccagggacgcca

SEQ ID NO: 37405 - DNA, 32 bp, Homo sapiens; identical to SEQ ID NO: 16715
  source 1..32: mol_type = genomic DNA

SEQ ID NO: 37406 - DNA, 33 bp, Homo sapiens; identical to SEQ ID NO: 16716
  source 1..33: mol_type = genomic DNA

SEQ ID NO: 37407 - DNA, 34 bp, Homo sapiens; identical to SEQ ID NO: 16717
  source 1..34: mol_type = genomic DNA

SEQ ID NO: 37408 - DNA, 25 bp, Homo sapiens
  source 1..25: mol_type = genomic DNA
gcccataacccagaggtcgatggat

SEQ ID NO: 37409 - DNA, 16 bp, Homo sapiens
  source 1..16: mol_type = genomic DNA
gccccacgttgggcgc

SEQ ID NO: 37410 - DNA, 17 bp, Homo sapiens
  source 1..17: mol_type = genomic DNA
gccccacgttgggcgcc

SEQ ID NO: 37411 - DNA, 18 bp, Homo sapiens
  source 1..18: mol_type = genomic DNA
gccccacgttgggcgcca

SEQ ID NO: 37412 - DNA, 16 bp, Homo sapiens
  source 1..16: mol_type = genomic DNA
gccccagtggaaccac

SEQ ID NO: 37413 - DNA, 17 bp, Homo sapiens
  source 1..17: mol_type = genomic DNA
gccccagtggaaccacc

SEQ ID NO: 37414 - DNA, 18 bp, Homo sapiens
  source 1..18: mol_type = genomic DNA
gccccagtggaaccacca

SEQ ID NO: 37415 - DNA, 18 bp, Homo sapiens
  source 1..18: mol_type = genomic DNA
gccccagtggcctaatgg

SEQ ID NO: 37416 - DNA, 19 bp, Homo sapiens
  source 1..19: mol_type = genomic DNA
gccccagtggcctaatgga

SEQ ID NO: 37417 - DNA, 20 bp, Homo sapiens
  source 1..20: mol_type = genomic DNA
gccccagtggcctaatggat

SEQ ID NO: 37418 - DNA, 25 bp, Homo sapiens
  source 1..25: mol_type = genomic DNA
gccccagtggcctaatggataaggc

SEQ ID NO: 37419 - DNA, 27 bp, Homo sapiens
  source 1..27: mol_type = genomic DNA
gccccagtggcctaatggataaggcac

SEQ ID NO: 37420 - DNA, 33 bp, Homo sapiens
  source 1..33: mol_type = genomic DNA
gccccagtggcctaatggataaggcactggcct

SEQ ID NO: 37421 - DNA, 33 bp, Homo sapiens; identical to SEQ ID NO: 16746
  source 1..33: mol_type = genomic DNA

SEQ ID NO: 37422 - DNA, 36 bp, Homo sapiens; identical to SEQ ID NO: 16747
  source 1..36: mol_type = genomic DNA

SEQ ID NO: 37423 - DNA, 19 bp, Homo sapiens
  source 1..19: mol_type = genomic DNA
gcccccatgtctaacaaca

SEQ ID NO: 37424 - DNA, 23 bp, Homo sapiens
  source 1..23: mol_type = genomic DNA
gcccccatgtctaacaacatggc

SEQ ID NO: 37425 - DNA, 24 bp, Homo sapiens
  source 1..24: mol_type = genomic DNA
gcccccatgtctaacaacatggct

SEQ ID NO: 37426 - DNA, 25 bp, Homo sapiens
  source 1..25: mol_type = genomic DNA
gcccccatgtctaacaacatggctt

SEQ ID NO: 37427 - DNA, 27 bp, Homo sapiens
  source 1..27: mol_type = genomic DNA
gcccccatgtctaacaacatggctttc

SEQ ID NO: 37428 - DNA, 28 bp, Homo sapiens
  source 1..28: mol_type = genomic DNA
gcccccatgtctaacaacatggctttct

SEQ ID NO: 37429 - DNA, 29 bp, Homo sapiens
  source 1..29: mol_type = genomic DNA
gcccccatgtctaacaacatggctttctc

SEQ ID NO: 37430 - DNA, 30 bp, Homo sapiens; identical to SEQ ID NO: 16767
  source 1..30: mol_type = genomic DNA

SEQ ID NO: 37431 - DNA, 32 bp, Homo sapiens; identical to SEQ ID NO: 16769
  source 1..32: mol_type = genomic DNA

SEQ ID NO: 37432 - DNA, 33 bp, Homo sapiens; identical to SEQ ID NO: 16770
  source 1..33: mol_type = genomic DNA

SEQ ID NO: 37433 - DNA, 30 bp, Homo sapiens; identical to SEQ ID NO: 16772
  source 1..30: mol_type = genomic DNA

SEQ ID NO: 37434 - DNA, 30 bp, Homo sapiens
  source 1..30: mol_type = genomic DNA
gccccgggttcgatccccggcatctccacc

SEQ ID NO: 37435 - DNA, 19 bp, Homo sapiens
  source 1..19: mol_type = genomic DNA
gccccggtggcctaatgga

SEQ ID NO: 37436 - DNA, 16 bp, Homo sapiens
  source 1..16: mol_type = genomic DNA
gcccgcatcctccacc

SEQ ID NO: 37437 - DNA, 17 bp, Homo sapiens
  source 1..17: mol_type = genomic DNA
gcccgcatcctccacca

SEQ ID NO: 37438 - DNA, 16 bp, Homo sapiens
  source 1..16: mol_type = genomic DNA
gcccgcattctccacc

SEQ ID NO: 37439 - DNA, 16 bp, Homo sapiens
  source 1..16: mol_type = genomic DNA
gcccggatagctcagt

SEQ ID NO: 37440 - DNA, 17 bp, Homo sapiens
  source 1..17: mol_type = genomic DNA
gcccggatagctcagtc

SEQ ID NO: 37441 - DNA, 18 bp, Homo sapiens
  source 1..18: mol_type = genomic DNA
gcccggatagctcagtcg

SEQ ID NO: 37442 - DNA, 19 bp, Homo sapiens
  source 1..19: mol_type = genomic DNA
gcccggatagctcagtcgg

SEQ ID NO: 37443 - DNA, 20 bp, Homo sapiens
  source 1..20: mol_type = genomic DNA
gcccggatagctcagtcggt

SEQ ID NO: 37444 - DNA, 22 bp, Homo sapiens
  source 1..22: mol_type = genomic DNA
gcccggatagctcagtcggtag

SEQ ID NO: 37445 - DNA, 23 bp, Homo sapiens
  source 1..23: mol_type = genomic DNA
gcccggatagctcagtcggtaga

SEQ ID NO: 37446 - DNA, 24 bp, Homo sapiens
  source 1..24: mol_type = genomic DNA
gcccggatagctcagtcggtagag

SEQ ID NO: 37447 - DNA, 25 bp, Homo sapiens
  source 1..25: mol_type = genomic DNA
gcccggatagctcagtcggtagagc

SEQ ID NO: 37448 - DNA, 26 bp, Homo sapiens
  source 1..26: mol_type = genomic DNA
gcccggatagctcagtcggtagagca

SEQ ID NO: 37449 - DNA, 27 bp, Homo sapiens
  source 1..27: mol_type = genomic DNA
gcccggatagctcagtcggtagagcat

SEQ ID NO: 37450 - DNA, 28 bp, Homo sapiens
  source 1..28: mol_type = genomic DNA
gcccggatagctcagtcggtagagcatc

SEQ ID NO: 37451 - DNA, 29 bp, Homo sapiens
  source 1..29: mol_type = genomic DNA
gcccggatagctcagtcggtagagcatca

SEQ ID NO: 37452 - DNA, 30 bp, Homo sapiens; identical to SEQ ID NO: 16802
  source 1..30: mol_type = genomic DNA

SEQ ID NO: 37453 - DNA, 31 bp, Homo sapiens; identical to SEQ ID NO: 16803
  source 1..31: mol_type = genomic DNA

SEQ ID NO: 37454 - DNA, 32 bp, Homo sapiens; identical to SEQ ID NO: 16804
  source 1..32: mol_type = genomic DNA

SEQ ID NO: 37455 - DNA, 33 bp, Homo sapiens; identical to SEQ ID NO: 16805
  source 1..33: mol_type = genomic DNA

SEQ ID NO: 37456 - DNA, 34 bp, Homo sapiens; identical to SEQ ID NO: 16806
  source 1..34: mol_type = genomic DNA

SEQ ID NO: 37457 - DNA, 35 bp, Homo sapiens; identical to SEQ ID NO: 16807
  source 1..35: mol_type = genomic DNA

SEQ ID NO: 37458 - DNA, 36 bp, Homo sapiens; identical to SEQ ID NO: 16808
  source 1..36: mol_type = genomic DNA

SEQ ID NO: 37459 - DNA, 16 bp, Homo sapiens
  source 1..16: mol_type = genomic DNA
gcccggctagctcagt

SEQ ID NO: 37460 - DNA, 17 bp, Homo sapiens
  source 1..17: mol_type = genomic DNA
gcccggctagctcagtc

SEQ ID NO: 37461 - DNA, 18 bp, Homo sapiens
  source 1..18: mol_type = genomic DNA
gcccggctagctcagtcg

SEQ ID NO: 37462 - DNA, 32 bp, Homo sapiens; identical to SEQ ID NO: 16814
  source 1..32: mol_type = genomic DNA

SEQ ID NO: 37463 - DNA, 33 bp, Homo sapiens; identical to SEQ ID NO: 16815
  source 1..33: mol_type = genomic DNA

SEQ ID NO: 37464 - DNA, 19 bp, Homo sapiens
  source 1..19: mol_type = genomic DNA
gcccggctagctcagtcgg

SEQ ID NO: 37465 - DNA, 23 bp, Homo sapiens
  source 1..23: mol_type = genomic DNA
gcccggctagctcagtcggtaga

SEQ ID NO: 37466 - DNA, 25 bp, Homo sapiens
  source 1..25: mol_type = genomic DNA
gcccggctagctcagtcggtagagc

SEQ ID NO: 37467 - DNA, 26 bp, Homo sapiens
  source 1..26: mol_type = genomic DNA
gcccggctagctcagtcggtagagca

SEQ ID NO: 37468 - DNA, 27 bp, Homo sapiens
  source 1..27: mol_type = genomic DNA
gcccggctagctcagtcggtagagcat

SEQ ID NO: 37469 - DNA, 28 bp, Homo sapiens
  source 1..28: mol_type = genomic DNA
gcccggctagctcagtcggtagagcatg

SEQ ID NO: 37470 - DNA, 29 bp, Homo sapiens
  source 1..29: mol_type = genomic DNA
gcccggctagctcagtcggtagagcatga

SEQ ID NO: 37471 - DNA, 30 bp, Homo sapiens; identical to SEQ ID NO: 16827
  source 1..30: mol_type = genomic DNA

SEQ ID NO: 37472 - DNA, 31 bp, Homo sapiens; identical to SEQ ID NO: 16828
  source 1..31: mol_type = genomic DNA

SEQ ID NO: 37473 - DNA, 32 bp, Homo sapiens; identical to SEQ ID NO: 16829
  source 1..32: mol_type = genomic DNA

SEQ ID NO: 37474 - DNA, 33 bp, Homo sapiens; identical to SEQ ID NO: 16830
  source 1..33: mol_type = genomic DNA

SEQ ID NO: 37475 - DNA, 34 bp, Homo sapiens; identical to SEQ ID NO: 16831
  source 1..34: mol_type = genomic DNA

SEQ ID NO: 37476 - DNA, 35 bp, Homo sapiens; identical to SEQ ID NO: 16832
  source 1..35: mol_type = genomic DNA

SEQ ID NO: 37477 - DNA, 33 bp, Homo sapiens; identical to SEQ ID NO: 16835
  source 1..33: mol_type = genomic DNA

SEQ ID NO: 37478 - DNA, 34 bp, Homo sapiens; identical to SEQ ID NO: 16836
  source 1..34: mol_type = genomic DNA

SEQ ID NO: 37479 - DNA, 35 bp, Homo sapiens; identical to SEQ ID NO: 16837
  source 1..35: mol_type = genomic DNA

SEQ ID NO: 37480 - DNA, 36 bp, Homo sapiens; identical to SEQ ID NO: 16838
  source 1..36: mol_type = genomic DNA

SEQ ID NO: 37481 - DNA, 38 bp, Homo sapiens; identical to SEQ ID NO: 16840
  source 1..38: mol_type = genomic DNA

SEQ ID NO: 37482 - DNA, 40 bp, Homo sapiens; identical to SEQ ID NO: 16842
  source 1..40: mol_type = genomic DNA

SEQ ID NO: 37483 - DNA, 41 bp, Homo sapiens; identical to SEQ ID NO: 16843
  source 1..41: mol_type = genomic DNA

SEQ ID NO: 37484 - DNA, 42 bp, Homo sapiens; identical to SEQ ID NO: 16844
  source 1..42: mol_type = genomic DNA

SEQ ID NO: 37485 - DNA, 29 bp, Homo sapiens
  source 1..29: mol_type = genomic DNA
gcccggctagctcagtcggtagagcatgg

SEQ ID NO: 37486 - DNA, 30 bp, Homo sapiens; identical to SEQ ID NO: 16847
  source 1..30: mol_type = genomic DNA

SEQ ID NO: 37487 - DNA, 31 bp, Homo sapiens; identical to SEQ ID NO: 16848
  source 1..31: mol_type = genomic DNA

SEQ ID NO: 37488 - DNA, 32 bp, Homo sapiens; identical to SEQ ID NO: 16849
  source 1..32: mol_type = genomic DNA

SEQ ID NO: 37489 - DNA, 33 bp, Homo sapiens; identical to SEQ ID NO: 16850
  source 1..33: mol_type = genomic DNA

SEQ ID NO: 37490 - DNA, 34 bp, Homo sapiens; identical to SEQ ID NO: 16851
  source 1..34: mol_type = genomic DNA

SEQ ID NO: 37491 - DNA, 35 bp, Homo sapiens; identical to SEQ ID NO: 16852
  source 1..35: mol_type = genomic DNA

SEQ ID NO: 37492 - DNA, 36 bp, Homo sapiens; identical to SEQ ID NO: 16853
  source 1..36: mol_type = genomic DNA

SEQ ID NO: 37493 - DNA, 37 bp, Homo sapiens; identical to SEQ ID NO: 16854
  source 1..37: mol_type = genomic DNA

SEQ ID NO: 37494 - DNA, 38 bp, Homo sapiens; identical to SEQ ID NO: 16855
  source 1..38: mol_type = genomic DNA

SEQ ID NO: 37495 - DNA, 39 bp, Homo sapiens; identical to SEQ ID NO: 16856
  source 1..39: mol_type = genomic DNA

SEQ ID NO: 37496 - DNA, 40 bp, Homo sapiens; identical to SEQ ID NO: 16857
  source 1..40: mol_type = genomic DNA

SEQ ID NO: 37497 - DNA, 41 bp, Homo sapiens; identical to SEQ ID NO: 16858
  source 1..41: mol_type = genomic DNA

SEQ ID NO: 37498 - DNA, 42 bp, Homo sapiens; identical to SEQ ID NO: 16859
  source 1..42: mol_type = genomic DNA

SEQ ID NO: 37499 - DNA, 26 bp, Homo sapiens
  source 1..26: mol_type = genomic DNA
gcccgggttcgactcccggtgtggga

SEQ ID NO: 37500 - DNA, 27 bp, Homo sapiens
  source 1..27: mol_type = genomic DNA
gcccgggttcgactcccggtgtgggaa

SEQ ID NO: 37501 - DNA, 28 bp, Homo sapiens
  source 1..28: mol_type = genomic DNA
gcccgggttcgactcccggtgtgggaac

SEQ ID NO: 37502 - DNA, 29 bp, Homo sapiens
  source 1..29: mol_type = genomic DNA
gcccgggttcgactcccggtgtgggaacc

SEQ ID NO: 37503 - DNA, 27 bp, Homo sapiens
  source 1..27: mol_type = genomic DNA
gcccgggttcgattcccggtcagggaa

SEQ ID NO: 37504 - DNA, 16 bp, Homo sapiens
  source 1..16: mol_type = genomic DNA
gccctcttagcgcagc

SEQ ID NO: 37505 - DNA, 16 bp, Homo sapiens
  source 1..16: mol_type = genomic DNA
gccctcttagcgcagt

SEQ ID NO: 37506 - DNA, 19 bp, Homo sapiens
  source 1..19: mol_type = genomic DNA
gccgaaatagctcagttgg

SEQ ID NO: 37507 - DNA, 20 bp, Homo sapiens
  source 1..20: mol_type = genomic DNA
gccgaaatagctcagttggg

SEQ ID NO: 37508 - DNA, 21 bp, Homo sapiens
  source 1..21: mol_type = genomic DNA
gccgaaatagctcagttggga

SEQ ID NO: 37509 - DNA, 22 bp, Homo sapiens
  source 1..22: mol_type = genomic DNA
gccgaaatagctcagttgggag

SEQ ID NO: 37510 - DNA, 23 bp, Homo sapiens
  source 1..23: mol_type = genomic DNA
gccgaaatagctcagttgggaga

SEQ ID NO: 37511 - DNA, 24 bp, Homo sapiens
  source 1..24: mol_type = genomic DNA
gccgaaatagctcagttgggagag

SEQ ID NO: 37512 - DNA, 25 bp, Homo sapiens
  source 1..25: mol_type = genomic DNA
gccgaaatagctcagttgggagagc

SEQ ID NO: 37513 - DNA, 33 bp, Homo sapiens; identical to SEQ ID NO: 16890
  source 1..33: mol_type = genomic DNA

SEQ ID NO: 37514 - DNA, 17 bp, Homo sapiens
  source 1..17: mol_type = genomic DNA
gccgagcggtctaaggc

SEQ ID NO: 37515 - DNA, 17 bp, Homo sapiens
  source 1..17: mol_type = genomic DNA
gccgaggttgtgagttc

SEQ ID NO: 37516 - DNA, 20 bp, Homo sapiens
  source 1..20: mol_type = genomic DNA
gccgcagcaacctcggttcg

SEQ ID NO: 37517 - DNA, 37 bp, Homo sapiens; identical to SEQ ID NO: 16902
  source 1..37: mol_type = genomic DNA

SEQ ID NO: 37518 - DNA, 38 bp, Homo sapiens; identical to SEQ ID NO: 16903
  source 1..38: mol_type = genomic DNA

SEQ ID NO: 37519 - DNA, 39 bp, Homo sapiens; identical to SEQ ID NO: 16904
  source 1..39: mol_type = genomic DNA

SEQ ID NO: 37520 - DNA, 30 bp, Homo sapiens; identical to SEQ ID NO: 16909
  source 1..30: mol_type = genomic DNA

SEQ ID NO: 37521 - DNA, 31 bp, Homo sapiens; identical to SEQ ID NO: 16910
  source 1..31: mol_type = genomic DNA

SEQ ID NO: 37522 - DNA, 32 bp, Homo sapiens; identical to SEQ ID NO: 16911
  source 1..32: mol_type = genomic DNA

SEQ ID NO: 37523 - DNA, 33 bp, Homo sapiens; identical to SEQ ID NO: 16912
  source 1..33: mol_type = genomic DNA

SEQ ID NO: 37524 - DNA, 34 bp, Homo sapiens; identical to SEQ ID NO: 16913
  source 1..34: mol_type = genomic DNA

SEQ ID NO: 37525 - DNA, 35 bp, Homo sapiens; identical to SEQ ID NO: 16914
  source 1..35: mol_type = genomic DNA

SEQ ID NO: 37526 - DNA, 36 bp, Homo sapiens; identical to SEQ ID NO: 16915
  source 1..36: mol_type = genomic DNA

SEQ ID NO: 37527 - DNA, 27 bp, Homo sapiens
  source 1..27: mol_type = genomic DNA
gccgctggtgtagtggtatcatgcaag

SEQ ID NO: 37528 - DNA, 28 bp, Homo sapiens
  source 1..28: mol_type = genomic DNA
gccgctggtgtagtggtatcatgcaaga

SEQ ID NO: 37529 - DNA, 30 bp, Homo sapiens; identical to SEQ ID NO: 16926
  source 1..30: mol_type = genomic DNA

SEQ ID NO: 37530 - DNA, 32 bp, Homo sapiens; identical to SEQ ID NO: 16928
  source 1..32: mol_type = genomic DNA

SEQ ID NO: 37531 - DNA, 33 bp, Homo sapiens; identical to SEQ ID NO: 16929
  source 1..33: mol_type = genomic DNA

SEQ ID NO: 37532 - DNA, 16 bp, Homo sapiens
  source 1..16: mol_type = genomic DNA
gccgtgatcgtatagt

SEQ ID NO: 37533 - DNA, 17 bp, Homo sapiens
  source 1..17: mol_type = genomic DNA
gccgtgatcgtatagtg

SEQ ID NO: 37534 - DNA, 18 bp, Homo sapiens
  source 1..18: mol_type = genomic DNA
gccgtgatcgtatagtgg

SEQ ID NO: 37535 - DNA, 19 bp, Homo sapiens
  source 1..19: mol_type = genomic DNA
gccgtgatcgtatagtggt

SEQ ID NO: 37536 - DNA, 21 bp, Homo sapiens
  source 1..21: mol_type = genomic DNA
gccgtgatcgtatagtggtta

SEQ ID NO: 37537 - DNA, 22 bp, Homo sapiens
  source 1..22: mol_type = genomic DNA
gccgtgatcgtatagtggttag

SEQ ID NO: 37538 - DNA, 23 bp, Homo sapiens
  source 1..23: mol_type = genomic DNA
gccgtgatcgtatagtggttagt

SEQ ID NO: 37539 - DNA, 24 bp, Homo sapiens
  source 1..24: mol_type = genomic DNA
gccgtgatcgtatagtggttagta

SEQ ID NO: 37540 - DNA, 25 bp, Homo sapiens
  source 1..25: mol_type = genomic DNA
gccgtgatcgtatagtggttagtac

SEQ ID NO: 37541 - DNA, 26 bp, Homo sapiens
  source 1..26: mol_type = genomic DNA
gccgtgatcgtatagtggttagtact

SEQ ID NO: 37542 - DNA, 27 bp, Homo sapiens
  source 1..27: mol_type = genomic DNA
gccgtgatcgtatagtggttagtactc

SEQ ID NO: 37543 - DNA, 28 bp, Homo sapiens
  source 1..28: mol_type = genomic DNA
gccgtgatcgtatagtggttagtactct

SEQ ID NO: 37544 - DNA, 29 bp, Homo sapiens
  source 1..29: mol_type = genomic DNA
gccgtgatcgtatagtggttagtactctg

SEQ ID NO: 37545 - DNA, 30 bp, Homo sapiens; identical to SEQ ID NO: 16951
  source 1..30: mol_type = genomic DNA

SEQ ID NO: 37546 - DNA, 31 bp, Homo sapiens; identical to SEQ ID NO: 16952
  source 1..31: mol_type = genomic DNA

SEQ ID NO: 37547 - DNA, 32 bp, Homo sapiens; identical to SEQ ID NO: 16953
  source 1..32: mol_type = genomic DNA

SEQ ID NO: 37548 - DNA, 33 bp, Homo sapiens; identical to SEQ ID NO: 16954
  source 1..33: mol_type = genomic DNA

SEQ ID NO: 37549 - DNA, 34 bp, Homo sapiens; identical to SEQ ID NO: 16955
  source 1..34: mol_type = genomic DNA

SEQ ID NO: 37550 - DNA, 35 bp, Homo sapiens; identical to SEQ ID NO: 16956
  source 1..35: mol_type = genomic DNA

SEQ ID NO: 37551 - DNA, 36 bp, Homo sapiens; identical to SEQ ID NO: 16957
  source 1..36: mol_type = genomic DNA

SEQ ID NO: 37552 - DNA, 37 bp, Homo sapiens; identical to SEQ ID NO: 16958
  source 1..37: mol_type = genomic DNA

SEQ ID NO: 37553 - DNA, 38 bp, Homo sapiens; identical to SEQ ID NO: 16959
  source 1..38: mol_type = genomic DNA

SEQ ID NO: 37554 - DNA, 39 bp, Homo sapiens; identical to SEQ ID NO: 16960
  source 1..39: mol_type = genomic DNA

SEQ ID NO: 37555 - DNA, 17 bp, Homo sapiens
  source 1..17: mol_type = genomic DNA
gcctacccagggacgcc

SEQ ID NO: 37556 - DNA, 16 bp, Homo sapiens
  source 1..16: mol_type = genomic DNA
gcctcacacggggcac

SEQ ID NO: 37557 - DNA, 16 bp, Homo sapiens
  source 1..16: mol_type = genomic DNA
gcctcacctggagcac

SEQ ID NO: 37558 - DNA, 17 bp, Homo sapiens
  source 1..17: mol_type = genomic DNA
gcctcacctggagcacc

SEQ ID NO: 37559 - DNA, 16 bp, Homo sapiens
  source 1..16: mol_type = genomic DNA
gcctcgttagcgcagt

SEQ ID NO: 37560 - DNA, 19 bp, Homo sapiens
  source 1..19: mol_type = genomic DNA
gcctcgttagcgcagtagg

SEQ ID NO: 37561 - DNA, 32 bp, Homo sapiens; identical to SEQ ID NO: 17001
  source 1..32: mol_type = genomic DNA

SEQ ID NO: 37562 - DNA, 33 bp, Homo sapiens; identical to SEQ ID NO: 17002
  source 1..33: mol_type = genomic DNA

SEQ ID NO: 37563 - DNA, 25 bp, Homo sapiens
  source 1..25: mol_type = genomic DNA
gcctggatagctcagttggtagagc

SEQ ID NO: 37564 - DNA, 32 bp, Homo sapiens; identical to SEQ ID NO: 17006
  source 1..32: mol_type = genomic DNA

SEQ ID NO: 37565 - DNA, 33 bp, Homo sapiens; identical to SEQ ID NO: 17007
  source 1..33: mol_type = genomic DNA

SEQ ID NO: 37566 - DNA, 32 bp, Homo sapiens; identical to SEQ ID NO: 17013
  source 1..32: mol_type = genomic DNA

SEQ ID NO: 37567 - DNA, 33 bp, Homo sapiens; identical to SEQ ID NO: 17014
  source 1..33: mol_type = genomic DNA

SEQ ID NO: 37568 - DNA, 40 bp, Homo sapiens; identical to SEQ ID NO: 17018
  source 1..40: mol_type = genomic DNA

SEQ ID NO: 37569 - DNA, 44 bp, Homo sapiens; identical to SEQ ID NO: 17019
  source 1..44: mol_type = genomic DNA

SEQ ID NO: 37570 - DNA, 39 bp, Homo sapiens; identical to SEQ ID NO: 17022
  source 1..39: mol_type = genomic DNA

SEQ ID NO: 37571 - DNA, 40 bp, Homo sapiens; identical to SEQ ID NO: 17023
  source 1..40: mol_type = genomic DNA

SEQ ID NO: 37572 - DNA, 43 bp, Homo sapiens; identical to SEQ ID NO: 17026
  source 1..43: mol_type = genomic DNA

SEQ ID NO: 37573 - DNA, 44 bp, Homo sapiens; identical to SEQ ID NO: 17027
  source 1..44: mol_type = genomic DNA

SEQ ID NO: 37574 - DNA, 45 bp, Homo sapiens; identical to SEQ ID NO: 17028
  source 1..45: mol_type = genomic DNA

SEQ ID NO: 37575 - DNA, 46 bp, Homo sapiens; identical to SEQ ID NO: 17029
  source 1..46: mol_type = genomic DNA

SEQ ID NO: 37576 - DNA, 43 bp, Homo sapiens; identical to SEQ ID NO: 17031
  source 1..43: mol_type = genomic DNA

SEQ ID NO: 37577 - DNA, 18 bp, Homo sapiens
  source 1..18: mol_type = genomic DNA
gccttggtggtgcagtgg

SEQ ID NO: 37578 - DNA, 30 bp, Homo sapiens
  source 1..30: mol_type = genomic DNA
gccttggtggtgcagtggtagaattctcgc

SEQ ID NO: 37579 - DNA, 31 bp, Homo sapiens
  source 1..31: mol_type = genomic DNA
gccttggtggtgcagtggtagaattctcgcc

SEQ ID NO: 37580 - DNA, 32 bp, Homo sapiens
  source 1..32: mol_type = genomic DNA
gccttggtggtgcagtggtagaattctcgcct

SEQ ID NO: 37581 - DNA, 16 bp, Homo sapiens
  source 1..16: mol_type = genomic DNA
gcgaaaggtccccggt

SEQ ID NO: 37582 - DNA, 26 bp, Homo sapiens
  source 1..26: mol_type = genomic DNA
gcgaaaggtccccggttcgaaaccgg

SEQ ID NO: 37583 - DNA, 28 bp, Homo sapiens
  source 1..28: mol_type = genomic DNA
gcgaaaggtccccggttcgaaaccgggc

SEQ ID NO: 37584 - DNA, 35 bp, Homo sapiens
  source 1..35: mol_type = genomic DNA
gcgaaaggtccccggttcgaaaccgggcagaagca

SEQ ID NO: 37585 - DNA, 36 bp, Homo sapiens
  source 1..36: mol_type = genomic DNA
gcgaaaggtccccggttcgaaaccgggcagaagcac

SEQ ID NO: 37586 - DNA, 37 bp, Homo sapiens; identical to SEQ ID NO: 17039
  source 1..37: mol_type = genomic DNA

SEQ ID NO: 37587 - DNA, 38 bp, Homo sapiens; identical to SEQ ID NO: 17040
  source 1..38: mol_type = genomic DNA

SEQ ID NO: 37588 - DNA, 31 bp, Homo sapiens
  source 1..31: mol_type = genomic DNA
gcgaaaggtccccggttcgaaaccgggcgga

SEQ ID NO: 37589 - DNA, 33 bp, Homo sapiens; identical to SEQ ID NO: 17042
  source 1..33: mol_type = genomic DNA

SEQ ID NO: 37590 - DNA, 34 bp, Homo sapiens; identical to SEQ ID NO: 17043
  source 1..34: mol_type = genomic DNA

SEQ ID NO: 37591 - DNA, 35 bp, Homo sapiens; identical to SEQ ID NO: 17044
  source 1..35: mol_type = genomic DNA

SEQ ID NO: 37592 - DNA, 36 bp, Homo sapiens; identical to SEQ ID NO: 17045
  source 1..36: mol_type = genomic DNA

SEQ ID NO: 37593 - DNA, 37 bp, Homo sapiens; identical to SEQ ID NO: 17046
  source 1..37: mol_type = genomic DNA

SEQ ID NO: 37594 - DNA, 38 bp, Homo sapiens; identical to SEQ ID NO: 17047
  source 1..38: mol_type = genomic DNA

SEQ ID NO: 37595 - DNA, 35 bp, Homo sapiens; identical to SEQ ID NO: 17051
  source 1..35: mol_type = genomic DNA

SEQ ID NO: 37596 - DNA, 36 bp, Homo sapiens
  source 1..36: mol_type = genomic DNA
gcgaaaggtccccggttcgatcccgggcggaaacac

SEQ ID NO: 37597 - DNA, 37 bp, Homo sapiens; identical to SEQ ID NO: 17052
  source 1..37: mol_type = genomic DNA

SEQ ID NO: 37598 - DNA, 38 bp, Homo sapiens; identical to SEQ ID NO: 17053
  source 1..38: mol_type = genomic DNA

SEQ ID NO: 37599 - DNA, 37 bp, Homo sapiens; identical to SEQ ID NO: 17054
  source 1..37: mol_type = genomic DNA

SEQ ID NO: 37600 - DNA, 37 bp, Homo sapiens
  source 1..37: mol_type = genomic DNA
gcgaaaggtccgcggttcgaaaccgggcggaaacacc

SEQ ID NO: 37601 - DNA, 16 bp, Homo sapiens
  source 1..16: mol_type = genomic DNA
gcgagaggtagcggga

SEQ ID NO: 37602 - DNA, 17 bp, Homo sapiens
  source 1..17: mol_type = genomic DNA
gcgagaggtagcgggat

SEQ ID NO: 37603 - DNA, 31 bp, Homo sapiens; identical to SEQ ID NO: 17061
  source 1..31: mol_type = genomic DNA

SEQ ID NO: 37604 - DNA, 32 bp, Homo sapiens; identical to SEQ ID NO: 17062
  source 1..32: mol_type = genomic DNA

SEQ ID NO: 37605 - DNA, 33 bp, Homo sapiens
  source 1..33: mol_type = genomic DNA
gcgagaggtcccgggttcaaatcccggacgagc

SEQ ID NO: 37606 - DNA, 34 bp, Homo sapiens; identical to SEQ ID NO: 17063
  source 1..34: mol_type = genomic DNA

SEQ ID NO: 37607 - DNA, 35 bp, Homo sapiens; identical to SEQ ID NO: 17064
  source 1..35: mol_type = genomic DNA

SEQ ID NO: 37608 - DNA, 36 bp, Homo sapiens; identical to SEQ ID NO: 17065
  source 1..36: mol_type = genomic DNA

SEQ ID NO: 37609 - DNA, 37 bp, Homo sapiens; identical to SEQ ID NO: 17066
  source 1..37: mol_type = genomic DNA

SEQ ID NO: 37610 - DNA, 38 bp, Homo sapiens; identical to SEQ ID NO: 17067
  source 1..38: mol_type = genomic DNA

SEQ ID NO: 37611 - DNA, 26 bp, Homo sapiens
  source 1..26: mol_type = genomic DNA
gcgagttcaaatctcgctggggcctc

SEQ ID NO: 37612 - DNA, 26 bp, Homo sapiens
  source 1..26: mol_type = genomic DNA
gcgagttcgatcctcgctggggcctc

SEQ ID NO: 37613 - DNA, 22 bp, Homo sapiens
  source 1..22: mol_type = genomic DNA
gcgatccgagttcaaatctcgg

SEQ ID NO: 37614 - DNA, 28 bp, Homo sapiens
  source 1..28: mol_type = genomic DNA
gcgatccgagttcaaatctcggtggaac

SEQ ID NO: 37615 - DNA, 29 bp, Homo sapiens
  source 1..29: mol_type = genomic DNA
gcgatccgagttcaaatctcggtggaacc

SEQ ID NO: 37616 - DNA, 31 bp, Homo sapiens; identical to SEQ ID NO: 17074
  source 1..31: mol_type = genomic DNA

SEQ ID NO: 37617 - DNA, 32 bp, Homo sapiens; identical to SEQ ID NO: 17075
  source 1..32: mol_type = genomic DNA

SEQ ID NO: 37618 - DNA, 28 bp, Homo sapiens
  source 1..28: mol_type = genomic DNA
gcgatccgagttcaaatctcggtgggac

SEQ ID NO: 37619 - DNA, 31 bp, Homo sapiens; identical to SEQ ID NO: 17078
  source 1..31: mol_type = genomic DNA

SEQ ID NO: 37620 - DNA, 31 bp, Homo sapiens
  source 1..31: mol_type = genomic DNA
gcgatccgagttcaagtctcggtggaacctc

SEQ ID NO: 37621 - DNA, 31 bp, Homo sapiens; identical to SEQ ID NO: 17081
  source 1..31: mol_type = genomic DNA

SEQ ID NO: 37622 - DNA, 24 bp, Homo sapiens
  source 1..24: mol_type = genomic DNA
gcgcaatggataacgcgtctgact

SEQ ID NO: 37623 - DNA, 22 bp, Homo sapiens
  source 1..22: mol_type = genomic DNA
gcgcagcggaagcgtgctgggc

SEQ ID NO: 37624 - DNA, 16 bp, Homo sapiens
  source 1..16: mol_type = genomic DNA
gcgccgctggtgtagt

SEQ ID NO: 37625 - DNA, 17 bp, Homo sapiens
  source 1..17: mol_type = genomic DNA
gcgccgctggtgtagtg

SEQ ID NO: 37626 - DNA, 18 bp, Homo sapiens
  source 1..18: mol_type = genomic DNA
gcgccgctggtgtagtgg

SEQ ID NO: 37627 - DNA, 19 bp, Homo sapiens
  source 1..19: mol_type = genomic DNA
gcgccgctggtgtagtggt

SEQ ID NO: 37628 - DNA, 20 bp, Homo sapiens
  source 1..20: mol_type = genomic DNA
gcgccgctggtgtagtggta

SEQ ID NO: 37629 - DNA, 21 bp, Homo sapiens
  source 1..21: mol_type = genomic DNA
gcgccgctggtgtagtggtat

SEQ ID NO: 37630 - DNA, 22 bp, Homo sapiens
  source 1..22: mol_type = genomic DNA
gcgccgctggtgtagtggtatc

SEQ ID NO: 37631 - DNA, 23 bp, Homo sapiens
  source 1..23: mol_type = genomic DNA
gcgccgctggtgtagtggtatca

SEQ ID NO: 37632 - DNA, 24 bp, Homo sapiens
  source 1..24: mol_type = genomic DNA
gcgccgctggtgtagtggtatcat

SEQ ID NO: 37633 - DNA, 25 bp, Homo sapiens
  source 1..25: mol_type = genomic DNA
gcgccgctggtgtagtggtatcatg

SEQ ID NO: 37634 - DNA, 26 bp, Homo sapiens
  source 1..26: mol_type = genomic DNA
gcgccgctggtgtagtggtatcatgc

SEQ ID NO: 37635 - DNA, 27 bp, Homo sapiens
  source 1..27: mol_type = genomic DNA
gcgccgctggtgtagtggtatcatgca

SEQ ID NO: 37636 - DNA, 28 bp, Homo sapiens
  source 1..28: mol_type = genomic DNA
gcgccgctggtgtagtggtatcatgcaa

SEQ ID NO: 37637 - DNA, 29 bp, Homo sapiens
  source 1..29: mol_type = genomic DNA
gcgccgctggtgtagtggtatcatgcaag

SEQ ID NO: 37638 - DNA, 30 bp, Homo sapiens; identical to SEQ ID NO: 17110
  source 1..30: mol_type = genomic DNA

SEQ ID NO: 37639 - DNA, 31 bp, Homo sapiens; identical to SEQ ID NO: 17111
  source 1..31: mol_type = genomic DNA

SEQ ID NO: 37640 - DNA, 32 bp, Homo sapiens; identical to SEQ ID NO: 17112
  source 1..32: mol_type = genomic DNA

SEQ ID NO: 37641 - DNA, 33 bp, Homo sapiens; identical to SEQ ID NO: 17113
  source 1..33: mol_type = genomic DNA

SEQ ID NO: 37642 - DNA, 34 bp, Homo sapiens; identical to SEQ ID NO: 17114
  source 1..34: mol_type = genomic DNA

SEQ ID NO: 37643 - DNA, 35 bp, Homo sapiens; identical to SEQ ID NO: 17115
  source 1..35: mol_type = genomic DNA

SEQ ID NO: 37644 - DNA, 36 bp, Homo sapiens; identical to SEQ ID NO: 17116
  source 1..36: mol_type = genomic DNA

SEQ ID NO: 37645 - DNA, 37 bp, Homo sapiens; identical to SEQ ID NO: 17117
  source 1..37: mol_type = genomic DNA

SEQ ID NO: 37646 - DNA, 39 bp, Homo sapiens; identical to SEQ ID NO: 17118
  source 1..39: mol_type = genomic DNA

SEQ ID NO: 37647 - DNA, 44 bp, Homo sapiens; identical to SEQ ID NO: 17121
  source 1..44: mol_type = genomic DNA

SEQ ID NO: 37648 - DNA, 47 bp, Homo sapiens
  source 1..47: mol_type = genomic DNA
gcgccgctggtgtagtggtatcatgcaagattcccattcttgcgacc

SEQ ID NO: 37649 - DNA, 33 bp, Homo sapiens; identical to SEQ ID NO: 17144
  source 1..33: mol_type = genomic DNA

SEQ ID NO: 37650 - DNA, 44 bp, Homo sapiens; identical to SEQ ID NO: 17148
  source 1..44: mol_type = genomic DNA

SEQ ID NO: 37651 - DNA, 45 bp, Homo sapiens; identical to SEQ ID NO: 17149
  source 1..45: mol_type = genomic DNA

SEQ ID NO: 37652 - DNA, 17 bp, Homo sapiens
  source 1..17: mol_type = genomic DNA
gcgctggatttaggctc

SEQ ID NO: 37653 - DNA, 16 bp, Homo sapiens
  source 1..16: mol_type = genomic DNA
gcggaagcgtgctggg

SEQ ID NO: 37654 - DNA, 17 bp, Homo sapiens
  source 1..17: mol_type = genomic DNA
gcggaagcgtgctgggc

SEQ ID NO: 37655 - DNA, 18 bp, Homo sapiens
  source 1..18: mol_type = genomic DNA
gcggaagcgtgctgggcc

SEQ ID NO: 37656 - DNA, 19 bp, Homo sapiens
  source 1..19: mol_type = genomic DNA
gcggaagcgtgctgggccc

SEQ ID NO: 37657 - DNA, 20 bp, Homo sapiens
  source 1..20: mol_type = genomic DNA
gcggaagcgtgctgggccca

SEQ ID NO: 37658 - DNA, 25 bp, Homo sapiens
  source 1..25: mol_type = genomic DNA
gcggaagcgtgctgggcccataacc

SEQ ID NO: 37659 - DNA, 26 bp, Homo sapiens
  source 1..26: mol_type = genomic DNA
gcggaagcgtgctgggcccataaccc

SEQ ID NO: 37660 - DNA, 16 bp, Homo sapiens
  source 1..16: mol_type = genomic DNA
gcggcccgggttcgac

SEQ ID NO: 37661 - DNA, 17 bp, Homo sapiens
  source 1..17: mol_type = genomic DNA
gcggcccgggttcgact

SEQ ID NO: 37662 - DNA, 18 bp, Homo sapiens
  source 1..18: mol_type = genomic DNA
gcggcccgggttcgactc

SEQ ID NO: 37663 - DNA, 19 bp, Homo sapiens
  source 1..19: mol_type = genomic DNA
gcggcccgggttcgactcc

SEQ ID NO: 37664 - DNA, 20 bp, Homo sapiens
  source 1..20: mol_type = genomic DNA
gcggcccgggttcgactccc

SEQ ID NO: 37665 - DNA, 21 bp, Homo sapiens
  source 1..21: mol_type = genomic DNA
gcggcccgggttcgactcccg

SEQ ID NO: 37666 - DNA, 22 bp, Homo sapiens
  source 1..22: mol_type = genomic DNA
gcggcccgggttcgactcccgg

SEQ ID NO: 37667 - DNA, 23 bp, Homo sapiens
  source 1..23: mol_type = genomic DNA
gcggcccgggttcgactcccggt

SEQ ID NO: 37668 - DNA, 24 bp, Homo sapiens
  source 1..24: mol_type = genomic DNA
gcggcccgggttcgactcccggtg

SEQ ID NO: 37669 - DNA, 25 bp, Homo sapiens
  source 1..25: mol_type = genomic DNA
gcggcccgggttcgactcccggtgt

SEQ ID NO: 37670 - DNA, 26 bp, Homo sapiens
  source 1..26: mol_type = genomic DNA
gcggcccgggttcgactcccggtgtg

SEQ ID NO: 37671 - DNA, 27 bp, Homo sapiens
  source 1..27: mol_type = genomic DNA
gcggcccgggttcgactcccggtgtgg

SEQ ID NO: 37672 - DNA, 28 bp, Homo sapiens
  source 1..28: mol_type = genomic DNA
gcggcccgggttcgactcccggtgtggg

SEQ ID NO: 37673 - DNA, 29 bp, Homo sapiens
  source 1..29: mol_type = genomic DNA
gcggcccgggttcgactcccggtgtggga

SEQ ID NO: 37674 - DNA, 30 bp, Homo sapiens; identical to SEQ ID NO: 17183
  source 1..30: mol_type = genomic DNA

SEQ ID NO: 37675 - DNA, 31 bp, Homo sapiens; identical to SEQ ID NO: 17184
  source 1..31: mol_type = genomic DNA

SEQ ID NO: 37676 - DNA, 32 bp, Homo sapiens; identical to SEQ ID NO: 17185
  source 1..32: mol_type = genomic DNA

SEQ ID NO: 37677 - DNA, 33 bp, Homo sapiens; identical to SEQ ID NO: 17186
  source 1..33: mol_type = genomic DNA

SEQ ID NO: 37678 - DNA, 17 bp, Homo sapiens
  source 1..17: mol_type = genomic DNA
gcggcccgggttcgatt

SEQ ID NO: 37679 - DNA, 18 bp, Homo sapiens
  source 1..18: mol_type = genomic DNA
gcggcccgggttcgattc

SEQ ID NO: 37680 - DNA, 19 bp, Homo sapiens
  source 1..19: mol_type = genomic DNA
gcggcccgggttcgattcc

SEQ ID NO: 37681 - DNA, 20 bp, Homo sapiens
  source 1..20: mol_type = genomic DNA
gcggcccgggttcgattccc

SEQ ID NO: 37682 - DNA, 21 bp, Homo sapiens
  source 1..21: mol_type = genomic DNA
gcggcccgggttcgattcccg

SEQ ID NO: 37683 - DNA, 23 bp, Homo sapiens
  source 1..23: mol_type = genomic DNA
gcggcccgggttcgattcccggt

SEQ ID NO: 37684 - DNA, 24 bp, Homo sapiens
  source 1..24: mol_type = genomic DNA
gcggcccgggttcgattcccggtc

SEQ ID NO: 37685 - DNA, 25 bp, Homo sapiens
  source 1..25: mol_type = genomic DNA
gcggcccgggttcgattcccggtca

SEQ ID NO: 37686 - DNA, 26 bp, Homo sapiens
  source 1..26: mol_type = genomic DNA
gcggcccgggttcgattcccggtcag

SEQ ID NO: 37687 - DNA, 27 bp, Homo sapiens
  source 1..27: mol_type = genomic DNA
gcggcccgggttcgattcccggtcagg

SEQ ID NO: 37688 - DNA, 28 bp, Homo sapiens
  source 1..28: mol_type = genomic DNA
gcggcccgggttcgattcccggtcaggg

SEQ ID NO: 37689 - DNA, 29 bp, Homo sapiens
  source 1..29: mol_type = genomic DNA
gcggcccgggttcgattcccggtcaggga

SEQ ID NO: 37690 - DNA, 30 bp, Homo sapiens; identical to SEQ ID NO: 17201
  source 1..30: mol_type = genomic DNA

SEQ ID NO: 37691 - DNA, 31 bp, Homo sapiens; identical to SEQ ID NO: 17202
  source 1..31: mol_type = genomic DNA

SEQ ID NO: 37692 - DNA, 32 bp, Homo sapiens; identical to SEQ ID NO: 17203
  source 1..32: mol_type = genomic DNA

SEQ ID NO: 37693 - DNA, 33 bp, Homo sapiens; identical to SEQ ID NO: 17204
  source 1..33: mol_type = genomic DNA

SEQ ID NO: 37694 - DNA, 31 bp, Homo sapiens; identical to SEQ ID NO: 17213
  source 1..31: mol_type = genomic DNA

SEQ ID NO: 37695 - DNA, 34 bp, Homo sapiens; identical to SEQ ID NO: 17216
  source 1..34: mol_type = genomic DNA

SEQ ID NO: 37696 - DNA, 35 bp, Homo sapiens; identical to SEQ ID NO: 17217
  source 1..35: mol_type = genomic DNA

SEQ ID NO: 37697 - DNA, 36 bp, Homo sapiens; identical to SEQ ID NO: 17218
  source 1..36: mol_type = genomic DNA

SEQ ID NO: 37698 - DNA, 37 bp, Homo sapiens; identical to SEQ ID NO: 17219
  source 1..37: mol_type = genomic DNA

SEQ ID NO: 37699 - DNA, 35 bp, Homo sapiens; identical to SEQ ID NO: 17221
  source 1..35: mol_type = genomic DNA

SEQ ID NO: 37700 - DNA, 36 bp, Homo sapiens; identical to SEQ ID NO: 17222
  source 1..36: mol_type = genomic DNA

SEQ ID NO: 37701 - DNA, 29 bp, Homo sapiens
  source 1..29: mol_type = genomic DNA
gcgggagaccggggttcgattccccgacg

SEQ ID NO: 37702 - DNA, 30 bp, Homo sapiens; identical to SEQ ID NO: 17228
  source 1..30: mol_type = genomic DNA

SEQ ID NO: 37703 - DNA, 31 bp, Homo sapiens; identical to SEQ ID NO: 17229
  source 1..31: mol_type = genomic DNA

SEQ ID NO: 37704 - DNA, 32 bp, Homo sapiens; identical to SEQ ID NO: 17230
  source 1..32: mol_type = genomic DNA

SEQ ID NO: 37705 - DNA, 33 bp, Homo sapiens; identical to SEQ ID NO: 17231
  source 1..33: mol_type = genomic DNA

SEQ ID NO: 37706 - DNA, 34 bp, Homo sapiens; identical to SEQ ID NO: 17232
  source 1..34: mol_type = genomic DNA

SEQ ID NO: 37707 - DNA, 35 bp, Homo sapiens; identical to SEQ ID NO: 17233
  source 1..35: mol_type = genomic DNA

SEQ ID NO: 37708 - DNA, 36 bp, Homo sapiens; identical to SEQ ID NO: 17234
  source 1..36: mol_type = genomic DNA

SEQ ID NO: 37709 - DNA, 37 bp, Homo sapiens; identical to SEQ ID NO: 17235
  source 1..37: mol_type = genomic DNA

SEQ ID NO: 37710 - DNA, 27 bp, Homo sapiens
  source 1..27: mol_type = genomic DNA
gcgggaggcccgggttcgattcccggc

SEQ ID NO: 37711 - DNA, 30 bp, Homo sapiens; identical to SEQ ID NO: 17241
  source 1..30: mol_type = genomic DNA

SEQ ID NO: 37712 - DNA, 32 bp, Homo sapiens; identical to SEQ ID NO: 17243
  source 1..32: mol_type = genomic DNA

SEQ ID NO: 37713 - DNA, 33 bp, Homo sapiens; identical to SEQ ID NO: 17244
  source 1..33: mol_type = genomic DNA

SEQ ID NO: 37714 - DNA, 34 bp, Homo sapiens; identical to SEQ ID NO: 17245
  source 1..34: mol_type = genomic DNA

SEQ ID NO: 37715 - DNA, 35 bp, Homo sapiens; identical to SEQ ID NO: 17246
  source 1..35: mol_type = genomic DNA

SEQ ID NO: 37716 - DNA, 36 bp, Homo sapiens; identical to SEQ ID NO: 17247
  source 1..36: mol_type = genomic DNA

SEQ ID NO: 37717 - DNA, 37 bp, Homo sapiens; identical to SEQ ID NO: 17248
  source 1..37: mol_type = genomic DNA

SEQ ID NO: 37718 - DNA, 25 bp, Homo sapiens
  source 1..25: mol_type = genomic DNA
gcgggttcgaaccccgtccgtgcct

SEQ ID NO: 37719 - DNA, 19 bp, Homo sapiens
  source 1..19: mol_type = genomic DNA
gcggttaggattcctggtt

SEQ ID NO: 37720 - DNA, 21 bp, Homo sapiens
  source 1..21: mol_type = genomic DNA
gcggttaggattcctggtttt

SEQ ID NO: 37721 - DNA, 18 bp, Homo sapiens
  source 1..18: mol_type = genomic DNA
gcggttatcacgtctgct

SEQ ID NO: 37722 - DNA, 19 bp, Homo sapiens
  source 1..19: mol_type = genomic DNA
gcggttatcacgtctgctt

SEQ ID NO: 37723 - DNA, 20 bp, Homo sapiens
  source 1..20: mol_type = genomic DNA
gcggttatcacgtctgcttt

SEQ ID NO: 37724 - DNA, 19 bp, Homo sapiens
  source 1..19: mol_type = genomic DNA
gcgtgctgggcccataacc

SEQ ID NO: 37725 - DNA, 20 bp, Homo sapiens
  source 1..20: mol_type = genomic DNA
gcgtgctgggcccataaccc

SEQ ID NO: 37726 - DNA, 22 bp, Homo sapiens
  source 1..22: mol_type = genomic DNA
gcgtgctgggcccataacccag

SEQ ID NO: 37727 - DNA, 23 bp, Homo sapiens
  source 1..23: mol_type = genomic DNA
gcgtgctgggcccataacccaga

SEQ ID NO: 37728 - DNA, 28 bp, Homo sapiens
  source 1..28: mol_type = genomic DNA
gcgtgctgggcccataacccagaggtcg

SEQ ID NO: 37729 - DNA, 30 bp, Homo sapiens; identical to SEQ ID NO: 17278
  source 1..30: mol_type = genomic DNA

SEQ ID NO: 37730 - DNA, 31 bp, Homo sapiens; identical to SEQ ID NO: 17279
  source 1..31: mol_type = genomic DNA

SEQ ID NO: 37731 - DNA, 34 bp, Homo sapiens; identical to SEQ ID NO: 17281
  source 1..34: mol_type = genomic DNA

SEQ ID NO: 37732 - DNA, 35 bp, Homo sapiens; identical to SEQ ID NO: 17282
  source 1..35: mol_type = genomic DNA

SEQ ID NO: 37733 - DNA, 36 bp, Homo sapiens; identical to SEQ ID NO: 17283
  source 1..36: mol_type = genomic DNA

SEQ ID NO: 37734 - DNA, 22 bp, Homo sapiens
  source 1..22: mol_type = genomic DNA
gcgtggccgagcggtctaaggc

SEQ ID NO: 37735 - DNA, 24 bp, Homo sapiens
  source 1..24: mol_type = genomic DNA
gcgtggcctaatggataaggcgtc

SEQ ID NO: 37736 - DNA, 27 bp, Homo sapiens
  source 1..27: mol_type = genomic DNA
gcgtggcctaatggataaggcgtctga

SEQ ID NO: 37737 - DNA, 29 bp, Homo sapiens
  source 1..29: mol_type = genomic DNA
gcgtggcctaatggataaggcgtctgact

SEQ ID NO: 37738 - DNA, 29 bp, Homo sapiens
  source 1..29: mol_type = genomic DNA
gcgtgggttcgaatcccaccctcgtcgcc

SEQ ID NO: 37739 - DNA, 29 bp, Homo sapiens
  source 1..29: mol_type = genomic DNA
gcgtgggttcgaatcccaccttcgtcgcc

SEQ ID NO: 37740 - DNA, 27 bp, Homo sapiens
  source 1..27: mol_type = genomic DNA
gcgtgggttcgaatcccatcctcgtcg

SEQ ID NO: 37741 - DNA, 28 bp, Homo sapiens
  source 1..28: mol_type = genomic DNA
gcgtgggttcgaatcccatcctcgtcgc

SEQ ID NO: 37742 - DNA, 29 bp, Homo sapiens
  source 1..29: mol_type = genomic DNA
gcgtgggttcgaatcccatcctcgtcgcc

SEQ ID NO: 37743 - DNA, 30 bp, Homo sapiens; identical to SEQ ID NO: 17298
  source 1..30: mol_type = genomic DNA

SEQ ID NO: 37744 - DNA, 26 bp, Homo sapiens
  source 1..26: mol_type = genomic DNA
gcgtgttcgaatcacgtcggggtcac

SEQ ID NO: 37745 - DNA, 27 bp, Homo sapiens
  source 1..27: mol_type = genomic DNA
gcgtgttcgaatcacgtcggggtcacc

SEQ ID NO: 37746 - DNA, 21 bp, Homo sapiens
  source 1..21: mol_type = genomic DNA
gcgttcaggtcgcagtctccc

SEQ ID NO: 37747 - DNA, 21 bp, Homo sapiens
  source 1..21: mol_type = genomic DNA
gcgttcgattcccggtcaggg

SEQ ID NO: 37748 - DNA, 22 bp, Homo sapiens
  source 1..22: mol_type = genomic DNA
gcgttcgattcccggtcaggga

SEQ ID NO: 37749 - DNA, 23 bp, Homo sapiens
  source 1..23: mol_type = genomic DNA
gcgttcgattcccggtcagggaa

SEQ ID NO: 37750 - DNA, 24 bp, Homo sapiens
  source 1..24: mol_type = genomic DNA
gcgttcgattcccggtcagggaac

SEQ ID NO: 37751 - DNA, 25 bp, Homo sapiens
  source 1..25: mol_type = genomic DNA
gcgttcgattcccggtcagggaacc

SEQ ID NO: 37752 - DNA, 16 bp, Homo sapiens
  source 1..16: mol_type = genomic DNA
gcgttcggctgttaac

SEQ ID NO: 37753 - DNA, 17 bp, Homo sapiens
  source 1..17: mol_type = genomic DNA
gcgttcggctgttaacc

SEQ ID NO: 37754 - DNA, 16 bp, Homo sapiens
  source 1..16: mol_type = genomic DNA
gcgttggtggtatagt

SEQ ID NO: 37755 - DNA, 17 bp, Homo sapiens
  source 1..17: mol_type = genomic DNA
gcgttggtggtatagtg

SEQ ID NO: 37756 - DNA, 18 bp, Homo sapiens
  source 1..18: mol_type = genomic DNA
gcgttggtggtatagtgg

SEQ ID NO: 37757 - DNA, 19 bp, Homo sapiens
  source 1..19: mol_type = genomic DNA
gcgttggtggtatagtggt

SEQ ID NO: 37758 - DNA, 33 bp, Homo sapiens; identical to SEQ ID NO: 17320
  source 1..33: mol_type = genomic DNA

SEQ ID NO: 37759 - DNA, 34 bp, Homo sapiens; identical to SEQ ID NO: 17321
  source 1..34: mol_type = genomic DNA

SEQ ID NO: 37760 - DNA, 23 bp, Homo sapiens
  source 1..23: mol_type = genomic DNA
gcgttggtggtatagtggtgagc

SEQ ID NO: 37761 - DNA, 24 bp, Homo sapiens
  source 1..24: mol_type = genomic DNA
gcgttggtggtatagtggtgagca

SEQ ID NO: 37762 - DNA, 26 bp, Homo sapiens
  source 1..26: mol_type = genomic DNA
gcgttggtggtatagtggtgagcata

SEQ ID NO: 37763 - DNA, 28 bp, Homo sapiens
  source 1..28: mol_type = genomic DNA
gcgttggtggtatagtggtgagcatagc

SEQ ID NO: 37764 - DNA, 29 bp, Homo sapiens
  source 1..29: mol_type = genomic DNA
gcgttggtggtatagtggtgagcatagct

SEQ ID NO: 37765 - DNA, 30 bp, Homo sapiens; identical to SEQ ID NO: 17335
  source 1..30: mol_type = genomic DNA

SEQ ID NO: 37766 - DNA, 31 bp, Homo sapiens; identical to SEQ ID NO: 17336
  source 1..31: mol_type = genomic DNA

SEQ ID NO: 37767 - DNA, 32 bp, Homo sapiens; identical to SEQ ID NO: 17337
  source 1..32: mol_type = genomic DNA

SEQ ID NO: 37768 - DNA, 33 bp, Homo sapiens; identical to SEQ ID NO: 17338
  source 1..33: mol_type = genomic DNA

SEQ ID NO: 37769 - DNA, 34 bp, Homo sapiens; identical to SEQ ID NO: 17339
  source 1..34: mol_type = genomic DNA

SEQ ID NO: 37770 - DNA, 35 bp, Homo sapiens; identical to SEQ ID NO: 17340
  source 1..35: mol_type = genomic DNA

SEQ ID NO: 37771 - DNA, 36 bp, Homo sapiens; identical to SEQ ID NO: 17341
  source 1..36: mol_type = genomic DNA

SEQ ID NO: 37772 - DNA, 23 bp, Homo sapiens
  source 1..23: mol_type = genomic DNA
gcgttggtggtatagtggttagc

SEQ ID NO: 37773 - DNA, 26 bp, Homo sapiens
  source 1..26: mol_type = genomic DNA
gcgttggtggtatagtggttagcata

SEQ ID NO: 37774 - DNA, 28 bp, Homo sapiens
  source 1..28: mol_type = genomic DNA
gcgttggtggtatagtggttagcatagc

SEQ ID NO: 37775 - DNA, 29 bp, Homo sapiens
  source 1..29: mol_type = genomic DNA
gcgttggtggtatagtggttagcatagct

SEQ ID NO: 37776 - DNA, 30 bp, Homo sapiens; identical to SEQ ID NO: 17358
  source 1..30: mol_type = genomic DNA

SEQ ID NO: 37777 - DNA, 31 bp, Homo sapiens; identical to SEQ ID NO: 17359
  source 1..31: mol_type = genomic DNA

SEQ ID NO: 37778 - DNA, 32 bp, Homo sapiens; identical to SEQ ID NO: 17360
  source 1..32: mol_type = genomic DNA

SEQ ID NO: 37779 - DNA, 33 bp, Homo sapiens; identical to SEQ ID NO: 17361
  source 1..33: mol_type = genomic DNA

SEQ ID NO: 37780 - DNA, 34 bp, Homo sapiens; identical to SEQ ID NO: 17362
  source 1..34: mol_type = genomic DNA

SEQ ID NO: 37781 - DNA, 35 bp, Homo sapiens; identical to SEQ ID NO: 17363
  source 1..35: mol_type = genomic DNA

SEQ ID NO: 37782 - DNA, 36 bp, Homo sapiens; identical to SEQ ID NO: 17364
  source 1..36: mol_type = genomic DNA

SEQ ID NO: 37783 - DNA, 32 bp, Homo sapiens; identical to SEQ ID NO: 17369
  source 1..32: mol_type = genomic DNA

SEQ ID NO: 37784 - DNA, 18 bp, Homo sapiens
  source 1..18: mol_type = genomic DNA
gctaaataagctatcggg

SEQ ID NO: 37785 - DNA, 19 bp, Homo sapiens
  source 1..19: mol_type = genomic DNA
gctaaataagctatcgggc

SEQ ID NO: 37786 - DNA, 21 bp, Homo sapiens
  source 1..21: mol_type = genomic DNA
gctaaataagctatcgggccc

SEQ ID NO: 37787 - DNA, 34 bp, Homo sapiens; identical to SEQ ID NO: 17405
  source 1..34: mol_type = genomic DNA

SEQ ID NO: 37788 - DNA, 42 bp, Homo sapiens; identical to SEQ ID NO: 17412
  source 1..42: mol_type = genomic DNA

SEQ ID NO: 37789 - DNA, 43 bp, Homo sapiens; identical to SEQ ID NO: 17413
  source 1..43: mol_type = genomic DNA

SEQ ID NO: 37790 - DNA, 32 bp, Homo sapiens; identical to SEQ ID NO: 17429
  source 1..32: mol_type = genomic DNA

SEQ ID NO: 37791 - DNA, 33 bp, Homo sapiens; identical to SEQ ID NO: 17430
  source 1..33: mol_type = genomic DNA

SEQ ID NO: 37792 - DNA, 34 bp, Homo sapiens; identical to SEQ ID NO: 17431
  source 1..34: mol_type = genomic DNA

SEQ ID NO: 37793 - DNA, 35 bp, Homo sapiens; identical to SEQ ID NO: 17432
  source 1..35: mol_type = genomic DNA

SEQ ID NO: 37794 - DNA, 16 bp, Homo sapiens
  source 1..16: mol_type = genomic DNA
gctagctcagtcggta

SEQ ID NO: 37795 - DNA, 17 bp, Homo sapiens
  source 1..17: mol_type = genomic DNA
gctagctcagtcggtag

SEQ ID NO: 37796 - DNA, 18 bp, Homo sapiens
  source 1..18: mol_type = genomic DNA
gctagctcagtcggtaga

SEQ ID NO: 37797 - DNA, 19 bp, Homo sapiens
  source 1..19: mol_type = genomic DNA
gctagctcagtcggtagag

SEQ ID NO: 37798 - DNA, 23 bp, Homo sapiens
  source 1..23: mol_type = genomic DNA
gctagctcagtcggtagagcatg

SEQ ID NO: 37799 - DNA, 27 bp, Homo sapiens
  source 1..27: mol_type = genomic DNA
gctagctcagtcggtagagcatgagac

SEQ ID NO: 37800 - DNA, 28 bp, Homo sapiens
  source 1..28: mol_type = genomic DNA
gctagctcagtcggtagagcatgagact

SEQ ID NO: 37801 - DNA, 29 bp, Homo sapiens
  source 1..29: mol_type = genomic DNA
gctagctcagtcggtagagcatgagactc

SEQ ID NO: 37802 - DNA, 45 bp, Homo sapiens
  source 1..45: mol_type = genomic DNA
gctagctcagtcggtagagcatgagactcttaatctcagggtcgt

SEQ ID NO: 37803 - DNA, 47 bp, Homo sapiens; identical to SEQ ID NO: 17455
  source 1..47: mol_type = genomic DNA

SEQ ID NO: 37804 - DNA, 25 bp, Homo sapiens
  source 1..25: mol_type = genomic DNA
gctagctcagtcggtagagcatggg

SEQ ID NO: 37805 - DNA, 27 bp, Homo sapiens
  source 1..27: mol_type = genomic DNA
gctagctcagtcggtagagcatgggac

SEQ ID NO: 37806 - DNA, 28 bp, Homo sapiens
  source 1..28: mol_type = genomic DNA
gctagctcagtcggtagagcatgggact

SEQ ID NO: 37807 - DNA, 29 bp, Homo sapiens
  source 1..29: mol_type = genomic DNA
gctagctcagtcggtagagcatgggactc

SEQ ID NO: 37808 - DNA, 30 bp, Homo sapiens; identical to SEQ ID NO: 17462
  source 1..30: mol_type = genomic DNA

SEQ ID NO: 37809 - DNA, 31 bp, Homo sapiens; identical to SEQ ID NO: 17463
  source 1..31: mol_type = genomic DNA

SEQ ID NO: 37810 - DNA, 36 bp, Homo sapiens; identical to SEQ ID NO: 17468
  source 1..36: mol_type = genomic DNA

SEQ ID NO: 37811 - DNA, 44 bp, Homo sapiens; identical to SEQ ID NO: 17470
  source 1..44: mol_type = genomic DNA

SEQ ID NO: 37812 - DNA, 47 bp, Homo sapiens; identical to SEQ ID NO: 17473
  source 1..47: mol_type = genomic DNA

SEQ ID NO: 37813 - DNA, 17 bp, Homo sapiens
  source 1..17: mol_type = genomic DNA
gctatcgggcccatacc

SEQ ID NO: 37814 - DNA, 19 bp, Homo sapiens
  source 1..19: mol_type = genomic DNA
gctcacaagaactgctaac

SEQ ID NO: 37815 - DNA, 20 bp, Homo sapiens
  source 1..20: mol_type = genomic DNA
gctcacaagaactgctaact

SEQ ID NO: 37816 - DNA, 21 bp, Homo sapiens
  source 1..21: mol_type = genomic DNA
gctcacaagaactgctaactc

SEQ ID NO: 37817 - DNA, 29 bp, Homo sapiens
  source 1..29: mol_type = genomic DNA
gctcacaagaactgctaactcatgccccc

SEQ ID NO: 37818 - DNA, 32 bp, Homo sapiens; identical to SEQ ID NO: 17523
  source 1..32: mol_type = genomic DNA

SEQ ID NO: 37819 - DNA, 23 bp, Homo sapiens
  source 1..23: mol_type = genomic DNA
gctcacatcaccccataaacacc

SEQ ID NO: 37820 - DNA, 24 bp, Homo sapiens
  source 1..24: mol_type = genomic DNA
gctcacatcaccccataaacacca

SEQ ID NO: 37821 - DNA, 23 bp, Homo sapiens
  source 1..23: mol_type = genomic DNA
gctcaggggtagagcatttgact

SEQ ID NO: 37822 - DNA, 16 bp, Homo sapiens
  source 1..16: mol_type = genomic DNA
gctcagtcggtagagc

SEQ ID NO: 37823 - DNA, 23 bp, Homo sapiens
  source 1..23: mol_type = genomic DNA
gctcagtcggtagagcatcagac

SEQ ID NO: 37824 - DNA, 24 bp, Homo sapiens
  source 1..24: mol_type = genomic DNA
gctcagtcggtagagcatcagact

SEQ ID NO: 37825 - DNA, 23 bp, Homo sapiens
  source 1..23: mol_type = genomic DNA
gctcagtcggtagagcatgagac

SEQ ID NO: 37826 - DNA, 24 bp, Homo sapiens
  source 1..24: mol_type = genomic DNA
gctcagtcggtagagcatgagact

SEQ ID NO: 37827 - DNA, 25 bp, Homo sapiens
  source 1..25: mol_type = genomic DNA
gctcagtcggtagagcatgagactc

SEQ ID NO: 37828 - DNA, 32 bp, Homo sapiens; identical to SEQ ID NO: 17569
  source 1..32: mol_type = genomic DNA

SEQ ID NO: 37829 - DNA, 23 bp, Homo sapiens
  source 1..23: mol_type = genomic DNA
gctcagtcggtagagcatgggac

SEQ ID NO: 37830 - DNA, 24 bp, Homo sapiens
  source 1..24: mol_type = genomic DNA
gctcagtcggtagagcatgggact

SEQ ID NO: 37831 - DNA, 25 bp, Homo sapiens
  source 1..25: mol_type = genomic DNA
gctcagtcggtagagcatgggactc

SEQ ID NO: 37832 - DNA, 26 bp, Homo sapiens
  source 1..26: mol_type = genomic DNA
gctcagtcggtagagcatgggactct

SEQ ID NO: 37833 - DNA, 30 bp, Homo sapiens; identical to SEQ ID NO: 17581
  source 1..30: mol_type = genomic DNA

SEQ ID NO: 37834 - DNA, 31 bp, Homo sapiens; identical to SEQ ID NO: 17582
  source 1..31: mol_type = genomic DNA

SEQ ID NO: 37835 - DNA, 32 bp, Homo sapiens; identical to SEQ ID NO: 17583
  source 1..32: mol_type = genomic DNA

SEQ ID NO: 37836 - DNA, 33 bp, Homo sapiens; identical to SEQ ID NO: 17584
  source 1..33: mol_type = genomic DNA

SEQ ID NO: 37837 - DNA, 43 bp, Homo sapiens; identical to SEQ ID NO: 17586
  source 1..43: mol_type = genomic DNA

SEQ ID NO: 37838 - DNA, 23 bp, Homo sapiens
  source 1..23: mol_type = genomic DNA
gctcagtggtagagcatttgact

SEQ ID NO: 37839 - DNA, 46 bp, Homo sapiens
  source 1..46: mol_type = genomic DNA
gctccagtctcttcgggggcgtgggttcgaatcccaccgctgccac

SEQ ID NO: 37840 - DNA, 47 bp, Homo sapiens; identical to SEQ ID NO: 17601
  source 1..47: mol_type = genomic DNA

SEQ ID NO: 37841 - DNA, 18 bp, Homo sapiens
  source 1..18: mol_type = genomic DNA
gctccagtggcgcaatcg

SEQ ID NO: 37842 - DNA, 19 bp, Homo sapiens
  source 1..19: mol_type = genomic DNA
gctccagtggcgcaatcgg

SEQ ID NO: 37843 - DNA, 20 bp, Homo sapiens
  source 1..20: mol_type = genomic DNA
gctccagtggcgcaatcggt

SEQ ID NO: 37844 - DNA, 16 bp, Homo sapiens
  source 1..16: mol_type = genomic DNA
gctccatagctcaggg

SEQ ID NO: 37845 - DNA, 23 bp, Homo sapiens
  source 1..23: mol_type = genomic DNA
gctccgaggtgattttcatattg

SEQ ID NO: 37846 - DNA, 28 bp, Homo sapiens
  source 1..28: mol_type = genomic DNA
gctccgaggtgattttcatattgaattg

SEQ ID NO: 37847 - DNA, 38 bp, Homo sapiens; identical to SEQ ID NO: 17634
  source 1..38: mol_type = genomic DNA

SEQ ID NO: 37848 - DNA, 32 bp, Homo sapiens; identical to SEQ ID NO: 17641
  source 1..32: mol_type = genomic DNA

SEQ ID NO: 37849 - DNA, 31 bp, Homo sapiens; identical to SEQ ID NO: 17646
  source 1..31: mol_type = genomic DNA

SEQ ID NO: 37850 - DNA, 17 bp, Homo sapiens
  source 1..17: mol_type = genomic DNA
gctctcaccgccgcggc

SEQ ID NO: 37851 - DNA, 19 bp, Homo sapiens
  source 1..19: mol_type = genomic DNA
gctctcaccgccgcggccc

SEQ ID NO: 37852 - DNA, 42 bp, Homo sapiens; identical to SEQ ID NO: 17670
  source 1..42: mol_type = genomic DNA

SEQ ID NO: 37853 - DNA, 43 bp, Homo sapiens; identical to SEQ ID NO: 17671
  source 1..43: mol_type = genomic DNA

SEQ ID NO: 37854 - DNA, 19 bp, Homo sapiens
  source 1..19: mol_type = genomic DNA
gctgagtgaagcattggac

SEQ ID NO: 37855 - DNA, 29 bp, Homo sapiens
  source 1..29: mol_type = genomic DNA
gctgcgtgttcgaatcacgtcggggtcac

SEQ ID NO: 37856 - DNA, 18 bp, Homo sapiens
  source 1..18: mol_type = genomic DNA
gctggggattgtgggttc

SEQ ID NO: 37857 - DNA, 35 bp, Homo sapiens; identical to SEQ ID NO: 17705
  source 1..35: mol_type = genomic DNA

SEQ ID NO: 37858 - DNA, 36 bp, Homo sapiens; identical to SEQ ID NO: 17706
  source 1..36: mol_type = genomic DNA

SEQ ID NO: 37859 - DNA, 37 bp, Homo sapiens; identical to SEQ ID NO: 17707
  source 1..37: mol_type = genomic DNA

SEQ ID NO: 37860 - DNA, 38 bp, Homo sapiens; identical to SEQ ID NO: 17708
  source 1..38: mol_type = genomic DNA

SEQ ID NO: 37861 - DNA, 17 bp, Homo sapiens
  source 1..17: mol_type = genomic DNA
gctggtgtagtggtatc

SEQ ID NO: 37862 - DNA, 20 bp, Homo sapiens
  source 1..20: mol_type = genomic DNA
gctggtgtagtggtatcatg

SEQ ID NO: 37863 - DNA, 25 bp, Homo sapiens
  source 1..25: mol_type = genomic DNA
gctggtgtagtggtatcatgcaaga

SEQ ID NO: 37864 - DNA, 26 bp, Homo sapiens
  source 1..26: mol_type = genomic DNA
gctggtgtagtggtatcatgcaagat

SEQ ID NO: 37865 - DNA, 27 bp, Homo sapiens
  source 1..27: mol_type = genomic DNA
gctggtgtagtggtatcatgcaagatt

SEQ ID NO: 37866 - DNA, 45 bp, Homo sapiens; identical to SEQ ID NO: 17728
  source 1..45: mol_type = genomic DNA

SEQ ID NO: 37867 - DNA, 47 bp, Homo sapiens; identical to SEQ ID NO: 17730
  source 1..47: mol_type = genomic DNA

SEQ ID NO: 37868 - DNA, 26 bp, Homo sapiens
  source 1..26: mol_type = genomic DNA
gctggttcgaatccggctcgaaggac

SEQ ID NO: 37869 - DNA, 27 bp, Homo sapiens
  source 1..27: mol_type = genomic DNA
gctggttcgaatccggctcgaaggacc

SEQ ID NO: 37870 - DNA, 26 bp, Homo sapiens
  source 1..26: mol_type = genomic DNA
gctggttcgaatccggctcggaggac

SEQ ID NO: 37871 - DNA, 27 bp, Homo sapiens
  source 1..27: mol_type = genomic DNA
gctggttcgaatccggctcggaggacc

SEQ ID NO: 37872 - DNA, 27 bp, Homo sapiens
  source 1..27: mol_type = genomic DNA
gctggttcgattccggctcgaaggacc

SEQ ID NO: 37873 - DNA, 16 bp, Homo sapiens
  source 1..16: mol_type = genomic DNA
gctgtgatggccgagt

SEQ ID NO: 37874 - DNA, 18 bp, Homo sapiens
  source 1..18: mol_type = genomic DNA
gctgtgatggccgagtgg

SEQ ID NO: 37875 - DNA, 24 bp, Homo sapiens
  source 1..24: mol_type = genomic DNA
gctgtgatggccgagtggttaagg

SEQ ID NO: 37876 - DNA, 25 bp, Homo sapiens
  source 1..25: mol_type = genomic DNA
gctgtgatggccgagtggttaaggc

SEQ ID NO: 37877 - DNA, 33 bp, Homo sapiens
  source 1..33: mol_type = genomic DNA
gctgtgatggccgagtggttaaggcgttggact

SEQ ID NO: 37878 - DNA, 22 bp, Homo sapiens
  source 1..22: mol_type = genomic DNA
gctgttaaccgaaaggttggtg

SEQ ID NO: 37879 - DNA, 23 bp, Homo sapiens
  source 1..23: mol_type = genomic DNA
gcttagcggtagagcatttgact

SEQ ID NO: 37880 - DNA, 16 bp, Homo sapiens
  source 1..16: mol_type = genomic DNA
gcttcaaacctgccgg

SEQ ID NO: 37881 - DNA, 17 bp, Homo sapiens
  source 1..17: mol_type = genomic DNA
gcttcaaacctgccggg

SEQ ID NO: 37882 - DNA, 18 bp, Homo sapiens
  source 1..18: mol_type = genomic DNA
gcttcaaacctgccgggg

SEQ ID NO: 37883 - DNA, 19 bp, Homo sapiens
  source 1..19: mol_type = genomic DNA
gcttcaaacctgccggggc

SEQ ID NO: 37884 - DNA, 20 bp, Homo sapiens
  source 1..20: mol_type = genomic DNA
gcttcaaacctgccggggct

SEQ ID NO: 37885 - DNA, 21 bp, Homo sapiens
  source 1..21: mol_type = genomic DNA
gcttcaaacctgccggggctt

SEQ ID NO: 37886 - DNA, 22 bp, Homo sapiens
  source 1..22: mol_type = genomic DNA
gcttcaaacctgccggggcttc

SEQ ID NO: 37887 - DNA, 23 bp, Homo sapiens
  source 1..23: mol_type = genomic DNA
gcttcaaacctgccggggcttcc

SEQ ID NO: 37888 - DNA, 16 bp, Homo sapiens
  source 1..16: mol_type = genomic DNA
gcttctgtagtgtagt

SEQ ID NO: 37889 - DNA, 17 bp, Homo sapiens
  source 1..17: mol_type = genomic DNA
gcttctgtagtgtagtg

SEQ ID NO: 37890 - DNA, 18 bp, Homo sapiens
  source 1..18: mol_type = genomic DNA
gcttctgtagtgtagtgg

SEQ ID NO: 37891 - DNA, 19 bp, Homo sapiens
  source 1..19: mol_type = genomic DNA
gcttctgtagtgtagtggt

SEQ ID NO: 37892 - DNA, 23 bp, Homo sapiens
  source 1..23: mol_type = genomic DNA
gcttctgtagtgtagtggttatc

SEQ ID NO: 37893 - DNA, 24 bp, Homo sapiens
  source 1..24: mol_type = genomic DNA
gcttctgtagtgtagtggttatca

SEQ ID NO: 37894 - DNA, 25 bp, Homo sapiens
  source 1..25: mol_type = genomic DNA
gcttctgtagtgtagtggttatcac

SEQ ID NO: 37895 - DNA, 26 bp, Homo sapiens
  source 1..26: mol_type = genomic DNA
gcttctgtagtgtagtggttatcacg

SEQ ID NO: 37896 - DNA, 28 bp, Homo sapiens
  source 1..28: mol_type = genomic DNA
gcttctgtagtgtagtggttatcacgtt

SEQ ID NO: 37897 - DNA, 29 bp, Homo sapiens
  source 1..29: mol_type = genomic DNA
gcttctgtagtgtagtggttatcacgttc

SEQ ID NO: 37898 - DNA, 30 bp, Homo sapiens; identical to SEQ ID NO: 17799
  source 1..30: mol_type = genomic DNA

SEQ ID NO: 37899 - DNA, 31 bp, Homo sapiens; identical to SEQ ID NO: 17800
  source 1..31: mol_type = genomic DNA

SEQ ID NO: 37900 - DNA, 32 bp, Homo sapiens; identical to SEQ ID NO: 17801
  source 1..32: mol_type = genomic DNA

SEQ ID NO: 37901 - DNA, 33 bp, Homo sapiens; identical to SEQ ID NO: 17802
  source 1..33: mol_type = genomic DNA

SEQ ID NO: 37902 - DNA, 34 bp, Homo sapiens; identical to SEQ ID NO: 17803
  source 1..34: mol_type = genomic DNA

SEQ ID NO: 37903 - DNA, 35 bp, Homo sapiens; identical to SEQ ID NO: 17804
  source 1..35: mol_type = genomic DNA

SEQ ID NO: 37904 - DNA, 36 bp, Homo sapiens; identical to SEQ ID NO: 17805
  source 1..36: mol_type = genomic DNA

SEQ ID NO: 37905 - DNA, 37 bp, Homo sapiens; identical to SEQ ID NO: 17806
  source 1..37: mol_type = genomic DNA

SEQ ID NO: 37906 - DNA, 39 bp, Homo sapiens; identical to SEQ ID NO: 17808
  source 1..39: mol_type = genomic DNA

SEQ ID NO: 37907 - DNA, 40 bp, Homo sapiens; identical to SEQ ID NO: 17809
  source 1..40: mol_type = genomic DNA

SEQ ID NO: 37908 - DNA, 43 bp, Homo sapiens; identical to SEQ ID NO: 17811
  source 1..43: mol_type = genomic DNA

SEQ ID NO: 37909 - DNA, 45 bp, Homo sapiens
  source 1..45: mol_type = genomic DNA
gcttctgtagtgtagtggttatcacgttcgcctcacacgcgaaag

SEQ ID NO: 37910 - DNA, 22 bp, Homo sapiens
  source 1..22: mol_type = genomic DNA
gctttacacgcagaaggtcctg

SEQ ID NO: 37911 - DNA, 19 bp, Homo sapiens
  source 1..19: mol_type = genomic DNA
gctttcaccgccgcggccc

SEQ ID NO: 37912 - DNA, 42 bp, Homo sapiens
  source 1..42: mol_type = genomic DNA
gctttcaccgccgcggcccgggttcgattcccggtcagggaa

SEQ ID NO: 37913 - DNA, 37 bp, Homo sapiens
  source 1..37: mol_type = genomic DNA
gctttgcacgcgtgggttcgaatcccatcctcgtcgc

SEQ ID NO: 37914 - DNA, 38 bp, Homo sapiens
  source 1..38: mol_type = genomic DNA
gctttgcacgcgtgggttcgaatcccatcctcgtcgcc

SEQ ID NO: 37915 - DNA, 19 bp, Homo sapiens
  source 1..19: mol_type = genomic DNA
gctttgcacgtatgaggcc

SEQ ID NO: 37916 - DNA, 21 bp, Homo sapiens
  source 1..21: mol_type = genomic DNA
gctttgcacgtatgaggcccc

SEQ ID NO: 37917 - DNA, 23 bp, Homo sapiens
  source 1..23: mol_type = genomic DNA
gctttgcacgtatgaggccccgg

SEQ ID NO: 37918 - DNA, 40 bp, Homo sapiens; identical to SEQ ID NO: 17827
  source 1..40: mol_type = genomic DNA

SEQ ID NO: 37919 - DNA, 41 bp, Homo sapiens; identical to SEQ ID NO: 17828
  source 1..41: mol_type = genomic DNA

SEQ ID NO: 37920 - DNA, 42 bp, Homo sapiens
  source 1..42: mol_type = genomic DNA
gctttgcacgtatgaggccccgggttcaatccccggcatctc

SEQ ID NO: 37921 - DNA, 42 bp, Homo sapiens; identical to SEQ ID NO: 17863
  source 1..42: mol_type = genomic DNA

SEQ ID NO: 37922 - DNA, 43 bp, Homo sapiens; identical to SEQ ID NO: 17864
  source 1..43: mol_type = genomic DNA

SEQ ID NO: 37923 - DNA, 16 bp, Homo sapiens
  source 1..16: mol_type = genomic DNA
ggaagcgtgctgggcc

SEQ ID NO: 37924 - DNA, 17 bp, Homo sapiens
  source 1..17: mol_type = genomic DNA
ggaagcgtgctgggccc

SEQ ID NO: 37925 - DNA, 18 bp, Homo sapiens
  source 1..18: mol_type = genomic DNA
ggaagcgtgctgggccca

SEQ ID NO: 37926 - DNA, 23 bp, Homo sapiens
  source 1..23: mol_type = genomic DNA
ggaagcgtgctgggcccataacc

SEQ ID NO: 37927 - DNA, 24 bp, Homo sapiens
  source 1..24: mol_type = genomic DNA
ggaagcgtgctgggcccataaccc

SEQ ID NO: 37928 - DNA, 26 bp, Homo sapiens
  source 1..26: mol_type = genomic DNA
ggaagcgtgctgggcccataacccag

SEQ ID NO: 37929 - DNA, 27 bp, Homo sapiens
  source 1..27: mol_type = genomic DNA
ggaagcgtgctgggcccataacccaga

SEQ ID NO: 37930 - DNA, 37 bp, Homo sapiens; identical to SEQ ID NO: 17881
  source 1..37: mol_type = genomic DNA

SEQ ID NO: 37931 - DNA, 38 bp, Homo sapiens; identical to SEQ ID NO: 17882
  source 1..38: mol_type = genomic DNA

SEQ ID NO: 37932 - DNA, 40 bp, Homo sapiens; identical to SEQ ID NO: 17884
  source 1..40: mol_type = genomic DNA

SEQ ID NO: 37933 - DNA, 16 bp, Homo sapiens
  source 1..16: mol_type = genomic DNA
ggactctgaatccagc

SEQ ID NO: 37934 - DNA, 24 bp, Homo sapiens
  source 1..24: mol_type = genomic DNA
ggactctgaatccagcgatccgag

SEQ ID NO: 37935 - DNA, 25 bp, Homo sapiens
  source 1..25: mol_type = genomic DNA
ggagaccggggttcaattccccgac

SEQ ID NO: 37936 - DNA, 31 bp, Homo sapiens; identical to SEQ ID NO: 17909
  source 1..31: mol_type = genomic DNA

SEQ ID NO: 37937 - DNA, 32 bp, Homo sapiens; identical to SEQ ID NO: 17910
  source 1..32: mol_type = genomic DNA

SEQ ID NO: 37938 - DNA, 33 bp, Homo sapiens; identical to SEQ ID NO: 17911
  source 1..33: mol_type = genomic DNA

SEQ ID NO: 37939 - DNA, 26 bp, Homo sapiens
  source 1..26: mol_type = genomic DNA
ggagaccggggttcgattccccgacg

SEQ ID NO: 37940 - DNA, 28 bp, Homo sapiens
  source 1..28: mol_type = genomic DNA
ggagaccggggttcgattccccgacggg

SEQ ID NO: 37941 - DNA, 29 bp, Homo sapiens
  source 1..29: mol_type = genomic DNA
ggagaccggggttcgattccccgacgggg

SEQ ID NO: 37942 - DNA, 30 bp, Homo sapiens; identical to SEQ ID NO: 17919
  source 1..30: mol_type = genomic DNA

SEQ ID NO: 37943 - DNA, 31 bp, Homo sapiens; identical to SEQ ID NO: 17920
  source 1..31: mol_type = genomic DNA

SEQ ID NO: 37944 - DNA, 32 bp, Homo sapiens; identical to SEQ ID NO: 17921
  source 1..32: mol_type = genomic DNA

SEQ ID NO: 37945 - DNA, 33 bp, Homo sapiens; identical to SEQ ID NO: 17922
  source 1..33: mol_type = genomic DNA

SEQ ID NO: 37946 - DNA, 34 bp, Homo sapiens; identical to SEQ ID NO: 17923
  source 1..34: mol_type = genomic DNA

SEQ ID NO: 37947 - DNA, 17 bp, Homo sapiens
  source 1..17: mol_type = genomic DNA
ggagagcattagactga

SEQ ID NO: 37948 - DNA, 17 bp, Homo sapiens
  source 1..17: mol_type = genomic DNA
ggagagcgttagactga

SEQ ID NO: 37949 - DNA, 16 bp, Homo sapiens
  source 1..16: mol_type = genomic DNA
ggagatcctgggttcg

SEQ ID NO: 37950 - DNA, 32 bp, Homo sapiens; identical to SEQ ID NO: 17928
  source 1..32: mol_type = genomic DNA

SEQ ID NO: 37951 - DNA, 34 bp, Homo sapiens
  source 1..34: mol_type = genomic DNA
ggagatcctgggttcgaatcccagcggggcctcc

SEQ ID NO: 37952 - DNA, 32 bp, Homo sapiens; identical to SEQ ID NO: 17932
  source 1..32: mol_type = genomic DNA

SEQ ID NO: 37953 - DNA, 34 bp, Homo sapiens; identical to SEQ ID NO: 17934
  source 1..34: mol_type = genomic DNA

SEQ ID NO: 37954 - DNA, 26 bp, Homo sapiens
  source 1..26: mol_type = genomic DNA
ggagatgaaaacctttttccaaggac

SEQ ID NO: 37955 - DNA, 27 bp, Homo sapiens
  source 1..27: mol_type = genomic DNA
ggagatgaaaacctttttccaaggaca

SEQ ID NO: 37956 - DNA, 28 bp, Homo sapiens
  source 1..28: mol_type = genomic DNA
ggagatgaaaacctttttccaaggacac

SEQ ID NO: 37957 - DNA, 29 bp, Homo sapiens
  source 1..29: mol_type = genomic DNA
ggagatgaaaacctttttccaaggacacc

SEQ ID NO: 37958 - DNA, 30 bp, Homo sapiens; identical to SEQ ID NO: 17942
  source 1..30: mol_type = genomic DNA

SEQ ID NO: 37959 - DNA, 29 bp, Homo sapiens
  source 1..29: mol_type = genomic DNA
ggagatttcaacttaacttgaccgctctg

SEQ ID NO: 37960 - DNA, 31 bp, Homo sapiens; identical to SEQ ID NO: 17957
  source 1..31: mol_type = genomic DNA

SEQ ID NO: 37961 - DNA, 32 bp, Homo sapiens; identical to SEQ ID NO: 17958
  source 1..32: mol_type = genomic DNA

SEQ ID NO: 37962 - DNA, 33 bp, Homo sapiens; identical to SEQ ID NO: 17959
  source 1..33: mol_type = genomic DNA

SEQ ID NO: 37963 - DNA, 18 bp, Homo sapiens
  source 1..18: mol_type = genomic DNA
ggagctggggattgtggg

SEQ ID NO: 37964 - DNA, 19 bp, Homo sapiens
  source 1..19: mol_type = genomic DNA
ggagctggggattgtgggt

SEQ ID NO: 37965 - DNA, 21 bp, Homo sapiens
  source 1..21: mol_type = genomic DNA
ggagctggggattgtgggttc

SEQ ID NO: 37966 - DNA, 22 bp, Homo sapiens
  source 1..22: mol_type = genomic DNA
ggagctggggattgtgggttcg

SEQ ID NO: 37967 - DNA, 28 bp, Homo sapiens
  source 1..28: mol_type = genomic DNA
ggagctggggattgtgggttcgagtccc

SEQ ID NO: 37968 - DNA, 29 bp, Homo sapiens
  source 1..29: mol_type = genomic DNA
ggagctggggattgtgggttcgagtccca

SEQ ID NO: 37969 - DNA, 40 bp, Homo sapiens; identical to SEQ ID NO: 17963
  source 1..40: mol_type = genomic DNA

SEQ ID NO: 37970 - DNA, 41 bp, Homo sapiens; identical to SEQ ID NO: 17964
  source 1..41: mol_type = genomic DNA

SEQ ID NO: 37971 - DNA, 33 bp, Homo sapiens
  source 1..33: mol_type = genomic DNA
ggaggcgtgggttcgaatcccactcctgacacc

SEQ ID NO: 37972 - DNA, 33 bp, Homo sapiens; identical to SEQ ID NO: 17979
  source 1..33: mol_type = genomic DNA

SEQ ID NO: 37973 - DNA, 22 bp, Homo sapiens
  source 1..22: mol_type = genomic DNA
ggagtggttatcacgttcgcct

SEQ ID NO: 37974 - DNA, 24 bp, Homo sapiens
  source 1..24: mol_type = genomic DNA
ggagttaaagactttttctctgac

SEQ ID NO: 37975 - DNA, 25 bp, Homo sapiens
  source 1..25: mol_type = genomic DNA
ggagttaaagactttttctctgacc

SEQ ID NO: 37976 - DNA, 26 bp, Homo sapiens
  source 1..26: mol_type = genomic DNA
ggagttaaagactttttctctgacca

SEQ ID NO: 37977 - DNA, 22 bp, Homo sapiens
  source 1..22: mol_type = genomic DNA
ggataacagctatccattggtc

SEQ ID NO: 37978 - DNA, 23 bp, Homo sapiens
  source 1..23: mol_type = genomic DNA
ggataacagctatccattggtct

SEQ ID NO: 37979 - DNA, 17 bp, Homo sapiens
  source 1..17: mol_type = genomic DNA
ggataacgcgtctgact

SEQ ID NO: 37980 - DNA, 34 bp, Homo sapiens; identical to SEQ ID NO: 18002
  source 1..34: mol_type = genomic DNA

SEQ ID NO: 37981 - DNA, 17 bp, Homo sapiens
  source 1..17: mol_type = genomic DNA
ggataaggcgtctgact

SEQ ID NO: 37982 - DNA, 16 bp, Homo sapiens
  source 1..16: mol_type = genomic DNA
ggatagcgcattggac

SEQ ID NO: 37983 - DNA, 18 bp, Homo sapiens
  source 1..18: mol_type = genomic DNA
ggatagctcagtcggtag

SEQ ID NO: 37984 - DNA, 19 bp, Homo sapiens
  source 1..19: mol_type = genomic DNA
ggatagctcagtcggtaga

SEQ ID NO: 37985 - DNA, 20 bp, Homo sapiens
  source 1..20: mol_type = genomic DNA
ggatagctcagtcggtagag

SEQ ID NO: 37986 - DNA, 24 bp, Homo sapiens
  source 1..24: mol_type = genomic DNA
ggatagctcagtcggtagagcatc

SEQ ID NO: 37987 - DNA, 28 bp, Homo sapiens
  source 1..28: mol_type = genomic DNA
ggatagctcagtcggtagagcatcagac

SEQ ID NO: 37988 - DNA, 18 bp, Homo sapiens
  source 1..18: mol_type = genomic DNA
ggatcagaagattccagg

SEQ ID NO: 37989 - DNA, 21 bp, Homo sapiens
  source 1..21: mol_type = genomic DNA
ggatcagaagattctaggttc

SEQ ID NO: 37990 - DNA, 22 bp, Homo sapiens
  source 1..22: mol_type = genomic DNA
ggatcagaagattctaggttcg

SEQ ID NO: 37991 - DNA, 40 bp, Homo sapiens; identical to SEQ ID NO: 18035
  source 1..40: mol_type = genomic DNA

SEQ ID NO: 37992 - DNA, 41 bp, Homo sapiens; identical to SEQ ID NO: 18036
  source 1..41: mol_type = genomic DNA

SEQ ID NO: 37993 - DNA, 19 bp, Homo sapiens
  source 1..19: mol_type = genomic DNA
ggatcagaagattgagggt

SEQ ID NO: 37994 - DNA, 20 bp, Homo sapiens
  source 1..20: mol_type = genomic DNA
ggatcagaagattgagggtt

SEQ ID NO: 37995 - DNA, 29 bp, Homo sapiens
  source 1..29: mol_type = genomic DNA
ggatcagaagattgcaggttcgagtcctg

SEQ ID NO: 37996 - DNA, 17 bp, Homo sapiens
  source 1..17: mol_type = genomic DNA
ggatggaggcgtgggtt

SEQ ID NO: 37997 - DNA, 36 bp, Homo sapiens
  source 1..36: mol_type = genomic DNA
ggatggaggcgtgggttcgaatcccacttctgacac

SEQ ID NO: 37998 - DNA, 37 bp, Homo sapiens; identical to SEQ ID NO: 18053
  source 1..37: mol_type = genomic DNA

SEQ ID NO: 37999 - DNA, 18 bp, Homo sapiens
  source 1..18: mol_type = genomic DNA
ggatggccgagcggtcta

SEQ ID NO: 38000 - DNA, 22 bp, Homo sapiens
  source 1..22: mol_type = genomic DNA
ggatggccgagcggtctaaggc

SEQ ID NO: 38001 - DNA, 28 bp, Homo sapiens
  source 1..28: mol_type = genomic DNA
ggatggggtgtgataggtggcacggaga

SEQ ID NO: 38002 - DNA, 29 bp, Homo sapiens
  source 1..29: mol_type = genomic DNA
ggatggggtgtgataggtggcacggagaa

SEQ ID NO: 38003 - DNA, 34 bp, Homo sapiens; identical to SEQ ID NO: 18078
  source 1..34: mol_type = genomic DNA

SEQ ID NO: 38004 - DNA, 16 bp, Homo sapiens
  source 1..16: mol_type = genomic DNA
ggatgtagctcagtgg

SEQ ID NO: 38005 - DNA, 17 bp, Homo sapiens
  source 1..17: mol_type = genomic DNA
ggatgtagctcagtggt

SEQ ID NO: 38006 - DNA, 21 bp, Homo sapiens
  source 1..21: mol_type = genomic DNA
ggatgtagctcagtggtagag

SEQ ID NO: 38007 - DNA, 16 bp, Homo sapiens
  source 1..16: mol_type = genomic DNA
ggattcggcgctctca

SEQ ID NO: 38008 - DNA, 18 bp, Homo sapiens
  source 1..18: mol_type = genomic DNA
ggattcggcgctctcacc

SEQ ID NO: 38009 - DNA, 21 bp, Homo sapiens
  source 1..21: mol_type = genomic DNA
ggattcggcgctctcaccgcc

SEQ ID NO: 38010 - DNA, 28 bp, Homo sapiens
  source 1..28: mol_type = genomic DNA
ggattcggcgctctcaccgccgcggccc

SEQ ID NO: 38011 - DNA, 33 bp, Homo sapiens; identical to SEQ ID NO: 18103
  source 1..33: mol_type = genomic DNA

SEQ ID NO: 38012 - DNA, 34 bp, Homo sapiens; identical to SEQ ID NO: 18104
  source 1..34: mol_type = genomic DNA

SEQ ID NO: 38013 - DNA, 23 bp, Homo sapiens
  source 1..23: mol_type = genomic DNA
ggattgtgggttcgagtcccatc

SEQ ID NO: 38014 - DNA, 31 bp, Homo sapiens; identical to SEQ ID NO: 18115
  source 1..31: mol_type = genomic DNA

SEQ ID NO: 38015 - DNA, 32 bp, Homo sapiens; identical to SEQ ID NO: 18116
  source 1..32: mol_type = genomic DNA

SEQ ID NO: 38016 - DNA, 18 bp, Homo sapiens
  source 1..18: mol_type = genomic DNA
ggatttgtggtccagtgg

SEQ ID NO: 38017 - DNA, 16 bp, Homo sapiens
  source 1..16: mol_type = genomic DNA
ggcagagcatttgact

SEQ ID NO: 38018 - DNA, 19 bp, Homo sapiens
  source 1..19: mol_type = genomic DNA
ggcagcgatggccgagtgg

SEQ ID NO: 38019 - DNA, 20 bp, Homo sapiens
  source 1..20: mol_type = genomic DNA
ggcatcagcctccggagctg

SEQ ID NO: 38020 - DNA, 27 bp, Homo sapiens
  source 1..27: mol_type = genomic DNA
ggcatcagcctccggagctggggattg

SEQ ID NO: 38021 - DNA, 28 bp, Homo sapiens
  source 1..28: mol_type = genomic DNA
ggcatcagcctccggagctggggattgt

SEQ ID NO: 38022 - DNA, 33 bp, Homo sapiens; identical to SEQ ID NO: 18137
  source 1..33: mol_type = genomic DNA

SEQ ID NO: 38023 - DNA, 19 bp, Homo sapiens
  source 1..19: mol_type = genomic DNA
ggcattggcctcctaagcc

SEQ ID NO: 38024 - DNA, 16 bp, Homo sapiens
  source 1..16: mol_type = genomic DNA
ggcattggtggttcag

SEQ ID NO: 38025 - DNA, 19 bp, Homo sapiens
  source 1..19: mol_type = genomic DNA
ggcattggtggttcagtgg

SEQ ID NO: 38026 - DNA, 31 bp, Homo sapiens
  source 1..31: mol_type = genomic DNA
ggcattggtggttcagtggtagaattctcgc

SEQ ID NO: 38027 - DNA, 32 bp, Homo sapiens; identical to SEQ ID NO: 18142
  source 1..32: mol_type = genomic DNA

SEQ ID NO: 38028 - DNA, 33 bp, Homo sapiens; identical to SEQ ID NO: 18143
  source 1..33: mol_type = genomic DNA

SEQ ID NO: 38029 - DNA, 26 bp, Homo sapiens
  source 1..26: mol_type = genomic DNA
ggcccataacccagaggtcgatggat

SEQ ID NO: 38030 - DNA, 33 bp, Homo sapiens; identical to SEQ ID NO: 18183
  source 1..33: mol_type = genomic DNA

SEQ ID NO: 38031 - DNA, 35 bp, Homo sapiens; identical to SEQ ID NO: 18185
  source 1..35: mol_type = genomic DNA

SEQ ID NO: 38032 - DNA, 32 bp, Homo sapiens; identical to SEQ ID NO: 18195
  source 1..32: mol_type = genomic DNA

SEQ ID NO: 38033 - DNA, 33 bp, Homo sapiens; identical to SEQ ID NO: 18196
  source 1..33: mol_type = genomic DNA

SEQ ID NO: 38034 - DNA, 35 bp, Homo sapiens; identical to SEQ ID NO: 18198
  source 1..35: mol_type = genomic DNA

SEQ ID NO: 38035 - DNA, 36 bp, Homo sapiens; identical to SEQ ID NO: 18199
  source 1..36: mol_type = genomic DNA

SEQ ID NO: 38036 - DNA, 37 bp, Homo sapiens; identical to SEQ ID NO: 18200
  source 1..37: mol_type = genomic DNA

SEQ ID NO: 38037 - DNA, 40 bp, Homo sapiens; identical to SEQ ID NO: 18201
  source 1..40: mol_type = genomic DNA

SEQ ID NO: 38038 - DNA, 41 bp, Homo sapiens; identical to SEQ ID NO: 18202
  source 1..41: mol_type = genomic DNA

SEQ ID NO: 38039 - DNA, 31 bp, Homo sapiens
  source 1..31: mol_type = genomic DNA
ggccccgggttcaatccccggcacctccacc

SEQ ID NO: 38040 - DNA, 31 bp, Homo sapiens
  source 1..31: mol_type = genomic DNA
ggccccgggttcgatccccggcatctccacc

SEQ ID NO: 38041 - DNA, 18 bp, Homo sapiens
  source 1..18: mol_type = genomic DNA
ggcccgggttcgactccc

SEQ ID NO: 38042 - DNA, 28 bp, Homo sapiens
  source 1..28: mol_type = genomic DNA
ggcccgggttcgactcccggtatgggaa

SEQ ID NO: 38043 - DNA, 29 bp, Homo sapiens
  source 1..29: mol_type = genomic DNA
ggcccgggttcgactcccggtatgggaac

SEQ ID NO: 38044 - DNA, 26 bp, Homo sapiens
  source 1..26: mol_type = genomic DNA
ggcccgggttcgactcccggtgtggg

SEQ ID NO: 38045 - DNA, 27 bp, Homo sapiens
  source 1..27: mol_type = genomic DNA
ggcccgggttcgactcccggtgtggga

SEQ ID NO: 38046 - DNA, 28 bp, Homo sapiens
  source 1..28: mol_type = genomic DNA
ggcccgggttcgactcccggtgtgggaa

SEQ ID NO: 38047 - DNA, 29 bp, Homo sapiens
  source 1..29: mol_type = genomic DNA
ggcccgggttcgactcccggtgtgggaac

SEQ ID NO: 38048 - DNA, 30 bp, Homo sapiens; identical to SEQ ID NO: 18208
  source 1..30: mol_type = genomic DNA

SEQ ID NO: 38049 - DNA, 28 bp, Homo sapiens
  source 1..28: mol_type = genomic DNA
ggcccgggttcgattcccggtcagggaa

SEQ ID NO: 38050 - DNA, 29 bp, Homo sapiens
  source 1..29: mol_type = genomic DNA
ggcccgggttcgattcccggtcagggaac

SEQ ID NO: 38051 - DNA, 31 bp, Homo sapiens; identical to SEQ ID NO: 18219
  source 1..31: mol_type = genomic DNA

SEQ ID NO: 38052 - DNA, 33 bp, Homo sapiens; identical to SEQ ID NO: 18221
  source 1..33: mol_type = genomic DNA

SEQ ID NO: 38053 - DNA, 35 bp, Homo sapiens; identical to SEQ ID NO: 18223
  source 1..35: mol_type = genomic DNA

SEQ ID NO: 38054 - DNA, 18 bp, Homo sapiens
  source 1..18: mol_type = genomic DNA
ggccgagcggtctaaggc

SEQ ID NO: 38055 - DNA, 22 bp, Homo sapiens
  source 1..22: mol_type = genomic DNA
ggccgagcggtctaaggcgctg

SEQ ID NO: 38056 - DNA, 21 bp, Homo sapiens
  source 1..21: mol_type = genomic DNA
ggccgcagcaacctcggttcg

SEQ ID NO: 38057 - DNA, 38 bp, Homo sapiens
  source 1..38: mol_type = genomic DNA
ggccgcagcaacctcggttcgaatccgagtcacggcac

SEQ ID NO: 38058 - DNA, 39 bp, Homo sapiens; identical to SEQ ID NO: 18236
  source 1..39: mol_type = genomic DNA

SEQ ID NO: 38059 - DNA, 18 bp, Homo sapiens
  source 1..18: mol_type = genomic DNA
ggccgcgtggcctaatgg

SEQ ID NO: 38060 - DNA, 19 bp, Homo sapiens
  source 1..19: mol_type = genomic DNA
ggccgcgtggcctaatgga

SEQ ID NO: 38061 - DNA, 25 bp, Homo sapiens
  source 1..25: mol_type = genomic DNA
ggccgcgtggcctaatggataaggc

SEQ ID NO: 38062 - DNA, 29 bp, Homo sapiens
  source 1..29: mol_type = genomic DNA
ggccgcgtggcctaatggataaggcgtct

SEQ ID NO: 38063 - DNA, 30 bp, Homo sapiens; identical to SEQ ID NO: 18240
  source 1..30: mol_type = genomic DNA

SEQ ID NO: 38064 - DNA, 33 bp, Homo sapiens; identical to SEQ ID NO: 18241
  source 1..33: mol_type = genomic DNA

SEQ ID NO: 38065 - DNA, 32 bp, Homo sapiens; identical to SEQ ID NO: 18243
  source 1..32: mol_type = genomic DNA

SEQ ID NO: 38066 - DNA, 33 bp, Homo sapiens; identical to SEQ ID NO: 18244
  source 1..33: mol_type = genomic DNA

SEQ ID NO: 38067 - DNA, 16 bp, Homo sapiens
  source 1..16: mol_type = genomic DNA
ggccggttagctcagt

SEQ ID NO: 38068 - DNA, 20 bp, Homo sapiens
  source 1..20: mol_type = genomic DNA
ggccggttagctcagtcggc

SEQ ID NO: 38069 - DNA, 18 bp, Homo sapiens
  source 1..18: mol_type = genomic DNA
ggccggttagctcagttg

SEQ ID NO: 38070 - DNA, 19 bp, Homo sapiens
  source 1..19: mol_type = genomic DNA
ggccggttagctcagttgg

SEQ ID NO: 38071 - DNA, 20 bp, Homo sapiens
  source 1..20: mol_type = genomic DNA
ggccggttagctcagttggt

SEQ ID NO: 38072 - DNA, 26 bp, Homo sapiens
  source 1..26: mol_type = genomic DNA
ggccggttagctcagttggttagagc

SEQ ID NO: 38073 - DNA, 16 bp, Homo sapiens
  source 1..16: mol_type = genomic DNA
ggccgtgatcgtatag

SEQ ID NO: 38074 - DNA, 17 bp, Homo sapiens
  source 1..17: mol_type = genomic DNA
ggccgtgatcgtatagt

SEQ ID NO: 38075 - DNA, 18 bp, Homo sapiens
  source 1..18: mol_type = genomic DNA
ggccgtgatcgtatagtg

SEQ ID NO: 38076 - DNA, 19 bp, Homo sapiens
  source 1..19: mol_type = genomic DNA
ggccgtgatcgtatagtgg

SEQ ID NO: 38077 - DNA, 20 bp, Homo sapiens
  source 1..20: mol_type = genomic DNA
ggccgtgatcgtatagtggt

SEQ ID NO: 38078 - DNA, 21 bp, Homo sapiens
  source 1..21: mol_type = genomic DNA
ggccgtgatcgtatagtggtt

SEQ ID NO: 38079 - DNA, 22 bp, Homo sapiens
  source 1..22: mol_type = genomic DNA
ggccgtgatcgtatagtggtta

SEQ ID NO: 38080 - DNA, 23 bp, Homo sapiens
  source 1..23: mol_type = genomic DNA
ggccgtgatcgtatagtggttag

SEQ ID NO: 38081 - DNA, 24 bp, Homo sapiens
  source 1..24: mol_type = genomic DNA
ggccgtgatcgtatagtggttagt

SEQ ID NO: 38082 - DNA, 25 bp, Homo sapiens
  source 1..25: mol_type = genomic DNA
ggccgtgatcgtatagtggttagta

SEQ ID NO: 38083 - DNA, 26 bp, Homo sapiens
  source 1..26: mol_type = genomic DNA
ggccgtgatcgtatagtggttagtac

SEQ ID NO: 38084 - DNA, 27 bp, Homo sapiens
  source 1..27: mol_type = genomic DNA
ggccgtgatcgtatagtggttagtact

SEQ ID NO: 38085 - DNA, 28 bp, Homo sapiens
  source 1..28: mol_type = genomic DNA
ggccgtgatcgtatagtggttagtactc

SEQ ID NO: 38086 - DNA, 29 bp, Homo sapiens
  source 1..29: mol_type = genomic DNA
ggccgtgatcgtatagtggttagtactct

SEQ ID NO: 38087 - DNA, 30 bp, Homo sapiens; identical to SEQ ID NO: 18279
  source 1..30: mol_type = genomic DNA

SEQ ID NO: 38088 - DNA, 31 bp, Homo sapiens; identical to SEQ ID NO: 18280
  source 1..31: mol_type = genomic DNA

SEQ ID NO: 38089 - DNA, 32 bp, Homo sapiens; identical to SEQ ID NO: 18281
  source 1..32: mol_type = genomic DNA

SEQ ID NO: 38090 - DNA, 33 bp, Homo sapiens; identical to SEQ ID NO: 18282
  source 1..33: mol_type = genomic DNA

SEQ ID NO: 38091 - DNA, 34 bp, Homo sapiens; identical to SEQ ID NO: 18283
  source 1..34: mol_type = genomic DNA

SEQ ID NO: 38092 - DNA, 35 bp, Homo sapiens; identical to SEQ ID NO: 18284
  source 1..35: mol_type = genomic DNA

SEQ ID NO: 38093 - DNA, 36 bp, Homo sapiens; identical to SEQ ID NO: 18285
  source 1..36: mol_type = genomic DNA

SEQ ID NO: 38094 - DNA, 37 bp, Homo sapiens; identical to SEQ ID NO: 18286
  source 1..37: mol_type = genomic DNA

SEQ ID NO: 38095 - DNA, 17 bp, Homo sapiens
  source 1..17: mol_type = genomic DNA
ggcctcgtggcgcaacg

SEQ ID NO: 38096 - DNA, 18 bp, Homo sapiens
  source 1..18: mol_type = genomic DNA
ggcctcgtggcgcaacgg

SEQ ID NO: 38097 - DNA, 31 bp, Homo sapiens; identical to SEQ ID NO: 18293
  source 1..31: mol_type = genomic DNA

SEQ ID NO: 38098 - DNA, 32 bp, Homo sapiens; identical to SEQ ID NO: 18294
  source 1..32: mol_type = genomic DNA

SEQ ID NO: 38099 - DNA, 33 bp, Homo sapiens; identical to SEQ ID NO: 18295
  source 1..33: mol_type = genomic DNA

SEQ ID NO: 38100 - DNA, 23 bp, Homo sapiens
  source 1..23: mol_type = genomic DNA
ggcgcagcggaagcgtgctgggc

SEQ ID NO: 38101 - DNA, 19 bp, Homo sapiens
  source 1..19: mol_type = genomic DNA
ggcgccgtggcttagttgg

SEQ ID NO: 38102 - DNA, 19 bp, Homo sapiens
  source 1..19: mol_type = genomic DNA
ggcgcggtggccaagtggt

SEQ ID NO: 38103 - DNA, 24 bp, Homo sapiens
  source 1..24: mol_type = genomic DNA
ggcgcggtggccaagtggtaaggc

SEQ ID NO: 38104 - DNA, 45 bp, Homo sapiens
  source 1..45: mol_type = genomic DNA
ggcgctctcaccgccgcggcccgggttcgattcccggtcagggaa

SEQ ID NO: 38105 - DNA, 46 bp, Homo sapiens; identical to SEQ ID NO: 18316
  source 1..46: mol_type = genomic DNA

SEQ ID NO: 38106 - DNA, 20 bp, Homo sapiens
  source 1..20: mol_type = genomic DNA
ggcggcccgggttcgactcc

SEQ ID NO: 38107 - DNA, 29 bp, Homo sapiens
  source 1..29: mol_type = genomic DNA
ggcggcccgggttcgactcccggtgtggg

SEQ ID NO: 38108 - DNA, 30 bp, Homo sapiens; identical to SEQ ID NO: 18326
  source 1..30: mol_type = genomic DNA

SEQ ID NO: 38109 - DNA, 31 bp, Homo sapiens; identical to SEQ ID NO: 18327
  source 1..31: mol_type = genomic DNA

SEQ ID NO: 38110 - DNA, 32 bp, Homo sapiens; identical to SEQ ID NO: 18328
  source 1..32: mol_type = genomic DNA

SEQ ID NO: 38111 - DNA, 33 bp, Homo sapiens; identical to SEQ ID NO: 18329
  source 1..33: mol_type = genomic DNA

SEQ ID NO: 38112 - DNA, 18 bp, Homo sapiens
  source 1..18: mol_type = genomic DNA
ggctagctcagtcggtag

SEQ ID NO: 38113 - DNA, 19 bp, Homo sapiens
  source 1..19: mol_type = genomic DNA
ggctagctcagtcggtaga

SEQ ID NO: 38114 - DNA, 20 bp, Homo sapiens
  source 1..20: mol_type = genomic DNA
ggctagctcagtcggtagag

SEQ ID NO: 38115 - DNA, 21 bp, Homo sapiens
  source 1..21: mol_type = genomic DNA
ggctagctcagtcggtagagc

SEQ ID NO: 38116 - DNA, 22 bp, Homo sapiens
  source 1..22: mol_type = genomic DNA
ggctagctcagtcggtagagca

SEQ ID NO: 38117 - DNA, 28 bp, Homo sapiens
  source 1..28: mol_type = genomic DNA
ggctagctcagtcggtagagcatgagac

SEQ ID NO: 38118 - DNA, 29 bp, Homo sapiens
  source 1..29: mol_type = genomic DNA
ggctagctcagtcggtagagcatgagact

SEQ ID NO: 38119 - DNA, 30 bp, Homo sapiens; identical to SEQ ID NO: 18355
  source 1..30: mol_type = genomic DNA

SEQ ID NO: 38120 - DNA, 31 bp, Homo sapiens; identical to SEQ ID NO: 18356
  source 1..31: mol_type = genomic DNA

SEQ ID NO: 38121 - DNA, 45 bp, Homo sapiens
  source 1..45: mol_type = genomic DNA
ggctagctcagtcggtagagcatgagactcttaatctcagggtcg

SEQ ID NO: 38122 - DNA, 28 bp, Homo sapiens
  source 1..28: mol_type = genomic DNA
ggctagctcagtcggtagagcatgggac

SEQ ID NO: 38123 - DNA, 29 bp, Homo sapiens
  source 1..29: mol_type = genomic DNA
ggctagctcagtcggtagagcatgggact

SEQ ID NO: 38124 - DNA, 30 bp, Homo sapiens; identical to SEQ ID NO: 18370
  source 1..30: mol_type = genomic DNA

SEQ ID NO: 38125 - DNA, 31 bp, Homo sapiens; identical to SEQ ID NO: 18371
  source 1..31: mol_type = genomic DNA

SEQ ID NO: 38126 - DNA, 32 bp, Homo sapiens; identical to SEQ ID NO: 18372
  source 1..32: mol_type = genomic DNA

SEQ ID NO: 38127 - DNA, 45 bp, Homo sapiens
  source 1..45: mol_type = genomic DNA
ggctagctcagtcggtagagcatgggactcttaatcccagggtcg

SEQ ID NO: 38128 - DNA, 24 bp, Homo sapiens
  source 1..24: mol_type = genomic DNA
ggctcacatcaccccataaacacc

SEQ ID NO: 38129 - DNA, 25 bp, Homo sapiens
  source 1..25: mol_type = genomic DNA
ggctcacatcaccccataaacacca

SEQ ID NO: 38130 - DNA, 27 bp, Homo sapiens
  source 1..27: mol_type = genomic DNA
ggctccagtctcttcgggggcgtgggt

SEQ ID NO: 38131 - DNA, 47 bp, Homo sapiens
  source 1..47: mol_type = genomic DNA
ggctccagtctcttcgggggcgtgggttcgaatcccaccgctgccac

SEQ ID NO: 38132 - DNA, 16 bp, Homo sapiens
  source 1..16: mol_type = genomic DNA
ggctccatagctcagg

SEQ ID NO: 38133 - DNA, 17 bp, Homo sapiens
  source 1..17: mol_type = genomic DNA
ggctccatagctcaggg

SEQ ID NO: 38134 - DNA, 18 bp, Homo sapiens
  source 1..18: mol_type = genomic DNA
ggctccatagctcagggg

SEQ ID NO: 38135 - DNA, 19 bp, Homo sapiens
  source 1..19: mol_type = genomic DNA
ggctccatagctcaggggt

SEQ ID NO: 38136 - DNA, 32 bp, Homo sapiens; identical to SEQ ID NO: 18410
  source 1..32: mol_type = genomic DNA

SEQ ID NO: 38137 - DNA, 33 bp, Homo sapiens; identical to SEQ ID NO: 18411
  source 1..33: mol_type = genomic DNA

SEQ ID NO: 38138 - DNA, 19 bp, Homo sapiens
  source 1..19: mol_type = genomic DNA
ggctccatagctcagtggt

SEQ ID NO: 38139 - DNA, 18 bp, Homo sapiens
  source 1..18: mol_type = genomic DNA
ggctccgtggcgcaatgg

SEQ ID NO: 38140 - DNA, 19 bp, Homo sapiens
  source 1..19: mol_type = genomic DNA
ggctccgtggcgcaatgga

SEQ ID NO: 38141 - DNA, 20 bp, Homo sapiens
  source 1..20: mol_type = genomic DNA
ggctccgtggcgcaatggat

SEQ ID NO: 38142 - DNA, 22 bp, Homo sapiens
  source 1..22: mol_type = genomic DNA
ggctccgtggcgcaatggatag

SEQ ID NO: 38143 - DNA, 27 bp, Homo sapiens
  source 1..27: mol_type = genomic DNA
ggctccgtggcgcaatggatagcgcat

SEQ ID NO: 38144 - DNA, 32 bp, Homo sapiens; identical to SEQ ID NO: 18427
  source 1..32: mol_type = genomic DNA

SEQ ID NO: 38145 - DNA, 33 bp, Homo sapiens; identical to SEQ ID NO: 18428
  source 1..33: mol_type = genomic DNA

SEQ ID NO: 38146 - DNA, 16 bp, Homo sapiens
  source 1..16: mol_type = genomic DNA
ggctcgttggtctagg

SEQ ID NO: 38147 - DNA, 17 bp, Homo sapiens
  source 1..17: mol_type = genomic DNA
ggctcgttggtctaggg

SEQ ID NO: 38148 - DNA, 18 bp, Homo sapiens
  source 1..18: mol_type = genomic DNA
ggctcgttggtctagggg

SEQ ID NO: 38149 - DNA, 19 bp, Homo sapiens
  source 1..19: mol_type = genomic DNA
ggctcgttggtctaggggt

SEQ ID NO: 38150 - DNA, 20 bp, Homo sapiens
  source 1..20: mol_type = genomic DNA
ggctcgttggtctaggggta

SEQ ID NO: 38151 - DNA, 22 bp, Homo sapiens
  source 1..22: mol_type = genomic DNA
ggctcgttggtctaggggtatg

SEQ ID NO: 38152 - DNA, 25 bp, Homo sapiens
  source 1..25: mol_type = genomic DNA
ggctcgttggtctaggggtatgatt

SEQ ID NO: 38153 - DNA, 26 bp, Homo sapiens
  source 1..26: mol_type = genomic DNA
ggctcgttggtctaggggtatgattc

SEQ ID NO: 38154 - DNA, 27 bp, Homo sapiens
  source 1..27: mol_type = genomic DNA
ggctcgttggtctaggggtatgattct

SEQ ID NO: 38155 - DNA, 28 bp, Homo sapiens
  source 1..28: mol_type = genomic DNA
ggctcgttggtctaggggtatgattctc

SEQ ID NO: 38156 - DNA, 29 bp, Homo sapiens
  source 1..29: mol_type = genomic DNA
ggctcgttggtctaggggtatgattctcg

SEQ ID NO: 38157 - DNA, 30 bp, Homo sapiens; identical to SEQ ID NO: 18447
  source 1..30: mol_type = genomic DNA

SEQ ID NO: 38158 - DNA, 31 bp, Homo sapiens; identical to SEQ ID NO: 18448
  source 1..31: mol_type = genomic DNA

SEQ ID NO: 38159 - DNA, 32 bp, Homo sapiens; identical to SEQ ID NO: 18449
  source 1..32: mol_type = genomic DNA

SEQ ID NO: 38160 - DNA, 33 bp, Homo sapiens; identical to SEQ ID NO: 18450
  source 1..33: mol_type = genomic DNA

SEQ ID NO: 38161 - DNA, 34 bp, Homo sapiens; identical to SEQ ID NO: 18451
  source 1..34: mol_type = genomic DNA

SEQ ID NO: 38162 - DNA, 35 bp, Homo sapiens; identical to SEQ ID NO: 18452
  source 1..35: mol_type = genomic DNA

SEQ ID NO: 38163 - DNA, 33 bp, Homo sapiens; identical to SEQ ID NO: 18454
  source 1..33: mol_type = genomic DNA

SEQ ID NO: 38164 - DNA, 34 bp, Homo sapiens; identical to SEQ ID NO: 18455
  source 1..34: mol_type = genomic DNA

SEQ ID NO: 38165 - DNA, 35 bp, Homo sapiens; identical to SEQ ID NO: 18456
  source 1..35: mol_type = genomic DNA

SEQ ID NO: 38166 - DNA, 30 bp, Homo sapiens
  source 1..30: mol_type = genomic DNA
ggctcgttggtctaggggtatgattctcgg

SEQ ID NO: 38167 - DNA, 31 bp, Homo sapiens; identical to SEQ ID NO: 18458
  source 1..31: mol_type = genomic DNA

SEQ ID NO: 38168 - DNA, 32 bp, Homo sapiens; identical to SEQ ID NO: 18459
  source 1..32: mol_type = genomic DNA

SEQ ID NO: 38169 - DNA, 33 bp, Homo sapiens; identical to SEQ ID NO: 18460
  source 1..33: mol_type = genomic DNA

SEQ ID NO: 38170 - DNA, 34 bp, Homo sapiens; identical to SEQ ID NO: 18461
  source 1..34: mol_type = genomic DNA

SEQ ID NO: 38171 - DNA, 35 bp, Homo sapiens; identical to SEQ ID NO: 18462
  source 1..35: mol_type = genomic DNA

SEQ ID NO: 38172 - DNA, 31 bp, Homo sapiens; identical to SEQ ID NO: 18467
  source 1..31: mol_type = genomic DNA

SEQ ID NO: 38173 - DNA, 32 bp, Homo sapiens; identical to SEQ ID NO: 18468
  source 1..32: mol_type = genomic DNA

SEQ ID NO: 38174 - DNA, 19 bp, Homo sapiens
  source 1..19: mol_type = genomic DNA
ggctctgtggcgcaatgga

SEQ ID NO: 38175 - DNA, 20 bp, Homo sapiens
  source 1..20: mol_type = genomic DNA
ggctctgtggcgcaatggat

SEQ ID NO: 38176 - DNA, 27 bp, Homo sapiens
  source 1..27: mol_type = genomic DNA
ggctctgtggcgcaatggatagcgcat

SEQ ID NO: 38177 - DNA, 32 bp, Homo sapiens; identical to SEQ ID NO: 18474
  source 1..32: mol_type = genomic DNA

SEQ ID NO: 38178 - DNA, 33 bp, Homo sapiens; identical to SEQ ID NO: 18475
  source 1..33: mol_type = genomic DNA

SEQ ID NO: 38179 - DNA, 20 bp, Homo sapiens
  source 1..20: mol_type = genomic DNA
ggctctgtggcttagttggc

SEQ ID NO: 38180 - DNA, 20 bp, Homo sapiens
  source 1..20: mol_type = genomic DNA
ggctgagtgaagcattggac

SEQ ID NO: 38181 - DNA, 32 bp, Homo sapiens
  source 1..32: mol_type = genomic DNA
ggctgtatagctcagtggtagagcatttgact

SEQ ID NO: 38182 - DNA, 25 bp, Homo sapiens
  source 1..25: mol_type = genomic DNA
ggctgtgatggccgagtggttaagg

SEQ ID NO: 38183 - DNA, 26 bp, Homo sapiens
  source 1..26: mol_type = genomic DNA
ggctgtgatggccgagtggttaaggc

SEQ ID NO: 38184 - DNA, 24 bp, Homo sapiens
  source 1..24: mol_type = genomic DNA
ggctgttaaccgaaaggttggtgg

SEQ ID NO: 38185 - DNA, 26 bp, Homo sapiens
  source 1..26: mol_type = genomic DNA
ggctgttaaccgaaaggttggtggtt

SEQ ID NO: 38186 - DNA, 26 bp, Homo sapiens
  source 1..26: mol_type = genomic DNA
gggagaccggggttcaattccccgac

SEQ ID NO: 38187 - DNA, 30 bp, Homo sapiens; identical to SEQ ID NO: 18507
  source 1..30: mol_type = genomic DNA

SEQ ID NO: 38188 - DNA, 31 bp, Homo sapiens; identical to SEQ ID NO: 18508
  source 1..31: mol_type = genomic DNA

SEQ ID NO: 38189 - DNA, 32 bp, Homo sapiens; identical to SEQ ID NO: 18509
  source 1..32: mol_type = genomic DNA

SEQ ID NO: 38190 - DNA, 33 bp, Homo sapiens; identical to SEQ ID NO: 18510
  source 1..33: mol_type = genomic DNA

SEQ ID NO: 38191 - DNA, 34 bp, Homo sapiens; identical to SEQ ID NO: 18511
  source 1..34: mol_type = genomic DNA

SEQ ID NO: 38192 - DNA, 35 bp, Homo sapiens; identical to SEQ ID NO: 18512
  source 1..35: mol_type = genomic DNA

SEQ ID NO: 38193 - DNA, 16 bp, Homo sapiens
  source 1..16: mol_type = genomic DNA
gggagaccggggttcg

SEQ ID NO: 38194 - DNA, 33 bp, Homo sapiens
  source 1..33: mol_type = genomic DNA
gggagaccggggttcgattccccaacggggagc

SEQ ID NO: 38195 - DNA, 26 bp, Homo sapiens
  source 1..26: mol_type = genomic DNA
gggagaccggggttcgattccccgac

SEQ ID NO: 38196 - DNA, 27 bp, Homo sapiens
  source 1..27: mol_type = genomic DNA
gggagaccggggttcgattccccgacg

SEQ ID NO: 38197 - DNA, 29 bp, Homo sapiens
  source 1..29: mol_type = genomic DNA
gggagaccggggttcgattccccgacggg

SEQ ID NO: 38198 - DNA, 30 bp, Homo sapiens; identical to SEQ ID NO: 18519
  source 1..30: mol_type = genomic DNA

SEQ ID NO: 38199 - DNA, 31 bp, Homo sapiens; identical to SEQ ID NO: 18520
  source 1..31: mol_type = genomic DNA

SEQ ID NO: 38200 - DNA, 32 bp, Homo sapiens; identical to SEQ ID NO: 18521
  source 1..32: mol_type = genomic DNA

SEQ ID NO: 38201 - DNA, 33 bp, Homo sapiens; identical to SEQ ID NO: 18522
  source 1..33: mol_type = genomic DNA

SEQ ID NO: 38202 - DNA, 34 bp, Homo sapiens; identical to SEQ ID NO: 18523
  source 1..34: mol_type = genomic DNA

SEQ ID NO: 38203 - DNA, 35 bp, Homo sapiens; identical to SEQ ID NO: 18524
  source 1..35: mol_type = genomic DNA

SEQ ID NO: 38204 - DNA, 16 bp, Homo sapiens
  source 1..16: mol_type = genomic DNA
gggagagcattagact

SEQ ID NO: 38205 - DNA, 18 bp, Homo sapiens
  source 1..18: mol_type = genomic DNA
gggagagcattagactga

SEQ ID NO: 38206 - DNA, 16 bp, Homo sapiens
  source 1..16: mol_type = genomic DNA
gggagagcgttagact

SEQ ID NO: 38207 - DNA, 16 bp, Homo sapiens
  source 1..16: mol_type = genomic DNA
gggaggcccgggttcg

SEQ ID NO: 38208 - DNA, 25 bp, Homo sapiens
  source 1..25: mol_type = genomic DNA
gggaggcccgggttcgattcccggc

SEQ ID NO: 38209 - DNA, 32 bp, Homo sapiens
  source 1..32: mol_type = genomic DNA
gggaggcccgggttcgattcccggccaatgca

SEQ ID NO: 38210 - DNA, 33 bp, Homo sapiens; identical to SEQ ID NO: 18529
  source 1..33: mol_type = genomic DNA

SEQ ID NO: 38211 - DNA, 16 bp, Homo sapiens
  source 1..16: mol_type = genomic DNA
gggatgggttcgattc

SEQ ID NO: 38212 - DNA, 16 bp, Homo sapiens
  source 1..16: mol_type = genomic DNA
gggatgtagctcagtg

SEQ ID NO: 38213 - DNA, 17 bp, Homo sapiens
  source 1..17: mol_type = genomic DNA
gggatgtagctcagtgg

SEQ ID NO: 38214 - DNA, 18 bp, Homo sapiens
  source 1..18: mol_type = genomic DNA
gggatgtagctcagtggt

SEQ ID NO: 38215 - DNA, 19 bp, Homo sapiens
  source 1..19: mol_type = genomic DNA
gggatgtagctcagtggta

SEQ ID NO: 38216 - DNA, 20 bp, Homo sapiens
  source 1..20: mol_type = genomic DNA
gggatgtagctcagtggtag

SEQ ID NO: 38217 - DNA, 21 bp, Homo sapiens
  source 1..21: mol_type = genomic DNA
gggatgtagctcagtggtaga

SEQ ID NO: 38218 - DNA, 22 bp, Homo sapiens
  source 1..22: mol_type = genomic DNA
gggatgtagctcagtggtagag

SEQ ID NO: 38219 - DNA, 25 bp, Homo sapiens
  source 1..25: mol_type = genomic DNA
gggatgtagctcagtggtagagcgc

SEQ ID NO: 38220 - DNA, 19 bp, Homo sapiens
  source 1..19: mol_type = genomic DNA
gggattgtgggttcgagtc

SEQ ID NO: 38221 - DNA, 20 bp, Homo sapiens
  source 1..20: mol_type = genomic DNA
gggattgtgggttcgagtcc

SEQ ID NO: 38222 - DNA, 21 bp, Homo sapiens
  source 1..21: mol_type = genomic DNA
gggattgtgggttcgagtccc

SEQ ID NO: 38223 - DNA, 22 bp, Homo sapiens
  source 1..22: mol_type = genomic DNA
gggattgtgggttcgagtccca

SEQ ID NO: 38224 - DNA, 24 bp, Homo sapiens
  source 1..24: mol_type = genomic DNA
gggattgtgggttcgagtcccacc

SEQ ID NO: 38225 - DNA, 28 bp, Homo sapiens
  source 1..28: mol_type = genomic DNA
gggattgtgggttcgagtcccacccggg

SEQ ID NO: 38226 - DNA, 29 bp, Homo sapiens
  source 1..29: mol_type = genomic DNA
gggattgtgggttcgagtcccacccgggg

SEQ ID NO: 38227 - DNA, 30 bp, Homo sapiens; identical to SEQ ID NO: 18559
  source 1..30: mol_type = genomic DNA

SEQ ID NO: 38228 - DNA, 31 bp, Homo sapiens; identical to SEQ ID NO: 18560
  source 1..31: mol_type = genomic DNA

SEQ ID NO: 38229 - DNA, 31 bp, Homo sapiens; identical to SEQ ID NO: 18561
  source 1..31: mol_type = genomic DNA

SEQ ID NO: 38230 - DNA, 24 bp, Homo sapiens
  source 1..24: mol_type = genomic DNA
gggattgtgggttcgagtcccatc

SEQ ID NO: 38231 - DNA, 26 bp, Homo sapiens
  source 1..26: mol_type = genomic DNA
gggattgtgggttcgagtcccatctg

SEQ ID NO: 38232 - DNA, 31 bp, Homo sapiens; identical to SEQ ID NO: 18565
  source 1..31: mol_type = genomic DNA

SEQ ID NO: 38233 - DNA, 32 bp, Homo sapiens; identical to SEQ ID NO: 18566
  source 1..32: mol_type = genomic DNA

SEQ ID NO: 38234 - DNA, 33 bp, Homo sapiens; identical to SEQ ID NO: 18567
  source 1..33: mol_type = genomic DNA

SEQ ID NO: 38235 - DNA, 34 bp, Homo sapiens; identical to SEQ ID NO: 18568
  source 1..34: mol_type = genomic DNA

SEQ ID NO: 38236 - DNA, 30 bp, Homo sapiens
  source 1..30: mol_type = genomic DNA
gggattgtgggttcgagtcccatctgggtc

SEQ ID NO: 38237 - DNA, 32 bp, Homo sapiens; identical to SEQ ID NO: 18569
  source 1..32: mol_type = genomic DNA

SEQ ID NO: 38238 - DNA, 33 bp, Homo sapiens; identical to SEQ ID NO: 18570
  source 1..33: mol_type = genomic DNA

SEQ ID NO: 38239 - DNA, 34 bp, Homo sapiens; identical to SEQ ID NO: 18571
  source 1..34: mol_type = genomic DNA

SEQ ID NO: 38240 - DNA, 18 bp, Homo sapiens
  source 1..18: mol_type = genomic DNA
gggccagtggcgcaatgg

SEQ ID NO: 38241 - DNA, 19 bp, Homo sapiens
  source 1..19: mol_type = genomic DNA
gggccagtggcgcaatgga

SEQ ID NO: 38242 - DNA, 20 bp, Homo sapiens
  source 1..20: mol_type = genomic DNA
gggccagtggcgcaatggat

SEQ ID NO: 38243 - DNA, 23 bp, Homo sapiens
  source 1..23: mol_type = genomic DNA
gggccagtggcgcaatggataac

SEQ ID NO: 38244 - DNA, 24 bp, Homo sapiens
  source 1..24: mol_type = genomic DNA
gggccagtggcgcaatggataacg

SEQ ID NO: 38245 - DNA, 25 bp, Homo sapiens
  source 1..25: mol_type = genomic DNA
gggccagtggcgcaatggataacgc

SEQ ID NO: 38246 - DNA, 32 bp, Homo sapiens; identical to SEQ ID NO: 18578
  source 1..32: mol_type = genomic DNA

SEQ ID NO: 38247 - DNA, 33 bp, Homo sapiens; identical to SEQ ID NO: 18579
  source 1..33: mol_type = genomic DNA

SEQ ID NO: 38248 - DNA, 17 bp, Homo sapiens
  source 1..17: mol_type = genomic DNA
gggcccataccccgaaa

SEQ ID NO: 38249 - DNA, 18 bp, Homo sapiens
  source 1..18: mol_type = genomic DNA
gggcccataccccgaaaa

SEQ ID NO: 38250 - DNA, 26 bp, Homo sapiens
  source 1..26: mol_type = genomic DNA
gggcccataccccgaaaatgttggtt

SEQ ID NO: 38251 - DNA, 46 bp, Homo sapiens; identical to SEQ ID NO: 18613
  source 1..46: mol_type = genomic DNA

SEQ ID NO: 38252 - DNA, 32 bp, Homo sapiens
  source 1..32: mol_type = genomic DNA
gggcgtatagctcaggggtagagcatttgact

SEQ ID NO: 38253 - DNA, 25 bp, Homo sapiens
  source 1..25: mol_type = genomic DNA
gggctcacatcaccccataaacacc

SEQ ID NO: 38254 - DNA, 26 bp, Homo sapiens
  source 1..26: mol_type = genomic DNA
gggctcacatcaccccataaacacca

SEQ ID NO: 38255 - DNA, 16 bp, Homo sapiens
  source 1..16: mol_type = genomic DNA
ggggaattagctcaaa

SEQ ID NO: 38256 - DNA, 19 bp, Homo sapiens
  source 1..19: mol_type = genomic DNA
ggggaattagctcaaatgg

SEQ ID NO: 38257 - DNA, 20 bp, Homo sapiens
  source 1..20: mol_type = genomic DNA
ggggaattagctcaaatggt

SEQ ID NO: 38258 - DNA, 23 bp, Homo sapiens
  source 1..23: mol_type = genomic DNA
ggggaattagctcaaatggtaga

SEQ ID NO: 38259 - DNA, 25 bp, Homo sapiens
  source 1..25: mol_type = genomic DNA
ggggaattagctcaaatggtagagc

SEQ ID NO: 38260 - DNA, 32 bp, Homo sapiens; identical to SEQ ID NO: 18633
  source 1..32: mol_type = genomic DNA

SEQ ID NO: 38261 - DNA, 33 bp, Homo sapiens; identical to SEQ ID NO: 18634
  source 1..33: mol_type = genomic DNA

SEQ ID NO: 38262 - DNA, 33 bp, Homo sapiens; identical to SEQ ID NO: 18635
  source 1..33: mol_type = genomic DNA

SEQ ID NO: 38263 - DNA, 33 bp, Homo sapiens
  source 1..33: mol_type = genomic DNA
ggggaattagctcaagtggtagagcgcttgctt

SEQ ID NO: 38264 - DNA, 16 bp, Homo sapiens
  source 1..16: mol_type = genomic DNA
ggggatgtagctcagt

SEQ ID NO: 38265 - DNA, 17 bp, Homo sapiens
  source 1..17: mol_type = genomic DNA
ggggatgtagctcagtg

SEQ ID NO: 38266 - DNA, 18 bp, Homo sapiens
  source 1..18: mol_type = genomic DNA
ggggatgtagctcagtgg

SEQ ID NO: 38267 - DNA, 19 bp, Homo sapiens
  source 1..19: mol_type = genomic DNA
ggggatgtagctcagtggt

SEQ ID NO: 38268 - DNA, 20 bp, Homo sapiens
  source 1..20: mol_type = genomic DNA
ggggatgtagctcagtggta

SEQ ID NO: 38269 - DNA, 21 bp, Homo sapiens
  source 1..21: mol_type = genomic DNA
ggggatgtagctcagtggtag

SEQ ID NO: 38270 - DNA, 22 bp, Homo sapiens
  source 1..22: mol_type = genomic DNA
ggggatgtagctcagtggtaga

SEQ ID NO: 38271 - DNA, 23 bp, Homo sapiens
  source 1..23: mol_type = genomic DNA
ggggatgtagctcagtggtagag

SEQ ID NO: 38272 - DNA, 24 bp, Homo sapiens
  source 1..24: mol_type = genomic DNA
ggggatgtagctcagtggtagagc

SEQ ID NO: 38273 - DNA, 25 bp, Homo sapiens
  source 1..25: mol_type = genomic DNA
ggggatgtagctcagtggtagagcg

SEQ ID NO: 38274 - DNA, 26 bp, Homo sapiens
  source 1..26: mol_type = genomic DNA
ggggatgtagctcagtggtagagcgc

SEQ ID NO: 38275 - DNA, 27 bp, Homo sapiens
  source 1..27: mol_type = genomic DNA
ggggatgtagctcagtggtagagcgca

SEQ ID NO: 38276 - DNA, 28 bp, Homo sapiens
  source 1..28: mol_type = genomic DNA
ggggatgtagctcagtggtagagcgcat

SEQ ID NO: 38277 - DNA, 29 bp, Homo sapiens
  source 1..29: mol_type = genomic DNA
ggggatgtagctcagtggtagagcgcatg

SEQ ID NO: 38278 - DNA, 30 bp, Homo sapiens; identical to SEQ ID NO: 18649
  source 1..30: mol_type = genomic DNA

SEQ ID NO: 38279 - DNA, 31 bp, Homo sapiens; identical to SEQ ID NO: 18650
  source 1..31: mol_type = genomic DNA

SEQ ID NO: 38280 - DNA, 32 bp, Homo sapiens; identical to SEQ ID NO: 18651
  source 1..32: mol_type = genomic DNA

SEQ ID NO: 38281 - DNA, 27 bp, Homo sapiens
  source 1..27: mol_type = genomic DNA
ggggatgtagctcagtggtagagcgcg

SEQ ID NO: 38282 - DNA, 28 bp, Homo sapiens
  source 1..28: mol_type = genomic DNA
ggggatgtagctcagtggtagagcgcgc

SEQ ID NO: 38283 - DNA, 29 bp, Homo sapiens
  source 1..29: mol_type = genomic DNA
ggggatgtagctcagtggtagagcgcgcg

SEQ ID NO: 38284 - DNA, 30 bp, Homo sapiens; identical to SEQ ID NO: 18658
  source 1..30: mol_type = genomic DNA

SEQ ID NO: 38285 - DNA, 31 bp, Homo sapiens; identical to SEQ ID NO: 18659
  source 1..31: mol_type = genomic DNA

SEQ ID NO: 38286 - DNA, 32 bp, Homo sapiens; identical to SEQ ID NO: 18660
  source 1..32: mol_type = genomic DNA

SEQ ID NO: 38287 - DNA, 22 bp, Homo sapiens
  source 1..22: mol_type = genomic DNA
ggggattagctcaaatggtaga

SEQ ID NO: 38288 - DNA, 31 bp, Homo sapiens
  source 1..31: mol_type = genomic DNA
ggggattagctcaaatggtagagcgctcgct

SEQ ID NO: 38289 - DNA, 32 bp, Homo sapiens; identical to SEQ ID NO: 18665
  source 1..32: mol_type = genomic DNA

SEQ ID NO: 38290 - DNA, 16 bp, Homo sapiens
  source 1..16: mol_type = genomic DNA
ggggattgtgggttcg

SEQ ID NO: 38291 - DNA, 21 bp, Homo sapiens
  source 1..21: mol_type = genomic DNA
ggggattgtgggttcgagtcc

SEQ ID NO: 38292 - DNA, 22 bp, Homo sapiens
  source 1..22: mol_type = genomic DNA
ggggattgtgggttcgagtccc

SEQ ID NO: 38293 - DNA, 23 bp, Homo sapiens
  source 1..23: mol_type = genomic DNA
ggggattgtgggttcgagtccca

SEQ ID NO: 38294 - DNA, 25 bp, Homo sapiens
  source 1..25: mol_type = genomic DNA
ggggattgtgggttcgagtcccatc

SEQ ID NO: 38295 - DNA, 32 bp, Homo sapiens; identical to SEQ ID NO: 18672
  source 1..32: mol_type = genomic DNA

SEQ ID NO: 38296 - DNA, 33 bp, Homo sapiens; identical to SEQ ID NO: 18673
  source 1..33: mol_type = genomic DNA

SEQ ID NO: 38297 - DNA, 34 bp, Homo sapiens; identical to SEQ ID NO: 18674
  source 1..34: mol_type = genomic DNA

SEQ ID NO: 38298 - DNA, 35 bp, Homo sapiens; identical to SEQ ID NO: 18675
  source 1..35: mol_type = genomic DNA

SEQ ID NO: 38299 - DNA, 16 bp, Homo sapiens
  source 1..16: mol_type = genomic DNA
gggggattagctcaaa

SEQ ID NO: 38300 - DNA, 19 bp, Homo sapiens
  source 1..19: mol_type = genomic DNA
gggggattagctcaaatgg

SEQ ID NO: 38301 - DNA, 20 bp, Homo sapiens
  source 1..20: mol_type = genomic DNA
gggggattagctcaaatggt

SEQ ID NO: 38302 - DNA, 22 bp, Homo sapiens
  source 1..22: mol_type = genomic DNA
gggggattagctcaaatggtag

SEQ ID NO: 38303 - DNA, 23 bp, Homo sapiens
  source 1..23: mol_type = genomic DNA
gggggattagctcaaatggtaga

SEQ ID NO: 38304 - DNA, 24 bp, Homo sapiens
  source 1..24: mol_type = genomic DNA
gggggattagctcaaatggtagag

SEQ ID NO: 38305 - DNA, 25 bp, Homo sapiens
  source 1..25: mol_type = genomic DNA
gggggattagctcaaatggtagagc

SEQ ID NO: 38306 - DNA, 29 bp, Homo sapiens
  source 1..29: mol_type = genomic DNA
gggggattagctcaaatggtagagcgctc

SEQ ID NO: 38307 - DNA, 31 bp, Homo sapiens; identical to SEQ ID NO: 18691
  source 1..31: mol_type = genomic DNA

SEQ ID NO: 38308 - DNA, 32 bp, Homo sapiens; identical to SEQ ID NO: 18692
  source 1..32: mol_type = genomic DNA

SEQ ID NO: 38309 - DNA, 33 bp, Homo sapiens; identical to SEQ ID NO: 18693
  source 1..33: mol_type = genomic DNA

SEQ ID NO: 38310 - DNA, 31 bp, Homo sapiens; identical to SEQ ID NO: 18699
  source 1..31: mol_type = genomic DNA

SEQ ID NO: 38311 - DNA, 32 bp, Homo sapiens; identical to SEQ ID NO: 18700
  source 1..32: mol_type = genomic DNA

SEQ ID NO: 38312 - DNA, 33 bp, Homo sapiens; identical to SEQ ID NO: 18701
  source 1..33: mol_type = genomic DNA

SEQ ID NO: 38313 - DNA, 34 bp, Homo sapiens; identical to SEQ ID NO: 18702
  source 1..34: mol_type = genomic DNA

SEQ ID NO: 38314 - DNA, 33 bp, Homo sapiens
  source 1..33: mol_type = genomic DNA
gggggcgtgggttcgaatcccaccgctgccacc

SEQ ID NO: 38315 - DNA, 33 bp, Homo sapiens
  source 1..33: mol_type = genomic DNA
ggggggtgtagctcagtggtagagcgcgtgctt

SEQ ID NO: 38316 - DNA, 16 bp, Homo sapiens
  source 1..16: mol_type = genomic DNA
gggggtatagctcagc

SEQ ID NO: 38317 - DNA, 16 bp, Homo sapiens
  source 1..16: mol_type = genomic DNA
gggggtatagctcagg

SEQ ID NO: 38318 - DNA, 17 bp, Homo sapiens
  source 1..17: mol_type = genomic DNA
gggggtatagctcaggg

SEQ ID NO: 38319 - DNA, 18 bp, Homo sapiens
  source 1..18: mol_type = genomic DNA
gggggtatagctcagggg

SEQ ID NO: 38320 - DNA, 31 bp, Homo sapiens; identical to SEQ ID NO: 18723
  source 1..31: mol_type = genomic DNA

SEQ ID NO: 38321 - DNA, 32 bp, Homo sapiens; identical to SEQ ID NO: 18724
  source 1..32: mol_type = genomic DNA

SEQ ID NO: 38322 - DNA, 33 bp, Homo sapiens; identical to SEQ ID NO: 18725
  source 1..33: mol_type = genomic DNA

SEQ ID NO: 38323 - DNA, 34 bp, Homo sapiens; identical to SEQ ID NO: 18726
  source 1..34: mol_type = genomic DNA

SEQ ID NO: 38324 - DNA, 33 bp, Homo sapiens; identical to SEQ ID NO: 18729
  source 1..33: mol_type = genomic DNA

SEQ ID NO: 38325 - DNA, 16 bp, Homo sapiens
  source 1..16: mol_type = genomic DNA
gggggtatagctcagt

SEQ ID NO: 38326 - DNA, 17 bp, Homo sapiens
  source 1..17: mol_type = genomic DNA
gggggtatagctcagtg

SEQ ID NO: 38327 - DNA, 18 bp, Homo sapiens
  source 1..18: mol_type = genomic DNA
gggggtatagctcagtgg

SEQ ID NO: 38328 - DNA, 33 bp, Homo sapiens; identical to SEQ ID NO: 18737
  source 1..33: mol_type = genomic DNA

SEQ ID NO: 38329 - DNA, 34 bp, Homo sapiens; identical to SEQ ID NO: 18738
  source 1..34: mol_type = genomic DNA

SEQ ID NO: 38330 - DNA, 35 bp, Homo sapiens; identical to SEQ ID NO: 18739
  source 1..35: mol_type = genomic DNA

SEQ ID NO: 38331 - DNA, 19 bp, Homo sapiens
  source 1..19: mol_type = genomic DNA
gggggtatagctcagtggt

SEQ ID NO: 38332 - DNA, 22 bp, Homo sapiens
  source 1..22: mol_type = genomic DNA
gggggtatagctcagtggtaga

SEQ ID NO: 38333 - DNA, 24 bp, Homo sapiens
  source 1..24: mol_type = genomic DNA
gggggtatagctcagtggtagagc

SEQ ID NO: 38334 - DNA, 25 bp, Homo sapiens
  source 1..25: mol_type = genomic DNA
gggggtatagctcagtggtagagca

SEQ ID NO: 38335 - DNA, 27 bp, Homo sapiens
  source 1..27: mol_type = genomic DNA
gggggtatagctcagtggtagagcatt

SEQ ID NO: 38336 - DNA, 29 bp, Homo sapiens
  source 1..29: mol_type = genomic DNA
gggggtatagctcagtggtagagcatttg

SEQ ID NO: 38337 - DNA, 31 bp, Homo sapiens; identical to SEQ ID NO: 18753
  source 1..31: mol_type = genomic DNA

SEQ ID NO: 38338 - DNA, 32 bp, Homo sapiens; identical to SEQ ID NO: 18754
  source 1..32: mol_type = genomic DNA

SEQ ID NO: 38339 - DNA, 33 bp, Homo sapiens; identical to SEQ ID NO: 18755
  source 1..33: mol_type = genomic DNA

SEQ ID NO: 38340 - DNA, 34 bp, Homo sapiens; identical to SEQ ID NO: 18756
  source 1..34: mol_type = genomic DNA

SEQ ID NO: 38341 - DNA, 35 bp, Homo sapiens; identical to SEQ ID NO: 18757
  source 1..35: mol_type = genomic DNA

SEQ ID NO: 38342 - DNA, 30 bp, Homo sapiens
  source 1..30: mol_type = genomic DNA
gggggtatagctcagtggtagagcgcgtgc

SEQ ID NO: 38343 - DNA, 31 bp, Homo sapiens
  source 1..31: mol_type = genomic DNA
gggggtatagctcagtggtagagcgcgtgct

SEQ ID NO: 38344 - DNA, 32 bp, Homo sapiens; identical to SEQ ID NO: 18761
  source 1..32: mol_type = genomic DNA

SEQ ID NO: 38345 - DNA, 25 bp, Homo sapiens
  source 1..25: mol_type = genomic DNA
gggggtatagcttagcggtagagca

SEQ ID NO: 38346 - DNA, 32 bp, Homo sapiens; identical to SEQ ID NO: 18765
  source 1..32: mol_type = genomic DNA

SEQ ID NO: 38347 - DNA, 33 bp, Homo sapiens; identical to SEQ ID NO: 18766
  source 1..33: mol_type = genomic DNA

SEQ ID NO: 38348 - DNA, 34 bp, Homo sapiens; identical to SEQ ID NO: 18767
  source 1..34: mol_type = genomic DNA

SEQ ID NO: 38349 - DNA, 24 bp, Homo sapiens
  source 1..24: mol_type = genomic DNA
gggggtcgattccccgacggggag

SEQ ID NO: 38350 - DNA, 25 bp, Homo sapiens
  source 1..25: mol_type = genomic DNA
gggggtcgattccccgacggggagc

SEQ ID NO: 38351 - DNA, 26 bp, Homo sapiens
  source 1..26: mol_type = genomic DNA
gggggtcgattccccgacggggagcc

SEQ ID NO: 38352 - DNA, 16 bp, Homo sapiens
  source 1..16: mol_type = genomic DNA
gggggtgtagctcagt

SEQ ID NO: 38353 - DNA, 17 bp, Homo sapiens
  source 1..17: mol_type = genomic DNA
gggggtgtagctcagtg

SEQ ID NO: 38354 - DNA, 18 bp, Homo sapiens
  source 1..18: mol_type = genomic DNA
gggggtgtagctcagtgg

SEQ ID NO: 38355 - DNA, 19 bp, Homo sapiens
  source 1..19: mol_type = genomic DNA
gggggtgtagctcagtggt

SEQ ID NO: 38356 - DNA, 20 bp, Homo sapiens
  source 1..20: mol_type = genomic DNA
gggggtgtagctcagtggta

SEQ ID NO: 38357 - DNA, 21 bp, Homo sapiens
  source 1..21: mol_type = genomic DNA
gggggtgtagctcagtggtag

SEQ ID NO: 38358 - DNA, 22 bp, Homo sapiens
  source 1..22: mol_type = genomic DNA
gggggtgtagctcagtggtaga

SEQ ID NO: 38359 - DNA, 23 bp, Homo sapiens
  source 1..23: mol_type = genomic DNA
gggggtgtagctcagtggtagag

SEQ ID NO: 38360 - DNA, 24 bp, Homo sapiens
  source 1..24: mol_type = genomic DNA
gggggtgtagctcagtggtagagc

SEQ ID NO: 38361 - DNA, 25 bp, Homo sapiens
  source 1..25: mol_type = genomic DNA
gggggtgtagctcagtggtagagca

SEQ ID NO: 38362 - DNA, 31 bp, Homo sapiens; identical to SEQ ID NO: 18788
  source 1..31: mol_type = genomic DNA

SEQ ID NO: 38363 - DNA, 32 bp, Homo sapiens; identical to SEQ ID NO: 18789
  source 1..32: mol_type = genomic DNA

SEQ ID NO: 38364 - DNA, 33 bp, Homo sapiens; identical to SEQ ID NO: 18790
  source 1..33: mol_type = genomic DNA

SEQ ID NO: 38365 - DNA, 34 bp, Homo sapiens; identical to SEQ ID NO: 18791
  source 1..34: mol_type = genomic DNA

SEQ ID NO: 38366 - DNA, 25 bp, Homo sapiens
  source 1..25: mol_type = genomic DNA
gggggtgtagctcagtggtagagcg

SEQ ID NO: 38367 - DNA, 26 bp, Homo sapiens
  source 1..26: mol_type = genomic DNA
gggggtgtagctcagtggtagagcgc

SEQ ID NO: 38368 - DNA, 28 bp, Homo sapiens
  source 1..28: mol_type = genomic DNA
gggggtgtagctcagtggtagagcgcat

SEQ ID NO: 38369 - DNA, 31 bp, Homo sapiens; identical to SEQ ID NO: 18794
  source 1..31: mol_type = genomic DNA

SEQ ID NO: 38370 - DNA, 32 bp, Homo sapiens; identical to SEQ ID NO: 18795
  source 1..32: mol_type = genomic DNA

SEQ ID NO: 38371 - DNA, 27 bp, Homo sapiens
  source 1..27: mol_type = genomic DNA
gggggtgtagctcagtggtagagcgcg

SEQ ID NO: 38372 - DNA, 28 bp, Homo sapiens
  source 1..28: mol_type = genomic DNA
gggggtgtagctcagtggtagagcgcgt

SEQ ID NO: 38373 - DNA, 29 bp, Homo sapiens
  source 1..29: mol_type = genomic DNA
gggggtgtagctcagtggtagagcgcgtg

SEQ ID NO: 38374 - DNA, 30 bp, Homo sapiens; identical to SEQ ID NO: 18801
  source 1..30: mol_type = genomic DNA

SEQ ID NO: 38375 - DNA, 31 bp, Homo sapiens; identical to SEQ ID NO: 18802
  source 1..31: mol_type = genomic DNA

SEQ ID NO: 38376 - DNA, 32 bp, Homo sapiens; identical to SEQ ID NO: 18803
  source 1..32: mol_type = genomic DNA

SEQ ID NO: 38377 - DNA, 33 bp, Homo sapiens; identical to SEQ ID NO: 18805
  source 1..33: mol_type = genomic DNA

SEQ ID NO: 38378 - DNA, 35 bp, Homo sapiens; identical to SEQ ID NO: 18806
  source 1..35: mol_type = genomic DNA

SEQ ID NO: 38379 - DNA, 18 bp, Homo sapiens
  source 1..18: mol_type = genomic DNA
ggggtagagcatttgact

SEQ ID NO: 38380 - DNA, 20 bp, Homo sapiens
  source 1..20: mol_type = genomic DNA
ggggtagagcatttgactgc

SEQ ID NO: 38381 - DNA, 16 bp, Homo sapiens
  source 1..16: mol_type = genomic DNA
ggggtatagctcaggg

SEQ ID NO: 38382 - DNA, 31 bp, Homo sapiens; identical to SEQ ID NO: 18818
  source 1..31: mol_type = genomic DNA

SEQ ID NO: 38383 - DNA, 16 bp, Homo sapiens
  source 1..16: mol_type = genomic DNA
ggggtatgattctcgc

SEQ ID NO: 38384 - DNA, 17 bp, Homo sapiens
  source 1..17: mol_type = genomic DNA
ggggtatgattctcgct

SEQ ID NO: 38385 - DNA, 18 bp, Homo sapiens
  source 1..18: mol_type = genomic DNA
ggggtatgattctcgctt

SEQ ID NO: 38386 - DNA, 16 bp, Homo sapiens
  source 1..16: mol_type = genomic DNA
ggggtatgattctcgg

SEQ ID NO: 38387 - DNA, 17 bp, Homo sapiens
  source 1..17: mol_type = genomic DNA
ggggtatgattctcggt

SEQ ID NO: 38388 - DNA, 18 bp, Homo sapiens
  source 1..18: mol_type = genomic DNA
ggggtatgattctcggtt

SEQ ID NO: 38389 - DNA, 23 bp, Homo sapiens
  source 1..23: mol_type = genomic DNA
ggggtcgattccccgacggggag

SEQ ID NO: 38390 - DNA, 24 bp, Homo sapiens
  source 1..24: mol_type = genomic DNA
ggggtcgattccccgacggggagc

SEQ ID NO: 38391 - DNA, 25 bp, Homo sapiens
  source 1..25: mol_type = genomic DNA
ggggtcgattccccgacggggagcc

SEQ ID NO: 38392 - DNA, 24 bp, Homo sapiens
  source 1..24: mol_type = genomic DNA
ggggtcgattccctgacggggagc

SEQ ID NO: 38393 - DNA, 31 bp, Homo sapiens
  source 1..31: mol_type = genomic DNA
ggggtcgcgagttcaaatctcgctggggcct

SEQ ID NO: 38394 - DNA, 32 bp, Homo sapiens; identical to SEQ ID NO: 18838
  source 1..32: mol_type = genomic DNA

SEQ ID NO: 38395 - DNA, 32 bp, Homo sapiens
  source 1..32: mol_type = genomic DNA
ggggtcgcgagttcaattctcgctggggcctc

SEQ ID NO: 38396 - DNA, 32 bp, Homo sapiens
  source 1..32: mol_type = genomic DNA
ggggtcgcgagttcgatcctcgctggggcctc

SEQ ID NO: 38397 - DNA, 17 bp, Homo sapiens
  source 1..17: mol_type = genomic DNA
ggggtgtagctcagtgg

SEQ ID NO: 38398 - DNA, 22 bp, Homo sapiens
  source 1..22: mol_type = genomic DNA
ggggtgtagctcagtggtagag

SEQ ID NO: 38399 - DNA, 31 bp, Homo sapiens; identical to SEQ ID NO: 18841
  source 1..31: mol_type = genomic DNA

SEQ ID NO: 38400 - DNA, 25 bp, Homo sapiens
  source 1..25: mol_type = genomic DNA
ggggttaggcctctttttaccacca

SEQ ID NO: 38401 - DNA, 25 bp, Homo sapiens
  source 1..25: mol_type = genomic DNA
ggggttcaagtccctgttcgggcgc

SEQ ID NO: 38402 - DNA, 24 bp, Homo sapiens
  source 1..24: mol_type = genomic DNA
ggggttcaattccccgacggggag

SEQ ID NO: 38403 - DNA, 25 bp, Homo sapiens
  source 1..25: mol_type = genomic DNA
ggggttcaattccccgacggggagc

SEQ ID NO: 38404 - DNA, 26 bp, Homo sapiens
  source 1..26: mol_type = genomic DNA
ggggttcaattccccgacggggagcc

SEQ ID NO: 38405 - DNA, 27 bp, Homo sapiens
  source 1..27: mol_type = genomic DNA
ggggttcaattccccgacggggagcca

SEQ ID NO: 38406 - DNA, 25 bp, Homo sapiens
  source 1..25: mol_type = genomic DNA
ggggttcgattccccaacggggagc

SEQ ID NO: 38407 - DNA, 26 bp, Homo sapiens
  source 1..26: mol_type = genomic DNA
ggggttcgattccccaacggggagcc

SEQ ID NO: 38408 - DNA, 21 bp, Homo sapiens
  source 1..21: mol_type = genomic DNA
ggggttcgattccccgacggg

SEQ ID NO: 38409 - DNA, 22 bp, Homo sapiens
  source 1..22: mol_type = genomic DNA
ggggttcgattccccgacgggg

SEQ ID NO: 38410 - DNA, 23 bp, Homo sapiens
  source 1..23: mol_type = genomic DNA
ggggttcgattccccgacgggga

SEQ ID NO: 38411 - DNA, 24 bp, Homo sapiens
  source 1..24: mol_type = genomic DNA
ggggttcgattccccgacggggag

SEQ ID NO: 38412 - DNA, 25 bp, Homo sapiens
  source 1..25: mol_type = genomic DNA
ggggttcgattccccgacggggagc

SEQ ID NO: 38413 - DNA, 26 bp, Homo sapiens
  source 1..26: mol_type = genomic DNA
ggggttcgattccccgacggggagcc

SEQ ID NO: 38414 - DNA, 27 bp, Homo sapiens
  source 1..27: mol_type = genomic DNA
ggggttcgattccccgacggggagcca

SEQ ID NO: 38415 - DNA, 17 bp, Homo sapiens
  source 1..17: mol_type = genomic DNA
gggtagagcatttgact

SEQ ID NO: 38416 - DNA, 16 bp, Homo sapiens
  source 1..16: mol_type = genomic DNA
gggtatagctcagggg

SEQ ID NO: 38417 - DNA, 32 bp, Homo sapiens; identical to SEQ ID NO: 18886
  source 1..32: mol_type = genomic DNA

SEQ ID NO: 38418 - DNA, 31 bp, Homo sapiens; identical to SEQ ID NO: 18902
  source 1..31: mol_type = genomic DNA

SEQ ID NO: 38419 - DNA, 32 bp, Homo sapiens; identical to SEQ ID NO: 18903
  source 1..32: mol_type = genomic DNA

SEQ ID NO: 38420 - DNA, 33 bp, Homo sapiens; identical to SEQ ID NO: 18904
  source 1..33: mol_type = genomic DNA

SEQ ID NO: 38421 - DNA, 16 bp, Homo sapiens
  source 1..16: mol_type = genomic DNA
gggtatgattctcgct

SEQ ID NO: 38422 - DNA, 17 bp, Homo sapiens
  source 1..17: mol_type = genomic DNA
gggtatgattctcgctt

SEQ ID NO: 38423 - DNA, 16 bp, Homo sapiens
  source 1..16: mol_type = genomic DNA
gggtatgattctcggt

SEQ ID NO: 38424 - DNA, 17 bp, Homo sapiens
  source 1..17: mol_type = genomic DNA
gggtatgattctcggtt

SEQ ID NO: 38425 - DNA, 28 bp, Homo sapiens
  source 1..28: mol_type = genomic DNA
gggtatgattctcggtttgggtccgaga

SEQ ID NO: 38426 - DNA, 29 bp, Homo sapiens
  source 1..29: mol_type = genomic DNA
gggtccagggttcaagtccctgttcgggc

SEQ ID NO: 38427 - DNA, 30 bp, Homo sapiens; identical to SEQ ID NO: 18925
  source 1..30: mol_type = genomic DNA

SEQ ID NO: 38428 - DNA, 31 bp, Homo sapiens; identical to SEQ ID NO: 18926
  source 1..31: mol_type = genomic DNA

SEQ ID NO: 38429 - DNA, 32 bp, Homo sapiens; identical to SEQ ID NO: 18927
  source 1..32: mol_type = genomic DNA

SEQ ID NO: 38430 - DNA, 23 bp, Homo sapiens
  source 1..23: mol_type = genomic DNA
gggtcgattccccgacggggagc

SEQ ID NO: 38431 - DNA, 24 bp, Homo sapiens
  source 1..24: mol_type = genomic DNA
gggtcgattccccgacggggagcc

SEQ ID NO: 38432 - DNA, 31 bp, Homo sapiens
  source 1..31: mol_type = genomic DNA
gggtcgcgagttcaaatctcgctggggcctc

SEQ ID NO: 38433 - DNA, 20 bp, Homo sapiens
  source 1..20: mol_type = genomic DNA
gggtcgtgggttcgagcccc

SEQ ID NO: 38434 - DNA, 29 bp, Homo sapiens
  source 1..29: mol_type = genomic DNA
gggtcgtgggttcgagccccacgttgggc

SEQ ID NO: 38435 - DNA, 30 bp, Homo sapiens; identical to SEQ ID NO: 18937
  source 1..30: mol_type = genomic DNA

SEQ ID NO: 38436 - DNA, 31 bp, Homo sapiens; identical to SEQ ID NO: 18938
  source 1..31: mol_type = genomic DNA

SEQ ID NO: 38437 - DNA, 32 bp, Homo sapiens; identical to SEQ ID NO: 18939
  source 1..32: mol_type = genomic DNA

SEQ ID NO: 38438 - DNA, 17 bp, Homo sapiens
  source 1..17: mol_type = genomic DNA
gggtgcgagaggtcccg

SEQ ID NO: 38439 - DNA, 40 bp, Homo sapiens; identical to SEQ ID NO: 18947
  source 1..40: mol_type = genomic DNA

SEQ ID NO: 38440 - DNA, 26 bp, Homo sapiens
  source 1..26: mol_type = genomic DNA
gggtggttcagtggtagaattctcgc

SEQ ID NO: 38441 - DNA, 27 bp, Homo sapiens
  source 1..27: mol_type = genomic DNA
gggtggttcagtggtagaattctcgcc

SEQ ID NO: 38442 - DNA, 28 bp, Homo sapiens
  source 1..28: mol_type = genomic DNA
gggtggttcagtggtagaattctcgcct

SEQ ID NO: 38443 - DNA, 31 bp, Homo sapiens; identical to SEQ ID NO: 18975
  source 1..31: mol_type = genomic DNA

SEQ ID NO: 38444 - DNA, 16 bp, Homo sapiens
  source 1..16: mol_type = genomic DNA
gggtgtagctcagtgg

SEQ ID NO: 38445 - DNA, 32 bp, Homo sapiens; identical to SEQ ID NO: 18983
  source 1..32: mol_type = genomic DNA

SEQ ID NO: 38446 - DNA, 28 bp, Homo sapiens
  source 1..28: mol_type = genomic DNA
gggtgtagctcagtggtagagcgcgtgc

SEQ ID NO: 38447 - DNA, 16 bp, Homo sapiens
  source 1..16: mol_type = genomic DNA
gggtgtgataggtggc

SEQ ID NO: 38448 - DNA, 17 bp, Homo sapiens
  source 1..17: mol_type = genomic DNA
gggtgtgataggtggca

SEQ ID NO: 38449 - DNA, 24 bp, Homo sapiens
  source 1..24: mol_type = genomic DNA
gggtgtgataggtggcacggagaa

SEQ ID NO: 38450 - DNA, 17 bp, Homo sapiens
  source 1..17: mol_type = genomic DNA
gggttagagcactggtc

SEQ ID NO: 38451 - DNA, 24 bp, Homo sapiens
  source 1..24: mol_type = genomic DNA
gggttcaagtccctgtccaggcgc

SEQ ID NO: 38452 - DNA, 22 bp, Homo sapiens
  source 1..22: mol_type = genomic DNA
gggttcaagtccctgttcgggc

SEQ ID NO: 38453 - DNA, 23 bp, Homo sapiens
  source 1..23: mol_type = genomic DNA
gggttcaagtccctgttcgggcg

SEQ ID NO: 38454 - DNA, 24 bp, Homo sapiens
  source 1..24: mol_type = genomic DNA
gggttcaagtccctgttcgggcgc

SEQ ID NO: 38455 - DNA, 25 bp, Homo sapiens
  source 1..25: mol_type = genomic DNA
gggttcaagtccctgttcgggcgcc

SEQ ID NO: 38456 - DNA, 25 bp, Homo sapiens
  source 1..25: mol_type = genomic DNA
gggttcaatccccggcacctccacc

SEQ ID NO: 38457 - DNA, 23 bp, Homo sapiens
  source 1..23: mol_type = genomic DNA
gggttcaattccccgacggggag

SEQ ID NO: 38458 - DNA, 24 bp, Homo sapiens
  source 1..24: mol_type = genomic DNA
gggttcaattccccgacggggagc

SEQ ID NO: 38459 - DNA, 25 bp, Homo sapiens
  source 1..25: mol_type = genomic DNA
gggttcaattccccgacggggagcc

SEQ ID NO: 38460 - DNA, 24 bp, Homo sapiens
  source 1..24: mol_type = genomic DNA
gggttcaattcccggtcagggaac

SEQ ID NO: 38461 - DNA, 23 bp, Homo sapiens
  source 1..23: mol_type = genomic DNA
gggttcgaaccccgtccgtgcct

SEQ ID NO: 38462 - DNA, 25 bp, Homo sapiens
  source 1..25: mol_type = genomic DNA
gggttcgaatcccaccagagtcgcc

SEQ ID NO: 38463 - DNA, 25 bp, Homo sapiens
  source 1..25: mol_type = genomic DNA
gggttcgaatcccaccgctgccacc

SEQ ID NO: 38464 - DNA, 25 bp, Homo sapiens
  source 1..25: mol_type = genomic DNA
gggttcgaatcccaccttcgtcgcc

SEQ ID NO: 38465 - DNA, 23 bp, Homo sapiens
  source 1..23: mol_type = genomic DNA
gggttcgaatcccagcggtgcct

SEQ ID NO: 38466 - DNA, 24 bp, Homo sapiens
  source 1..24: mol_type = genomic DNA
gggttcgaatcccatcctcgtcgc

SEQ ID NO: 38467 - DNA, 25 bp, Homo sapiens
  source 1..25: mol_type = genomic DNA
gggttcgaatcccatcctcgtcgcc

SEQ ID NO: 38468 - DNA, 23 bp, Homo sapiens
  source 1..23: mol_type = genomic DNA
gggttcgaatcccttcgtggttg

SEQ ID NO: 38469 - DNA, 24 bp, Homo sapiens
  source 1..24: mol_type = genomic DNA
gggttcgaatcccttcgtggttgc

SEQ ID NO: 38470 - DNA, 25 bp, Homo sapiens
  source 1..25: mol_type = genomic DNA
gggttcgaatcccttcgtggttgcc

SEQ ID NO: 38471 - DNA, 21 bp, Homo sapiens
  source 1..21: mol_type = genomic DNA
gggttcgactcccggtatggg

SEQ ID NO: 38472 - DNA, 22 bp, Homo sapiens
  source 1..22: mol_type = genomic DNA
gggttcgactcccggtatggga

SEQ ID NO: 38473 - DNA, 23 bp, Homo sapiens
  source 1..23: mol_type = genomic DNA
gggttcgactcccggtatgggaa

SEQ ID NO: 38474 - DNA, 24 bp, Homo sapiens
  source 1..24: mol_type = genomic DNA
gggttcgactcccggtatgggaac

SEQ ID NO: 38475 - DNA, 25 bp, Homo sapiens
  source 1..25: mol_type = genomic DNA
gggttcgactcccggtatgggaacc

SEQ ID NO: 38476 - DNA, 17 bp, Homo sapiens
  source 1..17: mol_type = genomic DNA
gggttcgactcccggtg

SEQ ID NO: 38477 - DNA, 18 bp, Homo sapiens
  source 1..18: mol_type = genomic DNA
gggttcgactcccggtgt

SEQ ID NO: 38478 - DNA, 19 bp, Homo sapiens
  source 1..19: mol_type = genomic DNA
gggttcgactcccggtgtg

SEQ ID NO: 38479 - DNA, 20 bp, Homo sapiens
  source 1..20: mol_type = genomic DNA
gggttcgactcccggtgtgg

SEQ ID NO: 38480 - DNA, 21 bp, Homo sapiens
  source 1..21: mol_type = genomic DNA
gggttcgactcccggtgtggg

SEQ ID NO: 38481 - DNA, 22 bp, Homo sapiens
  source 1..22: mol_type = genomic DNA
gggttcgactcccggtgtggga

SEQ ID NO: 38482 - DNA, 23 bp, Homo sapiens
  source 1..23: mol_type = genomic DNA
gggttcgactcccggtgtgggaa

SEQ ID NO: 38483 - DNA, 24 bp, Homo sapiens
  source 1..24: mol_type = genomic DNA
gggttcgactcccggtgtgggaac

SEQ ID NO: 38484 - DNA, 25 bp, Homo sapiens
  source 1..25: mol_type = genomic DNA
gggttcgactcccggtgtgggaacc

SEQ ID NO: 38485 - DNA, 26 bp, Homo sapiens
  source 1..26: mol_type = genomic DNA
gggttcgactcccggtgtgggaacca

SEQ ID NO: 38486 - DNA, 23 bp, Homo sapiens
  source 1..23: mol_type = genomic DNA
gggttcgagccccacgttgggcg

SEQ ID NO: 38487 - DNA, 24 bp, Homo sapiens
  source 1..24: mol_type = genomic DNA
gggttcgagccccacgttgggcgc

SEQ ID NO: 38488 - DNA, 25 bp, Homo sapiens
  source 1..25: mol_type = genomic DNA
gggttcgagccccacgttgggcgcc

SEQ ID NO: 38489 - DNA, 25 bp, Homo sapiens
  source 1..25: mol_type = genomic DNA
gggttcgagtcccatctggggtgcc

SEQ ID NO: 38490 - DNA, 26 bp, Homo sapiens
  source 1..26: mol_type = genomic DNA
gggttcgagtcccatctggggtgcca

SEQ ID NO: 38491 - DNA, 25 bp, Homo sapiens
  source 1..25: mol_type = genomic DNA
gggttcgagtcccatctgggtcgcc

SEQ ID NO: 38492 - DNA, 23 bp, Homo sapiens
  source 1..23: mol_type = genomic DNA
gggttcgagtcccttcgtggtcg

SEQ ID NO: 38493 - DNA, 24 bp, Homo sapiens
  source 1..24: mol_type = genomic DNA
gggttcgagtcccttcgtggtcgc

SEQ ID NO: 38494 - DNA, 25 bp, Homo sapiens
  source 1..25: mol_type = genomic DNA
gggttcgagtcccttcgtggtcgcc

SEQ ID NO: 38495 - DNA, 26 bp, Homo sapiens
  source 1..26: mol_type = genomic DNA
gggttcgagtcccttcgtggtcgcca

SEQ ID NO: 38496 - DNA, 16 bp, Homo sapiens
  source 1..16: mol_type = genomic DNA
gggttcgatccccggc

SEQ ID NO: 38497 - DNA, 17 bp, Homo sapiens
  source 1..17: mol_type = genomic DNA
gggttcgatccccggca

SEQ ID NO: 38498 - DNA, 24 bp, Homo sapiens
  source 1..24: mol_type = genomic DNA
gggttcgatccccggcatctccac

SEQ ID NO: 38499 - DNA, 25 bp, Homo sapiens
  source 1..25: mol_type = genomic DNA
gggttcgatccccggcatctccacc

SEQ ID NO: 38500 - DNA, 21 bp, Homo sapiens
  source 1..21: mol_type = genomic DNA
gggttcgatccccgtacgggc

SEQ ID NO: 38501 - DNA, 22 bp, Homo sapiens
  source 1..22: mol_type = genomic DNA
gggttcgatccccgtacgggcc

SEQ ID NO: 38502 - DNA, 23 bp, Homo sapiens
  source 1..23: mol_type = genomic DNA
gggttcgatccccgtacgggcca

SEQ ID NO: 38503 - DNA, 24 bp, Homo sapiens
  source 1..24: mol_type = genomic DNA
gggttcgattccccaacggggagc

SEQ ID NO: 38504 - DNA, 21 bp, Homo sapiens
  source 1..21: mol_type = genomic DNA
gggttcgattccccgacgggg

SEQ ID NO: 38505 - DNA, 22 bp, Homo sapiens
  source 1..22: mol_type = genomic DNA
gggttcgattccccgacgggga

SEQ ID NO: 38506 - DNA, 23 bp, Homo sapiens
  source 1..23: mol_type = genomic DNA
gggttcgattccccgacggggag

SEQ ID NO: 38507 - DNA, 24 bp, Homo sapiens
  source 1..24: mol_type = genomic DNA
gggttcgattccccgacggggagc

SEQ ID NO: 38508 - DNA, 25 bp, Homo sapiens
  source 1..25: mol_type = genomic DNA
gggttcgattccccgacggggagcc

SEQ ID NO: 38509 - DNA, 26 bp, Homo sapiens
  source 1..26: mol_type = genomic DNA
gggttcgattccccgacggggagcca

SEQ ID NO: 38510 - DNA, 24 bp, Homo sapiens
  source 1..24: mol_type = genomic DNA
gggttcgattcccggccagggaac

SEQ ID NO: 38511 - DNA, 20 bp, Homo sapiens
  source 1..20: mol_type = genomic DNA
gggttcgattcccgggcggc

SEQ ID NO: 38512 - DNA, 22 bp, Homo sapiens
  source 1..22: mol_type = genomic DNA
gggttcgattcccgggcggcgc

SEQ ID NO: 38513 - DNA, 23 bp, Homo sapiens
  source 1..23: mol_type = genomic DNA
gggttcgattcccgggcggcgca

SEQ ID NO: 38514 - DNA, 24 bp, Homo sapiens
  source 1..24: mol_type = genomic DNA
gggttcgattcccgggcggcgcac

SEQ ID NO: 38515 - DNA, 25 bp, Homo sapiens
  source 1..25: mol_type = genomic DNA
gggttcgattcccgggcggcgcacc

SEQ ID NO: 38516 - DNA, 19 bp, Homo sapiens
  source 1..19: mol_type = genomic DNA
gggttcgattcccggtcag

SEQ ID NO: 38517 - DNA, 20 bp, Homo sapiens
  source 1..20: mol_type = genomic DNA
gggttcgattcccggtcagg

SEQ ID NO: 38518 - DNA, 22 bp, Homo sapiens
  source 1..22: mol_type = genomic DNA
gggttcgattcccggtcaggaa

SEQ ID NO: 38519 - DNA, 24 bp, Homo sapiens
  source 1..24: mol_type = genomic DNA
gggttcgattcccggtcaggaaac

SEQ ID NO: 38520 - DNA, 21 bp, Homo sapiens
  source 1..21: mol_type = genomic DNA
gggttcgattcccggtcaggg

SEQ ID NO: 38521 - DNA, 22 bp, Homo sapiens
  source 1..22: mol_type = genomic DNA
gggttcgattcccggtcaggga

SEQ ID NO: 38522 - DNA, 23 bp, Homo sapiens
  source 1..23: mol_type = genomic DNA
gggttcgattcccggtcagggaa

SEQ ID NO: 38523 - DNA, 24 bp, Homo sapiens
  source 1..24: mol_type = genomic DNA
gggttcgattcccggtcagggaac

SEQ ID NO: 38524 - DNA, 25 bp, Homo sapiens
  source 1..25: mol_type = genomic DNA
gggttcgattcccggtcagggaacc

SEQ ID NO: 38525 - DNA, 26 bp, Homo sapiens
  source 1..26: mol_type = genomic DNA
gggttcgattcccggtcagggaacca

SEQ ID NO: 38526 - DNA, 23 bp, Homo sapiens
  source 1..23: mol_type = genomic DNA
gggttcgattcccggtcatggaa

SEQ ID NO: 38527 - DNA, 24 bp, Homo sapiens
  source 1..24: mol_type = genomic DNA
gggttcgattcccggtcatggaac

SEQ ID NO: 38528 - DNA, 23 bp, Homo sapiens
  source 1..23: mol_type = genomic DNA
gggttcgattctcatagtcctag

SEQ ID NO: 38529 - DNA, 18 bp, Homo sapiens
  source 1..18: mol_type = genomic DNA
gggtttccccgcgcaggt

SEQ ID NO: 38530 - DNA, 21 bp, Homo sapiens
  source 1..21: mol_type = genomic DNA
ggtaaaatggctgagtgaagc

SEQ ID NO: 38531 - DNA, 23 bp, Homo sapiens
  source 1..23: mol_type = genomic DNA
ggtaaaatggctgagtgaagcat

SEQ ID NO: 38532 - DNA, 25 bp, Homo sapiens
  source 1..25: mol_type = genomic DNA
ggtaaaatggctgagtgaagcattg

SEQ ID NO: 38533 - DNA, 28 bp, Homo sapiens
  source 1..28: mol_type = genomic DNA
ggtaaaatggctgagtgaagcattggac

SEQ ID NO: 38534 - DNA, 29 bp, Homo sapiens
  source 1..29: mol_type = genomic DNA
ggtaaaatggctgagtgaagcattggact

SEQ ID NO: 38535 - DNA, 30 bp, Homo sapiens; identical to SEQ ID NO: 19118
  source 1..30: mol_type = genomic DNA

SEQ ID NO: 38536 - DNA, 31 bp, Homo sapiens; identical to SEQ ID NO: 19119
  source 1..31: mol_type = genomic DNA

SEQ ID NO: 38537 - DNA, 32 bp, Homo sapiens; identical to SEQ ID NO: 19120
  source 1..32: mol_type = genomic DNA

SEQ ID NO: 38538 - DNA, 33 bp, Homo sapiens; identical to SEQ ID NO: 19121
  source 1..33: mol_type = genomic DNA

SEQ ID NO: 38539 - DNA, 34 bp, Homo sapiens; identical to SEQ ID NO: 19122
  source 1..34: mol_type = genomic DNA

SEQ ID NO: 38540 - DNA, 36 bp, Homo sapiens; identical to SEQ ID NO: 19124
  source 1..36: mol_type = genomic DNA

SEQ ID NO: 38541 - DNA, 37 bp, Homo sapiens; identical to SEQ ID NO: 19125
  source 1..37: mol_type = genomic DNA

SEQ ID NO: 38542 - DNA, 38 bp, Homo sapiens; identical to SEQ ID NO: 19143
  source 1..38: mol_type = genomic DNA

SEQ ID NO: 38543 - DNA, 40 bp, Homo sapiens; identical to SEQ ID NO: 19145
  source 1..40: mol_type = genomic DNA

SEQ ID NO: 38544 - DNA, 36 bp, Homo sapiens; identical to SEQ ID NO: 19152
  source 1..36: mol_type = genomic DNA

SEQ ID NO: 38545 - DNA, 16 bp, Homo sapiens
  source 1..16: mol_type = genomic DNA
ggtagaattctcgcct

SEQ ID NO: 38546 - DNA, 22 bp, Homo sapiens
  source 1..22: mol_type = genomic DNA
ggtagaattctcgcctcccacg

SEQ ID NO: 38547 - DNA, 37 bp, Homo sapiens; identical to SEQ ID NO: 19182
  source 1..37: mol_type = genomic DNA

SEQ ID NO: 38548 - DNA, 17 bp, Homo sapiens
  source 1..17: mol_type = genomic DNA
ggtagaattctcgcctg

SEQ ID NO: 38549 - DNA, 18 bp, Homo sapiens
  source 1..18: mol_type = genomic DNA
ggtagaattctcgcctgc

SEQ ID NO: 38550 - DNA, 19 bp, Homo sapiens
  source 1..19: mol_type = genomic DNA
ggtagaattctcgcctgcc

SEQ ID NO: 38551 - DNA, 22 bp, Homo sapiens
  source 1..22: mol_type = genomic DNA
ggtagaattctcgcctgccacg

SEQ ID NO: 38552 - DNA, 25 bp, Homo sapiens
  source 1..25: mol_type = genomic DNA
ggtagaattctcgcctgccacgcgg

SEQ ID NO: 38553 - DNA, 26 bp, Homo sapiens
  source 1..26: mol_type = genomic DNA
ggtagaattctcgcctgccacgcggg

SEQ ID NO: 38554 - DNA, 27 bp, Homo sapiens
  source 1..27: mol_type = genomic DNA
ggtagaattctcgcctgccacgcggga

SEQ ID NO: 38555 - DNA, 28 bp, Homo sapiens
  source 1..28: mol_type = genomic DNA
ggtagaattctcgcctgccacgcgggag

SEQ ID NO: 38556 - DNA, 31 bp, Homo sapiens; identical to SEQ ID NO: 19193
  source 1..31: mol_type = genomic DNA

SEQ ID NO: 38557 - DNA, 32 bp, Homo sapiens; identical to SEQ ID NO: 19194
  source 1..32: mol_type = genomic DNA

SEQ ID NO: 38558 - DNA, 33 bp, Homo sapiens; identical to SEQ ID NO: 19195
  source 1..33: mol_type = genomic DNA

SEQ ID NO: 38559 - DNA, 34 bp, Homo sapiens; identical to SEQ ID NO: 19196
  source 1..34: mol_type = genomic DNA

SEQ ID NO: 38560 - DNA, 35 bp, Homo sapiens; identical to SEQ ID NO: 19197
  source 1..35: mol_type = genomic DNA

SEQ ID NO: 38561 - DNA, 16 bp, Homo sapiens
  source 1..16: mol_type = genomic DNA
ggtagagcagaggact

SEQ ID NO: 38562 - DNA, 16 bp, Homo sapiens
  source 1..16: mol_type = genomic DNA
ggtagagcatcagact

SEQ ID NO: 38563 - DNA, 18 bp, Homo sapiens
  source 1..18: mol_type = genomic DNA
ggtagagcatcagacttt

SEQ ID NO: 38564 - DNA, 16 bp, Homo sapiens
  source 1..16: mol_type = genomic DNA
ggtagagcatgagacc

SEQ ID NO: 38565 - DNA, 17 bp, Homo sapiens
  source 1..17: mol_type = genomic DNA
ggtagagcatgagaccc

SEQ ID NO: 38566 - DNA, 16 bp, Homo sapiens
  source 1..16: mol_type = genomic DNA
ggtagagcatgagact

SEQ ID NO: 38567 - DNA, 17 bp, Homo sapiens
  source 1..17: mol_type = genomic DNA
ggtagagcatgagactc

SEQ ID NO: 38568 - DNA, 23 bp, Homo sapiens
  source 1..23: mol_type = genomic DNA
ggtagagcatgagactcttaatc

SEQ ID NO: 38569 - DNA, 24 bp, Homo sapiens
  source 1..24: mol_type = genomic DNA
ggtagagcatgagactcttaatct

SEQ ID NO: 38570 - DNA, 25 bp, Homo sapiens
  source 1..25: mol_type = genomic DNA
ggtagagcatgagactcttaatctc

SEQ ID NO: 38571 - DNA, 38 bp, Homo sapiens; identical to SEQ ID NO: 19223
  source 1..38: mol_type = genomic DNA

SEQ ID NO: 38572 - DNA, 16 bp, Homo sapiens
  source 1..16: mol_type = genomic DNA
ggtagagcatgggact

SEQ ID NO: 38573 - DNA, 17 bp, Homo sapiens
  source 1..17: mol_type = genomic DNA
ggtagagcatgggactc

SEQ ID NO: 38574 - DNA, 18 bp, Homo sapiens
  source 1..18: mol_type = genomic DNA
ggtagagcatgggactct

SEQ ID NO: 38575 - DNA, 22 bp, Homo sapiens
  source 1..22: mol_type = genomic DNA
ggtagagcatgggactcttaat

SEQ ID NO: 38576 - DNA, 23 bp, Homo sapiens
  source 1..23: mol_type = genomic DNA
ggtagagcatgggactcttaatc

SEQ ID NO: 38577 - DNA, 24 bp, Homo sapiens
  source 1..24: mol_type = genomic DNA
ggtagagcatgggactcttaatcc

SEQ ID NO: 38578 - DNA, 25 bp, Homo sapiens
  source 1..25: mol_type = genomic DNA
ggtagagcatgggactcttaatccc

SEQ ID NO: 38579 - DNA, 35 bp, Homo sapiens; identical to SEQ ID NO: 19240
  source 1..35: mol_type = genomic DNA

SEQ ID NO: 38580 - DNA, 38 bp, Homo sapiens; identical to SEQ ID NO: 19242
  source 1..38: mol_type = genomic DNA

SEQ ID NO: 38581 - DNA, 16 bp, Homo sapiens
  source 1..16: mol_type = genomic DNA
ggtagagcatttgact

SEQ ID NO: 38582 - DNA, 17 bp, Homo sapiens
  source 1..17: mol_type = genomic DNA
ggtagagcatttgactg

SEQ ID NO: 38583 - DNA, 18 bp, Homo sapiens
  source 1..18: mol_type = genomic DNA
ggtagagcatttgactgc

SEQ ID NO: 38584 - DNA, 18 bp, Homo sapiens
  source 1..18: mol_type = genomic DNA
ggtagcgcgtctgactcc

SEQ ID NO: 38585 - DNA, 16 bp, Homo sapiens
  source 1..16: mol_type = genomic DNA
ggtagcgtggccgagc

SEQ ID NO: 38586 - DNA, 17 bp, Homo sapiens
  source 1..17: mol_type = genomic DNA
ggtagcgtggccgagcg

SEQ ID NO: 38587 - DNA, 18 bp, Homo sapiens
  source 1..18: mol_type = genomic DNA
ggtagcgtggccgagcgg

SEQ ID NO: 38588 - DNA, 19 bp, Homo sapiens
  source 1..19: mol_type = genomic DNA
ggtagcgtggccgagcggt

SEQ ID NO: 38589 - DNA, 20 bp, Homo sapiens
  source 1..20: mol_type = genomic DNA
ggtagcgtggccgagcggtc

SEQ ID NO: 38590 - DNA, 21 bp, Homo sapiens
  source 1..21: mol_type = genomic DNA
ggtagcgtggccgagcggtct

SEQ ID NO: 38591 - DNA, 22 bp, Homo sapiens
  source 1..22: mol_type = genomic DNA
ggtagcgtggccgagcggtcta

SEQ ID NO: 38592 - DNA, 23 bp, Homo sapiens
  source 1..23: mol_type = genomic DNA
ggtagcgtggccgagcggtctaa

SEQ ID NO: 38593 - DNA, 24 bp, Homo sapiens
  source 1..24: mol_type = genomic DNA
ggtagcgtggccgagcggtctaag

SEQ ID NO: 38594 - DNA, 25 bp, Homo sapiens
  source 1..25: mol_type = genomic DNA
ggtagcgtggccgagcggtctaagg

SEQ ID NO: 38595 - DNA, 26 bp, Homo sapiens
  source 1..26: mol_type = genomic DNA
ggtagcgtggccgagcggtctaaggc

SEQ ID NO: 38596 - DNA, 28 bp, Homo sapiens
  source 1..28: mol_type = genomic DNA
ggtagcgtggccgagcggtctaaggcgc

SEQ ID NO: 38597 - DNA, 29 bp, Homo sapiens
  source 1..29: mol_type = genomic DNA
ggtagcgtggccgagcggtctaaggcgct

SEQ ID NO: 38598 - DNA, 32 bp, Homo sapiens; identical to SEQ ID NO: 19266
  source 1..32: mol_type = genomic DNA

SEQ ID NO: 38599 - DNA, 33 bp, Homo sapiens; identical to SEQ ID NO: 19267
  source 1..33: mol_type = genomic DNA

SEQ ID NO: 38600 - DNA, 34 bp, Homo sapiens; identical to SEQ ID NO: 19268
  source 1..34: mol_type = genomic DNA

SEQ ID NO: 38601 - DNA, 35 bp, Homo sapiens; identical to SEQ ID NO: 19269
  source 1..35: mol_type = genomic DNA

SEQ ID NO: 38602 - DNA, 16 bp, Homo sapiens
  source 1..16: mol_type = genomic DNA
ggtagcgtggccgagt

SEQ ID NO: 38603 - DNA, 18 bp, Homo sapiens
  source 1..18: mol_type = genomic DNA
ggtagcgtggccgagtgg

SEQ ID NO: 38604 - DNA, 19 bp, Homo sapiens
  source 1..19: mol_type = genomic DNA
ggtagcgtggccgagtggt

SEQ ID NO: 38605 - DNA, 22 bp, Homo sapiens
  source 1..22: mol_type = genomic DNA
ggtagcgtggccgagtggtcta

SEQ ID NO: 38606 - DNA, 25 bp, Homo sapiens
  source 1..25: mol_type = genomic DNA
ggtagcgtggccgagtggtctaagg

SEQ ID NO: 38607 - DNA, 26 bp, Homo sapiens
  source 1..26: mol_type = genomic DNA
ggtagcgtggccgagtggtctaaggc

SEQ ID NO: 38608 - DNA, 28 bp, Homo sapiens
  source 1..28: mol_type = genomic DNA
ggtagcgtggccgagtggtctaaggcgc

SEQ ID NO: 38609 - DNA, 29 bp, Homo sapiens
  source 1..29: mol_type = genomic DNA
ggtagcgtggccgagtggtctaaggcgct

SEQ ID NO: 38610 - DNA, 33 bp, Homo sapiens; identical to SEQ ID NO: 19281
  source 1..33: mol_type = genomic DNA

SEQ ID NO: 38611 - DNA, 34 bp, Homo sapiens; identical to SEQ ID NO: 19282
  source 1..34: mol_type = genomic DNA

SEQ ID NO: 38612 - DNA, 35 bp, Homo sapiens; identical to SEQ ID NO: 19283
  source 1..35: mol_type = genomic DNA

SEQ ID NO: 38613 - DNA, 19 bp, Homo sapiens
  source 1..19: mol_type = genomic DNA
ggtagctcagtcggtagag

SEQ ID NO: 38614 - DNA, 27 bp, Homo sapiens
  source 1..27: mol_type = genomic DNA
ggtagctcagtcggtagagcatcagac

SEQ ID NO: 38615 - DNA, 26 bp, Homo sapiens
  source 1..26: mol_type = genomic DNA
ggtagggtggccgagcggtctaaggc

SEQ ID NO: 38616 - DNA, 16 bp, Homo sapiens
  source 1..16: mol_type = genomic DNA
ggtagtgtggccgagc

SEQ ID NO: 38617 - DNA, 18 bp, Homo sapiens
  source 1..18: mol_type = genomic DNA
ggtagtgtggccgagcgg

SEQ ID NO: 38618 - DNA, 19 bp, Homo sapiens
  source 1..19: mol_type = genomic DNA
ggtagtgtggccgagcggt

SEQ ID NO: 38619 - DNA, 20 bp, Homo sapiens
  source 1..20: mol_type = genomic DNA
ggtagtgtggccgagcggtc

SEQ ID NO: 38620 - DNA, 21 bp, Homo sapiens
  source 1..21: mol_type = genomic DNA
ggtagtgtggccgagcggtct

SEQ ID NO: 38621 - DNA, 22 bp, Homo sapiens
  source 1..22: mol_type = genomic DNA
ggtagtgtggccgagcggtcta

SEQ ID NO: 38622 - DNA, 24 bp, Homo sapiens
  source 1..24: mol_type = genomic DNA
ggtagtgtggccgagcggtctaag

SEQ ID NO: 38623 - DNA, 25 bp, Homo sapiens
  source 1..25: mol_type = genomic DNA
ggtagtgtggccgagcggtctaagg

SEQ ID NO: 38624 - DNA, 26 bp, Homo sapiens
  source 1..26: mol_type = genomic DNA
ggtagtgtggccgagcggtctaaggc

SEQ ID NO: 38625 - DNA, 28 bp, Homo sapiens
  source 1..28: mol_type = genomic DNA
ggtagtgtggccgagcggtctaaggcgc

SEQ ID NO: 38626 - DNA, 29 bp, Homo sapiens
  source 1..29: mol_type = genomic DNA
ggtagtgtggccgagcggtctaaggcgct

SEQ ID NO: 38627 - DNA, 33 bp, Homo sapiens
  source 1..33: mol_type = genomic DNA
ggtagtgtggccgagcggtctaaggcgctggat

SEQ ID NO: 38628 - DNA, 34 bp, Homo sapiens; identical to SEQ ID NO: 19296
  source 1..34: mol_type = genomic DNA

SEQ ID NO: 38629 - DNA, 35 bp, Homo sapiens; identical to SEQ ID NO: 19297
  source 1..35: mol_type = genomic DNA

SEQ ID NO: 38630 - DNA, 31 bp, Homo sapiens; identical to SEQ ID NO: 19309
  source 1..31: mol_type = genomic DNA

SEQ ID NO: 38631 - DNA, 16 bp, Homo sapiens
  source 1..16: mol_type = genomic DNA
ggtatcatgcaagatt

SEQ ID NO: 38632 - DNA, 16 bp, Homo sapiens
  source 1..16: mol_type = genomic DNA
ggtatgattctcgctt

SEQ ID NO: 38633 - DNA, 18 bp, Homo sapiens
  source 1..18: mol_type = genomic DNA
ggtatgattctcgctttg

SEQ ID NO: 38634 - DNA, 19 bp, Homo sapiens
  source 1..19: mol_type = genomic DNA
ggtatgattctcgctttgg

SEQ ID NO: 38635 - DNA, 16 bp, Homo sapiens
  source 1..16: mol_type = genomic DNA
ggtatgattctcggtt

SEQ ID NO: 38636 - DNA, 23 bp, Homo sapiens
  source 1..23: mol_type = genomic DNA
ggtatgattctcggtttgggtcc

SEQ ID NO: 38637 - DNA, 27 bp, Homo sapiens
  source 1..27: mol_type = genomic DNA
ggtatgattctcggtttgggtccgaga

SEQ ID NO: 38638 - DNA, 36 bp, Homo sapiens
  source 1..36: mol_type = genomic DNA
ggtcagcactctggactctgaatccagcgatccgag

SEQ ID NO: 38639 - DNA, 27 bp, Homo sapiens
  source 1..27: mol_type = genomic DNA
ggtcagctaaataagctatcgggccca

SEQ ID NO: 38640 - DNA, 29 bp, Homo sapiens
  source 1..29: mol_type = genomic DNA
ggtccagggttcaagtccctgttcgggcg

SEQ ID NO: 38641 - DNA, 30 bp, Homo sapiens; identical to SEQ ID NO: 19349
  source 1..30: mol_type = genomic DNA

SEQ ID NO: 38642 - DNA, 31 bp, Homo sapiens; identical to SEQ ID NO: 19350
  source 1..31: mol_type = genomic DNA

SEQ ID NO: 38643 - DNA, 27 bp, Homo sapiens
  source 1..27: mol_type = genomic DNA
ggtcccatggtgtaatggttagcactc

SEQ ID NO: 38644 - DNA, 29 bp, Homo sapiens
  source 1..29: mol_type = genomic DNA
ggtcccatggtgtaatggttagcactctg

SEQ ID NO: 38645 - DNA, 31 bp, Homo sapiens; identical to SEQ ID NO: 19362
  source 1..31: mol_type = genomic DNA

SEQ ID NO: 38646 - DNA, 32 bp, Homo sapiens; identical to SEQ ID NO: 19363
  source 1..32: mol_type = genomic DNA

SEQ ID NO: 38647 - DNA, 33 bp, Homo sapiens; identical to SEQ ID NO: 19364
  source 1..33: mol_type = genomic DNA

SEQ ID NO: 38648 - DNA, 36 bp, Homo sapiens; identical to SEQ ID NO: 19366
  source 1..36: mol_type = genomic DNA

SEQ ID NO: 38649 - DNA, 41 bp, Homo sapiens; identical to SEQ ID NO: 19368
  source 1..41: mol_type = genomic DNA

SEQ ID NO: 38650 - DNA, 29 bp, Homo sapiens
  source 1..29: mol_type = genomic DNA
ggtccccggttcgaaaccgggcggaaaca

SEQ ID NO: 38651 - DNA, 29 bp, Homo sapiens
  source 1..29: mol_type = genomic DNA
ggtcccgggttcaaatcccggacgagccc

SEQ ID NO: 38652 - DNA, 31 bp, Homo sapiens
  source 1..31: mol_type = genomic DNA
ggtcccgggttcgatccccagcatctccacc

SEQ ID NO: 38653 - DNA, 30 bp, Homo sapiens
  source 1..30: mol_type = genomic DNA
ggtccctggttcgatcccgggtttcggcac

SEQ ID NO: 38654 - DNA, 31 bp, Homo sapiens
  source 1..31: mol_type = genomic DNA
ggtccctggttcgatcccgggtttcggcacc

SEQ ID NO: 38655 - DNA, 39 bp, Homo sapiens
  source 1..39: mol_type = genomic DNA
ggtccgagaggtcccgggttcaaatcccggacgagcccc

SEQ ID NO: 38656 - DNA, 28 bp, Homo sapiens
  source 1..28: mol_type = genomic DNA
ggtcctgagttcgaacctcagagggggc

SEQ ID NO: 38657 - DNA, 30 bp, Homo sapiens
  source 1..30: mol_type = genomic DNA
ggtcctgggttcgagccccagtggaaccac

SEQ ID NO: 38658 - DNA, 31 bp, Homo sapiens; identical to SEQ ID NO: 19381
  source 1..31: mol_type = genomic DNA

SEQ ID NO: 38659 - DNA, 17 bp, Homo sapiens
  source 1..17: mol_type = genomic DNA
ggtcgatggatcgaaac

SEQ ID NO: 38660 - DNA, 18 bp, Homo sapiens
  source 1..18: mol_type = genomic DNA
ggtcgatggatcgaaacc

SEQ ID NO: 38661 - DNA, 19 bp, Homo sapiens
  source 1..19: mol_type = genomic DNA
ggtcgatggatcgaaacca

SEQ ID NO: 38662 - DNA, 28 bp, Homo sapiens
  source 1..28: mol_type = genomic DNA
ggtcgatggatcgaaaccatcctctgct

SEQ ID NO: 38663 - DNA, 31 bp, Homo sapiens; identical to SEQ ID NO: 19388
  source 1..31: mol_type = genomic DNA

SEQ ID NO: 38664 - DNA, 16 bp, Homo sapiens
  source 1..16: mol_type = genomic DNA
ggtcgattccccgacg

SEQ ID NO: 38665 - DNA, 19 bp, Homo sapiens
  source 1..19: mol_type = genomic DNA
ggtcgattccccgacgggg

SEQ ID NO: 38666 - DNA, 20 bp, Homo sapiens
  source 1..20: mol_type = genomic DNA
ggtcgattccccgacgggga

SEQ ID NO: 38667 - DNA, 21 bp, Homo sapiens
  source 1..21: mol_type = genomic DNA
ggtcgattccccgacggggag

SEQ ID NO: 38668 - DNA, 22 bp, Homo sapiens
  source 1..22: mol_type = genomic DNA
ggtcgattccccgacggggagc

SEQ ID NO: 38669 - DNA, 23 bp, Homo sapiens
  source 1..23: mol_type = genomic DNA
ggtcgattccccgacggggagcc

SEQ ID NO: 38670 - DNA, 24 bp, Homo sapiens
  source 1..24: mol_type = genomic DNA
ggtcgattccccgacggggagcca

SEQ ID NO: 38671 - DNA, 30 bp, Homo sapiens; identical to SEQ ID NO: 19395
  source 1..30: mol_type = genomic DNA

SEQ ID NO: 38672 - DNA, 27 bp, Homo sapiens
  source 1..27: mol_type = genomic DNA
ggtcgcgggttcgatccccgtacgggc

SEQ ID NO: 38673 - DNA, 28 bp, Homo sapiens
  source 1..28: mol_type = genomic DNA
ggtcgcgggttcgatccccgtacgggcc

SEQ ID NO: 38674 - DNA, 29 bp, Homo sapiens
  source 1..29: mol_type = genomic DNA
ggtcgcgggttcgatccccgtacgggcca

SEQ ID NO: 38675 - DNA, 30 bp, Homo sapiens; identical to SEQ ID NO: 19406
  source 1..30: mol_type = genomic DNA

SEQ ID NO: 38676 - DNA, 31 bp, Homo sapiens; identical to SEQ ID NO: 19407
  source 1..31: mol_type = genomic DNA

SEQ ID NO: 38677 - DNA, 30 bp, Homo sapiens
  source 1..30: mol_type = genomic DNA
ggtcgctggttcgaatccggctcggaggac

SEQ ID NO: 38678 - DNA, 31 bp, Homo sapiens; identical to SEQ ID NO: 19409
  source 1..31: mol_type = genomic DNA

SEQ ID NO: 38679 - DNA, 30 bp, Homo sapiens; identical to SEQ ID NO: 19411
  source 1..30: mol_type = genomic DNA

SEQ ID NO: 38680 - DNA, 31 bp, Homo sapiens; identical to SEQ ID NO: 19412
  source 1..31: mol_type = genomic DNA

SEQ ID NO: 38681 - DNA, 28 bp, Homo sapiens
  source 1..28: mol_type = genomic DNA
ggtcgtgggttcgagccccacgttgggc

SEQ ID NO: 38682 - DNA, 29 bp, Homo sapiens
  source 1..29: mol_type = genomic DNA
ggtcgtgggttcgagccccacgttgggcg

SEQ ID NO: 38683 - DNA, 30 bp, Homo sapiens; identical to SEQ ID NO: 19423
  source 1..30: mol_type = genomic DNA

SEQ ID NO: 38684 - DNA, 27 bp, Homo sapiens
  source 1..27: mol_type = genomic DNA
ggtcgtggttgtagtccgtgcgagaat

SEQ ID NO: 38685 - DNA, 30 bp, Homo sapiens; identical to SEQ ID NO: 19439
  source 1..30: mol_type = genomic DNA

SEQ ID NO: 38686 - DNA, 31 bp, Homo sapiens; identical to SEQ ID NO: 19440
  source 1..31: mol_type = genomic DNA

SEQ ID NO: 38687 - DNA, 16 bp, Homo sapiens
  source 1..16: mol_type = genomic DNA
ggtctaaggcgctgcg

SEQ ID NO: 38688 - DNA, 16 bp, Homo sapiens
  source 1..16: mol_type = genomic DNA
ggtctaaggcgctgga

SEQ ID NO: 38689 - DNA, 18 bp, Homo sapiens
  source 1..18: mol_type = genomic DNA
ggtctagcggttaggatt

SEQ ID NO: 38690 - DNA, 20 bp, Homo sapiens
  source 1..20: mol_type = genomic DNA
ggtctaggggtatgattctc

SEQ ID NO: 38691 - DNA, 24 bp, Homo sapiens
  source 1..24: mol_type = genomic DNA
ggtctaggggtatgattctcgctt

SEQ ID NO: 38692 - DNA, 22 bp, Homo sapiens
  source 1..22: mol_type = genomic DNA
ggtctagtggctaggattcggc

SEQ ID NO: 38693 - DNA, 18 bp, Homo sapiens
  source 1..18: mol_type = genomic DNA
ggtctagtggttaggatt

SEQ ID NO: 38694 - DNA, 24 bp, Homo sapiens
  source 1..24: mol_type = genomic DNA
ggtctagtggttaggattcggcgc

SEQ ID NO: 38695 - DNA, 25 bp, Homo sapiens
  source 1..25: mol_type = genomic DNA
ggtctagtggttaggattcggcgct

SEQ ID NO: 38696 - DNA, 22 bp, Homo sapiens
  source 1..22: mol_type = genomic DNA
ggtgagcactctggactctgaa

SEQ ID NO: 38697 - DNA, 23 bp, Homo sapiens
  source 1..23: mol_type = genomic DNA
ggtgagcactctggactctgaat

SEQ ID NO: 38698 - DNA, 24 bp, Homo sapiens
  source 1..24: mol_type = genomic DNA
ggtgagcactctggactctgaatc

SEQ ID NO: 38699 - DNA, 25 bp, Homo sapiens
  source 1..25: mol_type = genomic DNA
ggtgagcactctggactctgaatcc

SEQ ID NO: 38700 - DNA, 26 bp, Homo sapiens
  source 1..26: mol_type = genomic DNA
ggtgagcactctggactctgaatcca

SEQ ID NO: 38701 - DNA, 28 bp, Homo sapiens
  source 1..28: mol_type = genomic DNA
ggtgagcactctggactctgaatccagc

SEQ ID NO: 38702 - DNA, 33 bp, Homo sapiens; identical to SEQ ID NO: 19495
  source 1..33: mol_type = genomic DNA

SEQ ID NO: 38703 - DNA, 34 bp, Homo sapiens; identical to SEQ ID NO: 19496
  source 1..34: mol_type = genomic DNA

SEQ ID NO: 38704 - DNA, 36 bp, Homo sapiens; identical to SEQ ID NO: 19497
  source 1..36: mol_type = genomic DNA

SEQ ID NO: 38705 - DNA, 37 bp, Homo sapiens; identical to SEQ ID NO: 19498
  source 1..37: mol_type = genomic DNA

SEQ ID NO: 38706 - DNA, 24 bp, Homo sapiens
  source 1..24: mol_type = genomic DNA
ggtgcagtggtagaattctcgcct

SEQ ID NO: 38707 - DNA, 16 bp, Homo sapiens
  source 1..16: mol_type = genomic DNA
ggtgcgagaggtcccg

SEQ ID NO: 38708 - DNA, 38 bp, Homo sapiens; identical to SEQ ID NO: 19528
  source 1..38: mol_type = genomic DNA

SEQ ID NO: 38709 - DNA, 39 bp, Homo sapiens; identical to SEQ ID NO: 19529
  source 1..39: mol_type = genomic DNA

SEQ ID NO: 38710 - DNA, 40 bp, Homo sapiens; identical to SEQ ID NO: 19530
  source 1..40: mol_type = genomic DNA

SEQ ID NO: 38711 - DNA, 41 bp, Homo sapiens; identical to SEQ ID NO: 19531
  source 1..41: mol_type = genomic DNA

SEQ ID NO: 38712 - DNA, 35 bp, Homo sapiens; identical to SEQ ID NO: 19547
  source 1..35: mol_type = genomic DNA

SEQ ID NO: 38713 - DNA, 36 bp, Homo sapiens; identical to SEQ ID NO: 19548
  source 1..36: mol_type = genomic DNA

SEQ ID NO: 38714 - DNA, 37 bp, Homo sapiens; identical to SEQ ID NO: 19549
  source 1..37: mol_type = genomic DNA

SEQ ID NO: 38715 - DNA, 38 bp, Homo sapiens; identical to SEQ ID NO: 19550
  source 1..38: mol_type = genomic DNA

SEQ ID NO: 38716 - DNA, 16 bp, Homo sapiens
  source 1..16: mol_type = genomic DNA
ggtggagcatgggact

SEQ ID NO: 38717 - DNA, 17 bp, Homo sapiens
  source 1..17: mol_type = genomic DNA
ggtggagcatgggactc

SEQ ID NO: 38718 - DNA, 27 bp, Homo sapiens
  source 1..27: mol_type = genomic DNA
ggtggagttaaagactttttctctgac

SEQ ID NO: 38719 - DNA, 28 bp, Homo sapiens
  source 1..28: mol_type = genomic DNA
ggtggagttaaagactttttctctgacc

SEQ ID NO: 38720 - DNA, 31 bp, Homo sapiens
  source 1..31: mol_type = genomic DNA
ggtggcccgggttcgactcccggtatgggaa

SEQ ID NO: 38721 - DNA, 32 bp, Homo sapiens
  source 1..32: mol_type = genomic DNA
ggtggcccgggttcgactcccggtatgggaac

SEQ ID NO: 38722 - DNA, 33 bp, Homo sapiens; identical to SEQ ID NO: 19576
  source 1..33: mol_type = genomic DNA

SEQ ID NO: 38723 - DNA, 21 bp, Homo sapiens
  source 1..21: mol_type = genomic DNA
ggtggtctagtggttaggatt

SEQ ID NO: 38724 - DNA, 27 bp, Homo sapiens
  source 1..27: mol_type = genomic DNA
ggtggtctagtggttaggattcggcgc

SEQ ID NO: 38725 - DNA, 28 bp, Homo sapiens
  source 1..28: mol_type = genomic DNA
ggtggtctagtggttaggattcggcgct

SEQ ID NO: 38726 - DNA, 29 bp, Homo sapiens
  source 1..29: mol_type = genomic DNA
ggtggtctagtggttaggattcggcgctc

SEQ ID NO: 38727 - DNA, 46 bp, Homo sapiens
  source 1..46: mol_type = genomic DNA
ggtggtctagtggttaggattcggcgctctcaccgccgcggcccgg

SEQ ID NO: 38728 - DNA, 25 bp, Homo sapiens
  source 1..25: mol_type = genomic DNA
ggtggttcagtggtagaattctcgc

SEQ ID NO: 38729 - DNA, 26 bp, Homo sapiens
  source 1..26: mol_type = genomic DNA
ggtggttcagtggtagaattctcgcc

SEQ ID NO: 38730 - DNA, 27 bp, Homo sapiens
  source 1..27: mol_type = genomic DNA
ggtggttcagtggtagaattctcgcct

SEQ ID NO: 38731 - DNA, 29 bp, Homo sapiens
  source 1..29: mol_type = genomic DNA
ggtggttcagtggtagaattctcgcctgc

SEQ ID NO: 38732 - DNA, 30 bp, Homo sapiens; identical to SEQ ID NO: 19619
  source 1..30: mol_type = genomic DNA

SEQ ID NO: 38733 - DNA, 43 bp, Homo sapiens; identical to SEQ ID NO: 19625
  source 1..43: mol_type = genomic DNA

SEQ ID NO: 38734 - DNA, 45 bp, Homo sapiens; identical to SEQ ID NO: 19626
  source 1..45: mol_type = genomic DNA

SEQ ID NO: 38735 - DNA, 27 bp, Homo sapiens
  source 1..27: mol_type = genomic DNA
ggtggttcgagcccacccagggacgcc

SEQ ID NO: 38736 - DNA, 23 bp, Homo sapiens
  source 1..23: mol_type = genomic DNA
ggtgtaatggttagcactctgga

SEQ ID NO: 38737 - DNA, 25 bp, Homo sapiens
  source 1..25: mol_type = genomic DNA
ggtgtaatggttagcactctggact

SEQ ID NO: 38738 - DNA, 26 bp, Homo sapiens
  source 1..26: mol_type = genomic DNA
ggtgtaatggttagcactctggactc

SEQ ID NO: 38739 - DNA, 27 bp, Homo sapiens
  source 1..27: mol_type = genomic DNA
ggtgtaatggttagcactctggactct

SEQ ID NO: 38740 - DNA, 28 bp, Homo sapiens
  source 1..28: mol_type = genomic DNA
ggtgtaatggttagcactctggactctg

SEQ ID NO: 38741 - DNA, 31 bp, Homo sapiens
  source 1..31: mol_type = genomic DNA
ggtgtaatggttagcactctggactctgaat

SEQ ID NO: 38742 - DNA, 32 bp, Homo sapiens; identical to SEQ ID NO: 19642
  source 1..32: mol_type = genomic DNA

SEQ ID NO: 38743 - DNA, 33 bp, Homo sapiens; identical to SEQ ID NO: 19643
  source 1..33: mol_type = genomic DNA

SEQ ID NO: 38744 - DNA, 44 bp, Homo sapiens; identical to SEQ ID NO: 19645
  source 1..44: mol_type = genomic DNA

SEQ ID NO: 38745 - DNA, 45 bp, Homo sapiens; identical to SEQ ID NO: 19646
  source 1..45: mol_type = genomic DNA

SEQ ID NO: 38746 - DNA, 46 bp, Homo sapiens; identical to SEQ ID NO: 19647
  source 1..46: mol_type = genomic DNA

SEQ ID NO: 38747 - DNA, 45 bp, Homo sapiens
  source 1..45: mol_type = genomic DNA
ggtgtaatggttagcactctggactttgaatccagcgatccgagt

SEQ ID NO: 38748 - DNA, 17 bp, Homo sapiens
  source 1..17: mol_type = genomic DNA
ggtgtagtggtatcatg

SEQ ID NO: 38749 - DNA, 19 bp, Homo sapiens
  source 1..19: mol_type = genomic DNA
ggtgtagtggtatcatgca

SEQ ID NO: 38750 - DNA, 24 bp, Homo sapiens
  source 1..24: mol_type = genomic DNA
ggtgtagtggtatcatgcaagatt

SEQ ID NO: 38751 - DNA, 16 bp, Homo sapiens
  source 1..16: mol_type = genomic DNA
ggttaaggcattggac

SEQ ID NO: 38752 - DNA, 16 bp, Homo sapiens
  source 1..16: mol_type = genomic DNA
ggttaaggcgttggac

SEQ ID NO: 38753 - DNA, 16 bp, Homo sapiens
  source 1..16: mol_type = genomic DNA
ggttagcactctggac

SEQ ID NO: 38754 - DNA, 17 bp, Homo sapiens
  source 1..17: mol_type = genomic DNA
ggttagcactctggact

SEQ ID NO: 38755 - DNA, 18 bp, Homo sapiens
  source 1..18: mol_type = genomic DNA
ggttagcactctggactc

SEQ ID NO: 38756 - DNA, 19 bp, Homo sapiens
  source 1..19: mol_type = genomic DNA
ggttagcactctggactct

SEQ ID NO: 38757 - DNA, 20 bp, Homo sapiens
  source 1..20: mol_type = genomic DNA
ggttagcactctggactctg

SEQ ID NO: 38758 - DNA, 21 bp, Homo sapiens
  source 1..21: mol_type = genomic DNA
ggttagcactctggactctga

SEQ ID NO: 38759 - DNA, 22 bp, Homo sapiens
  source 1..22: mol_type = genomic DNA
ggttagcactctggactctgaa

SEQ ID NO: 38760 - DNA, 23 bp, Homo sapiens
  source 1..23: mol_type = genomic DNA
ggttagcactctggactctgaat

SEQ ID NO: 38761 - DNA, 24 bp, Homo sapiens
  source 1..24: mol_type = genomic DNA
ggttagcactctggactctgaatc

SEQ ID NO: 38762 - DNA, 25 bp, Homo sapiens
  source 1..25: mol_type = genomic DNA
ggttagcactctggactctgaatcc

SEQ ID NO: 38763 - DNA, 26 bp, Homo sapiens
  source 1..26: mol_type = genomic DNA
ggttagcactctggactctgaatcca

SEQ ID NO: 38764 - DNA, 27 bp, Homo sapiens
  source 1..27: mol_type = genomic DNA
ggttagcactctggactctgaatccag

SEQ ID NO: 38765 - DNA, 28 bp, Homo sapiens
  source 1..28: mol_type = genomic DNA
ggttagcactctggactctgaatccagc

SEQ ID NO: 38766 - DNA, 29 bp, Homo sapiens
  source 1..29: mol_type = genomic DNA
ggttagcactctggactctgaatccagcg

SEQ ID NO: 38767 - DNA, 32 bp, Homo sapiens; identical to SEQ ID NO: 19694
  source 1..32: mol_type = genomic DNA

SEQ ID NO: 38768 - DNA, 33 bp, Homo sapiens; identical to SEQ ID NO: 19695
  source 1..33: mol_type = genomic DNA

SEQ ID NO: 38769 - DNA, 34 bp, Homo sapiens; identical to SEQ ID NO: 19696
  source 1..34: mol_type = genomic DNA

SEQ ID NO: 38770 - DNA, 35 bp, Homo sapiens; identical to SEQ ID NO: 19697
  source 1..35: mol_type = genomic DNA

SEQ ID NO: 38771 - DNA, 36 bp, Homo sapiens; identical to SEQ ID NO: 19698
  source 1..36: mol_type = genomic DNA

SEQ ID NO: 38772 - DNA, 37 bp, Homo sapiens; identical to SEQ ID NO: 19699
  source 1..37: mol_type = genomic DNA

SEQ ID NO: 38773 - DNA, 38 bp, Homo sapiens; identical to SEQ ID NO: 19700
  source 1..38: mol_type = genomic DNA

SEQ ID NO: 38774 - DNA, 39 bp, Homo sapiens; identical to SEQ ID NO: 19701
  source 1..39: mol_type = genomic DNA

SEQ ID NO: 38775 - DNA, 40 bp, Homo sapiens; identical to SEQ ID NO: 19702
  source 1..40: mol_type = genomic DNA

SEQ ID NO: 38776 - DNA, 22 bp, Homo sapiens
  source 1..22: mol_type = genomic DNA
ggttagcactctggactttgaa

SEQ ID NO: 38777 - DNA, 23 bp, Homo sapiens
  source 1..23: mol_type = genomic DNA
ggttagcactctggactttgaat

SEQ ID NO: 38778 - DNA, 24 bp, Homo sapiens
  source 1..24: mol_type = genomic DNA
ggttagcactctggactttgaatc

SEQ ID NO: 38779 - DNA, 25 bp, Homo sapiens
  source 1..25: mol_type = genomic DNA
ggttagcactctggactttgaatcc

SEQ ID NO: 38780 - DNA, 28 bp, Homo sapiens
  source 1..28: mol_type = genomic DNA
ggttagcactctggactttgaatccagc

SEQ ID NO: 38781 - DNA, 36 bp, Homo sapiens; identical to SEQ ID NO: 19717
  source 1..36: mol_type = genomic DNA

SEQ ID NO: 38782 - DNA, 37 bp, Homo sapiens; identical to SEQ ID NO: 19718
  source 1..37: mol_type = genomic DNA

SEQ ID NO: 38783 - DNA, 39 bp, Homo sapiens
  source 1..39: mol_type = genomic DNA
ggttagcactctggactttgaatccagcgatccgagttc

SEQ ID NO: 38784 - DNA, 16 bp, Homo sapiens
  source 1..16: mol_type = genomic DNA
ggttagcgcgcggtac

SEQ ID NO: 38785 - DNA, 23 bp, Homo sapiens
  source 1..23: mol_type = genomic DNA
ggttagcgcgttcggctgttaac

SEQ ID NO: 38786 - DNA, 16 bp, Homo sapiens
  source 1..16: mol_type = genomic DNA
ggttagctcagtcggc

SEQ ID NO: 38787 - DNA, 16 bp, Homo sapiens
  source 1..16: mol_type = genomic DNA
ggttaggattcctggt

SEQ ID NO: 38788 - DNA, 17 bp, Homo sapiens
  source 1..17: mol_type = genomic DNA
ggttaggattcctggtt

SEQ ID NO: 38789 - DNA, 19 bp, Homo sapiens
  source 1..19: mol_type = genomic DNA
ggttaggattcctggtttt

SEQ ID NO: 38790 - DNA, 29 bp, Homo sapiens
  source 1..29: mol_type = genomic DNA
ggttaggattcctggttttcacccaggtg

SEQ ID NO: 38791 - DNA, 16 bp, Homo sapiens
  source 1..16: mol_type = genomic DNA
ggttaggattcggcgc

SEQ ID NO: 38792 - DNA, 17 bp, Homo sapiens
  source 1..17: mol_type = genomic DNA
ggttaggattcggcgct

SEQ ID NO: 38793 - DNA, 18 bp, Homo sapiens
  source 1..18: mol_type = genomic DNA
ggttaggattcggcgctc

SEQ ID NO: 38794 - DNA, 19 bp, Homo sapiens
  source 1..19: mol_type = genomic DNA
ggttaggattcggcgctct

SEQ ID NO: 38795 - DNA, 20 bp, Homo sapiens
  source 1..20: mol_type = genomic DNA
ggttaggattcggcgctctc

SEQ ID NO: 38796 - DNA, 21 bp, Homo sapiens
  source 1..21: mol_type = genomic DNA
ggttaggattcggcgctctca

SEQ ID NO: 38797 - DNA, 23 bp, Homo sapiens
  source 1..23: mol_type = genomic DNA
ggttaggattcggcgctctcacc

SEQ ID NO: 38798 - DNA, 24 bp, Homo sapiens
  source 1..24: mol_type = genomic DNA
ggttaggattcggcgctctcaccg

SEQ ID NO: 38799 - DNA, 26 bp, Homo sapiens
  source 1..26: mol_type = genomic DNA
ggttaggattcggcgctctcaccgcc

SEQ ID NO: 38800 - DNA, 31 bp, Homo sapiens
  source 1..31: mol_type = genomic DNA
ggttaggattcggcgctctcaccgccgcggc

SEQ ID NO: 38801 - DNA, 33 bp, Homo sapiens; identical to SEQ ID NO: 19757
  source 1..33: mol_type = genomic DNA

SEQ ID NO: 38802 - DNA, 36 bp, Homo sapiens; identical to SEQ ID NO: 19760
  source 1..36: mol_type = genomic DNA

SEQ ID NO: 38803 - DNA, 16 bp, Homo sapiens
  source 1..16: mol_type = genomic DNA
ggttagtactctgcgt

SEQ ID NO: 38804 - DNA, 17 bp, Homo sapiens
  source 1..17: mol_type = genomic DNA
ggttagtactctgcgtt

SEQ ID NO: 38805 - DNA, 18 bp, Homo sapiens
  source 1..18: mol_type = genomic DNA
ggttagtactctgcgttg

SEQ ID NO: 38806 - DNA, 19 bp, Homo sapiens
  source 1..19: mol_type = genomic DNA
ggttagtactctgcgttgt

SEQ ID NO: 38807 - DNA, 23 bp, Homo sapiens
  source 1..23: mol_type = genomic DNA
ggttagtactctgcgttgtggcc

SEQ ID NO: 38808 - DNA, 28 bp, Homo sapiens
  source 1..28: mol_type = genomic DNA
ggttagtactctgcgttgtggccgcagc

SEQ ID NO: 38809 - DNA, 33 bp, Homo sapiens; identical to SEQ ID NO: 19778
  source 1..33: mol_type = genomic DNA

SEQ ID NO: 38810 - DNA, 24 bp, Homo sapiens
  source 1..24: mol_type = genomic DNA
ggttatacccttcccgtactacca

SEQ ID NO: 38811 - DNA, 16 bp, Homo sapiens
  source 1..16: mol_type = genomic DNA
ggttatcacgtctgct

SEQ ID NO: 38812 - DNA, 17 bp, Homo sapiens
  source 1..17: mol_type = genomic DNA
ggttatcacgtctgctt

SEQ ID NO: 38813 - DNA, 18 bp, Homo sapiens
  source 1..18: mol_type = genomic DNA
ggttatcacgtctgcttt

SEQ ID NO: 38814 - DNA, 16 bp, Homo sapiens
  source 1..16: mol_type = genomic DNA
ggttatcacgttcgcc

SEQ ID NO: 38815 - DNA, 17 bp, Homo sapiens
  source 1..17: mol_type = genomic DNA
ggttatcacgttcgcct

SEQ ID NO: 38816 - DNA, 16 bp, Homo sapiens
  source 1..16: mol_type = genomic DNA
ggttcaaatcccggac

SEQ ID NO: 38817 - DNA, 17 bp, Homo sapiens
  source 1..17: mol_type = genomic DNA
ggttcaaatcccggacg

SEQ ID NO: 38818 - DNA, 19 bp, Homo sapiens
  source 1..19: mol_type = genomic DNA
ggttcaaatcccggacgag

SEQ ID NO: 38819 - DNA, 20 bp, Homo sapiens
  source 1..20: mol_type = genomic DNA
ggttcaaatcccggacgagc

SEQ ID NO: 38820 - DNA, 22 bp, Homo sapiens
  source 1..22: mol_type = genomic DNA
ggttcaaatcccggacgagccc

SEQ ID NO: 38821 - DNA, 23 bp, Homo sapiens
  source 1..23: mol_type = genomic DNA
ggttcaaatcccggacgagcccc

SEQ ID NO: 38822 - DNA, 24 bp, Homo sapiens
  source 1..24: mol_type = genomic DNA
ggttcaaatcccggacgagccccc

SEQ ID NO: 38823 - DNA, 16 bp, Homo sapiens
  source 1..16: mol_type = genomic DNA
ggttcaaatccgggtg

SEQ ID NO: 38824 - DNA, 17 bp, Homo sapiens
  source 1..17: mol_type = genomic DNA
ggttcaaatccgggtgc

SEQ ID NO: 38825 - DNA, 18 bp, Homo sapiens
  source 1..18: mol_type = genomic DNA
ggttcaaatccgggtgcc

SEQ ID NO: 38826 - DNA, 19 bp, Homo sapiens
  source 1..19: mol_type = genomic DNA
ggttcaaatccgggtgccc

SEQ ID NO: 38827 - DNA, 21 bp, Homo sapiens
  source 1..21: mol_type = genomic DNA
ggttcaaatccgggtgccccc

SEQ ID NO: 38828 - DNA, 22 bp, Homo sapiens
  source 1..22: mol_type = genomic DNA
ggttcaaatccgggtgccccct

SEQ ID NO: 38829 - DNA, 24 bp, Homo sapiens
  source 1..24: mol_type = genomic DNA
ggttcaaatccgggtgccccctcc

SEQ ID NO: 38830 - DNA, 21 bp, Homo sapiens
  source 1..21: mol_type = genomic DNA
ggttcaagtccctgttcgggc

SEQ ID NO: 38831 - DNA, 22 bp, Homo sapiens
  source 1..22: mol_type = genomic DNA
ggttcaagtccctgttcgggcg

SEQ ID NO: 38832 - DNA, 23 bp, Homo sapiens
  source 1..23: mol_type = genomic DNA
ggttcaagtccctgttcgggcgc

SEQ ID NO: 38833 - DNA, 24 bp, Homo sapiens
  source 1..24: mol_type = genomic DNA
ggttcaagtccctgttcgggcgcc

SEQ ID NO: 38834 - DNA, 16 bp, Homo sapiens
  source 1..16: mol_type = genomic DNA
ggttcaatccccggca

SEQ ID NO: 38835 - DNA, 24 bp, Homo sapiens
  source 1..24: mol_type = genomic DNA
ggttcaatccccggcacctccacc

SEQ ID NO: 38836 - DNA, 23 bp, Homo sapiens
  source 1..23: mol_type = genomic DNA
ggttcaatcccgggtttcggcac

SEQ ID NO: 38837 - DNA, 23 bp, Homo sapiens
  source 1..23: mol_type = genomic DNA
ggttcaattccccgacggggagc

SEQ ID NO: 38838 - DNA, 24 bp, Homo sapiens
  source 1..24: mol_type = genomic DNA
ggttcaattccccgacggggagcc

SEQ ID NO: 38839 - DNA, 25 bp, Homo sapiens
  source 1..25: mol_type = genomic DNA
ggttcaattccccgacggggagcca

SEQ ID NO: 38840 - DNA, 22 bp, Homo sapiens
  source 1..22: mol_type = genomic DNA
ggttcagtggtagaattctcgc

SEQ ID NO: 38841 - DNA, 23 bp, Homo sapiens
  source 1..23: mol_type = genomic DNA
ggttcagtggtagaattctcgcc

SEQ ID NO: 38842 - DNA, 24 bp, Homo sapiens
  source 1..24: mol_type = genomic DNA
ggttcagtggtagaattctcgcct

SEQ ID NO: 38843 - DNA, 26 bp, Homo sapiens
  source 1..26: mol_type = genomic DNA
ggttcagtggtagaattctcgcctgc

SEQ ID NO: 38844 - DNA, 27 bp, Homo sapiens
  source 1..27: mol_type = genomic DNA
ggttcagtggtagaattctcgcctgcc

SEQ ID NO: 38845 - DNA, 29 bp, Homo sapiens
  source 1..29: mol_type = genomic DNA
ggttcagtggtagaattctcgcctgccac

SEQ ID NO: 38846 - DNA, 30 bp, Homo sapiens; identical to SEQ ID NO: 19851
  source 1..30: mol_type = genomic DNA

SEQ ID NO: 38847 - DNA, 40 bp, Homo sapiens; identical to SEQ ID NO: 19853
  source 1..40: mol_type = genomic DNA

SEQ ID NO: 38848 - DNA, 41 bp, Homo sapiens
  source 1..41: mol_type = genomic DNA
ggttcagtggtagaattctcgcctgccacgcgggaggcccg

SEQ ID NO: 38849 - DNA, 42 bp, Homo sapiens; identical to SEQ ID NO: 19854
  source 1..42: mol_type = genomic DNA

SEQ ID NO: 38850 - DNA, 16 bp, Homo sapiens
  source 1..16: mol_type = genomic DNA
ggttccatagtgtagc

SEQ ID NO: 38851 - DNA, 17 bp, Homo sapiens
  source 1..17: mol_type = genomic DNA
ggttccatagtgtagcg

SEQ ID NO: 38852 - DNA, 19 bp, Homo sapiens
  source 1..19: mol_type = genomic DNA
ggttccatagtgtagcggt

SEQ ID NO: 38853 - DNA, 23 bp, Homo sapiens
  source 1..23: mol_type = genomic DNA
ggttccatagtgtagcggttatc

SEQ ID NO: 38854 - DNA, 28 bp, Homo sapiens
  source 1..28: mol_type = genomic DNA
ggttccatagtgtagcggttatcacgtc

SEQ ID NO: 38855 - DNA, 30 bp, Homo sapiens; identical to SEQ ID NO: 19863
  source 1..30: mol_type = genomic DNA

SEQ ID NO: 38856 - DNA, 31 bp, Homo sapiens; identical to SEQ ID NO: 19864
  source 1..31: mol_type = genomic DNA

SEQ ID NO: 38857 - DNA, 32 bp, Homo sapiens; identical to SEQ ID NO: 19865
  source 1..32: mol_type = genomic DNA

SEQ ID NO: 38858 - DNA, 33 bp, Homo sapiens; identical to SEQ ID NO: 19866
  source 1..33: mol_type = genomic DNA

SEQ ID NO: 38859 - DNA, 34 bp, Homo sapiens; identical to SEQ ID NO: 19867
  source 1..34: mol_type = genomic DNA

SEQ ID NO: 38860 - DNA, 16 bp, Homo sapiens
  source 1..16: mol_type = genomic DNA
ggttccatagtgtagt

SEQ ID NO: 38861 - DNA, 17 bp, Homo sapiens
  source 1..17: mol_type = genomic DNA
ggttccatagtgtagtg

SEQ ID NO: 38862 - DNA, 18 bp, Homo sapiens
  source 1..18: mol_type = genomic DNA
ggttccatagtgtagtgg

SEQ ID NO: 38863 - DNA, 19 bp, Homo sapiens
  source 1..19: mol_type = genomic DNA
ggttccatagtgtagtggt

SEQ ID NO: 38864 - DNA, 23 bp, Homo sapiens
  source 1..23: mol_type = genomic DNA
ggttccatagtgtagtggttatc

SEQ ID NO: 38865 - DNA, 25 bp, Homo sapiens
  source 1..25: mol_type = genomic DNA
ggttccatagtgtagtggttatcac

SEQ ID NO: 38866 - DNA, 31 bp, Homo sapiens; identical to SEQ ID NO: 19882
  source 1..31: mol_type = genomic DNA

SEQ ID NO: 38867 - DNA, 32 bp, Homo sapiens; identical to SEQ ID NO: 19883
  source 1..32: mol_type = genomic DNA

SEQ ID NO: 38868 - DNA, 33 bp, Homo sapiens; identical to SEQ ID NO: 19884
  source 1..33: mol_type = genomic DNA

SEQ ID NO: 38869 - DNA, 34 bp, Homo sapiens; identical to SEQ ID NO: 19885
  source 1..34: mol_type = genomic DNA

SEQ ID NO: 38870 - DNA, 26 bp, Homo sapiens
  source 1..26: mol_type = genomic DNA
ggttccatagtgtagtggttatcacg

SEQ ID NO: 38871 - DNA, 28 bp, Homo sapiens
  source 1..28: mol_type = genomic DNA
ggttccatagtgtagtggttatcacgtc

SEQ ID NO: 38872 - DNA, 29 bp, Homo sapiens
  source 1..29: mol_type = genomic DNA
ggttccatagtgtagtggttatcacgtct

SEQ ID NO: 38873 - DNA, 30 bp, Homo sapiens; identical to SEQ ID NO: 19892
  source 1..30: mol_type = genomic DNA

SEQ ID NO: 38874 - DNA, 31 bp, Homo sapiens; identical to SEQ ID NO: 19893
  source 1..31: mol_type = genomic DNA

SEQ ID NO: 38875 - DNA, 32 bp, Homo sapiens; identical to SEQ ID NO: 19894
  source 1..32: mol_type = genomic DNA

SEQ ID NO: 38876 - DNA, 33 bp, Homo sapiens; identical to SEQ ID NO: 19895
  source 1..33: mol_type = genomic DNA

SEQ ID NO: 38877 - DNA, 34 bp, Homo sapiens; identical to SEQ ID NO: 19896
  source 1..34: mol_type = genomic DNA

SEQ ID NO: 38878 - DNA, 35 bp, Homo sapiens; identical to SEQ ID NO: 19897
  source 1..35: mol_type = genomic DNA

SEQ ID NO: 38879 - DNA, 16 bp, Homo sapiens
  source 1..16: mol_type = genomic DNA
ggttccatggtgtaat

SEQ ID NO: 38880 - DNA, 17 bp, Homo sapiens
  source 1..17: mol_type = genomic DNA
ggttccatggtgtaatg

SEQ ID NO: 38881 - DNA, 19 bp, Homo sapiens
  source 1..19: mol_type = genomic DNA
ggttccatggtgtaatggt

SEQ ID NO: 38882 - DNA, 33 bp, Homo sapiens; identical to SEQ ID NO: 19910
  source 1..33: mol_type = genomic DNA

SEQ ID NO: 38883 - DNA, 32 bp, Homo sapiens; identical to SEQ ID NO: 19919
  source 1..32: mol_type = genomic DNA

SEQ ID NO: 38884 - DNA, 33 bp, Homo sapiens; identical to SEQ ID NO: 19920
  source 1..33: mol_type = genomic DNA

SEQ ID NO: 38885 - DNA, 34 bp, Homo sapiens; identical to SEQ ID NO: 19921
  source 1..34: mol_type = genomic DNA

SEQ ID NO: 38886 - DNA, 35 bp, Homo sapiens; identical to SEQ ID NO: 19922
  source 1..35: mol_type = genomic DNA

SEQ ID NO: 38887 - DNA, 23 bp, Homo sapiens
  source 1..23: mol_type = genomic DNA
ggttccatggtgtaatggttagc

SEQ ID NO: 38888 - DNA, 26 bp, Homo sapiens
  source 1..26: mol_type = genomic DNA
ggttccatggtgtaatggttagcact

SEQ ID NO: 38889 - DNA, 27 bp, Homo sapiens
  source 1..27: mol_type = genomic DNA
ggttccatggtgtaatggttagcactc

SEQ ID NO: 38890 - DNA, 28 bp, Homo sapiens
  source 1..28: mol_type = genomic DNA
ggttccatggtgtaatggttagcactct

SEQ ID NO: 38891 - DNA, 29 bp, Homo sapiens
  source 1..29: mol_type = genomic DNA
ggttccatggtgtaatggttagcactctg

SEQ ID NO: 38892 - DNA, 30 bp, Homo sapiens; identical to SEQ ID NO: 19931
  source 1..30: mol_type = genomic DNA

SEQ ID NO: 38893 - DNA, 31 bp, Homo sapiens; identical to SEQ ID NO: 19932
  source 1..31: mol_type = genomic DNA

SEQ ID NO: 38894 - DNA, 32 bp, Homo sapiens; identical to SEQ ID NO: 19933
  source 1..32: mol_type = genomic DNA

SEQ ID NO: 38895 - DNA, 33 bp, Homo sapiens; identical to SEQ ID NO: 19934
  source 1..33: mol_type = genomic DNA

SEQ ID NO: 38896 - DNA, 34 bp, Homo sapiens; identical to SEQ ID NO: 19935
  source 1..34: mol_type = genomic DNA

SEQ ID NO: 38897 - DNA, 35 bp, Homo sapiens; identical to SEQ ID NO: 19936
  source 1..35: mol_type = genomic DNA

SEQ ID NO: 38898 - DNA, 36 bp, Homo sapiens; identical to SEQ ID NO: 19937
  source 1..36: mol_type = genomic DNA

SEQ ID NO: 38899 - DNA, 37 bp, Homo sapiens; identical to SEQ ID NO: 19938
  source 1..37: mol_type = genomic DNA

SEQ ID NO: 38900 - DNA, 38 bp, Homo sapiens; identical to SEQ ID NO: 19939
  source 1..38: mol_type = genomic DNA

SEQ ID NO: 38901 - DNA, 39 bp, Homo sapiens; identical to SEQ ID NO: 19940
  source 1..39: mol_type = genomic DNA

SEQ ID NO: 38902 - DNA, 40 bp, Homo sapiens; identical to SEQ ID NO: 19941
  source 1..40: mol_type = genomic DNA

SEQ ID NO: 38903 - DNA, 41 bp, Homo sapiens; identical to SEQ ID NO: 19942
  source 1..41: mol_type = genomic DNA

SEQ ID NO: 38904 - DNA, 42 bp, Homo sapiens; identical to SEQ ID NO: 19943
  source 1..42: mol_type = genomic DNA

SEQ ID NO: 38905 - DNA, 43 bp, Homo sapiens
  source 1..43: mol_type = genomic DNA
ggttccatggtgtaatggttagcactctggactctgaatccag

SEQ ID NO: 38906 - DNA, 44 bp, Homo sapiens; identical to SEQ ID NO: 19944
  source 1..44: mol_type = genomic DNA

SEQ ID NO: 38907 - DNA, 45 bp, Homo sapiens; identical to SEQ ID NO: 19945
  source 1..45: mol_type = genomic DNA

SEQ ID NO: 38908 - DNA, 46 bp, Homo sapiens; identical to SEQ ID NO: 19946
  source 1..46: mol_type = genomic DNA

SEQ ID NO: 38909 - DNA, 47 bp, Homo sapiens; identical to SEQ ID NO: 19947
  source 1..47: mol_type = genomic DNA

SEQ ID NO: 38910 - DNA, 19 bp, Homo sapiens
  source 1..19: mol_type = genomic DNA
ggttccgggttcgagtccc

SEQ ID NO: 38911 - DNA, 28 bp, Homo sapiens
  source 1..28: mol_type = genomic DNA
ggttccgggttcgagtcccggcggagtc

SEQ ID NO: 38912 - DNA, 30 bp, Homo sapiens; identical to SEQ ID NO: 19950
  source 1..30: mol_type = genomic DNA

SEQ ID NO: 38913 - DNA, 31 bp, Homo sapiens; identical to SEQ ID NO: 19951
  source 1..31: mol_type = genomic DNA

SEQ ID NO: 38914 - DNA, 16 bp, Homo sapiens
  source 1..16: mol_type = genomic DNA
ggttcgaaaccgggcg

SEQ ID NO: 38915 - DNA, 17 bp, Homo sapiens
  source 1..17: mol_type = genomic DNA
ggttcgaaaccgggcgg

SEQ ID NO: 38916 - DNA, 18 bp, Homo sapiens
  source 1..18: mol_type = genomic DNA
ggttcgaaaccgggcgga

SEQ ID NO: 38917 - DNA, 19 bp, Homo sapiens
  source 1..19: mol_type = genomic DNA
ggttcgaaaccgggcggaa

SEQ ID NO: 38918 - DNA, 21 bp, Homo sapiens
  source 1..21: mol_type = genomic DNA
ggttcgaaaccgggcggaaac

SEQ ID NO: 38919 - DNA, 22 bp, Homo sapiens
  source 1..22: mol_type = genomic DNA
ggttcgaaaccgggcggaaaca

SEQ ID NO: 38920 - DNA, 23 bp, Homo sapiens
  source 1..23: mol_type = genomic DNA
ggttcgaaaccgggcggaaacac

SEQ ID NO: 38921 - DNA, 24 bp, Homo sapiens
  source 1..24: mol_type = genomic DNA
ggttcgaaaccgggcggaaacacc

SEQ ID NO: 38922 - DNA, 22 bp, Homo sapiens
  source 1..22: mol_type = genomic DNA
ggttcgaaccccgtccgtgcct

SEQ ID NO: 38923 - DNA, 23 bp, Homo sapiens
  source 1..23: mol_type = genomic DNA
ggttcgaaccccgtccgtgcctc

SEQ ID NO: 38924 - DNA, 24 bp, Homo sapiens
  source 1..24: mol_type = genomic DNA
ggttcgaaccctgctcgctgcgcc

SEQ ID NO: 38925 - DNA, 22 bp, Homo sapiens
  source 1..22: mol_type = genomic DNA
ggttcgaatcccaccgctgcca

SEQ ID NO: 38926 - DNA, 24 bp, Homo sapiens
  source 1..24: mol_type = genomic DNA
ggttcgaatcccaccgctgccacc

SEQ ID NO: 38927 - DNA, 24 bp, Homo sapiens
  source 1..24: mol_type = genomic DNA
ggttcgaatcccaccttcgtcgcc

SEQ ID NO: 38928 - DNA, 23 bp, Homo sapiens
  source 1..23: mol_type = genomic DNA
ggttcgaatcccactcctgacac

SEQ ID NO: 38929 - DNA, 24 bp, Homo sapiens
  source 1..24: mol_type = genomic DNA
ggttcgaatcccactcctgacacc

SEQ ID NO: 38930 - DNA, 22 bp, Homo sapiens
  source 1..22: mol_type = genomic DNA
ggttcgaatcccacttctgaca

SEQ ID NO: 38931 - DNA, 24 bp, Homo sapiens
  source 1..24: mol_type = genomic DNA
ggttcgaatcccacttctgacacc

SEQ ID NO: 38932 - DNA, 24 bp, Homo sapiens
  source 1..24: mol_type = genomic DNA
ggttcgaatcccagcggggcctcc

SEQ ID NO: 38933 - DNA, 22 bp, Homo sapiens
  source 1..22: mol_type = genomic DNA
ggttcgaatcccagcggtgcct

SEQ ID NO: 38934 - DNA, 23 bp, Homo sapiens
  source 1..23: mol_type = genomic DNA
ggttcgaatcccagcggtgcctc

SEQ ID NO: 38935 - DNA, 24 bp, Homo sapiens
  source 1..24: mol_type = genomic DNA
ggttcgaatcccagcggtgcctcc

SEQ ID NO: 38936 - DNA, 23 bp, Homo sapiens
  source 1..23: mol_type = genomic DNA
ggttcgaatcccatcctcgtcgc

SEQ ID NO: 38937 - DNA, 24 bp, Homo sapiens
  source 1..24: mol_type = genomic DNA
ggttcgaatcccatcctcgtcgcc

SEQ ID NO: 38938 - DNA, 22 bp, Homo sapiens
  source 1..22: mol_type = genomic DNA
ggttcgaatcccttcgtggttg

SEQ ID NO: 38939 - DNA, 23 bp, Homo sapiens
  source 1..23: mol_type = genomic DNA
ggttcgaatcccttcgtggttgc

SEQ ID NO: 38940 - DNA, 24 bp, Homo sapiens
  source 1..24: mol_type = genomic DNA
ggttcgaatcccttcgtggttgcc

SEQ ID NO: 38941 - DNA, 21 bp, Homo sapiens
  source 1..21: mol_type = genomic DNA
ggttcgaatccgagtcacggc

SEQ ID NO: 38942 - DNA, 22 bp, Homo sapiens
  source 1..22: mol_type = genomic DNA
ggttcgaatccgagtcacggca

SEQ ID NO: 38943 - DNA, 23 bp, Homo sapiens
  source 1..23: mol_type = genomic DNA
ggttcgaatccgagtcacggcac

SEQ ID NO: 38944 - DNA, 22 bp, Homo sapiens
  source 1..22: mol_type = genomic DNA
ggttcgaatccggctcgaagga

SEQ ID NO: 38945 - DNA, 23 bp, Homo sapiens
  source 1..23: mol_type = genomic DNA
ggttcgaatccggctcgaaggac

SEQ ID NO: 38946 - DNA, 24 bp, Homo sapiens
  source 1..24: mol_type = genomic DNA
ggttcgaatccggctcgaaggacc

SEQ ID NO: 38947 - DNA, 23 bp, Homo sapiens
  source 1..23: mol_type = genomic DNA
ggttcgaatccggctcggaggac

SEQ ID NO: 38948 - DNA, 24 bp, Homo sapiens
  source 1..24: mol_type = genomic DNA
ggttcgaatccggctcggaggacc

SEQ ID NO: 38949 - DNA, 23 bp, Homo sapiens
  source 1..23: mol_type = genomic DNA
ggttcgaatcctgccgactacgc

SEQ ID NO: 38950 - DNA, 24 bp, Homo sapiens
  source 1..24: mol_type = genomic DNA
ggttcgaatcctgccgactacgcc

SEQ ID NO: 38951 - DNA, 24 bp, Homo sapiens
  source 1..24: mol_type = genomic DNA
ggttcgaatcctgctcacagcgcc

SEQ ID NO: 38952 - DNA, 22 bp, Homo sapiens
  source 1..22: mol_type = genomic DNA
ggttcgaatcctgttcgtgacg

SEQ ID NO: 38953 - DNA, 23 bp, Homo sapiens
  source 1..23: mol_type = genomic DNA
ggttcgaatcctgttcgtgacgc

SEQ ID NO: 38954 - DNA, 24 bp, Homo sapiens
  source 1..24: mol_type = genomic DNA
ggttcgaatcctgttcgtgacgcc

SEQ ID NO: 38955 - DNA, 21 bp, Homo sapiens
  source 1..21: mol_type = genomic DNA
ggttcgactcccggtatggga

SEQ ID NO: 38956 - DNA, 22 bp, Homo sapiens
  source 1..22: mol_type = genomic DNA
ggttcgactcccggtatgggaa

SEQ ID NO: 38957 - DNA, 23 bp, Homo sapiens
  source 1..23: mol_type = genomic DNA
ggttcgactcccggtatgggaac

SEQ ID NO: 38958 - DNA, 24 bp, Homo sapiens
  source 1..24: mol_type = genomic DNA
ggttcgactcccggtatgggaacc

SEQ ID NO: 38959 - DNA, 16 bp, Homo sapiens
  source 1..16: mol_type = genomic DNA
ggttcgactcccggtg

SEQ ID NO: 38960 - DNA, 18 bp, Homo sapiens
  source 1..18: mol_type = genomic DNA
ggttcgactcccggtgtg

SEQ ID NO: 38961 - DNA, 19 bp, Homo sapiens
  source 1..19: mol_type = genomic DNA
ggttcgactcccggtgtgg

SEQ ID NO: 38962 - DNA, 20 bp, Homo sapiens
  source 1..20: mol_type = genomic DNA
ggttcgactcccggtgtggg

SEQ ID NO: 38963 - DNA, 21 bp, Homo sapiens
  source 1..21: mol_type = genomic DNA
ggttcgactcccggtgtggga

SEQ ID NO: 38964 - DNA, 22 bp, Homo sapiens
  source 1..22: mol_type = genomic DNA
ggttcgactcccggtgtgggaa

SEQ ID NO: 38965 - DNA, 23 bp, Homo sapiens
  source 1..23: mol_type = genomic DNA
ggttcgactcccggtgtgggaac

SEQ ID NO: 38966 - DNA, 24 bp, Homo sapiens
  source 1..24: mol_type = genomic DNA
ggttcgactcccggtgtgggaacc

SEQ ID NO: 38967 - DNA, 23 bp, Homo sapiens
  source 1..23: mol_type = genomic DNA
ggttcgactcctggctggctcgc

SEQ ID NO: 38968 - DNA, 24 bp, Homo sapiens
  source 1..24: mol_type = genomic DNA
ggttcgactcctggctggctcgcc

SEQ ID NO: 38969 - DNA, 24 bp, Homo sapiens
  source 1..24: mol_type = genomic DNA
ggttcgagcccacccagggacgcc

SEQ ID NO: 38970 - DNA, 24 bp, Homo sapiens
  source 1..24: mol_type = genomic DNA
ggttcgagccccacgttgggcgcc

SEQ ID NO: 38971 - DNA, 17 bp, Homo sapiens
  source 1..17: mol_type = genomic DNA
ggttcgagtcccacctg

SEQ ID NO: 38972 - DNA, 24 bp, Homo sapiens
  source 1..24: mol_type = genomic DNA
ggttcgagtcccatctggggtgcc

SEQ ID NO: 38973 - DNA, 24 bp, Homo sapiens
  source 1..24: mol_type = genomic DNA
ggttcgagtcccatctgggtcgcc

SEQ ID NO: 38974 - DNA, 21 bp, Homo sapiens
  source 1..21: mol_type = genomic DNA
ggttcgagtcccggcggagtc

SEQ ID NO: 38975 - DNA, 23 bp, Homo sapiens
  source 1..23: mol_type = genomic DNA
ggttcgagtcccttcgtggtcgc

SEQ ID NO: 38976 - DNA, 24 bp, Homo sapiens
  source 1..24: mol_type = genomic DNA
ggttcgagtcccttcgtggtcgcc

SEQ ID NO: 38977 - DNA, 23 bp, Homo sapiens
  source 1..23: mol_type = genomic DNA
ggttcgagtcctgccgcggtcgc

SEQ ID NO: 38978 - DNA, 24 bp, Homo sapiens
  source 1..24: mol_type = genomic DNA
ggttcgagtcctgccgcggtcgcc

SEQ ID NO: 38979 - DNA, 22 bp, Homo sapiens
  source 1..22: mol_type = genomic DNA
ggttcgatccccagcatctcca

SEQ ID NO: 38980 - DNA, 23 bp, Homo sapiens
  source 1..23: mol_type = genomic DNA
ggttcgatccccagcatctccac

SEQ ID NO: 38981 - DNA, 24 bp, Homo sapiens
  source 1..24: mol_type = genomic DNA
ggttcgatccccagcatctccacc

SEQ ID NO: 38982 - DNA, 16 bp, Homo sapiens
  source 1..16: mol_type = genomic DNA
ggttcgatccccggca

SEQ ID NO: 38983 - DNA, 18 bp, Homo sapiens
  source 1..18: mol_type = genomic DNA
ggttcgatccccggcacc

SEQ ID NO: 38984 - DNA, 18 bp, Homo sapiens
  source 1..18: mol_type = genomic DNA
ggttcgatccccggcatc

SEQ ID NO: 38985 - DNA, 23 bp, Homo sapiens
  source 1..23: mol_type = genomic DNA
ggttcgatccccggcatctccac

SEQ ID NO: 38986 - DNA, 24 bp, Homo sapiens
  source 1..24: mol_type = genomic DNA
ggttcgatccccggcatctccacc

SEQ ID NO: 38987 - DNA, 20 bp, Homo sapiens
  source 1..20: mol_type = genomic DNA
ggttcgatccccgtacgggc

SEQ ID NO: 38988 - DNA, 22 bp, Homo sapiens
  source 1..22: mol_type = genomic DNA
ggttcgatcccgggtttcggca

SEQ ID NO: 38989 - DNA, 23 bp, Homo sapiens
  source 1..23: mol_type = genomic DNA
ggttcgatcccgggtttcggcac

SEQ ID NO: 38990 - DNA, 24 bp, Homo sapiens
  source 1..24: mol_type = genomic DNA
ggttcgatcccgggtttcggcacc

SEQ ID NO: 38991 - DNA, 20 bp, Homo sapiens
  source 1..20: mol_type = genomic DNA
ggttcgattccccgacgggg

SEQ ID NO: 38992 - DNA, 21 bp, Homo sapiens
  source 1..21: mol_type = genomic DNA
ggttcgattccccgacgggga

SEQ ID NO: 38993 - DNA, 22 bp, Homo sapiens
  source 1..22: mol_type = genomic DNA
ggttcgattccccgacggggag

SEQ ID NO: 38994 - DNA, 23 bp, Homo sapiens
  source 1..23: mol_type = genomic DNA
ggttcgattccccgacggggagc

SEQ ID NO: 38995 - DNA, 24 bp, Homo sapiens
  source 1..24: mol_type = genomic DNA
ggttcgattccccgacggggagcc

SEQ ID NO: 38996 - DNA, 25 bp, Homo sapiens
  source 1..25: mol_type = genomic DNA
ggttcgattccccgacggggagcca

SEQ ID NO: 38997 - DNA, 16 bp, Homo sapiens
  source 1..16: mol_type = genomic DNA
ggttcgattcccggcc

SEQ ID NO: 38998 - DNA, 24 bp, Homo sapiens
  source 1..24: mol_type = genomic DNA
ggttcgattcccggccaacgcacc

SEQ ID NO: 38999 - DNA, 24 bp, Homo sapiens
  source 1..24: mol_type = genomic DNA
ggttcgattcccggccaatgcacc

SEQ ID NO: 39000 - DNA, 16 bp, Homo sapiens
  source 1..16: mol_type = genomic DNA
ggttcgattcccgggc

SEQ ID NO: 39001 - DNA, 19 bp, Homo sapiens
  source 1..19: mol_type = genomic DNA
ggttcgattcccgggcggc

SEQ ID NO: 39002 - DNA, 21 bp, Homo sapiens
  source 1..21: mol_type = genomic DNA
ggttcgattcccgggcggcgc

SEQ ID NO: 39003 - DNA, 23 bp, Homo sapiens
  source 1..23: mol_type = genomic DNA
ggttcgattcccgggcggcgcac

SEQ ID NO: 39004 - DNA, 16 bp, Homo sapiens
  source 1..16: mol_type = genomic DNA
ggttcgattcccggtc

SEQ ID NO: 39005 - DNA, 18 bp, Homo sapiens
  source 1..18: mol_type = genomic DNA
ggttcgattcccggtcag

SEQ ID NO: 39006 - DNA, 19 bp, Homo sapiens
  source 1..19: mol_type = genomic DNA
ggttcgattcccggtcagg

SEQ ID NO: 39007 - DNA, 20 bp, Homo sapiens
  source 1..20: mol_type = genomic DNA
ggttcgattcccggtcaggg

SEQ ID NO: 39008 - DNA, 21 bp, Homo sapiens
  source 1..21: mol_type = genomic DNA
ggttcgattcccggtcaggga

SEQ ID NO: 39009 - DNA, 22 bp, Homo sapiens
  source 1..22: mol_type = genomic DNA
ggttcgattcccggtcagggaa

SEQ ID NO: 39010 - DNA, 23 bp, Homo sapiens
  source 1..23: mol_type = genomic DNA
ggttcgattcccggtcagggaac

SEQ ID NO: 39011 - DNA, 24 bp, Homo sapiens
  source 1..24: mol_type = genomic DNA
ggttcgattcccggtcagggaacc

SEQ ID NO: 39012 - DNA, 25 bp, Homo sapiens
  source 1..25: mol_type = genomic DNA
ggttcgattcccggtcagggaacca

SEQ ID NO: 39013 - DNA, 23 bp, Homo sapiens
  source 1..23: mol_type = genomic DNA
ggttcgattcccggtcatggaac

SEQ ID NO: 39014 - DNA, 23 bp, Homo sapiens
  source 1..23: mol_type = genomic DNA
ggttcgattccggctcgaaggac

SEQ ID NO: 39015 - DNA, 24 bp, Homo sapiens
  source 1..24: mol_type = genomic DNA
ggttcgattccggctcgaaggacc

SEQ ID NO: 39016 - DNA, 23 bp, Homo sapiens
  source 1..23: mol_type = genomic DNA
ggttcgattcctggtcagggaac

SEQ ID NO: 39017 - DNA, 25 bp, Homo sapiens
  source 1..25: mol_type = genomic DNA
ggttcgattccttccttttttgcca

SEQ ID NO: 39018 - DNA, 22 bp, Homo sapiens
  source 1..22: mol_type = genomic DNA
ggttcgattctcatagtcctag

SEQ ID NO: 39019 - DNA, 23 bp, Homo sapiens
  source 1..23: mol_type = genomic DNA
ggttcgattctcatagtcctagc

SEQ ID NO: 39020 - DNA, 31 bp, Homo sapiens; identical to SEQ ID NO: 20118
  source 1..31: mol_type = genomic DNA

SEQ ID NO: 39021 - DNA, 21 bp, Homo sapiens
  source 1..21: mol_type = genomic DNA
ggttgtagtccgtgcgagaat

SEQ ID NO: 39022 - DNA, 22 bp, Homo sapiens
  source 1..22: mol_type = genomic DNA
ggttgtagtccgtgcgagaata

SEQ ID NO: 39023 - DNA, 24 bp, Homo sapiens
  source 1..24: mol_type = genomic DNA
ggttgtagtccgtgcgagaatacc

SEQ ID NO: 39024 - DNA, 25 bp, Homo sapiens
  source 1..25: mol_type = genomic DNA
ggttgtagtccgtgcgagaatacca

SEQ ID NO: 39025 - DNA, 17 bp, Homo sapiens
  source 1..17: mol_type = genomic DNA
ggttgtgagttcgagcc

SEQ ID NO: 39026 - DNA, 31 bp, Homo sapiens; identical to SEQ ID NO: 20134
  source 1..31: mol_type = genomic DNA

SEQ ID NO: 39027 - DNA, 31 bp, Homo sapiens
  source 1..31: mol_type = genomic DNA
ggttgtgggttcgagtcccaccagagtcgcc

SEQ ID NO: 39028 - DNA, 24 bp, Homo sapiens
  source 1..24: mol_type = genomic DNA
ggtttaagtcccattggtctagcc

SEQ ID NO: 39029 - DNA, 38 bp, Homo sapiens
  source 1..38: mol_type = genomic DNA
ggtttccccgcgcaggttcgaatcctgccgactacgcc

SEQ ID NO: 39030 - DNA, 34 bp, Homo sapiens; identical to SEQ ID NO: 20146
  source 1..34: mol_type = genomic DNA

SEQ ID NO: 39031 - DNA, 33 bp, Homo sapiens; identical to SEQ ID NO: 20153
  source 1..33: mol_type = genomic DNA

SEQ ID NO: 39032 - DNA, 34 bp, Homo sapiens; identical to SEQ ID NO: 20154
  source 1..34: mol_type = genomic DNA

SEQ ID NO: 39033 - DNA, 44 bp, Homo sapiens; identical to SEQ ID NO: 20164
  source 1..44: mol_type = genomic DNA

SEQ ID NO: 39034 - DNA, 20 bp, Homo sapiens
  source 1..20: mol_type = genomic DNA
ggtttttcatatcattggtc

SEQ ID NO: 39035 - DNA, 21 bp, Homo sapiens
  source 1..21: mol_type = genomic DNA
ggtttttcatatcattggtcg

SEQ ID NO: 39036 - DNA, 26 bp, Homo sapiens
  source 1..26: mol_type = genomic DNA
ggtttttcatatcattggtcgtggtt

SEQ ID NO: 39037 - DNA, 27 bp, Homo sapiens
  source 1..27: mol_type = genomic DNA
ggtttttcatatcattggtcgtggttg

SEQ ID NO: 39038 - DNA, 29 bp, Homo sapiens
  source 1..29: mol_type = genomic DNA
ggtttttcatatcattggtcgtggttgta

SEQ ID NO: 39039 - DNA, 32 bp, Homo sapiens; identical to SEQ ID NO: 20185
  source 1..32: mol_type = genomic DNA

SEQ ID NO: 39040 - DNA, 33 bp, Homo sapiens; identical to SEQ ID NO: 20186
  source 1..33: mol_type = genomic DNA

SEQ ID NO: 39041 - DNA, 34 bp, Homo sapiens; identical to SEQ ID NO: 20187
  source 1..34: mol_type = genomic DNA

SEQ ID NO: 39042 - DNA, 36 bp, Homo sapiens; identical to SEQ ID NO: 20189
  source 1..36: mol_type = genomic DNA

SEQ ID NO: 39043 - DNA, 37 bp, Homo sapiens; identical to SEQ ID NO: 20190
  source 1..37: mol_type = genomic DNA

SEQ ID NO: 39044 - DNA, 38 bp, Homo sapiens; identical to SEQ ID NO: 20191
  source 1..38: mol_type = genomic DNA

SEQ ID NO: 39045 - DNA, 39 bp, Homo sapiens; identical to SEQ ID NO: 20192
  source 1..39: mol_type = genomic DNA

SEQ ID NO: 39046 - DNA, 40 bp, Homo sapiens; identical to SEQ ID NO: 20193
  source 1..40: mol_type = genomic DNA

SEQ ID NO: 39047 - DNA, 41 bp, Homo sapiens; identical to SEQ ID NO: 20194
  source 1..41: mol_type = genomic DNA

SEQ ID NO: 39048 - DNA, 42 bp, Homo sapiens; identical to SEQ ID NO: 20195
  source 1..42: mol_type = genomic DNA

SEQ ID NO: 39049 - DNA, 43 bp, Homo sapiens; identical to SEQ ID NO: 20196
  source 1..43: mol_type = genomic DNA

SEQ ID NO: 39050 - DNA, 44 bp, Homo sapiens; identical to SEQ ID NO: 20197
  source 1..44: mol_type = genomic DNA

SEQ ID NO: 39051 - DNA, 45 bp, Homo sapiens; identical to SEQ ID NO: 20198
  source 1..45: mol_type = genomic DNA

SEQ ID NO: 39052 - DNA, 46 bp, Homo sapiens; identical to SEQ ID NO: 20199
  source 1..46: mol_type = genomic DNA

SEQ ID NO: 39053 - DNA, 47 bp, Homo sapiens; identical to SEQ ID NO: 20200
  source 1..47: mol_type = genomic DNA

SEQ ID NO: 39054 - DNA, 22 bp, Homo sapiens
  source 1..22: mol_type = genomic DNA
gtaaacaggagatcctgggttc

SEQ ID NO: 39055 - DNA, 23 bp, Homo sapiens
  source 1..23: mol_type = genomic DNA
gtaaacaggagatcctgggttcg

SEQ ID NO: 39056 - DNA, 39 bp, Homo sapiens; identical to SEQ ID NO: 20209
  source 1..39: mol_type = genomic DNA

SEQ ID NO: 39057 - DNA, 40 bp, Homo sapiens; identical to SEQ ID NO: 20210
  source 1..40: mol_type = genomic DNA

SEQ ID NO: 39058 - DNA, 41 bp, Homo sapiens; identical to SEQ ID NO: 20211
  source 1..41: mol_type = genomic DNA

SEQ ID NO: 39059 - DNA, 39 bp, Homo sapiens; identical to SEQ ID NO: 20214
  source 1..39: mol_type = genomic DNA

SEQ ID NO: 39060 - DNA, 40 bp, Homo sapiens; identical to SEQ ID NO: 20215
  source 1..40: mol_type = genomic DNA

SEQ ID NO: 39061 - DNA, 41 bp, Homo sapiens; identical to SEQ ID NO: 20216
  source 1..41: mol_type = genomic DNA

SEQ ID NO: 39062 - DNA, 17 bp, Homo sapiens
  source 1..17: mol_type = genomic DNA
gtaaaccaggggtcgcg

SEQ ID NO: 39063 - DNA, 18 bp, Homo sapiens
  source 1..18: mol_type = genomic DNA
gtaaaccaggggtcgcga

SEQ ID NO: 39064 - DNA, 20 bp, Homo sapiens
  source 1..20: mol_type = genomic DNA
gtaaaccgaagatcacgggt

SEQ ID NO: 39065 - DNA, 16 bp, Homo sapiens
  source 1..16: mol_type = genomic DNA
gtaaaccgaagatcgc

SEQ ID NO: 39066 - DNA, 20 bp, Homo sapiens
  source 1..20: mol_type = genomic DNA
gtaaaccgaagatcgcgggt

SEQ ID NO: 39067 - DNA, 21 bp, Homo sapiens
  source 1..21: mol_type = genomic DNA
gtaaaccgaagatcgcgggtt

SEQ ID NO: 39068 - DNA, 19 bp, Homo sapiens
  source 1..19: mol_type = genomic DNA
gtaaaccggagatgaaaac

SEQ ID NO: 39069 - DNA, 33 bp, Homo sapiens; identical to SEQ ID NO: 20240
  source 1..33: mol_type = genomic DNA

SEQ ID NO: 39070 - DNA, 36 bp, Homo sapiens; identical to SEQ ID NO: 20243
  source 1..36: mol_type = genomic DNA

SEQ ID NO: 39071 - DNA, 37 bp, Homo sapiens; identical to SEQ ID NO: 20244
  source 1..37: mol_type = genomic DNA

SEQ ID NO: 39072 - DNA, 29 bp, Homo sapiens
  source 1..29: mol_type = genomic DNA
gtaaggtcagctaaataagctatcgggcc

SEQ ID NO: 39073 - DNA, 30 bp, Homo sapiens; identical to SEQ ID NO: 20279
  source 1..30: mol_type = genomic DNA

SEQ ID NO: 39074 - DNA, 31 bp, Homo sapiens; identical to SEQ ID NO: 20280
  source 1..31: mol_type = genomic DNA

SEQ ID NO: 39075 - DNA, 16 bp, Homo sapiens
  source 1..16: mol_type = genomic DNA
gtaatggttagcactc

SEQ ID NO: 39076 - DNA, 18 bp, Homo sapiens
  source 1..18: mol_type = genomic DNA
gtaatggttagcactctg

SEQ ID NO: 39077 - DNA, 19 bp, Homo sapiens
  source 1..19: mol_type = genomic DNA
gtaatggttagcactctgg

SEQ ID NO: 39078 - DNA, 20 bp, Homo sapiens
  source 1..20: mol_type = genomic DNA
gtaatggttagcactctgga

SEQ ID NO: 39079 - DNA, 21 bp, Homo sapiens
  source 1..21: mol_type = genomic DNA
gtaatggttagcactctggac

SEQ ID NO: 39080 - DNA, 22 bp, Homo sapiens
  source 1..22: mol_type = genomic DNA
gtaatggttagcactctggact

SEQ ID NO: 39081 - DNA, 23 bp, Homo sapiens
  source 1..23: mol_type = genomic DNA
gtaatggttagcactctggactc

SEQ ID NO: 39082 - DNA, 24 bp, Homo sapiens
  source 1..24: mol_type = genomic DNA
gtaatggttagcactctggactct

SEQ ID NO: 39083 - DNA, 25 bp, Homo sapiens
  source 1..25: mol_type = genomic DNA
gtaatggttagcactctggactctg

SEQ ID NO: 39084 - DNA, 27 bp, Homo sapiens
  source 1..27: mol_type = genomic DNA
gtaatggttagcactctggactctgaa

SEQ ID NO: 39085 - DNA, 28 bp, Homo sapiens
  source 1..28: mol_type = genomic DNA
gtaatggttagcactctggactctgaat

SEQ ID NO: 39086 - DNA, 29 bp, Homo sapiens
  source 1..29: mol_type = genomic DNA
gtaatggttagcactctggactctgaatc

SEQ ID NO: 39087 - DNA, 30 bp, Homo sapiens; identical to SEQ ID NO: 20328
  source 1..30: mol_type = genomic DNA

SEQ ID NO: 39088 - DNA, 32 bp, Homo sapiens
  source 1..32: mol_type = genomic DNA
gtaatggttagcactctggactctgaatccag

SEQ ID NO: 39089 - DNA, 34 bp, Homo sapiens; identical to SEQ ID NO: 20329
  source 1..34: mol_type = genomic DNA

SEQ ID NO: 39090 - DNA, 41 bp, Homo sapiens; identical to SEQ ID NO: 20330
  source 1..41: mol_type = genomic DNA

SEQ ID NO: 39091 - DNA, 29 bp, Homo sapiens
  source 1..29: mol_type = genomic DNA
gtaatggttagcactctggactttgaatc

SEQ ID NO: 39092 - DNA, 19 bp, Homo sapiens
  source 1..19: mol_type = genomic DNA
gtactctgcgttgtggccg

SEQ ID NO: 39093 - DNA, 21 bp, Homo sapiens
  source 1..21: mol_type = genomic DNA
gtagaattctcgcctcccacg

SEQ ID NO: 39094 - DNA, 24 bp, Homo sapiens
  source 1..24: mol_type = genomic DNA
gtagaattctcgcctcccacgcgg

SEQ ID NO: 39095 - DNA, 33 bp, Homo sapiens; identical to SEQ ID NO: 20345
  source 1..33: mol_type = genomic DNA

SEQ ID NO: 39096 - DNA, 34 bp, Homo sapiens; identical to SEQ ID NO: 20346
  source 1..34: mol_type = genomic DNA

SEQ ID NO: 39097 - DNA, 36 bp, Homo sapiens; identical to SEQ ID NO: 20348
  source 1..36: mol_type = genomic DNA

SEQ ID NO: 39098 - DNA, 16 bp, Homo sapiens
  source 1..16: mol_type = genomic DNA
gtagaattctcgcctg

SEQ ID NO: 39099 - DNA, 17 bp, Homo sapiens
  source 1..17: mol_type = genomic DNA
gtagaattctcgcctgc

SEQ ID NO: 39100 - DNA, 18 bp, Homo sapiens
  source 1..18: mol_type = genomic DNA
gtagaattctcgcctgcc

SEQ ID NO: 39101 - DNA, 19 bp, Homo sapiens
  source 1..19: mol_type = genomic DNA
gtagaattctcgcctgcca

SEQ ID NO: 39102 - DNA, 20 bp, Homo sapiens
  source 1..20: mol_type = genomic DNA
gtagaattctcgcctgccac

SEQ ID NO: 39103 - DNA, 21 bp, Homo sapiens
  source 1..21: mol_type = genomic DNA
gtagaattctcgcctgccacg

SEQ ID NO: 39104 - DNA, 22 bp, Homo sapiens
  source 1..22: mol_type = genomic DNA
gtagaattctcgcctgccacgc

SEQ ID NO: 39105 - DNA, 23 bp, Homo sapiens
  source 1..23: mol_type = genomic DNA
gtagaattctcgcctgccacgcg

SEQ ID NO: 39106 - DNA, 24 bp, Homo sapiens
  source 1..24: mol_type = genomic DNA
gtagaattctcgcctgccacgcgg

SEQ ID NO: 39107 - DNA, 25 bp, Homo sapiens
  source 1..25: mol_type = genomic DNA
gtagaattctcgcctgccacgcggg

SEQ ID NO: 39108 - DNA, 26 bp, Homo sapiens
  source 1..26: mol_type = genomic DNA
gtagaattctcgcctgccacgcggga

SEQ ID NO: 39109 - DNA, 27 bp, Homo sapiens
  source 1..27: mol_type = genomic DNA
gtagaattctcgcctgccacgcgggag

SEQ ID NO: 39110 - DNA, 30 bp, Homo sapiens; identical to SEQ ID NO: 20363
  source 1..30: mol_type = genomic DNA

SEQ ID NO: 39111 - DNA, 31 bp, Homo sapiens; identical to SEQ ID NO: 20364
  source 1..31: mol_type = genomic DNA

SEQ ID NO: 39112 - DNA, 32 bp, Homo sapiens; identical to SEQ ID NO: 20365
  source 1..32: mol_type = genomic DNA

SEQ ID NO: 39113 - DNA, 33 bp, Homo sapiens; identical to SEQ ID NO: 20366
  source 1..33: mol_type = genomic DNA

SEQ ID NO: 39114 - DNA, 34 bp, Homo sapiens; identical to SEQ ID NO: 20367
  source 1..34: mol_type = genomic DNA

SEQ ID NO: 39115 - DNA, 35 bp, Homo sapiens; identical to SEQ ID NO: 20368
  source 1..35: mol_type = genomic DNA

SEQ ID NO: 39116 - DNA, 36 bp, Homo sapiens; identical to SEQ ID NO: 20369
  source 1..36: mol_type = genomic DNA

SEQ ID NO: 39117 - DNA, 37 bp, Homo sapiens; identical to SEQ ID NO: 20370
  source 1..37: mol_type = genomic DNA

SEQ ID NO: 39118 - DNA, 16 bp, Homo sapiens
  source 1..16: mol_type = genomic DNA
gtagagcatgagaccc

SEQ ID NO: 39119 - DNA, 16 bp, Homo sapiens
  source 1..16: mol_type = genomic DNA
gtagagcatgagactc

SEQ ID NO: 39120 - DNA, 17 bp, Homo sapiens
  source 1..17: mol_type = genomic DNA
gtagagcatgagactct

SEQ ID NO: 39121 - DNA, 23 bp, Homo sapiens
  source 1..23: mol_type = genomic DNA
gtagagcatgagactcttaatct

SEQ ID NO: 39122 - DNA, 34 bp, Homo sapiens; identical to SEQ ID NO: 20393
  source 1..34: mol_type = genomic DNA

SEQ ID NO: 39123 - DNA, 37 bp, Homo sapiens; identical to SEQ ID NO: 20396
  source 1..37: mol_type = genomic DNA

SEQ ID NO: 39124 - DNA, 16 bp, Homo sapiens
  source 1..16: mol_type = genomic DNA
gtagagcatgggactc

SEQ ID NO: 39125 - DNA, 17 bp, Homo sapiens
  source 1..17: mol_type = genomic DNA
gtagagcatgggactct

SEQ ID NO: 39126 - DNA, 23 bp, Homo sapiens
  source 1..23: mol_type = genomic DNA
gtagagcatgggactcttaatcc

SEQ ID NO: 39127 - DNA, 24 bp, Homo sapiens
  source 1..24: mol_type = genomic DNA
gtagagcatgggactcttaatccc

SEQ ID NO: 39128 - DNA, 34 bp, Homo sapiens; identical to SEQ ID NO: 20409
  source 1..34: mol_type = genomic DNA

SEQ ID NO: 39129 - DNA, 37 bp, Homo sapiens; identical to SEQ ID NO: 20411
  source 1..37: mol_type = genomic DNA

SEQ ID NO: 39130 - DNA, 16 bp, Homo sapiens
  source 1..16: mol_type = genomic DNA
gtagagcatttgactg

SEQ ID NO: 39131 - DNA, 17 bp, Homo sapiens
  source 1..17: mol_type = genomic DNA
gtagagcatttgactgc

SEQ ID NO: 39132 - DNA, 18 bp, Homo sapiens
  source 1..18: mol_type = genomic DNA
gtagtccgtgcgagaata

SEQ ID NO: 39133 - DNA, 20 bp, Homo sapiens
  source 1..20: mol_type = genomic DNA
gtagtccgtgcgagaatacc

SEQ ID NO: 39134 - DNA, 21 bp, Homo sapiens
  source 1..21: mol_type = genomic DNA
gtagtccgtgcgagaatacca

SEQ ID NO: 39135 - DNA, 16 bp, Homo sapiens
  source 1..16: mol_type = genomic DNA
gtagtcgtggccgagt

SEQ ID NO: 39136 - DNA, 17 bp, Homo sapiens
  source 1..17: mol_type = genomic DNA
gtagtcgtggccgagtg

SEQ ID NO: 39137 - DNA, 18 bp, Homo sapiens
  source 1..18: mol_type = genomic DNA
gtagtcgtggccgagtgg

SEQ ID NO: 39138 - DNA, 19 bp, Homo sapiens
  source 1..19: mol_type = genomic DNA
gtagtcgtggccgagtggt

SEQ ID NO: 39139 - DNA, 20 bp, Homo sapiens
  source 1..20: mol_type = genomic DNA
gtagtcgtggccgagtggtt

SEQ ID NO: 39140 - DNA, 21 bp, Homo sapiens
  source 1..21: mol_type = genomic DNA
gtagtcgtggccgagtggtta

SEQ ID NO: 39141 - DNA, 22 bp, Homo sapiens
  source 1..22: mol_type = genomic DNA
gtagtcgtggccgagtggttaa

SEQ ID NO: 39142 - DNA, 23 bp, Homo sapiens
  source 1..23: mol_type = genomic DNA
gtagtcgtggccgagtggttaag

SEQ ID NO: 39143 - DNA, 24 bp, Homo sapiens
  source 1..24: mol_type = genomic DNA
gtagtcgtggccgagtggttaagg

SEQ ID NO: 39144 - DNA, 25 bp, Homo sapiens
  source 1..25: mol_type = genomic DNA
gtagtcgtggccgagtggttaaggc

SEQ ID NO: 39145 - DNA, 21 bp, Homo sapiens
  source 1..21: mol_type = genomic DNA
gtagtggtatcatgcaagatt

SEQ ID NO: 39146 - DNA, 22 bp, Homo sapiens
  source 1..22: mol_type = genomic DNA
gtagtggtcatcacgttcgcct

SEQ ID NO: 39147 - DNA, 21 bp, Homo sapiens
  source 1..21: mol_type = genomic DNA
gtagtggttatcacgtctgct

SEQ ID NO: 39148 - DNA, 22 bp, Homo sapiens
  source 1..22: mol_type = genomic DNA
gtagtggttatcacgtctgctt

SEQ ID NO: 39149 - DNA, 22 bp, Homo sapiens
  source 1..22: mol_type = genomic DNA
gtagtggttatcacgttcgcct

SEQ ID NO: 39150 - DNA, 25 bp, Homo sapiens
  source 1..25: mol_type = genomic DNA
gtagtgtagtggttatcacgttcgc

SEQ ID NO: 39151 - DNA, 27 bp, Homo sapiens
  source 1..27: mol_type = genomic DNA
gtagtgtagtggttatcacgttcgcct

SEQ ID NO: 39152 - DNA, 46 bp, Homo sapiens
  source 1..46: mol_type = genomic DNA
gtagtgtagtggttatcacgttcgcctcacacgcgaaaggtccccg

SEQ ID NO: 39153 - DNA, 18 bp, Homo sapiens
  source 1..18: mol_type = genomic DNA
gtatagtggttagtactc

SEQ ID NO: 39154 - DNA, 21 bp, Homo sapiens
  source 1..21: mol_type = genomic DNA
gtatagtggttagtactctgc

SEQ ID NO: 39155 - DNA, 22 bp, Homo sapiens
  source 1..22: mol_type = genomic DNA
gtatagtggttagtactctgcg

SEQ ID NO: 39156 - DNA, 23 bp, Homo sapiens
  source 1..23: mol_type = genomic DNA
gtatagtggttagtactctgcgt

SEQ ID NO: 39157 - DNA, 24 bp, Homo sapiens
  source 1..24: mol_type = genomic DNA
gtatagtggttagtactctgcgtt

SEQ ID NO: 39158 - DNA, 25 bp, Homo sapiens
  source 1..25: mol_type = genomic DNA
gtatagtggttagtactctgcgttg

SEQ ID NO: 39159 - DNA, 26 bp, Homo sapiens
  source 1..26: mol_type = genomic DNA
gtatagtggttagtactctgcgttgt

SEQ ID NO: 39160 - DNA, 27 bp, Homo sapiens
  source 1..27: mol_type = genomic DNA
gtatagtggttagtactctgcgttgtg

SEQ ID NO: 39161 - DNA, 30 bp, Homo sapiens; identical to SEQ ID NO: 20556
  source 1..30: mol_type = genomic DNA

SEQ ID NO: 39162 - DNA, 39 bp, Homo sapiens
  source 1..39: mol_type = genomic DNA
gtatagtggttagtactctgcgttgtggccgcagcaacc

SEQ ID NO: 39163 - DNA, 40 bp, Homo sapiens; identical to SEQ ID NO: 20558
  source 1..40: mol_type = genomic DNA

SEQ ID NO: 39164 - DNA, 35 bp, Homo sapiens
  source 1..35: mol_type = genomic DNA
gtatgaggccccgggttcaatccccggcatctcca

SEQ ID NO: 39165 - DNA, 36 bp, Homo sapiens
  source 1..36: mol_type = genomic DNA
gtatgaggccccgggttcaatccccggcatctccac

SEQ ID NO: 39166 - DNA, 37 bp, Homo sapiens; identical to SEQ ID NO: 20577
  source 1..37: mol_type = genomic DNA

SEQ ID NO: 39167 - DNA, 35 bp, Homo sapiens; identical to SEQ ID NO: 20587
  source 1..35: mol_type = genomic DNA

SEQ ID NO: 39168 - DNA, 36 bp, Homo sapiens; identical to SEQ ID NO: 20588
  source 1..36: mol_type = genomic DNA

SEQ ID NO: 39169 - DNA, 37 bp, Homo sapiens; identical to SEQ ID NO: 20589
  source 1..37: mol_type = genomic DNA

SEQ ID NO: 39170 - DNA, 38 bp, Homo sapiens; identical to SEQ ID NO: 20590
  source 1..38: mol_type = genomic DNA

SEQ ID NO: 39171 - DNA, 35 bp, Homo sapiens; identical to SEQ ID NO: 20596
  source 1..35: mol_type = genomic DNA

SEQ ID NO: 39172 - DNA, 36 bp, Homo sapiens; identical to SEQ ID NO: 20597
  source 1..36: mol_type = genomic DNA

SEQ ID NO: 39173 - DNA, 37 bp, Homo sapiens; identical to SEQ ID NO: 20598
  source 1..37: mol_type = genomic DNA

SEQ ID NO: 39174 - DNA, 38 bp, Homo sapiens
  source 1..38: mol_type = genomic DNA
gtatgaggtcccgggttcgatccccggcatctccacca

SEQ ID NO: 39175 - DNA, 18 bp, Homo sapiens
  source 1..18: mol_type = genomic DNA
gtatgattctcgctttgg

SEQ ID NO: 39176 - DNA, 21 bp, Homo sapiens
  source 1..21: mol_type = genomic DNA
gtatgattctcgctttgggtg

SEQ ID NO: 39177 - DNA, 38 bp, Homo sapiens
  source 1..38: mol_type = genomic DNA
gtatgattctcgctttgggtgcgagaggtcccgggttc

SEQ ID NO: 39178 - DNA, 22 bp, Homo sapiens
  source 1..22: mol_type = genomic DNA
gtatgattctcggtttgggtcc

SEQ ID NO: 39179 - DNA, 23 bp, Homo sapiens
  source 1..23: mol_type = genomic DNA
gtatgattctcggtttgggtccg

SEQ ID NO: 39180 - DNA, 26 bp, Homo sapiens
  source 1..26: mol_type = genomic DNA
gtatgattctcggtttgggtccgaga

SEQ ID NO: 39181 - DNA, 38 bp, Homo sapiens
  source 1..38: mol_type = genomic DNA
gtatgattctcggtttgggtccgagaggtcccgggttc

SEQ ID NO: 39182 - DNA, 40 bp, Homo sapiens; identical to SEQ ID NO: 20625
  source 1..40: mol_type = genomic DNA

SEQ ID NO: 39183 - DNA, 40 bp, Homo sapiens; identical to SEQ ID NO: 20633
  source 1..40: mol_type = genomic DNA

SEQ ID NO: 39184 - DNA, 41 bp, Homo sapiens; identical to SEQ ID NO: 20634
  source 1..41: mol_type = genomic DNA

SEQ ID NO: 39185 - DNA, 42 bp, Homo sapiens; identical to SEQ ID NO: 20635
  source 1..42: mol_type = genomic DNA

SEQ ID NO: 39186 - DNA, 16 bp, Homo sapiens
  source 1..16: mol_type = genomic DNA
gtcacggtggccgagt

SEQ ID NO: 39187 - DNA, 18 bp, Homo sapiens
  source 1..18: mol_type = genomic DNA
gtcacggtggccgagtgg

SEQ ID NO: 39188 - DNA, 24 bp, Homo sapiens
  source 1..24: mol_type = genomic DNA
gtcacggtggccgagtggttaagg

SEQ ID NO: 39189 - DNA, 25 bp, Homo sapiens
  source 1..25: mol_type = genomic DNA
gtcacggtggccgagtggttaaggc

SEQ ID NO: 39190 - DNA, 16 bp, Homo sapiens
  source 1..16: mol_type = genomic DNA
gtcacgtcggggtcac

SEQ ID NO: 39191 - DNA, 17 bp, Homo sapiens
  source 1..17: mol_type = genomic DNA
gtcacgtcggggtcacc

SEQ ID NO: 39192 - DNA, 18 bp, Homo sapiens
  source 1..18: mol_type = genomic DNA
gtcacgtcggggtcacca

SEQ ID NO: 39193 - DNA, 23 bp, Homo sapiens
  source 1..23: mol_type = genomic DNA
gtcagctaaataagctatcgggc

SEQ ID NO: 39194 - DNA, 24 bp, Homo sapiens
  source 1..24: mol_type = genomic DNA
gtcagctaaataagctatcgggcc

SEQ ID NO: 39195 - DNA, 26 bp, Homo sapiens
  source 1..26: mol_type = genomic DNA
gtcagctaaataagctatcgggccca

SEQ ID NO: 39196 - DNA, 16 bp, Homo sapiens
  source 1..16: mol_type = genomic DNA
gtcaggatggccgagc

SEQ ID NO: 39197 - DNA, 17 bp, Homo sapiens
  source 1..17: mol_type = genomic DNA
gtcaggatggccgagcg

SEQ ID NO: 39198 - DNA, 18 bp, Homo sapiens
  source 1..18: mol_type = genomic DNA
gtcaggatggccgagcgg

SEQ ID NO: 39199 - DNA, 19 bp, Homo sapiens
  source 1..19: mol_type = genomic DNA
gtcaggatggccgagcggt

SEQ ID NO: 39200 - DNA, 20 bp, Homo sapiens
  source 1..20: mol_type = genomic DNA
gtcaggatggccgagcggtc

SEQ ID NO: 39201 - DNA, 21 bp, Homo sapiens
  source 1..21: mol_type = genomic DNA
gtcaggatggccgagcggtct

SEQ ID NO: 39202 - DNA, 22 bp, Homo sapiens
  source 1..22: mol_type = genomic DNA
gtcaggatggccgagcggtcta

SEQ ID NO: 39203 - DNA, 23 bp, Homo sapiens
  source 1..23: mol_type = genomic DNA
gtcaggatggccgagcggtctaa

SEQ ID NO: 39204 - DNA, 24 bp, Homo sapiens
  source 1..24: mol_type = genomic DNA
gtcaggatggccgagcggtctaag

SEQ ID NO: 39205 - DNA, 25 bp, Homo sapiens
  source 1..25: mol_type = genomic DNA
gtcaggatggccgagcggtctaagg

SEQ ID NO: 39206 - DNA, 26 bp, Homo sapiens
  source 1..26: mol_type = genomic DNA
gtcaggatggccgagcggtctaaggc

SEQ ID NO: 39207 - DNA, 29 bp, Homo sapiens
  source 1..29: mol_type = genomic DNA
gtcaggatggccgagcggtctaaggcgct

SEQ ID NO: 39208 - DNA, 30 bp, Homo sapiens; identical to SEQ ID NO: 20674
  source 1..30: mol_type = genomic DNA

SEQ ID NO: 39209 - DNA, 31 bp, Homo sapiens; identical to SEQ ID NO: 20675
  source 1..31: mol_type = genomic DNA

SEQ ID NO: 39210 - DNA, 32 bp, Homo sapiens; identical to SEQ ID NO: 20676
  source 1..32: mol_type = genomic DNA

SEQ ID NO: 39211 - DNA, 33 bp, Homo sapiens; identical to SEQ ID NO: 20677
  source 1..33: mol_type = genomic DNA

SEQ ID NO: 39212 - DNA, 34 bp, Homo sapiens; identical to SEQ ID NO: 20678
  source 1..34: mol_type = genomic DNA

SEQ ID NO: 39213 - DNA, 35 bp, Homo sapiens; identical to SEQ ID NO: 20679
  source 1..35: mol_type = genomic DNA

SEQ ID NO: 39214 - DNA, 36 bp, Homo sapiens; identical to SEQ ID NO: 20680
  source 1..36: mol_type = genomic DNA

SEQ ID NO: 39215 - DNA, 16 bp, Homo sapiens
  source 1..16: mol_type = genomic DNA
gtcaggatggccgagt

SEQ ID NO: 39216 - DNA, 17 bp, Homo sapiens
  source 1..17: mol_type = genomic DNA
gtcaggatggccgagtg

SEQ ID NO: 39217 - DNA, 18 bp, Homo sapiens
  source 1..18: mol_type = genomic DNA
gtcaggatggccgagtgg

SEQ ID NO: 39218 - DNA, 19 bp, Homo sapiens
  source 1..19: mol_type = genomic DNA
gtcaggatggccgagtggt

SEQ ID NO: 39219 - DNA, 20 bp, Homo sapiens
  source 1..20: mol_type = genomic DNA
gtcaggatggccgagtggtc

SEQ ID NO: 39220 - DNA, 21 bp, Homo sapiens
  source 1..21: mol_type = genomic DNA
gtcaggatggccgagtggtct

SEQ ID NO: 39221 - DNA, 22 bp, Homo sapiens
  source 1..22: mol_type = genomic DNA
gtcaggatggccgagtggtcta

SEQ ID NO: 39222 - DNA, 23 bp, Homo sapiens
  source 1..23: mol_type = genomic DNA
gtcaggatggccgagtggtctaa

SEQ ID NO: 39223 - DNA, 24 bp, Homo sapiens
  source 1..24: mol_type = genomic DNA
gtcaggatggccgagtggtctaag

SEQ ID NO: 39224 - DNA, 25 bp, Homo sapiens
  source 1..25: mol_type = genomic DNA
gtcaggatggccgagtggtctaagg

SEQ ID NO: 39225 - DNA, 26 bp, Homo sapiens
  source 1..26: mol_type = genomic DNA
gtcaggatggccgagtggtctaaggc

SEQ ID NO: 39226 - DNA, 29 bp, Homo sapiens
  source 1..29: mol_type = genomic DNA
gtcaggatggccgagtggtctaaggcgcc

SEQ ID NO: 39227 - DNA, 32 bp, Homo sapiens; identical to SEQ ID NO: 20695
  source 1..32: mol_type = genomic DNA

SEQ ID NO: 39228 - DNA, 33 bp, Homo sapiens; identical to SEQ ID NO: 20696
  source 1..33: mol_type = genomic DNA

SEQ ID NO: 39229 - DNA, 34 bp, Homo sapiens; identical to SEQ ID NO: 20697
  source 1..34: mol_type = genomic DNA

SEQ ID NO: 39230 - DNA, 18 bp, Homo sapiens
  source 1..18: mol_type = genomic DNA
gtcagtagagcatcagac

SEQ ID NO: 39231 - DNA, 28 bp, Homo sapiens
  source 1..28: mol_type = genomic DNA
gtccagggttcaagtccctgttcgggcg

SEQ ID NO: 39232 - DNA, 29 bp, Homo sapiens
  source 1..29: mol_type = genomic DNA
gtccagggttcaagtccctgttcgggcgc

SEQ ID NO: 39233 - DNA, 30 bp, Homo sapiens; identical to SEQ ID NO: 20712
  source 1..30: mol_type = genomic DNA

SEQ ID NO: 39234 - DNA, 16 bp, Homo sapiens
  source 1..16: mol_type = genomic DNA
gtcccaccagagtcgc

SEQ ID NO: 39235 - DNA, 17 bp, Homo sapiens
  source 1..17: mol_type = genomic DNA
gtcccaccagagtcgcc

SEQ ID NO: 39236 - DNA, 17 bp, Homo sapiens
  source 1..17: mol_type = genomic DNA
gtcccacctggggtacc

SEQ ID NO: 39237 - DNA, 18 bp, Homo sapiens
  source 1..18: mol_type = genomic DNA
gtcccacctggggtgcca

SEQ ID NO: 39238 - DNA, 17 bp, Homo sapiens
  source 1..17: mol_type = genomic DNA
gtcccatctggggtgcc

SEQ ID NO: 39239 - DNA, 17 bp, Homo sapiens
  source 1..17: mol_type = genomic DNA
gtcccatctgggtcgcc

SEQ ID NO: 39240 - DNA, 28 bp, Homo sapiens
  source 1..28: mol_type = genomic DNA
gtcccatggtgtaatggttagcactctg

SEQ ID NO: 39241 - DNA, 16 bp, Homo sapiens
  source 1..16: mol_type = genomic DNA
gtcccggcggagtcgc

SEQ ID NO: 39242 - DNA, 17 bp, Homo sapiens
  source 1..17: mol_type = genomic DNA
gtcccggcggagtcgcc

SEQ ID NO: 39243 - DNA, 18 bp, Homo sapiens
  source 1..18: mol_type = genomic DNA
gtcccggcggagtcgcca

SEQ ID NO: 39244 - DNA, 30 bp, Homo sapiens; identical to SEQ ID NO: 20753
  source 1..30: mol_type = genomic DNA

SEQ ID NO: 39245 - DNA, 27 bp, Homo sapiens
  source 1..27: mol_type = genomic DNA
gtccctggttcgatcccgggtttcggc

SEQ ID NO: 39246 - DNA, 29 bp, Homo sapiens
  source 1..29: mol_type = genomic DNA
gtccctggttcgatcccgggtttcggcac

SEQ ID NO: 39247 - DNA, 16 bp, Homo sapiens
  source 1..16: mol_type = genomic DNA
gtccctgtccaggcgc

SEQ ID NO: 39248 - DNA, 16 bp, Homo sapiens
  source 1..16: mol_type = genomic DNA
gtccctgttcgggcgc

SEQ ID NO: 39249 - DNA, 17 bp, Homo sapiens
  source 1..17: mol_type = genomic DNA
gtccctgttcgggcgcc

SEQ ID NO: 39250 - DNA, 18 bp, Homo sapiens
  source 1..18: mol_type = genomic DNA
gtccctgttcgggcgcca

SEQ ID NO: 39251 - DNA, 16 bp, Homo sapiens
  source 1..16: mol_type = genomic DNA
gtcccttcgtggtcgc

SEQ ID NO: 39252 - DNA, 17 bp, Homo sapiens
  source 1..17: mol_type = genomic DNA
gtcccttcgtggtcgcc

SEQ ID NO: 39253 - DNA, 18 bp, Homo sapiens
  source 1..18: mol_type = genomic DNA
gtcccttcgtggtcgcca

SEQ ID NO: 39254 - DNA, 16 bp, Homo sapiens
  source 1..16: mol_type = genomic DNA
gtcctgccgcggtcgc

SEQ ID NO: 39255 - DNA, 17 bp, Homo sapiens
  source 1..17: mol_type = genomic DNA
gtcctgccgcggtcgcc

SEQ ID NO: 39256 - DNA, 18 bp, Homo sapiens
  source 1..18: mol_type = genomic DNA
gtcctgccgcggtcgcca

SEQ ID NO: 39257 - DNA, 29 bp, Homo sapiens
  source 1..29: mol_type = genomic DNA
gtcctgggttcgagccccagtggaaccac

SEQ ID NO: 39258 - DNA, 30 bp, Homo sapiens; identical to SEQ ID NO: 20796
  source 1..30: mol_type = genomic DNA

SEQ ID NO: 39259 - DNA, 17 bp, Homo sapiens
  source 1..17: mol_type = genomic DNA
gtccttgtagtataaac

SEQ ID NO: 39260 - DNA, 18 bp, Homo sapiens
  source 1..18: mol_type = genomic DNA
gtccttgtagtataaact

SEQ ID NO: 39261 - DNA, 22 bp, Homo sapiens
  source 1..22: mol_type = genomic DNA
gtccttgtagtataaactaata

SEQ ID NO: 39262 - DNA, 27 bp, Homo sapiens
  source 1..27: mol_type = genomic DNA
gtccttgtagtataaactaatacacca

SEQ ID NO: 39263 - DNA, 28 bp, Homo sapiens
  source 1..28: mol_type = genomic DNA
gtccttgtagtataaactaatacaccag

SEQ ID NO: 39264 - DNA, 29 bp, Homo sapiens
  source 1..29: mol_type = genomic DNA
gtccttgtagtataaactaatacaccagt

SEQ ID NO: 39265 - DNA, 17 bp, Homo sapiens
  source 1..17: mol_type = genomic DNA
gtcgatggatcgaaacc

SEQ ID NO: 39266 - DNA, 30 bp, Homo sapiens; identical to SEQ ID NO: 20825
  source 1..30: mol_type = genomic DNA

SEQ ID NO: 39267 - DNA, 29 bp, Homo sapiens
  source 1..29: mol_type = genomic DNA
gtcgcgagttcaaatctcgctggggcctc

SEQ ID NO: 39268 - DNA, 29 bp, Homo sapiens
  source 1..29: mol_type = genomic DNA
gtcgctggttcgaatccggctcgaaggac

SEQ ID NO: 39269 - DNA, 30 bp, Homo sapiens; identical to SEQ ID NO: 20847
  source 1..30: mol_type = genomic DNA

SEQ ID NO: 39270 - DNA, 29 bp, Homo sapiens
  source 1..29: mol_type = genomic DNA
gtcgctggttcgaatccggctcggaggac

SEQ ID NO: 39271 - DNA, 30 bp, Homo sapiens; identical to SEQ ID NO: 20850
  source 1..30: mol_type = genomic DNA

SEQ ID NO: 39272 - DNA, 30 bp, Homo sapiens; identical to SEQ ID NO: 20851
  source 1..30: mol_type = genomic DNA

SEQ ID NO: 39273 - DNA, 29 bp, Homo sapiens
  source 1..29: mol_type = genomic DNA
gtcgctggttcgattccggctcgaaggac

SEQ ID NO: 39274 - DNA, 30 bp, Homo sapiens; identical to SEQ ID NO: 20854
  source 1..30: mol_type = genomic DNA

SEQ ID NO: 39275 - DNA, 18 bp, Homo sapiens
  source 1..18: mol_type = genomic DNA
gtcggtagagcataagac

SEQ ID NO: 39276 - DNA, 17 bp, Homo sapiens
  source 1..17: mol_type = genomic DNA
gtcggtagagcatcaga

SEQ ID NO: 39277 - DNA, 18 bp, Homo sapiens
  source 1..18: mol_type = genomic DNA
gtcggtagagcatcagac

SEQ ID NO: 39278 - DNA, 19 bp, Homo sapiens
  source 1..19: mol_type = genomic DNA
gtcggtagagcatcagact

SEQ ID NO: 39279 - DNA, 16 bp, Homo sapiens
  source 1..16: mol_type = genomic DNA
gtcggtagagcatgag

SEQ ID NO: 39280 - DNA, 17 bp, Homo sapiens
  source 1..17: mol_type = genomic DNA
gtcggtagagcatgaga

SEQ ID NO: 39281 - DNA, 18 bp, Homo sapiens
  source 1..18: mol_type = genomic DNA
gtcggtagagcatgagac

SEQ ID NO: 39282 - DNA, 19 bp, Homo sapiens
  source 1..19: mol_type = genomic DNA
gtcggtagagcatgagacc

SEQ ID NO: 39283 - DNA, 20 bp, Homo sapiens
  source 1..20: mol_type = genomic DNA
gtcggtagagcatgagaccc

SEQ ID NO: 39284 - DNA, 25 bp, Homo sapiens
  source 1..25: mol_type = genomic DNA
gtcggtagagcatgagacccttaat

SEQ ID NO: 39285 - DNA, 26 bp, Homo sapiens
  source 1..26: mol_type = genomic DNA
gtcggtagagcatgagacccttaatc

SEQ ID NO: 39286 - DNA, 19 bp, Homo sapiens
  source 1..19: mol_type = genomic DNA
gtcggtagagcatgagact

SEQ ID NO: 39287 - DNA, 20 bp, Homo sapiens
  source 1..20: mol_type = genomic DNA
gtcggtagagcatgagactc

SEQ ID NO: 39288 - DNA, 21 bp, Homo sapiens
  source 1..21: mol_type = genomic DNA
gtcggtagagcatgagactct

SEQ ID NO: 39289 - DNA, 26 bp, Homo sapiens
  source 1..26: mol_type = genomic DNA
gtcggtagagcatgagactcttaatc

SEQ ID NO: 39290 - DNA, 27 bp, Homo sapiens
  source 1..27: mol_type = genomic DNA
gtcggtagagcatgagactcttaatct

SEQ ID NO: 39291 - DNA, 28 bp, Homo sapiens
  source 1..28: mol_type = genomic DNA
gtcggtagagcatgagactcttaatctc

SEQ ID NO: 39292 - DNA, 29 bp, Homo sapiens
  source 1..29: mol_type = genomic DNA
gtcggtagagcatgagactcttaatctca

SEQ ID NO: 39293 - DNA, 38 bp, Homo sapiens; identical to SEQ ID NO: 20891
  source 1..38: mol_type = genomic DNA

SEQ ID NO: 39294 - DNA, 41 bp, Homo sapiens; identical to SEQ ID NO: 20894
  source 1..41: mol_type = genomic DNA

SEQ ID NO: 39295 - DNA, 16 bp, Homo sapiens
  source 1..16: mol_type = genomic DNA
gtcggtagagcatggg

SEQ ID NO: 39296 - DNA, 17 bp, Homo sapiens
  source 1..17: mol_type = genomic DNA
gtcggtagagcatggga

SEQ ID NO: 39297 - DNA, 18 bp, Homo sapiens
  source 1..18: mol_type = genomic DNA
gtcggtagagcatgggac

SEQ ID NO: 39298 - DNA, 19 bp, Homo sapiens
  source 1..19: mol_type = genomic DNA
gtcggtagagcatgggact

SEQ ID NO: 39299 - DNA, 20 bp, Homo sapiens
  source 1..20: mol_type = genomic DNA
gtcggtagagcatgggactc

SEQ ID NO: 39300 - DNA, 21 bp, Homo sapiens
  source 1..21: mol_type = genomic DNA
gtcggtagagcatgggactct

SEQ ID NO: 39301 - DNA, 26 bp, Homo sapiens
  source 1..26: mol_type = genomic DNA
gtcggtagagcatgggactcttaatc

SEQ ID NO: 39302 - DNA, 27 bp, Homo sapiens
  source 1..27: mol_type = genomic DNA
gtcggtagagcatgggactcttaatcc

SEQ ID NO: 39303 - DNA, 28 bp, Homo sapiens
  source 1..28: mol_type = genomic DNA
gtcggtagagcatgggactcttaatccc

SEQ ID NO: 39304 - DNA, 41 bp, Homo sapiens; identical to SEQ ID NO: 20917
  source 1..41: mol_type = genomic DNA

SEQ ID NO: 39305 - DNA, 27 bp, Homo sapiens
  source 1..27: mol_type = genomic DNA
gtcgtgggttcgagccccacgttgggc

SEQ ID NO: 39306 - DNA, 28 bp, Homo sapiens
  source 1..28: mol_type = genomic DNA
gtcgtgggttcgagccccacgttgggcg

SEQ ID NO: 39307 - DNA, 29 bp, Homo sapiens
  source 1..29: mol_type = genomic DNA
gtcgtgggttcgagccccacgttgggcgc

SEQ ID NO: 39308 - DNA, 30 bp, Homo sapiens; identical to SEQ ID NO: 20938
  source 1..30: mol_type = genomic DNA

SEQ ID NO: 39309 - DNA, 24 bp, Homo sapiens
  source 1..24: mol_type = genomic DNA
gtcgtggttgtagtccgtgcgaga

SEQ ID NO: 39310 - DNA, 25 bp, Homo sapiens
  source 1..25: mol_type = genomic DNA
gtcgtggttgtagtccgtgcgagaa

SEQ ID NO: 39311 - DNA, 27 bp, Homo sapiens
  source 1..27: mol_type = genomic DNA
gtcgtggttgtagtccgtgcgagaata

SEQ ID NO: 39312 - DNA, 29 bp, Homo sapiens
  source 1..29: mol_type = genomic DNA
gtcgtggttgtagtccgtgcgagaatacc

SEQ ID NO: 39313 - DNA, 30 bp, Homo sapiens; identical to SEQ ID NO: 20954
  source 1..30: mol_type = genomic DNA

SEQ ID NO: 39314 - DNA, 16 bp, Homo sapiens
  source 1..16: mol_type = genomic DNA
gtctagcggttaggat

SEQ ID NO: 39315 - DNA, 17 bp, Homo sapiens
  source 1..17: mol_type = genomic DNA
gtctagcggttaggatt

SEQ ID NO: 39316 - DNA, 19 bp, Homo sapiens
  source 1..19: mol_type = genomic DNA
gtctagcggttaggattcc

SEQ ID NO: 39317 - DNA, 24 bp, Homo sapiens
  source 1..24: mol_type = genomic DNA
gtctagcggttaggattcctggtt

SEQ ID NO: 39318 - DNA, 26 bp, Homo sapiens
  source 1..26: mol_type = genomic DNA
gtctagcggttaggattcctggtttt

SEQ ID NO: 39319 - DNA, 23 bp, Homo sapiens
  source 1..23: mol_type = genomic DNA
gtctaggggtatgattctcgctt

SEQ ID NO: 39320 - DNA, 23 bp, Homo sapiens
  source 1..23: mol_type = genomic DNA
gtctaggggtatgattctcggtt

SEQ ID NO: 39321 - DNA, 17 bp, Homo sapiens
  source 1..17: mol_type = genomic DNA
gtctagtggttaggatt

SEQ ID NO: 39322 - DNA, 22 bp, Homo sapiens
  source 1..22: mol_type = genomic DNA
gtctagtggttaggattcggcg

SEQ ID NO: 39323 - DNA, 23 bp, Homo sapiens
  source 1..23: mol_type = genomic DNA
gtctagtggttaggattcggcgc

SEQ ID NO: 39324 - DNA, 24 bp, Homo sapiens
  source 1..24: mol_type = genomic DNA
gtctagtggttaggattcggcgct

SEQ ID NO: 39325 - DNA, 25 bp, Homo sapiens
  source 1..25: mol_type = genomic DNA
gtctagtggttaggattcggcgctc

SEQ ID NO: 39326 - DNA, 40 bp, Homo sapiens; identical to SEQ ID NO: 21013
  source 1..40: mol_type = genomic DNA

SEQ ID NO: 39327 - DNA, 16 bp, Homo sapiens
  source 1..16: mol_type = genomic DNA
gtctcggtggaacctc

SEQ ID NO: 39328 - DNA, 17 bp, Homo sapiens
  source 1..17: mol_type = genomic DNA
gtctcggtggaacctcc

SEQ ID NO: 39329 - DNA, 16 bp, Homo sapiens
  source 1..16: mol_type = genomic DNA
gtctctgtggcgcaat

SEQ ID NO: 39330 - DNA, 18 bp, Homo sapiens
  source 1..18: mol_type = genomic DNA
gtctctgtggcgcaatcg

SEQ ID NO: 39331 - DNA, 19 bp, Homo sapiens
  source 1..19: mol_type = genomic DNA
gtctctgtggcgcaatcgg

SEQ ID NO: 39332 - DNA, 20 bp, Homo sapiens
  source 1..20: mol_type = genomic DNA
gtctctgtggcgcaatcggt

SEQ ID NO: 39333 - DNA, 19 bp, Homo sapiens
  source 1..19: mol_type = genomic DNA
gtctctgtggcgcaatgga

SEQ ID NO: 39334 - DNA, 20 bp, Homo sapiens
  source 1..20: mol_type = genomic DNA
gtctctgtggcgcaatggac

SEQ ID NO: 39335 - DNA, 21 bp, Homo sapiens
  source 1..21: mol_type = genomic DNA
gtctctgtggcgcaatggacg

SEQ ID NO: 39336 - DNA, 16 bp, Homo sapiens
  source 1..16: mol_type = genomic DNA
gtgaagcattggactg

SEQ ID NO: 39337 - DNA, 17 bp, Homo sapiens
  source 1..17: mol_type = genomic DNA
gtgaagcattggactgt

SEQ ID NO: 39338 - DNA, 18 bp, Homo sapiens
  source 1..18: mol_type = genomic DNA
gtgaagcattggactgta

SEQ ID NO: 39339 - DNA, 20 bp, Homo sapiens
  source 1..20: mol_type = genomic DNA
gtgaagcattggactgtaaa

SEQ ID NO: 39340 - DNA, 22 bp, Homo sapiens
  source 1..22: mol_type = genomic DNA
gtgaagcattggactgtaaatc

SEQ ID NO: 39341 - DNA, 24 bp, Homo sapiens
  source 1..24: mol_type = genomic DNA
gtgaagcattggactgtaaatcta

SEQ ID NO: 39342 - DNA, 25 bp, Homo sapiens
  source 1..25: mol_type = genomic DNA
gtgaagcattggactgtaaatctaa

SEQ ID NO: 39343 - DNA, 17 bp, Homo sapiens
  source 1..17: mol_type = genomic DNA
gtgaatctgacaacaga

SEQ ID NO: 39344 - DNA, 42 bp, Homo sapiens; identical to SEQ ID NO: 21099
  source 1..42: mol_type = genomic DNA

SEQ ID NO: 39345 - DNA, 32 bp, Homo sapiens
  source 1..32: mol_type = genomic DNA
gtgagaggtcccgggttcaaatcccggacgag

SEQ ID NO: 39346 - DNA, 33 bp, Homo sapiens
  source 1..33: mol_type = genomic DNA
gtgagaggtcccgggttcaaatcccggacgagc

SEQ ID NO: 39347 - DNA, 34 bp, Homo sapiens
  source 1..34: mol_type = genomic DNA
gtgagaggtcccgggttcaaatcccggacgagcc

SEQ ID NO: 39348 - DNA, 35 bp, Homo sapiens; identical to SEQ ID NO: 21100
  source 1..35: mol_type = genomic DNA

SEQ ID NO: 39349 - DNA, 36 bp, Homo sapiens; identical to SEQ ID NO: 21101
  source 1..36: mol_type = genomic DNA

SEQ ID NO: 39350 - DNA, 24 bp, Homo sapiens
  source 1..24: mol_type = genomic DNA
gtgagcactctggactctgaatcc

SEQ ID NO: 39351 - DNA, 27 bp, Homo sapiens
  source 1..27: mol_type = genomic DNA
gtgagcactctggactctgaatccagc

SEQ ID NO: 39352 - DNA, 34 bp, Homo sapiens
  source 1..34: mol_type = genomic DNA
gtgagcatagctgccttccaagcagttgacccgg

SEQ ID NO: 39353 - DNA, 35 bp, Homo sapiens
  source 1..35: mol_type = genomic DNA
gtgagcatagctgccttccaagcagttgacccggg

SEQ ID NO: 39354 - DNA, 19 bp, Homo sapiens
  source 1..19: mol_type = genomic DNA
gtgagtatccccgcctgtc

SEQ ID NO: 39355 - DNA, 27 bp, Homo sapiens
  source 1..27: mol_type = genomic DNA
gtgagtatccccgcctgtcacgcggga

SEQ ID NO: 39356 - DNA, 26 bp, Homo sapiens
  source 1..26: mol_type = genomic DNA
gtgatcgtatagtggttagtactctg

SEQ ID NO: 39357 - DNA, 27 bp, Homo sapiens
  source 1..27: mol_type = genomic DNA
gtgatcgtatagtggttagtactctgc

SEQ ID NO: 39358 - DNA, 28 bp, Homo sapiens
  source 1..28: mol_type = genomic DNA
gtgatcgtatagtggttagtactctgcg

SEQ ID NO: 39359 - DNA, 29 bp, Homo sapiens
  source 1..29: mol_type = genomic DNA
gtgatcgtatagtggttagtactctgcgt

SEQ ID NO: 39360 - DNA, 30 bp, Homo sapiens; identical to SEQ ID NO: 21138
  source 1..30: mol_type = genomic DNA

SEQ ID NO: 39361 - DNA, 32 bp, Homo sapiens; identical to SEQ ID NO: 21140
  source 1..32: mol_type = genomic DNA

SEQ ID NO: 39362 - DNA, 33 bp, Homo sapiens; identical to SEQ ID NO: 21141
  source 1..33: mol_type = genomic DNA

SEQ ID NO: 39363 - DNA, 23 bp, Homo sapiens
  source 1..23: mol_type = genomic DNA
gtgcaactccaaataaaagtacc

SEQ ID NO: 39364 - DNA, 21 bp, Homo sapiens
  source 1..21: mol_type = genomic DNA
gtgcagtggtagaattctcgc

SEQ ID NO: 39365 - DNA, 22 bp, Homo sapiens
  source 1..22: mol_type = genomic DNA
gtgcagtggtagaattctcgcc

SEQ ID NO: 39366 - DNA, 23 bp, Homo sapiens
  source 1..23: mol_type = genomic DNA
gtgcagtggtagaattctcgcct

SEQ ID NO: 39367 - DNA, 37 bp, Homo sapiens
  source 1..37: mol_type = genomic DNA
gtgcgagaggtcccgggttcaaatcccggacgagccc

SEQ ID NO: 39368 - DNA, 38 bp, Homo sapiens; identical to SEQ ID NO: 21160
  source 1..38: mol_type = genomic DNA

SEQ ID NO: 39369 - DNA, 39 bp, Homo sapiens; identical to SEQ ID NO: 21161
  source 1..39: mol_type = genomic DNA

SEQ ID NO: 39370 - DNA, 34 bp, Homo sapiens; identical to SEQ ID NO: 21174
  source 1..34: mol_type = genomic DNA

SEQ ID NO: 39371 - DNA, 35 bp, Homo sapiens; identical to SEQ ID NO: 21175
  source 1..35: mol_type = genomic DNA

SEQ ID NO: 39372 - DNA, 36 bp, Homo sapiens; identical to SEQ ID NO: 21176
  source 1..36: mol_type = genomic DNA

SEQ ID NO: 39373 - DNA, 28 bp, Homo sapiens
  source 1..28: mol_type = genomic DNA
gtgctgggcccataacccagaggtcgat

SEQ ID NO: 39374 - DNA, 29 bp, Homo sapiens
  source 1..29: mol_type = genomic DNA
gtgctgggcccataacccagaggtcgatg

SEQ ID NO: 39375 - DNA, 32 bp, Homo sapiens; identical to SEQ ID NO: 21185
  source 1..32: mol_type = genomic DNA

SEQ ID NO: 39376 - DNA, 39 bp, Homo sapiens
  source 1..39: mol_type = genomic DNA
gtgctttgcacgcgtgggttcgaatcccatcctcgtcgc

SEQ ID NO: 39377 - DNA, 40 bp, Homo sapiens; identical to SEQ ID NO: 21196
  source 1..40: mol_type = genomic DNA

SEQ ID NO: 39378 - DNA, 24 bp, Homo sapiens
  source 1..24: mol_type = genomic DNA
gtggagtggttatcacgttcgcct

SEQ ID NO: 39379 - DNA, 26 bp, Homo sapiens
  source 1..26: mol_type = genomic DNA
gtggagttaaagactttttctctgac

SEQ ID NO: 39380 - DNA, 27 bp, Homo sapiens
  source 1..27: mol_type = genomic DNA
gtggagttaaagactttttctctgacc

SEQ ID NO: 39381 - DNA, 28 bp, Homo sapiens
  source 1..28: mol_type = genomic DNA
gtggagttaaagactttttctctgacca

SEQ ID NO: 39382 - DNA, 19 bp, Homo sapiens
  source 1..19: mol_type = genomic DNA
gtggcccgggttcgactcc

SEQ ID NO: 39383 - DNA, 23 bp, Homo sapiens
  source 1..23: mol_type = genomic DNA
gtggcccgggttcgactcccggt

SEQ ID NO: 39384 - DNA, 30 bp, Homo sapiens; identical to SEQ ID NO: 21217
  source 1..30: mol_type = genomic DNA

SEQ ID NO: 39385 - DNA, 31 bp, Homo sapiens
  source 1..31: mol_type = genomic DNA
gtggcccgggttcgactcccggtatgggaac

SEQ ID NO: 39386 - DNA, 32 bp, Homo sapiens; identical to SEQ ID NO: 21218
  source 1..32: mol_type = genomic DNA

SEQ ID NO: 39387 - DNA, 17 bp, Homo sapiens
  source 1..17: mol_type = genomic DNA
gtggccgagtggttaag

SEQ ID NO: 39388 - DNA, 18 bp, Homo sapiens
  source 1..18: mol_type = genomic DNA
gtggccgagtggttaagg

SEQ ID NO: 39389 - DNA, 16 bp, Homo sapiens
  source 1..16: mol_type = genomic DNA
gtggccgcagcaacct

SEQ ID NO: 39390 - DNA, 27 bp, Homo sapiens
  source 1..27: mol_type = genomic DNA
gtggcgcaatggataacgcgtctgact

SEQ ID NO: 39391 - DNA, 16 bp, Homo sapiens
  source 1..16: mol_type = genomic DNA
gtggcgcagcggaagc

SEQ ID NO: 39392 - DNA, 17 bp, Homo sapiens
  source 1..17: mol_type = genomic DNA
gtggcgcagcggaagcg

SEQ ID NO: 39393 - DNA, 25 bp, Homo sapiens
  source 1..25: mol_type = genomic DNA
gtggcgcagcggaagcgtgctgggc

SEQ ID NO: 39394 - DNA, 27 bp, Homo sapiens
  source 1..27: mol_type = genomic DNA
gtggcgcagcggaagcgtgctgggccc

SEQ ID NO: 39395 - DNA, 33 bp, Homo sapiens
  source 1..33: mol_type = genomic DNA
gtggcgcagcggaagcgtgctgggcccataacc

SEQ ID NO: 39396 - DNA, 16 bp, Homo sapiens
  source 1..16: mol_type = genomic DNA
gtggctaggattcggc

SEQ ID NO: 39397 - DNA, 18 bp, Homo sapiens
  source 1..18: mol_type = genomic DNA
gtgggtagagcatcagac

SEQ ID NO: 39398 - DNA, 26 bp, Homo sapiens
  source 1..26: mol_type = genomic DNA
gtgggttcgaatcccaccagagtcgc

SEQ ID NO: 39399 - DNA, 27 bp, Homo sapiens
  source 1..27: mol_type = genomic DNA
gtgggttcgaatcccaccagagtcgcc

SEQ ID NO: 39400 - DNA, 27 bp, Homo sapiens
  source 1..27: mol_type = genomic DNA
gtgggttcgaatcccaccctcgtcgcc

SEQ ID NO: 39401 - DNA, 26 bp, Homo sapiens
  source 1..26: mol_type = genomic DNA
gtgggttcgaatcccaccgctgccac

SEQ ID NO: 39402 - DNA, 27 bp, Homo sapiens
  source 1..27: mol_type = genomic DNA
gtgggttcgaatcccaccttcgtcgcc

SEQ ID NO: 39403 - DNA, 25 bp, Homo sapiens
  source 1..25: mol_type = genomic DNA
gtgggttcgaatcccacttctgaca

SEQ ID NO: 39404 - DNA, 26 bp, Homo sapiens
  source 1..26: mol_type = genomic DNA
gtgggttcgaatcccatcctcgtcgc

SEQ ID NO: 39405 - DNA, 27 bp, Homo sapiens
  source 1..27: mol_type = genomic DNA
gtgggttcgaatcccatcctcgtcgcc

SEQ ID NO: 39406 - DNA, 28 bp, Homo sapiens
  source 1..28: mol_type = genomic DNA
gtgggttcgaatcccatcctcgtcgcca

SEQ ID NO: 39407 - DNA, 25 bp, Homo sapiens
  source 1..25: mol_type = genomic DNA
gtgggttcgagccccacgttgggcg

SEQ ID NO: 39408 - DNA, 26 bp, Homo sapiens
  source 1..26: mol_type = genomic DNA
gtgggttcgagccccacgttgggcgc

SEQ ID NO: 39409 - DNA, 27 bp, Homo sapiens
  source 1..27: mol_type = genomic DNA
gtgggttcgagccccacgttgggcgcc

SEQ ID NO: 39410 - DNA, 26 bp, Homo sapiens
  source 1..26: mol_type = genomic DNA
gtgggttcgagtcccaccagagtcgc

SEQ ID NO: 39411 - DNA, 27 bp, Homo sapiens
  source 1..27: mol_type = genomic DNA
gtgggttcgagtcccaccagagtcgcc

SEQ ID NO: 39412 - DNA, 26 bp, Homo sapiens
  source 1..26: mol_type = genomic DNA
gtgggttcgagtcccatctgggtcgc

SEQ ID NO: 39413 - DNA, 27 bp, Homo sapiens
  source 1..27: mol_type = genomic DNA
gtgggttcgagtcccatctgggtcgcc

SEQ ID NO: 39414 - DNA, 26 bp, Homo sapiens
  source 1..26: mol_type = genomic DNA
gtgggtttaagtcccattggtctagc

SEQ ID NO: 39415 - DNA, 27 bp, Homo sapiens
  source 1..27: mol_type = genomic DNA
gtgggtttaagtcccattggtctagcc

SEQ ID NO: 39416 - DNA, 16 bp, Homo sapiens
  source 1..16: mol_type = genomic DNA
gtggtaaggcgtcggt

SEQ ID NO: 39417 - DNA, 16 bp, Homo sapiens
  source 1..16: mol_type = genomic DNA
gtggtagaattctcgc

SEQ ID NO: 39418 - DNA, 17 bp, Homo sapiens
  source 1..17: mol_type = genomic DNA
gtggtagaattctcgcc

SEQ ID NO: 39419 - DNA, 18 bp, Homo sapiens
  source 1..18: mol_type = genomic DNA
gtggtagaattctcgcct

SEQ ID NO: 39420 - DNA, 19 bp, Homo sapiens
  source 1..19: mol_type = genomic DNA
gtggtagaattctcgcctc

SEQ ID NO: 39421 - DNA, 19 bp, Homo sapiens
  source 1..19: mol_type = genomic DNA
gtggtagaattctcgcctg

SEQ ID NO: 39422 - DNA, 20 bp, Homo sapiens
  source 1..20: mol_type = genomic DNA
gtggtagaattctcgcctgc

SEQ ID NO: 39423 - DNA, 21 bp, Homo sapiens
  source 1..21: mol_type = genomic DNA
gtggtagaattctcgcctgcc

SEQ ID NO: 39424 - DNA, 22 bp, Homo sapiens
  source 1..22: mol_type = genomic DNA
gtggtagaattctcgcctgcca

SEQ ID NO: 39425 - DNA, 23 bp, Homo sapiens
  source 1..23: mol_type = genomic DNA
gtggtagaattctcgcctgccac

SEQ ID NO: 39426 - DNA, 29 bp, Homo sapiens
  source 1..29: mol_type = genomic DNA
gtggtagaattctcgcctgccacgcggga

SEQ ID NO: 39427 - DNA, 34 bp, Homo sapiens; identical to SEQ ID NO: 21294
  source 1..34: mol_type = genomic DNA

SEQ ID NO: 39428 - DNA, 36 bp, Homo sapiens; identical to SEQ ID NO: 21295
  source 1..36: mol_type = genomic DNA

SEQ ID NO: 39429 - DNA, 38 bp, Homo sapiens; identical to SEQ ID NO: 21297
  source 1..38: mol_type = genomic DNA

SEQ ID NO: 39430 - DNA, 18 bp, Homo sapiens
  source 1..18: mol_type = genomic DNA
gtggtagagcatttgact

SEQ ID NO: 39431 - DNA, 20 bp, Homo sapiens
  source 1..20: mol_type = genomic DNA
gtggtagagcatttgactgc

SEQ ID NO: 39432 - DNA, 16 bp, Homo sapiens
  source 1..16: mol_type = genomic DNA
gtggtagagcgcatgc

SEQ ID NO: 39433 - DNA, 16 bp, Homo sapiens
  source 1..16: mol_type = genomic DNA
gtggtagagcgcgtgc

SEQ ID NO: 39434 - DNA, 17 bp, Homo sapiens
  source 1..17: mol_type = genomic DNA
gtggtagagcgcgtgct

SEQ ID NO: 39435 - DNA, 16 bp, Homo sapiens
  source 1..16: mol_type = genomic DNA
gtggtatcatgcaaga

SEQ ID NO: 39436 - DNA, 17 bp, Homo sapiens
  source 1..17: mol_type = genomic DNA
gtggtatcatgcaagat

SEQ ID NO: 39437 - DNA, 18 bp, Homo sapiens
  source 1..18: mol_type = genomic DNA
gtggtatcatgcaagatt

SEQ ID NO: 39438 - DNA, 16 bp, Homo sapiens
  source 1..16: mol_type = genomic DNA
gtggtatgattctcgc

SEQ ID NO: 39439 - DNA, 18 bp, Homo sapiens
  source 1..18: mol_type = genomic DNA
gtggtatgattctcgctt

SEQ ID NO: 39440 - DNA, 17 bp, Homo sapiens
  source 1..17: mol_type = genomic DNA
gtggtcatcacgttcgc

SEQ ID NO: 39441 - DNA, 20 bp, Homo sapiens
  source 1..20: mol_type = genomic DNA
gtggtctagtggttaggatt

SEQ ID NO: 39442 - DNA, 21 bp, Homo sapiens
  source 1..21: mol_type = genomic DNA
gtggtctagtggttaggattc

SEQ ID NO: 39443 - DNA, 24 bp, Homo sapiens
  source 1..24: mol_type = genomic DNA
gtggtctagtggttaggattcggc

SEQ ID NO: 39444 - DNA, 26 bp, Homo sapiens
  source 1..26: mol_type = genomic DNA
gtggtctagtggttaggattcggcgc

SEQ ID NO: 39445 - DNA, 27 bp, Homo sapiens
  source 1..27: mol_type = genomic DNA
gtggtctagtggttaggattcggcgct

SEQ ID NO: 39446 - DNA, 29 bp, Homo sapiens
  source 1..29: mol_type = genomic DNA
gtggtctagtggttaggattcggcgctct

SEQ ID NO: 39447 - DNA, 36 bp, Homo sapiens
  source 1..36: mol_type = genomic DNA
gtggtctagtggttaggattcggcgctctcaccgcc

SEQ ID NO: 39448 - DNA, 43 bp, Homo sapiens; identical to SEQ ID NO: 21362
  source 1..43: mol_type = genomic DNA

SEQ ID NO: 39449 - DNA, 45 bp, Homo sapiens
  source 1..45: mol_type = genomic DNA
gtggtctagtggttaggattcggcgctctcaccgccgcggcccgg

SEQ ID NO: 39450 - DNA, 18 bp, Homo sapiens
  source 1..18: mol_type = genomic DNA
gtggttaaggcattggac

SEQ ID NO: 39451 - DNA, 19 bp, Homo sapiens
  source 1..19: mol_type = genomic DNA
gtggttaaggcattggact

SEQ ID NO: 39452 - DNA, 16 bp, Homo sapiens
  source 1..16: mol_type = genomic DNA
gtggttaggattcggc

SEQ ID NO: 39453 - DNA, 17 bp, Homo sapiens
  source 1..17: mol_type = genomic DNA
gtggttaggattcggcg

SEQ ID NO: 39454 - DNA, 18 bp, Homo sapiens
  source 1..18: mol_type = genomic DNA
gtggttaggattcggcgc

SEQ ID NO: 39455 - DNA, 19 bp, Homo sapiens
  source 1..19: mol_type = genomic DNA
gtggttaggattcggcgct

SEQ ID NO: 39456 - DNA, 20 bp, Homo sapiens
  source 1..20: mol_type = genomic DNA
gtggttaggattcggcgctc

SEQ ID NO: 39457 - DNA, 21 bp, Homo sapiens
  source 1..21: mol_type = genomic DNA
gtggttaggattcggcgctct

SEQ ID NO: 39458 - DNA, 23 bp, Homo sapiens
  source 1..23: mol_type = genomic DNA
gtggttaggattcggcgctctca

SEQ ID NO: 39459 - DNA, 25 bp, Homo sapiens
  source 1..25: mol_type = genomic DNA
gtggttaggattcggcgctctcacc

SEQ ID NO: 39460 - DNA, 28 bp, Homo sapiens
  source 1..28: mol_type = genomic DNA
gtggttaggattcggcgctctcaccgcc

SEQ ID NO: 39461 - DNA, 35 bp, Homo sapiens; identical to SEQ ID NO: 21407
  source 1..35: mol_type = genomic DNA

SEQ ID NO: 39462 - DNA, 38 bp, Homo sapiens; identical to SEQ ID NO: 21410
  source 1..38: mol_type = genomic DNA

SEQ ID NO: 39463 - DNA, 16 bp, Homo sapiens
  source 1..16: mol_type = genomic DNA
gtggttagtactctgc

SEQ ID NO: 39464 - DNA, 17 bp, Homo sapiens
  source 1..17: mol_type = genomic DNA
gtggttagtactctgcg

SEQ ID NO: 39465 - DNA, 18 bp, Homo sapiens
  source 1..18: mol_type = genomic DNA
gtggttagtactctgcgt

SEQ ID NO: 39466 - DNA, 19 bp, Homo sapiens
  source 1..19: mol_type = genomic DNA
gtggttagtactctgcgtt

SEQ ID NO: 39467 - DNA, 20 bp, Homo sapiens
  source 1..20: mol_type = genomic DNA
gtggttagtactctgcgttg

SEQ ID NO: 39468 - DNA, 21 bp, Homo sapiens
  source 1..21: mol_type = genomic DNA
gtggttagtactctgcgttgt

SEQ ID NO: 39469 - DNA, 22 bp, Homo sapiens
  source 1..22: mol_type = genomic DNA
gtggttagtactctgcgttgtg

SEQ ID NO: 39470 - DNA, 25 bp, Homo sapiens
  source 1..25: mol_type = genomic DNA
gtggttagtactctgcgttgtggcc

SEQ ID NO: 39471 - DNA, 30 bp, Homo sapiens
  source 1..30: mol_type = genomic DNA
gtggttagtactctgcgttgtggccgcagc

SEQ ID NO: 39472 - DNA, 34 bp, Homo sapiens; identical to SEQ ID NO: 21428
  source 1..34: mol_type = genomic DNA

SEQ ID NO: 39473 - DNA, 35 bp, Homo sapiens; identical to SEQ ID NO: 21429
  source 1..35: mol_type = genomic DNA

SEQ ID NO: 39474 - DNA, 17 bp, Homo sapiens
  source 1..17: mol_type = genomic DNA
gtggttatcacgtctgc

SEQ ID NO: 39475 - DNA, 18 bp, Homo sapiens
  source 1..18: mol_type = genomic DNA
gtggttatcacgtctgct

SEQ ID NO: 39476 - DNA, 19 bp, Homo sapiens
  source 1..19: mol_type = genomic DNA
gtggttatcacgtctgctt

SEQ ID NO: 39477 - DNA, 20 bp, Homo sapiens
  source 1..20: mol_type = genomic DNA
gtggttatcacgtctgcttt

SEQ ID NO: 39478 - DNA, 21 bp, Homo sapiens
  source 1..21: mol_type = genomic DNA
gtggttatcacgtctgcttta

SEQ ID NO: 39479 - DNA, 16 bp, Homo sapiens
  source 1..16: mol_type = genomic DNA
gtggttatcacgttcg

SEQ ID NO: 39480 - DNA, 17 bp, Homo sapiens
  source 1..17: mol_type = genomic DNA
gtggttatcacgttcgc

SEQ ID NO: 39481 - DNA, 18 bp, Homo sapiens
  source 1..18: mol_type = genomic DNA
gtggttatcacgttcgcc

SEQ ID NO: 39482 - DNA, 19 bp, Homo sapiens
  source 1..19: mol_type = genomic DNA
gtggttatcacgttcgcct

SEQ ID NO: 39483 - DNA, 20 bp, Homo sapiens
  source 1..20: mol_type = genomic DNA
gtggttatcacgttcgcctc

SEQ ID NO: 39484 - DNA, 22 bp, Homo sapiens
  source 1..22: mol_type = genomic DNA
gtggttatcacgttcgcctcac

SEQ ID NO: 39485 - DNA, 25 bp, Homo sapiens
  source 1..25: mol_type = genomic DNA
gtggttatcacgttcgcctcacacg

SEQ ID NO: 39486 - DNA, 26 bp, Homo sapiens
  source 1..26: mol_type = genomic DNA
gtggttatcacgttcgcctcacacgc

SEQ ID NO: 39487 - DNA, 19 bp, Homo sapiens
  source 1..19: mol_type = genomic DNA
gtggttcagtggtagaatt

SEQ ID NO: 39488 - DNA, 20 bp, Homo sapiens
  source 1..20: mol_type = genomic DNA
gtggttcagtggtagaattc

SEQ ID NO: 39489 - DNA, 22 bp, Homo sapiens
  source 1..22: mol_type = genomic DNA
gtggttcagtggtagaattctc

SEQ ID NO: 39490 - DNA, 24 bp, Homo sapiens
  source 1..24: mol_type = genomic DNA
gtggttcagtggtagaattctcgc

SEQ ID NO: 39491 - DNA, 25 bp, Homo sapiens
  source 1..25: mol_type = genomic DNA
gtggttcagtggtagaattctcgcc

SEQ ID NO: 39492 - DNA, 26 bp, Homo sapiens
  source 1..26: mol_type = genomic DNA
gtggttcagtggtagaattctcgcct

SEQ ID NO: 39493 - DNA, 28 bp, Homo sapiens
  source 1..28: mol_type = genomic DNA
gtggttcagtggtagaattctcgcctgc

SEQ ID NO: 39494 - DNA, 29 bp, Homo sapiens
  source 1..29: mol_type = genomic DNA
gtggttcagtggtagaattctcgcctgcc

SEQ ID NO: 39495 - DNA, 31 bp, Homo sapiens; identical to SEQ ID NO: 21490
  source 1..31: mol_type = genomic DNA

SEQ ID NO: 39496 - DNA, 32 bp, Homo sapiens; identical to SEQ ID NO: 21491
  source 1..32: mol_type = genomic DNA

SEQ ID NO: 39497 - DNA, 42 bp, Homo sapiens; identical to SEQ ID NO: 21493
  source 1..42: mol_type = genomic DNA

SEQ ID NO: 39498 - DNA, 43 bp, Homo sapiens
  source 1..43: mol_type = genomic DNA
gtggttcagtggtagaattctcgcctgccacgcgggaggcccg

SEQ ID NO: 39499 - DNA, 44 bp, Homo sapiens; identical to SEQ ID NO: 21494
  source 1..44: mol_type = genomic DNA

SEQ ID NO: 39500 - DNA, 45 bp, Homo sapiens; identical to SEQ ID NO: 21495
  source 1..45: mol_type = genomic DNA

SEQ ID NO: 39501 - DNA, 26 bp, Homo sapiens
  source 1..26: mol_type = genomic DNA
gtggttcgagcccacccagggacgcc

SEQ ID NO: 39502 - DNA, 17 bp, Homo sapiens
  source 1..17: mol_type = genomic DNA
gtggttgtagtccgtgc

SEQ ID NO: 39503 - DNA, 18 bp, Homo sapiens
  source 1..18: mol_type = genomic DNA
gtggttgtagtccgtgcg

SEQ ID NO: 39504 - DNA, 20 bp, Homo sapiens
  source 1..20: mol_type = genomic DNA
gtggttgtagtccgtgcgag

SEQ ID NO: 39505 - DNA, 21 bp, Homo sapiens
  source 1..21: mol_type = genomic DNA
gtggttgtagtccgtgcgaga

SEQ ID NO: 39506 - DNA, 22 bp, Homo sapiens
  source 1..22: mol_type = genomic DNA
gtggttgtagtccgtgcgagaa

SEQ ID NO: 39507 - DNA, 23 bp, Homo sapiens
  source 1..23: mol_type = genomic DNA
gtggttgtagtccgtgcgagaat

SEQ ID NO: 39508 - DNA, 24 bp, Homo sapiens
  source 1..24: mol_type = genomic DNA
gtggttgtagtccgtgcgagaata

SEQ ID NO: 39509 - DNA, 25 bp, Homo sapiens
  source 1..25: mol_type = genomic DNA
gtggttgtagtccgtgcgagaatac

SEQ ID NO: 39510 - DNA, 26 bp, Homo sapiens
  source 1..26: mol_type = genomic DNA
gtggttgtagtccgtgcgagaatacc

SEQ ID NO: 39511 - DNA, 27 bp, Homo sapiens
  source 1..27: mol_type = genomic DNA
gtggttgtagtccgtgcgagaatacca

SEQ ID NO: 39512 - DNA, 26 bp, Homo sapiens
  source 1..26: mol_type = genomic DNA
gtggtttagtggtagaattctcgcct

SEQ ID NO: 39513 - DNA, 20 bp, Homo sapiens
  source 1..20: mol_type = genomic DNA
gtgtaatggttagcactctg

SEQ ID NO: 39514 - DNA, 22 bp, Homo sapiens
  source 1..22: mol_type = genomic DNA
gtgtaatggttagcactctgga

SEQ ID NO: 39515 - DNA, 23 bp, Homo sapiens
  source 1..23: mol_type = genomic DNA
gtgtaatggttagcactctggac

SEQ ID NO: 39516 - DNA, 24 bp, Homo sapiens
  source 1..24: mol_type = genomic DNA
gtgtaatggttagcactctggact

SEQ ID NO: 39517 - DNA, 25 bp, Homo sapiens
  source 1..25: mol_type = genomic DNA
gtgtaatggttagcactctggactc

SEQ ID NO: 39518 - DNA, 26 bp, Homo sapiens
  source 1..26: mol_type = genomic DNA
gtgtaatggttagcactctggactct

SEQ ID NO: 39519 - DNA, 31 bp, Homo sapiens; identical to SEQ ID NO: 21537
  source 1..31: mol_type = genomic DNA

SEQ ID NO: 39520 - DNA, 32 bp, Homo sapiens; identical to SEQ ID NO: 21538
  source 1..32: mol_type = genomic DNA

SEQ ID NO: 39521 - DNA, 43 bp, Homo sapiens; identical to SEQ ID NO: 21543
  source 1..43: mol_type = genomic DNA

SEQ ID NO: 39522 - DNA, 32 bp, Homo sapiens; identical to SEQ ID NO: 21550
  source 1..32: mol_type = genomic DNA

SEQ ID NO: 39523 - DNA, 16 bp, Homo sapiens
  source 1..16: mol_type = genomic DNA
gtgtagtggtatcatg

SEQ ID NO: 39524 - DNA, 41 bp, Homo sapiens; identical to SEQ ID NO: 21569
  source 1..41: mol_type = genomic DNA

SEQ ID NO: 39525 - DNA, 43 bp, Homo sapiens; identical to SEQ ID NO: 21571
  source 1..43: mol_type = genomic DNA

SEQ ID NO: 39526 - DNA, 24 bp, Homo sapiens
  source 1..24: mol_type = genomic DNA
gtgtagtggtcatcacgttcgcct

SEQ ID NO: 39527 - DNA, 21 bp, Homo sapiens
  source 1..21: mol_type = genomic DNA
gtgtagtggttatcacgtctg

SEQ ID NO: 39528 - DNA, 22 bp, Homo sapiens
  source 1..22: mol_type = genomic DNA
gtgtagtggttatcacgttcgc

SEQ ID NO: 39529 - DNA, 23 bp, Homo sapiens
  source 1..23: mol_type = genomic DNA
gtgtagtggttatcacgttcgcc

SEQ ID NO: 39530 - DNA, 24 bp, Homo sapiens
  source 1..24: mol_type = genomic DNA
gtgtagtggttatcacgttcgcct

SEQ ID NO: 39531 - DNA, 25 bp, Homo sapiens
  source 1..25: mol_type = genomic DNA
gtgtagtggttatcacgttcgcctc

SEQ ID NO: 39532 - DNA, 16 bp, Homo sapiens
  source 1..16: mol_type = genomic DNA
gtgtgaggtcccgggt

SEQ ID NO: 39533 - DNA, 22 bp, Homo sapiens
  source 1..22: mol_type = genomic DNA
gtgtgataggtggcacggagaa

SEQ ID NO: 39534 - DNA, 23 bp, Homo sapiens
  source 1..23: mol_type = genomic DNA
gtgttcaaatcacgtcggggtca

SEQ ID NO: 39535 - DNA, 24 bp, Homo sapiens
  source 1..24: mol_type = genomic DNA
gtgttcaaatcacgtcggggtcac

SEQ ID NO: 39536 - DNA, 25 bp, Homo sapiens
  source 1..25: mol_type = genomic DNA
gtgttcaaatcacgtcggggtcacc

SEQ ID NO: 39537 - DNA, 24 bp, Homo sapiens
  source 1..24: mol_type = genomic DNA
gtgttcaagtcacgtcggggtcac

SEQ ID NO: 39538 - DNA, 25 bp, Homo sapiens
  source 1..25: mol_type = genomic DNA
gtgttcaagtcacgtcggggtcacc

SEQ ID NO: 39539 - DNA, 26 bp, Homo sapiens
  source 1..26: mol_type = genomic DNA
gtgttcaagtcacgtcggggtcacca

SEQ ID NO: 39540 - DNA, 23 bp, Homo sapiens
  source 1..23: mol_type = genomic DNA
gtgttcgaatcacgtcggggtca

SEQ ID NO: 39541 - DNA, 24 bp, Homo sapiens
  source 1..24: mol_type = genomic DNA
gtgttcgaatcacgtcggggtcac

SEQ ID NO: 39542 - DNA, 25 bp, Homo sapiens
  source 1..25: mol_type = genomic DNA
gtgttcgaatcacgtcggggtcacc

SEQ ID NO: 39543 - DNA, 26 bp, Homo sapiens
  source 1..26: mol_type = genomic DNA
gtgttcgaatcacgtcggggtcacca

SEQ ID NO: 39544 - DNA, 32 bp, Homo sapiens; identical to SEQ ID NO: 21621
  source 1..32: mol_type = genomic DNA

SEQ ID NO: 39545 - DNA, 33 bp, Homo sapiens; identical to SEQ ID NO: 21622
  source 1..33: mol_type = genomic DNA

SEQ ID NO: 39546 - DNA, 34 bp, Homo sapiens; identical to SEQ ID NO: 21623
  source 1..34: mol_type = genomic DNA

SEQ ID NO: 39547 - DNA, 17 bp, Homo sapiens
  source 1..17: mol_type = genomic DNA
gttaaagactttttctc

SEQ ID NO: 39548 - DNA, 20 bp, Homo sapiens
  source 1..20: mol_type = genomic DNA
gttaaagactttttctctga

SEQ ID NO: 39549 - DNA, 21 bp, Homo sapiens
  source 1..21: mol_type = genomic DNA
gttaaagactttttctctgac

SEQ ID NO: 39550 - DNA, 22 bp, Homo sapiens
  source 1..22: mol_type = genomic DNA
gttaaagactttttctctgacc

SEQ ID NO: 39551 - DNA, 23 bp, Homo sapiens
  source 1..23: mol_type = genomic DNA
gttaaagactttttctctgacca

SEQ ID NO: 39552 - DNA, 19 bp, Homo sapiens
  source 1..19: mol_type = genomic DNA
gttaaagattaagagaacc

SEQ ID NO: 39553 - DNA, 36 bp, Homo sapiens; identical to SEQ ID NO: 21652
  source 1..36: mol_type = genomic DNA

SEQ ID NO: 39554 - DNA, 37 bp, Homo sapiens; identical to SEQ ID NO: 21653
  source 1..37: mol_type = genomic DNA

SEQ ID NO: 39555 - DNA, 38 bp, Homo sapiens; identical to SEQ ID NO: 21654
  source 1..38: mol_type = genomic DNA

SEQ ID NO: 39556 - DNA, 39 bp, Homo sapiens; identical to SEQ ID NO: 21655
  source 1..39: mol_type = genomic DNA

SEQ ID NO: 39557 - DNA, 40 bp, Homo sapiens; identical to SEQ ID NO: 21656
  source 1..40: mol_type = genomic DNA

SEQ ID NO: 39558 - DNA, 16 bp, Homo sapiens
  source 1..16: mol_type = genomic DNA
gttaagatggcagagc

SEQ ID NO: 39559 - DNA, 17 bp, Homo sapiens
  source 1..17: mol_type = genomic DNA
gttaagatggcagagcc

SEQ ID NO: 39560 - DNA, 18 bp, Homo sapiens
  source 1..18: mol_type = genomic DNA
gttaagatggcagagccc

SEQ ID NO: 39561 - DNA, 19 bp, Homo sapiens
  source 1..19: mol_type = genomic DNA
gttaagatggcagagcccg

SEQ ID NO: 39562 - DNA, 20 bp, Homo sapiens
  source 1..20: mol_type = genomic DNA
gttaagatggcagagcccgg

SEQ ID NO: 39563 - DNA, 21 bp, Homo sapiens
  source 1..21: mol_type = genomic DNA
gttaagatggcagagcccggt

SEQ ID NO: 39564 - DNA, 22 bp, Homo sapiens
  source 1..22: mol_type = genomic DNA
gttaagatggcagagcccggta

SEQ ID NO: 39565 - DNA, 24 bp, Homo sapiens
  source 1..24: mol_type = genomic DNA
gttaagatggcagagcccggtaat

SEQ ID NO: 39566 - DNA, 25 bp, Homo sapiens
  source 1..25: mol_type = genomic DNA
gttaagatggcagagcccggtaatc

SEQ ID NO: 39567 - DNA, 27 bp, Homo sapiens
  source 1..27: mol_type = genomic DNA
gttaagatggcagagcccggtaatcgc

SEQ ID NO: 39568 - DNA, 28 bp, Homo sapiens
  source 1..28: mol_type = genomic DNA
gttaagatggcagagcccggtaatcgca

SEQ ID NO: 39569 - DNA, 29 bp, Homo sapiens
  source 1..29: mol_type = genomic DNA
gttaagatggcagagcccggtaatcgcat

SEQ ID NO: 39570 - DNA, 30 bp, Homo sapiens; identical to SEQ ID NO: 21718
  source 1..30: mol_type = genomic DNA

SEQ ID NO: 39571 - DNA, 31 bp, Homo sapiens; identical to SEQ ID NO: 21719
  source 1..31: mol_type = genomic DNA

SEQ ID NO: 39572 - DNA, 32 bp, Homo sapiens; identical to SEQ ID NO: 21720
  source 1..32: mol_type = genomic DNA

SEQ ID NO: 39573 - DNA, 33 bp, Homo sapiens; identical to SEQ ID NO: 21721
  source 1..33: mol_type = genomic DNA

SEQ ID NO: 39574 - DNA, 34 bp, Homo sapiens; identical to SEQ ID NO: 21722
  source 1..34: mol_type = genomic DNA

SEQ ID NO: 39575 - DNA, 35 bp, Homo sapiens; identical to SEQ ID NO: 21723
  source 1..35: mol_type = genomic DNA

SEQ ID NO: 39576 - DNA, 37 bp, Homo sapiens; identical to SEQ ID NO: 21725
  source 1..37: mol_type = genomic DNA

SEQ ID NO: 39577 - DNA, 38 bp, Homo sapiens; identical to SEQ ID NO: 21726
  source 1..38: mol_type = genomic DNA

SEQ ID NO: 39578 - DNA, 39 bp, Homo sapiens; identical to SEQ ID NO: 21727
  source 1..39: mol_type = genomic DNA

SEQ ID NO: 39579 - DNA, 40 bp, Homo sapiens; identical to SEQ ID NO: 21728
  source 1..40: mol_type = genomic DNA

SEQ ID NO: 39580 - DNA, 42 bp, Homo sapiens; identical to SEQ ID NO: 21730
  source 1..42: mol_type = genomic DNA

SEQ ID NO: 39581 - DNA, 43 bp, Homo sapiens; identical to SEQ ID NO: 21731
  source 1..43: mol_type = genomic DNA

SEQ ID NO: 39582 - DNA, 44 bp, Homo sapiens; identical to SEQ ID NO: 21732
  source 1..44: mol_type = genomic DNA

SEQ ID NO: 39583 - DNA, 45 bp, Homo sapiens; identical to SEQ ID NO: 21733
  source 1..45: mol_type = genomic DNA

SEQ ID NO: 39584 - DNA, 46 bp, Homo sapiens; identical to SEQ ID NO: 21734
  source 1..46: mol_type = genomic DNA

SEQ ID NO: 39585 - DNA, 47 bp, Homo sapiens; identical to SEQ ID NO: 21735
  source 1..47: mol_type = genomic DNA

SEQ ID NO: 39586 - DNA, 16 bp, Homo sapiens
  source 1..16: mol_type = genomic DNA
gttagcactctggact

SEQ ID NO: 39587 - DNA, 17 bp, Homo sapiens
  source 1..17: mol_type = genomic DNA
gttagcactctggactc

SEQ ID NO: 39588 - DNA, 18 bp, Homo sapiens
  source 1..18: mol_type = genomic DNA
gttagcactctggactct

SEQ ID NO: 39589 - DNA, 19 bp, Homo sapiens
  source 1..19: mol_type = genomic DNA
gttagcactctggactctg

SEQ ID NO: 39590 - DNA, 20 bp, Homo sapiens
  source 1..20: mol_type = genomic DNA
gttagcactctggactctga

SEQ ID NO: 39591 - DNA, 21 bp, Homo sapiens
  source 1..21: mol_type = genomic DNA
gttagcactctggactctgaa

SEQ ID NO: 39592 - DNA, 22 bp, Homo sapiens
  source 1..22: mol_type = genomic DNA
gttagcactctggactctgaat

SEQ ID NO: 39593 - DNA, 23 bp, Homo sapiens
  source 1..23: mol_type = genomic DNA
gttagcactctggactctgaatc

SEQ ID NO: 39594 - DNA, 24 bp, Homo sapiens
  source 1..24: mol_type = genomic DNA
gttagcactctggactctgaatcc

SEQ ID NO: 39595 - DNA, 25 bp, Homo sapiens
  source 1..25: mol_type = genomic DNA
gttagcactctggactctgaatcca

SEQ ID NO: 39596 - DNA, 26 bp, Homo sapiens
  source 1..26: mol_type = genomic DNA
gttagcactctggactctgaatccag

SEQ ID NO: 39597 - DNA, 27 bp, Homo sapiens
  source 1..27: mol_type = genomic DNA
gttagcactctggactctgaatccagc

SEQ ID NO: 39598 - DNA, 28 bp, Homo sapiens
  source 1..28: mol_type = genomic DNA
gttagcactctggactctgaatccagcg

SEQ ID NO: 39599 - DNA, 32 bp, Homo sapiens
  source 1..32: mol_type = genomic DNA
gttagcactctggactctgaatccagcgatcc

SEQ ID NO: 39600 - DNA, 33 bp, Homo sapiens; identical to SEQ ID NO: 21754
  source 1..33: mol_type = genomic DNA

SEQ ID NO: 39601 - DNA, 35 bp, Homo sapiens; identical to SEQ ID NO: 21756
  source 1..35: mol_type = genomic DNA

SEQ ID NO: 39602 - DNA, 36 bp, Homo sapiens; identical to SEQ ID NO: 21757
  source 1..36: mol_type = genomic DNA

SEQ ID NO: 39603 - DNA, 37 bp, Homo sapiens; identical to SEQ ID NO: 21758
  source 1..37: mol_type = genomic DNA

SEQ ID NO: 39604 - DNA, 38 bp, Homo sapiens; identical to SEQ ID NO: 21759
  source 1..38: mol_type = genomic DNA

SEQ ID NO: 39605 - DNA, 39 bp, Homo sapiens; identical to SEQ ID NO: 21760
  source 1..39: mol_type = genomic DNA

SEQ ID NO: 39606 - DNA, 47 bp, Homo sapiens
  source 1..47: mol_type = genomic DNA
gttagcactctggactctgaatccagcgatccgagttcaaatctcgg

SEQ ID NO: 39607 - DNA, 20 bp, Homo sapiens
  source 1..20: mol_type = genomic DNA
gttagcactctggactttga

SEQ ID NO: 39608 - DNA, 21 bp, Homo sapiens
  source 1..21: mol_type = genomic DNA
gttagcactctggactttgaa

SEQ ID NO: 39609 - DNA, 22 bp, Homo sapiens
  source 1..22: mol_type = genomic DNA
gttagcactctggactttgaat

SEQ ID NO: 39610 - DNA, 23 bp, Homo sapiens
  source 1..23: mol_type = genomic DNA
gttagcactctggactttgaatc

SEQ ID NO: 39611 - DNA, 24 bp, Homo sapiens
  source 1..24: mol_type = genomic DNA
gttagcactctggactttgaatcc

SEQ ID NO: 39612 - DNA, 35 bp, Homo sapiens; identical to SEQ ID NO: 21766
  source 1..35: mol_type = genomic DNA

SEQ ID NO: 39613 - DNA, 36 bp, Homo sapiens; identical to SEQ ID NO: 21767
  source 1..36: mol_type = genomic DNA

SEQ ID NO: 39614 - DNA, 47 bp, Homo sapiens
  source 1..47: mol_type = genomic DNA
gttagcactctggactttgaatccagcgatccgagttcaaatctcgg

SEQ ID NO: 39615 - DNA, 16 bp, Homo sapiens
  source 1..16: mol_type = genomic DNA
gttaggattcctggtt

SEQ ID NO: 39616 - DNA, 17 bp, Homo sapiens
  source 1..17: mol_type = genomic DNA
gttaggattcctggttt

SEQ ID NO: 39617 - DNA, 18 bp, Homo sapiens
  source 1..18: mol_type = genomic DNA
gttaggattcctggtttt

SEQ ID NO: 39618 - DNA, 26 bp, Homo sapiens
  source 1..26: mol_type = genomic DNA
gttaggattcctggttttcacccagg

SEQ ID NO: 39619 - DNA, 28 bp, Homo sapiens
  source 1..28: mol_type = genomic DNA
gttaggattcctggttttcacccaggtg

SEQ ID NO: 39620 - DNA, 16 bp, Homo sapiens
  source 1..16: mol_type = genomic DNA
gttaggattcggcgct

SEQ ID NO: 39621 - DNA, 17 bp, Homo sapiens
  source 1..17: mol_type = genomic DNA
gttaggattcggcgctc

SEQ ID NO: 39622 - DNA, 18 bp, Homo sapiens
  source 1..18: mol_type = genomic DNA
gttaggattcggcgctct

SEQ ID NO: 39623 - DNA, 19 bp, Homo sapiens
  source 1..19: mol_type = genomic DNA
gttaggattcggcgctctc

SEQ ID NO: 39624 - DNA, 20 bp, Homo sapiens
  source 1..20: mol_type = genomic DNA
gttaggattcggcgctctca

SEQ ID NO: 39625 - DNA, 21 bp, Homo sapiens
  source 1..21: mol_type = genomic DNA
gttaggattcggcgctctcac

SEQ ID NO: 39626 - DNA, 22 bp, Homo sapiens
  source 1..22: mol_type = genomic DNA
gttaggattcggcgctctcacc

SEQ ID NO: 39627 - DNA, 23 bp, Homo sapiens
  source 1..23: mol_type = genomic DNA
gttaggattcggcgctctcaccg

SEQ ID NO: 39628 - DNA, 24 bp, Homo sapiens
  source 1..24: mol_type = genomic DNA
gttaggattcggcgctctcaccgc

SEQ ID NO: 39629 - DNA, 25 bp, Homo sapiens
  source 1..25: mol_type = genomic DNA
gttaggattcggcgctctcaccgcc

SEQ ID NO: 39630 - DNA, 30 bp, Homo sapiens; identical to SEQ ID NO: 21795
  source 1..30: mol_type = genomic DNA

SEQ ID NO: 39631 - DNA, 31 bp, Homo sapiens; identical to SEQ ID NO: 21796
  source 1..31: mol_type = genomic DNA

SEQ ID NO: 39632 - DNA, 32 bp, Homo sapiens; identical to SEQ ID NO: 21797
  source 1..32: mol_type = genomic DNA

SEQ ID NO: 39633 - DNA, 35 bp, Homo sapiens; identical to SEQ ID NO: 21800
  source 1..35: mol_type = genomic DNA

SEQ ID NO: 39634 - DNA, 37 bp, Homo sapiens; identical to SEQ ID NO: 21802
  source 1..37: mol_type = genomic DNA

SEQ ID NO: 39635 - DNA, 21 bp, Homo sapiens
  source 1..21: mol_type = genomic DNA
gttaggcctctttttaccacc

SEQ ID NO: 39636 - DNA, 22 bp, Homo sapiens
  source 1..22: mol_type = genomic DNA
gttaggcctctttttaccacca

SEQ ID NO: 39637 - DNA, 16 bp, Homo sapiens
  source 1..16: mol_type = genomic DNA
gttagtactctgcgtt

SEQ ID NO: 39638 - DNA, 17 bp, Homo sapiens
  source 1..17: mol_type = genomic DNA
gttagtactctgcgttg

SEQ ID NO: 39639 - DNA, 18 bp, Homo sapiens
  source 1..18: mol_type = genomic DNA
gttagtactctgcgttgt

SEQ ID NO: 39640 - DNA, 22 bp, Homo sapiens
  source 1..22: mol_type = genomic DNA
gttagtactctgcgttgtggcc

SEQ ID NO: 39641 - DNA, 23 bp, Homo sapiens
  source 1..23: mol_type = genomic DNA
gttagtactctgcgttgtggccg

SEQ ID NO: 39642 - DNA, 27 bp, Homo sapiens
  source 1..27: mol_type = genomic DNA
gttagtactctgcgttgtggccgcagc

SEQ ID NO: 39643 - DNA, 31 bp, Homo sapiens; identical to SEQ ID NO: 21821
  source 1..31: mol_type = genomic DNA

SEQ ID NO: 39644 - DNA, 32 bp, Homo sapiens; identical to SEQ ID NO: 21822
  source 1..32: mol_type = genomic DNA

SEQ ID NO: 39645 - DNA, 23 bp, Homo sapiens
  source 1..23: mol_type = genomic DNA
gttatacccttcccgtactacca

SEQ ID NO: 39646 - DNA, 16 bp, Homo sapiens
  source 1..16: mol_type = genomic DNA
gttatcacgtctgctt

SEQ ID NO: 39647 - DNA, 17 bp, Homo sapiens
  source 1..17: mol_type = genomic DNA
gttatcacgtctgcttt

SEQ ID NO: 39648 - DNA, 16 bp, Homo sapiens
  source 1..16: mol_type = genomic DNA
gttatcacgttcgcct

SEQ ID NO: 39649 - DNA, 17 bp, Homo sapiens
  source 1..17: mol_type = genomic DNA
gttatcacgttcgcctc

SEQ ID NO: 39650 - DNA, 19 bp, Homo sapiens
  source 1..19: mol_type = genomic DNA
gttatcacgttcgcctcac

SEQ ID NO: 39651 - DNA, 34 bp, Homo sapiens
  source 1..34: mol_type = genomic DNA
gttatcacgttcgcctcacacgcgaaaggtcccc

SEQ ID NO: 39652 - DNA, 35 bp, Homo sapiens
  source 1..35: mol_type = genomic DNA
gttatcacgttcgcctcacacgcgaaaggtccccg

SEQ ID NO: 39653 - DNA, 36 bp, Homo sapiens
  source 1..36: mol_type = genomic DNA
gttatcacgttcgcctcacacgcgaaaggtccccgg

SEQ ID NO: 39654 - DNA, 21 bp, Homo sapiens
  source 1..21: mol_type = genomic DNA
gttcaaatcacgtcggggtca

SEQ ID NO: 39655 - DNA, 22 bp, Homo sapiens
  source 1..22: mol_type = genomic DNA
gttcaaatcacgtcggggtcac

SEQ ID NO: 39656 - DNA, 23 bp, Homo sapiens
  source 1..23: mol_type = genomic DNA
gttcaaatcacgtcggggtcacc

SEQ ID NO: 39657 - DNA, 16 bp, Homo sapiens
  source 1..16: mol_type = genomic DNA
gttcaaatccaggtgc

SEQ ID NO: 39658 - DNA, 17 bp, Homo sapiens
  source 1..17: mol_type = genomic DNA
gttcaaatccaggtgcc

SEQ ID NO: 39659 - DNA, 18 bp, Homo sapiens
  source 1..18: mol_type = genomic DNA
gttcaaatccaggtgccc

SEQ ID NO: 39660 - DNA, 22 bp, Homo sapiens
  source 1..22: mol_type = genomic DNA
gttcaaatccaggtgccccctc

SEQ ID NO: 39661 - DNA, 23 bp, Homo sapiens
  source 1..23: mol_type = genomic DNA
gttcaaatccaggtgccccctcc

SEQ ID NO: 39662 - DNA, 16 bp, Homo sapiens
  source 1..16: mol_type = genomic DNA
gttcaaatcccggacg

SEQ ID NO: 39663 - DNA, 17 bp, Homo sapiens
  source 1..17: mol_type = genomic DNA
gttcaaatcccggacga

SEQ ID NO: 39664 - DNA, 18 bp, Homo sapiens
  source 1..18: mol_type = genomic DNA
gttcaaatcccggacgag

SEQ ID NO: 39665 - DNA, 19 bp, Homo sapiens
  source 1..19: mol_type = genomic DNA
gttcaaatcccggacgagc

SEQ ID NO: 39666 - DNA, 20 bp, Homo sapiens
  source 1..20: mol_type = genomic DNA
gttcaaatcccggacgagcc

SEQ ID NO: 39667 - DNA, 21 bp, Homo sapiens
  source 1..21: mol_type = genomic DNA
gttcaaatcccggacgagccc

SEQ ID NO: 39668 - DNA, 22 bp, Homo sapiens
  source 1..22: mol_type = genomic DNA
gttcaaatcccggacgagcccc

SEQ ID NO: 39669 - DNA, 23 bp, Homo sapiens
  source 1..23: mol_type = genomic DNA
gttcaaatcccggacgagccccc

SEQ ID NO: 39670 - DNA, 16 bp, Homo sapiens
  source 1..16: mol_type = genomic DNA
gttcaaatccgggtgc

SEQ ID NO: 39671 - DNA, 17 bp, Homo sapiens
  source 1..17: mol_type = genomic DNA
gttcaaatccgggtgcc

SEQ ID NO: 39672 - DNA, 18 bp, Homo sapiens
  source 1..18: mol_type = genomic DNA
gttcaaatccgggtgccc

SEQ ID NO: 39673 - DNA, 19 bp, Homo sapiens
  source 1..19: mol_type = genomic DNA
gttcaaatccgggtgcccc

SEQ ID NO: 39674 - DNA, 20 bp, Homo sapiens
  source 1..20: mol_type = genomic DNA
gttcaaatccgggtgccccc

SEQ ID NO: 39675 - DNA, 21 bp, Homo sapiens
  source 1..21: mol_type = genomic DNA
gttcaaatccgggtgcccccc

SEQ ID NO: 39676 - DNA, 21 bp, Homo sapiens
  source 1..21: mol_type = genomic DNA
gttcaaatccgggtgccccct

SEQ ID NO: 39677 - DNA, 22 bp, Homo sapiens
  source 1..22: mol_type = genomic DNA
gttcaaatccgggtgccccctc

SEQ ID NO: 39678 - DNA, 23 bp, Homo sapiens
  source 1..23: mol_type = genomic DNA
gttcaaatccgggtgccccctcc

SEQ ID NO: 39679 - DNA, 24 bp, Homo sapiens
  source 1..24: mol_type = genomic DNA
gttcaaatccgggtgccccctcca

SEQ ID NO: 39680 - DNA, 18 bp, Homo sapiens
  source 1..18: mol_type = genomic DNA
gttcaaatctcgctgggg

SEQ ID NO: 39681 - DNA, 19 bp, Homo sapiens
  source 1..19: mol_type = genomic DNA
gttcaaatctcgctggggc

SEQ ID NO: 39682 - DNA, 20 bp, Homo sapiens
  source 1..20: mol_type = genomic DNA
gttcaaatctcgctggggcc

SEQ ID NO: 39683 - DNA, 21 bp, Homo sapiens
  source 1..21: mol_type = genomic DNA
gttcaaatctcgctggggcct

SEQ ID NO: 39684 - DNA, 22 bp, Homo sapiens
  source 1..22: mol_type = genomic DNA
gttcaaatctcgctggggcctc

SEQ ID NO: 39685 - DNA, 23 bp, Homo sapiens
  source 1..23: mol_type = genomic DNA
gttcaaatctcgctggggcctcc

SEQ ID NO: 39686 - DNA, 21 bp, Homo sapiens
  source 1..21: mol_type = genomic DNA
gttcaaatctcggtggaacct

SEQ ID NO: 39687 - DNA, 22 bp, Homo sapiens
  source 1..22: mol_type = genomic DNA
gttcaaatctcggtggaacctc

SEQ ID NO: 39688 - DNA, 23 bp, Homo sapiens
  source 1..23: mol_type = genomic DNA
gttcaaatctcggtggaacctcc

SEQ ID NO: 39689 - DNA, 21 bp, Homo sapiens
  source 1..21: mol_type = genomic DNA
gttcaaatctcggtgggacct

SEQ ID NO: 39690 - DNA, 22 bp, Homo sapiens
  source 1..22: mol_type = genomic DNA
gttcaaatctcggtgggacctc

SEQ ID NO: 39691 - DNA, 23 bp, Homo sapiens
  source 1..23: mol_type = genomic DNA
gttcaaatctcggtgggacctcc

SEQ ID NO: 39692 - DNA, 21 bp, Homo sapiens
  source 1..21: mol_type = genomic DNA
gttcaagtcacgtcggggtca

SEQ ID NO: 39693 - DNA, 22 bp, Homo sapiens
  source 1..22: mol_type = genomic DNA
gttcaagtcacgtcggggtcac

SEQ ID NO: 39694 - DNA, 23 bp, Homo sapiens
  source 1..23: mol_type = genomic DNA
gttcaagtcacgtcggggtcacc

SEQ ID NO: 39695 - DNA, 22 bp, Homo sapiens
  source 1..22: mol_type = genomic DNA
gttcaagtccctgtccaggcgc

SEQ ID NO: 39696 - DNA, 20 bp, Homo sapiens
  source 1..20: mol_type = genomic DNA
gttcaagtccctgttcgggc

SEQ ID NO: 39697 - DNA, 21 bp, Homo sapiens
  source 1..21: mol_type = genomic DNA
gttcaagtccctgttcgggcg

SEQ ID NO: 39698 - DNA, 22 bp, Homo sapiens
  source 1..22: mol_type = genomic DNA
gttcaagtccctgttcgggcgc

SEQ ID NO: 39699 - DNA, 23 bp, Homo sapiens
  source 1..23: mol_type = genomic DNA
gttcaagtccctgttcgggcgcc

SEQ ID NO: 39700 - DNA, 24 bp, Homo sapiens
  source 1..24: mol_type = genomic DNA
gttcaagtccctgttcgggcgcca

SEQ ID NO: 39701 - DNA, 16 bp, Homo sapiens
  source 1..16: mol_type = genomic DNA
gttcaatccccggcac

SEQ ID NO: 39702 - DNA, 17 bp, Homo sapiens
  source 1..17: mol_type = genomic DNA
gttcaatccccggcacc

SEQ ID NO: 39703 - DNA, 18 bp, Homo sapiens
  source 1..18: mol_type = genomic DNA
gttcaatccccggcacct

SEQ ID NO: 39704 - DNA, 19 bp, Homo sapiens
  source 1..19: mol_type = genomic DNA
gttcaatccccggcacctc

SEQ ID NO: 39705 - DNA, 21 bp, Homo sapiens
  source 1..21: mol_type = genomic DNA
gttcaatccccggcacctcca

SEQ ID NO: 39706 - DNA, 22 bp, Homo sapiens
  source 1..22: mol_type = genomic DNA
gttcaatccccggcacctccac

SEQ ID NO: 39707 - DNA, 23 bp, Homo sapiens
  source 1..23: mol_type = genomic DNA
gttcaatccccggcacctccacc

SEQ ID NO: 39708 - DNA, 24 bp, Homo sapiens
  source 1..24: mol_type = genomic DNA
gttcaatccccggcacctccacca

SEQ ID NO: 39709 - DNA, 17 bp, Homo sapiens
  source 1..17: mol_type = genomic DNA
gttcaatccccggcatc

SEQ ID NO: 39710 - DNA, 18 bp, Homo sapiens
  source 1..18: mol_type = genomic DNA
gttcaatccccggcatct

SEQ ID NO: 39711 - DNA, 20 bp, Homo sapiens
  source 1..20: mol_type = genomic DNA
gttcaatccccggcatctcc

SEQ ID NO: 39712 - DNA, 22 bp, Homo sapiens
  source 1..22: mol_type = genomic DNA
gttcaatccccggcatctccac

SEQ ID NO: 39713 - DNA, 23 bp, Homo sapiens
  source 1..23: mol_type = genomic DNA
gttcaatccccggcatctccacc

SEQ ID NO: 39714 - DNA, 22 bp, Homo sapiens
  source 1..22: mol_type = genomic DNA
gttcaatcccgggtttcggcac

SEQ ID NO: 39715 - DNA, 23 bp, Homo sapiens
  source 1..23: mol_type = genomic DNA
gttcaatcccgggtttcggcacc

SEQ ID NO: 39716 - DNA, 16 bp, Homo sapiens
  source 1..16: mol_type = genomic DNA
gttcaattccccgacg

SEQ ID NO: 39717 - DNA, 21 bp, Homo sapiens
  source 1..21: mol_type = genomic DNA
gttcaattccccgacggggag

SEQ ID NO: 39718 - DNA, 22 bp, Homo sapiens
  source 1..22: mol_type = genomic DNA
gttcaattccccgacggggagc

SEQ ID NO: 39719 - DNA, 23 bp, Homo sapiens
  source 1..23: mol_type = genomic DNA
gttcaattccccgacggggagcc

SEQ ID NO: 39720 - DNA, 24 bp, Homo sapiens
  source 1..24: mol_type = genomic DNA
gttcaattccccgacggggagcca

SEQ ID NO: 39721 - DNA, 18 bp, Homo sapiens
  source 1..18: mol_type = genomic DNA
gttcaggtcgcagtctcc

SEQ ID NO: 39722 - DNA, 19 bp, Homo sapiens
  source 1..19: mol_type = genomic DNA
gttcaggtcgcagtctccc

SEQ ID NO: 39723 - DNA, 16 bp, Homo sapiens
  source 1..16: mol_type = genomic DNA
gttcagtggtagaatt

SEQ ID NO: 39724 - DNA, 17 bp, Homo sapiens
  source 1..17: mol_type = genomic DNA
gttcagtggtagaattc

SEQ ID NO: 39725 - DNA, 19 bp, Homo sapiens
  source 1..19: mol_type = genomic DNA
gttcagtggtagaattctc

SEQ ID NO: 39726 - DNA, 20 bp, Homo sapiens
  source 1..20: mol_type = genomic DNA
gttcagtggtagaattctcg

SEQ ID NO: 39727 - DNA, 21 bp, Homo sapiens
  source 1..21: mol_type = genomic DNA
gttcagtggtagaattctcgc

SEQ ID NO: 39728 - DNA, 22 bp, Homo sapiens
  source 1..22: mol_type = genomic DNA
gttcagtggtagaattctcgcc

SEQ ID NO: 39729 - DNA, 23 bp, Homo sapiens
  source 1..23: mol_type = genomic DNA
gttcagtggtagaattctcgcct

SEQ ID NO: 39730 - DNA, 24 bp, Homo sapiens
  source 1..24: mol_type = genomic DNA
gttcagtggtagaattctcgcctc

SEQ ID NO: 39731 - DNA, 24 bp, Homo sapiens
  source 1..24: mol_type = genomic DNA
gttcagtggtagaattctcgcctg

SEQ ID NO: 39732 - DNA, 25 bp, Homo sapiens
  source 1..25: mol_type = genomic DNA
gttcagtggtagaattctcgcctgc

SEQ ID NO: 39733 - DNA, 26 bp, Homo sapiens
  source 1..26: mol_type = genomic DNA
gttcagtggtagaattctcgcctgcc

SEQ ID NO: 39734 - DNA, 27 bp, Homo sapiens
  source 1..27: mol_type = genomic DNA
gttcagtggtagaattctcgcctgcca

SEQ ID NO: 39735 - DNA, 39 bp, Homo sapiens; identical to SEQ ID NO: 21949
  source 1..39: mol_type = genomic DNA

SEQ ID NO: 39736 - DNA, 40 bp, Homo sapiens; identical to SEQ ID NO: 21950
  source 1..40: mol_type = genomic DNA

SEQ ID NO: 39737 - DNA, 41 bp, Homo sapiens; identical to SEQ ID NO: 21951
  source 1..41: mol_type = genomic DNA

SEQ ID NO: 39738 - DNA, 24 bp, Homo sapiens
  source 1..24: mol_type = genomic DNA
gttcagtggtagaattctcgcctt

SEQ ID NO: 39739 - DNA, 31 bp, Homo sapiens; identical to SEQ ID NO: 21968
  source 1..31: mol_type = genomic DNA

SEQ ID NO: 39740 - DNA, 32 bp, Homo sapiens; identical to SEQ ID NO: 21969
  source 1..32: mol_type = genomic DNA

SEQ ID NO: 39741 - DNA, 33 bp, Homo sapiens; identical to SEQ ID NO: 21970
  source 1..33: mol_type = genomic DNA

SEQ ID NO: 39742 - DNA, 28 bp, Homo sapiens
  source 1..28: mol_type = genomic DNA
gttccatagtgtagtggttatcacgtct

SEQ ID NO: 39743 - DNA, 30 bp, Homo sapiens; identical to SEQ ID NO: 21980
  source 1..30: mol_type = genomic DNA

SEQ ID NO: 39744 - DNA, 31 bp, Homo sapiens; identical to SEQ ID NO: 21981
  source 1..31: mol_type = genomic DNA

SEQ ID NO: 39745 - DNA, 32 bp, Homo sapiens; identical to SEQ ID NO: 21982
  source 1..32: mol_type = genomic DNA

SEQ ID NO: 39746 - DNA, 32 bp, Homo sapiens; identical to SEQ ID NO: 21997
  source 1..32: mol_type = genomic DNA

SEQ ID NO: 39747 - DNA, 29 bp, Homo sapiens
  source 1..29: mol_type = genomic DNA
gttccgggttcgagtcccggcggagtcgc

SEQ ID NO: 39748 - DNA, 30 bp, Homo sapiens; identical to SEQ ID NO: 22006
  source 1..30: mol_type = genomic DNA

SEQ ID NO: 39749 - DNA, 23 bp, Homo sapiens
  source 1..23: mol_type = genomic DNA
gttcgaaaccgggcagaagcacc

SEQ ID NO: 39750 - DNA, 16 bp, Homo sapiens
  source 1..16: mol_type = genomic DNA
gttcgaaaccgggcgg

SEQ ID NO: 39751 - DNA, 17 bp, Homo sapiens
  source 1..17: mol_type = genomic DNA
gttcgaaaccgggcgga

SEQ ID NO: 39752 - DNA, 18 bp, Homo sapiens
  source 1..18: mol_type = genomic DNA
gttcgaaaccgggcggaa

SEQ ID NO: 39753 - DNA, 19 bp, Homo sapiens
  source 1..19: mol_type = genomic DNA
gttcgaaaccgggcggaaa

SEQ ID NO: 39754 - DNA, 20 bp, Homo sapiens
  source 1..20: mol_type = genomic DNA
gttcgaaaccgggcggaaac

SEQ ID NO: 39755 - DNA, 21 bp, Homo sapiens
  source 1..21: mol_type = genomic DNA
gttcgaaaccgggcggaaaca

SEQ ID NO: 39756 - DNA, 22 bp, Homo sapiens
  source 1..22: mol_type = genomic DNA
gttcgaaaccgggcggaaacac

SEQ ID NO: 39757 - DNA, 23 bp, Homo sapiens
  source 1..23: mol_type = genomic DNA
gttcgaaaccgggcggaaacacc

SEQ ID NO: 39758 - DNA, 24 bp, Homo sapiens
  source 1..24: mol_type = genomic DNA
gttcgaaaccgggcggaaacacca

SEQ ID NO: 39759 - DNA, 16 bp, Homo sapiens
  source 1..16: mol_type = genomic DNA
gttcgaaccccactcc

SEQ ID NO: 39760 - DNA, 17 bp, Homo sapiens
  source 1..17: mol_type = genomic DNA
gttcgaaccccactcct

SEQ ID NO: 39761 - DNA, 22 bp, Homo sapiens
  source 1..22: mol_type = genomic DNA
gttcgaaccccactcctggtac

SEQ ID NO: 39762 - DNA, 23 bp, Homo sapiens
  source 1..23: mol_type = genomic DNA
gttcgaaccccactcctggtacc

SEQ ID NO: 39763 - DNA, 24 bp, Homo sapiens
  source 1..24: mol_type = genomic DNA
gttcgaaccccactcctggtacca

SEQ ID NO: 39764 - DNA, 23 bp, Homo sapiens
  source 1..23: mol_type = genomic DNA
gttcgaaccccgtacgggccacc

SEQ ID NO: 39765 - DNA, 20 bp, Homo sapiens
  source 1..20: mol_type = genomic DNA
gttcgaaccccgtccgtgcc

SEQ ID NO: 39766 - DNA, 21 bp, Homo sapiens
  source 1..21: mol_type = genomic DNA
gttcgaaccccgtccgtgcct

SEQ ID NO: 39767 - DNA, 22 bp, Homo sapiens
  source 1..22: mol_type = genomic DNA
gttcgaaccccgtccgtgcctc

SEQ ID NO: 39768 - DNA, 23 bp, Homo sapiens
  source 1..23: mol_type = genomic DNA
gttcgaaccccgtccgtgcctcc

SEQ ID NO: 39769 - DNA, 24 bp, Homo sapiens
  source 1..24: mol_type = genomic DNA
gttcgaaccccgtccgtgcctcca

SEQ ID NO: 39770 - DNA, 23 bp, Homo sapiens
  source 1..23: mol_type = genomic DNA
gttcgaaccctgctcgctgcgcc

SEQ ID NO: 39771 - DNA, 21 bp, Homo sapiens
  source 1..21: mol_type = genomic DNA
gttcgaacctcagagggggca

SEQ ID NO: 39772 - DNA, 22 bp, Homo sapiens
  source 1..22: mol_type = genomic DNA
gttcgaacctcagagggggcac

SEQ ID NO: 39773 - DNA, 23 bp, Homo sapiens
  source 1..23: mol_type = genomic DNA
gttcgaacctcagagggggcacc

SEQ ID NO: 39774 - DNA, 24 bp, Homo sapiens
  source 1..24: mol_type = genomic DNA
gttcgaacctcagagggggcacca

SEQ ID NO: 39775 - DNA, 21 bp, Homo sapiens
  source 1..21: mol_type = genomic DNA
gttcgaatcacgtcggggtca

SEQ ID NO: 39776 - DNA, 22 bp, Homo sapiens
  source 1..22: mol_type = genomic DNA
gttcgaatcacgtcggggtcac

SEQ ID NO: 39777 - DNA, 23 bp, Homo sapiens
  source 1..23: mol_type = genomic DNA
gttcgaatcacgtcggggtcacc

SEQ ID NO: 39778 - DNA, 22 bp, Homo sapiens
  source 1..22: mol_type = genomic DNA
gttcgaatcccaccactgccac

SEQ ID NO: 39779 - DNA, 23 bp, Homo sapiens
  source 1..23: mol_type = genomic DNA
gttcgaatcccaccactgccacc

SEQ ID NO: 39780 - DNA, 22 bp, Homo sapiens
  source 1..22: mol_type = genomic DNA
gttcgaatcccaccagagtcgc

SEQ ID NO: 39781 - DNA, 23 bp, Homo sapiens
  source 1..23: mol_type = genomic DNA
gttcgaatcccaccagagtcgcc

SEQ ID NO: 39782 - DNA, 23 bp, Homo sapiens
  source 1..23: mol_type = genomic DNA
gttcgaatcccaccctcgtcgcc

SEQ ID NO: 39783 - DNA, 16 bp, Homo sapiens
  source 1..16: mol_type = genomic DNA
gttcgaatcccaccgc

SEQ ID NO: 39784 - DNA, 20 bp, Homo sapiens
  source 1..20: mol_type = genomic DNA
gttcgaatcccaccgctgcc

SEQ ID NO: 39785 - DNA, 21 bp, Homo sapiens
  source 1..21: mol_type = genomic DNA
gttcgaatcccaccgctgcca

SEQ ID NO: 39786 - DNA, 22 bp, Homo sapiens
  source 1..22: mol_type = genomic DNA
gttcgaatcccaccgctgccac

SEQ ID NO: 39787 - DNA, 23 bp, Homo sapiens
  source 1..23: mol_type = genomic DNA
gttcgaatcccaccgctgccacc

SEQ ID NO: 39788 - DNA, 23 bp, Homo sapiens
  source 1..23: mol_type = genomic DNA
gttcgaatcccaccttcgtcgcc

SEQ ID NO: 39789 - DNA, 16 bp, Homo sapiens
  source 1..16: mol_type = genomic DNA
gttcgaatcccactcc

SEQ ID NO: 39790 - DNA, 21 bp, Homo sapiens
  source 1..21: mol_type = genomic DNA
gttcgaatcccactcctgaca

SEQ ID NO: 39791 - DNA, 22 bp, Homo sapiens
  source 1..22: mol_type = genomic DNA
gttcgaatcccactcctgacac

SEQ ID NO: 39792 - DNA, 23 bp, Homo sapiens
  source 1..23: mol_type = genomic DNA
gttcgaatcccactcctgacacc

SEQ ID NO: 39793 - DNA, 16 bp, Homo sapiens
  source 1..16: mol_type = genomic DNA
gttcgaatcccacttc

SEQ ID NO: 39794 - DNA, 21 bp, Homo sapiens
  source 1..21: mol_type = genomic DNA
gttcgaatcccacttctgaca

SEQ ID NO: 39795 - DNA, 22 bp, Homo sapiens
  source 1..22: mol_type = genomic DNA
gttcgaatcccacttctgacac

SEQ ID NO: 39796 - DNA, 23 bp, Homo sapiens
  source 1..23: mol_type = genomic DNA
gttcgaatcccacttctgacacc

SEQ ID NO: 39797 - DNA, 24 bp, Homo sapiens
  source 1..24: mol_type = genomic DNA
gttcgaatcccacttctgacacca

SEQ ID NO: 39798 - DNA, 21 bp, Homo sapiens
  source 1..21: mol_type = genomic DNA
gttcgaatcccagcgaggcct

SEQ ID NO: 39799 - DNA, 16 bp, Homo sapiens
  source 1..16: mol_type = genomic DNA
gttcgaatcccagcgg

SEQ ID NO: 39800 - DNA, 20 bp, Homo sapiens
  source 1..20: mol_type = genomic DNA
gttcgaatcccagcggggcc

SEQ ID NO: 39801 - DNA, 21 bp, Homo sapiens
  source 1..21: mol_type = genomic DNA
gttcgaatcccagcggggcct

SEQ ID NO: 39802 - DNA, 22 bp, Homo sapiens
  source 1..22: mol_type = genomic DNA
gttcgaatcccagcggggcctc

SEQ ID NO: 39803 - DNA, 23 bp, Homo sapiens
  source 1..23: mol_type = genomic DNA
gttcgaatcccagcggggcctcc

SEQ ID NO: 39804 - DNA, 18 bp, Homo sapiens
  source 1..18: mol_type = genomic DNA
gttcgaatcccagcggtg

SEQ ID NO: 39805 - DNA, 20 bp, Homo sapiens
  source 1..20: mol_type = genomic DNA
gttcgaatcccagcggtgcc

SEQ ID NO: 39806 - DNA, 21 bp, Homo sapiens
  source 1..21: mol_type = genomic DNA
gttcgaatcccagcggtgcct

SEQ ID NO: 39807 - DNA, 22 bp, Homo sapiens
  source 1..22: mol_type = genomic DNA
gttcgaatcccagcggtgcctc

SEQ ID NO: 39808 - DNA, 23 bp, Homo sapiens
  source 1..23: mol_type = genomic DNA
gttcgaatcccagcggtgcctcc

SEQ ID NO: 39809 - DNA, 21 bp, Homo sapiens
  source 1..21: mol_type = genomic DNA
gttcgaatcccagtagagcct

SEQ ID NO: 39810 - DNA, 21 bp, Homo sapiens
  source 1..21: mol_type = genomic DNA
gttcgaatcccatcctcgtcg

SEQ ID NO: 39811 - DNA, 22 bp, Homo sapiens
  source 1..22: mol_type = genomic DNA
gttcgaatcccatcctcgtcgc

SEQ ID NO: 39812 - DNA, 23 bp, Homo sapiens
  source 1..23: mol_type = genomic DNA
gttcgaatcccatcctcgtcgcc

SEQ ID NO: 39813 - DNA, 24 bp, Homo sapiens
  source 1..24: mol_type = genomic DNA
gttcgaatcccatcctcgtcgcca

SEQ ID NO: 39814 - DNA, 21 bp, Homo sapiens
  source 1..21: mol_type = genomic DNA
gttcgaatccctccgtggtta

SEQ ID NO: 39815 - DNA, 23 bp, Homo sapiens
  source 1..23: mol_type = genomic DNA
gttcgaatccctccgtggttacc

SEQ ID NO: 39816 - DNA, 16 bp, Homo sapiens
  source 1..16: mol_type = genomic DNA
gttcgaatcccttcgt

SEQ ID NO: 39817 - DNA, 21 bp, Homo sapiens
  source 1..21: mol_type = genomic DNA
gttcgaatcccttcgtggttg

SEQ ID NO: 39818 - DNA, 22 bp, Homo sapiens
  source 1..22: mol_type = genomic DNA
gttcgaatcccttcgtggttgc

SEQ ID NO: 39819 - DNA, 23 bp, Homo sapiens
  source 1..23: mol_type = genomic DNA
gttcgaatcccttcgtggttgcc

SEQ ID NO: 39820 - DNA, 24 bp, Homo sapiens
  source 1..24: mol_type = genomic DNA
gttcgaatcccttcgtggttgcca

SEQ ID NO: 39821 - DNA, 19 bp, Homo sapiens
  source 1..19: mol_type = genomic DNA
gttcgaatccgagtcacgg

SEQ ID NO: 39822 - DNA, 20 bp, Homo sapiens
  source 1..20: mol_type = genomic DNA
gttcgaatccgagtcacggc

SEQ ID NO: 39823 - DNA, 21 bp, Homo sapiens
  source 1..21: mol_type = genomic DNA
gttcgaatccgagtcacggca

SEQ ID NO: 39824 - DNA, 22 bp, Homo sapiens
  source 1..22: mol_type = genomic DNA
gttcgaatccgagtcacggcac

SEQ ID NO: 39825 - DNA, 23 bp, Homo sapiens
  source 1..23: mol_type = genomic DNA
gttcgaatccgagtcacggcacc

SEQ ID NO: 39826 - DNA, 24 bp, Homo sapiens
  source 1..24: mol_type = genomic DNA
gttcgaatccgagtcacggcacca

SEQ ID NO: 39827 - DNA, 16 bp, Homo sapiens
  source 1..16: mol_type = genomic DNA
gttcgaatccggctcg

SEQ ID NO: 39828 - DNA, 21 bp, Homo sapiens
  source 1..21: mol_type = genomic DNA
gttcgaatccggctcgaagga

SEQ ID NO: 39829 - DNA, 22 bp, Homo sapiens
  source 1..22: mol_type = genomic DNA
gttcgaatccggctcgaaggac

SEQ ID NO: 39830 - DNA, 23 bp, Homo sapiens
  source 1..23: mol_type = genomic DNA
gttcgaatccggctcgaaggacc

SEQ ID NO: 39831 - DNA, 22 bp, Homo sapiens
  source 1..22: mol_type = genomic DNA
gttcgaatccggctcggaggac

SEQ ID NO: 39832 - DNA, 23 bp, Homo sapiens
  source 1..23: mol_type = genomic DNA
gttcgaatccggctcggaggacc

SEQ ID NO: 39833 - DNA, 22 bp, Homo sapiens
  source 1..22: mol_type = genomic DNA
gttcgaatcctgccgactacgc

SEQ ID NO: 39834 - DNA, 23 bp, Homo sapiens
  source 1..23: mol_type = genomic DNA
gttcgaatcctgccgactacgcc

SEQ ID NO: 39835 - DNA, 24 bp, Homo sapiens
  source 1..24: mol_type = genomic DNA
gttcgaatcctgccgactacgcca

SEQ ID NO: 39836 - DNA, 23 bp, Homo sapiens
  source 1..23: mol_type = genomic DNA
gttcgaatcctgctcacagcgcc

SEQ ID NO: 39837 - DNA, 21 bp, Homo sapiens
  source 1..21: mol_type = genomic DNA
gttcgaatcctgttcgtgacg

SEQ ID NO: 39838 - DNA, 23 bp, Homo sapiens
  source 1..23: mol_type = genomic DNA
gttcgaatcctgttcgtgacgcc

SEQ ID NO: 39839 - DNA, 22 bp, Homo sapiens
  source 1..22: mol_type = genomic DNA
gttcgaatctcggtgggacctc

SEQ ID NO: 39840 - DNA, 21 bp, Homo sapiens
  source 1..21: mol_type = genomic DNA
gttcgactcccagtggggcct

SEQ ID NO: 39841 - DNA, 16 bp, Homo sapiens
  source 1..16: mol_type = genomic DNA
gttcgactcccggtat

SEQ ID NO: 39842 - DNA, 20 bp, Homo sapiens
  source 1..20: mol_type = genomic DNA
gttcgactcccggtatggga

SEQ ID NO: 39843 - DNA, 21 bp, Homo sapiens
  source 1..21: mol_type = genomic DNA
gttcgactcccggtatgggaa

SEQ ID NO: 39844 - DNA, 22 bp, Homo sapiens
  source 1..22: mol_type = genomic DNA
gttcgactcccggtatgggaac

SEQ ID NO: 39845 - DNA, 23 bp, Homo sapiens
  source 1..23: mol_type = genomic DNA
gttcgactcccggtatgggaacc

SEQ ID NO: 39846 - DNA, 16 bp, Homo sapiens
  source 1..16: mol_type = genomic DNA
gttcgactcccggtgt

SEQ ID NO: 39847 - DNA, 17 bp, Homo sapiens
  source 1..17: mol_type = genomic DNA
gttcgactcccggtgtg

SEQ ID NO: 39848 - DNA, 18 bp, Homo sapiens
  source 1..18: mol_type = genomic DNA
gttcgactcccggtgtgg

SEQ ID NO: 39849 - DNA, 19 bp, Homo sapiens
  source 1..19: mol_type = genomic DNA
gttcgactcccggtgtggg

SEQ ID NO: 39850 - DNA, 20 bp, Homo sapiens
  source 1..20: mol_type = genomic DNA
gttcgactcccggtgtggga

SEQ ID NO: 39851 - DNA, 21 bp, Homo sapiens
  source 1..21: mol_type = genomic DNA
gttcgactcccggtgtgggaa

SEQ ID NO: 39852 - DNA, 22 bp, Homo sapiens
  source 1..22: mol_type = genomic DNA
gttcgactcccggtgtgggaac

SEQ ID NO: 39853 - DNA, 23 bp, Homo sapiens
  source 1..23: mol_type = genomic DNA
gttcgactcccggtgtgggaacc

SEQ ID NO: 39854 - DNA, 24 bp, Homo sapiens
  source 1..24: mol_type = genomic DNA
gttcgactcccggtgtgggaacca

SEQ ID NO: 39855 - DNA, 22 bp, Homo sapiens
  source 1..22: mol_type = genomic DNA
gttcgactcctggctggctcgc

SEQ ID NO: 39856 - DNA, 23 bp, Homo sapiens
  source 1..23: mol_type = genomic DNA
gttcgactcctggctggctcgcc

SEQ ID NO: 39857 - DNA, 24 bp, Homo sapiens
  source 1..24: mol_type = genomic DNA
gttcgactcctggctggctcgcca

SEQ ID NO: 39858 - DNA, 22 bp, Homo sapiens
  source 1..22: mol_type = genomic DNA
gttcgagcccacccagggacgc

SEQ ID NO: 39859 - DNA, 23 bp, Homo sapiens
  source 1..23: mol_type = genomic DNA
gttcgagcccacccagggacgcc

SEQ ID NO: 39860 - DNA, 24 bp, Homo sapiens
  source 1..24: mol_type = genomic DNA
gttcgagcccacccagggacgcca

SEQ ID NO: 39861 - DNA, 16 bp, Homo sapiens
  source 1..16: mol_type = genomic DNA
gttcgagccccacgtt

SEQ ID NO: 39862 - DNA, 20 bp, Homo sapiens
  source 1..20: mol_type = genomic DNA
gttcgagccccacgttgggc

SEQ ID NO: 39863 - DNA, 21 bp, Homo sapiens
  source 1..21: mol_type = genomic DNA
gttcgagccccacgttgggcg

SEQ ID NO: 39864 - DNA, 22 bp, Homo sapiens
  source 1..22: mol_type = genomic DNA
gttcgagccccacgttgggcgc

SEQ ID NO: 39865 - DNA, 23 bp, Homo sapiens
  source 1..23: mol_type = genomic DNA
gttcgagccccacgttgggcgcc

SEQ ID NO: 39866 - DNA, 24 bp, Homo sapiens
  source 1..24: mol_type = genomic DNA
gttcgagccccacgttgggcgcca

SEQ ID NO: 39867 - DNA, 16 bp, Homo sapiens
  source 1..16: mol_type = genomic DNA
gttcgagccccagtgg

SEQ ID NO: 39868 - DNA, 17 bp, Homo sapiens
  source 1..17: mol_type = genomic DNA
gttcgagccccagtgga

SEQ ID NO: 39869 - DNA, 18 bp, Homo sapiens
  source 1..18: mol_type = genomic DNA
gttcgagccccagtggaa

SEQ ID NO: 39870 - DNA, 19 bp, Homo sapiens
  source 1..19: mol_type = genomic DNA
gttcgagccccagtggaac

SEQ ID NO: 39871 - DNA, 20 bp, Homo sapiens
  source 1..20: mol_type = genomic DNA
gttcgagccccagtggaacc

SEQ ID NO: 39872 - DNA, 21 bp, Homo sapiens
  source 1..21: mol_type = genomic DNA
gttcgagccccagtggaacca

SEQ ID NO: 39873 - DNA, 22 bp, Homo sapiens
  source 1..22: mol_type = genomic DNA
gttcgagccccagtggaaccac

SEQ ID NO: 39874 - DNA, 23 bp, Homo sapiens
  source 1..23: mol_type = genomic DNA
gttcgagccccagtggaaccacc

SEQ ID NO: 39875 - DNA, 20 bp, Homo sapiens
  source 1..20: mol_type = genomic DNA
gttcgagcctcacacggggc

SEQ ID NO: 39876 - DNA, 21 bp, Homo sapiens
  source 1..21: mol_type = genomic DNA
gttcgagcctcacacggggca

SEQ ID NO: 39877 - DNA, 22 bp, Homo sapiens
  source 1..22: mol_type = genomic DNA
gttcgagcctcacacggggcac

SEQ ID NO: 39878 - DNA, 23 bp, Homo sapiens
  source 1..23: mol_type = genomic DNA
gttcgagcctcacacggggcacc

SEQ ID NO: 39879 - DNA, 21 bp, Homo sapiens
  source 1..21: mol_type = genomic DNA
gttcgagcctcacctggagca

SEQ ID NO: 39880 - DNA, 22 bp, Homo sapiens
  source 1..22: mol_type = genomic DNA
gttcgagcctcacctggagcac

SEQ ID NO: 39881 - DNA, 23 bp, Homo sapiens
  source 1..23: mol_type = genomic DNA
gttcgagcctcacctggagcacc

SEQ ID NO: 39882 - DNA, 21 bp, Homo sapiens
  source 1..21: mol_type = genomic DNA
gttcgagcctcagagagggca

SEQ ID NO: 39883 - DNA, 22 bp, Homo sapiens
  source 1..22: mol_type = genomic DNA
gttcgagcctcagagagggcac

SEQ ID NO: 39884 - DNA, 23 bp, Homo sapiens
  source 1..23: mol_type = genomic DNA
gttcgagcctcagagagggcacc

SEQ ID NO: 39885 - DNA, 23 bp, Homo sapiens
  source 1..23: mol_type = genomic DNA
gttcgagtcccaccagagtcgcc

SEQ ID NO: 39886 - DNA, 17 bp, Homo sapiens
  source 1..17: mol_type = genomic DNA
gttcgagtcccacccgg

SEQ ID NO: 39887 - DNA, 16 bp, Homo sapiens
  source 1..16: mol_type = genomic DNA
gttcgagtcccacctg

SEQ ID NO: 39888 - DNA, 24 bp, Homo sapiens
  source 1..24: mol_type = genomic DNA
gttcgagtcccacctggggtgcca

SEQ ID NO: 39889 - DNA, 19 bp, Homo sapiens
  source 1..19: mol_type = genomic DNA
gttcgagtcccatctgggg

SEQ ID NO: 39890 - DNA, 22 bp, Homo sapiens
  source 1..22: mol_type = genomic DNA
gttcgagtcccatctggggtgc

SEQ ID NO: 39891 - DNA, 23 bp, Homo sapiens
  source 1..23: mol_type = genomic DNA
gttcgagtcccatctggggtgcc

SEQ ID NO: 39892 - DNA, 24 bp, Homo sapiens
  source 1..24: mol_type = genomic DNA
gttcgagtcccatctggggtgcca

SEQ ID NO: 39893 - DNA, 21 bp, Homo sapiens
  source 1..21: mol_type = genomic DNA
gttcgagtcccatctgggtcg

SEQ ID NO: 39894 - DNA, 23 bp, Homo sapiens
  source 1..23: mol_type = genomic DNA
gttcgagtcccatctgggtcgcc

SEQ ID NO: 39895 - DNA, 24 bp, Homo sapiens
  source 1..24: mol_type = genomic DNA
gttcgagtcccatctgggtcgcca

SEQ ID NO: 39896 - DNA, 24 bp, Homo sapiens
  source 1..24: mol_type = genomic DNA
gttcgagtcccggcagagatgcca

SEQ ID NO: 39897 - DNA, 22 bp, Homo sapiens
  source 1..22: mol_type = genomic DNA
gttcgagtcccggcggagtcgc

SEQ ID NO: 39898 - DNA, 23 bp, Homo sapiens
  source 1..23: mol_type = genomic DNA
gttcgagtcccggcggagtcgcc

SEQ ID NO: 39899 - DNA, 24 bp, Homo sapiens
  source 1..24: mol_type = genomic DNA
gttcgagtcccggcggagtcgcca

SEQ ID NO: 39900 - DNA, 16 bp, Homo sapiens
  source 1..16: mol_type = genomic DNA
gttcgagtcccttcgt

SEQ ID NO: 39901 - DNA, 21 bp, Homo sapiens
  source 1..21: mol_type = genomic DNA
gttcgagtcccttcgtggtcg

SEQ ID NO: 39902 - DNA, 22 bp, Homo sapiens
  source 1..22: mol_type = genomic DNA
gttcgagtcccttcgtggtcgc

SEQ ID NO: 39903 - DNA, 23 bp, Homo sapiens
  source 1..23: mol_type = genomic DNA
gttcgagtcccttcgtggtcgcc

SEQ ID NO: 39904 - DNA, 24 bp, Homo sapiens
  source 1..24: mol_type = genomic DNA
gttcgagtcccttcgtggtcgcca

SEQ ID NO: 39905 - DNA, 16 bp, Homo sapiens
  source 1..16: mol_type = genomic DNA
gttcgagtcctgccgc

SEQ ID NO: 39906 - DNA, 22 bp, Homo sapiens
  source 1..22: mol_type = genomic DNA
gttcgagtcctgccgcggtcgc

SEQ ID NO: 39907 - DNA, 23 bp, Homo sapiens
  source 1..23: mol_type = genomic DNA
gttcgagtcctgccgcggtcgcc

SEQ ID NO: 39908 - DNA, 24 bp, Homo sapiens
  source 1..24: mol_type = genomic DNA
gttcgagtcctgccgcggtcgcca

SEQ ID NO: 39909 - DNA, 23 bp, Homo sapiens
  source 1..23: mol_type = genomic DNA
gttcgatcccacccagggacgcc

SEQ ID NO: 39910 - DNA, 21 bp, Homo sapiens
  source 1..21: mol_type = genomic DNA
gttcgatccccagcatctcca

SEQ ID NO: 39911 - DNA, 22 bp, Homo sapiens
  source 1..22: mol_type = genomic DNA
gttcgatccccagcatctccac

SEQ ID NO: 39912 - DNA, 23 bp, Homo sapiens
  source 1..23: mol_type = genomic DNA
gttcgatccccagcatctccacc

SEQ ID NO: 39913 - DNA, 23 bp, Homo sapiens
  source 1..23: mol_type = genomic DNA
gttcgatccccagtacctccacc

SEQ ID NO: 39914 - DNA, 17 bp, Homo sapiens
  source 1..17: mol_type = genomic DNA
gttcgatccccggcacc

SEQ ID NO: 39915 - DNA, 18 bp, Homo sapiens
  source 1..18: mol_type = genomic DNA
gttcgatccccggcacct

SEQ ID NO: 39916 - DNA, 23 bp, Homo sapiens
  source 1..23: mol_type = genomic DNA
gttcgatccccggcacctccacc

SEQ ID NO: 39917 - DNA, 16 bp, Homo sapiens
  source 1..16: mol_type = genomic DNA
gttcgatccccggcat

SEQ ID NO: 39918 - DNA, 17 bp, Homo sapiens
  source 1..17: mol_type = genomic DNA
gttcgatccccggcatc

SEQ ID NO: 39919 - DNA, 18 bp, Homo sapiens
  source 1..18: mol_type = genomic DNA
gttcgatccccggcatct

SEQ ID NO: 39920 - DNA, 19 bp, Homo sapiens
  source 1..19: mol_type = genomic DNA
gttcgatccccggcatctc

SEQ ID NO: 39921 - DNA, 20 bp, Homo sapiens
  source 1..20: mol_type = genomic DNA
gttcgatccccggcatctcc

SEQ ID NO: 39922 - DNA, 21 bp, Homo sapiens
  source 1..21: mol_type = genomic DNA
gttcgatccccggcatctcca

SEQ ID NO: 39923 - DNA, 22 bp, Homo sapiens
  source 1..22: mol_type = genomic DNA
gttcgatccccggcatctccac

SEQ ID NO: 39924 - DNA, 23 bp, Homo sapiens
  source 1..23: mol_type = genomic DNA
gttcgatccccggcatctccacc

SEQ ID NO: 39925 - DNA, 24 bp, Homo sapiens
  source 1..24: mol_type = genomic DNA
gttcgatccccggcatctccacca

SEQ ID NO: 39926 - DNA, 19 bp, Homo sapiens
  source 1..19: mol_type = genomic DNA
gttcgatccccgtacgggc

SEQ ID NO: 39927 - DNA, 20 bp, Homo sapiens
  source 1..20: mol_type = genomic DNA
gttcgatccccgtacgggcc

SEQ ID NO: 39928 - DNA, 21 bp, Homo sapiens
  source 1..21: mol_type = genomic DNA
gttcgatccccgtacgggcca

SEQ ID NO: 39929 - DNA, 22 bp, Homo sapiens
  source 1..22: mol_type = genomic DNA
gttcgatccccgtacgggccac

SEQ ID NO: 39930 - DNA, 23 bp, Homo sapiens
  source 1..23: mol_type = genomic DNA
gttcgatccccgtacgggccacc

SEQ ID NO: 39931 - DNA, 21 bp, Homo sapiens
  source 1..21: mol_type = genomic DNA
gttcgatcccgggcggaaaca

SEQ ID NO: 39932 - DNA, 22 bp, Homo sapiens
  source 1..22: mol_type = genomic DNA
gttcgatcccgggcggaaacac

SEQ ID NO: 39933 - DNA, 20 bp, Homo sapiens
  source 1..20: mol_type = genomic DNA
gttcgatcccgggtttcggc

SEQ ID NO: 39934 - DNA, 21 bp, Homo sapiens
  source 1..21: mol_type = genomic DNA
gttcgatcccgggtttcggca

SEQ ID NO: 39935 - DNA, 22 bp, Homo sapiens
  source 1..22: mol_type = genomic DNA
gttcgatcccgggtttcggcac

SEQ ID NO: 39936 - DNA, 23 bp, Homo sapiens
  source 1..23: mol_type = genomic DNA
gttcgatcccgggtttcggcacc

SEQ ID NO: 39937 - DNA, 23 bp, Homo sapiens
  source 1..23: mol_type = genomic DNA
gttcgatcctcacacggggcacc

SEQ ID NO: 39938 - DNA, 22 bp, Homo sapiens
  source 1..22: mol_type = genomic DNA
gttcgatcctcacctggagcac

SEQ ID NO: 39939 - DNA, 23 bp, Homo sapiens
  source 1..23: mol_type = genomic DNA
gttcgatcctcacctggagcacc

SEQ ID NO: 39940 - DNA, 22 bp, Homo sapiens
  source 1..22: mol_type = genomic DNA
gttcgattccccaacggggagc

SEQ ID NO: 39941 - DNA, 23 bp, Homo sapiens
  source 1..23: mol_type = genomic DNA
gttcgattccccaacggggagcc

SEQ ID NO: 39942 - DNA, 16 bp, Homo sapiens
  source 1..16: mol_type = genomic DNA
gttcgattccccgacg

SEQ ID NO: 39943 - DNA, 17 bp, Homo sapiens
  source 1..17: mol_type = genomic DNA
gttcgattccccgacgg

SEQ ID NO: 39944 - DNA, 18 bp, Homo sapiens
  source 1..18: mol_type = genomic DNA
gttcgattccccgacggg

SEQ ID NO: 39945 - DNA, 19 bp, Homo sapiens
  source 1..19: mol_type = genomic DNA
gttcgattccccgacgggg

SEQ ID NO: 39946 - DNA, 20 bp, Homo sapiens
  source 1..20: mol_type = genomic DNA
gttcgattccccgacgggga

SEQ ID NO: 39947 - DNA, 21 bp, Homo sapiens
  source 1..21: mol_type = genomic DNA
gttcgattccccgacggggag

SEQ ID NO: 39948 - DNA, 22 bp, Homo sapiens
  source 1..22: mol_type = genomic DNA
gttcgattccccgacggggagc

SEQ ID NO: 39949 - DNA, 23 bp, Homo sapiens
  source 1..23: mol_type = genomic DNA
gttcgattccccgacggggagcc

SEQ ID NO: 39950 - DNA, 24 bp, Homo sapiens
  source 1..24: mol_type = genomic DNA
gttcgattccccgacggggagcca

SEQ ID NO: 39951 - DNA, 16 bp, Homo sapiens
  source 1..16: mol_type = genomic DNA
gttcgattcccggcca

SEQ ID NO: 39952 - DNA, 17 bp, Homo sapiens
  source 1..17: mol_type = genomic DNA
gttcgattcccggccaa

SEQ ID NO: 39953 - DNA, 18 bp, Homo sapiens
  source 1..18: mol_type = genomic DNA
gttcgattcccggccaac

SEQ ID NO: 39954 - DNA, 19 bp, Homo sapiens
  source 1..19: mol_type = genomic DNA
gttcgattcccggccaacg

SEQ ID NO: 39955 - DNA, 21 bp, Homo sapiens
  source 1..21: mol_type = genomic DNA
gttcgattcccggccaacgca

SEQ ID NO: 39956 - DNA, 22 bp, Homo sapiens
  source 1..22: mol_type = genomic DNA
gttcgattcccggccaacgcac

SEQ ID NO: 39957 - DNA, 23 bp, Homo sapiens
  source 1..23: mol_type = genomic DNA
gttcgattcccggccaacgcacc

SEQ ID NO: 39958 - DNA, 24 bp, Homo sapiens
  source 1..24: mol_type = genomic DNA
gttcgattcccggccaacgcacca

SEQ ID NO: 39959 - DNA, 18 bp, Homo sapiens
  source 1..18: mol_type = genomic DNA
gttcgattcccggccaat

SEQ ID NO: 39960 - DNA, 19 bp, Homo sapiens
  source 1..19: mol_type = genomic DNA
gttcgattcccggccaatg

SEQ ID NO: 39961 - DNA, 21 bp, Homo sapiens
  source 1..21: mol_type = genomic DNA
gttcgattcccggccaatgca

SEQ ID NO: 39962 - DNA, 22 bp, Homo sapiens
  source 1..22: mol_type = genomic DNA
gttcgattcccggccaatgcac

SEQ ID NO: 39963 - DNA, 23 bp, Homo sapiens
  source 1..23: mol_type = genomic DNA
gttcgattcccggccaatgcacc

SEQ ID NO: 39964 - DNA, 24 bp, Homo sapiens
  source 1..24: mol_type = genomic DNA
gttcgattcccggccaatgcacca

SEQ ID NO: 39965 - DNA, 16 bp, Homo sapiens
  source 1..16: mol_type = genomic DNA
gttcgattcccggccc

SEQ ID NO: 39966 - DNA, 19 bp, Homo sapiens
  source 1..19: mol_type = genomic DNA
gttcgattcccggcccatg

SEQ ID NO: 39967 - DNA, 23 bp, Homo sapiens
  source 1..23: mol_type = genomic DNA
gttcgattcccggcccatgcacc

SEQ ID NO: 39968 - DNA, 16 bp, Homo sapiens
  source 1..16: mol_type = genomic DNA
gttcgattcccgggcg

SEQ ID NO: 39969 - DNA, 18 bp, Homo sapiens
  source 1..18: mol_type = genomic DNA
gttcgattcccgggcggc

SEQ ID NO: 39970 - DNA, 20 bp, Homo sapiens
  source 1..20: mol_type = genomic DNA
gttcgattcccgggcggcgc

SEQ ID NO: 39971 - DNA, 21 bp, Homo sapiens
  source 1..21: mol_type = genomic DNA
gttcgattcccgggcggcgca

SEQ ID NO: 39972 - DNA, 22 bp, Homo sapiens
  source 1..22: mol_type = genomic DNA
gttcgattcccgggcggcgcac

SEQ ID NO: 39973 - DNA, 23 bp, Homo sapiens
  source 1..23: mol_type = genomic DNA
gttcgattcccgggcggcgcacc

SEQ ID NO: 39974 - DNA, 16 bp, Homo sapiens
  source 1..16: mol_type = genomic DNA
gttcgattcccggtca

SEQ ID NO: 39975 - DNA, 17 bp, Homo sapiens
  source 1..17: mol_type = genomic DNA
gttcgattcccggtcag

SEQ ID NO: 39976 - DNA, 18 bp, Homo sapiens
  source 1..18: mol_type = genomic DNA
gttcgattcccggtcagg

SEQ ID NO: 39977 - DNA, 19 bp, Homo sapiens
  source 1..19: mol_type = genomic DNA
gttcgattcccggtcaggg

SEQ ID NO: 39978 - DNA, 20 bp, Homo sapiens
  source 1..20: mol_type = genomic DNA
gttcgattcccggtcaggga

SEQ ID NO: 39979 - DNA, 21 bp, Homo sapiens
  source 1..21: mol_type = genomic DNA
gttcgattcccggtcagggaa

SEQ ID NO: 39980 - DNA, 22 bp, Homo sapiens
  source 1..22: mol_type = genomic DNA
gttcgattcccggtcagggaac

SEQ ID NO: 39981 - DNA, 23 bp, Homo sapiens
  source 1..23: mol_type = genomic DNA
gttcgattcccggtcagggaacc

SEQ ID NO: 39982 - DNA, 24 bp, Homo sapiens
  source 1..24: mol_type = genomic DNA
gttcgattcccggtcagggaacca

SEQ ID NO: 39983 - DNA, 21 bp, Homo sapiens
  source 1..21: mol_type = genomic DNA
gttcgattcccggtcatggaa

SEQ ID NO: 39984 - DNA, 22 bp, Homo sapiens
  source 1..22: mol_type = genomic DNA
gttcgattcccggtcatggaac

SEQ ID NO: 39985 - DNA, 16 bp, Homo sapiens
  source 1..16: mol_type = genomic DNA
gttcgattccggctcg

SEQ ID NO: 39986 - DNA, 22 bp, Homo sapiens
  source 1..22: mol_type = genomic DNA
gttcgattccggctcgaaggac

SEQ ID NO: 39987 - DNA, 23 bp, Homo sapiens
  source 1..23: mol_type = genomic DNA
gttcgattccggctcgaaggacc

SEQ ID NO: 39988 - DNA, 16 bp, Homo sapiens
  source 1..16: mol_type = genomic DNA
gttcgattccttcctt

SEQ ID NO: 39989 - DNA, 23 bp, Homo sapiens
  source 1..23: mol_type = genomic DNA
gttcgattccttccttttttgcc

SEQ ID NO: 39990 - DNA, 24 bp, Homo sapiens
  source 1..24: mol_type = genomic DNA
gttcgattccttccttttttgcca

SEQ ID NO: 39991 - DNA, 18 bp, Homo sapiens
  source 1..18: mol_type = genomic DNA
gttcgattctcatagtcc

SEQ ID NO: 39992 - DNA, 19 bp, Homo sapiens
  source 1..19: mol_type = genomic DNA
gttcgattctcatagtcct

SEQ ID NO: 39993 - DNA, 21 bp, Homo sapiens
  source 1..21: mol_type = genomic DNA
gttcgattctcatagtcctag

SEQ ID NO: 39994 - DNA, 22 bp, Homo sapiens
  source 1..22: mol_type = genomic DNA
gttcgattctcatagtcctagc

SEQ ID NO: 39995 - DNA, 23 bp, Homo sapiens
  source 1..23: mol_type = genomic DNA
gttcgattctcatagtcctagcc

SEQ ID NO: 39996 - DNA, 24 bp, Homo sapiens
  source 1..24: mol_type = genomic DNA
gttcgattctcatagtcctagcca

SEQ ID NO: 39997 - DNA, 16 bp, Homo sapiens
  source 1..16: mol_type = genomic DNA
gttctggtctccggat

SEQ ID NO: 39998 - DNA, 21 bp, Homo sapiens
  source 1..21: mol_type = genomic DNA
gttctggtctccggatggagg

SEQ ID NO: 39999 - DNA, 16 bp, Homo sapiens
  source 1..16: mol_type = genomic DNA
gttcttgtagttgaaa

SEQ ID NO: 40000 - DNA, 17 bp, Homo sapiens
  source 1..17: mol_type = genomic DNA
gttcttgtagttgaaat

SEQ ID NO: 40001 - DNA, 18 bp, Homo sapiens
  source 1..18: mol_type = genomic DNA
gttcttgtagttgaaata

SEQ ID NO: 40002 - DNA, 19 bp, Homo sapiens
  source 1..19: mol_type = genomic DNA
gttcttgtagttgaaatac

SEQ ID NO: 40003 - DNA, 20 bp, Homo sapiens
  source 1..20: mol_type = genomic DNA
gttcttgtagttgaaataca

SEQ ID NO: 40004 - DNA, 22 bp, Homo sapiens
  source 1..22: mol_type = genomic DNA
gttcttgtagttgaaatacaac

SEQ ID NO: 40005 - DNA, 23 bp, Homo sapiens
  source 1..23: mol_type = genomic DNA
gttcttgtagttgaaatacaacg

SEQ ID NO: 40006 - DNA, 24 bp, Homo sapiens
  source 1..24: mol_type = genomic DNA
gttcttgtagttgaaatacaacga

SEQ ID NO: 40007 - DNA, 25 bp, Homo sapiens
  source 1..25: mol_type = genomic DNA
gttcttgtagttgaaatacaacgat

SEQ ID NO: 40008 - DNA, 26 bp, Homo sapiens
  source 1..26: mol_type = genomic DNA
gttcttgtagttgaaatacaacgatg

SEQ ID NO: 40009 - DNA, 27 bp, Homo sapiens
  source 1..27: mol_type = genomic DNA
gttcttgtagttgaaatacaacgatgg

SEQ ID NO: 40010 - DNA, 28 bp, Homo sapiens
  source 1..28: mol_type = genomic DNA
gttcttgtagttgaaatacaacgatggt

SEQ ID NO: 40011 - DNA, 29 bp, Homo sapiens
  source 1..29: mol_type = genomic DNA
gttcttgtagttgaaatacaacgatggtt

SEQ ID NO: 40012 - DNA, 32 bp, Homo sapiens; identical to SEQ ID NO: 22222
  source 1..32: mol_type = genomic DNA

SEQ ID NO: 40013 - DNA, 33 bp, Homo sapiens; identical to SEQ ID NO: 22223
  source 1..33: mol_type = genomic DNA

SEQ ID NO: 40014 - DNA, 34 bp, Homo sapiens; identical to SEQ ID NO: 22224
  source 1..34: mol_type = genomic DNA

SEQ ID NO: 40015 - DNA, 35 bp, Homo sapiens; identical to SEQ ID NO: 22225
  source 1..35: mol_type = genomic DNA

SEQ ID NO: 40016 - DNA, 36 bp, Homo sapiens; identical to SEQ ID NO: 22226
  source 1..36: mol_type = genomic DNA

SEQ ID NO: 40017 - DNA, 38 bp, Homo sapiens; identical to SEQ ID NO: 22228
  source 1..38: mol_type = genomic DNA

SEQ ID NO: 40018 - DNA, 39 bp, Homo sapiens; identical to SEQ ID NO: 22229
  source 1..39: mol_type = genomic DNA

SEQ ID NO: 40019 - DNA, 40 bp, Homo sapiens; identical to SEQ ID NO: 22230
  source 1..40: mol_type = genomic DNA

SEQ ID NO: 40020 - DNA, 41 bp, Homo sapiens; identical to SEQ ID NO: 22231
  source 1..41: mol_type = genomic DNA

SEQ ID NO: 40021 - DNA, 43 bp, Homo sapiens; identical to SEQ ID NO: 22233
  source 1..43: mol_type = genomic DNA

SEQ ID NO: 40022 - DNA, 44 bp, Homo sapiens; identical to SEQ ID NO: 22234
  source 1..44: mol_type = genomic DNA

SEQ ID NO: 40023 - DNA, 45 bp, Homo sapiens; identical to SEQ ID NO: 22235
  source 1..45: mol_type = genomic DNA

SEQ ID NO: 40024 - DNA, 46 bp, Homo sapiens; identical to SEQ ID NO: 22236
  source 1..46: mol_type = genomic DNA

SEQ ID NO: 40025 - DNA, 16 bp, Homo sapiens
  source 1..16: mol_type = genomic DNA
gttgaaatccgggtgc

SEQ ID NO: 40026 - DNA, 22 bp, Homo sapiens
  source 1..22: mol_type = genomic DNA
gttgcaatacttaatttctgcc

SEQ ID NO: 40027 - DNA, 23 bp, Homo sapiens
  source 1..23: mol_type = genomic DNA
gttgcaatacttaatttctgcca

SEQ ID NO: 40028 - DNA, 21 bp, Homo sapiens
  source 1..21: mol_type = genomic DNA
gttgggagagcgttagactga

SEQ ID NO: 40029 - DNA, 22 bp, Homo sapiens
  source 1..22: mol_type = genomic DNA
gttgggagagcgttagactgaa

SEQ ID NO: 40030 - DNA, 18 bp, Homo sapiens
  source 1..18: mol_type = genomic DNA
gttggtagagcatcagac

SEQ ID NO: 40031 - DNA, 18 bp, Homo sapiens
  source 1..18: mol_type = genomic DNA
gttggtagagcggaggac

SEQ ID NO: 40032 - DNA, 27 bp, Homo sapiens
  source 1..27: mol_type = genomic DNA
gttggtctaggggtatgattctcgctt

SEQ ID NO: 40033 - DNA, 21 bp, Homo sapiens
  source 1..21: mol_type = genomic DNA
gttggtggtatagtggtgagc

SEQ ID NO: 40034 - DNA, 29 bp, Homo sapiens
  source 1..29: mol_type = genomic DNA
gttggtggtatagtggttagcatagctgc

SEQ ID NO: 40035 - DNA, 30 bp, Homo sapiens; identical to SEQ ID NO: 22341
  source 1..30: mol_type = genomic DNA

SEQ ID NO: 40036 - DNA, 34 bp, Homo sapiens; identical to SEQ ID NO: 22345
  source 1..34: mol_type = genomic DNA

SEQ ID NO: 40037 - DNA, 30 bp, Homo sapiens; identical to SEQ ID NO: 22349
  source 1..30: mol_type = genomic DNA

SEQ ID NO: 40038 - DNA, 27 bp, Homo sapiens
  source 1..27: mol_type = genomic DNA
gttggttatacccttcccgtactacca

SEQ ID NO: 40039 - DNA, 18 bp, Homo sapiens
  source 1..18: mol_type = genomic DNA
gttgtagtccgtgcgaga

SEQ ID NO: 40040 - DNA, 19 bp, Homo sapiens
  source 1..19: mol_type = genomic DNA
gttgtagtccgtgcgagaa

SEQ ID NO: 40041 - DNA, 20 bp, Homo sapiens
  source 1..20: mol_type = genomic DNA
gttgtagtccgtgcgagaat

SEQ ID NO: 40042 - DNA, 21 bp, Homo sapiens
  source 1..21: mol_type = genomic DNA
gttgtagtccgtgcgagaata

SEQ ID NO: 40043 - DNA, 23 bp, Homo sapiens
  source 1..23: mol_type = genomic DNA
gttgtagtccgtgcgagaatacc

SEQ ID NO: 40044 - DNA, 24 bp, Homo sapiens
  source 1..24: mol_type = genomic DNA
gttgtagtccgtgcgagaatacca

SEQ ID NO: 40045 - DNA, 30 bp, Homo sapiens; identical to SEQ ID NO: 22373
  source 1..30: mol_type = genomic DNA

SEQ ID NO: 40046 - DNA, 30 bp, Homo sapiens; identical to SEQ ID NO: 22375
  source 1..30: mol_type = genomic DNA

SEQ ID NO: 40047 - DNA, 27 bp, Homo sapiens
  source 1..27: mol_type = genomic DNA
gtttaaacaaaacgaatgatttcgact

SEQ ID NO: 40048 - DNA, 28 bp, Homo sapiens
  source 1..28: mol_type = genomic DNA
gtttaaccaaaacatcagattgtgaatc

SEQ ID NO: 40049 - DNA, 42 bp, Homo sapiens; identical to SEQ ID NO: 22411
  source 1..42: mol_type = genomic DNA

SEQ ID NO: 40050 - DNA, 16 bp, Homo sapiens
  source 1..16: mol_type = genomic DNA
gtttaagtcccattgg

SEQ ID NO: 40051 - DNA, 18 bp, Homo sapiens
  source 1..18: mol_type = genomic DNA
gtttaagtcccattggtc

SEQ ID NO: 40052 - DNA, 23 bp, Homo sapiens
  source 1..23: mol_type = genomic DNA
gtttaagtcccattggtctagcc

SEQ ID NO: 40053 - DNA, 24 bp, Homo sapiens
  source 1..24: mol_type = genomic DNA
gtttaagtcccattggtctagcca

SEQ ID NO: 40054 - DNA, 16 bp, Homo sapiens
  source 1..16: mol_type = genomic DNA
gtttagacgggctcac

SEQ ID NO: 40055 - DNA, 17 bp, Homo sapiens
  source 1..17: mol_type = genomic DNA
gtttagacgggctcaca

SEQ ID NO: 40056 - DNA, 18 bp, Homo sapiens
  source 1..18: mol_type = genomic DNA
gtttagacgggctcacat

SEQ ID NO: 40057 - DNA, 19 bp, Homo sapiens
  source 1..19: mol_type = genomic DNA
gtttagacgggctcacatc

SEQ ID NO: 40058 - DNA, 20 bp, Homo sapiens
  source 1..20: mol_type = genomic DNA
gtttagacgggctcacatca

SEQ ID NO: 40059 - DNA, 22 bp, Homo sapiens
  source 1..22: mol_type = genomic DNA
gtttagacgggctcacatcacc

SEQ ID NO: 40060 - DNA, 23 bp, Homo sapiens
  source 1..23: mol_type = genomic DNA
gtttagacgggctcacatcaccc

SEQ ID NO: 40061 - DNA, 24 bp, Homo sapiens
  source 1..24: mol_type = genomic DNA
gtttagacgggctcacatcacccc

SEQ ID NO: 40062 - DNA, 25 bp, Homo sapiens
  source 1..25: mol_type = genomic DNA
gtttagacgggctcacatcacccca

SEQ ID NO: 40063 - DNA, 26 bp, Homo sapiens
  source 1..26: mol_type = genomic DNA
gtttagacgggctcacatcaccccat

SEQ ID NO: 40064 - DNA, 27 bp, Homo sapiens
  source 1..27: mol_type = genomic DNA
gtttagacgggctcacatcaccccata

SEQ ID NO: 40065 - DNA, 28 bp, Homo sapiens
  source 1..28: mol_type = genomic DNA
gtttagacgggctcacatcaccccataa

SEQ ID NO: 40066 - DNA, 29 bp, Homo sapiens
  source 1..29: mol_type = genomic DNA
gtttagacgggctcacatcaccccataaa

SEQ ID NO: 40067 - DNA, 31 bp, Homo sapiens; identical to SEQ ID NO: 22435
  source 1..31: mol_type = genomic DNA

SEQ ID NO: 40068 - DNA, 33 bp, Homo sapiens; identical to SEQ ID NO: 22437
  source 1..33: mol_type = genomic DNA

SEQ ID NO: 40069 - DNA, 34 bp, Homo sapiens; identical to SEQ ID NO: 22438
  source 1..34: mol_type = genomic DNA

SEQ ID NO: 40070 - DNA, 23 bp, Homo sapiens
  source 1..23: mol_type = genomic DNA
gtttagtggtagaattctcgcct

SEQ ID NO: 40071 - DNA, 16 bp, Homo sapiens
  source 1..16: mol_type = genomic DNA
gtttatgtagcttacc

SEQ ID NO: 40072 - DNA, 17 bp, Homo sapiens
  source 1..17: mol_type = genomic DNA
gtttatgtagcttacct

SEQ ID NO: 40073 - DNA, 18 bp, Homo sapiens
  source 1..18: mol_type = genomic DNA
gtttatgtagcttacctc

SEQ ID NO: 40074 - DNA, 19 bp, Homo sapiens
  source 1..19: mol_type = genomic DNA
gtttatgtagcttacctcc

SEQ ID NO: 40075 - DNA, 20 bp, Homo sapiens
  source 1..20: mol_type = genomic DNA
gtttatgtagcttacctcct

SEQ ID NO: 40076 - DNA, 21 bp, Homo sapiens
  source 1..21: mol_type = genomic DNA
gtttatgtagcttacctcctc

SEQ ID NO: 40077 - DNA, 30 bp, Homo sapiens; identical to SEQ ID NO: 22453
  source 1..30: mol_type = genomic DNA

SEQ ID NO: 40078 - DNA, 34 bp, Homo sapiens; identical to SEQ ID NO: 22457
  source 1..34: mol_type = genomic DNA

SEQ ID NO: 40079 - DNA, 35 bp, Homo sapiens; identical to SEQ ID NO: 22458
  source 1..35: mol_type = genomic DNA

SEQ ID NO: 40080 - DNA, 36 bp, Homo sapiens; identical to SEQ ID NO: 22459
  source 1..36: mol_type = genomic DNA

SEQ ID NO: 40081 - DNA, 37 bp, Homo sapiens; identical to SEQ ID NO: 22460
  source 1..37: mol_type = genomic DNA

SEQ ID NO: 40082 - DNA, 37 bp, Homo sapiens
  source 1..37: mol_type = genomic DNA
gtttccccgcacaggttcgaatcctgttcgtgacgcc

SEQ ID NO: 40083 - DNA, 37 bp, Homo sapiens; identical to SEQ ID NO: 22466
  source 1..37: mol_type = genomic DNA

SEQ ID NO: 40084 - DNA, 23 bp, Homo sapiens
  source 1..23: mol_type = genomic DNA
gtttccgtagtggagtggttatc

SEQ ID NO: 40085 - DNA, 31 bp, Homo sapiens; identical to SEQ ID NO: 22472
  source 1..31: mol_type = genomic DNA

SEQ ID NO: 40086 - DNA, 32 bp, Homo sapiens; identical to SEQ ID NO: 22473
  source 1..32: mol_type = genomic DNA

SEQ ID NO: 40087 - DNA, 33 bp, Homo sapiens; identical to SEQ ID NO: 22474
  source 1..33: mol_type = genomic DNA

SEQ ID NO: 40088 - DNA, 34 bp, Homo sapiens; identical to SEQ ID NO: 22475
  source 1..34: mol_type = genomic DNA

SEQ ID NO: 40089 - DNA, 16 bp, Homo sapiens
  source 1..16: mol_type = genomic DNA
gtttccgtagtgtagc

SEQ ID NO: 40090 - DNA, 17 bp, Homo sapiens
  source 1..17: mol_type = genomic DNA
gtttccgtagtgtagcg

SEQ ID NO: 40091 - DNA, 18 bp, Homo sapiens
  source 1..18: mol_type = genomic DNA
gtttccgtagtgtagcgg

SEQ ID NO: 40092 - DNA, 19 bp, Homo sapiens
  source 1..19: mol_type = genomic DNA
gtttccgtagtgtagcggt

SEQ ID NO: 40093 - DNA, 23 bp, Homo sapiens
  source 1..23: mol_type = genomic DNA
gtttccgtagtgtagcggttatc

SEQ ID NO: 40094 - DNA, 26 bp, Homo sapiens
  source 1..26: mol_type = genomic DNA
gtttccgtagtgtagcggttatcaca

SEQ ID NO: 40095 - DNA, 28 bp, Homo sapiens
  source 1..28: mol_type = genomic DNA
gtttccgtagtgtagcggttatcacatt

SEQ ID NO: 40096 - DNA, 29 bp, Homo sapiens
  source 1..29: mol_type = genomic DNA
gtttccgtagtgtagcggttatcacattc

SEQ ID NO: 40097 - DNA, 30 bp, Homo sapiens; identical to SEQ ID NO: 22490
  source 1..30: mol_type = genomic DNA

SEQ ID NO: 40098 - DNA, 31 bp, Homo sapiens; identical to SEQ ID NO: 22491
  source 1..31: mol_type = genomic DNA

SEQ ID NO: 40099 - DNA, 32 bp, Homo sapiens; identical to SEQ ID NO: 22492
  source 1..32: mol_type = genomic DNA

SEQ ID NO: 40100 - DNA, 33 bp, Homo sapiens; identical to SEQ ID NO: 22493
  source 1..33: mol_type = genomic DNA

SEQ ID NO: 40101 - DNA, 34 bp, Homo sapiens; identical to SEQ ID NO: 22494
  source 1..34: mol_type = genomic DNA

SEQ ID NO: 40102 - DNA, 35 bp, Homo sapiens; identical to SEQ ID NO: 22495
  source 1..35: mol_type = genomic DNA

SEQ ID NO: 40103 - DNA, 16 bp, Homo sapiens
  source 1..16: mol_type = genomic DNA
gtttccgtagtgtagt

SEQ ID NO: 40104 - DNA, 17 bp, Homo sapiens
  source 1..17: mol_type = genomic DNA
gtttccgtagtgtagtg

SEQ ID NO: 40105 - DNA, 18 bp, Homo sapiens
  source 1..18: mol_type = genomic DNA
gtttccgtagtgtagtgg

SEQ ID NO: 40106 - DNA, 19 bp, Homo sapiens
  source 1..19: mol_type = genomic DNA
gtttccgtagtgtagtggt

SEQ ID NO: 40107 - DNA, 20 bp, Homo sapiens
  source 1..20: mol_type = genomic DNA
gtttccgtagtgtagtggtc

SEQ ID NO: 40108 - DNA, 21 bp, Homo sapiens
  source 1..21: mol_type = genomic DNA
gtttccgtagtgtagtggtca

SEQ ID NO: 40109 - DNA, 22 bp, Homo sapiens
  source 1..22: mol_type = genomic DNA
gtttccgtagtgtagtggtcat

SEQ ID NO: 40110 - DNA, 23 bp, Homo sapiens
  source 1..23: mol_type = genomic DNA
gtttccgtagtgtagtggtcatc

SEQ ID NO: 40111 - DNA, 24 bp, Homo sapiens
  source 1..24: mol_type = genomic DNA
gtttccgtagtgtagtggtcatca

SEQ ID NO: 40112 - DNA, 25 bp, Homo sapiens
  source 1..25: mol_type = genomic DNA
gtttccgtagtgtagtggtcatcac

SEQ ID NO: 40113 - DNA, 26 bp, Homo sapiens
  source 1..26: mol_type = genomic DNA
gtttccgtagtgtagtggtcatcacg

SEQ ID NO: 40114 - DNA, 29 bp, Homo sapiens
  source 1..29: mol_type = genomic DNA
gtttccgtagtgtagtggtcatcacgttc

SEQ ID NO: 40115 - DNA, 30 bp, Homo sapiens; identical to SEQ ID NO: 22515
  source 1..30: mol_type = genomic DNA

SEQ ID NO: 40116 - DNA, 31 bp, Homo sapiens; identical to SEQ ID NO: 22516
  source 1..31: mol_type = genomic DNA

SEQ ID NO: 40117 - DNA, 32 bp, Homo sapiens; identical to SEQ ID NO: 22517
  source 1..32: mol_type = genomic DNA

SEQ ID NO: 40118 - DNA, 33 bp, Homo sapiens; identical to SEQ ID NO: 22518
  source 1..33: mol_type = genomic DNA

SEQ ID NO: 40119 - DNA, 34 bp, Homo sapiens; identical to SEQ ID NO: 22519
  source 1..34: mol_type = genomic DNA

SEQ ID NO: 40120 - DNA, 21 bp, Homo sapiens
  source 1..21: mol_type = genomic DNA
gtttccgtagtgtagtggtta

SEQ ID NO: 40121 - DNA, 22 bp, Homo sapiens
  source 1..22: mol_type = genomic DNA
gtttccgtagtgtagtggttat

SEQ ID NO: 40122 - DNA, 23 bp, Homo sapiens
  source 1..23: mol_type = genomic DNA
gtttccgtagtgtagtggttatc

SEQ ID NO: 40123 - DNA, 24 bp, Homo sapiens
  source 1..24: mol_type = genomic DNA
gtttccgtagtgtagtggttatca

SEQ ID NO: 40124 - DNA, 25 bp, Homo sapiens
  source 1..25: mol_type = genomic DNA
gtttccgtagtgtagtggttatcac

SEQ ID NO: 40125 - DNA, 26 bp, Homo sapiens
  source 1..26: mol_type = genomic DNA
gtttccgtagtgtagtggttatcacg

SEQ ID NO: 40126 - DNA, 27 bp, Homo sapiens
  source 1..27: mol_type = genomic DNA
gtttccgtagtgtagtggttatcacgt

SEQ ID NO: 40127 - DNA, 28 bp, Homo sapiens
  source 1..28: mol_type = genomic DNA
gtttccgtagtgtagtggttatcacgtt

SEQ ID NO: 40128 - DNA, 29 bp, Homo sapiens
  source 1..29: mol_type = genomic DNA
gtttccgtagtgtagtggttatcacgttc

SEQ ID NO: 40129 - DNA, 30 bp, Homo sapiens; identical to SEQ ID NO: 22533
  source 1..30: mol_type = genomic DNA

SEQ ID NO: 40130 - DNA, 31 bp, Homo sapiens; identical to SEQ ID NO: 22534
  source 1..31: mol_type = genomic DNA

SEQ ID NO: 40131 - DNA, 32 bp, Homo sapiens; identical to SEQ ID NO: 22535
  source 1..32: mol_type = genomic DNA

SEQ ID NO: 40132 - DNA, 33 bp, Homo sapiens; identical to SEQ ID NO: 22536
  source 1..33: mol_type = genomic DNA

SEQ ID NO: 40133 - DNA, 34 bp, Homo sapiens; identical to SEQ ID NO: 22537
  source 1..34: mol_type = genomic DNA

SEQ ID NO: 40134 - DNA, 34 bp, Homo sapiens; identical to SEQ ID NO: 22542
  source 1..34: mol_type = genomic DNA

SEQ ID NO: 40135 - DNA, 35 bp, Homo sapiens; identical to SEQ ID NO: 22543
  source 1..35: mol_type = genomic DNA

SEQ ID NO: 40136 - DNA, 36 bp, Homo sapiens; identical to SEQ ID NO: 22544
  source 1..36: mol_type = genomic DNA

SEQ ID NO: 40137 - DNA, 37 bp, Homo sapiens; identical to SEQ ID NO: 22545
  source 1..37: mol_type = genomic DNA

SEQ ID NO: 40138 - DNA, 38 bp, Homo sapiens; identical to SEQ ID NO: 22546
  source 1..38: mol_type = genomic DNA

SEQ ID NO: 40139 - DNA, 39 bp, Homo sapiens; identical to SEQ ID NO: 22547
  source 1..39: mol_type = genomic DNA

SEQ ID NO: 40140 - DNA, 40 bp, Homo sapiens; identical to SEQ ID NO: 22548
  source 1..40: mol_type = genomic DNA

SEQ ID NO: 40141 - DNA, 41 bp, Homo sapiens; identical to SEQ ID NO: 22549
  source 1..41: mol_type = genomic DNA

SEQ ID NO: 40142 - DNA, 42 bp, Homo sapiens; identical to SEQ ID NO: 22550
  source 1..42: mol_type = genomic DNA

SEQ ID NO: 40143 - DNA, 43 bp, Homo sapiens; identical to SEQ ID NO: 22551
  source 1..43: mol_type = genomic DNA

SEQ ID NO: 40144 - DNA, 32 bp, Homo sapiens; identical to SEQ ID NO: 22553
  source 1..32: mol_type = genomic DNA

SEQ ID NO: 40145 - DNA, 33 bp, Homo sapiens; identical to SEQ ID NO: 22554
  source 1..33: mol_type = genomic DNA

SEQ ID NO: 40146 - DNA, 23 bp, Homo sapiens
  source 1..23: mol_type = genomic DNA
gtttccgtggtgtagtggttatc

SEQ ID NO: 40147 - DNA, 33 bp, Homo sapiens; identical to SEQ ID NO: 22561
  source 1..33: mol_type = genomic DNA

SEQ ID NO: 40148 - DNA, 22 bp, Homo sapiens
  source 1..22: mol_type = genomic DNA
gtttgtgggtttaagtcccatt

SEQ ID NO: 40149 - DNA, 30 bp, Homo sapiens; identical to SEQ ID NO: 22572
  source 1..30: mol_type = genomic DNA

SEQ ID NO: 40150 - DNA, 31 bp, Homo sapiens; identical to SEQ ID NO: 22573
  source 1..31: mol_type = genomic DNA

SEQ ID NO: 40151 - DNA, 32 bp, Homo sapiens; identical to SEQ ID NO: 22574
  source 1..32: mol_type = genomic DNA

SEQ ID NO: 40152 - DNA, 42 bp, Homo sapiens; identical to SEQ ID NO: 22581
  source 1..42: mol_type = genomic DNA

SEQ ID NO: 40153 - DNA, 43 bp, Homo sapiens; identical to SEQ ID NO: 22582
  source 1..43: mol_type = genomic DNA

SEQ ID NO: 40154 - DNA, 44 bp, Homo sapiens; identical to SEQ ID NO: 22583
  source 1..44: mol_type = genomic DNA

SEQ ID NO: 40155 - DNA, 45 bp, Homo sapiens; identical to SEQ ID NO: 22584
  source 1..45: mol_type = genomic DNA

SEQ ID NO: 40156 - DNA, 28 bp, Homo sapiens
  source 1..28: mol_type = genomic DNA
gttttgacaacattcaaaaaagagtacc

SEQ ID NO: 40157 - DNA, 17 bp, Homo sapiens
  source 1..17: mol_type = genomic DNA
gttttgcagtccttacc

SEQ ID NO: 40158 - DNA, 19 bp, Homo sapiens
  source 1..19: mol_type = genomic DNA
gtttttcatatcattggtc

SEQ ID NO: 40159 - DNA, 21 bp, Homo sapiens
  source 1..21: mol_type = genomic DNA
gtttttcatatcattggtcgt

SEQ ID NO: 40160 - DNA, 31 bp, Homo sapiens; identical to SEQ ID NO: 22605
  source 1..31: mol_type = genomic DNA

SEQ ID NO: 40161 - DNA, 32 bp, Homo sapiens; identical to SEQ ID NO: 22606
  source 1..32: mol_type = genomic DNA

SEQ ID NO: 40162 - DNA, 34 bp, Homo sapiens; identical to SEQ ID NO: 22608
  source 1..34: mol_type = genomic DNA

SEQ ID NO: 40163 - DNA, 35 bp, Homo sapiens; identical to SEQ ID NO: 22609
  source 1..35: mol_type = genomic DNA

SEQ ID NO: 40164 - DNA, 36 bp, Homo sapiens; identical to SEQ ID NO: 22610
  source 1..36: mol_type = genomic DNA

SEQ ID NO: 40165 - DNA, 38 bp, Homo sapiens; identical to SEQ ID NO: 22612
  source 1..38: mol_type = genomic DNA

SEQ ID NO: 40166 - DNA, 39 bp, Homo sapiens; identical to SEQ ID NO: 22613
  source 1..39: mol_type = genomic DNA

SEQ ID NO: 40167 - DNA, 40 bp, Homo sapiens; identical to SEQ ID NO: 22614
  source 1..40: mol_type = genomic DNA

SEQ ID NO: 40168 - DNA, 41 bp, Homo sapiens; identical to SEQ ID NO: 22615
  source 1..41: mol_type = genomic DNA

SEQ ID NO: 40169 - DNA, 42 bp, Homo sapiens; identical to SEQ ID NO: 22616
  source 1..42: mol_type = genomic DNA

SEQ ID NO: 40170 - DNA, 43 bp, Homo sapiens; identical to SEQ ID NO: 22617
  source 1..43: mol_type = genomic DNA

SEQ ID NO: 40171 - DNA, 45 bp, Homo sapiens; identical to SEQ ID NO: 22619
  source 1..45: mol_type = genomic DNA

SEQ ID NO: 40172 - DNA, 46 bp, Homo sapiens; identical to SEQ ID NO: 22620
  source 1..46: mol_type = genomic DNA

SEQ ID NO: 40173 - DNA, 35 bp, Homo sapiens
  source 1..35: mol_type = genomic DNA
taaaaggttggtggttcgaacccacccagaggcgc

SEQ ID NO: 40174 - DNA, 36 bp, Homo sapiens
  source 1..36: mol_type = genomic DNA
taaaaggttggtggttcgaacccacccagaggcgcc

SEQ ID NO: 40175 - DNA, 27 bp, Homo sapiens
  source 1..27: mol_type = genomic DNA
taaaatggctgagtgaagcattggact

SEQ ID NO: 40176 - DNA, 21 bp, Homo sapiens
  source 1..21: mol_type = genomic DNA
taaacaggagatcctgggttc

SEQ ID NO: 40177 - DNA, 22 bp, Homo sapiens
  source 1..22: mol_type = genomic DNA
taaacaggagatcctgggttcg

SEQ ID NO: 40178 - DNA, 23 bp, Homo sapiens
  source 1..23: mol_type = genomic DNA
taaacaggagatcctgggttcga

SEQ ID NO: 40179 - DNA, 36 bp, Homo sapiens; identical to SEQ ID NO: 22678
  source 1..36: mol_type = genomic DNA

SEQ ID NO: 40180 - DNA, 38 bp, Homo sapiens; identical to SEQ ID NO: 22680
  source 1..38: mol_type = genomic DNA

SEQ ID NO: 40181 - DNA, 39 bp, Homo sapiens; identical to SEQ ID NO: 22681
  source 1..39: mol_type = genomic DNA

SEQ ID NO: 40182 - DNA, 40 bp, Homo sapiens; identical to SEQ ID NO: 22682
  source 1..40: mol_type = genomic DNA

SEQ ID NO: 40183 - DNA, 41 bp, Homo sapiens; identical to SEQ ID NO: 22683
  source 1..41: mol_type = genomic DNA

SEQ ID NO: 40184 - DNA, 36 bp, Homo sapiens; identical to SEQ ID NO: 22686
  source 1..36: mol_type = genomic DNA

SEQ ID NO: 40185 - DNA, 38 bp, Homo sapiens; identical to SEQ ID NO: 22688
  source 1..38: mol_type = genomic DNA

SEQ ID NO: 40186 - DNA, 39 bp, Homo sapiens; identical to SEQ ID NO: 22689
  source 1..39: mol_type = genomic DNA

SEQ ID NO: 40187 - DNA, 40 bp, Homo sapiens; identical to SEQ ID NO: 22690
  source 1..40: mol_type = genomic DNA

SEQ ID NO: 40188 - DNA, 41 bp, Homo sapiens; identical to SEQ ID NO: 22691
  source 1..41: mol_type = genomic DNA

SEQ ID NO: 40189 - DNA, 17 bp, Homo sapiens
  source 1..17: mol_type = genomic DNA
taaaccaggggtcgcga

SEQ ID NO: 40190 - DNA, 38 bp, Homo sapiens; identical to SEQ ID NO: 22704
  source 1..38: mol_type = genomic DNA

SEQ ID NO: 40191 - DNA, 39 bp, Homo sapiens
  source 1..39: mol_type = genomic DNA
taaaccaggggtcgcgagttcaaatctcgctggggcctc

SEQ ID NO: 40192 - DNA, 40 bp, Homo sapiens; identical to SEQ ID NO: 22705
  source 1..40: mol_type = genomic DNA

SEQ ID NO: 40193 - DNA, 39 bp, Homo sapiens; identical to SEQ ID NO: 22718
  source 1..39: mol_type = genomic DNA

SEQ ID NO: 40194 - DNA, 19 bp, Homo sapiens
  source 1..19: mol_type = genomic DNA
taaaccgaagatcgcgggt

SEQ ID NO: 40195 - DNA, 22 bp, Homo sapiens
  source 1..22: mol_type = genomic DNA
taaaccgaagatcgcgggttcg

SEQ ID NO: 40196 - DNA, 23 bp, Homo sapiens
  source 1..23: mol_type = genomic DNA
taaaccgaagatcgcgggttcga

SEQ ID NO: 40197 - DNA, 39 bp, Homo sapiens; identical to SEQ ID NO: 22728
  source 1..39: mol_type = genomic DNA

SEQ ID NO: 40198 - DNA, 18 bp, Homo sapiens
  source 1..18: mol_type = genomic DNA
taaaccggagatgaaaac

SEQ ID NO: 40199 - DNA, 19 bp, Homo sapiens
  source 1..19: mol_type = genomic DNA
taaaccggagatgaaaacc

SEQ ID NO: 40200 - DNA, 32 bp, Homo sapiens; identical to SEQ ID NO: 22744
  source 1..32: mol_type = genomic DNA

SEQ ID NO: 40201 - DNA, 34 bp, Homo sapiens; identical to SEQ ID NO: 22746
  source 1..34: mol_type = genomic DNA

SEQ ID NO: 40202 - DNA, 35 bp, Homo sapiens; identical to SEQ ID NO: 22747
  source 1..35: mol_type = genomic DNA

SEQ ID NO: 40203 - DNA, 36 bp, Homo sapiens; identical to SEQ ID NO: 22748
  source 1..36: mol_type = genomic DNA

SEQ ID NO: 40204 - DNA, 32 bp, Homo sapiens; identical to SEQ ID NO: 22763
  source 1..32: mol_type = genomic DNA

SEQ ID NO: 40205 - DNA, 33 bp, Homo sapiens; identical to SEQ ID NO: 22764
  source 1..33: mol_type = genomic DNA

SEQ ID NO: 40206 - DNA, 18 bp, Homo sapiens
  source 1..18: mol_type = genomic DNA
taaagactttttctctga

SEQ ID NO: 40207 - DNA, 19 bp, Homo sapiens
  source 1..19: mol_type = genomic DNA
taaagactttttctctgac

SEQ ID NO: 40208 - DNA, 20 bp, Homo sapiens
  source 1..20: mol_type = genomic DNA
taaagactttttctctgacc

SEQ ID NO: 40209 - DNA, 21 bp, Homo sapiens
  source 1..21: mol_type = genomic DNA
taaagactttttctctgacca

SEQ ID NO: 40210 - DNA, 17 bp, Homo sapiens
  source 1..17: mol_type = genomic DNA
taaagattaagagaacc

SEQ ID NO: 40211 - DNA, 35 bp, Homo sapiens; identical to SEQ ID NO: 22790
  source 1..35: mol_type = genomic DNA

SEQ ID NO: 40212 - DNA, 36 bp, Homo sapiens; identical to SEQ ID NO: 22791
  source 1..36: mol_type = genomic DNA

SEQ ID NO: 40213 - DNA, 37 bp, Homo sapiens; identical to SEQ ID NO: 22792
  source 1..37: mol_type = genomic DNA

SEQ ID NO: 40214 - DNA, 38 bp, Homo sapiens; identical to SEQ ID NO: 22793
  source 1..38: mol_type = genomic DNA

SEQ ID NO: 40215 - DNA, 26 bp, Homo sapiens
  source 1..26: mol_type = genomic DNA
taaaggataacagctatccattggtc

SEQ ID NO: 40216 - DNA, 34 bp, Homo sapiens
  source 1..34: mol_type = genomic DNA
taaaggtccctggttcaatcccgggtttcggcac

SEQ ID NO: 40217 - DNA, 33 bp, Homo sapiens
  source 1..33: mol_type = genomic DNA
taaaggtccctggttcgatcccgggtttcggca

SEQ ID NO: 40218 - DNA, 34 bp, Homo sapiens; identical to SEQ ID NO: 22802
  source 1..34: mol_type = genomic DNA

SEQ ID NO: 40219 - DNA, 35 bp, Homo sapiens; identical to SEQ ID NO: 22803
  source 1..35: mol_type = genomic DNA

SEQ ID NO: 40220 - DNA, 17 bp, Homo sapiens
  source 1..17: mol_type = genomic DNA
taaagtggctgatttgc

SEQ ID NO: 40221 - DNA, 16 bp, Homo sapiens
  source 1..16: mol_type = genomic DNA
taaataagctatcggg

SEQ ID NO: 40222 - DNA, 19 bp, Homo sapiens
  source 1..19: mol_type = genomic DNA
taaataagctatcgggccc

SEQ ID NO: 40223 - DNA, 27 bp, Homo sapiens
  source 1..27: mol_type = genomic DNA
taaataataggagcttaaaccccctta

SEQ ID NO: 40224 - DNA, 35 bp, Homo sapiens; identical to SEQ ID NO: 22844
  source 1..35: mol_type = genomic DNA

SEQ ID NO: 40225 - DNA, 36 bp, Homo sapiens; identical to SEQ ID NO: 22845
  source 1..36: mol_type = genomic DNA

SEQ ID NO: 40226 - DNA, 22 bp, Homo sapiens
  source 1..22: mol_type = genomic DNA
taaatacagaccaagagccttc

SEQ ID NO: 40227 - DNA, 32 bp, Homo sapiens; identical to SEQ ID NO: 22857
  source 1..32: mol_type = genomic DNA

SEQ ID NO: 40228 - DNA, 38 bp, Homo sapiens; identical to SEQ ID NO: 22885
  source 1..38: mol_type = genomic DNA

SEQ ID NO: 40229 - DNA, 39 bp, Homo sapiens; identical to SEQ ID NO: 22886
  source 1..39: mol_type = genomic DNA

SEQ ID NO: 40230 - DNA, 22 bp, Homo sapiens
  source 1..22: mol_type = genomic DNA
taacaacatggctttctcacca

SEQ ID NO: 40231 - DNA, 20 bp, Homo sapiens
  source 1..20: mol_type = genomic DNA
taaccaaaacatcagattgt

SEQ ID NO: 40232 - DNA, 24 bp, Homo sapiens
  source 1..24: mol_type = genomic DNA
taaccaaaacatcagattgtgaat

SEQ ID NO: 40233 - DNA, 25 bp, Homo sapiens
  source 1..25: mol_type = genomic DNA
taaccaaaacatcagattgtgaatc

SEQ ID NO: 40234 - DNA, 17 bp, Homo sapiens
  source 1..17: mol_type = genomic DNA
taacccagaggtcgatg

SEQ ID NO: 40235 - DNA, 19 bp, Homo sapiens
  source 1..19: mol_type = genomic DNA
taacccagaggtcgatgga

SEQ ID NO: 40236 - DNA, 20 bp, Homo sapiens
  source 1..20: mol_type = genomic DNA
taacccagaggtcgatggat

SEQ ID NO: 40237 - DNA, 21 bp, Homo sapiens
  source 1..21: mol_type = genomic DNA
taacccagaggtcgatggatc

SEQ ID NO: 40238 - DNA, 22 bp, Homo sapiens
  source 1..22: mol_type = genomic DNA
taacccagaggtcgatggatcg

SEQ ID NO: 40239 - DNA, 23 bp, Homo sapiens
  source 1..23: mol_type = genomic DNA
taacccagaggtcgatggatcga

SEQ ID NO: 40240 - DNA, 22 bp, Homo sapiens
  source 1..22: mol_type = genomic DNA
taaccgaaaggttggtggttcg

SEQ ID NO: 40241 - DNA, 23 bp, Homo sapiens
  source 1..23: mol_type = genomic DNA
taaccgaaaggttggtggttcga

SEQ ID NO: 40242 - DNA, 37 bp, Homo sapiens; identical to SEQ ID NO: 22997
  source 1..37: mol_type = genomic DNA

SEQ ID NO: 40243 - DNA, 40 bp, Homo sapiens; identical to SEQ ID NO: 23000
  source 1..40: mol_type = genomic DNA

SEQ ID NO: 40244 - DNA, 40 bp, Homo sapiens
  source 1..40: mol_type = genomic DNA
taaccgaaaggttggtggttcgatcccacccagggacgcc

SEQ ID NO: 40245 - DNA, 30 bp, Homo sapiens; identical to SEQ ID NO: 23003
  source 1..30: mol_type = genomic DNA

SEQ ID NO: 40246 - DNA, 21 bp, Homo sapiens
  source 1..21: mol_type = genomic DNA
taacgccaaggtcgcgggttc

SEQ ID NO: 40247 - DNA, 22 bp, Homo sapiens
  source 1..22: mol_type = genomic DNA
taacgccaaggtcgcgggttcg

SEQ ID NO: 40248 - DNA, 23 bp, Homo sapiens
  source 1..23: mol_type = genomic DNA
taacgccaaggtcgcgggttcga

SEQ ID NO: 40249 - DNA, 24 bp, Homo sapiens
  source 1..24: mol_type = genomic DNA
taacgccaaggtcgcgggttcgat

SEQ ID NO: 40250 - DNA, 40 bp, Homo sapiens; identical to SEQ ID NO: 23028
  source 1..40: mol_type = genomic DNA

SEQ ID NO: 40251 - DNA, 41 bp, Homo sapiens; identical to SEQ ID NO: 23029
  source 1..41: mol_type = genomic DNA

SEQ ID NO: 40252 - DNA, 32 bp, Homo sapiens; identical to SEQ ID NO: 23068
  source 1..32: mol_type = genomic DNA

SEQ ID NO: 40253 - DNA, 16 bp, Homo sapiens
  source 1..16: mol_type = genomic DNA
taacttgaccgctctg

SEQ ID NO: 40254 - DNA, 17 bp, Homo sapiens
  source 1..17: mol_type = genomic DNA
taacttgaccgctctga

SEQ ID NO: 40255 - DNA, 18 bp, Homo sapiens
  source 1..18: mol_type = genomic DNA
taacttgaccgctctgac

SEQ ID NO: 40256 - DNA, 19 bp, Homo sapiens
  source 1..19: mol_type = genomic DNA
taacttgaccgctctgacc

SEQ ID NO: 40257 - DNA, 20 bp, Homo sapiens
  source 1..20: mol_type = genomic DNA
taacttgaccgctctgacca

SEQ ID NO: 40258 - DNA, 29 bp, Homo sapiens
  source 1..29: mol_type = genomic DNA
taagagaaccaacacctctttacagtgac

SEQ ID NO: 40259 - DNA, 30 bp, Homo sapiens; identical to SEQ ID NO: 23119
  source 1..30: mol_type = genomic DNA

SEQ ID NO: 40260 - DNA, 31 bp, Homo sapiens; identical to SEQ ID NO: 23120
  source 1..31: mol_type = genomic DNA

SEQ ID NO: 40261 - DNA, 17 bp, Homo sapiens
  source 1..17: mol_type = genomic DNA
taagatccaatggacat

SEQ ID NO: 40262 - DNA, 19 bp, Homo sapiens
  source 1..19: mol_type = genomic DNA
taagccagggattgtgggt

SEQ ID NO: 40263 - DNA, 21 bp, Homo sapiens
  source 1..21: mol_type = genomic DNA
taagccagggattgtgggttc

SEQ ID NO: 40264 - DNA, 22 bp, Homo sapiens
  source 1..22: mol_type = genomic DNA
taagccagggattgtgggttcg

SEQ ID NO: 40265 - DNA, 40 bp, Homo sapiens; identical to SEQ ID NO: 23179
  source 1..40: mol_type = genomic DNA

SEQ ID NO: 40266 - DNA, 41 bp, Homo sapiens; identical to SEQ ID NO: 23180
  source 1..41: mol_type = genomic DNA

SEQ ID NO: 40267 - DNA, 20 bp, Homo sapiens
  source 1..20: mol_type = genomic DNA
taagctatcgggcccatacc

SEQ ID NO: 40268 - DNA, 23 bp, Homo sapiens
  source 1..23: mol_type = genomic DNA
taagctatcgggcccataccccg

SEQ ID NO: 40269 - DNA, 24 bp, Homo sapiens
  source 1..24: mol_type = genomic DNA
taagctatcgggcccataccccga

SEQ ID NO: 40270 - DNA, 25 bp, Homo sapiens
  source 1..25: mol_type = genomic DNA
taagctatcgggcccataccccgaa

SEQ ID NO: 40271 - DNA, 26 bp, Homo sapiens
  source 1..26: mol_type = genomic DNA
taagctatcgggcccataccccgaaa

SEQ ID NO: 40272 - DNA, 35 bp, Homo sapiens; identical to SEQ ID NO: 23200
  source 1..35: mol_type = genomic DNA

SEQ ID NO: 40273 - DNA, 27 bp, Homo sapiens
  source 1..27: mol_type = genomic DNA
taaggtcagctaaataagctatcgggc

SEQ ID NO: 40274 - DNA, 28 bp, Homo sapiens
  source 1..28: mol_type = genomic DNA
taaggtcagctaaataagctatcgggcc

SEQ ID NO: 40275 - DNA, 29 bp, Homo sapiens
  source 1..29: mol_type = genomic DNA
taaggtcagctaaataagctatcgggccc

SEQ ID NO: 40276 - DNA, 30 bp, Homo sapiens; identical to SEQ ID NO: 23225
  source 1..30: mol_type = genomic DNA

SEQ ID NO: 40277 - DNA, 21 bp, Homo sapiens
  source 1..21: mol_type = genomic DNA
taagtcccattggtctagcca

SEQ ID NO: 40278 - DNA, 35 bp, Homo sapiens; identical to SEQ ID NO: 23255
  source 1..35: mol_type = genomic DNA

SEQ ID NO: 40279 - DNA, 22 bp, Homo sapiens
  source 1..22: mol_type = genomic DNA
taagttaaagattaagagaacc

SEQ ID NO: 40280 - DNA, 43 bp, Homo sapiens; identical to SEQ ID NO: 23281
  source 1..43: mol_type = genomic DNA

SEQ ID NO: 40281 - DNA, 41 bp, Homo sapiens; identical to SEQ ID NO: 23309
  source 1..41: mol_type = genomic DNA

SEQ ID NO: 40282 - DNA, 42 bp, Homo sapiens; identical to SEQ ID NO: 23322
  source 1..42: mol_type = genomic DNA

SEQ ID NO: 40283 - DNA, 40 bp, Homo sapiens; identical to SEQ ID NO: 23336
  source 1..40: mol_type = genomic DNA

SEQ ID NO: 40284 - DNA, 37 bp, Homo sapiens; identical to SEQ ID NO: 23347
  source 1..37: mol_type = genomic DNA

SEQ ID NO: 40285 - DNA, 39 bp, Homo sapiens; identical to SEQ ID NO: 23349
  source 1..39: mol_type = genomic DNA

SEQ ID NO: 40286 - DNA, 40 bp, Homo sapiens; identical to SEQ ID NO: 23350
  source 1..40: mol_type = genomic DNA

SEQ ID NO: 40287 - DNA, 41 bp, Homo sapiens; identical to SEQ ID NO: 23351
  source 1..41: mol_type = genomic DNA

SEQ ID NO: 40288 - DNA, 16 bp, Homo sapiens
  source 1..16: mol_type = genomic DNA
taatctgaaggtcgtg

SEQ ID NO: 40289 - DNA, 19 bp, Homo sapiens
  source 1..19: mol_type = genomic DNA
taatctgaaggtcgtgagt

SEQ ID NO: 40290 - DNA, 38 bp, Homo sapiens; identical to SEQ ID NO: 23363
  source 1..38: mol_type = genomic DNA

SEQ ID NO: 40291 - DNA, 39 bp, Homo sapiens; identical to SEQ ID NO: 23364
  source 1..39: mol_type = genomic DNA

SEQ ID NO: 40292 - DNA, 40 bp, Homo sapiens; identical to SEQ ID NO: 23365
  source 1..40: mol_type = genomic DNA

SEQ ID NO: 40293 - DNA, 41 bp, Homo sapiens; identical to SEQ ID NO: 23366
  source 1..41: mol_type = genomic DNA

SEQ ID NO: 40294 - DNA, 37 bp, Homo sapiens
  source 1..37: mol_type = genomic DNA
taatctgaaggtcgtgagttcgatcctcacacggggc

SEQ ID NO: 40295 - DNA, 39 bp, Homo sapiens; identical to SEQ ID NO: 23370
  source 1..39: mol_type = genomic DNA

SEQ ID NO: 40296 - DNA, 40 bp, Homo sapiens; identical to SEQ ID NO: 23371
  source 1..40: mol_type = genomic DNA

SEQ ID NO: 40297 - DNA, 41 bp, Homo sapiens; identical to SEQ ID NO: 23372
  source 1..41: mol_type = genomic DNA

SEQ ID NO: 40298 - DNA, 21 bp, Homo sapiens
  source 1..21: mol_type = genomic DNA
taatgccgaggttgtgagttc

SEQ ID NO: 40299 - DNA, 16 bp, Homo sapiens
  source 1..16: mol_type = genomic DNA
taatggataaggcact

SEQ ID NO: 40300 - DNA, 17 bp, Homo sapiens
  source 1..17: mol_type = genomic DNA
taatggataaggcactg

SEQ ID NO: 40301 - DNA, 19 bp, Homo sapiens
  source 1..19: mol_type = genomic DNA
taatggataaggcactggc

SEQ ID NO: 40302 - DNA, 16 bp, Homo sapiens
  source 1..16: mol_type = genomic DNA
taatggataaggcatc

SEQ ID NO: 40303 - DNA, 19 bp, Homo sapiens
  source 1..19: mol_type = genomic DNA
taatggataaggcatcagc

SEQ ID NO: 40304 - DNA, 21 bp, Homo sapiens
  source 1..21: mol_type = genomic DNA
taatggataaggcatcagcct

SEQ ID NO: 40305 - DNA, 23 bp, Homo sapiens
  source 1..23: mol_type = genomic DNA
taatggataaggcatcagcctcc

SEQ ID NO: 40306 - DNA, 30 bp, Homo sapiens; identical to SEQ ID NO: 23400
  source 1..30: mol_type = genomic DNA

SEQ ID NO: 40307 - DNA, 38 bp, Homo sapiens
  source 1..38: mol_type = genomic DNA
taatggataaggcatcagcctccggagctggggattgt

SEQ ID NO: 40308 - DNA, 16 bp, Homo sapiens
  source 1..16: mol_type = genomic DNA
taatggataaggcatt

SEQ ID NO: 40309 - DNA, 17 bp, Homo sapiens
  source 1..17: mol_type = genomic DNA
taatggataaggcattg

SEQ ID NO: 40310 - DNA, 19 bp, Homo sapiens
  source 1..19: mol_type = genomic DNA
taatggataaggcattggc

SEQ ID NO: 40311 - DNA, 16 bp, Homo sapiens
  source 1..16: mol_type = genomic DNA
taatggataaggcgtc

SEQ ID NO: 40312 - DNA, 19 bp, Homo sapiens
  source 1..19: mol_type = genomic DNA
taatggataaggcgtctga

SEQ ID NO: 40313 - DNA, 21 bp, Homo sapiens
  source 1..21: mol_type = genomic DNA
taatggataaggcgtctgact

SEQ ID NO: 40314 - DNA, 21 bp, Homo sapiens
  source 1..21: mol_type = genomic DNA
taatggataaggcgtctgatt

SEQ ID NO: 40315 - DNA, 31 bp, Homo sapiens
  source 1..31: mol_type = genomic DNA
taatggtgagcactctggactctgaatccag

SEQ ID NO: 40316 - DNA, 30 bp, Homo sapiens; identical to SEQ ID NO: 23439
  source 1..30: mol_type = genomic DNA

SEQ ID NO: 40317 - DNA, 31 bp, Homo sapiens; identical to SEQ ID NO: 23440
  source 1..31: mol_type = genomic DNA

SEQ ID NO: 40318 - DNA, 32 bp, Homo sapiens; identical to SEQ ID NO: 23441
  source 1..32: mol_type = genomic DNA

SEQ ID NO: 40319 - DNA, 17 bp, Homo sapiens
  source 1..17: mol_type = genomic DNA
taatggttagcactctg

SEQ ID NO: 40320 - DNA, 18 bp, Homo sapiens
  source 1..18: mol_type = genomic DNA
taatggttagcactctgg

SEQ ID NO: 40321 - DNA, 19 bp, Homo sapiens
  source 1..19: mol_type = genomic DNA
taatggttagcactctgga

SEQ ID NO: 40322 - DNA, 21 bp, Homo sapiens
  source 1..21: mol_type = genomic DNA
taatggttagcactctggact

SEQ ID NO: 40323 - DNA, 22 bp, Homo sapiens
  source 1..22: mol_type = genomic DNA
taatggttagcactctggactc

SEQ ID NO: 40324 - DNA, 23 bp, Homo sapiens
  source 1..23: mol_type = genomic DNA
taatggttagcactctggactct

SEQ ID NO: 40325 - DNA, 24 bp, Homo sapiens
  source 1..24: mol_type = genomic DNA
taatggttagcactctggactctg

SEQ ID NO: 40326 - DNA, 25 bp, Homo sapiens
  source 1..25: mol_type = genomic DNA
taatggttagcactctggactctga

SEQ ID NO: 40327 - DNA, 26 bp, Homo sapiens
  source 1..26: mol_type = genomic DNA
taatggttagcactctggactctgaa

SEQ ID NO: 40328 - DNA, 27 bp, Homo sapiens
  source 1..27: mol_type = genomic DNA
taatggttagcactctggactctgaat

SEQ ID NO: 40329 - DNA, 28 bp, Homo sapiens
  source 1..28: mol_type = genomic DNA
taatggttagcactctggactctgaatc

SEQ ID NO: 40330 - DNA, 29 bp, Homo sapiens
  source 1..29: mol_type = genomic DNA
taatggttagcactctggactctgaatcc

SEQ ID NO: 40331 - DNA, 30 bp, Homo sapiens; identical to SEQ ID NO: 23456
  source 1..30: mol_type = genomic DNA

SEQ ID NO: 40332 - DNA, 31 bp, Homo sapiens
  source 1..31: mol_type = genomic DNA
taatggttagcactctggactctgaatccag

SEQ ID NO: 40333 - DNA, 32 bp, Homo sapiens
  source 1..32: mol_type = genomic DNA
taatggttagcactctggactctgaatccagc

SEQ ID NO: 40334 - DNA, 33 bp, Homo sapiens; identical to SEQ ID NO: 23457
  source 1..33: mol_type = genomic DNA

SEQ ID NO: 40335 - DNA, 40 bp, Homo sapiens; identical to SEQ ID NO: 23458
  source 1..40: mol_type = genomic DNA

SEQ ID NO: 40336 - DNA, 41 bp, Homo sapiens; identical to SEQ ID NO: 23459
  source 1..41: mol_type = genomic DNA

SEQ ID NO: 40337 - DNA, 44 bp, Homo sapiens; identical to SEQ ID NO: 23461
  source 1..44: mol_type = genomic DNA

SEQ ID NO: 40338 - DNA, 24 bp, Homo sapiens
  source 1..24: mol_type = genomic DNA
taatggttagcactctggactttg

SEQ ID NO: 40339 - DNA, 26 bp, Homo sapiens
  source 1..26: mol_type = genomic DNA
taatggttagcactctggactttgaa

SEQ ID NO: 40340 - DNA, 28 bp, Homo sapiens
  source 1..28: mol_type = genomic DNA
taatggttagcactctggactttgaatc

SEQ ID NO: 40341 - DNA, 41 bp, Homo sapiens
  source 1..41: mol_type = genomic DNA
taatggttagcactctggactttgaatccagcgatccgagt

SEQ ID NO: 40342 - DNA, 16 bp, Homo sapiens
  source 1..16: mol_type = genomic DNA
taattaaagtggctga

SEQ ID NO: 40343 - DNA, 16 bp, Homo sapiens
  source 1..16: mol_type = genomic DNA
taattcaaaggttccg

SEQ ID NO: 40344 - DNA, 40 bp, Homo sapiens; identical to SEQ ID NO: 23474
  source 1..40: mol_type = genomic DNA

SEQ ID NO: 40345 - DNA, 41 bp, Homo sapiens; identical to SEQ ID NO: 23475
  source 1..41: mol_type = genomic DNA

SEQ ID NO: 40346 - DNA, 40 bp, Homo sapiens; identical to SEQ ID NO: 23476
  source 1..40: mol_type = genomic DNA

SEQ ID NO: 40347 - DNA, 41 bp, Homo sapiens; identical to SEQ ID NO: 23477
  source 1..41: mol_type = genomic DNA

SEQ ID NO: 40348 - DNA, 40 bp, Homo sapiens
  source 1..40: mol_type = genomic DNA
taattcaaaggttgtgggttcgagtcccaccagagtcgcc

SEQ ID NO: 40349 - DNA, 40 bp, Homo sapiens; identical to SEQ ID NO: 23490
  source 1..40: mol_type = genomic DNA

SEQ ID NO: 40350 - DNA, 41 bp, Homo sapiens; identical to SEQ ID NO: 23491
  source 1..41: mol_type = genomic DNA

SEQ ID NO: 40351 - DNA, 18 bp, Homo sapiens
  source 1..18: mol_type = genomic DNA
tacacgcagaaggtcctg

SEQ ID NO: 40352 - DNA, 42 bp, Homo sapiens; identical to SEQ ID NO: 23499
  source 1..42: mol_type = genomic DNA

SEQ ID NO: 40353 - DNA, 25 bp, Homo sapiens
  source 1..25: mol_type = genomic DNA
tacactgaaaatgtttagacgggct

SEQ ID NO: 40354 - DNA, 37 bp, Homo sapiens; identical to SEQ ID NO: 23534
  source 1..37: mol_type = genomic DNA

SEQ ID NO: 40355 - DNA, 38 bp, Homo sapiens; identical to SEQ ID NO: 23535
  source 1..38: mol_type = genomic DNA

SEQ ID NO: 40356 - DNA, 39 bp, Homo sapiens; identical to SEQ ID NO: 23536
  source 1..39: mol_type = genomic DNA

SEQ ID NO: 40357 - DNA, 40 bp, Homo sapiens; identical to SEQ ID NO: 23537
  source 1..40: mol_type = genomic DNA

SEQ ID NO: 40358 - DNA, 41 bp, Homo sapiens; identical to SEQ ID NO: 23538
  source 1..41: mol_type = genomic DNA

SEQ ID NO: 40359 - DNA, 39 bp, Homo sapiens; identical to SEQ ID NO: 23572
  source 1..39: mol_type = genomic DNA

SEQ ID NO: 40360 - DNA, 20 bp, Homo sapiens
  source 1..20: mol_type = genomic DNA
tacgaccccttatttacccc

SEQ ID NO: 40361 - DNA, 21 bp, Homo sapiens
  source 1..21: mol_type = genomic DNA
tacgaccccttatttacccca

SEQ ID NO: 40362 - DNA, 17 bp, Homo sapiens
  source 1..17: mol_type = genomic DNA
tactctgcgttgtggcc

SEQ ID NO: 40363 - DNA, 18 bp, Homo sapiens
  source 1..18: mol_type = genomic DNA
tactctgcgttgtggccg

SEQ ID NO: 40364 - DNA, 19 bp, Homo sapiens
  source 1..19: mol_type = genomic DNA
tactctgcgttgtggccgc

SEQ ID NO: 40365 - DNA, 16 bp, Homo sapiens
  source 1..16: mol_type = genomic DNA
tacttaatttctgcca

SEQ ID NO: 40366 - DNA, 40 bp, Homo sapiens; identical to SEQ ID NO: 23636
  source 1..40: mol_type = genomic DNA

SEQ ID NO: 40367 - DNA, 41 bp, Homo sapiens; identical to SEQ ID NO: 23637
  source 1..41: mol_type = genomic DNA

SEQ ID NO: 40368 - DNA, 32 bp, Homo sapiens; identical to SEQ ID NO: 23641
  source 1..32: mol_type = genomic DNA

SEQ ID NO: 40369 - DNA, 16 bp, Homo sapiens
  source 1..16: mol_type = genomic DNA
tagaattctcgcctgc

SEQ ID NO: 40370 - DNA, 17 bp, Homo sapiens
  source 1..17: mol_type = genomic DNA
tagaattctcgcctgcc

SEQ ID NO: 40371 - DNA, 18 bp, Homo sapiens
  source 1..18: mol_type = genomic DNA
tagaattctcgcctgcca

SEQ ID NO: 40372 - DNA, 19 bp, Homo sapiens
  source 1..19: mol_type = genomic DNA
tagaattctcgcctgccac

SEQ ID NO: 40373 - DNA, 20 bp, Homo sapiens
  source 1..20: mol_type = genomic DNA
tagaattctcgcctgccacg

SEQ ID NO: 40374 - DNA, 21 bp, Homo sapiens
  source 1..21: mol_type = genomic DNA
tagaattctcgcctgccacgc

SEQ ID NO: 40375 - DNA, 25 bp, Homo sapiens
  source 1..25: mol_type = genomic DNA
tagaattctcgcctgccacgcggga

SEQ ID NO: 40376 - DNA, 30 bp, Homo sapiens; identical to SEQ ID NO: 23652
  source 1..30: mol_type = genomic DNA

SEQ ID NO: 40377 - DNA, 32 bp, Homo sapiens; identical to SEQ ID NO: 23654
  source 1..32: mol_type = genomic DNA

SEQ ID NO: 40378 - DNA, 33 bp, Homo sapiens; identical to SEQ ID NO: 23655
  source 1..33: mol_type = genomic DNA

SEQ ID NO: 40379 - DNA, 34 bp, Homo sapiens; identical to SEQ ID NO: 23656
  source 1..34: mol_type = genomic DNA

SEQ ID NO: 40380 - DNA, 16 bp, Homo sapiens
  source 1..16: mol_type = genomic DNA
tagacgggctcacatc

SEQ ID NO: 40381 - DNA, 19 bp, Homo sapiens
  source 1..19: mol_type = genomic DNA
tagacgggctcacatcacc

SEQ ID NO: 40382 - DNA, 30 bp, Homo sapiens; identical to SEQ ID NO: 23674
  source 1..30: mol_type = genomic DNA

SEQ ID NO: 40383 - DNA, 31 bp, Homo sapiens; identical to SEQ ID NO: 23675
  source 1..31: mol_type = genomic DNA

SEQ ID NO: 40384 - DNA, 22 bp, Homo sapiens
  source 1..22: mol_type = genomic DNA
tagagcatgagactcttaatct

SEQ ID NO: 40385 - DNA, 23 bp, Homo sapiens
  source 1..23: mol_type = genomic DNA
tagagcatgagactcttaatctc

SEQ ID NO: 40386 - DNA, 30 bp, Homo sapiens; identical to SEQ ID NO: 23689
  source 1..30: mol_type = genomic DNA

SEQ ID NO: 40387 - DNA, 32 bp, Homo sapiens; identical to SEQ ID NO: 23691
  source 1..32: mol_type = genomic DNA

SEQ ID NO: 40388 - DNA, 33 bp, Homo sapiens; identical to SEQ ID NO: 23692
  source 1..33: mol_type = genomic DNA

SEQ ID NO: 40389 - DNA, 34 bp, Homo sapiens; identical to SEQ ID NO: 23693
  source 1..34: mol_type = genomic DNA

SEQ ID NO: 40390 - DNA, 35 bp, Homo sapiens; identical to SEQ ID NO: 23694
  source 1..35: mol_type = genomic DNA

SEQ ID NO: 40391 - DNA, 36 bp, Homo sapiens; identical to SEQ ID NO: 23695
  source 1..36: mol_type = genomic DNA

SEQ ID NO: 40392 - DNA, 38 bp, Homo sapiens; identical to SEQ ID NO: 23697
  source 1..38: mol_type = genomic DNA

SEQ ID NO: 40393 - DNA, 44 bp, Homo sapiens; identical to SEQ ID NO: 23699
  source 1..44: mol_type = genomic DNA

SEQ ID NO: 40394 - DNA, 16 bp, Homo sapiens
  source 1..16: mol_type = genomic DNA
tagagcatgggactct

SEQ ID NO: 40395 - DNA, 20 bp, Homo sapiens
  source 1..20: mol_type = genomic DNA
tagagcatgggactcttaat

SEQ ID NO: 40396 - DNA, 21 bp, Homo sapiens
  source 1..21: mol_type = genomic DNA
tagagcatgggactcttaatc

SEQ ID NO: 40397 - DNA, 22 bp, Homo sapiens
  source 1..22: mol_type = genomic DNA
tagagcatgggactcttaatcc

SEQ ID NO: 40398 - DNA, 23 bp, Homo sapiens
  source 1..23: mol_type = genomic DNA
tagagcatgggactcttaatccc

SEQ ID NO: 40399 - DNA, 30 bp, Homo sapiens; identical to SEQ ID NO: 23708
  source 1..30: mol_type = genomic DNA

SEQ ID NO: 40400 - DNA, 32 bp, Homo sapiens; identical to SEQ ID NO: 23710
  source 1..32: mol_type = genomic DNA

SEQ ID NO: 40401 - DNA, 33 bp, Homo sapiens; identical to SEQ ID NO: 23711
  source 1..33: mol_type = genomic DNA

SEQ ID NO: 40402 - DNA, 34 bp, Homo sapiens; identical to SEQ ID NO: 23712
  source 1..34: mol_type = genomic DNA

SEQ ID NO: 40403 - DNA, 35 bp, Homo sapiens; identical to SEQ ID NO: 23713
  source 1..35: mol_type = genomic DNA

SEQ ID NO: 40404 - DNA, 36 bp, Homo sapiens; identical to SEQ ID NO: 23714
  source 1..36: mol_type = genomic DNA

SEQ ID NO: 40405 - DNA, 37 bp, Homo sapiens
  source 1..37: mol_type = genomic DNA
tagagcatgggactcttaatcccagggtcgtgggttc

SEQ ID NO: 40406 - DNA, 38 bp, Homo sapiens; identical to SEQ ID NO: 23715
  source 1..38: mol_type = genomic DNA

SEQ ID NO: 40407 - DNA, 42 bp, Homo sapiens; identical to SEQ ID NO: 23716
  source 1..42: mol_type = genomic DNA

SEQ ID NO: 40408 - DNA, 44 bp, Homo sapiens; identical to SEQ ID NO: 23717
  source 1..44: mol_type = genomic DNA

SEQ ID NO: 40409 - DNA, 36 bp, Homo sapiens; identical to SEQ ID NO: 23724
  source 1..36: mol_type = genomic DNA

SEQ ID NO: 40410 - DNA, 16 bp, Homo sapiens
  source 1..16: mol_type = genomic DNA
tagagcatttgactgc

SEQ ID NO: 40411 - DNA, 20 bp, Homo sapiens
  source 1..20: mol_type = genomic DNA
tagagtaaataataggagct

SEQ ID NO: 40412 - DNA, 23 bp, Homo sapiens
  source 1..23: mol_type = genomic DNA
tagatccttaggtcgctggttcg

SEQ ID NO: 40413 - DNA, 16 bp, Homo sapiens
  source 1..16: mol_type = genomic DNA
tagcactctggactct

SEQ ID NO: 40414 - DNA, 17 bp, Homo sapiens
  source 1..17: mol_type = genomic DNA
tagcactctggactctg

SEQ ID NO: 40415 - DNA, 18 bp, Homo sapiens
  source 1..18: mol_type = genomic DNA
tagcactctggactctga

SEQ ID NO: 40416 - DNA, 19 bp, Homo sapiens
  source 1..19: mol_type = genomic DNA
tagcactctggactctgaa

SEQ ID NO: 40417 - DNA, 20 bp, Homo sapiens
  source 1..20: mol_type = genomic DNA
tagcactctggactctgaat

SEQ ID NO: 40418 - DNA, 21 bp, Homo sapiens
  source 1..21: mol_type = genomic DNA
tagcactctggactctgaatc

SEQ ID NO: 40419 - DNA, 22 bp, Homo sapiens
  source 1..22: mol_type = genomic DNA
tagcactctggactctgaatcc

SEQ ID NO: 40420 - DNA, 23 bp, Homo sapiens
  source 1..23: mol_type = genomic DNA
tagcactctggactctgaatcca

SEQ ID NO: 40421 - DNA, 24 bp, Homo sapiens
  source 1..24: mol_type = genomic DNA
tagcactctggactctgaatccag

SEQ ID NO: 40422 - DNA, 25 bp, Homo sapiens
  source 1..25: mol_type = genomic DNA
tagcactctggactctgaatccagc

SEQ ID NO: 40423 - DNA, 26 bp, Homo sapiens
  source 1..26: mol_type = genomic DNA
tagcactctggactctgaatccagcg

SEQ ID NO: 40424 - DNA, 29 bp, Homo sapiens
  source 1..29: mol_type = genomic DNA
tagcactctggactctgaatccagcgatc

SEQ ID NO: 40425 - DNA, 30 bp, Homo sapiens
  source 1..30: mol_type = genomic DNA
tagcactctggactctgaatccagcgatcc

SEQ ID NO: 40426 - DNA, 32 bp, Homo sapiens; identical to SEQ ID NO: 23786
  source 1..32: mol_type = genomic DNA

SEQ ID NO: 40427 - DNA, 33 bp, Homo sapiens; identical to SEQ ID NO: 23787
  source 1..33: mol_type = genomic DNA

SEQ ID NO: 40428 - DNA, 34 bp, Homo sapiens; identical to SEQ ID NO: 23788
  source 1..34: mol_type = genomic DNA

SEQ ID NO: 40429 - DNA, 35 bp, Homo sapiens; identical to SEQ ID NO: 23789
  source 1..35: mol_type = genomic DNA

SEQ ID NO: 40430 - DNA, 36 bp, Homo sapiens; identical to SEQ ID NO: 23790
  source 1..36: mol_type = genomic DNA

SEQ ID NO: 40431 - DNA, 37 bp, Homo sapiens; identical to SEQ ID NO: 23791
  source 1..37: mol_type = genomic DNA

SEQ ID NO: 40432 - DNA, 45 bp, Homo sapiens; identical to SEQ ID NO: 23794
  source 1..45: mol_type = genomic DNA

SEQ ID NO: 40433 - DNA, 18 bp, Homo sapiens
  source 1..18: mol_type = genomic DNA
tagcactctggactttga

SEQ ID NO: 40434 - DNA, 19 bp, Homo sapiens
  source 1..19: mol_type = genomic DNA
tagcactctggactttgaa

SEQ ID NO: 40435 - DNA, 20 bp, Homo sapiens
  source 1..20: mol_type = genomic DNA
tagcactctggactttgaat

SEQ ID NO: 40436 - DNA, 21 bp, Homo sapiens
  source 1..21: mol_type = genomic DNA
tagcactctggactttgaatc

SEQ ID NO: 40437 - DNA, 22 bp, Homo sapiens
  source 1..22: mol_type = genomic DNA
tagcactctggactttgaatcc

SEQ ID NO: 40438 - DNA, 23 bp, Homo sapiens
  source 1..23: mol_type = genomic DNA
tagcactctggactttgaatcca

SEQ ID NO: 40439 - DNA, 33 bp, Homo sapiens; identical to SEQ ID NO: 23807
  source 1..33: mol_type = genomic DNA

SEQ ID NO: 40440 - DNA, 34 bp, Homo sapiens; identical to SEQ ID NO: 23808
  source 1..34: mol_type = genomic DNA

SEQ ID NO: 40441 - DNA, 16 bp, Homo sapiens
  source 1..16: mol_type = genomic DNA
tagcggttaggattcc

SEQ ID NO: 40442 - DNA, 20 bp, Homo sapiens
  source 1..20: mol_type = genomic DNA
tagcggttaggattcctggt

SEQ ID NO: 40443 - DNA, 21 bp, Homo sapiens
  source 1..21: mol_type = genomic DNA
tagcggttaggattcctggtt

SEQ ID NO: 40444 - DNA, 22 bp, Homo sapiens
  source 1..22: mol_type = genomic DNA
tagcggttaggattcctggttt

SEQ ID NO: 40445 - DNA, 23 bp, Homo sapiens
  source 1..23: mol_type = genomic DNA
tagcggttaggattcctggtttt

SEQ ID NO: 40446 - DNA, 21 bp, Homo sapiens
  source 1..21: mol_type = genomic DNA
tagcggttatcacattcgcct

SEQ ID NO: 40447 - DNA, 22 bp, Homo sapiens
  source 1..22: mol_type = genomic DNA
tagcgtggccgagcggtctaag

SEQ ID NO: 40448 - DNA, 26 bp, Homo sapiens
  source 1..26: mol_type = genomic DNA
tagctcaggggttagagcactggtct

SEQ ID NO: 40449 - DNA, 16 bp, Homo sapiens
  source 1..16: mol_type = genomic DNA
tagctcagtcggtaga

SEQ ID NO: 40450 - DNA, 17 bp, Homo sapiens
  source 1..17: mol_type = genomic DNA
tagctcagtcggtagag

SEQ ID NO: 40451 - DNA, 19 bp, Homo sapiens
  source 1..19: mol_type = genomic DNA
tagctcagtcggtagagca

SEQ ID NO: 40452 - DNA, 25 bp, Homo sapiens
  source 1..25: mol_type = genomic DNA
tagctcagtcggtagagcatcagac

SEQ ID NO: 40453 - DNA, 26 bp, Homo sapiens
  source 1..26: mol_type = genomic DNA
tagctcagtcggtagagcatcagact

SEQ ID NO: 40454 - DNA, 28 bp, Homo sapiens
  source 1..28: mol_type = genomic DNA
tagctcagtcggtagagcatcagacttt

SEQ ID NO: 40455 - DNA, 46 bp, Homo sapiens
  source 1..46: mol_type = genomic DNA
tagctcagtcggtagagcatcagacttttaatctgagggtccaggg

SEQ ID NO: 40456 - DNA, 25 bp, Homo sapiens
  source 1..25: mol_type = genomic DNA
tagctcagtcggtagagcatgagac

SEQ ID NO: 40457 - DNA, 26 bp, Homo sapiens
  source 1..26: mol_type = genomic DNA
tagctcagtcggtagagcatgagact

SEQ ID NO: 40458 - DNA, 27 bp, Homo sapiens
  source 1..27: mol_type = genomic DNA
tagctcagtcggtagagcatgagactc

SEQ ID NO: 40459 - DNA, 28 bp, Homo sapiens
  source 1..28: mol_type = genomic DNA
tagctcagtcggtagagcatgagactct

SEQ ID NO: 40460 - DNA, 34 bp, Homo sapiens; identical to SEQ ID NO: 23910
  source 1..34: mol_type = genomic DNA

SEQ ID NO: 40461 - DNA, 25 bp, Homo sapiens
  source 1..25: mol_type = genomic DNA
tagctcagtcggtagagcatgggac

SEQ ID NO: 40462 - DNA, 26 bp, Homo sapiens
  source 1..26: mol_type = genomic DNA
tagctcagtcggtagagcatgggact

SEQ ID NO: 40463 - DNA, 27 bp, Homo sapiens
  source 1..27: mol_type = genomic DNA
tagctcagtcggtagagcatgggactc

SEQ ID NO: 40464 - DNA, 28 bp, Homo sapiens
  source 1..28: mol_type = genomic DNA
tagctcagtcggtagagcatgggactct

SEQ ID NO: 40465 - DNA, 29 bp, Homo sapiens
  source 1..29: mol_type = genomic DNA
tagctcagtcggtagagcatgggactctt

SEQ ID NO: 40466 - DNA, 32 bp, Homo sapiens; identical to SEQ ID NO: 23925
  source 1..32: mol_type = genomic DNA

SEQ ID NO: 40467 - DNA, 33 bp, Homo sapiens; identical to SEQ ID NO: 23926
  source 1..33: mol_type = genomic DNA

SEQ ID NO: 40468 - DNA, 34 bp, Homo sapiens; identical to SEQ ID NO: 23927
  source 1..34: mol_type = genomic DNA

SEQ ID NO: 40469 - DNA, 42 bp, Homo sapiens; identical to SEQ ID NO: 23928
  source 1..42: mol_type = genomic DNA

SEQ ID NO: 40470 - DNA, 45 bp, Homo sapiens; identical to SEQ ID NO: 23929
  source 1..45: mol_type = genomic DNA

SEQ ID NO: 40471 - DNA, 25 bp, Homo sapiens
  source 1..25: mol_type = genomic DNA
tagctcagtggtagagcatttgact

SEQ ID NO: 40472 - DNA, 46 bp, Homo sapiens; identical to SEQ ID NO: 23965
  source 1..46: mol_type = genomic DNA

SEQ ID NO: 40473 - DNA, 31 bp, Homo sapiens; identical to SEQ ID NO: 24008
  source 1..31: mol_type = genomic DNA

SEQ ID NO: 40474 - DNA, 32 bp, Homo sapiens; identical to SEQ ID NO: 24009
  source 1..32: mol_type = genomic DNA

SEQ ID NO: 40475 - DNA, 33 bp, Homo sapiens; identical to SEQ ID NO: 24010
  source 1..33: mol_type = genomic DNA

SEQ ID NO: 40476 - DNA, 34 bp, Homo sapiens; identical to SEQ ID NO: 24011
  source 1..34: mol_type = genomic DNA

SEQ ID NO: 40477 - DNA, 35 bp, Homo sapiens; identical to SEQ ID NO: 24012
  source 1..35: mol_type = genomic DNA

SEQ ID NO: 40478 - DNA, 16 bp, Homo sapiens
  source 1..16: mol_type = genomic DNA
taggagcttaaacccc

SEQ ID NO: 40479 - DNA, 28 bp, Homo sapiens
  source 1..28: mol_type = genomic DNA
taggagcttaaacccccttatttctacc

SEQ ID NO: 40480 - DNA, 29 bp, Homo sapiens
  source 1..29: mol_type = genomic DNA
taggagcttaaacccccttatttctacca

SEQ ID NO: 40481 - DNA, 16 bp, Homo sapiens
  source 1..16: mol_type = genomic DNA
taggatggggtgtgat

SEQ ID NO: 40482 - DNA, 17 bp, Homo sapiens
  source 1..17: mol_type = genomic DNA
taggatggggtgtgata

SEQ ID NO: 40483 - DNA, 18 bp, Homo sapiens
  source 1..18: mol_type = genomic DNA
taggatggggtgtgatag

SEQ ID NO: 40484 - DNA, 19 bp, Homo sapiens
  source 1..19: mol_type = genomic DNA
taggatggggtgtgatagg

SEQ ID NO: 40485 - DNA, 20 bp, Homo sapiens
  source 1..20: mol_type = genomic DNA
taggatggggtgtgataggt

SEQ ID NO: 40486 - DNA, 21 bp, Homo sapiens
  source 1..21: mol_type = genomic DNA
taggatggggtgtgataggtg

SEQ ID NO: 40487 - DNA, 22 bp, Homo sapiens
  source 1..22: mol_type = genomic DNA
taggatggggtgtgataggtgg

SEQ ID NO: 40488 - DNA, 23 bp, Homo sapiens
  source 1..23: mol_type = genomic DNA
taggatggggtgtgataggtggc

SEQ ID NO: 40489 - DNA, 24 bp, Homo sapiens
  source 1..24: mol_type = genomic DNA
taggatggggtgtgataggtggca

SEQ ID NO: 40490 - DNA, 25 bp, Homo sapiens
  source 1..25: mol_type = genomic DNA
taggatggggtgtgataggtggcac

SEQ ID NO: 40491 - DNA, 26 bp, Homo sapiens
  source 1..26: mol_type = genomic DNA
taggatggggtgtgataggtggcacg

SEQ ID NO: 40492 - DNA, 27 bp, Homo sapiens
  source 1..27: mol_type = genomic DNA
taggatggggtgtgataggtggcacgg

SEQ ID NO: 40493 - DNA, 28 bp, Homo sapiens
  source 1..28: mol_type = genomic DNA
taggatggggtgtgataggtggcacgga

SEQ ID NO: 40494 - DNA, 29 bp, Homo sapiens
  source 1..29: mol_type = genomic DNA
taggatggggtgtgataggtggcacggag

SEQ ID NO: 40495 - DNA, 30 bp, Homo sapiens; identical to SEQ ID NO: 24039
  source 1..30: mol_type = genomic DNA

SEQ ID NO: 40496 - DNA, 31 bp, Homo sapiens; identical to SEQ ID NO: 24040
  source 1..31: mol_type = genomic DNA

SEQ ID NO: 40497 - DNA, 32 bp, Homo sapiens; identical to SEQ ID NO: 24041
  source 1..32: mol_type = genomic DNA

SEQ ID NO: 40498 - DNA, 33 bp, Homo sapiens; identical to SEQ ID NO: 24042
  source 1..33: mol_type = genomic DNA

SEQ ID NO: 40499 - DNA, 34 bp, Homo sapiens; identical to SEQ ID NO: 24043
  source 1..34: mol_type = genomic DNA

SEQ ID NO: 40500 - DNA, 35 bp, Homo sapiens; identical to SEQ ID NO: 24044
  source 1..35: mol_type = genomic DNA

SEQ ID NO: 40501 - DNA, 36 bp, Homo sapiens; identical to SEQ ID NO: 24045
  source 1..36: mol_type = genomic DNA

SEQ ID NO: 40502 - DNA, 37 bp, Homo sapiens; identical to SEQ ID NO: 24046
  source 1..37: mol_type = genomic DNA

SEQ ID NO: 40503 - DNA, 38 bp, Homo sapiens; identical to SEQ ID NO: 24047
  source 1..38: mol_type = genomic DNA

SEQ ID NO: 40504 - DNA, 40 bp, Homo sapiens; identical to SEQ ID NO: 24049
  source 1..40: mol_type = genomic DNA

SEQ ID NO: 40505 - DNA, 41 bp, Homo sapiens; identical to SEQ ID NO: 24050
  source 1..41: mol_type = genomic DNA

SEQ ID NO: 40506 - DNA, 42 bp, Homo sapiens; identical to SEQ ID NO: 24051
  source 1..42: mol_type = genomic DNA

SEQ ID NO: 40507 - DNA, 43 bp, Homo sapiens; identical to SEQ ID NO: 24052
  source 1..43: mol_type = genomic DNA

SEQ ID NO: 40508 - DNA, 44 bp, Homo sapiens; identical to SEQ ID NO: 24053
  source 1..44: mol_type = genomic DNA

SEQ ID NO: 40509 - DNA, 24 bp, Homo sapiens
  source 1..24: mol_type = genomic DNA
taggattcctggttttcacccagg

SEQ ID NO: 40510 - DNA, 29 bp, Homo sapiens
  source 1..29: mol_type = genomic DNA
taggattcctggttttcacccaggcggcc

SEQ ID NO: 40511 - DNA, 47 bp, Homo sapiens; identical to SEQ ID NO: 24063
  source 1..47: mol_type = genomic DNA

SEQ ID NO: 40512 - DNA, 26 bp, Homo sapiens
  source 1..26: mol_type = genomic DNA
taggattcctggttttcacccaggtg

SEQ ID NO: 40513 - DNA, 47 bp, Homo sapiens
  source 1..47: mol_type = genomic DNA
taggattcctggttttcacccaggtggcccgggttcgactcccggta

SEQ ID NO: 40514 - DNA, 16 bp, Homo sapiens
  source 1..16: mol_type = genomic DNA
taggattcggcgctct

SEQ ID NO: 40515 - DNA, 17 bp, Homo sapiens
  source 1..17: mol_type = genomic DNA
taggattcggcgctctc

SEQ ID NO: 40516 - DNA, 19 bp, Homo sapiens
  source 1..19: mol_type = genomic DNA
taggattcggcgctctcac

SEQ ID NO: 40517 - DNA, 20 bp, Homo sapiens
  source 1..20: mol_type = genomic DNA
taggattcggcgctctcacc

SEQ ID NO: 40518 - DNA, 21 bp, Homo sapiens
  source 1..21: mol_type = genomic DNA
taggattcggcgctctcaccg

SEQ ID NO: 40519 - DNA, 22 bp, Homo sapiens
  source 1..22: mol_type = genomic DNA
taggattcggcgctctcaccgc

SEQ ID NO: 40520 - DNA, 23 bp, Homo sapiens
  source 1..23: mol_type = genomic DNA
taggattcggcgctctcaccgcc

SEQ ID NO: 40521 - DNA, 29 bp, Homo sapiens
  source 1..29: mol_type = genomic DNA
taggattcggcgctctcaccgccgcggcc

SEQ ID NO: 40522 - DNA, 30 bp, Homo sapiens; identical to SEQ ID NO: 24078
  source 1..30: mol_type = genomic DNA

SEQ ID NO: 40523 - DNA, 33 bp, Homo sapiens; identical to SEQ ID NO: 24081
  source 1..33: mol_type = genomic DNA

SEQ ID NO: 40524 - DNA, 36 bp, Homo sapiens; identical to SEQ ID NO: 24084
  source 1..36: mol_type = genomic DNA

SEQ ID NO: 40525 - DNA, 20 bp, Homo sapiens
  source 1..20: mol_type = genomic DNA
taggcctctttttaccacca

SEQ ID NO: 40526 - DNA, 16 bp, Homo sapiens
  source 1..16: mol_type = genomic DNA
taggggtatgattctc

SEQ ID NO: 40527 - DNA, 19 bp, Homo sapiens
  source 1..19: mol_type = genomic DNA
taggggtatgattctcgct

SEQ ID NO: 40528 - DNA, 20 bp, Homo sapiens
  source 1..20: mol_type = genomic DNA
taggggtatgattctcgctt

SEQ ID NO: 40529 - DNA, 19 bp, Homo sapiens
  source 1..19: mol_type = genomic DNA
taggggtatgattctcggt

SEQ ID NO: 40530 - DNA, 20 bp, Homo sapiens
  source 1..20: mol_type = genomic DNA
taggggtatgattctcggtt

SEQ ID NO: 40531 - DNA, 32 bp, Homo sapiens; identical to SEQ ID NO: 24135
  source 1..32: mol_type = genomic DNA

SEQ ID NO: 40532 - DNA, 33 bp, Homo sapiens; identical to SEQ ID NO: 24136
  source 1..33: mol_type = genomic DNA

SEQ ID NO: 40533 - DNA, 33 bp, Homo sapiens; identical to SEQ ID NO: 24138
  source 1..33: mol_type = genomic DNA

SEQ ID NO: 40534 - DNA, 32 bp, Homo sapiens; identical to SEQ ID NO: 24143
  source 1..32: mol_type = genomic DNA

SEQ ID NO: 40535 - DNA, 33 bp, Homo sapiens; identical to SEQ ID NO: 24144
  source 1..33: mol_type = genomic DNA

SEQ ID NO: 40536 - DNA, 16 bp, Homo sapiens
  source 1..16: mol_type = genomic DNA
taggtggcacggagaa

SEQ ID NO: 40537 - DNA, 20 bp, Homo sapiens
  source 1..20: mol_type = genomic DNA
taggtggcacggagaatttt

SEQ ID NO: 40538 - DNA, 24 bp, Homo sapiens
  source 1..24: mol_type = genomic DNA
taggttcgactcctggctggctcg

SEQ ID NO: 40539 - DNA, 26 bp, Homo sapiens
  source 1..26: mol_type = genomic DNA
taggttcgactcctggctggctcgcc

SEQ ID NO: 40540 - DNA, 27 bp, Homo sapiens
  source 1..27: mol_type = genomic DNA
taggttcgactcctggctggctcgcca

SEQ ID NO: 40541 - DNA, 20 bp, Homo sapiens
  source 1..20: mol_type = genomic DNA
tagtactctgcgttgtggcc

SEQ ID NO: 40542 - DNA, 21 bp, Homo sapiens
  source 1..21: mol_type = genomic DNA
tagtactctgcgttgtggccg

SEQ ID NO: 40543 - DNA, 34 bp, Homo sapiens; identical to SEQ ID NO: 24182
  source 1..34: mol_type = genomic DNA

SEQ ID NO: 40544 - DNA, 16 bp, Homo sapiens
  source 1..16: mol_type = genomic DNA
tagtccgtgcgagaat

SEQ ID NO: 40545 - DNA, 17 bp, Homo sapiens
  source 1..17: mol_type = genomic DNA
tagtccgtgcgagaata

SEQ ID NO: 40546 - DNA, 19 bp, Homo sapiens
  source 1..19: mol_type = genomic DNA
tagtccgtgcgagaatacc

SEQ ID NO: 40547 - DNA, 20 bp, Homo sapiens
  source 1..20: mol_type = genomic DNA
tagtccgtgcgagaatacca

SEQ ID NO: 40548 - DNA, 16 bp, Homo sapiens
  source 1..16: mol_type = genomic DNA
tagtcgtggccgagtg

SEQ ID NO: 40549 - DNA, 17 bp, Homo sapiens
  source 1..17: mol_type = genomic DNA
tagtcgtggccgagtgg

SEQ ID NO: 40550 - DNA, 21 bp, Homo sapiens
  source 1..21: mol_type = genomic DNA
tagtcgtggccgagtggttaa

SEQ ID NO: 40551 - DNA, 22 bp, Homo sapiens
  source 1..22: mol_type = genomic DNA
tagtcgtggccgagtggttaag

SEQ ID NO: 40552 - DNA, 23 bp, Homo sapiens
  source 1..23: mol_type = genomic DNA
tagtcgtggccgagtggttaagg

SEQ ID NO: 40553 - DNA, 18 bp, Homo sapiens
  source 1..18: mol_type = genomic DNA
tagtggctaggattcggc

SEQ ID NO: 40554 - DNA, 27 bp, Homo sapiens
  source 1..27: mol_type = genomic DNA
tagtggctaggattcggcgctttcacc

SEQ ID NO: 40555 - DNA, 20 bp, Homo sapiens
  source 1..20: mol_type = genomic DNA
tagtggtagaattctcgcct

SEQ ID NO: 40556 - DNA, 20 bp, Homo sapiens
  source 1..20: mol_type = genomic DNA
tagtggtatcatgcaagatt

SEQ ID NO: 40557 - DNA, 16 bp, Homo sapiens
  source 1..16: mol_type = genomic DNA
tagtggtatgattctc

SEQ ID NO: 40558 - DNA, 19 bp, Homo sapiens
  source 1..19: mol_type = genomic DNA
tagtggtatgattctcgct

SEQ ID NO: 40559 - DNA, 20 bp, Homo sapiens
  source 1..20: mol_type = genomic DNA
tagtggtatgattctcgctt

SEQ ID NO: 40560 - DNA, 19 bp, Homo sapiens
  source 1..19: mol_type = genomic DNA
tagtggtgagtatccccgc

SEQ ID NO: 40561 - DNA, 16 bp, Homo sapiens
  source 1..16: mol_type = genomic DNA
tagtggttaggattcg

SEQ ID NO: 40562 - DNA, 18 bp, Homo sapiens
  source 1..18: mol_type = genomic DNA
tagtggttaggattcggc

SEQ ID NO: 40563 - DNA, 19 bp, Homo sapiens
  source 1..19: mol_type = genomic DNA
tagtggttaggattcggcg

SEQ ID NO: 40564 - DNA, 20 bp, Homo sapiens
  source 1..20: mol_type = genomic DNA
tagtggttaggattcggcgc

SEQ ID NO: 40565 - DNA, 21 bp, Homo sapiens
  source 1..21: mol_type = genomic DNA
tagtggttaggattcggcgct

SEQ ID NO: 40566 - DNA, 22 bp, Homo sapiens
  source 1..22: mol_type = genomic DNA
tagtggttaggattcggcgctc

SEQ ID NO: 40567 - DNA, 25 bp, Homo sapiens
  source 1..25: mol_type = genomic DNA
tagtggttaggattcggcgctctca

SEQ ID NO: 40568 - DNA, 27 bp, Homo sapiens
  source 1..27: mol_type = genomic DNA
tagtggttaggattcggcgctctcacc

SEQ ID NO: 40569 - DNA, 30 bp, Homo sapiens; identical to SEQ ID NO: 24258
  source 1..30: mol_type = genomic DNA

SEQ ID NO: 40570 - DNA, 32 bp, Homo sapiens; identical to SEQ ID NO: 24259
  source 1..32: mol_type = genomic DNA

SEQ ID NO: 40571 - DNA, 37 bp, Homo sapiens; identical to SEQ ID NO: 24261
  source 1..37: mol_type = genomic DNA

SEQ ID NO: 40572 - DNA, 38 bp, Homo sapiens; identical to SEQ ID NO: 24262
  source 1..38: mol_type = genomic DNA

SEQ ID NO: 40573 - DNA, 42 bp, Homo sapiens; identical to SEQ ID NO: 24266
  source 1..42: mol_type = genomic DNA

SEQ ID NO: 40574 - DNA, 16 bp, Homo sapiens
  source 1..16: mol_type = genomic DNA
tagtggttagtactct

SEQ ID NO: 40575 - DNA, 17 bp, Homo sapiens
  source 1..17: mol_type = genomic DNA
tagtggttagtactctg

SEQ ID NO: 40576 - DNA, 18 bp, Homo sapiens
  source 1..18: mol_type = genomic DNA
tagtggttagtactctgc

SEQ ID NO: 40577 - DNA, 19 bp, Homo sapiens
  source 1..19: mol_type = genomic DNA
tagtggttagtactctgcg

SEQ ID NO: 40578 - DNA, 20 bp, Homo sapiens
  source 1..20: mol_type = genomic DNA
tagtggttagtactctgcgt

SEQ ID NO: 40579 - DNA, 21 bp, Homo sapiens
  source 1..21: mol_type = genomic DNA
tagtggttagtactctgcgtt

SEQ ID NO: 40580 - DNA, 22 bp, Homo sapiens
  source 1..22: mol_type = genomic DNA
tagtggttagtactctgcgttg

SEQ ID NO: 40581 - DNA, 23 bp, Homo sapiens
  source 1..23: mol_type = genomic DNA
tagtggttagtactctgcgttgt

SEQ ID NO: 40582 - DNA, 24 bp, Homo sapiens
  source 1..24: mol_type = genomic DNA
tagtggttagtactctgcgttgtg

SEQ ID NO: 40583 - DNA, 27 bp, Homo sapiens
  source 1..27: mol_type = genomic DNA
tagtggttagtactctgcgttgtggcc

SEQ ID NO: 40584 - DNA, 32 bp, Homo sapiens; identical to SEQ ID NO: 24283
  source 1..32: mol_type = genomic DNA

SEQ ID NO: 40585 - DNA, 33 bp, Homo sapiens; identical to SEQ ID NO: 24284
  source 1..33: mol_type = genomic DNA

SEQ ID NO: 40586 - DNA, 34 bp, Homo sapiens; identical to SEQ ID NO: 24285
  source 1..34: mol_type = genomic DNA

SEQ ID NO: 40587 - DNA, 36 bp, Homo sapiens; identical to SEQ ID NO: 24286
  source 1..36: mol_type = genomic DNA

SEQ ID NO: 40588 - DNA, 37 bp, Homo sapiens; identical to SEQ ID NO: 24287
  source 1..37: mol_type = genomic DNA

SEQ ID NO: 40589 - DNA, 21 bp, Homo sapiens
  source 1..21: mol_type = genomic DNA
tagtggttatcacatctgctt

SEQ ID NO: 40590 - DNA, 20 bp, Homo sapiens
  source 1..20: mol_type = genomic DNA
tagtggttatcacgtctgct

SEQ ID NO: 40591 - DNA, 21 bp, Homo sapiens
  source 1..21: mol_type = genomic DNA
tagtggttatcacgtctgctt

SEQ ID NO: 40592 - DNA, 22 bp, Homo sapiens
  source 1..22: mol_type = genomic DNA
tagtggttatcacgtctgcttt

SEQ ID NO: 40593 - DNA, 18 bp, Homo sapiens
  source 1..18: mol_type = genomic DNA
tagtggttatcacgttcg

SEQ ID NO: 40594 - DNA, 20 bp, Homo sapiens
  source 1..20: mol_type = genomic DNA
tagtggttatcacgttcgcc

SEQ ID NO: 40595 - DNA, 21 bp, Homo sapiens
  source 1..21: mol_type = genomic DNA
tagtggttatcacgttcgcct

SEQ ID NO: 40596 - DNA, 26 bp, Homo sapiens
  source 1..26: mol_type = genomic DNA
tagtgtagcggttatcacgtctgctt

SEQ ID NO: 40597 - DNA, 27 bp, Homo sapiens
  source 1..27: mol_type = genomic DNA
tagtgtagcggttatcacgtctgcttt

SEQ ID NO: 40598 - DNA, 26 bp, Homo sapiens
  source 1..26: mol_type = genomic DNA
tagtgtagtggtcatcacgttcgcct

SEQ ID NO: 40599 - DNA, 16 bp, Homo sapiens
  source 1..16: mol_type = genomic DNA
tagtgtagtggttatc

SEQ ID NO: 40600 - DNA, 17 bp, Homo sapiens
  source 1..17: mol_type = genomic DNA
tagtgtagtggttatca

SEQ ID NO: 40601 - DNA, 26 bp, Homo sapiens
  source 1..26: mol_type = genomic DNA
tagtgtagtggttatcacatctgctt

SEQ ID NO: 40602 - DNA, 24 bp, Homo sapiens
  source 1..24: mol_type = genomic DNA
tagtgtagtggttatcacgtctgc

SEQ ID NO: 40603 - DNA, 25 bp, Homo sapiens
  source 1..25: mol_type = genomic DNA
tagtgtagtggttatcacgtctgct

SEQ ID NO: 40604 - DNA, 26 bp, Homo sapiens
  source 1..26: mol_type = genomic DNA
tagtgtagtggttatcacgtctgctt

SEQ ID NO: 40605 - DNA, 27 bp, Homo sapiens
  source 1..27: mol_type = genomic DNA
tagtgtagtggttatcacgtctgcttt

SEQ ID NO: 40606 - DNA, 28 bp, Homo sapiens
  source 1..28: mol_type = genomic DNA
tagtgtagtggttatcacgtctgcttta

SEQ ID NO: 40607 - DNA, 24 bp, Homo sapiens
  source 1..24: mol_type = genomic DNA
tagtgtagtggttatcacgttcgc

SEQ ID NO: 40608 - DNA, 25 bp, Homo sapiens
  source 1..25: mol_type = genomic DNA
tagtgtagtggttatcacgttcgcc

SEQ ID NO: 40609 - DNA, 26 bp, Homo sapiens
  source 1..26: mol_type = genomic DNA
tagtgtagtggttatcacgttcgcct

SEQ ID NO: 40610 - DNA, 29 bp, Homo sapiens
  source 1..29: mol_type = genomic DNA
tagtgtagtggttatcacgttcgcctcac

SEQ ID NO: 40611 - DNA, 30 bp, Homo sapiens; identical to SEQ ID NO: 24367
  source 1..30: mol_type = genomic DNA

SEQ ID NO: 40612 - DNA, 23 bp, Homo sapiens
  source 1..23: mol_type = genomic DNA
tataatgccgaggttgtgagttc

SEQ ID NO: 40613 - DNA, 42 bp, Homo sapiens; identical to SEQ ID NO: 24383
  source 1..42: mol_type = genomic DNA

SEQ ID NO: 40614 - DNA, 42 bp, Homo sapiens; identical to SEQ ID NO: 24384
  source 1..42: mol_type = genomic DNA

SEQ ID NO: 40615 - DNA, 20 bp, Homo sapiens
  source 1..20: mol_type = genomic DNA
tatacccttcccgtactacc

SEQ ID NO: 40616 - DNA, 21 bp, Homo sapiens
  source 1..21: mol_type = genomic DNA
tatacccttcccgtactacca

SEQ ID NO: 40617 - DNA, 27 bp, Homo sapiens
  source 1..27: mol_type = genomic DNA
tatagctcagtggtagagcatttgact

SEQ ID NO: 40618 - DNA, 17 bp, Homo sapiens
  source 1..17: mol_type = genomic DNA
tatagtggttagtactc

SEQ ID NO: 40619 - DNA, 20 bp, Homo sapiens
  source 1..20: mol_type = genomic DNA
tatagtggttagtactctgc

SEQ ID NO: 40620 - DNA, 21 bp, Homo sapiens
  source 1..21: mol_type = genomic DNA
tatagtggttagtactctgcg

SEQ ID NO: 40621 - DNA, 22 bp, Homo sapiens
  source 1..22: mol_type = genomic DNA
tatagtggttagtactctgcgt

SEQ ID NO: 40622 - DNA, 23 bp, Homo sapiens
  source 1..23: mol_type = genomic DNA
tatagtggttagtactctgcgtt

SEQ ID NO: 40623 - DNA, 24 bp, Homo sapiens
  source 1..24: mol_type = genomic DNA
tatagtggttagtactctgcgttg

SEQ ID NO: 40624 - DNA, 25 bp, Homo sapiens
  source 1..25: mol_type = genomic DNA
tatagtggttagtactctgcgttgt

SEQ ID NO: 40625 - DNA, 26 bp, Homo sapiens
  source 1..26: mol_type = genomic DNA
tatagtggttagtactctgcgttgtg

SEQ ID NO: 40626 - DNA, 29 bp, Homo sapiens
  source 1..29: mol_type = genomic DNA
tatagtggttagtactctgcgttgtggcc

SEQ ID NO: 40627 - DNA, 30 bp, Homo sapiens; identical to SEQ ID NO: 24434
  source 1..30: mol_type = genomic DNA

SEQ ID NO: 40628 - DNA, 38 bp, Homo sapiens; identical to SEQ ID NO: 24435
  source 1..38: mol_type = genomic DNA

SEQ ID NO: 40629 - DNA, 39 bp, Homo sapiens; identical to SEQ ID NO: 24436
  source 1..39: mol_type = genomic DNA

SEQ ID NO: 40630 - DNA, 20 bp, Homo sapiens
  source 1..20: mol_type = genomic DNA
tatcacgtctgctttacacg

SEQ ID NO: 40631 - DNA, 24 bp, Homo sapiens
  source 1..24: mol_type = genomic DNA
tatcattggtcgtggttgtagtcc

SEQ ID NO: 40632 - DNA, 27 bp, Homo sapiens
  source 1..27: mol_type = genomic DNA
tatcattggtcgtggttgtagtccgtg

SEQ ID NO: 40633 - DNA, 29 bp, Homo sapiens
  source 1..29: mol_type = genomic DNA
tatcattggtcgtggttgtagtccgtgcg

SEQ ID NO: 40634 - DNA, 30 bp, Homo sapiens; identical to SEQ ID NO: 24471
  source 1..30: mol_type = genomic DNA

SEQ ID NO: 40635 - DNA, 31 bp, Homo sapiens; identical to SEQ ID NO: 24472
  source 1..31: mol_type = genomic DNA

SEQ ID NO: 40636 - DNA, 32 bp, Homo sapiens; identical to SEQ ID NO: 24473
  source 1..32: mol_type = genomic DNA

SEQ ID NO: 40637 - DNA, 33 bp, Homo sapiens; identical to SEQ ID NO: 24474
  source 1..33: mol_type = genomic DNA

SEQ ID NO: 40638 - DNA, 34 bp, Homo sapiens; identical to SEQ ID NO: 24475
  source 1..34: mol_type = genomic DNA

SEQ ID NO: 40639 - DNA, 35 bp, Homo sapiens; identical to SEQ ID NO: 24476
  source 1..35: mol_type = genomic DNA

SEQ ID NO: 40640 - DNA, 36 bp, Homo sapiens; identical to SEQ ID NO: 24477
  source 1..36: mol_type = genomic DNA

SEQ ID NO: 40641 - DNA, 37 bp, Homo sapiens; identical to SEQ ID NO: 24478
  source 1..37: mol_type = genomic DNA

SEQ ID NO: 40642 - DNA, 38 bp, Homo sapiens; identical to SEQ ID NO: 24479
  source 1..38: mol_type = genomic DNA

SEQ ID NO: 40643 - DNA, 30 bp, Homo sapiens; identical to SEQ ID NO: 24516
  source 1..30: mol_type = genomic DNA

SEQ ID NO: 40644 - DNA, 31 bp, Homo sapiens; identical to SEQ ID NO: 24517
  source 1..31: mol_type = genomic DNA

SEQ ID NO: 40645 - DNA, 32 bp, Homo sapiens; identical to SEQ ID NO: 24518
  source 1..32: mol_type = genomic DNA

SEQ ID NO: 40646 - DNA, 34 bp, Homo sapiens; identical to SEQ ID NO: 24530
  source 1..34: mol_type = genomic DNA

SEQ ID NO: 40647 - DNA, 35 bp, Homo sapiens; identical to SEQ ID NO: 24531
  source 1..35: mol_type = genomic DNA

SEQ ID NO: 40648 - DNA, 36 bp, Homo sapiens; identical to SEQ ID NO: 24532
  source 1..36: mol_type = genomic DNA

SEQ ID NO: 40649 - DNA, 33 bp, Homo sapiens
  source 1..33: mol_type = genomic DNA
tatgaggccccgggttcgatccccggcatctcc

SEQ ID NO: 40650 - DNA, 34 bp, Homo sapiens
  source 1..34: mol_type = genomic DNA
tatgaggccccgggttcgatccccggcatctcca

SEQ ID NO: 40651 - DNA, 35 bp, Homo sapiens; identical to SEQ ID NO: 24534
  source 1..35: mol_type = genomic DNA

SEQ ID NO: 40652 - DNA, 36 bp, Homo sapiens; identical to SEQ ID NO: 24535
  source 1..36: mol_type = genomic DNA

SEQ ID NO: 40653 - DNA, 33 bp, Homo sapiens
  source 1..33: mol_type = genomic DNA
tatgaggtcccgggttcgatccccggcatctcc

SEQ ID NO: 40654 - DNA, 34 bp, Homo sapiens
  source 1..34: mol_type = genomic DNA
tatgaggtcccgggttcgatccccggcatctcca

SEQ ID NO: 40655 - DNA, 35 bp, Homo sapiens; identical to SEQ ID NO: 24537
  source 1..35: mol_type = genomic DNA

SEQ ID NO: 40656 - DNA, 36 bp, Homo sapiens; identical to SEQ ID NO: 24538
  source 1..36: mol_type = genomic DNA

SEQ ID NO: 40657 - DNA, 21 bp, Homo sapiens
  source 1..21: mol_type = genomic DNA
tatgattctcggtttgggtcc

SEQ ID NO: 40658 - DNA, 25 bp, Homo sapiens
  source 1..25: mol_type = genomic DNA
tatgattctcggtttgggtccgaga

SEQ ID NO: 40659 - DNA, 24 bp, Homo sapiens
  source 1..24: mol_type = genomic DNA
tatggtctagcggttaggattcct

SEQ ID NO: 40660 - DNA, 27 bp, Homo sapiens
  source 1..27: mol_type = genomic DNA
tatggtctagcggttaggattcctggt

SEQ ID NO: 40661 - DNA, 28 bp, Homo sapiens
  source 1..28: mol_type = genomic DNA
tatggtctagcggttaggattcctggtt

SEQ ID NO: 40662 - DNA, 29 bp, Homo sapiens
  source 1..29: mol_type = genomic DNA
tatggtctagcggttaggattcctggttt

SEQ ID NO: 40663 - DNA, 30 bp, Homo sapiens; identical to SEQ ID NO: 24572
  source 1..30: mol_type = genomic DNA

SEQ ID NO: 40664 - DNA, 32 bp, Homo sapiens
  source 1..32: mol_type = genomic DNA
tatggtctagcggttaggattcctggttttca

SEQ ID NO: 40665 - DNA, 16 bp, Homo sapiens
  source 1..16: mol_type = genomic DNA
tatgtccgcgtgggtt

SEQ ID NO: 40666 - DNA, 44 bp, Homo sapiens; identical to SEQ ID NO: 24603
  source 1..44: mol_type = genomic DNA

SEQ ID NO: 40667 - DNA, 45 bp, Homo sapiens; identical to SEQ ID NO: 24604
  source 1..45: mol_type = genomic DNA

SEQ ID NO: 40668 - DNA, 46 bp, Homo sapiens; identical to SEQ ID NO: 24605
  source 1..46: mol_type = genomic DNA

SEQ ID NO: 40669 - DNA, 47 bp, Homo sapiens; identical to SEQ ID NO: 24606
  source 1..47: mol_type = genomic DNA

SEQ ID NO: 40670 - DNA, 16 bp, Homo sapiens
  source 1..16: mol_type = genomic DNA
tcaaacctgccggggc

SEQ ID NO: 40671 - DNA, 17 bp, Homo sapiens
  source 1..17: mol_type = genomic DNA
tcaaacctgccggggct

SEQ ID NO: 40672 - DNA, 18 bp, Homo sapiens
  source 1..18: mol_type = genomic DNA
tcaaacctgccggggctt

SEQ ID NO: 40673 - DNA, 20 bp, Homo sapiens
  source 1..20: mol_type = genomic DNA
tcaaacctgccggggcttcc

SEQ ID NO: 40674 - DNA, 21 bp, Homo sapiens
  source 1..21: mol_type = genomic DNA
tcaaacctgccggggcttcca

SEQ ID NO: 40675 - DNA, 34 bp, Homo sapiens; identical to SEQ ID NO: 24625
  source 1..34: mol_type = genomic DNA

SEQ ID NO: 40676 - DNA, 35 bp, Homo sapiens; identical to SEQ ID NO: 24626
  source 1..35: mol_type = genomic DNA

SEQ ID NO: 40677 - DNA, 36 bp, Homo sapiens; identical to SEQ ID NO: 24627
  source 1..36: mol_type = genomic DNA

SEQ ID NO: 40678 - DNA, 37 bp, Homo sapiens; identical to SEQ ID NO: 24628
  source 1..37: mol_type = genomic DNA

SEQ ID NO: 40679 - DNA, 32 bp, Homo sapiens; identical to SEQ ID NO: 24640
  source 1..32: mol_type = genomic DNA

SEQ ID NO: 40680 - DNA, 33 bp, Homo sapiens; identical to SEQ ID NO: 24641
  source 1..33: mol_type = genomic DNA

SEQ ID NO: 40681 - DNA, 34 bp, Homo sapiens; identical to SEQ ID NO: 24642
  source 1..34: mol_type = genomic DNA

SEQ ID NO: 40682 - DNA, 35 bp, Homo sapiens; identical to SEQ ID NO: 24643
  source 1..35: mol_type = genomic DNA

SEQ ID NO: 40683 - DNA, 36 bp, Homo sapiens; identical to SEQ ID NO: 24644
  source 1..36: mol_type = genomic DNA

SEQ ID NO: 40684 - DNA, 37 bp, Homo sapiens; identical to SEQ ID NO: 24645
  source 1..37: mol_type = genomic DNA

SEQ ID NO: 40685 - DNA, 33 bp, Homo sapiens
  source 1..33: mol_type = genomic DNA
tcaaaggttgtgggttcgaatcccaccagagtc

SEQ ID NO: 40686 - DNA, 34 bp, Homo sapiens
  source 1..34: mol_type = genomic DNA
tcaaaggttgtgggttcgaatcccaccagagtcg

SEQ ID NO: 40687 - DNA, 35 bp, Homo sapiens; identical to SEQ ID NO: 24646
  source 1..35: mol_type = genomic DNA

SEQ ID NO: 40688 - DNA, 36 bp, Homo sapiens; identical to SEQ ID NO: 24647
  source 1..36: mol_type = genomic DNA

SEQ ID NO: 40689 - DNA, 37 bp, Homo sapiens; identical to SEQ ID NO: 24648
  source 1..37: mol_type = genomic DNA

SEQ ID NO: 40690 - DNA, 33 bp, Homo sapiens
  source 1..33: mol_type = genomic DNA
tcaaaggttgtgggttcgagtcccaccagagtc

SEQ ID NO: 40691 - DNA, 34 bp, Homo sapiens
  source 1..34: mol_type = genomic DNA
tcaaaggttgtgggttcgagtcccaccagagtcg

SEQ ID NO: 40692 - DNA, 35 bp, Homo sapiens; identical to SEQ ID NO: 24649
  source 1..35: mol_type = genomic DNA

SEQ ID NO: 40693 - DNA, 36 bp, Homo sapiens; identical to SEQ ID NO: 24650
  source 1..36: mol_type = genomic DNA

SEQ ID NO: 40694 - DNA, 37 bp, Homo sapiens; identical to SEQ ID NO: 24651
  source 1..37: mol_type = genomic DNA

SEQ ID NO: 40695 - DNA, 20 bp, Homo sapiens
  source 1..20: mol_type = genomic DNA
tcaaagttaaattataggct

SEQ ID NO: 40696 - DNA, 19 bp, Homo sapiens
  source 1..19: mol_type = genomic DNA
tcaaatcacgtcggggtca

SEQ ID NO: 40697 - DNA, 20 bp, Homo sapiens
  source 1..20: mol_type = genomic DNA
tcaaatcacgtcggggtcac

SEQ ID NO: 40698 - DNA, 21 bp, Homo sapiens
  source 1..21: mol_type = genomic DNA
tcaaatcacgtcggggtcacc

SEQ ID NO: 40699 - DNA, 22 bp, Homo sapiens
  source 1..22: mol_type = genomic DNA
tcaaatcacgtcggggtcacca

SEQ ID NO: 40700 - DNA, 17 bp, Homo sapiens
  source 1..17: mol_type = genomic DNA
tcaaatcccggacgagc

SEQ ID NO: 40701 - DNA, 18 bp, Homo sapiens
  source 1..18: mol_type = genomic DNA
tcaaatcccggacgagcc

SEQ ID NO: 40702 - DNA, 19 bp, Homo sapiens
  source 1..19: mol_type = genomic DNA
tcaaatcccggacgagccc

SEQ ID NO: 40703 - DNA, 20 bp, Homo sapiens
  source 1..20: mol_type = genomic DNA
tcaaatcccggacgagcccc

SEQ ID NO: 40704 - DNA, 21 bp, Homo sapiens
  source 1..21: mol_type = genomic DNA
tcaaatcccggacgagccccc

SEQ ID NO: 40705 - DNA, 22 bp, Homo sapiens
  source 1..22: mol_type = genomic DNA
tcaaatcccggacgagccccca

SEQ ID NO: 40706 - DNA, 20 bp, Homo sapiens
  source 1..20: mol_type = genomic DNA
tcaaatccgggtgccccctc

SEQ ID NO: 40707 - DNA, 21 bp, Homo sapiens
  source 1..21: mol_type = genomic DNA
tcaaatccgggtgccccctcc

SEQ ID NO: 40708 - DNA, 18 bp, Homo sapiens
  source 1..18: mol_type = genomic DNA
tcaaatctcgctggggcc

SEQ ID NO: 40709 - DNA, 19 bp, Homo sapiens
  source 1..19: mol_type = genomic DNA
tcaaatctcgctggggcct

SEQ ID NO: 40710 - DNA, 20 bp, Homo sapiens
  source 1..20: mol_type = genomic DNA
tcaaatctcgctggggcctc

SEQ ID NO: 40711 - DNA, 21 bp, Homo sapiens
  source 1..21: mol_type = genomic DNA
tcaaatctcgctggggcctcc

SEQ ID NO: 40712 - DNA, 18 bp, Homo sapiens
  source 1..18: mol_type = genomic DNA
tcaaatctcggtggaacc

SEQ ID NO: 40713 - DNA, 19 bp, Homo sapiens
  source 1..19: mol_type = genomic DNA
tcaaatctcggtggaacct

SEQ ID NO: 40714 - DNA, 20 bp, Homo sapiens
  source 1..20: mol_type = genomic DNA
tcaaatctcggtggaacctc

SEQ ID NO: 40715 - DNA, 21 bp, Homo sapiens
  source 1..21: mol_type = genomic DNA
tcaaatctcggtggaacctcc

SEQ ID NO: 40716 - DNA, 22 bp, Homo sapiens
  source 1..22: mol_type = genomic DNA
tcaaatctcggtggaacctcca

SEQ ID NO: 40717 - DNA, 19 bp, Homo sapiens
  source 1..19: mol_type = genomic DNA
tcaaatctcggtgggacct

SEQ ID NO: 40718 - DNA, 20 bp, Homo sapiens
  source 1..20: mol_type = genomic DNA
tcaaatctcggtgggacctc

SEQ ID NO: 40719 - DNA, 21 bp, Homo sapiens
  source 1..21: mol_type = genomic DNA
tcaaatctcggtgggacctcc

SEQ ID NO: 40720 - DNA, 20 bp, Homo sapiens
  source 1..20: mol_type = genomic DNA
tcaacttaacttgaccgctc

SEQ ID NO: 40721 - DNA, 22 bp, Homo sapiens
  source 1..22: mol_type = genomic DNA
tcaacttaacttgaccgctctg

SEQ ID NO: 40722 - DNA, 23 bp, Homo sapiens
  source 1..23: mol_type = genomic DNA
tcaacttaacttgaccgctctga

SEQ ID NO: 40723 - DNA, 24 bp, Homo sapiens
  source 1..24: mol_type = genomic DNA
tcaacttaacttgaccgctctgac

SEQ ID NO: 40724 - DNA, 25 bp, Homo sapiens
  source 1..25: mol_type = genomic DNA
tcaacttaacttgaccgctctgacc

SEQ ID NO: 40725 - DNA, 26 bp, Homo sapiens
  source 1..26: mol_type = genomic DNA
tcaacttaacttgaccgctctgacca

SEQ ID NO: 40726 - DNA, 32 bp, Homo sapiens
  source 1..32: mol_type = genomic DNA
tcaagaggtccccggttcaaatccgggtgccc

SEQ ID NO: 40727 - DNA, 33 bp, Homo sapiens
  source 1..33: mol_type = genomic DNA
tcaagaggtccccggttcaaatccgggtgcccc

SEQ ID NO: 40728 - DNA, 34 bp, Homo sapiens
  source 1..34: mol_type = genomic DNA
tcaagaggtccccggttcaaatccgggtgccccc

SEQ ID NO: 40729 - DNA, 35 bp, Homo sapiens
  source 1..35: mol_type = genomic DNA
tcaagaggtccccggttcaaatccgggtgcccccc

SEQ ID NO: 40730 - DNA, 35 bp, Homo sapiens; identical to SEQ ID NO: 24715
  source 1..35: mol_type = genomic DNA

SEQ ID NO: 40731 - DNA, 36 bp, Homo sapiens; identical to SEQ ID NO: 24716
  source 1..36: mol_type = genomic DNA

SEQ ID NO: 40732 - DNA, 37 bp, Homo sapiens; identical to SEQ ID NO: 24717
  source 1..37: mol_type = genomic DNA

SEQ ID NO: 40733 - DNA, 35 bp, Homo sapiens; identical to SEQ ID NO: 24719
  source 1..35: mol_type = genomic DNA

SEQ ID NO: 40734 - DNA, 36 bp, Homo sapiens; identical to SEQ ID NO: 24720
  source 1..36: mol_type = genomic DNA

SEQ ID NO: 40735 - DNA, 37 bp, Homo sapiens; identical to SEQ ID NO: 24721
  source 1..37: mol_type = genomic DNA

SEQ ID NO: 40736 - DNA, 34 bp, Homo sapiens
  source 1..34: mol_type = genomic DNA
tcaagaggtccctggttcaaatccgggtgccccc

SEQ ID NO: 40737 - DNA, 35 bp, Homo sapiens; identical to SEQ ID NO: 24722
  source 1..35: mol_type = genomic DNA

SEQ ID NO: 40738 - DNA, 36 bp, Homo sapiens; identical to SEQ ID NO: 24723
  source 1..36: mol_type = genomic DNA

SEQ ID NO: 40739 - DNA, 37 bp, Homo sapiens; identical to SEQ ID NO: 24724
  source 1..37: mol_type = genomic DNA

SEQ ID NO: 40740 - DNA, 19 bp, Homo sapiens
  source 1..19: mol_type = genomic DNA
tcaagtcacgtcggggtca

SEQ ID NO: 40741 - DNA, 20 bp, Homo sapiens
  source 1..20: mol_type = genomic DNA
tcaagtcacgtcggggtcac

SEQ ID NO: 40742 - DNA, 21 bp, Homo sapiens
  source 1..21: mol_type = genomic DNA
tcaagtcacgtcggggtcacc

SEQ ID NO: 40743 - DNA, 21 bp, Homo sapiens
  source 1..21: mol_type = genomic DNA
tcaagtccctgtccaggcgcc

SEQ ID NO: 40744 - DNA, 18 bp, Homo sapiens
  source 1..18: mol_type = genomic DNA
tcaagtccctgttcgggc

SEQ ID NO: 40745 - DNA, 19 bp, Homo sapiens
  source 1..19: mol_type = genomic DNA
tcaagtccctgttcgggcg

SEQ ID NO: 40746 - DNA, 20 bp, Homo sapiens
  source 1..20: mol_type = genomic DNA
tcaagtccctgttcgggcgc

SEQ ID NO: 40747 - DNA, 21 bp, Homo sapiens
  source 1..21: mol_type = genomic DNA
tcaagtccctgttcgggcgcc

SEQ ID NO: 40748 - DNA, 22 bp, Homo sapiens
  source 1..22: mol_type = genomic DNA
tcaagtccctgttcgggcgcca

SEQ ID NO: 40749 - DNA, 21 bp, Homo sapiens
  source 1..21: mol_type = genomic DNA
tcaatccccggcacctccacc

SEQ ID NO: 40750 - DNA, 22 bp, Homo sapiens
  source 1..22: mol_type = genomic DNA
tcaatccccggcacctccacca

SEQ ID NO: 40751 - DNA, 21 bp, Homo sapiens
  source 1..21: mol_type = genomic DNA
tcaatccccggcatctccacc

SEQ ID NO: 40752 - DNA, 20 bp, Homo sapiens
  source 1..20: mol_type = genomic DNA
tcaatcccgggtttcggcac

SEQ ID NO: 40753 - DNA, 20 bp, Homo sapiens
  source 1..20: mol_type = genomic DNA
tcaattccccgacggggagc

SEQ ID NO: 40754 - DNA, 21 bp, Homo sapiens
  source 1..21: mol_type = genomic DNA
tcaattccccgacggggagcc

SEQ ID NO: 40755 - DNA, 20 bp, Homo sapiens
  source 1..20: mol_type = genomic DNA
tcaattctcgctggggcctc

SEQ ID NO: 40756 - DNA, 17 bp, Homo sapiens
  source 1..17: mol_type = genomic DNA
tcacaagaactgctaac

SEQ ID NO: 40757 - DNA, 18 bp, Homo sapiens
  source 1..18: mol_type = genomic DNA
tcacaagaactgctaact

SEQ ID NO: 40758 - DNA, 27 bp, Homo sapiens
  source 1..27: mol_type = genomic DNA
tcacaagaactgctaactcatgccccc

SEQ ID NO: 40759 - DNA, 40 bp, Homo sapiens; identical to SEQ ID NO: 24777
  source 1..40: mol_type = genomic DNA

SEQ ID NO: 40760 - DNA, 45 bp, Homo sapiens; identical to SEQ ID NO: 24782
  source 1..45: mol_type = genomic DNA

SEQ ID NO: 40761 - DNA, 21 bp, Homo sapiens
  source 1..21: mol_type = genomic DNA
tcacatcaccccataaacacc

SEQ ID NO: 40762 - DNA, 16 bp, Homo sapiens
  source 1..16: mol_type = genomic DNA
tcacccaggcggcccg

SEQ ID NO: 40763 - DNA, 35 bp, Homo sapiens; identical to SEQ ID NO: 24801
  source 1..35: mol_type = genomic DNA

SEQ ID NO: 40764 - DNA, 36 bp, Homo sapiens; identical to SEQ ID NO: 24802
  source 1..36: mol_type = genomic DNA

SEQ ID NO: 40765 - DNA, 37 bp, Homo sapiens; identical to SEQ ID NO: 24803
  source 1..37: mol_type = genomic DNA

SEQ ID NO: 40766 - DNA, 38 bp, Homo sapiens; identical to SEQ ID NO: 24804
  source 1..38: mol_type = genomic DNA

SEQ ID NO: 40767 - DNA, 39 bp, Homo sapiens; identical to SEQ ID NO: 24805
  source 1..39: mol_type = genomic DNA

SEQ ID NO: 40768 - DNA, 40 bp, Homo sapiens; identical to SEQ ID NO: 24806
  source 1..40: mol_type = genomic DNA

SEQ ID NO: 40769 - DNA, 41 bp, Homo sapiens; identical to SEQ ID NO: 24807
  source 1..41: mol_type = genomic DNA

SEQ ID NO: 40770 - DNA, 38 bp, Homo sapiens; identical to SEQ ID NO: 24808
  source 1..38: mol_type = genomic DNA

SEQ ID NO: 40771 - DNA, 39 bp, Homo sapiens; identical to SEQ ID NO: 24809
  source 1..39: mol_type = genomic DNA

SEQ ID NO: 40772 - DNA, 40 bp, Homo sapiens; identical to SEQ ID NO: 24810
  source 1..40: mol_type = genomic DNA

SEQ ID NO: 40773 - DNA, 16 bp, Homo sapiens
  source 1..16: mol_type = genomic DNA
tcaccccataaacacc

SEQ ID NO: 40774 - DNA, 20 bp, Homo sapiens
  source 1..20: mol_type = genomic DNA
tcaccgccgcggcccgggtt

SEQ ID NO: 40775 - DNA, 36 bp, Homo sapiens; identical to SEQ ID NO: 24829
  source 1..36: mol_type = genomic DNA

SEQ ID NO: 40776 - DNA, 38 bp, Homo sapiens; identical to SEQ ID NO: 24831
  source 1..38: mol_type = genomic DNA

SEQ ID NO: 40777 - DNA, 39 bp, Homo sapiens; identical to SEQ ID NO: 24832
  source 1..39: mol_type = genomic DNA

SEQ ID NO: 40778 - DNA, 40 bp, Homo sapiens; identical to SEQ ID NO: 24833
  source 1..40: mol_type = genomic DNA

SEQ ID NO: 40779 - DNA, 41 bp, Homo sapiens; identical to SEQ ID NO: 24834
  source 1..41: mol_type = genomic DNA

SEQ ID NO: 40780 - DNA, 39 bp, Homo sapiens; identical to SEQ ID NO: 24845
  source 1..39: mol_type = genomic DNA

SEQ ID NO: 40781 - DNA, 40 bp, Homo sapiens; identical to SEQ ID NO: 24846
  source 1..40: mol_type = genomic DNA

SEQ ID NO: 40782 - DNA, 41 bp, Homo sapiens; identical to SEQ ID NO: 24847
  source 1..41: mol_type = genomic DNA

SEQ ID NO: 40783 - DNA, 36 bp, Homo sapiens; identical to SEQ ID NO: 24856
  source 1..36: mol_type = genomic DNA

SEQ ID NO: 40784 - DNA, 37 bp, Homo sapiens; identical to SEQ ID NO: 24857
  source 1..37: mol_type = genomic DNA

SEQ ID NO: 40785 - DNA, 38 bp, Homo sapiens; identical to SEQ ID NO: 24858
  source 1..38: mol_type = genomic DNA

SEQ ID NO: 40786 - DNA, 39 bp, Homo sapiens; identical to SEQ ID NO: 24859
  source 1..39: mol_type = genomic DNA

SEQ ID NO: 40787 - DNA, 40 bp, Homo sapiens; identical to SEQ ID NO: 24860
  source 1..40: mol_type = genomic DNA

SEQ ID NO: 40788 - DNA, 41 bp, Homo sapiens; identical to SEQ ID NO: 24861
  source 1..41: mol_type = genomic DNA

SEQ ID NO: 40789 - DNA, 27 bp, Homo sapiens
  source 1..27: mol_type = genomic DNA
tcacgggttcgaaccccgtccgtgcct

SEQ ID NO: 40790 - DNA, 16 bp, Homo sapiens
  source 1..16: mol_type = genomic DNA
tcacgtcggggtcacc

SEQ ID NO: 40791 - DNA, 17 bp, Homo sapiens
  source 1..17: mol_type = genomic DNA
tcacgtcggggtcacca

SEQ ID NO: 40792 - DNA, 18 bp, Homo sapiens
  source 1..18: mol_type = genomic DNA
tcacgtctgctttacacg

SEQ ID NO: 40793 - DNA, 18 bp, Homo sapiens
  source 1..18: mol_type = genomic DNA
tcagaagattccaggttc

SEQ ID NO: 40794 - DNA, 33 bp, Homo sapiens; identical to SEQ ID NO: 24877
  source 1..33: mol_type = genomic DNA

SEQ ID NO: 40795 - DNA, 34 bp, Homo sapiens; identical to SEQ ID NO: 24878
  source 1..34: mol_type = genomic DNA

SEQ ID NO: 40796 - DNA, 35 bp, Homo sapiens; identical to SEQ ID NO: 24879
  source 1..35: mol_type = genomic DNA

SEQ ID NO: 40797 - DNA, 36 bp, Homo sapiens; identical to SEQ ID NO: 24880
  source 1..36: mol_type = genomic DNA

SEQ ID NO: 40798 - DNA, 37 bp, Homo sapiens; identical to SEQ ID NO: 24881
  source 1..37: mol_type = genomic DNA

SEQ ID NO: 40799 - DNA, 38 bp, Homo sapiens; identical to SEQ ID NO: 24882
  source 1..38: mol_type = genomic DNA

SEQ ID NO: 40800 - DNA, 18 bp, Homo sapiens
  source 1..18: mol_type = genomic DNA
tcagaagattctaggttc

SEQ ID NO: 40801 - DNA, 22 bp, Homo sapiens
  source 1..22: mol_type = genomic DNA
tcagaagattctaggttcgact

SEQ ID NO: 40802 - DNA, 34 bp, Homo sapiens; identical to SEQ ID NO: 24889
  source 1..34: mol_type = genomic DNA

SEQ ID NO: 40803 - DNA, 35 bp, Homo sapiens; identical to SEQ ID NO: 24890
  source 1..35: mol_type = genomic DNA

SEQ ID NO: 40804 - DNA, 36 bp, Homo sapiens; identical to SEQ ID NO: 24891
  source 1..36: mol_type = genomic DNA

SEQ ID NO: 40805 - DNA, 37 bp, Homo sapiens; identical to SEQ ID NO: 24892
  source 1..37: mol_type = genomic DNA

SEQ ID NO: 40806 - DNA, 38 bp, Homo sapiens; identical to SEQ ID NO: 24893
  source 1..38: mol_type = genomic DNA

SEQ ID NO: 40807 - DNA, 18 bp, Homo sapiens
  source 1..18: mol_type = genomic DNA
tcagaagattgagggttc

SEQ ID NO: 40808 - DNA, 29 bp, Homo sapiens
  source 1..29: mol_type = genomic DNA
tcagaagattgagggttcgaatccctccg

SEQ ID NO: 40809 - DNA, 33 bp, Homo sapiens; identical to SEQ ID NO: 24897
  source 1..33: mol_type = genomic DNA

SEQ ID NO: 40810 - DNA, 34 bp, Homo sapiens
  source 1..34: mol_type = genomic DNA
tcagaagattgagggttcgaatccctccgtggtt

SEQ ID NO: 40811 - DNA, 35 bp, Homo sapiens; identical to SEQ ID NO: 24898
  source 1..35: mol_type = genomic DNA

SEQ ID NO: 40812 - DNA, 36 bp, Homo sapiens; identical to SEQ ID NO: 24899
  source 1..36: mol_type = genomic DNA

SEQ ID NO: 40813 - DNA, 37 bp, Homo sapiens; identical to SEQ ID NO: 24900
  source 1..37: mol_type = genomic DNA

SEQ ID NO: 40814 - DNA, 29 bp, Homo sapiens
  source 1..29: mol_type = genomic DNA
tcagaagattgagggttcgaatcccttcg

SEQ ID NO: 40815 - DNA, 32 bp, Homo sapiens
  source 1..32: mol_type = genomic DNA
tcagaagattgagggttcgaatcccttcgtgg

SEQ ID NO: 40816 - DNA, 33 bp, Homo sapiens
  source 1..33: mol_type = genomic DNA
tcagaagattgagggttcgaatcccttcgtggt

SEQ ID NO: 40817 - DNA, 35 bp, Homo sapiens; identical to SEQ ID NO: 24901
  source 1..35: mol_type = genomic DNA

SEQ ID NO: 40818 - DNA, 36 bp, Homo sapiens; identical to SEQ ID NO: 24902
  source 1..36: mol_type = genomic DNA

SEQ ID NO: 40819 - DNA, 37 bp, Homo sapiens; identical to SEQ ID NO: 24903
  source 1..37: mol_type = genomic DNA

SEQ ID NO: 40820 - DNA, 35 bp, Homo sapiens; identical to SEQ ID NO: 24904
  source 1..35: mol_type = genomic DNA

SEQ ID NO: 40821 - DNA, 36 bp, Homo sapiens; identical to SEQ ID NO: 24905
  source 1..36: mol_type = genomic DNA

SEQ ID NO: 40822 - DNA, 37 bp, Homo sapiens; identical to SEQ ID NO: 24906
  source 1..37: mol_type = genomic DNA

SEQ ID NO: 40823 - DNA, 38 bp, Homo sapiens; identical to SEQ ID NO: 24907
  source 1..38: mol_type = genomic DNA

SEQ ID NO: 40824 - DNA, 28 bp, Homo sapiens
  source 1..28: mol_type = genomic DNA
tcagaagattgagggttcgagtcccttc

SEQ ID NO: 40825 - DNA, 29 bp, Homo sapiens
  source 1..29: mol_type = genomic DNA
tcagaagattgagggttcgagtcccttcg

SEQ ID NO: 40826 - DNA, 33 bp, Homo sapiens
  source 1..33: mol_type = genomic DNA
tcagaagattgagggttcgagtcccttcgtggt

SEQ ID NO: 40827 - DNA, 34 bp, Homo sapiens; identical to SEQ ID NO: 24909
  source 1..34: mol_type = genomic DNA

SEQ ID NO: 40828 - DNA, 35 bp, Homo sapiens; identical to SEQ ID NO: 24910
  source 1..35: mol_type = genomic DNA

SEQ ID NO: 40829 - DNA, 36 bp, Homo sapiens; identical to SEQ ID NO: 24911
  source 1..36: mol_type = genomic DNA

SEQ ID NO: 40830 - DNA, 37 bp, Homo sapiens; identical to SEQ ID NO: 24912
  source 1..37: mol_type = genomic DNA

SEQ ID NO: 40831 - DNA, 38 bp, Homo sapiens; identical to SEQ ID NO: 24913
  source 1..38: mol_type = genomic DNA

SEQ ID NO: 40832 - DNA, 18 bp, Homo sapiens
  source 1..18: mol_type = genomic DNA
tcagaagattgcaggttc

SEQ ID NO: 40833 - DNA, 32 bp, Homo sapiens
  source 1..32: mol_type = genomic DNA
tcagaagattgcaggttcgagtcctgccgcgg

SEQ ID NO: 40834 - DNA, 33 bp, Homo sapiens; identical to SEQ ID NO: 24919
  source 1..33: mol_type = genomic DNA

SEQ ID NO: 40835 - DNA, 34 bp, Homo sapiens; identical to SEQ ID NO: 24920
  source 1..34: mol_type = genomic DNA

SEQ ID NO: 40836 - DNA, 35 bp, Homo sapiens; identical to SEQ ID NO: 24921
  source 1..35: mol_type = genomic DNA

SEQ ID NO: 40837 - DNA, 36 bp, Homo sapiens; identical to SEQ ID NO: 24922
  source 1..36: mol_type = genomic DNA

SEQ ID NO: 40838 - DNA, 37 bp, Homo sapiens; identical to SEQ ID NO: 24923
  source 1..37: mol_type = genomic DNA

SEQ ID NO: 40839 - DNA, 38 bp, Homo sapiens; identical to SEQ ID NO: 24924
  source 1..38: mol_type = genomic DNA

SEQ ID NO: 40840 - DNA, 18 bp, Homo sapiens
  source 1..18: mol_type = genomic DNA
tcagaaggctgcgtgttc

SEQ ID NO: 40841 - DNA, 32 bp, Homo sapiens; identical to SEQ ID NO: 24937
  source 1..32: mol_type = genomic DNA

SEQ ID NO: 40842 - DNA, 33 bp, Homo sapiens; identical to SEQ ID NO: 24938
  source 1..33: mol_type = genomic DNA

SEQ ID NO: 40843 - DNA, 34 bp, Homo sapiens; identical to SEQ ID NO: 24939
  source 1..34: mol_type = genomic DNA

SEQ ID NO: 40844 - DNA, 35 bp, Homo sapiens; identical to SEQ ID NO: 24940
  source 1..35: mol_type = genomic DNA

SEQ ID NO: 40845 - DNA, 36 bp, Homo sapiens; identical to SEQ ID NO: 24941
  source 1..36: mol_type = genomic DNA

SEQ ID NO: 40846 - DNA, 37 bp, Homo sapiens; identical to SEQ ID NO: 24942
  source 1..37: mol_type = genomic DNA

SEQ ID NO: 40847 - DNA, 38 bp, Homo sapiens; identical to SEQ ID NO: 24943
  source 1..38: mol_type = genomic DNA

SEQ ID NO: 40848 - DNA, 28 bp, Homo sapiens
  source 1..28: mol_type = genomic DNA
tcagaaggttgcgtgttcaaatcacgtc

SEQ ID NO: 40849 - DNA, 32 bp, Homo sapiens
  source 1..32: mol_type = genomic DNA
tcagaaggttgcgtgttcaaatcacgtcgggg

SEQ ID NO: 40850 - DNA, 33 bp, Homo sapiens; identical to SEQ ID NO: 24951
  source 1..33: mol_type = genomic DNA

SEQ ID NO: 40851 - DNA, 34 bp, Homo sapiens; identical to SEQ ID NO: 24952
  source 1..34: mol_type = genomic DNA

SEQ ID NO: 40852 - DNA, 35 bp, Homo sapiens; identical to SEQ ID NO: 24953
  source 1..35: mol_type = genomic DNA

SEQ ID NO: 40853 - DNA, 36 bp, Homo sapiens; identical to SEQ ID NO: 24954
  source 1..36: mol_type = genomic DNA

SEQ ID NO: 40854 - DNA, 37 bp, Homo sapiens; identical to SEQ ID NO: 24955
  source 1..37: mol_type = genomic DNA

SEQ ID NO: 40855 - DNA, 38 bp, Homo sapiens; identical to SEQ ID NO: 24956
  source 1..38: mol_type = genomic DNA

SEQ ID NO: 40856 - DNA, 33 bp, Homo sapiens; identical to SEQ ID NO: 24961
  source 1..33: mol_type = genomic DNA

SEQ ID NO: 40857 - DNA, 34 bp, Homo sapiens; identical to SEQ ID NO: 24962
  source 1..34: mol_type = genomic DNA

SEQ ID NO: 40858 - DNA, 35 bp, Homo sapiens; identical to SEQ ID NO: 24963
  source 1..35: mol_type = genomic DNA

SEQ ID NO: 40859 - DNA, 36 bp, Homo sapiens; identical to SEQ ID NO: 24964
  source 1..36: mol_type = genomic DNA

SEQ ID NO: 40860 - DNA, 37 bp, Homo sapiens; identical to SEQ ID NO: 24965
  source 1..37: mol_type = genomic DNA

SEQ ID NO: 40861 - DNA, 38 bp, Homo sapiens; identical to SEQ ID NO: 24966
  source 1..38: mol_type = genomic DNA

SEQ ID NO: 40862 - DNA, 27 bp, Homo sapiens
  source 1..27: mol_type = genomic DNA
tcagattgtgaatctgacaacagaggc

SEQ ID NO: 40863 - DNA, 28 bp, Homo sapiens
  source 1..28: mol_type = genomic DNA
tcagattgtgaatctgacaacagaggct

SEQ ID NO: 40864 - DNA, 36 bp, Homo sapiens; identical to SEQ ID NO: 24984
  source 1..36: mol_type = genomic DNA

SEQ ID NO: 40865 - DNA, 38 bp, Homo sapiens; identical to SEQ ID NO: 24986
  source 1..38: mol_type = genomic DNA

SEQ ID NO: 40866 - DNA, 24 bp, Homo sapiens
  source 1..24: mol_type = genomic DNA
tcagcctccggagctggggattgt

SEQ ID NO: 40867 - DNA, 21 bp, Homo sapiens
  source 1..21: mol_type = genomic DNA
tcagctaaataagctatcggg

SEQ ID NO: 40868 - DNA, 25 bp, Homo sapiens
  source 1..25: mol_type = genomic DNA
tcagctaaataagctatcgggccca

SEQ ID NO: 40869 - DNA, 16 bp, Homo sapiens
  source 1..16: mol_type = genomic DNA
tcaggatggccgagcg

SEQ ID NO: 40870 - DNA, 17 bp, Homo sapiens
  source 1..17: mol_type = genomic DNA
tcaggatggccgagcgg

SEQ ID NO: 40871 - DNA, 21 bp, Homo sapiens
  source 1..21: mol_type = genomic DNA
tcaggatggccgagcggtcta

SEQ ID NO: 40872 - DNA, 23 bp, Homo sapiens
  source 1..23: mol_type = genomic DNA
tcaggatggccgagcggtctaag

SEQ ID NO: 40873 - DNA, 33 bp, Homo sapiens; identical to SEQ ID NO: 25029
  source 1..33: mol_type = genomic DNA

SEQ ID NO: 40874 - DNA, 16 bp, Homo sapiens
  source 1..16: mol_type = genomic DNA
tcaggatggccgagtg

SEQ ID NO: 40875 - DNA, 21 bp, Homo sapiens
  source 1..21: mol_type = genomic DNA
tcaggggtagagcatttgact

SEQ ID NO: 40876 - DNA, 33 bp, Homo sapiens; identical to SEQ ID NO: 25064
  source 1..33: mol_type = genomic DNA

SEQ ID NO: 40877 - DNA, 34 bp, Homo sapiens; identical to SEQ ID NO: 25065
  source 1..34: mol_type = genomic DNA

SEQ ID NO: 40878 - DNA, 35 bp, Homo sapiens; identical to SEQ ID NO: 25066
  source 1..35: mol_type = genomic DNA

SEQ ID NO: 40879 - DNA, 27 bp, Homo sapiens
  source 1..27: mol_type = genomic DNA
tcagtaagttgcaatacttaatttctg

SEQ ID NO: 40880 - DNA, 30 bp, Homo sapiens; identical to SEQ ID NO: 25075
  source 1..30: mol_type = genomic DNA

SEQ ID NO: 40881 - DNA, 16 bp, Homo sapiens
  source 1..16: mol_type = genomic DNA
tcagtcggtagagcat

SEQ ID NO: 40882 - DNA, 17 bp, Homo sapiens
  source 1..17: mol_type = genomic DNA
tcagtcggtagagcatc

SEQ ID NO: 40883 - DNA, 18 bp, Homo sapiens
  source 1..18: mol_type = genomic DNA
tcagtcggtagagcatca

SEQ ID NO: 40884 - DNA, 20 bp, Homo sapiens
  source 1..20: mol_type = genomic DNA
tcagtcggtagagcatcaga

SEQ ID NO: 40885 - DNA, 21 bp, Homo sapiens
  source 1..21: mol_type = genomic DNA
tcagtcggtagagcatcagac

SEQ ID NO: 40886 - DNA, 22 bp, Homo sapiens
  source 1..22: mol_type = genomic DNA
tcagtcggtagagcatcagact

SEQ ID NO: 40887 - DNA, 23 bp, Homo sapiens
  source 1..23: mol_type = genomic DNA
tcagtcggtagagcatcagactt

SEQ ID NO: 40888 - DNA, 24 bp, Homo sapiens
  source 1..24: mol_type = genomic DNA
tcagtcggtagagcatcagacttt

SEQ ID NO: 40889 - DNA, 25 bp, Homo sapiens
  source 1..25: mol_type = genomic DNA
tcagtcggtagagcatcagactttt

SEQ ID NO: 40890 - DNA, 17 bp, Homo sapiens
  source 1..17: mol_type = genomic DNA
tcagtcggtagagcatg

SEQ ID NO: 40891 - DNA, 20 bp, Homo sapiens
  source 1..20: mol_type = genomic DNA
tcagtcggtagagcatgaga

SEQ ID NO: 40892 - DNA, 21 bp, Homo sapiens
  source 1..21: mol_type = genomic DNA
tcagtcggtagagcatgagac

SEQ ID NO: 40893 - DNA, 22 bp, Homo sapiens
  source 1..22: mol_type = genomic DNA
tcagtcggtagagcatgagact

SEQ ID NO: 40894 - DNA, 23 bp, Homo sapiens
  source 1..23: mol_type = genomic DNA
tcagtcggtagagcatgagactc

SEQ ID NO: 40895 - DNA, 24 bp, Homo sapiens
  source 1..24: mol_type = genomic DNA
tcagtcggtagagcatgagactct

SEQ ID NO: 40896 - DNA, 29 bp, Homo sapiens
  source 1..29: mol_type = genomic DNA
tcagtcggtagagcatgagactcttaatc

SEQ ID NO: 40897 - DNA, 30 bp, Homo sapiens; identical to SEQ ID NO: 25109
  source 1..30: mol_type = genomic DNA

SEQ ID NO: 40898 - DNA, 31 bp, Homo sapiens; identical to SEQ ID NO: 25110
  source 1..31: mol_type = genomic DNA

SEQ ID NO: 40899 - DNA, 44 bp, Homo sapiens; identical to SEQ ID NO: 25115
  source 1..44: mol_type = genomic DNA

SEQ ID NO: 40900 - DNA, 18 bp, Homo sapiens
  source 1..18: mol_type = genomic DNA
tcagtcggtagagcatgg

SEQ ID NO: 40901 - DNA, 19 bp, Homo sapiens
  source 1..19: mol_type = genomic DNA
tcagtcggtagagcatggg

SEQ ID NO: 40902 - DNA, 21 bp, Homo sapiens
  source 1..21: mol_type = genomic DNA
tcagtcggtagagcatgggac

SEQ ID NO: 40903 - DNA, 22 bp, Homo sapiens
  source 1..22: mol_type = genomic DNA
tcagtcggtagagcatgggact

SEQ ID NO: 40904 - DNA, 23 bp, Homo sapiens
  source 1..23: mol_type = genomic DNA
tcagtcggtagagcatgggactc

SEQ ID NO: 40905 - DNA, 24 bp, Homo sapiens
  source 1..24: mol_type = genomic DNA
tcagtcggtagagcatgggactct

SEQ ID NO: 40906 - DNA, 30 bp, Homo sapiens; identical to SEQ ID NO: 25126
  source 1..30: mol_type = genomic DNA

SEQ ID NO: 40907 - DNA, 31 bp, Homo sapiens; identical to SEQ ID NO: 25127
  source 1..31: mol_type = genomic DNA

SEQ ID NO: 40908 - DNA, 44 bp, Homo sapiens; identical to SEQ ID NO: 25131
  source 1..44: mol_type = genomic DNA

SEQ ID NO: 40909 - DNA, 16 bp, Homo sapiens
  source 1..16: mol_type = genomic DNA
tcagtctcataatctg

SEQ ID NO: 40910 - DNA, 17 bp, Homo sapiens
  source 1..17: mol_type = genomic DNA
tcagtggtagaattctc

SEQ ID NO: 40911 - DNA, 18 bp, Homo sapiens
  source 1..18: mol_type = genomic DNA
tcagtggtagaattctcg

SEQ ID NO: 40912 - DNA, 19 bp, Homo sapiens
  source 1..19: mol_type = genomic DNA
tcagtggtagaattctcgc

SEQ ID NO: 40913 - DNA, 20 bp, Homo sapiens
  source 1..20: mol_type = genomic DNA
tcagtggtagaattctcgcc

SEQ ID NO: 40914 - DNA, 21 bp, Homo sapiens
  source 1..21: mol_type = genomic DNA
tcagtggtagaattctcgcct

SEQ ID NO: 40915 - DNA, 25 bp, Homo sapiens
  source 1..25: mol_type = genomic DNA
tcagtggtagaattctcgcctccca

SEQ ID NO: 40916 - DNA, 22 bp, Homo sapiens
  source 1..22: mol_type = genomic DNA
tcagtggtagaattctcgcctg

SEQ ID NO: 40917 - DNA, 23 bp, Homo sapiens
  source 1..23: mol_type = genomic DNA
tcagtggtagaattctcgcctgc

SEQ ID NO: 40918 - DNA, 24 bp, Homo sapiens
  source 1..24: mol_type = genomic DNA
tcagtggtagaattctcgcctgcc

SEQ ID NO: 40919 - DNA, 25 bp, Homo sapiens
  source 1..25: mol_type = genomic DNA
tcagtggtagaattctcgcctgcca

SEQ ID NO: 40920 - DNA, 27 bp, Homo sapiens
  source 1..27: mol_type = genomic DNA
tcagtggtagaattctcgcctgccacg

SEQ ID NO: 40921 - DNA, 32 bp, Homo sapiens; identical to SEQ ID NO: 25160
  source 1..32: mol_type = genomic DNA

SEQ ID NO: 40922 - DNA, 37 bp, Homo sapiens; identical to SEQ ID NO: 25162
  source 1..37: mol_type = genomic DNA

SEQ ID NO: 40923 - DNA, 41 bp, Homo sapiens; identical to SEQ ID NO: 25166
  source 1..41: mol_type = genomic DNA

SEQ ID NO: 40924 - DNA, 21 bp, Homo sapiens
  source 1..21: mol_type = genomic DNA
tcagtggtagagcatttgact

SEQ ID NO: 40925 - DNA, 35 bp, Homo sapiens; identical to SEQ ID NO: 25235
  source 1..35: mol_type = genomic DNA

SEQ ID NO: 40926 - DNA, 36 bp, Homo sapiens; identical to SEQ ID NO: 25236
  source 1..36: mol_type = genomic DNA

SEQ ID NO: 40927 - DNA, 37 bp, Homo sapiens; identical to SEQ ID NO: 25237
  source 1..37: mol_type = genomic DNA

SEQ ID NO: 40928 - DNA, 38 bp, Homo sapiens; identical to SEQ ID NO: 25238
  source 1..38: mol_type = genomic DNA

SEQ ID NO: 40929 - DNA, 39 bp, Homo sapiens; identical to SEQ ID NO: 25239
  source 1..39: mol_type = genomic DNA

SEQ ID NO: 40930 - DNA, 40 bp, Homo sapiens; identical to SEQ ID NO: 25240
  source 1..40: mol_type = genomic DNA

SEQ ID NO: 40931 - DNA, 41 bp, Homo sapiens; identical to SEQ ID NO: 25241
  source 1..41: mol_type = genomic DNA

SEQ ID NO: 40932 - DNA, 27 bp, Homo sapiens
  source 1..27: mol_type = genomic DNA
tcatgcccccatgtctaacaacatggc

SEQ ID NO: 40933 - DNA, 28 bp, Homo sapiens
  source 1..28: mol_type = genomic DNA
tcatgcccccatgtctaacaacatggct

SEQ ID NO: 40934 - DNA, 29 bp, Homo sapiens
  source 1..29: mol_type = genomic DNA
tcatgcccccatgtctaacaacatggctt

SEQ ID NO: 40935 - DNA, 31 bp, Homo sapiens; identical to SEQ ID NO: 25268
  source 1..31: mol_type = genomic DNA

SEQ ID NO: 40936 - DNA, 33 bp, Homo sapiens; identical to SEQ ID NO: 25270
  source 1..33: mol_type = genomic DNA

SEQ ID NO: 40937 - DNA, 34 bp, Homo sapiens; identical to SEQ ID NO: 25271
  source 1..34: mol_type = genomic DNA

SEQ ID NO: 40938 - DNA, 36 bp, Homo sapiens; identical to SEQ ID NO: 25273
  source 1..36: mol_type = genomic DNA

SEQ ID NO: 40939 - DNA, 37 bp, Homo sapiens; identical to SEQ ID NO: 25274
  source 1..37: mol_type = genomic DNA

SEQ ID NO: 40940 - DNA, 21 bp, Homo sapiens
  source 1..21: mol_type = genomic DNA
tcattggtcgtggttgtagtc

SEQ ID NO: 40941 - DNA, 27 bp, Homo sapiens
  source 1..27: mol_type = genomic DNA
tcattggtcgtggttgtagtccgtgcg

SEQ ID NO: 40942 - DNA, 29 bp, Homo sapiens
  source 1..29: mol_type = genomic DNA
tcattggtcgtggttgtagtccgtgcgag

SEQ ID NO: 40943 - DNA, 30 bp, Homo sapiens; identical to SEQ ID NO: 25296
  source 1..30: mol_type = genomic DNA

SEQ ID NO: 40944 - DNA, 31 bp, Homo sapiens; identical to SEQ ID NO: 25297
  source 1..31: mol_type = genomic DNA

SEQ ID NO: 40945 - DNA, 32 bp, Homo sapiens; identical to SEQ ID NO: 25298
  source 1..32: mol_type = genomic DNA

SEQ ID NO: 40946 - DNA, 33 bp, Homo sapiens; identical to SEQ ID NO: 25299
  source 1..33: mol_type = genomic DNA

SEQ ID NO: 40947 - DNA, 34 bp, Homo sapiens; identical to SEQ ID NO: 25300
  source 1..34: mol_type = genomic DNA

SEQ ID NO: 40948 - DNA, 35 bp, Homo sapiens; identical to SEQ ID NO: 25301
  source 1..35: mol_type = genomic DNA

SEQ ID NO: 40949 - DNA, 36 bp, Homo sapiens; identical to SEQ ID NO: 25302
  source 1..36: mol_type = genomic DNA

SEQ ID NO: 40950 - DNA, 40 bp, Homo sapiens; identical to SEQ ID NO: 25305
  source 1..40: mol_type = genomic DNA

SEQ ID NO: 40951 - DNA, 37 bp, Homo sapiens
  source 1..37: mol_type = genomic DNA
tccaatggaggcgtgggttcgaatcccacttctgaca

SEQ ID NO: 40952 - DNA, 38 bp, Homo sapiens
  source 1..38: mol_type = genomic DNA
tccaatggaggcgtgggttcgaatcccacttctgacac

SEQ ID NO: 40953 - DNA, 39 bp, Homo sapiens; identical to SEQ ID NO: 25320
  source 1..39: mol_type = genomic DNA

SEQ ID NO: 40954 - DNA, 16 bp, Homo sapiens
  source 1..16: mol_type = genomic DNA
tccaatggggtttccc

SEQ ID NO: 40955 - DNA, 17 bp, Homo sapiens
  source 1..17: mol_type = genomic DNA
tccaatggggtttcccc

SEQ ID NO: 40956 - DNA, 46 bp, Homo sapiens; identical to SEQ ID NO: 25326
  source 1..46: mol_type = genomic DNA

SEQ ID NO: 40957 - DNA, 47 bp, Homo sapiens; identical to SEQ ID NO: 25327
  source 1..47: mol_type = genomic DNA

SEQ ID NO: 40958 - DNA, 35 bp, Homo sapiens; identical to SEQ ID NO: 25338
  source 1..35: mol_type = genomic DNA

SEQ ID NO: 40959 - DNA, 36 bp, Homo sapiens; identical to SEQ ID NO: 25339
  source 1..36: mol_type = genomic DNA

SEQ ID NO: 40960 - DNA, 37 bp, Homo sapiens; identical to SEQ ID NO: 25340
  source 1..37: mol_type = genomic DNA

SEQ ID NO: 40961 - DNA, 38 bp, Homo sapiens; identical to SEQ ID NO: 25341
  source 1..38: mol_type = genomic DNA

SEQ ID NO: 40962 - DNA, 43 bp, Homo sapiens
  source 1..43: mol_type = genomic DNA
tccagatcagaaggctgcgtgttcgaatcacgtcggggtcacc

SEQ ID NO: 40963 - DNA, 18 bp, Homo sapiens
  source 1..18: mol_type = genomic DNA
tccagatcagaaggttgc

SEQ ID NO: 40964 - DNA, 17 bp, Homo sapiens
  source 1..17: mol_type = genomic DNA
tccagcgatccgagttc

SEQ ID NO: 40965 - DNA, 18 bp, Homo sapiens
  source 1..18: mol_type = genomic DNA
tccagcgatccgagttca

SEQ ID NO: 40966 - DNA, 34 bp, Homo sapiens; identical to SEQ ID NO: 25349
  source 1..34: mol_type = genomic DNA

SEQ ID NO: 40967 - DNA, 35 bp, Homo sapiens; identical to SEQ ID NO: 25350
  source 1..35: mol_type = genomic DNA

SEQ ID NO: 40968 - DNA, 36 bp, Homo sapiens; identical to SEQ ID NO: 25351
  source 1..36: mol_type = genomic DNA

SEQ ID NO: 40969 - DNA, 34 bp, Homo sapiens; identical to SEQ ID NO: 25361
  source 1..34: mol_type = genomic DNA

SEQ ID NO: 40970 - DNA, 16 bp, Homo sapiens
  source 1..16: mol_type = genomic DNA
tccagctcgaaggacc

SEQ ID NO: 40971 - DNA, 26 bp, Homo sapiens
  source 1..26: mol_type = genomic DNA
tccagggttcaagtccctgttcgggc

SEQ ID NO: 40972 - DNA, 27 bp, Homo sapiens
  source 1..27: mol_type = genomic DNA
tccagggttcaagtccctgttcgggcg

SEQ ID NO: 40973 - DNA, 28 bp, Homo sapiens
  source 1..28: mol_type = genomic DNA
tccagggttcaagtccctgttcgggcgc

SEQ ID NO: 40974 - DNA, 29 bp, Homo sapiens
  source 1..29: mol_type = genomic DNA
tccagggttcaagtccctgttcgggcgcc

SEQ ID NO: 40975 - DNA, 30 bp, Homo sapiens; identical to SEQ ID NO: 25372
  source 1..30: mol_type = genomic DNA

SEQ ID NO: 40976 - DNA, 28 bp, Homo sapiens
  source 1..28: mol_type = genomic DNA
tccaggttcgactcctggctggctcgcc

SEQ ID NO: 40977 - DNA, 45 bp, Homo sapiens; identical to SEQ ID NO: 25383
  source 1..45: mol_type = genomic DNA

SEQ ID NO: 40978 - DNA, 44 bp, Homo sapiens; identical to SEQ ID NO: 25384
  source 1..44: mol_type = genomic DNA

SEQ ID NO: 40979 - DNA, 45 bp, Homo sapiens; identical to SEQ ID NO: 25385
  source 1..45: mol_type = genomic DNA

SEQ ID NO: 40980 - DNA, 45 bp, Homo sapiens
  source 1..45: mol_type = genomic DNA
tccagtctcttcgggggcgtgggttcgaatcccaccactgccacc

SEQ ID NO: 40981 - DNA, 44 bp, Homo sapiens
  source 1..44: mol_type = genomic DNA
tccagtctcttcgggggcgtgggttcgaatcccaccgctgccac

SEQ ID NO: 40982 - DNA, 45 bp, Homo sapiens; identical to SEQ ID NO: 25389
  source 1..45: mol_type = genomic DNA

SEQ ID NO: 40983 - DNA, 33 bp, Homo sapiens; identical to SEQ ID NO: 25397
  source 1..33: mol_type = genomic DNA

SEQ ID NO: 40984 - DNA, 26 bp, Homo sapiens
  source 1..26: mol_type = genomic DNA
tccatggtgtaatggttagcactctg

SEQ ID NO: 40985 - DNA, 30 bp, Homo sapiens; identical to SEQ ID NO: 25420
  source 1..30: mol_type = genomic DNA

SEQ ID NO: 40986 - DNA, 31 bp, Homo sapiens; identical to SEQ ID NO: 25421
  source 1..31: mol_type = genomic DNA

SEQ ID NO: 40987 - DNA, 32 bp, Homo sapiens; identical to SEQ ID NO: 25422
  source 1..32: mol_type = genomic DNA

SEQ ID NO: 40988 - DNA, 33 bp, Homo sapiens; identical to SEQ ID NO: 25423
  source 1..33: mol_type = genomic DNA

SEQ ID NO: 40989 - DNA, 34 bp, Homo sapiens; identical to SEQ ID NO: 25424
  source 1..34: mol_type = genomic DNA

SEQ ID NO: 40990 - DNA, 37 bp, Homo sapiens; identical to SEQ ID NO: 25426
  source 1..37: mol_type = genomic DNA

SEQ ID NO: 40991 - DNA, 38 bp, Homo sapiens; identical to SEQ ID NO: 25427
  source 1..38: mol_type = genomic DNA

SEQ ID NO: 40992 - DNA, 16 bp, Homo sapiens
  source 1..16: mol_type = genomic DNA
tccattggggtttccc

SEQ ID NO: 40993 - DNA, 17 bp, Homo sapiens
  source 1..17: mol_type = genomic DNA
tccattggggtttcccc

SEQ ID NO: 40994 - DNA, 20 bp, Homo sapiens
  source 1..20: mol_type = genomic DNA
tccattggggtttccccgcg

SEQ ID NO: 40995 - DNA, 21 bp, Homo sapiens
  source 1..21: mol_type = genomic DNA
tccattggggtttccccgcgc

SEQ ID NO: 40996 - DNA, 22 bp, Homo sapiens
  source 1..22: mol_type = genomic DNA
tccattggggtttccccgcgca

SEQ ID NO: 40997 - DNA, 23 bp, Homo sapiens
  source 1..23: mol_type = genomic DNA
tccattggggtttccccgcgcag

SEQ ID NO: 40998 - DNA, 24 bp, Homo sapiens
  source 1..24: mol_type = genomic DNA
tccattggggtttccccgcgcagg

SEQ ID NO: 40999 - DNA, 25 bp, Homo sapiens
  source 1..25: mol_type = genomic DNA
tccattggggtttccccgcgcaggt

SEQ ID NO: 41000 - DNA, 26 bp, Homo sapiens
  source 1..26: mol_type = genomic DNA
tccattggggtttccccgcgcaggtt

SEQ ID NO: 41001 - DNA, 35 bp, Homo sapiens; identical to SEQ ID NO: 25438
  source 1..35: mol_type = genomic DNA

SEQ ID NO: 41002 - DNA, 45 bp, Homo sapiens
  source 1..45: mol_type = genomic DNA
tccattggggtttccccgcgcaggttcgaatcctgccgactacgc

SEQ ID NO: 41003 - DNA, 46 bp, Homo sapiens; identical to SEQ ID NO: 25444
  source 1..46: mol_type = genomic DNA

SEQ ID NO: 41004 - DNA, 47 bp, Homo sapiens; identical to SEQ ID NO: 25445
  source 1..47: mol_type = genomic DNA

SEQ ID NO: 41005 - DNA, 46 bp, Homo sapiens; identical to SEQ ID NO: 25461
  source 1..46: mol_type = genomic DNA

SEQ ID NO: 41006 - DNA, 47 bp, Homo sapiens; identical to SEQ ID NO: 25462
  source 1..47: mol_type = genomic DNA

SEQ ID NO: 41007 - DNA, 16 bp, Homo sapiens
  source 1..16: mol_type = genomic DNA
tcccacatggtctagc

SEQ ID NO: 41008 - DNA, 17 bp, Homo sapiens
  source 1..17: mol_type = genomic DNA
tcccacatggtctagcg

SEQ ID NO: 41009 - DNA, 18 bp, Homo sapiens
  source 1..18: mol_type = genomic DNA
tcccacatggtctagcgg

SEQ ID NO: 41010 - DNA, 19 bp, Homo sapiens
  source 1..19: mol_type = genomic DNA
tcccacatggtctagcggt

SEQ ID NO: 41011 - DNA, 20 bp, Homo sapiens
  source 1..20: mol_type = genomic DNA
tcccacatggtctagcggtt

SEQ ID NO: 41012 - DNA, 22 bp, Homo sapiens
  source 1..22: mol_type = genomic DNA
tcccacatggtctagcggttag

SEQ ID NO: 41013 - DNA, 23 bp, Homo sapiens
  source 1..23: mol_type = genomic DNA
tcccacatggtctagcggttagg

SEQ ID NO: 41014 - DNA, 24 bp, Homo sapiens
  source 1..24: mol_type = genomic DNA
tcccacatggtctagcggttagga

SEQ ID NO: 41015 - DNA, 25 bp, Homo sapiens
  source 1..25: mol_type = genomic DNA
tcccacatggtctagcggttaggat

SEQ ID NO: 41016 - DNA, 26 bp, Homo sapiens
  source 1..26: mol_type = genomic DNA
tcccacatggtctagcggttaggatt

SEQ ID NO: 41017 - DNA, 27 bp, Homo sapiens
  source 1..27: mol_type = genomic DNA
tcccacatggtctagcggttaggattc

SEQ ID NO: 41018 - DNA, 28 bp, Homo sapiens
  source 1..28: mol_type = genomic DNA
tcccacatggtctagcggttaggattcc

SEQ ID NO: 41019 - DNA, 29 bp, Homo sapiens
  source 1..29: mol_type = genomic DNA
tcccacatggtctagcggttaggattcct

SEQ ID NO: 41020 - DNA, 30 bp, Homo sapiens; identical to SEQ ID NO: 25476
  source 1..30: mol_type = genomic DNA

SEQ ID NO: 41021 - DNA, 31 bp, Homo sapiens; identical to SEQ ID NO: 25477
  source 1..31: mol_type = genomic DNA

SEQ ID NO: 41022 - DNA, 32 bp, Homo sapiens; identical to SEQ ID NO: 25478
  source 1..32: mol_type = genomic DNA

SEQ ID NO: 41023 - DNA, 33 bp, Homo sapiens; identical to SEQ ID NO: 25479
  source 1..33: mol_type = genomic DNA

SEQ ID NO: 41024 - DNA, 34 bp, Homo sapiens; identical to SEQ ID NO: 25480
  source 1..34: mol_type = genomic DNA

SEQ ID NO: 41025 - DNA, 35 bp, Homo sapiens; identical to SEQ ID NO: 25481
  source 1..35: mol_type = genomic DNA

SEQ ID NO: 41026 - DNA, 36 bp, Homo sapiens; identical to SEQ ID NO: 25482
  source 1..36: mol_type = genomic DNA

SEQ ID NO: 41027 - DNA, 37 bp, Homo sapiens; identical to SEQ ID NO: 25483
  source 1..37: mol_type = genomic DNA

SEQ ID NO: 41028 - DNA, 38 bp, Homo sapiens; identical to SEQ ID NO: 25484
  source 1..38: mol_type = genomic DNA

SEQ ID NO: 41029 - DNA, 39 bp, Homo sapiens; identical to SEQ ID NO: 25485
  source 1..39: mol_type = genomic DNA

SEQ ID NO: 41030 - DNA, 40 bp, Homo sapiens; identical to SEQ ID NO: 25486
  source 1..40: mol_type = genomic DNA

SEQ ID NO: 41031 - DNA, 41 bp, Homo sapiens; identical to SEQ ID NO: 25487
  source 1..41: mol_type = genomic DNA

SEQ ID NO: 41032 - DNA, 42 bp, Homo sapiens; identical to SEQ ID NO: 25488
  source 1..42: mol_type = genomic DNA

SEQ ID NO: 41033 - DNA, 43 bp, Homo sapiens
  source 1..43: mol_type = genomic DNA
tcccacatggtctagcggttaggattcctggttttcacccagg

SEQ ID NO: 41034 - DNA, 16 bp, Homo sapiens
  source 1..16: mol_type = genomic DNA
tcccaccactgccacc

SEQ ID NO: 41035 - DNA, 16 bp, Homo sapiens
  source 1..16: mol_type = genomic DNA
tcccaccagagtcgcc

SEQ ID NO: 41036 - DNA, 17 bp, Homo sapiens
  source 1..17: mol_type = genomic DNA
tcccacccagggacgcc

SEQ ID NO: 41037 - DNA, 16 bp, Homo sapiens
  source 1..16: mol_type = genomic DNA
tcccaccctcgtcgcc

SEQ ID NO: 41038 - DNA, 16 bp, Homo sapiens
  source 1..16: mol_type = genomic DNA
tcccaccgctgccacc

SEQ ID NO: 41039 - DNA, 17 bp, Homo sapiens
  source 1..17: mol_type = genomic DNA
tcccaccgctgccacca

SEQ ID NO: 41040 - DNA, 16 bp, Homo sapiens
  source 1..16: mol_type = genomic DNA
tcccacctggggtacc

SEQ ID NO: 41041 - DNA, 17 bp, Homo sapiens
  source 1..17: mol_type = genomic DNA
tcccacctggggtgcca

SEQ ID NO: 41042 - DNA, 16 bp, Homo sapiens
  source 1..16: mol_type = genomic DNA
tcccaccttcgtcgcc

SEQ ID NO: 41043 - DNA, 16 bp, Homo sapiens
  source 1..16: mol_type = genomic DNA
tcccactcctgacacc

SEQ ID NO: 41044 - DNA, 17 bp, Homo sapiens
  source 1..17: mol_type = genomic DNA
tcccactcctgacacca

SEQ ID NO: 41045 - DNA, 16 bp, Homo sapiens
  source 1..16: mol_type = genomic DNA
tcccacttctgacacc

SEQ ID NO: 41046 - DNA, 17 bp, Homo sapiens
  source 1..17: mol_type = genomic DNA
tcccacttctgacacca

SEQ ID NO: 41047 - DNA, 16 bp, Homo sapiens
  source 1..16: mol_type = genomic DNA
tcccagcggggcctcc

SEQ ID NO: 41048 - DNA, 17 bp, Homo sapiens
  source 1..17: mol_type = genomic DNA
tcccagcggggcctcca

SEQ ID NO: 41049 - DNA, 16 bp, Homo sapiens
  source 1..16: mol_type = genomic DNA
tcccagcggtgcctcc

SEQ ID NO: 41050 - DNA, 17 bp, Homo sapiens
  source 1..17: mol_type = genomic DNA
tcccagcggtgcctcca

SEQ ID NO: 41051 - DNA, 37 bp, Homo sapiens; identical to SEQ ID NO: 25512
  source 1..37: mol_type = genomic DNA

SEQ ID NO: 41052 - DNA, 38 bp, Homo sapiens; identical to SEQ ID NO: 25513
  source 1..38: mol_type = genomic DNA

SEQ ID NO: 41053 - DNA, 16 bp, Homo sapiens
  source 1..16: mol_type = genomic DNA
tcccagtagagcctcc

SEQ ID NO: 41054 - DNA, 16 bp, Homo sapiens
  source 1..16: mol_type = genomic DNA
tcccatatggtctagc

SEQ ID NO: 41055 - DNA, 17 bp, Homo sapiens
  source 1..17: mol_type = genomic DNA
tcccatatggtctagcg

SEQ ID NO: 41056 - DNA, 18 bp, Homo sapiens
  source 1..18: mol_type = genomic DNA
tcccatatggtctagcgg

SEQ ID NO: 41057 - DNA, 19 bp, Homo sapiens
  source 1..19: mol_type = genomic DNA
tcccatatggtctagcggt

SEQ ID NO: 41058 - DNA, 22 bp, Homo sapiens
  source 1..22: mol_type = genomic DNA
tcccatatggtctagcggttag

SEQ ID NO: 41059 - DNA, 23 bp, Homo sapiens
  source 1..23: mol_type = genomic DNA
tcccatatggtctagcggttagg

SEQ ID NO: 41060 - DNA, 24 bp, Homo sapiens
  source 1..24: mol_type = genomic DNA
tcccatatggtctagcggttagga

SEQ ID NO: 41061 - DNA, 25 bp, Homo sapiens
  source 1..25: mol_type = genomic DNA
tcccatatggtctagcggttaggat

SEQ ID NO: 41062 - DNA, 26 bp, Homo sapiens
  source 1..26: mol_type = genomic DNA
tcccatatggtctagcggttaggatt

SEQ ID NO: 41063 - DNA, 27 bp, Homo sapiens
  source 1..27: mol_type = genomic DNA
tcccatatggtctagcggttaggattc

SEQ ID NO: 41064 - DNA, 28 bp, Homo sapiens
  source 1..28: mol_type = genomic DNA
tcccatatggtctagcggttaggattcc

SEQ ID NO: 41065 - DNA, 29 bp, Homo sapiens
  source 1..29: mol_type = genomic DNA
tcccatatggtctagcggttaggattcct

SEQ ID NO: 41066 - DNA, 30 bp, Homo sapiens; identical to SEQ ID NO: 25530
  source 1..30: mol_type = genomic DNA

SEQ ID NO: 41067 - DNA, 31 bp, Homo sapiens; identical to SEQ ID NO: 25531
  source 1..31: mol_type = genomic DNA

SEQ ID NO: 41068 - DNA, 32 bp, Homo sapiens; identical to SEQ ID NO: 25532
  source 1..32: mol_type = genomic DNA

SEQ ID NO: 41069 - DNA, 33 bp, Homo sapiens; identical to SEQ ID NO: 25533
  source 1..33: mol_type = genomic DNA

SEQ ID NO: 41070 - DNA, 34 bp, Homo sapiens; identical to SEQ ID NO: 25534
  source 1..34: mol_type = genomic DNA

SEQ ID NO: 41071 - DNA, 35 bp, Homo sapiens; identical to SEQ ID NO: 25535
  source 1..35: mol_type = genomic DNA

SEQ ID NO: 41072 - DNA, 36 bp, Homo sapiens; identical to SEQ ID NO: 25536
  source 1..36: mol_type = genomic DNA

SEQ ID NO: 41073 - DNA, 37 bp, Homo sapiens; identical to SEQ ID NO: 25537
  source 1..37: mol_type = genomic DNA

SEQ ID NO: 41074 - DNA, 40 bp, Homo sapiens; identical to SEQ ID NO: 25540
  source 1..40: mol_type = genomic DNA

SEQ ID NO: 41075 - DNA, 41 bp, Homo sapiens; identical to SEQ ID NO: 25541
  source 1..41: mol_type = genomic DNA

SEQ ID NO: 41076 - DNA, 42 bp, Homo sapiens; identical to SEQ ID NO: 25542
  source 1..42: mol_type = genomic DNA

SEQ ID NO: 41077 - DNA, 43 bp, Homo sapiens; identical to SEQ ID NO: 25543
  source 1..43: mol_type = genomic DNA

SEQ ID NO: 41078 - DNA, 16 bp, Homo sapiens
  source 1..16: mol_type = genomic DNA
tcccatcctcgtcgcc

SEQ ID NO: 41079 - DNA, 17 bp, Homo sapiens
  source 1..17: mol_type = genomic DNA
tcccatcctcgtcgcca

SEQ ID NO: 41080 - DNA, 16 bp, Homo sapiens
  source 1..16: mol_type = genomic DNA
tcccatctggggtgcc

SEQ ID NO: 41081 - DNA, 17 bp, Homo sapiens
  source 1..17: mol_type = genomic DNA
tcccatctggggtgcca

SEQ ID NO: 41082 - DNA, 16 bp, Homo sapiens
  source 1..16: mol_type = genomic DNA
tcccatctgggtcgcc

SEQ ID NO: 41083 - DNA, 28 bp, Homo sapiens
  source 1..28: mol_type = genomic DNA
tcccatggtgtaatggttagcactctgg

SEQ ID NO: 41084 - DNA, 31 bp, Homo sapiens; identical to SEQ ID NO: 25557
  source 1..31: mol_type = genomic DNA

SEQ ID NO: 41085 - DNA, 34 bp, Homo sapiens; identical to SEQ ID NO: 25559
  source 1..34: mol_type = genomic DNA

SEQ ID NO: 41086 - DNA, 35 bp, Homo sapiens; identical to SEQ ID NO: 25560
  source 1..35: mol_type = genomic DNA

SEQ ID NO: 41087 - DNA, 16 bp, Homo sapiens
  source 1..16: mol_type = genomic DNA
tcccattggtctagcc

SEQ ID NO: 41088 - DNA, 16 bp, Homo sapiens
  source 1..16: mol_type = genomic DNA
tccccagcatctccac

SEQ ID NO: 41089 - DNA, 17 bp, Homo sapiens
  source 1..17: mol_type = genomic DNA
tccccagcatctccacc

SEQ ID NO: 41090 - DNA, 18 bp, Homo sapiens
  source 1..18: mol_type = genomic DNA
tccccagcatctccacca

SEQ ID NO: 41091 - DNA, 17 bp, Homo sapiens
  source 1..17: mol_type = genomic DNA
tccccagtacctccacc

SEQ ID NO: 41092 - DNA, 16 bp, Homo sapiens
  source 1..16: mol_type = genomic DNA
tccccgacggggagcc

SEQ ID NO: 41093 - DNA, 22 bp, Homo sapiens
  source 1..22: mol_type = genomic DNA
tccccgcgcaggttcgaatcct

SEQ ID NO: 41094 - DNA, 34 bp, Homo sapiens; identical to SEQ ID NO: 25596
  source 1..34: mol_type = genomic DNA

SEQ ID NO: 41095 - DNA, 16 bp, Homo sapiens
  source 1..16: mol_type = genomic DNA
tccccggcacctccac

SEQ ID NO: 41096 - DNA, 17 bp, Homo sapiens
  source 1..17: mol_type = genomic DNA
tccccggcacctccacc

SEQ ID NO: 41097 - DNA, 18 bp, Homo sapiens
  source 1..18: mol_type = genomic DNA
tccccggcacctccacca

SEQ ID NO: 41098 - DNA, 16 bp, Homo sapiens
  source 1..16: mol_type = genomic DNA
tccccggcatctccac

SEQ ID NO: 41099 - DNA, 17 bp, Homo sapiens
  source 1..17: mol_type = genomic DNA
tccccggcatctccacc

SEQ ID NO: 41100 - DNA, 18 bp, Homo sapiens
  source 1..18: mol_type = genomic DNA
tccccggcatctccacca

SEQ ID NO: 41101 - DNA, 16 bp, Homo sapiens
  source 1..16: mol_type = genomic DNA
tccccgtacgggccac

SEQ ID NO: 41102 - DNA, 17 bp, Homo sapiens
  source 1..17: mol_type = genomic DNA
tccccgtacgggccacc

SEQ ID NO: 41103 - DNA, 18 bp, Homo sapiens
  source 1..18: mol_type = genomic DNA
tccccgtacgggccacca

SEQ ID NO: 41104 - DNA, 16 bp, Homo sapiens
  source 1..16: mol_type = genomic DNA
tccccgtactggccac

SEQ ID NO: 41105 - DNA, 17 bp, Homo sapiens
  source 1..17: mol_type = genomic DNA
tccccgtactggccacc

SEQ ID NO: 41106 - DNA, 16 bp, Homo sapiens
  source 1..16: mol_type = genomic DNA
tcccggacgagccccc

SEQ ID NO: 41107 - DNA, 17 bp, Homo sapiens
  source 1..17: mol_type = genomic DNA
tcccggacgagccccca

SEQ ID NO: 41108 - DNA, 16 bp, Homo sapiens
  source 1..16: mol_type = genomic DNA
tcccggccaacgcacc

SEQ ID NO: 41109 - DNA, 17 bp, Homo sapiens
  source 1..17: mol_type = genomic DNA
tcccggccaacgcacca

SEQ ID NO: 41110 - DNA, 16 bp, Homo sapiens
  source 1..16: mol_type = genomic DNA
tcccggccaatgcacc

SEQ ID NO: 41111 - DNA, 17 bp, Homo sapiens
  source 1..17: mol_type = genomic DNA
tcccggccaatgcacca

SEQ ID NO: 41112 - DNA, 16 bp, Homo sapiens
  source 1..16: mol_type = genomic DNA
tcccggccactgcacc

SEQ ID NO: 41113 - DNA, 17 bp, Homo sapiens
  source 1..17: mol_type = genomic DNA
tcccggccactgcacca

SEQ ID NO: 41114 - DNA, 17 bp, Homo sapiens
  source 1..17: mol_type = genomic DNA
tcccggccagtgcacca

SEQ ID NO: 41115 - DNA, 16 bp, Homo sapiens
  source 1..16: mol_type = genomic DNA
tcccggcccatgcacc

SEQ ID NO: 41116 - DNA, 17 bp, Homo sapiens
  source 1..17: mol_type = genomic DNA
tcccggcccatgcacca

SEQ ID NO: 41117 - DNA, 16 bp, Homo sapiens
  source 1..16: mol_type = genomic DNA
tcccggcggagtcgcc

SEQ ID NO: 41118 - DNA, 16 bp, Homo sapiens
  source 1..16: mol_type = genomic DNA
tcccgggcggaaacac

SEQ ID NO: 41119 - DNA, 17 bp, Homo sapiens
  source 1..17: mol_type = genomic DNA
tcccgggcggaaacacc

SEQ ID NO: 41120 - DNA, 16 bp, Homo sapiens
  source 1..16: mol_type = genomic DNA
tcccgggcggcgcacc

SEQ ID NO: 41121 - DNA, 17 bp, Homo sapiens
  source 1..17: mol_type = genomic DNA
tcccgggcggcgcacca

SEQ ID NO: 41122 - DNA, 27 bp, Homo sapiens
  source 1..27: mol_type = genomic DNA
tcccgggttcaaatcccggacgagccc

SEQ ID NO: 41123 - DNA, 28 bp, Homo sapiens
  source 1..28: mol_type = genomic DNA
tcccgggttcaaatcccggacgagcccc

SEQ ID NO: 41124 - DNA, 29 bp, Homo sapiens
  source 1..29: mol_type = genomic DNA
tcccgggttcgatccccagcatctccacc

SEQ ID NO: 41125 - DNA, 16 bp, Homo sapiens
  source 1..16: mol_type = genomic DNA
tcccgggtttcggcac

SEQ ID NO: 41126 - DNA, 17 bp, Homo sapiens
  source 1..17: mol_type = genomic DNA
tcccgggtttcggcacc

SEQ ID NO: 41127 - DNA, 18 bp, Homo sapiens
  source 1..18: mol_type = genomic DNA
tcccgggtttcggcacca

SEQ ID NO: 41128 - DNA, 16 bp, Homo sapiens
  source 1..16: mol_type = genomic DNA
tcccggtatgggaacc

SEQ ID NO: 41129 - DNA, 16 bp, Homo sapiens
  source 1..16: mol_type = genomic DNA
tcccggtcagggaacc

SEQ ID NO: 41130 - DNA, 16 bp, Homo sapiens
  source 1..16: mol_type = genomic DNA
tcccggtcatggaacc

SEQ ID NO: 41131 - DNA, 16 bp, Homo sapiens
  source 1..16: mol_type = genomic DNA
tcccggtgtgggaacc

SEQ ID NO: 41132 - DNA, 17 bp, Homo sapiens
  source 1..17: mol_type = genomic DNA
tcccggtgtgggaacca

SEQ ID NO: 41133 - DNA, 19 bp, Homo sapiens
  source 1..19: mol_type = genomic DNA
tccctggtagtctagtggc

SEQ ID NO: 41134 - DNA, 22 bp, Homo sapiens
  source 1..22: mol_type = genomic DNA
tccctggtctagtggttaggat

SEQ ID NO: 41135 - DNA, 23 bp, Homo sapiens
  source 1..23: mol_type = genomic DNA
tccctggtctagtggttaggatt

SEQ ID NO: 41136 - DNA, 16 bp, Homo sapiens
  source 1..16: mol_type = genomic DNA
tccctggtggtctagt

SEQ ID NO: 41137 - DNA, 17 bp, Homo sapiens
  source 1..17: mol_type = genomic DNA
tccctggtggtctagtg

SEQ ID NO: 41138 - DNA, 18 bp, Homo sapiens
  source 1..18: mol_type = genomic DNA
tccctggtggtctagtgg

SEQ ID NO: 41139 - DNA, 19 bp, Homo sapiens
  source 1..19: mol_type = genomic DNA
tccctggtggtctagtggc

SEQ ID NO: 41140 - DNA, 20 bp, Homo sapiens
  source 1..20: mol_type = genomic DNA
tccctggtggtctagtggct

SEQ ID NO: 41141 - DNA, 22 bp, Homo sapiens
  source 1..22: mol_type = genomic DNA
tccctggtggtctagtggctag

SEQ ID NO: 41142 - DNA, 23 bp, Homo sapiens
  source 1..23: mol_type = genomic DNA
tccctggtggtctagtggctagg

SEQ ID NO: 41143 - DNA, 24 bp, Homo sapiens
  source 1..24: mol_type = genomic DNA
tccctggtggtctagtggctagga

SEQ ID NO: 41144 - DNA, 25 bp, Homo sapiens
  source 1..25: mol_type = genomic DNA
tccctggtggtctagtggctaggat

SEQ ID NO: 41145 - DNA, 26 bp, Homo sapiens
  source 1..26: mol_type = genomic DNA
tccctggtggtctagtggctaggatt

SEQ ID NO: 41146 - DNA, 27 bp, Homo sapiens
  source 1..27: mol_type = genomic DNA
tccctggtggtctagtggctaggattc

SEQ ID NO: 41147 - DNA, 28 bp, Homo sapiens
  source 1..28: mol_type = genomic DNA
tccctggtggtctagtggctaggattcg

SEQ ID NO: 41148 - DNA, 29 bp, Homo sapiens
  source 1..29: mol_type = genomic DNA
tccctggtggtctagtggctaggattcgg

SEQ ID NO: 41149 - DNA, 30 bp, Homo sapiens; identical to SEQ ID NO: 25675
  source 1..30: mol_type = genomic DNA

SEQ ID NO: 41150 - DNA, 31 bp, Homo sapiens; identical to SEQ ID NO: 25676
  source 1..31: mol_type = genomic DNA

SEQ ID NO: 41151 - DNA, 32 bp, Homo sapiens; identical to SEQ ID NO: 25677
  source 1..32: mol_type = genomic DNA

SEQ ID NO: 41152 - DNA, 33 bp, Homo sapiens; identical to SEQ ID NO: 25678
  source 1..33: mol_type = genomic DNA

SEQ ID NO: 41153 - DNA, 34 bp, Homo sapiens; identical to SEQ ID NO: 25679
  source 1..34: mol_type = genomic DNA

SEQ ID NO: 41154 - DNA, 35 bp, Homo sapiens; identical to SEQ ID NO: 25680
  source 1..35: mol_type = genomic DNA

SEQ ID NO: 41155 - DNA, 36 bp, Homo sapiens; identical to SEQ ID NO: 25681
  source 1..36: mol_type = genomic DNA

SEQ ID NO: 41156 - DNA, 39 bp, Homo sapiens; identical to SEQ ID NO: 25684
  source 1..39: mol_type = genomic DNA

SEQ ID NO: 41157 - DNA, 19 bp, Homo sapiens
  source 1..19: mol_type = genomic DNA
tccctggtggtctagtggt

SEQ ID NO: 41158 - DNA, 22 bp, Homo sapiens
  source 1..22: mol_type = genomic DNA
tccctggtggtctagtggttag

SEQ ID NO: 41159 - DNA, 23 bp, Homo sapiens
  source 1..23: mol_type = genomic DNA
tccctggtggtctagtggttagg

SEQ ID NO: 41160 - DNA, 24 bp, Homo sapiens
  source 1..24: mol_type = genomic DNA
tccctggtggtctagtggttagga

SEQ ID NO: 41161 - DNA, 25 bp, Homo sapiens
  source 1..25: mol_type = genomic DNA
tccctggtggtctagtggttaggat

SEQ ID NO: 41162 - DNA, 26 bp, Homo sapiens
  source 1..26: mol_type = genomic DNA
tccctggtggtctagtggttaggatt

SEQ ID NO: 41163 - DNA, 27 bp, Homo sapiens
  source 1..27: mol_type = genomic DNA
tccctggtggtctagtggttaggattc

SEQ ID NO: 41164 - DNA, 28 bp, Homo sapiens
  source 1..28: mol_type = genomic DNA
tccctggtggtctagtggttaggattcg

SEQ ID NO: 41165 - DNA, 29 bp, Homo sapiens
  source 1..29: mol_type = genomic DNA
tccctggtggtctagtggttaggattcgg

SEQ ID NO: 41166 - DNA, 30 bp, Homo sapiens; identical to SEQ ID NO: 25700
  source 1..30: mol_type = genomic DNA

SEQ ID NO: 41167 - DNA, 31 bp, Homo sapiens; identical to SEQ ID NO: 25701
  source 1..31: mol_type = genomic DNA

SEQ ID NO: 41168 - DNA, 32 bp, Homo sapiens; identical to SEQ ID NO: 25702
  source 1..32: mol_type = genomic DNA

SEQ ID NO: 41169 - DNA, 33 bp, Homo sapiens; identical to SEQ ID NO: 25703
  source 1..33: mol_type = genomic DNA

SEQ ID NO: 41170 - DNA, 34 bp, Homo sapiens; identical to SEQ ID NO: 25704
  source 1..34: mol_type = genomic DNA

SEQ ID NO: 41171 - DNA, 35 bp, Homo sapiens; identical to SEQ ID NO: 25705
  source 1..35: mol_type = genomic DNA

SEQ ID NO: 41172 - DNA, 36 bp, Homo sapiens; identical to SEQ ID NO: 25706
  source 1..36: mol_type = genomic DNA

SEQ ID NO: 41173 - DNA, 37 bp, Homo sapiens; identical to SEQ ID NO: 25707
  source 1..37: mol_type = genomic DNA

SEQ ID NO: 41174 - DNA, 38 bp, Homo sapiens; identical to SEQ ID NO: 25708
  source 1..38: mol_type = genomic DNA

SEQ ID NO: 41175 - DNA, 39 bp, Homo sapiens; identical to SEQ ID NO: 25709
  source 1..39: mol_type = genomic DNA

SEQ ID NO: 41176 - DNA, 40 bp, Homo sapiens; identical to SEQ ID NO: 25710
  source 1..40: mol_type = genomic DNA

SEQ ID NO: 41177 - DNA, 41 bp, Homo sapiens; identical to SEQ ID NO: 25711
  source 1..41: mol_type = genomic DNA

SEQ ID NO: 41178 - DNA, 42 bp, Homo sapiens; identical to SEQ ID NO: 25712
  source 1..42: mol_type = genomic DNA

SEQ ID NO: 41179 - DNA, 43 bp, Homo sapiens; identical to SEQ ID NO: 25713
  source 1..43: mol_type = genomic DNA

SEQ ID NO: 41180 - DNA, 44 bp, Homo sapiens; identical to SEQ ID NO: 25714
  source 1..44: mol_type = genomic DNA

SEQ ID NO: 41181 - DNA, 45 bp, Homo sapiens; identical to SEQ ID NO: 25715
  source 1..45: mol_type = genomic DNA

SEQ ID NO: 41182 - DNA, 46 bp, Homo sapiens; identical to SEQ ID NO: 25716
  source 1..46: mol_type = genomic DNA

SEQ ID NO: 41183 - DNA, 47 bp, Homo sapiens; identical to SEQ ID NO: 25717
  source 1..47: mol_type = genomic DNA

SEQ ID NO: 41184 - DNA, 28 bp, Homo sapiens
  source 1..28: mol_type = genomic DNA
tccctggttcgatcccgggtttcggcac

SEQ ID NO: 41185 - DNA, 16 bp, Homo sapiens
  source 1..16: mol_type = genomic DNA
tccctgtccaggcgcc

SEQ ID NO: 41186 - DNA, 16 bp, Homo sapiens
  source 1..16: mol_type = genomic DNA
tccctgtggtctagtg

SEQ ID NO: 41187 - DNA, 17 bp, Homo sapiens
  source 1..17: mol_type = genomic DNA
tccctgtggtctagtgg

SEQ ID NO: 41188 - DNA, 18 bp, Homo sapiens
  source 1..18: mol_type = genomic DNA
tccctgtggtctagtggt

SEQ ID NO: 41189 - DNA, 21 bp, Homo sapiens
  source 1..21: mol_type = genomic DNA
tccctgtggtctagtggttag

SEQ ID NO: 41190 - DNA, 22 bp, Homo sapiens
  source 1..22: mol_type = genomic DNA
tccctgtggtctagtggttagg

SEQ ID NO: 41191 - DNA, 23 bp, Homo sapiens
  source 1..23: mol_type = genomic DNA
tccctgtggtctagtggttagga

SEQ ID NO: 41192 - DNA, 16 bp, Homo sapiens
  source 1..16: mol_type = genomic DNA
tccctgttcaggcgcc

SEQ ID NO: 41193 - DNA, 16 bp, Homo sapiens
  source 1..16: mol_type = genomic DNA
tccctgttcgggcgcc

SEQ ID NO: 41194 - DNA, 17 bp, Homo sapiens
  source 1..17: mol_type = genomic DNA
tccctgttcgggcgcca

SEQ ID NO: 41195 - DNA, 16 bp, Homo sapiens
  source 1..16: mol_type = genomic DNA
tcccttcgtggtcgcc

SEQ ID NO: 41196 - DNA, 17 bp, Homo sapiens
  source 1..17: mol_type = genomic DNA
tcccttcgtggtcgcca

SEQ ID NO: 41197 - DNA, 16 bp, Homo sapiens
  source 1..16: mol_type = genomic DNA
tcccttcgtggttgcc

SEQ ID NO: 41198 - DNA, 34 bp, Homo sapiens
  source 1..34: mol_type = genomic DNA
tccgagaggtcccgggttcaaatcccggacgagc

SEQ ID NO: 41199 - DNA, 35 bp, Homo sapiens; identical to SEQ ID NO: 25745
  source 1..35: mol_type = genomic DNA

SEQ ID NO: 41200 - DNA, 36 bp, Homo sapiens
  source 1..36: mol_type = genomic DNA
tccgagaggtcccgggttcaaatcccggacgagccc

SEQ ID NO: 41201 - DNA, 37 bp, Homo sapiens; identical to SEQ ID NO: 25746
  source 1..37: mol_type = genomic DNA

SEQ ID NO: 41202 - DNA, 38 bp, Homo sapiens; identical to SEQ ID NO: 25747
  source 1..38: mol_type = genomic DNA

SEQ ID NO: 41203 - DNA, 39 bp, Homo sapiens
  source 1..39: mol_type = genomic DNA
tccgagaggtcccgggttcaaatcccggacgagccccca

SEQ ID NO: 41204 - DNA, 16 bp, Homo sapiens
  source 1..16: mol_type = genomic DNA
tccgagtcacggcacc

SEQ ID NO: 41205 - DNA, 17 bp, Homo sapiens
  source 1..17: mol_type = genomic DNA
tccgagtcacggcacca

SEQ ID NO: 41206 - DNA, 27 bp, Homo sapiens
  source 1..27: mol_type = genomic DNA
tccgagttcaaatctcggtggaacctc

SEQ ID NO: 41207 - DNA, 26 bp, Homo sapiens
  source 1..26: mol_type = genomic DNA
tccgagttcaaatctcggtgggacct

SEQ ID NO: 41208 - DNA, 27 bp, Homo sapiens
  source 1..27: mol_type = genomic DNA
tccgagttcaaatctcggtgggacctc

SEQ ID NO: 41209 - DNA, 16 bp, Homo sapiens
  source 1..16: mol_type = genomic DNA
tccgagttcgagtctc

SEQ ID NO: 41210 - DNA, 43 bp, Homo sapiens
  source 1..43: mol_type = genomic DNA
tccggagctggggattgtgggttcgagtcccatctgggtcgcc

SEQ ID NO: 41211 - DNA, 18 bp, Homo sapiens
  source 1..18: mol_type = genomic DNA
tccggatcagaagattga

SEQ ID NO: 41212 - DNA, 43 bp, Homo sapiens
  source 1..43: mol_type = genomic DNA
tccggatcagaagattgagggttcgagtcccttcgtggtcgcc

SEQ ID NO: 41213 - DNA, 19 bp, Homo sapiens
  source 1..19: mol_type = genomic DNA
tccggatggaggcgtgggt

SEQ ID NO: 41214 - DNA, 29 bp, Homo sapiens
  source 1..29: mol_type = genomic DNA
tccggatggaggcgtgggttcgaatccca

SEQ ID NO: 41215 - DNA, 38 bp, Homo sapiens; identical to SEQ ID NO: 25794
  source 1..38: mol_type = genomic DNA

SEQ ID NO: 41216 - DNA, 39 bp, Homo sapiens; identical to SEQ ID NO: 25795
  source 1..39: mol_type = genomic DNA

SEQ ID NO: 41217 - DNA, 40 bp, Homo sapiens; identical to SEQ ID NO: 25796
  source 1..40: mol_type = genomic DNA

SEQ ID NO: 41218 - DNA, 16 bp, Homo sapiens
  source 1..16: mol_type = genomic DNA
tccggctcgaaggacc

SEQ ID NO: 41219 - DNA, 17 bp, Homo sapiens
  source 1..17: mol_type = genomic DNA
tccggctcgaaggacca

SEQ ID NO: 41220 - DNA, 16 bp, Homo sapiens
  source 1..16: mol_type = genomic DNA
tccggctcggaggacc

SEQ ID NO: 41221 - DNA, 17 bp, Homo sapiens
  source 1..17: mol_type = genomic DNA
tccggctcggaggacca

SEQ ID NO: 41222 - DNA, 28 bp, Homo sapiens
  source 1..28: mol_type = genomic DNA
tccggggttcaagtccctgttcgggcgc

SEQ ID NO: 41223 - DNA, 16 bp, Homo sapiens
  source 1..16: mol_type = genomic DNA
tccgggtgccccctcc

SEQ ID NO: 41224 - DNA, 17 bp, Homo sapiens
  source 1..17: mol_type = genomic DNA
tccgggtgccccctcca

SEQ ID NO: 41225 - DNA, 27 bp, Homo sapiens
  source 1..27: mol_type = genomic DNA
tccgggttcgagtcccggcggagtcgc

SEQ ID NO: 41226 - DNA, 28 bp, Homo sapiens
  source 1..28: mol_type = genomic DNA
tccgggttcgagtcccggcggagtcgcc

SEQ ID NO: 41227 - DNA, 20 bp, Homo sapiens
  source 1..20: mol_type = genomic DNA
tccgtagtgtagtggtcatc

SEQ ID NO: 41228 - DNA, 29 bp, Homo sapiens
  source 1..29: mol_type = genomic DNA
tccgtagtgtagtggtcatcacgttcgcc

SEQ ID NO: 41229 - DNA, 30 bp, Homo sapiens; identical to SEQ ID NO: 25831
  source 1..30: mol_type = genomic DNA

SEQ ID NO: 41230 - DNA, 20 bp, Homo sapiens
  source 1..20: mol_type = genomic DNA
tccgtagtgtagtggttatc

SEQ ID NO: 41231 - DNA, 21 bp, Homo sapiens
  source 1..21: mol_type = genomic DNA
tccgtagtgtagtggttatca

SEQ ID NO: 41232 - DNA, 29 bp, Homo sapiens
  source 1..29: mol_type = genomic DNA
tccgtagtgtagtggttatcacgttcgcc

SEQ ID NO: 41233 - DNA, 30 bp, Homo sapiens; identical to SEQ ID NO: 25843
  source 1..30: mol_type = genomic DNA

SEQ ID NO: 41234 - DNA, 31 bp, Homo sapiens; identical to SEQ ID NO: 25847
  source 1..31: mol_type = genomic DNA

SEQ ID NO: 41235 - DNA, 33 bp, Homo sapiens; identical to SEQ ID NO: 25849
  source 1..33: mol_type = genomic DNA

SEQ ID NO: 41236 - DNA, 16 bp, Homo sapiens
  source 1..16: mol_type = genomic DNA
tccgtggtggtctagt

SEQ ID NO: 41237 - DNA, 17 bp, Homo sapiens
  source 1..17: mol_type = genomic DNA
tccgtggtggtctagtg

SEQ ID NO: 41238 - DNA, 19 bp, Homo sapiens
  source 1..19: mol_type = genomic DNA
tccgtggtggtctagtggc

SEQ ID NO: 41239 - DNA, 32 bp, Homo sapiens; identical to SEQ ID NO: 25865
  source 1..32: mol_type = genomic DNA

SEQ ID NO: 41240 - DNA, 33 bp, Homo sapiens; identical to SEQ ID NO: 25866
  source 1..33: mol_type = genomic DNA

SEQ ID NO: 41241 - DNA, 34 bp, Homo sapiens
  source 1..34: mol_type = genomic DNA
tccgtggtggtctagtggctaggattcggcgctt

SEQ ID NO: 41242 - DNA, 32 bp, Homo sapiens; identical to SEQ ID NO: 25867
  source 1..32: mol_type = genomic DNA

SEQ ID NO: 41243 - DNA, 43 bp, Homo sapiens; identical to SEQ ID NO: 25873
  source 1..43: mol_type = genomic DNA

SEQ ID NO: 41244 - DNA, 44 bp, Homo sapiens; identical to SEQ ID NO: 25874
  source 1..44: mol_type = genomic DNA

SEQ ID NO: 41245 - DNA, 16 bp, Homo sapiens
  source 1..16: mol_type = genomic DNA
tcctcacacggggcac

SEQ ID NO: 41246 - DNA, 17 bp, Homo sapiens
  source 1..17: mol_type = genomic DNA
tcctcacacggggcacc

SEQ ID NO: 41247 - DNA, 16 bp, Homo sapiens
  source 1..16: mol_type = genomic DNA
tcctcacctggagcac

SEQ ID NO: 41248 - DNA, 17 bp, Homo sapiens
  source 1..17: mol_type = genomic DNA
tcctcacctggagcacc

SEQ ID NO: 41249 - DNA, 18 bp, Homo sapiens
  source 1..18: mol_type = genomic DNA
tcctcacctggagcacca

SEQ ID NO: 41250 - DNA, 16 bp, Homo sapiens
  source 1..16: mol_type = genomic DNA
tcctcgctggggcctc

SEQ ID NO: 41251 - DNA, 17 bp, Homo sapiens
  source 1..17: mol_type = genomic DNA
tcctcgctggggcctcc

SEQ ID NO: 41252 - DNA, 16 bp, Homo sapiens
  source 1..16: mol_type = genomic DNA
tcctcgttagtatagt

SEQ ID NO: 41253 - DNA, 17 bp, Homo sapiens
  source 1..17: mol_type = genomic DNA
tcctcgttagtatagtg

SEQ ID NO: 41254 - DNA, 18 bp, Homo sapiens
  source 1..18: mol_type = genomic DNA
tcctcgttagtatagtgg

SEQ ID NO: 41255 - DNA, 22 bp, Homo sapiens
  source 1..22: mol_type = genomic DNA
tcctcgttagtatagtggtgag

SEQ ID NO: 41256 - DNA, 23 bp, Homo sapiens
  source 1..23: mol_type = genomic DNA
tcctcgttagtatagtggtgagt

SEQ ID NO: 41257 - DNA, 26 bp, Homo sapiens
  source 1..26: mol_type = genomic DNA
tcctcgttagtatagtggtgagtatc

SEQ ID NO: 41258 - DNA, 31 bp, Homo sapiens; identical to SEQ ID NO: 25907
  source 1..31: mol_type = genomic DNA

SEQ ID NO: 41259 - DNA, 32 bp, Homo sapiens; identical to SEQ ID NO: 25908
  source 1..32: mol_type = genomic DNA

SEQ ID NO: 41260 - DNA, 33 bp, Homo sapiens; identical to SEQ ID NO: 25909
  source 1..33: mol_type = genomic DNA

SEQ ID NO: 41261 - DNA, 34 bp, Homo sapiens; identical to SEQ ID NO: 25910
  source 1..34: mol_type = genomic DNA

SEQ ID NO: 41262 - DNA, 35 bp, Homo sapiens; identical to SEQ ID NO: 25911
  source 1..35: mol_type = genomic DNA

SEQ ID NO: 41263 - DNA, 36 bp, Homo sapiens; identical to SEQ ID NO: 25912
  source 1..36: mol_type = genomic DNA

SEQ ID NO: 41264 - DNA, 26 bp, Homo sapiens
  source 1..26: mol_type = genomic DNA
tcctcgttagtatagtggttagtatc

SEQ ID NO: 41265 - DNA, 32 bp, Homo sapiens; identical to SEQ ID NO: 25930
  source 1..32: mol_type = genomic DNA

SEQ ID NO: 41266 - DNA, 33 bp, Homo sapiens; identical to SEQ ID NO: 25931
  source 1..33: mol_type = genomic DNA

SEQ ID NO: 41267 - DNA, 34 bp, Homo sapiens; identical to SEQ ID NO: 25932
  source 1..34: mol_type = genomic DNA

SEQ ID NO: 41268 - DNA, 35 bp, Homo sapiens; identical to SEQ ID NO: 25933
  source 1..35: mol_type = genomic DNA

SEQ ID NO: 41269 - DNA, 36 bp, Homo sapiens; identical to SEQ ID NO: 25934
  source 1..36: mol_type = genomic DNA

SEQ ID NO: 41270 - DNA, 16 bp, Homo sapiens
  source 1..16: mol_type = genomic DNA
tcctgccgactacgcc

SEQ ID NO: 41271 - DNA, 17 bp, Homo sapiens
  source 1..17: mol_type = genomic DNA
tcctgccgactacgcca

SEQ ID NO: 41272 - DNA, 16 bp, Homo sapiens
  source 1..16: mol_type = genomic DNA
tcctgccgcggtcgcc

SEQ ID NO: 41273 - DNA, 17 bp, Homo sapiens
  source 1..17: mol_type = genomic DNA
tcctgccgcggtcgcca

SEQ ID NO: 41274 - DNA, 16 bp, Homo sapiens
  source 1..16: mol_type = genomic DNA
tcctgctcacagcgcc

SEQ ID NO: 41275 - DNA, 17 bp, Homo sapiens
  source 1..17: mol_type = genomic DNA
tcctgctcacagcgcca

SEQ ID NO: 41276 - DNA, 16 bp, Homo sapiens
  source 1..16: mol_type = genomic DNA
tcctggctggctcgcc

SEQ ID NO: 41277 - DNA, 17 bp, Homo sapiens
  source 1..17: mol_type = genomic DNA
tcctggctggctcgcca

SEQ ID NO: 41278 - DNA, 28 bp, Homo sapiens
  source 1..28: mol_type = genomic DNA
tcctgggttcgaatcccagcggggcctc

SEQ ID NO: 41279 - DNA, 28 bp, Homo sapiens
  source 1..28: mol_type = genomic DNA
tcctgggttcgaatcccagcggtgcctc

SEQ ID NO: 41280 - DNA, 29 bp, Homo sapiens
  source 1..29: mol_type = genomic DNA
tcctgggttcgaatcccagcggtgcctcc

SEQ ID NO: 41281 - DNA, 28 bp, Homo sapiens
  source 1..28: mol_type = genomic DNA
tcctgggttcgagccccagtggaaccac

SEQ ID NO: 41282 - DNA, 29 bp, Homo sapiens
  source 1..29: mol_type = genomic DNA
tcctgggttcgagccccagtggaaccacc

SEQ ID NO: 41283 - DNA, 47 bp, Homo sapiens
  source 1..47: mol_type = genomic DNA
tcctggttttcacccaggcggcccgggttcgactcccggtgtgggaa

SEQ ID NO: 41284 - DNA, 16 bp, Homo sapiens
  source 1..16: mol_type = genomic DNA
tcctgtcggctacgcc

SEQ ID NO: 41285 - DNA, 17 bp, Homo sapiens
  source 1..17: mol_type = genomic DNA
tcctgtcggctacgcca

SEQ ID NO: 41286 - DNA, 16 bp, Homo sapiens
  source 1..16: mol_type = genomic DNA
tcctgttcgtgacgcc

SEQ ID NO: 41287 - DNA, 17 bp, Homo sapiens
  source 1..17: mol_type = genomic DNA
tcctgttcgtgacgcca

SEQ ID NO: 41288 - DNA, 18 bp, Homo sapiens
  source 1..18: mol_type = genomic DNA
tccttaggtcgctggttc

SEQ ID NO: 41289 - DNA, 19 bp, Homo sapiens
  source 1..19: mol_type = genomic DNA
tccttaggtcgctggttcg

SEQ ID NO: 41290 - DNA, 16 bp, Homo sapiens
  source 1..16: mol_type = genomic DNA
tcgaaaccatcctctg

SEQ ID NO: 41291 - DNA, 18 bp, Homo sapiens
  source 1..18: mol_type = genomic DNA
tcgaaaccatcctctgct

SEQ ID NO: 41292 - DNA, 20 bp, Homo sapiens
  source 1..20: mol_type = genomic DNA
tcgaaaccatcctctgctac

SEQ ID NO: 41293 - DNA, 21 bp, Homo sapiens
  source 1..21: mol_type = genomic DNA
tcgaaaccatcctctgctacc

SEQ ID NO: 41294 - DNA, 22 bp, Homo sapiens
  source 1..22: mol_type = genomic DNA
tcgaaaccatcctctgctacca

SEQ ID NO: 41295 - DNA, 20 bp, Homo sapiens
  source 1..20: mol_type = genomic DNA
tcgaaaccgggcagaagcac

SEQ ID NO: 41296 - DNA, 21 bp, Homo sapiens
  source 1..21: mol_type = genomic DNA
tcgaaaccgggcagaagcacc

SEQ ID NO: 41297 - DNA, 22 bp, Homo sapiens
  source 1..22: mol_type = genomic DNA
tcgaaaccgggcagaagcacca

SEQ ID NO: 41298 - DNA, 16 bp, Homo sapiens
  source 1..16: mol_type = genomic DNA
tcgaaaccgggcggaa

SEQ ID NO: 41299 - DNA, 17 bp, Homo sapiens
  source 1..17: mol_type = genomic DNA
tcgaaaccgggcggaaa

SEQ ID NO: 41300 - DNA, 18 bp, Homo sapiens
  source 1..18: mol_type = genomic DNA
tcgaaaccgggcggaaac

SEQ ID NO: 41301 - DNA, 19 bp, Homo sapiens
  source 1..19: mol_type = genomic DNA
tcgaaaccgggcggaaaca

SEQ ID NO: 41302 - DNA, 20 bp, Homo sapiens
  source 1..20: mol_type = genomic DNA
tcgaaaccgggcggaaacac

SEQ ID NO: 41303 - DNA, 21 bp, Homo sapiens
  source 1..21: mol_type = genomic DNA
tcgaaaccgggcggaaacacc

SEQ ID NO: 41304 - DNA, 22 bp, Homo sapiens
  source 1..22: mol_type = genomic DNA
tcgaaaccgggcggaaacacca

SEQ ID NO: 41305 - DNA, 23 bp, Homo sapiens
  source 1..23: mol_type = genomic DNA
tcgaaatccaatggggtttcccc

SEQ ID NO: 41306 - DNA, 18 bp, Homo sapiens
  source 1..18: mol_type = genomic DNA
tcgaaccccgtccgtgcc

SEQ ID NO: 41307 - DNA, 19 bp, Homo sapiens
  source 1..19: mol_type = genomic DNA
tcgaaccccgtccgtgcct

SEQ ID NO: 41308 - DNA, 20 bp, Homo sapiens
  source 1..20: mol_type = genomic DNA
tcgaaccccgtccgtgcctc

SEQ ID NO: 41309 - DNA, 21 bp, Homo sapiens
  source 1..21: mol_type = genomic DNA
tcgaaccccgtccgtgcctcc

SEQ ID NO: 41310 - DNA, 21 bp, Homo sapiens
  source 1..21: mol_type = genomic DNA
tcgaaccctgctcgctgcgcc

SEQ ID NO: 41311 - DNA, 21 bp, Homo sapiens
  source 1..21: mol_type = genomic DNA
tcgaacctcagagggggcacc

SEQ ID NO: 41312 - DNA, 16 bp, Homo sapiens
  source 1..16: mol_type = genomic DNA
tcgaagaagcagcttc

SEQ ID NO: 41313 - DNA, 23 bp, Homo sapiens
  source 1..23: mol_type = genomic DNA
tcgaagaagcagcttcaaacctg

SEQ ID NO: 41314 - DNA, 28 bp, Homo sapiens
  source 1..28: mol_type = genomic DNA
tcgaagaagcagcttcaaacctgccggg

SEQ ID NO: 41315 - DNA, 29 bp, Homo sapiens
  source 1..29: mol_type = genomic DNA
tcgaagaagcagcttcaaacctgccgggg

SEQ ID NO: 41316 - DNA, 30 bp, Homo sapiens; identical to SEQ ID NO: 26039
  source 1..30: mol_type = genomic DNA

SEQ ID NO: 41317 - DNA, 31 bp, Homo sapiens; identical to SEQ ID NO: 26040
  source 1..31: mol_type = genomic DNA

SEQ ID NO: 41318 - DNA, 32 bp, Homo sapiens; identical to SEQ ID NO: 26041
  source 1..32: mol_type = genomic DNA

SEQ ID NO: 41319 - DNA, 33 bp, Homo sapiens; identical to SEQ ID NO: 26042
  source 1..33: mol_type = genomic DNA

SEQ ID NO: 41320 - DNA, 34 bp, Homo sapiens; identical to SEQ ID NO: 26043
  source 1..34: mol_type = genomic DNA

SEQ ID NO: 41321 - DNA, 35 bp, Homo sapiens; identical to SEQ ID NO: 26044
  source 1..35: mol_type = genomic DNA

SEQ ID NO: 41322 - DNA, 18 bp, Homo sapiens
  source 1..18: mol_type = genomic DNA
tcgaatcacgtcggggtc

SEQ ID NO: 41323 - DNA, 19 bp, Homo sapiens
  source 1..19: mol_type = genomic DNA
tcgaatcacgtcggggtca

SEQ ID NO: 41324 - DNA, 20 bp, Homo sapiens
  source 1..20: mol_type = genomic DNA
tcgaatcacgtcggggtcac

SEQ ID NO: 41325 - DNA, 21 bp, Homo sapiens
  source 1..21: mol_type = genomic DNA
tcgaatcacgtcggggtcacc

SEQ ID NO: 41326 - DNA, 22 bp, Homo sapiens
  source 1..22: mol_type = genomic DNA
tcgaatcacgtcggggtcacca

SEQ ID NO: 41327 - DNA, 20 bp, Homo sapiens
  source 1..20: mol_type = genomic DNA
tcgaatcccaccactgccac

SEQ ID NO: 41328 - DNA, 21 bp, Homo sapiens
  source 1..21: mol_type = genomic DNA
tcgaatcccaccactgccacc

SEQ ID NO: 41329 - DNA, 21 bp, Homo sapiens
  source 1..21: mol_type = genomic DNA
tcgaatcccaccagagtcgcc

SEQ ID NO: 41330 - DNA, 19 bp, Homo sapiens
  source 1..19: mol_type = genomic DNA
tcgaatcccaccgctgcca

SEQ ID NO: 41331 - DNA, 20 bp, Homo sapiens
  source 1..20: mol_type = genomic DNA
tcgaatcccaccgctgccac

SEQ ID NO: 41332 - DNA, 21 bp, Homo sapiens
  source 1..21: mol_type = genomic DNA
tcgaatcccaccgctgccacc

SEQ ID NO: 41333 - DNA, 22 bp, Homo sapiens
  source 1..22: mol_type = genomic DNA
tcgaatcccaccgctgccacca

SEQ ID NO: 41334 - DNA, 21 bp, Homo sapiens
  source 1..21: mol_type = genomic DNA
tcgaatcccaccttcgtcgcc

SEQ ID NO: 41335 - DNA, 19 bp, Homo sapiens
  source 1..19: mol_type = genomic DNA
tcgaatcccactcctgaca

SEQ ID NO: 41336 - DNA, 20 bp, Homo sapiens
  source 1..20: mol_type = genomic DNA
tcgaatcccactcctgacac

SEQ ID NO: 41337 - DNA, 21 bp, Homo sapiens
  source 1..21: mol_type = genomic DNA
tcgaatcccactcctgacacc

SEQ ID NO: 41338 - DNA, 22 bp, Homo sapiens
  source 1..22: mol_type = genomic DNA
tcgaatcccactcctgacacca

SEQ ID NO: 41339 - DNA, 19 bp, Homo sapiens
  source 1..19: mol_type = genomic DNA
tcgaatcccacttctgaca

SEQ ID NO: 41340 - DNA, 20 bp, Homo sapiens
  source 1..20: mol_type = genomic DNA
tcgaatcccacttctgacac

SEQ ID NO: 41341 - DNA, 21 bp, Homo sapiens
  source 1..21: mol_type = genomic DNA
tcgaatcccacttctgacacc

SEQ ID NO: 41342 - DNA, 22 bp, Homo sapiens
  source 1..22: mol_type = genomic DNA
tcgaatcccacttctgacacca

SEQ ID NO: 41343 - DNA, 20 bp, Homo sapiens
  source 1..20: mol_type = genomic DNA
tcgaatcccagcggggcctc

SEQ ID NO: 41344 - DNA, 21 bp, Homo sapiens
  source 1..21: mol_type = genomic DNA
tcgaatcccagcggggcctcc

SEQ ID NO: 41345 - DNA, 16 bp, Homo sapiens
  source 1..16: mol_type = genomic DNA
tcgaatcccagcggtg

SEQ ID NO: 41346 - DNA, 18 bp, Homo sapiens
  source 1..18: mol_type = genomic DNA
tcgaatcccagcggtgcc

SEQ ID NO: 41347 - DNA, 19 bp, Homo sapiens
  source 1..19: mol_type = genomic DNA
tcgaatcccagcggtgcct

SEQ ID NO: 41348 - DNA, 20 bp, Homo sapiens
  source 1..20: mol_type = genomic DNA
tcgaatcccagcggtgcctc

SEQ ID NO: 41349 - DNA, 21 bp, Homo sapiens
  source 1..21: mol_type = genomic DNA
tcgaatcccagcggtgcctcc

SEQ ID NO: 41350 - DNA, 20 bp, Homo sapiens
  source 1..20: mol_type = genomic DNA
tcgaatcccagtagagcctc

SEQ ID NO: 41351 - DNA, 21 bp, Homo sapiens
  source 1..21: mol_type = genomic DNA
tcgaatcccagtagagcctcc

SEQ ID NO: 41352 - DNA, 20 bp, Homo sapiens
  source 1..20: mol_type = genomic DNA
tcgaatcccatcctcgtcgc

SEQ ID NO: 41353 - DNA, 21 bp, Homo sapiens
  source 1..21: mol_type = genomic DNA
tcgaatcccatcctcgtcgcc

SEQ ID NO: 41354 - DNA, 22 bp, Homo sapiens
  source 1..22: mol_type = genomic DNA
tcgaatcccatcctcgtcgcca

SEQ ID NO: 41355 - DNA, 20 bp, Homo sapiens
  source 1..20: mol_type = genomic DNA
tcgaatcccttcgtggttgc

SEQ ID NO: 41356 - DNA, 21 bp, Homo sapiens
  source 1..21: mol_type = genomic DNA
tcgaatcccttcgtggttgcc

SEQ ID NO: 41357 - DNA, 18 bp, Homo sapiens
  source 1..18: mol_type = genomic DNA
tcgaatccgagtcacggc

SEQ ID NO: 41358 - DNA, 19 bp, Homo sapiens
  source 1..19: mol_type = genomic DNA
tcgaatccgagtcacggca

SEQ ID NO: 41359 - DNA, 20 bp, Homo sapiens
  source 1..20: mol_type = genomic DNA
tcgaatccgagtcacggcac

SEQ ID NO: 41360 - DNA, 21 bp, Homo sapiens
  source 1..21: mol_type = genomic DNA
tcgaatccgagtcacggcacc

SEQ ID NO: 41361 - DNA, 22 bp, Homo sapiens
  source 1..22: mol_type = genomic DNA
tcgaatccgagtcacggcacca

SEQ ID NO: 41362 - DNA, 20 bp, Homo sapiens
  source 1..20: mol_type = genomic DNA
tcgaatccggctcgaaggac

SEQ ID NO: 41363 - DNA, 21 bp, Homo sapiens
  source 1..21: mol_type = genomic DNA
tcgaatccggctcgaaggacc

SEQ ID NO: 41364 - DNA, 20 bp, Homo sapiens
  source 1..20: mol_type = genomic DNA
tcgaatccggctcggaggac

SEQ ID NO: 41365 - DNA, 21 bp, Homo sapiens
  source 1..21: mol_type = genomic DNA
tcgaatccggctcggaggacc

SEQ ID NO: 41366 - DNA, 20 bp, Homo sapiens
  source 1..20: mol_type = genomic DNA
tcgaatcctgccgactacgc

SEQ ID NO: 41367 - DNA, 21 bp, Homo sapiens
  source 1..21: mol_type = genomic DNA
tcgaatcctgccgactacgcc

SEQ ID NO: 41368 - DNA, 22 bp, Homo sapiens
  source 1..22: mol_type = genomic DNA
tcgaatcctgccgactacgcca

SEQ ID NO: 41369 - DNA, 21 bp, Homo sapiens
  source 1..21: mol_type = genomic DNA
tcgaatcctgctcacagcgcc

SEQ ID NO: 41370 - DNA, 20 bp, Homo sapiens
  source 1..20: mol_type = genomic DNA
tcgaatcctgttcgtgacgc

SEQ ID NO: 41371 - DNA, 21 bp, Homo sapiens
  source 1..21: mol_type = genomic DNA
tcgaatcctgttcgtgacgcc

SEQ ID NO: 41372 - DNA, 19 bp, Homo sapiens
  source 1..19: mol_type = genomic DNA
tcgaatctcggtgggacct

SEQ ID NO: 41373 - DNA, 20 bp, Homo sapiens
  source 1..20: mol_type = genomic DNA
tcgaatctcggtgggacctc

SEQ ID NO: 41374 - DNA, 19 bp, Homo sapiens
  source 1..19: mol_type = genomic DNA
tcgactcccggtatgggaa

SEQ ID NO: 41375 - DNA, 20 bp, Homo sapiens
  source 1..20: mol_type = genomic DNA
tcgactcccggtatgggaac

SEQ ID NO: 41376 - DNA, 17 bp, Homo sapiens
  source 1..17: mol_type = genomic DNA
tcgactcccggtgtggg

SEQ ID NO: 41377 - DNA, 18 bp, Homo sapiens
  source 1..18: mol_type = genomic DNA
tcgactcccggtgtggga

SEQ ID NO: 41378 - DNA, 19 bp, Homo sapiens
  source 1..19: mol_type = genomic DNA
tcgactcccggtgtgggaa

SEQ ID NO: 41379 - DNA, 20 bp, Homo sapiens
  source 1..20: mol_type = genomic DNA
tcgactcccggtgtgggaac

SEQ ID NO: 41380 - DNA, 21 bp, Homo sapiens
  source 1..21: mol_type = genomic DNA
tcgactcccggtgtgggaacc

SEQ ID NO: 41381 - DNA, 22 bp, Homo sapiens
  source 1..22: mol_type = genomic DNA
tcgactcccggtgtgggaacca

SEQ ID NO: 41382 - DNA, 16 bp, Homo sapiens
  source 1..16: mol_type = genomic DNA
tcgactcctggctggc

SEQ ID NO: 41383 - DNA, 19 bp, Homo sapiens
  source 1..19: mol_type = genomic DNA
tcgactcctggctggctcg

SEQ ID NO: 41384 - DNA, 20 bp, Homo sapiens
  source 1..20: mol_type = genomic DNA
tcgactcctggctggctcgc

SEQ ID NO: 41385 - DNA, 21 bp, Homo sapiens
  source 1..21: mol_type = genomic DNA
tcgactcctggctggctcgcc

SEQ ID NO: 41386 - DNA, 22 bp, Homo sapiens
  source 1..22: mol_type = genomic DNA
tcgactcctggctggctcgcca

SEQ ID NO: 41387 - DNA, 21 bp, Homo sapiens
  source 1..21: mol_type = genomic DNA
tcgagcccacccagggacgcc

SEQ ID NO: 41388 - DNA, 22 bp, Homo sapiens
  source 1..22: mol_type = genomic DNA
tcgagcccacccagggacgcca

SEQ ID NO: 41389 - DNA, 19 bp, Homo sapiens
  source 1..19: mol_type = genomic DNA
tcgagccccacgttgggcg

SEQ ID NO: 41390 - DNA, 18 bp, Homo sapiens
  source 1..18: mol_type = genomic DNA
tcgagccccagtggaacc

SEQ ID NO: 41391 - DNA, 19 bp, Homo sapiens
  source 1..19: mol_type = genomic DNA
tcgagccccagtggaacca

SEQ ID NO: 41392 - DNA, 20 bp, Homo sapiens
  source 1..20: mol_type = genomic DNA
tcgagccccagtggaaccac

SEQ ID NO: 41393 - DNA, 21 bp, Homo sapiens
  source 1..21: mol_type = genomic DNA
tcgagccccagtggaaccacc

SEQ ID NO: 41394 - DNA, 22 bp, Homo sapiens
  source 1..22: mol_type = genomic DNA
tcgagccccagtggaaccacca

SEQ ID NO: 41395 - DNA, 21 bp, Homo sapiens
  source 1..21: mol_type = genomic DNA
tcgagcctcacacggggcacc

SEQ ID NO: 41396 - DNA, 21 bp, Homo sapiens
  source 1..21: mol_type = genomic DNA
tcgagcctcacctggagcacc

SEQ ID NO: 41397 - DNA, 22 bp, Homo sapiens
  source 1..22: mol_type = genomic DNA
tcgagcctcacctggagcacca

SEQ ID NO: 41398 - DNA, 20 bp, Homo sapiens
  source 1..20: mol_type = genomic DNA
tcgagcctcagagagggcac

SEQ ID NO: 41399 - DNA, 20 bp, Homo sapiens
  source 1..20: mol_type = genomic DNA
tcgagtcccacccggggtac

SEQ ID NO: 41400 - DNA, 21 bp, Homo sapiens
  source 1..21: mol_type = genomic DNA
tcgagtcccatctggggtgcc

SEQ ID NO: 41401 - DNA, 22 bp, Homo sapiens
  source 1..22: mol_type = genomic DNA
tcgagtcccatctggggtgcca

SEQ ID NO: 41402 - DNA, 20 bp, Homo sapiens
  source 1..20: mol_type = genomic DNA
tcgagtcccatctgggtcgc

SEQ ID NO: 41403 - DNA, 21 bp, Homo sapiens
  source 1..21: mol_type = genomic DNA
tcgagtcccatctgggtcgcc

SEQ ID NO: 41404 - DNA, 16 bp, Homo sapiens
  source 1..16: mol_type = genomic DNA
tcgagtcccggcggag

SEQ ID NO: 41405 - DNA, 18 bp, Homo sapiens
  source 1..18: mol_type = genomic DNA
tcgagtcccggcggagtc

SEQ ID NO: 41406 - DNA, 20 bp, Homo sapiens
  source 1..20: mol_type = genomic DNA
tcgagtcccggcggagtcgc

SEQ ID NO: 41407 - DNA, 21 bp, Homo sapiens
  source 1..21: mol_type = genomic DNA
tcgagtcccggcggagtcgcc

SEQ ID NO: 41408 - DNA, 20 bp, Homo sapiens
  source 1..20: mol_type = genomic DNA
tcgagtcccttcgtggtcgc

SEQ ID NO: 41409 - DNA, 21 bp, Homo sapiens
  source 1..21: mol_type = genomic DNA
tcgagtcccttcgtggtcgcc

SEQ ID NO: 41410 - DNA, 22 bp, Homo sapiens
  source 1..22: mol_type = genomic DNA
tcgagtcccttcgtggtcgcca

SEQ ID NO: 41411 - DNA, 20 bp, Homo sapiens
  source 1..20: mol_type = genomic DNA
tcgagtcctgccgcggtcgc

SEQ ID NO: 41412 - DNA, 21 bp, Homo sapiens
  source 1..21: mol_type = genomic DNA
tcgagtcctgccgcggtcgcc

SEQ ID NO: 41413 - DNA, 20 bp, Homo sapiens
  source 1..20: mol_type = genomic DNA
tcgatccccagcatctccac

SEQ ID NO: 41414 - DNA, 21 bp, Homo sapiens
  source 1..21: mol_type = genomic DNA
tcgatccccagcatctccacc

SEQ ID NO: 41415 - DNA, 21 bp, Homo sapiens
  source 1..21: mol_type = genomic DNA
tcgatccccggcacctccacc

SEQ ID NO: 41416 - DNA, 20 bp, Homo sapiens
  source 1..20: mol_type = genomic DNA
tcgatccccggcatctccac

SEQ ID NO: 41417 - DNA, 21 bp, Homo sapiens
  source 1..21: mol_type = genomic DNA
tcgatccccggcatctccacc

SEQ ID NO: 41418 - DNA, 17 bp, Homo sapiens
  source 1..17: mol_type = genomic DNA
tcgatccccgtacgggc

SEQ ID NO: 41419 - DNA, 18 bp, Homo sapiens
  source 1..18: mol_type = genomic DNA
tcgatccccgtacgggcc

SEQ ID NO: 41420 - DNA, 19 bp, Homo sapiens
  source 1..19: mol_type = genomic DNA
tcgatccccgtacgggcca

SEQ ID NO: 41421 - DNA, 20 bp, Homo sapiens
  source 1..20: mol_type = genomic DNA
tcgatccccgtacgggccac

SEQ ID NO: 41422 - DNA, 21 bp, Homo sapiens
  source 1..21: mol_type = genomic DNA
tcgatccccgtacgggccacc

SEQ ID NO: 41423 - DNA, 20 bp, Homo sapiens
  source 1..20: mol_type = genomic DNA
tcgatcccgggcggaaacac

SEQ ID NO: 41424 - DNA, 21 bp, Homo sapiens
  source 1..21: mol_type = genomic DNA
tcgatcccgggcggaaacacc

SEQ ID NO: 41425 - DNA, 20 bp, Homo sapiens
  source 1..20: mol_type = genomic DNA
tcgatcccgggtttcggcac

SEQ ID NO: 41426 - DNA, 21 bp, Homo sapiens
  source 1..21: mol_type = genomic DNA
tcgatgcccgcatcctccacc

SEQ ID NO: 41427 - DNA, 16 bp, Homo sapiens
  source 1..16: mol_type = genomic DNA
tcgatggatcgaaacc

SEQ ID NO: 41428 - DNA, 17 bp, Homo sapiens
  source 1..17: mol_type = genomic DNA
tcgatggatcgaaacca

SEQ ID NO: 41429 - DNA, 25 bp, Homo sapiens
  source 1..25: mol_type = genomic DNA
tcgatggatcgaaaccatcctctgc

SEQ ID NO: 41430 - DNA, 26 bp, Homo sapiens
  source 1..26: mol_type = genomic DNA
tcgatggatcgaaaccatcctctgct

SEQ ID NO: 41431 - DNA, 29 bp, Homo sapiens
  source 1..29: mol_type = genomic DNA
tcgatggatcgaaaccatcctctgctacc

SEQ ID NO: 41432 - DNA, 30 bp, Homo sapiens; identical to SEQ ID NO: 26204
  source 1..30: mol_type = genomic DNA

SEQ ID NO: 41433 - DNA, 16 bp, Homo sapiens
  source 1..16: mol_type = genomic DNA
tcgatggcgtgggttc

SEQ ID NO: 41434 - DNA, 17 bp, Homo sapiens
  source 1..17: mol_type = genomic DNA
tcgatggcgtgggttcg

SEQ ID NO: 41435 - DNA, 24 bp, Homo sapiens
  source 1..24: mol_type = genomic DNA
tcgatggcgtgggttcgaatccca

SEQ ID NO: 41436 - DNA, 30 bp, Homo sapiens; identical to SEQ ID NO: 26211
  source 1..30: mol_type = genomic DNA

SEQ ID NO: 41437 - DNA, 35 bp, Homo sapiens; identical to SEQ ID NO: 26212
  source 1..35: mol_type = genomic DNA

SEQ ID NO: 41438 - DNA, 16 bp, Homo sapiens
  source 1..16: mol_type = genomic DNA
tcgattccccgacggg

SEQ ID NO: 41439 - DNA, 17 bp, Homo sapiens
  source 1..17: mol_type = genomic DNA
tcgattccccgacgggg

SEQ ID NO: 41440 - DNA, 18 bp, Homo sapiens
  source 1..18: mol_type = genomic DNA
tcgattccccgacgggga

SEQ ID NO: 41441 - DNA, 19 bp, Homo sapiens
  source 1..19: mol_type = genomic DNA
tcgattccccgacggggag

SEQ ID NO: 41442 - DNA, 20 bp, Homo sapiens
  source 1..20: mol_type = genomic DNA
tcgattccccgacggggagc

SEQ ID NO: 41443 - DNA, 21 bp, Homo sapiens
  source 1..21: mol_type = genomic DNA
tcgattccccgacggggagcc

SEQ ID NO: 41444 - DNA, 22 bp, Homo sapiens
  source 1..22: mol_type = genomic DNA
tcgattccccgacggggagcca

SEQ ID NO: 41445 - DNA, 20 bp, Homo sapiens
  source 1..20: mol_type = genomic DNA
tcgattcccggccaacgcac

SEQ ID NO: 41446 - DNA, 21 bp, Homo sapiens
  source 1..21: mol_type = genomic DNA
tcgattcccggccaacgcacc

SEQ ID NO: 41447 - DNA, 22 bp, Homo sapiens
  source 1..22: mol_type = genomic DNA
tcgattcccggccaacgcacca

SEQ ID NO: 41448 - DNA, 19 bp, Homo sapiens
  source 1..19: mol_type = genomic DNA
tcgattcccggccaatgca

SEQ ID NO: 41449 - DNA, 20 bp, Homo sapiens
  source 1..20: mol_type = genomic DNA
tcgattcccggccaatgcac

SEQ ID NO: 41450 - DNA, 21 bp, Homo sapiens
  source 1..21: mol_type = genomic DNA
tcgattcccggccaatgcacc

SEQ ID NO: 41451 - DNA, 22 bp, Homo sapiens
  source 1..22: mol_type = genomic DNA
tcgattcccggccaatgcacca

SEQ ID NO: 41452 - DNA, 19 bp, Homo sapiens
  source 1..19: mol_type = genomic DNA
tcgattcccggcccatgca

SEQ ID NO: 41453 - DNA, 20 bp, Homo sapiens
  source 1..20: mol_type = genomic DNA
tcgattcccggcccatgcac

SEQ ID NO: 41454 - DNA, 21 bp, Homo sapiens
  source 1..21: mol_type = genomic DNA
tcgattcccggcccatgcacc

SEQ ID NO: 41455 - DNA, 16 bp, Homo sapiens
  source 1..16: mol_type = genomic DNA
tcgattcccgggcggc

SEQ ID NO: 41456 - DNA, 19 bp, Homo sapiens
  source 1..19: mol_type = genomic DNA
tcgattcccgggcggcgca

SEQ ID NO: 41457 - DNA, 20 bp, Homo sapiens
  source 1..20: mol_type = genomic DNA
tcgattcccgggcggcgcac

SEQ ID NO: 41458 - DNA, 21 bp, Homo sapiens
  source 1..21: mol_type = genomic DNA
tcgattcccgggcggcgcacc

SEQ ID NO: 41459 - DNA, 22 bp, Homo sapiens
  source 1..22: mol_type = genomic DNA
tcgattcccgggcggcgcacca

SEQ ID NO: 41460 - DNA, 17 bp, Homo sapiens
  source 1..17: mol_type = genomic DNA
tcgattcccggtcaggg

SEQ ID NO: 41461 - DNA, 19 bp, Homo sapiens
  source 1..19: mol_type = genomic DNA
tcgattcccggtcagggaa

SEQ ID NO: 41462 - DNA, 20 bp, Homo sapiens
  source 1..20: mol_type = genomic DNA
tcgattcccggtcagggaac

SEQ ID NO: 41463 - DNA, 21 bp, Homo sapiens
  source 1..21: mol_type = genomic DNA
tcgattcccggtcagggaacc

SEQ ID NO: 41464 - DNA, 20 bp, Homo sapiens
  source 1..20: mol_type = genomic DNA
tcgattccggctcgaaggac

SEQ ID NO: 41465 - DNA, 21 bp, Homo sapiens
  source 1..21: mol_type = genomic DNA
tcgattccggctcgaaggacc

SEQ ID NO: 41466 - DNA, 22 bp, Homo sapiens
  source 1..22: mol_type = genomic DNA
tcgattccggctcgaaggacca

SEQ ID NO: 41467 - DNA, 19 bp, Homo sapiens
  source 1..19: mol_type = genomic DNA
tcgattctcatagtcctag

SEQ ID NO: 41468 - DNA, 20 bp, Homo sapiens
  source 1..20: mol_type = genomic DNA
tcgattctcatagtcctagc

SEQ ID NO: 41469 - DNA, 21 bp, Homo sapiens
  source 1..21: mol_type = genomic DNA
tcgattctcatagtcctagcc

SEQ ID NO: 41470 - DNA, 22 bp, Homo sapiens
  source 1..22: mol_type = genomic DNA
tcgattctcatagtcctagcca

SEQ ID NO: 41471 - DNA, 23 bp, Homo sapiens
  source 1..23: mol_type = genomic DNA
tcgcctgccacgcgggaggcccg

SEQ ID NO: 41472 - DNA, 24 bp, Homo sapiens
  source 1..24: mol_type = genomic DNA
tcgcctgccacgcgggaggcccgg

SEQ ID NO: 41473 - DNA, 25 bp, Homo sapiens
  source 1..25: mol_type = genomic DNA
tcgcctgccacgcgggaggcccggg

SEQ ID NO: 41474 - DNA, 26 bp, Homo sapiens
  source 1..26: mol_type = genomic DNA
tcgcctgccacgcgggaggcccgggt

SEQ ID NO: 41475 - DNA, 28 bp, Homo sapiens
  source 1..28: mol_type = genomic DNA
tcgcgagttcaaatctcgctggggcctc

SEQ ID NO: 41476 - DNA, 25 bp, Homo sapiens
  source 1..25: mol_type = genomic DNA
tcgcgggttcgatccccgtacgggc

SEQ ID NO: 41477 - DNA, 26 bp, Homo sapiens
  source 1..26: mol_type = genomic DNA
tcgcgggttcgatccccgtacgggcc

SEQ ID NO: 41478 - DNA, 27 bp, Homo sapiens
  source 1..27: mol_type = genomic DNA
tcgcgggttcgatccccgtacgggcca

SEQ ID NO: 41479 - DNA, 28 bp, Homo sapiens
  source 1..28: mol_type = genomic DNA
tcgcgggttcgatccccgtacgggccac

SEQ ID NO: 41480 - DNA, 29 bp, Homo sapiens
  source 1..29: mol_type = genomic DNA
tcgcgggttcgatccccgtacgggccacc

SEQ ID NO: 41481 - DNA, 28 bp, Homo sapiens
  source 1..28: mol_type = genomic DNA
tcgctggttcgaatccggctcgaaggac

SEQ ID NO: 41482 - DNA, 29 bp, Homo sapiens
  source 1..29: mol_type = genomic DNA
tcgctggttcgaatccggctcgaaggacc

SEQ ID NO: 41483 - DNA, 30 bp, Homo sapiens; identical to SEQ ID NO: 26303
  source 1..30: mol_type = genomic DNA

SEQ ID NO: 41484 - DNA, 28 bp, Homo sapiens
  source 1..28: mol_type = genomic DNA
tcgctggttcgaatccggctcggaggac

SEQ ID NO: 41485 - DNA, 29 bp, Homo sapiens
  source 1..29: mol_type = genomic DNA
tcgctggttcgaatccggctcggaggacc

SEQ ID NO: 41486 - DNA, 29 bp, Homo sapiens
  source 1..29: mol_type = genomic DNA
tcgctggttcgattccagctcgaaggacc

SEQ ID NO: 41487 - DNA, 28 bp, Homo sapiens
  source 1..28: mol_type = genomic DNA
tcgctggttcgattccggctcgaaggac

SEQ ID NO: 41488 - DNA, 29 bp, Homo sapiens
  source 1..29: mol_type = genomic DNA
tcgctggttcgattccggctcgaaggacc

SEQ ID NO: 41489 - DNA, 30 bp, Homo sapiens; identical to SEQ ID NO: 26315
  source 1..30: mol_type = genomic DNA

SEQ ID NO: 41490 - DNA, 19 bp, Homo sapiens
  source 1..19: mol_type = genomic DNA
tcggatcagaagattgcag

SEQ ID NO: 41491 - DNA, 41 bp, Homo sapiens; identical to SEQ ID NO: 26329
  source 1..41: mol_type = genomic DNA

SEQ ID NO: 41492 - DNA, 42 bp, Homo sapiens; identical to SEQ ID NO: 26330
  source 1..42: mol_type = genomic DNA

SEQ ID NO: 41493 - DNA, 16 bp, Homo sapiens
  source 1..16: mol_type = genomic DNA
tcggcgctctcaccgc

SEQ ID NO: 41494 - DNA, 17 bp, Homo sapiens
  source 1..17: mol_type = genomic DNA
tcggcgctctcaccgcc

SEQ ID NO: 41495 - DNA, 26 bp, Homo sapiens
  source 1..26: mol_type = genomic DNA
tcggcgctctcaccgccgcggcccgg

SEQ ID NO: 41496 - DNA, 47 bp, Homo sapiens
  source 1..47: mol_type = genomic DNA
tcggcgctctcaccgccgcggcccgggttcgattcccggtcagggaa

SEQ ID NO: 41497 - DNA, 23 bp, Homo sapiens
  source 1..23: mol_type = genomic DNA
tcggctgttaaccgaaaggttgg

SEQ ID NO: 41498 - DNA, 25 bp, Homo sapiens
  source 1..25: mol_type = genomic DNA
tcggctgttaaccgaaaggttggtg

SEQ ID NO: 41499 - DNA, 26 bp, Homo sapiens
  source 1..26: mol_type = genomic DNA
tcggctgttaaccgaaaggttggtgg

SEQ ID NO: 41500 - DNA, 47 bp, Homo sapiens
  source 1..47: mol_type = genomic DNA
tcggctgttaaccgaaaggttggtggttcgagcccacccagggacgc

SEQ ID NO: 41501 - DNA, 19 bp, Homo sapiens
  source 1..19: mol_type = genomic DNA
tcgggcccataccccgaaa

SEQ ID NO: 41502 - DNA, 31 bp, Homo sapiens
  source 1..31: mol_type = genomic DNA
tcgggggcgtgggttcgaatcccaccgctgc

SEQ ID NO: 41503 - DNA, 17 bp, Homo sapiens
  source 1..17: mol_type = genomic DNA
tcgggtgcgagaggtcc

SEQ ID NO: 41504 - DNA, 18 bp, Homo sapiens
  source 1..18: mol_type = genomic DNA
tcgggtgcgagaggtccc

SEQ ID NO: 41505 - DNA, 19 bp, Homo sapiens
  source 1..19: mol_type = genomic DNA
tcgggtgcgagaggtcccg

SEQ ID NO: 41506 - DNA, 23 bp, Homo sapiens
  source 1..23: mol_type = genomic DNA
tcgggtgcgagaggtcccgggtt

SEQ ID NO: 41507 - DNA, 42 bp, Homo sapiens
  source 1..42: mol_type = genomic DNA
tcgggtgcgagaggtcccgggttcaaatcccggacgagcccc

SEQ ID NO: 41508 - DNA, 17 bp, Homo sapiens
  source 1..17: mol_type = genomic DNA
tcggtagagcatcagac

SEQ ID NO: 41509 - DNA, 18 bp, Homo sapiens
  source 1..18: mol_type = genomic DNA
tcggtagagcatcagact

SEQ ID NO: 41510 - DNA, 25 bp, Homo sapiens
  source 1..25: mol_type = genomic DNA
tcggtagagcatcagacttttaatc

SEQ ID NO: 41511 - DNA, 16 bp, Homo sapiens
  source 1..16: mol_type = genomic DNA
tcggtagagcatgaga

SEQ ID NO: 41512 - DNA, 17 bp, Homo sapiens
  source 1..17: mol_type = genomic DNA
tcggtagagcatgagac

SEQ ID NO: 41513 - DNA, 18 bp, Homo sapiens
  source 1..18: mol_type = genomic DNA
tcggtagagcatgagacc

SEQ ID NO: 41514 - DNA, 19 bp, Homo sapiens
  source 1..19: mol_type = genomic DNA
tcggtagagcatgagaccc

SEQ ID NO: 41515 - DNA, 20 bp, Homo sapiens
  source 1..20: mol_type = genomic DNA
tcggtagagcatgagaccct

SEQ ID NO: 41516 - DNA, 24 bp, Homo sapiens
  source 1..24: mol_type = genomic DNA
tcggtagagcatgagacccttaat

SEQ ID NO: 41517 - DNA, 25 bp, Homo sapiens
  source 1..25: mol_type = genomic DNA
tcggtagagcatgagacccttaatc

SEQ ID NO: 41518 - DNA, 26 bp, Homo sapiens
  source 1..26: mol_type = genomic DNA
tcggtagagcatgagacccttaatct

SEQ ID NO: 41519 - DNA, 27 bp, Homo sapiens
  source 1..27: mol_type = genomic DNA
tcggtagagcatgagacccttaatctc

SEQ ID NO: 41520 - DNA, 18 bp, Homo sapiens
  source 1..18: mol_type = genomic DNA
tcggtagagcatgagact

SEQ ID NO: 41521 - DNA, 19 bp, Homo sapiens
  source 1..19: mol_type = genomic DNA
tcggtagagcatgagactc

SEQ ID NO: 41522 - DNA, 20 bp, Homo sapiens
  source 1..20: mol_type = genomic DNA
tcggtagagcatgagactct

SEQ ID NO: 41523 - DNA, 25 bp, Homo sapiens
  source 1..25: mol_type = genomic DNA
tcggtagagcatgagactcttaatc

SEQ ID NO: 41524 - DNA, 26 bp, Homo sapiens
  source 1..26: mol_type = genomic DNA
tcggtagagcatgagactcttaatct

SEQ ID NO: 41525 - DNA, 27 bp, Homo sapiens
  source 1..27: mol_type = genomic DNA
tcggtagagcatgagactcttaatctc

SEQ ID NO: 41526 - DNA, 37 bp, Homo sapiens; identical to SEQ ID NO: 26409
  source 1..37: mol_type = genomic DNA

SEQ ID NO: 41527 - DNA, 40 bp, Homo sapiens; identical to SEQ ID NO: 26412
  source 1..40: mol_type = genomic DNA

SEQ ID NO: 41528 - DNA, 16 bp, Homo sapiens
  source 1..16: mol_type = genomic DNA
tcggtagagcatggga

SEQ ID NO: 41529 - DNA, 17 bp, Homo sapiens
  source 1..17: mol_type = genomic DNA
tcggtagagcatgggac

SEQ ID NO: 41530 - DNA, 18 bp, Homo sapiens
  source 1..18: mol_type = genomic DNA
tcggtagagcatgggact

SEQ ID NO: 41531 - DNA, 19 bp, Homo sapiens
  source 1..19: mol_type = genomic DNA
tcggtagagcatgggactc

SEQ ID NO: 41532 - DNA, 20 bp, Homo sapiens
  source 1..20: mol_type = genomic DNA
tcggtagagcatgggactct

SEQ ID NO: 41533 - DNA, 24 bp, Homo sapiens
  source 1..24: mol_type = genomic DNA
tcggtagagcatgggactcttaat

SEQ ID NO: 41534 - DNA, 25 bp, Homo sapiens
  source 1..25: mol_type = genomic DNA
tcggtagagcatgggactcttaatc

SEQ ID NO: 41535 - DNA, 26 bp, Homo sapiens
  source 1..26: mol_type = genomic DNA
tcggtagagcatgggactcttaatcc

SEQ ID NO: 41536 - DNA, 27 bp, Homo sapiens
  source 1..27: mol_type = genomic DNA
tcggtagagcatgggactcttaatccc

SEQ ID NO: 41537 - DNA, 37 bp, Homo sapiens; identical to SEQ ID NO: 26429
  source 1..37: mol_type = genomic DNA

SEQ ID NO: 41538 - DNA, 40 bp, Homo sapiens; identical to SEQ ID NO: 26432
  source 1..40: mol_type = genomic DNA

SEQ ID NO: 41539 - DNA, 18 bp, Homo sapiens
  source 1..18: mol_type = genomic DNA
tcggttagcgcgcggtac

SEQ ID NO: 41540 - DNA, 23 bp, Homo sapiens
  source 1..23: mol_type = genomic DNA
tcggttcgaatccgagtcacggc

SEQ ID NO: 41541 - DNA, 24 bp, Homo sapiens
  source 1..24: mol_type = genomic DNA
tcggttcgaatccgagtcacggca

SEQ ID NO: 41542 - DNA, 25 bp, Homo sapiens
  source 1..25: mol_type = genomic DNA
tcggttcgaatccgagtcacggcac

SEQ ID NO: 41543 - DNA, 22 bp, Homo sapiens
  source 1..22: mol_type = genomic DNA
tcgtaaaccgaagatcacgggt

SEQ ID NO: 41544 - DNA, 18 bp, Homo sapiens
  source 1..18: mol_type = genomic DNA
tcgtaaaccgaagatcgc

SEQ ID NO: 41545 - DNA, 19 bp, Homo sapiens
  source 1..19: mol_type = genomic DNA
tcgtaaaccgaagatcgcg

SEQ ID NO: 41546 - DNA, 20 bp, Homo sapiens
  source 1..20: mol_type = genomic DNA
tcgtaaaccgaagatcgcgg

SEQ ID NO: 41547 - DNA, 21 bp, Homo sapiens
  source 1..21: mol_type = genomic DNA
tcgtaaaccgaagatcgcggg

SEQ ID NO: 41548 - DNA, 22 bp, Homo sapiens
  source 1..22: mol_type = genomic DNA
tcgtaaaccgaagatcgcgggt

SEQ ID NO: 41549 - DNA, 23 bp, Homo sapiens
  source 1..23: mol_type = genomic DNA
tcgtaaaccgaagatcgcgggtt

SEQ ID NO: 41550 - DNA, 17 bp, Homo sapiens
  source 1..17: mol_type = genomic DNA
tcgtatagtggttagta

SEQ ID NO: 41551 - DNA, 19 bp, Homo sapiens
  source 1..19: mol_type = genomic DNA
tcgtatagtggttagtact

SEQ ID NO: 41552 - DNA, 20 bp, Homo sapiens
  source 1..20: mol_type = genomic DNA
tcgtatagtggttagtactc

SEQ ID NO: 41553 - DNA, 21 bp, Homo sapiens
  source 1..21: mol_type = genomic DNA
tcgtatagtggttagtactct

SEQ ID NO: 41554 - DNA, 22 bp, Homo sapiens
  source 1..22: mol_type = genomic DNA
tcgtatagtggttagtactctg

SEQ ID NO: 41555 - DNA, 23 bp, Homo sapiens
  source 1..23: mol_type = genomic DNA
tcgtatagtggttagtactctgc

SEQ ID NO: 41556 - DNA, 24 bp, Homo sapiens
  source 1..24: mol_type = genomic DNA
tcgtatagtggttagtactctgcg

SEQ ID NO: 41557 - DNA, 26 bp, Homo sapiens
  source 1..26: mol_type = genomic DNA
tcgtatagtggttagtactctgcgtt

SEQ ID NO: 41558 - DNA, 41 bp, Homo sapiens; identical to SEQ ID NO: 26478
  source 1..41: mol_type = genomic DNA

SEQ ID NO: 41559 - DNA, 42 bp, Homo sapiens; identical to SEQ ID NO: 26479
  source 1..42: mol_type = genomic DNA

SEQ ID NO: 41560 - DNA, 43 bp, Homo sapiens; identical to SEQ ID NO: 26480
  source 1..43: mol_type = genomic DNA

SEQ ID NO: 41561 - DNA, 44 bp, Homo sapiens; identical to SEQ ID NO: 26481
  source 1..44: mol_type = genomic DNA

SEQ ID NO: 41562 - DNA, 46 bp, Homo sapiens; identical to SEQ ID NO: 26482
  source 1..46: mol_type = genomic DNA

SEQ ID NO: 41563 - DNA, 27 bp, Homo sapiens
  source 1..27: mol_type = genomic DNA
tcgtgagttcgatcctcacacggggca

SEQ ID NO: 41564 - DNA, 19 bp, Homo sapiens
  source 1..19: mol_type = genomic DNA
tcgtggccgagtggttaag

SEQ ID NO: 41565 - DNA, 26 bp, Homo sapiens
  source 1..26: mol_type = genomic DNA
tcgtgggttcgagccccacgttgggc

SEQ ID NO: 41566 - DNA, 27 bp, Homo sapiens
  source 1..27: mol_type = genomic DNA
tcgtgggttcgagccccacgttgggcg

SEQ ID NO: 41567 - DNA, 28 bp, Homo sapiens
  source 1..28: mol_type = genomic DNA
tcgtgggttcgagccccacgttgggcgc

SEQ ID NO: 41568 - DNA, 29 bp, Homo sapiens
  source 1..29: mol_type = genomic DNA
tcgtgggttcgagccccacgttgggcgcc

SEQ ID NO: 41569 - DNA, 30 bp, Homo sapiens; identical to SEQ ID NO: 26498
  source 1..30: mol_type = genomic DNA

SEQ ID NO: 41570 - DNA, 16 bp, Homo sapiens
  source 1..16: mol_type = genomic DNA
tcgtggttgtagtccg

SEQ ID NO: 41571 - DNA, 19 bp, Homo sapiens
  source 1..19: mol_type = genomic DNA
tcgtggttgtagtccgtgc

SEQ ID NO: 41572 - DNA, 20 bp, Homo sapiens
  source 1..20: mol_type = genomic DNA
tcgtggttgtagtccgtgcg

SEQ ID NO: 41573 - DNA, 23 bp, Homo sapiens
  source 1..23: mol_type = genomic DNA
tcgtggttgtagtccgtgcgaga

SEQ ID NO: 41574 - DNA, 24 bp, Homo sapiens
  source 1..24: mol_type = genomic DNA
tcgtggttgtagtccgtgcgagaa

SEQ ID NO: 41575 - DNA, 25 bp, Homo sapiens
  source 1..25: mol_type = genomic DNA
tcgtggttgtagtccgtgcgagaat

SEQ ID NO: 41576 - DNA, 26 bp, Homo sapiens
  source 1..26: mol_type = genomic DNA
tcgtggttgtagtccgtgcgagaata

SEQ ID NO: 41577 - DNA, 27 bp, Homo sapiens
  source 1..27: mol_type = genomic DNA
tcgtggttgtagtccgtgcgagaatac

SEQ ID NO: 41578 - DNA, 28 bp, Homo sapiens
  source 1..28: mol_type = genomic DNA
tcgtggttgtagtccgtgcgagaatacc

SEQ ID NO: 41579 - DNA, 29 bp, Homo sapiens
  source 1..29: mol_type = genomic DNA
tcgtggttgtagtccgtgcgagaatacca

SEQ ID NO: 41580 - DNA, 23 bp, Homo sapiens
  source 1..23: mol_type = genomic DNA
tcgttggtctaggggtatgattc

SEQ ID NO: 41581 - DNA, 25 bp, Homo sapiens
  source 1..25: mol_type = genomic DNA
tcgttggtctaggggtatgattctc

SEQ ID NO: 41582 - DNA, 28 bp, Homo sapiens
  source 1..28: mol_type = genomic DNA
tcgttggtctaggggtatgattctcgct

SEQ ID NO: 41583 - DNA, 29 bp, Homo sapiens
  source 1..29: mol_type = genomic DNA
tcgttggtctaggggtatgattctcgctt

SEQ ID NO: 41584 - DNA, 32 bp, Homo sapiens; identical to SEQ ID NO: 26542
  source 1..32: mol_type = genomic DNA

SEQ ID NO: 41585 - DNA, 21 bp, Homo sapiens
  source 1..21: mol_type = genomic DNA
tctaaaccatcctctgctacc

SEQ ID NO: 41586 - DNA, 21 bp, Homo sapiens
  source 1..21: mol_type = genomic DNA
tctaaagacaggggttaggcc

SEQ ID NO: 41587 - DNA, 33 bp, Homo sapiens
  source 1..33: mol_type = genomic DNA
tctaaaggtccctggttcaatcccgggtttcgg

SEQ ID NO: 41588 - DNA, 35 bp, Homo sapiens
  source 1..35: mol_type = genomic DNA
tctaaaggtccctggttcaatcccgggtttcggca

SEQ ID NO: 41589 - DNA, 36 bp, Homo sapiens
  source 1..36: mol_type = genomic DNA
tctaaaggtccctggttcaatcccgggtttcggcac

SEQ ID NO: 41590 - DNA, 37 bp, Homo sapiens; identical to SEQ ID NO: 26560
  source 1..37: mol_type = genomic DNA

SEQ ID NO: 41591 - DNA, 33 bp, Homo sapiens
  source 1..33: mol_type = genomic DNA
tctaaaggtccctggttcgatcccgggtttcgg

SEQ ID NO: 41592 - DNA, 34 bp, Homo sapiens
  source 1..34: mol_type = genomic DNA
tctaaaggtccctggttcgatcccgggtttcggc

SEQ ID NO: 41593 - DNA, 35 bp, Homo sapiens; identical to SEQ ID NO: 26564
  source 1..35: mol_type = genomic DNA

SEQ ID NO: 41594 - DNA, 36 bp, Homo sapiens; identical to SEQ ID NO: 26565
  source 1..36: mol_type = genomic DNA

SEQ ID NO: 41595 - DNA, 37 bp, Homo sapiens; identical to SEQ ID NO: 26566
  source 1..37: mol_type = genomic DNA

SEQ ID NO: 41596 - DNA, 38 bp, Homo sapiens; identical to SEQ ID NO: 26567
  source 1..38: mol_type = genomic DNA

SEQ ID NO: 41597 - DNA, 23 bp, Homo sapiens
  source 1..23: mol_type = genomic DNA
tctaacaacatggctttctcacc

SEQ ID NO: 41598 - DNA, 24 bp, Homo sapiens
  source 1..24: mol_type = genomic DNA
tctaacaacatggctttctcacca

SEQ ID NO: 41599 - DNA, 16 bp, Homo sapiens
  source 1..16: mol_type = genomic DNA
tctaaggcgctgcgtt

SEQ ID NO: 41600 - DNA, 43 bp, Homo sapiens; identical to SEQ ID NO: 26582
  source 1..43: mol_type = genomic DNA

SEQ ID NO: 41601 - DNA, 42 bp, Homo sapiens; identical to SEQ ID NO: 26585
  source 1..42: mol_type = genomic DNA

SEQ ID NO: 41602 - DNA, 42 bp, Homo sapiens
  source 1..42: mol_type = genomic DNA
tctaattcaaaggttgtgggttcgaatcccaccagagtcgcc

SEQ ID NO: 41603 - DNA, 42 bp, Homo sapiens
  source 1..42: mol_type = genomic DNA
tctaattcaaaggttgtgggttcgagtcccaccagagtcgcc

SEQ ID NO: 41604 - DNA, 16 bp, Homo sapiens
  source 1..16: mol_type = genomic DNA
tctagcggttaggatt

SEQ ID NO: 41605 - DNA, 17 bp, Homo sapiens
  source 1..17: mol_type = genomic DNA
tctagcggttaggattc

SEQ ID NO: 41606 - DNA, 18 bp, Homo sapiens
  source 1..18: mol_type = genomic DNA
tctagcggttaggattcc

SEQ ID NO: 41607 - DNA, 19 bp, Homo sapiens
  source 1..19: mol_type = genomic DNA
tctagcggttaggattcct

SEQ ID NO: 41608 - DNA, 20 bp, Homo sapiens
  source 1..20: mol_type = genomic DNA
tctagcggttaggattcctg

SEQ ID NO: 41609 - DNA, 21 bp, Homo sapiens
  source 1..21: mol_type = genomic DNA
tctagcggttaggattcctgg

SEQ ID NO: 41610 - DNA, 22 bp, Homo sapiens
  source 1..22: mol_type = genomic DNA
tctagcggttaggattcctggt

SEQ ID NO: 41611 - DNA, 23 bp, Homo sapiens
  source 1..23: mol_type = genomic DNA
tctagcggttaggattcctggtt

SEQ ID NO: 41612 - DNA, 18 bp, Homo sapiens
  source 1..18: mol_type = genomic DNA
tctaggggtatgattctc

SEQ ID NO: 41613 - DNA, 20 bp, Homo sapiens
  source 1..20: mol_type = genomic DNA
tctaggggtatgattctcgc

SEQ ID NO: 41614 - DNA, 21 bp, Homo sapiens
  source 1..21: mol_type = genomic DNA
tctaggggtatgattctcgct

SEQ ID NO: 41615 - DNA, 22 bp, Homo sapiens
  source 1..22: mol_type = genomic DNA
tctaggggtatgattctcgctt

SEQ ID NO: 41616 - DNA, 22 bp, Homo sapiens
  source 1..22: mol_type = genomic DNA
tctaggggtatgattctcggtt

SEQ ID NO: 41617 - DNA, 25 bp, Homo sapiens
  source 1..25: mol_type = genomic DNA
tctaggttcgactcctggctggctc

SEQ ID NO: 41618 - DNA, 26 bp, Homo sapiens
  source 1..26: mol_type = genomic DNA
tctaggttcgactcctggctggctcg

SEQ ID NO: 41619 - DNA, 27 bp, Homo sapiens
  source 1..27: mol_type = genomic DNA
tctaggttcgactcctggctggctcgc

SEQ ID NO: 41620 - DNA, 28 bp, Homo sapiens
  source 1..28: mol_type = genomic DNA
tctaggttcgactcctggctggctcgcc

SEQ ID NO: 41621 - DNA, 20 bp, Homo sapiens
  source 1..20: mol_type = genomic DNA
tctagtggctaggattcggc

SEQ ID NO: 41622 - DNA, 18 bp, Homo sapiens
  source 1..18: mol_type = genomic DNA
tctagtggtatgattctc

SEQ ID NO: 41623 - DNA, 20 bp, Homo sapiens
  source 1..20: mol_type = genomic DNA
tctagtggtatgattctcgc

SEQ ID NO: 41624 - DNA, 21 bp, Homo sapiens
  source 1..21: mol_type = genomic DNA
tctagtggtatgattctcgct

SEQ ID NO: 41625 - DNA, 22 bp, Homo sapiens
  source 1..22: mol_type = genomic DNA
tctagtggtatgattctcgctt

SEQ ID NO: 41626 - DNA, 18 bp, Homo sapiens
  source 1..18: mol_type = genomic DNA
tctagtggttaggattcg

SEQ ID NO: 41627 - DNA, 20 bp, Homo sapiens
  source 1..20: mol_type = genomic DNA
tctagtggttaggattcggc

SEQ ID NO: 41628 - DNA, 21 bp, Homo sapiens
  source 1..21: mol_type = genomic DNA
tctagtggttaggattcggcg

SEQ ID NO: 41629 - DNA, 22 bp, Homo sapiens
  source 1..22: mol_type = genomic DNA
tctagtggttaggattcggcgc

SEQ ID NO: 41630 - DNA, 23 bp, Homo sapiens
  source 1..23: mol_type = genomic DNA
tctagtggttaggattcggcgct

SEQ ID NO: 41631 - DNA, 24 bp, Homo sapiens
  source 1..24: mol_type = genomic DNA
tctagtggttaggattcggcgctc

SEQ ID NO: 41632 - DNA, 25 bp, Homo sapiens
  source 1..25: mol_type = genomic DNA
tctagtggttaggattcggcgctct

SEQ ID NO: 41633 - DNA, 29 bp, Homo sapiens
  source 1..29: mol_type = genomic DNA
tctagtggttaggattcggcgctctcacc

SEQ ID NO: 41634 - DNA, 30 bp, Homo sapiens; identical to SEQ ID NO: 26641
  source 1..30: mol_type = genomic DNA

SEQ ID NO: 41635 - DNA, 32 bp, Homo sapiens; identical to SEQ ID NO: 26643
  source 1..32: mol_type = genomic DNA

SEQ ID NO: 41636 - DNA, 39 bp, Homo sapiens; identical to SEQ ID NO: 26644
  source 1..39: mol_type = genomic DNA

SEQ ID NO: 41637 - DNA, 17 bp, Homo sapiens
  source 1..17: mol_type = genomic DNA
tctcaccgccgcggccc

SEQ ID NO: 41638 - DNA, 40 bp, Homo sapiens; identical to SEQ ID NO: 26665
  source 1..40: mol_type = genomic DNA

SEQ ID NO: 41639 - DNA, 41 bp, Homo sapiens; identical to SEQ ID NO: 26666
  source 1..41: mol_type = genomic DNA

SEQ ID NO: 41640 - DNA, 42 bp, Homo sapiens; identical to SEQ ID NO: 26667
  source 1..42: mol_type = genomic DNA

SEQ ID NO: 41641 - DNA, 43 bp, Homo sapiens; identical to SEQ ID NO: 26668
  source 1..43: mol_type = genomic DNA

SEQ ID NO: 41642 - DNA, 31 bp, Homo sapiens; identical to SEQ ID NO: 26674
  source 1..31: mol_type = genomic DNA

SEQ ID NO: 41643 - DNA, 33 bp, Homo sapiens; identical to SEQ ID NO: 26676
  source 1..33: mol_type = genomic DNA

SEQ ID NO: 41644 - DNA, 34 bp, Homo sapiens; identical to SEQ ID NO: 26677
  source 1..34: mol_type = genomic DNA

SEQ ID NO: 41645 - DNA, 29 bp, Homo sapiens
  source 1..29: mol_type = genomic DNA
tctcagggtcgtgggttcgagccccacgt

SEQ ID NO: 41646 - DNA, 33 bp, Homo sapiens; identical to SEQ ID NO: 26682
  source 1..33: mol_type = genomic DNA

SEQ ID NO: 41647 - DNA, 35 bp, Homo sapiens; identical to SEQ ID NO: 26684
  source 1..35: mol_type = genomic DNA

SEQ ID NO: 41648 - DNA, 36 bp, Homo sapiens; identical to SEQ ID NO: 26685
  source 1..36: mol_type = genomic DNA

SEQ ID NO: 41649 - DNA, 37 bp, Homo sapiens; identical to SEQ ID NO: 26686
  source 1..37: mol_type = genomic DNA

SEQ ID NO: 41650 - DNA, 38 bp, Homo sapiens; identical to SEQ ID NO: 26687
  source 1..38: mol_type = genomic DNA

SEQ ID NO: 41651 - DNA, 21 bp, Homo sapiens
  source 1..21: mol_type = genomic DNA
tctcataatctgaaggtcctg

SEQ ID NO: 41652 - DNA, 16 bp, Homo sapiens
  source 1..16: mol_type = genomic DNA
tctcatagtcctagcc

SEQ ID NO: 41653 - DNA, 39 bp, Homo sapiens; identical to SEQ ID NO: 26705
  source 1..39: mol_type = genomic DNA

SEQ ID NO: 41654 - DNA, 40 bp, Homo sapiens
  source 1..40: mol_type = genomic DNA
tctccaatggaggcgtgggttcgaatcccacttctgacac

SEQ ID NO: 41655 - DNA, 40 bp, Homo sapiens
  source 1..40: mol_type = genomic DNA
tctccggatggaggcgtgggttcgaatcccacttctgaca

SEQ ID NO: 41656 - DNA, 41 bp, Homo sapiens; identical to SEQ ID NO: 26727
  source 1..41: mol_type = genomic DNA

SEQ ID NO: 41657 - DNA, 42 bp, Homo sapiens; identical to SEQ ID NO: 26728
  source 1..42: mol_type = genomic DNA

SEQ ID NO: 41658 - DNA, 26 bp, Homo sapiens
  source 1..26: mol_type = genomic DNA
tctcgcctcccacgcgggagacccgg

SEQ ID NO: 41659 - DNA, 26 bp, Homo sapiens
  source 1..26: mol_type = genomic DNA
tctcgcctgccacgcgggaggcccgg

SEQ ID NO: 41660 - DNA, 16 bp, Homo sapiens
  source 1..16: mol_type = genomic DNA
tctcgctggggcctcc

SEQ ID NO: 41661 - DNA, 17 bp, Homo sapiens
  source 1..17: mol_type = genomic DNA
tctcgctggggcctcca

SEQ ID NO: 41662 - DNA, 16 bp, Homo sapiens
  source 1..16: mol_type = genomic DNA
tctcggtggaacctcc

SEQ ID NO: 41663 - DNA, 17 bp, Homo sapiens
  source 1..17: mol_type = genomic DNA
tctcggtggaacctcca

SEQ ID NO: 41664 - DNA, 16 bp, Homo sapiens
  source 1..16: mol_type = genomic DNA
tctcggtgggacctcc

SEQ ID NO: 41665 - DNA, 17 bp, Homo sapiens
  source 1..17: mol_type = genomic DNA
tctcggtgggacctcca

SEQ ID NO: 41666 - DNA, 16 bp, Homo sapiens
  source 1..16: mol_type = genomic DNA
tctctgtggaacctcc

SEQ ID NO: 41667 - DNA, 19 bp, Homo sapiens
  source 1..19: mol_type = genomic DNA
tctcttcgggggcgtgggt

SEQ ID NO: 41668 - DNA, 40 bp, Homo sapiens; identical to SEQ ID NO: 26752
  source 1..40: mol_type = genomic DNA

SEQ ID NO: 41669 - DNA, 16 bp, Homo sapiens
  source 1..16: mol_type = genomic DNA
tctgaaggtcctgagt

SEQ ID NO: 41670 - DNA, 17 bp, Homo sapiens
  source 1..17: mol_type = genomic DNA
tctgaaggtcctgagtt

SEQ ID NO: 41671 - DNA, 18 bp, Homo sapiens
  source 1..18: mol_type = genomic DNA
tctgaaggtcctgagttc

SEQ ID NO: 41672 - DNA, 19 bp, Homo sapiens
  source 1..19: mol_type = genomic DNA
tctgaaggtcctgagttcg

SEQ ID NO: 41673 - DNA, 35 bp, Homo sapiens; identical to SEQ ID NO: 26765
  source 1..35: mol_type = genomic DNA

SEQ ID NO: 41674 - DNA, 36 bp, Homo sapiens; identical to SEQ ID NO: 26766
  source 1..36: mol_type = genomic DNA

SEQ ID NO: 41675 - DNA, 37 bp, Homo sapiens; identical to SEQ ID NO: 26767
  source 1..37: mol_type = genomic DNA

SEQ ID NO: 41676 - DNA, 38 bp, Homo sapiens; identical to SEQ ID NO: 26768
  source 1..38: mol_type = genomic DNA

SEQ ID NO: 41677 - DNA, 35 bp, Homo sapiens; identical to SEQ ID NO: 26772
  source 1..35: mol_type = genomic DNA

SEQ ID NO: 41678 - DNA, 36 bp, Homo sapiens; identical to SEQ ID NO: 26773
  source 1..36: mol_type = genomic DNA

SEQ ID NO: 41679 - DNA, 37 bp, Homo sapiens; identical to SEQ ID NO: 26774
  source 1..37: mol_type = genomic DNA

SEQ ID NO: 41680 - DNA, 38 bp, Homo sapiens; identical to SEQ ID NO: 26775
  source 1..38: mol_type = genomic DNA

SEQ ID NO: 41681 - DNA, 16 bp, Homo sapiens
  source 1..16: mol_type = genomic DNA
tctgaaggtcgtgagt

SEQ ID NO: 41682 - DNA, 19 bp, Homo sapiens
  source 1..19: mol_type = genomic DNA
tctgaaggtcgtgagttcg

SEQ ID NO: 41683 - DNA, 32 bp, Homo sapiens; identical to SEQ ID NO: 26787
  source 1..32: mol_type = genomic DNA

SEQ ID NO: 41684 - DNA, 33 bp, Homo sapiens; identical to SEQ ID NO: 26788
  source 1..33: mol_type = genomic DNA

SEQ ID NO: 41685 - DNA, 35 bp, Homo sapiens; identical to SEQ ID NO: 26790
  source 1..35: mol_type = genomic DNA

SEQ ID NO: 41686 - DNA, 36 bp, Homo sapiens; identical to SEQ ID NO: 26791
  source 1..36: mol_type = genomic DNA

SEQ ID NO: 41687 - DNA, 37 bp, Homo sapiens; identical to SEQ ID NO: 26792
  source 1..37: mol_type = genomic DNA

SEQ ID NO: 41688 - DNA, 38 bp, Homo sapiens; identical to SEQ ID NO: 26793
  source 1..38: mol_type = genomic DNA

SEQ ID NO: 41689 - DNA, 32 bp, Homo sapiens; identical to SEQ ID NO: 26794
  source 1..32: mol_type = genomic DNA

SEQ ID NO: 41690 - DNA, 33 bp, Homo sapiens; identical to SEQ ID NO: 26795
  source 1..33: mol_type = genomic DNA

SEQ ID NO: 41691 - DNA, 35 bp, Homo sapiens; identical to SEQ ID NO: 26797
  source 1..35: mol_type = genomic DNA

SEQ ID NO: 41692 - DNA, 36 bp, Homo sapiens; identical to SEQ ID NO: 26798
  source 1..36: mol_type = genomic DNA

SEQ ID NO: 41693 - DNA, 37 bp, Homo sapiens; identical to SEQ ID NO: 26799
  source 1..37: mol_type = genomic DNA

SEQ ID NO: 41694 - DNA, 38 bp, Homo sapiens; identical to SEQ ID NO: 26800
  source 1..38: mol_type = genomic DNA

SEQ ID NO: 41695 - DNA, 17 bp, Homo sapiens
  source 1..17: mol_type = genomic DNA
tctgaatccagcgatcc

SEQ ID NO: 41696 - DNA, 18 bp, Homo sapiens
  source 1..18: mol_type = genomic DNA
tctgaatccagcgatccg

SEQ ID NO: 41697 - DNA, 19 bp, Homo sapiens
  source 1..19: mol_type = genomic DNA
tctgaatccagcgatccga

SEQ ID NO: 41698 - DNA, 20 bp, Homo sapiens
  source 1..20: mol_type = genomic DNA
tctgaatccagcgatccgag

SEQ ID NO: 41699 - DNA, 21 bp, Homo sapiens
  source 1..21: mol_type = genomic DNA
tctgaatccagcgatccgagt

SEQ ID NO: 41700 - DNA, 22 bp, Homo sapiens
  source 1..22: mol_type = genomic DNA
tctgaatccagcgatccgagtt

SEQ ID NO: 41701 - DNA, 23 bp, Homo sapiens
  source 1..23: mol_type = genomic DNA
tctgaatccagcgatccgagttc

SEQ ID NO: 41702 - DNA, 36 bp, Homo sapiens; identical to SEQ ID NO: 26814
  source 1..36: mol_type = genomic DNA

SEQ ID NO: 41703 - DNA, 40 bp, Homo sapiens; identical to SEQ ID NO: 26818
  source 1..40: mol_type = genomic DNA

SEQ ID NO: 41704 - DNA, 41 bp, Homo sapiens; identical to SEQ ID NO: 26819
  source 1..41: mol_type = genomic DNA

SEQ ID NO: 41705 - DNA, 42 bp, Homo sapiens; identical to SEQ ID NO: 26820
  source 1..42: mol_type = genomic DNA

SEQ ID NO: 41706 - DNA, 35 bp, Homo sapiens; identical to SEQ ID NO: 26852
  source 1..35: mol_type = genomic DNA

SEQ ID NO: 41707 - DNA, 36 bp, Homo sapiens; identical to SEQ ID NO: 26853
  source 1..36: mol_type = genomic DNA

SEQ ID NO: 41708 - DNA, 37 bp, Homo sapiens; identical to SEQ ID NO: 26854
  source 1..37: mol_type = genomic DNA

SEQ ID NO: 41709 - DNA, 18 bp, Homo sapiens
  source 1..18: mol_type = genomic DNA
tctgagggtccagggttc

SEQ ID NO: 41710 - DNA, 19 bp, Homo sapiens
  source 1..19: mol_type = genomic DNA
tctgagggtccagggttca

SEQ ID NO: 41711 - DNA, 36 bp, Homo sapiens; identical to SEQ ID NO: 26864
  source 1..36: mol_type = genomic DNA

SEQ ID NO: 41712 - DNA, 37 bp, Homo sapiens; identical to SEQ ID NO: 26865
  source 1..37: mol_type = genomic DNA

SEQ ID NO: 41713 - DNA, 38 bp, Homo sapiens; identical to SEQ ID NO: 26866
  source 1..38: mol_type = genomic DNA

SEQ ID NO: 41714 - DNA, 36 bp, Homo sapiens; identical to SEQ ID NO: 26869
  source 1..36: mol_type = genomic DNA

SEQ ID NO: 41715 - DNA, 37 bp, Homo sapiens; identical to SEQ ID NO: 26870
  source 1..37: mol_type = genomic DNA

SEQ ID NO: 41716 - DNA, 36 bp, Homo sapiens; identical to SEQ ID NO: 26872
  source 1..36: mol_type = genomic DNA

SEQ ID NO: 41717 - DNA, 37 bp, Homo sapiens; identical to SEQ ID NO: 26873
  source 1..37: mol_type = genomic DNA

SEQ ID NO: 41718 - DNA, 38 bp, Homo sapiens; identical to SEQ ID NO: 26874
  source 1..38: mol_type = genomic DNA

SEQ ID NO: 41719 - DNA, 31 bp, Homo sapiens; identical to SEQ ID NO: 26875
  source 1..31: mol_type = genomic DNA

SEQ ID NO: 41720 - DNA, 32 bp, Homo sapiens; identical to SEQ ID NO: 26876
  source 1..32: mol_type = genomic DNA

SEQ ID NO: 41721 - DNA, 33 bp, Homo sapiens; identical to SEQ ID NO: 26877
  source 1..33: mol_type = genomic DNA

SEQ ID NO: 41722 - DNA, 34 bp, Homo sapiens; identical to SEQ ID NO: 26878
  source 1..34: mol_type = genomic DNA

SEQ ID NO: 41723 - DNA, 35 bp, Homo sapiens; identical to SEQ ID NO: 26879
  source 1..35: mol_type = genomic DNA

SEQ ID NO: 41724 - DNA, 36 bp, Homo sapiens; identical to SEQ ID NO: 26880
  source 1..36: mol_type = genomic DNA

SEQ ID NO: 41725 - DNA, 37 bp, Homo sapiens; identical to SEQ ID NO: 26881
  source 1..37: mol_type = genomic DNA

SEQ ID NO: 41726 - DNA, 38 bp, Homo sapiens; identical to SEQ ID NO: 26882
  source 1..38: mol_type = genomic DNA

SEQ ID NO: 41727 - DNA, 36 bp, Homo sapiens
  source 1..36: mol_type = genomic DNA
tctgagggtccggggttcaagtccctgttcgggcgc

SEQ ID NO: 41728 - DNA, 37 bp, Homo sapiens; identical to SEQ ID NO: 26889
  source 1..37: mol_type = genomic DNA

SEQ ID NO: 41729 - DNA, 38 bp, Homo sapiens; identical to SEQ ID NO: 26890
  source 1..38: mol_type = genomic DNA

SEQ ID NO: 41730 - DNA, 16 bp, Homo sapiens
  source 1..16: mol_type = genomic DNA
tctgcgttgtggccgc

SEQ ID NO: 41731 - DNA, 16 bp, Homo sapiens
  source 1..16: mol_type = genomic DNA
tctggactctgaatcc

SEQ ID NO: 41732 - DNA, 17 bp, Homo sapiens
  source 1..17: mol_type = genomic DNA
tctggactctgaatcca

SEQ ID NO: 41733 - DNA, 19 bp, Homo sapiens
  source 1..19: mol_type = genomic DNA
tctggactctgaatccagc

SEQ ID NO: 41734 - DNA, 20 bp, Homo sapiens
  source 1..20: mol_type = genomic DNA
tctggactctgaatccagcg

SEQ ID NO: 41735 - DNA, 22 bp, Homo sapiens
  source 1..22: mol_type = genomic DNA
tctggactctgaatccagcgat

SEQ ID NO: 41736 - DNA, 23 bp, Homo sapiens
  source 1..23: mol_type = genomic DNA
tctggactctgaatccagcgatc

SEQ ID NO: 41737 - DNA, 24 bp, Homo sapiens
  source 1..24: mol_type = genomic DNA
tctggactctgaatccagcgatcc

SEQ ID NO: 41738 - DNA, 25 bp, Homo sapiens
  source 1..25: mol_type = genomic DNA
tctggactctgaatccagcgatccg

SEQ ID NO: 41739 - DNA, 26 bp, Homo sapiens
  source 1..26: mol_type = genomic DNA
tctggactctgaatccagcgatccga

SEQ ID NO: 41740 - DNA, 27 bp, Homo sapiens
  source 1..27: mol_type = genomic DNA
tctggactctgaatccagcgatccgag

SEQ ID NO: 41741 - DNA, 28 bp, Homo sapiens
  source 1..28: mol_type = genomic DNA
tctggactctgaatccagcgatccgagt

SEQ ID NO: 41742 - DNA, 29 bp, Homo sapiens
  source 1..29: mol_type = genomic DNA
tctggactctgaatccagcgatccgagtt

SEQ ID NO: 41743 - DNA, 30 bp, Homo sapiens; identical to SEQ ID NO: 26910
  source 1..30: mol_type = genomic DNA

SEQ ID NO: 41744 - DNA, 31 bp, Homo sapiens; identical to SEQ ID NO: 26911
  source 1..31: mol_type = genomic DNA

SEQ ID NO: 41745 - DNA, 47 bp, Homo sapiens; identical to SEQ ID NO: 26914
  source 1..47: mol_type = genomic DNA

SEQ ID NO: 41746 - DNA, 16 bp, Homo sapiens
  source 1..16: mol_type = genomic DNA
tctggactttgaatcc

SEQ ID NO: 41747 - DNA, 20 bp, Homo sapiens
  source 1..20: mol_type = genomic DNA
tctggtctccaatggaggcg

SEQ ID NO: 41748 - DNA, 44 bp, Homo sapiens
  source 1..44: mol_type = genomic DNA
tctggtctccaatggaggcgtgggttcgaatcccacttctgaca

SEQ ID NO: 41749 - DNA, 45 bp, Homo sapiens
  source 1..45: mol_type = genomic DNA
tctggtctccaatggaggcgtgggttcgaatcccacttctgacac

SEQ ID NO: 41750 - DNA, 46 bp, Homo sapiens; identical to SEQ ID NO: 26920
  source 1..46: mol_type = genomic DNA

SEQ ID NO: 41751 - DNA, 21 bp, Homo sapiens
  source 1..21: mol_type = genomic DNA
tctggtctccggatggaggcg

SEQ ID NO: 41752 - DNA, 45 bp, Homo sapiens
  source 1..45: mol_type = genomic DNA
tctggtctccggatggaggcgtgggttcgaatcccacttctgaca

SEQ ID NO: 41753 - DNA, 46 bp, Homo sapiens; identical to SEQ ID NO: 26924
  source 1..46: mol_type = genomic DNA

SEQ ID NO: 41754 - DNA, 47 bp, Homo sapiens; identical to SEQ ID NO: 26925
  source 1..47: mol_type = genomic DNA

SEQ ID NO: 41755 - DNA, 30 bp, Homo sapiens; identical to SEQ ID NO: 26928
  source 1..30: mol_type = genomic DNA

SEQ ID NO: 41756 - DNA, 17 bp, Homo sapiens
  source 1..17: mol_type = genomic DNA
tctgtggcgcaatggac

SEQ ID NO: 41757 - DNA, 16 bp, Homo sapiens
  source 1..16: mol_type = genomic DNA
tcttaatcccagggtc

SEQ ID NO: 41758 - DNA, 17 bp, Homo sapiens
  source 1..17: mol_type = genomic DNA
tcttaatcccagggtcg

SEQ ID NO: 41759 - DNA, 18 bp, Homo sapiens
  source 1..18: mol_type = genomic DNA
tcttaatcccagggtcgt

SEQ ID NO: 41760 - DNA, 19 bp, Homo sapiens
  source 1..19: mol_type = genomic DNA
tcttaatcccagggtcgtg

SEQ ID NO: 41761 - DNA, 20 bp, Homo sapiens
  source 1..20: mol_type = genomic DNA
tcttaatcccagggtcgtgg

SEQ ID NO: 41762 - DNA, 37 bp, Homo sapiens; identical to SEQ ID NO: 26946
  source 1..37: mol_type = genomic DNA

SEQ ID NO: 41763 - DNA, 16 bp, Homo sapiens
  source 1..16: mol_type = genomic DNA
tcttaatctcagggtc

SEQ ID NO: 41764 - DNA, 17 bp, Homo sapiens
  source 1..17: mol_type = genomic DNA
tcttaatctcagggtcg

SEQ ID NO: 41765 - DNA, 18 bp, Homo sapiens
  source 1..18: mol_type = genomic DNA
tcttaatctcagggtcgt

SEQ ID NO: 41766 - DNA, 19 bp, Homo sapiens
  source 1..19: mol_type = genomic DNA
tcttaatctcagggtcgtg

SEQ ID NO: 41767 - DNA, 31 bp, Homo sapiens; identical to SEQ ID NO: 26956
  source 1..31: mol_type = genomic DNA

SEQ ID NO: 41768 - DNA, 43 bp, Homo sapiens; identical to SEQ ID NO: 26961
  source 1..43: mol_type = genomic DNA

SEQ ID NO: 41769 - DNA, 35 bp, Homo sapiens; identical to SEQ ID NO: 26971
  source 1..35: mol_type = genomic DNA

SEQ ID NO: 41770 - DNA, 38 bp, Homo sapiens; identical to SEQ ID NO: 26986
  source 1..38: mol_type = genomic DNA

SEQ ID NO: 41771 - DNA, 17 bp, Homo sapiens
  source 1..17: mol_type = genomic DNA
tcttcgggggcgtgggt

SEQ ID NO: 41772 - DNA, 18 bp, Homo sapiens
  source 1..18: mol_type = genomic DNA
tcttcgggggcgtgggtt

SEQ ID NO: 41773 - DNA, 38 bp, Homo sapiens; identical to SEQ ID NO: 26993
  source 1..38: mol_type = genomic DNA

SEQ ID NO: 41774 - DNA, 16 bp, Homo sapiens
  source 1..16: mol_type = genomic DNA
tcttgcgacccgggtt

SEQ ID NO: 41775 - DNA, 17 bp, Homo sapiens
  source 1..17: mol_type = genomic DNA
tcttgcgacccgggttc

SEQ ID NO: 41776 - DNA, 30 bp, Homo sapiens; identical to SEQ ID NO: 26998
  source 1..30: mol_type = genomic DNA

SEQ ID NO: 41777 - DNA, 31 bp, Homo sapiens; identical to SEQ ID NO: 26999
  source 1..31: mol_type = genomic DNA

SEQ ID NO: 41778 - DNA, 32 bp, Homo sapiens; identical to SEQ ID NO: 27000
  source 1..32: mol_type = genomic DNA

SEQ ID NO: 41779 - DNA, 33 bp, Homo sapiens; identical to SEQ ID NO: 27001
  source 1..33: mol_type = genomic DNA

SEQ ID NO: 41780 - DNA, 34 bp, Homo sapiens; identical to SEQ ID NO: 27002
  source 1..34: mol_type = genomic DNA

SEQ ID NO: 41781 - DNA, 35 bp, Homo sapiens; identical to SEQ ID NO: 27003
  source 1..35: mol_type = genomic DNA

SEQ ID NO: 41782 - DNA, 36 bp, Homo sapiens; identical to SEQ ID NO: 27004
  source 1..36: mol_type = genomic DNA

SEQ ID NO: 41783 - DNA, 19 bp, Homo sapiens
  source 1..19: mol_type = genomic DNA
tgaaaaagtcatggaggcc

SEQ ID NO: 41784 - DNA, 18 bp, Homo sapiens
  source 1..18: mol_type = genomic DNA
tgaaaacctttttccaag

SEQ ID NO: 41785 - DNA, 20 bp, Homo sapiens
  source 1..20: mol_type = genomic DNA
tgaaaacctttttccaagga

SEQ ID NO: 41786 - DNA, 21 bp, Homo sapiens
  source 1..21: mol_type = genomic DNA
tgaaaacctttttccaaggac

SEQ ID NO: 41787 - DNA, 22 bp, Homo sapiens
  source 1..22: mol_type = genomic DNA
tgaaaacctttttccaaggaca

SEQ ID NO: 41788 - DNA, 23 bp, Homo sapiens
  source 1..23: mol_type = genomic DNA
tgaaaacctttttccaaggacac

SEQ ID NO: 41789 - DNA, 24 bp, Homo sapiens
  source 1..24: mol_type = genomic DNA
tgaaaacctttttccaaggacacc

SEQ ID NO: 41790 - DNA, 25 bp, Homo sapiens
  source 1..25: mol_type = genomic DNA
tgaaaacctttttccaaggacacca

SEQ ID NO: 41791 - DNA, 20 bp, Homo sapiens
  source 1..20: mol_type = genomic DNA
tgaaaatgtttagacgggct

SEQ ID NO: 41792 - DNA, 21 bp, Homo sapiens
  source 1..21: mol_type = genomic DNA
tgaaaatgtttagacgggctc

SEQ ID NO: 41793 - DNA, 36 bp, Homo sapiens; identical to SEQ ID NO: 27051
  source 1..36: mol_type = genomic DNA

SEQ ID NO: 41794 - DNA, 18 bp, Homo sapiens
  source 1..18: mol_type = genomic DNA
tgaagatctaaaggtccc

SEQ ID NO: 41795 - DNA, 16 bp, Homo sapiens
  source 1..16: mol_type = genomic DNA
tgaagcattggactgt

SEQ ID NO: 41796 - DNA, 17 bp, Homo sapiens
  source 1..17: mol_type = genomic DNA
tgaagcattggactgta

SEQ ID NO: 41797 - DNA, 16 bp, Homo sapiens
  source 1..16: mol_type = genomic DNA
tgaaggtcctgagttc

SEQ ID NO: 41798 - DNA, 33 bp, Homo sapiens; identical to SEQ ID NO: 27088
  source 1..33: mol_type = genomic DNA

SEQ ID NO: 41799 - DNA, 34 bp, Homo sapiens; identical to SEQ ID NO: 27089
  source 1..34: mol_type = genomic DNA

SEQ ID NO: 41800 - DNA, 35 bp, Homo sapiens; identical to SEQ ID NO: 27090
  source 1..35: mol_type = genomic DNA

SEQ ID NO: 41801 - DNA, 33 bp, Homo sapiens; identical to SEQ ID NO: 27092
  source 1..33: mol_type = genomic DNA

SEQ ID NO: 41802 - DNA, 34 bp, Homo sapiens; identical to SEQ ID NO: 27093
  source 1..34: mol_type = genomic DNA

SEQ ID NO: 41803 - DNA, 35 bp, Homo sapiens; identical to SEQ ID NO: 27094
  source 1..35: mol_type = genomic DNA

SEQ ID NO: 41804 - DNA, 16 bp, Homo sapiens
  source 1..16: mol_type = genomic DNA
tgaaggtcgtgagttc

SEQ ID NO: 41805 - DNA, 17 bp, Homo sapiens
  source 1..17: mol_type = genomic DNA
tgaaggtcgtgagttcg

SEQ ID NO: 41806 - DNA, 34 bp, Homo sapiens; identical to SEQ ID NO: 27101
  source 1..34: mol_type = genomic DNA

SEQ ID NO: 41807 - DNA, 35 bp, Homo sapiens; identical to SEQ ID NO: 27102
  source 1..35: mol_type = genomic DNA

SEQ ID NO: 41808 - DNA, 32 bp, Homo sapiens; identical to SEQ ID NO: 27107
  source 1..32: mol_type = genomic DNA

SEQ ID NO: 41809 - DNA, 34 bp, Homo sapiens; identical to SEQ ID NO: 27109
  source 1..34: mol_type = genomic DNA

SEQ ID NO: 41810 - DNA, 35 bp, Homo sapiens; identical to SEQ ID NO: 27110
  source 1..35: mol_type = genomic DNA

SEQ ID NO: 41811 - DNA, 16 bp, Homo sapiens
  source 1..16: mol_type = genomic DNA
tgaatccagcgatccg

SEQ ID NO: 41812 - DNA, 17 bp, Homo sapiens
  source 1..17: mol_type = genomic DNA
tgaatccagcgatccga

SEQ ID NO: 41813 - DNA, 18 bp, Homo sapiens
  source 1..18: mol_type = genomic DNA
tgaatccagcgatccgag

SEQ ID NO: 41814 - DNA, 19 bp, Homo sapiens
  source 1..19: mol_type = genomic DNA
tgaatccagcgatccgagt

SEQ ID NO: 41815 - DNA, 20 bp, Homo sapiens
  source 1..20: mol_type = genomic DNA
tgaatccagcgatccgagtt

SEQ ID NO: 41816 - DNA, 21 bp, Homo sapiens
  source 1..21: mol_type = genomic DNA
tgaatccagcgatccgagttc

SEQ ID NO: 41817 - DNA, 22 bp, Homo sapiens
  source 1..22: mol_type = genomic DNA
tgaatccagcgatccgagttca

SEQ ID NO: 41818 - DNA, 21 bp, Homo sapiens
  source 1..21: mol_type = genomic DNA
tgaatctgacaacagaggctt

SEQ ID NO: 41819 - DNA, 27 bp, Homo sapiens
  source 1..27: mol_type = genomic DNA
tgaatctgacaacagaggcttacgacc

SEQ ID NO: 41820 - DNA, 28 bp, Homo sapiens
  source 1..28: mol_type = genomic DNA
tgaatctgacaacagaggcttacgaccc

SEQ ID NO: 41821 - DNA, 29 bp, Homo sapiens
  source 1..29: mol_type = genomic DNA
tgaatctgacaacagaggcttacgacccc

SEQ ID NO: 41822 - DNA, 30 bp, Homo sapiens; identical to SEQ ID NO: 27160
  source 1..30: mol_type = genomic DNA

SEQ ID NO: 41823 - DNA, 31 bp, Homo sapiens; identical to SEQ ID NO: 27161
  source 1..31: mol_type = genomic DNA

SEQ ID NO: 41824 - DNA, 32 bp, Homo sapiens; identical to SEQ ID NO: 27162
  source 1..32: mol_type = genomic DNA

SEQ ID NO: 41825 - DNA, 33 bp, Homo sapiens; identical to SEQ ID NO: 27163
  source 1..33: mol_type = genomic DNA

SEQ ID NO: 41826 - DNA, 34 bp, Homo sapiens; identical to SEQ ID NO: 27164
  source 1..34: mol_type = genomic DNA

SEQ ID NO: 41827 - DNA, 35 bp, Homo sapiens; identical to SEQ ID NO: 27165
  source 1..35: mol_type = genomic DNA

SEQ ID NO: 41828 - DNA, 36 bp, Homo sapiens; identical to SEQ ID NO: 27166
  source 1..36: mol_type = genomic DNA

SEQ ID NO: 41829 - DNA, 37 bp, Homo sapiens; identical to SEQ ID NO: 27167
  source 1..37: mol_type = genomic DNA

SEQ ID NO: 41830 - DNA, 38 bp, Homo sapiens; identical to SEQ ID NO: 27168
  source 1..38: mol_type = genomic DNA

SEQ ID NO: 41831 - DNA, 39 bp, Homo sapiens; identical to SEQ ID NO: 27169
  source 1..39: mol_type = genomic DNA

SEQ ID NO: 41832 - DNA, 40 bp, Homo sapiens; identical to SEQ ID NO: 27170
  source 1..40: mol_type = genomic DNA

SEQ ID NO: 41833 - DNA, 41 bp, Homo sapiens; identical to SEQ ID NO: 27171
  source 1..41: mol_type = genomic DNA

SEQ ID NO: 41834 - DNA, 43 bp, Homo sapiens; identical to SEQ ID NO: 27176
  source 1..43: mol_type = genomic DNA

SEQ ID NO: 41835 - DNA, 34 bp, Homo sapiens; identical to SEQ ID NO: 27197
  source 1..34: mol_type = genomic DNA

SEQ ID NO: 41836 - DNA, 35 bp, Homo sapiens; identical to SEQ ID NO: 27198
  source 1..35: mol_type = genomic DNA

SEQ ID NO: 41837 - DNA, 30 bp, Homo sapiens
  source 1..30: mol_type = genomic DNA
tgacccgggttcgattcccggccaacgcac

SEQ ID NO: 41838 - DNA, 31 bp, Homo sapiens; identical to SEQ ID NO: 27207
  source 1..31: mol_type = genomic DNA

SEQ ID NO: 41839 - DNA, 20 bp, Homo sapiens
  source 1..20: mol_type = genomic DNA
tgactccagatcagaaggct

SEQ ID NO: 41840 - DNA, 22 bp, Homo sapiens
  source 1..22: mol_type = genomic DNA
tgactccagatcagaaggctgc

SEQ ID NO: 41841 - DNA, 23 bp, Homo sapiens
  source 1..23: mol_type = genomic DNA
tgactccagatcagaaggctgcg

SEQ ID NO: 41842 - DNA, 27 bp, Homo sapiens
  source 1..27: mol_type = genomic DNA
tgactccagatcagaaggctgcgtgtt

SEQ ID NO: 41843 - DNA, 28 bp, Homo sapiens
  source 1..28: mol_type = genomic DNA
tgactccagatcagaaggctgcgtgttc

SEQ ID NO: 41844 - DNA, 22 bp, Homo sapiens
  source 1..22: mol_type = genomic DNA
tgactccagatcagaaggttgc

SEQ ID NO: 41845 - DNA, 21 bp, Homo sapiens
  source 1..21: mol_type = genomic DNA
tgactgcagatcaagaggtcc

SEQ ID NO: 41846 - DNA, 22 bp, Homo sapiens
  source 1..22: mol_type = genomic DNA
tgactgcagatcaagaggtccc

SEQ ID NO: 41847 - DNA, 23 bp, Homo sapiens
  source 1..23: mol_type = genomic DNA
tgactgcagatcaagaggtcccc

SEQ ID NO: 41848 - DNA, 24 bp, Homo sapiens
  source 1..24: mol_type = genomic DNA
tgactgcagatcaagaggtccccg

SEQ ID NO: 41849 - DNA, 23 bp, Homo sapiens
  source 1..23: mol_type = genomic DNA
tgactgcagatcaagaggtccct

SEQ ID NO: 41850 - DNA, 24 bp, Homo sapiens
  source 1..24: mol_type = genomic DNA
tgactgcagatcaagaggtccctg

SEQ ID NO: 41851 - DNA, 17 bp, Homo sapiens
  source 1..17: mol_type = genomic DNA
tgagcactctggactct

SEQ ID NO: 41852 - DNA, 22 bp, Homo sapiens
  source 1..22: mol_type = genomic DNA
tgagcactctggactctgaatc

SEQ ID NO: 41853 - DNA, 24 bp, Homo sapiens
  source 1..24: mol_type = genomic DNA
tgagcactctggactctgaatcca

SEQ ID NO: 41854 - DNA, 25 bp, Homo sapiens
  source 1..25: mol_type = genomic DNA
tgagcactctggactctgaatccag

SEQ ID NO: 41855 - DNA, 26 bp, Homo sapiens
  source 1..26: mol_type = genomic DNA
tgagcactctggactctgaatccagc

SEQ ID NO: 41856 - DNA, 34 bp, Homo sapiens; identical to SEQ ID NO: 27237
  source 1..34: mol_type = genomic DNA

SEQ ID NO: 41857 - DNA, 33 bp, Homo sapiens; identical to SEQ ID NO: 27242
  source 1..33: mol_type = genomic DNA

SEQ ID NO: 41858 - DNA, 34 bp, Homo sapiens; identical to SEQ ID NO: 27256
  source 1..34: mol_type = genomic DNA

SEQ ID NO: 41859 - DNA, 16 bp, Homo sapiens
  source 1..16: mol_type = genomic DNA
tgagggtccagggttc

SEQ ID NO: 41860 - DNA, 32 bp, Homo sapiens; identical to SEQ ID NO: 27268
  source 1..32: mol_type = genomic DNA

SEQ ID NO: 41861 - DNA, 33 bp, Homo sapiens; identical to SEQ ID NO: 27269
  source 1..33: mol_type = genomic DNA

SEQ ID NO: 41862 - DNA, 34 bp, Homo sapiens; identical to SEQ ID NO: 27270
  source 1..34: mol_type = genomic DNA

SEQ ID NO: 41863 - DNA, 35 bp, Homo sapiens; identical to SEQ ID NO: 27271
  source 1..35: mol_type = genomic DNA

SEQ ID NO: 41864 - DNA, 36 bp, Homo sapiens; identical to SEQ ID NO: 27272
  source 1..36: mol_type = genomic DNA

SEQ ID NO: 41865 - DNA, 26 bp, Homo sapiens
  source 1..26: mol_type = genomic DNA
tgagggttcgaatcccttcgtggttg

SEQ ID NO: 41866 - DNA, 27 bp, Homo sapiens
  source 1..27: mol_type = genomic DNA
tgagggttcgaatcccttcgtggttgc

SEQ ID NO: 41867 - DNA, 28 bp, Homo sapiens
  source 1..28: mol_type = genomic DNA
tgagggttcgaatcccttcgtggttgcc

SEQ ID NO: 41868 - DNA, 26 bp, Homo sapiens
  source 1..26: mol_type = genomic DNA
tgagggttcgagtcccttcgtggtcg

SEQ ID NO: 41869 - DNA, 27 bp, Homo sapiens
  source 1..27: mol_type = genomic DNA
tgagggttcgagtcccttcgtggtcgc

SEQ ID NO: 41870 - DNA, 28 bp, Homo sapiens
  source 1..28: mol_type = genomic DNA
tgagggttcgagtcccttcgtggtcgcc

SEQ ID NO: 41871 - DNA, 29 bp, Homo sapiens
  source 1..29: mol_type = genomic DNA
tgagggttcgagtcccttcgtggtcgcca

SEQ ID NO: 41872 - DNA, 34 bp, Homo sapiens; identical to SEQ ID NO: 27286
  source 1..34: mol_type = genomic DNA

SEQ ID NO: 41873 - DNA, 17 bp, Homo sapiens
  source 1..17: mol_type = genomic DNA
tgagtgaagcattggac

SEQ ID NO: 41874 - DNA, 18 bp, Homo sapiens
  source 1..18: mol_type = genomic DNA
tgagtgaagcattggact

SEQ ID NO: 41875 - DNA, 21 bp, Homo sapiens
  source 1..21: mol_type = genomic DNA
tgagtgaagcattggactgta

SEQ ID NO: 41876 - DNA, 23 bp, Homo sapiens
  source 1..23: mol_type = genomic DNA
tgagttcgaacctcagagggggc

SEQ ID NO: 41877 - DNA, 24 bp, Homo sapiens
  source 1..24: mol_type = genomic DNA
tgagttcgaacctcagagggggca

SEQ ID NO: 41878 - DNA, 25 bp, Homo sapiens
  source 1..25: mol_type = genomic DNA
tgagttcgaacctcagagggggcac

SEQ ID NO: 41879 - DNA, 27 bp, Homo sapiens
  source 1..27: mol_type = genomic DNA
tgatcgtatagtggttagtactctgcg

SEQ ID NO: 41880 - DNA, 28 bp, Homo sapiens
  source 1..28: mol_type = genomic DNA
tgatcgtatagtggttagtactctgcgt

SEQ ID NO: 41881 - DNA, 22 bp, Homo sapiens
  source 1..22: mol_type = genomic DNA
tgattccggatcagaagattga

SEQ ID NO: 41882 - DNA, 26 bp, Homo sapiens
  source 1..26: mol_type = genomic DNA
tgattccggatcagaagattgagggt

SEQ ID NO: 41883 - DNA, 28 bp, Homo sapiens
  source 1..28: mol_type = genomic DNA
tgattccggatcagaagattgagggttc

SEQ ID NO: 41884 - DNA, 29 bp, Homo sapiens
  source 1..29: mol_type = genomic DNA
tgattccggatcagaagattgagggttcg

SEQ ID NO: 41885 - DNA, 36 bp, Homo sapiens
  source 1..36: mol_type = genomic DNA
tgattccggatcagaagattgagggttcgagtccct

SEQ ID NO: 41886 - DNA, 19 bp, Homo sapiens
  source 1..19: mol_type = genomic DNA
tgattctcgcttcgggtgc

SEQ ID NO: 41887 - DNA, 20 bp, Homo sapiens
  source 1..20: mol_type = genomic DNA
tgattctcgcttcgggtgcg

SEQ ID NO: 41888 - DNA, 19 bp, Homo sapiens
  source 1..19: mol_type = genomic DNA
tgattctcgctttgggtgc

SEQ ID NO: 41889 - DNA, 19 bp, Homo sapiens
  source 1..19: mol_type = genomic DNA
tgattctcggtttgggtcc

SEQ ID NO: 41890 - DNA, 20 bp, Homo sapiens
  source 1..20: mol_type = genomic DNA
tgattctcggtttgggtccg

SEQ ID NO: 41891 - DNA, 21 bp, Homo sapiens
  source 1..21: mol_type = genomic DNA
tgattctcggtttgggtccga

SEQ ID NO: 41892 - DNA, 20 bp, Homo sapiens
  source 1..20: mol_type = genomic DNA
tgcaaattcgaagaagcagc

SEQ ID NO: 41893 - DNA, 30 bp, Homo sapiens; identical to SEQ ID NO: 27440
  source 1..30: mol_type = genomic DNA

SEQ ID NO: 41894 - DNA, 36 bp, Homo sapiens; identical to SEQ ID NO: 27441
  source 1..36: mol_type = genomic DNA

SEQ ID NO: 41895 - DNA, 38 bp, Homo sapiens; identical to SEQ ID NO: 27443
  source 1..38: mol_type = genomic DNA

SEQ ID NO: 41896 - DNA, 39 bp, Homo sapiens; identical to SEQ ID NO: 27444
  source 1..39: mol_type = genomic DNA

SEQ ID NO: 41897 - DNA, 42 bp, Homo sapiens; identical to SEQ ID NO: 27447
  source 1..42: mol_type = genomic DNA

SEQ ID NO: 41898 - DNA, 20 bp, Homo sapiens
  source 1..20: mol_type = genomic DNA
tgcaatacttaatttctgcc

SEQ ID NO: 41899 - DNA, 21 bp, Homo sapiens
  source 1..21: mol_type = genomic DNA
tgcaatacttaatttctgcca

SEQ ID NO: 41900 - DNA, 33 bp, Homo sapiens; identical to SEQ ID NO: 27461
  source 1..33: mol_type = genomic DNA

SEQ ID NO: 41901 - DNA, 34 bp, Homo sapiens; identical to SEQ ID NO: 27462
  source 1..34: mol_type = genomic DNA

SEQ ID NO: 41902 - DNA, 33 bp, Homo sapiens; identical to SEQ ID NO: 27467
  source 1..33: mol_type = genomic DNA

SEQ ID NO: 41903 - DNA, 36 bp, Homo sapiens
  source 1..36: mol_type = genomic DNA
tgcacgaggccccgggttcaatccccggcacctcca

SEQ ID NO: 41904 - DNA, 37 bp, Homo sapiens; identical to SEQ ID NO: 27470
  source 1..37: mol_type = genomic DNA

SEQ ID NO: 41905 - DNA, 38 bp, Homo sapiens; identical to SEQ ID NO: 27471
  source 1..38: mol_type = genomic DNA

SEQ ID NO: 41906 - DNA, 33 bp, Homo sapiens; identical to SEQ ID NO: 27481
  source 1..33: mol_type = genomic DNA

SEQ ID NO: 41907 - DNA, 34 bp, Homo sapiens; identical to SEQ ID NO: 27482
  source 1..34: mol_type = genomic DNA

SEQ ID NO: 41908 - DNA, 42 bp, Homo sapiens
  source 1..42: mol_type = genomic DNA
tgcacgtatgaggccccgggttcaatccccggcatctccacc

SEQ ID NO: 41909 - DNA, 29 bp, Homo sapiens
  source 1..29: mol_type = genomic DNA
tgcagagtggggttttgcagtccttacca

SEQ ID NO: 41910 - DNA, 26 bp, Homo sapiens
  source 1..26: mol_type = genomic DNA
tgcaggttcgagtcctgccgcggtcg

SEQ ID NO: 41911 - DNA, 27 bp, Homo sapiens
  source 1..27: mol_type = genomic DNA
tgcaggttcgagtcctgccgcggtcgc

SEQ ID NO: 41912 - DNA, 28 bp, Homo sapiens
  source 1..28: mol_type = genomic DNA
tgcaggttcgagtcctgccgcggtcgcc

SEQ ID NO: 41913 - DNA, 20 bp, Homo sapiens
  source 1..20: mol_type = genomic DNA
tgcagtggtagaattctcgc

SEQ ID NO: 41914 - DNA, 21 bp, Homo sapiens
  source 1..21: mol_type = genomic DNA
tgcagtggtagaattctcgcc

SEQ ID NO: 41915 - DNA, 22 bp, Homo sapiens
  source 1..22: mol_type = genomic DNA
tgcagtggtagaattctcgcct

SEQ ID NO: 41916 - DNA, 36 bp, Homo sapiens; identical to SEQ ID NO: 27494
  source 1..36: mol_type = genomic DNA

SEQ ID NO: 41917 - DNA, 37 bp, Homo sapiens; identical to SEQ ID NO: 27495
  source 1..37: mol_type = genomic DNA

SEQ ID NO: 41918 - DNA, 38 bp, Homo sapiens; identical to SEQ ID NO: 27496
  source 1..38: mol_type = genomic DNA

SEQ ID NO: 41919 - DNA, 31 bp, Homo sapiens
  source 1..31: mol_type = genomic DNA
tgcattggtggttcagtggtagaattctcgc

SEQ ID NO: 41920 - DNA, 32 bp, Homo sapiens
  source 1..32: mol_type = genomic DNA
tgcattggtggttcagtggtagaattctcgcc

SEQ ID NO: 41921 - DNA, 33 bp, Homo sapiens; identical to SEQ ID NO: 27500
  source 1..33: mol_type = genomic DNA

SEQ ID NO: 41922 - DNA, 18 bp, Homo sapiens
  source 1..18: mol_type = genomic DNA
tgccacgcgggaggcccg

SEQ ID NO: 41923 - DNA, 21 bp, Homo sapiens
  source 1..21: mol_type = genomic DNA
tgccacgcgggaggcccgggt

SEQ ID NO: 41924 - DNA, 20 bp, Homo sapiens
  source 1..20: mol_type = genomic DNA
tgcccccatgtctaacaaca

SEQ ID NO: 41925 - DNA, 24 bp, Homo sapiens
  source 1..24: mol_type = genomic DNA
tgcccccatgtctaacaacatggc

SEQ ID NO: 41926 - DNA, 25 bp, Homo sapiens
  source 1..25: mol_type = genomic DNA
tgcccccatgtctaacaacatggct

SEQ ID NO: 41927 - DNA, 26 bp, Homo sapiens
  source 1..26: mol_type = genomic DNA
tgcccccatgtctaacaacatggctt

SEQ ID NO: 41928 - DNA, 31 bp, Homo sapiens; identical to SEQ ID NO: 27530
  source 1..31: mol_type = genomic DNA

SEQ ID NO: 41929 - DNA, 33 bp, Homo sapiens; identical to SEQ ID NO: 27532
  source 1..33: mol_type = genomic DNA

SEQ ID NO: 41930 - DNA, 34 bp, Homo sapiens; identical to SEQ ID NO: 27533
  source 1..34: mol_type = genomic DNA

SEQ ID NO: 41931 - DNA, 16 bp, Homo sapiens
  source 1..16: mol_type = genomic DNA
tgcccgcatcctccac

SEQ ID NO: 41932 - DNA, 17 bp, Homo sapiens
  source 1..17: mol_type = genomic DNA
tgcccgcatcctccacc

SEQ ID NO: 41933 - DNA, 16 bp, Homo sapiens
  source 1..16: mol_type = genomic DNA
tgcccgcattctccac

SEQ ID NO: 41934 - DNA, 17 bp, Homo sapiens
  source 1..17: mol_type = genomic DNA
tgcccgcattctccacc

SEQ ID NO: 41935 - DNA, 18 bp, Homo sapiens
  source 1..18: mol_type = genomic DNA
tgccgaggttgtgagttc

SEQ ID NO: 41936 - DNA, 37 bp, Homo sapiens; identical to SEQ ID NO: 27542
  source 1..37: mol_type = genomic DNA

SEQ ID NO: 41937 - DNA, 16 bp, Homo sapiens
  source 1..16: mol_type = genomic DNA
tgccgtgatcgtatag

SEQ ID NO: 41938 - DNA, 17 bp, Homo sapiens
  source 1..17: mol_type = genomic DNA
tgccgtgatcgtatagt

SEQ ID NO: 41939 - DNA, 18 bp, Homo sapiens
  source 1..18: mol_type = genomic DNA
tgccgtgatcgtatagtg

SEQ ID NO: 41940 - DNA, 19 bp, Homo sapiens
  source 1..19: mol_type = genomic DNA
tgccgtgatcgtatagtgg

SEQ ID NO: 41941 - DNA, 20 bp, Homo sapiens
  source 1..20: mol_type = genomic DNA
tgccgtgatcgtatagtggt

SEQ ID NO: 41942 - DNA, 21 bp, Homo sapiens
  source 1..21: mol_type = genomic DNA
tgccgtgatcgtatagtggtt

SEQ ID NO: 41943 - DNA, 22 bp, Homo sapiens
  source 1..22: mol_type = genomic DNA
tgccgtgatcgtatagtggtta

SEQ ID NO: 41944 - DNA, 23 bp, Homo sapiens
  source 1..23: mol_type = genomic DNA
tgccgtgatcgtatagtggttag

SEQ ID NO: 41945 - DNA, 24 bp, Homo sapiens
  source 1..24: mol_type = genomic DNA
tgccgtgatcgtatagtggttagt

SEQ ID NO: 41946 - DNA, 25 bp, Homo sapiens
  source 1..25: mol_type = genomic DNA
tgccgtgatcgtatagtggttagta

SEQ ID NO: 41947 - DNA, 26 bp, Homo sapiens
  source 1..26: mol_type = genomic DNA
tgccgtgatcgtatagtggttagtac

SEQ ID NO: 41948 - DNA, 27 bp, Homo sapiens
  source 1..27: mol_type = genomic DNA
tgccgtgatcgtatagtggttagtact

SEQ ID NO: 41949 - DNA, 28 bp, Homo sapiens
  source 1..28: mol_type = genomic DNA
tgccgtgatcgtatagtggttagtactc

SEQ ID NO: 41950 - DNA, 29 bp, Homo sapiens
  source 1..29: mol_type = genomic DNA
tgccgtgatcgtatagtggttagtactct

SEQ ID NO: 41951 - DNA, 30 bp, Homo sapiens; identical to SEQ ID NO: 27558
  source 1..30: mol_type = genomic DNA

SEQ ID NO: 41952 - DNA, 31 bp, Homo sapiens; identical to SEQ ID NO: 27559
  source 1..31: mol_type = genomic DNA

SEQ ID NO: 41953 - DNA, 32 bp, Homo sapiens; identical to SEQ ID NO: 27560
  source 1..32: mol_type = genomic DNA

SEQ ID NO: 41954 - DNA, 33 bp, Homo sapiens; identical to SEQ ID NO: 27561
  source 1..33: mol_type = genomic DNA

SEQ ID NO: 41955 - DNA, 34 bp, Homo sapiens; identical to SEQ ID NO: 27562
  source 1..34: mol_type = genomic DNA

SEQ ID NO: 41956 - DNA, 35 bp, Homo sapiens; identical to SEQ ID NO: 27563
  source 1..35: mol_type = genomic DNA

SEQ ID NO: 41957 - DNA, 36 bp, Homo sapiens; identical to SEQ ID NO: 27564
  source 1..36: mol_type = genomic DNA

SEQ ID NO: 41958 - DNA, 37 bp, Homo sapiens; identical to SEQ ID NO: 27565
  source 1..37: mol_type = genomic DNA

SEQ ID NO: 41959 - DNA, 16 bp, Homo sapiens
  source 1..16: mol_type = genomic DNA
tgcctgtggtctagtg

SEQ ID NO: 41960 - DNA, 31 bp, Homo sapiens
  source 1..31: mol_type = genomic DNA
tgcgacccgggttcgattcccgggcggcgca

SEQ ID NO: 41961 - DNA, 32 bp, Homo sapiens
  source 1..32: mol_type = genomic DNA
tgcgagaggtcccgggttcaaatcccggacga

SEQ ID NO: 41962 - DNA, 33 bp, Homo sapiens
  source 1..33: mol_type = genomic DNA
tgcgagaggtcccgggttcaaatcccggacgag

SEQ ID NO: 41963 - DNA, 34 bp, Homo sapiens; identical to SEQ ID NO: 27585
  source 1..34: mol_type = genomic DNA

SEQ ID NO: 41964 - DNA, 35 bp, Homo sapiens; identical to SEQ ID NO: 27586
  source 1..35: mol_type = genomic DNA

SEQ ID NO: 41965 - DNA, 36 bp, Homo sapiens; identical to SEQ ID NO: 27587
  source 1..36: mol_type = genomic DNA

SEQ ID NO: 41966 - DNA, 37 bp, Homo sapiens; identical to SEQ ID NO: 27588
  source 1..37: mol_type = genomic DNA

SEQ ID NO: 41967 - DNA, 38 bp, Homo sapiens; identical to SEQ ID NO: 27589
  source 1..38: mol_type = genomic DNA

SEQ ID NO: 41968 - DNA, 39 bp, Homo sapiens; identical to SEQ ID NO: 27590
  source 1..39: mol_type = genomic DNA

SEQ ID NO: 41969 - DNA, 27 bp, Homo sapiens
  source 1..27: mol_type = genomic DNA
tgcgtgttcaaatcacgtcggggtcac

SEQ ID NO: 41970 - DNA, 17 bp, Homo sapiens
  source 1..17: mol_type = genomic DNA
tgctaatccattgtgct

SEQ ID NO: 41971 - DNA, 34 bp, Homo sapiens; identical to SEQ ID NO: 27658
  source 1..34: mol_type = genomic DNA

SEQ ID NO: 41972 - DNA, 35 bp, Homo sapiens; identical to SEQ ID NO: 27659
  source 1..35: mol_type = genomic DNA

SEQ ID NO: 41973 - DNA, 36 bp, Homo sapiens; identical to SEQ ID NO: 27660
  source 1..36: mol_type = genomic DNA

SEQ ID NO: 41974 - DNA, 26 bp, Homo sapiens
  source 1..26: mol_type = genomic DNA
tgctttacacgcagaaggtcctgggt

SEQ ID NO: 41975 - DNA, 47 bp, Homo sapiens; identical to SEQ ID NO: 27672
  source 1..47: mol_type = genomic DNA

SEQ ID NO: 41976 - DNA, 39 bp, Homo sapiens
  source 1..39: mol_type = genomic DNA
tgctttgcacgcgtgggttcgaatcccatcctcgtcgcc

SEQ ID NO: 41977 - DNA, 21 bp, Homo sapiens
  source 1..21: mol_type = genomic DNA
tggacatatgtccgcgtgggt

SEQ ID NO: 41978 - DNA, 17 bp, Homo sapiens
  source 1..17: mol_type = genomic DNA
tggacgagcgcgctgga

SEQ ID NO: 41979 - DNA, 17 bp, Homo sapiens
  source 1..17: mol_type = genomic DNA
tggactctgaatccagc

SEQ ID NO: 41980 - DNA, 24 bp, Homo sapiens
  source 1..24: mol_type = genomic DNA
tggactctgaatccagcgatccga

SEQ ID NO: 41981 - DNA, 25 bp, Homo sapiens
  source 1..25: mol_type = genomic DNA
tggactctgaatccagcgatccgag

SEQ ID NO: 41982 - DNA, 26 bp, Homo sapiens
  source 1..26: mol_type = genomic DNA
tggactctgaatccagcgatccgagt

SEQ ID NO: 41983 - DNA, 27 bp, Homo sapiens
  source 1..27: mol_type = genomic DNA
tggactctgaatccagcgatccgagtt

SEQ ID NO: 41984 - DNA, 28 bp, Homo sapiens
  source 1..28: mol_type = genomic DNA
tggactctgaatccagcgatccgagttc

SEQ ID NO: 41985 - DNA, 45 bp, Homo sapiens; identical to SEQ ID NO: 27695
  source 1..45: mol_type = genomic DNA

SEQ ID NO: 41986 - DNA, 47 bp, Homo sapiens
  source 1..47: mol_type = genomic DNA
tggactctgaatccagcgatccgagttcaaatctcggtggaacctcc

SEQ ID NO: 41987 - DNA, 21 bp, Homo sapiens
  source 1..21: mol_type = genomic DNA
tggacttaagatccaatggac

SEQ ID NO: 41988 - DNA, 17 bp, Homo sapiens
  source 1..17: mol_type = genomic DNA
tggactttgaatccagc

SEQ ID NO: 41989 - DNA, 25 bp, Homo sapiens
  source 1..25: mol_type = genomic DNA
tggactttgaatccagcgatccgag

SEQ ID NO: 41990 - DNA, 16 bp, Homo sapiens
  source 1..16: mol_type = genomic DNA
tggaggcgtgggttcg

SEQ ID NO: 41991 - DNA, 32 bp, Homo sapiens; identical to SEQ ID NO: 27710
  source 1..32: mol_type = genomic DNA

SEQ ID NO: 41992 - DNA, 34 bp, Homo sapiens; identical to SEQ ID NO: 27711
  source 1..34: mol_type = genomic DNA

SEQ ID NO: 41993 - DNA, 23 bp, Homo sapiens
  source 1..23: mol_type = genomic DNA
tggagtggttatcacgttcgcct

SEQ ID NO: 41994 - DNA, 24 bp, Homo sapiens
  source 1..24: mol_type = genomic DNA
tggagttaaagactttttctctga

SEQ ID NO: 41995 - DNA, 25 bp, Homo sapiens
  source 1..25: mol_type = genomic DNA
tggagttaaagactttttctctgac

SEQ ID NO: 41996 - DNA, 26 bp, Homo sapiens
  source 1..26: mol_type = genomic DNA
tggagttaaagactttttctctgacc

SEQ ID NO: 41997 - DNA, 27 bp, Homo sapiens
  source 1..27: mol_type = genomic DNA
tggagttaaagactttttctctgacca

SEQ ID NO: 41998 - DNA, 16 bp, Homo sapiens
  source 1..16: mol_type = genomic DNA
tggataacgcgtctga

SEQ ID NO: 41999 - DNA, 18 bp, Homo sapiens
  source 1..18: mol_type = genomic DNA
tggataacgcgtctgact

SEQ ID NO: 42000 - DNA, 16 bp, Homo sapiens
  source 1..16: mol_type = genomic DNA
tggataaggcactggc

SEQ ID NO: 42001 - DNA, 35 bp, Homo sapiens
  source 1..35: mol_type = genomic DNA
tggataaggcatcagcctccggagctggggattgt

SEQ ID NO: 42002 - DNA, 16 bp, Homo sapiens
  source 1..16: mol_type = genomic DNA
tggataaggcgtctga

SEQ ID NO: 42003 - DNA, 18 bp, Homo sapiens
  source 1..18: mol_type = genomic DNA
tggataaggcgtctgact

SEQ ID NO: 42004 - DNA, 18 bp, Homo sapiens
  source 1..18: mol_type = genomic DNA
tggataaggcgtctgatt

SEQ ID NO: 42005 - DNA, 20 bp, Homo sapiens
  source 1..20: mol_type = genomic DNA
tggataaggcgtctgattcc

SEQ ID NO: 42006 - DNA, 16 bp, Homo sapiens
  source 1..16: mol_type = genomic DNA
tggatagcgcattgga

SEQ ID NO: 42007 - DNA, 17 bp, Homo sapiens
  source 1..17: mol_type = genomic DNA
tggatagcgcattggac

SEQ ID NO: 42008 - DNA, 29 bp, Homo sapiens
  source 1..29: mol_type = genomic DNA
tggatagctcagtcggtagagcatcagac

SEQ ID NO: 42009 - DNA, 22 bp, Homo sapiens
  source 1..22: mol_type = genomic DNA
tggatcgaaaccatcctctgct

SEQ ID NO: 42010 - DNA, 25 bp, Homo sapiens
  source 1..25: mol_type = genomic DNA
tggatcgaaaccatcctctgctacc

SEQ ID NO: 42011 - DNA, 39 bp, Homo sapiens; identical to SEQ ID NO: 27735
  source 1..39: mol_type = genomic DNA

SEQ ID NO: 42012 - DNA, 41 bp, Homo sapiens; identical to SEQ ID NO: 27737
  source 1..41: mol_type = genomic DNA

SEQ ID NO: 42013 - DNA, 35 bp, Homo sapiens
  source 1..35: mol_type = genomic DNA
tggatttaggctccagtctcttcggaggcgtgggt

SEQ ID NO: 42014 - DNA, 29 bp, Homo sapiens
  source 1..29: mol_type = genomic DNA
tggcccgggttcgactcccggtatgggaa

SEQ ID NO: 42015 - DNA, 30 bp, Homo sapiens
  source 1..30: mol_type = genomic DNA
tggcccgggttcgactcccggtatgggaac

SEQ ID NO: 42016 - DNA, 23 bp, Homo sapiens
  source 1..23: mol_type = genomic DNA
tggccgagcggtctaaggcgctg

SEQ ID NO: 42017 - DNA, 16 bp, Homo sapiens
  source 1..16: mol_type = genomic DNA
tggccgagtggttaag

SEQ ID NO: 42018 - DNA, 17 bp, Homo sapiens
  source 1..17: mol_type = genomic DNA
tggccgagtggttaagg

SEQ ID NO: 42019 - DNA, 21 bp, Homo sapiens
  source 1..21: mol_type = genomic DNA
tggccgcagcaacctcggttc

SEQ ID NO: 42020 - DNA, 22 bp, Homo sapiens
  source 1..22: mol_type = genomic DNA
tggccgcagcaacctcggttcg

SEQ ID NO: 42021 - DNA, 23 bp, Homo sapiens
  source 1..23: mol_type = genomic DNA
tggccgcagcaacctcggttcga

SEQ ID NO: 42022 - DNA, 38 bp, Homo sapiens
  source 1..38: mol_type = genomic DNA
tggccgcagcaacctcggttcgaatccgagtcacggca

SEQ ID NO: 42023 - DNA, 39 bp, Homo sapiens
  source 1..39: mol_type = genomic DNA
tggccgcagcaacctcggttcgaatccgagtcacggcac

SEQ ID NO: 42024 - DNA, 40 bp, Homo sapiens; identical to SEQ ID NO: 27765
  source 1..40: mol_type = genomic DNA

SEQ ID NO: 42025 - DNA, 41 bp, Homo sapiens; identical to SEQ ID NO: 27766
  source 1..41: mol_type = genomic DNA

SEQ ID NO: 42026 - DNA, 16 bp, Homo sapiens
  source 1..16: mol_type = genomic DNA
tggcgcagcggaagcg

SEQ ID NO: 42027 - DNA, 24 bp, Homo sapiens
  source 1..24: mol_type = genomic DNA
tggcgcagcggaagcgtgctgggc

SEQ ID NO: 42028 - DNA, 26 bp, Homo sapiens
  source 1..26: mol_type = genomic DNA
tggcgcagcggaagcgtgctgggccc

SEQ ID NO: 42029 - DNA, 16 bp, Homo sapiens
  source 1..16: mol_type = genomic DNA
tggctaggattcggcg

SEQ ID NO: 42030 - DNA, 24 bp, Homo sapiens
  source 1..24: mol_type = genomic DNA
tggctaggattcggcgctttcacc

SEQ ID NO: 42031 - DNA, 21 bp, Homo sapiens
  source 1..21: mol_type = genomic DNA
tggctgagtgaagcattggac

SEQ ID NO: 42032 - DNA, 22 bp, Homo sapiens
  source 1..22: mol_type = genomic DNA
tggctgagtgaagcattggact

SEQ ID NO: 42033 - DNA, 17 bp, Homo sapiens
  source 1..17: mol_type = genomic DNA
tgggagagcattagact

SEQ ID NO: 42034 - DNA, 19 bp, Homo sapiens
  source 1..19: mol_type = genomic DNA
tgggagagcattagactga

SEQ ID NO: 42035 - DNA, 23 bp, Homo sapiens
  source 1..23: mol_type = genomic DNA
tgggcccataacccagaggtcga

SEQ ID NO: 42036 - DNA, 27 bp, Homo sapiens
  source 1..27: mol_type = genomic DNA
tgggcccataacccagaggtcgatgga

SEQ ID NO: 42037 - DNA, 28 bp, Homo sapiens
  source 1..28: mol_type = genomic DNA
tgggcccataacccagaggtcgatggat

SEQ ID NO: 42038 - DNA, 16 bp, Homo sapiens
  source 1..16: mol_type = genomic DNA
tggggattgtgggttc

SEQ ID NO: 42039 - DNA, 17 bp, Homo sapiens
  source 1..17: mol_type = genomic DNA
tggggattgtgggttcg

SEQ ID NO: 42040 - DNA, 22 bp, Homo sapiens
  source 1..22: mol_type = genomic DNA
tggggattgtgggttcgagtcc

SEQ ID NO: 42041 - DNA, 23 bp, Homo sapiens
  source 1..23: mol_type = genomic DNA
tggggattgtgggttcgagtccc

SEQ ID NO: 42042 - DNA, 24 bp, Homo sapiens
  source 1..24: mol_type = genomic DNA
tggggattgtgggttcgagtccca

SEQ ID NO: 42043 - DNA, 26 bp, Homo sapiens
  source 1..26: mol_type = genomic DNA
tggggattgtgggttcgagtcccatc

SEQ ID NO: 42044 - DNA, 33 bp, Homo sapiens; identical to SEQ ID NO: 27815
  source 1..33: mol_type = genomic DNA

SEQ ID NO: 42045 - DNA, 34 bp, Homo sapiens; identical to SEQ ID NO: 27816
  source 1..34: mol_type = genomic DNA

SEQ ID NO: 42046 - DNA, 35 bp, Homo sapiens; identical to SEQ ID NO: 27817
  source 1..35: mol_type = genomic DNA

SEQ ID NO: 42047 - DNA, 36 bp, Homo sapiens; identical to SEQ ID NO: 27818
  source 1..36: mol_type = genomic DNA

SEQ ID NO: 42048 - DNA, 16 bp, Homo sapiens
  source 1..16: mol_type = genomic DNA
tggggttttgcagtcc

SEQ ID NO: 42049 - DNA, 17 bp, Homo sapiens
  source 1..17: mol_type = genomic DNA
tgggtggttcagtggta

SEQ ID NO: 42050 - DNA, 23 bp, Homo sapiens
  source 1..23: mol_type = genomic DNA
tgggtggttcagtggtagaattc

SEQ ID NO: 42051 - DNA, 25 bp, Homo sapiens
  source 1..25: mol_type = genomic DNA
tgggtggttcagtggtagaattctc

SEQ ID NO: 42052 - DNA, 27 bp, Homo sapiens
  source 1..27: mol_type = genomic DNA
tgggtggttcagtggtagaattctcgc

SEQ ID NO: 42053 - DNA, 28 bp, Homo sapiens
  source 1..28: mol_type = genomic DNA
tgggtggttcagtggtagaattctcgcc

SEQ ID NO: 42054 - DNA, 29 bp, Homo sapiens
  source 1..29: mol_type = genomic DNA
tgggtggttcagtggtagaattctcgcct

SEQ ID NO: 42055 - DNA, 31 bp, Homo sapiens; identical to SEQ ID NO: 27860
  source 1..31: mol_type = genomic DNA

SEQ ID NO: 42056 - DNA, 32 bp, Homo sapiens; identical to SEQ ID NO: 27861
  source 1..32: mol_type = genomic DNA

SEQ ID NO: 42057 - DNA, 33 bp, Homo sapiens; identical to SEQ ID NO: 27862
  source 1..33: mol_type = genomic DNA

SEQ ID NO: 42058 - DNA, 45 bp, Homo sapiens
  source 1..45: mol_type = genomic DNA
tgggtggttcagtggtagaattctcgcctgccacgcgggaggccc

SEQ ID NO: 42059 - DNA, 47 bp, Homo sapiens
  source 1..47: mol_type = genomic DNA
tgggtggttcagtggtagaattctcgcctgccacgcgggaggcccgg

SEQ ID NO: 42060 - DNA, 26 bp, Homo sapiens
  source 1..26: mol_type = genomic DNA
tgggttcgaatcccaccagagtcgcc

SEQ ID NO: 42061 - DNA, 26 bp, Homo sapiens
  source 1..26: mol_type = genomic DNA
tgggttcgaatcccaccctcgtcgcc

SEQ ID NO: 42062 - DNA, 26 bp, Homo sapiens
  source 1..26: mol_type = genomic DNA
tgggttcgaatcccaccgctgccacc

SEQ ID NO: 42063 - DNA, 25 bp, Homo sapiens
  source 1..25: mol_type = genomic DNA
tgggttcgaatcccaccttcgtcgc

SEQ ID NO: 42064 - DNA, 26 bp, Homo sapiens
  source 1..26: mol_type = genomic DNA
tgggttcgaatcccaccttcgtcgcc

SEQ ID NO: 42065 - DNA, 26 bp, Homo sapiens
  source 1..26: mol_type = genomic DNA
tgggttcgaatcccactcctgacacc

SEQ ID NO: 42066 - DNA, 24 bp, Homo sapiens
  source 1..24: mol_type = genomic DNA
tgggttcgaatcccacttctgaca

SEQ ID NO: 42067 - DNA, 25 bp, Homo sapiens
  source 1..25: mol_type = genomic DNA
tgggttcgaatcccacttctgacac

SEQ ID NO: 42068 - DNA, 26 bp, Homo sapiens
  source 1..26: mol_type = genomic DNA
tgggttcgaatcccacttctgacacc

SEQ ID NO: 42069 - DNA, 25 bp, Homo sapiens
  source 1..25: mol_type = genomic DNA
tgggttcgaatcccagcggggcctc

SEQ ID NO: 42070 - DNA, 26 bp, Homo sapiens
  source 1..26: mol_type = genomic DNA
tgggttcgaatcccagcggggcctcc

SEQ ID NO: 42071 - DNA, 25 bp, Homo sapiens
  source 1..25: mol_type = genomic DNA
tgggttcgaatcccagcggtgcctc

SEQ ID NO: 42072 - DNA, 26 bp, Homo sapiens
  source 1..26: mol_type = genomic DNA
tgggttcgaatcccagcggtgcctcc

SEQ ID NO: 42073 - DNA, 24 bp, Homo sapiens
  source 1..24: mol_type = genomic DNA
tgggttcgaatcccatcctcgtcg

SEQ ID NO: 42074 - DNA, 25 bp, Homo sapiens
  source 1..25: mol_type = genomic DNA
tgggttcgaatcccatcctcgtcgc

SEQ ID NO: 42075 - DNA, 26 bp, Homo sapiens
  source 1..26: mol_type = genomic DNA
tgggttcgaatcccatcctcgtcgcc

SEQ ID NO: 42076 - DNA, 27 bp, Homo sapiens
  source 1..27: mol_type = genomic DNA
tgggttcgaatcccatcctcgtcgcca

SEQ ID NO: 42077 - DNA, 24 bp, Homo sapiens
  source 1..24: mol_type = genomic DNA
tgggttcgagccccacgttgggcg

SEQ ID NO: 42078 - DNA, 25 bp, Homo sapiens
  source 1..25: mol_type = genomic DNA
tgggttcgagccccacgttgggcgc

SEQ ID NO: 42079 - DNA, 26 bp, Homo sapiens
  source 1..26: mol_type = genomic DNA
tgggttcgagccccacgttgggcgcc

SEQ ID NO: 42080 - DNA, 26 bp, Homo sapiens
  source 1..26: mol_type = genomic DNA
tgggttcgagccccagtggaaccacc

SEQ ID NO: 42081 - DNA, 26 bp, Homo sapiens
  source 1..26: mol_type = genomic DNA
tgggttcgagtcccaccagagtcgcc

SEQ ID NO: 42082 - DNA, 24 bp, Homo sapiens
  source 1..24: mol_type = genomic DNA
tgggttcgattctcatagtcctag

SEQ ID NO: 42083 - DNA, 25 bp, Homo sapiens
  source 1..25: mol_type = genomic DNA
tgggttcgattctcatagtcctagc

SEQ ID NO: 42084 - DNA, 27 bp, Homo sapiens
  source 1..27: mol_type = genomic DNA
tgggttcgattctcatagtcctagcca

SEQ ID NO: 42085 - DNA, 16 bp, Homo sapiens
  source 1..16: mol_type = genomic DNA
tggtagaattctcgcc

SEQ ID NO: 42086 - DNA, 17 bp, Homo sapiens
  source 1..17: mol_type = genomic DNA
tggtagaattctcgcct

SEQ ID NO: 42087 - DNA, 18 bp, Homo sapiens
  source 1..18: mol_type = genomic DNA
tggtagaattctcgcctc

SEQ ID NO: 42088 - DNA, 19 bp, Homo sapiens
  source 1..19: mol_type = genomic DNA
tggtagaattctcgcctcc

SEQ ID NO: 42089 - DNA, 20 bp, Homo sapiens
  source 1..20: mol_type = genomic DNA
tggtagaattctcgcctccc

SEQ ID NO: 42090 - DNA, 33 bp, Homo sapiens
  source 1..33: mol_type = genomic DNA
tggtagaattctcgcctcccacgcgggagaccc

SEQ ID NO: 42091 - DNA, 35 bp, Homo sapiens; identical to SEQ ID NO: 27904
  source 1..35: mol_type = genomic DNA

SEQ ID NO: 42092 - DNA, 18 bp, Homo sapiens
  source 1..18: mol_type = genomic DNA
tggtagaattctcgcctg

SEQ ID NO: 42093 - DNA, 19 bp, Homo sapiens
  source 1..19: mol_type = genomic DNA
tggtagaattctcgcctgc

SEQ ID NO: 42094 - DNA, 20 bp, Homo sapiens
  source 1..20: mol_type = genomic DNA
tggtagaattctcgcctgcc

SEQ ID NO: 42095 - DNA, 21 bp, Homo sapiens
  source 1..21: mol_type = genomic DNA
tggtagaattctcgcctgcca

SEQ ID NO: 42096 - DNA, 22 bp, Homo sapiens
  source 1..22: mol_type = genomic DNA
tggtagaattctcgcctgccac

SEQ ID NO: 42097 - DNA, 23 bp, Homo sapiens
  source 1..23: mol_type = genomic DNA
tggtagaattctcgcctgccacg

SEQ ID NO: 42098 - DNA, 24 bp, Homo sapiens
  source 1..24: mol_type = genomic DNA
tggtagaattctcgcctgccacgc

SEQ ID NO: 42099 - DNA, 25 bp, Homo sapiens
  source 1..25: mol_type = genomic DNA
tggtagaattctcgcctgccacgcg

SEQ ID NO: 42100 - DNA, 26 bp, Homo sapiens
  source 1..26: mol_type = genomic DNA
tggtagaattctcgcctgccacgcgg

SEQ ID NO: 42101 - DNA, 27 bp, Homo sapiens
  source 1..27: mol_type = genomic DNA
tggtagaattctcgcctgccacgcggg

SEQ ID NO: 42102 - DNA, 28 bp, Homo sapiens
  source 1..28: mol_type = genomic DNA
tggtagaattctcgcctgccacgcggga

SEQ ID NO: 42103 - DNA, 29 bp, Homo sapiens
  source 1..29: mol_type = genomic DNA
tggtagaattctcgcctgccacgcgggag

SEQ ID NO: 42104 - DNA, 31 bp, Homo sapiens; identical to SEQ ID NO: 27918
  source 1..31: mol_type = genomic DNA

SEQ ID NO: 42105 - DNA, 32 bp, Homo sapiens; identical to SEQ ID NO: 27919
  source 1..32: mol_type = genomic DNA

SEQ ID NO: 42106 - DNA, 33 bp, Homo sapiens; identical to SEQ ID NO: 27920
  source 1..33: mol_type = genomic DNA

SEQ ID NO: 42107 - DNA, 34 bp, Homo sapiens; identical to SEQ ID NO: 27921
  source 1..34: mol_type = genomic DNA

SEQ ID NO: 42108 - DNA, 35 bp, Homo sapiens; identical to SEQ ID NO: 27922
  source 1..35: mol_type = genomic DNA

SEQ ID NO: 42109 - DNA, 36 bp, Homo sapiens; identical to SEQ ID NO: 27923
  source 1..36: mol_type = genomic DNA

SEQ ID NO: 42110 - DNA, 37 bp, Homo sapiens; identical to SEQ ID NO: 27924
  source 1..37: mol_type = genomic DNA

SEQ ID NO: 42111 - DNA, 38 bp, Homo sapiens; identical to SEQ ID NO: 27925
  source 1..38: mol_type = genomic DNA

SEQ ID NO: 42112 - DNA, 39 bp, Homo sapiens; identical to SEQ ID NO: 27926
  source 1..39: mol_type = genomic DNA

SEQ ID NO: 42113 - DNA, 16 bp, Homo sapiens
  source 1..16: mol_type = genomic DNA
tggtagagcatttgac

SEQ ID NO: 42114 - DNA, 17 bp, Homo sapiens
  source 1..17: mol_type = genomic DNA
tggtagagcatttgact

SEQ ID NO: 42115 - DNA, 18 bp, Homo sapiens
  source 1..18: mol_type = genomic DNA
tggtagagcatttgactg

SEQ ID NO: 42116 - DNA, 19 bp, Homo sapiens
  source 1..19: mol_type = genomic DNA
tggtagagcatttgactgc

SEQ ID NO: 42117 - DNA, 24 bp, Homo sapiens
  source 1..24: mol_type = genomic DNA
tggtagagcatttgactgcagatc

SEQ ID NO: 42118 - DNA, 16 bp, Homo sapiens
  source 1..16: mol_type = genomic DNA
tggtagagcgcatgct

SEQ ID NO: 42119 - DNA, 16 bp, Homo sapiens
  source 1..16: mol_type = genomic DNA
tggtagagcgcgtgct

SEQ ID NO: 42120 - DNA, 17 bp, Homo sapiens
  source 1..17: mol_type = genomic DNA
tggtagagcgcgtgctt

SEQ ID NO: 42121 - DNA, 34 bp, Homo sapiens
  source 1..34: mol_type = genomic DNA
tggtagagcgcgtgcttagcatgcacgaggcccc

SEQ ID NO: 42122 - DNA, 16 bp, Homo sapiens
  source 1..16: mol_type = genomic DNA
tggtagagcgctcgct

SEQ ID NO: 42123 - DNA, 16 bp, Homo sapiens
  source 1..16: mol_type = genomic DNA
tggtagagcggaggac

SEQ ID NO: 42124 - DNA, 25 bp, Homo sapiens
  source 1..25: mol_type = genomic DNA
tggtagagcggaggactgtagatcc

SEQ ID NO: 42125 - DNA, 23 bp, Homo sapiens
  source 1..23: mol_type = genomic DNA
tggtatagtggtaagcatagctg

SEQ ID NO: 42126 - DNA, 23 bp, Homo sapiens
  source 1..23: mol_type = genomic DNA
tggtatagtggtgagcatagctg

SEQ ID NO: 42127 - DNA, 44 bp, Homo sapiens; identical to SEQ ID NO: 27956
  source 1..44: mol_type = genomic DNA

SEQ ID NO: 42128 - DNA, 46 bp, Homo sapiens
  source 1..46: mol_type = genomic DNA
tggtatagtggtgagcatagctgccttccaagcagttgacccgggt

SEQ ID NO: 42129 - DNA, 36 bp, Homo sapiens; identical to SEQ ID NO: 27963
  source 1..36: mol_type = genomic DNA

SEQ ID NO: 42130 - DNA, 37 bp, Homo sapiens; identical to SEQ ID NO: 27964
  source 1..37: mol_type = genomic DNA

SEQ ID NO: 42131 - DNA, 17 bp, Homo sapiens
  source 1..17: mol_type = genomic DNA
tggtatcatgcaagatt

SEQ ID NO: 42132 - DNA, 18 bp, Homo sapiens
  source 1..18: mol_type = genomic DNA
tggtatcatgcaagattc

SEQ ID NO: 42133 - DNA, 16 bp, Homo sapiens
  source 1..16: mol_type = genomic DNA
tggtcatcacgttcgc

SEQ ID NO: 42134 - DNA, 17 bp, Homo sapiens
  source 1..17: mol_type = genomic DNA
tggtcatcacgttcgcc

SEQ ID NO: 42135 - DNA, 16 bp, Homo sapiens
  source 1..16: mol_type = genomic DNA
tggtcgtggttgtagt

SEQ ID NO: 42136 - DNA, 17 bp, Homo sapiens
  source 1..17: mol_type = genomic DNA
tggtcgtggttgtagtc

SEQ ID NO: 42137 - DNA, 18 bp, Homo sapiens
  source 1..18: mol_type = genomic DNA
tggtcgtggttgtagtcc

SEQ ID NO: 42138 - DNA, 19 bp, Homo sapiens
  source 1..19: mol_type = genomic DNA
tggtcgtggttgtagtccg

SEQ ID NO: 42139 - DNA, 20 bp, Homo sapiens
  source 1..20: mol_type = genomic DNA
tggtcgtggttgtagtccgt

SEQ ID NO: 42140 - DNA, 21 bp, Homo sapiens
  source 1..21: mol_type = genomic DNA
tggtcgtggttgtagtccgtg

SEQ ID NO: 42141 - DNA, 22 bp, Homo sapiens
  source 1..22: mol_type = genomic DNA
tggtcgtggttgtagtccgtgc

SEQ ID NO: 42142 - DNA, 23 bp, Homo sapiens
  source 1..23: mol_type = genomic DNA
tggtcgtggttgtagtccgtgcg

SEQ ID NO: 42143 - DNA, 25 bp, Homo sapiens
  source 1..25: mol_type = genomic DNA
tggtcgtggttgtagtccgtgcgag

SEQ ID NO: 42144 - DNA, 26 bp, Homo sapiens
  source 1..26: mol_type = genomic DNA
tggtcgtggttgtagtccgtgcgaga

SEQ ID NO: 42145 - DNA, 27 bp, Homo sapiens
  source 1..27: mol_type = genomic DNA
tggtcgtggttgtagtccgtgcgagaa

SEQ ID NO: 42146 - DNA, 28 bp, Homo sapiens
  source 1..28: mol_type = genomic DNA
tggtcgtggttgtagtccgtgcgagaat

SEQ ID NO: 42147 - DNA, 29 bp, Homo sapiens
  source 1..29: mol_type = genomic DNA
tggtcgtggttgtagtccgtgcgagaata

SEQ ID NO: 42148 - DNA, 30 bp, Homo sapiens; identical to SEQ ID NO: 27986
  source 1..30: mol_type = genomic DNA

SEQ ID NO: 42149 - DNA, 31 bp, Homo sapiens; identical to SEQ ID NO: 27987
  source 1..31: mol_type = genomic DNA

SEQ ID NO: 42150 - DNA, 32 bp, Homo sapiens; identical to SEQ ID NO: 27988
  source 1..32: mol_type = genomic DNA

SEQ ID NO: 42151 - DNA, 20 bp, Homo sapiens
  source 1..20: mol_type = genomic DNA
tggtctaaggcgccagactc

SEQ ID NO: 42152 - DNA, 17 bp, Homo sapiens
  source 1..17: mol_type = genomic DNA
tggtctaaggcgctgga

SEQ ID NO: 42153 - DNA, 17 bp, Homo sapiens
  source 1..17: mol_type = genomic DNA
tggtctagcggttagga

SEQ ID NO: 42154 - DNA, 18 bp, Homo sapiens
  source 1..18: mol_type = genomic DNA
tggtctagcggttaggat

SEQ ID NO: 42155 - DNA, 19 bp, Homo sapiens
  source 1..19: mol_type = genomic DNA
tggtctagcggttaggatt

SEQ ID NO: 42156 - DNA, 20 bp, Homo sapiens
  source 1..20: mol_type = genomic DNA
tggtctagcggttaggattc

SEQ ID NO: 42157 - DNA, 21 bp, Homo sapiens
  source 1..21: mol_type = genomic DNA
tggtctagcggttaggattcc

SEQ ID NO: 42158 - DNA, 22 bp, Homo sapiens
  source 1..22: mol_type = genomic DNA
tggtctagcggttaggattcct

SEQ ID NO: 42159 - DNA, 23 bp, Homo sapiens
  source 1..23: mol_type = genomic DNA
tggtctagcggttaggattcctg

SEQ ID NO: 42160 - DNA, 24 bp, Homo sapiens
  source 1..24: mol_type = genomic DNA
tggtctagcggttaggattcctgg

SEQ ID NO: 42161 - DNA, 25 bp, Homo sapiens
  source 1..25: mol_type = genomic DNA
tggtctagcggttaggattcctggt

SEQ ID NO: 42162 - DNA, 26 bp, Homo sapiens
  source 1..26: mol_type = genomic DNA
tggtctagcggttaggattcctggtt

SEQ ID NO: 42163 - DNA, 28 bp, Homo sapiens
  source 1..28: mol_type = genomic DNA
tggtctagcggttaggattcctggtttt

SEQ ID NO: 42164 - DNA, 30 bp, Homo sapiens; identical to SEQ ID NO: 28005
  source 1..30: mol_type = genomic DNA

SEQ ID NO: 42165 - DNA, 33 bp, Homo sapiens; identical to SEQ ID NO: 28006
  source 1..33: mol_type = genomic DNA

SEQ ID NO: 42166 - DNA, 35 bp, Homo sapiens
  source 1..35: mol_type = genomic DNA
tggtctagcggttaggattcctggttttcacccag

SEQ ID NO: 42167 - DNA, 42 bp, Homo sapiens; identical to SEQ ID NO: 28008
  source 1..42: mol_type = genomic DNA

SEQ ID NO: 42168 - DNA, 44 bp, Homo sapiens; identical to SEQ ID NO: 28009
  source 1..44: mol_type = genomic DNA

SEQ ID NO: 42169 - DNA, 19 bp, Homo sapiens
  source 1..19: mol_type = genomic DNA
tggtctaggggtatgattc

SEQ ID NO: 42170 - DNA, 21 bp, Homo sapiens
  source 1..21: mol_type = genomic DNA
tggtctaggggtatgattctc

SEQ ID NO: 42171 - DNA, 24 bp, Homo sapiens
  source 1..24: mol_type = genomic DNA
tggtctaggggtatgattctcgct

SEQ ID NO: 42172 - DNA, 25 bp, Homo sapiens
  source 1..25: mol_type = genomic DNA
tggtctaggggtatgattctcgctt

SEQ ID NO: 42173 - DNA, 23 bp, Homo sapiens
  source 1..23: mol_type = genomic DNA
tggtctagtggctaggattcggc

SEQ ID NO: 42174 - DNA, 18 bp, Homo sapiens
  source 1..18: mol_type = genomic DNA
tggtctagtggttaggat

SEQ ID NO: 42175 - DNA, 19 bp, Homo sapiens
  source 1..19: mol_type = genomic DNA
tggtctagtggttaggatt

SEQ ID NO: 42176 - DNA, 23 bp, Homo sapiens
  source 1..23: mol_type = genomic DNA
tggtctagtggttaggattcggc

SEQ ID NO: 42177 - DNA, 24 bp, Homo sapiens
  source 1..24: mol_type = genomic DNA
tggtctagtggttaggattcggcg

SEQ ID NO: 42178 - DNA, 25 bp, Homo sapiens
  source 1..25: mol_type = genomic DNA
tggtctagtggttaggattcggcgc

SEQ ID NO: 42179 - DNA, 26 bp, Homo sapiens
  source 1..26: mol_type = genomic DNA
tggtctagtggttaggattcggcgct

SEQ ID NO: 42180 - DNA, 27 bp, Homo sapiens
  source 1..27: mol_type = genomic DNA
tggtctagtggttaggattcggcgctc

SEQ ID NO: 42181 - DNA, 28 bp, Homo sapiens
  source 1..28: mol_type = genomic DNA
tggtctagtggttaggattcggcgctct

SEQ ID NO: 42182 - DNA, 29 bp, Homo sapiens
  source 1..29: mol_type = genomic DNA
tggtctagtggttaggattcggcgctctc

SEQ ID NO: 42183 - DNA, 30 bp, Homo sapiens; identical to SEQ ID NO: 28039
  source 1..30: mol_type = genomic DNA

SEQ ID NO: 42184 - DNA, 31 bp, Homo sapiens
  source 1..31: mol_type = genomic DNA
tggtctagtggttaggattcggcgctctcac

SEQ ID NO: 42185 - DNA, 32 bp, Homo sapiens; identical to SEQ ID NO: 28040
  source 1..32: mol_type = genomic DNA

SEQ ID NO: 42186 - DNA, 33 bp, Homo sapiens
  source 1..33: mol_type = genomic DNA
tggtctagtggttaggattcggcgctctcaccg

SEQ ID NO: 42187 - DNA, 35 bp, Homo sapiens; identical to SEQ ID NO: 28041
  source 1..35: mol_type = genomic DNA

SEQ ID NO: 42188 - DNA, 41 bp, Homo sapiens; identical to SEQ ID NO: 28042
  source 1..41: mol_type = genomic DNA

SEQ ID NO: 42189 - DNA, 42 bp, Homo sapiens; identical to SEQ ID NO: 28043
  source 1..42: mol_type = genomic DNA

SEQ ID NO: 42190 - DNA, 43 bp, Homo sapiens
  source 1..43: mol_type = genomic DNA
tggtctagtggttaggattcggcgctctcaccgccgcggcccg

SEQ ID NO: 42191 - DNA, 44 bp, Homo sapiens; identical to SEQ ID NO: 28044
  source 1..44: mol_type = genomic DNA

SEQ ID NO: 42192 - DNA, 45 bp, Homo sapiens; identical to SEQ ID NO: 28045
  source 1..45: mol_type = genomic DNA

SEQ ID NO: 42193 - DNA, 18 bp, Homo sapiens
  source 1..18: mol_type = genomic DNA
tggtgagcactctggact

SEQ ID NO: 42194 - DNA, 24 bp, Homo sapiens
  source 1..24: mol_type = genomic DNA
tggtgagcactctggactctgaat

SEQ ID NO: 42195 - DNA, 25 bp, Homo sapiens
  source 1..25: mol_type = genomic DNA
tggtgagcactctggactctgaatc

SEQ ID NO: 42196 - DNA, 26 bp, Homo sapiens
  source 1..26: mol_type = genomic DNA
tggtgagcactctggactctgaatcc

SEQ ID NO: 42197 - DNA, 27 bp, Homo sapiens
  source 1..27: mol_type = genomic DNA
tggtgagcactctggactctgaatcca

SEQ ID NO: 42198 - DNA, 28 bp, Homo sapiens
  source 1..28: mol_type = genomic DNA
tggtgagcactctggactctgaatccag

SEQ ID NO: 42199 - DNA, 29 bp, Homo sapiens
  source 1..29: mol_type = genomic DNA
tggtgagcactctggactctgaatccagc

SEQ ID NO: 42200 - DNA, 16 bp, Homo sapiens
  source 1..16: mol_type = genomic DNA
tggtgagtatccccgc

SEQ ID NO: 42201 - DNA, 23 bp, Homo sapiens
  source 1..23: mol_type = genomic DNA
tggtgagtatccccgcctgtcac

SEQ ID NO: 42202 - DNA, 16 bp, Homo sapiens
  source 1..16: mol_type = genomic DNA
tggtggagttaaagac

SEQ ID NO: 42203 - DNA, 24 bp, Homo sapiens
  source 1..24: mol_type = genomic DNA
tggtggagttaaagactttttctc

SEQ ID NO: 42204 - DNA, 28 bp, Homo sapiens
  source 1..28: mol_type = genomic DNA
tggtggagttaaagactttttctctgac

SEQ ID NO: 42205 - DNA, 29 bp, Homo sapiens
  source 1..29: mol_type = genomic DNA
tggtggagttaaagactttttctctgacc

SEQ ID NO: 42206 - DNA, 30 bp, Homo sapiens; identical to SEQ ID NO: 28095
  source 1..30: mol_type = genomic DNA

SEQ ID NO: 42207 - DNA, 16 bp, Homo sapiens
  source 1..16: mol_type = genomic DNA
tggtggtctagtggct

SEQ ID NO: 42208 - DNA, 26 bp, Homo sapiens
  source 1..26: mol_type = genomic DNA
tggtggtctagtggctaggattcggc

SEQ ID NO: 42209 - DNA, 29 bp, Homo sapiens
  source 1..29: mol_type = genomic DNA
tggtggtctagtggctaggattcggcgct

SEQ ID NO: 42210 - DNA, 21 bp, Homo sapiens
  source 1..21: mol_type = genomic DNA
tggtggtctagtggttaggat

SEQ ID NO: 42211 - DNA, 22 bp, Homo sapiens
  source 1..22: mol_type = genomic DNA
tggtggtctagtggttaggatt

SEQ ID NO: 42212 - DNA, 23 bp, Homo sapiens
  source 1..23: mol_type = genomic DNA
tggtggtctagtggttaggattc

SEQ ID NO: 42213 - DNA, 24 bp, Homo sapiens
  source 1..24: mol_type = genomic DNA
tggtggtctagtggttaggattcg

SEQ ID NO: 42214 - DNA, 26 bp, Homo sapiens
  source 1..26: mol_type = genomic DNA
tggtggtctagtggttaggattcggc

SEQ ID NO: 42215 - DNA, 28 bp, Homo sapiens
  source 1..28: mol_type = genomic DNA
tggtggtctagtggttaggattcggcgc

SEQ ID NO: 42216 - DNA, 29 bp, Homo sapiens
  source 1..29: mol_type = genomic DNA
tggtggtctagtggttaggattcggcgct

SEQ ID NO: 42217 - DNA, 30 bp, Homo sapiens; identical to SEQ ID NO: 28133
  source 1..30: mol_type = genomic DNA

SEQ ID NO: 42218 - DNA, 31 bp, Homo sapiens; identical to SEQ ID NO: 28134
  source 1..31: mol_type = genomic DNA

SEQ ID NO: 42219 - DNA, 32 bp, Homo sapiens; identical to SEQ ID NO: 28135
  source 1..32: mol_type = genomic DNA

SEQ ID NO: 42220 - DNA, 33 bp, Homo sapiens; identical to SEQ ID NO: 28136
  source 1..33: mol_type = genomic DNA

SEQ ID NO: 42221 - DNA, 38 bp, Homo sapiens; identical to SEQ ID NO: 28140
  source 1..38: mol_type = genomic DNA

SEQ ID NO: 42222 - DNA, 45 bp, Homo sapiens; identical to SEQ ID NO: 28141
  source 1..45: mol_type = genomic DNA

SEQ ID NO: 42223 - DNA, 47 bp, Homo sapiens; identical to SEQ ID NO: 28142
  source 1..47: mol_type = genomic DNA

SEQ ID NO: 42224 - DNA, 26 bp, Homo sapiens
  source 1..26: mol_type = genomic DNA
tggtggttcagtggtagaattctcgc

SEQ ID NO: 42225 - DNA, 27 bp, Homo sapiens
  source 1..27: mol_type = genomic DNA
tggtggttcagtggtagaattctcgcc

SEQ ID NO: 42226 - DNA, 28 bp, Homo sapiens
  source 1..28: mol_type = genomic DNA
tggtggttcagtggtagaattctcgcct

SEQ ID NO: 42227 - DNA, 31 bp, Homo sapiens; identical to SEQ ID NO: 28160
  source 1..31: mol_type = genomic DNA

SEQ ID NO: 42228 - DNA, 44 bp, Homo sapiens; identical to SEQ ID NO: 28162
  source 1..44: mol_type = genomic DNA

SEQ ID NO: 42229 - DNA, 46 bp, Homo sapiens; identical to SEQ ID NO: 28163
  source 1..46: mol_type = genomic DNA

SEQ ID NO: 42230 - DNA, 28 bp, Homo sapiens
  source 1..28: mol_type = genomic DNA
tggtggttcgagcccacccagggacgcc

SEQ ID NO: 42231 - DNA, 26 bp, Homo sapiens
  source 1..26: mol_type = genomic DNA
tggtgtaatggtaagcactctggact

SEQ ID NO: 42232 - DNA, 26 bp, Homo sapiens
  source 1..26: mol_type = genomic DNA
tggtgtaatggtgagcactctggact

SEQ ID NO: 42233 - DNA, 27 bp, Homo sapiens
  source 1..27: mol_type = genomic DNA
tggtgtaatggtgagcactctggactc

SEQ ID NO: 42234 - DNA, 33 bp, Homo sapiens; identical to SEQ ID NO: 28178
  source 1..33: mol_type = genomic DNA

SEQ ID NO: 42235 - DNA, 16 bp, Homo sapiens
  source 1..16: mol_type = genomic DNA
tggtgtaatggttagc

SEQ ID NO: 42236 - DNA, 20 bp, Homo sapiens
  source 1..20: mol_type = genomic DNA
tggtgtaatggttagcactc

SEQ ID NO: 42237 - DNA, 23 bp, Homo sapiens
  source 1..23: mol_type = genomic DNA
tggtgtaatggttagcactctgg

SEQ ID NO: 42238 - DNA, 24 bp, Homo sapiens
  source 1..24: mol_type = genomic DNA
tggtgtaatggttagcactctgga

SEQ ID NO: 42239 - DNA, 25 bp, Homo sapiens
  source 1..25: mol_type = genomic DNA
tggtgtaatggttagcactctggac

SEQ ID NO: 42240 - DNA, 26 bp, Homo sapiens
  source 1..26: mol_type = genomic DNA
tggtgtaatggttagcactctggact

SEQ ID NO: 42241 - DNA, 27 bp, Homo sapiens
  source 1..27: mol_type = genomic DNA
tggtgtaatggttagcactctggactc

SEQ ID NO: 42242 - DNA, 28 bp, Homo sapiens
  source 1..28: mol_type = genomic DNA
tggtgtaatggttagcactctggactct

SEQ ID NO: 42243 - DNA, 29 bp, Homo sapiens
  source 1..29: mol_type = genomic DNA
tggtgtaatggttagcactctggactctg

SEQ ID NO: 42244 - DNA, 30 bp, Homo sapiens; identical to SEQ ID NO: 28193
  source 1..30: mol_type = genomic DNA

SEQ ID NO: 42245 - DNA, 31 bp, Homo sapiens; identical to SEQ ID NO: 28194
  source 1..31: mol_type = genomic DNA

SEQ ID NO: 42246 - DNA, 32 bp, Homo sapiens
  source 1..32: mol_type = genomic DNA
tggtgtaatggttagcactctggactctgaat

SEQ ID NO: 42247 - DNA, 33 bp, Homo sapiens; identical to SEQ ID NO: 28195
  source 1..33: mol_type = genomic DNA

SEQ ID NO: 42248 - DNA, 34 bp, Homo sapiens; identical to SEQ ID NO: 28196
  source 1..34: mol_type = genomic DNA

SEQ ID NO: 42249 - DNA, 35 bp, Homo sapiens; identical to SEQ ID NO: 28197
  source 1..35: mol_type = genomic DNA

SEQ ID NO: 42250 - DNA, 44 bp, Homo sapiens; identical to SEQ ID NO: 28198
  source 1..44: mol_type = genomic DNA

SEQ ID NO: 42251 - DNA, 45 bp, Homo sapiens; identical to SEQ ID NO: 28199
  source 1..45: mol_type = genomic DNA

SEQ ID NO: 42252 - DNA, 46 bp, Homo sapiens; identical to SEQ ID NO: 28200
  source 1..46: mol_type = genomic DNA

SEQ ID NO: 42253 - DNA, 47 bp, Homo sapiens; identical to SEQ ID NO: 28201
  source 1..47: mol_type = genomic DNA

SEQ ID NO: 42254 - DNA, 29 bp, Homo sapiens
  source 1..29: mol_type = genomic DNA
tggtgtaatggttagcactctggactttg

SEQ ID NO: 42255 - DNA, 31 bp, Homo sapiens
  source 1..31: mol_type = genomic DNA
tggtgtaatggttagcactctggactttgaa

SEQ ID NO: 42256 - DNA, 32 bp, Homo sapiens; identical to SEQ ID NO: 28203
  source 1..32: mol_type = genomic DNA

SEQ ID NO: 42257 - DNA, 33 bp, Homo sapiens; identical to SEQ ID NO: 28204
  source 1..33: mol_type = genomic DNA

SEQ ID NO: 42258 - DNA, 34 bp, Homo sapiens
  source 1..34: mol_type = genomic DNA
tggtgtaatggttagcactctggactttgaatcc

SEQ ID NO: 42259 - DNA, 35 bp, Homo sapiens
  source 1..35: mol_type = genomic DNA
tggtgtaatggttagcactctggactttgaatcca

SEQ ID NO: 42260 - DNA, 44 bp, Homo sapiens
  source 1..44: mol_type = genomic DNA
tggtgtaatggttagcactctggactttgaatccagcgatccga

SEQ ID NO: 42261 - DNA, 46 bp, Homo sapiens
  source 1..46: mol_type = genomic DNA
tggtgtaatggttagcactctggactttgaatccagcgatccgagt

SEQ ID NO: 42262 - DNA, 16 bp, Homo sapiens
  source 1..16: mol_type = genomic DNA
tggtgtagtggtatca

SEQ ID NO: 42263 - DNA, 18 bp, Homo sapiens
  source 1..18: mol_type = genomic DNA
tggtgtagtggtatcatg

SEQ ID NO: 42264 - DNA, 20 bp, Homo sapiens
  source 1..20: mol_type = genomic DNA
tggtgtagtggtatcatgca

SEQ ID NO: 42265 - DNA, 25 bp, Homo sapiens
  source 1..25: mol_type = genomic DNA
tggtgtagtggtatcatgcaagatt

SEQ ID NO: 42266 - DNA, 26 bp, Homo sapiens
  source 1..26: mol_type = genomic DNA
tggtgtagtggtatcatgcaagattc

SEQ ID NO: 42267 - DNA, 32 bp, Homo sapiens; identical to SEQ ID NO: 28214
  source 1..32: mol_type = genomic DNA

SEQ ID NO: 42268 - DNA, 43 bp, Homo sapiens; identical to SEQ ID NO: 28217
  source 1..43: mol_type = genomic DNA

SEQ ID NO: 42269 - DNA, 45 bp, Homo sapiens; identical to SEQ ID NO: 28219
  source 1..45: mol_type = genomic DNA

SEQ ID NO: 42270 - DNA, 16 bp, Homo sapiens
  source 1..16: mol_type = genomic DNA
tggttaaggcattgga

SEQ ID NO: 42271 - DNA, 17 bp, Homo sapiens
  source 1..17: mol_type = genomic DNA
tggttaaggcattggac

SEQ ID NO: 42272 - DNA, 18 bp, Homo sapiens
  source 1..18: mol_type = genomic DNA
tggttaaggcattggact

SEQ ID NO: 42273 - DNA, 20 bp, Homo sapiens
  source 1..20: mol_type = genomic DNA
tggttaaggcattggactta

SEQ ID NO: 42274 - DNA, 17 bp, Homo sapiens
  source 1..17: mol_type = genomic DNA
tggttaaggcgatggac

SEQ ID NO: 42275 - DNA, 16 bp, Homo sapiens
  source 1..16: mol_type = genomic DNA
tggttaaggcgttgga

SEQ ID NO: 42276 - DNA, 17 bp, Homo sapiens
  source 1..17: mol_type = genomic DNA
tggttaaggcgttggac

SEQ ID NO: 42277 - DNA, 17 bp, Homo sapiens
  source 1..17: mol_type = genomic DNA
tggttaaggtgatggac

SEQ ID NO: 42278 - DNA, 18 bp, Homo sapiens
  source 1..18: mol_type = genomic DNA
tggttaaggtgatggact

SEQ ID NO: 42279 - DNA, 16 bp, Homo sapiens
  source 1..16: mol_type = genomic DNA
tggttagcactctgga

SEQ ID NO: 42280 - DNA, 17 bp, Homo sapiens
  source 1..17: mol_type = genomic DNA
tggttagcactctggac

SEQ ID NO: 42281 - DNA, 18 bp, Homo sapiens
  source 1..18: mol_type = genomic DNA
tggttagcactctggact

SEQ ID NO: 42282 - DNA, 19 bp, Homo sapiens
  source 1..19: mol_type = genomic DNA
tggttagcactctggactc

SEQ ID NO: 42283 - DNA, 20 bp, Homo sapiens
  source 1..20: mol_type = genomic DNA
tggttagcactctggactct

SEQ ID NO: 42284 - DNA, 21 bp, Homo sapiens
  source 1..21: mol_type = genomic DNA
tggttagcactctggactctg

SEQ ID NO: 42285 - DNA, 22 bp, Homo sapiens
  source 1..22: mol_type = genomic DNA
tggttagcactctggactctga

SEQ ID NO: 42286 - DNA, 23 bp, Homo sapiens
  source 1..23: mol_type = genomic DNA
tggttagcactctggactctgaa

SEQ ID NO: 42287 - DNA, 24 bp, Homo sapiens
  source 1..24: mol_type = genomic DNA
tggttagcactctggactctgaat

SEQ ID NO: 42288 - DNA, 25 bp, Homo sapiens
  source 1..25: mol_type = genomic DNA
tggttagcactctggactctgaatc

SEQ ID NO: 42289 - DNA, 26 bp, Homo sapiens
  source 1..26: mol_type = genomic DNA
tggttagcactctggactctgaatcc

SEQ ID NO: 42290 - DNA, 27 bp, Homo sapiens
  source 1..27: mol_type = genomic DNA
tggttagcactctggactctgaatcca

SEQ ID NO: 42291 - DNA, 28 bp, Homo sapiens
  source 1..28: mol_type = genomic DNA
tggttagcactctggactctgaatccag

SEQ ID NO: 42292 - DNA, 29 bp, Homo sapiens
  source 1..29: mol_type = genomic DNA
tggttagcactctggactctgaatccagc

SEQ ID NO: 42293 - DNA, 30 bp, Homo sapiens; identical to SEQ ID NO: 28239
  source 1..30: mol_type = genomic DNA

SEQ ID NO: 42294 - DNA, 34 bp, Homo sapiens; identical to SEQ ID NO: 28240
  source 1..34: mol_type = genomic DNA

SEQ ID NO: 42295 - DNA, 37 bp, Homo sapiens; identical to SEQ ID NO: 28242
  source 1..37: mol_type = genomic DNA

SEQ ID NO: 42296 - DNA, 38 bp, Homo sapiens; identical to SEQ ID NO: 28243
  source 1..38: mol_type = genomic DNA

SEQ ID NO: 42297 - DNA, 40 bp, Homo sapiens; identical to SEQ ID NO: 28245
  source 1..40: mol_type = genomic DNA

SEQ ID NO: 42298 - DNA, 41 bp, Homo sapiens; identical to SEQ ID NO: 28246
  source 1..41: mol_type = genomic DNA

SEQ ID NO: 42299 - DNA, 22 bp, Homo sapiens
  source 1..22: mol_type = genomic DNA
tggttagcactctggactttga

SEQ ID NO: 42300 - DNA, 23 bp, Homo sapiens
  source 1..23: mol_type = genomic DNA
tggttagcactctggactttgaa

SEQ ID NO: 42301 - DNA, 25 bp, Homo sapiens
  source 1..25: mol_type = genomic DNA
tggttagcactctggactttgaatc

SEQ ID NO: 42302 - DNA, 26 bp, Homo sapiens
  source 1..26: mol_type = genomic DNA
tggttagcactctggactttgaatcc

SEQ ID NO: 42303 - DNA, 29 bp, Homo sapiens
  source 1..29: mol_type = genomic DNA
tggttagcactctggactttgaatccagc

SEQ ID NO: 42304 - DNA, 37 bp, Homo sapiens; identical to SEQ ID NO: 28255
  source 1..37: mol_type = genomic DNA

SEQ ID NO: 42305 - DNA, 40 bp, Homo sapiens; identical to SEQ ID NO: 28257
  source 1..40: mol_type = genomic DNA

SEQ ID NO: 42306 - DNA, 16 bp, Homo sapiens
  source 1..16: mol_type = genomic DNA
tggttaggattcggcg

SEQ ID NO: 42307 - DNA, 17 bp, Homo sapiens
  source 1..17: mol_type = genomic DNA
tggttaggattcggcgc

SEQ ID NO: 42308 - DNA, 18 bp, Homo sapiens
  source 1..18: mol_type = genomic DNA
tggttaggattcggcgct

SEQ ID NO: 42309 - DNA, 19 bp, Homo sapiens
  source 1..19: mol_type = genomic DNA
tggttaggattcggcgctc

SEQ ID NO: 42310 - DNA, 20 bp, Homo sapiens
  source 1..20: mol_type = genomic DNA
tggttaggattcggcgctct

SEQ ID NO: 42311 - DNA, 21 bp, Homo sapiens
  source 1..21: mol_type = genomic DNA
tggttaggattcggcgctctc

SEQ ID NO: 42312 - DNA, 22 bp, Homo sapiens
  source 1..22: mol_type = genomic DNA
tggttaggattcggcgctctca

SEQ ID NO: 42313 - DNA, 23 bp, Homo sapiens
  source 1..23: mol_type = genomic DNA
tggttaggattcggcgctctcac

SEQ ID NO: 42314 - DNA, 24 bp, Homo sapiens
  source 1..24: mol_type = genomic DNA
tggttaggattcggcgctctcacc

SEQ ID NO: 42315 - DNA, 25 bp, Homo sapiens
  source 1..25: mol_type = genomic DNA
tggttaggattcggcgctctcaccg

SEQ ID NO: 42316 - DNA, 26 bp, Homo sapiens
  source 1..26: mol_type = genomic DNA
tggttaggattcggcgctctcaccgc

SEQ ID NO: 42317 - DNA, 27 bp, Homo sapiens
  source 1..27: mol_type = genomic DNA
tggttaggattcggcgctctcaccgcc

SEQ ID NO: 42318 - DNA, 34 bp, Homo sapiens; identical to SEQ ID NO: 28280
  source 1..34: mol_type = genomic DNA

SEQ ID NO: 42319 - DNA, 35 bp, Homo sapiens; identical to SEQ ID NO: 28281
  source 1..35: mol_type = genomic DNA

SEQ ID NO: 42320 - DNA, 36 bp, Homo sapiens; identical to SEQ ID NO: 28282
  source 1..36: mol_type = genomic DNA

SEQ ID NO: 42321 - DNA, 37 bp, Homo sapiens; identical to SEQ ID NO: 28283
  source 1..37: mol_type = genomic DNA

SEQ ID NO: 42322 - DNA, 39 bp, Homo sapiens; identical to SEQ ID NO: 28285
  source 1..39: mol_type = genomic DNA

SEQ ID NO: 42323 - DNA, 40 bp, Homo sapiens; identical to SEQ ID NO: 28286
  source 1..40: mol_type = genomic DNA

SEQ ID NO: 42324 - DNA, 16 bp, Homo sapiens
  source 1..16: mol_type = genomic DNA
tggttagtactctgcg

SEQ ID NO: 42325 - DNA, 17 bp, Homo sapiens
  source 1..17: mol_type = genomic DNA
tggttagtactctgcgt

SEQ ID NO: 42326 - DNA, 18 bp, Homo sapiens
  source 1..18: mol_type = genomic DNA
tggttagtactctgcgtt

SEQ ID NO: 42327 - DNA, 19 bp, Homo sapiens
  source 1..19: mol_type = genomic DNA
tggttagtactctgcgttg

SEQ ID NO: 42328 - DNA, 20 bp, Homo sapiens
  source 1..20: mol_type = genomic DNA
tggttagtactctgcgttgt

SEQ ID NO: 42329 - DNA, 21 bp, Homo sapiens
  source 1..21: mol_type = genomic DNA
tggttagtactctgcgttgtg

SEQ ID NO: 42330 - DNA, 24 bp, Homo sapiens
  source 1..24: mol_type = genomic DNA
tggttagtactctgcgttgtggcc

SEQ ID NO: 42331 - DNA, 25 bp, Homo sapiens
  source 1..25: mol_type = genomic DNA
tggttagtactctgcgttgtggccg

SEQ ID NO: 42332 - DNA, 29 bp, Homo sapiens
  source 1..29: mol_type = genomic DNA
tggttagtactctgcgttgtggccgcagc

SEQ ID NO: 42333 - DNA, 33 bp, Homo sapiens; identical to SEQ ID NO: 28298
  source 1..33: mol_type = genomic DNA

SEQ ID NO: 42334 - DNA, 34 bp, Homo sapiens; identical to SEQ ID NO: 28299
  source 1..34: mol_type = genomic DNA

SEQ ID NO: 42335 - DNA, 37 bp, Homo sapiens
  source 1..37: mol_type = genomic DNA
tggttagtactctgcgttgtggccgcagcaacctcgg

SEQ ID NO: 42336 - DNA, 38 bp, Homo sapiens; identical to SEQ ID NO: 28300
  source 1..38: mol_type = genomic DNA

SEQ ID NO: 42337 - DNA, 40 bp, Homo sapiens
  source 1..40: mol_type = genomic DNA
tggttagtactctgcgttgtggccgcagcaacctcggttc

SEQ ID NO: 42338 - DNA, 25 bp, Homo sapiens
  source 1..25: mol_type = genomic DNA
tggttatacccttcccgtactacca

SEQ ID NO: 42339 - DNA, 16 bp, Homo sapiens
  source 1..16: mol_type = genomic DNA
tggttatcacgtctgc

SEQ ID NO: 42340 - DNA, 17 bp, Homo sapiens
  source 1..17: mol_type = genomic DNA
tggttatcacgtctgct

SEQ ID NO: 42341 - DNA, 18 bp, Homo sapiens
  source 1..18: mol_type = genomic DNA
tggttatcacgtctgctt

SEQ ID NO: 42342 - DNA, 19 bp, Homo sapiens
  source 1..19: mol_type = genomic DNA
tggttatcacgtctgcttt

SEQ ID NO: 42343 - DNA, 16 bp, Homo sapiens
  source 1..16: mol_type = genomic DNA
tggttatcacgttcgc

SEQ ID NO: 42344 - DNA, 17 bp, Homo sapiens
  source 1..17: mol_type = genomic DNA
tggttatcacgttcgcc

SEQ ID NO: 42345 - DNA, 18 bp, Homo sapiens
  source 1..18: mol_type = genomic DNA
tggttatcacgttcgcct

SEQ ID NO: 42346 - DNA, 19 bp, Homo sapiens
  source 1..19: mol_type = genomic DNA
tggttatcacgttcgcctc

SEQ ID NO: 42347 - DNA, 20 bp, Homo sapiens
  source 1..20: mol_type = genomic DNA
tggttatcacgttcgcctca

SEQ ID NO: 42348 - DNA, 21 bp, Homo sapiens
  source 1..21: mol_type = genomic DNA
tggttatcacgttcgcctcac

SEQ ID NO: 42349 - DNA, 23 bp, Homo sapiens
  source 1..23: mol_type = genomic DNA
tggttatcacgttcgcctcacac

SEQ ID NO: 42350 - DNA, 37 bp, Homo sapiens
  source 1..37: mol_type = genomic DNA
tggttatcacgttcgcctcacacgcgaaaggtccccg

SEQ ID NO: 42351 - DNA, 38 bp, Homo sapiens
  source 1..38: mol_type = genomic DNA
tggttatcacgttcgcctcacacgcgaaaggtccccgg

SEQ ID NO: 42352 - DNA, 19 bp, Homo sapiens
  source 1..19: mol_type = genomic DNA
tggttcaaatccgggtgcc

SEQ ID NO: 42353 - DNA, 20 bp, Homo sapiens
  source 1..20: mol_type = genomic DNA
tggttcaaatccgggtgccc

SEQ ID NO: 42354 - DNA, 23 bp, Homo sapiens
  source 1..23: mol_type = genomic DNA
tggttcaaatccgggtgccccct

SEQ ID NO: 42355 - DNA, 24 bp, Homo sapiens
  source 1..24: mol_type = genomic DNA
tggttcaatcccgggtttcggcac

SEQ ID NO: 42356 - DNA, 18 bp, Homo sapiens
  source 1..18: mol_type = genomic DNA
tggttcagtggtagaatt

SEQ ID NO: 42357 - DNA, 19 bp, Homo sapiens
  source 1..19: mol_type = genomic DNA
tggttcagtggtagaattc

SEQ ID NO: 42358 - DNA, 22 bp, Homo sapiens
  source 1..22: mol_type = genomic DNA
tggttcagtggtagaattctcg

SEQ ID NO: 42359 - DNA, 23 bp, Homo sapiens
  source 1..23: mol_type = genomic DNA
tggttcagtggtagaattctcgc

SEQ ID NO: 42360 - DNA, 24 bp, Homo sapiens
  source 1..24: mol_type = genomic DNA
tggttcagtggtagaattctcgcc

SEQ ID NO: 42361 - DNA, 25 bp, Homo sapiens
  source 1..25: mol_type = genomic DNA
tggttcagtggtagaattctcgcct

SEQ ID NO: 42362 - DNA, 43 bp, Homo sapiens
  source 1..43: mol_type = genomic DNA
tggttcagtggtagaattctcgcctcccacgcgggagacccgg

SEQ ID NO: 42363 - DNA, 26 bp, Homo sapiens
  source 1..26: mol_type = genomic DNA
tggttcagtggtagaattctcgcctg

SEQ ID NO: 42364 - DNA, 27 bp, Homo sapiens
  source 1..27: mol_type = genomic DNA
tggttcagtggtagaattctcgcctgc

SEQ ID NO: 42365 - DNA, 28 bp, Homo sapiens
  source 1..28: mol_type = genomic DNA
tggttcagtggtagaattctcgcctgcc

SEQ ID NO: 42366 - DNA, 29 bp, Homo sapiens
  source 1..29: mol_type = genomic DNA
tggttcagtggtagaattctcgcctgcca

SEQ ID NO: 42367 - DNA, 30 bp, Homo sapiens; identical to SEQ ID NO: 28340
  source 1..30: mol_type = genomic DNA

SEQ ID NO: 42368 - DNA, 31 bp, Homo sapiens; identical to SEQ ID NO: 28341
  source 1..31: mol_type = genomic DNA

SEQ ID NO: 42369 - DNA, 32 bp, Homo sapiens; identical to SEQ ID NO: 28342
  source 1..32: mol_type = genomic DNA

SEQ ID NO: 42370 - DNA, 36 bp, Homo sapiens
  source 1..36: mol_type = genomic DNA
tggttcagtggtagaattctcgcctgccacgcggga

SEQ ID NO: 42371 - DNA, 40 bp, Homo sapiens; identical to SEQ ID NO: 28344
  source 1..40: mol_type = genomic DNA

SEQ ID NO: 42372 - DNA, 41 bp, Homo sapiens; identical to SEQ ID NO: 28345
  source 1..41: mol_type = genomic DNA

SEQ ID NO: 42373 - DNA, 42 bp, Homo sapiens; identical to SEQ ID NO: 28346
  source 1..42: mol_type = genomic DNA

SEQ ID NO: 42374 - DNA, 43 bp, Homo sapiens; identical to SEQ ID NO: 28347
  source 1..43: mol_type = genomic DNA

SEQ ID NO: 42375 - DNA, 44 bp, Homo sapiens; identical to SEQ ID NO: 28348
  source 1..44: mol_type = genomic DNA

SEQ ID NO: 42376 - DNA, 45 bp, Homo sapiens; identical to SEQ ID NO: 28349
  source 1..45: mol_type = genomic DNA

SEQ ID NO: 42377 - DNA, 24 bp, Homo sapiens
  source 1..24: mol_type = genomic DNA
tggttcgaatccggctcgaaggac

SEQ ID NO: 42378 - DNA, 25 bp, Homo sapiens
  source 1..25: mol_type = genomic DNA
tggttcgaatccggctcgaaggacc

SEQ ID NO: 42379 - DNA, 24 bp, Homo sapiens
  source 1..24: mol_type = genomic DNA
tggttcgaatccggctcggaggac

SEQ ID NO: 42380 - DNA, 25 bp, Homo sapiens
  source 1..25: mol_type = genomic DNA
tggttcgaatccggctcggaggacc

SEQ ID NO: 42381 - DNA, 25 bp, Homo sapiens
  source 1..25: mol_type = genomic DNA
tggttcgagcccacccagggacgcc

SEQ ID NO: 42382 - DNA, 21 bp, Homo sapiens
  source 1..21: mol_type = genomic DNA
tggttcgatcccgggtttcgg

SEQ ID NO: 42383 - DNA, 24 bp, Homo sapiens
  source 1..24: mol_type = genomic DNA
tggttcgatcccgggtttcggcac

SEQ ID NO: 42384 - DNA, 24 bp, Homo sapiens
  source 1..24: mol_type = genomic DNA
tggttcgattccggctcgaaggac

SEQ ID NO: 42385 - DNA, 25 bp, Homo sapiens
  source 1..25: mol_type = genomic DNA
tggttcgattccggctcgaaggacc

SEQ ID NO: 42386 - DNA, 16 bp, Homo sapiens
  source 1..16: mol_type = genomic DNA
tggttgtagtccgtgc

SEQ ID NO: 42387 - DNA, 20 bp, Homo sapiens
  source 1..20: mol_type = genomic DNA
tggttgtagtccgtgcgaga

SEQ ID NO: 42388 - DNA, 21 bp, Homo sapiens
  source 1..21: mol_type = genomic DNA
tggttgtagtccgtgcgagaa

SEQ ID NO: 42389 - DNA, 22 bp, Homo sapiens
  source 1..22: mol_type = genomic DNA
tggttgtagtccgtgcgagaat

SEQ ID NO: 42390 - DNA, 23 bp, Homo sapiens
  source 1..23: mol_type = genomic DNA
tggttgtagtccgtgcgagaata

SEQ ID NO: 42391 - DNA, 25 bp, Homo sapiens
  source 1..25: mol_type = genomic DNA
tggttgtagtccgtgcgagaatacc

SEQ ID NO: 42392 - DNA, 26 bp, Homo sapiens
  source 1..26: mol_type = genomic DNA
tggttgtagtccgtgcgagaatacca

SEQ ID NO: 42393 - DNA, 47 bp, Homo sapiens; identical to SEQ ID NO: 28378
  source 1..47: mol_type = genomic DNA

SEQ ID NO: 42394 - DNA, 28 bp, Homo sapiens
  source 1..28: mol_type = genomic DNA
tggtttttcatatcattggtcgtggttg

SEQ ID NO: 42395 - DNA, 45 bp, Homo sapiens; identical to SEQ ID NO: 28390
  source 1..45: mol_type = genomic DNA

SEQ ID NO: 42396 - DNA, 47 bp, Homo sapiens; identical to SEQ ID NO: 28391
  source 1..47: mol_type = genomic DNA

SEQ ID NO: 42397 - DNA, 22 bp, Homo sapiens
  source 1..22: mol_type = genomic DNA
tgtaaaccggagatgaaaacct

SEQ ID NO: 42398 - DNA, 34 bp, Homo sapiens; identical to SEQ ID NO: 28407
  source 1..34: mol_type = genomic DNA

SEQ ID NO: 42399 - DNA, 36 bp, Homo sapiens; identical to SEQ ID NO: 28409
  source 1..36: mol_type = genomic DNA

SEQ ID NO: 42400 - DNA, 37 bp, Homo sapiens; identical to SEQ ID NO: 28410
  source 1..37: mol_type = genomic DNA

SEQ ID NO: 42401 - DNA, 38 bp, Homo sapiens; identical to SEQ ID NO: 28411
  source 1..38: mol_type = genomic DNA

SEQ ID NO: 42402 - DNA, 26 bp, Homo sapiens
  source 1..26: mol_type = genomic DNA
tgtaatggtgagcactctggactctg

SEQ ID NO: 42403 - DNA, 17 bp, Homo sapiens
  source 1..17: mol_type = genomic DNA
tgtaatggttagcactc

SEQ ID NO: 42404 - DNA, 20 bp, Homo sapiens
  source 1..20: mol_type = genomic DNA
tgtaatggttagcactctgg

SEQ ID NO: 42405 - DNA, 21 bp, Homo sapiens
  source 1..21: mol_type = genomic DNA
tgtaatggttagcactctgga

SEQ ID NO: 42406 - DNA, 23 bp, Homo sapiens
  source 1..23: mol_type = genomic DNA
tgtaatggttagcactctggact

SEQ ID NO: 42407 - DNA, 24 bp, Homo sapiens
  source 1..24: mol_type = genomic DNA
tgtaatggttagcactctggactc

SEQ ID NO: 42408 - DNA, 25 bp, Homo sapiens
  source 1..25: mol_type = genomic DNA
tgtaatggttagcactctggactct

SEQ ID NO: 42409 - DNA, 26 bp, Homo sapiens
  source 1..26: mol_type = genomic DNA
tgtaatggttagcactctggactctg

SEQ ID NO: 42410 - DNA, 27 bp, Homo sapiens
  source 1..27: mol_type = genomic DNA
tgtaatggttagcactctggactctga

SEQ ID NO: 42411 - DNA, 28 bp, Homo sapiens
  source 1..28: mol_type = genomic DNA
tgtaatggttagcactctggactctgaa

SEQ ID NO: 42412 - DNA, 29 bp, Homo sapiens
  source 1..29: mol_type = genomic DNA
tgtaatggttagcactctggactctgaat

SEQ ID NO: 42413 - DNA, 30 bp, Homo sapiens; identical to SEQ ID NO: 28440
  source 1..30: mol_type = genomic DNA

SEQ ID NO: 42414 - DNA, 31 bp, Homo sapiens; identical to SEQ ID NO: 28441
  source 1..31: mol_type = genomic DNA

SEQ ID NO: 42415 - DNA, 33 bp, Homo sapiens
  source 1..33: mol_type = genomic DNA
tgtaatggttagcactctggactctgaatccag

SEQ ID NO: 42416 - DNA, 43 bp, Homo sapiens; identical to SEQ ID NO: 28443
  source 1..43: mol_type = genomic DNA

SEQ ID NO: 42417 - DNA, 30 bp, Homo sapiens; identical to SEQ ID NO: 28449
  source 1..30: mol_type = genomic DNA

SEQ ID NO: 42418 - DNA, 43 bp, Homo sapiens; identical to SEQ ID NO: 28453
  source 1..43: mol_type = genomic DNA

SEQ ID NO: 42419 - DNA, 23 bp, Homo sapiens
  source 1..23: mol_type = genomic DNA
tgtagcggttatcacattcgcct

SEQ ID NO: 42420 - DNA, 16 bp, Homo sapiens
  source 1..16: mol_type = genomic DNA
tgtagctcagtggtag

SEQ ID NO: 42421 - DNA, 17 bp, Homo sapiens
  source 1..17: mol_type = genomic DNA
tgtagctcagtggtaga

SEQ ID NO: 42422 - DNA, 18 bp, Homo sapiens
  source 1..18: mol_type = genomic DNA
tgtagctcagtggtagag

SEQ ID NO: 42423 - DNA, 16 bp, Homo sapiens
  source 1..16: mol_type = genomic DNA
tgtagtccgtgcgaga

SEQ ID NO: 42424 - DNA, 17 bp, Homo sapiens
  source 1..17: mol_type = genomic DNA
tgtagtccgtgcgagaa

SEQ ID NO: 42425 - DNA, 18 bp, Homo sapiens
  source 1..18: mol_type = genomic DNA
tgtagtccgtgcgagaat

SEQ ID NO: 42426 - DNA, 19 bp, Homo sapiens
  source 1..19: mol_type = genomic DNA
tgtagtccgtgcgagaata

SEQ ID NO: 42427 - DNA, 21 bp, Homo sapiens
  source 1..21: mol_type = genomic DNA
tgtagtccgtgcgagaatacc

SEQ ID NO: 42428 - DNA, 22 bp, Homo sapiens
  source 1..22: mol_type = genomic DNA
tgtagtccgtgcgagaatacca

SEQ ID NO: 42429 - DNA, 17 bp, Homo sapiens
  source 1..17: mol_type = genomic DNA
tgtagtggtatcatgca

SEQ ID NO: 42430 - DNA, 22 bp, Homo sapiens
  source 1..22: mol_type = genomic DNA
tgtagtggtatcatgcaagatt

SEQ ID NO: 42431 - DNA, 23 bp, Homo sapiens
  source 1..23: mol_type = genomic DNA
tgtagtggtcatcacgttcgcct

SEQ ID NO: 42432 - DNA, 23 bp, Homo sapiens
  source 1..23: mol_type = genomic DNA
tgtagtggttatcacgtctgctt

SEQ ID NO: 42433 - DNA, 22 bp, Homo sapiens
  source 1..22: mol_type = genomic DNA
tgtagtggttatcacgttcgcc

SEQ ID NO: 42434 - DNA, 23 bp, Homo sapiens
  source 1..23: mol_type = genomic DNA
tgtagtggttatcacgttcgcct

SEQ ID NO: 42435 - DNA, 36 bp, Homo sapiens; identical to SEQ ID NO: 28531
  source 1..36: mol_type = genomic DNA

SEQ ID NO: 42436 - DNA, 37 bp, Homo sapiens; identical to SEQ ID NO: 28532
  source 1..37: mol_type = genomic DNA

SEQ ID NO: 42437 - DNA, 38 bp, Homo sapiens; identical to SEQ ID NO: 28533
  source 1..38: mol_type = genomic DNA

SEQ ID NO: 42438 - DNA, 36 bp, Homo sapiens; identical to SEQ ID NO: 28541
  source 1..36: mol_type = genomic DNA

SEQ ID NO: 42439 - DNA, 37 bp, Homo sapiens; identical to SEQ ID NO: 28542
  source 1..37: mol_type = genomic DNA

SEQ ID NO: 42440 - DNA, 38 bp, Homo sapiens; identical to SEQ ID NO: 28543
  source 1..38: mol_type = genomic DNA

SEQ ID NO: 42441 - DNA, 17 bp, Homo sapiens
  source 1..17: mol_type = genomic DNA
tgtcacgcgggagaccg

SEQ ID NO: 42442 - DNA, 41 bp, Homo sapiens; identical to SEQ ID NO: 28550
  source 1..41: mol_type = genomic DNA

SEQ ID NO: 42443 - DNA, 41 bp, Homo sapiens; identical to SEQ ID NO: 28557
  source 1..41: mol_type = genomic DNA

SEQ ID NO: 42444 - DNA, 42 bp, Homo sapiens; identical to SEQ ID NO: 28558
  source 1..42: mol_type = genomic DNA

SEQ ID NO: 42445 - DNA, 43 bp, Homo sapiens; identical to SEQ ID NO: 28559
  source 1..43: mol_type = genomic DNA

SEQ ID NO: 42446 - DNA, 16 bp, Homo sapiens
  source 1..16: mol_type = genomic DNA
tgtccgcgtgggttcg

SEQ ID NO: 42447 - DNA, 29 bp, Homo sapiens
  source 1..29: mol_type = genomic DNA
tgtccgcgtgggttcgaaccccactcctg

SEQ ID NO: 42448 - DNA, 41 bp, Homo sapiens; identical to SEQ ID NO: 28601
  source 1..41: mol_type = genomic DNA

SEQ ID NO: 42449 - DNA, 42 bp, Homo sapiens; identical to SEQ ID NO: 28602
  source 1..42: mol_type = genomic DNA

SEQ ID NO: 42450 - DNA, 43 bp, Homo sapiens; identical to SEQ ID NO: 28603
  source 1..43: mol_type = genomic DNA

SEQ ID NO: 42451 - DNA, 36 bp, Homo sapiens
  source 1..36: mol_type = genomic DNA
tgtgagaggtcccgggttcaaatcccggacgagccc

SEQ ID NO: 42452 - DNA, 37 bp, Homo sapiens
  source 1..37: mol_type = genomic DNA
tgtgagaggtcccgggttcaaatcccggacgagcccc

SEQ ID NO: 42453 - DNA, 28 bp, Homo sapiens
  source 1..28: mol_type = genomic DNA
tgtgagttcgagcctcacctggagcacc

SEQ ID NO: 42454 - DNA, 20 bp, Homo sapiens
  source 1..20: mol_type = genomic DNA
tgtgctttgcacgcgtgggt

SEQ ID NO: 42455 - DNA, 41 bp, Homo sapiens; identical to SEQ ID NO: 28610
  source 1..41: mol_type = genomic DNA

SEQ ID NO: 42456 - DNA, 27 bp, Homo sapiens
  source 1..27: mol_type = genomic DNA
tgtgggttcgaatcccaccagagtcgc

SEQ ID NO: 42457 - DNA, 28 bp, Homo sapiens
  source 1..28: mol_type = genomic DNA
tgtgggttcgaatcccaccagagtcgcc

SEQ ID NO: 42458 - DNA, 27 bp, Homo sapiens
  source 1..27: mol_type = genomic DNA
tgtgggttcgagtcccaccagagtcgc

SEQ ID NO: 42459 - DNA, 28 bp, Homo sapiens
  source 1..28: mol_type = genomic DNA
tgtgggttcgagtcccaccagagtcgcc

SEQ ID NO: 42460 - DNA, 26 bp, Homo sapiens
  source 1..26: mol_type = genomic DNA
tgtgggttcgagtcccatctggggtg

SEQ ID NO: 42461 - DNA, 26 bp, Homo sapiens
  source 1..26: mol_type = genomic DNA
tgtgggttcgagtcccatctgggtcg

SEQ ID NO: 42462 - DNA, 27 bp, Homo sapiens
  source 1..27: mol_type = genomic DNA
tgtgggttcgagtcccatctgggtcgc

SEQ ID NO: 42463 - DNA, 28 bp, Homo sapiens
  source 1..28: mol_type = genomic DNA
tgtgggttcgagtcccatctgggtcgcc

SEQ ID NO: 42464 - DNA, 27 bp, Homo sapiens
  source 1..27: mol_type = genomic DNA
tgtgggtttaagtcccattggtctagc

SEQ ID NO: 42465 - DNA, 28 bp, Homo sapiens
  source 1..28: mol_type = genomic DNA
tgtgggtttaagtcccattggtctagcc

SEQ ID NO: 42466 - DNA, 42 bp, Homo sapiens; identical to SEQ ID NO: 28651
  source 1..42: mol_type = genomic DNA

SEQ ID NO: 42467 - DNA, 22 bp, Homo sapiens
  source 1..22: mol_type = genomic DNA
tgttcaaatcacgtcggggtca

SEQ ID NO: 42468 - DNA, 23 bp, Homo sapiens
  source 1..23: mol_type = genomic DNA
tgttcaaatcacgtcggggtcac

SEQ ID NO: 42469 - DNA, 24 bp, Homo sapiens
  source 1..24: mol_type = genomic DNA
tgttcaaatcacgtcggggtcacc

SEQ ID NO: 42470 - DNA, 22 bp, Homo sapiens
  source 1..22: mol_type = genomic DNA
tgttcaagtcacgtcggggtca

SEQ ID NO: 42471 - DNA, 23 bp, Homo sapiens
  source 1..23: mol_type = genomic DNA
tgttcaagtcacgtcggggtcac

SEQ ID NO: 42472 - DNA, 24 bp, Homo sapiens
  source 1..24: mol_type = genomic DNA
tgttcaagtcacgtcggggtcacc

SEQ ID NO: 42473 - DNA, 22 bp, Homo sapiens
  source 1..22: mol_type = genomic DNA
tgttcgaatcacgtcggggtca

SEQ ID NO: 42474 - DNA, 23 bp, Homo sapiens
  source 1..23: mol_type = genomic DNA
tgttcgaatcacgtcggggtcac

SEQ ID NO: 42475 - DNA, 24 bp, Homo sapiens
  source 1..24: mol_type = genomic DNA
tgttcgaatcacgtcggggtcacc

SEQ ID NO: 42476 - DNA, 25 bp, Homo sapiens
  source 1..25: mol_type = genomic DNA
tgttggttatacccttcccgtacta

SEQ ID NO: 42477 - DNA, 27 bp, Homo sapiens
  source 1..27: mol_type = genomic DNA
tgttggttatacccttcccgtactacc

SEQ ID NO: 42478 - DNA, 28 bp, Homo sapiens
  source 1..28: mol_type = genomic DNA
tgttggttatacccttcccgtactacca

SEQ ID NO: 42479 - DNA, 16 bp, Homo sapiens
  source 1..16: mol_type = genomic DNA
tgtttagacgggctca

SEQ ID NO: 42480 - DNA, 17 bp, Homo sapiens
  source 1..17: mol_type = genomic DNA
tgtttagacgggctcac

SEQ ID NO: 42481 - DNA, 18 bp, Homo sapiens
  source 1..18: mol_type = genomic DNA
tgtttagacgggctcaca

SEQ ID NO: 42482 - DNA, 23 bp, Homo sapiens
  source 1..23: mol_type = genomic DNA
tgtttagacgggctcacatcacc

SEQ ID NO: 42483 - DNA, 24 bp, Homo sapiens
  source 1..24: mol_type = genomic DNA
tgtttagacgggctcacatcaccc

SEQ ID NO: 42484 - DNA, 25 bp, Homo sapiens
  source 1..25: mol_type = genomic DNA
tgtttagacgggctcacatcacccc

SEQ ID NO: 42485 - DNA, 26 bp, Homo sapiens
  source 1..26: mol_type = genomic DNA
tgtttagacgggctcacatcacccca

SEQ ID NO: 42486 - DNA, 28 bp, Homo sapiens
  source 1..28: mol_type = genomic DNA
tgtttagacgggctcacatcaccccata

SEQ ID NO: 42487 - DNA, 29 bp, Homo sapiens
  source 1..29: mol_type = genomic DNA
tgtttagacgggctcacatcaccccataa

SEQ ID NO: 42488 - DNA, 34 bp, Homo sapiens; identical to SEQ ID NO: 28695
  source 1..34: mol_type = genomic DNA

SEQ ID NO: 42489 - DNA, 35 bp, Homo sapiens; identical to SEQ ID NO: 28696
  source 1..35: mol_type = genomic DNA

SEQ ID NO: 42490 - DNA, 34 bp, Homo sapiens; identical to SEQ ID NO: 28697
  source 1..34: mol_type = genomic DNA

SEQ ID NO: 42491 - DNA, 31 bp, Homo sapiens; identical to SEQ ID NO: 28706
  source 1..31: mol_type = genomic DNA

SEQ ID NO: 42492 - DNA, 32 bp, Homo sapiens; identical to SEQ ID NO: 28707
  source 1..32: mol_type = genomic DNA

SEQ ID NO: 42493 - DNA, 33 bp, Homo sapiens; identical to SEQ ID NO: 28708
  source 1..33: mol_type = genomic DNA

SEQ ID NO: 42494 - DNA, 22 bp, Homo sapiens
  source 1..22: mol_type = genomic DNA
ttaaacccccttatttctacca

SEQ ID NO: 42495 - DNA, 19 bp, Homo sapiens
  source 1..19: mol_type = genomic DNA
ttaaagactttttctctga

SEQ ID NO: 42496 - DNA, 20 bp, Homo sapiens
  source 1..20: mol_type = genomic DNA
ttaaagactttttctctgac

SEQ ID NO: 42497 - DNA, 21 bp, Homo sapiens
  source 1..21: mol_type = genomic DNA
ttaaagactttttctctgacc

SEQ ID NO: 42498 - DNA, 22 bp, Homo sapiens
  source 1..22: mol_type = genomic DNA
ttaaagactttttctctgacca

SEQ ID NO: 42499 - DNA, 18 bp, Homo sapiens
  source 1..18: mol_type = genomic DNA
ttaaagattaagagaacc

SEQ ID NO: 42500 - DNA, 37 bp, Homo sapiens; identical to SEQ ID NO: 28754
  source 1..37: mol_type = genomic DNA

SEQ ID NO: 42501 - DNA, 38 bp, Homo sapiens; identical to SEQ ID NO: 28755
  source 1..38: mol_type = genomic DNA

SEQ ID NO: 42502 - DNA, 39 bp, Homo sapiens; identical to SEQ ID NO: 28756
  source 1..39: mol_type = genomic DNA

SEQ ID NO: 42503 - DNA, 27 bp, Homo sapiens
  source 1..27: mol_type = genomic DNA
ttaaaggataacagctatccattggtc

SEQ ID NO: 42504 - DNA, 18 bp, Homo sapiens
  source 1..18: mol_type = genomic DNA
ttaaagtggctgatttgc

SEQ ID NO: 42505 - DNA, 22 bp, Homo sapiens
  source 1..22: mol_type = genomic DNA
ttaaagtggctgatttgcgttc

SEQ ID NO: 42506 - DNA, 25 bp, Homo sapiens
  source 1..25: mol_type = genomic DNA
ttaaccaaaacatcagattgtgaat

SEQ ID NO: 42507 - DNA, 26 bp, Homo sapiens
  source 1..26: mol_type = genomic DNA
ttaaccaaaacatcagattgtgaatc

SEQ ID NO: 42508 - DNA, 21 bp, Homo sapiens
  source 1..21: mol_type = genomic DNA
ttaaccgaaaggttggtggtt

SEQ ID NO: 42509 - DNA, 22 bp, Homo sapiens
  source 1..22: mol_type = genomic DNA
ttaaccgaaaggttggtggttc

SEQ ID NO: 42510 - DNA, 23 bp, Homo sapiens
  source 1..23: mol_type = genomic DNA
ttaaccgaaaggttggtggttcg

SEQ ID NO: 42511 - DNA, 24 bp, Homo sapiens
  source 1..24: mol_type = genomic DNA
ttaaccgaaaggttggtggttcga

SEQ ID NO: 42512 - DNA, 38 bp, Homo sapiens; identical to SEQ ID NO: 28874
  source 1..38: mol_type = genomic DNA

SEQ ID NO: 42513 - DNA, 39 bp, Homo sapiens; identical to SEQ ID NO: 28875
  source 1..39: mol_type = genomic DNA

SEQ ID NO: 42514 - DNA, 40 bp, Homo sapiens; identical to SEQ ID NO: 28876
  source 1..40: mol_type = genomic DNA

SEQ ID NO: 42515 - DNA, 41 bp, Homo sapiens; identical to SEQ ID NO: 28877
  source 1..41: mol_type = genomic DNA

SEQ ID NO: 42516 - DNA, 42 bp, Homo sapiens; identical to SEQ ID NO: 28878
  source 1..42: mol_type = genomic DNA

SEQ ID NO: 42517 - DNA, 40 bp, Homo sapiens
  source 1..40: mol_type = genomic DNA
ttaaccgaaaggttggtggttcgatcccacccagggacgc

SEQ ID NO: 42518 - DNA, 41 bp, Homo sapiens; identical to SEQ ID NO: 28879
  source 1..41: mol_type = genomic DNA

SEQ ID NO: 42519 - DNA, 31 bp, Homo sapiens; identical to SEQ ID NO: 28884
  source 1..31: mol_type = genomic DNA

SEQ ID NO: 42520 - DNA, 22 bp, Homo sapiens
  source 1..22: mol_type = genomic DNA
ttaactaagtgtttgtgggttt

SEQ ID NO: 42521 - DNA, 32 bp, Homo sapiens; identical to SEQ ID NO: 28902
  source 1..32: mol_type = genomic DNA

SEQ ID NO: 42522 - DNA, 36 bp, Homo sapiens; identical to SEQ ID NO: 28906
  source 1..36: mol_type = genomic DNA

SEQ ID NO: 42523 - DNA, 37 bp, Homo sapiens; identical to SEQ ID NO: 28907
  source 1..37: mol_type = genomic DNA

SEQ ID NO: 42524 - DNA, 38 bp, Homo sapiens; identical to SEQ ID NO: 28908
  source 1..38: mol_type = genomic DNA

SEQ ID NO: 42525 - DNA, 39 bp, Homo sapiens; identical to SEQ ID NO: 28909
  source 1..39: mol_type = genomic DNA

SEQ ID NO: 42526 - DNA, 40 bp, Homo sapiens; identical to SEQ ID NO: 28910
  source 1..40: mol_type = genomic DNA

SEQ ID NO: 42527 - DNA, 41 bp, Homo sapiens; identical to SEQ ID NO: 28911
  source 1..41: mol_type = genomic DNA

SEQ ID NO: 42528 - DNA, 42 bp, Homo sapiens; identical to SEQ ID NO: 28912
  source 1..42: mol_type = genomic DNA

SEQ ID NO: 42529 - DNA, 26 bp, Homo sapiens
  source 1..26: mol_type = genomic DNA
ttaacttccaattaactagttttgac

SEQ ID NO: 42530 - DNA, 17 bp, Homo sapiens
  source 1..17: mol_type = genomic DNA
ttaacttgaccgctctg

SEQ ID NO: 42531 - DNA, 18 bp, Homo sapiens
  source 1..18: mol_type = genomic DNA
ttaacttgaccgctctga

SEQ ID NO: 42532 - DNA, 19 bp, Homo sapiens
  source 1..19: mol_type = genomic DNA
ttaacttgaccgctctgac

SEQ ID NO: 42533 - DNA, 20 bp, Homo sapiens
  source 1..20: mol_type = genomic DNA
ttaacttgaccgctctgacc

SEQ ID NO: 42534 - DNA, 21 bp, Homo sapiens
  source 1..21: mol_type = genomic DNA
ttaacttgaccgctctgacca

SEQ ID NO: 42535 - DNA, 30 bp, Homo sapiens; identical to SEQ ID NO: 28943
  source 1..30: mol_type = genomic DNA

SEQ ID NO: 42536 - DNA, 31 bp, Homo sapiens; identical to SEQ ID NO: 28944
  source 1..31: mol_type = genomic DNA

SEQ ID NO: 42537 - DNA, 32 bp, Homo sapiens; identical to SEQ ID NO: 28945
  source 1..32: mol_type = genomic DNA

SEQ ID NO: 42538 - DNA, 18 bp, Homo sapiens
  source 1..18: mol_type = genomic DNA
ttaagatccaatggacat

SEQ ID NO: 42539 - DNA, 16 bp, Homo sapiens
  source 1..16: mol_type = genomic DNA
ttaagatggcagagcc

SEQ ID NO: 42540 - DNA, 17 bp, Homo sapiens
  source 1..17: mol_type = genomic DNA
ttaagatggcagagccc

SEQ ID NO: 42541 - DNA, 20 bp, Homo sapiens
  source 1..20: mol_type = genomic DNA
ttaagtcccattggtctagc

SEQ ID NO: 42542 - DNA, 23 bp, Homo sapiens
  source 1..23: mol_type = genomic DNA
ttaagttaaagattaagagaacc

SEQ ID NO: 42543 - DNA, 35 bp, Homo sapiens; identical to SEQ ID NO: 28994
  source 1..35: mol_type = genomic DNA

SEQ ID NO: 42544 - DNA, 41 bp, Homo sapiens; identical to SEQ ID NO: 28999
  source 1..41: mol_type = genomic DNA

SEQ ID NO: 42545 - DNA, 42 bp, Homo sapiens; identical to SEQ ID NO: 29000
  source 1..42: mol_type = genomic DNA

SEQ ID NO: 42546 - DNA, 43 bp, Homo sapiens; identical to SEQ ID NO: 29001
  source 1..43: mol_type = genomic DNA

SEQ ID NO: 42547 - DNA, 44 bp, Homo sapiens; identical to SEQ ID NO: 29002
  source 1..44: mol_type = genomic DNA

SEQ ID NO: 42548 - DNA, 16 bp, Homo sapiens
  source 1..16: mol_type = genomic DNA
ttaatcccagggtcgt

SEQ ID NO: 42549 - DNA, 16 bp, Homo sapiens
  source 1..16: mol_type = genomic DNA
ttaatctcagggtcgt

SEQ ID NO: 42550 - DNA, 41 bp, Homo sapiens; identical to SEQ ID NO: 29015
  source 1..41: mol_type = genomic DNA

SEQ ID NO: 42551 - DNA, 22 bp, Homo sapiens
  source 1..22: mol_type = genomic DNA
ttaatctgagggtccagggttc

SEQ ID NO: 42552 - DNA, 42 bp, Homo sapiens; identical to SEQ ID NO: 29027
  source 1..42: mol_type = genomic DNA

SEQ ID NO: 42553 - DNA, 17 bp, Homo sapiens
  source 1..17: mol_type = genomic DNA
ttaattaaagtggctga

SEQ ID NO: 42554 - DNA, 18 bp, Homo sapiens
  source 1..18: mol_type = genomic DNA
ttaattaaagtggctgat

SEQ ID NO: 42555 - DNA, 19 bp, Homo sapiens
  source 1..19: mol_type = genomic DNA
ttacacgcagaaggtcctg

SEQ ID NO: 42556 - DNA, 42 bp, Homo sapiens
  source 1..42: mol_type = genomic DNA
ttacacgcagaaggtcctgggttcgagccccagtggaaccac

SEQ ID NO: 42557 - DNA, 43 bp, Homo sapiens; identical to SEQ ID NO: 29038
  source 1..43: mol_type = genomic DNA

SEQ ID NO: 42558 - DNA, 21 bp, Homo sapiens
  source 1..21: mol_type = genomic DNA
ttacacttaggagatttcaac

SEQ ID NO: 42559 - DNA, 38 bp, Homo sapiens; identical to SEQ ID NO: 29061
  source 1..38: mol_type = genomic DNA

SEQ ID NO: 42560 - DNA, 39 bp, Homo sapiens; identical to SEQ ID NO: 29062
  source 1..39: mol_type = genomic DNA

SEQ ID NO: 42561 - DNA, 40 bp, Homo sapiens; identical to SEQ ID NO: 29063
  source 1..40: mol_type = genomic DNA

SEQ ID NO: 42562 - DNA, 41 bp, Homo sapiens; identical to SEQ ID NO: 29064
  source 1..41: mol_type = genomic DNA

SEQ ID NO: 42563 - DNA, 42 bp, Homo sapiens; identical to SEQ ID NO: 29065
  source 1..42: mol_type = genomic DNA

SEQ ID NO: 42564 - DNA, 16 bp, Homo sapiens
  source 1..16: mol_type = genomic DNA
ttacagtcagaggttc

SEQ ID NO: 42565 - DNA, 21 bp, Homo sapiens
  source 1..21: mol_type = genomic DNA
ttacgaccccttatttacccc

SEQ ID NO: 42566 - DNA, 22 bp, Homo sapiens
  source 1..22: mol_type = genomic DNA
ttacgaccccttatttacccca

SEQ ID NO: 42567 - DNA, 17 bp, Homo sapiens
  source 1..17: mol_type = genomic DNA
ttagaatcttagctttg

SEQ ID NO: 42568 - DNA, 41 bp, Homo sapiens; identical to SEQ ID NO: 29120
  source 1..41: mol_type = genomic DNA

SEQ ID NO: 42569 - DNA, 20 bp, Homo sapiens
  source 1..20: mol_type = genomic DNA
ttagacgggctcacatcacc

SEQ ID NO: 42570 - DNA, 21 bp, Homo sapiens
  source 1..21: mol_type = genomic DNA
ttagacgggctcacatcaccc

SEQ ID NO: 42571 - DNA, 23 bp, Homo sapiens
  source 1..23: mol_type = genomic DNA
ttagacgggctcacatcacccca

SEQ ID NO: 42572 - DNA, 28 bp, Homo sapiens
  source 1..28: mol_type = genomic DNA
ttagacgggctcacatcaccccataaac

SEQ ID NO: 42573 - DNA, 29 bp, Homo sapiens
  source 1..29: mol_type = genomic DNA
ttagacgggctcacatcaccccataaaca

SEQ ID NO: 42574 - DNA, 31 bp, Homo sapiens; identical to SEQ ID NO: 29141
  source 1..31: mol_type = genomic DNA

SEQ ID NO: 42575 - DNA, 32 bp, Homo sapiens; identical to SEQ ID NO: 29142
  source 1..32: mol_type = genomic DNA

SEQ ID NO: 42576 - DNA, 23 bp, Homo sapiens
  source 1..23: mol_type = genomic DNA
ttagagccagactgcctgggttt

SEQ ID NO: 42577 - DNA, 16 bp, Homo sapiens
  source 1..16: mol_type = genomic DNA
ttagcactctggactc

SEQ ID NO: 42578 - DNA, 17 bp, Homo sapiens
  source 1..17: mol_type = genomic DNA
ttagcactctggactct

SEQ ID NO: 42579 - DNA, 18 bp, Homo sapiens
  source 1..18: mol_type = genomic DNA
ttagcactctggactctg

SEQ ID NO: 42580 - DNA, 19 bp, Homo sapiens
  source 1..19: mol_type = genomic DNA
ttagcactctggactctga

SEQ ID NO: 42581 - DNA, 20 bp, Homo sapiens
  source 1..20: mol_type = genomic DNA
ttagcactctggactctgaa

SEQ ID NO: 42582 - DNA, 21 bp, Homo sapiens
  source 1..21: mol_type = genomic DNA
ttagcactctggactctgaat

SEQ ID NO: 42583 - DNA, 22 bp, Homo sapiens
  source 1..22: mol_type = genomic DNA
ttagcactctggactctgaatc

SEQ ID NO: 42584 - DNA, 23 bp, Homo sapiens
  source 1..23: mol_type = genomic DNA
ttagcactctggactctgaatcc

SEQ ID NO: 42585 - DNA, 24 bp, Homo sapiens
  source 1..24: mol_type = genomic DNA
ttagcactctggactctgaatcca

SEQ ID NO: 42586 - DNA, 25 bp, Homo sapiens
  source 1..25: mol_type = genomic DNA
ttagcactctggactctgaatccag

SEQ ID NO: 42587 - DNA, 26 bp, Homo sapiens
  source 1..26: mol_type = genomic DNA
ttagcactctggactctgaatccagc

SEQ ID NO: 42588 - DNA, 27 bp, Homo sapiens
  source 1..27: mol_type = genomic DNA
ttagcactctggactctgaatccagcg

SEQ ID NO: 42589 - DNA, 31 bp, Homo sapiens; identical to SEQ ID NO: 29166
  source 1..31: mol_type = genomic DNA

SEQ ID NO: 42590 - DNA, 32 bp, Homo sapiens; identical to SEQ ID NO: 29167
  source 1..32: mol_type = genomic DNA

SEQ ID NO: 42591 - DNA, 33 bp, Homo sapiens; identical to SEQ ID NO: 29168
  source 1..33: mol_type = genomic DNA

SEQ ID NO: 42592 - DNA, 34 bp, Homo sapiens; identical to SEQ ID NO: 29169
  source 1..34: mol_type = genomic DNA

SEQ ID NO: 42593 - DNA, 35 bp, Homo sapiens; identical to SEQ ID NO: 29170
  source 1..35: mol_type = genomic DNA

SEQ ID NO: 42594 - DNA, 37 bp, Homo sapiens; identical to SEQ ID NO: 29172
  source 1..37: mol_type = genomic DNA

SEQ ID NO: 42595 - DNA, 38 bp, Homo sapiens; identical to SEQ ID NO: 29173
  source 1..38: mol_type = genomic DNA

SEQ ID NO: 42596 - DNA, 46 bp, Homo sapiens; identical to SEQ ID NO: 29176
  source 1..46: mol_type = genomic DNA

SEQ ID NO: 42597 - DNA, 17 bp, Homo sapiens
  source 1..17: mol_type = genomic DNA
ttagcactctggacttt

SEQ ID NO: 42598 - DNA, 18 bp, Homo sapiens
  source 1..18: mol_type = genomic DNA
ttagcactctggactttg

SEQ ID NO: 42599 - DNA, 19 bp, Homo sapiens
  source 1..19: mol_type = genomic DNA
ttagcactctggactttga

SEQ ID NO: 42600 - DNA, 20 bp, Homo sapiens
  source 1..20: mol_type = genomic DNA
ttagcactctggactttgaa

SEQ ID NO: 42601 - DNA, 21 bp, Homo sapiens
  source 1..21: mol_type = genomic DNA
ttagcactctggactttgaat

SEQ ID NO: 42602 - DNA, 22 bp, Homo sapiens
  source 1..22: mol_type = genomic DNA
ttagcactctggactttgaatc

SEQ ID NO: 42603 - DNA, 23 bp, Homo sapiens
  source 1..23: mol_type = genomic DNA
ttagcactctggactttgaatcc

SEQ ID NO: 42604 - DNA, 24 bp, Homo sapiens
  source 1..24: mol_type = genomic DNA
ttagcactctggactttgaatcca

SEQ ID NO: 42605 - DNA, 34 bp, Homo sapiens; identical to SEQ ID NO: 29188
  source 1..34: mol_type = genomic DNA

SEQ ID NO: 42606 - DNA, 21 bp, Homo sapiens
  source 1..21: mol_type = genomic DNA
ttagcggtagagcatttgact

SEQ ID NO: 42607 - DNA, 47 bp, Homo sapiens; identical to SEQ ID NO: 29230
  source 1..47: mol_type = genomic DNA

SEQ ID NO: 42608 - DNA, 33 bp, Homo sapiens; identical to SEQ ID NO: 29238
  source 1..33: mol_type = genomic DNA

SEQ ID NO: 42609 - DNA, 45 bp, Homo sapiens; identical to SEQ ID NO: 29244
  source 1..45: mol_type = genomic DNA

SEQ ID NO: 42610 - DNA, 46 bp, Homo sapiens; identical to SEQ ID NO: 29245
  source 1..46: mol_type = genomic DNA

SEQ ID NO: 42611 - DNA, 32 bp, Homo sapiens; identical to SEQ ID NO: 29262
  source 1..32: mol_type = genomic DNA

SEQ ID NO: 42612 - DNA, 33 bp, Homo sapiens; identical to SEQ ID NO: 29263
  source 1..33: mol_type = genomic DNA

SEQ ID NO: 42613 - DNA, 34 bp, Homo sapiens; identical to SEQ ID NO: 29264
  source 1..34: mol_type = genomic DNA

SEQ ID NO: 42614 - DNA, 35 bp, Homo sapiens; identical to SEQ ID NO: 29265
  source 1..35: mol_type = genomic DNA

SEQ ID NO: 42615 - DNA, 36 bp, Homo sapiens; identical to SEQ ID NO: 29266
  source 1..36: mol_type = genomic DNA

SEQ ID NO: 42616 - DNA, 17 bp, Homo sapiens
  source 1..17: mol_type = genomic DNA
ttaggattcctggtttt

SEQ ID NO: 42617 - DNA, 25 bp, Homo sapiens
  source 1..25: mol_type = genomic DNA
ttaggattcctggttttcacccagg

SEQ ID NO: 42618 - DNA, 27 bp, Homo sapiens
  source 1..27: mol_type = genomic DNA
ttaggattcctggttttcacccaggtg

SEQ ID NO: 42619 - DNA, 16 bp, Homo sapiens
  source 1..16: mol_type = genomic DNA
ttaggattcggcgctc

SEQ ID NO: 42620 - DNA, 17 bp, Homo sapiens
  source 1..17: mol_type = genomic DNA
ttaggattcggcgctct

SEQ ID NO: 42621 - DNA, 18 bp, Homo sapiens
  source 1..18: mol_type = genomic DNA
ttaggattcggcgctctc

SEQ ID NO: 42622 - DNA, 21 bp, Homo sapiens
  source 1..21: mol_type = genomic DNA
ttaggattcggcgctctcacc

SEQ ID NO: 42623 - DNA, 22 bp, Homo sapiens
  source 1..22: mol_type = genomic DNA
ttaggattcggcgctctcaccg

SEQ ID NO: 42624 - DNA, 23 bp, Homo sapiens
  source 1..23: mol_type = genomic DNA
ttaggattcggcgctctcaccgc

SEQ ID NO: 42625 - DNA, 24 bp, Homo sapiens
  source 1..24: mol_type = genomic DNA
ttaggattcggcgctctcaccgcc

SEQ ID NO: 42626 - DNA, 30 bp, Homo sapiens; identical to SEQ ID NO: 29291
  source 1..30: mol_type = genomic DNA

SEQ ID NO: 42627 - DNA, 31 bp, Homo sapiens; identical to SEQ ID NO: 29292
  source 1..31: mol_type = genomic DNA

SEQ ID NO: 42628 - DNA, 34 bp, Homo sapiens; identical to SEQ ID NO: 29295
  source 1..34: mol_type = genomic DNA

SEQ ID NO: 42629 - DNA, 37 bp, Homo sapiens; identical to SEQ ID NO: 29298
  source 1..37: mol_type = genomic DNA

SEQ ID NO: 42630 - DNA, 20 bp, Homo sapiens
  source 1..20: mol_type = genomic DNA
ttaggcctctttttaccacc

SEQ ID NO: 42631 - DNA, 33 bp, Homo sapiens; identical to SEQ ID NO: 29341
  source 1..33: mol_type = genomic DNA

SEQ ID NO: 42632 - DNA, 34 bp, Homo sapiens; identical to SEQ ID NO: 29342
  source 1..34: mol_type = genomic DNA

SEQ ID NO: 42633 - DNA, 33 bp, Homo sapiens; identical to SEQ ID NO: 29345
  source 1..33: mol_type = genomic DNA

SEQ ID NO: 42634 - DNA, 34 bp, Homo sapiens; identical to SEQ ID NO: 29346
  source 1..34: mol_type = genomic DNA

SEQ ID NO: 42635 - DNA, 33 bp, Homo sapiens; identical to SEQ ID NO: 29351
  source 1..33: mol_type = genomic DNA

SEQ ID NO: 42636 - DNA, 34 bp, Homo sapiens; identical to SEQ ID NO: 29352
  source 1..34: mol_type = genomic DNA

SEQ ID NO: 42637 - DNA, 16 bp, Homo sapiens
  source 1..16: mol_type = genomic DNA
ttagtactctgcgttg

SEQ ID NO: 42638 - DNA, 17 bp, Homo sapiens
  source 1..17: mol_type = genomic DNA
ttagtactctgcgttgt

SEQ ID NO: 42639 - DNA, 21 bp, Homo sapiens
  source 1..21: mol_type = genomic DNA
ttagtactctgcgttgtggcc

SEQ ID NO: 42640 - DNA, 22 bp, Homo sapiens
  source 1..22: mol_type = genomic DNA
ttagtactctgcgttgtggccg

SEQ ID NO: 42641 - DNA, 20 bp, Homo sapiens
  source 1..20: mol_type = genomic DNA
ttagtggtagaattctcgcc

SEQ ID NO: 42642 - DNA, 21 bp, Homo sapiens
  source 1..21: mol_type = genomic DNA
ttagtggtagaattctcgcct

SEQ ID NO: 42643 - DNA, 21 bp, Homo sapiens
  source 1..21: mol_type = genomic DNA
ttatacccttcccgtactacc

SEQ ID NO: 42644 - DNA, 22 bp, Homo sapiens
  source 1..22: mol_type = genomic DNA
ttatacccttcccgtactacca

SEQ ID NO: 42645 - DNA, 34 bp, Homo sapiens
  source 1..34: mol_type = genomic DNA
ttatcacgttcgcctcacacgcgaaaggtccccg

SEQ ID NO: 42646 - DNA, 35 bp, Homo sapiens
  source 1..35: mol_type = genomic DNA
ttatcacgttcgcctcacacgcgaaaggtccccgg

SEQ ID NO: 42647 - DNA, 16 bp, Homo sapiens
  source 1..16: mol_type = genomic DNA
ttcaaacctgccgggg

SEQ ID NO: 42648 - DNA, 17 bp, Homo sapiens
  source 1..17: mol_type = genomic DNA
ttcaaacctgccggggc

SEQ ID NO: 42649 - DNA, 18 bp, Homo sapiens
  source 1..18: mol_type = genomic DNA
ttcaaacctgccggggct

SEQ ID NO: 42650 - DNA, 19 bp, Homo sapiens
  source 1..19: mol_type = genomic DNA
ttcaaacctgccggggctt

SEQ ID NO: 42651 - DNA, 16 bp, Homo sapiens
  source 1..16: mol_type = genomic DNA
ttcaaaggttccgggt

SEQ ID NO: 42652 - DNA, 34 bp, Homo sapiens; identical to SEQ ID NO: 29429
  source 1..34: mol_type = genomic DNA

SEQ ID NO: 42653 - DNA, 35 bp, Homo sapiens; identical to SEQ ID NO: 29430
  source 1..35: mol_type = genomic DNA

SEQ ID NO: 42654 - DNA, 36 bp, Homo sapiens; identical to SEQ ID NO: 29431
  source 1..36: mol_type = genomic DNA

SEQ ID NO: 42655 - DNA, 37 bp, Homo sapiens; identical to SEQ ID NO: 29432
  source 1..37: mol_type = genomic DNA

SEQ ID NO: 42656 - DNA, 38 bp, Homo sapiens; identical to SEQ ID NO: 29433
  source 1..38: mol_type = genomic DNA

SEQ ID NO: 42657 - DNA, 33 bp, Homo sapiens
  source 1..33: mol_type = genomic DNA
ttcaaaggttgtgggttcgaatcccaccagagt

SEQ ID NO: 42658 - DNA, 34 bp, Homo sapiens
  source 1..34: mol_type = genomic DNA
ttcaaaggttgtgggttcgaatcccaccagagtc

SEQ ID NO: 42659 - DNA, 35 bp, Homo sapiens
  source 1..35: mol_type = genomic DNA
ttcaaaggttgtgggttcgaatcccaccagagtcg

SEQ ID NO: 42660 - DNA, 36 bp, Homo sapiens
  source 1..36: mol_type = genomic DNA
ttcaaaggttgtgggttcgaatcccaccagagtcgc

SEQ ID NO: 42661 - DNA, 37 bp, Homo sapiens; identical to SEQ ID NO: 29434
  source 1..37: mol_type = genomic DNA

SEQ ID NO: 42662 - DNA, 38 bp, Homo sapiens; identical to SEQ ID NO: 29435
  source 1..38: mol_type = genomic DNA

SEQ ID NO: 42663 - DNA, 34 bp, Homo sapiens
  source 1..34: mol_type = genomic DNA
ttcaaaggttgtgggttcgagtcccaccagagtc

SEQ ID NO: 42664 - DNA, 35 bp, Homo sapiens
  source 1..35: mol_type = genomic DNA
ttcaaaggttgtgggttcgagtcccaccagagtcg

SEQ ID NO: 42665 - DNA, 36 bp, Homo sapiens
  source 1..36: mol_type = genomic DNA
ttcaaaggttgtgggttcgagtcccaccagagtcgc

SEQ ID NO: 42666 - DNA, 37 bp, Homo sapiens; identical to SEQ ID NO: 29436
  source 1..37: mol_type = genomic DNA

SEQ ID NO: 42667 - DNA, 38 bp, Homo sapiens; identical to SEQ ID NO: 29437
  source 1..38: mol_type = genomic DNA

SEQ ID NO: 42668 - DNA, 20 bp, Homo sapiens
  source 1..20: mol_type = genomic DNA
ttcaaatcacgtcggggtca

SEQ ID NO: 42669 - DNA, 21 bp, Homo sapiens
  source 1..21: mol_type = genomic DNA
ttcaaatcacgtcggggtcac

SEQ ID NO: 42670 - DNA, 22 bp, Homo sapiens
  source 1..22: mol_type = genomic DNA
ttcaaatcacgtcggggtcacc

SEQ ID NO: 42671 - DNA, 17 bp, Homo sapiens
  source 1..17: mol_type = genomic DNA
ttcaaatcccggacgag

SEQ ID NO: 42672 - DNA, 18 bp, Homo sapiens
  source 1..18: mol_type = genomic DNA
ttcaaatcccggacgagc

SEQ ID NO: 42673 - DNA, 19 bp, Homo sapiens
  source 1..19: mol_type = genomic DNA
ttcaaatcccggacgagcc

SEQ ID NO: 42674 - DNA, 20 bp, Homo sapiens
  source 1..20: mol_type = genomic DNA
ttcaaatcccggacgagccc

SEQ ID NO: 42675 - DNA, 21 bp, Homo sapiens
  source 1..21: mol_type = genomic DNA
ttcaaatcccggacgagcccc

SEQ ID NO: 42676 - DNA, 22 bp, Homo sapiens
  source 1..22: mol_type = genomic DNA
ttcaaatcccggacgagccccc

SEQ ID NO: 42677 - DNA, 23 bp, Homo sapiens
  source 1..23: mol_type = genomic DNA
ttcaaatcccggacgagccccca

SEQ ID NO: 42678 - DNA, 21 bp, Homo sapiens
  source 1..21: mol_type = genomic DNA
ttcaaatccgggtgccccctc

SEQ ID NO: 42679 - DNA, 20 bp, Homo sapiens
  source 1..20: mol_type = genomic DNA
ttcaaatctcgctggggcct

SEQ ID NO: 42680 - DNA, 21 bp, Homo sapiens
  source 1..21: mol_type = genomic DNA
ttcaaatctcgctggggcctc

SEQ ID NO: 42681 - DNA, 22 bp, Homo sapiens
  source 1..22: mol_type = genomic DNA
ttcaaatctcgctggggcctcc

SEQ ID NO: 42682 - DNA, 19 bp, Homo sapiens
  source 1..19: mol_type = genomic DNA
ttcaaatctcggtggaacc

SEQ ID NO: 42683 - DNA, 20 bp, Homo sapiens
  source 1..20: mol_type = genomic DNA
ttcaaatctcggtggaacct

SEQ ID NO: 42684 - DNA, 21 bp, Homo sapiens
  source 1..21: mol_type = genomic DNA
ttcaaatctcggtggaacctc

SEQ ID NO: 42685 - DNA, 22 bp, Homo sapiens
  source 1..22: mol_type = genomic DNA
ttcaaatctcggtggaacctcc

SEQ ID NO: 42686 - DNA, 20 bp, Homo sapiens
  source 1..20: mol_type = genomic DNA
ttcaaatctcggtgggacct

SEQ ID NO: 42687 - DNA, 21 bp, Homo sapiens
  source 1..21: mol_type = genomic DNA
ttcaaatctcggtgggacctc

SEQ ID NO: 42688 - DNA, 22 bp, Homo sapiens
  source 1..22: mol_type = genomic DNA
ttcaaatctcggtgggacctcc

SEQ ID NO: 42689 - DNA, 21 bp, Homo sapiens
  source 1..21: mol_type = genomic DNA
ttcaacttaacttgaccgctc

SEQ ID NO: 42690 - DNA, 23 bp, Homo sapiens
  source 1..23: mol_type = genomic DNA
ttcaacttaacttgaccgctctg

SEQ ID NO: 42691 - DNA, 24 bp, Homo sapiens
  source 1..24: mol_type = genomic DNA
ttcaacttaacttgaccgctctga

SEQ ID NO: 42692 - DNA, 25 bp, Homo sapiens
  source 1..25: mol_type = genomic DNA
ttcaacttaacttgaccgctctgac

SEQ ID NO: 42693 - DNA, 26 bp, Homo sapiens
  source 1..26: mol_type = genomic DNA
ttcaacttaacttgaccgctctgacc

SEQ ID NO: 42694 - DNA, 27 bp, Homo sapiens
  source 1..27: mol_type = genomic DNA
ttcaacttaacttgaccgctctgacca

SEQ ID NO: 42695 - DNA, 20 bp, Homo sapiens
  source 1..20: mol_type = genomic DNA
ttcaagtcacgtcggggtca

SEQ ID NO: 42696 - DNA, 21 bp, Homo sapiens
  source 1..21: mol_type = genomic DNA
ttcaagtcacgtcggggtcac

SEQ ID NO: 42697 - DNA, 22 bp, Homo sapiens
  source 1..22: mol_type = genomic DNA
ttcaagtcacgtcggggtcacc

SEQ ID NO: 42698 - DNA, 23 bp, Homo sapiens
  source 1..23: mol_type = genomic DNA
ttcaagtcacgtcggggtcacca

SEQ ID NO: 42699 - DNA, 20 bp, Homo sapiens
  source 1..20: mol_type = genomic DNA
ttcaagtccctgttcgggcg

SEQ ID NO: 42700 - DNA, 21 bp, Homo sapiens
  source 1..21: mol_type = genomic DNA
ttcaagtccctgttcgggcgc

SEQ ID NO: 42701 - DNA, 23 bp, Homo sapiens
  source 1..23: mol_type = genomic DNA
ttcaagtccctgttcgggcgcca

SEQ ID NO: 42702 - DNA, 22 bp, Homo sapiens
  source 1..22: mol_type = genomic DNA
ttcaatccccggcacctccacc

SEQ ID NO: 42703 - DNA, 21 bp, Homo sapiens
  source 1..21: mol_type = genomic DNA
ttcaatcccgggtttcggcac

SEQ ID NO: 42704 - DNA, 21 bp, Homo sapiens
  source 1..21: mol_type = genomic DNA
ttcaattccccgacggggagc

SEQ ID NO: 42705 - DNA, 39 bp, Homo sapiens; identical to SEQ ID NO: 29495
  source 1..39: mol_type = genomic DNA

SEQ ID NO: 42706 - DNA, 40 bp, Homo sapiens; identical to SEQ ID NO: 29496
  source 1..40: mol_type = genomic DNA

SEQ ID NO: 42707 - DNA, 41 bp, Homo sapiens; identical to SEQ ID NO: 29497
  source 1..41: mol_type = genomic DNA

SEQ ID NO: 42708 - DNA, 42 bp, Homo sapiens; identical to SEQ ID NO: 29498
  source 1..42: mol_type = genomic DNA

SEQ ID NO: 42709 - DNA, 16 bp, Homo sapiens
  source 1..16: mol_type = genomic DNA
ttcaggtcgcagtctc

SEQ ID NO: 42710 - DNA, 17 bp, Homo sapiens
  source 1..17: mol_type = genomic DNA
ttcaggtcgcagtctcc

SEQ ID NO: 42711 - DNA, 18 bp, Homo sapiens
  source 1..18: mol_type = genomic DNA
ttcaggtcgcagtctccc

SEQ ID NO: 42712 - DNA, 16 bp, Homo sapiens
  source 1..16: mol_type = genomic DNA
ttcagtggtagaattc

SEQ ID NO: 42713 - DNA, 19 bp, Homo sapiens
  source 1..19: mol_type = genomic DNA
ttcagtggtagaattctcg

SEQ ID NO: 42714 - DNA, 20 bp, Homo sapiens
  source 1..20: mol_type = genomic DNA
ttcagtggtagaattctcgc

SEQ ID NO: 42715 - DNA, 21 bp, Homo sapiens
  source 1..21: mol_type = genomic DNA
ttcagtggtagaattctcgcc

SEQ ID NO: 42716 - DNA, 22 bp, Homo sapiens
  source 1..22: mol_type = genomic DNA
ttcagtggtagaattctcgcct

SEQ ID NO: 42717 - DNA, 26 bp, Homo sapiens
  source 1..26: mol_type = genomic DNA
ttcagtggtagaattctcgcctccca

SEQ ID NO: 42718 - DNA, 27 bp, Homo sapiens
  source 1..27: mol_type = genomic DNA
ttcagtggtagaattctcgcctcccac

SEQ ID NO: 42719 - DNA, 28 bp, Homo sapiens
  source 1..28: mol_type = genomic DNA
ttcagtggtagaattctcgcctcccacg

SEQ ID NO: 42720 - DNA, 23 bp, Homo sapiens
  source 1..23: mol_type = genomic DNA
ttcagtggtagaattctcgcctg

SEQ ID NO: 42721 - DNA, 24 bp, Homo sapiens
  source 1..24: mol_type = genomic DNA
ttcagtggtagaattctcgcctgc

SEQ ID NO: 42722 - DNA, 25 bp, Homo sapiens
  source 1..25: mol_type = genomic DNA
ttcagtggtagaattctcgcctgcc

SEQ ID NO: 42723 - DNA, 26 bp, Homo sapiens
  source 1..26: mol_type = genomic DNA
ttcagtggtagaattctcgcctgcca

SEQ ID NO: 42724 - DNA, 28 bp, Homo sapiens
  source 1..28: mol_type = genomic DNA
ttcagtggtagaattctcgcctgccacg

SEQ ID NO: 42725 - DNA, 29 bp, Homo sapiens
  source 1..29: mol_type = genomic DNA
ttcagtggtagaattctcgcctgccacgc

SEQ ID NO: 42726 - DNA, 33 bp, Homo sapiens; identical to SEQ ID NO: 29526
  source 1..33: mol_type = genomic DNA

SEQ ID NO: 42727 - DNA, 38 bp, Homo sapiens; identical to SEQ ID NO: 29527
  source 1..38: mol_type = genomic DNA

SEQ ID NO: 42728 - DNA, 39 bp, Homo sapiens; identical to SEQ ID NO: 29528
  source 1..39: mol_type = genomic DNA

SEQ ID NO: 42729 - DNA, 40 bp, Homo sapiens; identical to SEQ ID NO: 29529
  source 1..40: mol_type = genomic DNA

SEQ ID NO: 42730 - DNA, 42 bp, Homo sapiens; identical to SEQ ID NO: 29531
  source 1..42: mol_type = genomic DNA

SEQ ID NO: 42731 - DNA, 31 bp, Homo sapiens; identical to SEQ ID NO: 29546
  source 1..31: mol_type = genomic DNA

SEQ ID NO: 42732 - DNA, 32 bp, Homo sapiens; identical to SEQ ID NO: 29556
  source 1..32: mol_type = genomic DNA

SEQ ID NO: 42733 - DNA, 36 bp, Homo sapiens; identical to SEQ ID NO: 29577
  source 1..36: mol_type = genomic DNA

SEQ ID NO: 42734 - DNA, 37 bp, Homo sapiens; identical to SEQ ID NO: 29578
  source 1..37: mol_type = genomic DNA

SEQ ID NO: 42735 - DNA, 38 bp, Homo sapiens; identical to SEQ ID NO: 29579
  source 1..38: mol_type = genomic DNA

SEQ ID NO: 42736 - DNA, 39 bp, Homo sapiens; identical to SEQ ID NO: 29580
  source 1..39: mol_type = genomic DNA

SEQ ID NO: 42737 - DNA, 41 bp, Homo sapiens; identical to SEQ ID NO: 29582
  source 1..41: mol_type = genomic DNA

SEQ ID NO: 42738 - DNA, 42 bp, Homo sapiens; identical to SEQ ID NO: 29583
  source 1..42: mol_type = genomic DNA

SEQ ID NO: 42739 - DNA, 19 bp, Homo sapiens
  source 1..19: mol_type = genomic DNA
ttccaagcagttgacccgg

SEQ ID NO: 42740 - DNA, 16 bp, Homo sapiens
  source 1..16: mol_type = genomic DNA
ttccagctcgaaggac

SEQ ID NO: 42741 - DNA, 17 bp, Homo sapiens
  source 1..17: mol_type = genomic DNA
ttccagctcgaaggacc

SEQ ID NO: 42742 - DNA, 29 bp, Homo sapiens
  source 1..29: mol_type = genomic DNA
ttccaggttcgactcctggctggctcgcc

SEQ ID NO: 42743 - DNA, 34 bp, Homo sapiens; identical to SEQ ID NO: 29622
  source 1..34: mol_type = genomic DNA

SEQ ID NO: 42744 - DNA, 31 bp, Homo sapiens; identical to SEQ ID NO: 29632
  source 1..31: mol_type = genomic DNA

SEQ ID NO: 42745 - DNA, 32 bp, Homo sapiens; identical to SEQ ID NO: 29633
  source 1..32: mol_type = genomic DNA

SEQ ID NO: 42746 - DNA, 34 bp, Homo sapiens; identical to SEQ ID NO: 29635
  source 1..34: mol_type = genomic DNA

SEQ ID NO: 42747 - DNA, 31 bp, Homo sapiens; identical to SEQ ID NO: 29645
  source 1..31: mol_type = genomic DNA

SEQ ID NO: 42748 - DNA, 33 bp, Homo sapiens; identical to SEQ ID NO: 29647
  source 1..33: mol_type = genomic DNA

SEQ ID NO: 42749 - DNA, 27 bp, Homo sapiens
  source 1..27: mol_type = genomic DNA
ttccatggtgtaatggttagcactctg

SEQ ID NO: 42750 - DNA, 28 bp, Homo sapiens
  source 1..28: mol_type = genomic DNA
ttccatggtgtaatggttagcactctgg

SEQ ID NO: 42751 - DNA, 29 bp, Homo sapiens
  source 1..29: mol_type = genomic DNA
ttccatggtgtaatggttagcactctgga

SEQ ID NO: 42752 - DNA, 31 bp, Homo sapiens; identical to SEQ ID NO: 29658
  source 1..31: mol_type = genomic DNA

SEQ ID NO: 42753 - DNA, 32 bp, Homo sapiens; identical to SEQ ID NO: 29659
  source 1..32: mol_type = genomic DNA

SEQ ID NO: 42754 - DNA, 33 bp, Homo sapiens; identical to SEQ ID NO: 29660
  source 1..33: mol_type = genomic DNA

SEQ ID NO: 42755 - DNA, 34 bp, Homo sapiens; identical to SEQ ID NO: 29661
  source 1..34: mol_type = genomic DNA

SEQ ID NO: 42756 - DNA, 35 bp, Homo sapiens; identical to SEQ ID NO: 29662
  source 1..35: mol_type = genomic DNA

SEQ ID NO: 42757 - DNA, 16 bp, Homo sapiens
  source 1..16: mol_type = genomic DNA
ttcccattcttgcgac

SEQ ID NO: 42758 - DNA, 16 bp, Homo sapiens
  source 1..16: mol_type = genomic DNA
ttccccgacggggagc

SEQ ID NO: 42759 - DNA, 23 bp, Homo sapiens
  source 1..23: mol_type = genomic DNA
ttccccgcacaggttcgaatcct

SEQ ID NO: 42760 - DNA, 35 bp, Homo sapiens; identical to SEQ ID NO: 29703
  source 1..35: mol_type = genomic DNA

SEQ ID NO: 42761 - DNA, 16 bp, Homo sapiens
  source 1..16: mol_type = genomic DNA
ttcccggccaacgcac

SEQ ID NO: 42762 - DNA, 17 bp, Homo sapiens
  source 1..17: mol_type = genomic DNA
ttcccggccaacgcacc

SEQ ID NO: 42763 - DNA, 18 bp, Homo sapiens
  source 1..18: mol_type = genomic DNA
ttcccggccaacgcacca

SEQ ID NO: 42764 - DNA, 16 bp, Homo sapiens
  source 1..16: mol_type = genomic DNA
ttcccggccaatgcac

SEQ ID NO: 42765 - DNA, 17 bp, Homo sapiens
  source 1..17: mol_type = genomic DNA
ttcccggccaatgcacc

SEQ ID NO: 42766 - DNA, 18 bp, Homo sapiens
  source 1..18: mol_type = genomic DNA
ttcccggccaatgcacca

SEQ ID NO: 42767 - DNA, 17 bp, Homo sapiens
  source 1..17: mol_type = genomic DNA
ttcccggccagtgcacc

SEQ ID NO: 42768 - DNA, 18 bp, Homo sapiens
  source 1..18: mol_type = genomic DNA
ttcccggccagtgcacca

SEQ ID NO: 42769 - DNA, 16 bp, Homo sapiens
  source 1..16: mol_type = genomic DNA
ttcccggcccatgcac

SEQ ID NO: 42770 - DNA, 17 bp, Homo sapiens
  source 1..17: mol_type = genomic DNA
ttcccggcccatgcacc

SEQ ID NO: 42771 - DNA, 18 bp, Homo sapiens
  source 1..18: mol_type = genomic DNA
ttcccggcccatgcacca

SEQ ID NO: 42772 - DNA, 16 bp, Homo sapiens
  source 1..16: mol_type = genomic DNA
ttcccgggcggcgcac

SEQ ID NO: 42773 - DNA, 17 bp, Homo sapiens
  source 1..17: mol_type = genomic DNA
ttcccgggcggcgcacc

SEQ ID NO: 42774 - DNA, 18 bp, Homo sapiens
  source 1..18: mol_type = genomic DNA
ttcccgggcggcgcacca

SEQ ID NO: 42775 - DNA, 16 bp, Homo sapiens
  source 1..16: mol_type = genomic DNA
ttcccggtcagggaac

SEQ ID NO: 42776 - DNA, 17 bp, Homo sapiens
  source 1..17: mol_type = genomic DNA
ttcccggtcagggaacc

SEQ ID NO: 42777 - DNA, 16 bp, Homo sapiens
  source 1..16: mol_type = genomic DNA
ttcccggtcatggaac

SEQ ID NO: 42778 - DNA, 17 bp, Homo sapiens
  source 1..17: mol_type = genomic DNA
ttcccggtcatggaacc

SEQ ID NO: 42779 - DNA, 34 bp, Homo sapiens; identical to SEQ ID NO: 29726
  source 1..34: mol_type = genomic DNA

SEQ ID NO: 42780 - DNA, 18 bp, Homo sapiens
  source 1..18: mol_type = genomic DNA
ttccggatcagaagattg

SEQ ID NO: 42781 - DNA, 19 bp, Homo sapiens
  source 1..19: mol_type = genomic DNA
ttccggatcagaagattga

SEQ ID NO: 42782 - DNA, 20 bp, Homo sapiens
  source 1..20: mol_type = genomic DNA
ttccggatcagaagattgag

SEQ ID NO: 42783 - DNA, 21 bp, Homo sapiens
  source 1..21: mol_type = genomic DNA
ttccggatcagaagattgagg

SEQ ID NO: 42784 - DNA, 22 bp, Homo sapiens
  source 1..22: mol_type = genomic DNA
ttccggatcagaagattgaggg

SEQ ID NO: 42785 - DNA, 23 bp, Homo sapiens
  source 1..23: mol_type = genomic DNA
ttccggatcagaagattgagggt

SEQ ID NO: 42786 - DNA, 33 bp, Homo sapiens; identical to SEQ ID NO: 29741
  source 1..33: mol_type = genomic DNA

SEQ ID NO: 42787 - DNA, 44 bp, Homo sapiens; identical to SEQ ID NO: 29744
  source 1..44: mol_type = genomic DNA

SEQ ID NO: 42788 - DNA, 16 bp, Homo sapiens
  source 1..16: mol_type = genomic DNA
ttccggctcgaaggac

SEQ ID NO: 42789 - DNA, 17 bp, Homo sapiens
  source 1..17: mol_type = genomic DNA
ttccggctcgaaggacc

SEQ ID NO: 42790 - DNA, 18 bp, Homo sapiens
  source 1..18: mol_type = genomic DNA
ttccggctcgaaggacca

SEQ ID NO: 42791 - DNA, 26 bp, Homo sapiens
  source 1..26: mol_type = genomic DNA
ttccgggttcgagtcccggcggagtc

SEQ ID NO: 42792 - DNA, 27 bp, Homo sapiens
  source 1..27: mol_type = genomic DNA
ttccgggttcgagtcccggcggagtcg

SEQ ID NO: 42793 - DNA, 28 bp, Homo sapiens
  source 1..28: mol_type = genomic DNA
ttccgggttcgagtcccggcggagtcgc

SEQ ID NO: 42794 - DNA, 29 bp, Homo sapiens
  source 1..29: mol_type = genomic DNA
ttccgggttcgagtcccggcggagtcgcc

SEQ ID NO: 42795 - DNA, 31 bp, Homo sapiens; identical to SEQ ID NO: 29766
  source 1..31: mol_type = genomic DNA

SEQ ID NO: 42796 - DNA, 21 bp, Homo sapiens
  source 1..21: mol_type = genomic DNA
ttccgtagtgtagtggtcatc

SEQ ID NO: 42797 - DNA, 30 bp, Homo sapiens; identical to SEQ ID NO: 29780
  source 1..30: mol_type = genomic DNA

SEQ ID NO: 42798 - DNA, 31 bp, Homo sapiens; identical to SEQ ID NO: 29781
  source 1..31: mol_type = genomic DNA

SEQ ID NO: 42799 - DNA, 21 bp, Homo sapiens
  source 1..21: mol_type = genomic DNA
ttccgtagtgtagtggttatc

SEQ ID NO: 42800 - DNA, 22 bp, Homo sapiens
  source 1..22: mol_type = genomic DNA
ttccgtagtgtagtggttatca

SEQ ID NO: 42801 - DNA, 27 bp, Homo sapiens
  source 1..27: mol_type = genomic DNA
ttccgtagtgtagtggttatcacgttc

SEQ ID NO: 42802 - DNA, 29 bp, Homo sapiens
  source 1..29: mol_type = genomic DNA
ttccgtagtgtagtggttatcacgttcgc

SEQ ID NO: 42803 - DNA, 30 bp, Homo sapiens; identical to SEQ ID NO: 29794
  source 1..30: mol_type = genomic DNA

SEQ ID NO: 42804 - DNA, 31 bp, Homo sapiens; identical to SEQ ID NO: 29795
  source 1..31: mol_type = genomic DNA

SEQ ID NO: 42805 - DNA, 32 bp, Homo sapiens; identical to SEQ ID NO: 29799
  source 1..32: mol_type = genomic DNA

SEQ ID NO: 42806 - DNA, 33 bp, Homo sapiens; identical to SEQ ID NO: 29800
  source 1..33: mol_type = genomic DNA

SEQ ID NO: 42807 - DNA, 34 bp, Homo sapiens; identical to SEQ ID NO: 29801
  source 1..34: mol_type = genomic DNA

SEQ ID NO: 42808 - DNA, 17 bp, Homo sapiens
  source 1..17: mol_type = genomic DNA
ttcctcttcttaacacc

SEQ ID NO: 42809 - DNA, 16 bp, Homo sapiens
  source 1..16: mol_type = genomic DNA
ttcctggtcagggaac

SEQ ID NO: 42810 - DNA, 18 bp, Homo sapiens
  source 1..18: mol_type = genomic DNA
ttccttccttttttgcca

SEQ ID NO: 42811 - DNA, 21 bp, Homo sapiens
  source 1..21: mol_type = genomic DNA
ttcgaaaccgggcagaagcac

SEQ ID NO: 42812 - DNA, 22 bp, Homo sapiens
  source 1..22: mol_type = genomic DNA
ttcgaaaccgggcagaagcacc

SEQ ID NO: 42813 - DNA, 16 bp, Homo sapiens
  source 1..16: mol_type = genomic DNA
ttcgaaaccgggcgga

SEQ ID NO: 42814 - DNA, 17 bp, Homo sapiens
  source 1..17: mol_type = genomic DNA
ttcgaaaccgggcggaa

SEQ ID NO: 42815 - DNA, 18 bp, Homo sapiens
  source 1..18: mol_type = genomic DNA
ttcgaaaccgggcggaaa

SEQ ID NO: 42816 - DNA, 20 bp, Homo sapiens
  source 1..20: mol_type = genomic DNA
ttcgaaaccgggcggaaaca

SEQ ID NO: 42817 - DNA, 21 bp, Homo sapiens
  source 1..21: mol_type = genomic DNA
ttcgaaaccgggcggaaacac

SEQ ID NO: 42818 - DNA, 22 bp, Homo sapiens
  source 1..22: mol_type = genomic DNA
ttcgaaaccgggcggaaacacc

SEQ ID NO: 42819 - DNA, 20 bp, Homo sapiens
  source 1..20: mol_type = genomic DNA
ttcgaaccccgtccgtgcct

SEQ ID NO: 42820 - DNA, 21 bp, Homo sapiens
  source 1..21: mol_type = genomic DNA
ttcgaaccccgtccgtgcctc

SEQ ID NO: 42821 - DNA, 22 bp, Homo sapiens
  source 1..22: mol_type = genomic DNA
ttcgaaccctgctcgctgcgcc

SEQ ID NO: 42822 - DNA, 32 bp, Homo sapiens; identical to SEQ ID NO: 29841
  source 1..32: mol_type = genomic DNA

SEQ ID NO: 42823 - DNA, 33 bp, Homo sapiens; identical to SEQ ID NO: 29842
  source 1..33: mol_type = genomic DNA

SEQ ID NO: 42824 - DNA, 36 bp, Homo sapiens; identical to SEQ ID NO: 29845
  source 1..36: mol_type = genomic DNA

SEQ ID NO: 42825 - DNA, 17 bp, Homo sapiens
  source 1..17: mol_type = genomic DNA
ttcgaatcacgtcgggg

SEQ ID NO: 42826 - DNA, 20 bp, Homo sapiens
  source 1..20: mol_type = genomic DNA
ttcgaatcacgtcggggtca

SEQ ID NO: 42827 - DNA, 21 bp, Homo sapiens
  source 1..21: mol_type = genomic DNA
ttcgaatcacgtcggggtcac

SEQ ID NO: 42828 - DNA, 22 bp, Homo sapiens
  source 1..22: mol_type = genomic DNA
ttcgaatcacgtcggggtcacc

SEQ ID NO: 42829 - DNA, 23 bp, Homo sapiens
  source 1..23: mol_type = genomic DNA
ttcgaatcacgtcggggtcacca

SEQ ID NO: 42830 - DNA, 22 bp, Homo sapiens
  source 1..22: mol_type = genomic DNA
ttcgaatcccaccgctgccacc

SEQ ID NO: 42831 - DNA, 22 bp, Homo sapiens
  source 1..22: mol_type = genomic DNA
ttcgaatcccactcctgacacc

SEQ ID NO: 42832 - DNA, 20 bp, Homo sapiens
  source 1..20: mol_type = genomic DNA
ttcgaatcccacttctgaca

SEQ ID NO: 42833 - DNA, 21 bp, Homo sapiens
  source 1..21: mol_type = genomic DNA
ttcgaatcccacttctgacac

SEQ ID NO: 42834 - DNA, 22 bp, Homo sapiens
  source 1..22: mol_type = genomic DNA
ttcgaatcccacttctgacacc

SEQ ID NO: 42835 - DNA, 21 bp, Homo sapiens
  source 1..21: mol_type = genomic DNA
ttcgaatcccagcggggcctc

SEQ ID NO: 42836 - DNA, 22 bp, Homo sapiens
  source 1..22: mol_type = genomic DNA
ttcgaatcccagcggggcctcc

SEQ ID NO: 42837 - DNA, 17 bp, Homo sapiens
  source 1..17: mol_type = genomic DNA
ttcgaatcccagcggtg

SEQ ID NO: 42838 - DNA, 20 bp, Homo sapiens
  source 1..20: mol_type = genomic DNA
ttcgaatcccagcggtgcct

SEQ ID NO: 42839 - DNA, 21 bp, Homo sapiens
  source 1..21: mol_type = genomic DNA
ttcgaatcccagcggtgcctc

SEQ ID NO: 42840 - DNA, 22 bp, Homo sapiens
  source 1..22: mol_type = genomic DNA
ttcgaatcccagcggtgcctcc

SEQ ID NO: 42841 - DNA, 21 bp, Homo sapiens
  source 1..21: mol_type = genomic DNA
ttcgaatcccagtagagcctc

SEQ ID NO: 42842 - DNA, 22 bp, Homo sapiens
  source 1..22: mol_type = genomic DNA
ttcgaatcccagtagagcctcc

SEQ ID NO: 42843 - DNA, 21 bp, Homo sapiens
  source 1..21: mol_type = genomic DNA
ttcgaatcccatcctcgtcgc

SEQ ID NO: 42844 - DNA, 22 bp, Homo sapiens
  source 1..22: mol_type = genomic DNA
ttcgaatcccatcctcgtcgcc

SEQ ID NO: 42845 - DNA, 21 bp, Homo sapiens
  source 1..21: mol_type = genomic DNA
ttcgaatccgagtcacggcac

SEQ ID NO: 42846 - DNA, 22 bp, Homo sapiens
  source 1..22: mol_type = genomic DNA
ttcgaatccgagtcacggcacc

SEQ ID NO: 42847 - DNA, 21 bp, Homo sapiens
  source 1..21: mol_type = genomic DNA
ttcgaatccggctcgaaggac

SEQ ID NO: 42848 - DNA, 22 bp, Homo sapiens
  source 1..22: mol_type = genomic DNA
ttcgaatccggctcgaaggacc

SEQ ID NO: 42849 - DNA, 21 bp, Homo sapiens
  source 1..21: mol_type = genomic DNA
ttcgaatccggctcggaggac

SEQ ID NO: 42850 - DNA, 22 bp, Homo sapiens
  source 1..22: mol_type = genomic DNA
ttcgaatccggctcggaggacc

SEQ ID NO: 42851 - DNA, 17 bp, Homo sapiens
  source 1..17: mol_type = genomic DNA
ttcgaatcctgccgact

SEQ ID NO: 42852 - DNA, 20 bp, Homo sapiens
  source 1..20: mol_type = genomic DNA
ttcgaatcctgccgactacg

SEQ ID NO: 42853 - DNA, 22 bp, Homo sapiens
  source 1..22: mol_type = genomic DNA
ttcgaatcctgccgactacgcc

SEQ ID NO: 42854 - DNA, 20 bp, Homo sapiens
  source 1..20: mol_type = genomic DNA
ttcgaatcctgttcgtgacg

SEQ ID NO: 42855 - DNA, 21 bp, Homo sapiens
  source 1..21: mol_type = genomic DNA
ttcgaatcctgttcgtgacgc

SEQ ID NO: 42856 - DNA, 22 bp, Homo sapiens
  source 1..22: mol_type = genomic DNA
ttcgaatcctgttcgtgacgcc

SEQ ID NO: 42857 - DNA, 21 bp, Homo sapiens
  source 1..21: mol_type = genomic DNA
ttcgaatctcggtgggacctc

SEQ ID NO: 42858 - DNA, 20 bp, Homo sapiens
  source 1..20: mol_type = genomic DNA
ttcgactcccggtatgggaa

SEQ ID NO: 42859 - DNA, 21 bp, Homo sapiens
  source 1..21: mol_type = genomic DNA
ttcgactcccggtatgggaac

SEQ ID NO: 42860 - DNA, 22 bp, Homo sapiens
  source 1..22: mol_type = genomic DNA
ttcgactcccggtatgggaacc

SEQ ID NO: 42861 - DNA, 16 bp, Homo sapiens
  source 1..16: mol_type = genomic DNA
ttcgactcccggtgtg

SEQ ID NO: 42862 - DNA, 17 bp, Homo sapiens
  source 1..17: mol_type = genomic DNA
ttcgactcccggtgtgg

SEQ ID NO: 42863 - DNA, 18 bp, Homo sapiens
  source 1..18: mol_type = genomic DNA
ttcgactcccggtgtggg

SEQ ID NO: 42864 - DNA, 19 bp, Homo sapiens
  source 1..19: mol_type = genomic DNA
ttcgactcccggtgtggga

SEQ ID NO: 42865 - DNA, 20 bp, Homo sapiens
  source 1..20: mol_type = genomic DNA
ttcgactcccggtgtgggaa

SEQ ID NO: 42866 - DNA, 21 bp, Homo sapiens
  source 1..21: mol_type = genomic DNA
ttcgactcccggtgtgggaac

SEQ ID NO: 42867 - DNA, 22 bp, Homo sapiens
  source 1..22: mol_type = genomic DNA
ttcgactcccggtgtgggaacc

SEQ ID NO: 42868 - DNA, 23 bp, Homo sapiens
  source 1..23: mol_type = genomic DNA
ttcgactcccggtgtgggaacca

SEQ ID NO: 42869 - DNA, 17 bp, Homo sapiens
  source 1..17: mol_type = genomic DNA
ttcgactcctggctggc

SEQ ID NO: 42870 - DNA, 20 bp, Homo sapiens
  source 1..20: mol_type = genomic DNA
ttcgactcctggctggctcg

SEQ ID NO: 42871 - DNA, 21 bp, Homo sapiens
  source 1..21: mol_type = genomic DNA
ttcgactcctggctggctcgc

SEQ ID NO: 42872 - DNA, 22 bp, Homo sapiens
  source 1..22: mol_type = genomic DNA
ttcgactcctggctggctcgcc

SEQ ID NO: 42873 - DNA, 23 bp, Homo sapiens
  source 1..23: mol_type = genomic DNA
ttcgactcctggctggctcgcca

SEQ ID NO: 42874 - DNA, 22 bp, Homo sapiens
  source 1..22: mol_type = genomic DNA
ttcgagcccacccagggacgcc

SEQ ID NO: 42875 - DNA, 20 bp, Homo sapiens
  source 1..20: mol_type = genomic DNA
ttcgagccccagtggaacca

SEQ ID NO: 42876 - DNA, 21 bp, Homo sapiens
  source 1..21: mol_type = genomic DNA
ttcgagccccagtggaaccac

SEQ ID NO: 42877 - DNA, 22 bp, Homo sapiens
  source 1..22: mol_type = genomic DNA
ttcgagccccagtggaaccacc

SEQ ID NO: 42878 - DNA, 22 bp, Homo sapiens
  source 1..22: mol_type = genomic DNA
ttcgagtcccatctgggtcgcc

SEQ ID NO: 42879 - DNA, 21 bp, Homo sapiens
  source 1..21: mol_type = genomic DNA
ttcgagtcccggcggagtcgc

SEQ ID NO: 42880 - DNA, 22 bp, Homo sapiens
  source 1..22: mol_type = genomic DNA
ttcgagtcccggcggagtcgcc

SEQ ID NO: 42881 - DNA, 22 bp, Homo sapiens
  source 1..22: mol_type = genomic DNA
ttcgagtcctgccgcggtcgcc

SEQ ID NO: 42882 - DNA, 31 bp, Homo sapiens; identical to SEQ ID NO: 29955
  source 1..31: mol_type = genomic DNA

SEQ ID NO: 42883 - DNA, 22 bp, Homo sapiens
  source 1..22: mol_type = genomic DNA
ttcgatccccagcatctccacc

SEQ ID NO: 42884 - DNA, 21 bp, Homo sapiens
  source 1..21: mol_type = genomic DNA
ttcgatccccggcatctccac

SEQ ID NO: 42885 - DNA, 22 bp, Homo sapiens
  source 1..22: mol_type = genomic DNA
ttcgatccccggcatctccacc

SEQ ID NO: 42886 - DNA, 23 bp, Homo sapiens
  source 1..23: mol_type = genomic DNA
ttcgatccccggcatctccacca

SEQ ID NO: 42887 - DNA, 20 bp, Homo sapiens
  source 1..20: mol_type = genomic DNA
ttcgatccccgtacgggcca

SEQ ID NO: 42888 - DNA, 22 bp, Homo sapiens
  source 1..22: mol_type = genomic DNA
ttcgatccccgtacgggccacc

SEQ ID NO: 42889 - DNA, 22 bp, Homo sapiens
  source 1..22: mol_type = genomic DNA
ttcgatcccgggcggaaacacc

SEQ ID NO: 42890 - DNA, 21 bp, Homo sapiens
  source 1..21: mol_type = genomic DNA
ttcgatcccgggtttcggcac

SEQ ID NO: 42891 - DNA, 22 bp, Homo sapiens
  source 1..22: mol_type = genomic DNA
ttcgatcccgggtttcggcacc

SEQ ID NO: 42892 - DNA, 20 bp, Homo sapiens
  source 1..20: mol_type = genomic DNA
ttcgatcctcacctggagca

SEQ ID NO: 42893 - DNA, 36 bp, Homo sapiens; identical to SEQ ID NO: 29983
  source 1..36: mol_type = genomic DNA

SEQ ID NO: 42894 - DNA, 16 bp, Homo sapiens
  source 1..16: mol_type = genomic DNA
ttcgattccccgacgg

SEQ ID NO: 42895 - DNA, 17 bp, Homo sapiens
  source 1..17: mol_type = genomic DNA
ttcgattccccgacggg

SEQ ID NO: 42896 - DNA, 20 bp, Homo sapiens
  source 1..20: mol_type = genomic DNA
ttcgattccccgacggggag

SEQ ID NO: 42897 - DNA, 21 bp, Homo sapiens
  source 1..21: mol_type = genomic DNA
ttcgattccccgacggggagc

SEQ ID NO: 42898 - DNA, 22 bp, Homo sapiens
  source 1..22: mol_type = genomic DNA
ttcgattccccgacggggagcc

SEQ ID NO: 42899 - DNA, 22 bp, Homo sapiens
  source 1..22: mol_type = genomic DNA
ttcgattcccggccaacgcacc

SEQ ID NO: 42900 - DNA, 20 bp, Homo sapiens
  source 1..20: mol_type = genomic DNA
ttcgattcccggccaatgca

SEQ ID NO: 42901 - DNA, 21 bp, Homo sapiens
  source 1..21: mol_type = genomic DNA
ttcgattcccggccaatgcac

SEQ ID NO: 42902 - DNA, 22 bp, Homo sapiens
  source 1..22: mol_type = genomic DNA
ttcgattcccggccaatgcacc

SEQ ID NO: 42903 - DNA, 16 bp, Homo sapiens
  source 1..16: mol_type = genomic DNA
ttcgattcccgggcgg

SEQ ID NO: 42904 - DNA, 17 bp, Homo sapiens
  source 1..17: mol_type = genomic DNA
ttcgattcccgggcggc

SEQ ID NO: 42905 - DNA, 21 bp, Homo sapiens
  source 1..21: mol_type = genomic DNA
ttcgattcccgggcggcgcac

SEQ ID NO: 42906 - DNA, 22 bp, Homo sapiens
  source 1..22: mol_type = genomic DNA
ttcgattcccgggcggcgcacc

SEQ ID NO: 42907 - DNA, 16 bp, Homo sapiens
  source 1..16: mol_type = genomic DNA
ttcgattcccggtcag

SEQ ID NO: 42908 - DNA, 17 bp, Homo sapiens
  source 1..17: mol_type = genomic DNA
ttcgattcccggtcagg

SEQ ID NO: 42909 - DNA, 18 bp, Homo sapiens
  source 1..18: mol_type = genomic DNA
ttcgattcccggtcaggg

SEQ ID NO: 42910 - DNA, 21 bp, Homo sapiens
  source 1..21: mol_type = genomic DNA
ttcgattcccggtcagggaac

SEQ ID NO: 42911 - DNA, 22 bp, Homo sapiens
  source 1..22: mol_type = genomic DNA
ttcgattcccggtcagggaacc

SEQ ID NO: 42912 - DNA, 21 bp, Homo sapiens
  source 1..21: mol_type = genomic DNA
ttcgattccggctcgaaggac

SEQ ID NO: 42913 - DNA, 22 bp, Homo sapiens
  source 1..22: mol_type = genomic DNA
ttcgattccggctcgaaggacc

SEQ ID NO: 42914 - DNA, 23 bp, Homo sapiens
  source 1..23: mol_type = genomic DNA
ttcgattctcatagtcctagcca

SEQ ID NO: 42915 - DNA, 36 bp, Homo sapiens
  source 1..36: mol_type = genomic DNA
ttcggaggcgtgggttcgaatcccaccgctgccacc

SEQ ID NO: 42916 - DNA, 43 bp, Homo sapiens
  source 1..43: mol_type = genomic DNA
ttcggatcagaagattgagggttcgaatcccttcgtggttgcc

SEQ ID NO: 42917 - DNA, 43 bp, Homo sapiens; identical to SEQ ID NO: 30025
  source 1..43: mol_type = genomic DNA

SEQ ID NO: 42918 - DNA, 16 bp, Homo sapiens
  source 1..16: mol_type = genomic DNA
ttcggcgctctcaccg

SEQ ID NO: 42919 - DNA, 17 bp, Homo sapiens
  source 1..17: mol_type = genomic DNA
ttcggcgctctcaccgc

SEQ ID NO: 42920 - DNA, 18 bp, Homo sapiens
  source 1..18: mol_type = genomic DNA
ttcggcgctctcaccgcc

SEQ ID NO: 42921 - DNA, 25 bp, Homo sapiens
  source 1..25: mol_type = genomic DNA
ttcggcgctctcaccgccgcggccc

SEQ ID NO: 42922 - DNA, 27 bp, Homo sapiens
  source 1..27: mol_type = genomic DNA
ttcggcgctctcaccgccgcggcccgg

SEQ ID NO: 42923 - DNA, 28 bp, Homo sapiens
  source 1..28: mol_type = genomic DNA
ttcggcgctctcaccgccgcggcccggg

SEQ ID NO: 42924 - DNA, 26 bp, Homo sapiens
  source 1..26: mol_type = genomic DNA
ttcggctgttaaccgaaaggttggtg

SEQ ID NO: 42925 - DNA, 30 bp, Homo sapiens; identical to SEQ ID NO: 30051
  source 1..30: mol_type = genomic DNA

SEQ ID NO: 42926 - DNA, 36 bp, Homo sapiens
  source 1..36: mol_type = genomic DNA
ttcgggggcgtgggttcgaatcccaccgctgccacc

SEQ ID NO: 42927 - DNA, 19 bp, Homo sapiens
  source 1..19: mol_type = genomic DNA
ttcgggtgcgagaggtccc

SEQ ID NO: 42928 - DNA, 20 bp, Homo sapiens
  source 1..20: mol_type = genomic DNA
ttcgggtgcgagaggtcccg

SEQ ID NO: 42929 - DNA, 43 bp, Homo sapiens
  source 1..43: mol_type = genomic DNA
ttcgggtgcgagaggtcccgggttcaaatcccggacgagcccc

SEQ ID NO: 42930 - DNA, 44 bp, Homo sapiens; identical to SEQ ID NO: 30060
  source 1..44: mol_type = genomic DNA

SEQ ID NO: 42931 - DNA, 43 bp, Homo sapiens; identical to SEQ ID NO: 30064
  source 1..43: mol_type = genomic DNA

SEQ ID NO: 42932 - DNA, 44 bp, Homo sapiens; identical to SEQ ID NO: 30065
  source 1..44: mol_type = genomic DNA

SEQ ID NO: 42933 - DNA, 43 bp, Homo sapiens; identical to SEQ ID NO: 30066
  source 1..43: mol_type = genomic DNA

SEQ ID NO: 42934 - DNA, 43 bp, Homo sapiens
  source 1..43: mol_type = genomic DNA
ttctaattcaaaggttgtgggttcgagtcccaccagagtcgcc

SEQ ID NO: 42935 - DNA, 26 bp, Homo sapiens
  source 1..26: mol_type = genomic DNA
ttctaggttcgactcctggctggctc

SEQ ID NO: 42936 - DNA, 29 bp, Homo sapiens
  source 1..29: mol_type = genomic DNA
ttctaggttcgactcctggctggctcgcc

SEQ ID NO: 42937 - DNA, 30 bp, Homo sapiens; identical to SEQ ID NO: 30071
  source 1..30: mol_type = genomic DNA

SEQ ID NO: 42938 - DNA, 16 bp, Homo sapiens
  source 1..16: mol_type = genomic DNA
ttctcatagtcctagc

SEQ ID NO: 42939 - DNA, 17 bp, Homo sapiens
  source 1..17: mol_type = genomic DNA
ttctcatagtcctagcc

SEQ ID NO: 42940 - DNA, 18 bp, Homo sapiens
  source 1..18: mol_type = genomic DNA
ttctcatagtcctagcca

SEQ ID NO: 42941 - DNA, 16 bp, Homo sapiens
  source 1..16: mol_type = genomic DNA
ttctcgcctgccacgc

SEQ ID NO: 42942 - DNA, 20 bp, Homo sapiens
  source 1..20: mol_type = genomic DNA
ttctcgcctgccacgcggga

SEQ ID NO: 42943 - DNA, 27 bp, Homo sapiens
  source 1..27: mol_type = genomic DNA
ttctcgcctgccacgcgggaggcccgg

SEQ ID NO: 42944 - DNA, 16 bp, Homo sapiens
  source 1..16: mol_type = genomic DNA
ttctcgctggggcctc

SEQ ID NO: 42945 - DNA, 17 bp, Homo sapiens
  source 1..17: mol_type = genomic DNA
ttctcgctggggcctcc

SEQ ID NO: 42946 - DNA, 16 bp, Homo sapiens
  source 1..16: mol_type = genomic DNA
ttctcgctttgggtgc

SEQ ID NO: 42947 - DNA, 17 bp, Homo sapiens
  source 1..17: mol_type = genomic DNA
ttctcgctttgggtgcg

SEQ ID NO: 42948 - DNA, 17 bp, Homo sapiens
  source 1..17: mol_type = genomic DNA
ttctcggtttgggtccg

SEQ ID NO: 42949 - DNA, 21 bp, Homo sapiens
  source 1..21: mol_type = genomic DNA
ttctggtctccaatggaggcg

SEQ ID NO: 42950 - DNA, 45 bp, Homo sapiens
  source 1..45: mol_type = genomic DNA
ttctggtctccaatggaggcgtgggttcgaatcccacttctgaca

SEQ ID NO: 42951 - DNA, 46 bp, Homo sapiens
  source 1..46: mol_type = genomic DNA
ttctggtctccaatggaggcgtgggttcgaatcccacttctgacac

SEQ ID NO: 42952 - DNA, 47 bp, Homo sapiens; identical to SEQ ID NO: 30094
  source 1..47: mol_type = genomic DNA

SEQ ID NO: 42953 - DNA, 22 bp, Homo sapiens
  source 1..22: mol_type = genomic DNA
ttctggtctccggatggaggcg

SEQ ID NO: 42954 - DNA, 46 bp, Homo sapiens
  source 1..46: mol_type = genomic DNA
ttctggtctccggatggaggcgtgggttcgaatcccacttctgaca

SEQ ID NO: 42955 - DNA, 47 bp, Homo sapiens
  source 1..47: mol_type = genomic DNA
ttctggtctccggatggaggcgtgggttcgaatcccacttctgacac

SEQ ID NO: 42956 - DNA, 30 bp, Homo sapiens; identical to SEQ ID NO: 30105
  source 1..30: mol_type = genomic DNA

SEQ ID NO: 42957 - DNA, 31 bp, Homo sapiens; identical to SEQ ID NO: 30106
  source 1..31: mol_type = genomic DNA

SEQ ID NO: 42958 - DNA, 34 bp, Homo sapiens; identical to SEQ ID NO: 30109
  source 1..34: mol_type = genomic DNA

SEQ ID NO: 42959 - DNA, 18 bp, Homo sapiens
  source 1..18: mol_type = genomic DNA
ttcttgcgacccgggttc

SEQ ID NO: 42960 - DNA, 33 bp, Homo sapiens; identical to SEQ ID NO: 30116
  source 1..33: mol_type = genomic DNA

SEQ ID NO: 42961 - DNA, 34 bp, Homo sapiens; identical to SEQ ID NO: 30117
  source 1..34: mol_type = genomic DNA

SEQ ID NO: 42962 - DNA, 35 bp, Homo sapiens; identical to SEQ ID NO: 30118
  source 1..35: mol_type = genomic DNA

SEQ ID NO: 42963 - DNA, 36 bp, Homo sapiens; identical to SEQ ID NO: 30119
  source 1..36: mol_type = genomic DNA

SEQ ID NO: 42964 - DNA, 37 bp, Homo sapiens; identical to SEQ ID NO: 30120
  source 1..37: mol_type = genomic DNA

SEQ ID NO: 42965 - DNA, 22 bp, Homo sapiens
  source 1..22: mol_type = genomic DNA
ttgaatccagcgatccgagttc

SEQ ID NO: 42966 - DNA, 43 bp, Homo sapiens; identical to SEQ ID NO: 30151
  source 1..43: mol_type = genomic DNA

SEQ ID NO: 42967 - DNA, 44 bp, Homo sapiens; identical to SEQ ID NO: 30152
  source 1..44: mol_type = genomic DNA

SEQ ID NO: 42968 - DNA, 45 bp, Homo sapiens; identical to SEQ ID NO: 30153
  source 1..45: mol_type = genomic DNA

SEQ ID NO: 42969 - DNA, 25 bp, Homo sapiens
  source 1..25: mol_type = genomic DNA
ttgacaacattcaaaaaagagtacc

SEQ ID NO: 42970 - DNA, 26 bp, Homo sapiens
  source 1..26: mol_type = genomic DNA
ttgacaacattcaaaaaagagtacca

SEQ ID NO: 42971 - DNA, 23 bp, Homo sapiens
  source 1..23: mol_type = genomic DNA
ttgacccgggttcgattcccggc

SEQ ID NO: 42972 - DNA, 24 bp, Homo sapiens
  source 1..24: mol_type = genomic DNA
ttgacccgggttcgattcccggcc

SEQ ID NO: 42973 - DNA, 32 bp, Homo sapiens; identical to SEQ ID NO: 30165
  source 1..32: mol_type = genomic DNA

SEQ ID NO: 42974 - DNA, 16 bp, Homo sapiens
  source 1..16: mol_type = genomic DNA
ttgaccgctctgacca

SEQ ID NO: 42975 - DNA, 23 bp, Homo sapiens
  source 1..23: mol_type = genomic DNA
ttgactgcagatcaagaggtccc

SEQ ID NO: 42976 - DNA, 25 bp, Homo sapiens
  source 1..25: mol_type = genomic DNA
ttgactgcagatcaagaggtccccg

SEQ ID NO: 42977 - DNA, 24 bp, Homo sapiens
  source 1..24: mol_type = genomic DNA
ttgactgcagatcaagaggtccct

SEQ ID NO: 42978 - DNA, 25 bp, Homo sapiens
  source 1..25: mol_type = genomic DNA
ttgactgcagatcaagaggtccctg

SEQ ID NO: 42979 - DNA, 27 bp, Homo sapiens
  source 1..27: mol_type = genomic DNA
ttgagggttcgaatcccttcgtggttg

SEQ ID NO: 42980 - DNA, 28 bp, Homo sapiens
  source 1..28: mol_type = genomic DNA
ttgagggttcgaatcccttcgtggttgc

SEQ ID NO: 42981 - DNA, 29 bp, Homo sapiens
  source 1..29: mol_type = genomic DNA
ttgagggttcgaatcccttcgtggttgcc

SEQ ID NO: 42982 - DNA, 27 bp, Homo sapiens
  source 1..27: mol_type = genomic DNA
ttgagggttcgagtcccttcgtggtcg

SEQ ID NO: 42983 - DNA, 28 bp, Homo sapiens
  source 1..28: mol_type = genomic DNA
ttgagggttcgagtcccttcgtggtcgc

SEQ ID NO: 42984 - DNA, 29 bp, Homo sapiens
  source 1..29: mol_type = genomic DNA
ttgagggttcgagtcccttcgtggtcgcc

SEQ ID NO: 42985 - DNA, 30 bp, Homo sapiens; identical to SEQ ID NO: 30176
  source 1..30: mol_type = genomic DNA

SEQ ID NO: 42986 - DNA, 23 bp, Homo sapiens
  source 1..23: mol_type = genomic DNA
ttgatagagtaaataataggagc

SEQ ID NO: 42987 - DNA, 32 bp, Homo sapiens; identical to SEQ ID NO: 30209
  source 1..32: mol_type = genomic DNA

SEQ ID NO: 42988 - DNA, 16 bp, Homo sapiens
  source 1..16: mol_type = genomic DNA
ttgattagggtgctta

SEQ ID NO: 42989 - DNA, 17 bp, Homo sapiens
  source 1..17: mol_type = genomic DNA
ttgattagggtgcttag

SEQ ID NO: 42990 - DNA, 18 bp, Homo sapiens
  source 1..18: mol_type = genomic DNA
ttgattagggtgcttagc

SEQ ID NO: 42991 - DNA, 20 bp, Homo sapiens
  source 1..20: mol_type = genomic DNA
ttgattagggtgcttagctg

SEQ ID NO: 42992 - DNA, 22 bp, Homo sapiens
  source 1..22: mol_type = genomic DNA
ttgattagggtgcttagctgtt

SEQ ID NO: 42993 - DNA, 23 bp, Homo sapiens
  source 1..23: mol_type = genomic DNA
ttgattagggtgcttagctgtta

SEQ ID NO: 42994 - DNA, 24 bp, Homo sapiens
  source 1..24: mol_type = genomic DNA
ttgattagggtgcttagctgttaa

SEQ ID NO: 42995 - DNA, 25 bp, Homo sapiens
  source 1..25: mol_type = genomic DNA
ttgattagggtgcttagctgttaac

SEQ ID NO: 42996 - DNA, 26 bp, Homo sapiens
  source 1..26: mol_type = genomic DNA
ttgattagggtgcttagctgttaact

SEQ ID NO: 42997 - DNA, 27 bp, Homo sapiens
  source 1..27: mol_type = genomic DNA
ttgattagggtgcttagctgttaacta

SEQ ID NO: 42998 - DNA, 28 bp, Homo sapiens
  source 1..28: mol_type = genomic DNA
ttgattagggtgcttagctgttaactaa

SEQ ID NO: 42999 - DNA, 31 bp, Homo sapiens; identical to SEQ ID NO: 30232
  source 1..31: mol_type = genomic DNA

SEQ ID NO: 43000 - DNA, 37 bp, Homo sapiens; identical to SEQ ID NO: 30233
  source 1..37: mol_type = genomic DNA

SEQ ID NO: 43001 - DNA, 38 bp, Homo sapiens; identical to SEQ ID NO: 30234
  source 1..38: mol_type = genomic DNA

SEQ ID NO: 43002 - DNA, 39 bp, Homo sapiens; identical to SEQ ID NO: 30235
  source 1..39: mol_type = genomic DNA

SEQ ID NO: 43003 - DNA, 40 bp, Homo sapiens; identical to SEQ ID NO: 30236
  source 1..40: mol_type = genomic DNA

SEQ ID NO: 43004 - DNA, 43 bp, Homo sapiens; identical to SEQ ID NO: 30239
  source 1..43: mol_type = genomic DNA

SEQ ID NO: 43005 - DNA, 22 bp, Homo sapiens
  source 1..22: mol_type = genomic DNA
ttgcaatacttaatttctgcca

SEQ ID NO: 43006 - DNA, 28 bp, Homo sapiens
  source 1..28: mol_type = genomic DNA
ttgcacgcgtgggttcgaatcccatcct

SEQ ID NO: 43007 - DNA, 30 bp, Homo sapiens; identical to SEQ ID NO: 30248
  source 1..30: mol_type = genomic DNA

SEQ ID NO: 43008 - DNA, 34 bp, Homo sapiens; identical to SEQ ID NO: 30249
  source 1..34: mol_type = genomic DNA

SEQ ID NO: 43009 - DNA, 35 bp, Homo sapiens; identical to SEQ ID NO: 30250
  source 1..35: mol_type = genomic DNA

SEQ ID NO: 43010 - DNA, 43 bp, Homo sapiens
  source 1..43: mol_type = genomic DNA
ttgcacgtatgaggccccgggttcaatccccggcatctccacc

SEQ ID NO: 43011 - DNA, 28 bp, Homo sapiens
  source 1..28: mol_type = genomic DNA
ttgcaggttcgagtcctgccgcggtcgc

SEQ ID NO: 43012 - DNA, 29 bp, Homo sapiens
  source 1..29: mol_type = genomic DNA
ttgcaggttcgagtcctgccgcggtcgcc

SEQ ID NO: 43013 - DNA, 16 bp, Homo sapiens
  source 1..16: mol_type = genomic DNA
ttgcgacccgggttcg

SEQ ID NO: 43014 - DNA, 28 bp, Homo sapiens
  source 1..28: mol_type = genomic DNA
ttgcgacccgggttcgattcccgggcgg

SEQ ID NO: 43015 - DNA, 29 bp, Homo sapiens
  source 1..29: mol_type = genomic DNA
ttgcgacccgggttcgattcccgggcggc

SEQ ID NO: 43016 - DNA, 30 bp, Homo sapiens; identical to SEQ ID NO: 30268
  source 1..30: mol_type = genomic DNA

SEQ ID NO: 43017 - DNA, 31 bp, Homo sapiens
  source 1..31: mol_type = genomic DNA
ttgcgacccgggttcgattcccgggcggcgc

SEQ ID NO: 43018 - DNA, 32 bp, Homo sapiens; identical to SEQ ID NO: 30269
  source 1..32: mol_type = genomic DNA

SEQ ID NO: 43019 - DNA, 33 bp, Homo sapiens; identical to SEQ ID NO: 30270
  source 1..33: mol_type = genomic DNA

SEQ ID NO: 43020 - DNA, 34 bp, Homo sapiens; identical to SEQ ID NO: 30271
  source 1..34: mol_type = genomic DNA

SEQ ID NO: 43021 - DNA, 35 bp, Homo sapiens; identical to SEQ ID NO: 30272
  source 1..35: mol_type = genomic DNA

SEQ ID NO: 43022 - DNA, 27 bp, Homo sapiens
  source 1..27: mol_type = genomic DNA
ttgcgtgttcaaatcacgtcggggtca

SEQ ID NO: 43023 - DNA, 29 bp, Homo sapiens
  source 1..29: mol_type = genomic DNA
ttgcgtgttcaaatcacgtcggggtcacc

SEQ ID NO: 43024 - DNA, 27 bp, Homo sapiens
  source 1..27: mol_type = genomic DNA
ttgcgtgttcaagtcacgtcggggtca

SEQ ID NO: 43025 - DNA, 29 bp, Homo sapiens
  source 1..29: mol_type = genomic DNA
ttgcgtgttcaagtcacgtcggggtcacc

SEQ ID NO: 43026 - DNA, 17 bp, Homo sapiens
  source 1..17: mol_type = genomic DNA
ttgcgttcagttgatgc

SEQ ID NO: 43027 - DNA, 35 bp, Homo sapiens; identical to SEQ ID NO: 30296
  source 1..35: mol_type = genomic DNA

SEQ ID NO: 43028 - DNA, 39 bp, Homo sapiens
  source 1..39: mol_type = genomic DNA
ttggattctcagggatgggttcgattctcatagtcctag

SEQ ID NO: 43029 - DNA, 40 bp, Homo sapiens; identical to SEQ ID NO: 30306
  source 1..40: mol_type = genomic DNA

SEQ ID NO: 43030 - DNA, 20 bp, Homo sapiens
  source 1..20: mol_type = genomic DNA
ttgggagagcgttagactga

SEQ ID NO: 43031 - DNA, 29 bp, Homo sapiens
  source 1..29: mol_type = genomic DNA
ttgggagagcgttagactgaagatctaaa

SEQ ID NO: 43032 - DNA, 18 bp, Homo sapiens
  source 1..18: mol_type = genomic DNA
ttgggtgcgagaggtccc

SEQ ID NO: 43033 - DNA, 19 bp, Homo sapiens
  source 1..19: mol_type = genomic DNA
ttgggtgcgagaggtcccg

SEQ ID NO: 43034 - DNA, 20 bp, Homo sapiens
  source 1..20: mol_type = genomic DNA
ttgggtgcgagaggtcccgg

SEQ ID NO: 43035 - DNA, 22 bp, Homo sapiens
  source 1..22: mol_type = genomic DNA
ttgggtgcgagaggtcccgggt

SEQ ID NO: 43036 - DNA, 23 bp, Homo sapiens
  source 1..23: mol_type = genomic DNA
ttgggtgcgagaggtcccgggtt

SEQ ID NO: 43037 - DNA, 42 bp, Homo sapiens
  source 1..42: mol_type = genomic DNA
ttgggtgcgagaggtcccgggttcaaatcccggacgagcccc

SEQ ID NO: 43038 - DNA, 40 bp, Homo sapiens; identical to SEQ ID NO: 30354
  source 1..40: mol_type = genomic DNA

SEQ ID NO: 43039 - DNA, 41 bp, Homo sapiens; identical to SEQ ID NO: 30355
  source 1..41: mol_type = genomic DNA

SEQ ID NO: 43040 - DNA, 17 bp, Homo sapiens
  source 1..17: mol_type = genomic DNA
ttggtagagcatgggac

SEQ ID NO: 43041 - DNA, 26 bp, Homo sapiens
  source 1..26: mol_type = genomic DNA
ttggtagagcatgggactcttaatcc

SEQ ID NO: 43042 - DNA, 17 bp, Homo sapiens
  source 1..17: mol_type = genomic DNA
ttggtagagcggaggac

SEQ ID NO: 43043 - DNA, 21 bp, Homo sapiens
  source 1..21: mol_type = genomic DNA
ttggtagagcggaggactgta

SEQ ID NO: 43044 - DNA, 27 bp, Homo sapiens
  source 1..27: mol_type = genomic DNA
ttggtagagcggaggactgtagatcct

SEQ ID NO: 43045 - DNA, 28 bp, Homo sapiens
  source 1..28: mol_type = genomic DNA
ttggtagagcggaggactgtagatcctt

SEQ ID NO: 43046 - DNA, 16 bp, Homo sapiens
  source 1..16: mol_type = genomic DNA
ttggtcgtggttgtag

SEQ ID NO: 43047 - DNA, 17 bp, Homo sapiens
  source 1..17: mol_type = genomic DNA
ttggtcgtggttgtagt

SEQ ID NO: 43048 - DNA, 18 bp, Homo sapiens
  source 1..18: mol_type = genomic DNA
ttggtcgtggttgtagtc

SEQ ID NO: 43049 - DNA, 19 bp, Homo sapiens
  source 1..19: mol_type = genomic DNA
ttggtcgtggttgtagtcc

SEQ ID NO: 43050 - DNA, 20 bp, Homo sapiens
  source 1..20: mol_type = genomic DNA
ttggtcgtggttgtagtccg

SEQ ID NO: 43051 - DNA, 21 bp, Homo sapiens
  source 1..21: mol_type = genomic DNA
ttggtcgtggttgtagtccgt

SEQ ID NO: 43052 - DNA, 22 bp, Homo sapiens
  source 1..22: mol_type = genomic DNA
ttggtcgtggttgtagtccgtg

SEQ ID NO: 43053 - DNA, 23 bp, Homo sapiens
  source 1..23: mol_type = genomic DNA
ttggtcgtggttgtagtccgtgc

SEQ ID NO: 43054 - DNA, 24 bp, Homo sapiens
  source 1..24: mol_type = genomic DNA
ttggtcgtggttgtagtccgtgcg

SEQ ID NO: 43055 - DNA, 25 bp, Homo sapiens
  source 1..25: mol_type = genomic DNA
ttggtcgtggttgtagtccgtgcga

SEQ ID NO: 43056 - DNA, 26 bp, Homo sapiens
  source 1..26: mol_type = genomic DNA
ttggtcgtggttgtagtccgtgcgag

SEQ ID NO: 43057 - DNA, 27 bp, Homo sapiens
  source 1..27: mol_type = genomic DNA
ttggtcgtggttgtagtccgtgcgaga

SEQ ID NO: 43058 - DNA, 28 bp, Homo sapiens
  source 1..28: mol_type = genomic DNA
ttggtcgtggttgtagtccgtgcgagaa

SEQ ID NO: 43059 - DNA, 29 bp, Homo sapiens
  source 1..29: mol_type = genomic DNA
ttggtcgtggttgtagtccgtgcgagaat

SEQ ID NO: 43060 - DNA, 30 bp, Homo sapiens; identical to SEQ ID NO: 30377
  source 1..30: mol_type = genomic DNA

SEQ ID NO: 43061 - DNA, 31 bp, Homo sapiens; identical to SEQ ID NO: 30378
  source 1..31: mol_type = genomic DNA

SEQ ID NO: 43062 - DNA, 32 bp, Homo sapiens; identical to SEQ ID NO: 30379
  source 1..32: mol_type = genomic DNA

SEQ ID NO: 43063 - DNA, 33 bp, Homo sapiens; identical to SEQ ID NO: 30380
  source 1..33: mol_type = genomic DNA

SEQ ID NO: 43064 - DNA, 20 bp, Homo sapiens
  source 1..20: mol_type = genomic DNA
ttggtctaggggtatgattc

SEQ ID NO: 43065 - DNA, 22 bp, Homo sapiens
  source 1..22: mol_type = genomic DNA
ttggtctaggggtatgattctc

SEQ ID NO: 43066 - DNA, 24 bp, Homo sapiens
  source 1..24: mol_type = genomic DNA
ttggtctaggggtatgattctcgc

SEQ ID NO: 43067 - DNA, 25 bp, Homo sapiens
  source 1..25: mol_type = genomic DNA
ttggtctaggggtatgattctcgct

SEQ ID NO: 43068 - DNA, 26 bp, Homo sapiens
  source 1..26: mol_type = genomic DNA
ttggtctaggggtatgattctcgctt

SEQ ID NO: 43069 - DNA, 29 bp, Homo sapiens
  source 1..29: mol_type = genomic DNA
ttggtctaggggtatgattctcgctttgg

SEQ ID NO: 43070 - DNA, 20 bp, Homo sapiens
  source 1..20: mol_type = genomic DNA
ttggtggtatagtggtgagc

SEQ ID NO: 43071 - DNA, 21 bp, Homo sapiens
  source 1..21: mol_type = genomic DNA
ttggtggtatagtggtgagca

SEQ ID NO: 43072 - DNA, 16 bp, Homo sapiens
  source 1..16: mol_type = genomic DNA
ttggtggttcagtggt

SEQ ID NO: 43073 - DNA, 17 bp, Homo sapiens
  source 1..17: mol_type = genomic DNA
ttggtggttcagtggta

SEQ ID NO: 43074 - DNA, 19 bp, Homo sapiens
  source 1..19: mol_type = genomic DNA
ttggtggttcagtggtaga

SEQ ID NO: 43075 - DNA, 20 bp, Homo sapiens
  source 1..20: mol_type = genomic DNA
ttggtggttcagtggtagaa

SEQ ID NO: 43076 - DNA, 21 bp, Homo sapiens
  source 1..21: mol_type = genomic DNA
ttggtggttcagtggtagaat

SEQ ID NO: 43077 - DNA, 22 bp, Homo sapiens
  source 1..22: mol_type = genomic DNA
ttggtggttcagtggtagaatt

SEQ ID NO: 43078 - DNA, 23 bp, Homo sapiens
  source 1..23: mol_type = genomic DNA
ttggtggttcagtggtagaattc

SEQ ID NO: 43079 - DNA, 24 bp, Homo sapiens
  source 1..24: mol_type = genomic DNA
ttggtggttcagtggtagaattct

SEQ ID NO: 43080 - DNA, 25 bp, Homo sapiens
  source 1..25: mol_type = genomic DNA
ttggtggttcagtggtagaattctc

SEQ ID NO: 43081 - DNA, 26 bp, Homo sapiens
  source 1..26: mol_type = genomic DNA
ttggtggttcagtggtagaattctcg

SEQ ID NO: 43082 - DNA, 27 bp, Homo sapiens
  source 1..27: mol_type = genomic DNA
ttggtggttcagtggtagaattctcgc

SEQ ID NO: 43083 - DNA, 28 bp, Homo sapiens
  source 1..28: mol_type = genomic DNA
ttggtggttcagtggtagaattctcgcc

SEQ ID NO: 43084 - DNA, 29 bp, Homo sapiens
  source 1..29: mol_type = genomic DNA
ttggtggttcagtggtagaattctcgcct

SEQ ID NO: 43085 - DNA, 32 bp, Homo sapiens; identical to SEQ ID NO: 30456
  source 1..32: mol_type = genomic DNA

SEQ ID NO: 43086 - DNA, 47 bp, Homo sapiens
  source 1..47: mol_type = genomic DNA
ttggtggttcagtggtagaattctcgcctcccacgcgggagacccgg

SEQ ID NO: 43087 - DNA, 30 bp, Homo sapiens; identical to SEQ ID NO: 30459
  source 1..30: mol_type = genomic DNA

SEQ ID NO: 43088 - DNA, 31 bp, Homo sapiens; identical to SEQ ID NO: 30460
  source 1..31: mol_type = genomic DNA

SEQ ID NO: 43089 - DNA, 32 bp, Homo sapiens; identical to SEQ ID NO: 30461
  source 1..32: mol_type = genomic DNA

SEQ ID NO: 43090 - DNA, 33 bp, Homo sapiens; identical to SEQ ID NO: 30462
  source 1..33: mol_type = genomic DNA

SEQ ID NO: 43091 - DNA, 34 bp, Homo sapiens; identical to SEQ ID NO: 30463
  source 1..34: mol_type = genomic DNA

SEQ ID NO: 43092 - DNA, 35 bp, Homo sapiens; identical to SEQ ID NO: 30464
  source 1..35: mol_type = genomic DNA

SEQ ID NO: 43093 - DNA, 40 bp, Homo sapiens; identical to SEQ ID NO: 30469
  source 1..40: mol_type = genomic DNA

SEQ ID NO: 43094 - DNA, 44 bp, Homo sapiens; identical to SEQ ID NO: 30473
  source 1..44: mol_type = genomic DNA

SEQ ID NO: 43095 - DNA, 45 bp, Homo sapiens; identical to SEQ ID NO: 30474
  source 1..45: mol_type = genomic DNA

SEQ ID NO: 43096 - DNA, 46 bp, Homo sapiens; identical to SEQ ID NO: 30475
  source 1..46: mol_type = genomic DNA

SEQ ID NO: 43097 - DNA, 47 bp, Homo sapiens; identical to SEQ ID NO: 30476
  source 1..47: mol_type = genomic DNA

SEQ ID NO: 43098 - DNA, 26 bp, Homo sapiens
  source 1..26: mol_type = genomic DNA
ttggtggttcgagcccacccagggac

SEQ ID NO: 43099 - DNA, 27 bp, Homo sapiens
  source 1..27: mol_type = genomic DNA
ttggtggttcgagcccacccagggacg

SEQ ID NO: 43100 - DNA, 28 bp, Homo sapiens
  source 1..28: mol_type = genomic DNA
ttggtggttcgagcccacccagggacgc

SEQ ID NO: 43101 - DNA, 29 bp, Homo sapiens
  source 1..29: mol_type = genomic DNA
ttggtggttcgagcccacccagggacgcc

SEQ ID NO: 43102 - DNA, 30 bp, Homo sapiens; identical to SEQ ID NO: 30485
  source 1..30: mol_type = genomic DNA

SEQ ID NO: 43103 - DNA, 29 bp, Homo sapiens
  source 1..29: mol_type = genomic DNA
ttggtggttcgatcccacccagggacgcc

SEQ ID NO: 43104 - DNA, 25 bp, Homo sapiens
  source 1..25: mol_type = genomic DNA
ttggttatacccttcccgtactacc

SEQ ID NO: 43105 - DNA, 26 bp, Homo sapiens
  source 1..26: mol_type = genomic DNA
ttggttatacccttcccgtactacca

SEQ ID NO: 43106 - DNA, 19 bp, Homo sapiens
  source 1..19: mol_type = genomic DNA
ttgtaaaccaggggtcgcg

SEQ ID NO: 43107 - DNA, 20 bp, Homo sapiens
  source 1..20: mol_type = genomic DNA
ttgtaaaccggagatgaaaa

SEQ ID NO: 43108 - DNA, 21 bp, Homo sapiens
  source 1..21: mol_type = genomic DNA
ttgtaaaccggagatgaaaac

SEQ ID NO: 43109 - DNA, 22 bp, Homo sapiens
  source 1..22: mol_type = genomic DNA
ttgtaaaccggagatgaaaacc

SEQ ID NO: 43110 - DNA, 34 bp, Homo sapiens; identical to SEQ ID NO: 30529
  source 1..34: mol_type = genomic DNA

SEQ ID NO: 43111 - DNA, 35 bp, Homo sapiens; identical to SEQ ID NO: 30530
  source 1..35: mol_type = genomic DNA

SEQ ID NO: 43112 - DNA, 36 bp, Homo sapiens; identical to SEQ ID NO: 30531
  source 1..36: mol_type = genomic DNA

SEQ ID NO: 43113 - DNA, 37 bp, Homo sapiens; identical to SEQ ID NO: 30532
  source 1..37: mol_type = genomic DNA

SEQ ID NO: 43114 - DNA, 38 bp, Homo sapiens; identical to SEQ ID NO: 30533
  source 1..38: mol_type = genomic DNA

SEQ ID NO: 43115 - DNA, 39 bp, Homo sapiens; identical to SEQ ID NO: 30534
  source 1..39: mol_type = genomic DNA

SEQ ID NO: 43116 - DNA, 18 bp, Homo sapiens
  source 1..18: mol_type = genomic DNA
ttgtagtccgtgcgagaa

SEQ ID NO: 43117 - DNA, 19 bp, Homo sapiens
  source 1..19: mol_type = genomic DNA
ttgtagtccgtgcgagaat

SEQ ID NO: 43118 - DNA, 20 bp, Homo sapiens
  source 1..20: mol_type = genomic DNA
ttgtagtccgtgcgagaata

SEQ ID NO: 43119 - DNA, 22 bp, Homo sapiens
  source 1..22: mol_type = genomic DNA
ttgtagtccgtgcgagaatacc

SEQ ID NO: 43120 - DNA, 23 bp, Homo sapiens
  source 1..23: mol_type = genomic DNA
ttgtagtccgtgcgagaatacca

SEQ ID NO: 43121 - DNA, 16 bp, Homo sapiens
  source 1..16: mol_type = genomic DNA
ttgtgaatctgacaac

SEQ ID NO: 43122 - DNA, 17 bp, Homo sapiens
  source 1..17: mol_type = genomic DNA
ttgtgaatctgacaaca

SEQ ID NO: 43123 - DNA, 18 bp, Homo sapiens
  source 1..18: mol_type = genomic DNA
ttgtgaatctgacaacag

SEQ ID NO: 43124 - DNA, 19 bp, Homo sapiens
  source 1..19: mol_type = genomic DNA
ttgtgaatctgacaacaga

SEQ ID NO: 43125 - DNA, 20 bp, Homo sapiens
  source 1..20: mol_type = genomic DNA
ttgtgaatctgacaacagag

SEQ ID NO: 43126 - DNA, 21 bp, Homo sapiens
  source 1..21: mol_type = genomic DNA
ttgtgaatctgacaacagagg

SEQ ID NO: 43127 - DNA, 22 bp, Homo sapiens
  source 1..22: mol_type = genomic DNA
ttgtgaatctgacaacagaggc

SEQ ID NO: 43128 - DNA, 23 bp, Homo sapiens
  source 1..23: mol_type = genomic DNA
ttgtgaatctgacaacagaggct

SEQ ID NO: 43129 - DNA, 24 bp, Homo sapiens
  source 1..24: mol_type = genomic DNA
ttgtgaatctgacaacagaggctt

SEQ ID NO: 43130 - DNA, 25 bp, Homo sapiens
  source 1..25: mol_type = genomic DNA
ttgtgaatctgacaacagaggctta

SEQ ID NO: 43131 - DNA, 27 bp, Homo sapiens
  source 1..27: mol_type = genomic DNA
ttgtgaatctgacaacagaggcttacg

SEQ ID NO: 43132 - DNA, 29 bp, Homo sapiens
  source 1..29: mol_type = genomic DNA
ttgtgaatctgacaacagaggcttacgac

SEQ ID NO: 43133 - DNA, 30 bp, Homo sapiens; identical to SEQ ID NO: 30580
  source 1..30: mol_type = genomic DNA

SEQ ID NO: 43134 - DNA, 31 bp, Homo sapiens; identical to SEQ ID NO: 30581
  source 1..31: mol_type = genomic DNA

SEQ ID NO: 43135 - DNA, 32 bp, Homo sapiens; identical to SEQ ID NO: 30582
  source 1..32: mol_type = genomic DNA

SEQ ID NO: 43136 - DNA, 33 bp, Homo sapiens; identical to SEQ ID NO: 30583
  source 1..33: mol_type = genomic DNA

SEQ ID NO: 43137 - DNA, 35 bp, Homo sapiens; identical to SEQ ID NO: 30585
  source 1..35: mol_type = genomic DNA

SEQ ID NO: 43138 - DNA, 36 bp, Homo sapiens; identical to SEQ ID NO: 30586
  source 1..36: mol_type = genomic DNA

SEQ ID NO: 43139 - DNA, 40 bp, Homo sapiens; identical to SEQ ID NO: 30590
  source 1..40: mol_type = genomic DNA

SEQ ID NO: 43140 - DNA, 41 bp, Homo sapiens; identical to SEQ ID NO: 30591
  source 1..41: mol_type = genomic DNA

SEQ ID NO: 43141 - DNA, 42 bp, Homo sapiens; identical to SEQ ID NO: 30592
  source 1..42: mol_type = genomic DNA

SEQ ID NO: 43142 - DNA, 43 bp, Homo sapiens; identical to SEQ ID NO: 30593
  source 1..43: mol_type = genomic DNA

SEQ ID NO: 43143 - DNA, 44 bp, Homo sapiens; identical to SEQ ID NO: 30594
  source 1..44: mol_type = genomic DNA

SEQ ID NO: 43144 - DNA, 29 bp, Homo sapiens
  source 1..29: mol_type = genomic DNA
ttgtgagttcgagcctcacctggagcacc

SEQ ID NO: 43145 - DNA, 23 bp, Homo sapiens
  source 1..23: mol_type = genomic DNA
ttgtgctttgcacgcgtgggttc

SEQ ID NO: 43146 - DNA, 42 bp, Homo sapiens; identical to SEQ ID NO: 30607
  source 1..42: mol_type = genomic DNA

SEQ ID NO: 43147 - DNA, 16 bp, Homo sapiens
  source 1..16: mol_type = genomic DNA
ttgtggccgcagcaac

SEQ ID NO: 43148 - DNA, 17 bp, Homo sapiens
  source 1..17: mol_type = genomic DNA
ttgtggccgcagcaacc

SEQ ID NO: 43149 - DNA, 18 bp, Homo sapiens
  source 1..18: mol_type = genomic DNA
ttgtggccgcagcaacct

SEQ ID NO: 43150 - DNA, 28 bp, Homo sapiens
  source 1..28: mol_type = genomic DNA
ttgtgggttcgaatcccaccagagtcgc

SEQ ID NO: 43151 - DNA, 29 bp, Homo sapiens
  source 1..29: mol_type = genomic DNA
ttgtgggttcgaatcccaccagagtcgcc

SEQ ID NO: 43152 - DNA, 28 bp, Homo sapiens
  source 1..28: mol_type = genomic DNA
ttgtgggttcgagtcccaccagagtcgc

SEQ ID NO: 43153 - DNA, 29 bp, Homo sapiens
  source 1..29: mol_type = genomic DNA
ttgtgggttcgagtcccaccagagtcgcc

SEQ ID NO: 43154 - DNA, 27 bp, Homo sapiens
  source 1..27: mol_type = genomic DNA
ttgtgggttcgagtcccatctggggtg

SEQ ID NO: 43155 - DNA, 28 bp, Homo sapiens
  source 1..28: mol_type = genomic DNA
ttgtgggttcgagtcccatctggggtgc

SEQ ID NO: 43156 - DNA, 28 bp, Homo sapiens
  source 1..28: mol_type = genomic DNA
ttgtgggttcgagtcccatctgggtcgc

SEQ ID NO: 43157 - DNA, 29 bp, Homo sapiens
  source 1..29: mol_type = genomic DNA
ttgtgggttcgagtcccatctgggtcgcc

SEQ ID NO: 43158 - DNA, 28 bp, Homo sapiens
  source 1..28: mol_type = genomic DNA
ttgtgggtttaagtcccattggtctagc

SEQ ID NO: 43159 - DNA, 29 bp, Homo sapiens
  source 1..29: mol_type = genomic DNA
ttgtgggtttaagtcccattggtctagcc

SEQ ID NO: 43160 - DNA, 27 bp, Homo sapiens
  source 1..27: mol_type = genomic DNA
tttaaccaaaacatcagattgtgaatc

SEQ ID NO: 43161 - DNA, 24 bp, Homo sapiens
  source 1..24: mol_type = genomic DNA
tttaagttaaagattaagagaacc

SEQ ID NO: 43162 - DNA, 43 bp, Homo sapiens; identical to SEQ ID NO: 30710
  source 1..43: mol_type = genomic DNA

SEQ ID NO: 43163 - DNA, 45 bp, Homo sapiens; identical to SEQ ID NO: 30712
  source 1..45: mol_type = genomic DNA

SEQ ID NO: 43164 - DNA, 20 bp, Homo sapiens
  source 1..20: mol_type = genomic DNA
tttacacgcagaaggtcctg

SEQ ID NO: 43165 - DNA, 44 bp, Homo sapiens; identical to SEQ ID NO: 30722
  source 1..44: mol_type = genomic DNA

SEQ ID NO: 43166 - DNA, 16 bp, Homo sapiens
  source 1..16: mol_type = genomic DNA
tttacagtcagaggtt

SEQ ID NO: 43167 - DNA, 17 bp, Homo sapiens
  source 1..17: mol_type = genomic DNA
tttacagtcagaggttc

SEQ ID NO: 43168 - DNA, 16 bp, Homo sapiens
  source 1..16: mol_type = genomic DNA
tttagacgggctcaca

SEQ ID NO: 43169 - DNA, 18 bp, Homo sapiens
  source 1..18: mol_type = genomic DNA
tttagacgggctcacatc

SEQ ID NO: 43170 - DNA, 21 bp, Homo sapiens
  source 1..21: mol_type = genomic DNA
tttagacgggctcacatcacc

SEQ ID NO: 43171 - DNA, 22 bp, Homo sapiens
  source 1..22: mol_type = genomic DNA
tttagacgggctcacatcaccc

SEQ ID NO: 43172 - DNA, 28 bp, Homo sapiens
  source 1..28: mol_type = genomic DNA
tttagacgggctcacatcaccccataaa

SEQ ID NO: 43173 - DNA, 30 bp, Homo sapiens; identical to SEQ ID NO: 30752
  source 1..30: mol_type = genomic DNA

SEQ ID NO: 43174 - DNA, 32 bp, Homo sapiens; identical to SEQ ID NO: 30754
  source 1..32: mol_type = genomic DNA

SEQ ID NO: 43175 - DNA, 33 bp, Homo sapiens; identical to SEQ ID NO: 30755
  source 1..33: mol_type = genomic DNA

SEQ ID NO: 43176 - DNA, 17 bp, Homo sapiens
  source 1..17: mol_type = genomic DNA
tttaggctccagtcatt

SEQ ID NO: 43177 - DNA, 17 bp, Homo sapiens
  source 1..17: mol_type = genomic DNA
tttaggctccagtctct

SEQ ID NO: 43178 - DNA, 18 bp, Homo sapiens
  source 1..18: mol_type = genomic DNA
tttaggctccagtctctt

SEQ ID NO: 43179 - DNA, 19 bp, Homo sapiens
  source 1..19: mol_type = genomic DNA
tttaggctccagtctcttc

SEQ ID NO: 43180 - DNA, 17 bp, Homo sapiens
  source 1..17: mol_type = genomic DNA
tttcaacttaacttgac

SEQ ID NO: 43181 - DNA, 18 bp, Homo sapiens
  source 1..18: mol_type = genomic DNA
tttcaacttaacttgacc

SEQ ID NO: 43182 - DNA, 22 bp, Homo sapiens
  source 1..22: mol_type = genomic DNA
tttcaacttaacttgaccgctc

SEQ ID NO: 43183 - DNA, 24 bp, Homo sapiens
  source 1..24: mol_type = genomic DNA
tttcaacttaacttgaccgctctg

SEQ ID NO: 43184 - DNA, 25 bp, Homo sapiens
  source 1..25: mol_type = genomic DNA
tttcaacttaacttgaccgctctga

SEQ ID NO: 43185 - DNA, 26 bp, Homo sapiens
  source 1..26: mol_type = genomic DNA
tttcaacttaacttgaccgctctgac

SEQ ID NO: 43186 - DNA, 27 bp, Homo sapiens
  source 1..27: mol_type = genomic DNA
tttcaacttaacttgaccgctctgacc

SEQ ID NO: 43187 - DNA, 28 bp, Homo sapiens
  source 1..28: mol_type = genomic DNA
tttcaacttaacttgaccgctctgacca

SEQ ID NO: 43188 - DNA, 16 bp, Homo sapiens
  source 1..16: mol_type = genomic DNA
tttcacccaggcggcc

SEQ ID NO: 43189 - DNA, 18 bp, Homo sapiens
  source 1..18: mol_type = genomic DNA
tttcacccaggcggcccg

SEQ ID NO: 43190 - DNA, 40 bp, Homo sapiens; identical to SEQ ID NO: 30793
  source 1..40: mol_type = genomic DNA

SEQ ID NO: 43191 - DNA, 41 bp, Homo sapiens; identical to SEQ ID NO: 30794
  source 1..41: mol_type = genomic DNA

SEQ ID NO: 43192 - DNA, 42 bp, Homo sapiens; identical to SEQ ID NO: 30795
  source 1..42: mol_type = genomic DNA

SEQ ID NO: 43193 - DNA, 43 bp, Homo sapiens; identical to SEQ ID NO: 30796
  source 1..43: mol_type = genomic DNA

SEQ ID NO: 43194 - DNA, 40 bp, Homo sapiens
  source 1..40: mol_type = genomic DNA
tttcacccaggtggcccgggttcgactcccggtatgggaa

SEQ ID NO: 43195 - DNA, 37 bp, Homo sapiens; identical to SEQ ID NO: 30824
  source 1..37: mol_type = genomic DNA

SEQ ID NO: 43196 - DNA, 38 bp, Homo sapiens; identical to SEQ ID NO: 30825
  source 1..38: mol_type = genomic DNA

SEQ ID NO: 43197 - DNA, 39 bp, Homo sapiens; identical to SEQ ID NO: 30826
  source 1..39: mol_type = genomic DNA

SEQ ID NO: 43198 - DNA, 40 bp, Homo sapiens; identical to SEQ ID NO: 30827
  source 1..40: mol_type = genomic DNA

SEQ ID NO: 43199 - DNA, 42 bp, Homo sapiens; identical to SEQ ID NO: 30829
  source 1..42: mol_type = genomic DNA

SEQ ID NO: 43200 - DNA, 43 bp, Homo sapiens; identical to SEQ ID NO: 30830
  source 1..43: mol_type = genomic DNA

SEQ ID NO: 43201 - DNA, 36 bp, Homo sapiens; identical to SEQ ID NO: 30844
  source 1..36: mol_type = genomic DNA

SEQ ID NO: 43202 - DNA, 36 bp, Homo sapiens; identical to SEQ ID NO: 30851
  source 1..36: mol_type = genomic DNA

SEQ ID NO: 43203 - DNA, 32 bp, Homo sapiens; identical to SEQ ID NO: 30853
  source 1..32: mol_type = genomic DNA

SEQ ID NO: 43204 - DNA, 31 bp, Homo sapiens; identical to SEQ ID NO: 30860
  source 1..31: mol_type = genomic DNA

SEQ ID NO: 43205 - DNA, 32 bp, Homo sapiens; identical to SEQ ID NO: 30861
  source 1..32: mol_type = genomic DNA

SEQ ID NO: 43206 - DNA, 16 bp, Homo sapiens
  source 1..16: mol_type = genomic DNA
tttccgtagtgtagtg

SEQ ID NO: 43207 - DNA, 22 bp, Homo sapiens
  source 1..22: mol_type = genomic DNA
tttccgtagtgtagtggtcatc

SEQ ID NO: 43208 - DNA, 30 bp, Homo sapiens; identical to SEQ ID NO: 30871
  source 1..30: mol_type = genomic DNA

SEQ ID NO: 43209 - DNA, 31 bp, Homo sapiens; identical to SEQ ID NO: 30872
  source 1..31: mol_type = genomic DNA

SEQ ID NO: 43210 - DNA, 32 bp, Homo sapiens; identical to SEQ ID NO: 30873
  source 1..32: mol_type = genomic DNA

SEQ ID NO: 43211 - DNA, 22 bp, Homo sapiens
  source 1..22: mol_type = genomic DNA
tttccgtagtgtagtggttatc

SEQ ID NO: 43212 - DNA, 23 bp, Homo sapiens
  source 1..23: mol_type = genomic DNA
tttccgtagtgtagtggttatca

SEQ ID NO: 43213 - DNA, 29 bp, Homo sapiens
  source 1..29: mol_type = genomic DNA
tttccgtagtgtagtggttatcacgttcg

SEQ ID NO: 43214 - DNA, 30 bp, Homo sapiens; identical to SEQ ID NO: 30883
  source 1..30: mol_type = genomic DNA

SEQ ID NO: 43215 - DNA, 31 bp, Homo sapiens; identical to SEQ ID NO: 30884
  source 1..31: mol_type = genomic DNA

SEQ ID NO: 43216 - DNA, 32 bp, Homo sapiens; identical to SEQ ID NO: 30885
  source 1..32: mol_type = genomic DNA

SEQ ID NO: 43217 - DNA, 33 bp, Homo sapiens; identical to SEQ ID NO: 30887
  source 1..33: mol_type = genomic DNA

SEQ ID NO: 43218 - DNA, 34 bp, Homo sapiens; identical to SEQ ID NO: 30888
  source 1..34: mol_type = genomic DNA

SEQ ID NO: 43219 - DNA, 37 bp, Homo sapiens; identical to SEQ ID NO: 30923
  source 1..37: mol_type = genomic DNA

SEQ ID NO: 43220 - DNA, 36 bp, Homo sapiens; identical to SEQ ID NO: 30968
  source 1..36: mol_type = genomic DNA

SEQ ID NO: 43221 - DNA, 19 bp, Homo sapiens
  source 1..19: mol_type = genomic DNA
tttgcacgtatgaggcccc

SEQ ID NO: 43222 - DNA, 39 bp, Homo sapiens; identical to SEQ ID NO: 30976
  source 1..39: mol_type = genomic DNA

SEQ ID NO: 43223 - DNA, 40 bp, Homo sapiens
  source 1..40: mol_type = genomic DNA
tttgcacgtatgaggccccgggttcaatccccggcatctc

SEQ ID NO: 43224 - DNA, 44 bp, Homo sapiens
  source 1..44: mol_type = genomic DNA
tttgcacgtatgaggccccgggttcaatccccggcatctccacc

SEQ ID NO: 43225 - DNA, 17 bp, Homo sapiens
  source 1..17: mol_type = genomic DNA
tttgcgttcagttgatg

SEQ ID NO: 43226 - DNA, 18 bp, Homo sapiens
  source 1..18: mol_type = genomic DNA
tttggattctcagggatg

SEQ ID NO: 43227 - DNA, 40 bp, Homo sapiens; identical to SEQ ID NO: 30982
  source 1..40: mol_type = genomic DNA

SEQ ID NO: 43228 - DNA, 41 bp, Homo sapiens; identical to SEQ ID NO: 30983
  source 1..41: mol_type = genomic DNA

SEQ ID NO: 43229 - DNA, 43 bp, Homo sapiens
  source 1..43: mol_type = genomic DNA
tttggattctcagggatgggttcgattctcatagtcctagcca

SEQ ID NO: 43230 - DNA, 19 bp, Homo sapiens
  source 1..19: mol_type = genomic DNA
tttgggtccgagaggtccc

SEQ ID NO: 43231 - DNA, 18 bp, Homo sapiens
  source 1..18: mol_type = genomic DNA
tttgggtgcgagaggtcc

SEQ ID NO: 43232 - DNA, 19 bp, Homo sapiens
  source 1..19: mol_type = genomic DNA
tttgggtgcgagaggtccc

SEQ ID NO: 43233 - DNA, 20 bp, Homo sapiens
  source 1..20: mol_type = genomic DNA
tttgggtgcgagaggtcccg

SEQ ID NO: 43234 - DNA, 21 bp, Homo sapiens
  source 1..21: mol_type = genomic DNA
tttgggtgcgagaggtcccgg

SEQ ID NO: 43235 - DNA, 23 bp, Homo sapiens
  source 1..23: mol_type = genomic DNA
tttgggtgcgagaggtcccgggt

SEQ ID NO: 43236 - DNA, 24 bp, Homo sapiens
  source 1..24: mol_type = genomic DNA
tttgggtgcgagaggtcccgggtt

SEQ ID NO: 43237 - DNA, 25 bp, Homo sapiens
  source 1..25: mol_type = genomic DNA
tttgggtgcgagaggtcccgggttc

SEQ ID NO: 43238 - DNA, 43 bp, Homo sapiens
  source 1..43: mol_type = genomic DNA
tttgggtgcgagaggtcccgggttcaaatcccggacgagcccc

SEQ ID NO: 43239 - DNA, 41 bp, Homo sapiens; identical to SEQ ID NO: 31016
  source 1..41: mol_type = genomic DNA

SEQ ID NO: 43240 - DNA, 29 bp, Homo sapiens
  source 1..29: mol_type = genomic DNA
tttgtgggtttaagtcccattggtctagc

SEQ ID NO: 43241 - DNA, 30 bp, Homo sapiens; identical to SEQ ID NO: 31052
  source 1..30: mol_type = genomic DNA

SEQ ID NO: 43242 - DNA, 29 bp, Homo sapiens
  source 1..29: mol_type = genomic DNA
ttttaaaggataacagctatccattggtc

SEQ ID NO: 43243 - DNA, 25 bp, Homo sapiens
  source 1..25: mol_type = genomic DNA
ttttaagttaaagattaagagaacc

SEQ ID NO: 43244 - DNA, 44 bp, Homo sapiens; identical to SEQ ID NO: 31092
  source 1..44: mol_type = genomic DNA

SEQ ID NO: 43245 - DNA, 16 bp, Homo sapiens
  source 1..16: mol_type = genomic DNA
ttttcacccaggcggc

SEQ ID NO: 43246 - DNA, 17 bp, Homo sapiens
  source 1..17: mol_type = genomic DNA
ttttcacccaggcggcc

SEQ ID NO: 43247 - DNA, 19 bp, Homo sapiens
  source 1..19: mol_type = genomic DNA
ttttcacccaggcggcccg

SEQ ID NO: 43248 - DNA, 41 bp, Homo sapiens; identical to SEQ ID NO: 31112
  source 1..41: mol_type = genomic DNA

SEQ ID NO: 43249 - DNA, 42 bp, Homo sapiens; identical to SEQ ID NO: 31113
  source 1..42: mol_type = genomic DNA

SEQ ID NO: 43250 - DNA, 43 bp, Homo sapiens; identical to SEQ ID NO: 31114
  source 1..43: mol_type = genomic DNA

SEQ ID NO: 43251 - DNA, 44 bp, Homo sapiens; identical to SEQ ID NO: 31115
  source 1..44: mol_type = genomic DNA

SEQ ID NO: 43252 - DNA, 18 bp, Homo sapiens
  source 1..18: mol_type = genomic DNA
ttttcacccaggtggccc

SEQ ID NO: 43253 - DNA, 42 bp, Homo sapiens
  source 1..42: mol_type = genomic DNA
ttttcacccaggtggcccgggttcgactcccggtatgggaac

SEQ ID NO: 43254 - DNA, 17 bp, Homo sapiens
  source 1..17: mol_type = genomic DNA
ttttcatatcattggtc

SEQ ID NO: 43255 - DNA, 38 bp, Homo sapiens; identical to SEQ ID NO: 31139
  source 1..38: mol_type = genomic DNA

SEQ ID NO: 43256 - DNA, 39 bp, Homo sapiens; identical to SEQ ID NO: 31140
  source 1..39: mol_type = genomic DNA

SEQ ID NO: 43257 - DNA, 40 bp, Homo sapiens; identical to SEQ ID NO: 31141
  source 1..40: mol_type = genomic DNA

SEQ ID NO: 43258 - DNA, 41 bp, Homo sapiens; identical to SEQ ID NO: 31142
  source 1..41: mol_type = genomic DNA

SEQ ID NO: 43259 - DNA, 43 bp, Homo sapiens; identical to SEQ ID NO: 31144
  source 1..43: mol_type = genomic DNA

SEQ ID NO: 43260 - DNA, 44 bp, Homo sapiens; identical to SEQ ID NO: 31145
  source 1..44: mol_type = genomic DNA

SEQ ID NO: 43261 - DNA, 16 bp, Homo sapiens
  source 1..16: mol_type = genomic DNA
ttttccaaggacacca

SEQ ID NO: 43262 - DNA, 16 bp, Homo sapiens
  source 1..16: mol_type = genomic DNA
ttttgcagtccttacc

SEQ ID NO: 43263 - DNA, 18 bp, Homo sapiens
  source 1..18: mol_type = genomic DNA
ttttggattctcagggat

SEQ ID NO: 43264 - DNA, 41 bp, Homo sapiens; identical to SEQ ID NO: 31159
  source 1..41: mol_type = genomic DNA

SEQ ID NO: 43265 - DNA, 42 bp, Homo sapiens; identical to SEQ ID NO: 31160
  source 1..42: mol_type = genomic DNA

SEQ ID NO: 43266 - DNA, 18 bp, Homo sapiens
  source 1..18: mol_type = genomic DNA
tttttcatatcattggtc

SEQ ID NO: 43267 - DNA, 19 bp, Homo sapiens
  source 1..19: mol_type = genomic DNA
tttttcatatcattggtcg

SEQ ID NO: 43268 - DNA, 31 bp, Homo sapiens; identical to SEQ ID NO: 31182
  source 1..31: mol_type = genomic DNA

SEQ ID NO: 43269 - DNA, 33 bp, Homo sapiens; identical to SEQ ID NO: 31184
  source 1..33: mol_type = genomic DNA

SEQ ID NO: 43270 - DNA, 39 bp, Homo sapiens; identical to SEQ ID NO: 31189
  source 1..39: mol_type = genomic DNA

SEQ ID NO: 43271 - DNA, 40 bp, Homo sapiens; identical to SEQ ID NO: 31190
  source 1..40: mol_type = genomic DNA

SEQ ID NO: 43272 - DNA, 41 bp, Homo sapiens; identical to SEQ ID NO: 31191
  source 1..41: mol_type = genomic DNA

SEQ ID NO: 43273 - DNA, 42 bp, Homo sapiens; identical to SEQ ID NO: 31192
  source 1..42: mol_type = genomic DNA

SEQ ID NO: 43274 - DNA, 44 bp, Homo sapiens; identical to SEQ ID NO: 31194
  source 1..44: mol_type = genomic DNA

SEQ ID NO: 43275 - DNA, 45 bp, Homo sapiens; identical to SEQ ID NO: 31195
  source 1..45: mol_type = genomic DNA

SEQ ID NO: 43276 - DNA, 16 bp, Homo sapiens
  source 1..16: mol_type = genomic DNA
tttttccaaggacacc

SEQ ID NO: 43277 - DNA, 17 bp, Homo sapiens
  source 1..17: mol_type = genomic DNA
tttttccaaggacacca

SEQ ID NO: 43278 - DNA, 16 bp, Homo sapiens
  source 1..16: mol_type = genomic DNA
aaaaagtcatggaggc

SEQ ID NO: 43279 - DNA, 17 bp, Homo sapiens
  source 1..17: mol_type = genomic DNA
aaaaagtcatggaggcc

SEQ ID NO: 43280 - DNA, 25 bp, Homo sapiens
  source 1..25: mol_type = genomic DNA
aaaaagtcatggaggccatggggtt

SEQ ID NO: 43281 - DNA, 20 bp, Homo sapiens
  source 1..20: mol_type = genomic DNA
aaaacatcagattgtgaatc

SEQ ID NO: 43282 - DNA, 21 bp, Homo sapiens
  source 1..21: mol_type = genomic DNA
aaaacatcagattgtgaatct

SEQ ID NO: 43283 - DNA, 33 bp, Homo sapiens; identical to SEQ ID NO: 45
  source 1..33: mol_type = genomic DNA

SEQ ID NO: 43284 - DNA, 34 bp, Homo sapiens; identical to SEQ ID NO: 46
  source 1..34: mol_type = genomic DNA

SEQ ID NO: 43285 - DNA, 35 bp, Homo sapiens; identical to SEQ ID NO: 47
  source 1..35: mol_type = genomic DNA

SEQ ID NO: 43286 - DNA, 38 bp, Homo sapiens; identical to SEQ ID NO: 50
  source 1..38: mol_type = genomic DNA

SEQ ID NO: 43287 - DNA, 39 bp, Homo sapiens; identical to SEQ ID NO: 51
  source 1..39: mol_type = genomic DNA

SEQ ID NO: 43288 - DNA, 40 bp, Homo sapiens; identical to SEQ ID NO: 52
  source 1..40: mol_type = genomic DNA

SEQ ID NO: 43289 - DNA, 41 bp, Homo sapiens; identical to SEQ ID NO: 53
  source 1..41: mol_type = genomic DNA

SEQ ID NO: 43290 - DNA, 42 bp, Homo sapiens; identical to SEQ ID NO: 54
  source 1..42: mol_type = genomic DNA

SEQ ID NO: 43291 - DNA, 43 bp, Homo sapiens; identical to SEQ ID NO: 55
  source 1..43: mol_type = genomic DNA

SEQ ID NO: 43292 - DNA, 44 bp, Homo sapiens; identical to SEQ ID NO: 56
  source 1..44: mol_type = genomic DNA

SEQ ID NO: 43293 - DNA, 45 bp, Homo sapiens; identical to SEQ ID NO: 57
  source 1..45: mol_type = genomic DNA

SEQ ID NO: 43294 - DNA, 22 bp, Homo sapiens
  source 1..22: mol_type = genomic DNA
aaaaccatttcataactttgtc

SEQ ID NO: 43295 - DNA, 19 bp, Homo sapiens
  source 1..19: mol_type = genomic DNA
aaaacctttttccaaggac

SEQ ID NO: 43296 - DNA, 20 bp, Homo sapiens
  source 1..20: mol_type = genomic DNA
aaaacctttttccaaggaca

SEQ ID NO: 43297 - DNA, 21 bp, Homo sapiens
  source 1..21: mol_type = genomic DNA
aaaacctttttccaaggacac

SEQ ID NO: 43298 - DNA, 22 bp, Homo sapiens
  source 1..22: mol_type = genomic DNA
aaaacctttttccaaggacacc

SEQ ID NO: 43299 - DNA, 20 bp, Homo sapiens
  source 1..20: mol_type = genomic DNA
aaaacgaatgatttcgactc

SEQ ID NO: 43300 - DNA, 40 bp, Homo sapiens; identical to SEQ ID NO: 91
  source 1..40: mol_type = genomic DNA

SEQ ID NO: 43301 - DNA, 36 bp, Homo sapiens; identical to SEQ ID NO: 104
  source 1..36: mol_type = genomic DNA

SEQ ID NO: 43302 - DNA, 16 bp, Homo sapiens
  source 1..16: mol_type = genomic DNA
aaaagtcatggaggcc

SEQ ID NO: 43303 - DNA, 17 bp, Homo sapiens
  source 1..17: mol_type = genomic DNA
aaaatgttggttatacc

SEQ ID NO: 43304 - DNA, 18 bp, Homo sapiens
  source 1..18: mol_type = genomic DNA
aaaatgttggttataccc

SEQ ID NO: 43305 - DNA, 23 bp, Homo sapiens
  source 1..23: mol_type = genomic DNA
aaaatgttggttatacccttccc

SEQ ID NO: 43306 - DNA, 24 bp, Homo sapiens
  source 1..24: mol_type = genomic DNA
aaaatgttggttatacccttcccg

SEQ ID NO: 43307 - DNA, 28 bp, Homo sapiens
  source 1..28: mol_type = genomic DNA
aaaatgttggttatacccttcccgtact

SEQ ID NO: 43308 - DNA, 29 bp, Homo sapiens
  source 1..29: mol_type = genomic DNA
aaaatgttggttatacccttcccgtacta

SEQ ID NO: 43309 - DNA, 30 bp, Homo sapiens; identical to SEQ ID NO: 130
  source 1..30: mol_type = genomic DNA

SEQ ID NO: 43310 - DNA, 31 bp, Homo sapiens; identical to SEQ ID NO: 131
  source 1..31: mol_type = genomic DNA

SEQ ID NO: 43311 - DNA, 32 bp, Homo sapiens; identical to SEQ ID NO: 132
  source 1..32: mol_type = genomic DNA

SEQ ID NO: 43312 - DNA, 17 bp, Homo sapiens
  source 1..17: mol_type = genomic DNA
aaaatgtttagacgggc

SEQ ID NO: 43313 - DNA, 18 bp, Homo sapiens
  source 1..18: mol_type = genomic DNA
aaaatgtttagacgggct

SEQ ID NO: 43314 - DNA, 19 bp, Homo sapiens
  source 1..19: mol_type = genomic DNA
aaaatgtttagacgggctc

SEQ ID NO: 43315 - DNA, 22 bp, Homo sapiens
  source 1..22: mol_type = genomic DNA
aaaatgtttagacgggctcaca

SEQ ID NO: 43316 - DNA, 27 bp, Homo sapiens
  source 1..27: mol_type = genomic DNA
aaaatgtttagacgggctcacatcacc

SEQ ID NO: 43317 - DNA, 28 bp, Homo sapiens
  source 1..28: mol_type = genomic DNA
aaaatgtttagacgggctcacatcaccc

SEQ ID NO: 43318 - DNA, 29 bp, Homo sapiens
  source 1..29: mol_type = genomic DNA
aaaatgtttagacgggctcacatcacccc

SEQ ID NO: 43319 - DNA, 32 bp, Homo sapiens; identical to SEQ ID NO: 149
  source 1..32: mol_type = genomic DNA

SEQ ID NO: 43320 - DNA, 38 bp, Homo sapiens; identical to SEQ ID NO: 154
  source 1..38: mol_type = genomic DNA

SEQ ID NO: 43321 - DNA, 39 bp, Homo sapiens; identical to SEQ ID NO: 155
  source 1..39: mol_type = genomic DNA

SEQ ID NO: 43322 - DNA, 21 bp, Homo sapiens
  source 1..21: mol_type = genomic DNA
aaacaggagatcctgggttcg

SEQ ID NO: 43323 - DNA, 37 bp, Homo sapiens; identical to SEQ ID NO: 185
  source 1..37: mol_type = genomic DNA

SEQ ID NO: 43324 - DNA, 16 bp, Homo sapiens
  source 1..16: mol_type = genomic DNA
aaacatcagattgtga

SEQ ID NO: 43325 - DNA, 19 bp, Homo sapiens
  source 1..19: mol_type = genomic DNA
aaacatcagattgtgaatc

SEQ ID NO: 43326 - DNA, 20 bp, Homo sapiens
  source 1..20: mol_type = genomic DNA
aaacatcagattgtgaatct

SEQ ID NO: 43327 - DNA, 29 bp, Homo sapiens
  source 1..29: mol_type = genomic DNA
aaacatcagattgtgaatctgacaacaga

SEQ ID NO: 43328 - DNA, 32 bp, Homo sapiens; identical to SEQ ID NO: 206
  source 1..32: mol_type = genomic DNA

SEQ ID NO: 43329 - DNA, 33 bp, Homo sapiens; identical to SEQ ID NO: 207
  source 1..33: mol_type = genomic DNA

SEQ ID NO: 43330 - DNA, 34 bp, Homo sapiens; identical to SEQ ID NO: 208
  source 1..34: mol_type = genomic DNA

SEQ ID NO: 43331 - DNA, 37 bp, Homo sapiens; identical to SEQ ID NO: 211
  source 1..37: mol_type = genomic DNA

SEQ ID NO: 43332 - DNA, 40 bp, Homo sapiens; identical to SEQ ID NO: 214
  source 1..40: mol_type = genomic DNA

SEQ ID NO: 43333 - DNA, 41 bp, Homo sapiens; identical to SEQ ID NO: 215
  source 1..41: mol_type = genomic DNA

SEQ ID NO: 43334 - DNA, 42 bp, Homo sapiens; identical to SEQ ID NO: 216
  source 1..42: mol_type = genomic DNA

SEQ ID NO: 43335 - DNA, 43 bp, Homo sapiens; identical to SEQ ID NO: 217
  source 1..43: mol_type = genomic DNA

SEQ ID NO: 43336 - DNA, 44 bp, Homo sapiens; identical to SEQ ID NO: 218
  source 1..44: mol_type = genomic DNA

SEQ ID NO: 43337 - DNA, 45 bp, Homo sapiens; identical to SEQ ID NO: 219
  source 1..45: mol_type = genomic DNA

SEQ ID NO: 43338 - DNA, 18 bp, Homo sapiens
  source 1..18: mol_type = genomic DNA
aaaccatcctctgctacc

SEQ ID NO: 43339 - DNA, 19 bp, Homo sapiens
  source 1..19: mol_type = genomic DNA
aaaccatcctctgctacca

SEQ ID NO: 43340 - DNA, 28 bp, Homo sapiens
  source 1..28: mol_type = genomic DNA
aaaccatttcataactttgtcaaagtta

SEQ ID NO: 43341 - DNA, 37 bp, Homo sapiens; identical to SEQ ID NO: 252
  source 1..37: mol_type = genomic DNA

SEQ ID NO: 43342 - DNA, 21 bp, Homo sapiens
  source 1..21: mol_type = genomic DNA
aaaccgaagatcgcgggttcg

SEQ ID NO: 43343 - DNA, 37 bp, Homo sapiens; identical to SEQ ID NO: 262
  source 1..37: mol_type = genomic DNA

SEQ ID NO: 43344 - DNA, 17 bp, Homo sapiens
  source 1..17: mol_type = genomic DNA
aaaccgggcagaagcac

SEQ ID NO: 43345 - DNA, 18 bp, Homo sapiens
  source 1..18: mol_type = genomic DNA
aaaccgggcagaagcacc

SEQ ID NO: 43346 - DNA, 19 bp, Homo sapiens
  source 1..19: mol_type = genomic DNA
aaaccgggcagaagcacca

SEQ ID NO: 43347 - DNA, 16 bp, Homo sapiens
  source 1..16: mol_type = genomic DNA
aaaccgggcggaaaca

SEQ ID NO: 43348 - DNA, 17 bp, Homo sapiens
  source 1..17: mol_type = genomic DNA
aaaccgggcggaaacac

SEQ ID NO: 43349 - DNA, 18 bp, Homo sapiens
  source 1..18: mol_type = genomic DNA
aaaccgggcggaaacacc

SEQ ID NO: 43350 - DNA, 19 bp, Homo sapiens
  source 1..19: mol_type = genomic DNA
aaaccgggcggaaacacca

SEQ ID NO: 43351 - DNA, 16 bp, Homo sapiens
  source 1..16: mol_type = genomic DNA
aaacctgccggggctt

SEQ ID NO: 43352 - DNA, 17 bp, Homo sapiens
  source 1..17: mol_type = genomic DNA
aaacctgccggggcttc

SEQ ID NO: 43353 - DNA, 18 bp, Homo sapiens
  source 1..18: mol_type = genomic DNA
aaacctgccggggcttcc

SEQ ID NO: 43354 - DNA, 19 bp, Homo sapiens
  source 1..19: mol_type = genomic DNA
aaacctgccggggcttcca

SEQ ID NO: 43355 - DNA, 18 bp, Homo sapiens
  source 1..18: mol_type = genomic DNA
aaacctttttccaaggac

SEQ ID NO: 43356 - DNA, 20 bp, Homo sapiens
  source 1..20: mol_type = genomic DNA
aaacctttttccaaggacac

SEQ ID NO: 43357 - DNA, 18 bp, Homo sapiens
  source 1..18: mol_type = genomic DNA
aaacgaatgatttcgact

SEQ ID NO: 43358 - DNA, 19 bp, Homo sapiens
  source 1..19: mol_type = genomic DNA
aaacgaatgatttcgactc

SEQ ID NO: 43359 - DNA, 16 bp, Homo sapiens
  source 1..16: mol_type = genomic DNA
aaagactttttctctg

SEQ ID NO: 43360 - DNA, 17 bp, Homo sapiens
  source 1..17: mol_type = genomic DNA
aaagactttttctctga

SEQ ID NO: 43361 - DNA, 18 bp, Homo sapiens
  source 1..18: mol_type = genomic DNA
aaagactttttctctgac

SEQ ID NO: 43362 - DNA, 19 bp, Homo sapiens
  source 1..19: mol_type = genomic DNA
aaagactttttctctgacc

SEQ ID NO: 43363 - DNA, 20 bp, Homo sapiens
  source 1..20: mol_type = genomic DNA
aaagactttttctctgacca

SEQ ID NO: 43364 - DNA, 16 bp, Homo sapiens
  source 1..16: mol_type = genomic DNA
aaagattaagagaacc

SEQ ID NO: 43365 - DNA, 35 bp, Homo sapiens; identical to SEQ ID NO: 362
  source 1..35: mol_type = genomic DNA

SEQ ID NO: 43366 - DNA, 36 bp, Homo sapiens; identical to SEQ ID NO: 363
  source 1..36: mol_type = genomic DNA

SEQ ID NO: 43367 - DNA, 37 bp, Homo sapiens; identical to SEQ ID NO: 364
  source 1..37: mol_type = genomic DNA

SEQ ID NO: 43368 - DNA, 32 bp, Homo sapiens; identical to SEQ ID NO: 370
  source 1..32: mol_type = genomic DNA

SEQ ID NO: 43369 - DNA, 33 bp, Homo sapiens; identical to SEQ ID NO: 371
  source 1..33: mol_type = genomic DNA

SEQ ID NO: 43370 - DNA, 34 bp, Homo sapiens; identical to SEQ ID NO: 372
  source 1..34: mol_type = genomic DNA

SEQ ID NO: 43371 - DNA, 43 bp, Homo sapiens; identical to SEQ ID NO: 380
  source 1..43: mol_type = genomic DNA

SEQ ID NO: 43372 - DNA, 23 bp, Homo sapiens
  source 1..23: mol_type = genomic DNA
aaagctcacaagaactgctaact

SEQ ID NO: 43373 - DNA, 30 bp, Homo sapiens; identical to SEQ ID NO: 413
  source 1..30: mol_type = genomic DNA

SEQ ID NO: 43374 - DNA, 16 bp, Homo sapiens
  source 1..16: mol_type = genomic DNA
aaaggtccccggttcg

SEQ ID NO: 43375 - DNA, 21 bp, Homo sapiens
  source 1..21: mol_type = genomic DNA
aaaggtccccggttcgaaacc

SEQ ID NO: 43376 - DNA, 31 bp, Homo sapiens; identical to SEQ ID NO: 438
  source 1..31: mol_type = genomic DNA

SEQ ID NO: 43377 - DNA, 32 bp, Homo sapiens; identical to SEQ ID NO: 31308
  source 1..32: mol_type = genomic DNA

SEQ ID NO: 43378 - DNA, 16 bp, Homo sapiens
  source 1..16: mol_type = genomic DNA
aaaggtccctggttcg

SEQ ID NO: 43379 - DNA, 33 bp, Homo sapiens; identical to SEQ ID NO: 444
  source 1..33: mol_type = genomic DNA

SEQ ID NO: 43380 - DNA, 34 bp, Homo sapiens; identical to SEQ ID NO: 445
  source 1..34: mol_type = genomic DNA

SEQ ID NO: 43381 - DNA, 35 bp, Homo sapiens; identical to SEQ ID NO: 446
  source 1..35: mol_type = genomic DNA

SEQ ID NO: 43382 - DNA, 33 bp, Homo sapiens; identical to SEQ ID NO: 449
  source 1..33: mol_type = genomic DNA

SEQ ID NO: 43383 - DNA, 34 bp, Homo sapiens; identical to SEQ ID NO: 450
  source 1..34: mol_type = genomic DNA

SEQ ID NO: 43384 - DNA, 16 bp, Homo sapiens
  source 1..16: mol_type = genomic DNA
aaaggttggtggttcg

SEQ ID NO: 43385 - DNA, 31 bp, Homo sapiens; identical to SEQ ID NO: 453
  source 1..31: mol_type = genomic DNA

SEQ ID NO: 43386 - DNA, 34 bp, Homo sapiens; identical to SEQ ID NO: 455
  source 1..34: mol_type = genomic DNA

SEQ ID NO: 43387 - DNA, 33 bp, Homo sapiens; identical to SEQ ID NO: 458
  source 1..33: mol_type = genomic DNA

SEQ ID NO: 43388 - DNA, 34 bp, Homo sapiens; identical to SEQ ID NO: 459
  source 1..34: mol_type = genomic DNA

SEQ ID NO: 43389 - DNA, 34 bp, Homo sapiens; identical to SEQ ID NO: 462
  source 1..34: mol_type = genomic DNA

SEQ ID NO: 43390 - DNA, 18 bp, Homo sapiens
  source 1..18: mol_type = genomic DNA
aaagttaaattataggct

SEQ ID NO: 43391 - DNA, 16 bp, Homo sapiens
  source 1..16: mol_type = genomic DNA
aaataagctatcgggc

SEQ ID NO: 43392 - DNA, 18 bp, Homo sapiens
  source 1..18: mol_type = genomic DNA
aaataagctatcgggccc

SEQ ID NO: 43393 - DNA, 19 bp, Homo sapiens
  source 1..19: mol_type = genomic DNA
aaataagctatcgggccca

SEQ ID NO: 43394 - DNA, 27 bp, Homo sapiens
  source 1..27: mol_type = genomic DNA
aaataagctatcgggcccataccccga

SEQ ID NO: 43395 - DNA, 28 bp, Homo sapiens
  source 1..28: mol_type = genomic DNA
aaataagctatcgggcccataccccgaa

SEQ ID NO: 43396 - DNA, 29 bp, Homo sapiens
  source 1..29: mol_type = genomic DNA
aaataagctatcgggcccataccccgaaa

SEQ ID NO: 43397 - DNA, 30 bp, Homo sapiens; identical to SEQ ID NO: 500
  source 1..30: mol_type = genomic DNA

SEQ ID NO: 43398 - DNA, 21 bp, Homo sapiens
  source 1..21: mol_type = genomic DNA
aaataataggagcttaaaccc

SEQ ID NO: 43399 - DNA, 35 bp, Homo sapiens; identical to SEQ ID NO: 529
  source 1..35: mol_type = genomic DNA

SEQ ID NO: 43400 - DNA, 19 bp, Homo sapiens
  source 1..19: mol_type = genomic DNA
aaatcacgtcggggtcacc

SEQ ID NO: 43401 - DNA, 20 bp, Homo sapiens
  source 1..20: mol_type = genomic DNA
aaatcacgtcggggtcacca

SEQ ID NO: 43402 - DNA, 16 bp, Homo sapiens
  source 1..16: mol_type = genomic DNA
aaatcccggacgagcc

SEQ ID NO: 43403 - DNA, 17 bp, Homo sapiens
  source 1..17: mol_type = genomic DNA
aaatcccggacgagccc

SEQ ID NO: 43404 - DNA, 18 bp, Homo sapiens
  source 1..18: mol_type = genomic DNA
aaatcccggacgagcccc

SEQ ID NO: 43405 - DNA, 19 bp, Homo sapiens
  source 1..19: mol_type = genomic DNA
aaatcccggacgagccccc

SEQ ID NO: 43406 - DNA, 20 bp, Homo sapiens
  source 1..20: mol_type = genomic DNA
aaatcccggacgagccccca

SEQ ID NO: 43407 - DNA, 18 bp, Homo sapiens
  source 1..18: mol_type = genomic DNA
aaatctcgctggggcctc

SEQ ID NO: 43408 - DNA, 19 bp, Homo sapiens
  source 1..19: mol_type = genomic DNA
aaatctcgctggggcctcc

SEQ ID NO: 43409 - DNA, 16 bp, Homo sapiens
  source 1..16: mol_type = genomic DNA
aaatctcggtggaacc

SEQ ID NO: 43410 - DNA, 17 bp, Homo sapiens
  source 1..17: mol_type = genomic DNA
aaatctcggtggaacct

SEQ ID NO: 43411 - DNA, 18 bp, Homo sapiens
  source 1..18: mol_type = genomic DNA
aaatctcggtggaacctc

SEQ ID NO: 43412 - DNA, 19 bp, Homo sapiens
  source 1..19: mol_type = genomic DNA
aaatctcggtggaacctcc

SEQ ID NO: 43413 - DNA, 20 bp, Homo sapiens
  source 1..20: mol_type = genomic DNA
aaatctcggtggaacctcca

SEQ ID NO: 43414 - DNA, 17 bp, Homo sapiens
  source 1..17: mol_type = genomic DNA
aaatctcggtgggacct

SEQ ID NO: 43415 - DNA, 18 bp, Homo sapiens
  source 1..18: mol_type = genomic DNA
aaatctcggtgggacctc

SEQ ID NO: 43416 - DNA, 19 bp, Homo sapiens
  source 1..19: mol_type = genomic DNA
aaatctcggtgggacctcc

SEQ ID NO: 43417 - DNA, 18 bp, Homo sapiens
  source 1..18: mol_type = genomic DNA
aaatggtagagcgctcgc

SEQ ID NO: 43418 - DNA, 28 bp, Homo sapiens
  source 1..28: mol_type = genomic DNA
aaatgttggttatacccttcccgtacta

SEQ ID NO: 43419 - DNA, 29 bp, Homo sapiens
  source 1..29: mol_type = genomic DNA
aaatgttggttatacccttcccgtactac

SEQ ID NO: 43420 - DNA, 30 bp, Homo sapiens; identical to SEQ ID NO: 627
  source 1..30: mol_type = genomic DNA

SEQ ID NO: 43421 - DNA, 31 bp, Homo sapiens; identical to SEQ ID NO: 628
  source 1..31: mol_type = genomic DNA

SEQ ID NO: 43422 - DNA, 16 bp, Homo sapiens
  source 1..16: mol_type = genomic DNA
aaatgtttagacgggc

SEQ ID NO: 43423 - DNA, 17 bp, Homo sapiens
  source 1..17: mol_type = genomic DNA
aaatgtttagacgggct

SEQ ID NO: 43424 - DNA, 18 bp, Homo sapiens
  source 1..18: mol_type = genomic DNA
aaatgtttagacgggctc

SEQ ID NO: 43425 - DNA, 26 bp, Homo sapiens
  source 1..26: mol_type = genomic DNA
aaatgtttagacgggctcacatcacc

SEQ ID NO: 43426 - DNA, 27 bp, Homo sapiens
  source 1..27: mol_type = genomic DNA
aaatgtttagacgggctcacatcaccc

SEQ ID NO: 43427 - DNA, 29 bp, Homo sapiens
  source 1..29: mol_type = genomic DNA
aaatgtttagacgggctcacatcacccca

SEQ ID NO: 43428 - DNA, 35 bp, Homo sapiens; identical to SEQ ID NO: 680
  source 1..35: mol_type = genomic DNA

SEQ ID NO: 43429 - DNA, 36 bp, Homo sapiens; identical to SEQ ID NO: 681
  source 1..36: mol_type = genomic DNA

SEQ ID NO: 43430 - DNA, 22 bp, Homo sapiens
  source 1..22: mol_type = genomic DNA
aacaaaacgaatgatttcgact

SEQ ID NO: 43431 - DNA, 20 bp, Homo sapiens
  source 1..20: mol_type = genomic DNA
aacaacatggctttctcacc

SEQ ID NO: 43432 - DNA, 37 bp, Homo sapiens
  source 1..37: mol_type = genomic DNA
aacacaaagcacccaacttacacttaggagatttcaa

SEQ ID NO: 43433 - DNA, 18 bp, Homo sapiens
  source 1..18: mol_type = genomic DNA
aacacctctttacagtga

SEQ ID NO: 43434 - DNA, 19 bp, Homo sapiens
  source 1..19: mol_type = genomic DNA
aacacctctttacagtgac

SEQ ID NO: 43435 - DNA, 20 bp, Homo sapiens
  source 1..20: mol_type = genomic DNA
aacacctctttacagtgacc

SEQ ID NO: 43436 - DNA, 16 bp, Homo sapiens
  source 1..16: mol_type = genomic DNA
aacagaggcttacgac

SEQ ID NO: 43437 - DNA, 17 bp, Homo sapiens
  source 1..17: mol_type = genomic DNA
aacagaggcttacgacc

SEQ ID NO: 43438 - DNA, 30 bp, Homo sapiens; identical to SEQ ID NO: 746
  source 1..30: mol_type = genomic DNA

SEQ ID NO: 43439 - DNA, 31 bp, Homo sapiens; identical to SEQ ID NO: 747
  source 1..31: mol_type = genomic DNA

SEQ ID NO: 43440 - DNA, 18 bp, Homo sapiens
  source 1..18: mol_type = genomic DNA
aacagctatccattggtc

SEQ ID NO: 43441 - DNA, 34 bp, Homo sapiens; identical to SEQ ID NO: 771
  source 1..34: mol_type = genomic DNA

SEQ ID NO: 43442 - DNA, 36 bp, Homo sapiens; identical to SEQ ID NO: 773
  source 1..36: mol_type = genomic DNA

SEQ ID NO: 43443 - DNA, 37 bp, Homo sapiens; identical to SEQ ID NO: 774
  source 1..37: mol_type = genomic DNA

SEQ ID NO: 43444 - DNA, 38 bp, Homo sapiens; identical to SEQ ID NO: 775
  source 1..38: mol_type = genomic DNA

SEQ ID NO: 43445 - DNA, 33 bp, Homo sapiens; identical to SEQ ID NO: 776
  source 1..33: mol_type = genomic DNA

SEQ ID NO: 43446 - DNA, 34 bp, Homo sapiens; identical to SEQ ID NO: 777
  source 1..34: mol_type = genomic DNA

SEQ ID NO: 43447 - DNA, 35 bp, Homo sapiens; identical to SEQ ID NO: 778
  source 1..35: mol_type = genomic DNA

SEQ ID NO: 43448 - DNA, 36 bp, Homo sapiens; identical to SEQ ID NO: 779
  source 1..36: mol_type = genomic DNA

SEQ ID NO: 43449 - DNA, 38 bp, Homo sapiens; identical to SEQ ID NO: 781
  source 1..38: mol_type = genomic DNA

SEQ ID NO: 43450 - DNA, 18 bp, Homo sapiens
  source 1..18: mol_type = genomic DNA
aacatcagattgtgaatc

SEQ ID NO: 43451 - DNA, 31 bp, Homo sapiens; identical to SEQ ID NO: 800
  source 1..31: mol_type = genomic DNA

SEQ ID NO: 43452 - DNA, 32 bp, Homo sapiens; identical to SEQ ID NO: 801
  source 1..32: mol_type = genomic DNA

SEQ ID NO: 43453 - DNA, 36 bp, Homo sapiens; identical to SEQ ID NO: 805
  source 1..36: mol_type = genomic DNA

SEQ ID NO: 43454 - DNA, 37 bp, Homo sapiens; identical to SEQ ID NO: 806
  source 1..37: mol_type = genomic DNA

SEQ ID NO: 43455 - DNA, 39 bp, Homo sapiens; identical to SEQ ID NO: 808
  source 1..39: mol_type = genomic DNA

SEQ ID NO: 43456 - DNA, 40 bp, Homo sapiens; identical to SEQ ID NO: 809
  source 1..40: mol_type = genomic DNA

SEQ ID NO: 43457 - DNA, 41 bp, Homo sapiens; identical to SEQ ID NO: 810
  source 1..41: mol_type = genomic DNA

SEQ ID NO: 43458 - DNA, 42 bp, Homo sapiens; identical to SEQ ID NO: 811
  source 1..42: mol_type = genomic DNA

SEQ ID NO: 43459 - DNA, 43 bp, Homo sapiens; identical to SEQ ID NO: 812
  source 1..43: mol_type = genomic DNA

SEQ ID NO: 43460 - DNA, 17 bp, Homo sapiens
  source 1..17: mol_type = genomic DNA
aacatggctttctcacc

SEQ ID NO: 43461 - DNA, 23 bp, Homo sapiens
  source 1..23: mol_type = genomic DNA
aaccaaaacatcagattgtgaat

SEQ ID NO: 43462 - DNA, 36 bp, Homo sapiens; identical to SEQ ID NO: 840
  source 1..36: mol_type = genomic DNA

SEQ ID NO: 43463 - DNA, 37 bp, Homo sapiens; identical to SEQ ID NO: 841
  source 1..37: mol_type = genomic DNA

SEQ ID NO: 43464 - DNA, 38 bp, Homo sapiens; identical to SEQ ID NO: 842
  source 1..38: mol_type = genomic DNA

SEQ ID NO: 43465 - DNA, 23 bp, Homo sapiens
  source 1..23: mol_type = genomic DNA
aaccaacacctctttacagtgac

SEQ ID NO: 43466 - DNA, 24 bp, Homo sapiens
  source 1..24: mol_type = genomic DNA
aaccaacacctctttacagtgacc

SEQ ID NO: 43467 - DNA, 25 bp, Homo sapiens
  source 1..25: mol_type = genomic DNA
aaccaacacctctttacagtgacca

SEQ ID NO: 43468 - DNA, 36 bp, Homo sapiens; identical to SEQ ID NO: 869
  source 1..36: mol_type = genomic DNA

SEQ ID NO: 43469 - DNA, 17 bp, Homo sapiens
  source 1..17: mol_type = genomic DNA
aaccatcctctgctacc

SEQ ID NO: 43470 - DNA, 18 bp, Homo sapiens
  source 1..18: mol_type = genomic DNA
aaccatcctctgctacca

SEQ ID NO: 43471 - DNA, 20 bp, Homo sapiens
  source 1..20: mol_type = genomic DNA
aacccagaggtcgatggatc

SEQ ID NO: 43472 - DNA, 21 bp, Homo sapiens
  source 1..21: mol_type = genomic DNA
aacccagaggtcgatggatcg

SEQ ID NO: 43473 - DNA, 22 bp, Homo sapiens
  source 1..22: mol_type = genomic DNA
aacccagaggtcgatggatcga

SEQ ID NO: 43474 - DNA, 18 bp, Homo sapiens
  source 1..18: mol_type = genomic DNA
aaccccactcctggtacc

SEQ ID NO: 43475 - DNA, 19 bp, Homo sapiens
  source 1..19: mol_type = genomic DNA
aaccccactcctggtacca

SEQ ID NO: 43476 - DNA, 19 bp, Homo sapiens
  source 1..19: mol_type = genomic DNA
aaccctgctcgctgcgcca

SEQ ID NO: 43477 - DNA, 39 bp, Homo sapiens; identical to SEQ ID NO: 913
  source 1..39: mol_type = genomic DNA

SEQ ID NO: 43478 - DNA, 35 bp, Homo sapiens; identical to SEQ ID NO: 31426
  source 1..35: mol_type = genomic DNA

SEQ ID NO: 43479 - DNA, 36 bp, Homo sapiens; identical to SEQ ID NO: 918
  source 1..36: mol_type = genomic DNA

SEQ ID NO: 43480 - DNA, 37 bp, Homo sapiens; identical to SEQ ID NO: 919
  source 1..37: mol_type = genomic DNA

SEQ ID NO: 43481 - DNA, 35 bp, Homo sapiens
  source 1..35: mol_type = genomic DNA
aaccgaagatcgcgggttcgaaccccgtccgtgcc

SEQ ID NO: 43482 - DNA, 36 bp, Homo sapiens; identical to SEQ ID NO: 929
  source 1..36: mol_type = genomic DNA

SEQ ID NO: 43483 - DNA, 37 bp, Homo sapiens; identical to SEQ ID NO: 930
  source 1..37: mol_type = genomic DNA

SEQ ID NO: 43484 - DNA, 38 bp, Homo sapiens; identical to SEQ ID NO: 931
  source 1..38: mol_type = genomic DNA

SEQ ID NO: 43485 - DNA, 16 bp, Homo sapiens
  source 1..16: mol_type = genomic DNA
aaccgagcggaaacac

SEQ ID NO: 43486 - DNA, 30 bp, Homo sapiens; identical to SEQ ID NO: 946
  source 1..30: mol_type = genomic DNA

SEQ ID NO: 43487 - DNA, 32 bp, Homo sapiens; identical to SEQ ID NO: 948
  source 1..32: mol_type = genomic DNA

SEQ ID NO: 43488 - DNA, 33 bp, Homo sapiens; identical to SEQ ID NO: 949
  source 1..33: mol_type = genomic DNA

SEQ ID NO: 43489 - DNA, 34 bp, Homo sapiens; identical to SEQ ID NO: 950
  source 1..34: mol_type = genomic DNA

SEQ ID NO: 43490 - DNA, 17 bp, Homo sapiens
  source 1..17: mol_type = genomic DNA
aaccgggcagaaacacc

SEQ ID NO: 43491 - DNA, 16 bp, Homo sapiens
  source 1..16: mol_type = genomic DNA
aaccgggcagaagcac

SEQ ID NO: 43492 - DNA, 17 bp, Homo sapiens
  source 1..17: mol_type = genomic DNA
aaccgggcagaagcacc

SEQ ID NO: 43493 - DNA, 18 bp, Homo sapiens
  source 1..18: mol_type = genomic DNA
aaccgggcagaagcacca

SEQ ID NO: 43494 - DNA, 16 bp, Homo sapiens
  source 1..16: mol_type = genomic DNA
aaccgggcggaaacac

SEQ ID NO: 43495 - DNA, 17 bp, Homo sapiens
  source 1..17: mol_type = genomic DNA
aaccgggcggaaacacc

SEQ ID NO: 43496 - DNA, 18 bp, Homo sapiens
  source 1..18: mol_type = genomic DNA
aaccgggcggaaacacca

SEQ ID NO: 43497 - DNA, 18 bp, Homo sapiens
  source 1..18: mol_type = genomic DNA
aacctcagagggggcacc

SEQ ID NO: 43498 - DNA, 18 bp, Homo sapiens
  source 1..18: mol_type = genomic DNA
aacctcggttcgaatccg

SEQ ID NO: 43499 - DNA, 29 bp, Homo sapiens
  source 1..29: mol_type = genomic DNA
aacctcggttcgaatccgagtcacggcac

SEQ ID NO: 43500 - DNA, 16 bp, Homo sapiens
  source 1..16: mol_type = genomic DNA
aacctgccggggcttc

SEQ ID NO: 43501 - DNA, 17 bp, Homo sapiens
  source 1..17: mol_type = genomic DNA
aacctgccggggcttcc

SEQ ID NO: 43502 - DNA, 17 bp, Homo sapiens
  source 1..17: mol_type = genomic DNA
aacctttttccaaggac

SEQ ID NO: 43503 - DNA, 17 bp, Homo sapiens
  source 1..17: mol_type = genomic DNA
aacgaatgatttcgact

SEQ ID NO: 43504 - DNA, 18 bp, Homo sapiens
  source 1..18: mol_type = genomic DNA
aacgaatgatttcgactc

SEQ ID NO: 43505 - DNA, 39 bp, Homo sapiens; identical to SEQ ID NO: 1012
  source 1..39: mol_type = genomic DNA

SEQ ID NO: 43506 - DNA, 47 bp, Homo sapiens; identical to SEQ ID NO: 1019
  source 1..47: mol_type = genomic DNA

SEQ ID NO: 43507 - DNA, 39 bp, Homo sapiens; identical to SEQ ID NO: 1022
  source 1..39: mol_type = genomic DNA

SEQ ID NO: 43508 - DNA, 31 bp, Homo sapiens; identical to SEQ ID NO: 1069
  source 1..31: mol_type = genomic DNA

SEQ ID NO: 43509 - DNA, 32 bp, Homo sapiens; identical to SEQ ID NO: 1070
  source 1..32: mol_type = genomic DNA

SEQ ID NO: 43510 - DNA, 39 bp, Homo sapiens; identical to SEQ ID NO: 1077
  source 1..39: mol_type = genomic DNA

SEQ ID NO: 43511 - DNA, 40 bp, Homo sapiens; identical to SEQ ID NO: 1078
  source 1..40: mol_type = genomic DNA

SEQ ID NO: 43512 - DNA, 33 bp, Homo sapiens; identical to SEQ ID NO: 1100
  source 1..33: mol_type = genomic DNA

SEQ ID NO: 43513 - DNA, 36 bp, Homo sapiens; identical to SEQ ID NO: 1103
  source 1..36: mol_type = genomic DNA

SEQ ID NO: 43514 - DNA, 37 bp, Homo sapiens; identical to SEQ ID NO: 1104
  source 1..37: mol_type = genomic DNA

SEQ ID NO: 43515 - DNA, 38 bp, Homo sapiens; identical to SEQ ID NO: 1105
  source 1..38: mol_type = genomic DNA

SEQ ID NO: 43516 - DNA, 44 bp, Homo sapiens; identical to SEQ ID NO: 1111
  source 1..44: mol_type = genomic DNA

SEQ ID NO: 43517 - DNA, 46 bp, Homo sapiens; identical to SEQ ID NO: 1113
  source 1..46: mol_type = genomic DNA

SEQ ID NO: 43518 - DNA, 47 bp, Homo sapiens; identical to SEQ ID NO: 1114
  source 1..47: mol_type = genomic DNA

SEQ ID NO: 43519 - DNA, 17 bp, Homo sapiens
  source 1..17: mol_type = genomic DNA
aactgggcggaaacacc

SEQ ID NO: 43520 - DNA, 38 bp, Homo sapiens; identical to SEQ ID NO: 1126
  source 1..38: mol_type = genomic DNA

SEQ ID NO: 43521 - DNA, 17 bp, Homo sapiens
  source 1..17: mol_type = genomic DNA
aacttaacttgaccgct

SEQ ID NO: 43522 - DNA, 18 bp, Homo sapiens
  source 1..18: mol_type = genomic DNA
aacttaacttgaccgctc

SEQ ID NO: 43523 - DNA, 20 bp, Homo sapiens
  source 1..20: mol_type = genomic DNA
aacttaacttgaccgctctg

SEQ ID NO: 43524 - DNA, 21 bp, Homo sapiens
  source 1..21: mol_type = genomic DNA
aacttaacttgaccgctctga

SEQ ID NO: 43525 - DNA, 22 bp, Homo sapiens
  source 1..22: mol_type = genomic DNA
aacttaacttgaccgctctgac

SEQ ID NO: 43526 - DNA, 23 bp, Homo sapiens
  source 1..23: mol_type = genomic DNA
aacttaacttgaccgctctgacc

SEQ ID NO: 43527 - DNA, 24 bp, Homo sapiens
  source 1..24: mol_type = genomic DNA
aacttaacttgaccgctctgacca

SEQ ID NO: 43528 - DNA, 16 bp, Homo sapiens
  source 1..16: mol_type = genomic DNA
aacttacacttaggag

SEQ ID NO: 43529 - DNA, 35 bp, Homo sapiens; identical to SEQ ID NO: 1156
  source 1..35: mol_type = genomic DNA

SEQ ID NO: 43530 - DNA, 39 bp, Homo sapiens; identical to SEQ ID NO: 1160
  source 1..39: mol_type = genomic DNA

SEQ ID NO: 43531 - DNA, 40 bp, Homo sapiens; identical to SEQ ID NO: 1161
  source 1..40: mol_type = genomic DNA

SEQ ID NO: 43532 - DNA, 41 bp, Homo sapiens; identical to SEQ ID NO: 1162
  source 1..41: mol_type = genomic DNA

SEQ ID NO: 43533 - DNA, 42 bp, Homo sapiens; identical to SEQ ID NO: 1163
  source 1..42: mol_type = genomic DNA

SEQ ID NO: 43534 - DNA, 43 bp, Homo sapiens; identical to SEQ ID NO: 1164
  source 1..43: mol_type = genomic DNA

SEQ ID NO: 43535 - DNA, 44 bp, Homo sapiens; identical to SEQ ID NO: 1165
  source 1..44: mol_type = genomic DNA

SEQ ID NO: 43536 - DNA, 45 bp, Homo sapiens; identical to SEQ ID NO: 1166
  source 1..45: mol_type = genomic DNA

SEQ ID NO: 43537 - DNA, 16 bp, Homo sapiens
  source 1..16: mol_type = genomic DNA
aacttgaccgctctga

SEQ ID NO: 43538 - DNA, 17 bp, Homo sapiens
  source 1..17: mol_type = genomic DNA
aacttgaccgctctgac

SEQ ID NO: 43539 - DNA, 18 bp, Homo sapiens
  source 1..18: mol_type = genomic DNA
aacttgaccgctctgacc

SEQ ID NO: 43540 - DNA, 19 bp, Homo sapiens
  source 1..19: mol_type = genomic DNA
aacttgaccgctctgacca

SEQ ID NO: 43541 - DNA, 27 bp, Homo sapiens
  source 1..27: mol_type = genomic DNA
aactttgtcaaagttaaattataggct

SEQ ID NO: 43542 - DNA, 20 bp, Homo sapiens
  source 1..20: mol_type = genomic DNA
aagaactgctaactcatgcc

SEQ ID NO: 43543 - DNA, 22 bp, Homo sapiens
  source 1..22: mol_type = genomic DNA
aagaactgctaactcatgcccc

SEQ ID NO: 43544 - DNA, 23 bp, Homo sapiens
  source 1..23: mol_type = genomic DNA
aagaactgctaactcatgccccc

SEQ ID NO: 43545 - DNA, 25 bp, Homo sapiens
  source 1..25: mol_type = genomic DNA
aagaactgctaactcatgcccccat

SEQ ID NO: 43546 - DNA, 26 bp, Homo sapiens
  source 1..26: mol_type = genomic DNA
aagaactgctaactcatgcccccatg

SEQ ID NO: 43547 - DNA, 27 bp, Homo sapiens
  source 1..27: mol_type = genomic DNA
aagaactgctaactcatgcccccatgt

SEQ ID NO: 43548 - DNA, 28 bp, Homo sapiens
  source 1..28: mol_type = genomic DNA
aagaactgctaactcatgcccccatgtc

SEQ ID NO: 43549 - DNA, 29 bp, Homo sapiens
  source 1..29: mol_type = genomic DNA
aagaactgctaactcatgcccccatgtct

SEQ ID NO: 43550 - DNA, 30 bp, Homo sapiens; identical to SEQ ID NO: 1227
  source 1..30: mol_type = genomic DNA

SEQ ID NO: 43551 - DNA, 32 bp, Homo sapiens; identical to SEQ ID NO: 1229
  source 1..32: mol_type = genomic DNA

SEQ ID NO: 43552 - DNA, 33 bp, Homo sapiens; identical to SEQ ID NO: 1230
  source 1..33: mol_type = genomic DNA

SEQ ID NO: 43553 - DNA, 36 bp, Homo sapiens; identical to SEQ ID NO: 1233
  source 1..36: mol_type = genomic DNA

SEQ ID NO: 43554 - DNA, 38 bp, Homo sapiens; identical to SEQ ID NO: 1235
  source 1..38: mol_type = genomic DNA

SEQ ID NO: 43555 - DNA, 39 bp, Homo sapiens; identical to SEQ ID NO: 1236
  source 1..39: mol_type = genomic DNA

SEQ ID NO: 43556 - DNA, 40 bp, Homo sapiens; identical to SEQ ID NO: 1237
  source 1..40: mol_type = genomic DNA

SEQ ID NO: 43557 - DNA, 41 bp, Homo sapiens; identical to SEQ ID NO: 1238
  source 1..41: mol_type = genomic DNA

SEQ ID NO: 43558 - DNA, 42 bp, Homo sapiens; identical to SEQ ID NO: 1239
  source 1..42: mol_type = genomic DNA

SEQ ID NO: 43559 - DNA, 43 bp, Homo sapiens; identical to SEQ ID NO: 1240
  source 1..43: mol_type = genomic DNA

SEQ ID NO: 43560 - DNA, 44 bp, Homo sapiens; identical to SEQ ID NO: 1241
  source 1..44: mol_type = genomic DNA

SEQ ID NO: 43561 - DNA, 45 bp, Homo sapiens; identical to SEQ ID NO: 1242
  source 1..45: mol_type = genomic DNA

SEQ ID NO: 43562 - DNA, 46 bp, Homo sapiens; identical to SEQ ID NO: 1243
  source 1..46: mol_type = genomic DNA

SEQ ID NO: 43563 - DNA, 47 bp, Homo sapiens; identical to SEQ ID NO: 1244
  source 1..47: mol_type = genomic DNA

SEQ ID NO: 43564 - DNA, 20 bp, Homo sapiens
  source 1..20: mol_type = genomic DNA
aagaagcagcttcaaacctg

SEQ ID NO: 43565 - DNA, 27 bp, Homo sapiens
  source 1..27: mol_type = genomic DNA
aagaagcagcttcaaacctgccggggc

SEQ ID NO: 43566 - DNA, 28 bp, Homo sapiens
  source 1..28: mol_type = genomic DNA
aagaagcagcttcaaacctgccggggct

SEQ ID NO: 43567 - DNA, 29 bp, Homo sapiens
  source 1..29: mol_type = genomic DNA
aagaagcagcttcaaacctgccggggctt

SEQ ID NO: 43568 - DNA, 30 bp, Homo sapiens; identical to SEQ ID NO: 1254
  source 1..30: mol_type = genomic DNA

SEQ ID NO: 43569 - DNA, 31 bp, Homo sapiens; identical to SEQ ID NO: 1255
  source 1..31: mol_type = genomic DNA

SEQ ID NO: 43570 - DNA, 32 bp, Homo sapiens; identical to SEQ ID NO: 1256
  source 1..32: mol_type = genomic DNA

SEQ ID NO: 43571 - DNA, 23 bp, Homo sapiens
  source 1..23: mol_type = genomic DNA
aagacaggggttaggcctctttt

SEQ ID NO: 43572 - DNA, 16 bp, Homo sapiens
  source 1..16: mol_type = genomic DNA
aagactttttctctga

SEQ ID NO: 43573 - DNA, 17 bp, Homo sapiens
  source 1..17: mol_type = genomic DNA
aagactttttctctgac

SEQ ID NO: 43574 - DNA, 18 bp, Homo sapiens
  source 1..18: mol_type = genomic DNA
aagactttttctctgacc

SEQ ID NO: 43575 - DNA, 19 bp, Homo sapiens
  source 1..19: mol_type = genomic DNA
aagactttttctctgacca

SEQ ID NO: 43576 - DNA, 28 bp, Homo sapiens
  source 1..28: mol_type = genomic DNA
aagagaaccaacacctctttacagtgac

SEQ ID NO: 43577 - DNA, 29 bp, Homo sapiens
  source 1..29: mol_type = genomic DNA
aagagaaccaacacctctttacagtgacc

SEQ ID NO: 43578 - DNA, 30 bp, Homo sapiens; identical to SEQ ID NO: 1283
  source 1..30: mol_type = genomic DNA

SEQ ID NO: 43579 - DNA, 35 bp, Homo sapiens; identical to SEQ ID NO: 1295
  source 1..35: mol_type = genomic DNA

SEQ ID NO: 43580 - DNA, 21 bp, Homo sapiens
  source 1..21: mol_type = genomic DNA
aagattaagagaaccaacacc

SEQ ID NO: 43581 - DNA, 34 bp, Homo sapiens; identical to SEQ ID NO: 1345
  source 1..34: mol_type = genomic DNA

SEQ ID NO: 43582 - DNA, 35 bp, Homo sapiens; identical to SEQ ID NO: 1346
  source 1..35: mol_type = genomic DNA

SEQ ID NO: 43583 - DNA, 36 bp, Homo sapiens; identical to SEQ ID NO: 1347
  source 1..36: mol_type = genomic DNA

SEQ ID NO: 43584 - DNA, 22 bp, Homo sapiens
  source 1..22: mol_type = genomic DNA
aagattccaggttcgactcctg

SEQ ID NO: 43585 - DNA, 29 bp, Homo sapiens
  source 1..29: mol_type = genomic DNA
aagattccaggttcgactcctggctggct

SEQ ID NO: 43586 - DNA, 30 bp, Homo sapiens; identical to SEQ ID NO: 1352
  source 1..30: mol_type = genomic DNA

SEQ ID NO: 43587 - DNA, 31 bp, Homo sapiens; identical to SEQ ID NO: 1353
  source 1..31: mol_type = genomic DNA

SEQ ID NO: 43588 - DNA, 33 bp, Homo sapiens; identical to SEQ ID NO: 1362
  source 1..33: mol_type = genomic DNA

SEQ ID NO: 43589 - DNA, 33 bp, Homo sapiens; identical to SEQ ID NO: 1365
  source 1..33: mol_type = genomic DNA

SEQ ID NO: 43590 - DNA, 20 bp, Homo sapiens
  source 1..20: mol_type = genomic DNA
aagattgagggttcgagtcc

SEQ ID NO: 43591 - DNA, 22 bp, Homo sapiens
  source 1..22: mol_type = genomic DNA
aagattgagggttcgagtccct

SEQ ID NO: 43592 - DNA, 32 bp, Homo sapiens; identical to SEQ ID NO: 1371
  source 1..32: mol_type = genomic DNA

SEQ ID NO: 43593 - DNA, 33 bp, Homo sapiens; identical to SEQ ID NO: 1372
  source 1..33: mol_type = genomic DNA

SEQ ID NO: 43594 - DNA, 34 bp, Homo sapiens; identical to SEQ ID NO: 1373
  source 1..34: mol_type = genomic DNA

SEQ ID NO: 43595 - DNA, 22 bp, Homo sapiens
  source 1..22: mol_type = genomic DNA
aagattgcaggttcgagtcctg

SEQ ID NO: 43596 - DNA, 30 bp, Homo sapiens; identical to SEQ ID NO: 1376
  source 1..30: mol_type = genomic DNA

SEQ ID NO: 43597 - DNA, 31 bp, Homo sapiens; identical to SEQ ID NO: 1377
  source 1..31: mol_type = genomic DNA

SEQ ID NO: 43598 - DNA, 32 bp, Homo sapiens; identical to SEQ ID NO: 1378
  source 1..32: mol_type = genomic DNA

SEQ ID NO: 43599 - DNA, 33 bp, Homo sapiens; identical to SEQ ID NO: 1379
  source 1..33: mol_type = genomic DNA

SEQ ID NO: 43600 - DNA, 34 bp, Homo sapiens; identical to SEQ ID NO: 1380
  source 1..34: mol_type = genomic DNA

SEQ ID NO: 43601 - DNA, 31 bp, Homo sapiens; identical to SEQ ID NO: 1382
  source 1..31: mol_type = genomic DNA

SEQ ID NO: 43602 - DNA, 24 bp, Homo sapiens
  source 1..24: mol_type = genomic DNA
aagcagcttcaaacctgccggggc

SEQ ID NO: 43603 - DNA, 25 bp, Homo sapiens
  source 1..25: mol_type = genomic DNA
aagcagcttcaaacctgccggggct

SEQ ID NO: 43604 - DNA, 26 bp, Homo sapiens
  source 1..26: mol_type = genomic DNA
aagcagcttcaaacctgccggggctt

SEQ ID NO: 43605 - DNA, 27 bp, Homo sapiens
  source 1..27: mol_type = genomic DNA
aagcagcttcaaacctgccggggcttc

SEQ ID NO: 43606 - DNA, 28 bp, Homo sapiens
  source 1..28: mol_type = genomic DNA
aagcagcttcaaacctgccggggcttcc

SEQ ID NO: 43607 - DNA, 30 bp, Homo sapiens; identical to SEQ ID NO: 1421
  source 1..30: mol_type = genomic DNA

SEQ ID NO: 43608 - DNA, 33 bp, Homo sapiens; identical to SEQ ID NO: 1424
  source 1..33: mol_type = genomic DNA

SEQ ID NO: 43609 - DNA, 38 bp, Homo sapiens; identical to SEQ ID NO: 1428
  source 1..38: mol_type = genomic DNA

SEQ ID NO: 43610 - DNA, 20 bp, Homo sapiens
  source 1..20: mol_type = genomic DNA
aagcattggactgtaaatct

SEQ ID NO: 43611 - DNA, 20 bp, Homo sapiens
  source 1..20: mol_type = genomic DNA
aagccagggattgtgggttc

SEQ ID NO: 43612 - DNA, 21 bp, Homo sapiens
  source 1..21: mol_type = genomic DNA
aagccagggattgtgggttcg

SEQ ID NO: 43613 - DNA, 37 bp, Homo sapiens; identical to SEQ ID NO: 1465
  source 1..37: mol_type = genomic DNA

SEQ ID NO: 43614 - DNA, 39 bp, Homo sapiens; identical to SEQ ID NO: 1467
  source 1..39: mol_type = genomic DNA

SEQ ID NO: 43615 - DNA, 39 bp, Homo sapiens; identical to SEQ ID NO: 1471
  source 1..39: mol_type = genomic DNA

SEQ ID NO: 43616 - DNA, 39 bp, Homo sapiens; identical to SEQ ID NO: 1475
  source 1..39: mol_type = genomic DNA

SEQ ID NO: 43617 - DNA, 37 bp, Homo sapiens; identical to SEQ ID NO: 1482
  source 1..37: mol_type = genomic DNA

SEQ ID NO: 43618 - DNA, 38 bp, Homo sapiens; identical to SEQ ID NO: 1483
  source 1..38: mol_type = genomic DNA

SEQ ID NO: 43619 - DNA, 39 bp, Homo sapiens; identical to SEQ ID NO: 1484
  source 1..39: mol_type = genomic DNA

SEQ ID NO: 43620 - DNA, 40 bp, Homo sapiens; identical to SEQ ID NO: 1485
  source 1..40: mol_type = genomic DNA

SEQ ID NO: 43621 - DNA, 22 bp, Homo sapiens
  source 1..22: mol_type = genomic DNA
aagcgtgctgggcccataaccc

SEQ ID NO: 43622 - DNA, 19 bp, Homo sapiens
  source 1..19: mol_type = genomic DNA
aagctatcgggcccatacc

SEQ ID NO: 43623 - DNA, 23 bp, Homo sapiens
  source 1..23: mol_type = genomic DNA
aagctatcgggcccataccccga

SEQ ID NO: 43624 - DNA, 41 bp, Homo sapiens; identical to SEQ ID NO: 1548
  source 1..41: mol_type = genomic DNA

SEQ ID NO: 43625 - DNA, 24 bp, Homo sapiens
  source 1..24: mol_type = genomic DNA
aaggataacagctatccattggtc

SEQ ID NO: 43626 - DNA, 30 bp, Homo sapiens; identical to SEQ ID NO: 1566
  source 1..30: mol_type = genomic DNA

SEQ ID NO: 43627 - DNA, 19 bp, Homo sapiens
  source 1..19: mol_type = genomic DNA
aaggctgcgtgttcgaatc

SEQ ID NO: 43628 - DNA, 22 bp, Homo sapiens
  source 1..22: mol_type = genomic DNA
aaggctgcgtgttcgaatcacg

SEQ ID NO: 43629 - DNA, 24 bp, Homo sapiens
  source 1..24: mol_type = genomic DNA
aaggctgcgtgttcgaatcacgtc

SEQ ID NO: 43630 - DNA, 26 bp, Homo sapiens
  source 1..26: mol_type = genomic DNA
aaggctgcgtgttcgaatcacgtcgg

SEQ ID NO: 43631 - DNA, 27 bp, Homo sapiens
  source 1..27: mol_type = genomic DNA
aaggctgcgtgttcgaatcacgtcggg

SEQ ID NO: 43632 - DNA, 28 bp, Homo sapiens
  source 1..28: mol_type = genomic DNA
aaggctgcgtgttcgaatcacgtcgggg

SEQ ID NO: 43633 - DNA, 30 bp, Homo sapiens; identical to SEQ ID NO: 1575
  source 1..30: mol_type = genomic DNA

SEQ ID NO: 43634 - DNA, 33 bp, Homo sapiens; identical to SEQ ID NO: 1576
  source 1..33: mol_type = genomic DNA

SEQ ID NO: 43635 - DNA, 22 bp, Homo sapiens
  source 1..22: mol_type = genomic DNA
aagggcttagcttaattaaagt

SEQ ID NO: 43636 - DNA, 25 bp, Homo sapiens
  source 1..25: mol_type = genomic DNA
aagggcttagcttaattaaagtggc

SEQ ID NO: 43637 - DNA, 38 bp, Homo sapiens; identical to SEQ ID NO: 1613
  source 1..38: mol_type = genomic DNA

SEQ ID NO: 43638 - DNA, 40 bp, Homo sapiens; identical to SEQ ID NO: 1615
  source 1..40: mol_type = genomic DNA

SEQ ID NO: 43639 - DNA, 27 bp, Homo sapiens
  source 1..27: mol_type = genomic DNA
aaggtccccggttcgaaaccgggcgga

SEQ ID NO: 43640 - DNA, 30 bp, Homo sapiens; identical to SEQ ID NO: 1632
  source 1..30: mol_type = genomic DNA

SEQ ID NO: 43641 - DNA, 31 bp, Homo sapiens; identical to SEQ ID NO: 31607
  source 1..31: mol_type = genomic DNA

SEQ ID NO: 43642 - DNA, 32 bp, Homo sapiens; identical to SEQ ID NO: 1633
  source 1..32: mol_type = genomic DNA

SEQ ID NO: 43643 - DNA, 33 bp, Homo sapiens; identical to SEQ ID NO: 31609
  source 1..33: mol_type = genomic DNA

SEQ ID NO: 43644 - DNA, 30 bp, Homo sapiens
  source 1..30: mol_type = genomic DNA
aaggtccccggttcgatcccgggcggaaac

SEQ ID NO: 43645 - DNA, 32 bp, Homo sapiens; identical to SEQ ID NO: 1634
  source 1..32: mol_type = genomic DNA

SEQ ID NO: 43646 - DNA, 34 bp, Homo sapiens
  source 1..34: mol_type = genomic DNA
aaggtccctggttcgatcccgggtttcggcacca

SEQ ID NO: 43647 - DNA, 29 bp, Homo sapiens
  source 1..29: mol_type = genomic DNA
aaggtcctgggttcgagccccagtggaac

SEQ ID NO: 43648 - DNA, 30 bp, Homo sapiens; identical to SEQ ID NO: 1644
  source 1..30: mol_type = genomic DNA

SEQ ID NO: 43649 - DNA, 31 bp, Homo sapiens; identical to SEQ ID NO: 31615
  source 1..31: mol_type = genomic DNA

SEQ ID NO: 43650 - DNA, 32 bp, Homo sapiens; identical to SEQ ID NO: 31616
  source 1..32: mol_type = genomic DNA

SEQ ID NO: 43651 - DNA, 33 bp, Homo sapiens; identical to SEQ ID NO: 1645
  source 1..33: mol_type = genomic DNA

SEQ ID NO: 43652 - DNA, 34 bp, Homo sapiens; identical to SEQ ID NO: 1646
  source 1..34: mol_type = genomic DNA

SEQ ID NO: 43653 - DNA, 29 bp, Homo sapiens
  source 1..29: mol_type = genomic DNA
aaggtcgcgggttcgatccccgtacgggc

SEQ ID NO: 43654 - DNA, 30 bp, Homo sapiens; identical to SEQ ID NO: 1651
  source 1..30: mol_type = genomic DNA

SEQ ID NO: 43655 - DNA, 33 bp, Homo sapiens; identical to SEQ ID NO: 1654
  source 1..33: mol_type = genomic DNA

SEQ ID NO: 43656 - DNA, 24 bp, Homo sapiens
  source 1..24: mol_type = genomic DNA
aaggttccgggttcgagtcccggc

SEQ ID NO: 43657 - DNA, 30 bp, Homo sapiens; identical to SEQ ID NO: 1661
  source 1..30: mol_type = genomic DNA

SEQ ID NO: 43658 - DNA, 31 bp, Homo sapiens; identical to SEQ ID NO: 1662
  source 1..31: mol_type = genomic DNA

SEQ ID NO: 43659 - DNA, 32 bp, Homo sapiens; identical to SEQ ID NO: 1663
  source 1..32: mol_type = genomic DNA

SEQ ID NO: 43660 - DNA, 33 bp, Homo sapiens; identical to SEQ ID NO: 1664
  source 1..33: mol_type = genomic DNA

SEQ ID NO: 43661 - DNA, 34 bp, Homo sapiens; identical to SEQ ID NO: 1665
  source 1..34: mol_type = genomic DNA

SEQ ID NO: 43662 - DNA, 33 bp, Homo sapiens; identical to SEQ ID NO: 1670
  source 1..33: mol_type = genomic DNA

SEQ ID NO: 43663 - DNA, 34 bp, Homo sapiens
  source 1..34: mol_type = genomic DNA
aaggttggtggttcgagcccacccagggacgcca

SEQ ID NO: 43664 - DNA, 32 bp, Homo sapiens; identical to SEQ ID NO: 31635
  source 1..32: mol_type = genomic DNA

SEQ ID NO: 43665 - DNA, 33 bp, Homo sapiens; identical to SEQ ID NO: 1671
  source 1..33: mol_type = genomic DNA

SEQ ID NO: 43666 - DNA, 33 bp, Homo sapiens; identical to SEQ ID NO: 1674
  source 1..33: mol_type = genomic DNA

SEQ ID NO: 43667 - DNA, 19 bp, Homo sapiens
  source 1..19: mol_type = genomic DNA
aagtcacgtcggggtcacc

SEQ ID NO: 43668 - DNA, 20 bp, Homo sapiens
  source 1..20: mol_type = genomic DNA
aagtcacgtcggggtcacca

SEQ ID NO: 43669 - DNA, 17 bp, Homo sapiens
  source 1..17: mol_type = genomic DNA
aagtcatggaggccatg

SEQ ID NO: 43670 - DNA, 20 bp, Homo sapiens
  source 1..20: mol_type = genomic DNA
aagtcatggaggccatgggg

SEQ ID NO: 43671 - DNA, 20 bp, Homo sapiens
  source 1..20: mol_type = genomic DNA
aagtcccattggtctagcca

SEQ ID NO: 43672 - DNA, 16 bp, Homo sapiens
  source 1..16: mol_type = genomic DNA
aagtccctgttcgggc

SEQ ID NO: 43673 - DNA, 17 bp, Homo sapiens
  source 1..17: mol_type = genomic DNA
aagtccctgttcgggcg

SEQ ID NO: 43674 - DNA, 18 bp, Homo sapiens
  source 1..18: mol_type = genomic DNA
aagtccctgttcgggcgc

SEQ ID NO: 43675 - DNA, 19 bp, Homo sapiens
  source 1..19: mol_type = genomic DNA
aagtccctgttcgggcgcc

SEQ ID NO: 43676 - DNA, 20 bp, Homo sapiens
  source 1..20: mol_type = genomic DNA
aagtccctgttcgggcgcca

SEQ ID NO: 43677 - DNA, 34 bp, Homo sapiens; identical to SEQ ID NO: 1712
  source 1..34: mol_type = genomic DNA

SEQ ID NO: 43678 - DNA, 35 bp, Homo sapiens; identical to SEQ ID NO: 1713
  source 1..35: mol_type = genomic DNA

SEQ ID NO: 43679 - DNA, 36 bp, Homo sapiens; identical to SEQ ID NO: 1714
  source 1..36: mol_type = genomic DNA

SEQ ID NO: 43680 - DNA, 28 bp, Homo sapiens
  source 1..28: mol_type = genomic DNA
aagttaaagattaagagaaccaacacct

SEQ ID NO: 43681 - DNA, 41 bp, Homo sapiens; identical to SEQ ID NO: 1733
  source 1..41: mol_type = genomic DNA

SEQ ID NO: 43682 - DNA, 22 bp, Homo sapiens
  source 1..22: mol_type = genomic DNA
aagttgcaatacttaatttctg

SEQ ID NO: 43683 - DNA, 17 bp, Homo sapiens
  source 1..17: mol_type = genomic DNA
aataagctatcgggccc

SEQ ID NO: 43684 - DNA, 19 bp, Homo sapiens
  source 1..19: mol_type = genomic DNA
aataataggagcttaaacc

SEQ ID NO: 43685 - DNA, 34 bp, Homo sapiens; identical to SEQ ID NO: 1787
  source 1..34: mol_type = genomic DNA

SEQ ID NO: 43686 - DNA, 40 bp, Homo sapiens; identical to SEQ ID NO: 1799
  source 1..40: mol_type = genomic DNA

SEQ ID NO: 43687 - DNA, 44 bp, Homo sapiens; identical to SEQ ID NO: 1801
  source 1..44: mol_type = genomic DNA

SEQ ID NO: 43688 - DNA, 31 bp, Homo sapiens; identical to SEQ ID NO: 1813
  source 1..31: mol_type = genomic DNA

SEQ ID NO: 43689 - DNA, 37 bp, Homo sapiens; identical to SEQ ID NO: 1819
  source 1..37: mol_type = genomic DNA

SEQ ID NO: 43690 - DNA, 17 bp, Homo sapiens
  source 1..17: mol_type = genomic DNA
aatacttaatttctgcc

SEQ ID NO: 43691 - DNA, 18 bp, Homo sapiens
  source 1..18: mol_type = genomic DNA
aatacttaatttctgcca

SEQ ID NO: 43692 - DNA, 17 bp, Homo sapiens
  source 1..17: mol_type = genomic DNA
aataggagcttaaaccc

SEQ ID NO: 43693 - DNA, 19 bp, Homo sapiens
  source 1..19: mol_type = genomic DNA
aataggagcttaaaccccc

SEQ ID NO: 43694 - DNA, 31 bp, Homo sapiens; identical to SEQ ID NO: 1853
  source 1..31: mol_type = genomic DNA

SEQ ID NO: 43695 - DNA, 16 bp, Homo sapiens
  source 1..16: mol_type = genomic DNA
aatagtaccgttaact

SEQ ID NO: 43696 - DNA, 16 bp, Homo sapiens
  source 1..16: mol_type = genomic DNA
aatcacgtcggggtca

SEQ ID NO: 43697 - DNA, 17 bp, Homo sapiens
  source 1..17: mol_type = genomic DNA
aatcacgtcggggtcac

SEQ ID NO: 43698 - DNA, 18 bp, Homo sapiens
  source 1..18: mol_type = genomic DNA
aatcacgtcggggtcacc

SEQ ID NO: 43699 - DNA, 19 bp, Homo sapiens
  source 1..19: mol_type = genomic DNA
aatcacgtcggggtcacca

SEQ ID NO: 43700 - DNA, 18 bp, Homo sapiens
  source 1..18: mol_type = genomic DNA
aatccagcgatccgagtt

SEQ ID NO: 43701 - DNA, 19 bp, Homo sapiens
  source 1..19: mol_type = genomic DNA
aatccagcgatccgagttc

SEQ ID NO: 43702 - DNA, 20 bp, Homo sapiens
  source 1..20: mol_type = genomic DNA
aatccagcgatccgagttca

SEQ ID NO: 43703 - DNA, 21 bp, Homo sapiens
  source 1..21: mol_type = genomic DNA
aatccagcgatccgagttcaa

SEQ ID NO: 43704 - DNA, 22 bp, Homo sapiens
  source 1..22: mol_type = genomic DNA
aatccagcgatccgagttcaaa

SEQ ID NO: 43705 - DNA, 23 bp, Homo sapiens
  source 1..23: mol_type = genomic DNA
aatccagcgatccgagttcaaat

SEQ ID NO: 43706 - DNA, 36 bp, Homo sapiens; identical to SEQ ID NO: 1913
  source 1..36: mol_type = genomic DNA

SEQ ID NO: 43707 - DNA, 38 bp, Homo sapiens; identical to SEQ ID NO: 1915
  source 1..38: mol_type = genomic DNA

SEQ ID NO: 43708 - DNA, 22 bp, Homo sapiens
  source 1..22: mol_type = genomic DNA
aatccattggggtttccccgcg

SEQ ID NO: 43709 - DNA, 23 bp, Homo sapiens
  source 1..23: mol_type = genomic DNA
aatccattggggtttccccgcgc

SEQ ID NO: 43710 - DNA, 26 bp, Homo sapiens
  source 1..26: mol_type = genomic DNA
aatccattggggtttccccgcgcagg

SEQ ID NO: 43711 - DNA, 27 bp, Homo sapiens
  source 1..27: mol_type = genomic DNA
aatccattggggtttccccgcgcaggt

SEQ ID NO: 43712 - DNA, 41 bp, Homo sapiens; identical to SEQ ID NO: 1957
  source 1..41: mol_type = genomic DNA

SEQ ID NO: 43713 - DNA, 42 bp, Homo sapiens; identical to SEQ ID NO: 1958
  source 1..42: mol_type = genomic DNA

SEQ ID NO: 43714 - DNA, 43 bp, Homo sapiens; identical to SEQ ID NO: 1959
  source 1..43: mol_type = genomic DNA

SEQ ID NO: 43715 - DNA, 17 bp, Homo sapiens
  source 1..17: mol_type = genomic DNA
aatcccaccgctgccac

SEQ ID NO: 43716 - DNA, 18 bp, Homo sapiens
  source 1..18: mol_type = genomic DNA
aatcccaccgctgccacc

SEQ ID NO: 43717 - DNA, 18 bp, Homo sapiens
  source 1..18: mol_type = genomic DNA
aatcccactcctgacacc

SEQ ID NO: 43718 - DNA, 19 bp, Homo sapiens
  source 1..19: mol_type = genomic DNA
aatcccactcctgacacca

SEQ ID NO: 43719 - DNA, 16 bp, Homo sapiens
  source 1..16: mol_type = genomic DNA
aatcccacttctgaca

SEQ ID NO: 43720 - DNA, 17 bp, Homo sapiens
  source 1..17: mol_type = genomic DNA
aatcccacttctgacac

SEQ ID NO: 43721 - DNA, 18 bp, Homo sapiens
  source 1..18: mol_type = genomic DNA
aatcccacttctgacacc

SEQ ID NO: 43722 - DNA, 19 bp, Homo sapiens
  source 1..19: mol_type = genomic DNA
aatcccagcggggcctcca

SEQ ID NO: 43723 - DNA, 16 bp, Homo sapiens
  source 1..16: mol_type = genomic DNA
aatcccagcggtgcct

SEQ ID NO: 43724 - DNA, 17 bp, Homo sapiens
  source 1..17: mol_type = genomic DNA
aatcccagcggtgcctc

SEQ ID NO: 43725 - DNA, 18 bp, Homo sapiens
  source 1..18: mol_type = genomic DNA
aatcccagcggtgcctcc

SEQ ID NO: 43726 - DNA, 19 bp, Homo sapiens
  source 1..19: mol_type = genomic DNA
aatcccagcggtgcctcca

SEQ ID NO: 43727 - DNA, 17 bp, Homo sapiens
  source 1..17: mol_type = genomic DNA
aatcccatcctcgtcgc

SEQ ID NO: 43728 - DNA, 18 bp, Homo sapiens
  source 1..18: mol_type = genomic DNA
aatcccatcctcgtcgcc

SEQ ID NO: 43729 - DNA, 19 bp, Homo sapiens
  source 1..19: mol_type = genomic DNA
aatcccatcctcgtcgcca

SEQ ID NO: 43730 - DNA, 19 bp, Homo sapiens
  source 1..19: mol_type = genomic DNA
aatccccggcacctccacc

SEQ ID NO: 43731 - DNA, 20 bp, Homo sapiens
  source 1..20: mol_type = genomic DNA
aatccccggcacctccacca

SEQ ID NO: 43732 - DNA, 16 bp, Homo sapiens
  source 1..16: mol_type = genomic DNA
aatcccggacgagccc

SEQ ID NO: 43733 - DNA, 17 bp, Homo sapiens
  source 1..17: mol_type = genomic DNA
aatcccggacgagcccc

SEQ ID NO: 43734 - DNA, 18 bp, Homo sapiens
  source 1..18: mol_type = genomic DNA
aatcccggacgagccccc

SEQ ID NO: 43735 - DNA, 19 bp, Homo sapiens
  source 1..19: mol_type = genomic DNA
aatcccggacgagccccca

SEQ ID NO: 43736 - DNA, 18 bp, Homo sapiens
  source 1..18: mol_type = genomic DNA
aatcccgggtttcggcac

SEQ ID NO: 43737 - DNA, 17 bp, Homo sapiens
  source 1..17: mol_type = genomic DNA
aatccgagtcacggcac

SEQ ID NO: 43738 - DNA, 18 bp, Homo sapiens
  source 1..18: mol_type = genomic DNA
aatccgagtcacggcacc

SEQ ID NO: 43739 - DNA, 19 bp, Homo sapiens
  source 1..19: mol_type = genomic DNA
aatccgagtcacggcacca

SEQ ID NO: 43740 - DNA, 17 bp, Homo sapiens
  source 1..17: mol_type = genomic DNA
aatccggctcgaaggac

SEQ ID NO: 43741 - DNA, 18 bp, Homo sapiens
  source 1..18: mol_type = genomic DNA
aatccggctcgaaggacc

SEQ ID NO: 43742 - DNA, 18 bp, Homo sapiens
  source 1..18: mol_type = genomic DNA
aatccggctcggaggacc

SEQ ID NO: 43743 - DNA, 17 bp, Homo sapiens
  source 1..17: mol_type = genomic DNA
aatccgggtgccccctc

SEQ ID NO: 43744 - DNA, 18 bp, Homo sapiens
  source 1..18: mol_type = genomic DNA
aatccgggtgccccctcc

SEQ ID NO: 43745 - DNA, 17 bp, Homo sapiens
  source 1..17: mol_type = genomic DNA
aatcctgccgactacgc

SEQ ID NO: 43746 - DNA, 18 bp, Homo sapiens
  source 1..18: mol_type = genomic DNA
aatcctgccgactacgcc

SEQ ID NO: 43747 - DNA, 19 bp, Homo sapiens
  source 1..19: mol_type = genomic DNA
aatcctgccgactacgcca

SEQ ID NO: 43748 - DNA, 17 bp, Homo sapiens
  source 1..17: mol_type = genomic DNA
aatcctgttcgtgacgc

SEQ ID NO: 43749 - DNA, 18 bp, Homo sapiens
  source 1..18: mol_type = genomic DNA
aatcctgttcgtgacgcc

SEQ ID NO: 43750 - DNA, 37 bp, Homo sapiens; identical to SEQ ID NO: 2042
  source 1..37: mol_type = genomic DNA

SEQ ID NO: 43751 - DNA, 39 bp, Homo sapiens; identical to SEQ ID NO: 2048
  source 1..39: mol_type = genomic DNA

SEQ ID NO: 43752 - DNA, 16 bp, Homo sapiens
  source 1..16: mol_type = genomic DNA
aatctcgctggggcct

SEQ ID NO: 43753 - DNA, 17 bp, Homo sapiens
  source 1..17: mol_type = genomic DNA
aatctcgctggggcctc

SEQ ID NO: 43754 - DNA, 18 bp, Homo sapiens
  source 1..18: mol_type = genomic DNA
aatctcgctggggcctcc

SEQ ID NO: 43755 - DNA, 16 bp, Homo sapiens
  source 1..16: mol_type = genomic DNA
aatctcggtggaacct

SEQ ID NO: 43756 - DNA, 17 bp, Homo sapiens
  source 1..17: mol_type = genomic DNA
aatctcggtggaacctc

SEQ ID NO: 43757 - DNA, 18 bp, Homo sapiens
  source 1..18: mol_type = genomic DNA
aatctcggtggaacctcc

SEQ ID NO: 43758 - DNA, 19 bp, Homo sapiens
  source 1..19: mol_type = genomic DNA
aatctcggtggaacctcca

SEQ ID NO: 43759 - DNA, 16 bp, Homo sapiens
  source 1..16: mol_type = genomic DNA
aatctcggtgggacct

SEQ ID NO: 43760 - DNA, 17 bp, Homo sapiens
  source 1..17: mol_type = genomic DNA
aatctcggtgggacctc

SEQ ID NO: 43761 - DNA, 18 bp, Homo sapiens
  source 1..18: mol_type = genomic DNA
aatctcggtgggacctcc

SEQ ID NO: 43762 - DNA, 19 bp, Homo sapiens
  source 1..19: mol_type = genomic DNA
aatctcggtgggacctcca

SEQ ID NO: 43763 - DNA, 39 bp, Homo sapiens; identical to SEQ ID NO: 2086
  source 1..39: mol_type = genomic DNA

SEQ ID NO: 43764 - DNA, 39 bp, Homo sapiens; identical to SEQ ID NO: 2094
  source 1..39: mol_type = genomic DNA

SEQ ID NO: 43765 - DNA, 37 bp, Homo sapiens; identical to SEQ ID NO: 2110
  source 1..37: mol_type = genomic DNA

SEQ ID NO: 43766 - DNA, 38 bp, Homo sapiens; identical to SEQ ID NO: 2111
  source 1..38: mol_type = genomic DNA

SEQ ID NO: 43767 - DNA, 39 bp, Homo sapiens; identical to SEQ ID NO: 2112
  source 1..39: mol_type = genomic DNA

SEQ ID NO: 43768 - DNA, 24 bp, Homo sapiens
  source 1..24: mol_type = genomic DNA
aatgccgaggttgtgagttcgagc

SEQ ID NO: 43769 - DNA, 34 bp, Homo sapiens; identical to SEQ ID NO: 2160
  source 1..34: mol_type = genomic DNA

SEQ ID NO: 43770 - DNA, 35 bp, Homo sapiens; identical to SEQ ID NO: 2161
  source 1..35: mol_type = genomic DNA

SEQ ID NO: 43771 - DNA, 36 bp, Homo sapiens; identical to SEQ ID NO: 2162
  source 1..36: mol_type = genomic DNA

SEQ ID NO: 43772 - DNA, 18 bp, Homo sapiens
  source 1..18: mol_type = genomic DNA
aatggataacgcgtctga

SEQ ID NO: 43773 - DNA, 20 bp, Homo sapiens
  source 1..20: mol_type = genomic DNA
aatggataacgcgtctgact

SEQ ID NO: 43774 - DNA, 16 bp, Homo sapiens
  source 1..16: mol_type = genomic DNA
aatggataaggcactg

SEQ ID NO: 43775 - DNA, 20 bp, Homo sapiens
  source 1..20: mol_type = genomic DNA
aatggataaggcatcagcct

SEQ ID NO: 43776 - DNA, 22 bp, Homo sapiens
  source 1..22: mol_type = genomic DNA
aatggataaggcatcagcctcc

SEQ ID NO: 43777 - DNA, 37 bp, Homo sapiens; identical to SEQ ID NO: 31782
  source 1..37: mol_type = genomic DNA

SEQ ID NO: 43778 - DNA, 16 bp, Homo sapiens
  source 1..16: mol_type = genomic DNA
aatggataaggcattg

SEQ ID NO: 43779 - DNA, 18 bp, Homo sapiens
  source 1..18: mol_type = genomic DNA
aatggataaggcattggc

SEQ ID NO: 43780 - DNA, 18 bp, Homo sapiens
  source 1..18: mol_type = genomic DNA
aatggataaggcgtctga

SEQ ID NO: 43781 - DNA, 27 bp, Homo sapiens
  source 1..27: mol_type = genomic DNA
aatggataaggcgtctgacttcggatc

SEQ ID NO: 43782 - DNA, 22 bp, Homo sapiens
  source 1..22: mol_type = genomic DNA
aatggataaggcgtctgattcc

SEQ ID NO: 43783 - DNA, 16 bp, Homo sapiens
  source 1..16: mol_type = genomic DNA
aatggatagcgcattg

SEQ ID NO: 43784 - DNA, 17 bp, Homo sapiens
  source 1..17: mol_type = genomic DNA
aatggatagcgcattgg

SEQ ID NO: 43785 - DNA, 18 bp, Homo sapiens
  source 1..18: mol_type = genomic DNA
aatggatagcgcattgga

SEQ ID NO: 43786 - DNA, 19 bp, Homo sapiens
  source 1..19: mol_type = genomic DNA
aatggatagcgcattggac

SEQ ID NO: 43787 - DNA, 20 bp, Homo sapiens
  source 1..20: mol_type = genomic DNA
aatggatagcgcattggact

SEQ ID NO: 43788 - DNA, 22 bp, Homo sapiens
  source 1..22: mol_type = genomic DNA
aatggatagcgcattggacttc

SEQ ID NO: 43789 - DNA, 28 bp, Homo sapiens
  source 1..28: mol_type = genomic DNA
aatggatagcgcattggacttctaattc

SEQ ID NO: 43790 - DNA, 30 bp, Homo sapiens
  source 1..30: mol_type = genomic DNA
aatggatagcgcattggacttctaattcaa

SEQ ID NO: 43791 - DNA, 17 bp, Homo sapiens
  source 1..17: mol_type = genomic DNA
aatggtagaattctcgc

SEQ ID NO: 43792 - DNA, 18 bp, Homo sapiens
  source 1..18: mol_type = genomic DNA
aatggtagaattctcgcc

SEQ ID NO: 43793 - DNA, 17 bp, Homo sapiens
  source 1..17: mol_type = genomic DNA
aatggtagagcgctcgc

SEQ ID NO: 43794 - DNA, 20 bp, Homo sapiens
  source 1..20: mol_type = genomic DNA
aatggtgagcactctggact

SEQ ID NO: 43795 - DNA, 20 bp, Homo sapiens
  source 1..20: mol_type = genomic DNA
aatggtgagcactttggact

SEQ ID NO: 43796 - DNA, 19 bp, Homo sapiens
  source 1..19: mol_type = genomic DNA
aatggtggagttaaagact

SEQ ID NO: 43797 - DNA, 29 bp, Homo sapiens
  source 1..29: mol_type = genomic DNA
aatggtggagttaaagactttttctctga

SEQ ID NO: 43798 - DNA, 30 bp, Homo sapiens; identical to SEQ ID NO: 2232
  source 1..30: mol_type = genomic DNA

SEQ ID NO: 43799 - DNA, 31 bp, Homo sapiens; identical to SEQ ID NO: 2233
  source 1..31: mol_type = genomic DNA

SEQ ID NO: 43800 - DNA, 32 bp, Homo sapiens; identical to SEQ ID NO: 2234
  source 1..32: mol_type = genomic DNA

SEQ ID NO: 43801 - DNA, 29 bp, Homo sapiens
  source 1..29: mol_type = genomic DNA
aatggtggttcagtggtagaattctcgcc

SEQ ID NO: 43802 - DNA, 30 bp, Homo sapiens; identical to SEQ ID NO: 2236
  source 1..30: mol_type = genomic DNA

SEQ ID NO: 43803 - DNA, 16 bp, Homo sapiens
  source 1..16: mol_type = genomic DNA
aatggttagcactctg

SEQ ID NO: 43804 - DNA, 17 bp, Homo sapiens
  source 1..17: mol_type = genomic DNA
aatggttagcactctgg

SEQ ID NO: 43805 - DNA, 18 bp, Homo sapiens
  source 1..18: mol_type = genomic DNA
aatggttagcactctgga

SEQ ID NO: 43806 - DNA, 20 bp, Homo sapiens
  source 1..20: mol_type = genomic DNA
aatggttagcactctggact

SEQ ID NO: 43807 - DNA, 21 bp, Homo sapiens
  source 1..21: mol_type = genomic DNA
aatggttagcactctggactc

SEQ ID NO: 43808 - DNA, 24 bp, Homo sapiens
  source 1..24: mol_type = genomic DNA
aatggttagcactctggactctga

SEQ ID NO: 43809 - DNA, 25 bp, Homo sapiens
  source 1..25: mol_type = genomic DNA
aatggttagcactctggactctgaa

SEQ ID NO: 43810 - DNA, 26 bp, Homo sapiens
  source 1..26: mol_type = genomic DNA
aatggttagcactctggactctgaat

SEQ ID NO: 43811 - DNA, 27 bp, Homo sapiens
  source 1..27: mol_type = genomic DNA
aatggttagcactctggactctgaatc

SEQ ID NO: 43812 - DNA, 28 bp, Homo sapiens
  source 1..28: mol_type = genomic DNA
aatggttagcactctggactctgaatcc

SEQ ID NO: 43813 - DNA, 29 bp, Homo sapiens
  source 1..29: mol_type = genomic DNA
aatggttagcactctggactctgaatcca

SEQ ID NO: 43814 - DNA, 31 bp, Homo sapiens; identical to SEQ ID NO: 2251
  source 1..31: mol_type = genomic DNA

SEQ ID NO: 43815 - DNA, 32 bp, Homo sapiens; identical to SEQ ID NO: 2252
  source 1..32: mol_type = genomic DNA

SEQ ID NO: 43816 - DNA, 39 bp, Homo sapiens; identical to SEQ ID NO: 2253
  source 1..39: mol_type = genomic DNA

SEQ ID NO: 43817 - DNA, 40 bp, Homo sapiens; identical to SEQ ID NO: 2254
  source 1..40: mol_type = genomic DNA

SEQ ID NO: 43818 - DNA, 43 bp, Homo sapiens; identical to SEQ ID NO: 2255
  source 1..43: mol_type = genomic DNA

SEQ ID NO: 43819 - DNA, 27 bp, Homo sapiens
  source 1..27: mol_type = genomic DNA
aatggttagcactctggactttgaatc

SEQ ID NO: 43820 - DNA, 26 bp, Homo sapiens
  source 1..26: mol_type = genomic DNA
aatgttggttatacccttcccgtact

SEQ ID NO: 43821 - DNA, 29 bp, Homo sapiens
  source 1..29: mol_type = genomic DNA
aatgttggttatacccttcccgtactacc

SEQ ID NO: 43822 - DNA, 30 bp, Homo sapiens; identical to SEQ ID NO: 2272
  source 1..30: mol_type = genomic DNA

SEQ ID NO: 43823 - DNA, 16 bp, Homo sapiens
  source 1..16: mol_type = genomic DNA
aatgtttagacgggct

SEQ ID NO: 43824 - DNA, 17 bp, Homo sapiens
  source 1..17: mol_type = genomic DNA
aatgtttagacgggctc

SEQ ID NO: 43825 - DNA, 18 bp, Homo sapiens
  source 1..18: mol_type = genomic DNA
aatgtttagacgggctca

SEQ ID NO: 43826 - DNA, 19 bp, Homo sapiens
  source 1..19: mol_type = genomic DNA
aatgtttagacgggctcac

SEQ ID NO: 43827 - DNA, 20 bp, Homo sapiens
  source 1..20: mol_type = genomic DNA
aatgtttagacgggctcaca

SEQ ID NO: 43828 - DNA, 25 bp, Homo sapiens
  source 1..25: mol_type = genomic DNA
aatgtttagacgggctcacatcacc

SEQ ID NO: 43829 - DNA, 26 bp, Homo sapiens
  source 1..26: mol_type = genomic DNA
aatgtttagacgggctcacatcaccc

SEQ ID NO: 43830 - DNA, 27 bp, Homo sapiens
  source 1..27: mol_type = genomic DNA
aatgtttagacgggctcacatcacccc

SEQ ID NO: 43831 - DNA, 30 bp, Homo sapiens; identical to SEQ ID NO: 2287
  source 1..30: mol_type = genomic DNA

SEQ ID NO: 43832 - DNA, 32 bp, Homo sapiens; identical to SEQ ID NO: 2289
  source 1..32: mol_type = genomic DNA

SEQ ID NO: 43833 - DNA, 36 bp, Homo sapiens; identical to SEQ ID NO: 2292
  source 1..36: mol_type = genomic DNA

SEQ ID NO: 43834 - DNA, 37 bp, Homo sapiens; identical to SEQ ID NO: 2293
  source 1..37: mol_type = genomic DNA

SEQ ID NO: 43835 - DNA, 17 bp, Homo sapiens
  source 1..17: mol_type = genomic DNA
aattaactagttttgac

SEQ ID NO: 43836 - DNA, 44 bp, Homo sapiens; identical to SEQ ID NO: 2327
  source 1..44: mol_type = genomic DNA

SEQ ID NO: 43837 - DNA, 39 bp, Homo sapiens; identical to SEQ ID NO: 2341
  source 1..39: mol_type = genomic DNA

SEQ ID NO: 43838 - DNA, 39 bp, Homo sapiens; identical to SEQ ID NO: 2343
  source 1..39: mol_type = genomic DNA

SEQ ID NO: 43839 - DNA, 39 bp, Homo sapiens; identical to SEQ ID NO: 2345
  source 1..39: mol_type = genomic DNA

SEQ ID NO: 43840 - DNA, 18 bp, Homo sapiens
  source 1..18: mol_type = genomic DNA
aattccccgacggggagc

SEQ ID NO: 43841 - DNA, 34 bp, Homo sapiens; identical to SEQ ID NO: 2354
  source 1..34: mol_type = genomic DNA

SEQ ID NO: 43842 - DNA, 35 bp, Homo sapiens; identical to SEQ ID NO: 2355
  source 1..35: mol_type = genomic DNA

SEQ ID NO: 43843 - DNA, 36 bp, Homo sapiens; identical to SEQ ID NO: 2356
  source 1..36: mol_type = genomic DNA

SEQ ID NO: 43844 - DNA, 16 bp, Homo sapiens
  source 1..16: mol_type = genomic DNA
aattctcgcctgccac

SEQ ID NO: 43845 - DNA, 17 bp, Homo sapiens
  source 1..17: mol_type = genomic DNA
aattctcgcctgccacg

SEQ ID NO: 43846 - DNA, 18 bp, Homo sapiens
  source 1..18: mol_type = genomic DNA
aattctcgcctgccacgc

SEQ ID NO: 43847 - DNA, 20 bp, Homo sapiens
  source 1..20: mol_type = genomic DNA
aattctcgcctgccacgcgg

SEQ ID NO: 43848 - DNA, 22 bp, Homo sapiens
  source 1..22: mol_type = genomic DNA
aattctcgcctgccacgcggga

SEQ ID NO: 43849 - DNA, 27 bp, Homo sapiens
  source 1..27: mol_type = genomic DNA
aattctcgcctgccacgcgggaggccc

SEQ ID NO: 43850 - DNA, 31 bp, Homo sapiens
  source 1..31: mol_type = genomic DNA
aattctcgcctgccacgcgggaggcccgggt

SEQ ID NO: 43851 - DNA, 41 bp, Homo sapiens; identical to SEQ ID NO: 2376
  source 1..41: mol_type = genomic DNA

SEQ ID NO: 43852 - DNA, 42 bp, Homo sapiens; identical to SEQ ID NO: 2377
  source 1..42: mol_type = genomic DNA

SEQ ID NO: 43853 - DNA, 16 bp, Homo sapiens
  source 1..16: mol_type = genomic DNA
aattttggtgcaactc

SEQ ID NO: 43854 - DNA, 31 bp, Homo sapiens; identical to SEQ ID NO: 2393
  source 1..31: mol_type = genomic DNA

SEQ ID NO: 43855 - DNA, 23 bp, Homo sapiens
  source 1..23: mol_type = genomic DNA
acaaaacgaatgatttcgactca

SEQ ID NO: 43856 - DNA, 33 bp, Homo sapiens; identical to SEQ ID NO: 2415
  source 1..33: mol_type = genomic DNA

SEQ ID NO: 43857 - DNA, 34 bp, Homo sapiens; identical to SEQ ID NO: 2416
  source 1..34: mol_type = genomic DNA

SEQ ID NO: 43858 - DNA, 35 bp, Homo sapiens; identical to SEQ ID NO: 2417
  source 1..35: mol_type = genomic DNA

SEQ ID NO: 43859 - DNA, 32 bp, Homo sapiens; identical to SEQ ID NO: 2433
  source 1..32: mol_type = genomic DNA

SEQ ID NO: 43860 - DNA, 19 bp, Homo sapiens
  source 1..19: mol_type = genomic DNA
acaacatggctttctcacc

SEQ ID NO: 43861 - DNA, 30 bp, Homo sapiens; identical to SEQ ID NO: 2449
  source 1..30: mol_type = genomic DNA

SEQ ID NO: 43862 - DNA, 25 bp, Homo sapiens
  source 1..25: mol_type = genomic DNA
acaagaactgctaactcatgccccc

SEQ ID NO: 43863 - DNA, 28 bp, Homo sapiens
  source 1..28: mol_type = genomic DNA
acaagaactgctaactcatgcccccatg

SEQ ID NO: 43864 - DNA, 31 bp, Homo sapiens; identical to SEQ ID NO: 2474
  source 1..31: mol_type = genomic DNA

SEQ ID NO: 43865 - DNA, 35 bp, Homo sapiens; identical to SEQ ID NO: 2478
  source 1..35: mol_type = genomic DNA

SEQ ID NO: 43866 - DNA, 38 bp, Homo sapiens; identical to SEQ ID NO: 2481
  source 1..38: mol_type = genomic DNA

SEQ ID NO: 43867 - DNA, 40 bp, Homo sapiens; identical to SEQ ID NO: 2483
  source 1..40: mol_type = genomic DNA

SEQ ID NO: 43868 - DNA, 41 bp, Homo sapiens; identical to SEQ ID NO: 2484
  source 1..41: mol_type = genomic DNA

SEQ ID NO: 43869 - DNA, 42 bp, Homo sapiens; identical to SEQ ID NO: 2485
  source 1..42: mol_type = genomic DNA

SEQ ID NO: 43870 - DNA, 43 bp, Homo sapiens; identical to SEQ ID NO: 2486
  source 1..43: mol_type = genomic DNA

SEQ ID NO: 43871 - DNA, 44 bp, Homo sapiens; identical to SEQ ID NO: 2487
  source 1..44: mol_type = genomic DNA

SEQ ID NO: 43872 - DNA, 47 bp, Homo sapiens; identical to SEQ ID NO: 2490
  source 1..47: mol_type = genomic DNA

SEQ ID NO: 43873 - DNA, 18 bp, Homo sapiens
  source 1..18: mol_type = genomic DNA
acacctctttacagtgac

SEQ ID NO: 43874 - DNA, 20 bp, Homo sapiens
  source 1..20: mol_type = genomic DNA
acacctctttacagtgacca

SEQ ID NO: 43875 - DNA, 17 bp, Homo sapiens
  source 1..17: mol_type = genomic DNA
acacgcagaaggtcctg

SEQ ID NO: 43876 - DNA, 38 bp, Homo sapiens
  source 1..38: mol_type = genomic DNA
acacgcagaaggtcctgggttcgagccccagtggaacc

SEQ ID NO: 43877 - DNA, 40 bp, Homo sapiens; identical to SEQ ID NO: 2507
  source 1..40: mol_type = genomic DNA

SEQ ID NO: 43878 - DNA, 41 bp, Homo sapiens; identical to SEQ ID NO: 2508
  source 1..41: mol_type = genomic DNA

SEQ ID NO: 43879 - DNA, 42 bp, Homo sapiens; identical to SEQ ID NO: 2509
  source 1..42: mol_type = genomic DNA

SEQ ID NO: 43880 - DNA, 38 bp, Homo sapiens
  source 1..38: mol_type = genomic DNA
acacgcgaaaggtccccggttcgaaaccgggcggaaac

SEQ ID NO: 43881 - DNA, 39 bp, Homo sapiens; identical to SEQ ID NO: 31897
  source 1..39: mol_type = genomic DNA

SEQ ID NO: 43882 - DNA, 41 bp, Homo sapiens; identical to SEQ ID NO: 2514
  source 1..41: mol_type = genomic DNA

SEQ ID NO: 43883 - DNA, 31 bp, Homo sapiens; identical to SEQ ID NO: 2517
  source 1..31: mol_type = genomic DNA

SEQ ID NO: 43884 - DNA, 24 bp, Homo sapiens
  source 1..24: mol_type = genomic DNA
acactgaaaatgtttagacgggct

SEQ ID NO: 43885 - DNA, 28 bp, Homo sapiens
  source 1..28: mol_type = genomic DNA
acactgaaaatgtttagacgggctcaca

SEQ ID NO: 43886 - DNA, 33 bp, Homo sapiens; identical to SEQ ID NO: 2551
  source 1..33: mol_type = genomic DNA

SEQ ID NO: 43887 - DNA, 36 bp, Homo sapiens; identical to SEQ ID NO: 2554
  source 1..36: mol_type = genomic DNA

SEQ ID NO: 43888 - DNA, 37 bp, Homo sapiens; identical to SEQ ID NO: 2555
  source 1..37: mol_type = genomic DNA

SEQ ID NO: 43889 - DNA, 38 bp, Homo sapiens; identical to SEQ ID NO: 2556
  source 1..38: mol_type = genomic DNA

SEQ ID NO: 43890 - DNA, 39 bp, Homo sapiens; identical to SEQ ID NO: 2557
  source 1..39: mol_type = genomic DNA

SEQ ID NO: 43891 - DNA, 40 bp, Homo sapiens; identical to SEQ ID NO: 2558
  source 1..40: mol_type = genomic DNA

SEQ ID NO: 43892 - DNA, 17 bp, Homo sapiens
  source 1..17: mol_type = genomic DNA
acagaggcttacgaccc

SEQ ID NO: 43893 - DNA, 29 bp, Homo sapiens
  source 1..29: mol_type = genomic DNA
acagaggcttacgaccccttatttacccc

SEQ ID NO: 43894 - DNA, 18 bp, Homo sapiens
  source 1..18: mol_type = genomic DNA
acagctatccattggtct

SEQ ID NO: 43895 - DNA, 33 bp, Homo sapiens; identical to SEQ ID NO: 2615
  source 1..33: mol_type = genomic DNA

SEQ ID NO: 43896 - DNA, 34 bp, Homo sapiens; identical to SEQ ID NO: 2616
  source 1..34: mol_type = genomic DNA

SEQ ID NO: 43897 - DNA, 35 bp, Homo sapiens; identical to SEQ ID NO: 2617
  source 1..35: mol_type = genomic DNA

SEQ ID NO: 43898 - DNA, 36 bp, Homo sapiens; identical to SEQ ID NO: 2618
  source 1..36: mol_type = genomic DNA

SEQ ID NO: 43899 - DNA, 37 bp, Homo sapiens; identical to SEQ ID NO: 2619
  source 1..37: mol_type = genomic DNA

SEQ ID NO: 43900 - DNA, 38 bp, Homo sapiens; identical to SEQ ID NO: 2620
  source 1..38: mol_type = genomic DNA

SEQ ID NO: 43901 - DNA, 32 bp, Homo sapiens; identical to SEQ ID NO: 2622
  source 1..32: mol_type = genomic DNA

SEQ ID NO: 43902 - DNA, 33 bp, Homo sapiens; identical to SEQ ID NO: 2623
  source 1..33: mol_type = genomic DNA

SEQ ID NO: 43903 - DNA, 34 bp, Homo sapiens; identical to SEQ ID NO: 2624
  source 1..34: mol_type = genomic DNA

SEQ ID NO: 43904 - DNA, 35 bp, Homo sapiens; identical to SEQ ID NO: 2625
  source 1..35: mol_type = genomic DNA

SEQ ID NO: 43905 - DNA, 36 bp, Homo sapiens; identical to SEQ ID NO: 2626
  source 1..36: mol_type = genomic DNA

SEQ ID NO: 43906 - DNA, 37 bp, Homo sapiens; identical to SEQ ID NO: 2627
  source 1..37: mol_type = genomic DNA

SEQ ID NO: 43907 - DNA, 25 bp, Homo sapiens
  source 1..25: mol_type = genomic DNA
acaggttcgaatcctgttcgtgacg

SEQ ID NO: 43908 - DNA, 27 bp, Homo sapiens
  source 1..27: mol_type = genomic DNA
acaggttcgaatcctgttcgtgacgcc

SEQ ID NO: 43909 - DNA, 16 bp, Homo sapiens
  source 1..16: mol_type = genomic DNA
acatcagattgtgaat

SEQ ID NO: 43910 - DNA, 17 bp, Homo sapiens
  source 1..17: mol_type = genomic DNA
acatcagattgtgaatc

SEQ ID NO: 43911 - DNA, 30 bp, Homo sapiens; identical to SEQ ID NO: 2675
  source 1..30: mol_type = genomic DNA

SEQ ID NO: 43912 - DNA, 38 bp, Homo sapiens; identical to SEQ ID NO: 2683
  source 1..38: mol_type = genomic DNA

SEQ ID NO: 43913 - DNA, 16 bp, Homo sapiens
  source 1..16: mol_type = genomic DNA
acatggctttctcacc

SEQ ID NO: 43914 - DNA, 17 bp, Homo sapiens
  source 1..17: mol_type = genomic DNA
acatggctttctcacca

SEQ ID NO: 43915 - DNA, 22 bp, Homo sapiens
  source 1..22: mol_type = genomic DNA
acatggtctagcggttaggatt

SEQ ID NO: 43916 - DNA, 24 bp, Homo sapiens
  source 1..24: mol_type = genomic DNA
acatggtctagcggttaggattcc

SEQ ID NO: 43917 - DNA, 25 bp, Homo sapiens
  source 1..25: mol_type = genomic DNA
acatggtctagcggttaggattcct

SEQ ID NO: 43918 - DNA, 26 bp, Homo sapiens
  source 1..26: mol_type = genomic DNA
acatggtctagcggttaggattcctg

SEQ ID NO: 43919 - DNA, 28 bp, Homo sapiens
  source 1..28: mol_type = genomic DNA
acatggtctagcggttaggattcctggt

SEQ ID NO: 43920 - DNA, 29 bp, Homo sapiens
  source 1..29: mol_type = genomic DNA
acatggtctagcggttaggattcctggtt

SEQ ID NO: 43921 - DNA, 30 bp, Homo sapiens; identical to SEQ ID NO: 2704
  source 1..30: mol_type = genomic DNA

SEQ ID NO: 43922 - DNA, 31 bp, Homo sapiens; identical to SEQ ID NO: 2705
  source 1..31: mol_type = genomic DNA

SEQ ID NO: 43923 - DNA, 32 bp, Homo sapiens; identical to SEQ ID NO: 2706
  source 1..32: mol_type = genomic DNA

SEQ ID NO: 43924 - DNA, 22 bp, Homo sapiens
  source 1..22: mol_type = genomic DNA
accaaaacatcagattgtgaat

SEQ ID NO: 43925 - DNA, 23 bp, Homo sapiens
  source 1..23: mol_type = genomic DNA
accaaaacatcagattgtgaatc

SEQ ID NO: 43926 - DNA, 35 bp, Homo sapiens; identical to SEQ ID NO: 2728
  source 1..35: mol_type = genomic DNA

SEQ ID NO: 43927 - DNA, 36 bp, Homo sapiens; identical to SEQ ID NO: 2729
  source 1..36: mol_type = genomic DNA

SEQ ID NO: 43928 - DNA, 44 bp, Homo sapiens; identical to SEQ ID NO: 2736
  source 1..44: mol_type = genomic DNA

SEQ ID NO: 43929 - DNA, 46 bp, Homo sapiens; identical to SEQ ID NO: 2738
  source 1..46: mol_type = genomic DNA

SEQ ID NO: 43930 - DNA, 22 bp, Homo sapiens
  source 1..22: mol_type = genomic DNA
accaacacctctttacagtgac

SEQ ID NO: 43931 - DNA, 18 bp, Homo sapiens
  source 1..18: mol_type = genomic DNA
accagaatggccgagtgg

SEQ ID NO: 43932 - DNA, 25 bp, Homo sapiens
  source 1..25: mol_type = genomic DNA
accagaatggccgagtggttaaggc

SEQ ID NO: 43933 - DNA, 16 bp, Homo sapiens
  source 1..16: mol_type = genomic DNA
accaggatggccgagt

SEQ ID NO: 43934 - DNA, 17 bp, Homo sapiens
  source 1..17: mol_type = genomic DNA
accaggatggccgagtg

SEQ ID NO: 43935 - DNA, 18 bp, Homo sapiens
  source 1..18: mol_type = genomic DNA
accaggatggccgagtgg

SEQ ID NO: 43936 - DNA, 19 bp, Homo sapiens
  source 1..19: mol_type = genomic DNA
accaggatggccgagtggt

SEQ ID NO: 43937 - DNA, 22 bp, Homo sapiens
  source 1..22: mol_type = genomic DNA
accaggatggccgagtggttaa

SEQ ID NO: 43938 - DNA, 23 bp, Homo sapiens
  source 1..23: mol_type = genomic DNA
accaggatggccgagtggttaag

SEQ ID NO: 43939 - DNA, 24 bp, Homo sapiens
  source 1..24: mol_type = genomic DNA
accaggatggccgagtggttaagg

SEQ ID NO: 43940 - DNA, 25 bp, Homo sapiens
  source 1..25: mol_type = genomic DNA
accaggatggccgagtggttaaggc

SEQ ID NO: 43941 - DNA, 33 bp, Homo sapiens; identical to SEQ ID NO: 2782
  source 1..33: mol_type = genomic DNA

SEQ ID NO: 43942 - DNA, 17 bp, Homo sapiens
  source 1..17: mol_type = genomic DNA
accaggcggaaacacca

SEQ ID NO: 43943 - DNA, 35 bp, Homo sapiens; identical to SEQ ID NO: 2793
  source 1..35: mol_type = genomic DNA

SEQ ID NO: 43944 - DNA, 36 bp, Homo sapiens; identical to SEQ ID NO: 2794
  source 1..36: mol_type = genomic DNA

SEQ ID NO: 43945 - DNA, 37 bp, Homo sapiens; identical to SEQ ID NO: 2795
  source 1..37: mol_type = genomic DNA

SEQ ID NO: 43946 - DNA, 37 bp, Homo sapiens; identical to SEQ ID NO: 2798
  source 1..37: mol_type = genomic DNA

SEQ ID NO: 43947 - DNA, 16 bp, Homo sapiens
  source 1..16: mol_type = genomic DNA
accatcctctgctacc

SEQ ID NO: 43948 - DNA, 17 bp, Homo sapiens
  source 1..17: mol_type = genomic DNA
accatcctctgctacca

SEQ ID NO: 43949 - DNA, 43 bp, Homo sapiens; identical to SEQ ID NO: 2831
  source 1..43: mol_type = genomic DNA

SEQ ID NO: 43950 - DNA, 45 bp, Homo sapiens; identical to SEQ ID NO: 2833
  source 1..45: mol_type = genomic DNA

SEQ ID NO: 43951 - DNA, 46 bp, Homo sapiens; identical to SEQ ID NO: 2834
  source 1..46: mol_type = genomic DNA

SEQ ID NO: 43952 - DNA, 47 bp, Homo sapiens; identical to SEQ ID NO: 2835
  source 1..47: mol_type = genomic DNA

SEQ ID NO: 43953 - DNA, 18 bp, Homo sapiens
  source 1..18: mol_type = genomic DNA
acccagaggtcgatggat

SEQ ID NO: 43954 - DNA, 19 bp, Homo sapiens
  source 1..19: mol_type = genomic DNA
acccagaggtcgatggatc

SEQ ID NO: 43955 - DNA, 20 bp, Homo sapiens
  source 1..20: mol_type = genomic DNA
acccagaggtcgatggatcg

SEQ ID NO: 43956 - DNA, 21 bp, Homo sapiens
  source 1..21: mol_type = genomic DNA
acccagaggtcgatggatcga

SEQ ID NO: 43957 - DNA, 38 bp, Homo sapiens; identical to SEQ ID NO: 31995
  source 1..38: mol_type = genomic DNA

SEQ ID NO: 43958 - DNA, 30 bp, Homo sapiens; identical to SEQ ID NO: 2849
  source 1..30: mol_type = genomic DNA

SEQ ID NO: 43959 - DNA, 32 bp, Homo sapiens; identical to SEQ ID NO: 2851
  source 1..32: mol_type = genomic DNA

SEQ ID NO: 43960 - DNA, 33 bp, Homo sapiens; identical to SEQ ID NO: 2852
  source 1..33: mol_type = genomic DNA

SEQ ID NO: 43961 - DNA, 34 bp, Homo sapiens; identical to SEQ ID NO: 2853
  source 1..34: mol_type = genomic DNA

SEQ ID NO: 43962 - DNA, 35 bp, Homo sapiens; identical to SEQ ID NO: 2854
  source 1..35: mol_type = genomic DNA

SEQ ID NO: 43963 - DNA, 36 bp, Homo sapiens; identical to SEQ ID NO: 2855
  source 1..36: mol_type = genomic DNA

SEQ ID NO: 43964 - DNA, 37 bp, Homo sapiens; identical to SEQ ID NO: 2856
  source 1..37: mol_type = genomic DNA

SEQ ID NO: 43965 - DNA, 38 bp, Homo sapiens; identical to SEQ ID NO: 2857
  source 1..38: mol_type = genomic DNA

SEQ ID NO: 43966 - DNA, 39 bp, Homo sapiens; identical to SEQ ID NO: 2858
  source 1..39: mol_type = genomic DNA

SEQ ID NO: 43967 - DNA, 16 bp, Homo sapiens
  source 1..16: mol_type = genomic DNA
accccactcctggtac

SEQ ID NO: 43968 - DNA, 17 bp, Homo sapiens
  source 1..17: mol_type = genomic DNA
accccactcctggtacc

SEQ ID NO: 43969 - DNA, 18 bp, Homo sapiens
  source 1..18: mol_type = genomic DNA
accccactcctggtacca

SEQ ID NO: 43970 - DNA, 18 bp, Homo sapiens
  source 1..18: mol_type = genomic DNA
accccacttctggtacca

SEQ ID NO: 43971 - DNA, 17 bp, Homo sapiens
  source 1..17: mol_type = genomic DNA
accccgtacgggccacc

SEQ ID NO: 43972 - DNA, 16 bp, Homo sapiens
  source 1..16: mol_type = genomic DNA
accccgtccgtgcctc

SEQ ID NO: 43973 - DNA, 17 bp, Homo sapiens
  source 1..17: mol_type = genomic DNA
accccgtccgtgcctcc

SEQ ID NO: 43974 - DNA, 18 bp, Homo sapiens
  source 1..18: mol_type = genomic DNA
accccgtccgtgcctcca

SEQ ID NO: 43975 - DNA, 28 bp, Homo sapiens
  source 1..28: mol_type = genomic DNA
acccgggttcgattcccgggcggcgcac

SEQ ID NO: 43976 - DNA, 16 bp, Homo sapiens
  source 1..16: mol_type = genomic DNA
accctgctcgctgcgc

SEQ ID NO: 43977 - DNA, 17 bp, Homo sapiens
  source 1..17: mol_type = genomic DNA
accctgctcgctgcgcc

SEQ ID NO: 43978 - DNA, 18 bp, Homo sapiens
  source 1..18: mol_type = genomic DNA
accctgctcgctgcgcca

SEQ ID NO: 43979 - DNA, 38 bp, Homo sapiens; identical to SEQ ID NO: 2912
  source 1..38: mol_type = genomic DNA

SEQ ID NO: 43980 - DNA, 34 bp, Homo sapiens; identical to SEQ ID NO: 2916
  source 1..34: mol_type = genomic DNA

SEQ ID NO: 43981 - DNA, 35 bp, Homo sapiens; identical to SEQ ID NO: 2917
  source 1..35: mol_type = genomic DNA

SEQ ID NO: 43982 - DNA, 36 bp, Homo sapiens; identical to SEQ ID NO: 2918
  source 1..36: mol_type = genomic DNA

SEQ ID NO: 43983 - DNA, 37 bp, Homo sapiens; identical to SEQ ID NO: 2919
  source 1..37: mol_type = genomic DNA

SEQ ID NO: 43984 - DNA, 16 bp, Homo sapiens
  source 1..16: mol_type = genomic DNA
accgaagatcgcgggt

SEQ ID NO: 43985 - DNA, 34 bp, Homo sapiens; identical to SEQ ID NO: 2926
  source 1..34: mol_type = genomic DNA

SEQ ID NO: 43986 - DNA, 35 bp, Homo sapiens; identical to SEQ ID NO: 2927
  source 1..35: mol_type = genomic DNA

SEQ ID NO: 43987 - DNA, 36 bp, Homo sapiens; identical to SEQ ID NO: 2928
  source 1..36: mol_type = genomic DNA

SEQ ID NO: 43988 - DNA, 37 bp, Homo sapiens; identical to SEQ ID NO: 2929
  source 1..37: mol_type = genomic DNA

SEQ ID NO: 43989 - DNA, 38 bp, Homo sapiens; identical to SEQ ID NO: 2930
  source 1..38: mol_type = genomic DNA

SEQ ID NO: 43990 - DNA, 16 bp, Homo sapiens
  source 1..16: mol_type = genomic DNA
accgccgcggcccggg

SEQ ID NO: 43991 - DNA, 18 bp, Homo sapiens
  source 1..18: mol_type = genomic DNA
accgccgcggcccgggtt

SEQ ID NO: 43992 - DNA, 33 bp, Homo sapiens; identical to SEQ ID NO: 2952
  source 1..33: mol_type = genomic DNA

SEQ ID NO: 43993 - DNA, 34 bp, Homo sapiens; identical to SEQ ID NO: 2955
  source 1..34: mol_type = genomic DNA

SEQ ID NO: 43994 - DNA, 35 bp, Homo sapiens; identical to SEQ ID NO: 2956
  source 1..35: mol_type = genomic DNA

SEQ ID NO: 43995 - DNA, 36 bp, Homo sapiens; identical to SEQ ID NO: 2957
  source 1..36: mol_type = genomic DNA

SEQ ID NO: 43996 - DNA, 37 bp, Homo sapiens; identical to SEQ ID NO: 2958
  source 1..37: mol_type = genomic DNA

SEQ ID NO: 43997 - DNA, 38 bp, Homo sapiens; identical to SEQ ID NO: 2959
  source 1..38: mol_type = genomic DNA

SEQ ID NO: 43998 - DNA, 39 bp, Homo sapiens; identical to SEQ ID NO: 2960
  source 1..39: mol_type = genomic DNA

SEQ ID NO: 43999 - DNA, 30 bp, Homo sapiens; identical to SEQ ID NO: 2977
  source 1..30: mol_type = genomic DNA

SEQ ID NO: 44000 - DNA, 32 bp, Homo sapiens; identical to SEQ ID NO: 2979
  source 1..32: mol_type = genomic DNA

SEQ ID NO: 44001 - DNA, 33 bp, Homo sapiens; identical to SEQ ID NO: 2980
  source 1..33: mol_type = genomic DNA

SEQ ID NO: 44002 - DNA, 16 bp, Homo sapiens
  source 1..16: mol_type = genomic DNA
accgggcagaagcacc

SEQ ID NO: 44003 - DNA, 17 bp, Homo sapiens
  source 1..17: mol_type = genomic DNA
accgggcagaagcacca

SEQ ID NO: 44004 - DNA, 16 bp, Homo sapiens
  source 1..16: mol_type = genomic DNA
accgggcggaaacacc

SEQ ID NO: 44005 - DNA, 17 bp, Homo sapiens
  source 1..17: mol_type = genomic DNA
accgggcggaaacacca

SEQ ID NO: 44006 - DNA, 28 bp, Homo sapiens
  source 1..28: mol_type = genomic DNA
accggggttcaattccccgacggggagc

SEQ ID NO: 44007 - DNA, 29 bp, Homo sapiens
  source 1..29: mol_type = genomic DNA
accggggttcaattccccgacggggagcc

SEQ ID NO: 44008 - DNA, 25 bp, Homo sapiens
  source 1..25: mol_type = genomic DNA
accggggttcgattccccgacgggg

SEQ ID NO: 44009 - DNA, 27 bp, Homo sapiens
  source 1..27: mol_type = genomic DNA
accggggttcgattccccgacggggag

SEQ ID NO: 44010 - DNA, 28 bp, Homo sapiens
  source 1..28: mol_type = genomic DNA
accggggttcgattccccgacggggagc

SEQ ID NO: 44011 - DNA, 29 bp, Homo sapiens
  source 1..29: mol_type = genomic DNA
accggggttcgattccccgacggggagcc

SEQ ID NO: 44012 - DNA, 30 bp, Homo sapiens; identical to SEQ ID NO: 2992
  source 1..30: mol_type = genomic DNA

SEQ ID NO: 44013 - DNA, 17 bp, Homo sapiens
  source 1..17: mol_type = genomic DNA
acctcagagggggcacc

SEQ ID NO: 44014 - DNA, 18 bp, Homo sapiens
  source 1..18: mol_type = genomic DNA
acctcagagggggcacca

SEQ ID NO: 44015 - DNA, 16 bp, Homo sapiens
  source 1..16: mol_type = genomic DNA
acctctttacagtgac

SEQ ID NO: 44016 - DNA, 17 bp, Homo sapiens
  source 1..17: mol_type = genomic DNA
acctctttacagtgacc

SEQ ID NO: 44017 - DNA, 18 bp, Homo sapiens
  source 1..18: mol_type = genomic DNA
acctctttacagtgacca

SEQ ID NO: 44018 - DNA, 16 bp, Homo sapiens
  source 1..16: mol_type = genomic DNA
acctgccggggcttcc

SEQ ID NO: 44019 - DNA, 17 bp, Homo sapiens
  source 1..17: mol_type = genomic DNA
acctgccggggcttcca

SEQ ID NO: 44020 - DNA, 35 bp, Homo sapiens; identical to SEQ ID NO: 3028
  source 1..35: mol_type = genomic DNA

SEQ ID NO: 44021 - DNA, 17 bp, Homo sapiens
  source 1..17: mol_type = genomic DNA
acctttttccaaggaca

SEQ ID NO: 44022 - DNA, 16 bp, Homo sapiens
  source 1..16: mol_type = genomic DNA
acgaatgatttcgact

SEQ ID NO: 44023 - DNA, 17 bp, Homo sapiens
  source 1..17: mol_type = genomic DNA
acgaatgatttcgactc

SEQ ID NO: 44024 - DNA, 18 bp, Homo sapiens
  source 1..18: mol_type = genomic DNA
acgaatgatttcgactca

SEQ ID NO: 44025 - DNA, 35 bp, Homo sapiens; identical to SEQ ID NO: 3066
  source 1..35: mol_type = genomic DNA

SEQ ID NO: 44026 - DNA, 36 bp, Homo sapiens; identical to SEQ ID NO: 3067
  source 1..36: mol_type = genomic DNA

SEQ ID NO: 44027 - DNA, 32 bp, Homo sapiens; identical to SEQ ID NO: 3076
  source 1..32: mol_type = genomic DNA

SEQ ID NO: 44028 - DNA, 37 bp, Homo sapiens; identical to SEQ ID NO: 3081
  source 1..37: mol_type = genomic DNA

SEQ ID NO: 44029 - DNA, 38 bp, Homo sapiens; identical to SEQ ID NO: 3082
  source 1..38: mol_type = genomic DNA

SEQ ID NO: 44030 - DNA, 40 bp, Homo sapiens; identical to SEQ ID NO: 3084
  source 1..40: mol_type = genomic DNA

SEQ ID NO: 44031 - DNA, 43 bp, Homo sapiens; identical to SEQ ID NO: 3087
  source 1..43: mol_type = genomic DNA

SEQ ID NO: 44032 - DNA, 46 bp, Homo sapiens; identical to SEQ ID NO: 3089
  source 1..46: mol_type = genomic DNA

SEQ ID NO: 44033 - DNA, 47 bp, Homo sapiens; identical to SEQ ID NO: 3090
  source 1..47: mol_type = genomic DNA

SEQ ID NO: 44034 - DNA, 35 bp, Homo sapiens; identical to SEQ ID NO: 3096
  source 1..35: mol_type = genomic DNA

SEQ ID NO: 44035 - DNA, 36 bp, Homo sapiens; identical to SEQ ID NO: 3097
  source 1..36: mol_type = genomic DNA

SEQ ID NO: 44036 - DNA, 37 bp, Homo sapiens; identical to SEQ ID NO: 3098
  source 1..37: mol_type = genomic DNA

SEQ ID NO: 44037 - DNA, 38 bp, Homo sapiens; identical to SEQ ID NO: 3099
  source 1..38: mol_type = genomic DNA

SEQ ID NO: 44038 - DNA, 39 bp, Homo sapiens; identical to SEQ ID NO: 3100
  source 1..39: mol_type = genomic DNA

SEQ ID NO: 44039 - DNA, 40 bp, Homo sapiens; identical to SEQ ID NO: 3101
  source 1..40: mol_type = genomic DNA

SEQ ID NO: 44040 - DNA, 17 bp, Homo sapiens
  source 1..17: mol_type = genomic DNA
acgccaaggtcgcgggt

SEQ ID NO: 44041 - DNA, 33 bp, Homo sapiens; identical to SEQ ID NO: 3112
  source 1..33: mol_type = genomic DNA

SEQ ID NO: 44042 - DNA, 38 bp, Homo sapiens; identical to SEQ ID NO: 3115
  source 1..38: mol_type = genomic DNA

SEQ ID NO: 44043 - DNA, 39 bp, Homo sapiens; identical to SEQ ID NO: 3116
  source 1..39: mol_type = genomic DNA

SEQ ID NO: 44044 - DNA, 17 bp, Homo sapiens
  source 1..17: mol_type = genomic DNA
acgcgaaaggtccccgg

SEQ ID NO: 44045 - DNA, 18 bp, Homo sapiens
  source 1..18: mol_type = genomic DNA
acgcgaaaggtccccggt

SEQ ID NO: 44046 - DNA, 33 bp, Homo sapiens
  source 1..33: mol_type = genomic DNA
acgcgaaaggtccccggttcgaaaccgggcgga

SEQ ID NO: 44047 - DNA, 36 bp, Homo sapiens; identical to SEQ ID NO: 3127
  source 1..36: mol_type = genomic DNA

SEQ ID NO: 44048 - DNA, 37 bp, Homo sapiens; identical to SEQ ID NO: 3128
  source 1..37: mol_type = genomic DNA

SEQ ID NO: 44049 - DNA, 39 bp, Homo sapiens; identical to SEQ ID NO: 3130
  source 1..39: mol_type = genomic DNA

SEQ ID NO: 44050 - DNA, 38 bp, Homo sapiens; identical to SEQ ID NO: 3137
  source 1..38: mol_type = genomic DNA

SEQ ID NO: 44051 - DNA, 17 bp, Homo sapiens
  source 1..17: mol_type = genomic DNA
acgcgggagaccggggt

SEQ ID NO: 44052 - DNA, 33 bp, Homo sapiens; identical to SEQ ID NO: 3142
  source 1..33: mol_type = genomic DNA

SEQ ID NO: 44053 - DNA, 34 bp, Homo sapiens; identical to SEQ ID NO: 3143
  source 1..34: mol_type = genomic DNA

SEQ ID NO: 44054 - DNA, 35 bp, Homo sapiens; identical to SEQ ID NO: 3144
  source 1..35: mol_type = genomic DNA

SEQ ID NO: 44055 - DNA, 37 bp, Homo sapiens; identical to SEQ ID NO: 3146
  source 1..37: mol_type = genomic DNA

SEQ ID NO: 44056 - DNA, 38 bp, Homo sapiens; identical to SEQ ID NO: 3147
  source 1..38: mol_type = genomic DNA

SEQ ID NO: 44057 - DNA, 39 bp, Homo sapiens; identical to SEQ ID NO: 3148
  source 1..39: mol_type = genomic DNA

SEQ ID NO: 44058 - DNA, 29 bp, Homo sapiens
  source 1..29: mol_type = genomic DNA
acgcgggagaccggggttcgattccccga

SEQ ID NO: 44059 - DNA, 30 bp, Homo sapiens; identical to SEQ ID NO: 3155
  source 1..30: mol_type = genomic DNA

SEQ ID NO: 44060 - DNA, 31 bp, Homo sapiens; identical to SEQ ID NO: 3156
  source 1..31: mol_type = genomic DNA

SEQ ID NO: 44061 - DNA, 32 bp, Homo sapiens; identical to SEQ ID NO: 3157
  source 1..32: mol_type = genomic DNA

SEQ ID NO: 44062 - DNA, 33 bp, Homo sapiens; identical to SEQ ID NO: 3158
  source 1..33: mol_type = genomic DNA

SEQ ID NO: 44063 - DNA, 34 bp, Homo sapiens; identical to SEQ ID NO: 3159
  source 1..34: mol_type = genomic DNA

SEQ ID NO: 44064 - DNA, 35 bp, Homo sapiens; identical to SEQ ID NO: 3160
  source 1..35: mol_type = genomic DNA

SEQ ID NO: 44065 - DNA, 36 bp, Homo sapiens; identical to SEQ ID NO: 3161
  source 1..36: mol_type = genomic DNA

SEQ ID NO: 44066 - DNA, 37 bp, Homo sapiens; identical to SEQ ID NO: 3162
  source 1..37: mol_type = genomic DNA

SEQ ID NO: 44067 - DNA, 38 bp, Homo sapiens; identical to SEQ ID NO: 3163
  source 1..38: mol_type = genomic DNA

SEQ ID NO: 44068 - DNA, 39 bp, Homo sapiens; identical to SEQ ID NO: 3164
  source 1..39: mol_type = genomic DNA

SEQ ID NO: 44069 - DNA, 16 bp, Homo sapiens
  source 1..16: mol_type = genomic DNA
acgcgggaggcccggg

SEQ ID NO: 44070 - DNA, 17 bp, Homo sapiens
  source 1..17: mol_type = genomic DNA
acgcgggaggcccgggt

SEQ ID NO: 44071 - DNA, 30 bp, Homo sapiens; identical to SEQ ID NO: 3169
  source 1..30: mol_type = genomic DNA

SEQ ID NO: 44072 - DNA, 32 bp, Homo sapiens; identical to SEQ ID NO: 3170
  source 1..32: mol_type = genomic DNA

SEQ ID NO: 44073 - DNA, 34 bp, Homo sapiens; identical to SEQ ID NO: 3172
  source 1..34: mol_type = genomic DNA

SEQ ID NO: 44074 - DNA, 35 bp, Homo sapiens; identical to SEQ ID NO: 3173
  source 1..35: mol_type = genomic DNA

SEQ ID NO: 44075 - DNA, 36 bp, Homo sapiens; identical to SEQ ID NO: 3174
  source 1..36: mol_type = genomic DNA

SEQ ID NO: 44076 - DNA, 37 bp, Homo sapiens; identical to SEQ ID NO: 3175
  source 1..37: mol_type = genomic DNA

SEQ ID NO: 44077 - DNA, 38 bp, Homo sapiens; identical to SEQ ID NO: 3176
  source 1..38: mol_type = genomic DNA

SEQ ID NO: 44078 - DNA, 39 bp, Homo sapiens; identical to SEQ ID NO: 3177
  source 1..39: mol_type = genomic DNA

SEQ ID NO: 44079 - DNA, 34 bp, Homo sapiens; identical to SEQ ID NO: 3179
  source 1..34: mol_type = genomic DNA

SEQ ID NO: 44080 - DNA, 38 bp, Homo sapiens; identical to SEQ ID NO: 3181
  source 1..38: mol_type = genomic DNA

SEQ ID NO: 44081 - DNA, 24 bp, Homo sapiens
  source 1..24: mol_type = genomic DNA
acgcgtgggttcgaatcccatcct

SEQ ID NO: 44082 - DNA, 26 bp, Homo sapiens
  source 1..26: mol_type = genomic DNA
acgcgtgggttcgaatcccatcctcg

SEQ ID NO: 44083 - DNA, 30 bp, Homo sapiens; identical to SEQ ID NO: 3185
  source 1..30: mol_type = genomic DNA

SEQ ID NO: 44084 - DNA, 31 bp, Homo sapiens; identical to SEQ ID NO: 3186
  source 1..31: mol_type = genomic DNA

SEQ ID NO: 44085 - DNA, 32 bp, Homo sapiens; identical to SEQ ID NO: 3187
  source 1..32: mol_type = genomic DNA

SEQ ID NO: 44086 - DNA, 16 bp, Homo sapiens
  source 1..16: mol_type = genomic DNA
acgggctcacatcacc

SEQ ID NO: 44087 - DNA, 28 bp, Homo sapiens
  source 1..28: mol_type = genomic DNA
acgggctcacatcaccccataaacacca

SEQ ID NO: 44088 - DNA, 18 bp, Homo sapiens
  source 1..18: mol_type = genomic DNA
acggtagcgcgtctgact

SEQ ID NO: 44089 - DNA, 20 bp, Homo sapiens
  source 1..20: mol_type = genomic DNA
acggtagcgcgtctgactcc

SEQ ID NO: 44090 - DNA, 39 bp, Homo sapiens; identical to SEQ ID NO: 3206
  source 1..39: mol_type = genomic DNA

SEQ ID NO: 44091 - DNA, 40 bp, Homo sapiens
  source 1..40: mol_type = genomic DNA
acgtatgaggccccgggttcaatccccggcatctccacca

SEQ ID NO: 44092 - DNA, 29 bp, Homo sapiens
  source 1..29: mol_type = genomic DNA
acgtgggttcgaatcccatcctcgtcgcc

SEQ ID NO: 44093 - DNA, 30 bp, Homo sapiens
  source 1..30: mol_type = genomic DNA
acgtgggttcgaatcccatcctcgtcgcca

SEQ ID NO: 44094 - DNA, 17 bp, Homo sapiens
  source 1..17: mol_type = genomic DNA
acgttcgcctcacacgc

SEQ ID NO: 44095 - DNA, 23 bp, Homo sapiens
  source 1..23: mol_type = genomic DNA
actaagtgtttgtgggtttaagt

SEQ ID NO: 44096 - DNA, 36 bp, Homo sapiens; identical to SEQ ID NO: 3224
  source 1..36: mol_type = genomic DNA

SEQ ID NO: 44097 - DNA, 16 bp, Homo sapiens
  source 1..16: mol_type = genomic DNA
actcaagttctggtct

SEQ ID NO: 44098 - DNA, 17 bp, Homo sapiens
  source 1..17: mol_type = genomic DNA
actcaagttctggtctc

SEQ ID NO: 44099 - DNA, 18 bp, Homo sapiens
  source 1..18: mol_type = genomic DNA
actcaagttctggtctcc

SEQ ID NO: 44100 - DNA, 30 bp, Homo sapiens; identical to SEQ ID NO: 3258
  source 1..30: mol_type = genomic DNA

SEQ ID NO: 44101 - DNA, 39 bp, Homo sapiens; identical to SEQ ID NO: 3267
  source 1..39: mol_type = genomic DNA

SEQ ID NO: 44102 - DNA, 20 bp, Homo sapiens
  source 1..20: mol_type = genomic DNA
actccagatcagaaggctgc

SEQ ID NO: 44103 - DNA, 17 bp, Homo sapiens
  source 1..17: mol_type = genomic DNA
actcccggtatgggaac

SEQ ID NO: 44104 - DNA, 16 bp, Homo sapiens
  source 1..16: mol_type = genomic DNA
actcccggtgtgggaa

SEQ ID NO: 44105 - DNA, 17 bp, Homo sapiens
  source 1..17: mol_type = genomic DNA
actcccggtgtgggaac

SEQ ID NO: 44106 - DNA, 18 bp, Homo sapiens
  source 1..18: mol_type = genomic DNA
actcccggtgtgggaacc

SEQ ID NO: 44107 - DNA, 19 bp, Homo sapiens
  source 1..19: mol_type = genomic DNA
actcccggtgtgggaacca

SEQ ID NO: 44108 - DNA, 17 bp, Homo sapiens
  source 1..17: mol_type = genomic DNA
actcctggctggctcgc

SEQ ID NO: 44109 - DNA, 18 bp, Homo sapiens
  source 1..18: mol_type = genomic DNA
actcctggctggctcgcc

SEQ ID NO: 44110 - DNA, 19 bp, Homo sapiens
  source 1..19: mol_type = genomic DNA
actcctggctggctcgcca

SEQ ID NO: 44111 - DNA, 16 bp, Homo sapiens
  source 1..16: mol_type = genomic DNA
actctggactctgaat

SEQ ID NO: 44112 - DNA, 17 bp, Homo sapiens
  source 1..17: mol_type = genomic DNA
actctggactctgaatc

SEQ ID NO: 44113 - DNA, 18 bp, Homo sapiens
  source 1..18: mol_type = genomic DNA
actctggactctgaatcc

SEQ ID NO: 44114 - DNA, 19 bp, Homo sapiens
  source 1..19: mol_type = genomic DNA
actctggactctgaatcca

SEQ ID NO: 44115 - DNA, 20 bp, Homo sapiens
  source 1..20: mol_type = genomic DNA
actctggactctgaatccag

SEQ ID NO: 44116 - DNA, 21 bp, Homo sapiens
  source 1..21: mol_type = genomic DNA
actctggactctgaatccagc

SEQ ID NO: 44117 - DNA, 26 bp, Homo sapiens
  source 1..26: mol_type = genomic DNA
actctggactctgaatccagcgatcc

SEQ ID NO: 44118 - DNA, 28 bp, Homo sapiens
  source 1..28: mol_type = genomic DNA
actctggactctgaatccagcgatccga

SEQ ID NO: 44119 - DNA, 29 bp, Homo sapiens
  source 1..29: mol_type = genomic DNA
actctggactctgaatccagcgatccgag

SEQ ID NO: 44120 - DNA, 30 bp, Homo sapiens; identical to SEQ ID NO: 3319
  source 1..30: mol_type = genomic DNA

SEQ ID NO: 44121 - DNA, 31 bp, Homo sapiens; identical to SEQ ID NO: 3320
  source 1..31: mol_type = genomic DNA

SEQ ID NO: 44122 - DNA, 32 bp, Homo sapiens; identical to SEQ ID NO: 3321
  source 1..32: mol_type = genomic DNA

SEQ ID NO: 44123 - DNA, 33 bp, Homo sapiens; identical to SEQ ID NO: 3322
  source 1..33: mol_type = genomic DNA

SEQ ID NO: 44124 - DNA, 17 bp, Homo sapiens
  source 1..17: mol_type = genomic DNA
actctggactttgaatc

SEQ ID NO: 44125 - DNA, 18 bp, Homo sapiens
  source 1..18: mol_type = genomic DNA
actctggactttgaatcc

SEQ ID NO: 44126 - DNA, 20 bp, Homo sapiens
  source 1..20: mol_type = genomic DNA
actcttaatcccagggtcgt

SEQ ID NO: 44127 - DNA, 30 bp, Homo sapiens; identical to SEQ ID NO: 3341
  source 1..30: mol_type = genomic DNA

SEQ ID NO: 44128 - DNA, 31 bp, Homo sapiens; identical to SEQ ID NO: 3342
  source 1..31: mol_type = genomic DNA

SEQ ID NO: 44129 - DNA, 22 bp, Homo sapiens
  source 1..22: mol_type = genomic DNA
actgaaaatgtttagacgggct

SEQ ID NO: 44130 - DNA, 32 bp, Homo sapiens; identical to SEQ ID NO: 3384
  source 1..32: mol_type = genomic DNA

SEQ ID NO: 44131 - DNA, 37 bp, Homo sapiens; identical to SEQ ID NO: 3389
  source 1..37: mol_type = genomic DNA

SEQ ID NO: 44132 - DNA, 16 bp, Homo sapiens
  source 1..16: mol_type = genomic DNA
actgggcggaaacacc

SEQ ID NO: 44133 - DNA, 26 bp, Homo sapiens
  source 1..26: mol_type = genomic DNA
actggtggttcagtggtagaattctc

SEQ ID NO: 44134 - DNA, 28 bp, Homo sapiens
  source 1..28: mol_type = genomic DNA
actggtggttcagtggtagaattctcgc

SEQ ID NO: 44135 - DNA, 29 bp, Homo sapiens
  source 1..29: mol_type = genomic DNA
actggtggttcagtggtagaattctcgcc

SEQ ID NO: 44136 - DNA, 30 bp, Homo sapiens; identical to SEQ ID NO: 3403
  source 1..30: mol_type = genomic DNA

SEQ ID NO: 44137 - DNA, 16 bp, Homo sapiens
  source 1..16: mol_type = genomic DNA
acttaacttgaccgct

SEQ ID NO: 44138 - DNA, 17 bp, Homo sapiens
  source 1..17: mol_type = genomic DNA
acttaacttgaccgctc

SEQ ID NO: 44139 - DNA, 19 bp, Homo sapiens
  source 1..19: mol_type = genomic DNA
acttaacttgaccgctctg

SEQ ID NO: 44140 - DNA, 20 bp, Homo sapiens
  source 1..20: mol_type = genomic DNA
acttaacttgaccgctctga

SEQ ID NO: 44141 - DNA, 21 bp, Homo sapiens
  source 1..21: mol_type = genomic DNA
acttaacttgaccgctctgac

SEQ ID NO: 44142 - DNA, 22 bp, Homo sapiens
  source 1..22: mol_type = genomic DNA
acttaacttgaccgctctgacc

SEQ ID NO: 44143 - DNA, 23 bp, Homo sapiens
  source 1..23: mol_type = genomic DNA
acttaacttgaccgctctgacca

SEQ ID NO: 44144 - DNA, 37 bp, Homo sapiens; identical to SEQ ID NO: 3450
  source 1..37: mol_type = genomic DNA

SEQ ID NO: 44145 - DNA, 39 bp, Homo sapiens; identical to SEQ ID NO: 3452
  source 1..39: mol_type = genomic DNA

SEQ ID NO: 44146 - DNA, 40 bp, Homo sapiens; identical to SEQ ID NO: 3453
  source 1..40: mol_type = genomic DNA

SEQ ID NO: 44147 - DNA, 41 bp, Homo sapiens; identical to SEQ ID NO: 3454
  source 1..41: mol_type = genomic DNA

SEQ ID NO: 44148 - DNA, 42 bp, Homo sapiens; identical to SEQ ID NO: 3455
  source 1..42: mol_type = genomic DNA

SEQ ID NO: 44149 - DNA, 43 bp, Homo sapiens; identical to SEQ ID NO: 3456
  source 1..43: mol_type = genomic DNA

SEQ ID NO: 44150 - DNA, 44 bp, Homo sapiens; identical to SEQ ID NO: 3457
  source 1..44: mol_type = genomic DNA

SEQ ID NO: 44151 - DNA, 28 bp, Homo sapiens
  source 1..28: mol_type = genomic DNA
acttaggagatttcaacttaacttgacc

SEQ ID NO: 44152 - DNA, 31 bp, Homo sapiens; identical to SEQ ID NO: 3479
  source 1..31: mol_type = genomic DNA

SEQ ID NO: 44153 - DNA, 32 bp, Homo sapiens; identical to SEQ ID NO: 3480
  source 1..32: mol_type = genomic DNA

SEQ ID NO: 44154 - DNA, 34 bp, Homo sapiens; identical to SEQ ID NO: 3482
  source 1..34: mol_type = genomic DNA

SEQ ID NO: 44155 - DNA, 35 bp, Homo sapiens; identical to SEQ ID NO: 3483
  source 1..35: mol_type = genomic DNA

SEQ ID NO: 44156 - DNA, 36 bp, Homo sapiens; identical to SEQ ID NO: 3484
  source 1..36: mol_type = genomic DNA

SEQ ID NO: 44157 - DNA, 37 bp, Homo sapiens; identical to SEQ ID NO: 3485
  source 1..37: mol_type = genomic DNA

SEQ ID NO: 44158 - DNA, 38 bp, Homo sapiens; identical to SEQ ID NO: 3486
  source 1..38: mol_type = genomic DNA

SEQ ID NO: 44159 - DNA, 45 bp, Homo sapiens; identical to SEQ ID NO: 3509
  source 1..45: mol_type = genomic DNA

SEQ ID NO: 44160 - DNA, 16 bp, Homo sapiens
  source 1..16: mol_type = genomic DNA
acttgaccgctctgac

SEQ ID NO: 44161 - DNA, 17 bp, Homo sapiens
  source 1..17: mol_type = genomic DNA
acttgaccgctctgacc

SEQ ID NO: 44162 - DNA, 18 bp, Homo sapiens
  source 1..18: mol_type = genomic DNA
acttgaccgctctgacca

SEQ ID NO: 44163 - DNA, 16 bp, Homo sapiens
  source 1..16: mol_type = genomic DNA
actttacagtcagagg

SEQ ID NO: 44164 - DNA, 21 bp, Homo sapiens
  source 1..21: mol_type = genomic DNA
actttgaatccagcgatccga

SEQ ID NO: 44165 - DNA, 23 bp, Homo sapiens
  source 1..23: mol_type = genomic DNA
actttgaatccagcgatccgagt

SEQ ID NO: 44166 - DNA, 26 bp, Homo sapiens
  source 1..26: mol_type = genomic DNA
actttgatagagtaaataataggagc

SEQ ID NO: 44167 - DNA, 34 bp, Homo sapiens; identical to SEQ ID NO: 3547
  source 1..34: mol_type = genomic DNA

SEQ ID NO: 44168 - DNA, 35 bp, Homo sapiens; identical to SEQ ID NO: 3548
  source 1..35: mol_type = genomic DNA

SEQ ID NO: 44169 - DNA, 36 bp, Homo sapiens; identical to SEQ ID NO: 3549
  source 1..36: mol_type = genomic DNA

SEQ ID NO: 44170 - DNA, 39 bp, Homo sapiens; identical to SEQ ID NO: 3552
  source 1..39: mol_type = genomic DNA

SEQ ID NO: 44171 - DNA, 25 bp, Homo sapiens
  source 1..25: mol_type = genomic DNA
actttgtcaaagttaaattataggc

SEQ ID NO: 44172 - DNA, 26 bp, Homo sapiens
  source 1..26: mol_type = genomic DNA
actttgtcaaagttaaattataggct

SEQ ID NO: 44173 - DNA, 36 bp, Homo sapiens; identical to SEQ ID NO: 3570
  source 1..36: mol_type = genomic DNA

SEQ ID NO: 44174 - DNA, 16 bp, Homo sapiens
  source 1..16: mol_type = genomic DNA
acttttaaaggataac

SEQ ID NO: 44175 - DNA, 31 bp, Homo sapiens; identical to SEQ ID NO: 3591
  source 1..31: mol_type = genomic DNA

SEQ ID NO: 44176 - DNA, 32 bp, Homo sapiens; identical to SEQ ID NO: 3592
  source 1..32: mol_type = genomic DNA

SEQ ID NO: 44177 - DNA, 33 bp, Homo sapiens; identical to SEQ ID NO: 3593
  source 1..33: mol_type = genomic DNA

SEQ ID NO: 44178 - DNA, 16 bp, Homo sapiens
  source 1..16: mol_type = genomic DNA
actttttctctgacca

SEQ ID NO: 44179 - DNA, 32 bp, Homo sapiens; identical to SEQ ID NO: 3619
  source 1..32: mol_type = genomic DNA

SEQ ID NO: 44180 - DNA, 47 bp, Homo sapiens; identical to SEQ ID NO: 3633
  source 1..47: mol_type = genomic DNA

SEQ ID NO: 44181 - DNA, 39 bp, Homo sapiens; identical to SEQ ID NO: 3658
  source 1..39: mol_type = genomic DNA

SEQ ID NO: 44182 - DNA, 17 bp, Homo sapiens
  source 1..17: mol_type = genomic DNA
agaactgctaactcatg

SEQ ID NO: 44183 - DNA, 18 bp, Homo sapiens
  source 1..18: mol_type = genomic DNA
agaactgctaactcatgc

SEQ ID NO: 44184 - DNA, 19 bp, Homo sapiens
  source 1..19: mol_type = genomic DNA
agaactgctaactcatgcc

SEQ ID NO: 44185 - DNA, 22 bp, Homo sapiens
  source 1..22: mol_type = genomic DNA
agaactgctaactcatgccccc

SEQ ID NO: 44186 - DNA, 25 bp, Homo sapiens
  source 1..25: mol_type = genomic DNA
agaactgctaactcatgcccccatg

SEQ ID NO: 44187 - DNA, 26 bp, Homo sapiens
  source 1..26: mol_type = genomic DNA
agaactgctaactcatgcccccatgt

SEQ ID NO: 44188 - DNA, 27 bp, Homo sapiens
  source 1..27: mol_type = genomic DNA
agaactgctaactcatgcccccatgtc

SEQ ID NO: 44189 - DNA, 28 bp, Homo sapiens
  source 1..28: mol_type = genomic DNA
agaactgctaactcatgcccccatgtct

SEQ ID NO: 44190 - DNA, 32 bp, Homo sapiens; identical to SEQ ID NO: 3704
  source 1..32: mol_type = genomic DNA

SEQ ID NO: 44191 - DNA, 35 bp, Homo sapiens; identical to SEQ ID NO: 3707
  source 1..35: mol_type = genomic DNA

SEQ ID NO: 44192 - DNA, 38 bp, Homo sapiens; identical to SEQ ID NO: 3710
  source 1..38: mol_type = genomic DNA

SEQ ID NO: 44193 - DNA, 40 bp, Homo sapiens; identical to SEQ ID NO: 3712
  source 1..40: mol_type = genomic DNA

SEQ ID NO: 44194 - DNA, 41 bp, Homo sapiens; identical to SEQ ID NO: 3713
  source 1..41: mol_type = genomic DNA

SEQ ID NO: 44195 - DNA, 42 bp, Homo sapiens; identical to SEQ ID NO: 3714
  source 1..42: mol_type = genomic DNA

SEQ ID NO: 44196 - DNA, 43 bp, Homo sapiens; identical to SEQ ID NO: 3715
  source 1..43: mol_type = genomic DNA

SEQ ID NO: 44197 - DNA, 44 bp, Homo sapiens; identical to SEQ ID NO: 3716
  source 1..44: mol_type = genomic DNA

SEQ ID NO: 44198 - DNA, 45 bp, Homo sapiens; identical to SEQ ID NO: 3717
  source 1..45: mol_type = genomic DNA

SEQ ID NO: 44199 - DNA, 46 bp, Homo sapiens; identical to SEQ ID NO: 3718
  source 1..46: mol_type = genomic DNA

SEQ ID NO: 44200 - DNA, 17 bp, Homo sapiens
  source 1..17: mol_type = genomic DNA
agaagattccaggttcg

SEQ ID NO: 44201 - DNA, 33 bp, Homo sapiens; identical to SEQ ID NO: 3729
  source 1..33: mol_type = genomic DNA

SEQ ID NO: 44202 - DNA, 35 bp, Homo sapiens; identical to SEQ ID NO: 3731
  source 1..35: mol_type = genomic DNA

SEQ ID NO: 44203 - DNA, 16 bp, Homo sapiens
  source 1..16: mol_type = genomic DNA
agaagattctaggttc

SEQ ID NO: 44204 - DNA, 17 bp, Homo sapiens
  source 1..17: mol_type = genomic DNA
agaagattctaggttcg

SEQ ID NO: 44205 - DNA, 26 bp, Homo sapiens
  source 1..26: mol_type = genomic DNA
agaagattctaggttcgactcctggc

SEQ ID NO: 44206 - DNA, 35 bp, Homo sapiens; identical to SEQ ID NO: 3741
  source 1..35: mol_type = genomic DNA

SEQ ID NO: 44207 - DNA, 16 bp, Homo sapiens
  source 1..16: mol_type = genomic DNA
agaagattgagggttc

SEQ ID NO: 44208 - DNA, 17 bp, Homo sapiens
  source 1..17: mol_type = genomic DNA
agaagattgagggttcg

SEQ ID NO: 44209 - DNA, 35 bp, Homo sapiens; identical to SEQ ID NO: 3748
  source 1..35: mol_type = genomic DNA

SEQ ID NO: 44210 - DNA, 34 bp, Homo sapiens; identical to SEQ ID NO: 3752
  source 1..34: mol_type = genomic DNA

SEQ ID NO: 44211 - DNA, 35 bp, Homo sapiens; identical to SEQ ID NO: 3753
  source 1..35: mol_type = genomic DNA

SEQ ID NO: 44212 - DNA, 36 bp, Homo sapiens; identical to SEQ ID NO: 3754
  source 1..36: mol_type = genomic DNA

SEQ ID NO: 44213 - DNA, 16 bp, Homo sapiens
  source 1..16: mol_type = genomic DNA
agaagattgcaggttc

SEQ ID NO: 44214 - DNA, 32 bp, Homo sapiens; identical to SEQ ID NO: 3758
  source 1..32: mol_type = genomic DNA

SEQ ID NO: 44215 - DNA, 34 bp, Homo sapiens; identical to SEQ ID NO: 3760
  source 1..34: mol_type = genomic DNA

SEQ ID NO: 44216 - DNA, 35 bp, Homo sapiens; identical to SEQ ID NO: 3761
  source 1..35: mol_type = genomic DNA

SEQ ID NO: 44217 - DNA, 36 bp, Homo sapiens; identical to SEQ ID NO: 3762
  source 1..36: mol_type = genomic DNA

SEQ ID NO: 44218 - DNA, 26 bp, Homo sapiens
  source 1..26: mol_type = genomic DNA
agaagcagcttcaaacctgccggggc

SEQ ID NO: 44219 - DNA, 27 bp, Homo sapiens
  source 1..27: mol_type = genomic DNA
agaagcagcttcaaacctgccggggct

SEQ ID NO: 44220 - DNA, 28 bp, Homo sapiens
  source 1..28: mol_type = genomic DNA
agaagcagcttcaaacctgccggggctt

SEQ ID NO: 44221 - DNA, 16 bp, Homo sapiens
  source 1..16: mol_type = genomic DNA
agaaggctgcgtgttc

SEQ ID NO: 44222 - DNA, 30 bp, Homo sapiens; identical to SEQ ID NO: 3776
  source 1..30: mol_type = genomic DNA

SEQ ID NO: 44223 - DNA, 34 bp, Homo sapiens; identical to SEQ ID NO: 3778
  source 1..34: mol_type = genomic DNA

SEQ ID NO: 44224 - DNA, 35 bp, Homo sapiens; identical to SEQ ID NO: 3779
  source 1..35: mol_type = genomic DNA

SEQ ID NO: 44225 - DNA, 36 bp, Homo sapiens; identical to SEQ ID NO: 3780
  source 1..36: mol_type = genomic DNA

SEQ ID NO: 44226 - DNA, 32 bp, Homo sapiens; identical to SEQ ID NO: 3784
  source 1..32: mol_type = genomic DNA

SEQ ID NO: 44227 - DNA, 35 bp, Homo sapiens; identical to SEQ ID NO: 3787
  source 1..35: mol_type = genomic DNA

SEQ ID NO: 44228 - DNA, 36 bp, Homo sapiens; identical to SEQ ID NO: 3788
  source 1..36: mol_type = genomic DNA

SEQ ID NO: 44229 - DNA, 33 bp, Homo sapiens; identical to SEQ ID NO: 3790
  source 1..33: mol_type = genomic DNA

SEQ ID NO: 44230 - DNA, 34 bp, Homo sapiens; identical to SEQ ID NO: 32295
  source 1..34: mol_type = genomic DNA

SEQ ID NO: 44231 - DNA, 35 bp, Homo sapiens; identical to SEQ ID NO: 3791
  source 1..35: mol_type = genomic DNA

SEQ ID NO: 44232 - DNA, 33 bp, Homo sapiens; identical to SEQ ID NO: 3794
  source 1..33: mol_type = genomic DNA

SEQ ID NO: 44233 - DNA, 34 bp, Homo sapiens; identical to SEQ ID NO: 3795
  source 1..34: mol_type = genomic DNA

SEQ ID NO: 44234 - DNA, 35 bp, Homo sapiens; identical to SEQ ID NO: 3796
  source 1..35: mol_type = genomic DNA

SEQ ID NO: 44235 - DNA, 39 bp, Homo sapiens; identical to SEQ ID NO: 3813
  source 1..39: mol_type = genomic DNA

SEQ ID NO: 44236 - DNA, 40 bp, Homo sapiens; identical to SEQ ID NO: 3814
  source 1..40: mol_type = genomic DNA

SEQ ID NO: 44237 - DNA, 18 bp, Homo sapiens
  source 1..18: mol_type = genomic DNA
agaattctcgcctgccac

SEQ ID NO: 44238 - DNA, 19 bp, Homo sapiens
  source 1..19: mol_type = genomic DNA
agaattctcgcctgccacg

SEQ ID NO: 44239 - DNA, 31 bp, Homo sapiens; identical to SEQ ID NO: 3827
  source 1..31: mol_type = genomic DNA

SEQ ID NO: 44240 - DNA, 16 bp, Homo sapiens
  source 1..16: mol_type = genomic DNA
agacaggggttaggcc

SEQ ID NO: 44241 - DNA, 30 bp, Homo sapiens; identical to SEQ ID NO: 3839
  source 1..30: mol_type = genomic DNA

SEQ ID NO: 44242 - DNA, 30 bp, Homo sapiens; identical to SEQ ID NO: 3851
  source 1..30: mol_type = genomic DNA

SEQ ID NO: 44243 - DNA, 31 bp, Homo sapiens; identical to SEQ ID NO: 3852
  source 1..31: mol_type = genomic DNA

SEQ ID NO: 44244 - DNA, 17 bp, Homo sapiens
  source 1..17: mol_type = genomic DNA
agaccggggttcgattc

SEQ ID NO: 44245 - DNA, 18 bp, Homo sapiens
  source 1..18: mol_type = genomic DNA
agaccggggttcgattcc

SEQ ID NO: 44246 - DNA, 19 bp, Homo sapiens
  source 1..19: mol_type = genomic DNA
agaccggggttcgattccc

SEQ ID NO: 44247 - DNA, 24 bp, Homo sapiens
  source 1..24: mol_type = genomic DNA
agaccggggttcgattccccgacg

SEQ ID NO: 44248 - DNA, 26 bp, Homo sapiens
  source 1..26: mol_type = genomic DNA
agaccggggttcgattccccgacggg

SEQ ID NO: 44249 - DNA, 28 bp, Homo sapiens
  source 1..28: mol_type = genomic DNA
agaccggggttcgattccccgacgggga

SEQ ID NO: 44250 - DNA, 29 bp, Homo sapiens
  source 1..29: mol_type = genomic DNA
agaccggggttcgattccccgacggggag

SEQ ID NO: 44251 - DNA, 30 bp, Homo sapiens; identical to SEQ ID NO: 3861
  source 1..30: mol_type = genomic DNA

SEQ ID NO: 44252 - DNA, 31 bp, Homo sapiens; identical to SEQ ID NO: 3862
  source 1..31: mol_type = genomic DNA

SEQ ID NO: 44253 - DNA, 32 bp, Homo sapiens; identical to SEQ ID NO: 3863
  source 1..32: mol_type = genomic DNA

SEQ ID NO: 44254 - DNA, 18 bp, Homo sapiens
  source 1..18: mol_type = genomic DNA
agacgggctcacatcacc

SEQ ID NO: 44255 - DNA, 27 bp, Homo sapiens
  source 1..27: mol_type = genomic DNA
agacgggctcacatcaccccataaaca

SEQ ID NO: 44256 - DNA, 29 bp, Homo sapiens
  source 1..29: mol_type = genomic DNA
agacgggctcacatcaccccataaacacc

SEQ ID NO: 44257 - DNA, 30 bp, Homo sapiens; identical to SEQ ID NO: 3877
  source 1..30: mol_type = genomic DNA

SEQ ID NO: 44258 - DNA, 37 bp, Homo sapiens
  source 1..37: mol_type = genomic DNA
agacttttaatctgagggtccagggttcaagtccctg

SEQ ID NO: 44259 - DNA, 16 bp, Homo sapiens
  source 1..16: mol_type = genomic DNA
agactttttctctgac

SEQ ID NO: 44260 - DNA, 17 bp, Homo sapiens
  source 1..17: mol_type = genomic DNA
agactttttctctgacc

SEQ ID NO: 44261 - DNA, 18 bp, Homo sapiens
  source 1..18: mol_type = genomic DNA
agactttttctctgacca

SEQ ID NO: 44262 - DNA, 27 bp, Homo sapiens
  source 1..27: mol_type = genomic DNA
agagaaccaacacctctttacagtgac

SEQ ID NO: 44263 - DNA, 28 bp, Homo sapiens
  source 1..28: mol_type = genomic DNA
agagaaccaacacctctttacagtgacc

SEQ ID NO: 44264 - DNA, 35 bp, Homo sapiens; identical to SEQ ID NO: 3913
  source 1..35: mol_type = genomic DNA

SEQ ID NO: 44265 - DNA, 21 bp, Homo sapiens
  source 1..21: mol_type = genomic DNA
agagcatgggactcttaatcc

SEQ ID NO: 44266 - DNA, 22 bp, Homo sapiens
  source 1..22: mol_type = genomic DNA
agagcatgggactcttaatccc

SEQ ID NO: 44267 - DNA, 32 bp, Homo sapiens; identical to SEQ ID NO: 3921
  source 1..32: mol_type = genomic DNA

SEQ ID NO: 44268 - DNA, 35 bp, Homo sapiens; identical to SEQ ID NO: 3924
  source 1..35: mol_type = genomic DNA

SEQ ID NO: 44269 - DNA, 43 bp, Homo sapiens; identical to SEQ ID NO: 3927
  source 1..43: mol_type = genomic DNA

SEQ ID NO: 44270 - DNA, 32 bp, Homo sapiens; identical to SEQ ID NO: 32327
  source 1..32: mol_type = genomic DNA

SEQ ID NO: 44271 - DNA, 27 bp, Homo sapiens
  source 1..27: mol_type = genomic DNA
agaggcttacgaccccttatttacccc

SEQ ID NO: 44272 - DNA, 32 bp, Homo sapiens; identical to SEQ ID NO: 3960
  source 1..32: mol_type = genomic DNA

SEQ ID NO: 44273 - DNA, 16 bp, Homo sapiens
  source 1..16: mol_type = genomic DNA
agaggtcgatggatcg

SEQ ID NO: 44274 - DNA, 21 bp, Homo sapiens
  source 1..21: mol_type = genomic DNA
agaggtcgatggatcgaaacc

SEQ ID NO: 44275 - DNA, 22 bp, Homo sapiens
  source 1..22: mol_type = genomic DNA
agaggtcgatggatcgaaacca

SEQ ID NO: 44276 - DNA, 23 bp, Homo sapiens
  source 1..23: mol_type = genomic DNA
agaggtcgatggatcgaaaccat

SEQ ID NO: 44277 - DNA, 28 bp, Homo sapiens
  source 1..28: mol_type = genomic DNA
agagtggcgcagcggaagcgtgctgggc

SEQ ID NO: 44278 - DNA, 30 bp, Homo sapiens; identical to SEQ ID NO: 4009
  source 1..30: mol_type = genomic DNA

SEQ ID NO: 44279 - DNA, 19 bp, Homo sapiens
  source 1..19: mol_type = genomic DNA
agatcaagaggtccccggt

SEQ ID NO: 44280 - DNA, 21 bp, Homo sapiens
  source 1..21: mol_type = genomic DNA
agatcagaaggctgcgtgttc

SEQ ID NO: 44281 - DNA, 37 bp, Homo sapiens
  source 1..37: mol_type = genomic DNA
agatcagaaggttgcgtgttcaaatcacgtcggggtc

SEQ ID NO: 44282 - DNA, 37 bp, Homo sapiens; identical to SEQ ID NO: 4043
  source 1..37: mol_type = genomic DNA

SEQ ID NO: 44283 - DNA, 21 bp, Homo sapiens
  source 1..21: mol_type = genomic DNA
agatcctgggttcgaatccca

SEQ ID NO: 44284 - DNA, 28 bp, Homo sapiens
  source 1..28: mol_type = genomic DNA
agatcctgggttcgaatcccagcggggc

SEQ ID NO: 44285 - DNA, 18 bp, Homo sapiens
  source 1..18: mol_type = genomic DNA
agatcgcgggttcgaacc

SEQ ID NO: 44286 - DNA, 20 bp, Homo sapiens
  source 1..20: mol_type = genomic DNA
agatcgcgggttcgaacccc

SEQ ID NO: 44287 - DNA, 24 bp, Homo sapiens
  source 1..24: mol_type = genomic DNA
agatgaaaacctttttccaaggac

SEQ ID NO: 44288 - DNA, 25 bp, Homo sapiens
  source 1..25: mol_type = genomic DNA
agatgaaaacctttttccaaggaca

SEQ ID NO: 44289 - DNA, 26 bp, Homo sapiens
  source 1..26: mol_type = genomic DNA
agatgaaaacctttttccaaggacac

SEQ ID NO: 44290 - DNA, 27 bp, Homo sapiens
  source 1..27: mol_type = genomic DNA
agatgaaaacctttttccaaggacacc

SEQ ID NO: 44291 - DNA, 28 bp, Homo sapiens
  source 1..28: mol_type = genomic DNA
agatgaaaacctttttccaaggacacca

SEQ ID NO: 44292 - DNA, 20 bp, Homo sapiens
  source 1..20: mol_type = genomic DNA
agattaagagaaccaacacc

SEQ ID NO: 44293 - DNA, 33 bp, Homo sapiens; identical to SEQ ID NO: 4092
  source 1..33: mol_type = genomic DNA

SEQ ID NO: 44294 - DNA, 35 bp, Homo sapiens; identical to SEQ ID NO: 4094
  source 1..35: mol_type = genomic DNA

SEQ ID NO: 44295 - DNA, 16 bp, Homo sapiens
  source 1..16: mol_type = genomic DNA
agattccaggttcgac

SEQ ID NO: 44296 - DNA, 18 bp, Homo sapiens
  source 1..18: mol_type = genomic DNA
agattccaggttcgactc

SEQ ID NO: 44297 - DNA, 25 bp, Homo sapiens
  source 1..25: mol_type = genomic DNA
agattcccattcttgcgacccgggt

SEQ ID NO: 44298 - DNA, 21 bp, Homo sapiens
  source 1..21: mol_type = genomic DNA
agattgagggttcgaatccct

SEQ ID NO: 44299 - DNA, 32 bp, Homo sapiens; identical to SEQ ID NO: 4117
  source 1..32: mol_type = genomic DNA

SEQ ID NO: 44300 - DNA, 18 bp, Homo sapiens
  source 1..18: mol_type = genomic DNA
agattgagggttcgagtc

SEQ ID NO: 44301 - DNA, 21 bp, Homo sapiens
  source 1..21: mol_type = genomic DNA
agattgagggttcgagtccct

SEQ ID NO: 44302 - DNA, 30 bp, Homo sapiens; identical to SEQ ID NO: 4122
  source 1..30: mol_type = genomic DNA

SEQ ID NO: 44303 - DNA, 31 bp, Homo sapiens; identical to SEQ ID NO: 4123
  source 1..31: mol_type = genomic DNA

SEQ ID NO: 44304 - DNA, 32 bp, Homo sapiens; identical to SEQ ID NO: 4124
  source 1..32: mol_type = genomic DNA

SEQ ID NO: 44305 - DNA, 33 bp, Homo sapiens; identical to SEQ ID NO: 4125
  source 1..33: mol_type = genomic DNA

SEQ ID NO: 44306 - DNA, 21 bp, Homo sapiens
  source 1..21: mol_type = genomic DNA
agattgcaggttcgagtcctg

SEQ ID NO: 44307 - DNA, 31 bp, Homo sapiens; identical to SEQ ID NO: 4131
  source 1..31: mol_type = genomic DNA

SEQ ID NO: 44308 - DNA, 32 bp, Homo sapiens; identical to SEQ ID NO: 4132
  source 1..32: mol_type = genomic DNA

SEQ ID NO: 44309 - DNA, 16 bp, Homo sapiens
  source 1..16: mol_type = genomic DNA
agattgtgaatctgac

SEQ ID NO: 44310 - DNA, 22 bp, Homo sapiens
  source 1..22: mol_type = genomic DNA
agattgtgaatctgacaacaga

SEQ ID NO: 44311 - DNA, 24 bp, Homo sapiens
  source 1..24: mol_type = genomic DNA
agattgtgaatctgacaacagagg

SEQ ID NO: 44312 - DNA, 25 bp, Homo sapiens
  source 1..25: mol_type = genomic DNA
agattgtgaatctgacaacagaggc

SEQ ID NO: 44313 - DNA, 26 bp, Homo sapiens
  source 1..26: mol_type = genomic DNA
agattgtgaatctgacaacagaggct

SEQ ID NO: 44314 - DNA, 27 bp, Homo sapiens
  source 1..27: mol_type = genomic DNA
agattgtgaatctgacaacagaggctt

SEQ ID NO: 44315 - DNA, 30 bp, Homo sapiens; identical to SEQ ID NO: 4148
  source 1..30: mol_type = genomic DNA

SEQ ID NO: 44316 - DNA, 31 bp, Homo sapiens; identical to SEQ ID NO: 4149
  source 1..31: mol_type = genomic DNA

SEQ ID NO: 44317 - DNA, 32 bp, Homo sapiens; identical to SEQ ID NO: 4150
  source 1..32: mol_type = genomic DNA

SEQ ID NO: 44318 - DNA, 33 bp, Homo sapiens; identical to SEQ ID NO: 4151
  source 1..33: mol_type = genomic DNA

SEQ ID NO: 44319 - DNA, 34 bp, Homo sapiens; identical to SEQ ID NO: 4152
  source 1..34: mol_type = genomic DNA

SEQ ID NO: 44320 - DNA, 35 bp, Homo sapiens; identical to SEQ ID NO: 4153
  source 1..35: mol_type = genomic DNA

SEQ ID NO: 44321 - DNA, 36 bp, Homo sapiens; identical to SEQ ID NO: 4154
  source 1..36: mol_type = genomic DNA

SEQ ID NO: 44322 - DNA, 37 bp, Homo sapiens; identical to SEQ ID NO: 4155
  source 1..37: mol_type = genomic DNA

SEQ ID NO: 44323 - DNA, 38 bp, Homo sapiens; identical to SEQ ID NO: 4156
  source 1..38: mol_type = genomic DNA

SEQ ID NO: 44324 - DNA, 40 bp, Homo sapiens; identical to SEQ ID NO: 4158
  source 1..40: mol_type = genomic DNA

SEQ ID NO: 44325 - DNA, 42 bp, Homo sapiens; identical to SEQ ID NO: 4160
  source 1..42: mol_type = genomic DNA

SEQ ID NO: 44326 - DNA, 43 bp, Homo sapiens; identical to SEQ ID NO: 4161
  source 1..43: mol_type = genomic DNA

SEQ ID NO: 44327 - DNA, 44 bp, Homo sapiens; identical to SEQ ID NO: 4162
  source 1..44: mol_type = genomic DNA

SEQ ID NO: 44328 - DNA, 45 bp, Homo sapiens; identical to SEQ ID NO: 4163
  source 1..45: mol_type = genomic DNA

SEQ ID NO: 44329 - DNA, 46 bp, Homo sapiens; identical to SEQ ID NO: 4164
  source 1..46: mol_type = genomic DNA

SEQ ID NO: 44330 - DNA, 47 bp, Homo sapiens; identical to SEQ ID NO: 4165
  source 1..47: mol_type = genomic DNA

SEQ ID NO: 44331 - DNA, 25 bp, Homo sapiens
  source 1..25: mol_type = genomic DNA
agatttcaacttaacttgaccgctc

SEQ ID NO: 44332 - DNA, 26 bp, Homo sapiens
  source 1..26: mol_type = genomic DNA
agatttcaacttaacttgaccgctct

SEQ ID NO: 44333 - DNA, 27 bp, Homo sapiens
  source 1..27: mol_type = genomic DNA
agatttcaacttaacttgaccgctctg

SEQ ID NO: 44334 - DNA, 28 bp, Homo sapiens
  source 1..28: mol_type = genomic DNA
agatttcaacttaacttgaccgctctga

SEQ ID NO: 44335 - DNA, 29 bp, Homo sapiens
  source 1..29: mol_type = genomic DNA
agatttcaacttaacttgaccgctctgac

SEQ ID NO: 44336 - DNA, 30 bp, Homo sapiens; identical to SEQ ID NO: 4178
  source 1..30: mol_type = genomic DNA

SEQ ID NO: 44337 - DNA, 31 bp, Homo sapiens; identical to SEQ ID NO: 4179
  source 1..31: mol_type = genomic DNA

SEQ ID NO: 44338 - DNA, 17 bp, Homo sapiens
  source 1..17: mol_type = genomic DNA
agcactctggactctga

SEQ ID NO: 44339 - DNA, 18 bp, Homo sapiens
  source 1..18: mol_type = genomic DNA
agcactctggactctgaa

SEQ ID NO: 44340 - DNA, 19 bp, Homo sapiens
  source 1..19: mol_type = genomic DNA
agcactctggactctgaat

SEQ ID NO: 44341 - DNA, 20 bp, Homo sapiens
  source 1..20: mol_type = genomic DNA
agcactctggactctgaatc

SEQ ID NO: 44342 - DNA, 21 bp, Homo sapiens
  source 1..21: mol_type = genomic DNA
agcactctggactctgaatcc

SEQ ID NO: 44343 - DNA, 22 bp, Homo sapiens
  source 1..22: mol_type = genomic DNA
agcactctggactctgaatcca

SEQ ID NO: 44344 - DNA, 23 bp, Homo sapiens
  source 1..23: mol_type = genomic DNA
agcactctggactctgaatccag

SEQ ID NO: 44345 - DNA, 24 bp, Homo sapiens
  source 1..24: mol_type = genomic DNA
agcactctggactctgaatccagc

SEQ ID NO: 44346 - DNA, 25 bp, Homo sapiens
  source 1..25: mol_type = genomic DNA
agcactctggactctgaatccagcg

SEQ ID NO: 44347 - DNA, 31 bp, Homo sapiens; identical to SEQ ID NO: 4233
  source 1..31: mol_type = genomic DNA

SEQ ID NO: 44348 - DNA, 32 bp, Homo sapiens; identical to SEQ ID NO: 4234
  source 1..32: mol_type = genomic DNA

SEQ ID NO: 44349 - DNA, 33 bp, Homo sapiens; identical to SEQ ID NO: 4235
  source 1..33: mol_type = genomic DNA

SEQ ID NO: 44350 - DNA, 34 bp, Homo sapiens; identical to SEQ ID NO: 4236
  source 1..34: mol_type = genomic DNA

SEQ ID NO: 44351 - DNA, 35 bp, Homo sapiens; identical to SEQ ID NO: 4237
  source 1..35: mol_type = genomic DNA

SEQ ID NO: 44352 - DNA, 36 bp, Homo sapiens; identical to SEQ ID NO: 4238
  source 1..36: mol_type = genomic DNA

SEQ ID NO: 44353 - DNA, 44 bp, Homo sapiens; identical to SEQ ID NO: 4242
  source 1..44: mol_type = genomic DNA

SEQ ID NO: 44354 - DNA, 18 bp, Homo sapiens
  source 1..18: mol_type = genomic DNA
agcactctggactttgaa

SEQ ID NO: 44355 - DNA, 20 bp, Homo sapiens
  source 1..20: mol_type = genomic DNA
agcactctggactttgaatc

SEQ ID NO: 44356 - DNA, 21 bp, Homo sapiens
  source 1..21: mol_type = genomic DNA
agcactctggactttgaatcc

SEQ ID NO: 44357 - DNA, 33 bp, Homo sapiens; identical to SEQ ID NO: 4262
  source 1..33: mol_type = genomic DNA

SEQ ID NO: 44358 - DNA, 16 bp, Homo sapiens
  source 1..16: mol_type = genomic DNA
agcagagtggcgcagc

SEQ ID NO: 44359 - DNA, 18 bp, Homo sapiens
  source 1..18: mol_type = genomic DNA
agcagagtggcgcagcgg

SEQ ID NO: 44360 - DNA, 19 bp, Homo sapiens
  source 1..19: mol_type = genomic DNA
agcagagtggcgcagcgga

SEQ ID NO: 44361 - DNA, 21 bp, Homo sapiens
  source 1..21: mol_type = genomic DNA
agcagagtggcgcagcggaag

SEQ ID NO: 44362 - DNA, 22 bp, Homo sapiens
  source 1..22: mol_type = genomic DNA
agcagagtggcgcagcggaagc

SEQ ID NO: 44363 - DNA, 23 bp, Homo sapiens
  source 1..23: mol_type = genomic DNA
agcagagtggcgcagcggaagcg

SEQ ID NO: 44364 - DNA, 26 bp, Homo sapiens
  source 1..26: mol_type = genomic DNA
agcagagtggcgcagcggaagcgtgc

SEQ ID NO: 44365 - DNA, 28 bp, Homo sapiens
  source 1..28: mol_type = genomic DNA
agcagagtggcgcagcggaagcgtgctg

SEQ ID NO: 44366 - DNA, 29 bp, Homo sapiens
  source 1..29: mol_type = genomic DNA
agcagagtggcgcagcggaagcgtgctgg

SEQ ID NO: 44367 - DNA, 30 bp, Homo sapiens; identical to SEQ ID NO: 4283
  source 1..30: mol_type = genomic DNA

SEQ ID NO: 44368 - DNA, 31 bp, Homo sapiens; identical to SEQ ID NO: 4284
  source 1..31: mol_type = genomic DNA

SEQ ID NO: 44369 - DNA, 32 bp, Homo sapiens; identical to SEQ ID NO: 4285
  source 1..32: mol_type = genomic DNA

SEQ ID NO: 44370 - DNA, 33 bp, Homo sapiens; identical to SEQ ID NO: 4286
  source 1..33: mol_type = genomic DNA

SEQ ID NO: 44371 - DNA, 34 bp, Homo sapiens; identical to SEQ ID NO: 4287
  source 1..34: mol_type = genomic DNA

SEQ ID NO: 44372 - DNA, 41 bp, Homo sapiens
  source 1..41: mol_type = genomic DNA
agcagagtggcgcagcggaagcgtgctgggcccataaccca

SEQ ID NO: 44373 - DNA, 42 bp, Homo sapiens; identical to SEQ ID NO: 4291
  source 1..42: mol_type = genomic DNA

SEQ ID NO: 44374 - DNA, 23 bp, Homo sapiens
  source 1..23: mol_type = genomic DNA
agcagcttcaaacctgccggggc

SEQ ID NO: 44375 - DNA, 24 bp, Homo sapiens
  source 1..24: mol_type = genomic DNA
agcagcttcaaacctgccggggct

SEQ ID NO: 44376 - DNA, 25 bp, Homo sapiens
  source 1..25: mol_type = genomic DNA
agcagcttcaaacctgccggggctt

SEQ ID NO: 44377 - DNA, 26 bp, Homo sapiens
  source 1..26: mol_type = genomic DNA
agcagcttcaaacctgccggggcttc

SEQ ID NO: 44378 - DNA, 27 bp, Homo sapiens
  source 1..27: mol_type = genomic DNA
agcagcttcaaacctgccggggcttcc

SEQ ID NO: 44379 - DNA, 32 bp, Homo sapiens; identical to SEQ ID NO: 4308
  source 1..32: mol_type = genomic DNA

SEQ ID NO: 44380 - DNA, 33 bp, Homo sapiens; identical to SEQ ID NO: 4309
  source 1..33: mol_type = genomic DNA

SEQ ID NO: 44381 - DNA, 38 bp, Homo sapiens; identical to SEQ ID NO: 4312
  source 1..38: mol_type = genomic DNA

SEQ ID NO: 44382 - DNA, 31 bp, Homo sapiens; identical to SEQ ID NO: 4314
  source 1..31: mol_type = genomic DNA

SEQ ID NO: 44383 - DNA, 17 bp, Homo sapiens
  source 1..17: mol_type = genomic DNA
agcatgggactcttaat

SEQ ID NO: 44384 - DNA, 18 bp, Homo sapiens
  source 1..18: mol_type = genomic DNA
agcatgggactcttaatc

SEQ ID NO: 44385 - DNA, 19 bp, Homo sapiens
  source 1..19: mol_type = genomic DNA
agcatgggactcttaatcc

SEQ ID NO: 44386 - DNA, 20 bp, Homo sapiens
  source 1..20: mol_type = genomic DNA
agcatgggactcttaatccc

SEQ ID NO: 44387 - DNA, 28 bp, Homo sapiens
  source 1..28: mol_type = genomic DNA
agcatgggactcttaatcccagggtcgt

SEQ ID NO: 44388 - DNA, 33 bp, Homo sapiens; identical to SEQ ID NO: 4337
  source 1..33: mol_type = genomic DNA

SEQ ID NO: 44389 - DNA, 18 bp, Homo sapiens
  source 1..18: mol_type = genomic DNA
agcatgggactcttcatc

SEQ ID NO: 44390 - DNA, 19 bp, Homo sapiens
  source 1..19: mol_type = genomic DNA
agcatgggactcttcatcc

SEQ ID NO: 44391 - DNA, 19 bp, Homo sapiens
  source 1..19: mol_type = genomic DNA
agcattggactgtaaatct

SEQ ID NO: 44392 - DNA, 31 bp, Homo sapiens; identical to SEQ ID NO: 4369
  source 1..31: mol_type = genomic DNA

SEQ ID NO: 44393 - DNA, 32 bp, Homo sapiens; identical to SEQ ID NO: 4370
  source 1..32: mol_type = genomic DNA

SEQ ID NO: 44394 - DNA, 33 bp, Homo sapiens; identical to SEQ ID NO: 4371
  source 1..33: mol_type = genomic DNA

SEQ ID NO: 44395 - DNA, 21 bp, Homo sapiens
  source 1..21: mol_type = genomic DNA
agcatttgactgcagatcaag

SEQ ID NO: 44396 - DNA, 19 bp, Homo sapiens
  source 1..19: mol_type = genomic DNA
agccagggattgtgggttc

SEQ ID NO: 44397 - DNA, 20 bp, Homo sapiens
  source 1..20: mol_type = genomic DNA
agccagggattgtgggttcg

SEQ ID NO: 44398 - DNA, 36 bp, Homo sapiens; identical to SEQ ID NO: 4386
  source 1..36: mol_type = genomic DNA

SEQ ID NO: 44399 - DNA, 38 bp, Homo sapiens; identical to SEQ ID NO: 4397
  source 1..38: mol_type = genomic DNA

SEQ ID NO: 44400 - DNA, 36 bp, Homo sapiens; identical to SEQ ID NO: 4403
  source 1..36: mol_type = genomic DNA

SEQ ID NO: 44401 - DNA, 37 bp, Homo sapiens; identical to SEQ ID NO: 4404
  source 1..37: mol_type = genomic DNA

SEQ ID NO: 44402 - DNA, 38 bp, Homo sapiens; identical to SEQ ID NO: 4405
  source 1..38: mol_type = genomic DNA

SEQ ID NO: 44403 - DNA, 39 bp, Homo sapiens; identical to SEQ ID NO: 4406
  source 1..39: mol_type = genomic DNA

SEQ ID NO: 44404 - DNA, 18 bp, Homo sapiens
  source 1..18: mol_type = genomic DNA
agcccacccagggacgcc

SEQ ID NO: 44405 - DNA, 19 bp, Homo sapiens
  source 1..19: mol_type = genomic DNA
agcccacccagggacgcca

SEQ ID NO: 44406 - DNA, 18 bp, Homo sapiens
  source 1..18: mol_type = genomic DNA
agccccagtggaaccacc

SEQ ID NO: 44407 - DNA, 16 bp, Homo sapiens
  source 1..16: mol_type = genomic DNA
agccgtgatcgtatag

SEQ ID NO: 44408 - DNA, 17 bp, Homo sapiens
  source 1..17: mol_type = genomic DNA
agccgtgatcgtatagt

SEQ ID NO: 44409 - DNA, 19 bp, Homo sapiens
  source 1..19: mol_type = genomic DNA
agccgtgatcgtatagtgg

SEQ ID NO: 44410 - DNA, 21 bp, Homo sapiens
  source 1..21: mol_type = genomic DNA
agccgtgatcgtatagtggtt

SEQ ID NO: 44411 - DNA, 22 bp, Homo sapiens
  source 1..22: mol_type = genomic DNA
agccgtgatcgtatagtggtta

SEQ ID NO: 44412 - DNA, 23 bp, Homo sapiens
  source 1..23: mol_type = genomic DNA
agccgtgatcgtatagtggttag

SEQ ID NO: 44413 - DNA, 24 bp, Homo sapiens
  source 1..24: mol_type = genomic DNA
agccgtgatcgtatagtggttagt

SEQ ID NO: 44414 - DNA, 27 bp, Homo sapiens
  source 1..27: mol_type = genomic DNA
agccgtgatcgtatagtggttagtact

SEQ ID NO: 44415 - DNA, 28 bp, Homo sapiens
  source 1..28: mol_type = genomic DNA
agccgtgatcgtatagtggttagtactc

SEQ ID NO: 44416 - DNA, 29 bp, Homo sapiens
  source 1..29: mol_type = genomic DNA
agccgtgatcgtatagtggttagtactct

SEQ ID NO: 44417 - DNA, 30 bp, Homo sapiens; identical to SEQ ID NO: 4451
  source 1..30: mol_type = genomic DNA

SEQ ID NO: 44418 - DNA, 31 bp, Homo sapiens; identical to SEQ ID NO: 4452
  source 1..31: mol_type = genomic DNA

SEQ ID NO: 44419 - DNA, 32 bp, Homo sapiens; identical to SEQ ID NO: 4453
  source 1..32: mol_type = genomic DNA

SEQ ID NO: 44420 - DNA, 33 bp, Homo sapiens; identical to SEQ ID NO: 4454
  source 1..33: mol_type = genomic DNA

SEQ ID NO: 44421 - DNA, 34 bp, Homo sapiens; identical to SEQ ID NO: 4455
  source 1..34: mol_type = genomic DNA

SEQ ID NO: 44422 - DNA, 35 bp, Homo sapiens; identical to SEQ ID NO: 4456
  source 1..35: mol_type = genomic DNA

SEQ ID NO: 44423 - DNA, 36 bp, Homo sapiens; identical to SEQ ID NO: 4457
  source 1..36: mol_type = genomic DNA

SEQ ID NO: 44424 - DNA, 18 bp, Homo sapiens
  source 1..18: mol_type = genomic DNA
agcctcacctggagcacc

SEQ ID NO: 44425 - DNA, 19 bp, Homo sapiens
  source 1..19: mol_type = genomic DNA
agcctcacctggagcacca

SEQ ID NO: 44426 - DNA, 29 bp, Homo sapiens
  source 1..29: mol_type = genomic DNA
agcgatccgagttcaaatctcggtggaac

SEQ ID NO: 44427 - DNA, 32 bp, Homo sapiens; identical to SEQ ID NO: 4471
  source 1..32: mol_type = genomic DNA

SEQ ID NO: 44428 - DNA, 33 bp, Homo sapiens; identical to SEQ ID NO: 4472
  source 1..33: mol_type = genomic DNA

SEQ ID NO: 44429 - DNA, 29 bp, Homo sapiens
  source 1..29: mol_type = genomic DNA
agcgatccgagttcaaatctcggtgggac

SEQ ID NO: 44430 - DNA, 31 bp, Homo sapiens; identical to SEQ ID NO: 4475
  source 1..31: mol_type = genomic DNA

SEQ ID NO: 44431 - DNA, 32 bp, Homo sapiens; identical to SEQ ID NO: 4476
  source 1..32: mol_type = genomic DNA

SEQ ID NO: 44432 - DNA, 32 bp, Homo sapiens; identical to SEQ ID NO: 4484
  source 1..32: mol_type = genomic DNA

SEQ ID NO: 44433 - DNA, 23 bp, Homo sapiens
  source 1..23: mol_type = genomic DNA
agcgcgttcggctgttaaccgga

SEQ ID NO: 44434 - DNA, 17 bp, Homo sapiens
  source 1..17: mol_type = genomic DNA
agcggaagcgtgctggg

SEQ ID NO: 44435 - DNA, 18 bp, Homo sapiens
  source 1..18: mol_type = genomic DNA
agcggaagcgtgctgggc

SEQ ID NO: 44436 - DNA, 19 bp, Homo sapiens
  source 1..19: mol_type = genomic DNA
agcggaagcgtgctgggcc

SEQ ID NO: 44437 - DNA, 20 bp, Homo sapiens
  source 1..20: mol_type = genomic DNA
agcggaagcgtgctgggccc

SEQ ID NO: 44438 - DNA, 21 bp, Homo sapiens
  source 1..21: mol_type = genomic DNA
agcggaagcgtgctgggccca

SEQ ID NO: 44439 - DNA, 26 bp, Homo sapiens
  source 1..26: mol_type = genomic DNA
agcggaagcgtgctgggcccataacc

SEQ ID NO: 44440 - DNA, 17 bp, Homo sapiens
  source 1..17: mol_type = genomic DNA
agcggtctaaggcgctg

SEQ ID NO: 44441 - DNA, 21 bp, Homo sapiens
  source 1..21: mol_type = genomic DNA
agcggtctaaggcgctggatt

SEQ ID NO: 44442 - DNA, 19 bp, Homo sapiens
  source 1..19: mol_type = genomic DNA
agcggttaggattcctggt

SEQ ID NO: 44443 - DNA, 16 bp, Homo sapiens
  source 1..16: mol_type = genomic DNA
agcgtgctgggcccat

SEQ ID NO: 44444 - DNA, 19 bp, Homo sapiens
  source 1..19: mol_type = genomic DNA
agcgtgctgggcccataac

SEQ ID NO: 44445 - DNA, 20 bp, Homo sapiens
  source 1..20: mol_type = genomic DNA
agcgtgctgggcccataacc

SEQ ID NO: 44446 - DNA, 21 bp, Homo sapiens
  source 1..21: mol_type = genomic DNA
agcgtgctgggcccataaccc

SEQ ID NO: 44447 - DNA, 32 bp, Homo sapiens; identical to SEQ ID NO: 4528
  source 1..32: mol_type = genomic DNA

SEQ ID NO: 44448 - DNA, 35 bp, Homo sapiens; identical to SEQ ID NO: 4530
  source 1..35: mol_type = genomic DNA

SEQ ID NO: 44449 - DNA, 23 bp, Homo sapiens
  source 1..23: mol_type = genomic DNA
agcgtggccgagtggtctaaggc

SEQ ID NO: 44450 - DNA, 18 bp, Homo sapiens
  source 1..18: mol_type = genomic DNA
agctatcgggcccatacc

SEQ ID NO: 44451 - DNA, 20 bp, Homo sapiens
  source 1..20: mol_type = genomic DNA
agctatcgggcccatacccc

SEQ ID NO: 44452 - DNA, 28 bp, Homo sapiens
  source 1..28: mol_type = genomic DNA
agctcacaagaactgctaactcatgccc

SEQ ID NO: 44453 - DNA, 33 bp, Homo sapiens; identical to SEQ ID NO: 4606
  source 1..33: mol_type = genomic DNA

SEQ ID NO: 44454 - DNA, 16 bp, Homo sapiens
  source 1..16: mol_type = genomic DNA
agctcagtcggtagag

SEQ ID NO: 44455 - DNA, 24 bp, Homo sapiens
  source 1..24: mol_type = genomic DNA
agctcagtcggtagagcatcagac

SEQ ID NO: 44456 - DNA, 25 bp, Homo sapiens
  source 1..25: mol_type = genomic DNA
agctcagtcggtagagcatcagact

SEQ ID NO: 44457 - DNA, 24 bp, Homo sapiens
  source 1..24: mol_type = genomic DNA
agctcagtcggtagagcatgagac

SEQ ID NO: 44458 - DNA, 25 bp, Homo sapiens
  source 1..25: mol_type = genomic DNA
agctcagtcggtagagcatgagact

SEQ ID NO: 44459 - DNA, 24 bp, Homo sapiens
  source 1..24: mol_type = genomic DNA
agctcagtcggtagagcatgggac

SEQ ID NO: 44460 - DNA, 25 bp, Homo sapiens
  source 1..25: mol_type = genomic DNA
agctcagtcggtagagcatgggact

SEQ ID NO: 44461 - DNA, 26 bp, Homo sapiens
  source 1..26: mol_type = genomic DNA
agctcagtcggtagagcatgggactc

SEQ ID NO: 44462 - DNA, 27 bp, Homo sapiens
  source 1..27: mol_type = genomic DNA
agctcagtcggtagagcatgggactct

SEQ ID NO: 44463 - DNA, 33 bp, Homo sapiens; identical to SEQ ID NO: 4660
  source 1..33: mol_type = genomic DNA

SEQ ID NO: 44464 - DNA, 24 bp, Homo sapiens
  source 1..24: mol_type = genomic DNA
agctccgaggtgattttcatattg

SEQ ID NO: 44465 - DNA, 29 bp, Homo sapiens
  source 1..29: mol_type = genomic DNA
agctccgaggtgattttcatattgaattg

SEQ ID NO: 44466 - DNA, 30 bp, Homo sapiens; identical to SEQ ID NO: 4685
  source 1..30: mol_type = genomic DNA

SEQ ID NO: 44467 - DNA, 38 bp, Homo sapiens; identical to SEQ ID NO: 4693
  source 1..38: mol_type = genomic DNA

SEQ ID NO: 44468 - DNA, 39 bp, Homo sapiens; identical to SEQ ID NO: 4694
  source 1..39: mol_type = genomic DNA

SEQ ID NO: 44469 - DNA, 45 bp, Homo sapiens; identical to SEQ ID NO: 4700
  source 1..45: mol_type = genomic DNA

SEQ ID NO: 44470 - DNA, 26 bp, Homo sapiens
  source 1..26: mol_type = genomic DNA
agctgccttccaagcagttgacccgg

SEQ ID NO: 44471 - DNA, 20 bp, Homo sapiens
  source 1..20: mol_type = genomic DNA
agctggggattgtgggttcg

SEQ ID NO: 44472 - DNA, 37 bp, Homo sapiens; identical to SEQ ID NO: 4717
  source 1..37: mol_type = genomic DNA

SEQ ID NO: 44473 - DNA, 38 bp, Homo sapiens; identical to SEQ ID NO: 4718
  source 1..38: mol_type = genomic DNA

SEQ ID NO: 44474 - DNA, 21 bp, Homo sapiens
  source 1..21: mol_type = genomic DNA
agcttaacacaaagcacccaa

SEQ ID NO: 44475 - DNA, 20 bp, Homo sapiens
  source 1..20: mol_type = genomic DNA
agcttcaaacctgccggggc

SEQ ID NO: 44476 - DNA, 21 bp, Homo sapiens
  source 1..21: mol_type = genomic DNA
agcttcaaacctgccggggct

SEQ ID NO: 44477 - DNA, 22 bp, Homo sapiens
  source 1..22: mol_type = genomic DNA
agcttcaaacctgccggggctt

SEQ ID NO: 44478 - DNA, 25 bp, Homo sapiens
  source 1..25: mol_type = genomic DNA
agcttcaaacctgccggggcttcca

SEQ ID NO: 44479 - DNA, 16 bp, Homo sapiens
  source 1..16: mol_type = genomic DNA
agctttggggggttcg

SEQ ID NO: 44480 - DNA, 16 bp, Homo sapiens
  source 1..16: mol_type = genomic DNA
aggagatcctgggttc

SEQ ID NO: 44481 - DNA, 27 bp, Homo sapiens
  source 1..27: mol_type = genomic DNA
aggagatcctgggttcgaatcccagcg

SEQ ID NO: 44482 - DNA, 31 bp, Homo sapiens; identical to SEQ ID NO: 4805
  source 1..31: mol_type = genomic DNA

SEQ ID NO: 44483 - DNA, 33 bp, Homo sapiens; identical to SEQ ID NO: 4807
  source 1..33: mol_type = genomic DNA

SEQ ID NO: 44484 - DNA, 30 bp, Homo sapiens; identical to SEQ ID NO: 4810
  source 1..30: mol_type = genomic DNA

SEQ ID NO: 44485 - DNA, 32 bp, Homo sapiens; identical to SEQ ID NO: 4812
  source 1..32: mol_type = genomic DNA

SEQ ID NO: 44486 - DNA, 33 bp, Homo sapiens; identical to SEQ ID NO: 4813
  source 1..33: mol_type = genomic DNA

SEQ ID NO: 44487 - DNA, 35 bp, Homo sapiens; identical to SEQ ID NO: 4815
  source 1..35: mol_type = genomic DNA

SEQ ID NO: 44488 - DNA, 18 bp, Homo sapiens
  source 1..18: mol_type = genomic DNA
aggagatttcaacttaac

SEQ ID NO: 44489 - DNA, 24 bp, Homo sapiens
  source 1..24: mol_type = genomic DNA
aggagatttcaacttaacttgacc

SEQ ID NO: 44490 - DNA, 28 bp, Homo sapiens
  source 1..28: mol_type = genomic DNA
aggagatttcaacttaacttgaccgctc

SEQ ID NO: 44491 - DNA, 29 bp, Homo sapiens
  source 1..29: mol_type = genomic DNA
aggagatttcaacttaacttgaccgctct

SEQ ID NO: 44492 - DNA, 30 bp, Homo sapiens; identical to SEQ ID NO: 4838
  source 1..30: mol_type = genomic DNA

SEQ ID NO: 44493 - DNA, 31 bp, Homo sapiens; identical to SEQ ID NO: 4839
  source 1..31: mol_type = genomic DNA

SEQ ID NO: 44494 - DNA, 32 bp, Homo sapiens; identical to SEQ ID NO: 4840
  source 1..32: mol_type = genomic DNA

SEQ ID NO: 44495 - DNA, 33 bp, Homo sapiens; identical to SEQ ID NO: 4841
  source 1..33: mol_type = genomic DNA

SEQ ID NO: 44496 - DNA, 34 bp, Homo sapiens; identical to SEQ ID NO: 4842
  source 1..34: mol_type = genomic DNA

SEQ ID NO: 44497 - DNA, 16 bp, Homo sapiens
  source 1..16: mol_type = genomic DNA
aggagcttaaaccccc

SEQ ID NO: 44498 - DNA, 27 bp, Homo sapiens
  source 1..27: mol_type = genomic DNA
aggagcttaaacccccttatttctacc

SEQ ID NO: 44499 - DNA, 23 bp, Homo sapiens
  source 1..23: mol_type = genomic DNA
aggataacagctatccattggtc

SEQ ID NO: 44500 - DNA, 17 bp, Homo sapiens
  source 1..17: mol_type = genomic DNA
aggatggccgagcggtc

SEQ ID NO: 44501 - DNA, 18 bp, Homo sapiens
  source 1..18: mol_type = genomic DNA
aggatggccgagcggtct

SEQ ID NO: 44502 - DNA, 19 bp, Homo sapiens
  source 1..19: mol_type = genomic DNA
aggatggccgagcggtcta

SEQ ID NO: 44503 - DNA, 20 bp, Homo sapiens
  source 1..20: mol_type = genomic DNA
aggatggccgagcggtctaa

SEQ ID NO: 44504 - DNA, 21 bp, Homo sapiens
  source 1..21: mol_type = genomic DNA
aggatggccgagcggtctaag

SEQ ID NO: 44505 - DNA, 22 bp, Homo sapiens
  source 1..22: mol_type = genomic DNA
aggatggccgagcggtctaagg

SEQ ID NO: 44506 - DNA, 23 bp, Homo sapiens
  source 1..23: mol_type = genomic DNA
aggatggccgagcggtctaaggc

SEQ ID NO: 44507 - DNA, 27 bp, Homo sapiens
  source 1..27: mol_type = genomic DNA
aggatggccgagcggtctaaggcgctg

SEQ ID NO: 44508 - DNA, 29 bp, Homo sapiens
  source 1..29: mol_type = genomic DNA
aggatggccgagcggtctaaggcgctgcg

SEQ ID NO: 44509 - DNA, 21 bp, Homo sapiens
  source 1..21: mol_type = genomic DNA
aggatggccgagtggtctaag

SEQ ID NO: 44510 - DNA, 23 bp, Homo sapiens
  source 1..23: mol_type = genomic DNA
aggatggccgagtggtctaaggc

SEQ ID NO: 44511 - DNA, 20 bp, Homo sapiens
  source 1..20: mol_type = genomic DNA
aggatggccgagtggttaag

SEQ ID NO: 44512 - DNA, 22 bp, Homo sapiens
  source 1..22: mol_type = genomic DNA
aggatggccgagtggttaaggc

SEQ ID NO: 44513 - DNA, 29 bp, Homo sapiens
  source 1..29: mol_type = genomic DNA
aggatggggtgtgataggtggcacggaga

SEQ ID NO: 44514 - DNA, 30 bp, Homo sapiens; identical to SEQ ID NO: 4890
  source 1..30: mol_type = genomic DNA

SEQ ID NO: 44515 - DNA, 31 bp, Homo sapiens; identical to SEQ ID NO: 4891
  source 1..31: mol_type = genomic DNA

SEQ ID NO: 44516 - DNA, 32 bp, Homo sapiens; identical to SEQ ID NO: 4892
  source 1..32: mol_type = genomic DNA

SEQ ID NO: 44517 - DNA, 33 bp, Homo sapiens; identical to SEQ ID NO: 4893
  source 1..33: mol_type = genomic DNA

SEQ ID NO: 44518 - DNA, 35 bp, Homo sapiens; identical to SEQ ID NO: 4895
  source 1..35: mol_type = genomic DNA

SEQ ID NO: 44519 - DNA, 42 bp, Homo sapiens
  source 1..42: mol_type = genomic DNA
aggatggggtgtgataggtggcacggagaattttggattctc

SEQ ID NO: 44520 - DNA, 28 bp, Homo sapiens
  source 1..28: mol_type = genomic DNA
aggattcctggttttcacccaggcggcc

SEQ ID NO: 44521 - DNA, 38 bp, Homo sapiens; identical to SEQ ID NO: 32640
  source 1..38: mol_type = genomic DNA

SEQ ID NO: 44522 - DNA, 40 bp, Homo sapiens
  source 1..40: mol_type = genomic DNA
aggattcctggttttcacccaggcggcccgggttcgactc

SEQ ID NO: 44523 - DNA, 41 bp, Homo sapiens
  source 1..41: mol_type = genomic DNA
aggattcctggttttcacccaggcggcccgggttcgactcc

SEQ ID NO: 44524 - DNA, 25 bp, Homo sapiens
  source 1..25: mol_type = genomic DNA
aggattcctggttttcacccaggtg

SEQ ID NO: 44525 - DNA, 16 bp, Homo sapiens
  source 1..16: mol_type = genomic DNA
aggattcggcgctctc

SEQ ID NO: 44526 - DNA, 17 bp, Homo sapiens
  source 1..17: mol_type = genomic DNA
aggattcggcgctctca

SEQ ID NO: 44527 - DNA, 18 bp, Homo sapiens
  source 1..18: mol_type = genomic DNA
aggattcggcgctctcac

SEQ ID NO: 44528 - DNA, 19 bp, Homo sapiens
  source 1..19: mol_type = genomic DNA
aggattcggcgctctcacc

SEQ ID NO: 44529 - DNA, 20 bp, Homo sapiens
  source 1..20: mol_type = genomic DNA
aggattcggcgctctcaccg

SEQ ID NO: 44530 - DNA, 22 bp, Homo sapiens
  source 1..22: mol_type = genomic DNA
aggattcggcgctctcaccgcc

SEQ ID NO: 44531 - DNA, 27 bp, Homo sapiens
  source 1..27: mol_type = genomic DNA
aggattcggcgctctcaccgccgcggc

SEQ ID NO: 44532 - DNA, 28 bp, Homo sapiens
  source 1..28: mol_type = genomic DNA
aggattcggcgctctcaccgccgcggcc

SEQ ID NO: 44533 - DNA, 29 bp, Homo sapiens
  source 1..29: mol_type = genomic DNA
aggattcggcgctctcaccgccgcggccc

SEQ ID NO: 44534 - DNA, 31 bp, Homo sapiens; identical to SEQ ID NO: 4919
  source 1..31: mol_type = genomic DNA

SEQ ID NO: 44535 - DNA, 32 bp, Homo sapiens; identical to SEQ ID NO: 4920
  source 1..32: mol_type = genomic DNA

SEQ ID NO: 44536 - DNA, 33 bp, Homo sapiens; identical to SEQ ID NO: 4921
  source 1..33: mol_type = genomic DNA

SEQ ID NO: 44537 - DNA, 41 bp, Homo sapiens
  source 1..41: mol_type = genomic DNA
aggattcggcgctctcaccgccgcggcccgggttcgattcc

SEQ ID NO: 44538 - DNA, 28 bp, Homo sapiens
  source 1..28: mol_type = genomic DNA
aggcatcagcctccggagctggggattg

SEQ ID NO: 44539 - DNA, 29 bp, Homo sapiens
  source 1..29: mol_type = genomic DNA
aggcatcagcctccggagctggggattgt

SEQ ID NO: 44540 - DNA, 20 bp, Homo sapiens
  source 1..20: mol_type = genomic DNA
aggcattggcctcctaagcc

SEQ ID NO: 44541 - DNA, 29 bp, Homo sapiens
  source 1..29: mol_type = genomic DNA
aggcattggcctcctaagccagggattgt

SEQ ID NO: 44542 - DNA, 26 bp, Homo sapiens
  source 1..26: mol_type = genomic DNA
aggccccgggttcaatccccggcacc

SEQ ID NO: 44543 - DNA, 32 bp, Homo sapiens; identical to SEQ ID NO: 4949
  source 1..32: mol_type = genomic DNA

SEQ ID NO: 44544 - DNA, 33 bp, Homo sapiens; identical to SEQ ID NO: 4950
  source 1..33: mol_type = genomic DNA

SEQ ID NO: 44545 - DNA, 17 bp, Homo sapiens
  source 1..17: mol_type = genomic DNA
aggccccgggttcgatc

SEQ ID NO: 44546 - DNA, 20 bp, Homo sapiens
  source 1..20: mol_type = genomic DNA
aggccccgggttcgatcccc

SEQ ID NO: 44547 - DNA, 32 bp, Homo sapiens; identical to SEQ ID NO: 4951
  source 1..32: mol_type = genomic DNA

SEQ ID NO: 44548 - DNA, 33 bp, Homo sapiens; identical to SEQ ID NO: 4952
  source 1..33: mol_type = genomic DNA

SEQ ID NO: 44549 - DNA, 18 bp, Homo sapiens
  source 1..18: mol_type = genomic DNA
aggcggcccgggttcgac

SEQ ID NO: 44550 - DNA, 21 bp, Homo sapiens
  source 1..21: mol_type = genomic DNA
aggcggcccgggttcgactcc

SEQ ID NO: 44551 - DNA, 22 bp, Homo sapiens
  source 1..22: mol_type = genomic DNA
aggcggcccgggttcgactccc

SEQ ID NO: 44552 - DNA, 25 bp, Homo sapiens
  source 1..25: mol_type = genomic DNA
aggcggcccgggttcgactcccggt

SEQ ID NO: 44553 - DNA, 26 bp, Homo sapiens
  source 1..26: mol_type = genomic DNA
aggcggcccgggttcgactcccggtg

SEQ ID NO: 44554 - DNA, 27 bp, Homo sapiens
  source 1..27: mol_type = genomic DNA
aggcggcccgggttcgactcccggtgt

SEQ ID NO: 44555 - DNA, 28 bp, Homo sapiens
  source 1..28: mol_type = genomic DNA
aggcggcccgggttcgactcccggtgtg

SEQ ID NO: 44556 - DNA, 29 bp, Homo sapiens
  source 1..29: mol_type = genomic DNA
aggcggcccgggttcgactcccggtgtgg

SEQ ID NO: 44557 - DNA, 30 bp, Homo sapiens; identical to SEQ ID NO: 4967
  source 1..30: mol_type = genomic DNA

SEQ ID NO: 44558 - DNA, 31 bp, Homo sapiens; identical to SEQ ID NO: 4968
  source 1..31: mol_type = genomic DNA

SEQ ID NO: 44559 - DNA, 32 bp, Homo sapiens; identical to SEQ ID NO: 4969
  source 1..32: mol_type = genomic DNA

SEQ ID NO: 44560 - DNA, 33 bp, Homo sapiens; identical to SEQ ID NO: 4970
  source 1..33: mol_type = genomic DNA

SEQ ID NO: 44561 - DNA, 34 bp, Homo sapiens; identical to SEQ ID NO: 4971
  source 1..34: mol_type = genomic DNA

SEQ ID NO: 44562 - DNA, 35 bp, Homo sapiens; identical to SEQ ID NO: 4972
  source 1..35: mol_type = genomic DNA

SEQ ID NO: 44563 - DNA, 46 bp, Homo sapiens
  source 1..46: mol_type = genomic DNA
aggctccagtctcttcgggggcgtgggttcgaatcccaccgctgcc

SEQ ID NO: 44564 - DNA, 18 bp, Homo sapiens
  source 1..18: mol_type = genomic DNA
aggctgcgtgttcgaatc

SEQ ID NO: 44565 - DNA, 23 bp, Homo sapiens
  source 1..23: mol_type = genomic DNA
aggctgcgtgttcgaatcacgtc

SEQ ID NO: 44566 - DNA, 25 bp, Homo sapiens
  source 1..25: mol_type = genomic DNA
aggcttacgaccccttatttacccc

SEQ ID NO: 44567 - DNA, 27 bp, Homo sapiens
  source 1..27: mol_type = genomic DNA
agggatgggttcgattctcatagtcct

SEQ ID NO: 44568 - DNA, 16 bp, Homo sapiens
  source 1..16: mol_type = genomic DNA
agggattgtgggttcg

SEQ ID NO: 44569 - DNA, 21 bp, Homo sapiens
  source 1..21: mol_type = genomic DNA
agggattgtgggttcgagtcc

SEQ ID NO: 44570 - DNA, 22 bp, Homo sapiens
  source 1..22: mol_type = genomic DNA
agggattgtgggttcgagtccc

SEQ ID NO: 44571 - DNA, 23 bp, Homo sapiens
  source 1..23: mol_type = genomic DNA
agggattgtgggttcgagtccca

SEQ ID NO: 44572 - DNA, 25 bp, Homo sapiens
  source 1..25: mol_type = genomic DNA
agggattgtgggttcgagtcccacc

SEQ ID NO: 44573 - DNA, 30 bp, Homo sapiens; identical to SEQ ID NO: 5013
  source 1..30: mol_type = genomic DNA

SEQ ID NO: 44574 - DNA, 31 bp, Homo sapiens; identical to SEQ ID NO: 5014
  source 1..31: mol_type = genomic DNA

SEQ ID NO: 44575 - DNA, 32 bp, Homo sapiens; identical to SEQ ID NO: 5015
  source 1..32: mol_type = genomic DNA

SEQ ID NO: 44576 - DNA, 33 bp, Homo sapiens; identical to SEQ ID NO: 5016
  source 1..33: mol_type = genomic DNA

SEQ ID NO: 44577 - DNA, 34 bp, Homo sapiens; identical to SEQ ID NO: 5017
  source 1..34: mol_type = genomic DNA

SEQ ID NO: 44578 - DNA, 35 bp, Homo sapiens; identical to SEQ ID NO: 5018
  source 1..35: mol_type = genomic DNA

SEQ ID NO: 44579 - DNA, 26 bp, Homo sapiens
  source 1..26: mol_type = genomic DNA
agggattgtgggttcgagtcccacct

SEQ ID NO: 44580 - DNA, 31 bp, Homo sapiens; identical to SEQ ID NO: 5019
  source 1..31: mol_type = genomic DNA

SEQ ID NO: 44581 - DNA, 34 bp, Homo sapiens; identical to SEQ ID NO: 5022
  source 1..34: mol_type = genomic DNA

SEQ ID NO: 44582 - DNA, 35 bp, Homo sapiens; identical to SEQ ID NO: 5023
  source 1..35: mol_type = genomic DNA

SEQ ID NO: 44583 - DNA, 34 bp, Homo sapiens; identical to SEQ ID NO: 5026
  source 1..34: mol_type = genomic DNA

SEQ ID NO: 44584 - DNA, 35 bp, Homo sapiens; identical to SEQ ID NO: 5027
  source 1..35: mol_type = genomic DNA

SEQ ID NO: 44585 - DNA, 25 bp, Homo sapiens
  source 1..25: mol_type = genomic DNA
agggattgtgggttcgagtcccatc

SEQ ID NO: 44586 - DNA, 26 bp, Homo sapiens
  source 1..26: mol_type = genomic DNA
agggattgtgggttcgagtcccatct

SEQ ID NO: 44587 - DNA, 27 bp, Homo sapiens
  source 1..27: mol_type = genomic DNA
agggattgtgggttcgagtcccatctg

SEQ ID NO: 44588 - DNA, 29 bp, Homo sapiens
  source 1..29: mol_type = genomic DNA
agggattgtgggttcgagtcccatctggg

SEQ ID NO: 44589 - DNA, 30 bp, Homo sapiens; identical to SEQ ID NO: 5031
  source 1..30: mol_type = genomic DNA

SEQ ID NO: 44590 - DNA, 31 bp, Homo sapiens; identical to SEQ ID NO: 5032
  source 1..31: mol_type = genomic DNA

SEQ ID NO: 44591 - DNA, 32 bp, Homo sapiens; identical to SEQ ID NO: 5033
  source 1..32: mol_type = genomic DNA

SEQ ID NO: 44592 - DNA, 33 bp, Homo sapiens; identical to SEQ ID NO: 5034
  source 1..33: mol_type = genomic DNA

SEQ ID NO: 44593 - DNA, 34 bp, Homo sapiens; identical to SEQ ID NO: 5035
  source 1..34: mol_type = genomic DNA

SEQ ID NO: 44594 - DNA, 35 bp, Homo sapiens; identical to SEQ ID NO: 5036
  source 1..35: mol_type = genomic DNA

SEQ ID NO: 44595 - DNA, 19 bp, Homo sapiens
  source 1..19: mol_type = genomic DNA
aggggtagagcatttgact

SEQ ID NO: 44596 - DNA, 21 bp, Homo sapiens
  source 1..21: mol_type = genomic DNA
aggggtagagcatttgactgc

SEQ ID NO: 44597 - DNA, 17 bp, Homo sapiens
  source 1..17: mol_type = genomic DNA
aggggtatgattctcgc

SEQ ID NO: 44598 - DNA, 18 bp, Homo sapiens
  source 1..18: mol_type = genomic DNA
aggggtatgattctcgct

SEQ ID NO: 44599 - DNA, 19 bp, Homo sapiens
  source 1..19: mol_type = genomic DNA
aggggtatgattctcgctt

SEQ ID NO: 44600 - DNA, 18 bp, Homo sapiens
  source 1..18: mol_type = genomic DNA
aggggtatgattctcggt

SEQ ID NO: 44601 - DNA, 19 bp, Homo sapiens
  source 1..19: mol_type = genomic DNA
aggggtatgattctcggtt

SEQ ID NO: 44602 - DNA, 33 bp, Homo sapiens; identical to SEQ ID NO: 5057
  source 1..33: mol_type = genomic DNA

SEQ ID NO: 44603 - DNA, 33 bp, Homo sapiens; identical to SEQ ID NO: 5063
  source 1..33: mol_type = genomic DNA

SEQ ID NO: 44604 - DNA, 18 bp, Homo sapiens
  source 1..18: mol_type = genomic DNA
aggggttagagcactggt

SEQ ID NO: 44605 - DNA, 30 bp, Homo sapiens; identical to SEQ ID NO: 5073
  source 1..30: mol_type = genomic DNA

SEQ ID NO: 44606 - DNA, 31 bp, Homo sapiens; identical to SEQ ID NO: 5074
  source 1..31: mol_type = genomic DNA

SEQ ID NO: 44607 - DNA, 32 bp, Homo sapiens; identical to SEQ ID NO: 5075
  source 1..32: mol_type = genomic DNA

SEQ ID NO: 44608 - DNA, 33 bp, Homo sapiens; identical to SEQ ID NO: 5076
  source 1..33: mol_type = genomic DNA

SEQ ID NO: 44609 - DNA, 34 bp, Homo sapiens; identical to SEQ ID NO: 5077
  source 1..34: mol_type = genomic DNA

SEQ ID NO: 44610 - DNA, 21 bp, Homo sapiens
  source 1..21: mol_type = genomic DNA
agggtcgtgggttcgagcccc

SEQ ID NO: 44611 - DNA, 22 bp, Homo sapiens
  source 1..22: mol_type = genomic DNA
agggtcgtgggttcgagcccca

SEQ ID NO: 44612 - DNA, 24 bp, Homo sapiens
  source 1..24: mol_type = genomic DNA
agggtcgtgggttcgagccccacg

SEQ ID NO: 44613 - DNA, 30 bp, Homo sapiens; identical to SEQ ID NO: 5086
  source 1..30: mol_type = genomic DNA

SEQ ID NO: 44614 - DNA, 31 bp, Homo sapiens; identical to SEQ ID NO: 5087
  source 1..31: mol_type = genomic DNA

SEQ ID NO: 44615 - DNA, 32 bp, Homo sapiens; identical to SEQ ID NO: 5088
  source 1..32: mol_type = genomic DNA

SEQ ID NO: 44616 - DNA, 33 bp, Homo sapiens; identical to SEQ ID NO: 5089
  source 1..33: mol_type = genomic DNA

SEQ ID NO: 44617 - DNA, 34 bp, Homo sapiens; identical to SEQ ID NO: 5090
  source 1..34: mol_type = genomic DNA

SEQ ID NO: 44618 - DNA, 19 bp, Homo sapiens
  source 1..19: mol_type = genomic DNA
agggtggccgagcggtcta

SEQ ID NO: 44619 - DNA, 21 bp, Homo sapiens
  source 1..21: mol_type = genomic DNA
agggtggccgagcggtctaag

SEQ ID NO: 44620 - DNA, 23 bp, Homo sapiens
  source 1..23: mol_type = genomic DNA
agggtggccgagcggtctaaggc

SEQ ID NO: 44621 - DNA, 23 bp, Homo sapiens
  source 1..23: mol_type = genomic DNA
agggttcaagtccctgttcgggc

SEQ ID NO: 44622 - DNA, 24 bp, Homo sapiens
  source 1..24: mol_type = genomic DNA
agggttcaagtccctgttcgggcg

SEQ ID NO: 44623 - DNA, 25 bp, Homo sapiens
  source 1..25: mol_type = genomic DNA
agggttcaagtccctgttcgggcgc

SEQ ID NO: 44624 - DNA, 26 bp, Homo sapiens
  source 1..26: mol_type = genomic DNA
agggttcaagtccctgttcgggcgcc

SEQ ID NO: 44625 - DNA, 27 bp, Homo sapiens
  source 1..27: mol_type = genomic DNA
agggttcaagtccctgttcgggcgcca

SEQ ID NO: 44626 - DNA, 25 bp, Homo sapiens
  source 1..25: mol_type = genomic DNA
agggttcgagtcccttcgtggtcgc

SEQ ID NO: 44627 - DNA, 26 bp, Homo sapiens
  source 1..26: mol_type = genomic DNA
agggttcgagtcccttcgtggtcgcc

SEQ ID NO: 44628 - DNA, 16 bp, Homo sapiens
  source 1..16: mol_type = genomic DNA
aggtagcgcgtcagtc

SEQ ID NO: 44629 - DNA, 24 bp, Homo sapiens
  source 1..24: mol_type = genomic DNA
aggtcagctaaataagctatcggg

SEQ ID NO: 44630 - DNA, 19 bp, Homo sapiens
  source 1..19: mol_type = genomic DNA
aggtccccggttcgaaacc

SEQ ID NO: 44631 - DNA, 30 bp, Homo sapiens; identical to SEQ ID NO: 5130
  source 1..30: mol_type = genomic DNA

SEQ ID NO: 44632 - DNA, 32 bp, Homo sapiens; identical to SEQ ID NO: 5134
  source 1..32: mol_type = genomic DNA

SEQ ID NO: 44633 - DNA, 33 bp, Homo sapiens
  source 1..33: mol_type = genomic DNA
aggtcccgggttcgatccccggcatctccacca

SEQ ID NO: 44634 - DNA, 18 bp, Homo sapiens
  source 1..18: mol_type = genomic DNA
aggtccctggttcaaatc

SEQ ID NO: 44635 - DNA, 19 bp, Homo sapiens
  source 1..19: mol_type = genomic DNA
aggtccctggttcaaatcc

SEQ ID NO: 44636 - DNA, 19 bp, Homo sapiens
  source 1..19: mol_type = genomic DNA
aggtccctggttcgatccc

SEQ ID NO: 44637 - DNA, 31 bp, Homo sapiens; identical to SEQ ID NO: 5138
  source 1..31: mol_type = genomic DNA

SEQ ID NO: 44638 - DNA, 33 bp, Homo sapiens; identical to SEQ ID NO: 5139
  source 1..33: mol_type = genomic DNA

SEQ ID NO: 44639 - DNA, 17 bp, Homo sapiens
  source 1..17: mol_type = genomic DNA
aggtcctgagttcgaac

SEQ ID NO: 44640 - DNA, 29 bp, Homo sapiens
  source 1..29: mol_type = genomic DNA
aggtcctgagttcgaacctcagagggggc

SEQ ID NO: 44641 - DNA, 30 bp, Homo sapiens
  source 1..30: mol_type = genomic DNA
aggtcctgagttcgaacctcagagggggca

SEQ ID NO: 44642 - DNA, 20 bp, Homo sapiens
  source 1..20: mol_type = genomic DNA
aggtcctgggttcgagcccc

SEQ ID NO: 44643 - DNA, 29 bp, Homo sapiens
  source 1..29: mol_type = genomic DNA
aggtcctgggttcgagccccagtggaacc

SEQ ID NO: 44644 - DNA, 31 bp, Homo sapiens; identical to SEQ ID NO: 5149
  source 1..31: mol_type = genomic DNA

SEQ ID NO: 44645 - DNA, 32 bp, Homo sapiens; identical to SEQ ID NO: 5150
  source 1..32: mol_type = genomic DNA

SEQ ID NO: 44646 - DNA, 33 bp, Homo sapiens; identical to SEQ ID NO: 5151
  source 1..33: mol_type = genomic DNA

SEQ ID NO: 44647 - DNA, 18 bp, Homo sapiens
  source 1..18: mol_type = genomic DNA
aggtcgatggatcgaaac

SEQ ID NO: 44648 - DNA, 19 bp, Homo sapiens
  source 1..19: mol_type = genomic DNA
aggtcgatggatcgaaacc

SEQ ID NO: 44649 - DNA, 20 bp, Homo sapiens
  source 1..20: mol_type = genomic DNA
aggtcgatggatcgaaacca

SEQ ID NO: 44650 - DNA, 21 bp, Homo sapiens
  source 1..21: mol_type = genomic DNA
aggtcgatggatcgaaaccat

SEQ ID NO: 44651 - DNA, 31 bp, Homo sapiens
  source 1..31: mol_type = genomic DNA
aggtcgcagtctcccctggaggcgtgggttc

SEQ ID NO: 44652 - DNA, 18 bp, Homo sapiens
  source 1..18: mol_type = genomic DNA
aggtcgcgggttcgatcc

SEQ ID NO: 44653 - DNA, 20 bp, Homo sapiens
  source 1..20: mol_type = genomic DNA
aggtcgcgggttcgatcccc

SEQ ID NO: 44654 - DNA, 23 bp, Homo sapiens
  source 1..23: mol_type = genomic DNA
aggtcgcgggttcgatccccgta

SEQ ID NO: 44655 - DNA, 28 bp, Homo sapiens
  source 1..28: mol_type = genomic DNA
aggtcgcgggttcgatccccgtacgggc

SEQ ID NO: 44656 - DNA, 29 bp, Homo sapiens
  source 1..29: mol_type = genomic DNA
aggtcgcgggttcgatccccgtacgggcc

SEQ ID NO: 44657 - DNA, 30 bp, Homo sapiens; identical to SEQ ID NO: 5165
  source 1..30: mol_type = genomic DNA

SEQ ID NO: 44658 - DNA, 32 bp, Homo sapiens; identical to SEQ ID NO: 5167
  source 1..32: mol_type = genomic DNA

SEQ ID NO: 44659 - DNA, 33 bp, Homo sapiens; identical to SEQ ID NO: 5168
  source 1..33: mol_type = genomic DNA

SEQ ID NO: 44660 - DNA, 31 bp, Homo sapiens; identical to SEQ ID NO: 5170
  source 1..31: mol_type = genomic DNA

SEQ ID NO: 44661 - DNA, 32 bp, Homo sapiens; identical to SEQ ID NO: 5171
  source 1..32: mol_type = genomic DNA

SEQ ID NO: 44662 - DNA, 33 bp, Homo sapiens; identical to SEQ ID NO: 5172
  source 1..33: mol_type = genomic DNA

SEQ ID NO: 44663 - DNA, 31 bp, Homo sapiens; identical to SEQ ID NO: 5179
  source 1..31: mol_type = genomic DNA

SEQ ID NO: 44664 - DNA, 32 bp, Homo sapiens; identical to SEQ ID NO: 5180
  source 1..32: mol_type = genomic DNA

SEQ ID NO: 44665 - DNA, 33 bp, Homo sapiens; identical to SEQ ID NO: 5181
  source 1..33: mol_type = genomic DNA

SEQ ID NO: 44666 - DNA, 19 bp, Homo sapiens
  source 1..19: mol_type = genomic DNA
aggtcgtgagttcgagcct

SEQ ID NO: 44667 - DNA, 18 bp, Homo sapiens
  source 1..18: mol_type = genomic DNA
aggtcgtgagttcgatcc

SEQ ID NO: 44668 - DNA, 17 bp, Homo sapiens
  source 1..17: mol_type = genomic DNA
aggtcgtgggttcgatc

SEQ ID NO: 44669 - DNA, 18 bp, Homo sapiens
  source 1..18: mol_type = genomic DNA
aggtggcccgggttcgac

SEQ ID NO: 44670 - DNA, 19 bp, Homo sapiens
  source 1..19: mol_type = genomic DNA
aggtggcccgggttcgact

SEQ ID NO: 44671 - DNA, 21 bp, Homo sapiens
  source 1..21: mol_type = genomic DNA
aggtggcccgggttcgactcc

SEQ ID NO: 44672 - DNA, 22 bp, Homo sapiens
  source 1..22: mol_type = genomic DNA
aggtggcccgggttcgactccc

SEQ ID NO: 44673 - DNA, 33 bp, Homo sapiens; identical to SEQ ID NO: 5217
  source 1..33: mol_type = genomic DNA

SEQ ID NO: 44674 - DNA, 34 bp, Homo sapiens; identical to SEQ ID NO: 5218
  source 1..34: mol_type = genomic DNA

SEQ ID NO: 44675 - DNA, 35 bp, Homo sapiens; identical to SEQ ID NO: 5219
  source 1..35: mol_type = genomic DNA

SEQ ID NO: 44676 - DNA, 19 bp, Homo sapiens
  source 1..19: mol_type = genomic DNA
aggtggccgagtggttaag

SEQ ID NO: 44677 - DNA, 20 bp, Homo sapiens
  source 1..20: mol_type = genomic DNA
aggttccgggttcgagtccc

SEQ ID NO: 44678 - DNA, 21 bp, Homo sapiens
  source 1..21: mol_type = genomic DNA
aggttccgggttcgagtcccg

SEQ ID NO: 44679 - DNA, 23 bp, Homo sapiens
  source 1..23: mol_type = genomic DNA
aggttccgggttcgagtcccggc

SEQ ID NO: 44680 - DNA, 27 bp, Homo sapiens
  source 1..27: mol_type = genomic DNA
aggttccgggttcgagtcccggcggag

SEQ ID NO: 44681 - DNA, 29 bp, Homo sapiens
  source 1..29: mol_type = genomic DNA
aggttccgggttcgagtcccggcggagtc

SEQ ID NO: 44682 - DNA, 32 bp, Homo sapiens; identical to SEQ ID NO: 5229
  source 1..32: mol_type = genomic DNA

SEQ ID NO: 44683 - DNA, 25 bp, Homo sapiens
  source 1..25: mol_type = genomic DNA
aggttcgaaccctgctcgctgcgcc

SEQ ID NO: 44684 - DNA, 25 bp, Homo sapiens
  source 1..25: mol_type = genomic DNA
aggttcgaatcctgttcgtgacgcc

SEQ ID NO: 44685 - DNA, 25 bp, Homo sapiens
  source 1..25: mol_type = genomic DNA
aggttcgactcctggctggctcgcc

SEQ ID NO: 44686 - DNA, 17 bp, Homo sapiens
  source 1..17: mol_type = genomic DNA
aggttggtggttcgagc

SEQ ID NO: 44687 - DNA, 32 bp, Homo sapiens; identical to SEQ ID NO: 5257
  source 1..32: mol_type = genomic DNA

SEQ ID NO: 44688 - DNA, 32 bp, Homo sapiens; identical to SEQ ID NO: 5263
  source 1..32: mol_type = genomic DNA

SEQ ID NO: 44689 - DNA, 32 bp, Homo sapiens; identical to SEQ ID NO: 5266
  source 1..32: mol_type = genomic DNA

SEQ ID NO: 44690 - DNA, 27 bp, Homo sapiens
  source 1..27: mol_type = genomic DNA
agtaaataataggagcttaaaccccct

SEQ ID NO: 44691 - DNA, 17 bp, Homo sapiens
  source 1..17: mol_type = genomic DNA
agtaaggtcagctaaat

SEQ ID NO: 44692 - DNA, 20 bp, Homo sapiens
  source 1..20: mol_type = genomic DNA
agtaaggtcagctaaataag

SEQ ID NO: 44693 - DNA, 21 bp, Homo sapiens
  source 1..21: mol_type = genomic DNA
agtaaggtcagctaaataagc

SEQ ID NO: 44694 - DNA, 28 bp, Homo sapiens
  source 1..28: mol_type = genomic DNA
agtaaggtcagctaaataagctatcggg

SEQ ID NO: 44695 - DNA, 29 bp, Homo sapiens
  source 1..29: mol_type = genomic DNA
agtaaggtcagctaaataagctatcgggc

SEQ ID NO: 44696 - DNA, 30 bp, Homo sapiens; identical to SEQ ID NO: 5300
  source 1..30: mol_type = genomic DNA

SEQ ID NO: 44697 - DNA, 31 bp, Homo sapiens; identical to SEQ ID NO: 5301
  source 1..31: mol_type = genomic DNA

SEQ ID NO: 44698 - DNA, 32 bp, Homo sapiens; identical to SEQ ID NO: 5302
  source 1..32: mol_type = genomic DNA

SEQ ID NO: 44699 - DNA, 33 bp, Homo sapiens; identical to SEQ ID NO: 5303
  source 1..33: mol_type = genomic DNA

SEQ ID NO: 44700 - DNA, 34 bp, Homo sapiens; identical to SEQ ID NO: 5304
  source 1..34: mol_type = genomic DNA

SEQ ID NO: 44701 - DNA, 35 bp, Homo sapiens; identical to SEQ ID NO: 5305
  source 1..35: mol_type = genomic DNA

SEQ ID NO: 44702 - DNA, 36 bp, Homo sapiens; identical to SEQ ID NO: 5306
  source 1..36: mol_type = genomic DNA

SEQ ID NO: 44703 - DNA, 37 bp, Homo sapiens; identical to SEQ ID NO: 5307
  source 1..37: mol_type = genomic DNA

SEQ ID NO: 44704 - DNA, 38 bp, Homo sapiens; identical to SEQ ID NO: 5308
  source 1..38: mol_type = genomic DNA

SEQ ID NO: 44705 - DNA, 39 bp, Homo sapiens; identical to SEQ ID NO: 5309
  source 1..39: mol_type = genomic DNA

SEQ ID NO: 44706 - DNA, 40 bp, Homo sapiens; identical to SEQ ID NO: 5310
  source 1..40: mol_type = genomic DNA

SEQ ID NO: 44707 - DNA, 41 bp, Homo sapiens; identical to SEQ ID NO: 5311
  source 1..41: mol_type = genomic DNA

SEQ ID NO: 44708 - DNA, 42 bp, Homo sapiens; identical to SEQ ID NO: 5312
  source 1..42: mol_type = genomic DNA

SEQ ID NO: 44709 - DNA, 43 bp, Homo sapiens; identical to SEQ ID NO: 5313
  source 1..43: mol_type = genomic DNA

SEQ ID NO: 44710 - DNA, 44 bp, Homo sapiens; identical to SEQ ID NO: 5314
  source 1..44: mol_type = genomic DNA

SEQ ID NO: 44711 - DNA, 45 bp, Homo sapiens; identical to SEQ ID NO: 5315
  source 1..45: mol_type = genomic DNA

SEQ ID NO: 44712 - DNA, 46 bp, Homo sapiens; identical to SEQ ID NO: 5316
  source 1..46: mol_type = genomic DNA

SEQ ID NO: 44713 - DNA, 47 bp, Homo sapiens; identical to SEQ ID NO: 5317
  source 1..47: mol_type = genomic DNA

SEQ ID NO: 44714 - DNA, 20 bp, Homo sapiens
  source 1..20: mol_type = genomic DNA
agtaggcagcgcgtcagtct

SEQ ID NO: 44715 - DNA, 19 bp, Homo sapiens
  source 1..19: mol_type = genomic DNA
agtaggtagcgcatcagtc

SEQ ID NO: 44716 - DNA, 20 bp, Homo sapiens
  source 1..20: mol_type = genomic DNA
agtaggtagcgcgtcagtct

SEQ ID NO: 44717 - DNA, 17 bp, Homo sapiens
  source 1..17: mol_type = genomic DNA
agtagtcgtggccgagt

SEQ ID NO: 44718 - DNA, 16 bp, Homo sapiens
  source 1..16: mol_type = genomic DNA
agtatccccgcctgtc

SEQ ID NO: 44719 - DNA, 18 bp, Homo sapiens
  source 1..18: mol_type = genomic DNA
agtatccccgcctgtcac

SEQ ID NO: 44720 - DNA, 19 bp, Homo sapiens
  source 1..19: mol_type = genomic DNA
agtcacggtggccgagtgg

SEQ ID NO: 44721 - DNA, 16 bp, Homo sapiens
  source 1..16: mol_type = genomic DNA
agtcacgtcggggtca

SEQ ID NO: 44722 - DNA, 18 bp, Homo sapiens
  source 1..18: mol_type = genomic DNA
agtcacgtcggggtcacc

SEQ ID NO: 44723 - DNA, 19 bp, Homo sapiens
  source 1..19: mol_type = genomic DNA
agtcacgtcggggtcacca

SEQ ID NO: 44724 - DNA, 17 bp, Homo sapiens
  source 1..17: mol_type = genomic DNA
agtcaggatggccgagc

SEQ ID NO: 44725 - DNA, 21 bp, Homo sapiens
  source 1..21: mol_type = genomic DNA
agtcatggaggccatggggtt

SEQ ID NO: 44726 - DNA, 23 bp, Homo sapiens
  source 1..23: mol_type = genomic DNA
agtcatttcgatggcgtgggttc

SEQ ID NO: 44727 - DNA, 18 bp, Homo sapiens
  source 1..18: mol_type = genomic DNA
agtcccacctggggtacc

SEQ ID NO: 44728 - DNA, 18 bp, Homo sapiens
  source 1..18: mol_type = genomic DNA
agtcccacctggggtgcc

SEQ ID NO: 44729 - DNA, 18 bp, Homo sapiens
  source 1..18: mol_type = genomic DNA
agtcccattggtctagcc

SEQ ID NO: 44730 - DNA, 19 bp, Homo sapiens
  source 1..19: mol_type = genomic DNA
agtcccattggtctagcca

SEQ ID NO: 44731 - DNA, 17 bp, Homo sapiens
  source 1..17: mol_type = genomic DNA
agtcccggcggagtcgc

SEQ ID NO: 44732 - DNA, 18 bp, Homo sapiens
  source 1..18: mol_type = genomic DNA
agtcccggcggagtcgcc

SEQ ID NO: 44733 - DNA, 16 bp, Homo sapiens
  source 1..16: mol_type = genomic DNA
agtccctgttcgggcg

SEQ ID NO: 44734 - DNA, 17 bp, Homo sapiens
  source 1..17: mol_type = genomic DNA
agtccctgttcgggcgc

SEQ ID NO: 44735 - DNA, 18 bp, Homo sapiens
  source 1..18: mol_type = genomic DNA
agtccctgttcgggcgcc

SEQ ID NO: 44736 - DNA, 19 bp, Homo sapiens
  source 1..19: mol_type = genomic DNA
agtccctgttcgggcgcca

SEQ ID NO: 44737 - DNA, 18 bp, Homo sapiens
  source 1..18: mol_type = genomic DNA
agtccgtgcgagaatacc

SEQ ID NO: 44738 - DNA, 19 bp, Homo sapiens
  source 1..19: mol_type = genomic DNA
agtccgtgcgagaatacca

SEQ ID NO: 44739 - DNA, 18 bp, Homo sapiens
  source 1..18: mol_type = genomic DNA
agtcctgccgcggtcgcc

SEQ ID NO: 44740 - DNA, 16 bp, Homo sapiens
  source 1..16: mol_type = genomic DNA
agtcggtagagcatca

SEQ ID NO: 44741 - DNA, 18 bp, Homo sapiens
  source 1..18: mol_type = genomic DNA
agtcggtagagcatcaga

SEQ ID NO: 44742 - DNA, 19 bp, Homo sapiens
  source 1..19: mol_type = genomic DNA
agtcggtagagcatcagac

SEQ ID NO: 44743 - DNA, 20 bp, Homo sapiens
  source 1..20: mol_type = genomic DNA
agtcggtagagcatcagact

SEQ ID NO: 44744 - DNA, 18 bp, Homo sapiens
  source 1..18: mol_type = genomic DNA
agtcggtagagcatgaga

SEQ ID NO: 44745 - DNA, 19 bp, Homo sapiens
  source 1..19: mol_type = genomic DNA
agtcggtagagcatgagac

SEQ ID NO: 44746 - DNA, 20 bp, Homo sapiens
  source 1..20: mol_type = genomic DNA
agtcggtagagcatgagacc

SEQ ID NO: 44747 - DNA, 20 bp, Homo sapiens
  source 1..20: mol_type = genomic DNA
agtcggtagagcatgagact

SEQ ID NO: 44748 - DNA, 21 bp, Homo sapiens
  source 1..21: mol_type = genomic DNA
agtcggtagagcatgagactc

SEQ ID NO: 44749 - DNA, 22 bp, Homo sapiens
  source 1..22: mol_type = genomic DNA
agtcggtagagcatgagactct

SEQ ID NO: 44750 - DNA, 24 bp, Homo sapiens
  source 1..24: mol_type = genomic DNA
agtcggtagagcatgagactctta

SEQ ID NO: 44751 - DNA, 27 bp, Homo sapiens
  source 1..27: mol_type = genomic DNA
agtcggtagagcatgagactcttaatc

SEQ ID NO: 44752 - DNA, 28 bp, Homo sapiens
  source 1..28: mol_type = genomic DNA
agtcggtagagcatgagactcttaatct

SEQ ID NO: 44753 - DNA, 29 bp, Homo sapiens
  source 1..29: mol_type = genomic DNA
agtcggtagagcatgagactcttaatctc

SEQ ID NO: 44754 - DNA, 30 bp, Homo sapiens; identical to SEQ ID NO: 5417
  source 1..30: mol_type = genomic DNA

SEQ ID NO: 44755 - DNA, 39 bp, Homo sapiens; identical to SEQ ID NO: 5421
  source 1..39: mol_type = genomic DNA

SEQ ID NO: 44756 - DNA, 16 bp, Homo sapiens
  source 1..16: mol_type = genomic DNA
agtcggtagagcatgg

SEQ ID NO: 44757 - DNA, 17 bp, Homo sapiens
  source 1..17: mol_type = genomic DNA
agtcggtagagcatggg

SEQ ID NO: 44758 - DNA, 18 bp, Homo sapiens
  source 1..18: mol_type = genomic DNA
agtcggtagagcatggga

SEQ ID NO: 44759 - DNA, 19 bp, Homo sapiens
  source 1..19: mol_type = genomic DNA
agtcggtagagcatgggac

SEQ ID NO: 44760 - DNA, 20 bp, Homo sapiens
  source 1..20: mol_type = genomic DNA
agtcggtagagcatgggact

SEQ ID NO: 44761 - DNA, 21 bp, Homo sapiens
  source 1..21: mol_type = genomic DNA
agtcggtagagcatgggactc

SEQ ID NO: 44762 - DNA, 22 bp, Homo sapiens
  source 1..22: mol_type = genomic DNA
agtcggtagagcatgggactct

SEQ ID NO: 44763 - DNA, 24 bp, Homo sapiens
  source 1..24: mol_type = genomic DNA
agtcggtagagcatgggactctta

SEQ ID NO: 44764 - DNA, 25 bp, Homo sapiens
  source 1..25: mol_type = genomic DNA
agtcggtagagcatgggactcttaa

SEQ ID NO: 44765 - DNA, 26 bp, Homo sapiens
  source 1..26: mol_type = genomic DNA
agtcggtagagcatgggactcttaat

SEQ ID NO: 44766 - DNA, 27 bp, Homo sapiens
  source 1..27: mol_type = genomic DNA
agtcggtagagcatgggactcttaatc

SEQ ID NO: 44767 - DNA, 28 bp, Homo sapiens
  source 1..28: mol_type = genomic DNA
agtcggtagagcatgggactcttaatcc

SEQ ID NO: 44768 - DNA, 29 bp, Homo sapiens
  source 1..29: mol_type = genomic DNA
agtcggtagagcatgggactcttaatccc

SEQ ID NO: 44769 - DNA, 39 bp, Homo sapiens; identical to SEQ ID NO: 5444
  source 1..39: mol_type = genomic DNA

SEQ ID NO: 44770 - DNA, 43 bp, Homo sapiens
  source 1..43: mol_type = genomic DNA
agtcggtagagcatgggactcttaatcccagggtcgtgggttc

SEQ ID NO: 44771 - DNA, 22 bp, Homo sapiens
  source 1..22: mol_type = genomic DNA
agtctcataatctgaaggtcct

SEQ ID NO: 44772 - DNA, 23 bp, Homo sapiens
  source 1..23: mol_type = genomic DNA
agtctcataatctgaaggtcgtg

SEQ ID NO: 44773 - DNA, 26 bp, Homo sapiens
  source 1..26: mol_type = genomic DNA
agtctcataatctgaaggtcgtgagt

SEQ ID NO: 44774 - DNA, 21 bp, Homo sapiens
  source 1..21: mol_type = genomic DNA
agtctcttcgggggcgtgggt

SEQ ID NO: 44775 - DNA, 16 bp, Homo sapiens
  source 1..16: mol_type = genomic DNA
agtgaagcattggact

SEQ ID NO: 44776 - DNA, 18 bp, Homo sapiens
  source 1..18: mol_type = genomic DNA
agtggcgcagcggaagcg

SEQ ID NO: 44777 - DNA, 26 bp, Homo sapiens
  source 1..26: mol_type = genomic DNA
agtggcgcagcggaagcgtgctgggc

SEQ ID NO: 44778 - DNA, 28 bp, Homo sapiens
  source 1..28: mol_type = genomic DNA
agtggcgcagcggaagcgtgctgggccc

SEQ ID NO: 44779 - DNA, 16 bp, Homo sapiens
  source 1..16: mol_type = genomic DNA
agtggtagaattctcg

SEQ ID NO: 44780 - DNA, 17 bp, Homo sapiens
  source 1..17: mol_type = genomic DNA
agtggtagaattctcgc

SEQ ID NO: 44781 - DNA, 18 bp, Homo sapiens
  source 1..18: mol_type = genomic DNA
agtggtagaattctcgcc

SEQ ID NO: 44782 - DNA, 19 bp, Homo sapiens
  source 1..19: mol_type = genomic DNA
agtggtagaattctcgcct

SEQ ID NO: 44783 - DNA, 20 bp, Homo sapiens
  source 1..20: mol_type = genomic DNA
agtggtagaattctcgcctg

SEQ ID NO: 44784 - DNA, 21 bp, Homo sapiens
  source 1..21: mol_type = genomic DNA
agtggtagaattctcgcctgc

SEQ ID NO: 44785 - DNA, 22 bp, Homo sapiens
  source 1..22: mol_type = genomic DNA
agtggtagaattctcgcctgcc

SEQ ID NO: 44786 - DNA, 23 bp, Homo sapiens
  source 1..23: mol_type = genomic DNA
agtggtagaattctcgcctgcca

SEQ ID NO: 44787 - DNA, 24 bp, Homo sapiens
  source 1..24: mol_type = genomic DNA
agtggtagaattctcgcctgccac

SEQ ID NO: 44788 - DNA, 25 bp, Homo sapiens
  source 1..25: mol_type = genomic DNA
agtggtagaattctcgcctgccacg

SEQ ID NO: 44789 - DNA, 30 bp, Homo sapiens; identical to SEQ ID NO: 5546
  source 1..30: mol_type = genomic DNA

SEQ ID NO: 44790 - DNA, 35 bp, Homo sapiens; identical to SEQ ID NO: 5548
  source 1..35: mol_type = genomic DNA

SEQ ID NO: 44791 - DNA, 39 bp, Homo sapiens; identical to SEQ ID NO: 5552
  source 1..39: mol_type = genomic DNA

SEQ ID NO: 44792 - DNA, 17 bp, Homo sapiens
  source 1..17: mol_type = genomic DNA
agtggtagagcatttga

SEQ ID NO: 44793 - DNA, 18 bp, Homo sapiens
  source 1..18: mol_type = genomic DNA
agtggtagagcatttgac

SEQ ID NO: 44794 - DNA, 19 bp, Homo sapiens
  source 1..19: mol_type = genomic DNA
agtggtagagcatttgact

SEQ ID NO: 44795 - DNA, 20 bp, Homo sapiens
  source 1..20: mol_type = genomic DNA
agtggtagagcatttgactg

SEQ ID NO: 44796 - DNA, 21 bp, Homo sapiens
  source 1..21: mol_type = genomic DNA
agtggtagagcatttgactgc

SEQ ID NO: 44797 - DNA, 29 bp, Homo sapiens
  source 1..29: mol_type = genomic DNA
agtggtagagcatttgactgcagatcaag

SEQ ID NO: 44798 - DNA, 18 bp, Homo sapiens
  source 1..18: mol_type = genomic DNA
agtggtagagcgcatgct

SEQ ID NO: 44799 - DNA, 17 bp, Homo sapiens
  source 1..17: mol_type = genomic DNA
agtggtagagcgcgtgc

SEQ ID NO: 44800 - DNA, 18 bp, Homo sapiens
  source 1..18: mol_type = genomic DNA
agtggtagagcgcgtgct

SEQ ID NO: 44801 - DNA, 16 bp, Homo sapiens
  source 1..16: mol_type = genomic DNA
agtggtatcatgcaag

SEQ ID NO: 44802 - DNA, 17 bp, Homo sapiens
  source 1..17: mol_type = genomic DNA
agtggtatcatgcaaga

SEQ ID NO: 44803 - DNA, 18 bp, Homo sapiens
  source 1..18: mol_type = genomic DNA
agtggtatcatgcaagat

SEQ ID NO: 44804 - DNA, 19 bp, Homo sapiens
  source 1..19: mol_type = genomic DNA
agtggtatcatgcaagatt

SEQ ID NO: 44805 - DNA, 20 bp, Homo sapiens
  source 1..20: mol_type = genomic DNA
agtggtatcatgcaagattc

SEQ ID NO: 44806 - DNA, 18 bp, Homo sapiens
  source 1..18: mol_type = genomic DNA
agtggtgagtatccccgc

SEQ ID NO: 44807 - DNA, 25 bp, Homo sapiens
  source 1..25: mol_type = genomic DNA
agtggtgagtatccccgcctgtcac

SEQ ID NO: 44808 - DNA, 17 bp, Homo sapiens
  source 1..17: mol_type = genomic DNA
agtggttaggattcggc

SEQ ID NO: 44809 - DNA, 18 bp, Homo sapiens
  source 1..18: mol_type = genomic DNA
agtggttaggattcggcg

SEQ ID NO: 44810 - DNA, 19 bp, Homo sapiens
  source 1..19: mol_type = genomic DNA
agtggttaggattcggcgc

SEQ ID NO: 44811 - DNA, 20 bp, Homo sapiens
  source 1..20: mol_type = genomic DNA
agtggttaggattcggcgct

SEQ ID NO: 44812 - DNA, 21 bp, Homo sapiens
  source 1..21: mol_type = genomic DNA
agtggttaggattcggcgctc

SEQ ID NO: 44813 - DNA, 25 bp, Homo sapiens
  source 1..25: mol_type = genomic DNA
agtggttaggattcggcgctctcac

SEQ ID NO: 44814 - DNA, 26 bp, Homo sapiens
  source 1..26: mol_type = genomic DNA
agtggttaggattcggcgctctcacc

SEQ ID NO: 44815 - DNA, 29 bp, Homo sapiens
  source 1..29: mol_type = genomic DNA
agtggttaggattcggcgctctcaccgcc

SEQ ID NO: 44816 - DNA, 36 bp, Homo sapiens; identical to SEQ ID NO: 5616
  source 1..36: mol_type = genomic DNA

SEQ ID NO: 44817 - DNA, 40 bp, Homo sapiens; identical to SEQ ID NO: 5620
  source 1..40: mol_type = genomic DNA

SEQ ID NO: 44818 - DNA, 17 bp, Homo sapiens
  source 1..17: mol_type = genomic DNA
agtggttagtactctgc

SEQ ID NO: 44819 - DNA, 18 bp, Homo sapiens
  source 1..18: mol_type = genomic DNA
agtggttagtactctgcg

SEQ ID NO: 44820 - DNA, 19 bp, Homo sapiens
  source 1..19: mol_type = genomic DNA
agtggttagtactctgcgt

SEQ ID NO: 44821 - DNA, 20 bp, Homo sapiens
  source 1..20: mol_type = genomic DNA
agtggttagtactctgcgtt

SEQ ID NO: 44822 - DNA, 22 bp, Homo sapiens
  source 1..22: mol_type = genomic DNA
agtggttagtactctgcgttgt

SEQ ID NO: 44823 - DNA, 31 bp, Homo sapiens
  source 1..31: mol_type = genomic DNA
agtggttagtactctgcgttgtggccgcagc

SEQ ID NO: 44824 - DNA, 35 bp, Homo sapiens; identical to SEQ ID NO: 5634
  source 1..35: mol_type = genomic DNA

SEQ ID NO: 44825 - DNA, 36 bp, Homo sapiens; identical to SEQ ID NO: 5635
  source 1..36: mol_type = genomic DNA

SEQ ID NO: 44826 - DNA, 18 bp, Homo sapiens
  source 1..18: mol_type = genomic DNA
agtggttatcacgtctgc

SEQ ID NO: 44827 - DNA, 18 bp, Homo sapiens
  source 1..18: mol_type = genomic DNA
agtggttatcacgttcgc

SEQ ID NO: 44828 - DNA, 19 bp, Homo sapiens
  source 1..19: mol_type = genomic DNA
agtggttatcacgttcgcc

SEQ ID NO: 44829 - DNA, 20 bp, Homo sapiens
  source 1..20: mol_type = genomic DNA
agtggttatcacgttcgcct

SEQ ID NO: 44830 - DNA, 21 bp, Homo sapiens
  source 1..21: mol_type = genomic DNA
agtggttatcacgttcgcctc

SEQ ID NO: 44831 - DNA, 27 bp, Homo sapiens
  source 1..27: mol_type = genomic DNA
agtggttatcacgttcgcctcacacgc

SEQ ID NO: 44832 - DNA, 25 bp, Homo sapiens
  source 1..25: mol_type = genomic DNA
agtgtagtggtcatcacgttcgcct

SEQ ID NO: 44833 - DNA, 23 bp, Homo sapiens
  source 1..23: mol_type = genomic DNA
agtgtagtggttatcacgtctgc

SEQ ID NO: 44834 - DNA, 24 bp, Homo sapiens
  source 1..24: mol_type = genomic DNA
agtgtagtggttatcacgttcgcc

SEQ ID NO: 44835 - DNA, 25 bp, Homo sapiens
  source 1..25: mol_type = genomic DNA
agtgtagtggttatcacgttcgcct

SEQ ID NO: 44836 - DNA, 33 bp, Homo sapiens; identical to SEQ ID NO: 5677
  source 1..33: mol_type = genomic DNA

SEQ ID NO: 44837 - DNA, 34 bp, Homo sapiens; identical to SEQ ID NO: 5678
  source 1..34: mol_type = genomic DNA

SEQ ID NO: 44838 - DNA, 35 bp, Homo sapiens; identical to SEQ ID NO: 5679
  source 1..35: mol_type = genomic DNA

SEQ ID NO: 44839 - DNA, 18 bp, Homo sapiens
  source 1..18: mol_type = genomic DNA
agttaaagactttttctc

SEQ ID NO: 44840 - DNA, 19 bp, Homo sapiens
  source 1..19: mol_type = genomic DNA
agttaaagactttttctct

SEQ ID NO: 44841 - DNA, 21 bp, Homo sapiens
  source 1..21: mol_type = genomic DNA
agttaaagactttttctctga

SEQ ID NO: 44842 - DNA, 22 bp, Homo sapiens
  source 1..22: mol_type = genomic DNA
agttaaagactttttctctgac

SEQ ID NO: 44843 - DNA, 23 bp, Homo sapiens
  source 1..23: mol_type = genomic DNA
agttaaagactttttctctgacc

SEQ ID NO: 44844 - DNA, 24 bp, Homo sapiens
  source 1..24: mol_type = genomic DNA
agttaaagactttttctctgacca

SEQ ID NO: 44845 - DNA, 20 bp, Homo sapiens
  source 1..20: mol_type = genomic DNA
agttaaagattaagagaacc

SEQ ID NO: 44846 - DNA, 26 bp, Homo sapiens
  source 1..26: mol_type = genomic DNA
agttaaagattaagagaaccaacacc

SEQ ID NO: 44847 - DNA, 23 bp, Homo sapiens
  source 1..23: mol_type = genomic DNA
agttcaaatctcgctggggcctc

SEQ ID NO: 44848 - DNA, 24 bp, Homo sapiens
  source 1..24: mol_type = genomic DNA
agttcaaatctcgctggggcctcc

SEQ ID NO: 44849 - DNA, 22 bp, Homo sapiens
  source 1..22: mol_type = genomic DNA
agttcaaatctcggtggaacct

SEQ ID NO: 44850 - DNA, 23 bp, Homo sapiens
  source 1..23: mol_type = genomic DNA
agttcaaatctcggtggaacctc

SEQ ID NO: 44851 - DNA, 24 bp, Homo sapiens
  source 1..24: mol_type = genomic DNA
agttcaaatctcggtggaacctcc

SEQ ID NO: 44852 - DNA, 25 bp, Homo sapiens
  source 1..25: mol_type = genomic DNA
agttcaaatctcggtggaacctcca

SEQ ID NO: 44853 - DNA, 23 bp, Homo sapiens
  source 1..23: mol_type = genomic DNA
agttcaaatctcggtgggacctc

SEQ ID NO: 44854 - DNA, 24 bp, Homo sapiens
  source 1..24: mol_type = genomic DNA
agttcaaatctcggtgggacctcc

SEQ ID NO: 44855 - DNA, 24 bp, Homo sapiens
  source 1..24: mol_type = genomic DNA
agttcgaacctcagagggggcacc

SEQ ID NO: 44856 - DNA, 25 bp, Homo sapiens
  source 1..25: mol_type = genomic DNA
agttcgaacctcagagggggcacca

SEQ ID NO: 44857 - DNA, 24 bp, Homo sapiens
  source 1..24: mol_type = genomic DNA
agttcgagcctcacctggagcacc

SEQ ID NO: 44858 - DNA, 16 bp, Homo sapiens
  source 1..16: mol_type = genomic DNA
agttctggtctccgga

SEQ ID NO: 44859 - DNA, 20 bp, Homo sapiens
  source 1..20: mol_type = genomic DNA
agttctggtctccggatgga

SEQ ID NO: 44860 - DNA, 22 bp, Homo sapiens
  source 1..22: mol_type = genomic DNA
agttctggtctccggatggagg

SEQ ID NO: 44861 - DNA, 44 bp, Homo sapiens; identical to SEQ ID NO: 5810
  source 1..44: mol_type = genomic DNA

SEQ ID NO: 44862 - DNA, 21 bp, Homo sapiens
  source 1..21: mol_type = genomic DNA
agttgcaatacttaatttctg

SEQ ID NO: 44863 - DNA, 24 bp, Homo sapiens
  source 1..24: mol_type = genomic DNA
agttgcaatacttaatttctgcca

SEQ ID NO: 44864 - DNA, 22 bp, Homo sapiens
  source 1..22: mol_type = genomic DNA
agttgggagagcgttagactga

SEQ ID NO: 44865 - DNA, 23 bp, Homo sapiens
  source 1..23: mol_type = genomic DNA
agttgggagagcgttagactgaa

SEQ ID NO: 44866 - DNA, 27 bp, Homo sapiens
  source 1..27: mol_type = genomic DNA
agttgggagagcgttagactgaagatc

SEQ ID NO: 44867 - DNA, 28 bp, Homo sapiens
  source 1..28: mol_type = genomic DNA
agttgggagagcgttagactgaagatct

SEQ ID NO: 44868 - DNA, 30 bp, Homo sapiens
  source 1..30: mol_type = genomic DNA
agttgggagagcgttagactgaagatctaa

SEQ ID NO: 44869 - DNA, 31 bp, Homo sapiens; identical to SEQ ID NO: 33050
  source 1..31: mol_type = genomic DNA

SEQ ID NO: 44870 - DNA, 19 bp, Homo sapiens
  source 1..19: mol_type = genomic DNA
agttggtagagcggaggac

SEQ ID NO: 44871 - DNA, 24 bp, Homo sapiens
  source 1..24: mol_type = genomic DNA
agttggtagagcggaggactgtag

SEQ ID NO: 44872 - DNA, 25 bp, Homo sapiens
  source 1..25: mol_type = genomic DNA
agttggtagagcggaggactgtaga

SEQ ID NO: 44873 - DNA, 34 bp, Homo sapiens; identical to SEQ ID NO: 5860
  source 1..34: mol_type = genomic DNA

SEQ ID NO: 44874 - DNA, 20 bp, Homo sapiens
  source 1..20: mol_type = genomic DNA
ataacagctatccattggtc

SEQ ID NO: 44875 - DNA, 18 bp, Homo sapiens
  source 1..18: mol_type = genomic DNA
ataacccagaggtcgatg

SEQ ID NO: 44876 - DNA, 20 bp, Homo sapiens
  source 1..20: mol_type = genomic DNA
ataacccagaggtcgatgga

SEQ ID NO: 44877 - DNA, 21 bp, Homo sapiens
  source 1..21: mol_type = genomic DNA
ataacccagaggtcgatggat

SEQ ID NO: 44878 - DNA, 22 bp, Homo sapiens
  source 1..22: mol_type = genomic DNA
ataacccagaggtcgatggatc

SEQ ID NO: 44879 - DNA, 23 bp, Homo sapiens
  source 1..23: mol_type = genomic DNA
ataacccagaggtcgatggatcg

SEQ ID NO: 44880 - DNA, 27 bp, Homo sapiens
  source 1..27: mol_type = genomic DNA
ataacccagaggtcgatggatcgaaac

SEQ ID NO: 44881 - DNA, 41 bp, Homo sapiens; identical to SEQ ID NO: 5913
  source 1..41: mol_type = genomic DNA

SEQ ID NO: 44882 - DNA, 29 bp, Homo sapiens
  source 1..29: mol_type = genomic DNA
ataactttgtcaaagttaaattataggct

SEQ ID NO: 44883 - DNA, 22 bp, Homo sapiens
  source 1..22: mol_type = genomic DNA
ataagctatcgggcccataccc

SEQ ID NO: 44884 - DNA, 26 bp, Homo sapiens
  source 1..26: mol_type = genomic DNA
ataagctatcgggcccataccccgaa

SEQ ID NO: 44885 - DNA, 32 bp, Homo sapiens; identical to SEQ ID NO: 33063
  source 1..32: mol_type = genomic DNA

SEQ ID NO: 44886 - DNA, 18 bp, Homo sapiens
  source 1..18: mol_type = genomic DNA
ataataggagcttaaacc

SEQ ID NO: 44887 - DNA, 19 bp, Homo sapiens
  source 1..19: mol_type = genomic DNA
ataataggagcttaaaccc

SEQ ID NO: 44888 - DNA, 20 bp, Homo sapiens
  source 1..20: mol_type = genomic DNA
ataatctgaaggtcctgagt

SEQ ID NO: 44889 - DNA, 40 bp, Homo sapiens; identical to SEQ ID NO: 5966
  source 1..40: mol_type = genomic DNA

SEQ ID NO: 44890 - DNA, 41 bp, Homo sapiens; identical to SEQ ID NO: 5967
  source 1..41: mol_type = genomic DNA

SEQ ID NO: 44891 - DNA, 38 bp, Homo sapiens
  source 1..38: mol_type = genomic DNA
ataatctgaaggtcgtgagttcgagcctcacacggggc

SEQ ID NO: 44892 - DNA, 41 bp, Homo sapiens; identical to SEQ ID NO: 5976
  source 1..41: mol_type = genomic DNA

SEQ ID NO: 44893 - DNA, 42 bp, Homo sapiens; identical to SEQ ID NO: 5977
  source 1..42: mol_type = genomic DNA

SEQ ID NO: 44894 - DNA, 41 bp, Homo sapiens; identical to SEQ ID NO: 5979
  source 1..41: mol_type = genomic DNA

SEQ ID NO: 44895 - DNA, 16 bp, Homo sapiens
  source 1..16: mol_type = genomic DNA
ataatgccgaggttgt

SEQ ID NO: 44896 - DNA, 17 bp, Homo sapiens
  source 1..17: mol_type = genomic DNA
ataatgccgaggttgtg

SEQ ID NO: 44897 - DNA, 22 bp, Homo sapiens
  source 1..22: mol_type = genomic DNA
ataatgccgaggttgtgagttc

SEQ ID NO: 44898 - DNA, 41 bp, Homo sapiens; identical to SEQ ID NO: 5988
  source 1..41: mol_type = genomic DNA

SEQ ID NO: 44899 - DNA, 39 bp, Homo sapiens; identical to SEQ ID NO: 5998
  source 1..39: mol_type = genomic DNA

SEQ ID NO: 44900 - DNA, 42 bp, Homo sapiens; identical to SEQ ID NO: 6000
  source 1..42: mol_type = genomic DNA

SEQ ID NO: 44901 - DNA, 40 bp, Homo sapiens; identical to SEQ ID NO: 6036
  source 1..40: mol_type = genomic DNA

SEQ ID NO: 44902 - DNA, 19 bp, Homo sapiens
  source 1..19: mol_type = genomic DNA
atacccttcccgtactacc

SEQ ID NO: 44903 - DNA, 20 bp, Homo sapiens
  source 1..20: mol_type = genomic DNA
atacccttcccgtactacca

SEQ ID NO: 44904 - DNA, 16 bp, Homo sapiens
  source 1..16: mol_type = genomic DNA
atacttaatttctgcc

SEQ ID NO: 44905 - DNA, 17 bp, Homo sapiens
  source 1..17: mol_type = genomic DNA
atacttaatttctgcca

SEQ ID NO: 44906 - DNA, 32 bp, Homo sapiens; identical to SEQ ID NO: 6057
  source 1..32: mol_type = genomic DNA

SEQ ID NO: 44907 - DNA, 33 bp, Homo sapiens; identical to SEQ ID NO: 6058
  source 1..33: mol_type = genomic DNA

SEQ ID NO: 44908 - DNA, 17 bp, Homo sapiens
  source 1..17: mol_type = genomic DNA
atagctcagtcggtaga

SEQ ID NO: 44909 - DNA, 18 bp, Homo sapiens
  source 1..18: mol_type = genomic DNA
atagctcagtcggtagag

SEQ ID NO: 44910 - DNA, 26 bp, Homo sapiens
  source 1..26: mol_type = genomic DNA
atagctcagtcggtagagcatcagac

SEQ ID NO: 44911 - DNA, 27 bp, Homo sapiens
  source 1..27: mol_type = genomic DNA
atagctcagtcggtagagcatcagact

SEQ ID NO: 44912 - DNA, 16 bp, Homo sapiens
  source 1..16: mol_type = genomic DNA
ataggagcttaaaccc

SEQ ID NO: 44913 - DNA, 30 bp, Homo sapiens; identical to SEQ ID NO: 6115
  source 1..30: mol_type = genomic DNA

SEQ ID NO: 44914 - DNA, 31 bp, Homo sapiens
  source 1..31: mol_type = genomic DNA
ataggatggggtgtgataggtggcacggaga

SEQ ID NO: 44915 - DNA, 32 bp, Homo sapiens
  source 1..32: mol_type = genomic DNA
ataggatggggtgtgataggtggcacggagaa

SEQ ID NO: 44916 - DNA, 33 bp, Homo sapiens
  source 1..33: mol_type = genomic DNA
ataggatggggtgtgataggtggcacggagaat

SEQ ID NO: 44917 - DNA, 34 bp, Homo sapiens
  source 1..34: mol_type = genomic DNA
ataggatggggtgtgataggtggcacggagaatt

SEQ ID NO: 44918 - DNA, 37 bp, Homo sapiens
  source 1..37: mol_type = genomic DNA
ataggatggggtgtgataggtggcacggagaattttg

SEQ ID NO: 44919 - DNA, 22 bp, Homo sapiens
  source 1..22: mol_type = genomic DNA
atagtggtgagtatccccgcct

SEQ ID NO: 44920 - DNA, 19 bp, Homo sapiens
  source 1..19: mol_type = genomic DNA
atagtggttagtactctgc

SEQ ID NO: 44921 - DNA, 20 bp, Homo sapiens
  source 1..20: mol_type = genomic DNA
atagtggttagtactctgcg

SEQ ID NO: 44922 - DNA, 21 bp, Homo sapiens
  source 1..21: mol_type = genomic DNA
atagtggttagtactctgcgt

SEQ ID NO: 44923 - DNA, 22 bp, Homo sapiens
  source 1..22: mol_type = genomic DNA
atagtggttagtactctgcgtt

SEQ ID NO: 44924 - DNA, 23 bp, Homo sapiens
  source 1..23: mol_type = genomic DNA
atagtggttagtactctgcgttg

SEQ ID NO: 44925 - DNA, 24 bp, Homo sapiens
  source 1..24: mol_type = genomic DNA
atagtggttagtactctgcgttgt

SEQ ID NO: 44926 - DNA, 38 bp, Homo sapiens; identical to SEQ ID NO: 6160
  source 1..38: mol_type = genomic DNA

SEQ ID NO: 44927 - DNA, 24 bp, Homo sapiens
  source 1..24: mol_type = genomic DNA
atagtgtagtggttatcacatctg

SEQ ID NO: 44928 - DNA, 28 bp, Homo sapiens
  source 1..28: mol_type = genomic DNA
atagtgtagtggttatcacgtctgcttt

SEQ ID NO: 44929 - DNA, 25 bp, Homo sapiens
  source 1..25: mol_type = genomic DNA
atatcattggtcgtggttgtagtcc

SEQ ID NO: 44930 - DNA, 30 bp, Homo sapiens; identical to SEQ ID NO: 6208
  source 1..30: mol_type = genomic DNA

SEQ ID NO: 44931 - DNA, 31 bp, Homo sapiens; identical to SEQ ID NO: 6209
  source 1..31: mol_type = genomic DNA

SEQ ID NO: 44932 - DNA, 32 bp, Homo sapiens; identical to SEQ ID NO: 6210
  source 1..32: mol_type = genomic DNA

SEQ ID NO: 44933 - DNA, 33 bp, Homo sapiens; identical to SEQ ID NO: 6211
  source 1..33: mol_type = genomic DNA

SEQ ID NO: 44934 - DNA, 34 bp, Homo sapiens; identical to SEQ ID NO: 6212
  source 1..34: mol_type = genomic DNA

SEQ ID NO: 44935 - DNA, 35 bp, Homo sapiens; identical to SEQ ID NO: 6213
  source 1..35: mol_type = genomic DNA

SEQ ID NO: 44936 - DNA, 36 bp, Homo sapiens; identical to SEQ ID NO: 6214
  source 1..36: mol_type = genomic DNA

SEQ ID NO: 44937 - DNA, 38 bp, Homo sapiens; identical to SEQ ID NO: 6216
  source 1..38: mol_type = genomic DNA

SEQ ID NO: 44938 - DNA, 39 bp, Homo sapiens; identical to SEQ ID NO: 6217
  source 1..39: mol_type = genomic DNA

SEQ ID NO: 44939 - DNA, 25 bp, Homo sapiens
  source 1..25: mol_type = genomic DNA
atatggtctagcggttaggattcct

SEQ ID NO: 44940 - DNA, 29 bp, Homo sapiens
  source 1..29: mol_type = genomic DNA
atatggtctagcggttaggattcctggtt

SEQ ID NO: 44941 - DNA, 32 bp, Homo sapiens; identical to SEQ ID NO: 6228
  source 1..32: mol_type = genomic DNA

SEQ ID NO: 44942 - DNA, 16 bp, Homo sapiens
  source 1..16: mol_type = genomic DNA
atatgtccgcgtgggt

SEQ ID NO: 44943 - DNA, 37 bp, Homo sapiens; identical to SEQ ID NO: 6241
  source 1..37: mol_type = genomic DNA

SEQ ID NO: 44944 - DNA, 47 bp, Homo sapiens; identical to SEQ ID NO: 6257
  source 1..47: mol_type = genomic DNA

SEQ ID NO: 44945 - DNA, 38 bp, Homo sapiens; identical to SEQ ID NO: 6261
  source 1..38: mol_type = genomic DNA

SEQ ID NO: 44946 - DNA, 17 bp, Homo sapiens
  source 1..17: mol_type = genomic DNA
atcaccccataaacacc

SEQ ID NO: 44947 - DNA, 16 bp, Homo sapiens
  source 1..16: mol_type = genomic DNA
atcacgtcggggtcac

SEQ ID NO: 44948 - DNA, 17 bp, Homo sapiens
  source 1..17: mol_type = genomic DNA
atcacgtcggggtcacc

SEQ ID NO: 44949 - DNA, 18 bp, Homo sapiens
  source 1..18: mol_type = genomic DNA
atcacgtcggggtcacca

SEQ ID NO: 44950 - DNA, 19 bp, Homo sapiens
  source 1..19: mol_type = genomic DNA
atcacgttcgcctcacacg

SEQ ID NO: 44951 - DNA, 38 bp, Homo sapiens; identical to SEQ ID NO: 6289
  source 1..38: mol_type = genomic DNA

SEQ ID NO: 44952 - DNA, 39 bp, Homo sapiens; identical to SEQ ID NO: 6290
  source 1..39: mol_type = genomic DNA

SEQ ID NO: 44953 - DNA, 35 bp, Homo sapiens; identical to SEQ ID NO: 6298
  source 1..35: mol_type = genomic DNA

SEQ ID NO: 44954 - DNA, 38 bp, Homo sapiens; identical to SEQ ID NO: 6301
  source 1..38: mol_type = genomic DNA

SEQ ID NO: 44955 - DNA, 38 bp, Homo sapiens; identical to SEQ ID NO: 6310
  source 1..38: mol_type = genomic DNA

SEQ ID NO: 44956 - DNA, 37 bp, Homo sapiens; identical to SEQ ID NO: 6316
  source 1..37: mol_type = genomic DNA

SEQ ID NO: 44957 - DNA, 38 bp, Homo sapiens; identical to SEQ ID NO: 6317
  source 1..38: mol_type = genomic DNA

SEQ ID NO: 44958 - DNA, 38 bp, Homo sapiens; identical to SEQ ID NO: 6326
  source 1..38: mol_type = genomic DNA

SEQ ID NO: 44959 - DNA, 35 bp, Homo sapiens; identical to SEQ ID NO: 6333
  source 1..35: mol_type = genomic DNA

SEQ ID NO: 44960 - DNA, 37 bp, Homo sapiens; identical to SEQ ID NO: 6335
  source 1..37: mol_type = genomic DNA

SEQ ID NO: 44961 - DNA, 38 bp, Homo sapiens; identical to SEQ ID NO: 6336
  source 1..38: mol_type = genomic DNA

SEQ ID NO: 44962 - DNA, 34 bp, Homo sapiens
  source 1..34: mol_type = genomic DNA
atcagaaggttgcgtgttcaaatcacgtcggggt

SEQ ID NO: 44963 - DNA, 35 bp, Homo sapiens; identical to SEQ ID NO: 6343
  source 1..35: mol_type = genomic DNA

SEQ ID NO: 44964 - DNA, 35 bp, Homo sapiens; identical to SEQ ID NO: 6351
  source 1..35: mol_type = genomic DNA

SEQ ID NO: 44965 - DNA, 36 bp, Homo sapiens; identical to SEQ ID NO: 6352
  source 1..36: mol_type = genomic DNA

SEQ ID NO: 44966 - DNA, 38 bp, Homo sapiens; identical to SEQ ID NO: 6354
  source 1..38: mol_type = genomic DNA

SEQ ID NO: 44967 - DNA, 28 bp, Homo sapiens
  source 1..28: mol_type = genomic DNA
atcattggtcgtggttgtagtccgtgcg

SEQ ID NO: 44968 - DNA, 30 bp, Homo sapiens; identical to SEQ ID NO: 6404
  source 1..30: mol_type = genomic DNA

SEQ ID NO: 44969 - DNA, 31 bp, Homo sapiens; identical to SEQ ID NO: 6405
  source 1..31: mol_type = genomic DNA

SEQ ID NO: 44970 - DNA, 32 bp, Homo sapiens; identical to SEQ ID NO: 6406
  source 1..32: mol_type = genomic DNA

SEQ ID NO: 44971 - DNA, 33 bp, Homo sapiens; identical to SEQ ID NO: 6407
  source 1..33: mol_type = genomic DNA

SEQ ID NO: 44972 - DNA, 34 bp, Homo sapiens; identical to SEQ ID NO: 6408
  source 1..34: mol_type = genomic DNA

SEQ ID NO: 44973 - DNA, 36 bp, Homo sapiens; identical to SEQ ID NO: 6410
  source 1..36: mol_type = genomic DNA

SEQ ID NO: 44974 - DNA, 37 bp, Homo sapiens; identical to SEQ ID NO: 6411
  source 1..37: mol_type = genomic DNA

SEQ ID NO: 44975 - DNA, 18 bp, Homo sapiens
  source 1..18: mol_type = genomic DNA
atccagcgatccgagttc

SEQ ID NO: 44976 - DNA, 36 bp, Homo sapiens; identical to SEQ ID NO: 6429
  source 1..36: mol_type = genomic DNA

SEQ ID NO: 44977 - DNA, 20 bp, Homo sapiens
  source 1..20: mol_type = genomic DNA
atccattggggtctccccgc

SEQ ID NO: 44978 - DNA, 47 bp, Homo sapiens; identical to SEQ ID NO: 6455
  source 1..47: mol_type = genomic DNA

SEQ ID NO: 44979 - DNA, 18 bp, Homo sapiens
  source 1..18: mol_type = genomic DNA
atccattggtcttaggcc

SEQ ID NO: 44980 - DNA, 19 bp, Homo sapiens
  source 1..19: mol_type = genomic DNA
atccattggtcttaggccc

SEQ ID NO: 44981 - DNA, 47 bp, Homo sapiens; identical to SEQ ID NO: 6484
  source 1..47: mol_type = genomic DNA

SEQ ID NO: 44982 - DNA, 17 bp, Homo sapiens
  source 1..17: mol_type = genomic DNA
atcccaccactgccacc

SEQ ID NO: 44983 - DNA, 18 bp, Homo sapiens
  source 1..18: mol_type = genomic DNA
atcccaccactgccacca

SEQ ID NO: 44984 - DNA, 17 bp, Homo sapiens
  source 1..17: mol_type = genomic DNA
atcccaccagagtcgcc

SEQ ID NO: 44985 - DNA, 17 bp, Homo sapiens
  source 1..17: mol_type = genomic DNA
atcccaccctcgtcgcc

SEQ ID NO: 44986 - DNA, 18 bp, Homo sapiens
  source 1..18: mol_type = genomic DNA
atcccaccctcgtcgcca

SEQ ID NO: 44987 - DNA, 16 bp, Homo sapiens
  source 1..16: mol_type = genomic DNA
atcccaccgctgccac

SEQ ID NO: 44988 - DNA, 17 bp, Homo sapiens
  source 1..17: mol_type = genomic DNA
atcccaccgctgccacc

SEQ ID NO: 44989 - DNA, 18 bp, Homo sapiens
  source 1..18: mol_type = genomic DNA
atcccaccgctgccacca

SEQ ID NO: 44990 - DNA, 17 bp, Homo sapiens
  source 1..17: mol_type = genomic DNA
atcccaccttcgtcgcc

SEQ ID NO: 44991 - DNA, 16 bp, Homo sapiens
  source 1..16: mol_type = genomic DNA
atcccactcctgacac

SEQ ID NO: 44992 - DNA, 17 bp, Homo sapiens
  source 1..17: mol_type = genomic DNA
atcccactcctgacacc

SEQ ID NO: 44993 - DNA, 18 bp, Homo sapiens
  source 1..18: mol_type = genomic DNA
atcccactcctgacacca

SEQ ID NO: 44994 - DNA, 16 bp, Homo sapiens
  source 1..16: mol_type = genomic DNA
atcccacttctgacac

SEQ ID NO: 44995 - DNA, 17 bp, Homo sapiens
  source 1..17: mol_type = genomic DNA
atcccacttctgacacc

SEQ ID NO: 44996 - DNA, 18 bp, Homo sapiens
  source 1..18: mol_type = genomic DNA
atcccacttctgacacca

SEQ ID NO: 44997 - DNA, 16 bp, Homo sapiens
  source 1..16: mol_type = genomic DNA
atcccagcggggcctc

SEQ ID NO: 44998 - DNA, 17 bp, Homo sapiens
  source 1..17: mol_type = genomic DNA
atcccagcggggcctcc

SEQ ID NO: 44999 - DNA, 18 bp, Homo sapiens
  source 1..18: mol_type = genomic DNA
atcccagcggggcctcca

SEQ ID NO: 45000 - DNA, 16 bp, Homo sapiens
  source 1..16: mol_type = genomic DNA
atcccagcggtgcctc

SEQ ID NO: 45001 - DNA, 17 bp, Homo sapiens
  source 1..17: mol_type = genomic DNA
atcccagcggtgcctcc

SEQ ID NO: 45002 - DNA, 18 bp, Homo sapiens
  source 1..18: mol_type = genomic DNA
atcccagcggtgcctcca

SEQ ID NO: 45003 - DNA, 16 bp, Homo sapiens
  source 1..16: mol_type = genomic DNA
atcccagtagagcctc

SEQ ID NO: 45004 - DNA, 16 bp, Homo sapiens
  source 1..16: mol_type = genomic DNA
atcccatcctcgtcgc

SEQ ID NO: 45005 - DNA, 17 bp, Homo sapiens
  source 1..17: mol_type = genomic DNA
atcccatcctcgtcgcc

SEQ ID NO: 45006 - DNA, 18 bp, Homo sapiens
  source 1..18: mol_type = genomic DNA
atcccatcctcgtcgcca

SEQ ID NO: 45007 - DNA, 18 bp, Homo sapiens
  source 1..18: mol_type = genomic DNA
atccccagcatctccacc

SEQ ID NO: 45008 - DNA, 38 bp, Homo sapiens; identical to SEQ ID NO: 33215
  source 1..38: mol_type = genomic DNA

SEQ ID NO: 45009 - DNA, 17 bp, Homo sapiens
  source 1..17: mol_type = genomic DNA
atccccggcacctccac

SEQ ID NO: 45010 - DNA, 18 bp, Homo sapiens
  source 1..18: mol_type = genomic DNA
atccccggcacctccacc

SEQ ID NO: 45011 - DNA, 19 bp, Homo sapiens
  source 1..19: mol_type = genomic DNA
atccccggcacctccacca

SEQ ID NO: 45012 - DNA, 17 bp, Homo sapiens
  source 1..17: mol_type = genomic DNA
atccccggcatctccac

SEQ ID NO: 45013 - DNA, 18 bp, Homo sapiens
  source 1..18: mol_type = genomic DNA
atccccggcatctccacc

SEQ ID NO: 45014 - DNA, 19 bp, Homo sapiens
  source 1..19: mol_type = genomic DNA
atccccggcatctccacca

SEQ ID NO: 45015 - DNA, 17 bp, Homo sapiens
  source 1..17: mol_type = genomic DNA
atccccgtacgggccac

SEQ ID NO: 45016 - DNA, 18 bp, Homo sapiens
  source 1..18: mol_type = genomic DNA
atccccgtacgggccacc

SEQ ID NO: 45017 - DNA, 16 bp, Homo sapiens
  source 1..16: mol_type = genomic DNA
atcccggacgagcccc

SEQ ID NO: 45018 - DNA, 17 bp, Homo sapiens
  source 1..17: mol_type = genomic DNA
atcccggacgagccccc

SEQ ID NO: 45019 - DNA, 18 bp, Homo sapiens
  source 1..18: mol_type = genomic DNA
atcccggacgagccccca

SEQ ID NO: 45020 - DNA, 17 bp, Homo sapiens
  source 1..17: mol_type = genomic DNA
atcccgggcggaaacac

SEQ ID NO: 45021 - DNA, 18 bp, Homo sapiens
  source 1..18: mol_type = genomic DNA
atcccgggcggaaacacc

SEQ ID NO: 45022 - DNA, 16 bp, Homo sapiens
  source 1..16: mol_type = genomic DNA
atcccgggtttcggca

SEQ ID NO: 45023 - DNA, 17 bp, Homo sapiens
  source 1..17: mol_type = genomic DNA
atcccgggtttcggcac

SEQ ID NO: 45024 - DNA, 18 bp, Homo sapiens
  source 1..18: mol_type = genomic DNA
atcccgggtttcggcacc

SEQ ID NO: 45025 - DNA, 19 bp, Homo sapiens
  source 1..19: mol_type = genomic DNA
atcccgggtttcggcacca

SEQ ID NO: 45026 - DNA, 16 bp, Homo sapiens
  source 1..16: mol_type = genomic DNA
atcccttcgtggttgc

SEQ ID NO: 45027 - DNA, 16 bp, Homo sapiens
  source 1..16: mol_type = genomic DNA
atccgagtcacggcac

SEQ ID NO: 45028 - DNA, 17 bp, Homo sapiens
  source 1..17: mol_type = genomic DNA
atccgagtcacggcacc

SEQ ID NO: 45029 - DNA, 18 bp, Homo sapiens
  source 1..18: mol_type = genomic DNA
atccgagtcacggcacca

SEQ ID NO: 45030 - DNA, 28 bp, Homo sapiens
  source 1..28: mol_type = genomic DNA
atccgagttcaaatctcggtgggacctc

SEQ ID NO: 45031 - DNA, 16 bp, Homo sapiens
  source 1..16: mol_type = genomic DNA
atccggctcgaaggac

SEQ ID NO: 45032 - DNA, 17 bp, Homo sapiens
  source 1..17: mol_type = genomic DNA
atccggctcgaaggacc

SEQ ID NO: 45033 - DNA, 18 bp, Homo sapiens
  source 1..18: mol_type = genomic DNA
atccggctcgaaggacca

SEQ ID NO: 45034 - DNA, 16 bp, Homo sapiens
  source 1..16: mol_type = genomic DNA
atccggctcggaggac

SEQ ID NO: 45035 - DNA, 17 bp, Homo sapiens
  source 1..17: mol_type = genomic DNA
atccggctcggaggacc

SEQ ID NO: 45036 - DNA, 18 bp, Homo sapiens
  source 1..18: mol_type = genomic DNA
atccggctcggaggacca

SEQ ID NO: 45037 - DNA, 16 bp, Homo sapiens
  source 1..16: mol_type = genomic DNA
atccgggtgccccctc

SEQ ID NO: 45038 - DNA, 17 bp, Homo sapiens
  source 1..17: mol_type = genomic DNA
atccgggtgccccctcc

SEQ ID NO: 45039 - DNA, 18 bp, Homo sapiens
  source 1..18: mol_type = genomic DNA
atccgggtgccccctcca

SEQ ID NO: 45040 - DNA, 19 bp, Homo sapiens
  source 1..19: mol_type = genomic DNA
atcctcacacggggcacca

SEQ ID NO: 45041 - DNA, 18 bp, Homo sapiens
  source 1..18: mol_type = genomic DNA
atcctcacctggagcacc

SEQ ID NO: 45042 - DNA, 19 bp, Homo sapiens
  source 1..19: mol_type = genomic DNA
atcctcacctggagcacca

SEQ ID NO: 45043 - DNA, 16 bp, Homo sapiens
  source 1..16: mol_type = genomic DNA
atcctgccgactacgc

SEQ ID NO: 45044 - DNA, 17 bp, Homo sapiens
  source 1..17: mol_type = genomic DNA
atcctgccgactacgcc

SEQ ID NO: 45045 - DNA, 18 bp, Homo sapiens
  source 1..18: mol_type = genomic DNA
atcctgccgactacgcca

SEQ ID NO: 45046 - DNA, 16 bp, Homo sapiens
  source 1..16: mol_type = genomic DNA
atcctgctcacagcgc

SEQ ID NO: 45047 - DNA, 17 bp, Homo sapiens
  source 1..17: mol_type = genomic DNA
atcctgctcacagcgcc

SEQ ID NO: 45048 - DNA, 18 bp, Homo sapiens
  source 1..18: mol_type = genomic DNA
atcctgctcacagcgcca

SEQ ID NO: 45049 - DNA, 29 bp, Homo sapiens
  source 1..29: mol_type = genomic DNA
atcctgggttcgaatcccagcggggcctc

SEQ ID NO: 45050 - DNA, 17 bp, Homo sapiens
  source 1..17: mol_type = genomic DNA
atcctgtcggctacgcc

SEQ ID NO: 45051 - DNA, 18 bp, Homo sapiens
  source 1..18: mol_type = genomic DNA
atcctgtcggctacgcca

SEQ ID NO: 45052 - DNA, 16 bp, Homo sapiens
  source 1..16: mol_type = genomic DNA
atcctgttcgtgacgc

SEQ ID NO: 45053 - DNA, 17 bp, Homo sapiens
  source 1..17: mol_type = genomic DNA
atcctgttcgtgacgcc

SEQ ID NO: 45054 - DNA, 18 bp, Homo sapiens
  source 1..18: mol_type = genomic DNA
atcctgttcgtgacgcca

SEQ ID NO: 45055 - DNA, 22 bp, Homo sapiens
  source 1..22: mol_type = genomic DNA
atcgaaaccatcctctgctacc

SEQ ID NO: 45056 - DNA, 23 bp, Homo sapiens
  source 1..23: mol_type = genomic DNA
atcgaaaccatcctctgctacca

SEQ ID NO: 45057 - DNA, 22 bp, Homo sapiens
  source 1..22: mol_type = genomic DNA
atcgtatagtggttagtactct

SEQ ID NO: 45058 - DNA, 24 bp, Homo sapiens
  source 1..24: mol_type = genomic DNA
atcgtatagtggttagtactctgc

SEQ ID NO: 45059 - DNA, 25 bp, Homo sapiens
  source 1..25: mol_type = genomic DNA
atcgtatagtggttagtactctgcg

SEQ ID NO: 45060 - DNA, 27 bp, Homo sapiens
  source 1..27: mol_type = genomic DNA
atcgtatagtggttagtactctgcgtt

SEQ ID NO: 45061 - DNA, 17 bp, Homo sapiens
  source 1..17: mol_type = genomic DNA
atctaaaggtccctggt

SEQ ID NO: 45062 - DNA, 19 bp, Homo sapiens
  source 1..19: mol_type = genomic DNA
atctaaaggtccctggttc

SEQ ID NO: 45063 - DNA, 38 bp, Homo sapiens; identical to SEQ ID NO: 6661
  source 1..38: mol_type = genomic DNA

SEQ ID NO: 45064 - DNA, 20 bp, Homo sapiens
  source 1..20: mol_type = genomic DNA
atctaaaggtccctggttcg

SEQ ID NO: 45065 - DNA, 21 bp, Homo sapiens
  source 1..21: mol_type = genomic DNA
atctaaaggtccctggttcga

SEQ ID NO: 45066 - DNA, 22 bp, Homo sapiens
  source 1..22: mol_type = genomic DNA
atctaaaggtccctggttcgat

SEQ ID NO: 45067 - DNA, 30 bp, Homo sapiens; identical to SEQ ID NO: 6669
  source 1..30: mol_type = genomic DNA

SEQ ID NO: 45068 - DNA, 34 bp, Homo sapiens; identical to SEQ ID NO: 6671
  source 1..34: mol_type = genomic DNA

SEQ ID NO: 45069 - DNA, 35 bp, Homo sapiens; identical to SEQ ID NO: 6672
  source 1..35: mol_type = genomic DNA

SEQ ID NO: 45070 - DNA, 36 bp, Homo sapiens; identical to SEQ ID NO: 6673
  source 1..36: mol_type = genomic DNA

SEQ ID NO: 45071 - DNA, 37 bp, Homo sapiens; identical to SEQ ID NO: 6674
  source 1..37: mol_type = genomic DNA

SEQ ID NO: 45072 - DNA, 38 bp, Homo sapiens; identical to SEQ ID NO: 6675
  source 1..38: mol_type = genomic DNA

SEQ ID NO: 45073 - DNA, 39 bp, Homo sapiens; identical to SEQ ID NO: 6676
  source 1..39: mol_type = genomic DNA

SEQ ID NO: 45074 - DNA, 37 bp, Homo sapiens; identical to SEQ ID NO: 6680
  source 1..37: mol_type = genomic DNA

SEQ ID NO: 45075 - DNA, 38 bp, Homo sapiens; identical to SEQ ID NO: 6681
  source 1..38: mol_type = genomic DNA

SEQ ID NO: 45076 - DNA, 39 bp, Homo sapiens; identical to SEQ ID NO: 6682
  source 1..39: mol_type = genomic DNA

SEQ ID NO: 45077 - DNA, 16 bp, Homo sapiens
  source 1..16: mol_type = genomic DNA
atctcgctggggcctc

SEQ ID NO: 45078 - DNA, 17 bp, Homo sapiens
  source 1..17: mol_type = genomic DNA
atctcgctggggcctcc

SEQ ID NO: 45079 - DNA, 18 bp, Homo sapiens
  source 1..18: mol_type = genomic DNA
atctcgctggggcctcca

SEQ ID NO: 45080 - DNA, 16 bp, Homo sapiens
  source 1..16: mol_type = genomic DNA
atctcggtggaacctc

SEQ ID NO: 45081 - DNA, 17 bp, Homo sapiens
  source 1..17: mol_type = genomic DNA
atctcggtggaacctcc

SEQ ID NO: 45082 - DNA, 18 bp, Homo sapiens
  source 1..18: mol_type = genomic DNA
atctcggtggaacctcca

SEQ ID NO: 45083 - DNA, 16 bp, Homo sapiens
  source 1..16: mol_type = genomic DNA
atctcggtgggacccc

SEQ ID NO: 45084 - DNA, 16 bp, Homo sapiens
  source 1..16: mol_type = genomic DNA
atctcggtgggacctc

SEQ ID NO: 45085 - DNA, 17 bp, Homo sapiens
  source 1..17: mol_type = genomic DNA
atctcggtgggacctcc

SEQ ID NO: 45086 - DNA, 18 bp, Homo sapiens
  source 1..18: mol_type = genomic DNA
atctcggtgggacctcca

SEQ ID NO: 45087 - DNA, 35 bp, Homo sapiens; identical to SEQ ID NO: 6701
  source 1..35: mol_type = genomic DNA

SEQ ID NO: 45088 - DNA, 37 bp, Homo sapiens; identical to SEQ ID NO: 6703
  source 1..37: mol_type = genomic DNA

SEQ ID NO: 45089 - DNA, 38 bp, Homo sapiens; identical to SEQ ID NO: 6704
  source 1..38: mol_type = genomic DNA

SEQ ID NO: 45090 - DNA, 39 bp, Homo sapiens; identical to SEQ ID NO: 6705
  source 1..39: mol_type = genomic DNA

SEQ ID NO: 45091 - DNA, 37 bp, Homo sapiens; identical to SEQ ID NO: 6717
  source 1..37: mol_type = genomic DNA

SEQ ID NO: 45092 - DNA, 38 bp, Homo sapiens; identical to SEQ ID NO: 6718
  source 1..38: mol_type = genomic DNA

SEQ ID NO: 45093 - DNA, 39 bp, Homo sapiens; identical to SEQ ID NO: 6719
  source 1..39: mol_type = genomic DNA

SEQ ID NO: 45094 - DNA, 37 bp, Homo sapiens; identical to SEQ ID NO: 6724
  source 1..37: mol_type = genomic DNA

SEQ ID NO: 45095 - DNA, 38 bp, Homo sapiens; identical to SEQ ID NO: 6725
  source 1..38: mol_type = genomic DNA

SEQ ID NO: 45096 - DNA, 39 bp, Homo sapiens; identical to SEQ ID NO: 6726
  source 1..39: mol_type = genomic DNA

SEQ ID NO: 45097 - DNA, 37 bp, Homo sapiens; identical to SEQ ID NO: 6739
  source 1..37: mol_type = genomic DNA

SEQ ID NO: 45098 - DNA, 36 bp, Homo sapiens; identical to SEQ ID NO: 6751
  source 1..36: mol_type = genomic DNA

SEQ ID NO: 45099 - DNA, 37 bp, Homo sapiens; identical to SEQ ID NO: 6752
  source 1..37: mol_type = genomic DNA

SEQ ID NO: 45100 - DNA, 38 bp, Homo sapiens; identical to SEQ ID NO: 6753
  source 1..38: mol_type = genomic DNA

SEQ ID NO: 45101 - DNA, 39 bp, Homo sapiens; identical to SEQ ID NO: 6754
  source 1..39: mol_type = genomic DNA

SEQ ID NO: 45102 - DNA, 19 bp, Homo sapiens
  source 1..19: mol_type = genomic DNA
atctgagggtccagggttt

SEQ ID NO: 45103 - DNA, 22 bp, Homo sapiens
  source 1..22: mol_type = genomic DNA
atgaaaacctttttccaaggac

SEQ ID NO: 45104 - DNA, 23 bp, Homo sapiens
  source 1..23: mol_type = genomic DNA
atgaaaacctttttccaaggaca

SEQ ID NO: 45105 - DNA, 24 bp, Homo sapiens
  source 1..24: mol_type = genomic DNA
atgaaaacctttttccaaggacac

SEQ ID NO: 45106 - DNA, 25 bp, Homo sapiens
  source 1..25: mol_type = genomic DNA
atgaaaacctttttccaaggacacc

SEQ ID NO: 45107 - DNA, 26 bp, Homo sapiens
  source 1..26: mol_type = genomic DNA
atgaaaacctttttccaaggacacca

SEQ ID NO: 45108 - DNA, 21 bp, Homo sapiens
  source 1..21: mol_type = genomic DNA
atgaggccccgggttcaatcc

SEQ ID NO: 45109 - DNA, 26 bp, Homo sapiens
  source 1..26: mol_type = genomic DNA
atgaggccccgggttcgatccccggc

SEQ ID NO: 45110 - DNA, 35 bp, Homo sapiens; identical to SEQ ID NO: 6789
  source 1..35: mol_type = genomic DNA

SEQ ID NO: 45111 - DNA, 36 bp, Homo sapiens; identical to SEQ ID NO: 6790
  source 1..36: mol_type = genomic DNA

SEQ ID NO: 45112 - DNA, 35 bp, Homo sapiens; identical to SEQ ID NO: 6796
  source 1..35: mol_type = genomic DNA

SEQ ID NO: 45113 - DNA, 32 bp, Homo sapiens; identical to SEQ ID NO: 6810
  source 1..32: mol_type = genomic DNA

SEQ ID NO: 45114 - DNA, 25 bp, Homo sapiens
  source 1..25: mol_type = genomic DNA
atgcccccatgtctaacaacatggc

SEQ ID NO: 45115 - DNA, 26 bp, Homo sapiens
  source 1..26: mol_type = genomic DNA
atgcccccatgtctaacaacatggct

SEQ ID NO: 45116 - DNA, 27 bp, Homo sapiens
  source 1..27: mol_type = genomic DNA
atgcccccatgtctaacaacatggctt

SEQ ID NO: 45117 - DNA, 19 bp, Homo sapiens
  source 1..19: mol_type = genomic DNA
atgccgaggttgtgagttc

SEQ ID NO: 45118 - DNA, 22 bp, Homo sapiens
  source 1..22: mol_type = genomic DNA
atgccgaggttgtgagttcgag

SEQ ID NO: 45119 - DNA, 21 bp, Homo sapiens
  source 1..21: mol_type = genomic DNA
atgctttgcacgtatgaggcc

SEQ ID NO: 45120 - DNA, 25 bp, Homo sapiens
  source 1..25: mol_type = genomic DNA
atgctttgcacgtatgaggccccgg

SEQ ID NO: 45121 - DNA, 27 bp, Homo sapiens
  source 1..27: mol_type = genomic DNA
atgctttgcacgtatgaggccccgggt

SEQ ID NO: 45122 - DNA, 41 bp, Homo sapiens
  source 1..41: mol_type = genomic DNA
atgctttgcacgtatgaggccccgggttcaatccccggcat

SEQ ID NO: 45123 - DNA, 42 bp, Homo sapiens
  source 1..42: mol_type = genomic DNA
atgctttgcacgtatgaggccccgggttcaatccccggcatc

SEQ ID NO: 45124 - DNA, 43 bp, Homo sapiens; identical to SEQ ID NO: 33360
  source 1..43: mol_type = genomic DNA

SEQ ID NO: 45125 - DNA, 33 bp, Homo sapiens; identical to SEQ ID NO: 6890
  source 1..33: mol_type = genomic DNA

SEQ ID NO: 45126 - DNA, 34 bp, Homo sapiens; identical to SEQ ID NO: 6891
  source 1..34: mol_type = genomic DNA

SEQ ID NO: 45127 - DNA, 35 bp, Homo sapiens; identical to SEQ ID NO: 6892
  source 1..35: mol_type = genomic DNA

SEQ ID NO: 45128 - DNA, 36 bp, Homo sapiens; identical to SEQ ID NO: 6893
  source 1..36: mol_type = genomic DNA

SEQ ID NO: 45129 - DNA, 16 bp, Homo sapiens
  source 1..16: mol_type = genomic DNA
atggataacgcgtctg

SEQ ID NO: 45130 - DNA, 17 bp, Homo sapiens
  source 1..17: mol_type = genomic DNA
atggataacgcgtctga

SEQ ID NO: 45131 - DNA, 19 bp, Homo sapiens
  source 1..19: mol_type = genomic DNA
atggataacgcgtctgact

SEQ ID NO: 45132 - DNA, 17 bp, Homo sapiens
  source 1..17: mol_type = genomic DNA
atggataaggcactggc

SEQ ID NO: 45133 - DNA, 17 bp, Homo sapiens
  source 1..17: mol_type = genomic DNA
atggataaggcatcagc

SEQ ID NO: 45134 - DNA, 19 bp, Homo sapiens
  source 1..19: mol_type = genomic DNA
atggataaggcatcagcct

SEQ ID NO: 45135 - DNA, 20 bp, Homo sapiens
  source 1..20: mol_type = genomic DNA
atggataaggcatcagcctc

SEQ ID NO: 45136 - DNA, 21 bp, Homo sapiens
  source 1..21: mol_type = genomic DNA
atggataaggcatcagcctcc

SEQ ID NO: 45137 - DNA, 28 bp, Homo sapiens
  source 1..28: mol_type = genomic DNA
atggataaggcatcagcctccggagctg

SEQ ID NO: 45138 - DNA, 29 bp, Homo sapiens
  source 1..29: mol_type = genomic DNA
atggataaggcatcagcctccggagctgg

SEQ ID NO: 45139 - DNA, 36 bp, Homo sapiens; identical to SEQ ID NO: 6910
  source 1..36: mol_type = genomic DNA

SEQ ID NO: 45140 - DNA, 17 bp, Homo sapiens
  source 1..17: mol_type = genomic DNA
atggataaggcattggc

SEQ ID NO: 45141 - DNA, 18 bp, Homo sapiens
  source 1..18: mol_type = genomic DNA
atggataaggcattggcc

SEQ ID NO: 45142 - DNA, 19 bp, Homo sapiens
  source 1..19: mol_type = genomic DNA
atggataaggcattggcct

SEQ ID NO: 45143 - DNA, 16 bp, Homo sapiens
  source 1..16: mol_type = genomic DNA
atggataaggcgtctg

SEQ ID NO: 45144 - DNA, 17 bp, Homo sapiens
  source 1..17: mol_type = genomic DNA
atggataaggcgtctga

SEQ ID NO: 45145 - DNA, 19 bp, Homo sapiens
  source 1..19: mol_type = genomic DNA
atggataaggcgtctgact

SEQ ID NO: 45146 - DNA, 26 bp, Homo sapiens
  source 1..26: mol_type = genomic DNA
atggataaggcgtctgacttcggatc

SEQ ID NO: 45147 - DNA, 21 bp, Homo sapiens
  source 1..21: mol_type = genomic DNA
atggataaggcgtctgattcc

SEQ ID NO: 45148 - DNA, 16 bp, Homo sapiens
  source 1..16: mol_type = genomic DNA
atggatagcgcattgg

SEQ ID NO: 45149 - DNA, 17 bp, Homo sapiens
  source 1..17: mol_type = genomic DNA
atggatagcgcattgga

SEQ ID NO: 45150 - DNA, 18 bp, Homo sapiens
  source 1..18: mol_type = genomic DNA
atggatagcgcattggac

SEQ ID NO: 45151 - DNA, 21 bp, Homo sapiens
  source 1..21: mol_type = genomic DNA
atggatagcgcattggacttc

SEQ ID NO: 45152 - DNA, 26 bp, Homo sapiens
  source 1..26: mol_type = genomic DNA
atggatcgaaaccatcctctgctacc

SEQ ID NO: 45153 - DNA, 24 bp, Homo sapiens
  source 1..24: mol_type = genomic DNA
atggccgagcggtctaaggcgctg

SEQ ID NO: 45154 - DNA, 16 bp, Homo sapiens
  source 1..16: mol_type = genomic DNA
atgggactcttaatcc

SEQ ID NO: 45155 - DNA, 27 bp, Homo sapiens
  source 1..27: mol_type = genomic DNA
atggggtgtgataggtggcacggagaa

SEQ ID NO: 45156 - DNA, 32 bp, Homo sapiens; identical to SEQ ID NO: 6978
  source 1..32: mol_type = genomic DNA

SEQ ID NO: 45157 - DNA, 16 bp, Homo sapiens
  source 1..16: mol_type = genomic DNA
atgggtggttcagtgg

SEQ ID NO: 45158 - DNA, 23 bp, Homo sapiens
  source 1..23: mol_type = genomic DNA
atgggtggttcagtggtagaatt

SEQ ID NO: 45159 - DNA, 26 bp, Homo sapiens
  source 1..26: mol_type = genomic DNA
atgggtggttcagtggtagaattctc

SEQ ID NO: 45160 - DNA, 27 bp, Homo sapiens
  source 1..27: mol_type = genomic DNA
atgggtggttcagtggtagaattctcg

SEQ ID NO: 45161 - DNA, 28 bp, Homo sapiens
  source 1..28: mol_type = genomic DNA
atgggtggttcagtggtagaattctcgc

SEQ ID NO: 45162 - DNA, 29 bp, Homo sapiens
  source 1..29: mol_type = genomic DNA
atgggtggttcagtggtagaattctcgcc

SEQ ID NO: 45163 - DNA, 30 bp, Homo sapiens; identical to SEQ ID NO: 6995
  source 1..30: mol_type = genomic DNA

SEQ ID NO: 45164 - DNA, 31 bp, Homo sapiens; identical to SEQ ID NO: 6996
  source 1..31: mol_type = genomic DNA

SEQ ID NO: 45165 - DNA, 32 bp, Homo sapiens; identical to SEQ ID NO: 6997
  source 1..32: mol_type = genomic DNA

SEQ ID NO: 45166 - DNA, 33 bp, Homo sapiens; identical to SEQ ID NO: 6998
  source 1..33: mol_type = genomic DNA

SEQ ID NO: 45167 - DNA, 34 bp, Homo sapiens; identical to SEQ ID NO: 6999
  source 1..34: mol_type = genomic DNA

SEQ ID NO: 45168 - DNA, 25 bp, Homo sapiens
  source 1..25: mol_type = genomic DNA
atgggttcgattctcatagtcctag

SEQ ID NO: 45169 - DNA, 26 bp, Homo sapiens
  source 1..26: mol_type = genomic DNA
atgggttcgattctcatagtcctagc

SEQ ID NO: 45170 - DNA, 17 bp, Homo sapiens
  source 1..17: mol_type = genomic DNA
atggtagaattctcgcc

SEQ ID NO: 45171 - DNA, 16 bp, Homo sapiens
  source 1..16: mol_type = genomic DNA
atggtagagcgctcgc

SEQ ID NO: 45172 - DNA, 17 bp, Homo sapiens
  source 1..17: mol_type = genomic DNA
atggtagagcgctcgct

SEQ ID NO: 45173 - DNA, 20 bp, Homo sapiens
  source 1..20: mol_type = genomic DNA
atggtctagcggttaggatt

SEQ ID NO: 45174 - DNA, 22 bp, Homo sapiens
  source 1..22: mol_type = genomic DNA
atggtctagcggttaggattcc

SEQ ID NO: 45175 - DNA, 23 bp, Homo sapiens
  source 1..23: mol_type = genomic DNA
atggtctagcggttaggattcct

SEQ ID NO: 45176 - DNA, 25 bp, Homo sapiens
  source 1..25: mol_type = genomic DNA
atggtctagcggttaggattcctgg

SEQ ID NO: 45177 - DNA, 27 bp, Homo sapiens
  source 1..27: mol_type = genomic DNA
atggtctagcggttaggattcctggtt

SEQ ID NO: 45178 - DNA, 36 bp, Homo sapiens; identical to SEQ ID NO: 33422
  source 1..36: mol_type = genomic DNA

SEQ ID NO: 45179 - DNA, 30 bp, Homo sapiens; identical to SEQ ID NO: 7052
  source 1..30: mol_type = genomic DNA

SEQ ID NO: 45180 - DNA, 39 bp, Homo sapiens
  source 1..39: mol_type = genomic DNA
atggtgagcactctggactctgaatccagcgatccgagt

SEQ ID NO: 45181 - DNA, 29 bp, Homo sapiens
  source 1..29: mol_type = genomic DNA
atggtggagttaaagactttttctctgac

SEQ ID NO: 45182 - DNA, 30 bp, Homo sapiens; identical to SEQ ID NO: 7068
  source 1..30: mol_type = genomic DNA

SEQ ID NO: 45183 - DNA, 31 bp, Homo sapiens; identical to SEQ ID NO: 7069
  source 1..31: mol_type = genomic DNA

SEQ ID NO: 45184 - DNA, 29 bp, Homo sapiens
  source 1..29: mol_type = genomic DNA
atggtggttcagtggtagaattctcgcct

SEQ ID NO: 45185 - DNA, 25 bp, Homo sapiens
  source 1..25: mol_type = genomic DNA
atggtgtaatggttagcactctgga

SEQ ID NO: 45186 - DNA, 27 bp, Homo sapiens
  source 1..27: mol_type = genomic DNA
atggtgtaatggttagcactctggact

SEQ ID NO: 45187 - DNA, 28 bp, Homo sapiens
  source 1..28: mol_type = genomic DNA
atggtgtaatggttagcactctggactc

SEQ ID NO: 45188 - DNA, 30 bp, Homo sapiens; identical to SEQ ID NO: 7092
  source 1..30: mol_type = genomic DNA

SEQ ID NO: 45189 - DNA, 32 bp, Homo sapiens; identical to SEQ ID NO: 7094
  source 1..32: mol_type = genomic DNA

SEQ ID NO: 45190 - DNA, 47 bp, Homo sapiens; identical to SEQ ID NO: 33444
  source 1..47: mol_type = genomic DNA

SEQ ID NO: 45191 - DNA, 16 bp, Homo sapiens
  source 1..16: mol_type = genomic DNA
atggttagcactctgg

SEQ ID NO: 45192 - DNA, 17 bp, Homo sapiens
  source 1..17: mol_type = genomic DNA
atggttagcactctgga

SEQ ID NO: 45193 - DNA, 18 bp, Homo sapiens
  source 1..18: mol_type = genomic DNA
atggttagcactctggac

SEQ ID NO: 45194 - DNA, 19 bp, Homo sapiens
  source 1..19: mol_type = genomic DNA
atggttagcactctggact

SEQ ID NO: 45195 - DNA, 20 bp, Homo sapiens
  source 1..20: mol_type = genomic DNA
atggttagcactctggactc

SEQ ID NO: 45196 - DNA, 21 bp, Homo sapiens
  source 1..21: mol_type = genomic DNA
atggttagcactctggactct

SEQ ID NO: 45197 - DNA, 22 bp, Homo sapiens
  source 1..22: mol_type = genomic DNA
atggttagcactctggactctg

SEQ ID NO: 45198 - DNA, 23 bp, Homo sapiens
  source 1..23: mol_type = genomic DNA
atggttagcactctggactctga

SEQ ID NO: 45199 - DNA, 24 bp, Homo sapiens
  source 1..24: mol_type = genomic DNA
atggttagcactctggactctgaa

SEQ ID NO: 45200 - DNA, 25 bp, Homo sapiens
  source 1..25: mol_type = genomic DNA
atggttagcactctggactctgaat

SEQ ID NO: 45201 - DNA, 26 bp, Homo sapiens
  source 1..26: mol_type = genomic DNA
atggttagcactctggactctgaatc

SEQ ID NO: 45202 - DNA, 27 bp, Homo sapiens
  source 1..27: mol_type = genomic DNA
atggttagcactctggactctgaatcc

SEQ ID NO: 45203 - DNA, 28 bp, Homo sapiens
  source 1..28: mol_type = genomic DNA
atggttagcactctggactctgaatcca

SEQ ID NO: 45204 - DNA, 30 bp, Homo sapiens; identical to SEQ ID NO: 7111
  source 1..30: mol_type = genomic DNA

SEQ ID NO: 45205 - DNA, 31 bp, Homo sapiens; identical to SEQ ID NO: 7112
  source 1..31: mol_type = genomic DNA

SEQ ID NO: 45206 - DNA, 38 bp, Homo sapiens; identical to SEQ ID NO: 7116
  source 1..38: mol_type = genomic DNA

SEQ ID NO: 45207 - DNA, 39 bp, Homo sapiens; identical to SEQ ID NO: 7117
  source 1..39: mol_type = genomic DNA

SEQ ID NO: 45208 - DNA, 40 bp, Homo sapiens; identical to SEQ ID NO: 33465
  source 1..40: mol_type = genomic DNA

SEQ ID NO: 45209 - DNA, 26 bp, Homo sapiens
  source 1..26: mol_type = genomic DNA
atggttagcactctggactttgaatc

SEQ ID NO: 45210 - DNA, 23 bp, Homo sapiens
  source 1..23: mol_type = genomic DNA
atggtttttcatatcattggtcg

SEQ ID NO: 45211 - DNA, 30 bp, Homo sapiens; identical to SEQ ID NO: 7138
  source 1..30: mol_type = genomic DNA

SEQ ID NO: 45212 - DNA, 33 bp, Homo sapiens; identical to SEQ ID NO: 7141
  source 1..33: mol_type = genomic DNA

SEQ ID NO: 45213 - DNA, 34 bp, Homo sapiens; identical to SEQ ID NO: 7142
  source 1..34: mol_type = genomic DNA

SEQ ID NO: 45214 - DNA, 40 bp, Homo sapiens; identical to SEQ ID NO: 7148
  source 1..40: mol_type = genomic DNA

SEQ ID NO: 45215 - DNA, 41 bp, Homo sapiens; identical to SEQ ID NO: 7149
  source 1..41: mol_type = genomic DNA

SEQ ID NO: 45216 - DNA, 42 bp, Homo sapiens; identical to SEQ ID NO: 7150
  source 1..42: mol_type = genomic DNA

SEQ ID NO: 45217 - DNA, 43 bp, Homo sapiens; identical to SEQ ID NO: 7151
  source 1..43: mol_type = genomic DNA

SEQ ID NO: 45218 - DNA, 44 bp, Homo sapiens; identical to SEQ ID NO: 7152
  source 1..44: mol_type = genomic DNA

SEQ ID NO: 45219 - DNA, 45 bp, Homo sapiens; identical to SEQ ID NO: 7153
  source 1..45: mol_type = genomic DNA

SEQ ID NO: 45220 - DNA, 46 bp, Homo sapiens; identical to SEQ ID NO: 7154
  source 1..46: mol_type = genomic DNA

SEQ ID NO: 45221 - DNA, 39 bp, Homo sapiens
  source 1..39: mol_type = genomic DNA
atgtatgaggccccgggttcgatccccggcatctccacc

SEQ ID NO: 45222 - DNA, 17 bp, Homo sapiens
  source 1..17: mol_type = genomic DNA
atgtccgcgtgggttcg

SEQ ID NO: 45223 - DNA, 27 bp, Homo sapiens
  source 1..27: mol_type = genomic DNA
atgtccgcgtgggttcgaaccccactc

SEQ ID NO: 45224 - DNA, 30 bp, Homo sapiens; identical to SEQ ID NO: 7173
  source 1..30: mol_type = genomic DNA

SEQ ID NO: 45225 - DNA, 26 bp, Homo sapiens
  source 1..26: mol_type = genomic DNA
atgtctaacaacatggctttctcacc

SEQ ID NO: 45226 - DNA, 18 bp, Homo sapiens
  source 1..18: mol_type = genomic DNA
atgttggttatacccttc

SEQ ID NO: 45227 - DNA, 23 bp, Homo sapiens
  source 1..23: mol_type = genomic DNA
atgttggttatacccttcccgta

SEQ ID NO: 45228 - DNA, 25 bp, Homo sapiens
  source 1..25: mol_type = genomic DNA
atgttggttatacccttcccgtact

SEQ ID NO: 45229 - DNA, 28 bp, Homo sapiens
  source 1..28: mol_type = genomic DNA
atgttggttatacccttcccgtactacc

SEQ ID NO: 45230 - DNA, 29 bp, Homo sapiens
  source 1..29: mol_type = genomic DNA
atgttggttatacccttcccgtactacca

SEQ ID NO: 45231 - DNA, 16 bp, Homo sapiens
  source 1..16: mol_type = genomic DNA
atgtttagacgggctc

SEQ ID NO: 45232 - DNA, 17 bp, Homo sapiens
  source 1..17: mol_type = genomic DNA
atgtttagacgggctca

SEQ ID NO: 45233 - DNA, 18 bp, Homo sapiens
  source 1..18: mol_type = genomic DNA
atgtttagacgggctcac

SEQ ID NO: 45234 - DNA, 19 bp, Homo sapiens
  source 1..19: mol_type = genomic DNA
atgtttagacgggctcaca

SEQ ID NO: 45235 - DNA, 21 bp, Homo sapiens
  source 1..21: mol_type = genomic DNA
atgtttagacgggctcacatc

SEQ ID NO: 45236 - DNA, 22 bp, Homo sapiens
  source 1..22: mol_type = genomic DNA
atgtttagacgggctcacatca

SEQ ID NO: 45237 - DNA, 24 bp, Homo sapiens
  source 1..24: mol_type = genomic DNA
atgtttagacgggctcacatcacc

SEQ ID NO: 45238 - DNA, 25 bp, Homo sapiens
  source 1..25: mol_type = genomic DNA
atgtttagacgggctcacatcaccc

SEQ ID NO: 45239 - DNA, 26 bp, Homo sapiens
  source 1..26: mol_type = genomic DNA
atgtttagacgggctcacatcacccc

SEQ ID NO: 45240 - DNA, 27 bp, Homo sapiens
  source 1..27: mol_type = genomic DNA
atgtttagacgggctcacatcacccca

SEQ ID NO: 45241 - DNA, 29 bp, Homo sapiens
  source 1..29: mol_type = genomic DNA
atgtttagacgggctcacatcaccccata

SEQ ID NO: 45242 - DNA, 30 bp, Homo sapiens; identical to SEQ ID NO: 7219
  source 1..30: mol_type = genomic DNA

SEQ ID NO: 45243 - DNA, 31 bp, Homo sapiens; identical to SEQ ID NO: 7220
  source 1..31: mol_type = genomic DNA

SEQ ID NO: 45244 - DNA, 35 bp, Homo sapiens; identical to SEQ ID NO: 7224
  source 1..35: mol_type = genomic DNA

SEQ ID NO: 45245 - DNA, 36 bp, Homo sapiens; identical to SEQ ID NO: 7225
  source 1..36: mol_type = genomic DNA

SEQ ID NO: 45246 - DNA, 16 bp, Homo sapiens
  source 1..16: mol_type = genomic DNA
attaactagttttgac

SEQ ID NO: 45247 - DNA, 34 bp, Homo sapiens; identical to SEQ ID NO: 7248
  source 1..34: mol_type = genomic DNA

SEQ ID NO: 45248 - DNA, 31 bp, Homo sapiens; identical to SEQ ID NO: 7262
  source 1..31: mol_type = genomic DNA

SEQ ID NO: 45249 - DNA, 32 bp, Homo sapiens; identical to SEQ ID NO: 7263
  source 1..32: mol_type = genomic DNA

SEQ ID NO: 45250 - DNA, 33 bp, Homo sapiens; identical to SEQ ID NO: 7264
  source 1..33: mol_type = genomic DNA

SEQ ID NO: 45251 - DNA, 23 bp, Homo sapiens
  source 1..23: mol_type = genomic DNA
attagaatcttagctttgggtgc

SEQ ID NO: 45252 - DNA, 17 bp, Homo sapiens
  source 1..17: mol_type = genomic DNA
attcaaaggttccgggt

SEQ ID NO: 45253 - DNA, 35 bp, Homo sapiens; identical to SEQ ID NO: 7311
  source 1..35: mol_type = genomic DNA

SEQ ID NO: 45254 - DNA, 38 bp, Homo sapiens; identical to SEQ ID NO: 7314
  source 1..38: mol_type = genomic DNA

SEQ ID NO: 45255 - DNA, 39 bp, Homo sapiens; identical to SEQ ID NO: 7315
  source 1..39: mol_type = genomic DNA

SEQ ID NO: 45256 - DNA, 38 bp, Homo sapiens; identical to SEQ ID NO: 7319
  source 1..38: mol_type = genomic DNA

SEQ ID NO: 45257 - DNA, 38 bp, Homo sapiens; identical to SEQ ID NO: 7322
  source 1..38: mol_type = genomic DNA

SEQ ID NO: 45258 - DNA, 19 bp, Homo sapiens
  source 1..19: mol_type = genomic DNA
attccagctcgaaggacca

SEQ ID NO: 45259 - DNA, 28 bp, Homo sapiens
  source 1..28: mol_type = genomic DNA
attccaggttcgactcctggctggctcg

SEQ ID NO: 45260 - DNA, 30 bp, Homo sapiens; identical to SEQ ID NO: 7329
  source 1..30: mol_type = genomic DNA

SEQ ID NO: 45261 - DNA, 23 bp, Homo sapiens
  source 1..23: mol_type = genomic DNA
attcccattcttgcgacccgggt

SEQ ID NO: 45262 - DNA, 44 bp, Homo sapiens; identical to SEQ ID NO: 7333
  source 1..44: mol_type = genomic DNA

SEQ ID NO: 45263 - DNA, 16 bp, Homo sapiens
  source 1..16: mol_type = genomic DNA
attccccgacggggag

SEQ ID NO: 45264 - DNA, 17 bp, Homo sapiens
  source 1..17: mol_type = genomic DNA
attccccgacggggagc

SEQ ID NO: 45265 - DNA, 18 bp, Homo sapiens
  source 1..18: mol_type = genomic DNA
attccccgacggggagcc

SEQ ID NO: 45266 - DNA, 17 bp, Homo sapiens
  source 1..17: mol_type = genomic DNA
attcccggccaacgcac

SEQ ID NO: 45267 - DNA, 18 bp, Homo sapiens
  source 1..18: mol_type = genomic DNA
attcccggccaacgcacc

SEQ ID NO: 45268 - DNA, 19 bp, Homo sapiens
  source 1..19: mol_type = genomic DNA
attcccggccaacgcacca

SEQ ID NO: 45269 - DNA, 17 bp, Homo sapiens
  source 1..17: mol_type = genomic DNA
attcccggccaatgcac

SEQ ID NO: 45270 - DNA, 18 bp, Homo sapiens
  source 1..18: mol_type = genomic DNA
attcccggccaatgcacc

SEQ ID NO: 45271 - DNA, 19 bp, Homo sapiens
  source 1..19: mol_type = genomic DNA
attcccggccaatgcacca

SEQ ID NO: 45272 - DNA, 19 bp, Homo sapiens
  source 1..19: mol_type = genomic DNA
attcccggcccatgcacca

SEQ ID NO: 45273 - DNA, 16 bp, Homo sapiens
  source 1..16: mol_type = genomic DNA
attcccgggcggcgca

SEQ ID NO: 45274 - DNA, 18 bp, Homo sapiens
  source 1..18: mol_type = genomic DNA
attcccgggcggcgcacc

SEQ ID NO: 45275 - DNA, 19 bp, Homo sapiens
  source 1..19: mol_type = genomic DNA
attcccgggcggcgcacca

SEQ ID NO: 45276 - DNA, 16 bp, Homo sapiens
  source 1..16: mol_type = genomic DNA
attcccggtcagggaa

SEQ ID NO: 45277 - DNA, 17 bp, Homo sapiens
  source 1..17: mol_type = genomic DNA
attcccggtcagggaac

SEQ ID NO: 45278 - DNA, 18 bp, Homo sapiens
  source 1..18: mol_type = genomic DNA
attcccggtcagggaacc

SEQ ID NO: 45279 - DNA, 17 bp, Homo sapiens
  source 1..17: mol_type = genomic DNA
attcccggtcatggaac

SEQ ID NO: 45280 - DNA, 20 bp, Homo sapiens
  source 1..20: mol_type = genomic DNA
attccggatcagaagattga

SEQ ID NO: 45281 - DNA, 17 bp, Homo sapiens
  source 1..17: mol_type = genomic DNA
attccggctcgaaggac

SEQ ID NO: 45282 - DNA, 18 bp, Homo sapiens
  source 1..18: mol_type = genomic DNA
attccggctcgaaggacc

SEQ ID NO: 45283 - DNA, 19 bp, Homo sapiens
  source 1..19: mol_type = genomic DNA
attccggctcgaaggacca

SEQ ID NO: 45284 - DNA, 31 bp, Homo sapiens
  source 1..31: mol_type = genomic DNA
attcgaagaagcagcttcaaacctgccgggg

SEQ ID NO: 45285 - DNA, 33 bp, Homo sapiens; identical to SEQ ID NO: 7380
  source 1..33: mol_type = genomic DNA

SEQ ID NO: 45286 - DNA, 34 bp, Homo sapiens; identical to SEQ ID NO: 7381
  source 1..34: mol_type = genomic DNA

SEQ ID NO: 45287 - DNA, 35 bp, Homo sapiens; identical to SEQ ID NO: 7382
  source 1..35: mol_type = genomic DNA

SEQ ID NO: 45288 - DNA, 16 bp, Homo sapiens
  source 1..16: mol_type = genomic DNA
attcggcgctctcacc

SEQ ID NO: 45289 - DNA, 18 bp, Homo sapiens
  source 1..18: mol_type = genomic DNA
attcggcgctctcaccgc

SEQ ID NO: 45290 - DNA, 19 bp, Homo sapiens
  source 1..19: mol_type = genomic DNA
attcggcgctctcaccgcc

SEQ ID NO: 45291 - DNA, 26 bp, Homo sapiens
  source 1..26: mol_type = genomic DNA
attcggcgctctcaccgccgcggccc

SEQ ID NO: 45292 - DNA, 29 bp, Homo sapiens
  source 1..29: mol_type = genomic DNA
attcggcgctctcaccgccgcggcccggg

SEQ ID NO: 45293 - DNA, 30 bp, Homo sapiens; identical to SEQ ID NO: 7417
  source 1..30: mol_type = genomic DNA

SEQ ID NO: 45294 - DNA, 33 bp, Homo sapiens; identical to SEQ ID NO: 7423
  source 1..33: mol_type = genomic DNA

SEQ ID NO: 45295 - DNA, 38 bp, Homo sapiens; identical to SEQ ID NO: 7427
  source 1..38: mol_type = genomic DNA

SEQ ID NO: 45296 - DNA, 17 bp, Homo sapiens
  source 1..17: mol_type = genomic DNA
attctcatagtcctagc

SEQ ID NO: 45297 - DNA, 18 bp, Homo sapiens
  source 1..18: mol_type = genomic DNA
attctcatagtcctagcc

SEQ ID NO: 45298 - DNA, 16 bp, Homo sapiens
  source 1..16: mol_type = genomic DNA
attctcgcctgccacg

SEQ ID NO: 45299 - DNA, 17 bp, Homo sapiens
  source 1..17: mol_type = genomic DNA
attctcgcctgccacgc

SEQ ID NO: 45300 - DNA, 26 bp, Homo sapiens
  source 1..26: mol_type = genomic DNA
attctcgcctgccacgcgggaggccc

SEQ ID NO: 45301 - DNA, 16 bp, Homo sapiens
  source 1..16: mol_type = genomic DNA
attcttgcgacccggg

SEQ ID NO: 45302 - DNA, 17 bp, Homo sapiens
  source 1..17: mol_type = genomic DNA
attcttgcgacccgggt

SEQ ID NO: 45303 - DNA, 18 bp, Homo sapiens
  source 1..18: mol_type = genomic DNA
attcttgcgacccgggtt

SEQ ID NO: 45304 - DNA, 32 bp, Homo sapiens; identical to SEQ ID NO: 7454
  source 1..32: mol_type = genomic DNA

SEQ ID NO: 45305 - DNA, 33 bp, Homo sapiens; identical to SEQ ID NO: 7455
  source 1..33: mol_type = genomic DNA

SEQ ID NO: 45306 - DNA, 34 bp, Homo sapiens; identical to SEQ ID NO: 7456
  source 1..34: mol_type = genomic DNA

SEQ ID NO: 45307 - DNA, 35 bp, Homo sapiens; identical to SEQ ID NO: 7457
  source 1..35: mol_type = genomic DNA

SEQ ID NO: 45308 - DNA, 36 bp, Homo sapiens; identical to SEQ ID NO: 7458
  source 1..36: mol_type = genomic DNA

SEQ ID NO: 45309 - DNA, 37 bp, Homo sapiens; identical to SEQ ID NO: 7459
  source 1..37: mol_type = genomic DNA

SEQ ID NO: 45310 - DNA, 38 bp, Homo sapiens; identical to SEQ ID NO: 7460
  source 1..38: mol_type = genomic DNA

SEQ ID NO: 45311 - DNA, 39 bp, Homo sapiens; identical to SEQ ID NO: 7461
  source 1..39: mol_type = genomic DNA

SEQ ID NO: 45312 - DNA, 30 bp, Homo sapiens; identical to SEQ ID NO: 7470
  source 1..30: mol_type = genomic DNA

SEQ ID NO: 45313 - DNA, 29 bp, Homo sapiens
  source 1..29: mol_type = genomic DNA
attgagggttcgagtcccttcgtggtcgc

SEQ ID NO: 45314 - DNA, 30 bp, Homo sapiens; identical to SEQ ID NO: 7477
  source 1..30: mol_type = genomic DNA

SEQ ID NO: 45315 - DNA, 31 bp, Homo sapiens; identical to SEQ ID NO: 7478
  source 1..31: mol_type = genomic DNA

SEQ ID NO: 45316 - DNA, 32 bp, Homo sapiens; identical to SEQ ID NO: 7481
  source 1..32: mol_type = genomic DNA

SEQ ID NO: 45317 - DNA, 40 bp, Homo sapiens; identical to SEQ ID NO: 7483
  source 1..40: mol_type = genomic DNA

SEQ ID NO: 45318 - DNA, 41 bp, Homo sapiens; identical to SEQ ID NO: 7484
  source 1..41: mol_type = genomic DNA

SEQ ID NO: 45319 - DNA, 19 bp, Homo sapiens
  source 1..19: mol_type = genomic DNA
attgcaggttcgagtcctg

SEQ ID NO: 45320 - DNA, 30 bp, Homo sapiens; identical to SEQ ID NO: 7490
  source 1..30: mol_type = genomic DNA

SEQ ID NO: 45321 - DNA, 25 bp, Homo sapiens
  source 1..25: mol_type = genomic DNA
attggactgtaaatctaaagacagg

SEQ ID NO: 45322 - DNA, 35 bp, Homo sapiens; identical to SEQ ID NO: 7500
  source 1..35: mol_type = genomic DNA

SEQ ID NO: 45323 - DNA, 29 bp, Homo sapiens
  source 1..29: mol_type = genomic DNA
attggacttctaattcaaaggttccgggt

SEQ ID NO: 45324 - DNA, 16 bp, Homo sapiens
  source 1..16: mol_type = genomic DNA
attggtcgtggttgta

SEQ ID NO: 45325 - DNA, 19 bp, Homo sapiens
  source 1..19: mol_type = genomic DNA
attggtcgtggttgtagtc

SEQ ID NO: 45326 - DNA, 20 bp, Homo sapiens
  source 1..20: mol_type = genomic DNA
attggtcgtggttgtagtcc

SEQ ID NO: 45327 - DNA, 21 bp, Homo sapiens
  source 1..21: mol_type = genomic DNA
attggtcgtggttgtagtccg

SEQ ID NO: 45328 - DNA, 22 bp, Homo sapiens
  source 1..22: mol_type = genomic DNA
attggtcgtggttgtagtccgt

SEQ ID NO: 45329 - DNA, 23 bp, Homo sapiens
  source 1..23: mol_type = genomic DNA
attggtcgtggttgtagtccgtg

SEQ ID NO: 45330 - DNA, 24 bp, Homo sapiens
  source 1..24: mol_type = genomic DNA
attggtcgtggttgtagtccgtgc

SEQ ID NO: 45331 - DNA, 25 bp, Homo sapiens
  source 1..25: mol_type = genomic DNA
attggtcgtggttgtagtccgtgcg

SEQ ID NO: 45332 - DNA, 26 bp, Homo sapiens
  source 1..26: mol_type = genomic DNA
attggtcgtggttgtagtccgtgcga

SEQ ID NO: 45333 - DNA, 27 bp, Homo sapiens
  source 1..27: mol_type = genomic DNA
attggtcgtggttgtagtccgtgcgag

SEQ ID NO: 45334 - DNA, 28 bp, Homo sapiens
  source 1..28: mol_type = genomic DNA
attggtcgtggttgtagtccgtgcgaga

SEQ ID NO: 45335 - DNA, 29 bp, Homo sapiens
  source 1..29: mol_type = genomic DNA
attggtcgtggttgtagtccgtgcgagaa

SEQ ID NO: 45336 - DNA, 30 bp, Homo sapiens; identical to SEQ ID NO: 7529
  source 1..30: mol_type = genomic DNA

SEQ ID NO: 45337 - DNA, 31 bp, Homo sapiens; identical to SEQ ID NO: 7530
  source 1..31: mol_type = genomic DNA

SEQ ID NO: 45338 - DNA, 32 bp, Homo sapiens; identical to SEQ ID NO: 7531
  source 1..32: mol_type = genomic DNA

SEQ ID NO: 45339 - DNA, 33 bp, Homo sapiens; identical to SEQ ID NO: 7532
  source 1..33: mol_type = genomic DNA

SEQ ID NO: 45340 - DNA, 34 bp, Homo sapiens; identical to SEQ ID NO: 7533
  source 1..34: mol_type = genomic DNA

SEQ ID NO: 45341 - DNA, 16 bp, Homo sapiens
  source 1..16: mol_type = genomic DNA
attggtggttcagtgg

SEQ ID NO: 45342 - DNA, 23 bp, Homo sapiens
  source 1..23: mol_type = genomic DNA
attggtggttcagtggtagaatt

SEQ ID NO: 45343 - DNA, 24 bp, Homo sapiens
  source 1..24: mol_type = genomic DNA
attggtggttcagtggtagaattc

SEQ ID NO: 45344 - DNA, 25 bp, Homo sapiens
  source 1..25: mol_type = genomic DNA
attggtggttcagtggtagaattct

SEQ ID NO: 45345 - DNA, 26 bp, Homo sapiens
  source 1..26: mol_type = genomic DNA
attggtggttcagtggtagaattctc

SEQ ID NO: 45346 - DNA, 27 bp, Homo sapiens
  source 1..27: mol_type = genomic DNA
attggtggttcagtggtagaattctcg

SEQ ID NO: 45347 - DNA, 28 bp, Homo sapiens
  source 1..28: mol_type = genomic DNA
attggtggttcagtggtagaattctcgc

SEQ ID NO: 45348 - DNA, 29 bp, Homo sapiens
  source 1..29: mol_type = genomic DNA
attggtggttcagtggtagaattctcgcc

SEQ ID NO: 45349 - DNA, 30 bp, Homo sapiens; identical to SEQ ID NO: 7557
  source 1..30: mol_type = genomic DNA

SEQ ID NO: 45350 - DNA, 31 bp, Homo sapiens; identical to SEQ ID NO: 7563
  source 1..31: mol_type = genomic DNA

SEQ ID NO: 45351 - DNA, 32 bp, Homo sapiens; identical to SEQ ID NO: 7564
  source 1..32: mol_type = genomic DNA

SEQ ID NO: 45352 - DNA, 33 bp, Homo sapiens; identical to SEQ ID NO: 7565
  source 1..33: mol_type = genomic DNA

SEQ ID NO: 45353 - DNA, 34 bp, Homo sapiens; identical to SEQ ID NO: 7566
  source 1..34: mol_type = genomic DNA

SEQ ID NO: 45354 - DNA, 35 bp, Homo sapiens; identical to SEQ ID NO: 7567
  source 1..35: mol_type = genomic DNA

SEQ ID NO: 45355 - DNA, 36 bp, Homo sapiens; identical to SEQ ID NO: 7568
  source 1..36: mol_type = genomic DNA

SEQ ID NO: 45356 - DNA, 37 bp, Homo sapiens; identical to SEQ ID NO: 7569
  source 1..37: mol_type = genomic DNA

SEQ ID NO: 45357 - DNA, 17 bp, Homo sapiens
  source 1..17: mol_type = genomic DNA
attgtgaatctgacaac

SEQ ID NO: 45358 - DNA, 20 bp, Homo sapiens
  source 1..20: mol_type = genomic DNA
attgtgaatctgacaacaga

SEQ ID NO: 45359 - DNA, 22 bp, Homo sapiens
  source 1..22: mol_type = genomic DNA
attgtgaatctgacaacagagg

SEQ ID NO: 45360 - DNA, 23 bp, Homo sapiens
  source 1..23: mol_type = genomic DNA
attgtgaatctgacaacagaggc

SEQ ID NO: 45361 - DNA, 24 bp, Homo sapiens
  source 1..24: mol_type = genomic DNA
attgtgaatctgacaacagaggct

SEQ ID NO: 45362 - DNA, 25 bp, Homo sapiens
  source 1..25: mol_type = genomic DNA
attgtgaatctgacaacagaggctt

SEQ ID NO: 45363 - DNA, 26 bp, Homo sapiens
  source 1..26: mol_type = genomic DNA
attgtgaatctgacaacagaggctta

SEQ ID NO: 45364 - DNA, 28 bp, Homo sapiens
  source 1..28: mol_type = genomic DNA
attgtgaatctgacaacagaggcttacg

SEQ ID NO: 45365 - DNA, 29 bp, Homo sapiens
  source 1..29: mol_type = genomic DNA
attgtgaatctgacaacagaggcttacga

SEQ ID NO: 45366 - DNA, 31 bp, Homo sapiens; identical to SEQ ID NO: 7597
  source 1..31: mol_type = genomic DNA

SEQ ID NO: 45367 - DNA, 32 bp, Homo sapiens; identical to SEQ ID NO: 7598
  source 1..32: mol_type = genomic DNA

SEQ ID NO: 45368 - DNA, 33 bp, Homo sapiens; identical to SEQ ID NO: 7599
  source 1..33: mol_type = genomic DNA

SEQ ID NO: 45369 - DNA, 34 bp, Homo sapiens; identical to SEQ ID NO: 7600
  source 1..34: mol_type = genomic DNA

SEQ ID NO: 45370 - DNA, 36 bp, Homo sapiens; identical to SEQ ID NO: 7602
  source 1..36: mol_type = genomic DNA

SEQ ID NO: 45371 - DNA, 37 bp, Homo sapiens; identical to SEQ ID NO: 7603
  source 1..37: mol_type = genomic DNA

SEQ ID NO: 45372 - DNA, 42 bp, Homo sapiens; identical to SEQ ID NO: 7608
  source 1..42: mol_type = genomic DNA

SEQ ID NO: 45373 - DNA, 43 bp, Homo sapiens; identical to SEQ ID NO: 7609
  source 1..43: mol_type = genomic DNA

SEQ ID NO: 45374 - DNA, 44 bp, Homo sapiens; identical to SEQ ID NO: 7610
  source 1..44: mol_type = genomic DNA

SEQ ID NO: 45375 - DNA, 45 bp, Homo sapiens; identical to SEQ ID NO: 7611
  source 1..45: mol_type = genomic DNA

SEQ ID NO: 45376 - DNA, 22 bp, Homo sapiens
  source 1..22: mol_type = genomic DNA
attgtgctctgcacgcgtgggt

SEQ ID NO: 45377 - DNA, 43 bp, Homo sapiens; identical to SEQ ID NO: 7621
  source 1..43: mol_type = genomic DNA

SEQ ID NO: 45378 - DNA, 28 bp, Homo sapiens
  source 1..28: mol_type = genomic DNA
attgtgggttcgagtcccatctggggtg

SEQ ID NO: 45379 - DNA, 30 bp, Homo sapiens; identical to SEQ ID NO: 7630
  source 1..30: mol_type = genomic DNA

SEQ ID NO: 45380 - DNA, 27 bp, Homo sapiens
  source 1..27: mol_type = genomic DNA
atttaggttaaatacagaccaagagcc

SEQ ID NO: 45381 - DNA, 18 bp, Homo sapiens
  source 1..18: mol_type = genomic DNA
atttcaacttaacttgac

SEQ ID NO: 45382 - DNA, 19 bp, Homo sapiens
  source 1..19: mol_type = genomic DNA
atttcaacttaacttgacc

SEQ ID NO: 45383 - DNA, 20 bp, Homo sapiens
  source 1..20: mol_type = genomic DNA
atttcaacttaacttgaccg

SEQ ID NO: 45384 - DNA, 22 bp, Homo sapiens
  source 1..22: mol_type = genomic DNA
atttcaacttaacttgaccgct

SEQ ID NO: 45385 - DNA, 23 bp, Homo sapiens
  source 1..23: mol_type = genomic DNA
atttcaacttaacttgaccgctc

SEQ ID NO: 45386 - DNA, 25 bp, Homo sapiens
  source 1..25: mol_type = genomic DNA
atttcaacttaacttgaccgctctg

SEQ ID NO: 45387 - DNA, 26 bp, Homo sapiens
  source 1..26: mol_type = genomic DNA
atttcaacttaacttgaccgctctga

SEQ ID NO: 45388 - DNA, 27 bp, Homo sapiens
  source 1..27: mol_type = genomic DNA
atttcaacttaacttgaccgctctgac

SEQ ID NO: 45389 - DNA, 28 bp, Homo sapiens
  source 1..28: mol_type = genomic DNA
atttcaacttaacttgaccgctctgacc

SEQ ID NO: 45390 - DNA, 29 bp, Homo sapiens
  source 1..29: mol_type = genomic DNA
atttcaacttaacttgaccgctctgacca

SEQ ID NO: 45391 - DNA, 34 bp, Homo sapiens; identical to SEQ ID NO: 7655
  source 1..34: mol_type = genomic DNA

SEQ ID NO: 45392 - DNA, 17 bp, Homo sapiens
  source 1..17: mol_type = genomic DNA
atttcgatggcgtgggt

SEQ ID NO: 45393 - DNA, 40 bp, Homo sapiens; identical to SEQ ID NO: 7691
  source 1..40: mol_type = genomic DNA

SEQ ID NO: 45394 - DNA, 42 bp, Homo sapiens; identical to SEQ ID NO: 33683
  source 1..42: mol_type = genomic DNA

SEQ ID NO: 45395 - DNA, 43 bp, Homo sapiens; identical to SEQ ID NO: 7692
  source 1..43: mol_type = genomic DNA

SEQ ID NO: 45396 - DNA, 30 bp, Homo sapiens; identical to SEQ ID NO: 7702
  source 1..30: mol_type = genomic DNA

SEQ ID NO: 45397 - DNA, 21 bp, Homo sapiens
  source 1..21: mol_type = genomic DNA
caaaacatcagattgtgaatc

SEQ ID NO: 45398 - DNA, 34 bp, Homo sapiens; identical to SEQ ID NO: 7734
  source 1..34: mol_type = genomic DNA

SEQ ID NO: 45399 - DNA, 35 bp, Homo sapiens; identical to SEQ ID NO: 7735
  source 1..35: mol_type = genomic DNA

SEQ ID NO: 45400 - DNA, 36 bp, Homo sapiens; identical to SEQ ID NO: 7736
  source 1..36: mol_type = genomic DNA

SEQ ID NO: 45401 - DNA, 37 bp, Homo sapiens; identical to SEQ ID NO: 7737
  source 1..37: mol_type = genomic DNA

SEQ ID NO: 45402 - DNA, 39 bp, Homo sapiens; identical to SEQ ID NO: 7739
  source 1..39: mol_type = genomic DNA

SEQ ID NO: 45403 - DNA, 41 bp, Homo sapiens; identical to SEQ ID NO: 7741
  source 1..41: mol_type = genomic DNA

SEQ ID NO: 45404 - DNA, 42 bp, Homo sapiens; identical to SEQ ID NO: 7742
  source 1..42: mol_type = genomic DNA

SEQ ID NO: 45405 - DNA, 43 bp, Homo sapiens; identical to SEQ ID NO: 7743
  source 1..43: mol_type = genomic DNA

SEQ ID NO: 45406 - DNA, 44 bp, Homo sapiens; identical to SEQ ID NO: 7744
  source 1..44: mol_type = genomic DNA

SEQ ID NO: 45407 - DNA, 45 bp, Homo sapiens; identical to SEQ ID NO: 7745
  source 1..45: mol_type = genomic DNA

SEQ ID NO: 45408 - DNA, 46 bp, Homo sapiens; identical to SEQ ID NO: 7746
  source 1..46: mol_type = genomic DNA

SEQ ID NO: 45409 - DNA, 47 bp, Homo sapiens; identical to SEQ ID NO: 7747
  source 1..47: mol_type = genomic DNA

SEQ ID NO: 45410 - DNA, 16 bp, Homo sapiens
  source 1..16: mol_type = genomic DNA
caaacctgccggggct

SEQ ID NO: 45411 - DNA, 17 bp, Homo sapiens
  source 1..17: mol_type = genomic DNA
caaacctgccggggctt

SEQ ID NO: 45412 - DNA, 19 bp, Homo sapiens
  source 1..19: mol_type = genomic DNA
caaacctgccggggcttcc

SEQ ID NO: 45413 - DNA, 20 bp, Homo sapiens
  source 1..20: mol_type = genomic DNA
caaacctgccggggcttcca

SEQ ID NO: 45414 - DNA, 32 bp, Homo sapiens; identical to SEQ ID NO: 7798
  source 1..32: mol_type = genomic DNA

SEQ ID NO: 45415 - DNA, 33 bp, Homo sapiens; identical to SEQ ID NO: 7799
  source 1..33: mol_type = genomic DNA

SEQ ID NO: 45416 - DNA, 34 bp, Homo sapiens; identical to SEQ ID NO: 7815
  source 1..34: mol_type = genomic DNA

SEQ ID NO: 45417 - DNA, 35 bp, Homo sapiens; identical to SEQ ID NO: 7816
  source 1..35: mol_type = genomic DNA

SEQ ID NO: 45418 - DNA, 36 bp, Homo sapiens; identical to SEQ ID NO: 7817
  source 1..36: mol_type = genomic DNA

SEQ ID NO: 45419 - DNA, 35 bp, Homo sapiens; identical to SEQ ID NO: 7819
  source 1..35: mol_type = genomic DNA

SEQ ID NO: 45420 - DNA, 35 bp, Homo sapiens; identical to SEQ ID NO: 7821
  source 1..35: mol_type = genomic DNA

SEQ ID NO: 45421 - DNA, 20 bp, Homo sapiens
  source 1..20: mol_type = genomic DNA
caaatcacgtcggggtcacc

SEQ ID NO: 45422 - DNA, 21 bp, Homo sapiens
  source 1..21: mol_type = genomic DNA
caaatcacgtcggggtcacca

SEQ ID NO: 45423 - DNA, 16 bp, Homo sapiens
  source 1..16: mol_type = genomic DNA
caaatcccggacgagc

SEQ ID NO: 45424 - DNA, 17 bp, Homo sapiens
  source 1..17: mol_type = genomic DNA
caaatcccggacgagcc

SEQ ID NO: 45425 - DNA, 18 bp, Homo sapiens
  source 1..18: mol_type = genomic DNA
caaatcccggacgagccc

SEQ ID NO: 45426 - DNA, 19 bp, Homo sapiens
  source 1..19: mol_type = genomic DNA
caaatcccggacgagcccc

SEQ ID NO: 45427 - DNA, 20 bp, Homo sapiens
  source 1..20: mol_type = genomic DNA
caaatcccggacgagccccc

SEQ ID NO: 45428 - DNA, 21 bp, Homo sapiens
  source 1..21: mol_type = genomic DNA
caaatcccggacgagccccca

SEQ ID NO: 45429 - DNA, 19 bp, Homo sapiens
  source 1..19: mol_type = genomic DNA
caaatccgggtgccccctc

SEQ ID NO: 45430 - DNA, 20 bp, Homo sapiens
  source 1..20: mol_type = genomic DNA
caaatccgggtgccccctcc

SEQ ID NO: 45431 - DNA, 18 bp, Homo sapiens
  source 1..18: mol_type = genomic DNA
caaatctcgctggggcct

SEQ ID NO: 45432 - DNA, 19 bp, Homo sapiens
  source 1..19: mol_type = genomic DNA
caaatctcgctggggcctc

SEQ ID NO: 45433 - DNA, 20 bp, Homo sapiens
  source 1..20: mol_type = genomic DNA
caaatctcgctggggcctcc

SEQ ID NO: 45434 - DNA, 21 bp, Homo sapiens
  source 1..21: mol_type = genomic DNA
caaatctcgctggggcctcca

SEQ ID NO: 45435 - DNA, 17 bp, Homo sapiens
  source 1..17: mol_type = genomic DNA
caaatctcggtggaacc

SEQ ID NO: 45436 - DNA, 18 bp, Homo sapiens
  source 1..18: mol_type = genomic DNA
caaatctcggtggaacct

SEQ ID NO: 45437 - DNA, 19 bp, Homo sapiens
  source 1..19: mol_type = genomic DNA
caaatctcggtggaacctc

SEQ ID NO: 45438 - DNA, 20 bp, Homo sapiens
  source 1..20: mol_type = genomic DNA
caaatctcggtggaacctcc

SEQ ID NO: 45439 - DNA, 21 bp, Homo sapiens
  source 1..21: mol_type = genomic DNA
caaatctcggtggaacctcca

SEQ ID NO: 45440 - DNA, 17 bp, Homo sapiens
  source 1..17: mol_type = genomic DNA
caaatctcggtgggacc

SEQ ID NO: 45441 - DNA, 18 bp, Homo sapiens
  source 1..18: mol_type = genomic DNA
caaatctcggtgggacct

SEQ ID NO: 45442 - DNA, 19 bp, Homo sapiens
  source 1..19: mol_type = genomic DNA
caaatctcggtgggacctc

SEQ ID NO: 45443 - DNA, 20 bp, Homo sapiens
  source 1..20: mol_type = genomic DNA
caaatctcggtgggacctcc

SEQ ID NO: 45444 - DNA, 21 bp, Homo sapiens
  source 1..21: mol_type = genomic DNA
caaatctcggtgggacctcca

SEQ ID NO: 45445 - DNA, 19 bp, Homo sapiens
  source 1..19: mol_type = genomic DNA
caaatggtagagcgctcgc

SEQ ID NO: 45446 - DNA, 35 bp, Homo sapiens; identical to SEQ ID NO: 7862
  source 1..35: mol_type = genomic DNA

SEQ ID NO: 45447 - DNA, 36 bp, Homo sapiens; identical to SEQ ID NO: 7863
  source 1..36: mol_type = genomic DNA

SEQ ID NO: 45448 - DNA, 37 bp, Homo sapiens; identical to SEQ ID NO: 7864
  source 1..37: mol_type = genomic DNA

SEQ ID NO: 45449 - DNA, 38 bp, Homo sapiens; identical to SEQ ID NO: 7865
  source 1..38: mol_type = genomic DNA

SEQ ID NO: 45450 - DNA, 39 bp, Homo sapiens; identical to SEQ ID NO: 7866
  source 1..39: mol_type = genomic DNA

SEQ ID NO: 45451 - DNA, 21 bp, Homo sapiens
  source 1..21: mol_type = genomic DNA
caacacctctttacagtgacc

SEQ ID NO: 45452 - DNA, 22 bp, Homo sapiens
  source 1..22: mol_type = genomic DNA
caacacctctttacagtgacca

SEQ ID NO: 45453 - DNA, 18 bp, Homo sapiens
  source 1..18: mol_type = genomic DNA
caacagaggcttacgacc

SEQ ID NO: 45454 - DNA, 19 bp, Homo sapiens
  source 1..19: mol_type = genomic DNA
caacagaggcttacgaccc

SEQ ID NO: 45455 - DNA, 31 bp, Homo sapiens; identical to SEQ ID NO: 7882
  source 1..31: mol_type = genomic DNA

SEQ ID NO: 45456 - DNA, 18 bp, Homo sapiens
  source 1..18: mol_type = genomic DNA
caacatggctttctcacc

SEQ ID NO: 45457 - DNA, 28 bp, Homo sapiens
  source 1..28: mol_type = genomic DNA
caacctcggttcgaatccgagtcacggc

SEQ ID NO: 45458 - DNA, 30 bp, Homo sapiens; identical to SEQ ID NO: 7895
  source 1..30: mol_type = genomic DNA

SEQ ID NO: 45459 - DNA, 45 bp, Homo sapiens
  source 1..45: mol_type = genomic DNA
caacgatggtttttcatatcattggtcgtggttgtagtccgtgcg

SEQ ID NO: 45460 - DNA, 16 bp, Homo sapiens
  source 1..16: mol_type = genomic DNA
caacttaacttgaccg

SEQ ID NO: 45461 - DNA, 19 bp, Homo sapiens
  source 1..19: mol_type = genomic DNA
caacttaacttgaccgctc

SEQ ID NO: 45462 - DNA, 21 bp, Homo sapiens
  source 1..21: mol_type = genomic DNA
caacttaacttgaccgctctg

SEQ ID NO: 45463 - DNA, 22 bp, Homo sapiens
  source 1..22: mol_type = genomic DNA
caacttaacttgaccgctctga

SEQ ID NO: 45464 - DNA, 23 bp, Homo sapiens
  source 1..23: mol_type = genomic DNA
caacttaacttgaccgctctgac

SEQ ID NO: 45465 - DNA, 24 bp, Homo sapiens
  source 1..24: mol_type = genomic DNA
caacttaacttgaccgctctgacc

SEQ ID NO: 45466 - DNA, 25 bp, Homo sapiens
  source 1..25: mol_type = genomic DNA
caacttaacttgaccgctctgacca

SEQ ID NO: 45467 - DNA, 17 bp, Homo sapiens
  source 1..17: mol_type = genomic DNA
caacttacacttaggag

SEQ ID NO: 45468 - DNA, 26 bp, Homo sapiens
  source 1..26: mol_type = genomic DNA
caacttacacttaggagatttcaact

SEQ ID NO: 45469 - DNA, 36 bp, Homo sapiens; identical to SEQ ID NO: 7954
  source 1..36: mol_type = genomic DNA

SEQ ID NO: 45470 - DNA, 37 bp, Homo sapiens; identical to SEQ ID NO: 7955
  source 1..37: mol_type = genomic DNA

SEQ ID NO: 45471 - DNA, 39 bp, Homo sapiens; identical to SEQ ID NO: 7957
  source 1..39: mol_type = genomic DNA

SEQ ID NO: 45472 - DNA, 40 bp, Homo sapiens; identical to SEQ ID NO: 7958
  source 1..40: mol_type = genomic DNA

SEQ ID NO: 45473 - DNA, 41 bp, Homo sapiens; identical to SEQ ID NO: 7959
  source 1..41: mol_type = genomic DNA

SEQ ID NO: 45474 - DNA, 42 bp, Homo sapiens; identical to SEQ ID NO: 7960
  source 1..42: mol_type = genomic DNA

SEQ ID NO: 45475 - DNA, 43 bp, Homo sapiens; identical to SEQ ID NO: 7961
  source 1..43: mol_type = genomic DNA

SEQ ID NO: 45476 - DNA, 44 bp, Homo sapiens; identical to SEQ ID NO: 7962
  source 1..44: mol_type = genomic DNA

SEQ ID NO: 45477 - DNA, 45 bp, Homo sapiens; identical to SEQ ID NO: 7963
  source 1..45: mol_type = genomic DNA

SEQ ID NO: 45478 - DNA, 46 bp, Homo sapiens; identical to SEQ ID NO: 7964
  source 1..46: mol_type = genomic DNA

SEQ ID NO: 45479 - DNA, 24 bp, Homo sapiens
  source 1..24: mol_type = genomic DNA
caagaactgctaactcatgccccc

SEQ ID NO: 45480 - DNA, 30 bp, Homo sapiens; identical to SEQ ID NO: 7979
  source 1..30: mol_type = genomic DNA

SEQ ID NO: 45481 - DNA, 37 bp, Homo sapiens; identical to SEQ ID NO: 7986
  source 1..37: mol_type = genomic DNA

SEQ ID NO: 45482 - DNA, 39 bp, Homo sapiens; identical to SEQ ID NO: 7988
  source 1..39: mol_type = genomic DNA

SEQ ID NO: 45483 - DNA, 40 bp, Homo sapiens; identical to SEQ ID NO: 7989
  source 1..40: mol_type = genomic DNA

SEQ ID NO: 45484 - DNA, 42 bp, Homo sapiens; identical to SEQ ID NO: 7991
  source 1..42: mol_type = genomic DNA

SEQ ID NO: 45485 - DNA, 43 bp, Homo sapiens; identical to SEQ ID NO: 7992
  source 1..43: mol_type = genomic DNA

SEQ ID NO: 45486 - DNA, 45 bp, Homo sapiens; identical to SEQ ID NO: 7994
  source 1..45: mol_type = genomic DNA

SEQ ID NO: 45487 - DNA, 46 bp, Homo sapiens; identical to SEQ ID NO: 7995
  source 1..46: mol_type = genomic DNA

SEQ ID NO: 45488 - DNA, 34 bp, Homo sapiens; identical to SEQ ID NO: 8006
  source 1..34: mol_type = genomic DNA

SEQ ID NO: 45489 - DNA, 35 bp, Homo sapiens; identical to SEQ ID NO: 8007
  source 1..35: mol_type = genomic DNA

SEQ ID NO: 45490 - DNA, 36 bp, Homo sapiens; identical to SEQ ID NO: 8008
  source 1..36: mol_type = genomic DNA

SEQ ID NO: 45491 - DNA, 35 bp, Homo sapiens; identical to SEQ ID NO: 33801
  source 1..35: mol_type = genomic DNA

SEQ ID NO: 45492 - DNA, 35 bp, Homo sapiens; identical to SEQ ID NO: 33804
  source 1..35: mol_type = genomic DNA

SEQ ID NO: 45493 - DNA, 36 bp, Homo sapiens; identical to SEQ ID NO: 33805
  source 1..36: mol_type = genomic DNA

SEQ ID NO: 45494 - DNA, 18 bp, Homo sapiens
  source 1..18: mol_type = genomic DNA
caagcagttgacccgggt

SEQ ID NO: 45495 - DNA, 30 bp, Homo sapiens; identical to SEQ ID NO: 8036
  source 1..30: mol_type = genomic DNA

SEQ ID NO: 45496 - DNA, 20 bp, Homo sapiens
  source 1..20: mol_type = genomic DNA
caagtcacgtcggggtcacc

SEQ ID NO: 45497 - DNA, 17 bp, Homo sapiens
  source 1..17: mol_type = genomic DNA
caagtccctgttcgggc

SEQ ID NO: 45498 - DNA, 19 bp, Homo sapiens
  source 1..19: mol_type = genomic DNA
caagtccctgttcgggcgc

SEQ ID NO: 45499 - DNA, 20 bp, Homo sapiens
  source 1..20: mol_type = genomic DNA
caagtccctgttcgggcgcc

SEQ ID NO: 45500 - DNA, 32 bp, Homo sapiens; identical to SEQ ID NO: 8072
  source 1..32: mol_type = genomic DNA

SEQ ID NO: 45501 - DNA, 18 bp, Homo sapiens
  source 1..18: mol_type = genomic DNA
caatacttaatttctgcc

SEQ ID NO: 45502 - DNA, 19 bp, Homo sapiens
  source 1..19: mol_type = genomic DNA
caatacttaatttctgcca

SEQ ID NO: 45503 - DNA, 20 bp, Homo sapiens
  source 1..20: mol_type = genomic DNA
caatccccggcacctccacc

SEQ ID NO: 45504 - DNA, 21 bp, Homo sapiens
  source 1..21: mol_type = genomic DNA
caatccccggcacctccacca

SEQ ID NO: 45505 - DNA, 20 bp, Homo sapiens
  source 1..20: mol_type = genomic DNA
caatccccggcatctccacc

SEQ ID NO: 45506 - DNA, 19 bp, Homo sapiens
  source 1..19: mol_type = genomic DNA
caatcccgggtttcggcac

SEQ ID NO: 45507 - DNA, 35 bp, Homo sapiens; identical to SEQ ID NO: 8105
  source 1..35: mol_type = genomic DNA

SEQ ID NO: 45508 - DNA, 36 bp, Homo sapiens; identical to SEQ ID NO: 8106
  source 1..36: mol_type = genomic DNA

SEQ ID NO: 45509 - DNA, 37 bp, Homo sapiens; identical to SEQ ID NO: 8107
  source 1..37: mol_type = genomic DNA

SEQ ID NO: 45510 - DNA, 19 bp, Homo sapiens
  source 1..19: mol_type = genomic DNA
caatggataacgcgtctga

SEQ ID NO: 45511 - DNA, 21 bp, Homo sapiens
  source 1..21: mol_type = genomic DNA
caatggataacgcgtctgact

SEQ ID NO: 45512 - DNA, 17 bp, Homo sapiens
  source 1..17: mol_type = genomic DNA
caatggatagcgcattg

SEQ ID NO: 45513 - DNA, 18 bp, Homo sapiens
  source 1..18: mol_type = genomic DNA
caatggatagcgcattgg

SEQ ID NO: 45514 - DNA, 19 bp, Homo sapiens
  source 1..19: mol_type = genomic DNA
caatggatagcgcattgga

SEQ ID NO: 45515 - DNA, 20 bp, Homo sapiens
  source 1..20: mol_type = genomic DNA
caatggatagcgcattggac

SEQ ID NO: 45516 - DNA, 21 bp, Homo sapiens
  source 1..21: mol_type = genomic DNA
caatggatagcgcattggact

SEQ ID NO: 45517 - DNA, 23 bp, Homo sapiens
  source 1..23: mol_type = genomic DNA
caatggatagcgcattggacttc

SEQ ID NO: 45518 - DNA, 42 bp, Homo sapiens; identical to SEQ ID NO: 33839
  source 1..42: mol_type = genomic DNA

SEQ ID NO: 45519 - DNA, 18 bp, Homo sapiens
  source 1..18: mol_type = genomic DNA
caattaactagttttgac

SEQ ID NO: 45520 - DNA, 19 bp, Homo sapiens
  source 1..19: mol_type = genomic DNA
caattccccgacggggagc

SEQ ID NO: 45521 - DNA, 20 bp, Homo sapiens
  source 1..20: mol_type = genomic DNA
caattccccgacggggagcc

SEQ ID NO: 45522 - DNA, 36 bp, Homo sapiens; identical to SEQ ID NO: 8161
  source 1..36: mol_type = genomic DNA

SEQ ID NO: 45523 - DNA, 17 bp, Homo sapiens
  source 1..17: mol_type = genomic DNA
cacaagaactgctaact

SEQ ID NO: 45524 - DNA, 22 bp, Homo sapiens
  source 1..22: mol_type = genomic DNA
cacaagaactgctaactcatgc

SEQ ID NO: 45525 - DNA, 26 bp, Homo sapiens
  source 1..26: mol_type = genomic DNA
cacaagaactgctaactcatgccccc

SEQ ID NO: 45526 - DNA, 29 bp, Homo sapiens
  source 1..29: mol_type = genomic DNA
cacaagaactgctaactcatgcccccatg

SEQ ID NO: 45527 - DNA, 38 bp, Homo sapiens; identical to SEQ ID NO: 8191
  source 1..38: mol_type = genomic DNA

SEQ ID NO: 45528 - DNA, 44 bp, Homo sapiens; identical to SEQ ID NO: 8197
  source 1..44: mol_type = genomic DNA

SEQ ID NO: 45529 - DNA, 45 bp, Homo sapiens; identical to SEQ ID NO: 8198
  source 1..45: mol_type = genomic DNA

SEQ ID NO: 45530 - DNA, 21 bp, Homo sapiens
  source 1..21: mol_type = genomic DNA
cacacgcgaaaggtccccggt

SEQ ID NO: 45531 - DNA, 32 bp, Homo sapiens; identical to SEQ ID NO: 8204
  source 1..32: mol_type = genomic DNA

SEQ ID NO: 45532 - DNA, 33 bp, Homo sapiens; identical to SEQ ID NO: 8205
  source 1..33: mol_type = genomic DNA

SEQ ID NO: 45533 - DNA, 28 bp, Homo sapiens
  source 1..28: mol_type = genomic DNA
cacaggttcgaatcctgttcgtgacgcc

SEQ ID NO: 45534 - DNA, 20 bp, Homo sapiens
  source 1..20: mol_type = genomic DNA
cacatcaccccataaacacc

SEQ ID NO: 45535 - DNA, 21 bp, Homo sapiens
  source 1..21: mol_type = genomic DNA
cacatcaccccataaacacca

SEQ ID NO: 45536 - DNA, 23 bp, Homo sapiens
  source 1..23: mol_type = genomic DNA
cacatggtctagcggttaggatt

SEQ ID NO: 45537 - DNA, 25 bp, Homo sapiens
  source 1..25: mol_type = genomic DNA
cacatggtctagcggttaggattcc

SEQ ID NO: 45538 - DNA, 26 bp, Homo sapiens
  source 1..26: mol_type = genomic DNA
cacatggtctagcggttaggattcct

SEQ ID NO: 45539 - DNA, 27 bp, Homo sapiens
  source 1..27: mol_type = genomic DNA
cacatggtctagcggttaggattcctg

SEQ ID NO: 45540 - DNA, 28 bp, Homo sapiens
  source 1..28: mol_type = genomic DNA
cacatggtctagcggttaggattcctgg

SEQ ID NO: 45541 - DNA, 29 bp, Homo sapiens
  source 1..29: mol_type = genomic DNA
cacatggtctagcggttaggattcctggt

SEQ ID NO: 45542 - DNA, 30 bp, Homo sapiens; identical to SEQ ID NO: 8223
  source 1..30: mol_type = genomic DNA

SEQ ID NO: 45543 - DNA, 31 bp, Homo sapiens; identical to SEQ ID NO: 8224
  source 1..31: mol_type = genomic DNA

SEQ ID NO: 45544 - DNA, 32 bp, Homo sapiens; identical to SEQ ID NO: 8225
  source 1..32: mol_type = genomic DNA

SEQ ID NO: 45545 - DNA, 33 bp, Homo sapiens; identical to SEQ ID NO: 8226
  source 1..33: mol_type = genomic DNA

SEQ ID NO: 45546 - DNA, 34 bp, Homo sapiens; identical to SEQ ID NO: 8227
  source 1..34: mol_type = genomic DNA

SEQ ID NO: 45547 - DNA, 44 bp, Homo sapiens; identical to SEQ ID NO: 8255
  source 1..44: mol_type = genomic DNA

SEQ ID NO: 45548 - DNA, 47 bp, Homo sapiens; identical to SEQ ID NO: 8258
  source 1..47: mol_type = genomic DNA

SEQ ID NO: 45549 - DNA, 19 bp, Homo sapiens
  source 1..19: mol_type = genomic DNA
cacccaggcggcccgggtt

SEQ ID NO: 45550 - DNA, 33 bp, Homo sapiens; identical to SEQ ID NO: 8269
  source 1..33: mol_type = genomic DNA

SEQ ID NO: 45551 - DNA, 34 bp, Homo sapiens; identical to SEQ ID NO: 8270
  source 1..34: mol_type = genomic DNA

SEQ ID NO: 45552 - DNA, 35 bp, Homo sapiens; identical to SEQ ID NO: 8271
  source 1..35: mol_type = genomic DNA

SEQ ID NO: 45553 - DNA, 37 bp, Homo sapiens; identical to SEQ ID NO: 8273
  source 1..37: mol_type = genomic DNA

SEQ ID NO: 45554 - DNA, 38 bp, Homo sapiens; identical to SEQ ID NO: 8274
  source 1..38: mol_type = genomic DNA

SEQ ID NO: 45555 - DNA, 39 bp, Homo sapiens; identical to SEQ ID NO: 8275
  source 1..39: mol_type = genomic DNA

SEQ ID NO: 45556 - DNA, 40 bp, Homo sapiens; identical to SEQ ID NO: 8276
  source 1..40: mol_type = genomic DNA

SEQ ID NO: 45557 - DNA, 37 bp, Homo sapiens; identical to SEQ ID NO: 8283
  source 1..37: mol_type = genomic DNA

SEQ ID NO: 45558 - DNA, 38 bp, Homo sapiens; identical to SEQ ID NO: 8284
  source 1..38: mol_type = genomic DNA

SEQ ID NO: 45559 - DNA, 39 bp, Homo sapiens; identical to SEQ ID NO: 8285
  source 1..39: mol_type = genomic DNA

SEQ ID NO: 45560 - DNA, 19 bp, Homo sapiens
  source 1..19: mol_type = genomic DNA
caccgccgcggcccgggtt

SEQ ID NO: 45561 - DNA, 24 bp, Homo sapiens
  source 1..24: mol_type = genomic DNA
caccgccgcggcccgggttcgatt

SEQ ID NO: 45562 - DNA, 34 bp, Homo sapiens; identical to SEQ ID NO: 8309
  source 1..34: mol_type = genomic DNA

SEQ ID NO: 45563 - DNA, 35 bp, Homo sapiens; identical to SEQ ID NO: 8310
  source 1..35: mol_type = genomic DNA

SEQ ID NO: 45564 - DNA, 37 bp, Homo sapiens; identical to SEQ ID NO: 8312
  source 1..37: mol_type = genomic DNA

SEQ ID NO: 45565 - DNA, 38 bp, Homo sapiens; identical to SEQ ID NO: 8313
  source 1..38: mol_type = genomic DNA

SEQ ID NO: 45566 - DNA, 39 bp, Homo sapiens; identical to SEQ ID NO: 8314
  source 1..39: mol_type = genomic DNA

SEQ ID NO: 45567 - DNA, 40 bp, Homo sapiens; identical to SEQ ID NO: 8315
  source 1..40: mol_type = genomic DNA

SEQ ID NO: 45568 - DNA, 17 bp, Homo sapiens
  source 1..17: mol_type = genomic DNA
cacctctttacagtgac

SEQ ID NO: 45569 - DNA, 18 bp, Homo sapiens
  source 1..18: mol_type = genomic DNA
cacctctttacagtgacc

SEQ ID NO: 45570 - DNA, 19 bp, Homo sapiens
  source 1..19: mol_type = genomic DNA
cacctctttacagtgacca

SEQ ID NO: 45571 - DNA, 33 bp, Homo sapiens; identical to SEQ ID NO: 33906
  source 1..33: mol_type = genomic DNA

SEQ ID NO: 45572 - DNA, 34 bp, Homo sapiens; identical to SEQ ID NO: 33907
  source 1..34: mol_type = genomic DNA

SEQ ID NO: 45573 - DNA, 35 bp, Homo sapiens; identical to SEQ ID NO: 33908
  source 1..35: mol_type = genomic DNA

SEQ ID NO: 45574 - DNA, 36 bp, Homo sapiens; identical to SEQ ID NO: 8323
  source 1..36: mol_type = genomic DNA

SEQ ID NO: 45575 - DNA, 37 bp, Homo sapiens
  source 1..37: mol_type = genomic DNA
cacgaggccccgggttcaatccccggcacctccacca

SEQ ID NO: 45576 - DNA, 16 bp, Homo sapiens
  source 1..16: mol_type = genomic DNA
cacgcagaaggtcctg

SEQ ID NO: 45577 - DNA, 36 bp, Homo sapiens; identical to SEQ ID NO: 8327
  source 1..36: mol_type = genomic DNA

SEQ ID NO: 45578 - DNA, 37 bp, Homo sapiens
  source 1..37: mol_type = genomic DNA
cacgcagaaggtcctgggttcgagccccagtggaacc

SEQ ID NO: 45579 - DNA, 39 bp, Homo sapiens; identical to SEQ ID NO: 8328
  source 1..39: mol_type = genomic DNA

SEQ ID NO: 45580 - DNA, 40 bp, Homo sapiens; identical to SEQ ID NO: 8329
  source 1..40: mol_type = genomic DNA

SEQ ID NO: 45581 - DNA, 41 bp, Homo sapiens; identical to SEQ ID NO: 8330
  source 1..41: mol_type = genomic DNA

SEQ ID NO: 45582 - DNA, 19 bp, Homo sapiens
  source 1..19: mol_type = genomic DNA
cacgcgaaaggtccccggt

SEQ ID NO: 45583 - DNA, 37 bp, Homo sapiens
  source 1..37: mol_type = genomic DNA
cacgcgaaaggtccccggttcgaaaccgggcggaaac

SEQ ID NO: 45584 - DNA, 40 bp, Homo sapiens; identical to SEQ ID NO: 8340
  source 1..40: mol_type = genomic DNA

SEQ ID NO: 45585 - DNA, 35 bp, Homo sapiens; identical to SEQ ID NO: 8354
  source 1..35: mol_type = genomic DNA

SEQ ID NO: 45586 - DNA, 38 bp, Homo sapiens; identical to SEQ ID NO: 8357
  source 1..38: mol_type = genomic DNA

SEQ ID NO: 45587 - DNA, 39 bp, Homo sapiens; identical to SEQ ID NO: 8358
  source 1..39: mol_type = genomic DNA

SEQ ID NO: 45588 - DNA, 40 bp, Homo sapiens; identical to SEQ ID NO: 8359
  source 1..40: mol_type = genomic DNA

SEQ ID NO: 45589 - DNA, 32 bp, Homo sapiens; identical to SEQ ID NO: 8367
  source 1..32: mol_type = genomic DNA

SEQ ID NO: 45590 - DNA, 34 bp, Homo sapiens; identical to SEQ ID NO: 8369
  source 1..34: mol_type = genomic DNA

SEQ ID NO: 45591 - DNA, 35 bp, Homo sapiens; identical to SEQ ID NO: 8370
  source 1..35: mol_type = genomic DNA

SEQ ID NO: 45592 - DNA, 36 bp, Homo sapiens; identical to SEQ ID NO: 8371
  source 1..36: mol_type = genomic DNA

SEQ ID NO: 45593 - DNA, 37 bp, Homo sapiens; identical to SEQ ID NO: 8372
  source 1..37: mol_type = genomic DNA

SEQ ID NO: 45594 - DNA, 38 bp, Homo sapiens; identical to SEQ ID NO: 8373
  source 1..38: mol_type = genomic DNA

SEQ ID NO: 45595 - DNA, 39 bp, Homo sapiens; identical to SEQ ID NO: 8374
  source 1..39: mol_type = genomic DNA

SEQ ID NO: 45596 - DNA, 40 bp, Homo sapiens; identical to SEQ ID NO: 8375
  source 1..40: mol_type = genomic DNA

SEQ ID NO: 45597 - DNA, 18 bp, Homo sapiens
  source 1..18: mol_type = genomic DNA
cacgcgggaggcccgggt

SEQ ID NO: 45598 - DNA, 35 bp, Homo sapiens; identical to SEQ ID NO: 8385
  source 1..35: mol_type = genomic DNA

SEQ ID NO: 45599 - DNA, 36 bp, Homo sapiens; identical to SEQ ID NO: 8386
  source 1..36: mol_type = genomic DNA

SEQ ID NO: 45600 - DNA, 39 bp, Homo sapiens; identical to SEQ ID NO: 8389
  source 1..39: mol_type = genomic DNA

SEQ ID NO: 45601 - DNA, 40 bp, Homo sapiens; identical to SEQ ID NO: 8390
  source 1..40: mol_type = genomic DNA

SEQ ID NO: 45602 - DNA, 40 bp, Homo sapiens
  source 1..40: mol_type = genomic DNA
cacgcgggaggcccgggttcgattcccggcccatgcacca

SEQ ID NO: 45603 - DNA, 25 bp, Homo sapiens
  source 1..25: mol_type = genomic DNA
cacgcgtgggttcgaatcccatcct

SEQ ID NO: 45604 - DNA, 27 bp, Homo sapiens
  source 1..27: mol_type = genomic DNA
cacgcgtgggttcgaatcccatcctcg

SEQ ID NO: 45605 - DNA, 31 bp, Homo sapiens; identical to SEQ ID NO: 8397
  source 1..31: mol_type = genomic DNA

SEQ ID NO: 45606 - DNA, 32 bp, Homo sapiens; identical to SEQ ID NO: 8398
  source 1..32: mol_type = genomic DNA

SEQ ID NO: 45607 - DNA, 33 bp, Homo sapiens; identical to SEQ ID NO: 8399
  source 1..33: mol_type = genomic DNA

SEQ ID NO: 45608 - DNA, 33 bp, Homo sapiens
  source 1..33: mol_type = genomic DNA
cacggagaattttggattctcagggatgggttc

SEQ ID NO: 45609 - DNA, 40 bp, Homo sapiens; identical to SEQ ID NO: 33950
  source 1..40: mol_type = genomic DNA

SEQ ID NO: 45610 - DNA, 16 bp, Homo sapiens
  source 1..16: mol_type = genomic DNA
cacgtcggggtcacca

SEQ ID NO: 45611 - DNA, 30 bp, Homo sapiens; identical to SEQ ID NO: 33955
  source 1..30: mol_type = genomic DNA

SEQ ID NO: 45612 - DNA, 16 bp, Homo sapiens
  source 1..16: mol_type = genomic DNA
cactctggactctgaa

SEQ ID NO: 45613 - DNA, 17 bp, Homo sapiens
  source 1..17: mol_type = genomic DNA
cactctggactctgaat

SEQ ID NO: 45614 - DNA, 18 bp, Homo sapiens
  source 1..18: mol_type = genomic DNA
cactctggactctgaatc

SEQ ID NO: 45615 - DNA, 19 bp, Homo sapiens
  source 1..19: mol_type = genomic DNA
cactctggactctgaatcc

SEQ ID NO: 45616 - DNA, 20 bp, Homo sapiens
  source 1..20: mol_type = genomic DNA
cactctggactctgaatcca

SEQ ID NO: 45617 - DNA, 21 bp, Homo sapiens
  source 1..21: mol_type = genomic DNA
cactctggactctgaatccag

SEQ ID NO: 45618 - DNA, 22 bp, Homo sapiens
  source 1..22: mol_type = genomic DNA
cactctggactctgaatccagc

SEQ ID NO: 45619 - DNA, 23 bp, Homo sapiens
  source 1..23: mol_type = genomic DNA
cactctggactctgaatccagcg

SEQ ID NO: 45620 - DNA, 27 bp, Homo sapiens
  source 1..27: mol_type = genomic DNA
cactctggactctgaatccagcgatcc

SEQ ID NO: 45621 - DNA, 29 bp, Homo sapiens
  source 1..29: mol_type = genomic DNA
cactctggactctgaatccagcgatccga

SEQ ID NO: 45622 - DNA, 30 bp, Homo sapiens; identical to SEQ ID NO: 8428
  source 1..30: mol_type = genomic DNA

SEQ ID NO: 45623 - DNA, 31 bp, Homo sapiens; identical to SEQ ID NO: 8429
  source 1..31: mol_type = genomic DNA

SEQ ID NO: 45624 - DNA, 32 bp, Homo sapiens; identical to SEQ ID NO: 8430
  source 1..32: mol_type = genomic DNA

SEQ ID NO: 45625 - DNA, 33 bp, Homo sapiens; identical to SEQ ID NO: 8431
  source 1..33: mol_type = genomic DNA

SEQ ID NO: 45626 - DNA, 34 bp, Homo sapiens; identical to SEQ ID NO: 8432
  source 1..34: mol_type = genomic DNA

SEQ ID NO: 45627 - DNA, 18 bp, Homo sapiens
  source 1..18: mol_type = genomic DNA
cactctggactttgaatc

SEQ ID NO: 45628 - DNA, 19 bp, Homo sapiens
  source 1..19: mol_type = genomic DNA
cactctggactttgaatcc

SEQ ID NO: 45629 - DNA, 23 bp, Homo sapiens
  source 1..23: mol_type = genomic DNA
cactgaaaatgtttagacgggct

SEQ ID NO: 45630 - DNA, 16 bp, Homo sapiens
  source 1..16: mol_type = genomic DNA
cactgtaaagctaact

SEQ ID NO: 45631 - DNA, 17 bp, Homo sapiens
  source 1..17: mol_type = genomic DNA
cactgtaaagctaactt

SEQ ID NO: 45632 - DNA, 23 bp, Homo sapiens
  source 1..23: mol_type = genomic DNA
cactgtaaagctaacttagcatt

SEQ ID NO: 45633 - DNA, 24 bp, Homo sapiens
  source 1..24: mol_type = genomic DNA
cactgtaaagctaacttagcatta

SEQ ID NO: 45634 - DNA, 27 bp, Homo sapiens
  source 1..27: mol_type = genomic DNA
cactgtaaagctaacttagcattaacc

SEQ ID NO: 45635 - DNA, 28 bp, Homo sapiens
  source 1..28: mol_type = genomic DNA
cactgtaaagctaacttagcattaacct

SEQ ID NO: 45636 - DNA, 30 bp, Homo sapiens; identical to SEQ ID NO: 8478
  source 1..30: mol_type = genomic DNA

SEQ ID NO: 45637 - DNA, 31 bp, Homo sapiens; identical to SEQ ID NO: 8479
  source 1..31: mol_type = genomic DNA

SEQ ID NO: 45638 - DNA, 33 bp, Homo sapiens; identical to SEQ ID NO: 8481
  source 1..33: mol_type = genomic DNA

SEQ ID NO: 45639 - DNA, 35 bp, Homo sapiens; identical to SEQ ID NO: 8483
  source 1..35: mol_type = genomic DNA

SEQ ID NO: 45640 - DNA, 38 bp, Homo sapiens; identical to SEQ ID NO: 8486
  source 1..38: mol_type = genomic DNA

SEQ ID NO: 45641 - DNA, 45 bp, Homo sapiens; identical to SEQ ID NO: 8493
  source 1..45: mol_type = genomic DNA

SEQ ID NO: 45642 - DNA, 46 bp, Homo sapiens; identical to SEQ ID NO: 8494
  source 1..46: mol_type = genomic DNA

SEQ ID NO: 45643 - DNA, 47 bp, Homo sapiens; identical to SEQ ID NO: 8495
  source 1..47: mol_type = genomic DNA

SEQ ID NO: 45644 - DNA, 32 bp, Homo sapiens; identical to SEQ ID NO: 8513
  source 1..32: mol_type = genomic DNA

SEQ ID NO: 45645 - DNA, 33 bp, Homo sapiens; identical to SEQ ID NO: 8514
  source 1..33: mol_type = genomic DNA

SEQ ID NO: 45646 - DNA, 35 bp, Homo sapiens; identical to SEQ ID NO: 8516
  source 1..35: mol_type = genomic DNA

SEQ ID NO: 45647 - DNA, 36 bp, Homo sapiens; identical to SEQ ID NO: 8517
  source 1..36: mol_type = genomic DNA

SEQ ID NO: 45648 - DNA, 37 bp, Homo sapiens; identical to SEQ ID NO: 8518
  source 1..37: mol_type = genomic DNA

SEQ ID NO: 45649 - DNA, 38 bp, Homo sapiens; identical to SEQ ID NO: 8519
  source 1..38: mol_type = genomic DNA

SEQ ID NO: 45650 - DNA, 39 bp, Homo sapiens; identical to SEQ ID NO: 8520
  source 1..39: mol_type = genomic DNA

SEQ ID NO: 45651 - DNA, 27 bp, Homo sapiens
  source 1..27: mol_type = genomic DNA
cagaagattccaggttcgactcctggc

SEQ ID NO: 45652 - DNA, 28 bp, Homo sapiens
  source 1..28: mol_type = genomic DNA
cagaagattccaggttcgactcctggct

SEQ ID NO: 45653 - DNA, 35 bp, Homo sapiens; identical to SEQ ID NO: 8531
  source 1..35: mol_type = genomic DNA

SEQ ID NO: 45654 - DNA, 36 bp, Homo sapiens; identical to SEQ ID NO: 8532
  source 1..36: mol_type = genomic DNA

SEQ ID NO: 45655 - DNA, 16 bp, Homo sapiens
  source 1..16: mol_type = genomic DNA
cagaagattctaggtt

SEQ ID NO: 45656 - DNA, 17 bp, Homo sapiens
  source 1..17: mol_type = genomic DNA
cagaagattctaggttc

SEQ ID NO: 45657 - DNA, 18 bp, Homo sapiens
  source 1..18: mol_type = genomic DNA
cagaagattctaggttcg

SEQ ID NO: 45658 - DNA, 27 bp, Homo sapiens
  source 1..27: mol_type = genomic DNA
cagaagattctaggttcgactcctggc

SEQ ID NO: 45659 - DNA, 36 bp, Homo sapiens; identical to SEQ ID NO: 8546
  source 1..36: mol_type = genomic DNA

SEQ ID NO: 45660 - DNA, 16 bp, Homo sapiens
  source 1..16: mol_type = genomic DNA
cagaagattgagggtt

SEQ ID NO: 45661 - DNA, 17 bp, Homo sapiens
  source 1..17: mol_type = genomic DNA
cagaagattgagggttc

SEQ ID NO: 45662 - DNA, 18 bp, Homo sapiens
  source 1..18: mol_type = genomic DNA
cagaagattgagggttcg

SEQ ID NO: 45663 - DNA, 34 bp, Homo sapiens; identical to SEQ ID NO: 8551
  source 1..34: mol_type = genomic DNA

SEQ ID NO: 45664 - DNA, 36 bp, Homo sapiens; identical to SEQ ID NO: 8552
  source 1..36: mol_type = genomic DNA

SEQ ID NO: 45665 - DNA, 36 bp, Homo sapiens; identical to SEQ ID NO: 8557
  source 1..36: mol_type = genomic DNA

SEQ ID NO: 45666 - DNA, 37 bp, Homo sapiens; identical to SEQ ID NO: 8558
  source 1..37: mol_type = genomic DNA

SEQ ID NO: 45667 - DNA, 24 bp, Homo sapiens
  source 1..24: mol_type = genomic DNA
cagaagattgagggttcgagtccc

SEQ ID NO: 45668 - DNA, 35 bp, Homo sapiens; identical to SEQ ID NO: 8565
  source 1..35: mol_type = genomic DNA

SEQ ID NO: 45669 - DNA, 36 bp, Homo sapiens; identical to SEQ ID NO: 8566
  source 1..36: mol_type = genomic DNA

SEQ ID NO: 45670 - DNA, 37 bp, Homo sapiens; identical to SEQ ID NO: 8567
  source 1..37: mol_type = genomic DNA

SEQ ID NO: 45671 - DNA, 16 bp, Homo sapiens
  source 1..16: mol_type = genomic DNA
cagaagattgcaggtt

SEQ ID NO: 45672 - DNA, 17 bp, Homo sapiens
  source 1..17: mol_type = genomic DNA
cagaagattgcaggttc

SEQ ID NO: 45673 - DNA, 33 bp, Homo sapiens; identical to SEQ ID NO: 8573
  source 1..33: mol_type = genomic DNA

SEQ ID NO: 45674 - DNA, 35 bp, Homo sapiens; identical to SEQ ID NO: 8575
  source 1..35: mol_type = genomic DNA

SEQ ID NO: 45675 - DNA, 36 bp, Homo sapiens; identical to SEQ ID NO: 8576
  source 1..36: mol_type = genomic DNA

SEQ ID NO: 45676 - DNA, 17 bp, Homo sapiens
  source 1..17: mol_type = genomic DNA
cagaaggctgcgtgttc

SEQ ID NO: 45677 - DNA, 36 bp, Homo sapiens; identical to SEQ ID NO: 8583
  source 1..36: mol_type = genomic DNA

SEQ ID NO: 45678 - DNA, 21 bp, Homo sapiens
  source 1..21: mol_type = genomic DNA
cagaaggtcctgggttcgagc

SEQ ID NO: 45679 - DNA, 26 bp, Homo sapiens
  source 1..26: mol_type = genomic DNA
cagaaggtcctgggttcgagccccag

SEQ ID NO: 45680 - DNA, 32 bp, Homo sapiens; identical to SEQ ID NO: 8587
  source 1..32: mol_type = genomic DNA

SEQ ID NO: 45681 - DNA, 33 bp, Homo sapiens; identical to SEQ ID NO: 8588
  source 1..33: mol_type = genomic DNA

SEQ ID NO: 45682 - DNA, 34 bp, Homo sapiens; identical to SEQ ID NO: 8589
  source 1..34: mol_type = genomic DNA

SEQ ID NO: 45683 - DNA, 35 bp, Homo sapiens; identical to SEQ ID NO: 8590
  source 1..35: mol_type = genomic DNA

SEQ ID NO: 45684 - DNA, 36 bp, Homo sapiens; identical to SEQ ID NO: 8591
  source 1..36: mol_type = genomic DNA

SEQ ID NO: 45685 - DNA, 37 bp, Homo sapiens; identical to SEQ ID NO: 8592
  source 1..37: mol_type = genomic DNA

SEQ ID NO: 45686 - DNA, 35 bp, Homo sapiens; identical to SEQ ID NO: 8595
  source 1..35: mol_type = genomic DNA

SEQ ID NO: 45687 - DNA, 36 bp, Homo sapiens; identical to SEQ ID NO: 8596
  source 1..36: mol_type = genomic DNA

SEQ ID NO: 45688 - DNA, 36 bp, Homo sapiens; identical to SEQ ID NO: 8601
  source 1..36: mol_type = genomic DNA

SEQ ID NO: 45689 - DNA, 16 bp, Homo sapiens
  source 1..16: mol_type = genomic DNA
cagaccaagagccttc

SEQ ID NO: 45690 - DNA, 17 bp, Homo sapiens
  source 1..17: mol_type = genomic DNA
cagaccaagagccttca

SEQ ID NO: 45691 - DNA, 20 bp, Homo sapiens
  source 1..20: mol_type = genomic DNA
cagaccaagagccttcaaag

SEQ ID NO: 45692 - DNA, 25 bp, Homo sapiens
  source 1..25: mol_type = genomic DNA
cagaccaagagccttcaaagccctc

SEQ ID NO: 45693 - DNA, 27 bp, Homo sapiens
  source 1..27: mol_type = genomic DNA
cagaccaagagccttcaaagccctcag

SEQ ID NO: 45694 - DNA, 22 bp, Homo sapiens
  source 1..22: mol_type = genomic DNA
cagagaatagtttaaattagaa

SEQ ID NO: 45695 - DNA, 24 bp, Homo sapiens
  source 1..24: mol_type = genomic DNA
cagagaatagtttaaattagaatc

SEQ ID NO: 45696 - DNA, 28 bp, Homo sapiens
  source 1..28: mol_type = genomic DNA
cagagaatagtttaaattagaatcttag

SEQ ID NO: 45697 - DNA, 29 bp, Homo sapiens
  source 1..29: mol_type = genomic DNA
cagagaatagtttaaattagaatcttagc

SEQ ID NO: 45698 - DNA, 31 bp, Homo sapiens; identical to SEQ ID NO: 8638
  source 1..31: mol_type = genomic DNA

SEQ ID NO: 45699 - DNA, 32 bp, Homo sapiens; identical to SEQ ID NO: 8639
  source 1..32: mol_type = genomic DNA

SEQ ID NO: 45700 - DNA, 44 bp, Homo sapiens; identical to SEQ ID NO: 8650
  source 1..44: mol_type = genomic DNA

SEQ ID NO: 45701 - DNA, 28 bp, Homo sapiens
  source 1..28: mol_type = genomic DNA
cagaggcttacgaccccttatttacccc

SEQ ID NO: 45702 - DNA, 29 bp, Homo sapiens
  source 1..29: mol_type = genomic DNA
cagaggcttacgaccccttatttacccca

SEQ ID NO: 45703 - DNA, 16 bp, Homo sapiens
  source 1..16: mol_type = genomic DNA
cagaggtcgatggatc

SEQ ID NO: 45704 - DNA, 17 bp, Homo sapiens
  source 1..17: mol_type = genomic DNA
cagaggtcgatggatcg

SEQ ID NO: 45705 - DNA, 22 bp, Homo sapiens
  source 1..22: mol_type = genomic DNA
cagaggtcgatggatcgaaacc

SEQ ID NO: 45706 - DNA, 23 bp, Homo sapiens
  source 1..23: mol_type = genomic DNA
cagaggtcgatggatcgaaacca

SEQ ID NO: 45707 - DNA, 26 bp, Homo sapiens
  source 1..26: mol_type = genomic DNA
cagaggtcgatggatcgaaaccatcc

SEQ ID NO: 45708 - DNA, 19 bp, Homo sapiens
  source 1..19: mol_type = genomic DNA
cagagtggcgcagcggaag

SEQ ID NO: 45709 - DNA, 20 bp, Homo sapiens
  source 1..20: mol_type = genomic DNA
cagagtggcgcagcggaagc

SEQ ID NO: 45710 - DNA, 29 bp, Homo sapiens
  source 1..29: mol_type = genomic DNA
cagagtggcgcagcggaagcgtgctgggc

SEQ ID NO: 45711 - DNA, 31 bp, Homo sapiens; identical to SEQ ID NO: 8714
  source 1..31: mol_type = genomic DNA

SEQ ID NO: 45712 - DNA, 37 bp, Homo sapiens; identical to SEQ ID NO: 34117
  source 1..37: mol_type = genomic DNA

SEQ ID NO: 45713 - DNA, 40 bp, Homo sapiens; identical to SEQ ID NO: 8719
  source 1..40: mol_type = genomic DNA

SEQ ID NO: 45714 - DNA, 47 bp, Homo sapiens; identical to SEQ ID NO: 8720
  source 1..47: mol_type = genomic DNA

SEQ ID NO: 45715 - DNA, 26 bp, Homo sapiens
  source 1..26: mol_type = genomic DNA
cagagtggggttttgcagtccttacc

SEQ ID NO: 45716 - DNA, 27 bp, Homo sapiens
  source 1..27: mol_type = genomic DNA
cagagtggggttttgcagtccttacca

SEQ ID NO: 45717 - DNA, 16 bp, Homo sapiens
  source 1..16: mol_type = genomic DNA
cagagtgtagcttaac

SEQ ID NO: 45718 - DNA, 26 bp, Homo sapiens
  source 1..26: mol_type = genomic DNA
cagagtgtagcttaacacaaagcacc

SEQ ID NO: 45719 - DNA, 27 bp, Homo sapiens
  source 1..27: mol_type = genomic DNA
cagagtgtagcttaacacaaagcaccc

SEQ ID NO: 45720 - DNA, 28 bp, Homo sapiens
  source 1..28: mol_type = genomic DNA
cagagtgtagcttaacacaaagcaccca

SEQ ID NO: 45721 - DNA, 29 bp, Homo sapiens
  source 1..29: mol_type = genomic DNA
cagagtgtagcttaacacaaagcacccaa

SEQ ID NO: 45722 - DNA, 31 bp, Homo sapiens; identical to SEQ ID NO: 8747
  source 1..31: mol_type = genomic DNA

SEQ ID NO: 45723 - DNA, 32 bp, Homo sapiens; identical to SEQ ID NO: 8748
  source 1..32: mol_type = genomic DNA

SEQ ID NO: 45724 - DNA, 35 bp, Homo sapiens; identical to SEQ ID NO: 8751
  source 1..35: mol_type = genomic DNA

SEQ ID NO: 45725 - DNA, 37 bp, Homo sapiens; identical to SEQ ID NO: 8753
  source 1..37: mol_type = genomic DNA

SEQ ID NO: 45726 - DNA, 38 bp, Homo sapiens; identical to SEQ ID NO: 8754
  source 1..38: mol_type = genomic DNA

SEQ ID NO: 45727 - DNA, 39 bp, Homo sapiens; identical to SEQ ID NO: 8755
  source 1..39: mol_type = genomic DNA

SEQ ID NO: 45728 - DNA, 40 bp, Homo sapiens; identical to SEQ ID NO: 8756
  source 1..40: mol_type = genomic DNA

SEQ ID NO: 45729 - DNA, 41 bp, Homo sapiens; identical to SEQ ID NO: 8757
  source 1..41: mol_type = genomic DNA

SEQ ID NO: 45730 - DNA, 42 bp, Homo sapiens; identical to SEQ ID NO: 8758
  source 1..42: mol_type = genomic DNA

SEQ ID NO: 45731 - DNA, 43 bp, Homo sapiens; identical to SEQ ID NO: 8759
  source 1..43: mol_type = genomic DNA

SEQ ID NO: 45732 - DNA, 44 bp, Homo sapiens; identical to SEQ ID NO: 8760
  source 1..44: mol_type = genomic DNA

SEQ ID NO: 45733 - DNA, 45 bp, Homo sapiens; identical to SEQ ID NO: 8761
  source 1..45: mol_type = genomic DNA

SEQ ID NO: 45734 - DNA, 46 bp, Homo sapiens; identical to SEQ ID NO: 8762
  source 1..46: mol_type = genomic DNA

SEQ ID NO: 45735 - DNA, 47 bp, Homo sapiens; identical to SEQ ID NO: 8763
  source 1..47: mol_type = genomic DNA

SEQ ID NO: 45736 - DNA, 41 bp, Homo sapiens; identical to SEQ ID NO: 8767
  source 1..41: mol_type = genomic DNA

SEQ ID NO: 45737 - DNA, 42 bp, Homo sapiens
  source 1..42: mol_type = genomic DNA
cagatcagaaggctgcgtgttcgaatcacgtcggggtcacca

SEQ ID NO: 45738 - DNA, 17 bp, Homo sapiens
  source 1..17: mol_type = genomic DNA
cagattgtgaatctgac

SEQ ID NO: 45739 - DNA, 26 bp, Homo sapiens
  source 1..26: mol_type = genomic DNA
cagattgtgaatctgacaacagaggc

SEQ ID NO: 45740 - DNA, 27 bp, Homo sapiens
  source 1..27: mol_type = genomic DNA
cagattgtgaatctgacaacagaggct

SEQ ID NO: 45741 - DNA, 28 bp, Homo sapiens
  source 1..28: mol_type = genomic DNA
cagattgtgaatctgacaacagaggctt

SEQ ID NO: 45742 - DNA, 33 bp, Homo sapiens; identical to SEQ ID NO: 8786
  source 1..33: mol_type = genomic DNA

SEQ ID NO: 45743 - DNA, 34 bp, Homo sapiens; identical to SEQ ID NO: 8787
  source 1..34: mol_type = genomic DNA

SEQ ID NO: 45744 - DNA, 35 bp, Homo sapiens; identical to SEQ ID NO: 8788
  source 1..35: mol_type = genomic DNA

SEQ ID NO: 45745 - DNA, 36 bp, Homo sapiens; identical to SEQ ID NO: 8789
  source 1..36: mol_type = genomic DNA

SEQ ID NO: 45746 - DNA, 37 bp, Homo sapiens; identical to SEQ ID NO: 8790
  source 1..37: mol_type = genomic DNA

SEQ ID NO: 45747 - DNA, 38 bp, Homo sapiens; identical to SEQ ID NO: 8791
  source 1..38: mol_type = genomic DNA

SEQ ID NO: 45748 - DNA, 41 bp, Homo sapiens; identical to SEQ ID NO: 8794
  source 1..41: mol_type = genomic DNA

SEQ ID NO: 45749 - DNA, 45 bp, Homo sapiens; identical to SEQ ID NO: 8798
  source 1..45: mol_type = genomic DNA

SEQ ID NO: 45750 - DNA, 46 bp, Homo sapiens; identical to SEQ ID NO: 8799
  source 1..46: mol_type = genomic DNA

SEQ ID NO: 45751 - DNA, 47 bp, Homo sapiens; identical to SEQ ID NO: 8800
  source 1..47: mol_type = genomic DNA

SEQ ID NO: 45752 - DNA, 31 bp, Homo sapiens; identical to SEQ ID NO: 8805
  source 1..31: mol_type = genomic DNA

SEQ ID NO: 45753 - DNA, 33 bp, Homo sapiens; identical to SEQ ID NO: 8807
  source 1..33: mol_type = genomic DNA

SEQ ID NO: 45754 - DNA, 34 bp, Homo sapiens; identical to SEQ ID NO: 8808
  source 1..34: mol_type = genomic DNA

SEQ ID NO: 45755 - DNA, 35 bp, Homo sapiens; identical to SEQ ID NO: 8809
  source 1..35: mol_type = genomic DNA

SEQ ID NO: 45756 - DNA, 32 bp, Homo sapiens; identical to SEQ ID NO: 8821
  source 1..32: mol_type = genomic DNA

SEQ ID NO: 45757 - DNA, 23 bp, Homo sapiens
  source 1..23: mol_type = genomic DNA
cagcctccggagctggggattgt

SEQ ID NO: 45758 - DNA, 16 bp, Homo sapiens
  source 1..16: mol_type = genomic DNA
cagcgatccgagttca

SEQ ID NO: 45759 - DNA, 33 bp, Homo sapiens; identical to SEQ ID NO: 8832
  source 1..33: mol_type = genomic DNA

SEQ ID NO: 45760 - DNA, 34 bp, Homo sapiens; identical to SEQ ID NO: 8833
  source 1..34: mol_type = genomic DNA

SEQ ID NO: 45761 - DNA, 30 bp, Homo sapiens; identical to SEQ ID NO: 8835
  source 1..30: mol_type = genomic DNA

SEQ ID NO: 45762 - DNA, 32 bp, Homo sapiens; identical to SEQ ID NO: 8837
  source 1..32: mol_type = genomic DNA

SEQ ID NO: 45763 - DNA, 33 bp, Homo sapiens; identical to SEQ ID NO: 8838
  source 1..33: mol_type = genomic DNA

SEQ ID NO: 45764 - DNA, 34 bp, Homo sapiens; identical to SEQ ID NO: 8839
  source 1..34: mol_type = genomic DNA

SEQ ID NO: 45765 - DNA, 33 bp, Homo sapiens; identical to SEQ ID NO: 8846
  source 1..33: mol_type = genomic DNA

SEQ ID NO: 45766 - DNA, 18 bp, Homo sapiens
  source 1..18: mol_type = genomic DNA
cagcggaagcgtgctggg

SEQ ID NO: 45767 - DNA, 19 bp, Homo sapiens
  source 1..19: mol_type = genomic DNA
cagcggaagcgtgctgggc

SEQ ID NO: 45768 - DNA, 20 bp, Homo sapiens
  source 1..20: mol_type = genomic DNA
cagcggaagcgtgctgggcc

SEQ ID NO: 45769 - DNA, 21 bp, Homo sapiens
  source 1..21: mol_type = genomic DNA
cagcggaagcgtgctgggccc

SEQ ID NO: 45770 - DNA, 22 bp, Homo sapiens
  source 1..22: mol_type = genomic DNA
cagcggaagcgtgctgggccca

SEQ ID NO: 45771 - DNA, 28 bp, Homo sapiens
  source 1..28: mol_type = genomic DNA
cagcggaagcgtgctgggcccataaccc

SEQ ID NO: 45772 - DNA, 31 bp, Homo sapiens; identical to SEQ ID NO: 8858
  source 1..31: mol_type = genomic DNA

SEQ ID NO: 45773 - DNA, 37 bp, Homo sapiens
  source 1..37: mol_type = genomic DNA
cagcggaagcgtgctgggcccataacccagaggtcga

SEQ ID NO: 45774 - DNA, 23 bp, Homo sapiens
  source 1..23: mol_type = genomic DNA
cagctaaataagctatcgggccc

SEQ ID NO: 45775 - DNA, 24 bp, Homo sapiens
  source 1..24: mol_type = genomic DNA
cagctaaataagctatcgggccca

SEQ ID NO: 45776 - DNA, 16 bp, Homo sapiens
  source 1..16: mol_type = genomic DNA
cagctatccattggtc

SEQ ID NO: 45777 - DNA, 17 bp, Homo sapiens
  source 1..17: mol_type = genomic DNA
cagctatccattggtct

SEQ ID NO: 45778 - DNA, 21 bp, Homo sapiens
  source 1..21: mol_type = genomic DNA
cagcttcaaacctgccggggc

SEQ ID NO: 45779 - DNA, 24 bp, Homo sapiens
  source 1..24: mol_type = genomic DNA
cagcttcaaacctgccggggcttc

SEQ ID NO: 45780 - DNA, 25 bp, Homo sapiens
  source 1..25: mol_type = genomic DNA
cagcttcaaacctgccggggcttcc

SEQ ID NO: 45781 - DNA, 21 bp, Homo sapiens
  source 1..21: mol_type = genomic DNA
cagctttggggggttcgattc

SEQ ID NO: 45782 - DNA, 36 bp, Homo sapiens; identical to SEQ ID NO: 8927
  source 1..36: mol_type = genomic DNA

SEQ ID NO: 45783 - DNA, 18 bp, Homo sapiens
  source 1..18: mol_type = genomic DNA
caggagatcctgggttcg

SEQ ID NO: 45784 - DNA, 32 bp, Homo sapiens; identical to SEQ ID NO: 8939
  source 1..32: mol_type = genomic DNA

SEQ ID NO: 45785 - DNA, 34 bp, Homo sapiens; identical to SEQ ID NO: 8941
  source 1..34: mol_type = genomic DNA

SEQ ID NO: 45786 - DNA, 35 bp, Homo sapiens; identical to SEQ ID NO: 8942
  source 1..35: mol_type = genomic DNA

SEQ ID NO: 45787 - DNA, 36 bp, Homo sapiens; identical to SEQ ID NO: 8943
  source 1..36: mol_type = genomic DNA

SEQ ID NO: 45788 - DNA, 37 bp, Homo sapiens; identical to SEQ ID NO: 8944
  source 1..37: mol_type = genomic DNA

SEQ ID NO: 45789 - DNA, 31 bp, Homo sapiens; identical to SEQ ID NO: 8946
  source 1..31: mol_type = genomic DNA

SEQ ID NO: 45790 - DNA, 32 bp, Homo sapiens; identical to SEQ ID NO: 8947
  source 1..32: mol_type = genomic DNA

SEQ ID NO: 45791 - DNA, 33 bp, Homo sapiens; identical to SEQ ID NO: 8948
  source 1..33: mol_type = genomic DNA

SEQ ID NO: 45792 - DNA, 34 bp, Homo sapiens; identical to SEQ ID NO: 8949
  source 1..34: mol_type = genomic DNA

SEQ ID NO: 45793 - DNA, 35 bp, Homo sapiens; identical to SEQ ID NO: 8950
  source 1..35: mol_type = genomic DNA

SEQ ID NO: 45794 - DNA, 36 bp, Homo sapiens; identical to SEQ ID NO: 8951
  source 1..36: mol_type = genomic DNA

SEQ ID NO: 45795 - DNA, 16 bp, Homo sapiens
  source 1..16: mol_type = genomic DNA
caggatggccgagcgg

SEQ ID NO: 45796 - DNA, 20 bp, Homo sapiens
  source 1..20: mol_type = genomic DNA
caggatggccgagcggtcta

SEQ ID NO: 45797 - DNA, 22 bp, Homo sapiens
  source 1..22: mol_type = genomic DNA
caggatggccgagcggtctaag

SEQ ID NO: 45798 - DNA, 24 bp, Homo sapiens
  source 1..24: mol_type = genomic DNA
caggatggccgagcggtctaaggc

SEQ ID NO: 45799 - DNA, 30 bp, Homo sapiens; identical to SEQ ID NO: 8970
  source 1..30: mol_type = genomic DNA

SEQ ID NO: 45800 - DNA, 33 bp, Homo sapiens; identical to SEQ ID NO: 8973
  source 1..33: mol_type = genomic DNA

SEQ ID NO: 45801 - DNA, 22 bp, Homo sapiens
  source 1..22: mol_type = genomic DNA
caggatggccgagtggtctaag

SEQ ID NO: 45802 - DNA, 24 bp, Homo sapiens
  source 1..24: mol_type = genomic DNA
caggatggccgagtggtctaaggc

SEQ ID NO: 45803 - DNA, 23 bp, Homo sapiens
  source 1..23: mol_type = genomic DNA
caggatggccgagtggttaaggc

SEQ ID NO: 45804 - DNA, 19 bp, Homo sapiens
  source 1..19: mol_type = genomic DNA
caggcggcccgggttcgac

SEQ ID NO: 45805 - DNA, 21 bp, Homo sapiens
  source 1..21: mol_type = genomic DNA
caggcggcccgggttcgactc

SEQ ID NO: 45806 - DNA, 22 bp, Homo sapiens
  source 1..22: mol_type = genomic DNA
caggcggcccgggttcgactcc

SEQ ID NO: 45807 - DNA, 23 bp, Homo sapiens
  source 1..23: mol_type = genomic DNA
caggcggcccgggttcgactccc

SEQ ID NO: 45808 - DNA, 25 bp, Homo sapiens
  source 1..25: mol_type = genomic DNA
caggcggcccgggttcgactcccgg

SEQ ID NO: 45809 - DNA, 26 bp, Homo sapiens
  source 1..26: mol_type = genomic DNA
caggcggcccgggttcgactcccggt

SEQ ID NO: 45810 - DNA, 27 bp, Homo sapiens
  source 1..27: mol_type = genomic DNA
caggcggcccgggttcgactcccggtg

SEQ ID NO: 45811 - DNA, 28 bp, Homo sapiens
  source 1..28: mol_type = genomic DNA
caggcggcccgggttcgactcccggtgt

SEQ ID NO: 45812 - DNA, 29 bp, Homo sapiens
  source 1..29: mol_type = genomic DNA
caggcggcccgggttcgactcccggtgtg

SEQ ID NO: 45813 - DNA, 30 bp, Homo sapiens; identical to SEQ ID NO: 9004
  source 1..30: mol_type = genomic DNA

SEQ ID NO: 45814 - DNA, 31 bp, Homo sapiens; identical to SEQ ID NO: 9005
  source 1..31: mol_type = genomic DNA

SEQ ID NO: 45815 - DNA, 32 bp, Homo sapiens; identical to SEQ ID NO: 9006
  source 1..32: mol_type = genomic DNA

SEQ ID NO: 45816 - DNA, 33 bp, Homo sapiens; identical to SEQ ID NO: 9007
  source 1..33: mol_type = genomic DNA

SEQ ID NO: 45817 - DNA, 34 bp, Homo sapiens; identical to SEQ ID NO: 9008
  source 1..34: mol_type = genomic DNA

SEQ ID NO: 45818 - DNA, 35 bp, Homo sapiens; identical to SEQ ID NO: 9009
  source 1..35: mol_type = genomic DNA

SEQ ID NO: 45819 - DNA, 36 bp, Homo sapiens; identical to SEQ ID NO: 9010
  source 1..36: mol_type = genomic DNA

SEQ ID NO: 45820 - DNA, 36 bp, Homo sapiens; identical to SEQ ID NO: 9032
  source 1..36: mol_type = genomic DNA

SEQ ID NO: 45821 - DNA, 35 bp, Homo sapiens; identical to SEQ ID NO: 9035
  source 1..35: mol_type = genomic DNA

SEQ ID NO: 45822 - DNA, 35 bp, Homo sapiens; identical to SEQ ID NO: 9039
  source 1..35: mol_type = genomic DNA

SEQ ID NO: 45823 - DNA, 36 bp, Homo sapiens; identical to SEQ ID NO: 9040
  source 1..36: mol_type = genomic DNA

SEQ ID NO: 45824 - DNA, 34 bp, Homo sapiens; identical to SEQ ID NO: 9046
  source 1..34: mol_type = genomic DNA

SEQ ID NO: 45825 - DNA, 35 bp, Homo sapiens; identical to SEQ ID NO: 9047
  source 1..35: mol_type = genomic DNA

SEQ ID NO: 45826 - DNA, 36 bp, Homo sapiens; identical to SEQ ID NO: 9048
  source 1..36: mol_type = genomic DNA

SEQ ID NO: 45827 - DNA, 34 bp, Homo sapiens; identical to SEQ ID NO: 9059
  source 1..34: mol_type = genomic DNA

SEQ ID NO: 45828 - DNA, 26 bp, Homo sapiens
  source 1..26: mol_type = genomic DNA
caggggttaggcctctttttaccacc

SEQ ID NO: 45829 - DNA, 31 bp, Homo sapiens; identical to SEQ ID NO: 9085
  source 1..31: mol_type = genomic DNA

SEQ ID NO: 45830 - DNA, 33 bp, Homo sapiens; identical to SEQ ID NO: 9087
  source 1..33: mol_type = genomic DNA

SEQ ID NO: 45831 - DNA, 34 bp, Homo sapiens; identical to SEQ ID NO: 9088
  source 1..34: mol_type = genomic DNA

SEQ ID NO: 45832 - DNA, 35 bp, Homo sapiens; identical to SEQ ID NO: 9089
  source 1..35: mol_type = genomic DNA

SEQ ID NO: 45833 - DNA, 24 bp, Homo sapiens
  source 1..24: mol_type = genomic DNA
cagggttcaagtccctgttcgggc

SEQ ID NO: 45834 - DNA, 25 bp, Homo sapiens
  source 1..25: mol_type = genomic DNA
cagggttcaagtccctgttcgggcg

SEQ ID NO: 45835 - DNA, 26 bp, Homo sapiens
  source 1..26: mol_type = genomic DNA
cagggttcaagtccctgttcgggcgc

SEQ ID NO: 45836 - DNA, 27 bp, Homo sapiens
  source 1..27: mol_type = genomic DNA
cagggttcaagtccctgttcgggcgcc

SEQ ID NO: 45837 - DNA, 28 bp, Homo sapiens
  source 1..28: mol_type = genomic DNA
cagggttcaagtccctgttcgggcgcca

SEQ ID NO: 45838 - DNA, 16 bp, Homo sapiens
  source 1..16: mol_type = genomic DNA
caggtcgcagtctccc

SEQ ID NO: 45839 - DNA, 32 bp, Homo sapiens; identical to SEQ ID NO: 9100
  source 1..32: mol_type = genomic DNA

SEQ ID NO: 45840 - DNA, 33 bp, Homo sapiens; identical to SEQ ID NO: 9101
  source 1..33: mol_type = genomic DNA

SEQ ID NO: 45841 - DNA, 34 bp, Homo sapiens; identical to SEQ ID NO: 9102
  source 1..34: mol_type = genomic DNA

SEQ ID NO: 45842 - DNA, 35 bp, Homo sapiens; identical to SEQ ID NO: 9103
  source 1..35: mol_type = genomic DNA

SEQ ID NO: 45843 - DNA, 36 bp, Homo sapiens; identical to SEQ ID NO: 9104
  source 1..36: mol_type = genomic DNA

SEQ ID NO: 45844 - DNA, 26 bp, Homo sapiens
  source 1..26: mol_type = genomic DNA
caggttcgaaccctgctcgctgcgcc

SEQ ID NO: 45845 - DNA, 26 bp, Homo sapiens
  source 1..26: mol_type = genomic DNA
caggttcgaatcctgccgactacgcc

SEQ ID NO: 45846 - DNA, 24 bp, Homo sapiens
  source 1..24: mol_type = genomic DNA
caggttcgaatcctgttcgtgacg

SEQ ID NO: 45847 - DNA, 25 bp, Homo sapiens
  source 1..25: mol_type = genomic DNA
caggttcgaatcctgttcgtgacgc

SEQ ID NO: 45848 - DNA, 26 bp, Homo sapiens
  source 1..26: mol_type = genomic DNA
caggttcgaatcctgttcgtgacgcc

SEQ ID NO: 45849 - DNA, 24 bp, Homo sapiens
  source 1..24: mol_type = genomic DNA
caggttcgactcctggctggctcg

SEQ ID NO: 45850 - DNA, 26 bp, Homo sapiens
  source 1..26: mol_type = genomic DNA
caggttcgactcctggctggctcgcc

SEQ ID NO: 45851 - DNA, 26 bp, Homo sapiens
  source 1..26: mol_type = genomic DNA
cagtaagttgcaatacttaatttctg

SEQ ID NO: 45852 - DNA, 29 bp, Homo sapiens
  source 1..29: mol_type = genomic DNA
cagtaagttgcaatacttaatttctgcca

SEQ ID NO: 45853 - DNA, 16 bp, Homo sapiens
  source 1..16: mol_type = genomic DNA
cagtcagtagagcatc

SEQ ID NO: 45854 - DNA, 16 bp, Homo sapiens
  source 1..16: mol_type = genomic DNA
cagtcggtagagcata

SEQ ID NO: 45855 - DNA, 16 bp, Homo sapiens
  source 1..16: mol_type = genomic DNA
cagtcggtagagcatc

SEQ ID NO: 45856 - DNA, 17 bp, Homo sapiens
  source 1..17: mol_type = genomic DNA
cagtcggtagagcatca

SEQ ID NO: 45857 - DNA, 18 bp, Homo sapiens
  source 1..18: mol_type = genomic DNA
cagtcggtagagcatcag

SEQ ID NO: 45858 - DNA, 19 bp, Homo sapiens
  source 1..19: mol_type = genomic DNA
cagtcggtagagcatcaga

SEQ ID NO: 45859 - DNA, 20 bp, Homo sapiens
  source 1..20: mol_type = genomic DNA
cagtcggtagagcatcagac

SEQ ID NO: 45860 - DNA, 21 bp, Homo sapiens
  source 1..21: mol_type = genomic DNA
cagtcggtagagcatcagact

SEQ ID NO: 45861 - DNA, 23 bp, Homo sapiens
  source 1..23: mol_type = genomic DNA
cagtcggtagagcatcagacttt

SEQ ID NO: 45862 - DNA, 24 bp, Homo sapiens
  source 1..24: mol_type = genomic DNA
cagtcggtagagcatcagactttt

SEQ ID NO: 45863 - DNA, 16 bp, Homo sapiens
  source 1..16: mol_type = genomic DNA
cagtcggtagagcatg

SEQ ID NO: 45864 - DNA, 17 bp, Homo sapiens
  source 1..17: mol_type = genomic DNA
cagtcggtagagcatga

SEQ ID NO: 45865 - DNA, 18 bp, Homo sapiens
  source 1..18: mol_type = genomic DNA
cagtcggtagagcatgag

SEQ ID NO: 45866 - DNA, 19 bp, Homo sapiens
  source 1..19: mol_type = genomic DNA
cagtcggtagagcatgaga

SEQ ID NO: 45867 - DNA, 20 bp, Homo sapiens
  source 1..20: mol_type = genomic DNA
cagtcggtagagcatgagac

SEQ ID NO: 45868 - DNA, 21 bp, Homo sapiens
  source 1..21: mol_type = genomic DNA
cagtcggtagagcatgagacc

SEQ ID NO: 45869 - DNA, 30 bp, Homo sapiens; identical to SEQ ID NO: 9182
  source 1..30: mol_type = genomic DNA

SEQ ID NO: 45870 - DNA, 21 bp, Homo sapiens
  source 1..21: mol_type = genomic DNA
cagtcggtagagcatgagact

SEQ ID NO: 45871 - DNA, 22 bp, Homo sapiens
  source 1..22: mol_type = genomic DNA
cagtcggtagagcatgagactc

SEQ ID NO: 45872 - DNA, 27 bp, Homo sapiens
  source 1..27: mol_type = genomic DNA
cagtcggtagagcatgagactcttaat

SEQ ID NO: 45873 - DNA, 28 bp, Homo sapiens
  source 1..28: mol_type = genomic DNA
cagtcggtagagcatgagactcttaatc

SEQ ID NO: 45874 - DNA, 29 bp, Homo sapiens
  source 1..29: mol_type = genomic DNA
cagtcggtagagcatgagactcttaatct

SEQ ID NO: 45875 - DNA, 30 bp, Homo sapiens; identical to SEQ ID NO: 9193
  source 1..30: mol_type = genomic DNA

SEQ ID NO: 45876 - DNA, 31 bp, Homo sapiens; identical to SEQ ID NO: 9194
  source 1..31: mol_type = genomic DNA

SEQ ID NO: 45877 - DNA, 40 bp, Homo sapiens; identical to SEQ ID NO: 9198
  source 1..40: mol_type = genomic DNA

SEQ ID NO: 45878 - DNA, 43 bp, Homo sapiens; identical to SEQ ID NO: 9201
  source 1..43: mol_type = genomic DNA

SEQ ID NO: 45879 - DNA, 17 bp, Homo sapiens
  source 1..17: mol_type = genomic DNA
cagtcggtagagcatgg

SEQ ID NO: 45880 - DNA, 18 bp, Homo sapiens
  source 1..18: mol_type = genomic DNA
cagtcggtagagcatggg

SEQ ID NO: 45881 - DNA, 19 bp, Homo sapiens
  source 1..19: mol_type = genomic DNA
cagtcggtagagcatggga

SEQ ID NO: 45882 - DNA, 20 bp, Homo sapiens
  source 1..20: mol_type = genomic DNA
cagtcggtagagcatgggac

SEQ ID NO: 45883 - DNA, 21 bp, Homo sapiens
  source 1..21: mol_type = genomic DNA
cagtcggtagagcatgggact

SEQ ID NO: 45884 - DNA, 22 bp, Homo sapiens
  source 1..22: mol_type = genomic DNA
cagtcggtagagcatgggactc

SEQ ID NO: 45885 - DNA, 23 bp, Homo sapiens
  source 1..23: mol_type = genomic DNA
cagtcggtagagcatgggactct

SEQ ID NO: 45886 - DNA, 27 bp, Homo sapiens
  source 1..27: mol_type = genomic DNA
cagtcggtagagcatgggactcttaat

SEQ ID NO: 45887 - DNA, 28 bp, Homo sapiens
  source 1..28: mol_type = genomic DNA
cagtcggtagagcatgggactcttaatc

SEQ ID NO: 45888 - DNA, 29 bp, Homo sapiens
  source 1..29: mol_type = genomic DNA
cagtcggtagagcatgggactcttaatcc

SEQ ID NO: 45889 - DNA, 30 bp, Homo sapiens; identical to SEQ ID NO: 9217
  source 1..30: mol_type = genomic DNA

SEQ ID NO: 45890 - DNA, 31 bp, Homo sapiens; identical to SEQ ID NO: 9218
  source 1..31: mol_type = genomic DNA

SEQ ID NO: 45891 - DNA, 38 bp, Homo sapiens; identical to SEQ ID NO: 9220
  source 1..38: mol_type = genomic DNA

SEQ ID NO: 45892 - DNA, 39 bp, Homo sapiens; identical to SEQ ID NO: 9221
  source 1..39: mol_type = genomic DNA

SEQ ID NO: 45893 - DNA, 40 bp, Homo sapiens; identical to SEQ ID NO: 9222
  source 1..40: mol_type = genomic DNA

SEQ ID NO: 45894 - DNA, 42 bp, Homo sapiens; identical to SEQ ID NO: 9224
  source 1..42: mol_type = genomic DNA

SEQ ID NO: 45895 - DNA, 43 bp, Homo sapiens; identical to SEQ ID NO: 9225
  source 1..43: mol_type = genomic DNA

SEQ ID NO: 45896 - DNA, 24 bp, Homo sapiens
  source 1..24: mol_type = genomic DNA
cagtctcataatctgaaggtcctg

SEQ ID NO: 45897 - DNA, 23 bp, Homo sapiens
  source 1..23: mol_type = genomic DNA
cagtctcccctggaggcgtgggt

SEQ ID NO: 45898 - DNA, 43 bp, Homo sapiens; identical to SEQ ID NO: 9261
  source 1..43: mol_type = genomic DNA

SEQ ID NO: 45899 - DNA, 29 bp, Homo sapiens
  source 1..29: mol_type = genomic DNA
cagtggcctaatggataaggcatcagcct

SEQ ID NO: 45900 - DNA, 31 bp, Homo sapiens; identical to SEQ ID NO: 9270
  source 1..31: mol_type = genomic DNA

SEQ ID NO: 45901 - DNA, 16 bp, Homo sapiens
  source 1..16: mol_type = genomic DNA
cagtgggtagagcatc

SEQ ID NO: 45902 - DNA, 16 bp, Homo sapiens
  source 1..16: mol_type = genomic DNA
cagtggtagaattctc

SEQ ID NO: 45903 - DNA, 17 bp, Homo sapiens
  source 1..17: mol_type = genomic DNA
cagtggtagaattctcg

SEQ ID NO: 45904 - DNA, 18 bp, Homo sapiens
  source 1..18: mol_type = genomic DNA
cagtggtagaattctcgc

SEQ ID NO: 45905 - DNA, 19 bp, Homo sapiens
  source 1..19: mol_type = genomic DNA
cagtggtagaattctcgcc

SEQ ID NO: 45906 - DNA, 20 bp, Homo sapiens
  source 1..20: mol_type = genomic DNA
cagtggtagaattctcgcct

SEQ ID NO: 45907 - DNA, 21 bp, Homo sapiens
  source 1..21: mol_type = genomic DNA
cagtggtagaattctcgcctg

SEQ ID NO: 45908 - DNA, 22 bp, Homo sapiens
  source 1..22: mol_type = genomic DNA
cagtggtagaattctcgcctgc

SEQ ID NO: 45909 - DNA, 23 bp, Homo sapiens
  source 1..23: mol_type = genomic DNA
cagtggtagaattctcgcctgcc

SEQ ID NO: 45910 - DNA, 24 bp, Homo sapiens
  source 1..24: mol_type = genomic DNA
cagtggtagaattctcgcctgcca

SEQ ID NO: 45911 - DNA, 25 bp, Homo sapiens
  source 1..25: mol_type = genomic DNA
cagtggtagaattctcgcctgccac

SEQ ID NO: 45912 - DNA, 27 bp, Homo sapiens
  source 1..27: mol_type = genomic DNA
cagtggtagaattctcgcctgccacgc

SEQ ID NO: 45913 - DNA, 31 bp, Homo sapiens; identical to SEQ ID NO: 9295
  source 1..31: mol_type = genomic DNA

SEQ ID NO: 45914 - DNA, 35 bp, Homo sapiens; identical to SEQ ID NO: 9298
  source 1..35: mol_type = genomic DNA

SEQ ID NO: 45915 - DNA, 36 bp, Homo sapiens; identical to SEQ ID NO: 9299
  source 1..36: mol_type = genomic DNA

SEQ ID NO: 45916 - DNA, 39 bp, Homo sapiens; identical to SEQ ID NO: 9301
  source 1..39: mol_type = genomic DNA

SEQ ID NO: 45917 - DNA, 40 bp, Homo sapiens; identical to SEQ ID NO: 9302
  source 1..40: mol_type = genomic DNA

SEQ ID NO: 45918 - DNA, 20 bp, Homo sapiens
  source 1..20: mol_type = genomic DNA
cagtggtagagcatttgact

SEQ ID NO: 45919 - DNA, 22 bp, Homo sapiens
  source 1..22: mol_type = genomic DNA
cagtggtagagcatttgactgc

SEQ ID NO: 45920 - DNA, 16 bp, Homo sapiens
  source 1..16: mol_type = genomic DNA
cagtggtagagcgcat

SEQ ID NO: 45921 - DNA, 18 bp, Homo sapiens
  source 1..18: mol_type = genomic DNA
cagtggtagagcgcgtgc

SEQ ID NO: 45922 - DNA, 21 bp, Homo sapiens
  source 1..21: mol_type = genomic DNA
cagtggtagagcgcgtgcttc

SEQ ID NO: 45923 - DNA, 24 bp, Homo sapiens
  source 1..24: mol_type = genomic DNA
cagttgacccgggttcgattcccg

SEQ ID NO: 45924 - DNA, 29 bp, Homo sapiens
  source 1..29: mol_type = genomic DNA
cagttgacccgggttcgattcccggccaa

SEQ ID NO: 45925 - DNA, 35 bp, Homo sapiens; identical to SEQ ID NO: 9330
  source 1..35: mol_type = genomic DNA

SEQ ID NO: 45926 - DNA, 35 bp, Homo sapiens; identical to SEQ ID NO: 9344
  source 1..35: mol_type = genomic DNA

SEQ ID NO: 45927 - DNA, 36 bp, Homo sapiens; identical to SEQ ID NO: 9345
  source 1..36: mol_type = genomic DNA

SEQ ID NO: 45928 - DNA, 16 bp, Homo sapiens
  source 1..16: mol_type = genomic DNA
cagttggtagagcatc

SEQ ID NO: 45929 - DNA, 28 bp, Homo sapiens
  source 1..28: mol_type = genomic DNA
cataaaacttaaaactttacagtcagag

SEQ ID NO: 45930 - DNA, 21 bp, Homo sapiens
  source 1..21: mol_type = genomic DNA
cataacccagaggtcgatgga

SEQ ID NO: 45931 - DNA, 22 bp, Homo sapiens
  source 1..22: mol_type = genomic DNA
cataacccagaggtcgatggat

SEQ ID NO: 45932 - DNA, 23 bp, Homo sapiens
  source 1..23: mol_type = genomic DNA
cataacccagaggtcgatggatc

SEQ ID NO: 45933 - DNA, 24 bp, Homo sapiens
  source 1..24: mol_type = genomic DNA
cataacccagaggtcgatggatcg

SEQ ID NO: 45934 - DNA, 28 bp, Homo sapiens
  source 1..28: mol_type = genomic DNA
cataacccagaggtcgatggatcgaaac

SEQ ID NO: 45935 - DNA, 29 bp, Homo sapiens
  source 1..29: mol_type = genomic DNA
cataacccagaggtcgatggatcgaaacc

SEQ ID NO: 45936 - DNA, 30 bp, Homo sapiens
  source 1..30: mol_type = genomic DNA
cataacccagaggtcgatggatcgaaacca

SEQ ID NO: 45937 - DNA, 30 bp, Homo sapiens; identical to SEQ ID NO: 9394
  source 1..30: mol_type = genomic DNA

SEQ ID NO: 45938 - DNA, 16 bp, Homo sapiens
  source 1..16: mol_type = genomic DNA
cataatctgaaggtcc

SEQ ID NO: 45939 - DNA, 17 bp, Homo sapiens
  source 1..17: mol_type = genomic DNA
cataatctgaaggtcct

SEQ ID NO: 45940 - DNA, 18 bp, Homo sapiens
  source 1..18: mol_type = genomic DNA
cataatctgaaggtcctg

SEQ ID NO: 45941 - DNA, 19 bp, Homo sapiens
  source 1..19: mol_type = genomic DNA
cataatctgaaggtcctga

SEQ ID NO: 45942 - DNA, 21 bp, Homo sapiens
  source 1..21: mol_type = genomic DNA
cataatctgaaggtcctgagt

SEQ ID NO: 45943 - DNA, 22 bp, Homo sapiens
  source 1..22: mol_type = genomic DNA
cataatctgaaggtcctgagtt

SEQ ID NO: 45944 - DNA, 29 bp, Homo sapiens
  source 1..29: mol_type = genomic DNA
cataatctgaaggtcctgagttcgaacct

SEQ ID NO: 45945 - DNA, 30 bp, Homo sapiens; identical to SEQ ID NO: 9408
  source 1..30: mol_type = genomic DNA

SEQ ID NO: 45946 - DNA, 42 bp, Homo sapiens; identical to SEQ ID NO: 9415
  source 1..42: mol_type = genomic DNA

SEQ ID NO: 45947 - DNA, 43 bp, Homo sapiens; identical to SEQ ID NO: 9416
  source 1..43: mol_type = genomic DNA

SEQ ID NO: 45948 - DNA, 18 bp, Homo sapiens
  source 1..18: mol_type = genomic DNA
cataatctgaaggtcgtg

SEQ ID NO: 45949 - DNA, 20 bp, Homo sapiens
  source 1..20: mol_type = genomic DNA
cataatctgaaggtcgtgag

SEQ ID NO: 45950 - DNA, 21 bp, Homo sapiens
  source 1..21: mol_type = genomic DNA
cataatctgaaggtcgtgagt

SEQ ID NO: 45951 - DNA, 41 bp, Homo sapiens; identical to SEQ ID NO: 9430
  source 1..41: mol_type = genomic DNA

SEQ ID NO: 45952 - DNA, 42 bp, Homo sapiens; identical to SEQ ID NO: 9431
  source 1..42: mol_type = genomic DNA

SEQ ID NO: 45953 - DNA, 43 bp, Homo sapiens; identical to SEQ ID NO: 9432
  source 1..43: mol_type = genomic DNA

SEQ ID NO: 45954 - DNA, 42 bp, Homo sapiens; identical to SEQ ID NO: 9435
  source 1..42: mol_type = genomic DNA

SEQ ID NO: 45955 - DNA, 43 bp, Homo sapiens; identical to SEQ ID NO: 9436
  source 1..43: mol_type = genomic DNA

SEQ ID NO: 45956 - DNA, 41 bp, Homo sapiens; identical to SEQ ID NO: 9443
  source 1..41: mol_type = genomic DNA

SEQ ID NO: 45957 - DNA, 28 bp, Homo sapiens
  source 1..28: mol_type = genomic DNA
catagtgtagtggttatcacgtctgctt

SEQ ID NO: 45958 - DNA, 31 bp, Homo sapiens; identical to SEQ ID NO: 9467
  source 1..31: mol_type = genomic DNA

SEQ ID NO: 45959 - DNA, 32 bp, Homo sapiens; identical to SEQ ID NO: 9468
  source 1..32: mol_type = genomic DNA

SEQ ID NO: 45960 - DNA, 34 bp, Homo sapiens; identical to SEQ ID NO: 9470
  source 1..34: mol_type = genomic DNA

SEQ ID NO: 45961 - DNA, 35 bp, Homo sapiens; identical to SEQ ID NO: 9471
  source 1..35: mol_type = genomic DNA

SEQ ID NO: 45962 - DNA, 36 bp, Homo sapiens; identical to SEQ ID NO: 9472
  source 1..36: mol_type = genomic DNA

SEQ ID NO: 45963 - DNA, 37 bp, Homo sapiens; identical to SEQ ID NO: 9473
  source 1..37: mol_type = genomic DNA

SEQ ID NO: 45964 - DNA, 39 bp, Homo sapiens; identical to SEQ ID NO: 9475
  source 1..39: mol_type = genomic DNA

SEQ ID NO: 45965 - DNA, 40 bp, Homo sapiens; identical to SEQ ID NO: 9476
  source 1..40: mol_type = genomic DNA

SEQ ID NO: 45966 - DNA, 25 bp, Homo sapiens
  source 1..25: mol_type = genomic DNA
catatggtctagcggttaggattcc

SEQ ID NO: 45967 - DNA, 29 bp, Homo sapiens
  source 1..29: mol_type = genomic DNA
catatggtctagcggttaggattcctggt

SEQ ID NO: 45968 - DNA, 30 bp, Homo sapiens; identical to SEQ ID NO: 9484
  source 1..30: mol_type = genomic DNA

SEQ ID NO: 45969 - DNA, 31 bp, Homo sapiens; identical to SEQ ID NO: 9485
  source 1..31: mol_type = genomic DNA

SEQ ID NO: 45970 - DNA, 32 bp, Homo sapiens; identical to SEQ ID NO: 9486
  source 1..32: mol_type = genomic DNA

SEQ ID NO: 45971 - DNA, 33 bp, Homo sapiens; identical to SEQ ID NO: 9487
  source 1..33: mol_type = genomic DNA

SEQ ID NO: 45972 - DNA, 18 bp, Homo sapiens
  source 1..18: mol_type = genomic DNA
catcaccccataaacacc

SEQ ID NO: 45973 - DNA, 19 bp, Homo sapiens
  source 1..19: mol_type = genomic DNA
catcaccccataaacacca

SEQ ID NO: 45974 - DNA, 16 bp, Homo sapiens
  source 1..16: mol_type = genomic DNA
catcagattgtgaatc

SEQ ID NO: 45975 - DNA, 17 bp, Homo sapiens
  source 1..17: mol_type = genomic DNA
catcagattgtgaatct

SEQ ID NO: 45976 - DNA, 29 bp, Homo sapiens
  source 1..29: mol_type = genomic DNA
catcagattgtgaatctgacaacagaggc

SEQ ID NO: 45977 - DNA, 30 bp, Homo sapiens; identical to SEQ ID NO: 9532
  source 1..30: mol_type = genomic DNA

SEQ ID NO: 45978 - DNA, 37 bp, Homo sapiens; identical to SEQ ID NO: 9539
  source 1..37: mol_type = genomic DNA

SEQ ID NO: 45979 - DNA, 26 bp, Homo sapiens
  source 1..26: mol_type = genomic DNA
catcagcctccggagctggggattgt

SEQ ID NO: 45980 - DNA, 16 bp, Homo sapiens
  source 1..16: mol_type = genomic DNA
catgagactcttaatc

SEQ ID NO: 45981 - DNA, 17 bp, Homo sapiens
  source 1..17: mol_type = genomic DNA
catgagactcttaatct

SEQ ID NO: 45982 - DNA, 34 bp, Homo sapiens; identical to SEQ ID NO: 34451
  source 1..34: mol_type = genomic DNA

SEQ ID NO: 45983 - DNA, 35 bp, Homo sapiens; identical to SEQ ID NO: 9558
  source 1..35: mol_type = genomic DNA

SEQ ID NO: 45984 - DNA, 36 bp, Homo sapiens; identical to SEQ ID NO: 9559
  source 1..36: mol_type = genomic DNA

SEQ ID NO: 45985 - DNA, 26 bp, Homo sapiens
  source 1..26: mol_type = genomic DNA
catgcccccatgtctaacaacatggc

SEQ ID NO: 45986 - DNA, 27 bp, Homo sapiens
  source 1..27: mol_type = genomic DNA
catgcccccatgtctaacaacatggct

SEQ ID NO: 45987 - DNA, 28 bp, Homo sapiens
  source 1..28: mol_type = genomic DNA
catgcccccatgtctaacaacatggctt

SEQ ID NO: 45988 - DNA, 33 bp, Homo sapiens; identical to SEQ ID NO: 9582
  source 1..33: mol_type = genomic DNA

SEQ ID NO: 45989 - DNA, 35 bp, Homo sapiens; identical to SEQ ID NO: 9584
  source 1..35: mol_type = genomic DNA

SEQ ID NO: 45990 - DNA, 36 bp, Homo sapiens; identical to SEQ ID NO: 9585
  source 1..36: mol_type = genomic DNA

SEQ ID NO: 45991 - DNA, 16 bp, Homo sapiens
  source 1..16: mol_type = genomic DNA
catgggactcttaatc

SEQ ID NO: 45992 - DNA, 17 bp, Homo sapiens
  source 1..17: mol_type = genomic DNA
catgggactcttaatcc

SEQ ID NO: 45993 - DNA, 17 bp, Homo sapiens
  source 1..17: mol_type = genomic DNA
catgggactcttcatcc

SEQ ID NO: 45994 - DNA, 29 bp, Homo sapiens
  source 1..29: mol_type = genomic DNA
catgggtggttcagtggtagaattctcgc

SEQ ID NO: 45995 - DNA, 30 bp, Homo sapiens; identical to SEQ ID NO: 9620
  source 1..30: mol_type = genomic DNA

SEQ ID NO: 45996 - DNA, 31 bp, Homo sapiens; identical to SEQ ID NO: 9621
  source 1..31: mol_type = genomic DNA

SEQ ID NO: 45997 - DNA, 32 bp, Homo sapiens; identical to SEQ ID NO: 9622
  source 1..32: mol_type = genomic DNA

SEQ ID NO: 45998 - DNA, 34 bp, Homo sapiens; identical to SEQ ID NO: 9624
  source 1..34: mol_type = genomic DNA

SEQ ID NO: 45999 - DNA, 35 bp, Homo sapiens; identical to SEQ ID NO: 9625
  source 1..35: mol_type = genomic DNA

SEQ ID NO: 46000 - DNA, 21 bp, Homo sapiens
  source 1..21: mol_type = genomic DNA
catggtctagcggttaggatt

SEQ ID NO: 46001 - DNA, 23 bp, Homo sapiens
  source 1..23: mol_type = genomic DNA
catggtctagcggttaggattcc

SEQ ID NO: 46002 - DNA, 24 bp, Homo sapiens
  source 1..24: mol_type = genomic DNA
catggtctagcggttaggattcct

SEQ ID NO: 46003 - DNA, 25 bp, Homo sapiens
  source 1..25: mol_type = genomic DNA
catggtctagcggttaggattcctg

SEQ ID NO: 46004 - DNA, 26 bp, Homo sapiens
  source 1..26: mol_type = genomic DNA
catggtctagcggttaggattcctgg

SEQ ID NO: 46005 - DNA, 27 bp, Homo sapiens
  source 1..27: mol_type = genomic DNA
catggtctagcggttaggattcctggt

SEQ ID NO: 46006 - DNA, 28 bp, Homo sapiens
  source 1..28: mol_type = genomic DNA
catggtctagcggttaggattcctggtt

SEQ ID NO: 46007 - DNA, 30 bp, Homo sapiens; identical to SEQ ID NO: 9642
  source 1..30: mol_type = genomic DNA

SEQ ID NO: 46008 - DNA, 31 bp, Homo sapiens; identical to SEQ ID NO: 9643
  source 1..31: mol_type = genomic DNA

SEQ ID NO: 46009 - DNA, 28 bp, Homo sapiens
  source 1..28: mol_type = genomic DNA
catggtgtaatggttagcactctggact

SEQ ID NO: 46010 - DNA, 31 bp, Homo sapiens; identical to SEQ ID NO: 9656
  source 1..31: mol_type = genomic DNA

SEQ ID NO: 46011 - DNA, 16 bp, Homo sapiens
  source 1..16: mol_type = genomic DNA
cattcttgcgacccgg

SEQ ID NO: 46012 - DNA, 17 bp, Homo sapiens
  source 1..17: mol_type = genomic DNA
cattcttgcgacccggg

SEQ ID NO: 46013 - DNA, 18 bp, Homo sapiens
  source 1..18: mol_type = genomic DNA
cattcttgcgacccgggt

SEQ ID NO: 46014 - DNA, 19 bp, Homo sapiens
  source 1..19: mol_type = genomic DNA
cattcttgcgacccgggtt

SEQ ID NO: 46015 - DNA, 20 bp, Homo sapiens
  source 1..20: mol_type = genomic DNA
cattcttgcgacccgggttc

SEQ ID NO: 46016 - DNA, 21 bp, Homo sapiens
  source 1..21: mol_type = genomic DNA
cattcttgcgacccgggttcg

SEQ ID NO: 46017 - DNA, 22 bp, Homo sapiens
  source 1..22: mol_type = genomic DNA
cattcttgcgacccgggttcga

SEQ ID NO: 46018 - DNA, 34 bp, Homo sapiens; identical to SEQ ID NO: 9708
  source 1..34: mol_type = genomic DNA

SEQ ID NO: 46019 - DNA, 35 bp, Homo sapiens; identical to SEQ ID NO: 9709
  source 1..35: mol_type = genomic DNA

SEQ ID NO: 46020 - DNA, 39 bp, Homo sapiens; identical to SEQ ID NO: 9713
  source 1..39: mol_type = genomic DNA

SEQ ID NO: 46021 - DNA, 40 bp, Homo sapiens; identical to SEQ ID NO: 9714
  source 1..40: mol_type = genomic DNA

SEQ ID NO: 46022 - DNA, 36 bp, Homo sapiens; identical to SEQ ID NO: 9725
  source 1..36: mol_type = genomic DNA

SEQ ID NO: 46023 - DNA, 37 bp, Homo sapiens; identical to SEQ ID NO: 9726
  source 1..37: mol_type = genomic DNA

SEQ ID NO: 46024 - DNA, 23 bp, Homo sapiens
  source 1..23: mol_type = genomic DNA
cattggggtttccccgcgcaggt

SEQ ID NO: 46025 - DNA, 17 bp, Homo sapiens
  source 1..17: mol_type = genomic DNA
cattggtcgtggttgta

SEQ ID NO: 46026 - DNA, 18 bp, Homo sapiens
  source 1..18: mol_type = genomic DNA
cattggtcgtggttgtag

SEQ ID NO: 46027 - DNA, 19 bp, Homo sapiens
  source 1..19: mol_type = genomic DNA
cattggtcgtggttgtagt

SEQ ID NO: 46028 - DNA, 21 bp, Homo sapiens
  source 1..21: mol_type = genomic DNA
cattggtcgtggttgtagtcc

SEQ ID NO: 46029 - DNA, 25 bp, Homo sapiens
  source 1..25: mol_type = genomic DNA
cattggtcgtggttgtagtccgtgc

SEQ ID NO: 46030 - DNA, 26 bp, Homo sapiens
  source 1..26: mol_type = genomic DNA
cattggtcgtggttgtagtccgtgcg

SEQ ID NO: 46031 - DNA, 27 bp, Homo sapiens
  source 1..27: mol_type = genomic DNA
cattggtcgtggttgtagtccgtgcga

SEQ ID NO: 46032 - DNA, 28 bp, Homo sapiens
  source 1..28: mol_type = genomic DNA
cattggtcgtggttgtagtccgtgcgag

SEQ ID NO: 46033 - DNA, 29 bp, Homo sapiens
  source 1..29: mol_type = genomic DNA
cattggtcgtggttgtagtccgtgcgaga

SEQ ID NO: 46034 - DNA, 30 bp, Homo sapiens; identical to SEQ ID NO: 9763
  source 1..30: mol_type = genomic DNA

SEQ ID NO: 46035 - DNA, 31 bp, Homo sapiens; identical to SEQ ID NO: 9764
  source 1..31: mol_type = genomic DNA

SEQ ID NO: 46036 - DNA, 32 bp, Homo sapiens; identical to SEQ ID NO: 9765
  source 1..32: mol_type = genomic DNA

SEQ ID NO: 46037 - DNA, 33 bp, Homo sapiens; identical to SEQ ID NO: 9766
  source 1..33: mol_type = genomic DNA

SEQ ID NO: 46038 - DNA, 34 bp, Homo sapiens; identical to SEQ ID NO: 9767
  source 1..34: mol_type = genomic DNA

SEQ ID NO: 46039 - DNA, 35 bp, Homo sapiens; identical to SEQ ID NO: 9768
  source 1..35: mol_type = genomic DNA

SEQ ID NO: 46040 - DNA, 17 bp, Homo sapiens
  source 1..17: mol_type = genomic DNA
cattggtggttcagtgg

SEQ ID NO: 46041 - DNA, 27 bp, Homo sapiens
  source 1..27: mol_type = genomic DNA
cattggtggttcagtggtagaattctc

SEQ ID NO: 46042 - DNA, 28 bp, Homo sapiens
  source 1..28: mol_type = genomic DNA
cattggtggttcagtggtagaattctcg

SEQ ID NO: 46043 - DNA, 29 bp, Homo sapiens
  source 1..29: mol_type = genomic DNA
cattggtggttcagtggtagaattctcgc

SEQ ID NO: 46044 - DNA, 30 bp, Homo sapiens; identical to SEQ ID NO: 9797
  source 1..30: mol_type = genomic DNA

SEQ ID NO: 46045 - DNA, 31 bp, Homo sapiens; identical to SEQ ID NO: 9798
  source 1..31: mol_type = genomic DNA

SEQ ID NO: 46046 - DNA, 32 bp, Homo sapiens; identical to SEQ ID NO: 9804
  source 1..32: mol_type = genomic DNA

SEQ ID NO: 46047 - DNA, 33 bp, Homo sapiens; identical to SEQ ID NO: 9805
  source 1..33: mol_type = genomic DNA

SEQ ID NO: 46048 - DNA, 34 bp, Homo sapiens; identical to SEQ ID NO: 9806
  source 1..34: mol_type = genomic DNA

SEQ ID NO: 46049 - DNA, 35 bp, Homo sapiens; identical to SEQ ID NO: 9807
  source 1..35: mol_type = genomic DNA

SEQ ID NO: 46050 - DNA, 47 bp, Homo sapiens; identical to SEQ ID NO: 9814
  source 1..47: mol_type = genomic DNA

SEQ ID NO: 46051 - DNA, 43 bp, Homo sapiens; identical to SEQ ID NO: 9821
  source 1..43: mol_type = genomic DNA

SEQ ID NO: 46052 - DNA, 44 bp, Homo sapiens; identical to SEQ ID NO: 9822
  source 1..44: mol_type = genomic DNA

SEQ ID NO: 46053 - DNA, 34 bp, Homo sapiens; identical to SEQ ID NO: 9833
  source 1..34: mol_type = genomic DNA

SEQ ID NO: 46054 - DNA, 35 bp, Homo sapiens; identical to SEQ ID NO: 9834
  source 1..35: mol_type = genomic DNA

SEQ ID NO: 46055 - DNA, 36 bp, Homo sapiens; identical to SEQ ID NO: 9835
  source 1..36: mol_type = genomic DNA

SEQ ID NO: 46056 - DNA, 17 bp, Homo sapiens
  source 1..17: mol_type = genomic DNA
catttgactgcagatca

SEQ ID NO: 46057 - DNA, 25 bp, Homo sapiens
  source 1..25: mol_type = genomic DNA
catttgactgcagatcaagaggtcc

SEQ ID NO: 46058 - DNA, 26 bp, Homo sapiens
  source 1..26: mol_type = genomic DNA
catttgactgcagatcaagaggtccc

SEQ ID NO: 46059 - DNA, 21 bp, Homo sapiens
  source 1..21: mol_type = genomic DNA
ccaaaacatcagattgtgaat

SEQ ID NO: 46060 - DNA, 22 bp, Homo sapiens
  source 1..22: mol_type = genomic DNA
ccaaaacatcagattgtgaatc

SEQ ID NO: 46061 - DNA, 30 bp, Homo sapiens; identical to SEQ ID NO: 9876
  source 1..30: mol_type = genomic DNA

SEQ ID NO: 46062 - DNA, 31 bp, Homo sapiens; identical to SEQ ID NO: 9877
  source 1..31: mol_type = genomic DNA

SEQ ID NO: 46063 - DNA, 32 bp, Homo sapiens; identical to SEQ ID NO: 9878
  source 1..32: mol_type = genomic DNA

SEQ ID NO: 46064 - DNA, 33 bp, Homo sapiens; identical to SEQ ID NO: 9879
  source 1..33: mol_type = genomic DNA

SEQ ID NO: 46065 - DNA, 34 bp, Homo sapiens; identical to SEQ ID NO: 9880
  source 1..34: mol_type = genomic DNA

SEQ ID NO: 46066 - DNA, 35 bp, Homo sapiens; identical to SEQ ID NO: 9881
  source 1..35: mol_type = genomic DNA

SEQ ID NO: 46067 - DNA, 36 bp, Homo sapiens; identical to SEQ ID NO: 9882
  source 1..36: mol_type = genomic DNA

SEQ ID NO: 46068 - DNA, 37 bp, Homo sapiens; identical to SEQ ID NO: 9883
  source 1..37: mol_type = genomic DNA

SEQ ID NO: 46069 - DNA, 42 bp, Homo sapiens; identical to SEQ ID NO: 9888
  source 1..42: mol_type = genomic DNA

SEQ ID NO: 46070 - DNA, 43 bp, Homo sapiens; identical to SEQ ID NO: 9889
  source 1..43: mol_type = genomic DNA

SEQ ID NO: 46071 - DNA, 44 bp, Homo sapiens; identical to SEQ ID NO: 9890
  source 1..44: mol_type = genomic DNA

SEQ ID NO: 46072 - DNA, 45 bp, Homo sapiens; identical to SEQ ID NO: 9891
  source 1..45: mol_type = genomic DNA

SEQ ID NO: 46073 - DNA, 46 bp, Homo sapiens; identical to SEQ ID NO: 9892
  source 1..46: mol_type = genomic DNA

SEQ ID NO: 46074 - DNA, 21 bp, Homo sapiens
  source 1..21: mol_type = genomic DNA
ccaacacctctttacagtgac

SEQ ID NO: 46075 - DNA, 22 bp, Homo sapiens
  source 1..22: mol_type = genomic DNA
ccaacacctctttacagtgacc

SEQ ID NO: 46076 - DNA, 23 bp, Homo sapiens
  source 1..23: mol_type = genomic DNA
ccaacacctctttacagtgacca

SEQ ID NO: 46077 - DNA, 18 bp, Homo sapiens
  source 1..18: mol_type = genomic DNA
ccaacttacacttaggag

SEQ ID NO: 46078 - DNA, 26 bp, Homo sapiens
  source 1..26: mol_type = genomic DNA
ccaacttacacttaggagatttcaac

SEQ ID NO: 46079 - DNA, 27 bp, Homo sapiens
  source 1..27: mol_type = genomic DNA
ccaacttacacttaggagatttcaact

SEQ ID NO: 46080 - DNA, 28 bp, Homo sapiens
  source 1..28: mol_type = genomic DNA
ccaacttacacttaggagatttcaactt

SEQ ID NO: 46081 - DNA, 32 bp, Homo sapiens; identical to SEQ ID NO: 9920
  source 1..32: mol_type = genomic DNA

SEQ ID NO: 46082 - DNA, 37 bp, Homo sapiens; identical to SEQ ID NO: 9925
  source 1..37: mol_type = genomic DNA

SEQ ID NO: 46083 - DNA, 38 bp, Homo sapiens; identical to SEQ ID NO: 9926
  source 1..38: mol_type = genomic DNA

SEQ ID NO: 46084 - DNA, 39 bp, Homo sapiens; identical to SEQ ID NO: 9927
  source 1..39: mol_type = genomic DNA

SEQ ID NO: 46085 - DNA, 40 bp, Homo sapiens; identical to SEQ ID NO: 9928
  source 1..40: mol_type = genomic DNA

SEQ ID NO: 46086 - DNA, 41 bp, Homo sapiens; identical to SEQ ID NO: 9929
  source 1..41: mol_type = genomic DNA

SEQ ID NO: 46087 - DNA, 42 bp, Homo sapiens; identical to SEQ ID NO: 9930
  source 1..42: mol_type = genomic DNA

SEQ ID NO: 46088 - DNA, 43 bp, Homo sapiens; identical to SEQ ID NO: 9931
  source 1..43: mol_type = genomic DNA

SEQ ID NO: 46089 - DNA, 44 bp, Homo sapiens; identical to SEQ ID NO: 9932
  source 1..44: mol_type = genomic DNA

SEQ ID NO: 46090 - DNA, 45 bp, Homo sapiens; identical to SEQ ID NO: 9933
  source 1..45: mol_type = genomic DNA

SEQ ID NO: 46091 - DNA, 46 bp, Homo sapiens; identical to SEQ ID NO: 9934
  source 1..46: mol_type = genomic DNA

SEQ ID NO: 46092 - DNA, 47 bp, Homo sapiens; identical to SEQ ID NO: 9935
  source 1..47: mol_type = genomic DNA

SEQ ID NO: 46093 - DNA, 16 bp, Homo sapiens
  source 1..16: mol_type = genomic DNA
ccaaggtcgcgggttc

SEQ ID NO: 46094 - DNA, 31 bp, Homo sapiens; identical to SEQ ID NO: 9952
  source 1..31: mol_type = genomic DNA

SEQ ID NO: 46095 - DNA, 35 bp, Homo sapiens; identical to SEQ ID NO: 9956
  source 1..35: mol_type = genomic DNA

SEQ ID NO: 46096 - DNA, 36 bp, Homo sapiens; identical to SEQ ID NO: 9959
  source 1..36: mol_type = genomic DNA

SEQ ID NO: 46097 - DNA, 36 bp, Homo sapiens; identical to SEQ ID NO: 9965
  source 1..36: mol_type = genomic DNA

SEQ ID NO: 46098 - DNA, 37 bp, Homo sapiens; identical to SEQ ID NO: 9966
  source 1..37: mol_type = genomic DNA

SEQ ID NO: 46099 - DNA, 38 bp, Homo sapiens; identical to SEQ ID NO: 9967
  source 1..38: mol_type = genomic DNA

SEQ ID NO: 46100 - DNA, 39 bp, Homo sapiens; identical to SEQ ID NO: 9968
  source 1..39: mol_type = genomic DNA

SEQ ID NO: 46101 - DNA, 19 bp, Homo sapiens
  source 1..19: mol_type = genomic DNA
ccaattaactagttttgac

SEQ ID NO: 46102 - DNA, 38 bp, Homo sapiens; identical to SEQ ID NO: 9974
  source 1..38: mol_type = genomic DNA

SEQ ID NO: 46103 - DNA, 39 bp, Homo sapiens; identical to SEQ ID NO: 9975
  source 1..39: mol_type = genomic DNA

SEQ ID NO: 46104 - DNA, 40 bp, Homo sapiens; identical to SEQ ID NO: 9976
  source 1..40: mol_type = genomic DNA

SEQ ID NO: 46105 - DNA, 16 bp, Homo sapiens
  source 1..16: mol_type = genomic DNA
ccacatggtctagcgg

SEQ ID NO: 46106 - DNA, 26 bp, Homo sapiens
  source 1..26: mol_type = genomic DNA
ccacatggtctagcggttaggattcc

SEQ ID NO: 46107 - DNA, 27 bp, Homo sapiens
  source 1..27: mol_type = genomic DNA
ccacatggtctagcggttaggattcct

SEQ ID NO: 46108 - DNA, 28 bp, Homo sapiens
  source 1..28: mol_type = genomic DNA
ccacatggtctagcggttaggattcctg

SEQ ID NO: 46109 - DNA, 30 bp, Homo sapiens; identical to SEQ ID NO: 9987
  source 1..30: mol_type = genomic DNA

SEQ ID NO: 46110 - DNA, 31 bp, Homo sapiens; identical to SEQ ID NO: 9988
  source 1..31: mol_type = genomic DNA

SEQ ID NO: 46111 - DNA, 32 bp, Homo sapiens; identical to SEQ ID NO: 9989
  source 1..32: mol_type = genomic DNA

SEQ ID NO: 46112 - DNA, 33 bp, Homo sapiens; identical to SEQ ID NO: 9990
  source 1..33: mol_type = genomic DNA

SEQ ID NO: 46113 - DNA, 34 bp, Homo sapiens; identical to SEQ ID NO: 9991
  source 1..34: mol_type = genomic DNA

SEQ ID NO: 46114 - DNA, 16 bp, Homo sapiens
  source 1..16: mol_type = genomic DNA
ccacccagggacgcca

SEQ ID NO: 46115 - DNA, 17 bp, Homo sapiens
  source 1..17: mol_type = genomic DNA
ccacgcgggaggcccgg

SEQ ID NO: 46116 - DNA, 19 bp, Homo sapiens
  source 1..19: mol_type = genomic DNA
ccacgcgggaggcccgggt

SEQ ID NO: 46117 - DNA, 20 bp, Homo sapiens
  source 1..20: mol_type = genomic DNA
ccacgcgggaggcccgggtt

SEQ ID NO: 46118 - DNA, 32 bp, Homo sapiens; identical to SEQ ID NO: 10006
  source 1..32: mol_type = genomic DNA

SEQ ID NO: 46119 - DNA, 36 bp, Homo sapiens; identical to SEQ ID NO: 10009
  source 1..36: mol_type = genomic DNA

SEQ ID NO: 46120 - DNA, 37 bp, Homo sapiens; identical to SEQ ID NO: 10010
  source 1..37: mol_type = genomic DNA

SEQ ID NO: 46121 - DNA, 40 bp, Homo sapiens; identical to SEQ ID NO: 10012
  source 1..40: mol_type = genomic DNA

SEQ ID NO: 46122 - DNA, 41 bp, Homo sapiens; identical to SEQ ID NO: 10013
  source 1..41: mol_type = genomic DNA

SEQ ID NO: 46123 - DNA, 40 bp, Homo sapiens; identical to SEQ ID NO: 10015
  source 1..40: mol_type = genomic DNA

SEQ ID NO: 46124 - DNA, 41 bp, Homo sapiens; identical to SEQ ID NO: 10016
  source 1..41: mol_type = genomic DNA

SEQ ID NO: 46125 - DNA, 16 bp, Homo sapiens
  source 1..16: mol_type = genomic DNA
ccagaggtcgatggat

SEQ ID NO: 46126 - DNA, 18 bp, Homo sapiens
  source 1..18: mol_type = genomic DNA
ccagaggtcgatggatcg

SEQ ID NO: 46127 - DNA, 23 bp, Homo sapiens
  source 1..23: mol_type = genomic DNA
ccagaggtcgatggatcgaaacc

SEQ ID NO: 46128 - DNA, 17 bp, Homo sapiens
  source 1..17: mol_type = genomic DNA
ccagatcagaaggctgc

SEQ ID NO: 46129 - DNA, 16 bp, Homo sapiens
  source 1..16: mol_type = genomic DNA
ccagcgatccgagttc

SEQ ID NO: 46130 - DNA, 34 bp, Homo sapiens; identical to SEQ ID NO: 10089
  source 1..34: mol_type = genomic DNA

SEQ ID NO: 46131 - DNA, 35 bp, Homo sapiens; identical to SEQ ID NO: 10090
  source 1..35: mol_type = genomic DNA

SEQ ID NO: 46132 - DNA, 36 bp, Homo sapiens; identical to SEQ ID NO: 10091
  source 1..36: mol_type = genomic DNA

SEQ ID NO: 46133 - DNA, 34 bp, Homo sapiens; identical to SEQ ID NO: 10095
  source 1..34: mol_type = genomic DNA

SEQ ID NO: 46134 - DNA, 34 bp, Homo sapiens; identical to SEQ ID NO: 10101
  source 1..34: mol_type = genomic DNA

SEQ ID NO: 46135 - DNA, 21 bp, Homo sapiens
  source 1..21: mol_type = genomic DNA
ccaggcggcccgggttcgact

SEQ ID NO: 46136 - DNA, 26 bp, Homo sapiens
  source 1..26: mol_type = genomic DNA
ccaggcggcccgggttcgactcccgg

SEQ ID NO: 46137 - DNA, 27 bp, Homo sapiens
  source 1..27: mol_type = genomic DNA
ccaggcggcccgggttcgactcccggt

SEQ ID NO: 46138 - DNA, 28 bp, Homo sapiens
  source 1..28: mol_type = genomic DNA
ccaggcggcccgggttcgactcccggtg

SEQ ID NO: 46139 - DNA, 29 bp, Homo sapiens
  source 1..29: mol_type = genomic DNA
ccaggcggcccgggttcgactcccggtgt

SEQ ID NO: 46140 - DNA, 30 bp, Homo sapiens; identical to SEQ ID NO: 10129
  source 1..30: mol_type = genomic DNA

SEQ ID NO: 46141 - DNA, 31 bp, Homo sapiens; identical to SEQ ID NO: 10130
  source 1..31: mol_type = genomic DNA

SEQ ID NO: 46142 - DNA, 32 bp, Homo sapiens; identical to SEQ ID NO: 10131
  source 1..32: mol_type = genomic DNA

SEQ ID NO: 46143 - DNA, 33 bp, Homo sapiens; identical to SEQ ID NO: 10132
  source 1..33: mol_type = genomic DNA

SEQ ID NO: 46144 - DNA, 34 bp, Homo sapiens; identical to SEQ ID NO: 10133
  source 1..34: mol_type = genomic DNA

SEQ ID NO: 46145 - DNA, 35 bp, Homo sapiens; identical to SEQ ID NO: 10134
  source 1..35: mol_type = genomic DNA

SEQ ID NO: 46146 - DNA, 36 bp, Homo sapiens; identical to SEQ ID NO: 10135
  source 1..36: mol_type = genomic DNA

SEQ ID NO: 46147 - DNA, 37 bp, Homo sapiens; identical to SEQ ID NO: 10136
  source 1..37: mol_type = genomic DNA

SEQ ID NO: 46148 - DNA, 36 bp, Homo sapiens; identical to SEQ ID NO: 10143
  source 1..36: mol_type = genomic DNA

SEQ ID NO: 46149 - DNA, 36 bp, Homo sapiens; identical to SEQ ID NO: 10144
  source 1..36: mol_type = genomic DNA

SEQ ID NO: 46150 - DNA, 35 bp, Homo sapiens; identical to SEQ ID NO: 10148
  source 1..35: mol_type = genomic DNA

SEQ ID NO: 46151 - DNA, 36 bp, Homo sapiens; identical to SEQ ID NO: 10149
  source 1..36: mol_type = genomic DNA

SEQ ID NO: 46152 - DNA, 34 bp, Homo sapiens; identical to SEQ ID NO: 10156
  source 1..34: mol_type = genomic DNA

SEQ ID NO: 46153 - DNA, 35 bp, Homo sapiens; identical to SEQ ID NO: 10157
  source 1..35: mol_type = genomic DNA

SEQ ID NO: 46154 - DNA, 36 bp, Homo sapiens; identical to SEQ ID NO: 10158
  source 1..36: mol_type = genomic DNA

SEQ ID NO: 46155 - DNA, 25 bp, Homo sapiens
  source 1..25: mol_type = genomic DNA
ccagggttcaagtccctgttcgggc

SEQ ID NO: 46156 - DNA, 26 bp, Homo sapiens
  source 1..26: mol_type = genomic DNA
ccagggttcaagtccctgttcgggcg

SEQ ID NO: 46157 - DNA, 27 bp, Homo sapiens
  source 1..27: mol_type = genomic DNA
ccagggttcaagtccctgttcgggcgc

SEQ ID NO: 46158 - DNA, 28 bp, Homo sapiens
  source 1..28: mol_type = genomic DNA
ccagggttcaagtccctgttcgggcgcc

SEQ ID NO: 46159 - DNA, 29 bp, Homo sapiens
  source 1..29: mol_type = genomic DNA
ccagggttcaagtccctgttcgggcgcca

SEQ ID NO: 46160 - DNA, 34 bp, Homo sapiens; identical to SEQ ID NO: 10191
  source 1..34: mol_type = genomic DNA

SEQ ID NO: 46161 - DNA, 35 bp, Homo sapiens; identical to SEQ ID NO: 10192
  source 1..35: mol_type = genomic DNA

SEQ ID NO: 46162 - DNA, 36 bp, Homo sapiens; identical to SEQ ID NO: 10193
  source 1..36: mol_type = genomic DNA

SEQ ID NO: 46163 - DNA, 18 bp, Homo sapiens
  source 1..18: mol_type = genomic DNA
ccataacccagaggtcga

SEQ ID NO: 46164 - DNA, 23 bp, Homo sapiens
  source 1..23: mol_type = genomic DNA
ccataacccagaggtcgatggat

SEQ ID NO: 46165 - DNA, 42 bp, Homo sapiens; identical to SEQ ID NO: 10222
  source 1..42: mol_type = genomic DNA

SEQ ID NO: 46166 - DNA, 28 bp, Homo sapiens
  source 1..28: mol_type = genomic DNA
ccatatggtctagcggttaggattcctg

SEQ ID NO: 46167 - DNA, 31 bp, Homo sapiens; identical to SEQ ID NO: 10248
  source 1..31: mol_type = genomic DNA

SEQ ID NO: 46168 - DNA, 34 bp, Homo sapiens; identical to SEQ ID NO: 10251
  source 1..34: mol_type = genomic DNA

SEQ ID NO: 46169 - DNA, 16 bp, Homo sapiens
  source 1..16: mol_type = genomic DNA
ccatcctctgctacca

SEQ ID NO: 46170 - DNA, 29 bp, Homo sapiens
  source 1..29: mol_type = genomic DNA
ccatgatcgtatagtggttagtactctgc

SEQ ID NO: 46171 - DNA, 25 bp, Homo sapiens
  source 1..25: mol_type = genomic DNA
ccatggtgtaatggttagcactctg

SEQ ID NO: 46172 - DNA, 30 bp, Homo sapiens; identical to SEQ ID NO: 10275
  source 1..30: mol_type = genomic DNA

SEQ ID NO: 46173 - DNA, 32 bp, Homo sapiens; identical to SEQ ID NO: 10277
  source 1..32: mol_type = genomic DNA

SEQ ID NO: 46174 - DNA, 16 bp, Homo sapiens
  source 1..16: mol_type = genomic DNA
ccattcttgcgacccg

SEQ ID NO: 46175 - DNA, 17 bp, Homo sapiens
  source 1..17: mol_type = genomic DNA
ccattcttgcgacccgg

SEQ ID NO: 46176 - DNA, 19 bp, Homo sapiens
  source 1..19: mol_type = genomic DNA
ccattcttgcgacccgggt

SEQ ID NO: 46177 - DNA, 40 bp, Homo sapiens
  source 1..40: mol_type = genomic DNA
ccattgtgctttgcacgcgtgggttcgaatcccatcctcg

SEQ ID NO: 46178 - DNA, 45 bp, Homo sapiens; identical to SEQ ID NO: 10317
  source 1..45: mol_type = genomic DNA

SEQ ID NO: 46179 - DNA, 46 bp, Homo sapiens; identical to SEQ ID NO: 10318
  source 1..46: mol_type = genomic DNA

SEQ ID NO: 46180 - DNA, 33 bp, Homo sapiens; identical to SEQ ID NO: 10334
  source 1..33: mol_type = genomic DNA

SEQ ID NO: 46181 - DNA, 36 bp, Homo sapiens; identical to SEQ ID NO: 10337
  source 1..36: mol_type = genomic DNA

SEQ ID NO: 46182 - DNA, 37 bp, Homo sapiens; identical to SEQ ID NO: 10338
  source 1..37: mol_type = genomic DNA

SEQ ID NO: 46183 - DNA, 21 bp, Homo sapiens
  source 1..21: mol_type = genomic DNA
cccaacttacacttaggagat

SEQ ID NO: 46184 - DNA, 28 bp, Homo sapiens
  source 1..28: mol_type = genomic DNA
cccaacttacacttaggagatttcaact

SEQ ID NO: 46185 - DNA, 29 bp, Homo sapiens
  source 1..29: mol_type = genomic DNA
cccaacttacacttaggagatttcaactt

SEQ ID NO: 46186 - DNA, 33 bp, Homo sapiens
  source 1..33: mol_type = genomic DNA
cccaacttacacttaggagatttcaacttaact

SEQ ID NO: 46187 - DNA, 39 bp, Homo sapiens; identical to SEQ ID NO: 10358
  source 1..39: mol_type = genomic DNA

SEQ ID NO: 46188 - DNA, 41 bp, Homo sapiens; identical to SEQ ID NO: 10360
  source 1..41: mol_type = genomic DNA

SEQ ID NO: 46189 - DNA, 42 bp, Homo sapiens; identical to SEQ ID NO: 10361
  source 1..42: mol_type = genomic DNA

SEQ ID NO: 46190 - DNA, 43 bp, Homo sapiens; identical to SEQ ID NO: 10362
  source 1..43: mol_type = genomic DNA

SEQ ID NO: 46191 - DNA, 44 bp, Homo sapiens; identical to SEQ ID NO: 10363
  source 1..44: mol_type = genomic DNA

SEQ ID NO: 46192 - DNA, 45 bp, Homo sapiens; identical to SEQ ID NO: 10364
  source 1..45: mol_type = genomic DNA

SEQ ID NO: 46193 - DNA, 46 bp, Homo sapiens; identical to SEQ ID NO: 10365
  source 1..46: mol_type = genomic DNA

SEQ ID NO: 46194 - DNA, 47 bp, Homo sapiens; identical to SEQ ID NO: 10366
  source 1..47: mol_type = genomic DNA

SEQ ID NO: 46195 - DNA, 16 bp, Homo sapiens
  source 1..16: mol_type = genomic DNA
cccacatggtctagcg

SEQ ID NO: 46196 - DNA, 25 bp, Homo sapiens
  source 1..25: mol_type = genomic DNA
cccacatggtctagcggttaggatt

SEQ ID NO: 46197 - DNA, 27 bp, Homo sapiens
  source 1..27: mol_type = genomic DNA
cccacatggtctagcggttaggattcc

SEQ ID NO: 46198 - DNA, 28 bp, Homo sapiens
  source 1..28: mol_type = genomic DNA
cccacatggtctagcggttaggattcct

SEQ ID NO: 46199 - DNA, 29 bp, Homo sapiens
  source 1..29: mol_type = genomic DNA
cccacatggtctagcggttaggattcctg

SEQ ID NO: 46200 - DNA, 30 bp, Homo sapiens; identical to SEQ ID NO: 10375
  source 1..30: mol_type = genomic DNA

SEQ ID NO: 46201 - DNA, 31 bp, Homo sapiens; identical to SEQ ID NO: 10376
  source 1..31: mol_type = genomic DNA

SEQ ID NO: 46202 - DNA, 32 bp, Homo sapiens; identical to SEQ ID NO: 10377
  source 1..32: mol_type = genomic DNA

SEQ ID NO: 46203 - DNA, 33 bp, Homo sapiens; identical to SEQ ID NO: 10378
  source 1..33: mol_type = genomic DNA

SEQ ID NO: 46204 - DNA, 34 bp, Homo sapiens; identical to SEQ ID NO: 10379
  source 1..34: mol_type = genomic DNA

SEQ ID NO: 46205 - DNA, 16 bp, Homo sapiens
  source 1..16: mol_type = genomic DNA
cccaccagagtcgcca

SEQ ID NO: 46206 - DNA, 16 bp, Homo sapiens
  source 1..16: mol_type = genomic DNA
cccacccagggacgcc

SEQ ID NO: 46207 - DNA, 17 bp, Homo sapiens
  source 1..17: mol_type = genomic DNA
cccacccagggacgcca

SEQ ID NO: 46208 - DNA, 16 bp, Homo sapiens
  source 1..16: mol_type = genomic DNA
cccacccggggtacca

SEQ ID NO: 46209 - DNA, 16 bp, Homo sapiens
  source 1..16: mol_type = genomic DNA
cccaccgctgccacca

SEQ ID NO: 46210 - DNA, 16 bp, Homo sapiens
  source 1..16: mol_type = genomic DNA
cccacctggggtacca

SEQ ID NO: 46211 - DNA, 16 bp, Homo sapiens
  source 1..16: mol_type = genomic DNA
cccacctggggtgcca

SEQ ID NO: 46212 - DNA, 16 bp, Homo sapiens
  source 1..16: mol_type = genomic DNA
cccacgttgggcgcca

SEQ ID NO: 46213 - DNA, 16 bp, Homo sapiens
  source 1..16: mol_type = genomic DNA
cccactcctgacacca

SEQ ID NO: 46214 - DNA, 16 bp, Homo sapiens
  source 1..16: mol_type = genomic DNA
cccactcctggtacca

SEQ ID NO: 46215 - DNA, 16 bp, Homo sapiens
  source 1..16: mol_type = genomic DNA
cccacttctgacacca

SEQ ID NO: 46216 - DNA, 17 bp, Homo sapiens
  source 1..17: mol_type = genomic DNA
cccagaggtcgatggat

SEQ ID NO: 46217 - DNA, 18 bp, Homo sapiens
  source 1..18: mol_type = genomic DNA
cccagaggtcgatggatc

SEQ ID NO: 46218 - DNA, 19 bp, Homo sapiens
  source 1..19: mol_type = genomic DNA
cccagaggtcgatggatcg

SEQ ID NO: 46219 - DNA, 37 bp, Homo sapiens; identical to SEQ ID NO: 34772
  source 1..37: mol_type = genomic DNA

SEQ ID NO: 46220 - DNA, 16 bp, Homo sapiens
  source 1..16: mol_type = genomic DNA
cccagcatctccacca

SEQ ID NO: 46221 - DNA, 16 bp, Homo sapiens
  source 1..16: mol_type = genomic DNA
cccagcggggcctcca

SEQ ID NO: 46222 - DNA, 16 bp, Homo sapiens
  source 1..16: mol_type = genomic DNA
cccagcggtgcctcca

SEQ ID NO: 46223 - DNA, 30 bp, Homo sapiens; identical to SEQ ID NO: 10415
  source 1..30: mol_type = genomic DNA

SEQ ID NO: 46224 - DNA, 31 bp, Homo sapiens; identical to SEQ ID NO: 10416
  source 1..31: mol_type = genomic DNA

SEQ ID NO: 46225 - DNA, 32 bp, Homo sapiens; identical to SEQ ID NO: 10417
  source 1..32: mol_type = genomic DNA

SEQ ID NO: 46226 - DNA, 33 bp, Homo sapiens; identical to SEQ ID NO: 10418
  source 1..33: mol_type = genomic DNA

SEQ ID NO: 46227 - DNA, 35 bp, Homo sapiens; identical to SEQ ID NO: 10420
  source 1..35: mol_type = genomic DNA

SEQ ID NO: 46228 - DNA, 36 bp, Homo sapiens; identical to SEQ ID NO: 10421
  source 1..36: mol_type = genomic DNA

SEQ ID NO: 46229 - DNA, 37 bp, Homo sapiens; identical to SEQ ID NO: 10422
  source 1..37: mol_type = genomic DNA

SEQ ID NO: 46230 - DNA, 38 bp, Homo sapiens; identical to SEQ ID NO: 10423
  source 1..38: mol_type = genomic DNA

SEQ ID NO: 46231 - DNA, 16 bp, Homo sapiens
  source 1..16: mol_type = genomic DNA
cccagtggaaccacca

SEQ ID NO: 46232 - DNA, 21 bp, Homo sapiens
  source 1..21: mol_type = genomic DNA
cccataacccagaggtcgatg

SEQ ID NO: 46233 - DNA, 24 bp, Homo sapiens
  source 1..24: mol_type = genomic DNA
cccataacccagaggtcgatggat

SEQ ID NO: 46234 - DNA, 32 bp, Homo sapiens; identical to SEQ ID NO: 34794
  source 1..32: mol_type = genomic DNA

SEQ ID NO: 46235 - DNA, 33 bp, Homo sapiens; identical to SEQ ID NO: 34795
  source 1..33: mol_type = genomic DNA

SEQ ID NO: 46236 - DNA, 32 bp, Homo sapiens
  source 1..32: mol_type = genomic DNA
cccataccccgaaaatgttggttatacccttc

SEQ ID NO: 46237 - DNA, 43 bp, Homo sapiens; identical to SEQ ID NO: 10473
  source 1..43: mol_type = genomic DNA

SEQ ID NO: 46238 - DNA, 25 bp, Homo sapiens
  source 1..25: mol_type = genomic DNA
cccatatggtctagcggttaggatt

SEQ ID NO: 46239 - DNA, 27 bp, Homo sapiens
  source 1..27: mol_type = genomic DNA
cccatatggtctagcggttaggattcc

SEQ ID NO: 46240 - DNA, 32 bp, Homo sapiens; identical to SEQ ID NO: 10481
  source 1..32: mol_type = genomic DNA

SEQ ID NO: 46241 - DNA, 34 bp, Homo sapiens; identical to SEQ ID NO: 10483
  source 1..34: mol_type = genomic DNA

SEQ ID NO: 46242 - DNA, 16 bp, Homo sapiens
  source 1..16: mol_type = genomic DNA
cccatcctcgtcgcca

SEQ ID NO: 46243 - DNA, 16 bp, Homo sapiens
  source 1..16: mol_type = genomic DNA
cccatctggggtgcca

SEQ ID NO: 46244 - DNA, 16 bp, Homo sapiens
  source 1..16: mol_type = genomic DNA
cccatctgggtcgcca

SEQ ID NO: 46245 - DNA, 30 bp, Homo sapiens; identical to SEQ ID NO: 10495
  source 1..30: mol_type = genomic DNA

SEQ ID NO: 46246 - DNA, 16 bp, Homo sapiens
  source 1..16: mol_type = genomic DNA
cccattcttgcgaccc

SEQ ID NO: 46247 - DNA, 17 bp, Homo sapiens
  source 1..17: mol_type = genomic DNA
cccattcttgcgacccg

SEQ ID NO: 46248 - DNA, 18 bp, Homo sapiens
  source 1..18: mol_type = genomic DNA
cccattcttgcgacccgg

SEQ ID NO: 46249 - DNA, 19 bp, Homo sapiens
  source 1..19: mol_type = genomic DNA
cccattcttgcgacccggg

SEQ ID NO: 46250 - DNA, 20 bp, Homo sapiens
  source 1..20: mol_type = genomic DNA
cccattcttgcgacccgggt

SEQ ID NO: 46251 - DNA, 21 bp, Homo sapiens
  source 1..21: mol_type = genomic DNA
cccattcttgcgacccgggtt

SEQ ID NO: 46252 - DNA, 22 bp, Homo sapiens
  source 1..22: mol_type = genomic DNA
cccattcttgcgacccgggttc

SEQ ID NO: 46253 - DNA, 23 bp, Homo sapiens
  source 1..23: mol_type = genomic DNA
cccattcttgcgacccgggttcg

SEQ ID NO: 46254 - DNA, 24 bp, Homo sapiens
  source 1..24: mol_type = genomic DNA
cccattcttgcgacccgggttcga

SEQ ID NO: 46255 - DNA, 25 bp, Homo sapiens
  source 1..25: mol_type = genomic DNA
cccattcttgcgacccgggttcgat

SEQ ID NO: 46256 - DNA, 26 bp, Homo sapiens
  source 1..26: mol_type = genomic DNA
cccattcttgcgacccgggttcgatt

SEQ ID NO: 46257 - DNA, 35 bp, Homo sapiens; identical to SEQ ID NO: 10520
  source 1..35: mol_type = genomic DNA

SEQ ID NO: 46258 - DNA, 36 bp, Homo sapiens; identical to SEQ ID NO: 10521
  source 1..36: mol_type = genomic DNA

SEQ ID NO: 46259 - DNA, 37 bp, Homo sapiens; identical to SEQ ID NO: 10522
  source 1..37: mol_type = genomic DNA

SEQ ID NO: 46260 - DNA, 38 bp, Homo sapiens; identical to SEQ ID NO: 10523
  source 1..38: mol_type = genomic DNA

SEQ ID NO: 46261 - DNA, 39 bp, Homo sapiens; identical to SEQ ID NO: 10524
  source 1..39: mol_type = genomic DNA

SEQ ID NO: 46262 - DNA, 40 bp, Homo sapiens; identical to SEQ ID NO: 10525
  source 1..40: mol_type = genomic DNA

SEQ ID NO: 46263 - DNA, 41 bp, Homo sapiens; identical to SEQ ID NO: 10526
  source 1..41: mol_type = genomic DNA

SEQ ID NO: 46264 - DNA, 42 bp, Homo sapiens; identical to SEQ ID NO: 10527
  source 1..42: mol_type = genomic DNA

SEQ ID NO: 46265 - DNA, 16 bp, Homo sapiens
  source 1..16: mol_type = genomic DNA
cccattggtctagcca

SEQ ID NO: 46266 - DNA, 16 bp, Homo sapiens
  source 1..16: mol_type = genomic DNA
ccccacattgggcgcc

SEQ ID NO: 46267 - DNA, 16 bp, Homo sapiens
  source 1..16: mol_type = genomic DNA
ccccacgttgggcgcc

SEQ ID NO: 46268 - DNA, 17 bp, Homo sapiens
  source 1..17: mol_type = genomic DNA
ccccacgttgggcgcca

SEQ ID NO: 46269 - DNA, 16 bp, Homo sapiens
  source 1..16: mol_type = genomic DNA
ccccactcctggtacc

SEQ ID NO: 46270 - DNA, 16 bp, Homo sapiens
  source 1..16: mol_type = genomic DNA
ccccagcatctccacc

SEQ ID NO: 46271 - DNA, 16 bp, Homo sapiens
  source 1..16: mol_type = genomic DNA
ccccagtggaaccacc

SEQ ID NO: 46272 - DNA, 17 bp, Homo sapiens
  source 1..17: mol_type = genomic DNA
ccccagtggaaccacca

SEQ ID NO: 46273 - DNA, 31 bp, Homo sapiens; identical to SEQ ID NO: 10560
  source 1..31: mol_type = genomic DNA

SEQ ID NO: 46274 - DNA, 22 bp, Homo sapiens
  source 1..22: mol_type = genomic DNA
ccccatgtctaacaacatggct

SEQ ID NO: 46275 - DNA, 30 bp, Homo sapiens; identical to SEQ ID NO: 10569
  source 1..30: mol_type = genomic DNA

SEQ ID NO: 46276 - DNA, 31 bp, Homo sapiens; identical to SEQ ID NO: 10570
  source 1..31: mol_type = genomic DNA

SEQ ID NO: 46277 - DNA, 17 bp, Homo sapiens
  source 1..17: mol_type = genomic DNA
cccccggctcctccacc

SEQ ID NO: 46278 - DNA, 18 bp, Homo sapiens
  source 1..18: mol_type = genomic DNA
cccccggctcctccacca

SEQ ID NO: 46279 - DNA, 37 bp, Homo sapiens; identical to SEQ ID NO: 10600
  source 1..37: mol_type = genomic DNA

SEQ ID NO: 46280 - DNA, 16 bp, Homo sapiens
  source 1..16: mol_type = genomic DNA
ccccgacggggagcca

SEQ ID NO: 46281 - DNA, 32 bp, Homo sapiens; identical to SEQ ID NO: 34862
  source 1..32: mol_type = genomic DNA

SEQ ID NO: 46282 - DNA, 33 bp, Homo sapiens; identical to SEQ ID NO: 34863
  source 1..33: mol_type = genomic DNA

SEQ ID NO: 46283 - DNA, 31 bp, Homo sapiens; identical to SEQ ID NO: 34871
  source 1..31: mol_type = genomic DNA

SEQ ID NO: 46284 - DNA, 32 bp, Homo sapiens; identical to SEQ ID NO: 34872
  source 1..32: mol_type = genomic DNA

SEQ ID NO: 46285 - DNA, 33 bp, Homo sapiens; identical to SEQ ID NO: 10606
  source 1..33: mol_type = genomic DNA

SEQ ID NO: 46286 - DNA, 34 bp, Homo sapiens; identical to SEQ ID NO: 34874
  source 1..34: mol_type = genomic DNA

SEQ ID NO: 46287 - DNA, 21 bp, Homo sapiens
  source 1..21: mol_type = genomic DNA
ccccgcgcaggttcgaatcct

SEQ ID NO: 46288 - DNA, 31 bp, Homo sapiens; identical to SEQ ID NO: 34884
  source 1..31: mol_type = genomic DNA

SEQ ID NO: 46289 - DNA, 32 bp, Homo sapiens; identical to SEQ ID NO: 34885
  source 1..32: mol_type = genomic DNA

SEQ ID NO: 46290 - DNA, 33 bp, Homo sapiens; identical to SEQ ID NO: 10615
  source 1..33: mol_type = genomic DNA

SEQ ID NO: 46291 - DNA, 31 bp, Homo sapiens; identical to SEQ ID NO: 34890
  source 1..31: mol_type = genomic DNA

SEQ ID NO: 46292 - DNA, 32 bp, Homo sapiens; identical to SEQ ID NO: 34891
  source 1..32: mol_type = genomic DNA

SEQ ID NO: 46293 - DNA, 33 bp, Homo sapiens; identical to SEQ ID NO: 10618
  source 1..33: mol_type = genomic DNA

SEQ ID NO: 46294 - DNA, 16 bp, Homo sapiens
  source 1..16: mol_type = genomic DNA
ccccggcacctccacc

SEQ ID NO: 46295 - DNA, 17 bp, Homo sapiens
  source 1..17: mol_type = genomic DNA
ccccggcacctccacca

SEQ ID NO: 46296 - DNA, 16 bp, Homo sapiens
  source 1..16: mol_type = genomic DNA
ccccggcatctccacc

SEQ ID NO: 46297 - DNA, 17 bp, Homo sapiens
  source 1..17: mol_type = genomic DNA
ccccggcatctccacca

SEQ ID NO: 46298 - DNA, 29 bp, Homo sapiens
  source 1..29: mol_type = genomic DNA
ccccgggttcaatccccggcacctccacc

SEQ ID NO: 46299 - DNA, 30 bp, Homo sapiens; identical to SEQ ID NO: 10630
  source 1..30: mol_type = genomic DNA

SEQ ID NO: 46300 - DNA, 29 bp, Homo sapiens
  source 1..29: mol_type = genomic DNA
ccccgggttcgatccccggcatctccacc

SEQ ID NO: 46301 - DNA, 30 bp, Homo sapiens; identical to SEQ ID NO: 10637
  source 1..30: mol_type = genomic DNA

SEQ ID NO: 46302 - DNA, 16 bp, Homo sapiens
  source 1..16: mol_type = genomic DNA
ccccgtacgggccacc

SEQ ID NO: 46303 - DNA, 17 bp, Homo sapiens
  source 1..17: mol_type = genomic DNA
ccccgtacgggccacca

SEQ ID NO: 46304 - DNA, 16 bp, Homo sapiens
  source 1..16: mol_type = genomic DNA
ccccgtactggccacc

SEQ ID NO: 46305 - DNA, 16 bp, Homo sapiens
  source 1..16: mol_type = genomic DNA
ccccgtccgtgcctcc

SEQ ID NO: 46306 - DNA, 17 bp, Homo sapiens
  source 1..17: mol_type = genomic DNA
ccccgtccgtgcctcca

SEQ ID NO: 46307 - DNA, 17 bp, Homo sapiens
  source 1..17: mol_type = genomic DNA
cccctggaggcgtgggt

SEQ ID NO: 46308 - DNA, 16 bp, Homo sapiens
  source 1..16: mol_type = genomic DNA
ccccttatttacccca

SEQ ID NO: 46309 - DNA, 33 bp, Homo sapiens; identical to SEQ ID NO: 10671
  source 1..33: mol_type = genomic DNA

SEQ ID NO: 46310 - DNA, 36 bp, Homo sapiens; identical to SEQ ID NO: 10674
  source 1..36: mol_type = genomic DNA

SEQ ID NO: 46311 - DNA, 16 bp, Homo sapiens
  source 1..16: mol_type = genomic DNA
cccgcatcctccacca

SEQ ID NO: 46312 - DNA, 47 bp, Homo sapiens; identical to SEQ ID NO: 34929
  source 1..47: mol_type = genomic DNA

SEQ ID NO: 46313 - DNA, 31 bp, Homo sapiens; identical to SEQ ID NO: 34935
  source 1..31: mol_type = genomic DNA

SEQ ID NO: 46314 - DNA, 16 bp, Homo sapiens
  source 1..16: mol_type = genomic DNA
cccggacgagccccca

SEQ ID NO: 46315 - DNA, 18 bp, Homo sapiens
  source 1..18: mol_type = genomic DNA
cccggatagctcagtcgg

SEQ ID NO: 46316 - DNA, 31 bp, Homo sapiens; identical to SEQ ID NO: 10702
  source 1..31: mol_type = genomic DNA

SEQ ID NO: 46317 - DNA, 32 bp, Homo sapiens; identical to SEQ ID NO: 10703
  source 1..32: mol_type = genomic DNA

SEQ ID NO: 46318 - DNA, 16 bp, Homo sapiens
  source 1..16: mol_type = genomic DNA
cccggcacctccacca

SEQ ID NO: 46319 - DNA, 16 bp, Homo sapiens
  source 1..16: mol_type = genomic DNA
cccggcatctccacca

SEQ ID NO: 46320 - DNA, 16 bp, Homo sapiens
  source 1..16: mol_type = genomic DNA
cccggccaacgcacca

SEQ ID NO: 46321 - DNA, 16 bp, Homo sapiens
  source 1..16: mol_type = genomic DNA
cccggccaatgcacca

SEQ ID NO: 46322 - DNA, 16 bp, Homo sapiens
  source 1..16: mol_type = genomic DNA
cccggccagtgcacca

SEQ ID NO: 46323 - DNA, 16 bp, Homo sapiens
  source 1..16: mol_type = genomic DNA
cccggcccatgcacca

SEQ ID NO: 46324 - DNA, 16 bp, Homo sapiens
  source 1..16: mol_type = genomic DNA
cccggcggagtcgcca

SEQ ID NO: 46325 - DNA, 18 bp, Homo sapiens
  source 1..18: mol_type = genomic DNA
cccggctagctcagtcgg

SEQ ID NO: 46326 - DNA, 27 bp, Homo sapiens
  source 1..27: mol_type = genomic DNA
cccggctagctcagtcggtagagcatg

SEQ ID NO: 46327 - DNA, 32 bp, Homo sapiens; identical to SEQ ID NO: 10728
  source 1..32: mol_type = genomic DNA

SEQ ID NO: 46328 - DNA, 33 bp, Homo sapiens; identical to SEQ ID NO: 10729
  source 1..33: mol_type = genomic DNA

SEQ ID NO: 46329 - DNA, 28 bp, Homo sapiens
  source 1..28: mol_type = genomic DNA
cccggctagctcagtcggtagagcatgg

SEQ ID NO: 46330 - DNA, 31 bp, Homo sapiens; identical to SEQ ID NO: 10743
  source 1..31: mol_type = genomic DNA

SEQ ID NO: 46331 - DNA, 32 bp, Homo sapiens; identical to SEQ ID NO: 10744
  source 1..32: mol_type = genomic DNA

SEQ ID NO: 46332 - DNA, 33 bp, Homo sapiens; identical to SEQ ID NO: 10745
  source 1..33: mol_type = genomic DNA

SEQ ID NO: 46333 - DNA, 41 bp, Homo sapiens; identical to SEQ ID NO: 10750
  source 1..41: mol_type = genomic DNA

SEQ ID NO: 46334 - DNA, 16 bp, Homo sapiens
  source 1..16: mol_type = genomic DNA
cccggctcctccacca

SEQ ID NO: 46335 - DNA, 16 bp, Homo sapiens
  source 1..16: mol_type = genomic DNA
cccgggcggaaacacc

SEQ ID NO: 46336 - DNA, 17 bp, Homo sapiens
  source 1..17: mol_type = genomic DNA
cccgggcggaaacacca

SEQ ID NO: 46337 - DNA, 16 bp, Homo sapiens
  source 1..16: mol_type = genomic DNA
cccgggcggcgcacca

SEQ ID NO: 46338 - DNA, 28 bp, Homo sapiens
  source 1..28: mol_type = genomic DNA
cccgggttcaatccccggcacctccacc

SEQ ID NO: 46339 - DNA, 27 bp, Homo sapiens
  source 1..27: mol_type = genomic DNA
cccgggttcgactcccggtatgggaac

SEQ ID NO: 46340 - DNA, 25 bp, Homo sapiens
  source 1..25: mol_type = genomic DNA
cccgggttcgactcccggtgtggga

SEQ ID NO: 46341 - DNA, 26 bp, Homo sapiens
  source 1..26: mol_type = genomic DNA
cccgggttcgactcccggtgtgggaa

SEQ ID NO: 46342 - DNA, 27 bp, Homo sapiens
  source 1..27: mol_type = genomic DNA
cccgggttcgactcccggtgtgggaac

SEQ ID NO: 46343 - DNA, 28 bp, Homo sapiens
  source 1..28: mol_type = genomic DNA
cccgggttcgactcccggtgtgggaacc

SEQ ID NO: 46344 - DNA, 28 bp, Homo sapiens
  source 1..28: mol_type = genomic DNA
cccgggttcgatccccagcatctccacc

SEQ ID NO: 46345 - DNA, 28 bp, Homo sapiens
  source 1..28: mol_type = genomic DNA
cccgggttcgatccccggcatctccacc

SEQ ID NO: 46346 - DNA, 29 bp, Homo sapiens
  source 1..29: mol_type = genomic DNA
cccgggttcgatccccggcatctccacca

SEQ ID NO: 46347 - DNA, 27 bp, Homo sapiens
  source 1..27: mol_type = genomic DNA
cccgggttcgattcccggtcagggaac

SEQ ID NO: 46348 - DNA, 16 bp, Homo sapiens
  source 1..16: mol_type = genomic DNA
cccgggtttcggcacc

SEQ ID NO: 46349 - DNA, 17 bp, Homo sapiens
  source 1..17: mol_type = genomic DNA
cccgggtttcggcacca

SEQ ID NO: 46350 - DNA, 16 bp, Homo sapiens
  source 1..16: mol_type = genomic DNA
cccggtatgggaacca

SEQ ID NO: 46351 - DNA, 16 bp, Homo sapiens
  source 1..16: mol_type = genomic DNA
cccggtcagggaacca

SEQ ID NO: 46352 - DNA, 16 bp, Homo sapiens
  source 1..16: mol_type = genomic DNA
cccggtgtgggaacca

SEQ ID NO: 46353 - DNA, 16 bp, Homo sapiens
  source 1..16: mol_type = genomic DNA
cccgtacgggccacca

SEQ ID NO: 46354 - DNA, 16 bp, Homo sapiens
  source 1..16: mol_type = genomic DNA
cccgtccgtgcctcca

SEQ ID NO: 46355 - DNA, 16 bp, Homo sapiens
  source 1..16: mol_type = genomic DNA
ccctacgttgggcgcc

SEQ ID NO: 46356 - DNA, 30 bp, Homo sapiens; identical to SEQ ID NO: 10827
  source 1..30: mol_type = genomic DNA

SEQ ID NO: 46357 - DNA, 33 bp, Homo sapiens; identical to SEQ ID NO: 10830
  source 1..33: mol_type = genomic DNA

SEQ ID NO: 46358 - DNA, 16 bp, Homo sapiens
  source 1..16: mol_type = genomic DNA
ccctccgtggttacca

SEQ ID NO: 46359 - DNA, 16 bp, Homo sapiens
  source 1..16: mol_type = genomic DNA
ccctgctcgctgcgcc

SEQ ID NO: 46360 - DNA, 17 bp, Homo sapiens
  source 1..17: mol_type = genomic DNA
ccctgctcgctgcgcca

SEQ ID NO: 46361 - DNA, 32 bp, Homo sapiens; identical to SEQ ID NO: 10846
  source 1..32: mol_type = genomic DNA

SEQ ID NO: 46362 - DNA, 24 bp, Homo sapiens
  source 1..24: mol_type = genomic DNA
ccctggtggtctagtggttaggat

SEQ ID NO: 46363 - DNA, 26 bp, Homo sapiens
  source 1..26: mol_type = genomic DNA
ccctggtggtctagtggttaggattc

SEQ ID NO: 46364 - DNA, 27 bp, Homo sapiens
  source 1..27: mol_type = genomic DNA
ccctggtggtctagtggttaggattcg

SEQ ID NO: 46365 - DNA, 28 bp, Homo sapiens
  source 1..28: mol_type = genomic DNA
ccctggtggtctagtggttaggattcgg

SEQ ID NO: 46366 - DNA, 29 bp, Homo sapiens
  source 1..29: mol_type = genomic DNA
ccctggtggtctagtggttaggattcggc

SEQ ID NO: 46367 - DNA, 30 bp, Homo sapiens; identical to SEQ ID NO: 10862
  source 1..30: mol_type = genomic DNA

SEQ ID NO: 46368 - DNA, 31 bp, Homo sapiens; identical to SEQ ID NO: 10863
  source 1..31: mol_type = genomic DNA

SEQ ID NO: 46369 - DNA, 32 bp, Homo sapiens; identical to SEQ ID NO: 10864
  source 1..32: mol_type = genomic DNA

SEQ ID NO: 46370 - DNA, 33 bp, Homo sapiens; identical to SEQ ID NO: 10865
  source 1..33: mol_type = genomic DNA

SEQ ID NO: 46371 - DNA, 34 bp, Homo sapiens; identical to SEQ ID NO: 10866
  source 1..34: mol_type = genomic DNA

SEQ ID NO: 46372 - DNA, 41 bp, Homo sapiens; identical to SEQ ID NO: 10872
  source 1..41: mol_type = genomic DNA

SEQ ID NO: 46373 - DNA, 27 bp, Homo sapiens
  source 1..27: mol_type = genomic DNA
ccctggttcgatcccgggtttcggcac

SEQ ID NO: 46374 - DNA, 29 bp, Homo sapiens
  source 1..29: mol_type = genomic DNA
ccctggttcgatcccgggtttcggcacca

SEQ ID NO: 46375 - DNA, 16 bp, Homo sapiens
  source 1..16: mol_type = genomic DNA
ccctgttcgggcgcca

SEQ ID NO: 46376 - DNA, 16 bp, Homo sapiens
  source 1..16: mol_type = genomic DNA
cccttcgtggtcgcca

SEQ ID NO: 46377 - DNA, 19 bp, Homo sapiens
  source 1..19: mol_type = genomic DNA
ccgaaaatgttggttatac

SEQ ID NO: 46378 - DNA, 31 bp, Homo sapiens; identical to SEQ ID NO: 10905
  source 1..31: mol_type = genomic DNA

SEQ ID NO: 46379 - DNA, 32 bp, Homo sapiens; identical to SEQ ID NO: 10906
  source 1..32: mol_type = genomic DNA

SEQ ID NO: 46380 - DNA, 34 bp, Homo sapiens; identical to SEQ ID NO: 10908
  source 1..34: mol_type = genomic DNA

SEQ ID NO: 46381 - DNA, 35 bp, Homo sapiens; identical to SEQ ID NO: 10909
  source 1..35: mol_type = genomic DNA

SEQ ID NO: 46382 - DNA, 17 bp, Homo sapiens
  source 1..17: mol_type = genomic DNA
ccgaaaggttggtggtt

SEQ ID NO: 46383 - DNA, 35 bp, Homo sapiens; identical to SEQ ID NO: 10915
  source 1..35: mol_type = genomic DNA

SEQ ID NO: 46384 - DNA, 36 bp, Homo sapiens; identical to SEQ ID NO: 10916
  source 1..36: mol_type = genomic DNA

SEQ ID NO: 46385 - DNA, 37 bp, Homo sapiens; identical to SEQ ID NO: 10917
  source 1..37: mol_type = genomic DNA

SEQ ID NO: 46386 - DNA, 38 bp, Homo sapiens; identical to SEQ ID NO: 10918
  source 1..38: mol_type = genomic DNA

SEQ ID NO: 46387 - DNA, 37 bp, Homo sapiens; identical to SEQ ID NO: 10919
  source 1..37: mol_type = genomic DNA

SEQ ID NO: 46388 - DNA, 20 bp, Homo sapiens
  source 1..20: mol_type = genomic DNA
ccgaaatagctcagttggga

SEQ ID NO: 46389 - DNA, 22 bp, Homo sapiens
  source 1..22: mol_type = genomic DNA
ccgaaatagctcagttgggaga

SEQ ID NO: 46390 - DNA, 16 bp, Homo sapiens
  source 1..16: mol_type = genomic DNA
ccgaagatcacgggtt

SEQ ID NO: 46391 - DNA, 34 bp, Homo sapiens; identical to SEQ ID NO: 10924
  source 1..34: mol_type = genomic DNA

SEQ ID NO: 46392 - DNA, 36 bp, Homo sapiens; identical to SEQ ID NO: 10926
  source 1..36: mol_type = genomic DNA

SEQ ID NO: 46393 - DNA, 16 bp, Homo sapiens
  source 1..16: mol_type = genomic DNA
ccgaagatcgcgggtt

SEQ ID NO: 46394 - DNA, 22 bp, Homo sapiens
  source 1..22: mol_type = genomic DNA
ccgaagatcgcgggttcgaacc

SEQ ID NO: 46395 - DNA, 23 bp, Homo sapiens
  source 1..23: mol_type = genomic DNA
ccgaagatcgcgggttcgaaccc

SEQ ID NO: 46396 - DNA, 34 bp, Homo sapiens; identical to SEQ ID NO: 10933
  source 1..34: mol_type = genomic DNA

SEQ ID NO: 46397 - DNA, 33 bp, Homo sapiens; identical to SEQ ID NO: 10937
  source 1..33: mol_type = genomic DNA

SEQ ID NO: 46398 - DNA, 34 bp, Homo sapiens; identical to SEQ ID NO: 35054
  source 1..34: mol_type = genomic DNA

SEQ ID NO: 46399 - DNA, 35 bp, Homo sapiens; identical to SEQ ID NO: 10938
  source 1..35: mol_type = genomic DNA

SEQ ID NO: 46400 - DNA, 36 bp, Homo sapiens; identical to SEQ ID NO: 10939
  source 1..36: mol_type = genomic DNA

SEQ ID NO: 46401 - DNA, 37 bp, Homo sapiens; identical to SEQ ID NO: 10940
  source 1..37: mol_type = genomic DNA

SEQ ID NO: 46402 - DNA, 38 bp, Homo sapiens; identical to SEQ ID NO: 10941
  source 1..38: mol_type = genomic DNA

SEQ ID NO: 46403 - DNA, 34 bp, Homo sapiens; identical to SEQ ID NO: 35059
  source 1..34: mol_type = genomic DNA

SEQ ID NO: 46404 - DNA, 35 bp, Homo sapiens
  source 1..35: mol_type = genomic DNA
ccgagatagctcagttgggagagcgttagactgaa

SEQ ID NO: 46405 - DNA, 16 bp, Homo sapiens
  source 1..16: mol_type = genomic DNA
ccgagcggtctaaggc

SEQ ID NO: 46406 - DNA, 16 bp, Homo sapiens
  source 1..16: mol_type = genomic DNA
ccgaggttgtgagttc

SEQ ID NO: 46407 - DNA, 16 bp, Homo sapiens
  source 1..16: mol_type = genomic DNA
ccgagtcacggcacca

SEQ ID NO: 46408 - DNA, 16 bp, Homo sapiens
  source 1..16: mol_type = genomic DNA
ccgagtggtctaaggc

SEQ ID NO: 46409 - DNA, 26 bp, Homo sapiens
  source 1..26: mol_type = genomic DNA
ccgagttcaaatctcggtggaacctc

SEQ ID NO: 46410 - DNA, 25 bp, Homo sapiens
  source 1..25: mol_type = genomic DNA
ccgagttcaaatctcggtgggacct

SEQ ID NO: 46411 - DNA, 26 bp, Homo sapiens
  source 1..26: mol_type = genomic DNA
ccgagttcaaatctcggtgggacctc

SEQ ID NO: 46412 - DNA, 16 bp, Homo sapiens
  source 1..16: mol_type = genomic DNA
ccgcacgttgggcgcc

SEQ ID NO: 46413 - DNA, 36 bp, Homo sapiens; identical to SEQ ID NO: 10989
  source 1..36: mol_type = genomic DNA

SEQ ID NO: 46414 - DNA, 37 bp, Homo sapiens; identical to SEQ ID NO: 10990
  source 1..37: mol_type = genomic DNA

SEQ ID NO: 46415 - DNA, 38 bp, Homo sapiens; identical to SEQ ID NO: 10991
  source 1..38: mol_type = genomic DNA

SEQ ID NO: 46416 - DNA, 16 bp, Homo sapiens
  source 1..16: mol_type = genomic DNA
ccgccgcggcccgggt

SEQ ID NO: 46417 - DNA, 17 bp, Homo sapiens
  source 1..17: mol_type = genomic DNA
ccgccgcggcccgggtt

SEQ ID NO: 46418 - DNA, 18 bp, Homo sapiens
  source 1..18: mol_type = genomic DNA
ccgccgcggcccgggttc

SEQ ID NO: 46419 - DNA, 28 bp, Homo sapiens
  source 1..28: mol_type = genomic DNA
ccgccgcggcccgggttcgattcccggt

SEQ ID NO: 46420 - DNA, 29 bp, Homo sapiens
  source 1..29: mol_type = genomic DNA
ccgccgcggcccgggttcgattcccggtc

SEQ ID NO: 46421 - DNA, 30 bp, Homo sapiens; identical to SEQ ID NO: 11008
  source 1..30: mol_type = genomic DNA

SEQ ID NO: 46422 - DNA, 31 bp, Homo sapiens; identical to SEQ ID NO: 11009
  source 1..31: mol_type = genomic DNA

SEQ ID NO: 46423 - DNA, 32 bp, Homo sapiens; identical to SEQ ID NO: 11010
  source 1..32: mol_type = genomic DNA

SEQ ID NO: 46424 - DNA, 33 bp, Homo sapiens; identical to SEQ ID NO: 11011
  source 1..33: mol_type = genomic DNA

SEQ ID NO: 46425 - DNA, 35 bp, Homo sapiens; identical to SEQ ID NO: 11013
  source 1..35: mol_type = genomic DNA

SEQ ID NO: 46426 - DNA, 36 bp, Homo sapiens; identical to SEQ ID NO: 11014
  source 1..36: mol_type = genomic DNA

SEQ ID NO: 46427 - DNA, 37 bp, Homo sapiens; identical to SEQ ID NO: 11015
  source 1..37: mol_type = genomic DNA

SEQ ID NO: 46428 - DNA, 38 bp, Homo sapiens; identical to SEQ ID NO: 11016
  source 1..38: mol_type = genomic DNA

SEQ ID NO: 46429 - DNA, 25 bp, Homo sapiens
  source 1..25: mol_type = genomic DNA
ccgcctgtcacgcgggagaccgggg

SEQ ID NO: 46430 - DNA, 26 bp, Homo sapiens
  source 1..26: mol_type = genomic DNA
ccgcctgtcacgcgggagaccggggt

SEQ ID NO: 46431 - DNA, 46 bp, Homo sapiens; identical to SEQ ID NO: 11018
  source 1..46: mol_type = genomic DNA

SEQ ID NO: 46432 - DNA, 46 bp, Homo sapiens; identical to SEQ ID NO: 11024
  source 1..46: mol_type = genomic DNA

SEQ ID NO: 46433 - DNA, 47 bp, Homo sapiens; identical to SEQ ID NO: 11025
  source 1..47: mol_type = genomic DNA

SEQ ID NO: 46434 - DNA, 16 bp, Homo sapiens
  source 1..16: mol_type = genomic DNA
ccgcggcccgggttcg

SEQ ID NO: 46435 - DNA, 18 bp, Homo sapiens
  source 1..18: mol_type = genomic DNA
ccgcggcccgggttcgat

SEQ ID NO: 46436 - DNA, 19 bp, Homo sapiens
  source 1..19: mol_type = genomic DNA
ccgcggcccgggttcgatt

SEQ ID NO: 46437 - DNA, 20 bp, Homo sapiens
  source 1..20: mol_type = genomic DNA
ccgcggcccgggttcgattc

SEQ ID NO: 46438 - DNA, 21 bp, Homo sapiens
  source 1..21: mol_type = genomic DNA
ccgcggcccgggttcgattcc

SEQ ID NO: 46439 - DNA, 22 bp, Homo sapiens
  source 1..22: mol_type = genomic DNA
ccgcggcccgggttcgattccc

SEQ ID NO: 46440 - DNA, 25 bp, Homo sapiens
  source 1..25: mol_type = genomic DNA
ccgcggcccgggttcgattcccggt

SEQ ID NO: 46441 - DNA, 26 bp, Homo sapiens
  source 1..26: mol_type = genomic DNA
ccgcggcccgggttcgattcccggtc

SEQ ID NO: 46442 - DNA, 27 bp, Homo sapiens
  source 1..27: mol_type = genomic DNA
ccgcggcccgggttcgattcccggtca

SEQ ID NO: 46443 - DNA, 28 bp, Homo sapiens
  source 1..28: mol_type = genomic DNA
ccgcggcccgggttcgattcccggtcag

SEQ ID NO: 46444 - DNA, 29 bp, Homo sapiens
  source 1..29: mol_type = genomic DNA
ccgcggcccgggttcgattcccggtcagg

SEQ ID NO: 46445 - DNA, 30 bp, Homo sapiens; identical to SEQ ID NO: 11045
  source 1..30: mol_type = genomic DNA

SEQ ID NO: 46446 - DNA, 32 bp, Homo sapiens; identical to SEQ ID NO: 11046
  source 1..32: mol_type = genomic DNA

SEQ ID NO: 46447 - DNA, 33 bp, Homo sapiens; identical to SEQ ID NO: 11047
  source 1..33: mol_type = genomic DNA

SEQ ID NO: 46448 - DNA, 34 bp, Homo sapiens; identical to SEQ ID NO: 11048
  source 1..34: mol_type = genomic DNA

SEQ ID NO: 46449 - DNA, 35 bp, Homo sapiens; identical to SEQ ID NO: 11049
  source 1..35: mol_type = genomic DNA

SEQ ID NO: 46450 - DNA, 28 bp, Homo sapiens
  source 1..28: mol_type = genomic DNA
ccgcgtggcctaatggataaggcgtctg

SEQ ID NO: 46451 - DNA, 29 bp, Homo sapiens
  source 1..29: mol_type = genomic DNA
ccgcgtggcctaatggataaggcgtctga

SEQ ID NO: 46452 - DNA, 23 bp, Homo sapiens
  source 1..23: mol_type = genomic DNA
ccgctggtgtagtggtatcatgc

SEQ ID NO: 46453 - DNA, 24 bp, Homo sapiens
  source 1..24: mol_type = genomic DNA
ccgctggtgtagtggtatcatgca

SEQ ID NO: 46454 - DNA, 25 bp, Homo sapiens
  source 1..25: mol_type = genomic DNA
ccgctggtgtagtggtatcatgcaa

SEQ ID NO: 46455 - DNA, 26 bp, Homo sapiens
  source 1..26: mol_type = genomic DNA
ccgctggtgtagtggtatcatgcaag

SEQ ID NO: 46456 - DNA, 27 bp, Homo sapiens
  source 1..27: mol_type = genomic DNA
ccgctggtgtagtggtatcatgcaaga

SEQ ID NO: 46457 - DNA, 29 bp, Homo sapiens
  source 1..29: mol_type = genomic DNA
ccgctggtgtagtggtatcatgcaagatt

SEQ ID NO: 46458 - DNA, 32 bp, Homo sapiens; identical to SEQ ID NO: 11072
  source 1..32: mol_type = genomic DNA

SEQ ID NO: 46459 - DNA, 36 bp, Homo sapiens; identical to SEQ ID NO: 11075
  source 1..36: mol_type = genomic DNA

SEQ ID NO: 46460 - DNA, 46 bp, Homo sapiens; identical to SEQ ID NO: 11079
  source 1..46: mol_type = genomic DNA

SEQ ID NO: 46461 - DNA, 47 bp, Homo sapiens; identical to SEQ ID NO: 11080
  source 1..47: mol_type = genomic DNA

SEQ ID NO: 46462 - DNA, 16 bp, Homo sapiens
  source 1..16: mol_type = genomic DNA
ccggagatgaaaacct

SEQ ID NO: 46463 - DNA, 28 bp, Homo sapiens
  source 1..28: mol_type = genomic DNA
ccggagatgaaaacctttttccaaggac

SEQ ID NO: 46464 - DNA, 29 bp, Homo sapiens
  source 1..29: mol_type = genomic DNA
ccggagatgaaaacctttttccaaggaca

SEQ ID NO: 46465 - DNA, 30 bp, Homo sapiens; identical to SEQ ID NO: 11096
  source 1..30: mol_type = genomic DNA

SEQ ID NO: 46466 - DNA, 31 bp, Homo sapiens; identical to SEQ ID NO: 11097
  source 1..31: mol_type = genomic DNA

SEQ ID NO: 46467 - DNA, 32 bp, Homo sapiens; identical to SEQ ID NO: 11098
  source 1..32: mol_type = genomic DNA

SEQ ID NO: 46468 - DNA, 17 bp, Homo sapiens
  source 1..17: mol_type = genomic DNA
ccggagctggggattgt

SEQ ID NO: 46469 - DNA, 24 bp, Homo sapiens
  source 1..24: mol_type = genomic DNA
ccggagctggggattgtgggttcg

SEQ ID NO: 46470 - DNA, 27 bp, Homo sapiens
  source 1..27: mol_type = genomic DNA
ccggagctggggattgtgggttcgagt

SEQ ID NO: 46471 - DNA, 28 bp, Homo sapiens
  source 1..28: mol_type = genomic DNA
ccggagctggggattgtgggttcgagtc

SEQ ID NO: 46472 - DNA, 33 bp, Homo sapiens; identical to SEQ ID NO: 11101
  source 1..33: mol_type = genomic DNA

SEQ ID NO: 46473 - DNA, 21 bp, Homo sapiens
  source 1..21: mol_type = genomic DNA
ccggatagctcagtcggtaga

SEQ ID NO: 46474 - DNA, 22 bp, Homo sapiens
  source 1..22: mol_type = genomic DNA
ccggatagctcagtcggtagag

SEQ ID NO: 46475 - DNA, 23 bp, Homo sapiens
  source 1..23: mol_type = genomic DNA
ccggatagctcagtcggtagagc

SEQ ID NO: 46476 - DNA, 25 bp, Homo sapiens
  source 1..25: mol_type = genomic DNA
ccggatagctcagtcggtagagcat

SEQ ID NO: 46477 - DNA, 26 bp, Homo sapiens
  source 1..26: mol_type = genomic DNA
ccggatagctcagtcggtagagcatc

SEQ ID NO: 46478 - DNA, 27 bp, Homo sapiens
  source 1..27: mol_type = genomic DNA
ccggatagctcagtcggtagagcatca

SEQ ID NO: 46479 - DNA, 28 bp, Homo sapiens
  source 1..28: mol_type = genomic DNA
ccggatagctcagtcggtagagcatcag

SEQ ID NO: 46480 - DNA, 29 bp, Homo sapiens
  source 1..29: mol_type = genomic DNA
ccggatagctcagtcggtagagcatcaga

SEQ ID NO: 46481 - DNA, 30 bp, Homo sapiens; identical to SEQ ID NO: 11116
  source 1..30: mol_type = genomic DNA

SEQ ID NO: 46482 - DNA, 31 bp, Homo sapiens; identical to SEQ ID NO: 11117
  source 1..31: mol_type = genomic DNA

SEQ ID NO: 46483 - DNA, 17 bp, Homo sapiens
  source 1..17: mol_type = genomic DNA
ccggatcagaagattga

SEQ ID NO: 46484 - DNA, 21 bp, Homo sapiens
  source 1..21: mol_type = genomic DNA
ccggatcagaagattgagggt

SEQ ID NO: 46485 - DNA, 31 bp, Homo sapiens; identical to SEQ ID NO: 11132
  source 1..31: mol_type = genomic DNA

SEQ ID NO: 46486 - DNA, 18 bp, Homo sapiens
  source 1..18: mol_type = genomic DNA
ccggatggaggcgtgggt

SEQ ID NO: 46487 - DNA, 30 bp, Homo sapiens; identical to SEQ ID NO: 11141
  source 1..30: mol_type = genomic DNA

SEQ ID NO: 46488 - DNA, 36 bp, Homo sapiens
  source 1..36: mol_type = genomic DNA
ccggatggaggcgtgggttcgaatcccacttctgac

SEQ ID NO: 46489 - DNA, 37 bp, Homo sapiens; identical to SEQ ID NO: 11143
  source 1..37: mol_type = genomic DNA

SEQ ID NO: 46490 - DNA, 38 bp, Homo sapiens; identical to SEQ ID NO: 11144
  source 1..38: mol_type = genomic DNA

SEQ ID NO: 46491 - DNA, 39 bp, Homo sapiens; identical to SEQ ID NO: 11145
  source 1..39: mol_type = genomic DNA

SEQ ID NO: 46492 - DNA, 23 bp, Homo sapiens
  source 1..23: mol_type = genomic DNA
ccggctagctcagtcggtagagc

SEQ ID NO: 46493 - DNA, 24 bp, Homo sapiens
  source 1..24: mol_type = genomic DNA
ccggctagctcagtcggtagagca

SEQ ID NO: 46494 - DNA, 26 bp, Homo sapiens
  source 1..26: mol_type = genomic DNA
ccggctagctcagtcggtagagcatg

SEQ ID NO: 46495 - DNA, 27 bp, Homo sapiens
  source 1..27: mol_type = genomic DNA
ccggctagctcagtcggtagagcatga

SEQ ID NO: 46496 - DNA, 28 bp, Homo sapiens
  source 1..28: mol_type = genomic DNA
ccggctagctcagtcggtagagcatgag

SEQ ID NO: 46497 - DNA, 30 bp, Homo sapiens; identical to SEQ ID NO: 11159
  source 1..30: mol_type = genomic DNA

SEQ ID NO: 46498 - DNA, 31 bp, Homo sapiens; identical to SEQ ID NO: 11160
  source 1..31: mol_type = genomic DNA

SEQ ID NO: 46499 - DNA, 32 bp, Homo sapiens; identical to SEQ ID NO: 11161
  source 1..32: mol_type = genomic DNA

SEQ ID NO: 46500 - DNA, 31 bp, Homo sapiens; identical to SEQ ID NO: 11165
  source 1..31: mol_type = genomic DNA

SEQ ID NO: 46501 - DNA, 32 bp, Homo sapiens; identical to SEQ ID NO: 11166
  source 1..32: mol_type = genomic DNA

SEQ ID NO: 46502 - DNA, 33 bp, Homo sapiens; identical to SEQ ID NO: 11167
  source 1..33: mol_type = genomic DNA

SEQ ID NO: 46503 - DNA, 38 bp, Homo sapiens; identical to SEQ ID NO: 11172
  source 1..38: mol_type = genomic DNA

SEQ ID NO: 46504 - DNA, 40 bp, Homo sapiens; identical to SEQ ID NO: 11174
  source 1..40: mol_type = genomic DNA

SEQ ID NO: 46505 - DNA, 41 bp, Homo sapiens; identical to SEQ ID NO: 11175
  source 1..41: mol_type = genomic DNA

SEQ ID NO: 46506 - DNA, 47 bp, Homo sapiens; identical to SEQ ID NO: 35187
  source 1..47: mol_type = genomic DNA

SEQ ID NO: 46507 - DNA, 27 bp, Homo sapiens
  source 1..27: mol_type = genomic DNA
ccggctagctcagtcggtagagcatgg

SEQ ID NO: 46508 - DNA, 28 bp, Homo sapiens
  source 1..28: mol_type = genomic DNA
ccggctagctcagtcggtagagcatggg

SEQ ID NO: 46509 - DNA, 29 bp, Homo sapiens
  source 1..29: mol_type = genomic DNA
ccggctagctcagtcggtagagcatggga

SEQ ID NO: 46510 - DNA, 30 bp, Homo sapiens; identical to SEQ ID NO: 11179
  source 1..30: mol_type = genomic DNA

SEQ ID NO: 46511 - DNA, 31 bp, Homo sapiens; identical to SEQ ID NO: 11180
  source 1..31: mol_type = genomic DNA

SEQ ID NO: 46512 - DNA, 32 bp, Homo sapiens; identical to SEQ ID NO: 11181
  source 1..32: mol_type = genomic DNA

SEQ ID NO: 46513 - DNA, 33 bp, Homo sapiens; identical to SEQ ID NO: 11182
  source 1..33: mol_type = genomic DNA

SEQ ID NO: 46514 - DNA, 34 bp, Homo sapiens; identical to SEQ ID NO: 11183
  source 1..34: mol_type = genomic DNA

SEQ ID NO: 46515 - DNA, 37 bp, Homo sapiens; identical to SEQ ID NO: 11186
  source 1..37: mol_type = genomic DNA

SEQ ID NO: 46516 - DNA, 39 bp, Homo sapiens; identical to SEQ ID NO: 11188
  source 1..39: mol_type = genomic DNA

SEQ ID NO: 46517 - DNA, 40 bp, Homo sapiens; identical to SEQ ID NO: 11189
  source 1..40: mol_type = genomic DNA

SEQ ID NO: 46518 - DNA, 47 bp, Homo sapiens; identical to SEQ ID NO: 11191
  source 1..47: mol_type = genomic DNA

SEQ ID NO: 46519 - DNA, 16 bp, Homo sapiens
  source 1..16: mol_type = genomic DNA
ccggctcgaaggacca

SEQ ID NO: 46520 - DNA, 16 bp, Homo sapiens
  source 1..16: mol_type = genomic DNA
ccggctcggaggacca

SEQ ID NO: 46521 - DNA, 16 bp, Homo sapiens
  source 1..16: mol_type = genomic DNA
ccgggcagaagcacca

SEQ ID NO: 46522 - DNA, 16 bp, Homo sapiens
  source 1..16: mol_type = genomic DNA
ccgggcggaaacacca

SEQ ID NO: 46523 - DNA, 27 bp, Homo sapiens
  source 1..27: mol_type = genomic DNA
ccggggttcaagtccctgttcgggcgc

SEQ ID NO: 46524 - DNA, 27 bp, Homo sapiens
  source 1..27: mol_type = genomic DNA
ccggggttcaattccccgacggggagc

SEQ ID NO: 46525 - DNA, 28 bp, Homo sapiens
  source 1..28: mol_type = genomic DNA
ccggggttcaattccccgacggggagcc

SEQ ID NO: 46526 - DNA, 16 bp, Homo sapiens
  source 1..16: mol_type = genomic DNA
ccggggttcgattccc

SEQ ID NO: 46527 - DNA, 23 bp, Homo sapiens
  source 1..23: mol_type = genomic DNA
ccggggttcgattccccgacggg

SEQ ID NO: 46528 - DNA, 24 bp, Homo sapiens
  source 1..24: mol_type = genomic DNA
ccggggttcgattccccgacgggg

SEQ ID NO: 46529 - DNA, 26 bp, Homo sapiens
  source 1..26: mol_type = genomic DNA
ccggggttcgattccccgacggggag

SEQ ID NO: 46530 - DNA, 27 bp, Homo sapiens
  source 1..27: mol_type = genomic DNA
ccggggttcgattccccgacggggagc

SEQ ID NO: 46531 - DNA, 28 bp, Homo sapiens
  source 1..28: mol_type = genomic DNA
ccggggttcgattccccgacggggagcc

SEQ ID NO: 46532 - DNA, 29 bp, Homo sapiens
  source 1..29: mol_type = genomic DNA
ccggggttcgattccccgacggggagcca

SEQ ID NO: 46533 - DNA, 16 bp, Homo sapiens
  source 1..16: mol_type = genomic DNA
ccgggtgccccctcca

SEQ ID NO: 46534 - DNA, 27 bp, Homo sapiens
  source 1..27: mol_type = genomic DNA
ccgggttcaatccccggcacctccacc

SEQ ID NO: 46535 - DNA, 24 bp, Homo sapiens
  source 1..24: mol_type = genomic DNA
ccgggttcgactcccggtgtggga

SEQ ID NO: 46536 - DNA, 25 bp, Homo sapiens
  source 1..25: mol_type = genomic DNA
ccgggttcgactcccggtgtgggaa

SEQ ID NO: 46537 - DNA, 26 bp, Homo sapiens
  source 1..26: mol_type = genomic DNA
ccgggttcgactcccggtgtgggaac

SEQ ID NO: 46538 - DNA, 27 bp, Homo sapiens
  source 1..27: mol_type = genomic DNA
ccgggttcgactcccggtgtgggaacc

SEQ ID NO: 46539 - DNA, 27 bp, Homo sapiens
  source 1..27: mol_type = genomic DNA
ccgggttcgagtcccggcggagtcgcc

SEQ ID NO: 46540 - DNA, 27 bp, Homo sapiens
  source 1..27: mol_type = genomic DNA
ccgggttcgatccccagcatctccacc

SEQ ID NO: 46541 - DNA, 27 bp, Homo sapiens
  source 1..27: mol_type = genomic DNA
ccgggttcgatccccggcatctccacc

SEQ ID NO: 46542 - DNA, 22 bp, Homo sapiens
  source 1..22: mol_type = genomic DNA
ccgggttcgattcccgggcggc

SEQ ID NO: 46543 - DNA, 23 bp, Homo sapiens
  source 1..23: mol_type = genomic DNA
ccgggttcgattcccgggcggcg

SEQ ID NO: 46544 - DNA, 23 bp, Homo sapiens
  source 1..23: mol_type = genomic DNA
ccgggttcgattcccggtcaggg

SEQ ID NO: 46545 - DNA, 26 bp, Homo sapiens
  source 1..26: mol_type = genomic DNA
ccgggttcgattcccggtcagggaac

SEQ ID NO: 46546 - DNA, 28 bp, Homo sapiens
  source 1..28: mol_type = genomic DNA
ccgggttcgattcccggtcagggaacca

SEQ ID NO: 46547 - DNA, 16 bp, Homo sapiens
  source 1..16: mol_type = genomic DNA
ccgggtttcggcacca

SEQ ID NO: 46548 - DNA, 24 bp, Homo sapiens
  source 1..24: mol_type = genomic DNA
ccggttcgaaaccgggcggaaaca

SEQ ID NO: 46549 - DNA, 19 bp, Homo sapiens
  source 1..19: mol_type = genomic DNA
ccgtagtgtagtggtcatc

SEQ ID NO: 46550 - DNA, 27 bp, Homo sapiens
  source 1..27: mol_type = genomic DNA
ccgtagtgtagtggtcatcacgttcgc

SEQ ID NO: 46551 - DNA, 28 bp, Homo sapiens
  source 1..28: mol_type = genomic DNA
ccgtagtgtagtggtcatcacgttcgcc

SEQ ID NO: 46552 - DNA, 29 bp, Homo sapiens
  source 1..29: mol_type = genomic DNA
ccgtagtgtagtggtcatcacgttcgcct

SEQ ID NO: 46553 - DNA, 19 bp, Homo sapiens
  source 1..19: mol_type = genomic DNA
ccgtagtgtagtggttatc

SEQ ID NO: 46554 - DNA, 20 bp, Homo sapiens
  source 1..20: mol_type = genomic DNA
ccgtagtgtagtggttatca

SEQ ID NO: 46555 - DNA, 27 bp, Homo sapiens
  source 1..27: mol_type = genomic DNA
ccgtagtgtagtggttatcacgttcgc

SEQ ID NO: 46556 - DNA, 28 bp, Homo sapiens
  source 1..28: mol_type = genomic DNA
ccgtagtgtagtggttatcacgttcgcc

SEQ ID NO: 46557 - DNA, 29 bp, Homo sapiens
  source 1..29: mol_type = genomic DNA
ccgtagtgtagtggttatcacgttcgcct

SEQ ID NO: 46558 - DNA, 32 bp, Homo sapiens; identical to SEQ ID NO: 11297
  source 1..32: mol_type = genomic DNA

SEQ ID NO: 46559 - DNA, 33 bp, Homo sapiens; identical to SEQ ID NO: 11298
  source 1..33: mol_type = genomic DNA

SEQ ID NO: 46560 - DNA, 39 bp, Homo sapiens
  source 1..39: mol_type = genomic DNA
ccgtagtgtagtggttatcacgttcgcctcacacgcgaa

SEQ ID NO: 46561 - DNA, 18 bp, Homo sapiens
  source 1..18: mol_type = genomic DNA
ccgtatggaggcgtgggt

SEQ ID NO: 46562 - DNA, 37 bp, Homo sapiens; identical to SEQ ID NO: 35249
  source 1..37: mol_type = genomic DNA

SEQ ID NO: 46563 - DNA, 38 bp, Homo sapiens; identical to SEQ ID NO: 35250
  source 1..38: mol_type = genomic DNA

SEQ ID NO: 46564 - DNA, 39 bp, Homo sapiens; identical to SEQ ID NO: 35251
  source 1..39: mol_type = genomic DNA

SEQ ID NO: 46565 - DNA, 22 bp, Homo sapiens
  source 1..22: mol_type = genomic DNA
ccgtgatcgtatagtggttagt

SEQ ID NO: 46566 - DNA, 23 bp, Homo sapiens
  source 1..23: mol_type = genomic DNA
ccgtgatcgtatagtggttagta

SEQ ID NO: 46567 - DNA, 24 bp, Homo sapiens
  source 1..24: mol_type = genomic DNA
ccgtgatcgtatagtggttagtac

SEQ ID NO: 46568 - DNA, 25 bp, Homo sapiens
  source 1..25: mol_type = genomic DNA
ccgtgatcgtatagtggttagtact

SEQ ID NO: 46569 - DNA, 26 bp, Homo sapiens
  source 1..26: mol_type = genomic DNA
ccgtgatcgtatagtggttagtactc

SEQ ID NO: 46570 - DNA, 27 bp, Homo sapiens
  source 1..27: mol_type = genomic DNA
ccgtgatcgtatagtggttagtactct

SEQ ID NO: 46571 - DNA, 28 bp, Homo sapiens
  source 1..28: mol_type = genomic DNA
ccgtgatcgtatagtggttagtactctg

SEQ ID NO: 46572 - DNA, 29 bp, Homo sapiens
  source 1..29: mol_type = genomic DNA
ccgtgatcgtatagtggttagtactctgc

SEQ ID NO: 46573 - DNA, 30 bp, Homo sapiens; identical to SEQ ID NO: 11315
  source 1..30: mol_type = genomic DNA

SEQ ID NO: 46574 - DNA, 31 bp, Homo sapiens; identical to SEQ ID NO: 11316
  source 1..31: mol_type = genomic DNA

SEQ ID NO: 46575 - DNA, 32 bp, Homo sapiens; identical to SEQ ID NO: 11317
  source 1..32: mol_type = genomic DNA

SEQ ID NO: 46576 - DNA, 33 bp, Homo sapiens; identical to SEQ ID NO: 11318
  source 1..33: mol_type = genomic DNA

SEQ ID NO: 46577 - DNA, 34 bp, Homo sapiens; identical to SEQ ID NO: 11319
  source 1..34: mol_type = genomic DNA

SEQ ID NO: 46578 - DNA, 35 bp, Homo sapiens; identical to SEQ ID NO: 11320
  source 1..35: mol_type = genomic DNA

SEQ ID NO: 46579 - DNA, 41 bp, Homo sapiens; identical to SEQ ID NO: 11326
  source 1..41: mol_type = genomic DNA

SEQ ID NO: 46580 - DNA, 43 bp, Homo sapiens; identical to SEQ ID NO: 35270
  source 1..43: mol_type = genomic DNA

SEQ ID NO: 46581 - DNA, 44 bp, Homo sapiens; identical to SEQ ID NO: 11327
  source 1..44: mol_type = genomic DNA

SEQ ID NO: 46582 - DNA, 47 bp, Homo sapiens; identical to SEQ ID NO: 11328
  source 1..47: mol_type = genomic DNA

SEQ ID NO: 46583 - DNA, 16 bp, Homo sapiens
  source 1..16: mol_type = genomic DNA
ccgtgcgagaatacca

SEQ ID NO: 46584 - DNA, 21 bp, Homo sapiens
  source 1..21: mol_type = genomic DNA
cctaagccagggattgtgggt

SEQ ID NO: 46585 - DNA, 42 bp, Homo sapiens; identical to SEQ ID NO: 11347
  source 1..42: mol_type = genomic DNA

SEQ ID NO: 46586 - DNA, 40 bp, Homo sapiens; identical to SEQ ID NO: 35278
  source 1..40: mol_type = genomic DNA

SEQ ID NO: 46587 - DNA, 16 bp, Homo sapiens
  source 1..16: mol_type = genomic DNA
cctacccagggacgcc

SEQ ID NO: 46588 - DNA, 16 bp, Homo sapiens
  source 1..16: mol_type = genomic DNA
cctatatatcttacca

SEQ ID NO: 46589 - DNA, 16 bp, Homo sapiens
  source 1..16: mol_type = genomic DNA
cctcacacggggcacc

SEQ ID NO: 46590 - DNA, 17 bp, Homo sapiens
  source 1..17: mol_type = genomic DNA
cctcacacggggcacca

SEQ ID NO: 46591 - DNA, 16 bp, Homo sapiens
  source 1..16: mol_type = genomic DNA
cctcacctggagcacc

SEQ ID NO: 46592 - DNA, 17 bp, Homo sapiens
  source 1..17: mol_type = genomic DNA
cctcacctggagcacca

SEQ ID NO: 46593 - DNA, 16 bp, Homo sapiens
  source 1..16: mol_type = genomic DNA
cctcagagggggcacc

SEQ ID NO: 46594 - DNA, 17 bp, Homo sapiens
  source 1..17: mol_type = genomic DNA
cctcagagggggcacca

SEQ ID NO: 46595 - DNA, 29 bp, Homo sapiens
  source 1..29: mol_type = genomic DNA
cctcagtaagttgcaatacttaatttctg

SEQ ID NO: 46596 - DNA, 31 bp, Homo sapiens; identical to SEQ ID NO: 11385
  source 1..31: mol_type = genomic DNA

SEQ ID NO: 46597 - DNA, 32 bp, Homo sapiens; identical to SEQ ID NO: 11386
  source 1..32: mol_type = genomic DNA

SEQ ID NO: 46598 - DNA, 16 bp, Homo sapiens
  source 1..16: mol_type = genomic DNA
cctcgctggggcctcc

SEQ ID NO: 46599 - DNA, 27 bp, Homo sapiens
  source 1..27: mol_type = genomic DNA
cctcggttcgaatccgagtcacggcac

SEQ ID NO: 46600 - DNA, 16 bp, Homo sapiens
  source 1..16: mol_type = genomic DNA
cctctttacagtgacc

SEQ ID NO: 46601 - DNA, 17 bp, Homo sapiens
  source 1..17: mol_type = genomic DNA
cctctttacagtgacca

SEQ ID NO: 46602 - DNA, 19 bp, Homo sapiens
  source 1..19: mol_type = genomic DNA
cctgccacgcgggaggccc

SEQ ID NO: 46603 - DNA, 23 bp, Homo sapiens
  source 1..23: mol_type = genomic DNA
cctgccacgcgggaggcccgggt

SEQ ID NO: 46604 - DNA, 44 bp, Homo sapiens
  source 1..44: mol_type = genomic DNA
cctgccacgcgggaggcccgggttcgattcccggccaatgcacc

SEQ ID NO: 46605 - DNA, 16 bp, Homo sapiens
  source 1..16: mol_type = genomic DNA
cctgccgactacgcca

SEQ ID NO: 46606 - DNA, 16 bp, Homo sapiens
  source 1..16: mol_type = genomic DNA
cctgccgcggtcgcca

SEQ ID NO: 46607 - DNA, 16 bp, Homo sapiens
  source 1..16: mol_type = genomic DNA
cctgccggggcttcca

SEQ ID NO: 46608 - DNA, 16 bp, Homo sapiens
  source 1..16: mol_type = genomic DNA
cctgctcacagcgcca

SEQ ID NO: 46609 - DNA, 16 bp, Homo sapiens
  source 1..16: mol_type = genomic DNA
cctgctcgctgcgcca

SEQ ID NO: 46610 - DNA, 16 bp, Homo sapiens
  source 1..16: mol_type = genomic DNA
cctggctggctcgcca

SEQ ID NO: 46611 - DNA, 27 bp, Homo sapiens
  source 1..27: mol_type = genomic DNA
cctgggttcgaatcccagcggtgcctc

SEQ ID NO: 46612 - DNA, 28 bp, Homo sapiens
  source 1..28: mol_type = genomic DNA
cctgggttcgagccccagtggaaccacc

SEQ ID NO: 46613 - DNA, 31 bp, Homo sapiens; identical to SEQ ID NO: 11479
  source 1..31: mol_type = genomic DNA

SEQ ID NO: 46614 - DNA, 24 bp, Homo sapiens
  source 1..24: mol_type = genomic DNA
cctggtggtctagtggttaggatt

SEQ ID NO: 46615 - DNA, 25 bp, Homo sapiens
  source 1..25: mol_type = genomic DNA
cctggtggtctagtggttaggattc

SEQ ID NO: 46616 - DNA, 26 bp, Homo sapiens
  source 1..26: mol_type = genomic DNA
cctggtggtctagtggttaggattcg

SEQ ID NO: 46617 - DNA, 27 bp, Homo sapiens
  source 1..27: mol_type = genomic DNA
cctggtggtctagtggttaggattcgg

SEQ ID NO: 46618 - DNA, 28 bp, Homo sapiens
  source 1..28: mol_type = genomic DNA
cctggtggtctagtggttaggattcggc

SEQ ID NO: 46619 - DNA, 29 bp, Homo sapiens
  source 1..29: mol_type = genomic DNA
cctggtggtctagtggttaggattcggcg

SEQ ID NO: 46620 - DNA, 30 bp, Homo sapiens; identical to SEQ ID NO: 11496
  source 1..30: mol_type = genomic DNA

SEQ ID NO: 46621 - DNA, 31 bp, Homo sapiens; identical to SEQ ID NO: 11497
  source 1..31: mol_type = genomic DNA

SEQ ID NO: 46622 - DNA, 32 bp, Homo sapiens; identical to SEQ ID NO: 11498
  source 1..32: mol_type = genomic DNA

SEQ ID NO: 46623 - DNA, 33 bp, Homo sapiens; identical to SEQ ID NO: 11499
  source 1..33: mol_type = genomic DNA

SEQ ID NO: 46624 - DNA, 34 bp, Homo sapiens; identical to SEQ ID NO: 11500
  source 1..34: mol_type = genomic DNA

SEQ ID NO: 46625 - DNA, 40 bp, Homo sapiens; identical to SEQ ID NO: 11506
  source 1..40: mol_type = genomic DNA

SEQ ID NO: 46626 - DNA, 26 bp, Homo sapiens
  source 1..26: mol_type = genomic DNA
cctggttcgatcccgggtttcggcac

SEQ ID NO: 46627 - DNA, 27 bp, Homo sapiens
  source 1..27: mol_type = genomic DNA
cctggttcgatcccgggtttcggcacc

SEQ ID NO: 46628 - DNA, 47 bp, Homo sapiens; identical to SEQ ID NO: 35333
  source 1..47: mol_type = genomic DNA

SEQ ID NO: 46629 - DNA, 16 bp, Homo sapiens
  source 1..16: mol_type = genomic DNA
cctgtcacgcgggaga

SEQ ID NO: 46630 - DNA, 17 bp, Homo sapiens
  source 1..17: mol_type = genomic DNA
cctgtcacgcgggagac

SEQ ID NO: 46631 - DNA, 18 bp, Homo sapiens
  source 1..18: mol_type = genomic DNA
cctgtcacgcgggagacc

SEQ ID NO: 46632 - DNA, 19 bp, Homo sapiens
  source 1..19: mol_type = genomic DNA
cctgtcacgcgggagaccg

SEQ ID NO: 46633 - DNA, 20 bp, Homo sapiens
  source 1..20: mol_type = genomic DNA
cctgtcacgcgggagaccgg

SEQ ID NO: 46634 - DNA, 21 bp, Homo sapiens
  source 1..21: mol_type = genomic DNA
cctgtcacgcgggagaccggg

SEQ ID NO: 46635 - DNA, 22 bp, Homo sapiens
  source 1..22: mol_type = genomic DNA
cctgtcacgcgggagaccgggg

SEQ ID NO: 46636 - DNA, 23 bp, Homo sapiens
  source 1..23: mol_type = genomic DNA
cctgtcacgcgggagaccggggt

SEQ ID NO: 46637 - DNA, 24 bp, Homo sapiens
  source 1..24: mol_type = genomic DNA
cctgtcacgcgggagaccggggtt

SEQ ID NO: 46638 - DNA, 39 bp, Homo sapiens; identical to SEQ ID NO: 11521
  source 1..39: mol_type = genomic DNA

SEQ ID NO: 46639 - DNA, 43 bp, Homo sapiens; identical to SEQ ID NO: 11522
  source 1..43: mol_type = genomic DNA

SEQ ID NO: 46640 - DNA, 44 bp, Homo sapiens; identical to SEQ ID NO: 11523
  source 1..44: mol_type = genomic DNA

SEQ ID NO: 46641 - DNA, 45 bp, Homo sapiens; identical to SEQ ID NO: 11524
  source 1..45: mol_type = genomic DNA

SEQ ID NO: 46642 - DNA, 29 bp, Homo sapiens
  source 1..29: mol_type = genomic DNA
cctgtcacgcgggagaccggggttcgatt

SEQ ID NO: 46643 - DNA, 30 bp, Homo sapiens
  source 1..30: mol_type = genomic DNA
cctgtcacgcgggagaccggggttcgattc

SEQ ID NO: 46644 - DNA, 32 bp, Homo sapiens
  source 1..32: mol_type = genomic DNA
cctgtcacgcgggagaccggggttcgattccc

SEQ ID NO: 46645 - DNA, 33 bp, Homo sapiens
  source 1..33: mol_type = genomic DNA
cctgtcacgcgggagaccggggttcgattcccc

SEQ ID NO: 46646 - DNA, 35 bp, Homo sapiens; identical to SEQ ID NO: 35343
  source 1..35: mol_type = genomic DNA

SEQ ID NO: 46647 - DNA, 39 bp, Homo sapiens; identical to SEQ ID NO: 11527
  source 1..39: mol_type = genomic DNA

SEQ ID NO: 46648 - DNA, 40 bp, Homo sapiens; identical to SEQ ID NO: 11528
  source 1..40: mol_type = genomic DNA

SEQ ID NO: 46649 - DNA, 41 bp, Homo sapiens; identical to SEQ ID NO: 11529
  source 1..41: mol_type = genomic DNA

SEQ ID NO: 46650 - DNA, 42 bp, Homo sapiens; identical to SEQ ID NO: 11530
  source 1..42: mol_type = genomic DNA

SEQ ID NO: 46651 - DNA, 43 bp, Homo sapiens; identical to SEQ ID NO: 11531
  source 1..43: mol_type = genomic DNA

SEQ ID NO: 46652 - DNA, 44 bp, Homo sapiens; identical to SEQ ID NO: 11532
  source 1..44: mol_type = genomic DNA

SEQ ID NO: 46653 - DNA, 45 bp, Homo sapiens; identical to SEQ ID NO: 11533
  source 1..45: mol_type = genomic DNA

SEQ ID NO: 46654 - DNA, 16 bp, Homo sapiens
  source 1..16: mol_type = genomic DNA
cctgtcggctacgcca

SEQ ID NO: 46655 - DNA, 16 bp, Homo sapiens
  source 1..16: mol_type = genomic DNA
cctgttcgtgacgcca

SEQ ID NO: 46656 - DNA, 35 bp, Homo sapiens; identical to SEQ ID NO: 11540
  source 1..35: mol_type = genomic DNA

SEQ ID NO: 46657 - DNA, 21 bp, Homo sapiens
  source 1..21: mol_type = genomic DNA
ccttccaagcagttgacccgg

SEQ ID NO: 46658 - DNA, 22 bp, Homo sapiens
  source 1..22: mol_type = genomic DNA
ccttccaagcagttgacccggg

SEQ ID NO: 46659 - DNA, 23 bp, Homo sapiens
  source 1..23: mol_type = genomic DNA
ccttccaagcagttgacccgggt

SEQ ID NO: 46660 - DNA, 24 bp, Homo sapiens
  source 1..24: mol_type = genomic DNA
ccttccaagcagttgacccgggtt

SEQ ID NO: 46661 - DNA, 16 bp, Homo sapiens
  source 1..16: mol_type = genomic DNA
ccttcccgtactacca

SEQ ID NO: 46662 - DNA, 16 bp, Homo sapiens
  source 1..16: mol_type = genomic DNA
ccttccttttttgcca

SEQ ID NO: 46663 - DNA, 16 bp, Homo sapiens
  source 1..16: mol_type = genomic DNA
ccttcgatagctcagc

SEQ ID NO: 46664 - DNA, 18 bp, Homo sapiens
  source 1..18: mol_type = genomic DNA
ccttcgatagctcagctg

SEQ ID NO: 46665 - DNA, 25 bp, Homo sapiens
  source 1..25: mol_type = genomic DNA
ccttcgatagctcagctggtagagc

SEQ ID NO: 46666 - DNA, 19 bp, Homo sapiens
  source 1..19: mol_type = genomic DNA
ccttcgatagctcagttgg

SEQ ID NO: 46667 - DNA, 25 bp, Homo sapiens
  source 1..25: mol_type = genomic DNA
ccttcgatagctcagttggtagagc

SEQ ID NO: 46668 - DNA, 33 bp, Homo sapiens; identical to SEQ ID NO: 11581
  source 1..33: mol_type = genomic DNA

SEQ ID NO: 46669 - DNA, 27 bp, Homo sapiens
  source 1..27: mol_type = genomic DNA
ccttttaagttaaagattaagagaacc

SEQ ID NO: 46670 - DNA, 28 bp, Homo sapiens
  source 1..28: mol_type = genomic DNA
ccttttaagttaaagattaagagaacca

SEQ ID NO: 46671 - DNA, 33 bp, Homo sapiens; identical to SEQ ID NO: 11596
  source 1..33: mol_type = genomic DNA

SEQ ID NO: 46672 - DNA, 16 bp, Homo sapiens
  source 1..16: mol_type = genomic DNA
cctttttccaaggaca

SEQ ID NO: 46673 - DNA, 17 bp, Homo sapiens
  source 1..17: mol_type = genomic DNA
cctttttccaaggacac

SEQ ID NO: 46674 - DNA, 18 bp, Homo sapiens
  source 1..18: mol_type = genomic DNA
cctttttccaaggacacc

SEQ ID NO: 46675 - DNA, 19 bp, Homo sapiens
  source 1..19: mol_type = genomic DNA
cctttttccaaggacacca

SEQ ID NO: 46676 - DNA, 16 bp, Homo sapiens
  source 1..16: mol_type = genomic DNA
cgaaaatgttggttat

SEQ ID NO: 46677 - DNA, 17 bp, Homo sapiens
  source 1..17: mol_type = genomic DNA
cgaaaatgttggttata

SEQ ID NO: 46678 - DNA, 19 bp, Homo sapiens
  source 1..19: mol_type = genomic DNA
cgaaaatgttggttatacc

SEQ ID NO: 46679 - DNA, 23 bp, Homo sapiens
  source 1..23: mol_type = genomic DNA
cgaaaatgttggttatacccttc

SEQ ID NO: 46680 - DNA, 26 bp, Homo sapiens
  source 1..26: mol_type = genomic DNA
cgaaaatgttggttatacccttcccg

SEQ ID NO: 46681 - DNA, 31 bp, Homo sapiens; identical to SEQ ID NO: 11628
  source 1..31: mol_type = genomic DNA

SEQ ID NO: 46682 - DNA, 32 bp, Homo sapiens; identical to SEQ ID NO: 11629
  source 1..32: mol_type = genomic DNA

SEQ ID NO: 46683 - DNA, 33 bp, Homo sapiens; identical to SEQ ID NO: 11630
  source 1..33: mol_type = genomic DNA

SEQ ID NO: 46684 - DNA, 34 bp, Homo sapiens; identical to SEQ ID NO: 11631
  source 1..34: mol_type = genomic DNA

SEQ ID NO: 46685 - DNA, 20 bp, Homo sapiens
  source 1..20: mol_type = genomic DNA
cgaaaccatcctctgctacc

SEQ ID NO: 46686 - DNA, 21 bp, Homo sapiens
  source 1..21: mol_type = genomic DNA
cgaaaccatcctctgctacca

SEQ ID NO: 46687 - DNA, 20 bp, Homo sapiens
  source 1..20: mol_type = genomic DNA
cgaaaccgggcagaagcacc

SEQ ID NO: 46688 - DNA, 21 bp, Homo sapiens
  source 1..21: mol_type = genomic DNA
cgaaaccgggcagaagcacca

SEQ ID NO: 46689 - DNA, 16 bp, Homo sapiens
  source 1..16: mol_type = genomic DNA
cgaaaccgggcggaaa

SEQ ID NO: 46690 - DNA, 17 bp, Homo sapiens
  source 1..17: mol_type = genomic DNA
cgaaaccgggcggaaac

SEQ ID NO: 46691 - DNA, 18 bp, Homo sapiens
  source 1..18: mol_type = genomic DNA
cgaaaccgggcggaaaca

SEQ ID NO: 46692 - DNA, 19 bp, Homo sapiens
  source 1..19: mol_type = genomic DNA
cgaaaccgggcggaaacac

SEQ ID NO: 46693 - DNA, 20 bp, Homo sapiens
  source 1..20: mol_type = genomic DNA
cgaaaccgggcggaaacacc

SEQ ID NO: 46694 - DNA, 21 bp, Homo sapiens
  source 1..21: mol_type = genomic DNA
cgaaaccgggcggaaacacca

SEQ ID NO: 46695 - DNA, 25 bp, Homo sapiens
  source 1..25: mol_type = genomic DNA
cgaaaggtccccggttcgaaaccgg

SEQ ID NO: 46696 - DNA, 30 bp, Homo sapiens
  source 1..30: mol_type = genomic DNA
cgaaaggtccccggttcgaaaccgggcgga

SEQ ID NO: 46697 - DNA, 33 bp, Homo sapiens; identical to SEQ ID NO: 11647
  source 1..33: mol_type = genomic DNA

SEQ ID NO: 46698 - DNA, 34 bp, Homo sapiens; identical to SEQ ID NO: 11648
  source 1..34: mol_type = genomic DNA

SEQ ID NO: 46699 - DNA, 35 bp, Homo sapiens; identical to SEQ ID NO: 11649
  source 1..35: mol_type = genomic DNA

SEQ ID NO: 46700 - DNA, 36 bp, Homo sapiens; identical to SEQ ID NO: 11650
  source 1..36: mol_type = genomic DNA

SEQ ID NO: 46701 - DNA, 36 bp, Homo sapiens; identical to SEQ ID NO: 35414
  source 1..36: mol_type = genomic DNA

SEQ ID NO: 46702 - DNA, 16 bp, Homo sapiens
  source 1..16: mol_type = genomic DNA
cgaaaggttggtggtt

SEQ ID NO: 46703 - DNA, 17 bp, Homo sapiens
  source 1..17: mol_type = genomic DNA
cgaaaggttggtggttc

SEQ ID NO: 46704 - DNA, 34 bp, Homo sapiens; identical to SEQ ID NO: 11656
  source 1..34: mol_type = genomic DNA

SEQ ID NO: 46705 - DNA, 35 bp, Homo sapiens; identical to SEQ ID NO: 11657
  source 1..35: mol_type = genomic DNA

SEQ ID NO: 46706 - DNA, 36 bp, Homo sapiens; identical to SEQ ID NO: 11658
  source 1..36: mol_type = genomic DNA

SEQ ID NO: 46707 - DNA, 37 bp, Homo sapiens; identical to SEQ ID NO: 11659
  source 1..37: mol_type = genomic DNA

SEQ ID NO: 46708 - DNA, 36 bp, Homo sapiens; identical to SEQ ID NO: 11660
  source 1..36: mol_type = genomic DNA

SEQ ID NO: 46709 - DNA, 21 bp, Homo sapiens
  source 1..21: mol_type = genomic DNA
cgaaatagctcagttgggaga

SEQ ID NO: 46710 - DNA, 17 bp, Homo sapiens
  source 1..17: mol_type = genomic DNA
cgaaccccgtccgtgcc

SEQ ID NO: 46711 - DNA, 18 bp, Homo sapiens
  source 1..18: mol_type = genomic DNA
cgaaccccgtccgtgcct

SEQ ID NO: 46712 - DNA, 19 bp, Homo sapiens
  source 1..19: mol_type = genomic DNA
cgaaccccgtccgtgcctc

SEQ ID NO: 46713 - DNA, 20 bp, Homo sapiens
  source 1..20: mol_type = genomic DNA
cgaaccctgctcgctgcgcc

SEQ ID NO: 46714 - DNA, 28 bp, Homo sapiens
  source 1..28: mol_type = genomic DNA
cgaagaagcagcttcaaacctgccgggg

SEQ ID NO: 46715 - DNA, 29 bp, Homo sapiens
  source 1..29: mol_type = genomic DNA
cgaagaagcagcttcaaacctgccggggc

SEQ ID NO: 46716 - DNA, 30 bp, Homo sapiens; identical to SEQ ID NO: 11673
  source 1..30: mol_type = genomic DNA

SEQ ID NO: 46717 - DNA, 31 bp, Homo sapiens; identical to SEQ ID NO: 11674
  source 1..31: mol_type = genomic DNA

SEQ ID NO: 46718 - DNA, 32 bp, Homo sapiens; identical to SEQ ID NO: 11675
  source 1..32: mol_type = genomic DNA

SEQ ID NO: 46719 - DNA, 33 bp, Homo sapiens; identical to SEQ ID NO: 11676
  source 1..33: mol_type = genomic DNA

SEQ ID NO: 46720 - DNA, 33 bp, Homo sapiens; identical to SEQ ID NO: 11681
  source 1..33: mol_type = genomic DNA

SEQ ID NO: 46721 - DNA, 33 bp, Homo sapiens; identical to SEQ ID NO: 11687
  source 1..33: mol_type = genomic DNA

SEQ ID NO: 46722 - DNA, 20 bp, Homo sapiens
  source 1..20: mol_type = genomic DNA
cgaatcacgtcggggtcacc

SEQ ID NO: 46723 - DNA, 21 bp, Homo sapiens
  source 1..21: mol_type = genomic DNA
cgaatcacgtcggggtcacca

SEQ ID NO: 46724 - DNA, 17 bp, Homo sapiens
  source 1..17: mol_type = genomic DNA
cgaatcccaccgctgcc

SEQ ID NO: 46725 - DNA, 18 bp, Homo sapiens
  source 1..18: mol_type = genomic DNA
cgaatcccaccgctgcca

SEQ ID NO: 46726 - DNA, 20 bp, Homo sapiens
  source 1..20: mol_type = genomic DNA
cgaatcccaccgctgccacc

SEQ ID NO: 46727 - DNA, 19 bp, Homo sapiens
  source 1..19: mol_type = genomic DNA
cgaatcccactcctgacac

SEQ ID NO: 46728 - DNA, 20 bp, Homo sapiens
  source 1..20: mol_type = genomic DNA
cgaatcccactcctgacacc

SEQ ID NO: 46729 - DNA, 21 bp, Homo sapiens
  source 1..21: mol_type = genomic DNA
cgaatcccactcctgacacca

SEQ ID NO: 46730 - DNA, 18 bp, Homo sapiens
  source 1..18: mol_type = genomic DNA
cgaatcccacttctgaca

SEQ ID NO: 46731 - DNA, 20 bp, Homo sapiens
  source 1..20: mol_type = genomic DNA
cgaatcccacttctgacacc

SEQ ID NO: 46732 - DNA, 21 bp, Homo sapiens
  source 1..21: mol_type = genomic DNA
cgaatcccacttctgacacca

SEQ ID NO: 46733 - DNA, 19 bp, Homo sapiens
  source 1..19: mol_type = genomic DNA
cgaatcccagcggggcctc

SEQ ID NO: 46734 - DNA, 18 bp, Homo sapiens
  source 1..18: mol_type = genomic DNA
cgaatcccagcggtgcct

SEQ ID NO: 46735 - DNA, 19 bp, Homo sapiens
  source 1..19: mol_type = genomic DNA
cgaatcccagcggtgcctc

SEQ ID NO: 46736 - DNA, 20 bp, Homo sapiens
  source 1..20: mol_type = genomic DNA
cgaatcccagcggtgcctcc

SEQ ID NO: 46737 - DNA, 19 bp, Homo sapiens
  source 1..19: mol_type = genomic DNA
cgaatcccatcctcgtcgc

SEQ ID NO: 46738 - DNA, 20 bp, Homo sapiens
  source 1..20: mol_type = genomic DNA
cgaatcccatcctcgtcgcc

SEQ ID NO: 46739 - DNA, 21 bp, Homo sapiens
  source 1..21: mol_type = genomic DNA
cgaatcccatcctcgtcgcca

SEQ ID NO: 46740 - DNA, 17 bp, Homo sapiens
  source 1..17: mol_type = genomic DNA
cgaatccgagtcacggc

SEQ ID NO: 46741 - DNA, 19 bp, Homo sapiens
  source 1..19: mol_type = genomic DNA
cgaatccgagtcacggcac

SEQ ID NO: 46742 - DNA, 20 bp, Homo sapiens
  source 1..20: mol_type = genomic DNA
cgaatccgagtcacggcacc

SEQ ID NO: 46743 - DNA, 21 bp, Homo sapiens
  source 1..21: mol_type = genomic DNA
cgaatccgagtcacggcacca

SEQ ID NO: 46744 - DNA, 19 bp, Homo sapiens
  source 1..19: mol_type = genomic DNA
cgaatccggctcgaaggac

SEQ ID NO: 46745 - DNA, 20 bp, Homo sapiens
  source 1..20: mol_type = genomic DNA
cgaatccggctcgaaggacc

SEQ ID NO: 46746 - DNA, 20 bp, Homo sapiens
  source 1..20: mol_type = genomic DNA
cgaatccggctcggaggacc

SEQ ID NO: 46747 - DNA, 20 bp, Homo sapiens
  source 1..20: mol_type = genomic DNA
cgaatcctgccgactacgcc

SEQ ID NO: 46748 - DNA, 20 bp, Homo sapiens
  source 1..20: mol_type = genomic DNA
cgaatcctgttcgtgacgcc

SEQ ID NO: 46749 - DNA, 16 bp, Homo sapiens
  source 1..16: mol_type = genomic DNA
cgaatgatttcgactc

SEQ ID NO: 46750 - DNA, 18 bp, Homo sapiens
  source 1..18: mol_type = genomic DNA
cgaccccttatttacccc

SEQ ID NO: 46751 - DNA, 19 bp, Homo sapiens
  source 1..19: mol_type = genomic DNA
cgactcccggtatgggaac

SEQ ID NO: 46752 - DNA, 16 bp, Homo sapiens
  source 1..16: mol_type = genomic DNA
cgactcccggtgtggg

SEQ ID NO: 46753 - DNA, 17 bp, Homo sapiens
  source 1..17: mol_type = genomic DNA
cgactcccggtgtggga

SEQ ID NO: 46754 - DNA, 18 bp, Homo sapiens
  source 1..18: mol_type = genomic DNA
cgactcccggtgtgggaa

SEQ ID NO: 46755 - DNA, 19 bp, Homo sapiens
  source 1..19: mol_type = genomic DNA
cgactcccggtgtgggaac

SEQ ID NO: 46756 - DNA, 20 bp, Homo sapiens
  source 1..20: mol_type = genomic DNA
cgactcccggtgtgggaacc

SEQ ID NO: 46757 - DNA, 21 bp, Homo sapiens
  source 1..21: mol_type = genomic DNA
cgactcccggtgtgggaacca

SEQ ID NO: 46758 - DNA, 17 bp, Homo sapiens
  source 1..17: mol_type = genomic DNA
cgactcctggctggctc

SEQ ID NO: 46759 - DNA, 18 bp, Homo sapiens
  source 1..18: mol_type = genomic DNA
cgactcctggctggctcg

SEQ ID NO: 46760 - DNA, 19 bp, Homo sapiens
  source 1..19: mol_type = genomic DNA
cgactcctggctggctcgc

SEQ ID NO: 46761 - DNA, 20 bp, Homo sapiens
  source 1..20: mol_type = genomic DNA
cgactcctggctggctcgcc

SEQ ID NO: 46762 - DNA, 21 bp, Homo sapiens
  source 1..21: mol_type = genomic DNA
cgactcctggctggctcgcca

SEQ ID NO: 46763 - DNA, 32 bp, Homo sapiens; identical to SEQ ID NO: 11786
  source 1..32: mol_type = genomic DNA

SEQ ID NO: 46764 - DNA, 33 bp, Homo sapiens; identical to SEQ ID NO: 11787
  source 1..33: mol_type = genomic DNA

SEQ ID NO: 46765 - DNA, 34 bp, Homo sapiens; identical to SEQ ID NO: 11788
  source 1..34: mol_type = genomic DNA

SEQ ID NO: 46766 - DNA, 35 bp, Homo sapiens; identical to SEQ ID NO: 11789
  source 1..35: mol_type = genomic DNA

SEQ ID NO: 46767 - DNA, 36 bp, Homo sapiens; identical to SEQ ID NO: 11790
  source 1..36: mol_type = genomic DNA

SEQ ID NO: 46768 - DNA, 37 bp, Homo sapiens; identical to SEQ ID NO: 11791
  source 1..37: mol_type = genomic DNA

SEQ ID NO: 46769 - DNA, 20 bp, Homo sapiens
  source 1..20: mol_type = genomic DNA
cgagcccacccagggacgcc

SEQ ID NO: 46770 - DNA, 17 bp, Homo sapiens
  source 1..17: mol_type = genomic DNA
cgagccccagtggaacc

SEQ ID NO: 46771 - DNA, 18 bp, Homo sapiens
  source 1..18: mol_type = genomic DNA
cgagccccagtggaacca

SEQ ID NO: 46772 - DNA, 19 bp, Homo sapiens
  source 1..19: mol_type = genomic DNA
cgagccccagtggaaccac

SEQ ID NO: 46773 - DNA, 20 bp, Homo sapiens
  source 1..20: mol_type = genomic DNA
cgagccccagtggaaccacc

SEQ ID NO: 46774 - DNA, 21 bp, Homo sapiens
  source 1..21: mol_type = genomic DNA
cgagccccagtggaaccacca

SEQ ID NO: 46775 - DNA, 19 bp, Homo sapiens
  source 1..19: mol_type = genomic DNA
cgagcctcacctggagcac

SEQ ID NO: 46776 - DNA, 19 bp, Homo sapiens
  source 1..19: mol_type = genomic DNA
cgagcggtctaaggcgctg

SEQ ID NO: 46777 - DNA, 23 bp, Homo sapiens
  source 1..23: mol_type = genomic DNA
cgagcggtctaaggcgctggatt

SEQ ID NO: 46778 - DNA, 29 bp, Homo sapiens
  source 1..29: mol_type = genomic DNA
cgaggccccgggttcaatccccggcacct

SEQ ID NO: 46779 - DNA, 34 bp, Homo sapiens; identical to SEQ ID NO: 35529
  source 1..34: mol_type = genomic DNA

SEQ ID NO: 46780 - DNA, 35 bp, Homo sapiens
  source 1..35: mol_type = genomic DNA
cgaggccccgggttcaatccccggcacctccacca

SEQ ID NO: 46781 - DNA, 22 bp, Homo sapiens
  source 1..22: mol_type = genomic DNA
cgaggtggccgagtggttaagg

SEQ ID NO: 46782 - DNA, 20 bp, Homo sapiens
  source 1..20: mol_type = genomic DNA
cgagtcccacctggggtacc

SEQ ID NO: 46783 - DNA, 21 bp, Homo sapiens
  source 1..21: mol_type = genomic DNA
cgagtcccatctggggtgcca

SEQ ID NO: 46784 - DNA, 20 bp, Homo sapiens
  source 1..20: mol_type = genomic DNA
cgagtcccttcgtggtcgcc

SEQ ID NO: 46785 - DNA, 19 bp, Homo sapiens
  source 1..19: mol_type = genomic DNA
cgagtcctgccgcggtcgc

SEQ ID NO: 46786 - DNA, 20 bp, Homo sapiens
  source 1..20: mol_type = genomic DNA
cgagtcctgccgcggtcgcc

SEQ ID NO: 46787 - DNA, 25 bp, Homo sapiens
  source 1..25: mol_type = genomic DNA
cgagttcaaatctcgctggggcctc

SEQ ID NO: 46788 - DNA, 24 bp, Homo sapiens
  source 1..24: mol_type = genomic DNA
cgagttcaaatctcggtggaacct

SEQ ID NO: 46789 - DNA, 25 bp, Homo sapiens
  source 1..25: mol_type = genomic DNA
cgagttcaaatctcggtggaacctc

SEQ ID NO: 46790 - DNA, 24 bp, Homo sapiens
  source 1..24: mol_type = genomic DNA
cgagttcaaatctcggtgggacct

SEQ ID NO: 46791 - DNA, 25 bp, Homo sapiens
  source 1..25: mol_type = genomic DNA
cgagttcaaatctcggtgggacctc

SEQ ID NO: 46792 - DNA, 26 bp, Homo sapiens
  source 1..26: mol_type = genomic DNA
cgagttcaaatctcggtgggacctcc

SEQ ID NO: 46793 - DNA, 20 bp, Homo sapiens
  source 1..20: mol_type = genomic DNA
cgatccccagcatctccacc

SEQ ID NO: 46794 - DNA, 16 bp, Homo sapiens
  source 1..16: mol_type = genomic DNA
cgatccccggcacctc

SEQ ID NO: 46795 - DNA, 20 bp, Homo sapiens
  source 1..20: mol_type = genomic DNA
cgatccccggcatctccacc

SEQ ID NO: 46796 - DNA, 21 bp, Homo sapiens
  source 1..21: mol_type = genomic DNA
cgatccccggcatctccacca

SEQ ID NO: 46797 - DNA, 19 bp, Homo sapiens
  source 1..19: mol_type = genomic DNA
cgatccccgtacgggccac

SEQ ID NO: 46798 - DNA, 20 bp, Homo sapiens
  source 1..20: mol_type = genomic DNA
cgatccccgtacgggccacc

SEQ ID NO: 46799 - DNA, 20 bp, Homo sapiens
  source 1..20: mol_type = genomic DNA
cgatccccgtactggccacc

SEQ ID NO: 46800 - DNA, 20 bp, Homo sapiens
  source 1..20: mol_type = genomic DNA
cgatcccgggcggaaacacc

SEQ ID NO: 46801 - DNA, 18 bp, Homo sapiens
  source 1..18: mol_type = genomic DNA
cgatcccgggtttcggca

SEQ ID NO: 46802 - DNA, 19 bp, Homo sapiens
  source 1..19: mol_type = genomic DNA
cgatcccgggtttcggcac

SEQ ID NO: 46803 - DNA, 20 bp, Homo sapiens
  source 1..20: mol_type = genomic DNA
cgatcccgggtttcggcacc

SEQ ID NO: 46804 - DNA, 21 bp, Homo sapiens
  source 1..21: mol_type = genomic DNA
cgatcccgggtttcggcacca

SEQ ID NO: 46805 - DNA, 29 bp, Homo sapiens
  source 1..29: mol_type = genomic DNA
cgatccgagttcaaatctcggtgggacct

SEQ ID NO: 46806 - DNA, 30 bp, Homo sapiens; identical to SEQ ID NO: 11877
  source 1..30: mol_type = genomic DNA

SEQ ID NO: 46807 - DNA, 19 bp, Homo sapiens
  source 1..19: mol_type = genomic DNA
cgatcctcacctggagcac

SEQ ID NO: 46808 - DNA, 20 bp, Homo sapiens
  source 1..20: mol_type = genomic DNA
cgatcctcacctggagcacc

SEQ ID NO: 46809 - DNA, 19 bp, Homo sapiens
  source 1..19: mol_type = genomic DNA
cgatgcccgcatcctccac

SEQ ID NO: 46810 - DNA, 28 bp, Homo sapiens
  source 1..28: mol_type = genomic DNA
cgatggatcgaaaccatcctctgctacc

SEQ ID NO: 46811 - DNA, 37 bp, Homo sapiens; identical to SEQ ID NO: 11904
  source 1..37: mol_type = genomic DNA

SEQ ID NO: 46812 - DNA, 16 bp, Homo sapiens
  source 1..16: mol_type = genomic DNA
cgattccccgacgggg

SEQ ID NO: 46813 - DNA, 17 bp, Homo sapiens
  source 1..17: mol_type = genomic DNA
cgattccccgacgggga

SEQ ID NO: 46814 - DNA, 18 bp, Homo sapiens
  source 1..18: mol_type = genomic DNA
cgattccccgacggggag

SEQ ID NO: 46815 - DNA, 19 bp, Homo sapiens
  source 1..19: mol_type = genomic DNA
cgattccccgacggggagc

SEQ ID NO: 46816 - DNA, 20 bp, Homo sapiens
  source 1..20: mol_type = genomic DNA
cgattccccgacggggagcc

SEQ ID NO: 46817 - DNA, 21 bp, Homo sapiens
  source 1..21: mol_type = genomic DNA
cgattccccgacggggagcca

SEQ ID NO: 46818 - DNA, 16 bp, Homo sapiens
  source 1..16: mol_type = genomic DNA
cgattcccggccaacg

SEQ ID NO: 46819 - DNA, 17 bp, Homo sapiens
  source 1..17: mol_type = genomic DNA
cgattcccggccaacgc

SEQ ID NO: 46820 - DNA, 19 bp, Homo sapiens
  source 1..19: mol_type = genomic DNA
cgattcccggccaacgcac

SEQ ID NO: 46821 - DNA, 20 bp, Homo sapiens
  source 1..20: mol_type = genomic DNA
cgattcccggccaacgcacc

SEQ ID NO: 46822 - DNA, 21 bp, Homo sapiens
  source 1..21: mol_type = genomic DNA
cgattcccggccaacgcacca

SEQ ID NO: 46823 - DNA, 18 bp, Homo sapiens
  source 1..18: mol_type = genomic DNA
cgattcccggccaatgca

SEQ ID NO: 46824 - DNA, 19 bp, Homo sapiens
  source 1..19: mol_type = genomic DNA
cgattcccggccaatgcac

SEQ ID NO: 46825 - DNA, 20 bp, Homo sapiens
  source 1..20: mol_type = genomic DNA
cgattcccggccaatgcacc

SEQ ID NO: 46826 - DNA, 21 bp, Homo sapiens
  source 1..21: mol_type = genomic DNA
cgattcccggccaatgcacca

SEQ ID NO: 46827 - DNA, 20 bp, Homo sapiens
  source 1..20: mol_type = genomic DNA
cgattcccggcccatgcacc

SEQ ID NO: 46828 - DNA, 21 bp, Homo sapiens
  source 1..21: mol_type = genomic DNA
cgattcccggcccatgcacca

SEQ ID NO: 46829 - DNA, 16 bp, Homo sapiens
  source 1..16: mol_type = genomic DNA
cgattcccgggcggcg

SEQ ID NO: 46830 - DNA, 17 bp, Homo sapiens
  source 1..17: mol_type = genomic DNA
cgattcccgggcggcgc

SEQ ID NO: 46831 - DNA, 18 bp, Homo sapiens
  source 1..18: mol_type = genomic DNA
cgattcccgggcggcgca

SEQ ID NO: 46832 - DNA, 19 bp, Homo sapiens
  source 1..19: mol_type = genomic DNA
cgattcccgggcggcgcac

SEQ ID NO: 46833 - DNA, 20 bp, Homo sapiens
  source 1..20: mol_type = genomic DNA
cgattcccgggcggcgcacc

SEQ ID NO: 46834 - DNA, 21 bp, Homo sapiens
  source 1..21: mol_type = genomic DNA
cgattcccgggcggcgcacca

SEQ ID NO: 46835 - DNA, 16 bp, Homo sapiens
  source 1..16: mol_type = genomic DNA
cgattcccggtcaggg

SEQ ID NO: 46836 - DNA, 19 bp, Homo sapiens
  source 1..19: mol_type = genomic DNA
cgattcccggtcagggaac

SEQ ID NO: 46837 - DNA, 20 bp, Homo sapiens
  source 1..20: mol_type = genomic DNA
cgattcccggtcagggaacc

SEQ ID NO: 46838 - DNA, 19 bp, Homo sapiens
  source 1..19: mol_type = genomic DNA
cgattccggctcgaaggac

SEQ ID NO: 46839 - DNA, 20 bp, Homo sapiens
  source 1..20: mol_type = genomic DNA
cgattccggctcgaaggacc

SEQ ID NO: 46840 - DNA, 21 bp, Homo sapiens
  source 1..21: mol_type = genomic DNA
cgattccggctcgaaggacca

SEQ ID NO: 46841 - DNA, 18 bp, Homo sapiens
  source 1..18: mol_type = genomic DNA
cgattctcatagtcctag

SEQ ID NO: 46842 - DNA, 19 bp, Homo sapiens
  source 1..19: mol_type = genomic DNA
cgattctcatagtcctagc

SEQ ID NO: 46843 - DNA, 20 bp, Homo sapiens
  source 1..20: mol_type = genomic DNA
cgattctcatagtcctagcc

SEQ ID NO: 46844 - DNA, 21 bp, Homo sapiens
  source 1..21: mol_type = genomic DNA
cgattctcatagtcctagcca

SEQ ID NO: 46845 - DNA, 23 bp, Homo sapiens
  source 1..23: mol_type = genomic DNA
cgcaatggataacgcgtctgact

SEQ ID NO: 46846 - DNA, 19 bp, Homo sapiens
  source 1..19: mol_type = genomic DNA
cgcaatggatagcgcattg

SEQ ID NO: 46847 - DNA, 25 bp, Homo sapiens
  source 1..25: mol_type = genomic DNA
cgcaatggatagcgcattggacttc

SEQ ID NO: 46848 - DNA, 16 bp, Homo sapiens
  source 1..16: mol_type = genomic DNA
cgcacgttgggcgcca

SEQ ID NO: 46849 - DNA, 34 bp, Homo sapiens; identical to SEQ ID NO: 11951
  source 1..34: mol_type = genomic DNA

SEQ ID NO: 46850 - DNA, 35 bp, Homo sapiens; identical to SEQ ID NO: 11952
  source 1..35: mol_type = genomic DNA

SEQ ID NO: 46851 - DNA, 36 bp, Homo sapiens; identical to SEQ ID NO: 11953
  source 1..36: mol_type = genomic DNA

SEQ ID NO: 46852 - DNA, 37 bp, Homo sapiens; identical to SEQ ID NO: 11954
  source 1..37: mol_type = genomic DNA

SEQ ID NO: 46853 - DNA, 38 bp, Homo sapiens; identical to SEQ ID NO: 11955
  source 1..38: mol_type = genomic DNA

SEQ ID NO: 46854 - DNA, 39 bp, Homo sapiens; identical to SEQ ID NO: 11956
  source 1..39: mol_type = genomic DNA

SEQ ID NO: 46855 - DNA, 33 bp, Homo sapiens; identical to SEQ ID NO: 11964
  source 1..33: mol_type = genomic DNA

SEQ ID NO: 46856 - DNA, 34 bp, Homo sapiens; identical to SEQ ID NO: 11965
  source 1..34: mol_type = genomic DNA

SEQ ID NO: 46857 - DNA, 35 bp, Homo sapiens; identical to SEQ ID NO: 11966
  source 1..35: mol_type = genomic DNA

SEQ ID NO: 46858 - DNA, 36 bp, Homo sapiens; identical to SEQ ID NO: 11967
  source 1..36: mol_type = genomic DNA

SEQ ID NO: 46859 - DNA, 37 bp, Homo sapiens; identical to SEQ ID NO: 11968
  source 1..37: mol_type = genomic DNA

SEQ ID NO: 46860 - DNA, 21 bp, Homo sapiens
  source 1..21: mol_type = genomic DNA
cgcagcggaagcgtgctgggc

SEQ ID NO: 46861 - DNA, 22 bp, Homo sapiens
  source 1..22: mol_type = genomic DNA
cgcagcggaagcgtgctgggcc

SEQ ID NO: 46862 - DNA, 23 bp, Homo sapiens
  source 1..23: mol_type = genomic DNA
cgcagcggaagcgtgctgggccc

SEQ ID NO: 46863 - DNA, 32 bp, Homo sapiens; identical to SEQ ID NO: 11998
  source 1..32: mol_type = genomic DNA

SEQ ID NO: 46864 - DNA, 33 bp, Homo sapiens; identical to SEQ ID NO: 11999
  source 1..33: mol_type = genomic DNA

SEQ ID NO: 46865 - DNA, 17 bp, Homo sapiens
  source 1..17: mol_type = genomic DNA
cgcattggacttctaat

SEQ ID NO: 46866 - DNA, 19 bp, Homo sapiens
  source 1..19: mol_type = genomic DNA
cgcattggtggttcagtgg

SEQ ID NO: 46867 - DNA, 31 bp, Homo sapiens; identical to SEQ ID NO: 12010
  source 1..31: mol_type = genomic DNA

SEQ ID NO: 46868 - DNA, 32 bp, Homo sapiens; identical to SEQ ID NO: 12011
  source 1..32: mol_type = genomic DNA

SEQ ID NO: 46869 - DNA, 33 bp, Homo sapiens; identical to SEQ ID NO: 12012
  source 1..33: mol_type = genomic DNA

SEQ ID NO: 46870 - DNA, 34 bp, Homo sapiens; identical to SEQ ID NO: 12013
  source 1..34: mol_type = genomic DNA

SEQ ID NO: 46871 - DNA, 37 bp, Homo sapiens; identical to SEQ ID NO: 12023
  source 1..37: mol_type = genomic DNA

SEQ ID NO: 46872 - DNA, 31 bp, Homo sapiens
  source 1..31: mol_type = genomic DNA
cgccaaggtcgcgggttcgatccccgtacgg

SEQ ID NO: 46873 - DNA, 32 bp, Homo sapiens; identical to SEQ ID NO: 12027
  source 1..32: mol_type = genomic DNA

SEQ ID NO: 46874 - DNA, 33 bp, Homo sapiens; identical to SEQ ID NO: 12028
  source 1..33: mol_type = genomic DNA

SEQ ID NO: 46875 - DNA, 34 bp, Homo sapiens
  source 1..34: mol_type = genomic DNA
cgccaaggtcgcgggttcgatccccgtacgggcc

SEQ ID NO: 46876 - DNA, 36 bp, Homo sapiens; identical to SEQ ID NO: 35645
  source 1..36: mol_type = genomic DNA

SEQ ID NO: 46877 - DNA, 37 bp, Homo sapiens; identical to SEQ ID NO: 12030
  source 1..37: mol_type = genomic DNA

SEQ ID NO: 46878 - DNA, 38 bp, Homo sapiens; identical to SEQ ID NO: 12031
  source 1..38: mol_type = genomic DNA

SEQ ID NO: 46879 - DNA, 32 bp, Homo sapiens; identical to SEQ ID NO: 12032
  source 1..32: mol_type = genomic DNA

SEQ ID NO: 46880 - DNA, 37 bp, Homo sapiens; identical to SEQ ID NO: 12033
  source 1..37: mol_type = genomic DNA

SEQ ID NO: 46881 - DNA, 38 bp, Homo sapiens
  source 1..38: mol_type = genomic DNA
cgccaaggtcgcgggttcgatccccgtactggccacca

SEQ ID NO: 46882 - DNA, 33 bp, Homo sapiens; identical to SEQ ID NO: 12041
  source 1..33: mol_type = genomic DNA

SEQ ID NO: 46883 - DNA, 34 bp, Homo sapiens; identical to SEQ ID NO: 12048
  source 1..34: mol_type = genomic DNA

SEQ ID NO: 46884 - DNA, 34 bp, Homo sapiens; identical to SEQ ID NO: 12054
  source 1..34: mol_type = genomic DNA

SEQ ID NO: 46885 - DNA, 16 bp, Homo sapiens
  source 1..16: mol_type = genomic DNA
cgccgcggcccgggtt

SEQ ID NO: 46886 - DNA, 21 bp, Homo sapiens
  source 1..21: mol_type = genomic DNA
cgccgcggcccgggttcgatt

SEQ ID NO: 46887 - DNA, 24 bp, Homo sapiens
  source 1..24: mol_type = genomic DNA
cgccgcggcccgggttcgattccc

SEQ ID NO: 46888 - DNA, 27 bp, Homo sapiens
  source 1..27: mol_type = genomic DNA
cgccgcggcccgggttcgattcccggt

SEQ ID NO: 46889 - DNA, 28 bp, Homo sapiens
  source 1..28: mol_type = genomic DNA
cgccgcggcccgggttcgattcccggtc

SEQ ID NO: 46890 - DNA, 29 bp, Homo sapiens
  source 1..29: mol_type = genomic DNA
cgccgcggcccgggttcgattcccggtca

SEQ ID NO: 46891 - DNA, 30 bp, Homo sapiens; identical to SEQ ID NO: 12073
  source 1..30: mol_type = genomic DNA

SEQ ID NO: 46892 - DNA, 31 bp, Homo sapiens; identical to SEQ ID NO: 12074
  source 1..31: mol_type = genomic DNA

SEQ ID NO: 46893 - DNA, 32 bp, Homo sapiens; identical to SEQ ID NO: 12076
  source 1..32: mol_type = genomic DNA

SEQ ID NO: 46894 - DNA, 33 bp, Homo sapiens; identical to SEQ ID NO: 12077
  source 1..33: mol_type = genomic DNA

SEQ ID NO: 46895 - DNA, 34 bp, Homo sapiens; identical to SEQ ID NO: 12078
  source 1..34: mol_type = genomic DNA

SEQ ID NO: 46896 - DNA, 35 bp, Homo sapiens; identical to SEQ ID NO: 12079
  source 1..35: mol_type = genomic DNA

SEQ ID NO: 46897 - DNA, 36 bp, Homo sapiens; identical to SEQ ID NO: 12080
  source 1..36: mol_type = genomic DNA

SEQ ID NO: 46898 - DNA, 37 bp, Homo sapiens; identical to SEQ ID NO: 12081
  source 1..37: mol_type = genomic DNA

SEQ ID NO: 46899 - DNA, 17 bp, Homo sapiens
  source 1..17: mol_type = genomic DNA
cgccgctggtgtagtgg

SEQ ID NO: 46900 - DNA, 26 bp, Homo sapiens
  source 1..26: mol_type = genomic DNA
cgccgctggtgtagtggtatcatgca

SEQ ID NO: 46901 - DNA, 28 bp, Homo sapiens
  source 1..28: mol_type = genomic DNA
cgccgctggtgtagtggtatcatgcaag

SEQ ID NO: 46902 - DNA, 29 bp, Homo sapiens
  source 1..29: mol_type = genomic DNA
cgccgctggtgtagtggtatcatgcaaga

SEQ ID NO: 46903 - DNA, 31 bp, Homo sapiens; identical to SEQ ID NO: 12092
  source 1..31: mol_type = genomic DNA

SEQ ID NO: 46904 - DNA, 38 bp, Homo sapiens; identical to SEQ ID NO: 12098
  source 1..38: mol_type = genomic DNA

SEQ ID NO: 46905 - DNA, 22 bp, Homo sapiens
  source 1..22: mol_type = genomic DNA
cgccgtgatcgtatagtggtta

SEQ ID NO: 46906 - DNA, 31 bp, Homo sapiens; identical to SEQ ID NO: 12106
  source 1..31: mol_type = genomic DNA

SEQ ID NO: 46907 - DNA, 32 bp, Homo sapiens; identical to SEQ ID NO: 12107
  source 1..32: mol_type = genomic DNA

SEQ ID NO: 46908 - DNA, 33 bp, Homo sapiens; identical to SEQ ID NO: 12108
  source 1..33: mol_type = genomic DNA

SEQ ID NO: 46909 - DNA, 34 bp, Homo sapiens; identical to SEQ ID NO: 12109
  source 1..34: mol_type = genomic DNA

SEQ ID NO: 46910 - DNA, 35 bp, Homo sapiens; identical to SEQ ID NO: 12110
  source 1..35: mol_type = genomic DNA

SEQ ID NO: 46911 - DNA, 16 bp, Homo sapiens
  source 1..16: mol_type = genomic DNA
cgcctgtcacgcggga

SEQ ID NO: 46912 - DNA, 19 bp, Homo sapiens
  source 1..19: mol_type = genomic DNA
cgcctgtcacgcgggagac

SEQ ID NO: 46913 - DNA, 20 bp, Homo sapiens
  source 1..20: mol_type = genomic DNA
cgcctgtcacgcgggagacc

SEQ ID NO: 46914 - DNA, 21 bp, Homo sapiens
  source 1..21: mol_type = genomic DNA
cgcctgtcacgcgggagaccg

SEQ ID NO: 46915 - DNA, 22 bp, Homo sapiens
  source 1..22: mol_type = genomic DNA
cgcctgtcacgcgggagaccgg

SEQ ID NO: 46916 - DNA, 23 bp, Homo sapiens
  source 1..23: mol_type = genomic DNA
cgcctgtcacgcgggagaccggg

SEQ ID NO: 46917 - DNA, 41 bp, Homo sapiens; identical to SEQ ID NO: 12129
  source 1..41: mol_type = genomic DNA

SEQ ID NO: 46918 - DNA, 44 bp, Homo sapiens; identical to SEQ ID NO: 12131
  source 1..44: mol_type = genomic DNA

SEQ ID NO: 46919 - DNA, 45 bp, Homo sapiens; identical to SEQ ID NO: 12132
  source 1..45: mol_type = genomic DNA

SEQ ID NO: 46920 - DNA, 46 bp, Homo sapiens; identical to SEQ ID NO: 12133
  source 1..46: mol_type = genomic DNA

SEQ ID NO: 46921 - DNA, 37 bp, Homo sapiens; identical to SEQ ID NO: 12135
  source 1..37: mol_type = genomic DNA

SEQ ID NO: 46922 - DNA, 39 bp, Homo sapiens; identical to SEQ ID NO: 12137
  source 1..39: mol_type = genomic DNA

SEQ ID NO: 46923 - DNA, 40 bp, Homo sapiens; identical to SEQ ID NO: 12138
  source 1..40: mol_type = genomic DNA

SEQ ID NO: 46924 - DNA, 41 bp, Homo sapiens; identical to SEQ ID NO: 12139
  source 1..41: mol_type = genomic DNA

SEQ ID NO: 46925 - DNA, 42 bp, Homo sapiens; identical to SEQ ID NO: 12140
  source 1..42: mol_type = genomic DNA

SEQ ID NO: 46926 - DNA, 43 bp, Homo sapiens; identical to SEQ ID NO: 12141
  source 1..43: mol_type = genomic DNA

SEQ ID NO: 46927 - DNA, 44 bp, Homo sapiens; identical to SEQ ID NO: 12142
  source 1..44: mol_type = genomic DNA

SEQ ID NO: 46928 - DNA, 45 bp, Homo sapiens; identical to SEQ ID NO: 12143
  source 1..45: mol_type = genomic DNA

SEQ ID NO: 46929 - DNA, 46 bp, Homo sapiens; identical to SEQ ID NO: 12144
  source 1..46: mol_type = genomic DNA

SEQ ID NO: 46930 - DNA, 47 bp, Homo sapiens; identical to SEQ ID NO: 12145
  source 1..47: mol_type = genomic DNA

SEQ ID NO: 46931 - DNA, 36 bp, Homo sapiens; identical to SEQ ID NO: 12156
  source 1..36: mol_type = genomic DNA

SEQ ID NO: 46932 - DNA, 38 bp, Homo sapiens; identical to SEQ ID NO: 12158
  source 1..38: mol_type = genomic DNA

SEQ ID NO: 46933 - DNA, 39 bp, Homo sapiens; identical to SEQ ID NO: 12159
  source 1..39: mol_type = genomic DNA

SEQ ID NO: 46934 - DNA, 36 bp, Homo sapiens; identical to SEQ ID NO: 12163
  source 1..36: mol_type = genomic DNA

SEQ ID NO: 46935 - DNA, 38 bp, Homo sapiens; identical to SEQ ID NO: 12164
  source 1..38: mol_type = genomic DNA

SEQ ID NO: 46936 - DNA, 24 bp, Homo sapiens
  source 1..24: mol_type = genomic DNA
cgcggcccgggttcgattcccggt

SEQ ID NO: 46937 - DNA, 25 bp, Homo sapiens
  source 1..25: mol_type = genomic DNA
cgcggcccgggttcgattcccggtc

SEQ ID NO: 46938 - DNA, 27 bp, Homo sapiens
  source 1..27: mol_type = genomic DNA
cgcggcccgggttcgattcccggtcag

SEQ ID NO: 46939 - DNA, 30 bp, Homo sapiens
  source 1..30: mol_type = genomic DNA
cgcggcccgggttcgattcccggtcaggga

SEQ ID NO: 46940 - DNA, 31 bp, Homo sapiens; identical to SEQ ID NO: 12193
  source 1..31: mol_type = genomic DNA

SEQ ID NO: 46941 - DNA, 32 bp, Homo sapiens; identical to SEQ ID NO: 12194
  source 1..32: mol_type = genomic DNA

SEQ ID NO: 46942 - DNA, 33 bp, Homo sapiens; identical to SEQ ID NO: 12195
  source 1..33: mol_type = genomic DNA

SEQ ID NO: 46943 - DNA, 34 bp, Homo sapiens; identical to SEQ ID NO: 12196
  source 1..34: mol_type = genomic DNA

SEQ ID NO: 46944 - DNA, 32 bp, Homo sapiens; identical to SEQ ID NO: 12207
  source 1..32: mol_type = genomic DNA

SEQ ID NO: 46945 - DNA, 33 bp, Homo sapiens; identical to SEQ ID NO: 12208
  source 1..33: mol_type = genomic DNA

SEQ ID NO: 46946 - DNA, 35 bp, Homo sapiens; identical to SEQ ID NO: 12210
  source 1..35: mol_type = genomic DNA

SEQ ID NO: 46947 - DNA, 36 bp, Homo sapiens; identical to SEQ ID NO: 12211
  source 1..36: mol_type = genomic DNA

SEQ ID NO: 46948 - DNA, 37 bp, Homo sapiens; identical to SEQ ID NO: 12212
  source 1..37: mol_type = genomic DNA

SEQ ID NO: 46949 - DNA, 38 bp, Homo sapiens; identical to SEQ ID NO: 12213
  source 1..38: mol_type = genomic DNA

SEQ ID NO: 46950 - DNA, 19 bp, Homo sapiens
  source 1..19: mol_type = genomic DNA
cgcgggagaccggggttcg

SEQ ID NO: 46951 - DNA, 22 bp, Homo sapiens
  source 1..22: mol_type = genomic DNA
cgcgggagaccggggttcgatt

SEQ ID NO: 46952 - DNA, 27 bp, Homo sapiens
  source 1..27: mol_type = genomic DNA
cgcgggagaccggggttcgattccccg

SEQ ID NO: 46953 - DNA, 28 bp, Homo sapiens
  source 1..28: mol_type = genomic DNA
cgcgggagaccggggttcgattccccga

SEQ ID NO: 46954 - DNA, 29 bp, Homo sapiens
  source 1..29: mol_type = genomic DNA
cgcgggagaccggggttcgattccccgac

SEQ ID NO: 46955 - DNA, 30 bp, Homo sapiens; identical to SEQ ID NO: 12222
  source 1..30: mol_type = genomic DNA

SEQ ID NO: 46956 - DNA, 31 bp, Homo sapiens; identical to SEQ ID NO: 12223
  source 1..31: mol_type = genomic DNA

SEQ ID NO: 46957 - DNA, 32 bp, Homo sapiens; identical to SEQ ID NO: 12224
  source 1..32: mol_type = genomic DNA

SEQ ID NO: 46958 - DNA, 33 bp, Homo sapiens; identical to SEQ ID NO: 12225
  source 1..33: mol_type = genomic DNA

SEQ ID NO: 46959 - DNA, 34 bp, Homo sapiens; identical to SEQ ID NO: 12226
  source 1..34: mol_type = genomic DNA

SEQ ID NO: 46960 - DNA, 35 bp, Homo sapiens; identical to SEQ ID NO: 12227
  source 1..35: mol_type = genomic DNA

SEQ ID NO: 46961 - DNA, 36 bp, Homo sapiens; identical to SEQ ID NO: 12228
  source 1..36: mol_type = genomic DNA

SEQ ID NO: 46962 - DNA, 37 bp, Homo sapiens; identical to SEQ ID NO: 12229
  source 1..37: mol_type = genomic DNA

SEQ ID NO: 46963 - DNA, 38 bp, Homo sapiens; identical to SEQ ID NO: 12230
  source 1..38: mol_type = genomic DNA

SEQ ID NO: 46964 - DNA, 16 bp, Homo sapiens
  source 1..16: mol_type = genomic DNA
cgcgggaggcccgggt

SEQ ID NO: 46965 - DNA, 17 bp, Homo sapiens
  source 1..17: mol_type = genomic DNA
cgcgggaggcccgggtt

SEQ ID NO: 46966 - DNA, 29 bp, Homo sapiens
  source 1..29: mol_type = genomic DNA
cgcgggaggcccgggttcgattcccggcc

SEQ ID NO: 46967 - DNA, 31 bp, Homo sapiens; identical to SEQ ID NO: 12239
  source 1..31: mol_type = genomic DNA

SEQ ID NO: 46968 - DNA, 33 bp, Homo sapiens; identical to SEQ ID NO: 12241
  source 1..33: mol_type = genomic DNA

SEQ ID NO: 46969 - DNA, 34 bp, Homo sapiens; identical to SEQ ID NO: 12242
  source 1..34: mol_type = genomic DNA

SEQ ID NO: 46970 - DNA, 35 bp, Homo sapiens; identical to SEQ ID NO: 12243
  source 1..35: mol_type = genomic DNA

SEQ ID NO: 46971 - DNA, 36 bp, Homo sapiens; identical to SEQ ID NO: 12244
  source 1..36: mol_type = genomic DNA

SEQ ID NO: 46972 - DNA, 37 bp, Homo sapiens; identical to SEQ ID NO: 12245
  source 1..37: mol_type = genomic DNA

SEQ ID NO: 46973 - DNA, 38 bp, Homo sapiens; identical to SEQ ID NO: 12246
  source 1..38: mol_type = genomic DNA

SEQ ID NO: 46974 - DNA, 33 bp, Homo sapiens; identical to SEQ ID NO: 12249
  source 1..33: mol_type = genomic DNA

SEQ ID NO: 46975 - DNA, 37 bp, Homo sapiens; identical to SEQ ID NO: 12251
  source 1..37: mol_type = genomic DNA

SEQ ID NO: 46976 - DNA, 24 bp, Homo sapiens
  source 1..24: mol_type = genomic DNA
cgcgggttcgatccccgtacgggc

SEQ ID NO: 46977 - DNA, 25 bp, Homo sapiens
  source 1..25: mol_type = genomic DNA
cgcgggttcgatccccgtacgggcc

SEQ ID NO: 46978 - DNA, 26 bp, Homo sapiens
  source 1..26: mol_type = genomic DNA
cgcgggttcgatccccgtacgggcca

SEQ ID NO: 46979 - DNA, 27 bp, Homo sapiens
  source 1..27: mol_type = genomic DNA
cgcgggttcgatccccgtacgggccac

SEQ ID NO: 46980 - DNA, 28 bp, Homo sapiens
  source 1..28: mol_type = genomic DNA
cgcgggttcgatccccgtacgggccacc

SEQ ID NO: 46981 - DNA, 25 bp, Homo sapiens
  source 1..25: mol_type = genomic DNA
cgcgtgggttcgaaccccactcctg

SEQ ID NO: 46982 - DNA, 28 bp, Homo sapiens
  source 1..28: mol_type = genomic DNA
cgcgtgggttcgaatcccatcctcgtcg

SEQ ID NO: 46983 - DNA, 29 bp, Homo sapiens
  source 1..29: mol_type = genomic DNA
cgcgtgggttcgaatcccatcctcgtcgc

SEQ ID NO: 46984 - DNA, 30 bp, Homo sapiens; identical to SEQ ID NO: 12289
  source 1..30: mol_type = genomic DNA

SEQ ID NO: 46985 - DNA, 31 bp, Homo sapiens; identical to SEQ ID NO: 12290
  source 1..31: mol_type = genomic DNA

SEQ ID NO: 46986 - DNA, 25 bp, Homo sapiens
  source 1..25: mol_type = genomic DNA
cgcgttcgattcccggtcagggaac

SEQ ID NO: 46987 - DNA, 21 bp, Homo sapiens
  source 1..21: mol_type = genomic DNA
cgcgttcggctgttaaccgga

SEQ ID NO: 46988 - DNA, 43 bp, Homo sapiens; identical to SEQ ID NO: 12305
  source 1..43: mol_type = genomic DNA

SEQ ID NO: 46989 - DNA, 44 bp, Homo sapiens; identical to SEQ ID NO: 12306
  source 1..44: mol_type = genomic DNA

SEQ ID NO: 46990 - DNA, 46 bp, Homo sapiens; identical to SEQ ID NO: 12308
  source 1..46: mol_type = genomic DNA

SEQ ID NO: 46991 - DNA, 22 bp, Homo sapiens
  source 1..22: mol_type = genomic DNA
cgctggtgtagtggtatcatgc

SEQ ID NO: 46992 - DNA, 25 bp, Homo sapiens
  source 1..25: mol_type = genomic DNA
cgctggtgtagtggtatcatgcaag

SEQ ID NO: 46993 - DNA, 28 bp, Homo sapiens
  source 1..28: mol_type = genomic DNA
cgctggtgtagtggtatcatgcaagatt

SEQ ID NO: 46994 - DNA, 27 bp, Homo sapiens
  source 1..27: mol_type = genomic DNA
cgctggttcgaatccggctcgaaggac

SEQ ID NO: 46995 - DNA, 28 bp, Homo sapiens
  source 1..28: mol_type = genomic DNA
cgctggttcgaatccggctcgaaggacc

SEQ ID NO: 46996 - DNA, 29 bp, Homo sapiens
  source 1..29: mol_type = genomic DNA
cgctggttcgaatccggctcgaaggacca

SEQ ID NO: 46997 - DNA, 28 bp, Homo sapiens
  source 1..28: mol_type = genomic DNA
cgctggttcgaatccggctcggaggacc

SEQ ID NO: 46998 - DNA, 29 bp, Homo sapiens
  source 1..29: mol_type = genomic DNA
cgctggttcgaatccggctcggaggacca

SEQ ID NO: 46999 - DNA, 28 bp, Homo sapiens
  source 1..28: mol_type = genomic DNA
cgctggttcgattccagctcgaaggacc

SEQ ID NO: 47000 - DNA, 27 bp, Homo sapiens
  source 1..27: mol_type = genomic DNA
cgctggttcgattccggctcgaaggac

SEQ ID NO: 47001 - DNA, 28 bp, Homo sapiens
  source 1..28: mol_type = genomic DNA
cgctggttcgattccggctcgaaggacc

SEQ ID NO: 47002 - DNA, 29 bp, Homo sapiens
  source 1..29: mol_type = genomic DNA
cgctggttcgattccggctcgaaggacca

SEQ ID NO: 47003 - DNA, 45 bp, Homo sapiens
  source 1..45: mol_type = genomic DNA
cgcttcgggtgcgagaggtcccgggttcaaatcccggacgagccc

SEQ ID NO: 47004 - DNA, 34 bp, Homo sapiens; identical to SEQ ID NO: 12342
  source 1..34: mol_type = genomic DNA

SEQ ID NO: 47005 - DNA, 16 bp, Homo sapiens
  source 1..16: mol_type = genomic DNA
cggaagcgtgctgggc

SEQ ID NO: 47006 - DNA, 17 bp, Homo sapiens
  source 1..17: mol_type = genomic DNA
cggaagcgtgctgggcc

SEQ ID NO: 47007 - DNA, 18 bp, Homo sapiens
  source 1..18: mol_type = genomic DNA
cggaagcgtgctgggccc

SEQ ID NO: 47008 - DNA, 19 bp, Homo sapiens
  source 1..19: mol_type = genomic DNA
cggaagcgtgctgggccca

SEQ ID NO: 47009 - DNA, 20 bp, Homo sapiens
  source 1..20: mol_type = genomic DNA
cggaagcgtgctgggcccat

SEQ ID NO: 47010 - DNA, 21 bp, Homo sapiens
  source 1..21: mol_type = genomic DNA
cggaagcgtgctgggcccata

SEQ ID NO: 47011 - DNA, 22 bp, Homo sapiens
  source 1..22: mol_type = genomic DNA
cggaagcgtgctgggcccataa

SEQ ID NO: 47012 - DNA, 23 bp, Homo sapiens
  source 1..23: mol_type = genomic DNA
cggaagcgtgctgggcccataac

SEQ ID NO: 47013 - DNA, 24 bp, Homo sapiens
  source 1..24: mol_type = genomic DNA
cggaagcgtgctgggcccataacc

SEQ ID NO: 47014 - DNA, 25 bp, Homo sapiens
  source 1..25: mol_type = genomic DNA
cggaagcgtgctgggcccataaccc

SEQ ID NO: 47015 - DNA, 26 bp, Homo sapiens
  source 1..26: mol_type = genomic DNA
cggaagcgtgctgggcccataaccca

SEQ ID NO: 47016 - DNA, 27 bp, Homo sapiens
  source 1..27: mol_type = genomic DNA
cggaagcgtgctgggcccataacccag

SEQ ID NO: 47017 - DNA, 28 bp, Homo sapiens
  source 1..28: mol_type = genomic DNA
cggaagcgtgctgggcccataacccaga

SEQ ID NO: 47018 - DNA, 33 bp, Homo sapiens; identical to SEQ ID NO: 12359
  source 1..33: mol_type = genomic DNA

SEQ ID NO: 47019 - DNA, 34 bp, Homo sapiens; identical to SEQ ID NO: 12360
  source 1..34: mol_type = genomic DNA

SEQ ID NO: 47020 - DNA, 35 bp, Homo sapiens; identical to SEQ ID NO: 12361
  source 1..35: mol_type = genomic DNA

SEQ ID NO: 47021 - DNA, 36 bp, Homo sapiens; identical to SEQ ID NO: 12362
  source 1..36: mol_type = genomic DNA

SEQ ID NO: 47022 - DNA, 37 bp, Homo sapiens; identical to SEQ ID NO: 12363
  source 1..37: mol_type = genomic DNA

SEQ ID NO: 47023 - DNA, 38 bp, Homo sapiens; identical to SEQ ID NO: 12364
  source 1..38: mol_type = genomic DNA

SEQ ID NO: 47024 - DNA, 39 bp, Homo sapiens; identical to SEQ ID NO: 12365
  source 1..39: mol_type = genomic DNA

SEQ ID NO: 47025 - DNA, 40 bp, Homo sapiens; identical to SEQ ID NO: 12366
  source 1..40: mol_type = genomic DNA

SEQ ID NO: 47026 - DNA, 41 bp, Homo sapiens; identical to SEQ ID NO: 12367
  source 1..41: mol_type = genomic DNA

SEQ ID NO: 47027 - DNA, 44 bp, Homo sapiens; identical to SEQ ID NO: 35779
  source 1..44: mol_type = genomic DNA

SEQ ID NO: 47028 - DNA, 45 bp, Homo sapiens; identical to SEQ ID NO: 35780
  source 1..45: mol_type = genomic DNA

SEQ ID NO: 47029 - DNA, 46 bp, Homo sapiens; identical to SEQ ID NO: 35781
  source 1..46: mol_type = genomic DNA

SEQ ID NO: 47030 - DNA, 47 bp, Homo sapiens; identical to SEQ ID NO: 35782
  source 1..47: mol_type = genomic DNA

SEQ ID NO: 47031 - DNA, 25 bp, Homo sapiens
  source 1..25: mol_type = genomic DNA
cggaagcgtgctgggcccgtaaccc

SEQ ID NO: 47032 - DNA, 25 bp, Homo sapiens
  source 1..25: mol_type = genomic DNA
cggagaattttggattctcagggat

SEQ ID NO: 47033 - DNA, 26 bp, Homo sapiens
  source 1..26: mol_type = genomic DNA
cggagaattttggattctcagggatg

SEQ ID NO: 47034 - DNA, 31 bp, Homo sapiens
  source 1..31: mol_type = genomic DNA
cggagaattttggattctcagggatgggttc

SEQ ID NO: 47035 - DNA, 32 bp, Homo sapiens; identical to SEQ ID NO: 12369
  source 1..32: mol_type = genomic DNA

SEQ ID NO: 47036 - DNA, 34 bp, Homo sapiens; identical to SEQ ID NO: 12370
  source 1..34: mol_type = genomic DNA

SEQ ID NO: 47037 - DNA, 35 bp, Homo sapiens; identical to SEQ ID NO: 35789
  source 1..35: mol_type = genomic DNA

SEQ ID NO: 47038 - DNA, 36 bp, Homo sapiens
  source 1..36: mol_type = genomic DNA
cggagaattttggattctcagggatgggttcgattc

SEQ ID NO: 47039 - DNA, 37 bp, Homo sapiens
  source 1..37: mol_type = genomic DNA
cggagaattttggattctcagggatgggttcgattct

SEQ ID NO: 47040 - DNA, 45 bp, Homo sapiens
  source 1..45: mol_type = genomic DNA
cggagaattttggattctcagggatgggttcgattctcatagtcc

SEQ ID NO: 47041 - DNA, 46 bp, Homo sapiens
  source 1..46: mol_type = genomic DNA
cggagaattttggattctcagggatgggttcgattctcatagtcct

SEQ ID NO: 47042 - DNA, 47 bp, Homo sapiens; identical to SEQ ID NO: 35790
  source 1..47: mol_type = genomic DNA

SEQ ID NO: 47043 - DNA, 27 bp, Homo sapiens
  source 1..27: mol_type = genomic DNA
cggagatgaaaacctttttccaaggac

SEQ ID NO: 47044 - DNA, 28 bp, Homo sapiens
  source 1..28: mol_type = genomic DNA
cggagatgaaaacctttttccaaggaca

SEQ ID NO: 47045 - DNA, 29 bp, Homo sapiens
  source 1..29: mol_type = genomic DNA
cggagatgaaaacctttttccaaggacac

SEQ ID NO: 47046 - DNA, 30 bp, Homo sapiens; identical to SEQ ID NO: 12384
  source 1..30: mol_type = genomic DNA

SEQ ID NO: 47047 - DNA, 31 bp, Homo sapiens; identical to SEQ ID NO: 12385
  source 1..31: mol_type = genomic DNA

SEQ ID NO: 47048 - DNA, 16 bp, Homo sapiens
  source 1..16: mol_type = genomic DNA
cggagctggggattgt

SEQ ID NO: 47049 - DNA, 32 bp, Homo sapiens; identical to SEQ ID NO: 12389
  source 1..32: mol_type = genomic DNA

SEQ ID NO: 47050 - DNA, 41 bp, Homo sapiens; identical to SEQ ID NO: 12391
  source 1..41: mol_type = genomic DNA

SEQ ID NO: 47051 - DNA, 16 bp, Homo sapiens
  source 1..16: mol_type = genomic DNA
cggatagctcagtcgg

SEQ ID NO: 47052 - DNA, 19 bp, Homo sapiens
  source 1..19: mol_type = genomic DNA
cggatagctcagtcggtag

SEQ ID NO: 47053 - DNA, 20 bp, Homo sapiens
  source 1..20: mol_type = genomic DNA
cggatagctcagtcggtaga

SEQ ID NO: 47054 - DNA, 21 bp, Homo sapiens
  source 1..21: mol_type = genomic DNA
cggatagctcagtcggtagag

SEQ ID NO: 47055 - DNA, 22 bp, Homo sapiens
  source 1..22: mol_type = genomic DNA
cggatagctcagtcggtagagc

SEQ ID NO: 47056 - DNA, 23 bp, Homo sapiens
  source 1..23: mol_type = genomic DNA
cggatagctcagtcggtagagca

SEQ ID NO: 47057 - DNA, 24 bp, Homo sapiens
  source 1..24: mol_type = genomic DNA
cggatagctcagtcggtagagcat

SEQ ID NO: 47058 - DNA, 25 bp, Homo sapiens
  source 1..25: mol_type = genomic DNA
cggatagctcagtcggtagagcatc

SEQ ID NO: 47059 - DNA, 27 bp, Homo sapiens
  source 1..27: mol_type = genomic DNA
cggatagctcagtcggtagagcatcag

SEQ ID NO: 47060 - DNA, 28 bp, Homo sapiens
  source 1..28: mol_type = genomic DNA
cggatagctcagtcggtagagcatcaga

SEQ ID NO: 47061 - DNA, 29 bp, Homo sapiens
  source 1..29: mol_type = genomic DNA
cggatagctcagtcggtagagcatcagac

SEQ ID NO: 47062 - DNA, 30 bp, Homo sapiens; identical to SEQ ID NO: 12409
  source 1..30: mol_type = genomic DNA

SEQ ID NO: 47063 - DNA, 32 bp, Homo sapiens; identical to SEQ ID NO: 12411
  source 1..32: mol_type = genomic DNA

SEQ ID NO: 47064 - DNA, 33 bp, Homo sapiens; identical to SEQ ID NO: 12417
  source 1..33: mol_type = genomic DNA

SEQ ID NO: 47065 - DNA, 38 bp, Homo sapiens
  source 1..38: mol_type = genomic DNA
cggatcagaagattccaggttcgactcctggctggctc

SEQ ID NO: 47066 - DNA, 22 bp, Homo sapiens
  source 1..22: mol_type = genomic DNA
cggatcagaagattctaggttc

SEQ ID NO: 47067 - DNA, 16 bp, Homo sapiens
  source 1..16: mol_type = genomic DNA
cggatcagaagattga

SEQ ID NO: 47068 - DNA, 20 bp, Homo sapiens
  source 1..20: mol_type = genomic DNA
cggatcagaagattgagggt

SEQ ID NO: 47069 - DNA, 21 bp, Homo sapiens
  source 1..21: mol_type = genomic DNA
cggatcagaagattgagggtt

SEQ ID NO: 47070 - DNA, 22 bp, Homo sapiens
  source 1..22: mol_type = genomic DNA
cggatcagaagattgagggttc

SEQ ID NO: 47071 - DNA, 30 bp, Homo sapiens; identical to SEQ ID NO: 12425
  source 1..30: mol_type = genomic DNA

SEQ ID NO: 47072 - DNA, 32 bp, Homo sapiens
  source 1..32: mol_type = genomic DNA
cggatcagaagattgagggttcgagtcccttc

SEQ ID NO: 47073 - DNA, 22 bp, Homo sapiens
  source 1..22: mol_type = genomic DNA
cggatcagaagattgcaggttc

SEQ ID NO: 47074 - DNA, 16 bp, Homo sapiens
  source 1..16: mol_type = genomic DNA
cggatggaggcgtggg

SEQ ID NO: 47075 - DNA, 17 bp, Homo sapiens
  source 1..17: mol_type = genomic DNA
cggatggaggcgtgggt

SEQ ID NO: 47076 - DNA, 18 bp, Homo sapiens
  source 1..18: mol_type = genomic DNA
cggatggaggcgtgggtt

SEQ ID NO: 47077 - DNA, 29 bp, Homo sapiens
  source 1..29: mol_type = genomic DNA
cggatggaggcgtgggttcgaatcccact

SEQ ID NO: 47078 - DNA, 36 bp, Homo sapiens; identical to SEQ ID NO: 12442
  source 1..36: mol_type = genomic DNA

SEQ ID NO: 47079 - DNA, 37 bp, Homo sapiens; identical to SEQ ID NO: 12443
  source 1..37: mol_type = genomic DNA

SEQ ID NO: 47080 - DNA, 38 bp, Homo sapiens; identical to SEQ ID NO: 12444
  source 1..38: mol_type = genomic DNA

SEQ ID NO: 47081 - DNA, 17 bp, Homo sapiens
  source 1..17: mol_type = genomic DNA
cggcccgggttcgactc

SEQ ID NO: 47082 - DNA, 19 bp, Homo sapiens
  source 1..19: mol_type = genomic DNA
cggcccgggttcgactccc

SEQ ID NO: 47083 - DNA, 23 bp, Homo sapiens
  source 1..23: mol_type = genomic DNA
cggcccgggttcgactcccggtg

SEQ ID NO: 47084 - DNA, 25 bp, Homo sapiens
  source 1..25: mol_type = genomic DNA
cggcccgggttcgactcccggtgtg

SEQ ID NO: 47085 - DNA, 26 bp, Homo sapiens
  source 1..26: mol_type = genomic DNA
cggcccgggttcgactcccggtgtgg

SEQ ID NO: 47086 - DNA, 27 bp, Homo sapiens
  source 1..27: mol_type = genomic DNA
cggcccgggttcgactcccggtgtggg

SEQ ID NO: 47087 - DNA, 28 bp, Homo sapiens
  source 1..28: mol_type = genomic DNA
cggcccgggttcgactcccggtgtggga

SEQ ID NO: 47088 - DNA, 29 bp, Homo sapiens
  source 1..29: mol_type = genomic DNA
cggcccgggttcgactcccggtgtgggaa

SEQ ID NO: 47089 - DNA, 30 bp, Homo sapiens; identical to SEQ ID NO: 12456
  source 1..30: mol_type = genomic DNA

SEQ ID NO: 47090 - DNA, 31 bp, Homo sapiens; identical to SEQ ID NO: 12457
  source 1..31: mol_type = genomic DNA

SEQ ID NO: 47091 - DNA, 32 bp, Homo sapiens; identical to SEQ ID NO: 12458
  source 1..32: mol_type = genomic DNA

SEQ ID NO: 47092 - DNA, 22 bp, Homo sapiens
  source 1..22: mol_type = genomic DNA
cggcccgggttcgattcccggt

SEQ ID NO: 47093 - DNA, 23 bp, Homo sapiens
  source 1..23: mol_type = genomic DNA
cggcccgggttcgattcccggtc

SEQ ID NO: 47094 - DNA, 29 bp, Homo sapiens
  source 1..29: mol_type = genomic DNA
cggcccgggttcgattcccggtcagggaa

SEQ ID NO: 47095 - DNA, 30 bp, Homo sapiens; identical to SEQ ID NO: 12467
  source 1..30: mol_type = genomic DNA

SEQ ID NO: 47096 - DNA, 32 bp, Homo sapiens; identical to SEQ ID NO: 12469
  source 1..32: mol_type = genomic DNA

SEQ ID NO: 47097 - DNA, 46 bp, Homo sapiens; identical to SEQ ID NO: 12481
  source 1..46: mol_type = genomic DNA

SEQ ID NO: 47098 - DNA, 47 bp, Homo sapiens; identical to SEQ ID NO: 12482
  source 1..47: mol_type = genomic DNA

SEQ ID NO: 47099 - DNA, 16 bp, Homo sapiens
  source 1..16: mol_type = genomic DNA
cggctagctcagtcgg

SEQ ID NO: 47100 - DNA, 17 bp, Homo sapiens
  source 1..17: mol_type = genomic DNA
cggctagctcagtcggt

SEQ ID NO: 47101 - DNA, 21 bp, Homo sapiens
  source 1..21: mol_type = genomic DNA
cggctagctcagtcggtagag

SEQ ID NO: 47102 - DNA, 22 bp, Homo sapiens
  source 1..22: mol_type = genomic DNA
cggctagctcagtcggtagagc

SEQ ID NO: 47103 - DNA, 23 bp, Homo sapiens
  source 1..23: mol_type = genomic DNA
cggctagctcagtcggtagagca

SEQ ID NO: 47104 - DNA, 25 bp, Homo sapiens
  source 1..25: mol_type = genomic DNA
cggctagctcagtcggtagagcatg

SEQ ID NO: 47105 - DNA, 27 bp, Homo sapiens
  source 1..27: mol_type = genomic DNA
cggctagctcagtcggtagagcatgag

SEQ ID NO: 47106 - DNA, 29 bp, Homo sapiens
  source 1..29: mol_type = genomic DNA
cggctagctcagtcggtagagcatgagac

SEQ ID NO: 47107 - DNA, 30 bp, Homo sapiens; identical to SEQ ID NO: 12504
  source 1..30: mol_type = genomic DNA

SEQ ID NO: 47108 - DNA, 31 bp, Homo sapiens; identical to SEQ ID NO: 12505
  source 1..31: mol_type = genomic DNA

SEQ ID NO: 47109 - DNA, 32 bp, Homo sapiens; identical to SEQ ID NO: 12506
  source 1..32: mol_type = genomic DNA

SEQ ID NO: 47110 - DNA, 38 bp, Homo sapiens; identical to SEQ ID NO: 12512
  source 1..38: mol_type = genomic DNA

SEQ ID NO: 47111 - DNA, 39 bp, Homo sapiens; identical to SEQ ID NO: 12513
  source 1..39: mol_type = genomic DNA

SEQ ID NO: 47112 - DNA, 26 bp, Homo sapiens
  source 1..26: mol_type = genomic DNA
cggctagctcagtcggtagagcatgg

SEQ ID NO: 47113 - DNA, 27 bp, Homo sapiens
  source 1..27: mol_type = genomic DNA
cggctagctcagtcggtagagcatggg

SEQ ID NO: 47114 - DNA, 28 bp, Homo sapiens
  source 1..28: mol_type = genomic DNA
cggctagctcagtcggtagagcatggga

SEQ ID NO: 47115 - DNA, 29 bp, Homo sapiens
  source 1..29: mol_type = genomic DNA
cggctagctcagtcggtagagcatgggac

SEQ ID NO: 47116 - DNA, 30 bp, Homo sapiens; identical to SEQ ID NO: 12521
  source 1..30: mol_type = genomic DNA

SEQ ID NO: 47117 - DNA, 31 bp, Homo sapiens; identical to SEQ ID NO: 12522
  source 1..31: mol_type = genomic DNA

SEQ ID NO: 47118 - DNA, 32 bp, Homo sapiens; identical to SEQ ID NO: 12523
  source 1..32: mol_type = genomic DNA

SEQ ID NO: 47119 - DNA, 33 bp, Homo sapiens; identical to SEQ ID NO: 12524
  source 1..33: mol_type = genomic DNA

SEQ ID NO: 47120 - DNA, 36 bp, Homo sapiens; identical to SEQ ID NO: 12527
  source 1..36: mol_type = genomic DNA

SEQ ID NO: 47121 - DNA, 38 bp, Homo sapiens; identical to SEQ ID NO: 12529
  source 1..38: mol_type = genomic DNA

SEQ ID NO: 47122 - DNA, 39 bp, Homo sapiens; identical to SEQ ID NO: 12530
  source 1..39: mol_type = genomic DNA

SEQ ID NO: 47123 - DNA, 26 bp, Homo sapiens
  source 1..26: mol_type = genomic DNA
cggctgttaaccgaaagattggtggt

SEQ ID NO: 47124 - DNA, 26 bp, Homo sapiens
  source 1..26: mol_type = genomic DNA
cggctgttaaccgaaaggttggtggt

SEQ ID NO: 47125 - DNA, 27 bp, Homo sapiens
  source 1..27: mol_type = genomic DNA
cggctgttaaccgaaaggttggtggtt

SEQ ID NO: 47126 - DNA, 37 bp, Homo sapiens
  source 1..37: mol_type = genomic DNA
cggctgttaaccgaaaggttggtggttcgagcccacc

SEQ ID NO: 47127 - DNA, 38 bp, Homo sapiens
  source 1..38: mol_type = genomic DNA
cggctgttaaccgaaaggttggtggttcgagcccaccc

SEQ ID NO: 47128 - DNA, 46 bp, Homo sapiens; identical to SEQ ID NO: 12539
  source 1..46: mol_type = genomic DNA

SEQ ID NO: 47129 - DNA, 47 bp, Homo sapiens; identical to SEQ ID NO: 12540
  source 1..47: mol_type = genomic DNA

SEQ ID NO: 47130 - DNA, 16 bp, Homo sapiens
  source 1..16: mol_type = genomic DNA
cgggagaccggggttc

SEQ ID NO: 47131 - DNA, 30 bp, Homo sapiens; identical to SEQ ID NO: 12546
  source 1..30: mol_type = genomic DNA

SEQ ID NO: 47132 - DNA, 33 bp, Homo sapiens; identical to SEQ ID NO: 12549
  source 1..33: mol_type = genomic DNA

SEQ ID NO: 47133 - DNA, 34 bp, Homo sapiens; identical to SEQ ID NO: 12550
  source 1..34: mol_type = genomic DNA

SEQ ID NO: 47134 - DNA, 35 bp, Homo sapiens; identical to SEQ ID NO: 12551
  source 1..35: mol_type = genomic DNA

SEQ ID NO: 47135 - DNA, 36 bp, Homo sapiens; identical to SEQ ID NO: 12552
  source 1..36: mol_type = genomic DNA

SEQ ID NO: 47136 - DNA, 25 bp, Homo sapiens
  source 1..25: mol_type = genomic DNA
cgggagaccggggttcgattccccg

SEQ ID NO: 47137 - DNA, 26 bp, Homo sapiens
  source 1..26: mol_type = genomic DNA
cgggagaccggggttcgattccccga

SEQ ID NO: 47138 - DNA, 27 bp, Homo sapiens
  source 1..27: mol_type = genomic DNA
cgggagaccggggttcgattccccgac

SEQ ID NO: 47139 - DNA, 28 bp, Homo sapiens
  source 1..28: mol_type = genomic DNA
cgggagaccggggttcgattccccgacg

SEQ ID NO: 47140 - DNA, 29 bp, Homo sapiens
  source 1..29: mol_type = genomic DNA
cgggagaccggggttcgattccccgacgg

SEQ ID NO: 47141 - DNA, 30 bp, Homo sapiens; identical to SEQ ID NO: 12559
  source 1..30: mol_type = genomic DNA

SEQ ID NO: 47142 - DNA, 31 bp, Homo sapiens; identical to SEQ ID NO: 12560
  source 1..31: mol_type = genomic DNA

SEQ ID NO: 47143 - DNA, 32 bp, Homo sapiens; identical to SEQ ID NO: 12561
  source 1..32: mol_type = genomic DNA

SEQ ID NO: 47144 - DNA, 33 bp, Homo sapiens; identical to SEQ ID NO: 12562
  source 1..33: mol_type = genomic DNA

SEQ ID NO: 47145 - DNA, 34 bp, Homo sapiens; identical to SEQ ID NO: 12563
  source 1..34: mol_type = genomic DNA

SEQ ID NO: 47146 - DNA, 35 bp, Homo sapiens; identical to SEQ ID NO: 12564
  source 1..35: mol_type = genomic DNA

SEQ ID NO: 47147 - DNA, 36 bp, Homo sapiens; identical to SEQ ID NO: 12565
  source 1..36: mol_type = genomic DNA

SEQ ID NO: 47148 - DNA, 16 bp, Homo sapiens
  source 1..16: mol_type = genomic DNA
cgggaggcccgggttc

SEQ ID NO: 47149 - DNA, 25 bp, Homo sapiens
  source 1..25: mol_type = genomic DNA
cgggaggcccgggttcgattcccgg

SEQ ID NO: 47150 - DNA, 26 bp, Homo sapiens
  source 1..26: mol_type = genomic DNA
cgggaggcccgggttcgattcccggc

SEQ ID NO: 47151 - DNA, 27 bp, Homo sapiens
  source 1..27: mol_type = genomic DNA
cgggaggcccgggttcgattcccggcc

SEQ ID NO: 47152 - DNA, 29 bp, Homo sapiens
  source 1..29: mol_type = genomic DNA
cgggaggcccgggttcgattcccggccaa

SEQ ID NO: 47153 - DNA, 31 bp, Homo sapiens; identical to SEQ ID NO: 12573
  source 1..31: mol_type = genomic DNA

SEQ ID NO: 47154 - DNA, 32 bp, Homo sapiens; identical to SEQ ID NO: 12574
  source 1..32: mol_type = genomic DNA

SEQ ID NO: 47155 - DNA, 33 bp, Homo sapiens; identical to SEQ ID NO: 12575
  source 1..33: mol_type = genomic DNA

SEQ ID NO: 47156 - DNA, 34 bp, Homo sapiens; identical to SEQ ID NO: 12576
  source 1..34: mol_type = genomic DNA

SEQ ID NO: 47157 - DNA, 35 bp, Homo sapiens; identical to SEQ ID NO: 12577
  source 1..35: mol_type = genomic DNA

SEQ ID NO: 47158 - DNA, 36 bp, Homo sapiens; identical to SEQ ID NO: 12578
  source 1..36: mol_type = genomic DNA

SEQ ID NO: 47159 - DNA, 36 bp, Homo sapiens; identical to SEQ ID NO: 12582
  source 1..36: mol_type = genomic DNA

SEQ ID NO: 47160 - DNA, 26 bp, Homo sapiens
  source 1..26: mol_type = genomic DNA
cgggatcgatgcccgcatcctccacc

SEQ ID NO: 47161 - DNA, 16 bp, Homo sapiens
  source 1..16: mol_type = genomic DNA
cgggcccataccccga

SEQ ID NO: 47162 - DNA, 17 bp, Homo sapiens
  source 1..17: mol_type = genomic DNA
cgggcccataccccgaa

SEQ ID NO: 47163 - DNA, 18 bp, Homo sapiens
  source 1..18: mol_type = genomic DNA
cgggcccataccccgaaa

SEQ ID NO: 47164 - DNA, 47 bp, Homo sapiens; identical to SEQ ID NO: 12606
  source 1..47: mol_type = genomic DNA

SEQ ID NO: 47165 - DNA, 27 bp, Homo sapiens
  source 1..27: mol_type = genomic DNA
cggggttcaagtccctgttcgggcgcc

SEQ ID NO: 47166 - DNA, 26 bp, Homo sapiens
  source 1..26: mol_type = genomic DNA
cggggttcaattccccgacggggagc

SEQ ID NO: 47167 - DNA, 27 bp, Homo sapiens
  source 1..27: mol_type = genomic DNA
cggggttcaattccccgacggggagcc

SEQ ID NO: 47168 - DNA, 25 bp, Homo sapiens
  source 1..25: mol_type = genomic DNA
cggggttcgattccccgacggggag

SEQ ID NO: 47169 - DNA, 26 bp, Homo sapiens
  source 1..26: mol_type = genomic DNA
cggggttcgattccccgacggggagc

SEQ ID NO: 47170 - DNA, 27 bp, Homo sapiens
  source 1..27: mol_type = genomic DNA
cggggttcgattccccgacggggagcc

SEQ ID NO: 47171 - DNA, 26 bp, Homo sapiens
  source 1..26: mol_type = genomic DNA
cgggttcaatccccggcacctccacc

SEQ ID NO: 47172 - DNA, 26 bp, Homo sapiens
  source 1..26: mol_type = genomic DNA
cgggttcaatccccggcatctccacc

SEQ ID NO: 47173 - DNA, 25 bp, Homo sapiens
  source 1..25: mol_type = genomic DNA
cgggttcaattcccggtcagggaac

SEQ ID NO: 47174 - DNA, 25 bp, Homo sapiens
  source 1..25: mol_type = genomic DNA
cgggttcgaaccccgtccgtgcctc

SEQ ID NO: 47175 - DNA, 23 bp, Homo sapiens
  source 1..23: mol_type = genomic DNA
cgggttcgactcccggtatggga

SEQ ID NO: 47176 - DNA, 24 bp, Homo sapiens
  source 1..24: mol_type = genomic DNA
cgggttcgactcccggtatgggaa

SEQ ID NO: 47177 - DNA, 25 bp, Homo sapiens
  source 1..25: mol_type = genomic DNA
cgggttcgactcccggtatgggaac

SEQ ID NO: 47178 - DNA, 26 bp, Homo sapiens
  source 1..26: mol_type = genomic DNA
cgggttcgactcccggtatgggaacc

SEQ ID NO: 47179 - DNA, 18 bp, Homo sapiens
  source 1..18: mol_type = genomic DNA
cgggttcgactcccggtg

SEQ ID NO: 47180 - DNA, 20 bp, Homo sapiens
  source 1..20: mol_type = genomic DNA
cgggttcgactcccggtgtg

SEQ ID NO: 47181 - DNA, 21 bp, Homo sapiens
  source 1..21: mol_type = genomic DNA
cgggttcgactcccggtgtgg

SEQ ID NO: 47182 - DNA, 22 bp, Homo sapiens
  source 1..22: mol_type = genomic DNA
cgggttcgactcccggtgtggg

SEQ ID NO: 47183 - DNA, 23 bp, Homo sapiens
  source 1..23: mol_type = genomic DNA
cgggttcgactcccggtgtggga

SEQ ID NO: 47184 - DNA, 24 bp, Homo sapiens
  source 1..24: mol_type = genomic DNA
cgggttcgactcccggtgtgggaa

SEQ ID NO: 47185 - DNA, 25 bp, Homo sapiens
  source 1..25: mol_type = genomic DNA
cgggttcgactcccggtgtgggaac

SEQ ID NO: 47186 - DNA, 26 bp, Homo sapiens
  source 1..26: mol_type = genomic DNA
cgggttcgactcccggtgtgggaacc

SEQ ID NO: 47187 - DNA, 27 bp, Homo sapiens
  source 1..27: mol_type = genomic DNA
cgggttcgactcccggtgtgggaacca

SEQ ID NO: 47188 - DNA, 26 bp, Homo sapiens
  source 1..26: mol_type = genomic DNA
cgggttcgagtcccggcggagtcgcc

SEQ ID NO: 47189 - DNA, 25 bp, Homo sapiens
  source 1..25: mol_type = genomic DNA
cgggttcgatccccggcatctccac

SEQ ID NO: 47190 - DNA, 26 bp, Homo sapiens
  source 1..26: mol_type = genomic DNA
cgggttcgatccccggcatctccacc

SEQ ID NO: 47191 - DNA, 27 bp, Homo sapiens
  source 1..27: mol_type = genomic DNA
cgggttcgatccccggcatctccacca

SEQ ID NO: 47192 - DNA, 22 bp, Homo sapiens
  source 1..22: mol_type = genomic DNA
cgggttcgatccccgtacgggc

SEQ ID NO: 47193 - DNA, 23 bp, Homo sapiens
  source 1..23: mol_type = genomic DNA
cgggttcgatccccgtacgggcc

SEQ ID NO: 47194 - DNA, 24 bp, Homo sapiens
  source 1..24: mol_type = genomic DNA
cgggttcgatccccgtacgggcca

SEQ ID NO: 47195 - DNA, 25 bp, Homo sapiens
  source 1..25: mol_type = genomic DNA
cgggttcgatccccgtacgggccac

SEQ ID NO: 47196 - DNA, 26 bp, Homo sapiens
  source 1..26: mol_type = genomic DNA
cgggttcgatccccgtacgggccacc

SEQ ID NO: 47197 - DNA, 25 bp, Homo sapiens
  source 1..25: mol_type = genomic DNA
cgggttcgattcccggccagggaac

SEQ ID NO: 47198 - DNA, 21 bp, Homo sapiens
  source 1..21: mol_type = genomic DNA
cgggttcgattcccgggcggc

SEQ ID NO: 47199 - DNA, 22 bp, Homo sapiens
  source 1..22: mol_type = genomic DNA
cgggttcgattcccgggcggcg

SEQ ID NO: 47200 - DNA, 23 bp, Homo sapiens
  source 1..23: mol_type = genomic DNA
cgggttcgattcccgggcggcgc

SEQ ID NO: 47201 - DNA, 24 bp, Homo sapiens
  source 1..24: mol_type = genomic DNA
cgggttcgattcccgggcggcgca

SEQ ID NO: 47202 - DNA, 25 bp, Homo sapiens
  source 1..25: mol_type = genomic DNA
cgggttcgattcccgggcggcgcac

SEQ ID NO: 47203 - DNA, 26 bp, Homo sapiens
  source 1..26: mol_type = genomic DNA
cgggttcgattcccgggcggcgcacc

SEQ ID NO: 47204 - DNA, 22 bp, Homo sapiens
  source 1..22: mol_type = genomic DNA
cgggttcgattcccggtcaggg

SEQ ID NO: 47205 - DNA, 23 bp, Homo sapiens
  source 1..23: mol_type = genomic DNA
cgggttcgattcccggtcaggga

SEQ ID NO: 47206 - DNA, 24 bp, Homo sapiens
  source 1..24: mol_type = genomic DNA
cgggttcgattcccggtcagggaa

SEQ ID NO: 47207 - DNA, 25 bp, Homo sapiens
  source 1..25: mol_type = genomic DNA
cgggttcgattcccggtcagggaac

SEQ ID NO: 47208 - DNA, 26 bp, Homo sapiens
  source 1..26: mol_type = genomic DNA
cgggttcgattcccggtcagggaacc

SEQ ID NO: 47209 - DNA, 27 bp, Homo sapiens
  source 1..27: mol_type = genomic DNA
cgggttcgattcccggtcagggaacca

SEQ ID NO: 47210 - DNA, 25 bp, Homo sapiens
  source 1..25: mol_type = genomic DNA
cgggttcgattcccggtcatggaac

SEQ ID NO: 47211 - DNA, 20 bp, Homo sapiens
  source 1..20: mol_type = genomic DNA
cggtaatcgcataaaactta

SEQ ID NO: 47212 - DNA, 26 bp, Homo sapiens
  source 1..26: mol_type = genomic DNA
cggtaatcgcataaaacttaaaactt

SEQ ID NO: 47213 - DNA, 30 bp, Homo sapiens; identical to SEQ ID NO: 12717
  source 1..30: mol_type = genomic DNA

SEQ ID NO: 47214 - DNA, 39 bp, Homo sapiens; identical to SEQ ID NO: 12726
  source 1..39: mol_type = genomic DNA

SEQ ID NO: 47215 - DNA, 16 bp, Homo sapiens
  source 1..16: mol_type = genomic DNA
cggtagagcatcagac

SEQ ID NO: 47216 - DNA, 17 bp, Homo sapiens
  source 1..17: mol_type = genomic DNA
cggtagagcatcagact

SEQ ID NO: 47217 - DNA, 16 bp, Homo sapiens
  source 1..16: mol_type = genomic DNA
cggtagagcatgagac

SEQ ID NO: 47218 - DNA, 17 bp, Homo sapiens
  source 1..17: mol_type = genomic DNA
cggtagagcatgagact

SEQ ID NO: 47219 - DNA, 18 bp, Homo sapiens
  source 1..18: mol_type = genomic DNA
cggtagagcatgagactc

SEQ ID NO: 47220 - DNA, 25 bp, Homo sapiens
  source 1..25: mol_type = genomic DNA
cggtagagcatgagactcttaatct

SEQ ID NO: 47221 - DNA, 36 bp, Homo sapiens; identical to SEQ ID NO: 12751
  source 1..36: mol_type = genomic DNA

SEQ ID NO: 47222 - DNA, 39 bp, Homo sapiens; identical to SEQ ID NO: 12753
  source 1..39: mol_type = genomic DNA

SEQ ID NO: 47223 - DNA, 16 bp, Homo sapiens
  source 1..16: mol_type = genomic DNA
cggtagagcatgggac

SEQ ID NO: 47224 - DNA, 17 bp, Homo sapiens
  source 1..17: mol_type = genomic DNA
cggtagagcatgggact

SEQ ID NO: 47225 - DNA, 18 bp, Homo sapiens
  source 1..18: mol_type = genomic DNA
cggtagagcatgggactc

SEQ ID NO: 47226 - DNA, 24 bp, Homo sapiens
  source 1..24: mol_type = genomic DNA
cggtagagcatgggactcttaatc

SEQ ID NO: 47227 - DNA, 25 bp, Homo sapiens
  source 1..25: mol_type = genomic DNA
cggtagagcatgggactcttaatcc

SEQ ID NO: 47228 - DNA, 26 bp, Homo sapiens
  source 1..26: mol_type = genomic DNA
cggtagagcatgggactcttaatccc

SEQ ID NO: 47229 - DNA, 36 bp, Homo sapiens; identical to SEQ ID NO: 12766
  source 1..36: mol_type = genomic DNA

SEQ ID NO: 47230 - DNA, 39 bp, Homo sapiens; identical to SEQ ID NO: 12767
  source 1..39: mol_type = genomic DNA

SEQ ID NO: 47231 - DNA, 19 bp, Homo sapiens
  source 1..19: mol_type = genomic DNA
cggtagagcatttgactgc

SEQ ID NO: 47232 - DNA, 16 bp, Homo sapiens
  source 1..16: mol_type = genomic DNA
cggtagagcgcgtgct

SEQ ID NO: 47233 - DNA, 16 bp, Homo sapiens
  source 1..16: mol_type = genomic DNA
cggtagcgcgtctgac

SEQ ID NO: 47234 - DNA, 17 bp, Homo sapiens
  source 1..17: mol_type = genomic DNA
cggtagcgcgtctgact

SEQ ID NO: 47235 - DNA, 19 bp, Homo sapiens
  source 1..19: mol_type = genomic DNA
cggtagcgcgtctgactcc

SEQ ID NO: 47236 - DNA, 16 bp, Homo sapiens
  source 1..16: mol_type = genomic DNA
cggtctaaggcgctgc

SEQ ID NO: 47237 - DNA, 17 bp, Homo sapiens
  source 1..17: mol_type = genomic DNA
cggtctaaggcgctgcg

SEQ ID NO: 47238 - DNA, 19 bp, Homo sapiens
  source 1..19: mol_type = genomic DNA
cggtctaaggcgctgcgtt

SEQ ID NO: 47239 - DNA, 20 bp, Homo sapiens
  source 1..20: mol_type = genomic DNA
cggtctaaggcgctgcgttc

SEQ ID NO: 47240 - DNA, 17 bp, Homo sapiens
  source 1..17: mol_type = genomic DNA
cggtctaaggcgctgga

SEQ ID NO: 47241 - DNA, 27 bp, Homo sapiens
  source 1..27: mol_type = genomic DNA
cggtggccaagtggtaaggcgtcggtc

SEQ ID NO: 47242 - DNA, 24 bp, Homo sapiens
  source 1..24: mol_type = genomic DNA
cggttagcgcgttcggctgttaac

SEQ ID NO: 47243 - DNA, 17 bp, Homo sapiens
  source 1..17: mol_type = genomic DNA
cggttaggattcctggt

SEQ ID NO: 47244 - DNA, 18 bp, Homo sapiens
  source 1..18: mol_type = genomic DNA
cggttaggattcctggtt

SEQ ID NO: 47245 - DNA, 20 bp, Homo sapiens
  source 1..20: mol_type = genomic DNA
cggttaggattcctggtttt

SEQ ID NO: 47246 - DNA, 21 bp, Homo sapiens
  source 1..21: mol_type = genomic DNA
cggttaggattcctggttttc

SEQ ID NO: 47247 - DNA, 22 bp, Homo sapiens
  source 1..22: mol_type = genomic DNA
cggttaggattcctggttttca

SEQ ID NO: 47248 - DNA, 23 bp, Homo sapiens
  source 1..23: mol_type = genomic DNA
cggttaggattcctggttttcac

SEQ ID NO: 47249 - DNA, 24 bp, Homo sapiens
  source 1..24: mol_type = genomic DNA
cggttaggattcctggttttcacc

SEQ ID NO: 47250 - DNA, 27 bp, Homo sapiens
  source 1..27: mol_type = genomic DNA
cggttaggattcctggttttcacccag

SEQ ID NO: 47251 - DNA, 28 bp, Homo sapiens
  source 1..28: mol_type = genomic DNA
cggttaggattcctggttttcacccagg

SEQ ID NO: 47252 - DNA, 29 bp, Homo sapiens
  source 1..29: mol_type = genomic DNA
cggttaggattcctggttttcacccaggc

SEQ ID NO: 47253 - DNA, 16 bp, Homo sapiens
  source 1..16: mol_type = genomic DNA
cggttatcacgtctgc

SEQ ID NO: 47254 - DNA, 19 bp, Homo sapiens
  source 1..19: mol_type = genomic DNA
cggttcaaatccgggtgcc

SEQ ID NO: 47255 - DNA, 20 bp, Homo sapiens
  source 1..20: mol_type = genomic DNA
cggttcaaatccgggtgccc

SEQ ID NO: 47256 - DNA, 23 bp, Homo sapiens
  source 1..23: mol_type = genomic DNA
cggttcaaatccgggtgccccct

SEQ ID NO: 47257 - DNA, 16 bp, Homo sapiens
  source 1..16: mol_type = genomic DNA
cggttcgaaaccgggc

SEQ ID NO: 47258 - DNA, 23 bp, Homo sapiens
  source 1..23: mol_type = genomic DNA
cggttcgaaaccgggcggaaaca

SEQ ID NO: 47259 - DNA, 22 bp, Homo sapiens
  source 1..22: mol_type = genomic DNA
cggttcgaatccgagtcacggc

SEQ ID NO: 47260 - DNA, 23 bp, Homo sapiens
  source 1..23: mol_type = genomic DNA
cggttcgaatccgagtcacggca

SEQ ID NO: 47261 - DNA, 24 bp, Homo sapiens
  source 1..24: mol_type = genomic DNA
cggttcgaatccgagtcacggcac

SEQ ID NO: 47262 - DNA, 26 bp, Homo sapiens
  source 1..26: mol_type = genomic DNA
cggttcgaatccgagtcacggcacca

SEQ ID NO: 47263 - DNA, 38 bp, Homo sapiens
  source 1..38: mol_type = genomic DNA
cggtttgggtccgagaggtcccgggttcaaatcccgga

SEQ ID NO: 47264 - DNA, 16 bp, Homo sapiens
  source 1..16: mol_type = genomic DNA
cgtagtcgtggccgag

SEQ ID NO: 47265 - DNA, 17 bp, Homo sapiens
  source 1..17: mol_type = genomic DNA
cgtagtcgtggccgagt

SEQ ID NO: 47266 - DNA, 19 bp, Homo sapiens
  source 1..19: mol_type = genomic DNA
cgtagtcgtggccgagtgg

SEQ ID NO: 47267 - DNA, 18 bp, Homo sapiens
  source 1..18: mol_type = genomic DNA
cgtagtgtagtggtcatc

SEQ ID NO: 47268 - DNA, 28 bp, Homo sapiens
  source 1..28: mol_type = genomic DNA
cgtagtgtagtggtcatcacgttcgcct

SEQ ID NO: 47269 - DNA, 18 bp, Homo sapiens
  source 1..18: mol_type = genomic DNA
cgtagtgtagtggttatc

SEQ ID NO: 47270 - DNA, 27 bp, Homo sapiens
  source 1..27: mol_type = genomic DNA
cgtagtgtagtggttatcacgttcgcc

SEQ ID NO: 47271 - DNA, 28 bp, Homo sapiens
  source 1..28: mol_type = genomic DNA
cgtagtgtagtggttatcacgttcgcct

SEQ ID NO: 47272 - DNA, 47 bp, Homo sapiens; identical to SEQ ID NO: 36059
  source 1..47: mol_type = genomic DNA

SEQ ID NO: 47273 - DNA, 19 bp, Homo sapiens
  source 1..19: mol_type = genomic DNA
cgtatagtggttagtactc

SEQ ID NO: 47274 - DNA, 20 bp, Homo sapiens
  source 1..20: mol_type = genomic DNA
cgtatagtggttagtactct

SEQ ID NO: 47275 - DNA, 21 bp, Homo sapiens
  source 1..21: mol_type = genomic DNA
cgtatagtggttagtactctg

SEQ ID NO: 47276 - DNA, 22 bp, Homo sapiens
  source 1..22: mol_type = genomic DNA
cgtatagtggttagtactctgc

SEQ ID NO: 47277 - DNA, 23 bp, Homo sapiens
  source 1..23: mol_type = genomic DNA
cgtatagtggttagtactctgcg

SEQ ID NO: 47278 - DNA, 25 bp, Homo sapiens
  source 1..25: mol_type = genomic DNA
cgtatagtggttagtactctgcgtt

SEQ ID NO: 47279 - DNA, 31 bp, Homo sapiens; identical to SEQ ID NO: 12890
  source 1..31: mol_type = genomic DNA

SEQ ID NO: 47280 - DNA, 40 bp, Homo sapiens; identical to SEQ ID NO: 12892
  source 1..40: mol_type = genomic DNA

SEQ ID NO: 47281 - DNA, 41 bp, Homo sapiens; identical to SEQ ID NO: 12893
  source 1..41: mol_type = genomic DNA

SEQ ID NO: 47282 - DNA, 34 bp, Homo sapiens; identical to SEQ ID NO: 12901
  source 1..34: mol_type = genomic DNA

SEQ ID NO: 47283 - DNA, 38 bp, Homo sapiens; identical to SEQ ID NO: 12904
  source 1..38: mol_type = genomic DNA

SEQ ID NO: 47284 - DNA, 39 bp, Homo sapiens
  source 1..39: mol_type = genomic DNA
cgtatgaggccccgggttcaatccccggcatctccacca

SEQ ID NO: 47285 - DNA, 29 bp, Homo sapiens
  source 1..29: mol_type = genomic DNA
cgtgagttcgatcctcacacggggcacca

SEQ ID NO: 47286 - DNA, 22 bp, Homo sapiens
  source 1..22: mol_type = genomic DNA
cgtgatcgtatagtggttagta

SEQ ID NO: 47287 - DNA, 23 bp, Homo sapiens
  source 1..23: mol_type = genomic DNA
cgtgatcgtatagtggttagtac

SEQ ID NO: 47288 - DNA, 24 bp, Homo sapiens
  source 1..24: mol_type = genomic DNA
cgtgatcgtatagtggttagtact

SEQ ID NO: 47289 - DNA, 25 bp, Homo sapiens
  source 1..25: mol_type = genomic DNA
cgtgatcgtatagtggttagtactc

SEQ ID NO: 47290 - DNA, 26 bp, Homo sapiens
  source 1..26: mol_type = genomic DNA
cgtgatcgtatagtggttagtactct

SEQ ID NO: 47291 - DNA, 27 bp, Homo sapiens
  source 1..27: mol_type = genomic DNA
cgtgatcgtatagtggttagtactctg

SEQ ID NO: 47292 - DNA, 28 bp, Homo sapiens
  source 1..28: mol_type = genomic DNA
cgtgatcgtatagtggttagtactctgc

SEQ ID NO: 47293 - DNA, 29 bp, Homo sapiens
  source 1..29: mol_type = genomic DNA
cgtgatcgtatagtggttagtactctgcg

SEQ ID NO: 47294 - DNA, 30 bp, Homo sapiens; identical to SEQ ID NO: 12928
  source 1..30: mol_type = genomic DNA

SEQ ID NO: 47295 - DNA, 31 bp, Homo sapiens; identical to SEQ ID NO: 12929
  source 1..31: mol_type = genomic DNA

SEQ ID NO: 47296 - DNA, 32 bp, Homo sapiens; identical to SEQ ID NO: 12930
  source 1..32: mol_type = genomic DNA

SEQ ID NO: 47297 - DNA, 33 bp, Homo sapiens; identical to SEQ ID NO: 12931
  source 1..33: mol_type = genomic DNA

SEQ ID NO: 47298 - DNA, 34 bp, Homo sapiens; identical to SEQ ID NO: 12932
  source 1..34: mol_type = genomic DNA

SEQ ID NO: 47299 - DNA, 42 bp, Homo sapiens; identical to SEQ ID NO: 12937
  source 1..42: mol_type = genomic DNA

SEQ ID NO: 47300 - DNA, 18 bp, Homo sapiens
  source 1..18: mol_type = genomic DNA
cgtgctgggcccataacc

SEQ ID NO: 47301 - DNA, 19 bp, Homo sapiens
  source 1..19: mol_type = genomic DNA
cgtgctgggcccataaccc

SEQ ID NO: 47302 - DNA, 27 bp, Homo sapiens
  source 1..27: mol_type = genomic DNA
cgtgctgggcccataacccagaggtcg

SEQ ID NO: 47303 - DNA, 29 bp, Homo sapiens
  source 1..29: mol_type = genomic DNA
cgtgctgggcccataacccagaggtcgat

SEQ ID NO: 47304 - DNA, 30 bp, Homo sapiens; identical to SEQ ID NO: 12946
  source 1..30: mol_type = genomic DNA

SEQ ID NO: 47305 - DNA, 32 bp, Homo sapiens; identical to SEQ ID NO: 12948
  source 1..32: mol_type = genomic DNA

SEQ ID NO: 47306 - DNA, 33 bp, Homo sapiens; identical to SEQ ID NO: 12949
  source 1..33: mol_type = genomic DNA

SEQ ID NO: 47307 - DNA, 16 bp, Homo sapiens
  source 1..16: mol_type = genomic DNA
cgtggccgagcggtct

SEQ ID NO: 47308 - DNA, 17 bp, Homo sapiens
  source 1..17: mol_type = genomic DNA
cgtggccgagcggtcta

SEQ ID NO: 47309 - DNA, 28 bp, Homo sapiens
  source 1..28: mol_type = genomic DNA
cgtgggttcgaatcccaccttcgtcgcc

SEQ ID NO: 47310 - DNA, 25 bp, Homo sapiens
  source 1..25: mol_type = genomic DNA
cgtgggttcgaatcccacttctgac

SEQ ID NO: 47311 - DNA, 27 bp, Homo sapiens
  source 1..27: mol_type = genomic DNA
cgtgggttcgaatcccatcctcgtcgc

SEQ ID NO: 47312 - DNA, 28 bp, Homo sapiens
  source 1..28: mol_type = genomic DNA
cgtgggttcgaatcccatcctcgtcgcc

SEQ ID NO: 47313 - DNA, 29 bp, Homo sapiens
  source 1..29: mol_type = genomic DNA
cgtgggttcgaatcccatcctcgtcgcca

SEQ ID NO: 47314 - DNA, 25 bp, Homo sapiens
  source 1..25: mol_type = genomic DNA
cgtgggttcgagccccacgttgggc

SEQ ID NO: 47315 - DNA, 26 bp, Homo sapiens
  source 1..26: mol_type = genomic DNA
cgtgggttcgagccccacgttgggcg

SEQ ID NO: 47316 - DNA, 27 bp, Homo sapiens
  source 1..27: mol_type = genomic DNA
cgtgggttcgagccccacgttgggcgc

SEQ ID NO: 47317 - DNA, 28 bp, Homo sapiens
  source 1..28: mol_type = genomic DNA
cgtgggttcgagccccacgttgggcgcc

SEQ ID NO: 47318 - DNA, 29 bp, Homo sapiens
  source 1..29: mol_type = genomic DNA
cgtgggttcgagccccacgttgggcgcca

SEQ ID NO: 47319 - DNA, 19 bp, Homo sapiens
  source 1..19: mol_type = genomic DNA
cgtggttgtagtccgtgcg

SEQ ID NO: 47320 - DNA, 20 bp, Homo sapiens
  source 1..20: mol_type = genomic DNA
cgtggttgtagtccgtgcga

SEQ ID NO: 47321 - DNA, 22 bp, Homo sapiens
  source 1..22: mol_type = genomic DNA
cgtggttgtagtccgtgcgaga

SEQ ID NO: 47322 - DNA, 23 bp, Homo sapiens
  source 1..23: mol_type = genomic DNA
cgtggttgtagtccgtgcgagaa

SEQ ID NO: 47323 - DNA, 24 bp, Homo sapiens
  source 1..24: mol_type = genomic DNA
cgtggttgtagtccgtgcgagaat

SEQ ID NO: 47324 - DNA, 25 bp, Homo sapiens
  source 1..25: mol_type = genomic DNA
cgtggttgtagtccgtgcgagaata

SEQ ID NO: 47325 - DNA, 26 bp, Homo sapiens
  source 1..26: mol_type = genomic DNA
cgtggttgtagtccgtgcgagaatac

SEQ ID NO: 47326 - DNA, 27 bp, Homo sapiens
  source 1..27: mol_type = genomic DNA
cgtggttgtagtccgtgcgagaatacc

SEQ ID NO: 47327 - DNA, 28 bp, Homo sapiens
  source 1..28: mol_type = genomic DNA
cgtggttgtagtccgtgcgagaatacca

SEQ ID NO: 47328 - DNA, 26 bp, Homo sapiens
  source 1..26: mol_type = genomic DNA
cgtgttcaaatcacgtcggggtcacc

SEQ ID NO: 47329 - DNA, 26 bp, Homo sapiens
  source 1..26: mol_type = genomic DNA
cgtgttcaagtcacgtcggggtcacc

SEQ ID NO: 47330 - DNA, 24 bp, Homo sapiens
  source 1..24: mol_type = genomic DNA
cgtgttcgaatcacgtcggggtca

SEQ ID NO: 47331 - DNA, 25 bp, Homo sapiens
  source 1..25: mol_type = genomic DNA
cgtgttcgaatcacgtcggggtcac

SEQ ID NO: 47332 - DNA, 26 bp, Homo sapiens
  source 1..26: mol_type = genomic DNA
cgtgttcgaatcacgtcggggtcacc

SEQ ID NO: 47333 - DNA, 18 bp, Homo sapiens
  source 1..18: mol_type = genomic DNA
cgttcaggtcgcagtctc

SEQ ID NO: 47334 - DNA, 19 bp, Homo sapiens
  source 1..19: mol_type = genomic DNA
cgttcaggtcgcagtctcc

SEQ ID NO: 47335 - DNA, 20 bp, Homo sapiens
  source 1..20: mol_type = genomic DNA
cgttcaggtcgcagtctccc

SEQ ID NO: 47336 - DNA, 19 bp, Homo sapiens
  source 1..19: mol_type = genomic DNA
cgttcggctgttaaccgga

SEQ ID NO: 47337 - DNA, 27 bp, Homo sapiens
  source 1..27: mol_type = genomic DNA
cgttggtctaggggtatgattctcgct

SEQ ID NO: 47338 - DNA, 31 bp, Homo sapiens; identical to SEQ ID NO: 13062
  source 1..31: mol_type = genomic DNA

SEQ ID NO: 47339 - DNA, 31 bp, Homo sapiens; identical to SEQ ID NO: 13069
  source 1..31: mol_type = genomic DNA

SEQ ID NO: 47340 - DNA, 34 bp, Homo sapiens; identical to SEQ ID NO: 13076
  source 1..34: mol_type = genomic DNA

SEQ ID NO: 47341 - DNA, 34 bp, Homo sapiens; identical to SEQ ID NO: 13078
  source 1..34: mol_type = genomic DNA

SEQ ID NO: 47342 - DNA, 33 bp, Homo sapiens; identical to SEQ ID NO: 13094
  source 1..33: mol_type = genomic DNA

SEQ ID NO: 47343 - DNA, 34 bp, Homo sapiens; identical to SEQ ID NO: 13095
  source 1..34: mol_type = genomic DNA

SEQ ID NO: 47344 - DNA, 17 bp, Homo sapiens
  source 1..17: mol_type = genomic DNA
ctaaaggtccctggttc

SEQ ID NO: 47345 - DNA, 18 bp, Homo sapiens
  source 1..18: mol_type = genomic DNA
ctaaaggtccctggttcg

SEQ ID NO: 47346 - DNA, 33 bp, Homo sapiens; identical to SEQ ID NO: 13099
  source 1..33: mol_type = genomic DNA

SEQ ID NO: 47347 - DNA, 34 bp, Homo sapiens; identical to SEQ ID NO: 13100
  source 1..34: mol_type = genomic DNA

SEQ ID NO: 47348 - DNA, 35 bp, Homo sapiens; identical to SEQ ID NO: 13101
  source 1..35: mol_type = genomic DNA

SEQ ID NO: 47349 - DNA, 36 bp, Homo sapiens; identical to SEQ ID NO: 13102
  source 1..36: mol_type = genomic DNA

SEQ ID NO: 47350 - DNA, 37 bp, Homo sapiens; identical to SEQ ID NO: 13103
  source 1..37: mol_type = genomic DNA

SEQ ID NO: 47351 - DNA, 23 bp, Homo sapiens
  source 1..23: mol_type = genomic DNA
ctaacaacatggctttctcacca

SEQ ID NO: 47352 - DNA, 33 bp, Homo sapiens; identical to SEQ ID NO: 13152
  source 1..33: mol_type = genomic DNA

SEQ ID NO: 47353 - DNA, 41 bp, Homo sapiens; identical to SEQ ID NO: 13160
  source 1..41: mol_type = genomic DNA

SEQ ID NO: 47354 - DNA, 16 bp, Homo sapiens
  source 1..16: mol_type = genomic DNA
ctaagccagggattgt

SEQ ID NO: 47355 - DNA, 18 bp, Homo sapiens
  source 1..18: mol_type = genomic DNA
ctaagccagggattgtgg

SEQ ID NO: 47356 - DNA, 20 bp, Homo sapiens
  source 1..20: mol_type = genomic DNA
ctaagccagggattgtgggt

SEQ ID NO: 47357 - DNA, 22 bp, Homo sapiens
  source 1..22: mol_type = genomic DNA
ctaagccagggattgtgggttc

SEQ ID NO: 47358 - DNA, 23 bp, Homo sapiens
  source 1..23: mol_type = genomic DNA
ctaagccagggattgtgggttcg

SEQ ID NO: 47359 - DNA, 41 bp, Homo sapiens; identical to SEQ ID NO: 13181
  source 1..41: mol_type = genomic DNA

SEQ ID NO: 47360 - DNA, 32 bp, Homo sapiens; identical to SEQ ID NO: 13184
  source 1..32: mol_type = genomic DNA

SEQ ID NO: 47361 - DNA, 41 bp, Homo sapiens; identical to SEQ ID NO: 13186
  source 1..41: mol_type = genomic DNA

SEQ ID NO: 47362 - DNA, 42 bp, Homo sapiens; identical to SEQ ID NO: 13187
  source 1..42: mol_type = genomic DNA

SEQ ID NO: 47363 - DNA, 16 bp, Homo sapiens
  source 1..16: mol_type = genomic DNA
ctaatggataaggcac

SEQ ID NO: 47364 - DNA, 17 bp, Homo sapiens
  source 1..17: mol_type = genomic DNA
ctaatggataaggcact

SEQ ID NO: 47365 - DNA, 18 bp, Homo sapiens
  source 1..18: mol_type = genomic DNA
ctaatggataaggcactg

SEQ ID NO: 47366 - DNA, 17 bp, Homo sapiens
  source 1..17: mol_type = genomic DNA
ctaatggataaggcatc

SEQ ID NO: 47367 - DNA, 20 bp, Homo sapiens
  source 1..20: mol_type = genomic DNA
ctaatggataaggcatcagc

SEQ ID NO: 47368 - DNA, 22 bp, Homo sapiens
  source 1..22: mol_type = genomic DNA
ctaatggataaggcatcagcct

SEQ ID NO: 47369 - DNA, 24 bp, Homo sapiens
  source 1..24: mol_type = genomic DNA
ctaatggataaggcatcagcctcc

SEQ ID NO: 47370 - DNA, 31 bp, Homo sapiens; identical to SEQ ID NO: 13229
  source 1..31: mol_type = genomic DNA

SEQ ID NO: 47371 - DNA, 18 bp, Homo sapiens
  source 1..18: mol_type = genomic DNA
ctaatggataaggcattg

SEQ ID NO: 47372 - DNA, 22 bp, Homo sapiens
  source 1..22: mol_type = genomic DNA
ctaatggataaggcattggcct

SEQ ID NO: 47373 - DNA, 30 bp, Homo sapiens
  source 1..30: mol_type = genomic DNA
ctaatggataaggcattggcctcctaagcc

SEQ ID NO: 47374 - DNA, 20 bp, Homo sapiens
  source 1..20: mol_type = genomic DNA
ctaatggataaggcgtctga

SEQ ID NO: 47375 - DNA, 33 bp, Homo sapiens; identical to SEQ ID NO: 13256
  source 1..33: mol_type = genomic DNA

SEQ ID NO: 47376 - DNA, 34 bp, Homo sapiens; identical to SEQ ID NO: 13257
  source 1..34: mol_type = genomic DNA

SEQ ID NO: 47377 - DNA, 20 bp, Homo sapiens
  source 1..20: mol_type = genomic DNA
ctaattcaaaggttccgggt

SEQ ID NO: 47378 - DNA, 41 bp, Homo sapiens; identical to SEQ ID NO: 13261
  source 1..41: mol_type = genomic DNA

SEQ ID NO: 47379 - DNA, 41 bp, Homo sapiens; identical to SEQ ID NO: 13263
  source 1..41: mol_type = genomic DNA

SEQ ID NO: 47380 - DNA, 41 bp, Homo sapiens; identical to SEQ ID NO: 13265
  source 1..41: mol_type = genomic DNA

SEQ ID NO: 47381 - DNA, 16 bp, Homo sapiens
  source 1..16: mol_type = genomic DNA
ctagcggttaggattc

SEQ ID NO: 47382 - DNA, 17 bp, Homo sapiens
  source 1..17: mol_type = genomic DNA
ctagcggttaggattcc

SEQ ID NO: 47383 - DNA, 19 bp, Homo sapiens
  source 1..19: mol_type = genomic DNA
ctagcggttaggattcctg

SEQ ID NO: 47384 - DNA, 20 bp, Homo sapiens
  source 1..20: mol_type = genomic DNA
ctagcggttaggattcctgg

SEQ ID NO: 47385 - DNA, 21 bp, Homo sapiens
  source 1..21: mol_type = genomic DNA
ctagcggttaggattcctggt

SEQ ID NO: 47386 - DNA, 22 bp, Homo sapiens
  source 1..22: mol_type = genomic DNA
ctagcggttaggattcctggtt

SEQ ID NO: 47387 - DNA, 31 bp, Homo sapiens; identical to SEQ ID NO: 36198
  source 1..31: mol_type = genomic DNA

SEQ ID NO: 47388 - DNA, 17 bp, Homo sapiens
  source 1..17: mol_type = genomic DNA
ctagctcagtcggtaga

SEQ ID NO: 47389 - DNA, 18 bp, Homo sapiens
  source 1..18: mol_type = genomic DNA
ctagctcagtcggtagag

SEQ ID NO: 47390 - DNA, 26 bp, Homo sapiens
  source 1..26: mol_type = genomic DNA
ctagctcagtcggtagagcatgagac

SEQ ID NO: 47391 - DNA, 27 bp, Homo sapiens
  source 1..27: mol_type = genomic DNA
ctagctcagtcggtagagcatgagact

SEQ ID NO: 47392 - DNA, 29 bp, Homo sapiens
  source 1..29: mol_type = genomic DNA
ctagctcagtcggtagagcatgagactct

SEQ ID NO: 47393 - DNA, 26 bp, Homo sapiens
  source 1..26: mol_type = genomic DNA
ctagctcagtcggtagagcatgggac

SEQ ID NO: 47394 - DNA, 27 bp, Homo sapiens
  source 1..27: mol_type = genomic DNA
ctagctcagtcggtagagcatgggact

SEQ ID NO: 47395 - DNA, 28 bp, Homo sapiens
  source 1..28: mol_type = genomic DNA
ctagctcagtcggtagagcatgggactc

SEQ ID NO: 47396 - DNA, 43 bp, Homo sapiens; identical to SEQ ID NO: 13305
  source 1..43: mol_type = genomic DNA

SEQ ID NO: 47397 - DNA, 31 bp, Homo sapiens; identical to SEQ ID NO: 13310
  source 1..31: mol_type = genomic DNA

SEQ ID NO: 47398 - DNA, 32 bp, Homo sapiens; identical to SEQ ID NO: 13311
  source 1..32: mol_type = genomic DNA

SEQ ID NO: 47399 - DNA, 33 bp, Homo sapiens; identical to SEQ ID NO: 13312
  source 1..33: mol_type = genomic DNA

SEQ ID NO: 47400 - DNA, 34 bp, Homo sapiens; identical to SEQ ID NO: 13313
  source 1..34: mol_type = genomic DNA

SEQ ID NO: 47401 - DNA, 37 bp, Homo sapiens; identical to SEQ ID NO: 13316
  source 1..37: mol_type = genomic DNA

SEQ ID NO: 47402 - DNA, 17 bp, Homo sapiens
  source 1..17: mol_type = genomic DNA
ctaggggtatgattctc

SEQ ID NO: 47403 - DNA, 20 bp, Homo sapiens
  source 1..20: mol_type = genomic DNA
ctaggggtatgattctcgct

SEQ ID NO: 47404 - DNA, 21 bp, Homo sapiens
  source 1..21: mol_type = genomic DNA
ctaggggtatgattctcgctt

SEQ ID NO: 47405 - DNA, 21 bp, Homo sapiens
  source 1..21: mol_type = genomic DNA
ctaggggtatgattctcggtt

SEQ ID NO: 47406 - DNA, 27 bp, Homo sapiens
  source 1..27: mol_type = genomic DNA
ctaggttcgactcctggctggctcgcc

SEQ ID NO: 47407 - DNA, 19 bp, Homo sapiens
  source 1..19: mol_type = genomic DNA
ctagtggtatgattctcgc

SEQ ID NO: 47408 - DNA, 20 bp, Homo sapiens
  source 1..20: mol_type = genomic DNA
ctagtggtatgattctcgct

SEQ ID NO: 47409 - DNA, 18 bp, Homo sapiens
  source 1..18: mol_type = genomic DNA
ctagtggttaggattcgg

SEQ ID NO: 47410 - DNA, 19 bp, Homo sapiens
  source 1..19: mol_type = genomic DNA
ctagtggttaggattcggc

SEQ ID NO: 47411 - DNA, 20 bp, Homo sapiens
  source 1..20: mol_type = genomic DNA
ctagtggttaggattcggcg

SEQ ID NO: 47412 - DNA, 21 bp, Homo sapiens
  source 1..21: mol_type = genomic DNA
ctagtggttaggattcggcgc

SEQ ID NO: 47413 - DNA, 22 bp, Homo sapiens
  source 1..22: mol_type = genomic DNA
ctagtggttaggattcggcgct

SEQ ID NO: 47414 - DNA, 23 bp, Homo sapiens
  source 1..23: mol_type = genomic DNA
ctagtggttaggattcggcgctc

SEQ ID NO: 47415 - DNA, 24 bp, Homo sapiens
  source 1..24: mol_type = genomic DNA
ctagtggttaggattcggcgctct

SEQ ID NO: 47416 - DNA, 31 bp, Homo sapiens; identical to SEQ ID NO: 13363
  source 1..31: mol_type = genomic DNA

SEQ ID NO: 47417 - DNA, 38 bp, Homo sapiens; identical to SEQ ID NO: 13365
  source 1..38: mol_type = genomic DNA

SEQ ID NO: 47418 - DNA, 16 bp, Homo sapiens
  source 1..16: mol_type = genomic DNA
ctatcgggcccatacc

SEQ ID NO: 47419 - DNA, 42 bp, Homo sapiens; identical to SEQ ID NO: 13423
  source 1..42: mol_type = genomic DNA

SEQ ID NO: 47420 - DNA, 16 bp, Homo sapiens
  source 1..16: mol_type = genomic DNA
ctcaagttctggtctc

SEQ ID NO: 47421 - DNA, 17 bp, Homo sapiens
  source 1..17: mol_type = genomic DNA
ctcaagttctggtctcc

SEQ ID NO: 47422 - DNA, 31 bp, Homo sapiens; identical to SEQ ID NO: 13463
  source 1..31: mol_type = genomic DNA

SEQ ID NO: 47423 - DNA, 44 bp, Homo sapiens; identical to SEQ ID NO: 13476
  source 1..44: mol_type = genomic DNA

SEQ ID NO: 47424 - DNA, 46 bp, Homo sapiens; identical to SEQ ID NO: 13478
  source 1..46: mol_type = genomic DNA

SEQ ID NO: 47425 - DNA, 22 bp, Homo sapiens
  source 1..22: mol_type = genomic DNA
ctcacacgcgaaaggtccccgg

SEQ ID NO: 47426 - DNA, 23 bp, Homo sapiens
  source 1..23: mol_type = genomic DNA
ctcacacgcgaaaggtccccggt

SEQ ID NO: 47427 - DNA, 16 bp, Homo sapiens
  source 1..16: mol_type = genomic DNA
ctcacacggggcacca

SEQ ID NO: 47428 - DNA, 16 bp, Homo sapiens
  source 1..16: mol_type = genomic DNA
ctcaccgccgcggccc

SEQ ID NO: 47429 - DNA, 21 bp, Homo sapiens
  source 1..21: mol_type = genomic DNA
ctcaccgccgcggcccgggtt

SEQ ID NO: 47430 - DNA, 23 bp, Homo sapiens
  source 1..23: mol_type = genomic DNA
ctcaccgccgcggcccgggttcg

SEQ ID NO: 47431 - DNA, 39 bp, Homo sapiens; identical to SEQ ID NO: 13508
  source 1..39: mol_type = genomic DNA

SEQ ID NO: 47432 - DNA, 40 bp, Homo sapiens; identical to SEQ ID NO: 13509
  source 1..40: mol_type = genomic DNA

SEQ ID NO: 47433 - DNA, 41 bp, Homo sapiens; identical to SEQ ID NO: 13510
  source 1..41: mol_type = genomic DNA

SEQ ID NO: 47434 - DNA, 42 bp, Homo sapiens; identical to SEQ ID NO: 13511
  source 1..42: mol_type = genomic DNA

SEQ ID NO: 47435 - DNA, 16 bp, Homo sapiens
  source 1..16: mol_type = genomic DNA
ctcacctggagcacca

SEQ ID NO: 47436 - DNA, 16 bp, Homo sapiens
  source 1..16: mol_type = genomic DNA
ctcagagggggcacca

SEQ ID NO: 47437 - DNA, 29 bp, Homo sapiens
  source 1..29: mol_type = genomic DNA
ctcagggatgggttcgattctcatagtcc

SEQ ID NO: 47438 - DNA, 30 bp, Homo sapiens; identical to SEQ ID NO: 13523
  source 1..30: mol_type = genomic DNA

SEQ ID NO: 47439 - DNA, 32 bp, Homo sapiens; identical to SEQ ID NO: 13524
  source 1..32: mol_type = genomic DNA

SEQ ID NO: 47440 - DNA, 33 bp, Homo sapiens; identical to SEQ ID NO: 13525
  source 1..33: mol_type = genomic DNA

SEQ ID NO: 47441 - DNA, 34 bp, Homo sapiens; identical to SEQ ID NO: 13526
  source 1..34: mol_type = genomic DNA

SEQ ID NO: 47442 - DNA, 34 bp, Homo sapiens; identical to SEQ ID NO: 13539
  source 1..34: mol_type = genomic DNA

SEQ ID NO: 47443 - DNA, 36 bp, Homo sapiens; identical to SEQ ID NO: 13541
  source 1..36: mol_type = genomic DNA

SEQ ID NO: 47444 - DNA, 37 bp, Homo sapiens; identical to SEQ ID NO: 13542
  source 1..37: mol_type = genomic DNA

SEQ ID NO: 47445 - DNA, 28 bp, Homo sapiens
  source 1..28: mol_type = genomic DNA
ctcagtaagttgcaatacttaatttctg

SEQ ID NO: 47446 - DNA, 30 bp, Homo sapiens; identical to SEQ ID NO: 13557
  source 1..30: mol_type = genomic DNA

SEQ ID NO: 47447 - DNA, 31 bp, Homo sapiens; identical to SEQ ID NO: 13558
  source 1..31: mol_type = genomic DNA

SEQ ID NO: 47448 - DNA, 16 bp, Homo sapiens
  source 1..16: mol_type = genomic DNA
ctcagtcggtagagca

SEQ ID NO: 47449 - DNA, 17 bp, Homo sapiens
  source 1..17: mol_type = genomic DNA
ctcagtcggtagagcat

SEQ ID NO: 47450 - DNA, 18 bp, Homo sapiens
  source 1..18: mol_type = genomic DNA
ctcagtcggtagagcatc

SEQ ID NO: 47451 - DNA, 21 bp, Homo sapiens
  source 1..21: mol_type = genomic DNA
ctcagtcggtagagcatcaga

SEQ ID NO: 47452 - DNA, 22 bp, Homo sapiens
  source 1..22: mol_type = genomic DNA
ctcagtcggtagagcatcagac

SEQ ID NO: 47453 - DNA, 23 bp, Homo sapiens
  source 1..23: mol_type = genomic DNA
ctcagtcggtagagcatcagact

SEQ ID NO: 47454 - DNA, 26 bp, Homo sapiens
  source 1..26: mol_type = genomic DNA
ctcagtcggtagagcatcagactttt

SEQ ID NO: 47455 - DNA, 23 bp, Homo sapiens
  source 1..23: mol_type = genomic DNA
ctcagtcggtagagcatgagact

SEQ ID NO: 47456 - DNA, 25 bp, Homo sapiens
  source 1..25: mol_type = genomic DNA
ctcagtcggtagagcatgagactct

SEQ ID NO: 47457 - DNA, 20 bp, Homo sapiens
  source 1..20: mol_type = genomic DNA
ctcagtcggtagagcatggg

SEQ ID NO: 47458 - DNA, 22 bp, Homo sapiens
  source 1..22: mol_type = genomic DNA
ctcagtcggtagagcatgggac

SEQ ID NO: 47459 - DNA, 23 bp, Homo sapiens
  source 1..23: mol_type = genomic DNA
ctcagtcggtagagcatgggact

SEQ ID NO: 47460 - DNA, 24 bp, Homo sapiens
  source 1..24: mol_type = genomic DNA
ctcagtcggtagagcatgggactc

SEQ ID NO: 47461 - DNA, 25 bp, Homo sapiens
  source 1..25: mol_type = genomic DNA
ctcagtcggtagagcatgggactct

SEQ ID NO: 47462 - DNA, 26 bp, Homo sapiens
  source 1..26: mol_type = genomic DNA
ctcagtcggtagagcatgggactctt

SEQ ID NO: 47463 - DNA, 31 bp, Homo sapiens; identical to SEQ ID NO: 13601
  source 1..31: mol_type = genomic DNA

SEQ ID NO: 47464 - DNA, 32 bp, Homo sapiens; identical to SEQ ID NO: 13602
  source 1..32: mol_type = genomic DNA

SEQ ID NO: 47465 - DNA, 23 bp, Homo sapiens
  source 1..23: mol_type = genomic DNA
ctcataatctgaaggtcctgagt

SEQ ID NO: 47466 - DNA, 44 bp, Homo sapiens; identical to SEQ ID NO: 13624
  source 1..44: mol_type = genomic DNA

SEQ ID NO: 47467 - DNA, 45 bp, Homo sapiens; identical to SEQ ID NO: 13625
  source 1..45: mol_type = genomic DNA

SEQ ID NO: 47468 - DNA, 23 bp, Homo sapiens
  source 1..23: mol_type = genomic DNA
ctcataatctgaaggtcgtgagt

SEQ ID NO: 47469 - DNA, 44 bp, Homo sapiens; identical to SEQ ID NO: 13630
  source 1..44: mol_type = genomic DNA

SEQ ID NO: 47470 - DNA, 45 bp, Homo sapiens
  source 1..45: mol_type = genomic DNA
ctcataatctgaaggtcgtgagttcgatcctcacacggggcacca

SEQ ID NO: 47471 - DNA, 29 bp, Homo sapiens
  source 1..29: mol_type = genomic DNA
ctcatgcccccatgtctaacaacatggct

SEQ ID NO: 47472 - DNA, 35 bp, Homo sapiens; identical to SEQ ID NO: 13650
  source 1..35: mol_type = genomic DNA

SEQ ID NO: 47473 - DNA, 37 bp, Homo sapiens; identical to SEQ ID NO: 13652
  source 1..37: mol_type = genomic DNA

SEQ ID NO: 47474 - DNA, 38 bp, Homo sapiens; identical to SEQ ID NO: 36299
  source 1..38: mol_type = genomic DNA

SEQ ID NO: 47475 - DNA, 17 bp, Homo sapiens
  source 1..17: mol_type = genomic DNA
ctccagatcagaaggct

SEQ ID NO: 47476 - DNA, 25 bp, Homo sapiens
  source 1..25: mol_type = genomic DNA
ctccagatcagaaggctgcgtgttc

SEQ ID NO: 47477 - DNA, 46 bp, Homo sapiens; identical to SEQ ID NO: 13677
  source 1..46: mol_type = genomic DNA

SEQ ID NO: 47478 - DNA, 46 bp, Homo sapiens; identical to SEQ ID NO: 13681
  source 1..46: mol_type = genomic DNA

SEQ ID NO: 47479 - DNA, 44 bp, Homo sapiens; identical to SEQ ID NO: 13687
  source 1..44: mol_type = genomic DNA

SEQ ID NO: 47480 - DNA, 46 bp, Homo sapiens; identical to SEQ ID NO: 13689
  source 1..46: mol_type = genomic DNA

SEQ ID NO: 47481 - DNA, 16 bp, Homo sapiens
  source 1..16: mol_type = genomic DNA
ctcccggtatgggaac

SEQ ID NO: 47482 - DNA, 17 bp, Homo sapiens
  source 1..17: mol_type = genomic DNA
ctcccggtatgggaacc

SEQ ID NO: 47483 - DNA, 16 bp, Homo sapiens
  source 1..16: mol_type = genomic DNA
ctcccggtgtgggaac

SEQ ID NO: 47484 - DNA, 17 bp, Homo sapiens
  source 1..17: mol_type = genomic DNA
ctcccggtgtgggaacc

SEQ ID NO: 47485 - DNA, 18 bp, Homo sapiens
  source 1..18: mol_type = genomic DNA
ctcccggtgtgggaacca

SEQ ID NO: 47486 - DNA, 32 bp, Homo sapiens; identical to SEQ ID NO: 13725
  source 1..32: mol_type = genomic DNA

SEQ ID NO: 47487 - DNA, 33 bp, Homo sapiens; identical to SEQ ID NO: 13726
  source 1..33: mol_type = genomic DNA

SEQ ID NO: 47488 - DNA, 34 bp, Homo sapiens; identical to SEQ ID NO: 13727
  source 1..34: mol_type = genomic DNA

SEQ ID NO: 47489 - DNA, 35 bp, Homo sapiens; identical to SEQ ID NO: 13728
  source 1..35: mol_type = genomic DNA

SEQ ID NO: 47490 - DNA, 36 bp, Homo sapiens; identical to SEQ ID NO: 13729
  source 1..36: mol_type = genomic DNA

SEQ ID NO: 47491 - DNA, 29 bp, Homo sapiens
  source 1..29: mol_type = genomic DNA
ctccgaggtgattttcatattgaattgca

SEQ ID NO: 47492 - DNA, 41 bp, Homo sapiens; identical to SEQ ID NO: 36336
  source 1..41: mol_type = genomic DNA

SEQ ID NO: 47493 - DNA, 34 bp, Homo sapiens; identical to SEQ ID NO: 13790
  source 1..34: mol_type = genomic DNA

SEQ ID NO: 47494 - DNA, 16 bp, Homo sapiens
  source 1..16: mol_type = genomic DNA
ctcctggctggctcgc

SEQ ID NO: 47495 - DNA, 17 bp, Homo sapiens
  source 1..17: mol_type = genomic DNA
ctcctggctggctcgcc

SEQ ID NO: 47496 - DNA, 18 bp, Homo sapiens
  source 1..18: mol_type = genomic DNA
ctcctggctggctcgcca

SEQ ID NO: 47497 - DNA, 16 bp, Homo sapiens
  source 1..16: mol_type = genomic DNA
ctcgctggggcctcca

SEQ ID NO: 47498 - DNA, 16 bp, Homo sapiens
  source 1..16: mol_type = genomic DNA
ctcggtggaacctcca

SEQ ID NO: 47499 - DNA, 16 bp, Homo sapiens
  source 1..16: mol_type = genomic DNA
ctcggtgggacctcca

SEQ ID NO: 47500 - DNA, 26 bp, Homo sapiens
  source 1..26: mol_type = genomic DNA
ctcggttcgaatccgagtcacggcac

SEQ ID NO: 47501 - DNA, 18 bp, Homo sapiens
  source 1..18: mol_type = genomic DNA
ctctcaccgccgcggccc

SEQ ID NO: 47502 - DNA, 41 bp, Homo sapiens; identical to SEQ ID NO: 13880
  source 1..41: mol_type = genomic DNA

SEQ ID NO: 47503 - DNA, 42 bp, Homo sapiens; identical to SEQ ID NO: 13881
  source 1..42: mol_type = genomic DNA

SEQ ID NO: 47504 - DNA, 44 bp, Homo sapiens; identical to SEQ ID NO: 13883
  source 1..44: mol_type = genomic DNA

SEQ ID NO: 47505 - DNA, 18 bp, Homo sapiens
  source 1..18: mol_type = genomic DNA
ctctgaatccagcgatcc

SEQ ID NO: 47506 - DNA, 19 bp, Homo sapiens
  source 1..19: mol_type = genomic DNA
ctctgaatccagcgatccg

SEQ ID NO: 47507 - DNA, 20 bp, Homo sapiens
  source 1..20: mol_type = genomic DNA
ctctgaatccagcgatccga

SEQ ID NO: 47508 - DNA, 21 bp, Homo sapiens
  source 1..21: mol_type = genomic DNA
ctctgaatccagcgatccgag

SEQ ID NO: 47509 - DNA, 22 bp, Homo sapiens
  source 1..22: mol_type = genomic DNA
ctctgaatccagcgatccgagt

SEQ ID NO: 47510 - DNA, 23 bp, Homo sapiens
  source 1..23: mol_type = genomic DNA
ctctgaatccagcgatccgagtt

SEQ ID NO: 47511 - DNA, 41 bp, Homo sapiens; identical to SEQ ID NO: 13897
  source 1..41: mol_type = genomic DNA

SEQ ID NO: 47512 - DNA, 42 bp, Homo sapiens; identical to SEQ ID NO: 36359
  source 1..42: mol_type = genomic DNA

SEQ ID NO: 47513 - DNA, 44 bp, Homo sapiens
  source 1..44: mol_type = genomic DNA
ctctgaatccagcgatccgagttcaaatctcggtggaacctcca

SEQ ID NO: 47514 - DNA, 16 bp, Homo sapiens
  source 1..16: mol_type = genomic DNA
ctctgcgttgtggccg

SEQ ID NO: 47515 - DNA, 17 bp, Homo sapiens
  source 1..17: mol_type = genomic DNA
ctctgcgttgtggccgc

SEQ ID NO: 47516 - DNA, 16 bp, Homo sapiens
  source 1..16: mol_type = genomic DNA
ctctggactctgaatc

SEQ ID NO: 47517 - DNA, 17 bp, Homo sapiens
  source 1..17: mol_type = genomic DNA
ctctggactctgaatcc

SEQ ID NO: 47518 - DNA, 18 bp, Homo sapiens
  source 1..18: mol_type = genomic DNA
ctctggactctgaatcca

SEQ ID NO: 47519 - DNA, 19 bp, Homo sapiens
  source 1..19: mol_type = genomic DNA
ctctggactctgaatccag

SEQ ID NO: 47520 - DNA, 20 bp, Homo sapiens
  source 1..20: mol_type = genomic DNA
ctctggactctgaatccagc

SEQ ID NO: 47521 - DNA, 21 bp, Homo sapiens
  source 1..21: mol_type = genomic DNA
ctctggactctgaatccagcg

SEQ ID NO: 47522 - DNA, 23 bp, Homo sapiens
  source 1..23: mol_type = genomic DNA
ctctggactctgaatccagcgat

SEQ ID NO: 47523 - DNA, 27 bp, Homo sapiens
  source 1..27: mol_type = genomic DNA
ctctggactctgaatccagcgatccga

SEQ ID NO: 47524 - DNA, 28 bp, Homo sapiens
  source 1..28: mol_type = genomic DNA
ctctggactctgaatccagcgatccgag

SEQ ID NO: 47525 - DNA, 29 bp, Homo sapiens
  source 1..29: mol_type = genomic DNA
ctctggactctgaatccagcgatccgagt

SEQ ID NO: 47526 - DNA, 30 bp, Homo sapiens; identical to SEQ ID NO: 13916
  source 1..30: mol_type = genomic DNA

SEQ ID NO: 47527 - DNA, 31 bp, Homo sapiens; identical to SEQ ID NO: 13917
  source 1..31: mol_type = genomic DNA

SEQ ID NO: 47528 - DNA, 32 bp, Homo sapiens; identical to SEQ ID NO: 13918
  source 1..32: mol_type = genomic DNA

SEQ ID NO: 47529 - DNA, 16 bp, Homo sapiens
  source 1..16: mol_type = genomic DNA
ctctggactttgaatc

SEQ ID NO: 47530 - DNA, 17 bp, Homo sapiens
  source 1..17: mol_type = genomic DNA
ctctggactttgaatcc

SEQ ID NO: 47531 - DNA, 16 bp, Homo sapiens
  source 1..16: mol_type = genomic DNA
ctctgtggaacctcca

SEQ ID NO: 47532 - DNA, 18 bp, Homo sapiens
  source 1..18: mol_type = genomic DNA
ctcttaatcccagggtcg

SEQ ID NO: 47533 - DNA, 19 bp, Homo sapiens
  source 1..19: mol_type = genomic DNA
ctcttaatcccagggtcgt

SEQ ID NO: 47534 - DNA, 18 bp, Homo sapiens
  source 1..18: mol_type = genomic DNA
ctcttcgggggcgtgggt

SEQ ID NO: 47535 - DNA, 16 bp, Homo sapiens
  source 1..16: mol_type = genomic DNA
ctctttacagtgacca

SEQ ID NO: 47536 - DNA, 20 bp, Homo sapiens
  source 1..20: mol_type = genomic DNA
ctgaaaatgtttagacgggc

SEQ ID NO: 47537 - DNA, 21 bp, Homo sapiens
  source 1..21: mol_type = genomic DNA
ctgaaaatgtttagacgggct

SEQ ID NO: 47538 - DNA, 30 bp, Homo sapiens; identical to SEQ ID NO: 13960
  source 1..30: mol_type = genomic DNA

SEQ ID NO: 47539 - DNA, 16 bp, Homo sapiens
  source 1..16: mol_type = genomic DNA
ctgaaggtcctgagtt

SEQ ID NO: 47540 - DNA, 17 bp, Homo sapiens
  source 1..17: mol_type = genomic DNA
ctgaaggtcctgagttc

SEQ ID NO: 47541 - DNA, 18 bp, Homo sapiens
  source 1..18: mol_type = genomic DNA
ctgaaggtcctgagttcg

SEQ ID NO: 47542 - DNA, 21 bp, Homo sapiens
  source 1..21: mol_type = genomic DNA
ctgaaggtcctgagttcgaac

SEQ ID NO: 47543 - DNA, 34 bp, Homo sapiens; identical to SEQ ID NO: 13983
  source 1..34: mol_type = genomic DNA

SEQ ID NO: 47544 - DNA, 35 bp, Homo sapiens; identical to SEQ ID NO: 13984
  source 1..35: mol_type = genomic DNA

SEQ ID NO: 47545 - DNA, 36 bp, Homo sapiens; identical to SEQ ID NO: 13985
  source 1..36: mol_type = genomic DNA

SEQ ID NO: 47546 - DNA, 37 bp, Homo sapiens; identical to SEQ ID NO: 13986
  source 1..37: mol_type = genomic DNA

SEQ ID NO: 47547 - DNA, 16 bp, Homo sapiens
  source 1..16: mol_type = genomic DNA
ctgaaggtcgtgagtt

SEQ ID NO: 47548 - DNA, 17 bp, Homo sapiens
  source 1..17: mol_type = genomic DNA
ctgaaggtcgtgagttc

SEQ ID NO: 47549 - DNA, 18 bp, Homo sapiens
  source 1..18: mol_type = genomic DNA
ctgaaggtcgtgagttcg

SEQ ID NO: 47550 - DNA, 31 bp, Homo sapiens; identical to SEQ ID NO: 14000
  source 1..31: mol_type = genomic DNA

SEQ ID NO: 47551 - DNA, 34 bp, Homo sapiens; identical to SEQ ID NO: 14002
  source 1..34: mol_type = genomic DNA

SEQ ID NO: 47552 - DNA, 35 bp, Homo sapiens; identical to SEQ ID NO: 14003
  source 1..35: mol_type = genomic DNA

SEQ ID NO: 47553 - DNA, 36 bp, Homo sapiens; identical to SEQ ID NO: 14004
  source 1..36: mol_type = genomic DNA

SEQ ID NO: 47554 - DNA, 37 bp, Homo sapiens; identical to SEQ ID NO: 14005
  source 1..37: mol_type = genomic DNA

SEQ ID NO: 47555 - DNA, 35 bp, Homo sapiens; identical to SEQ ID NO: 14009
  source 1..35: mol_type = genomic DNA

SEQ ID NO: 47556 - DNA, 36 bp, Homo sapiens; identical to SEQ ID NO: 14010
  source 1..36: mol_type = genomic DNA

SEQ ID NO: 47557 - DNA, 37 bp, Homo sapiens; identical to SEQ ID NO: 14011
  source 1..37: mol_type = genomic DNA

SEQ ID NO: 47558 - DNA, 16 bp, Homo sapiens
  source 1..16: mol_type = genomic DNA
ctgaatccagcgatcc

SEQ ID NO: 47559 - DNA, 17 bp, Homo sapiens
  source 1..17: mol_type = genomic DNA
ctgaatccagcgatccg

SEQ ID NO: 47560 - DNA, 18 bp, Homo sapiens
  source 1..18: mol_type = genomic DNA
ctgaatccagcgatccga

SEQ ID NO: 47561 - DNA, 19 bp, Homo sapiens
  source 1..19: mol_type = genomic DNA
ctgaatccagcgatccgag

SEQ ID NO: 47562 - DNA, 20 bp, Homo sapiens
  source 1..20: mol_type = genomic DNA
ctgaatccagcgatccgagt

SEQ ID NO: 47563 - DNA, 21 bp, Homo sapiens
  source 1..21: mol_type = genomic DNA
ctgaatccagcgatccgagtt

SEQ ID NO: 47564 - DNA, 22 bp, Homo sapiens
  source 1..22: mol_type = genomic DNA
ctgaatccagcgatccgagttc

SEQ ID NO: 47565 - DNA, 23 bp, Homo sapiens
  source 1..23: mol_type = genomic DNA
ctgaatccagcgatccgagttca

SEQ ID NO: 47566 - DNA, 40 bp, Homo sapiens; identical to SEQ ID NO: 14032
  source 1..40: mol_type = genomic DNA

SEQ ID NO: 47567 - DNA, 16 bp, Homo sapiens
  source 1..16: mol_type = genomic DNA
ctgacaacagaggctt

SEQ ID NO: 47568 - DNA, 24 bp, Homo sapiens
  source 1..24: mol_type = genomic DNA
ctgacaacagaggcttacgacccc

SEQ ID NO: 47569 - DNA, 33 bp, Homo sapiens; identical to SEQ ID NO: 14063
  source 1..33: mol_type = genomic DNA

SEQ ID NO: 47570 - DNA, 34 bp, Homo sapiens; identical to SEQ ID NO: 14064
  source 1..34: mol_type = genomic DNA

SEQ ID NO: 47571 - DNA, 35 bp, Homo sapiens; identical to SEQ ID NO: 14065
  source 1..35: mol_type = genomic DNA

SEQ ID NO: 47572 - DNA, 36 bp, Homo sapiens; identical to SEQ ID NO: 14066
  source 1..36: mol_type = genomic DNA

SEQ ID NO: 47573 - DNA, 23 bp, Homo sapiens
  source 1..23: mol_type = genomic DNA
ctgactccagatcagaaggctgc

SEQ ID NO: 47574 - DNA, 29 bp, Homo sapiens
  source 1..29: mol_type = genomic DNA
ctgactccagatcagaaggctgcgtgttc

SEQ ID NO: 47575 - DNA, 17 bp, Homo sapiens
  source 1..17: mol_type = genomic DNA
ctgagggtccagggttc

SEQ ID NO: 47576 - DNA, 33 bp, Homo sapiens; identical to SEQ ID NO: 14079
  source 1..33: mol_type = genomic DNA

SEQ ID NO: 47577 - DNA, 34 bp, Homo sapiens; identical to SEQ ID NO: 14080
  source 1..34: mol_type = genomic DNA

SEQ ID NO: 47578 - DNA, 35 bp, Homo sapiens; identical to SEQ ID NO: 14081
  source 1..35: mol_type = genomic DNA

SEQ ID NO: 47579 - DNA, 36 bp, Homo sapiens; identical to SEQ ID NO: 14082
  source 1..36: mol_type = genomic DNA

SEQ ID NO: 47580 - DNA, 37 bp, Homo sapiens; identical to SEQ ID NO: 14083
  source 1..37: mol_type = genomic DNA

SEQ ID NO: 47581 - DNA, 26 bp, Homo sapiens
  source 1..26: mol_type = genomic DNA
ctgagggtccagggttcatgtccctg

SEQ ID NO: 47582 - DNA, 23 bp, Homo sapiens
  source 1..23: mol_type = genomic DNA
ctgcagatcaagaggtccccggt

SEQ ID NO: 47583 - DNA, 18 bp, Homo sapiens
  source 1..18: mol_type = genomic DNA
ctgccacgcgggaggccc

SEQ ID NO: 47584 - DNA, 19 bp, Homo sapiens
  source 1..19: mol_type = genomic DNA
ctgccacgcgggaggcccg

SEQ ID NO: 47585 - DNA, 21 bp, Homo sapiens
  source 1..21: mol_type = genomic DNA
ctgccacgcgggaggcccggg

SEQ ID NO: 47586 - DNA, 22 bp, Homo sapiens
  source 1..22: mol_type = genomic DNA
ctgccacgcgggaggcccgggt

SEQ ID NO: 47587 - DNA, 44 bp, Homo sapiens
  source 1..44: mol_type = genomic DNA
ctgccacgcgggaggcccgggttcgattcccggccaatgcacca

SEQ ID NO: 47588 - DNA, 24 bp, Homo sapiens
  source 1..24: mol_type = genomic DNA
ctgcgtgttcgaatcacgtcgggg

SEQ ID NO: 47589 - DNA, 26 bp, Homo sapiens
  source 1..26: mol_type = genomic DNA
ctgcgtgttcgaatcacgtcggggtc

SEQ ID NO: 47590 - DNA, 27 bp, Homo sapiens
  source 1..27: mol_type = genomic DNA
ctgcgtgttcgaatcacgtcggggtca

SEQ ID NO: 47591 - DNA, 29 bp, Homo sapiens
  source 1..29: mol_type = genomic DNA
ctgcgtgttcgaatcacgtcggggtcacc

SEQ ID NO: 47592 - DNA, 30 bp, Homo sapiens; identical to SEQ ID NO: 14130
  source 1..30: mol_type = genomic DNA

SEQ ID NO: 47593 - DNA, 18 bp, Homo sapiens
  source 1..18: mol_type = genomic DNA
ctgctaactcatgccccc

SEQ ID NO: 47594 - DNA, 36 bp, Homo sapiens; identical to SEQ ID NO: 14151
  source 1..36: mol_type = genomic DNA

SEQ ID NO: 47595 - DNA, 42 bp, Homo sapiens; identical to SEQ ID NO: 14157
  source 1..42: mol_type = genomic DNA

SEQ ID NO: 47596 - DNA, 44 bp, Homo sapiens; identical to SEQ ID NO: 14159
  source 1..44: mol_type = genomic DNA

SEQ ID NO: 47597 - DNA, 45 bp, Homo sapiens; identical to SEQ ID NO: 14160
  source 1..45: mol_type = genomic DNA

SEQ ID NO: 47598 - DNA, 18 bp, Homo sapiens
  source 1..18: mol_type = genomic DNA
ctgctaatccattgtgct

SEQ ID NO: 47599 - DNA, 16 bp, Homo sapiens
  source 1..16: mol_type = genomic DNA
ctggactctgaatcca

SEQ ID NO: 47600 - DNA, 18 bp, Homo sapiens
  source 1..18: mol_type = genomic DNA
ctggactctgaatccagc

SEQ ID NO: 47601 - DNA, 19 bp, Homo sapiens
  source 1..19: mol_type = genomic DNA
ctggactctgaatccagcg

SEQ ID NO: 47602 - DNA, 21 bp, Homo sapiens
  source 1..21: mol_type = genomic DNA
ctggactctgaatccagcgat

SEQ ID NO: 47603 - DNA, 23 bp, Homo sapiens
  source 1..23: mol_type = genomic DNA
ctggactctgaatccagcgatcc

SEQ ID NO: 47604 - DNA, 26 bp, Homo sapiens
  source 1..26: mol_type = genomic DNA
ctggactctgaatccagcgatccgag

SEQ ID NO: 47605 - DNA, 27 bp, Homo sapiens
  source 1..27: mol_type = genomic DNA
ctggactctgaatccagcgatccgagt

SEQ ID NO: 47606 - DNA, 28 bp, Homo sapiens
  source 1..28: mol_type = genomic DNA
ctggactctgaatccagcgatccgagtt

SEQ ID NO: 47607 - DNA, 29 bp, Homo sapiens
  source 1..29: mol_type = genomic DNA
ctggactctgaatccagcgatccgagttc

SEQ ID NO: 47608 - DNA, 39 bp, Homo sapiens; identical to SEQ ID NO: 14182
  source 1..39: mol_type = genomic DNA

SEQ ID NO: 47609 - DNA, 46 bp, Homo sapiens; identical to SEQ ID NO: 14184
  source 1..46: mol_type = genomic DNA

SEQ ID NO: 47610 - DNA, 35 bp, Homo sapiens; identical to SEQ ID NO: 14192
  source 1..35: mol_type = genomic DNA

SEQ ID NO: 47611 - DNA, 16 bp, Homo sapiens
  source 1..16: mol_type = genomic DNA
ctggggattgtgggtt

SEQ ID NO: 47612 - DNA, 24 bp, Homo sapiens
  source 1..24: mol_type = genomic DNA
ctggggattgtgggttcgagtccc

SEQ ID NO: 47613 - DNA, 27 bp, Homo sapiens
  source 1..27: mol_type = genomic DNA
ctggggattgtgggttcgagtcccatc

SEQ ID NO: 47614 - DNA, 34 bp, Homo sapiens; identical to SEQ ID NO: 14221
  source 1..34: mol_type = genomic DNA

SEQ ID NO: 47615 - DNA, 35 bp, Homo sapiens; identical to SEQ ID NO: 14222
  source 1..35: mol_type = genomic DNA

SEQ ID NO: 47616 - DNA, 36 bp, Homo sapiens; identical to SEQ ID NO: 14223
  source 1..36: mol_type = genomic DNA

SEQ ID NO: 47617 - DNA, 37 bp, Homo sapiens; identical to SEQ ID NO: 14224
  source 1..37: mol_type = genomic DNA

SEQ ID NO: 47618 - DNA, 26 bp, Homo sapiens
  source 1..26: mol_type = genomic DNA
ctgggttcgaatcccagcggtgcctc

SEQ ID NO: 47619 - DNA, 27 bp, Homo sapiens
  source 1..27: mol_type = genomic DNA
ctgggttcgagccccagtggaaccacc

SEQ ID NO: 47620 - DNA, 43 bp, Homo sapiens; identical to SEQ ID NO: 36499
  source 1..43: mol_type = genomic DNA

SEQ ID NO: 47621 - DNA, 45 bp, Homo sapiens; identical to SEQ ID NO: 14245
  source 1..45: mol_type = genomic DNA

SEQ ID NO: 47622 - DNA, 44 bp, Homo sapiens; identical to SEQ ID NO: 36502
  source 1..44: mol_type = genomic DNA

SEQ ID NO: 47623 - DNA, 46 bp, Homo sapiens; identical to SEQ ID NO: 14247
  source 1..46: mol_type = genomic DNA

SEQ ID NO: 47624 - DNA, 33 bp, Homo sapiens; identical to SEQ ID NO: 14261
  source 1..33: mol_type = genomic DNA

SEQ ID NO: 47625 - DNA, 22 bp, Homo sapiens
  source 1..22: mol_type = genomic DNA
ctggtggtctagtggttaggat

SEQ ID NO: 47626 - DNA, 25 bp, Homo sapiens
  source 1..25: mol_type = genomic DNA
ctggtggtctagtggttaggattcg

SEQ ID NO: 47627 - DNA, 27 bp, Homo sapiens
  source 1..27: mol_type = genomic DNA
ctggtggtctagtggttaggattcggc

SEQ ID NO: 47628 - DNA, 28 bp, Homo sapiens
  source 1..28: mol_type = genomic DNA
ctggtggtctagtggttaggattcggcg

SEQ ID NO: 47629 - DNA, 29 bp, Homo sapiens
  source 1..29: mol_type = genomic DNA
ctggtggtctagtggttaggattcggcgc

SEQ ID NO: 47630 - DNA, 30 bp, Homo sapiens; identical to SEQ ID NO: 14277
  source 1..30: mol_type = genomic DNA

SEQ ID NO: 47631 - DNA, 31 bp, Homo sapiens; identical to SEQ ID NO: 14278
  source 1..31: mol_type = genomic DNA

SEQ ID NO: 47632 - DNA, 32 bp, Homo sapiens; identical to SEQ ID NO: 14279
  source 1..32: mol_type = genomic DNA

SEQ ID NO: 47633 - DNA, 33 bp, Homo sapiens; identical to SEQ ID NO: 14280
  source 1..33: mol_type = genomic DNA

SEQ ID NO: 47634 - DNA, 39 bp, Homo sapiens; identical to SEQ ID NO: 14284
  source 1..39: mol_type = genomic DNA

SEQ ID NO: 47635 - DNA, 19 bp, Homo sapiens
  source 1..19: mol_type = genomic DNA
ctggtgtagtggtatcatg

SEQ ID NO: 47636 - DNA, 23 bp, Homo sapiens
  source 1..23: mol_type = genomic DNA
ctggtgtagtggtatcatgcaag

SEQ ID NO: 47637 - DNA, 24 bp, Homo sapiens
  source 1..24: mol_type = genomic DNA
ctggtgtagtggtatcatgcaaga

SEQ ID NO: 47638 - DNA, 26 bp, Homo sapiens
  source 1..26: mol_type = genomic DNA
ctggtgtagtggtatcatgcaagatt

SEQ ID NO: 47639 - DNA, 46 bp, Homo sapiens; identical to SEQ ID NO: 14304
  source 1..46: mol_type = genomic DNA

SEQ ID NO: 47640 - DNA, 23 bp, Homo sapiens
  source 1..23: mol_type = genomic DNA
ctggttcaaatccgggtgccccc

SEQ ID NO: 47641 - DNA, 25 bp, Homo sapiens
  source 1..25: mol_type = genomic DNA
ctggttcgaatccggctcgaaggac

SEQ ID NO: 47642 - DNA, 26 bp, Homo sapiens
  source 1..26: mol_type = genomic DNA
ctggttcgaatccggctcgaaggacc

SEQ ID NO: 47643 - DNA, 25 bp, Homo sapiens
  source 1..25: mol_type = genomic DNA
ctggttcgaatccggctcggaggac

SEQ ID NO: 47644 - DNA, 24 bp, Homo sapiens
  source 1..24: mol_type = genomic DNA
ctggttcgatcccgggtttcggca

SEQ ID NO: 47645 - DNA, 25 bp, Homo sapiens
  source 1..25: mol_type = genomic DNA
ctggttcgatcccgggtttcggcac

SEQ ID NO: 47646 - DNA, 26 bp, Homo sapiens
  source 1..26: mol_type = genomic DNA
ctggttcgatcccgggtttcggcacc

SEQ ID NO: 47647 - DNA, 27 bp, Homo sapiens
  source 1..27: mol_type = genomic DNA
ctggttcgatcccgggtttcggcacca

SEQ ID NO: 47648 - DNA, 25 bp, Homo sapiens
  source 1..25: mol_type = genomic DNA
ctggttcgattccggctcgaaggac

SEQ ID NO: 47649 - DNA, 26 bp, Homo sapiens
  source 1..26: mol_type = genomic DNA
ctggttcgattccggctcgaaggacc

SEQ ID NO: 47650 - DNA, 27 bp, Homo sapiens
  source 1..27: mol_type = genomic DNA
ctggttcgattccggctcgaaggacca

SEQ ID NO: 47651 - DNA, 23 bp, Homo sapiens
  source 1..23: mol_type = genomic DNA
ctggttttcacccaggcggcccg

SEQ ID NO: 47652 - DNA, 45 bp, Homo sapiens; identical to SEQ ID NO: 36541
  source 1..45: mol_type = genomic DNA

SEQ ID NO: 47653 - DNA, 46 bp, Homo sapiens; identical to SEQ ID NO: 36542
  source 1..46: mol_type = genomic DNA

SEQ ID NO: 47654 - DNA, 47 bp, Homo sapiens; identical to SEQ ID NO: 14328
  source 1..47: mol_type = genomic DNA

SEQ ID NO: 47655 - DNA, 19 bp, Homo sapiens
  source 1..19: mol_type = genomic DNA
ctgtagatccttaggtcgc

SEQ ID NO: 47656 - DNA, 23 bp, Homo sapiens
  source 1..23: mol_type = genomic DNA
ctgtagatccttaggtcgctggt

SEQ ID NO: 47657 - DNA, 16 bp, Homo sapiens
  source 1..16: mol_type = genomic DNA
ctgtcacgcgggagac

SEQ ID NO: 47658 - DNA, 17 bp, Homo sapiens
  source 1..17: mol_type = genomic DNA
ctgtcacgcgggagacc

SEQ ID NO: 47659 - DNA, 18 bp, Homo sapiens
  source 1..18: mol_type = genomic DNA
ctgtcacgcgggagaccg

SEQ ID NO: 47660 - DNA, 19 bp, Homo sapiens
  source 1..19: mol_type = genomic DNA
ctgtcacgcgggagaccgg

SEQ ID NO: 47661 - DNA, 20 bp, Homo sapiens
  source 1..20: mol_type = genomic DNA
ctgtcacgcgggagaccggg

SEQ ID NO: 47662 - DNA, 21 bp, Homo sapiens
  source 1..21: mol_type = genomic DNA
ctgtcacgcgggagaccgggg

SEQ ID NO: 47663 - DNA, 22 bp, Homo sapiens
  source 1..22: mol_type = genomic DNA
ctgtcacgcgggagaccggggt

SEQ ID NO: 47664 - DNA, 23 bp, Homo sapiens
  source 1..23: mol_type = genomic DNA
ctgtcacgcgggagaccggggtt

SEQ ID NO: 47665 - DNA, 24 bp, Homo sapiens
  source 1..24: mol_type = genomic DNA
ctgtcacgcgggagaccggggttc

SEQ ID NO: 47666 - DNA, 39 bp, Homo sapiens; identical to SEQ ID NO: 36558
  source 1..39: mol_type = genomic DNA

SEQ ID NO: 47667 - DNA, 40 bp, Homo sapiens; identical to SEQ ID NO: 14361
  source 1..40: mol_type = genomic DNA

SEQ ID NO: 47668 - DNA, 42 bp, Homo sapiens; identical to SEQ ID NO: 14362
  source 1..42: mol_type = genomic DNA

SEQ ID NO: 47669 - DNA, 44 bp, Homo sapiens; identical to SEQ ID NO: 14364
  source 1..44: mol_type = genomic DNA

SEQ ID NO: 47670 - DNA, 25 bp, Homo sapiens
  source 1..25: mol_type = genomic DNA
ctgtcacgcgggagaccggggttcg

SEQ ID NO: 47671 - DNA, 26 bp, Homo sapiens
  source 1..26: mol_type = genomic DNA
ctgtcacgcgggagaccggggttcga

SEQ ID NO: 47672 - DNA, 28 bp, Homo sapiens
  source 1..28: mol_type = genomic DNA
ctgtcacgcgggagaccggggttcgatt

SEQ ID NO: 47673 - DNA, 29 bp, Homo sapiens
  source 1..29: mol_type = genomic DNA
ctgtcacgcgggagaccggggttcgattc

SEQ ID NO: 47674 - DNA, 30 bp, Homo sapiens; identical to SEQ ID NO: 36564
  source 1..30: mol_type = genomic DNA

SEQ ID NO: 47675 - DNA, 31 bp, Homo sapiens
  source 1..31: mol_type = genomic DNA
ctgtcacgcgggagaccggggttcgattccc

SEQ ID NO: 47676 - DNA, 34 bp, Homo sapiens; identical to SEQ ID NO: 14368
  source 1..34: mol_type = genomic DNA

SEQ ID NO: 47677 - DNA, 35 bp, Homo sapiens; identical to SEQ ID NO: 14369
  source 1..35: mol_type = genomic DNA

SEQ ID NO: 47678 - DNA, 36 bp, Homo sapiens; identical to SEQ ID NO: 14370
  source 1..36: mol_type = genomic DNA

SEQ ID NO: 47679 - DNA, 37 bp, Homo sapiens; identical to SEQ ID NO: 14371
  source 1..37: mol_type = genomic DNA

SEQ ID NO: 47680 - DNA, 38 bp, Homo sapiens; identical to SEQ ID NO: 14372
  source 1..38: mol_type = genomic DNA

SEQ ID NO: 47681 - DNA, 39 bp, Homo sapiens; identical to SEQ ID NO: 14373
  source 1..39: mol_type = genomic DNA

SEQ ID NO: 47682 - DNA, 41 bp, Homo sapiens; identical to SEQ ID NO: 14374
  source 1..41: mol_type = genomic DNA

SEQ ID NO: 47683 - DNA, 42 bp, Homo sapiens; identical to SEQ ID NO: 14375
  source 1..42: mol_type = genomic DNA

SEQ ID NO: 47684 - DNA, 43 bp, Homo sapiens; identical to SEQ ID NO: 14376
  source 1..43: mol_type = genomic DNA

SEQ ID NO: 47685 - DNA, 44 bp, Homo sapiens; identical to SEQ ID NO: 14377
  source 1..44: mol_type = genomic DNA

SEQ ID NO: 47686 - DNA, 44 bp, Homo sapiens; identical to SEQ ID NO: 36577
  source 1..44: mol_type = genomic DNA

SEQ ID NO: 47687 - DNA, 22 bp, Homo sapiens
  source 1..22: mol_type = genomic DNA
cttaaacccccttatttctacc

SEQ ID NO: 47688 - DNA, 18 bp, Homo sapiens
  source 1..18: mol_type = genomic DNA
cttaacacaaagcaccca

SEQ ID NO: 47689 - DNA, 19 bp, Homo sapiens
  source 1..19: mol_type = genomic DNA
cttaacacaaagcacccaa

SEQ ID NO: 47690 - DNA, 18 bp, Homo sapiens
  source 1..18: mol_type = genomic DNA
cttaacttgaccgctctg

SEQ ID NO: 47691 - DNA, 19 bp, Homo sapiens
  source 1..19: mol_type = genomic DNA
cttaacttgaccgctctga

SEQ ID NO: 47692 - DNA, 20 bp, Homo sapiens
  source 1..20: mol_type = genomic DNA
cttaacttgaccgctctgac

SEQ ID NO: 47693 - DNA, 21 bp, Homo sapiens
  source 1..21: mol_type = genomic DNA
cttaacttgaccgctctgacc

SEQ ID NO: 47694 - DNA, 22 bp, Homo sapiens
  source 1..22: mol_type = genomic DNA
cttaacttgaccgctctgacca

SEQ ID NO: 47695 - DNA, 17 bp, Homo sapiens
  source 1..17: mol_type = genomic DNA
cttaagatccaatggac

SEQ ID NO: 47696 - DNA, 18 bp, Homo sapiens
  source 1..18: mol_type = genomic DNA
cttaagatccaatggaca

SEQ ID NO: 47697 - DNA, 19 bp, Homo sapiens
  source 1..19: mol_type = genomic DNA
cttaagatccaatggacat

SEQ ID NO: 47698 - DNA, 16 bp, Homo sapiens
  source 1..16: mol_type = genomic DNA
cttaatcccagggtcg

SEQ ID NO: 47699 - DNA, 17 bp, Homo sapiens
  source 1..17: mol_type = genomic DNA
cttaatcccagggtcgt

SEQ ID NO: 47700 - DNA, 42 bp, Homo sapiens; identical to SEQ ID NO: 14476
  source 1..42: mol_type = genomic DNA

SEQ ID NO: 47701 - DNA, 33 bp, Homo sapiens; identical to SEQ ID NO: 14500
  source 1..33: mol_type = genomic DNA

SEQ ID NO: 47702 - DNA, 39 bp, Homo sapiens; identical to SEQ ID NO: 14506
  source 1..39: mol_type = genomic DNA

SEQ ID NO: 47703 - DNA, 40 bp, Homo sapiens; identical to SEQ ID NO: 14507
  source 1..40: mol_type = genomic DNA

SEQ ID NO: 47704 - DNA, 41 bp, Homo sapiens; identical to SEQ ID NO: 14508
  source 1..41: mol_type = genomic DNA

SEQ ID NO: 47705 - DNA, 42 bp, Homo sapiens; identical to SEQ ID NO: 14509
  source 1..42: mol_type = genomic DNA

SEQ ID NO: 47706 - DNA, 43 bp, Homo sapiens; identical to SEQ ID NO: 14510
  source 1..43: mol_type = genomic DNA

SEQ ID NO: 47707 - DNA, 21 bp, Homo sapiens
  source 1..21: mol_type = genomic DNA
cttacgaccccttatttaccc

SEQ ID NO: 47708 - DNA, 22 bp, Homo sapiens
  source 1..22: mol_type = genomic DNA
cttacgaccccttatttacccc

SEQ ID NO: 47709 - DNA, 23 bp, Homo sapiens
  source 1..23: mol_type = genomic DNA
cttacgaccccttatttacccca

SEQ ID NO: 47710 - DNA, 31 bp, Homo sapiens; identical to SEQ ID NO: 14541
  source 1..31: mol_type = genomic DNA

SEQ ID NO: 47711 - DNA, 46 bp, Homo sapiens; identical to SEQ ID NO: 14566
  source 1..46: mol_type = genomic DNA

SEQ ID NO: 47712 - DNA, 47 bp, Homo sapiens; identical to SEQ ID NO: 14567
  source 1..47: mol_type = genomic DNA

SEQ ID NO: 47713 - DNA, 18 bp, Homo sapiens
  source 1..18: mol_type = genomic DNA
cttaggagatttcaactt

SEQ ID NO: 47714 - DNA, 27 bp, Homo sapiens
  source 1..27: mol_type = genomic DNA
cttaggagatttcaacttaacttgacc

SEQ ID NO: 47715 - DNA, 28 bp, Homo sapiens
  source 1..28: mol_type = genomic DNA
cttaggagatttcaacttaacttgaccg

SEQ ID NO: 47716 - DNA, 30 bp, Homo sapiens; identical to SEQ ID NO: 14583
  source 1..30: mol_type = genomic DNA

SEQ ID NO: 47717 - DNA, 32 bp, Homo sapiens; identical to SEQ ID NO: 14585
  source 1..32: mol_type = genomic DNA

SEQ ID NO: 47718 - DNA, 33 bp, Homo sapiens; identical to SEQ ID NO: 14586
  source 1..33: mol_type = genomic DNA

SEQ ID NO: 47719 - DNA, 34 bp, Homo sapiens; identical to SEQ ID NO: 14587
  source 1..34: mol_type = genomic DNA

SEQ ID NO: 47720 - DNA, 35 bp, Homo sapiens; identical to SEQ ID NO: 14588
  source 1..35: mol_type = genomic DNA

SEQ ID NO: 47721 - DNA, 36 bp, Homo sapiens; identical to SEQ ID NO: 14589
  source 1..36: mol_type = genomic DNA

SEQ ID NO: 47722 - DNA, 37 bp, Homo sapiens; identical to SEQ ID NO: 14590
  source 1..37: mol_type = genomic DNA

SEQ ID NO: 47723 - DNA, 34 bp, Homo sapiens; identical to SEQ ID NO: 14594
  source 1..34: mol_type = genomic DNA

SEQ ID NO: 47724 - DNA, 35 bp, Homo sapiens; identical to SEQ ID NO: 14595
  source 1..35: mol_type = genomic DNA

SEQ ID NO: 47725 - DNA, 35 bp, Homo sapiens; identical to SEQ ID NO: 14600
  source 1..35: mol_type = genomic DNA

SEQ ID NO: 47726 - DNA, 17 bp, Homo sapiens
  source 1..17: mol_type = genomic DNA
cttcaaacctgccgggg

SEQ ID NO: 47727 - DNA, 18 bp, Homo sapiens
  source 1..18: mol_type = genomic DNA
cttcaaacctgccggggc

SEQ ID NO: 47728 - DNA, 19 bp, Homo sapiens
  source 1..19: mol_type = genomic DNA
cttcaaacctgccggggct

SEQ ID NO: 47729 - DNA, 20 bp, Homo sapiens
  source 1..20: mol_type = genomic DNA
cttcaaacctgccggggctt

SEQ ID NO: 47730 - DNA, 22 bp, Homo sapiens
  source 1..22: mol_type = genomic DNA
cttcaaacctgccggggcttcc

SEQ ID NO: 47731 - DNA, 23 bp, Homo sapiens
  source 1..23: mol_type = genomic DNA
cttcaaacctgccggggcttcca

SEQ ID NO: 47732 - DNA, 16 bp, Homo sapiens
  source 1..16: mol_type = genomic DNA
cttccaagcagttgac

SEQ ID NO: 47733 - DNA, 17 bp, Homo sapiens
  source 1..17: mol_type = genomic DNA
cttccaagcagttgacc

SEQ ID NO: 47734 - DNA, 20 bp, Homo sapiens
  source 1..20: mol_type = genomic DNA
cttccaagcagttgacccgg

SEQ ID NO: 47735 - DNA, 22 bp, Homo sapiens
  source 1..22: mol_type = genomic DNA
cttccaagcagttgacccgggt

SEQ ID NO: 47736 - DNA, 22 bp, Homo sapiens
  source 1..22: mol_type = genomic DNA
cttccaattaactagttttgac

SEQ ID NO: 47737 - DNA, 42 bp, Homo sapiens; identical to SEQ ID NO: 14638
  source 1..42: mol_type = genomic DNA

SEQ ID NO: 47738 - DNA, 17 bp, Homo sapiens
  source 1..17: mol_type = genomic DNA
cttcggaggcgtgggtt

SEQ ID NO: 47739 - DNA, 26 bp, Homo sapiens
  source 1..26: mol_type = genomic DNA
cttcggaggcgtgggttcgaatccca

SEQ ID NO: 47740 - DNA, 25 bp, Homo sapiens
  source 1..25: mol_type = genomic DNA
cttcggatcagaagattgagggttc

SEQ ID NO: 47741 - DNA, 25 bp, Homo sapiens
  source 1..25: mol_type = genomic DNA
cttcggatcagaagattgcaggttc

SEQ ID NO: 47742 - DNA, 16 bp, Homo sapiens
  source 1..16: mol_type = genomic DNA
cttcgggggcgtgggt

SEQ ID NO: 47743 - DNA, 37 bp, Homo sapiens; identical to SEQ ID NO: 14666
  source 1..37: mol_type = genomic DNA

SEQ ID NO: 47744 - DNA, 23 bp, Homo sapiens
  source 1..23: mol_type = genomic DNA
cttctaattcaaaggttccgggt

SEQ ID NO: 47745 - DNA, 32 bp, Homo sapiens; identical to SEQ ID NO: 14673
  source 1..32: mol_type = genomic DNA

SEQ ID NO: 47746 - DNA, 16 bp, Homo sapiens
  source 1..16: mol_type = genomic DNA
cttgaccgctctgacc

SEQ ID NO: 47747 - DNA, 17 bp, Homo sapiens
  source 1..17: mol_type = genomic DNA
cttgaccgctctgacca

SEQ ID NO: 47748 - DNA, 33 bp, Homo sapiens
  source 1..33: mol_type = genomic DNA
cttgcgacccgggttcgattcccgggcggcgca

SEQ ID NO: 47749 - DNA, 35 bp, Homo sapiens; identical to SEQ ID NO: 14685
  source 1..35: mol_type = genomic DNA

SEQ ID NO: 47750 - DNA, 45 bp, Homo sapiens; identical to SEQ ID NO: 14698
  source 1..45: mol_type = genomic DNA

SEQ ID NO: 47751 - DNA, 19 bp, Homo sapiens
  source 1..19: mol_type = genomic DNA
ctttgaatccagcgatccg

SEQ ID NO: 47752 - DNA, 20 bp, Homo sapiens
  source 1..20: mol_type = genomic DNA
ctttgaatccagcgatccga

SEQ ID NO: 47753 - DNA, 21 bp, Homo sapiens
  source 1..21: mol_type = genomic DNA
ctttgaatccagcgatccgag

SEQ ID NO: 47754 - DNA, 22 bp, Homo sapiens
  source 1..22: mol_type = genomic DNA
ctttgaatccagcgatccgagt

SEQ ID NO: 47755 - DNA, 23 bp, Homo sapiens
  source 1..23: mol_type = genomic DNA
ctttgaatccagcgatccgagtt

SEQ ID NO: 47756 - DNA, 30 bp, Homo sapiens
  source 1..30: mol_type = genomic DNA
ctttgcacgcgtgggttcgaatcccatcct

SEQ ID NO: 47757 - DNA, 37 bp, Homo sapiens; identical to SEQ ID NO: 14763
  source 1..37: mol_type = genomic DNA

SEQ ID NO: 47758 - DNA, 39 bp, Homo sapiens
  source 1..39: mol_type = genomic DNA
ctttgcacgtatgaggccccgggttcaatccccggcatc

SEQ ID NO: 47759 - DNA, 41 bp, Homo sapiens; identical to SEQ ID NO: 14768
  source 1..41: mol_type = genomic DNA

SEQ ID NO: 47760 - DNA, 45 bp, Homo sapiens; identical to SEQ ID NO: 36664
  source 1..45: mol_type = genomic DNA

SEQ ID NO: 47761 - DNA, 21 bp, Homo sapiens
  source 1..21: mol_type = genomic DNA
ctttgggtgcgagaggtcccg

SEQ ID NO: 47762 - DNA, 44 bp, Homo sapiens; identical to SEQ ID NO: 14776
  source 1..44: mol_type = genomic DNA

SEQ ID NO: 47763 - DNA, 42 bp, Homo sapiens; identical to SEQ ID NO: 14797
  source 1..42: mol_type = genomic DNA

SEQ ID NO: 47764 - DNA, 43 bp, Homo sapiens; identical to SEQ ID NO: 14798
  source 1..43: mol_type = genomic DNA

SEQ ID NO: 47765 - DNA, 26 bp, Homo sapiens
  source 1..26: mol_type = genomic DNA
cttttaagttaaagattaagagaacc

SEQ ID NO: 47766 - DNA, 45 bp, Homo sapiens; identical to SEQ ID NO: 14847
  source 1..45: mol_type = genomic DNA

SEQ ID NO: 47767 - DNA, 46 bp, Homo sapiens; identical to SEQ ID NO: 14848
  source 1..46: mol_type = genomic DNA

SEQ ID NO: 47768 - DNA, 16 bp, Homo sapiens
  source 1..16: mol_type = genomic DNA
ctttttccaaggacac

SEQ ID NO: 47769 - DNA, 17 bp, Homo sapiens
  source 1..17: mol_type = genomic DNA
ctttttccaaggacacc

SEQ ID NO: 47770 - DNA, 18 bp, Homo sapiens
  source 1..18: mol_type = genomic DNA
ctttttccaaggacacca

SEQ ID NO: 47771 - DNA, 16 bp, Homo sapiens
  source 1..16: mol_type = genomic DNA
gaaaaagtcatggagg

SEQ ID NO: 47772 - DNA, 17 bp, Homo sapiens
  source 1..17: mol_type = genomic DNA
gaaaaagtcatggaggc

SEQ ID NO: 47773 - DNA, 18 bp, Homo sapiens
  source 1..18: mol_type = genomic DNA
gaaaaagtcatggaggcc

SEQ ID NO: 47774 - DNA, 19 bp, Homo sapiens
  source 1..19: mol_type = genomic DNA
gaaaaagtcatggaggcca

SEQ ID NO: 47775 - DNA, 21 bp, Homo sapiens
  source 1..21: mol_type = genomic DNA
gaaaaagtcatggaggccatg

SEQ ID NO: 47776 - DNA, 24 bp, Homo sapiens
  source 1..24: mol_type = genomic DNA
gaaaaagtcatggaggccatgggg

SEQ ID NO: 47777 - DNA, 25 bp, Homo sapiens
  source 1..25: mol_type = genomic DNA
gaaaaagtcatggaggccatggggt

SEQ ID NO: 47778 - DNA, 26 bp, Homo sapiens
  source 1..26: mol_type = genomic DNA
gaaaaagtcatggaggccatggggtt

SEQ ID NO: 47779 - DNA, 27 bp, Homo sapiens
  source 1..27: mol_type = genomic DNA
gaaaaagtcatggaggccatggggttg

SEQ ID NO: 47780 - DNA, 28 bp, Homo sapiens
  source 1..28: mol_type = genomic DNA
gaaaaagtcatggaggccatggggttgg

SEQ ID NO: 47781 - DNA, 30 bp, Homo sapiens; identical to SEQ ID NO: 14877
  source 1..30: mol_type = genomic DNA

SEQ ID NO: 47782 - DNA, 23 bp, Homo sapiens
  source 1..23: mol_type = genomic DNA
gaaaacctttttccaaggacacc

SEQ ID NO: 47783 - DNA, 17 bp, Homo sapiens
  source 1..17: mol_type = genomic DNA
gaaaatgttggttatac

SEQ ID NO: 47784 - DNA, 25 bp, Homo sapiens
  source 1..25: mol_type = genomic DNA
gaaaatgttggttatacccttcccg

SEQ ID NO: 47785 - DNA, 30 bp, Homo sapiens; identical to SEQ ID NO: 14908
  source 1..30: mol_type = genomic DNA

SEQ ID NO: 47786 - DNA, 31 bp, Homo sapiens; identical to SEQ ID NO: 14909
  source 1..31: mol_type = genomic DNA

SEQ ID NO: 47787 - DNA, 32 bp, Homo sapiens; identical to SEQ ID NO: 14910
  source 1..32: mol_type = genomic DNA

SEQ ID NO: 47788 - DNA, 33 bp, Homo sapiens; identical to SEQ ID NO: 14911
  source 1..33: mol_type = genomic DNA

SEQ ID NO: 47789 - DNA, 18 bp, Homo sapiens
  source 1..18: mol_type = genomic DNA
gaaaatgtttagacgggc

SEQ ID NO: 47790 - DNA, 19 bp, Homo sapiens
  source 1..19: mol_type = genomic DNA
gaaaatgtttagacgggct

SEQ ID NO: 47791 - DNA, 20 bp, Homo sapiens
  source 1..20: mol_type = genomic DNA
gaaaatgtttagacgggctc

SEQ ID NO: 47792 - DNA, 21 bp, Homo sapiens
  source 1..21: mol_type = genomic DNA
gaaaatgtttagacgggctca

SEQ ID NO: 47793 - DNA, 22 bp, Homo sapiens
  source 1..22: mol_type = genomic DNA
gaaaatgtttagacgggctcac

SEQ ID NO: 47794 - DNA, 23 bp, Homo sapiens
  source 1..23: mol_type = genomic DNA
gaaaatgtttagacgggctcaca

SEQ ID NO: 47795 - DNA, 25 bp, Homo sapiens
  source 1..25: mol_type = genomic DNA
gaaaatgtttagacgggctcacatc

SEQ ID NO: 47796 - DNA, 28 bp, Homo sapiens
  source 1..28: mol_type = genomic DNA
gaaaatgtttagacgggctcacatcacc

SEQ ID NO: 47797 - DNA, 29 bp, Homo sapiens
  source 1..29: mol_type = genomic DNA
gaaaatgtttagacgggctcacatcaccc

SEQ ID NO: 47798 - DNA, 30 bp, Homo sapiens; identical to SEQ ID NO: 14926
  source 1..30: mol_type = genomic DNA

SEQ ID NO: 47799 - DNA, 31 bp, Homo sapiens; identical to SEQ ID NO: 14927
  source 1..31: mol_type = genomic DNA

SEQ ID NO: 47800 - DNA, 35 bp, Homo sapiens; identical to SEQ ID NO: 14931
  source 1..35: mol_type = genomic DNA

SEQ ID NO: 47801 - DNA, 39 bp, Homo sapiens; identical to SEQ ID NO: 14934
  source 1..39: mol_type = genomic DNA

SEQ ID NO: 47802 - DNA, 40 bp, Homo sapiens; identical to SEQ ID NO: 14935
  source 1..40: mol_type = genomic DNA

SEQ ID NO: 47803 - DNA, 19 bp, Homo sapiens
  source 1..19: mol_type = genomic DNA
gaaaccgggcagaagcacc

SEQ ID NO: 47804 - DNA, 17 bp, Homo sapiens
  source 1..17: mol_type = genomic DNA
gaaaccgggcggaaaca

SEQ ID NO: 47805 - DNA, 18 bp, Homo sapiens
  source 1..18: mol_type = genomic DNA
gaaaccgggcggaaacac

SEQ ID NO: 47806 - DNA, 19 bp, Homo sapiens
  source 1..19: mol_type = genomic DNA
gaaaccgggcggaaacacc

SEQ ID NO: 47807 - DNA, 20 bp, Homo sapiens
  source 1..20: mol_type = genomic DNA
gaaaccgggcggaaacacca

SEQ ID NO: 47808 - DNA, 24 bp, Homo sapiens
  source 1..24: mol_type = genomic DNA
gaaagctcacaagaactgctaact

SEQ ID NO: 47809 - DNA, 33 bp, Homo sapiens; identical to SEQ ID NO: 14966
  source 1..33: mol_type = genomic DNA

SEQ ID NO: 47810 - DNA, 16 bp, Homo sapiens
  source 1..16: mol_type = genomic DNA
gaaaggttggtggttc

SEQ ID NO: 47811 - DNA, 17 bp, Homo sapiens
  source 1..17: mol_type = genomic DNA
gaaaggttggtggttcg

SEQ ID NO: 47812 - DNA, 32 bp, Homo sapiens; identical to SEQ ID NO: 14988
  source 1..32: mol_type = genomic DNA

SEQ ID NO: 47813 - DNA, 35 bp, Homo sapiens; identical to SEQ ID NO: 14991
  source 1..35: mol_type = genomic DNA

SEQ ID NO: 47814 - DNA, 44 bp, Homo sapiens; identical to SEQ ID NO: 15004
  source 1..44: mol_type = genomic DNA

SEQ ID NO: 47815 - DNA, 46 bp, Homo sapiens; identical to SEQ ID NO: 15006
  source 1..46: mol_type = genomic DNA

SEQ ID NO: 47816 - DNA, 24 bp, Homo sapiens
  source 1..24: mol_type = genomic DNA
gaaccaacacctctttacagtgac

SEQ ID NO: 47817 - DNA, 25 bp, Homo sapiens
  source 1..25: mol_type = genomic DNA
gaaccaacacctctttacagtgacc

SEQ ID NO: 47818 - DNA, 20 bp, Homo sapiens
  source 1..20: mol_type = genomic DNA
gaaccctgctcgctgcgcca

SEQ ID NO: 47819 - DNA, 31 bp, Homo sapiens; identical to SEQ ID NO: 15041
  source 1..31: mol_type = genomic DNA

SEQ ID NO: 47820 - DNA, 34 bp, Homo sapiens; identical to SEQ ID NO: 15044
  source 1..34: mol_type = genomic DNA

SEQ ID NO: 47821 - DNA, 39 bp, Homo sapiens; identical to SEQ ID NO: 15049
  source 1..39: mol_type = genomic DNA

SEQ ID NO: 47822 - DNA, 47 bp, Homo sapiens; identical to SEQ ID NO: 15057
  source 1..47: mol_type = genomic DNA

SEQ ID NO: 47823 - DNA, 28 bp, Homo sapiens
  source 1..28: mol_type = genomic DNA
gaagaagcagcttcaaacctgccggggc

SEQ ID NO: 47824 - DNA, 29 bp, Homo sapiens
  source 1..29: mol_type = genomic DNA
gaagaagcagcttcaaacctgccggggct

SEQ ID NO: 47825 - DNA, 30 bp, Homo sapiens; identical to SEQ ID NO: 15062
  source 1..30: mol_type = genomic DNA

SEQ ID NO: 47826 - DNA, 32 bp, Homo sapiens; identical to SEQ ID NO: 15070
  source 1..32: mol_type = genomic DNA

SEQ ID NO: 47827 - DNA, 33 bp, Homo sapiens; identical to SEQ ID NO: 15071
  source 1..33: mol_type = genomic DNA

SEQ ID NO: 47828 - DNA, 34 bp, Homo sapiens; identical to SEQ ID NO: 15072
  source 1..34: mol_type = genomic DNA

SEQ ID NO: 47829 - DNA, 34 bp, Homo sapiens; identical to SEQ ID NO: 15089
  source 1..34: mol_type = genomic DNA

SEQ ID NO: 47830 - DNA, 33 bp, Homo sapiens; identical to SEQ ID NO: 15098
  source 1..33: mol_type = genomic DNA

SEQ ID NO: 47831 - DNA, 34 bp, Homo sapiens; identical to SEQ ID NO: 15099
  source 1..34: mol_type = genomic DNA

SEQ ID NO: 47832 - DNA, 35 bp, Homo sapiens; identical to SEQ ID NO: 15100
  source 1..35: mol_type = genomic DNA

SEQ ID NO: 47833 - DNA, 23 bp, Homo sapiens
  source 1..23: mol_type = genomic DNA
gaagattgcaggttcgagtcctg

SEQ ID NO: 47834 - DNA, 33 bp, Homo sapiens; identical to SEQ ID NO: 15104
  source 1..33: mol_type = genomic DNA

SEQ ID NO: 47835 - DNA, 34 bp, Homo sapiens; identical to SEQ ID NO: 15105
  source 1..34: mol_type = genomic DNA

SEQ ID NO: 47836 - DNA, 35 bp, Homo sapiens; identical to SEQ ID NO: 15106
  source 1..35: mol_type = genomic DNA

SEQ ID NO: 47837 - DNA, 25 bp, Homo sapiens
  source 1..25: mol_type = genomic DNA
gaagcagcttcaaacctgccggggc

SEQ ID NO: 47838 - DNA, 26 bp, Homo sapiens
  source 1..26: mol_type = genomic DNA
gaagcagcttcaaacctgccggggct

SEQ ID NO: 47839 - DNA, 27 bp, Homo sapiens
  source 1..27: mol_type = genomic DNA
gaagcagcttcaaacctgccggggctt

SEQ ID NO: 47840 - DNA, 16 bp, Homo sapiens
  source 1..16: mol_type = genomic DNA
gaagcgtgctgggccc

SEQ ID NO: 47841 - DNA, 23 bp, Homo sapiens
  source 1..23: mol_type = genomic DNA
gaagcgtgctgggcccataaccc

SEQ ID NO: 47842 - DNA, 31 bp, Homo sapiens; identical to SEQ ID NO: 15143
  source 1..31: mol_type = genomic DNA

SEQ ID NO: 47843 - DNA, 32 bp, Homo sapiens; identical to SEQ ID NO: 15144
  source 1..32: mol_type = genomic DNA

SEQ ID NO: 47844 - DNA, 33 bp, Homo sapiens; identical to SEQ ID NO: 15145
  source 1..33: mol_type = genomic DNA

SEQ ID NO: 47845 - DNA, 34 bp, Homo sapiens; identical to SEQ ID NO: 15146
  source 1..34: mol_type = genomic DNA

SEQ ID NO: 47846 - DNA, 21 bp, Homo sapiens
  source 1..21: mol_type = genomic DNA
gaaggtcctgagttcgaacct

SEQ ID NO: 47847 - DNA, 33 bp, Homo sapiens; identical to SEQ ID NO: 15162
  source 1..33: mol_type = genomic DNA

SEQ ID NO: 47848 - DNA, 34 bp, Homo sapiens; identical to SEQ ID NO: 15163
  source 1..34: mol_type = genomic DNA

SEQ ID NO: 47849 - DNA, 35 bp, Homo sapiens; identical to SEQ ID NO: 15164
  source 1..35: mol_type = genomic DNA

SEQ ID NO: 47850 - DNA, 16 bp, Homo sapiens
  source 1..16: mol_type = genomic DNA
gaaggttgcgtgttca

SEQ ID NO: 47851 - DNA, 19 bp, Homo sapiens
  source 1..19: mol_type = genomic DNA
gaatcacgtcggggtcacc

SEQ ID NO: 47852 - DNA, 20 bp, Homo sapiens
  source 1..20: mol_type = genomic DNA
gaatcacgtcggggtcacca

SEQ ID NO: 47853 - DNA, 20 bp, Homo sapiens
  source 1..20: mol_type = genomic DNA
gaatccagcgatccgagttc

SEQ ID NO: 47854 - DNA, 37 bp, Homo sapiens; identical to SEQ ID NO: 15197
  source 1..37: mol_type = genomic DNA

SEQ ID NO: 47855 - DNA, 19 bp, Homo sapiens
  source 1..19: mol_type = genomic DNA
gaatcccaccgctgccacc

SEQ ID NO: 47856 - DNA, 19 bp, Homo sapiens
  source 1..19: mol_type = genomic DNA
gaatcccacttctgacacc

SEQ ID NO: 47857 - DNA, 20 bp, Homo sapiens
  source 1..20: mol_type = genomic DNA
gaatcccagcggtgcctcca

SEQ ID NO: 47858 - DNA, 18 bp, Homo sapiens
  source 1..18: mol_type = genomic DNA
gaatcccatcctcgtcgc

SEQ ID NO: 47859 - DNA, 19 bp, Homo sapiens
  source 1..19: mol_type = genomic DNA
gaatcccatcctcgtcgcc

SEQ ID NO: 47860 - DNA, 20 bp, Homo sapiens
  source 1..20: mol_type = genomic DNA
gaatcccatcctcgtcgcca

SEQ ID NO: 47861 - DNA, 18 bp, Homo sapiens
  source 1..18: mol_type = genomic DNA
gaatccgagtcacggcac

SEQ ID NO: 47862 - DNA, 20 bp, Homo sapiens
  source 1..20: mol_type = genomic DNA
gaatccgagtcacggcacca

SEQ ID NO: 47863 - DNA, 18 bp, Homo sapiens
  source 1..18: mol_type = genomic DNA
gaatccggctcgaaggac

SEQ ID NO: 47864 - DNA, 19 bp, Homo sapiens
  source 1..19: mol_type = genomic DNA
gaatccggctcgaaggacc

SEQ ID NO: 47865 - DNA, 20 bp, Homo sapiens
  source 1..20: mol_type = genomic DNA
gaatccggctcgaaggacca

SEQ ID NO: 47866 - DNA, 19 bp, Homo sapiens
  source 1..19: mol_type = genomic DNA
gaatccggctcggaggacc

SEQ ID NO: 47867 - DNA, 19 bp, Homo sapiens
  source 1..19: mol_type = genomic DNA
gaatcctgccgactacgcc

SEQ ID NO: 47868 - DNA, 19 bp, Homo sapiens
  source 1..19: mol_type = genomic DNA
gaatcctgttcgtgacgcc

SEQ ID NO: 47869 - DNA, 16 bp, Homo sapiens
  source 1..16: mol_type = genomic DNA
gaattctcgcctgcca

SEQ ID NO: 47870 - DNA, 17 bp, Homo sapiens
  source 1..17: mol_type = genomic DNA
gaattctcgcctgccac

SEQ ID NO: 47871 - DNA, 18 bp, Homo sapiens
  source 1..18: mol_type = genomic DNA
gaattctcgcctgccacg

SEQ ID NO: 47872 - DNA, 34 bp, Homo sapiens; identical to SEQ ID NO: 15264
  source 1..34: mol_type = genomic DNA

SEQ ID NO: 47873 - DNA, 41 bp, Homo sapiens; identical to SEQ ID NO: 15266
  source 1..41: mol_type = genomic DNA

SEQ ID NO: 47874 - DNA, 42 bp, Homo sapiens; identical to SEQ ID NO: 15267
  source 1..42: mol_type = genomic DNA

SEQ ID NO: 47875 - DNA, 43 bp, Homo sapiens; identical to SEQ ID NO: 15268
  source 1..43: mol_type = genomic DNA

SEQ ID NO: 47876 - DNA, 45 bp, Homo sapiens; identical to SEQ ID NO: 15270
  source 1..45: mol_type = genomic DNA

SEQ ID NO: 47877 - DNA, 46 bp, Homo sapiens; identical to SEQ ID NO: 15271
  source 1..46: mol_type = genomic DNA

SEQ ID NO: 47878 - DNA, 19 bp, Homo sapiens
  source 1..19: mol_type = genomic DNA
gaccacgtggcctaatgga

SEQ ID NO: 47879 - DNA, 33 bp, Homo sapiens; identical to SEQ ID NO: 15309
  source 1..33: mol_type = genomic DNA

SEQ ID NO: 47880 - DNA, 19 bp, Homo sapiens
  source 1..19: mol_type = genomic DNA
gacccagtggcctaatgga

SEQ ID NO: 47881 - DNA, 31 bp, Homo sapiens; identical to SEQ ID NO: 15319
  source 1..31: mol_type = genomic DNA

SEQ ID NO: 47882 - DNA, 32 bp, Homo sapiens; identical to SEQ ID NO: 15320
  source 1..32: mol_type = genomic DNA

SEQ ID NO: 47883 - DNA, 33 bp, Homo sapiens; identical to SEQ ID NO: 15321
  source 1..33: mol_type = genomic DNA

SEQ ID NO: 47884 - DNA, 34 bp, Homo sapiens; identical to SEQ ID NO: 15322
  source 1..34: mol_type = genomic DNA

SEQ ID NO: 47885 - DNA, 35 bp, Homo sapiens; identical to SEQ ID NO: 15323
  source 1..35: mol_type = genomic DNA

SEQ ID NO: 47886 - DNA, 36 bp, Homo sapiens; identical to SEQ ID NO: 15324
  source 1..36: mol_type = genomic DNA

SEQ ID NO: 47887 - DNA, 16 bp, Homo sapiens
  source 1..16: mol_type = genomic DNA
gaccccttatttaccc

SEQ ID NO: 47888 - DNA, 30 bp, Homo sapiens; identical to SEQ ID NO: 15331
  source 1..30: mol_type = genomic DNA

SEQ ID NO: 47889 - DNA, 31 bp, Homo sapiens; identical to SEQ ID NO: 15332
  source 1..31: mol_type = genomic DNA

SEQ ID NO: 47890 - DNA, 18 bp, Homo sapiens
  source 1..18: mol_type = genomic DNA
gaccgcgtggcctaatgg

SEQ ID NO: 47891 - DNA, 19 bp, Homo sapiens
  source 1..19: mol_type = genomic DNA
gaccgcgtggcctaatgga

SEQ ID NO: 47892 - DNA, 30 bp, Homo sapiens; identical to SEQ ID NO: 15337
  source 1..30: mol_type = genomic DNA

SEQ ID NO: 47893 - DNA, 32 bp, Homo sapiens; identical to SEQ ID NO: 15338
  source 1..32: mol_type = genomic DNA

SEQ ID NO: 47894 - DNA, 33 bp, Homo sapiens; identical to SEQ ID NO: 15339
  source 1..33: mol_type = genomic DNA

SEQ ID NO: 47895 - DNA, 34 bp, Homo sapiens; identical to SEQ ID NO: 15340
  source 1..34: mol_type = genomic DNA

SEQ ID NO: 47896 - DNA, 36 bp, Homo sapiens; identical to SEQ ID NO: 15342
  source 1..36: mol_type = genomic DNA

SEQ ID NO: 47897 - DNA, 29 bp, Homo sapiens
  source 1..29: mol_type = genomic DNA
gaccggggttcaattccccgacggggagc

SEQ ID NO: 47898 - DNA, 30 bp, Homo sapiens; identical to SEQ ID NO: 15344
  source 1..30: mol_type = genomic DNA

SEQ ID NO: 47899 - DNA, 29 bp, Homo sapiens
  source 1..29: mol_type = genomic DNA
gaccggggttcgattccccgacggggagc

SEQ ID NO: 47900 - DNA, 30 bp, Homo sapiens; identical to SEQ ID NO: 15351
  source 1..30: mol_type = genomic DNA

SEQ ID NO: 47901 - DNA, 31 bp, Homo sapiens; identical to SEQ ID NO: 15352
  source 1..31: mol_type = genomic DNA

SEQ ID NO: 47902 - DNA, 17 bp, Homo sapiens
  source 1..17: mol_type = genomic DNA
gacctcgtggcgcaacg

SEQ ID NO: 47903 - DNA, 18 bp, Homo sapiens
  source 1..18: mol_type = genomic DNA
gacctcgtggcgcaacgg

SEQ ID NO: 47904 - DNA, 31 bp, Homo sapiens; identical to SEQ ID NO: 15357
  source 1..31: mol_type = genomic DNA

SEQ ID NO: 47905 - DNA, 32 bp, Homo sapiens; identical to SEQ ID NO: 15358
  source 1..32: mol_type = genomic DNA

SEQ ID NO: 47906 - DNA, 33 bp, Homo sapiens; identical to SEQ ID NO: 15359
  source 1..33: mol_type = genomic DNA

SEQ ID NO: 47907 - DNA, 34 bp, Homo sapiens; identical to SEQ ID NO: 15360
  source 1..34: mol_type = genomic DNA

SEQ ID NO: 47908 - DNA, 18 bp, Homo sapiens
  source 1..18: mol_type = genomic DNA
gacctcgtggcgcaatgg

SEQ ID NO: 47909 - DNA, 32 bp, Homo sapiens; identical to SEQ ID NO: 15365
  source 1..32: mol_type = genomic DNA

SEQ ID NO: 47910 - DNA, 16 bp, Homo sapiens
  source 1..16: mol_type = genomic DNA
gacgaggtggccgagt

SEQ ID NO: 47911 - DNA, 18 bp, Homo sapiens
  source 1..18: mol_type = genomic DNA
gacgaggtggccgagtgg

SEQ ID NO: 47912 - DNA, 19 bp, Homo sapiens
  source 1..19: mol_type = genomic DNA
gacgaggtggccgagtggt

SEQ ID NO: 47913 - DNA, 23 bp, Homo sapiens
  source 1..23: mol_type = genomic DNA
gacgaggtggccgagtggttaag

SEQ ID NO: 47914 - DNA, 24 bp, Homo sapiens
  source 1..24: mol_type = genomic DNA
gacgaggtggccgagtggttaagg

SEQ ID NO: 47915 - DNA, 25 bp, Homo sapiens
  source 1..25: mol_type = genomic DNA
gacgaggtggccgagtggttaaggc

SEQ ID NO: 47916 - DNA, 32 bp, Homo sapiens; identical to SEQ ID NO: 15378
  source 1..32: mol_type = genomic DNA

SEQ ID NO: 47917 - DNA, 33 bp, Homo sapiens; identical to SEQ ID NO: 15379
  source 1..33: mol_type = genomic DNA

SEQ ID NO: 47918 - DNA, 36 bp, Homo sapiens; identical to SEQ ID NO: 15381
  source 1..36: mol_type = genomic DNA

SEQ ID NO: 47919 - DNA, 29 bp, Homo sapiens
  source 1..29: mol_type = genomic DNA
gacgggctcacatcaccccataaacacca

SEQ ID NO: 47920 - DNA, 21 bp, Homo sapiens
  source 1..21: mol_type = genomic DNA
gactccagatcagaaggctgc

SEQ ID NO: 47921 - DNA, 27 bp, Homo sapiens
  source 1..27: mol_type = genomic DNA
gactccagatcagaaggctgcgtgttc

SEQ ID NO: 47922 - DNA, 18 bp, Homo sapiens
  source 1..18: mol_type = genomic DNA
gactcccggtatgggaac

SEQ ID NO: 47923 - DNA, 16 bp, Homo sapiens
  source 1..16: mol_type = genomic DNA
gactcccggtgtggga

SEQ ID NO: 47924 - DNA, 17 bp, Homo sapiens
  source 1..17: mol_type = genomic DNA
gactcccggtgtgggaa

SEQ ID NO: 47925 - DNA, 18 bp, Homo sapiens
  source 1..18: mol_type = genomic DNA
gactcccggtgtgggaac

SEQ ID NO: 47926 - DNA, 19 bp, Homo sapiens
  source 1..19: mol_type = genomic DNA
gactcccggtgtgggaacc

SEQ ID NO: 47927 - DNA, 17 bp, Homo sapiens
  source 1..17: mol_type = genomic DNA
gactcctggctggctcg

SEQ ID NO: 47928 - DNA, 18 bp, Homo sapiens
  source 1..18: mol_type = genomic DNA
gactcctggctggctcgc

SEQ ID NO: 47929 - DNA, 19 bp, Homo sapiens
  source 1..19: mol_type = genomic DNA
gactcctggctggctcgcc

SEQ ID NO: 47930 - DNA, 20 bp, Homo sapiens
  source 1..20: mol_type = genomic DNA
gactcctggctggctcgcca

SEQ ID NO: 47931 - DNA, 43 bp, Homo sapiens; identical to SEQ ID NO: 15425
  source 1..43: mol_type = genomic DNA

SEQ ID NO: 47932 - DNA, 45 bp, Homo sapiens; identical to SEQ ID NO: 15427
  source 1..45: mol_type = genomic DNA

SEQ ID NO: 47933 - DNA, 16 bp, Homo sapiens
  source 1..16: mol_type = genomic DNA
gactttttctctgacc

SEQ ID NO: 47934 - DNA, 17 bp, Homo sapiens
  source 1..17: mol_type = genomic DNA
gactttttctctgacca

SEQ ID NO: 47935 - DNA, 18 bp, Homo sapiens
  source 1..18: mol_type = genomic DNA
gagaaagctcacaagaac

SEQ ID NO: 47936 - DNA, 19 bp, Homo sapiens
  source 1..19: mol_type = genomic DNA
gagaaagctcacaagaact

SEQ ID NO: 47937 - DNA, 20 bp, Homo sapiens
  source 1..20: mol_type = genomic DNA
gagaaagctcacaagaactg

SEQ ID NO: 47938 - DNA, 21 bp, Homo sapiens
  source 1..21: mol_type = genomic DNA
gagaaagctcacaagaactgc

SEQ ID NO: 47939 - DNA, 22 bp, Homo sapiens
  source 1..22: mol_type = genomic DNA
gagaaagctcacaagaactgct

SEQ ID NO: 47940 - DNA, 23 bp, Homo sapiens
  source 1..23: mol_type = genomic DNA
gagaaagctcacaagaactgcta

SEQ ID NO: 47941 - DNA, 25 bp, Homo sapiens
  source 1..25: mol_type = genomic DNA
gagaaagctcacaagaactgctaac

SEQ ID NO: 47942 - DNA, 26 bp, Homo sapiens
  source 1..26: mol_type = genomic DNA
gagaaagctcacaagaactgctaact

SEQ ID NO: 47943 - DNA, 27 bp, Homo sapiens
  source 1..27: mol_type = genomic DNA
gagaaagctcacaagaactgctaactc

SEQ ID NO: 47944 - DNA, 28 bp, Homo sapiens
  source 1..28: mol_type = genomic DNA
gagaaagctcacaagaactgctaactca

SEQ ID NO: 47945 - DNA, 32 bp, Homo sapiens; identical to SEQ ID NO: 15487
  source 1..32: mol_type = genomic DNA

SEQ ID NO: 47946 - DNA, 33 bp, Homo sapiens; identical to SEQ ID NO: 15488
  source 1..33: mol_type = genomic DNA

SEQ ID NO: 47947 - DNA, 34 bp, Homo sapiens; identical to SEQ ID NO: 15489
  source 1..34: mol_type = genomic DNA

SEQ ID NO: 47948 - DNA, 35 bp, Homo sapiens; identical to SEQ ID NO: 15490
  source 1..35: mol_type = genomic DNA

SEQ ID NO: 47949 - DNA, 38 bp, Homo sapiens; identical to SEQ ID NO: 15493
  source 1..38: mol_type = genomic DNA

SEQ ID NO: 47950 - DNA, 41 bp, Homo sapiens; identical to SEQ ID NO: 15496
  source 1..41: mol_type = genomic DNA

SEQ ID NO: 47951 - DNA, 44 bp, Homo sapiens; identical to SEQ ID NO: 15499
  source 1..44: mol_type = genomic DNA

SEQ ID NO: 47952 - DNA, 45 bp, Homo sapiens; identical to SEQ ID NO: 15500
  source 1..45: mol_type = genomic DNA

SEQ ID NO: 47953 - DNA, 26 bp, Homo sapiens
  source 1..26: mol_type = genomic DNA
gagaaccaacacctctttacagtgac

SEQ ID NO: 47954 - DNA, 31 bp, Homo sapiens; identical to SEQ ID NO: 15532
  source 1..31: mol_type = genomic DNA

SEQ ID NO: 47955 - DNA, 32 bp, Homo sapiens; identical to SEQ ID NO: 15533
  source 1..32: mol_type = genomic DNA

SEQ ID NO: 47956 - DNA, 17 bp, Homo sapiens
  source 1..17: mol_type = genomic DNA
gagaccggggttcgatt

SEQ ID NO: 47957 - DNA, 18 bp, Homo sapiens
  source 1..18: mol_type = genomic DNA
gagaccggggttcgattc

SEQ ID NO: 47958 - DNA, 23 bp, Homo sapiens
  source 1..23: mol_type = genomic DNA
gagaccggggttcgattccccga

SEQ ID NO: 47959 - DNA, 24 bp, Homo sapiens
  source 1..24: mol_type = genomic DNA
gagaccggggttcgattccccgac

SEQ ID NO: 47960 - DNA, 27 bp, Homo sapiens
  source 1..27: mol_type = genomic DNA
gagaccggggttcgattccccgacggg

SEQ ID NO: 47961 - DNA, 29 bp, Homo sapiens
  source 1..29: mol_type = genomic DNA
gagaccggggttcgattccccgacgggga

SEQ ID NO: 47962 - DNA, 30 bp, Homo sapiens; identical to SEQ ID NO: 15542
  source 1..30: mol_type = genomic DNA

SEQ ID NO: 47963 - DNA, 31 bp, Homo sapiens; identical to SEQ ID NO: 15543
  source 1..31: mol_type = genomic DNA

SEQ ID NO: 47964 - DNA, 32 bp, Homo sapiens; identical to SEQ ID NO: 15544
  source 1..32: mol_type = genomic DNA

SEQ ID NO: 47965 - DNA, 33 bp, Homo sapiens; identical to SEQ ID NO: 15545
  source 1..33: mol_type = genomic DNA

SEQ ID NO: 47966 - DNA, 16 bp, Homo sapiens
  source 1..16: mol_type = genomic DNA
gagagcattagactga

SEQ ID NO: 47967 - DNA, 16 bp, Homo sapiens
  source 1..16: mol_type = genomic DNA
gagagcgttagactga

SEQ ID NO: 47968 - DNA, 16 bp, Homo sapiens
  source 1..16: mol_type = genomic DNA
gagaggtcccgggttc

SEQ ID NO: 47969 - DNA, 34 bp, Homo sapiens; identical to SEQ ID NO: 15557
  source 1..34: mol_type = genomic DNA

SEQ ID NO: 47970 - DNA, 29 bp, Homo sapiens
  source 1..29: mol_type = genomic DNA
gagatcctgggttcgaatcccagcggggc

SEQ ID NO: 47971 - DNA, 24 bp, Homo sapiens
  source 1..24: mol_type = genomic DNA
gagatgaaaacctttttccaagga

SEQ ID NO: 47972 - DNA, 25 bp, Homo sapiens
  source 1..25: mol_type = genomic DNA
gagatgaaaacctttttccaaggac

SEQ ID NO: 47973 - DNA, 26 bp, Homo sapiens
  source 1..26: mol_type = genomic DNA
gagatgaaaacctttttccaaggaca

SEQ ID NO: 47974 - DNA, 27 bp, Homo sapiens
  source 1..27: mol_type = genomic DNA
gagatgaaaacctttttccaaggacac

SEQ ID NO: 47975 - DNA, 28 bp, Homo sapiens
  source 1..28: mol_type = genomic DNA
gagatgaaaacctttttccaaggacacc

SEQ ID NO: 47976 - DNA, 29 bp, Homo sapiens
  source 1..29: mol_type = genomic DNA
gagatgaaaacctttttccaaggacacca

SEQ ID NO: 47977 - DNA, 26 bp, Homo sapiens
  source 1..26: mol_type = genomic DNA
gagatttcaacttaacttgaccgctc

SEQ ID NO: 47978 - DNA, 28 bp, Homo sapiens
  source 1..28: mol_type = genomic DNA
gagatttcaacttaacttgaccgctctg

SEQ ID NO: 47979 - DNA, 29 bp, Homo sapiens
  source 1..29: mol_type = genomic DNA
gagatttcaacttaacttgaccgctctga

SEQ ID NO: 47980 - DNA, 30 bp, Homo sapiens; identical to SEQ ID NO: 15583
  source 1..30: mol_type = genomic DNA

SEQ ID NO: 47981 - DNA, 31 bp, Homo sapiens; identical to SEQ ID NO: 15584
  source 1..31: mol_type = genomic DNA

SEQ ID NO: 47982 - DNA, 32 bp, Homo sapiens; identical to SEQ ID NO: 15585
  source 1..32: mol_type = genomic DNA

SEQ ID NO: 47983 - DNA, 20 bp, Homo sapiens
  source 1..20: mol_type = genomic DNA
gagcatgggactcttaatcc

SEQ ID NO: 47984 - DNA, 36 bp, Homo sapiens; identical to SEQ ID NO: 15610
  source 1..36: mol_type = genomic DNA

SEQ ID NO: 47985 - DNA, 18 bp, Homo sapiens
  source 1..18: mol_type = genomic DNA
gagccccagtggaaccac

SEQ ID NO: 47986 - DNA, 19 bp, Homo sapiens
  source 1..19: mol_type = genomic DNA
gagccccagtggaaccacc

SEQ ID NO: 47987 - DNA, 20 bp, Homo sapiens
  source 1..20: mol_type = genomic DNA
gagccccagtggaaccacca

SEQ ID NO: 47988 - DNA, 45 bp, Homo sapiens
  source 1..45: mol_type = genomic DNA
gagcccggtaatcgcataaaacttaaaactttacagtcagaggtt

SEQ ID NO: 47989 - DNA, 18 bp, Homo sapiens
  source 1..18: mol_type = genomic DNA
gagcggtctaaggcgctg

SEQ ID NO: 47990 - DNA, 18 bp, Homo sapiens
  source 1..18: mol_type = genomic DNA
gagctggggattgtgggt

SEQ ID NO: 47991 - DNA, 39 bp, Homo sapiens; identical to SEQ ID NO: 15644
  source 1..39: mol_type = genomic DNA

SEQ ID NO: 47992 - DNA, 16 bp, Homo sapiens
  source 1..16: mol_type = genomic DNA
gagcttaaaccccctt

SEQ ID NO: 47993 - DNA, 25 bp, Homo sapiens
  source 1..25: mol_type = genomic DNA
gagcttaaacccccttatttctacc

SEQ ID NO: 47994 - DNA, 26 bp, Homo sapiens
  source 1..26: mol_type = genomic DNA
gagcttaaacccccttatttctacca

SEQ ID NO: 47995 - DNA, 34 bp, Homo sapiens; identical to SEQ ID NO: 15658
  source 1..34: mol_type = genomic DNA

SEQ ID NO: 47996 - DNA, 34 bp, Homo sapiens; identical to SEQ ID NO: 15662
  source 1..34: mol_type = genomic DNA

SEQ ID NO: 47997 - DNA, 26 bp, Homo sapiens
  source 1..26: mol_type = genomic DNA
gaggcttacgaccccttatttacccc

SEQ ID NO: 47998 - DNA, 31 bp, Homo sapiens; identical to SEQ ID NO: 15682
  source 1..31: mol_type = genomic DNA

SEQ ID NO: 47999 - DNA, 32 bp, Homo sapiens; identical to SEQ ID NO: 15683
  source 1..32: mol_type = genomic DNA

SEQ ID NO: 48000 - DNA, 33 bp, Homo sapiens; identical to SEQ ID NO: 15684
  source 1..33: mol_type = genomic DNA

SEQ ID NO: 48001 - DNA, 34 bp, Homo sapiens; identical to SEQ ID NO: 15685
  source 1..34: mol_type = genomic DNA

SEQ ID NO: 48002 - DNA, 27 bp, Homo sapiens
  source 1..27: mol_type = genomic DNA
gagggttcgagtcccttcgtggtcgcc

SEQ ID NO: 48003 - DNA, 19 bp, Homo sapiens
  source 1..19: mol_type = genomic DNA
gaggtcgatggatcgaaac

SEQ ID NO: 48004 - DNA, 20 bp, Homo sapiens
  source 1..20: mol_type = genomic DNA
gaggtcgatggatcgaaacc

SEQ ID NO: 48005 - DNA, 20 bp, Homo sapiens
  source 1..20: mol_type = genomic DNA
gaggttgtgagttcgagcct

SEQ ID NO: 48006 - DNA, 18 bp, Homo sapiens
  source 1..18: mol_type = genomic DNA
gagtcccggcggagtcgc

SEQ ID NO: 48007 - DNA, 20 bp, Homo sapiens
  source 1..20: mol_type = genomic DNA
gagtctcggtggaacctcca

SEQ ID NO: 48008 - DNA, 16 bp, Homo sapiens
  source 1..16: mol_type = genomic DNA
gagtgaagcattggac

SEQ ID NO: 48009 - DNA, 17 bp, Homo sapiens
  source 1..17: mol_type = genomic DNA
gagtgaagcattggact

SEQ ID NO: 48010 - DNA, 19 bp, Homo sapiens
  source 1..19: mol_type = genomic DNA
gagtgaagcattggactgt

SEQ ID NO: 48011 - DNA, 20 bp, Homo sapiens
  source 1..20: mol_type = genomic DNA
gagtgaagcattggactgta

SEQ ID NO: 48012 - DNA, 24 bp, Homo sapiens
  source 1..24: mol_type = genomic DNA
gagtgaagcattggactgtaaatc

SEQ ID NO: 48013 - DNA, 43 bp, Homo sapiens; identical to SEQ ID NO: 15764
  source 1..43: mol_type = genomic DNA

SEQ ID NO: 48014 - DNA, 45 bp, Homo sapiens; identical to SEQ ID NO: 15766
  source 1..45: mol_type = genomic DNA

SEQ ID NO: 48015 - DNA, 26 bp, Homo sapiens
  source 1..26: mol_type = genomic DNA
gagtggcgcagcggaagcgtgctggg

SEQ ID NO: 48016 - DNA, 27 bp, Homo sapiens
  source 1..27: mol_type = genomic DNA
gagtggcgcagcggaagcgtgctgggc

SEQ ID NO: 48017 - DNA, 29 bp, Homo sapiens
  source 1..29: mol_type = genomic DNA
gagtggcgcagcggaagcgtgctgggccc

SEQ ID NO: 48018 - DNA, 35 bp, Homo sapiens; identical to SEQ ID NO: 15776
  source 1..35: mol_type = genomic DNA

SEQ ID NO: 48019 - DNA, 18 bp, Homo sapiens
  source 1..18: mol_type = genomic DNA
gagtggggttttgcagtc

SEQ ID NO: 48020 - DNA, 24 bp, Homo sapiens
  source 1..24: mol_type = genomic DNA
gagtggggttttgcagtccttacc

SEQ ID NO: 48021 - DNA, 20 bp, Homo sapiens
  source 1..20: mol_type = genomic DNA
gagtggttaaggcattggac

SEQ ID NO: 48022 - DNA, 24 bp, Homo sapiens
  source 1..24: mol_type = genomic DNA
gagttaaagactttttctctgacc

SEQ ID NO: 48023 - DNA, 25 bp, Homo sapiens
  source 1..25: mol_type = genomic DNA
gagttaaagactttttctctgacca

SEQ ID NO: 48024 - DNA, 24 bp, Homo sapiens
  source 1..24: mol_type = genomic DNA
gagttcaaatctcgctggggcctc

SEQ ID NO: 48025 - DNA, 23 bp, Homo sapiens
  source 1..23: mol_type = genomic DNA
gagttcaaatctcggtggaacct

SEQ ID NO: 48026 - DNA, 24 bp, Homo sapiens
  source 1..24: mol_type = genomic DNA
gagttcaaatctcggtggaacctc

SEQ ID NO: 48027 - DNA, 26 bp, Homo sapiens
  source 1..26: mol_type = genomic DNA
gagttcaaatctcggtggaacctcca

SEQ ID NO: 48028 - DNA, 23 bp, Homo sapiens
  source 1..23: mol_type = genomic DNA
gagttcaaatctcggtgggacct

SEQ ID NO: 48029 - DNA, 24 bp, Homo sapiens
  source 1..24: mol_type = genomic DNA
gagttcaaatctcggtgggacctc

SEQ ID NO: 48030 - DNA, 39 bp, Homo sapiens; identical to SEQ ID NO: 15835
  source 1..39: mol_type = genomic DNA

SEQ ID NO: 48031 - DNA, 46 bp, Homo sapiens; identical to SEQ ID NO: 37037
  source 1..46: mol_type = genomic DNA

SEQ ID NO: 48032 - DNA, 16 bp, Homo sapiens
  source 1..16: mol_type = genomic DNA
gataacgcgtctgact

SEQ ID NO: 48033 - DNA, 17 bp, Homo sapiens
  source 1..17: mol_type = genomic DNA
gatagctcagtcggtag

SEQ ID NO: 48034 - DNA, 18 bp, Homo sapiens
  source 1..18: mol_type = genomic DNA
gatagctcagtcggtaga

SEQ ID NO: 48035 - DNA, 19 bp, Homo sapiens
  source 1..19: mol_type = genomic DNA
gatagctcagtcggtagag

SEQ ID NO: 48036 - DNA, 22 bp, Homo sapiens
  source 1..22: mol_type = genomic DNA
gatagctcagtcggtagagcat

SEQ ID NO: 48037 - DNA, 27 bp, Homo sapiens
  source 1..27: mol_type = genomic DNA
gatagctcagtcggtagagcatcagac

SEQ ID NO: 48038 - DNA, 18 bp, Homo sapiens
  source 1..18: mol_type = genomic DNA
gataggtggcacggagaa

SEQ ID NO: 48039 - DNA, 38 bp, Homo sapiens; identical to SEQ ID NO: 15923
  source 1..38: mol_type = genomic DNA

SEQ ID NO: 48040 - DNA, 39 bp, Homo sapiens; identical to SEQ ID NO: 15924
  source 1..39: mol_type = genomic DNA

SEQ ID NO: 48041 - DNA, 20 bp, Homo sapiens
  source 1..20: mol_type = genomic DNA
gatcagaaggctgcgtgttc

SEQ ID NO: 48042 - DNA, 32 bp, Homo sapiens
  source 1..32: mol_type = genomic DNA
gatcagaaggctgcgtgttcgaatcacgtcgg

SEQ ID NO: 48043 - DNA, 36 bp, Homo sapiens; identical to SEQ ID NO: 15935
  source 1..36: mol_type = genomic DNA

SEQ ID NO: 48044 - DNA, 37 bp, Homo sapiens
  source 1..37: mol_type = genomic DNA
gatcagaaggctgcgtgttcgaatcacgtcggggtca

SEQ ID NO: 48045 - DNA, 38 bp, Homo sapiens; identical to SEQ ID NO: 15936
  source 1..38: mol_type = genomic DNA

SEQ ID NO: 48046 - DNA, 39 bp, Homo sapiens; identical to SEQ ID NO: 15937
  source 1..39: mol_type = genomic DNA

SEQ ID NO: 48047 - DNA, 36 bp, Homo sapiens; identical to SEQ ID NO: 15942
  source 1..36: mol_type = genomic DNA

SEQ ID NO: 48048 - DNA, 36 bp, Homo sapiens; identical to SEQ ID NO: 15949
  source 1..36: mol_type = genomic DNA

SEQ ID NO: 48049 - DNA, 39 bp, Homo sapiens; identical to SEQ ID NO: 15952
  source 1..39: mol_type = genomic DNA

SEQ ID NO: 48050 - DNA, 19 bp, Homo sapiens
  source 1..19: mol_type = genomic DNA
gatccccggcatctccacc

SEQ ID NO: 48051 - DNA, 20 bp, Homo sapiens
  source 1..20: mol_type = genomic DNA
gatccccggcatctccacca

SEQ ID NO: 48052 - DNA, 17 bp, Homo sapiens
  source 1..17: mol_type = genomic DNA
gatccccgtacgggcca

SEQ ID NO: 48053 - DNA, 19 bp, Homo sapiens
  source 1..19: mol_type = genomic DNA
gatccccgtacgggccacc

SEQ ID NO: 48054 - DNA, 20 bp, Homo sapiens
  source 1..20: mol_type = genomic DNA
gatccccgtacgggccacca

SEQ ID NO: 48055 - DNA, 19 bp, Homo sapiens
  source 1..19: mol_type = genomic DNA
gatcccgggcggaaacacc

SEQ ID NO: 48056 - DNA, 18 bp, Homo sapiens
  source 1..18: mol_type = genomic DNA
gatcccgggtttcggcac

SEQ ID NO: 48057 - DNA, 19 bp, Homo sapiens
  source 1..19: mol_type = genomic DNA
gatcccgggtttcggcacc

SEQ ID NO: 48058 - DNA, 20 bp, Homo sapiens
  source 1..20: mol_type = genomic DNA
gatcccgggtttcggcacca

SEQ ID NO: 48059 - DNA, 26 bp, Homo sapiens
  source 1..26: mol_type = genomic DNA
gatccgagttcaaatctcggtgggac

SEQ ID NO: 48060 - DNA, 29 bp, Homo sapiens
  source 1..29: mol_type = genomic DNA
gatccgagttcaaatctcggtgggacctc

SEQ ID NO: 48061 - DNA, 19 bp, Homo sapiens
  source 1..19: mol_type = genomic DNA
gatcctcacctggagcacc

SEQ ID NO: 48062 - DNA, 31 bp, Homo sapiens; identical to SEQ ID NO: 15971
  source 1..31: mol_type = genomic DNA

SEQ ID NO: 48063 - DNA, 23 bp, Homo sapiens
  source 1..23: mol_type = genomic DNA
gatcgaaaccatcctctgctacc

SEQ ID NO: 48064 - DNA, 24 bp, Homo sapiens
  source 1..24: mol_type = genomic DNA
gatcgaaaccatcctctgctacca

SEQ ID NO: 48065 - DNA, 28 bp, Homo sapiens
  source 1..28: mol_type = genomic DNA
gatcgtatagtggttagtactctgcgtt

SEQ ID NO: 48066 - DNA, 22 bp, Homo sapiens
  source 1..22: mol_type = genomic DNA
gatgaaaacctttttccaagga

SEQ ID NO: 48067 - DNA, 23 bp, Homo sapiens
  source 1..23: mol_type = genomic DNA
gatgaaaacctttttccaaggac

SEQ ID NO: 48068 - DNA, 24 bp, Homo sapiens
  source 1..24: mol_type = genomic DNA
gatgaaaacctttttccaaggaca

SEQ ID NO: 48069 - DNA, 25 bp, Homo sapiens
  source 1..25: mol_type = genomic DNA
gatgaaaacctttttccaaggacac

SEQ ID NO: 48070 - DNA, 26 bp, Homo sapiens
  source 1..26: mol_type = genomic DNA
gatgaaaacctttttccaaggacacc

SEQ ID NO: 48071 - DNA, 27 bp, Homo sapiens
  source 1..27: mol_type = genomic DNA
gatgaaaacctttttccaaggacacca

SEQ ID NO: 48072 - DNA, 16 bp, Homo sapiens
  source 1..16: mol_type = genomic DNA
gatggccgagcggtct

SEQ ID NO: 48073 - DNA, 19 bp, Homo sapiens
  source 1..19: mol_type = genomic DNA
gatggccgagcggtctaag

SEQ ID NO: 48074 - DNA, 21 bp, Homo sapiens
  source 1..21: mol_type = genomic DNA
gatggccgagcggtctaaggc

SEQ ID NO: 48075 - DNA, 33 bp, Homo sapiens; identical to SEQ ID NO: 16040
  source 1..33: mol_type = genomic DNA

SEQ ID NO: 48076 - DNA, 26 bp, Homo sapiens
  source 1..26: mol_type = genomic DNA
gatgggttcgattctcatagtcctag

SEQ ID NO: 48077 - DNA, 31 bp, Homo sapiens; identical to SEQ ID NO: 16054
  source 1..31: mol_type = genomic DNA

SEQ ID NO: 48078 - DNA, 32 bp, Homo sapiens; identical to SEQ ID NO: 16055
  source 1..32: mol_type = genomic DNA

SEQ ID NO: 48079 - DNA, 35 bp, Homo sapiens; identical to SEQ ID NO: 16058
  source 1..35: mol_type = genomic DNA

SEQ ID NO: 48080 - DNA, 40 bp, Homo sapiens; identical to SEQ ID NO: 16063
  source 1..40: mol_type = genomic DNA

SEQ ID NO: 48081 - DNA, 43 bp, Homo sapiens; identical to SEQ ID NO: 16066
  source 1..43: mol_type = genomic DNA

SEQ ID NO: 48082 - DNA, 44 bp, Homo sapiens; identical to SEQ ID NO: 16067
  source 1..44: mol_type = genomic DNA

SEQ ID NO: 48083 - DNA, 45 bp, Homo sapiens; identical to SEQ ID NO: 16068
  source 1..45: mol_type = genomic DNA

SEQ ID NO: 48084 - DNA, 46 bp, Homo sapiens; identical to SEQ ID NO: 16069
  source 1..46: mol_type = genomic DNA

SEQ ID NO: 48085 - DNA, 47 bp, Homo sapiens; identical to SEQ ID NO: 16070
  source 1..47: mol_type = genomic DNA

SEQ ID NO: 48086 - DNA, 32 bp, Homo sapiens; identical to SEQ ID NO: 16090
  source 1..32: mol_type = genomic DNA

SEQ ID NO: 48087 - DNA, 21 bp, Homo sapiens
  source 1..21: mol_type = genomic DNA
gattcccattcttgcgacccg

SEQ ID NO: 48088 - DNA, 22 bp, Homo sapiens
  source 1..22: mol_type = genomic DNA
gattcccattcttgcgacccgg

SEQ ID NO: 48089 - DNA, 24 bp, Homo sapiens
  source 1..24: mol_type = genomic DNA
gattcccattcttgcgacccgggt

SEQ ID NO: 48090 - DNA, 45 bp, Homo sapiens; identical to SEQ ID NO: 16116
  source 1..45: mol_type = genomic DNA

SEQ ID NO: 48091 - DNA, 17 bp, Homo sapiens
  source 1..17: mol_type = genomic DNA
gattccccgacggggag

SEQ ID NO: 48092 - DNA, 18 bp, Homo sapiens
  source 1..18: mol_type = genomic DNA
gattccccgacggggagc

SEQ ID NO: 48093 - DNA, 19 bp, Homo sapiens
  source 1..19: mol_type = genomic DNA
gattccccgacggggagcc

SEQ ID NO: 48094 - DNA, 20 bp, Homo sapiens
  source 1..20: mol_type = genomic DNA
gattccccgacggggagcca

SEQ ID NO: 48095 - DNA, 19 bp, Homo sapiens
  source 1..19: mol_type = genomic DNA
gattcccggccaacgcacc

SEQ ID NO: 48096 - DNA, 20 bp, Homo sapiens
  source 1..20: mol_type = genomic DNA
gattcccggccaacgcacca

SEQ ID NO: 48097 - DNA, 18 bp, Homo sapiens
  source 1..18: mol_type = genomic DNA
gattcccggccaatgcac

SEQ ID NO: 48098 - DNA, 19 bp, Homo sapiens
  source 1..19: mol_type = genomic DNA
gattcccggccaatgcacc

SEQ ID NO: 48099 - DNA, 20 bp, Homo sapiens
  source 1..20: mol_type = genomic DNA
gattcccggccaatgcacca

SEQ ID NO: 48100 - DNA, 20 bp, Homo sapiens
  source 1..20: mol_type = genomic DNA
gattcccggcccatgcacca

SEQ ID NO: 48101 - DNA, 16 bp, Homo sapiens
  source 1..16: mol_type = genomic DNA
gattcccgggcggcgc

SEQ ID NO: 48102 - DNA, 18 bp, Homo sapiens
  source 1..18: mol_type = genomic DNA
gattcccgggcggcgcac

SEQ ID NO: 48103 - DNA, 19 bp, Homo sapiens
  source 1..19: mol_type = genomic DNA
gattcccgggcggcgcacc

SEQ ID NO: 48104 - DNA, 16 bp, Homo sapiens
  source 1..16: mol_type = genomic DNA
gattcccggtcaggga

SEQ ID NO: 48105 - DNA, 17 bp, Homo sapiens
  source 1..17: mol_type = genomic DNA
gattcccggtcagggaa

SEQ ID NO: 48106 - DNA, 18 bp, Homo sapiens
  source 1..18: mol_type = genomic DNA
gattcccggtcagggaac

SEQ ID NO: 48107 - DNA, 19 bp, Homo sapiens
  source 1..19: mol_type = genomic DNA
gattcccggtcagggaacc

SEQ ID NO: 48108 - DNA, 18 bp, Homo sapiens
  source 1..18: mol_type = genomic DNA
gattccggctcgaaggac

SEQ ID NO: 48109 - DNA, 19 bp, Homo sapiens
  source 1..19: mol_type = genomic DNA
gattccggctcgaaggacc

SEQ ID NO: 48110 - DNA, 20 bp, Homo sapiens
  source 1..20: mol_type = genomic DNA
gattccggctcgaaggacca

SEQ ID NO: 48111 - DNA, 17 bp, Homo sapiens
  source 1..17: mol_type = genomic DNA
gattcggcgctctcacc

SEQ ID NO: 48112 - DNA, 20 bp, Homo sapiens
  source 1..20: mol_type = genomic DNA
gattcggcgctctcaccgcc

SEQ ID NO: 48113 - DNA, 27 bp, Homo sapiens
  source 1..27: mol_type = genomic DNA
gattcggcgctctcaccgccgcggccc

SEQ ID NO: 48114 - DNA, 28 bp, Homo sapiens
  source 1..28: mol_type = genomic DNA
gattcggcgctctcaccgccgcggcccg

SEQ ID NO: 48115 - DNA, 29 bp, Homo sapiens
  source 1..29: mol_type = genomic DNA
gattctaggttcgactcctggctggctcg

SEQ ID NO: 48116 - DNA, 31 bp, Homo sapiens; identical to SEQ ID NO: 16171
  source 1..31: mol_type = genomic DNA

SEQ ID NO: 48117 - DNA, 18 bp, Homo sapiens
  source 1..18: mol_type = genomic DNA
gattctcatagtcctagc

SEQ ID NO: 48118 - DNA, 30 bp, Homo sapiens; identical to SEQ ID NO: 16191
  source 1..30: mol_type = genomic DNA

SEQ ID NO: 48119 - DNA, 31 bp, Homo sapiens; identical to SEQ ID NO: 16192
  source 1..31: mol_type = genomic DNA

SEQ ID NO: 48120 - DNA, 32 bp, Homo sapiens; identical to SEQ ID NO: 16193
  source 1..32: mol_type = genomic DNA

SEQ ID NO: 48121 - DNA, 20 bp, Homo sapiens
  source 1..20: mol_type = genomic DNA
gattgcaggttcgagtcctg

SEQ ID NO: 48122 - DNA, 30 bp, Homo sapiens; identical to SEQ ID NO: 16195
  source 1..30: mol_type = genomic DNA

SEQ ID NO: 48123 - DNA, 31 bp, Homo sapiens; identical to SEQ ID NO: 16196
  source 1..31: mol_type = genomic DNA

SEQ ID NO: 48124 - DNA, 32 bp, Homo sapiens; identical to SEQ ID NO: 16197
  source 1..32: mol_type = genomic DNA

SEQ ID NO: 48125 - DNA, 33 bp, Homo sapiens; identical to SEQ ID NO: 16215
  source 1..33: mol_type = genomic DNA

SEQ ID NO: 48126 - DNA, 34 bp, Homo sapiens; identical to SEQ ID NO: 16216
  source 1..34: mol_type = genomic DNA

SEQ ID NO: 48127 - DNA, 35 bp, Homo sapiens; identical to SEQ ID NO: 16217
  source 1..35: mol_type = genomic DNA

SEQ ID NO: 48128 - DNA, 43 bp, Homo sapiens; identical to SEQ ID NO: 16225
  source 1..43: mol_type = genomic DNA

SEQ ID NO: 48129 - DNA, 44 bp, Homo sapiens; identical to SEQ ID NO: 16226
  source 1..44: mol_type = genomic DNA

SEQ ID NO: 48130 - DNA, 45 bp, Homo sapiens; identical to SEQ ID NO: 16227
  source 1..45: mol_type = genomic DNA

SEQ ID NO: 48131 - DNA, 46 bp, Homo sapiens; identical to SEQ ID NO: 16228
  source 1..46: mol_type = genomic DNA

SEQ ID NO: 48132 - DNA, 29 bp, Homo sapiens
  source 1..29: mol_type = genomic DNA
gattgtgggttcgagtcccatctgggtcg

SEQ ID NO: 48133 - DNA, 30 bp, Homo sapiens; identical to SEQ ID NO: 16237
  source 1..30: mol_type = genomic DNA

SEQ ID NO: 48134 - DNA, 31 bp, Homo sapiens; identical to SEQ ID NO: 16238
  source 1..31: mol_type = genomic DNA

SEQ ID NO: 48135 - DNA, 17 bp, Homo sapiens
  source 1..17: mol_type = genomic DNA
gatttcaacttaacttg

SEQ ID NO: 48136 - DNA, 24 bp, Homo sapiens
  source 1..24: mol_type = genomic DNA
gatttcaacttaacttgaccgctc

SEQ ID NO: 48137 - DNA, 26 bp, Homo sapiens
  source 1..26: mol_type = genomic DNA
gatttcaacttaacttgaccgctctg

SEQ ID NO: 48138 - DNA, 27 bp, Homo sapiens
  source 1..27: mol_type = genomic DNA
gatttcaacttaacttgaccgctctga

SEQ ID NO: 48139 - DNA, 28 bp, Homo sapiens
  source 1..28: mol_type = genomic DNA
gatttcaacttaacttgaccgctctgac

SEQ ID NO: 48140 - DNA, 29 bp, Homo sapiens
  source 1..29: mol_type = genomic DNA
gatttcaacttaacttgaccgctctgacc

SEQ ID NO: 48141 - DNA, 30 bp, Homo sapiens; identical to SEQ ID NO: 16253
  source 1..30: mol_type = genomic DNA

SEQ ID NO: 48142 - DNA, 35 bp, Homo sapiens
  source 1..35: mol_type = genomic DNA
gcaaattcgaagaagcagcttcaaacctgccgggg

SEQ ID NO: 48143 - DNA, 36 bp, Homo sapiens; identical to SEQ ID NO: 16289
  source 1..36: mol_type = genomic DNA

SEQ ID NO: 48144 - DNA, 37 bp, Homo sapiens; identical to SEQ ID NO: 16290
  source 1..37: mol_type = genomic DNA

SEQ ID NO: 48145 - DNA, 38 bp, Homo sapiens; identical to SEQ ID NO: 16291
  source 1..38: mol_type = genomic DNA

SEQ ID NO: 48146 - DNA, 29 bp, Homo sapiens
  source 1..29: mol_type = genomic DNA
gcaacctcggttcgaatccgagtcacggc

SEQ ID NO: 48147 - DNA, 33 bp, Homo sapiens; identical to SEQ ID NO: 16314
  source 1..33: mol_type = genomic DNA

SEQ ID NO: 48148 - DNA, 41 bp, Homo sapiens; identical to SEQ ID NO: 16317
  source 1..41: mol_type = genomic DNA

SEQ ID NO: 48149 - DNA, 22 bp, Homo sapiens
  source 1..22: mol_type = genomic DNA
gcaatggataacgcgtctgact

SEQ ID NO: 48150 - DNA, 18 bp, Homo sapiens
  source 1..18: mol_type = genomic DNA
gcaatggatagcgcattg

SEQ ID NO: 48151 - DNA, 19 bp, Homo sapiens
  source 1..19: mol_type = genomic DNA
gcaatggatagcgcattgg

SEQ ID NO: 48152 - DNA, 20 bp, Homo sapiens
  source 1..20: mol_type = genomic DNA
gcaatggatagcgcattgga

SEQ ID NO: 48153 - DNA, 21 bp, Homo sapiens
  source 1..21: mol_type = genomic DNA
gcaatggatagcgcattggac

SEQ ID NO: 48154 - DNA, 22 bp, Homo sapiens
  source 1..22: mol_type = genomic DNA
gcaatggatagcgcattggact

SEQ ID NO: 48155 - DNA, 24 bp, Homo sapiens
  source 1..24: mol_type = genomic DNA
gcaatggatagcgcattggacttc

SEQ ID NO: 48156 - DNA, 42 bp, Homo sapiens
  source 1..42: mol_type = genomic DNA
gcaatggatagcgcattggacttctaattcaaaggttccggg

SEQ ID NO: 48157 - DNA, 44 bp, Homo sapiens; identical to SEQ ID NO: 37202
  source 1..44: mol_type = genomic DNA

SEQ ID NO: 48158 - DNA, 18 bp, Homo sapiens
  source 1..18: mol_type = genomic DNA
gcaatggtggttcagtgg

SEQ ID NO: 48159 - DNA, 29 bp, Homo sapiens
  source 1..29: mol_type = genomic DNA
gcaatggtggttcagtggtagaattctcg

SEQ ID NO: 48160 - DNA, 30 bp, Homo sapiens; identical to SEQ ID NO: 16339
  source 1..30: mol_type = genomic DNA

SEQ ID NO: 48161 - DNA, 31 bp, Homo sapiens; identical to SEQ ID NO: 16340
  source 1..31: mol_type = genomic DNA

SEQ ID NO: 48162 - DNA, 32 bp, Homo sapiens; identical to SEQ ID NO: 16341
  source 1..32: mol_type = genomic DNA

SEQ ID NO: 48163 - DNA, 32 bp, Homo sapiens; identical to SEQ ID NO: 16354
  source 1..32: mol_type = genomic DNA

SEQ ID NO: 48164 - DNA, 34 bp, Homo sapiens; identical to SEQ ID NO: 37214
  source 1..34: mol_type = genomic DNA

SEQ ID NO: 48165 - DNA, 35 bp, Homo sapiens; identical to SEQ ID NO: 37215
  source 1..35: mol_type = genomic DNA

SEQ ID NO: 48166 - DNA, 36 bp, Homo sapiens; identical to SEQ ID NO: 16356
  source 1..36: mol_type = genomic DNA

SEQ ID NO: 48167 - DNA, 37 bp, Homo sapiens; identical to SEQ ID NO: 16357
  source 1..37: mol_type = genomic DNA

SEQ ID NO: 48168 - DNA, 38 bp, Homo sapiens; identical to SEQ ID NO: 16358
  source 1..38: mol_type = genomic DNA

SEQ ID NO: 48169 - DNA, 36 bp, Homo sapiens
  source 1..36: mol_type = genomic DNA
gcacgaggtcctgggttcgatccccagtacctccac

SEQ ID NO: 48170 - DNA, 33 bp, Homo sapiens; identical to SEQ ID NO: 16361
  source 1..33: mol_type = genomic DNA

SEQ ID NO: 48171 - DNA, 16 bp, Homo sapiens
  source 1..16: mol_type = genomic DNA
gcactctggactctga

SEQ ID NO: 48172 - DNA, 17 bp, Homo sapiens
  source 1..17: mol_type = genomic DNA
gcactctggactctgaa

SEQ ID NO: 48173 - DNA, 18 bp, Homo sapiens
  source 1..18: mol_type = genomic DNA
gcactctggactctgaat

SEQ ID NO: 48174 - DNA, 19 bp, Homo sapiens
  source 1..19: mol_type = genomic DNA
gcactctggactctgaatc

SEQ ID NO: 48175 - DNA, 20 bp, Homo sapiens
  source 1..20: mol_type = genomic DNA
gcactctggactctgaatcc

SEQ ID NO: 48176 - DNA, 21 bp, Homo sapiens
  source 1..21: mol_type = genomic DNA
gcactctggactctgaatcca

SEQ ID NO: 48177 - DNA, 22 bp, Homo sapiens
  source 1..22: mol_type = genomic DNA
gcactctggactctgaatccag

SEQ ID NO: 48178 - DNA, 23 bp, Homo sapiens
  source 1..23: mol_type = genomic DNA
gcactctggactctgaatccagc

SEQ ID NO: 48179 - DNA, 24 bp, Homo sapiens
  source 1..24: mol_type = genomic DNA
gcactctggactctgaatccagcg

SEQ ID NO: 48180 - DNA, 30 bp, Homo sapiens; identical to SEQ ID NO: 16375
  source 1..30: mol_type = genomic DNA

SEQ ID NO: 48181 - DNA, 31 bp, Homo sapiens; identical to SEQ ID NO: 16376
  source 1..31: mol_type = genomic DNA

SEQ ID NO: 48182 - DNA, 32 bp, Homo sapiens; identical to SEQ ID NO: 16377
  source 1..32: mol_type = genomic DNA

SEQ ID NO: 48183 - DNA, 33 bp, Homo sapiens; identical to SEQ ID NO: 16378
  source 1..33: mol_type = genomic DNA

SEQ ID NO: 48184 - DNA, 34 bp, Homo sapiens; identical to SEQ ID NO: 16379
  source 1..34: mol_type = genomic DNA

SEQ ID NO: 48185 - DNA, 35 bp, Homo sapiens; identical to SEQ ID NO: 16380
  source 1..35: mol_type = genomic DNA

SEQ ID NO: 48186 - DNA, 43 bp, Homo sapiens; identical to SEQ ID NO: 37240
  source 1..43: mol_type = genomic DNA

SEQ ID NO: 48187 - DNA, 17 bp, Homo sapiens
  source 1..17: mol_type = genomic DNA
gcactctggactttgaa

SEQ ID NO: 48188 - DNA, 19 bp, Homo sapiens
  source 1..19: mol_type = genomic DNA
gcactctggactttgaatc

SEQ ID NO: 48189 - DNA, 20 bp, Homo sapiens
  source 1..20: mol_type = genomic DNA
gcactctggactttgaatcc

SEQ ID NO: 48190 - DNA, 18 bp, Homo sapiens
  source 1..18: mol_type = genomic DNA
gcactggtggttcagtgg

SEQ ID NO: 48191 - DNA, 29 bp, Homo sapiens
  source 1..29: mol_type = genomic DNA
gcactggtggttcagtggtagaattctcg

SEQ ID NO: 48192 - DNA, 30 bp, Homo sapiens; identical to SEQ ID NO: 16401
  source 1..30: mol_type = genomic DNA

SEQ ID NO: 48193 - DNA, 31 bp, Homo sapiens; identical to SEQ ID NO: 16402
  source 1..31: mol_type = genomic DNA

SEQ ID NO: 48194 - DNA, 32 bp, Homo sapiens; identical to SEQ ID NO: 16403
  source 1..32: mol_type = genomic DNA

SEQ ID NO: 48195 - DNA, 27 bp, Homo sapiens
  source 1..27: mol_type = genomic DNA
gcagaaggtcctgggttcgagccccag

SEQ ID NO: 48196 - DNA, 33 bp, Homo sapiens; identical to SEQ ID NO: 16414
  source 1..33: mol_type = genomic DNA

SEQ ID NO: 48197 - DNA, 34 bp, Homo sapiens; identical to SEQ ID NO: 16415
  source 1..34: mol_type = genomic DNA

SEQ ID NO: 48198 - DNA, 35 bp, Homo sapiens; identical to SEQ ID NO: 16416
  source 1..35: mol_type = genomic DNA

SEQ ID NO: 48199 - DNA, 36 bp, Homo sapiens; identical to SEQ ID NO: 16417
  source 1..36: mol_type = genomic DNA

SEQ ID NO: 48200 - DNA, 37 bp, Homo sapiens; identical to SEQ ID NO: 16418
  source 1..37: mol_type = genomic DNA

SEQ ID NO: 48201 - DNA, 38 bp, Homo sapiens; identical to SEQ ID NO: 16419
  source 1..38: mol_type = genomic DNA

SEQ ID NO: 48202 - DNA, 18 bp, Homo sapiens
  source 1..18: mol_type = genomic DNA
gcagagtggcgcagcgga

SEQ ID NO: 48203 - DNA, 27 bp, Homo sapiens
  source 1..27: mol_type = genomic DNA
gcagagtggcgcagcggaagcgtgctg

SEQ ID NO: 48204 - DNA, 30 bp, Homo sapiens; identical to SEQ ID NO: 16440
  source 1..30: mol_type = genomic DNA

SEQ ID NO: 48205 - DNA, 32 bp, Homo sapiens; identical to SEQ ID NO: 16461
  source 1..32: mol_type = genomic DNA

SEQ ID NO: 48206 - DNA, 35 bp, Homo sapiens; identical to SEQ ID NO: 16464
  source 1..35: mol_type = genomic DNA

SEQ ID NO: 48207 - DNA, 36 bp, Homo sapiens; identical to SEQ ID NO: 16465
  source 1..36: mol_type = genomic DNA

SEQ ID NO: 48208 - DNA, 16 bp, Homo sapiens
  source 1..16: mol_type = genomic DNA
gcagcgatggccgagt

SEQ ID NO: 48209 - DNA, 18 bp, Homo sapiens
  source 1..18: mol_type = genomic DNA
gcagcgatggccgagtgg

SEQ ID NO: 48210 - DNA, 19 bp, Homo sapiens
  source 1..19: mol_type = genomic DNA
gcagcgatggccgagtggt

SEQ ID NO: 48211 - DNA, 21 bp, Homo sapiens
  source 1..21: mol_type = genomic DNA
gcagcgatggccgagtggtta

SEQ ID NO: 48212 - DNA, 24 bp, Homo sapiens
  source 1..24: mol_type = genomic DNA
gcagcgatggccgagtggttaagg

SEQ ID NO: 48213 - DNA, 25 bp, Homo sapiens
  source 1..25: mol_type = genomic DNA
gcagcgatggccgagtggttaaggc

SEQ ID NO: 48214 - DNA, 19 bp, Homo sapiens
  source 1..19: mol_type = genomic DNA
gcagcggaagcgtgctggg

SEQ ID NO: 48215 - DNA, 20 bp, Homo sapiens
  source 1..20: mol_type = genomic DNA
gcagcggaagcgtgctgggc

SEQ ID NO: 48216 - DNA, 21 bp, Homo sapiens
  source 1..21: mol_type = genomic DNA
gcagcggaagcgtgctgggcc

SEQ ID NO: 48217 - DNA, 22 bp, Homo sapiens
  source 1..22: mol_type = genomic DNA
gcagcggaagcgtgctgggccc

SEQ ID NO: 48218 - DNA, 19 bp, Homo sapiens
  source 1..19: mol_type = genomic DNA
gcagtggtagaattctcgc

SEQ ID NO: 48219 - DNA, 20 bp, Homo sapiens
  source 1..20: mol_type = genomic DNA
gcagtggtagaattctcgcc

SEQ ID NO: 48220 - DNA, 21 bp, Homo sapiens
  source 1..21: mol_type = genomic DNA
gcagtggtagaattctcgcct

SEQ ID NO: 48221 - DNA, 18 bp, Homo sapiens
  source 1..18: mol_type = genomic DNA
gcataggtggttcagtgg

SEQ ID NO: 48222 - DNA, 27 bp, Homo sapiens
  source 1..27: mol_type = genomic DNA
gcatcagcctccggagctggggattgt

SEQ ID NO: 48223 - DNA, 18 bp, Homo sapiens
  source 1..18: mol_type = genomic DNA
gcatgagactcttaatct

SEQ ID NO: 48224 - DNA, 33 bp, Homo sapiens
  source 1..33: mol_type = genomic DNA
gcatgagactcttaatctcagggtcgtgggttc

SEQ ID NO: 48225 - DNA, 16 bp, Homo sapiens
  source 1..16: mol_type = genomic DNA
gcatgaggtcccgggt

SEQ ID NO: 48226 - DNA, 37 bp, Homo sapiens; identical to SEQ ID NO: 16534
  source 1..37: mol_type = genomic DNA

SEQ ID NO: 48227 - DNA, 17 bp, Homo sapiens
  source 1..17: mol_type = genomic DNA
gcatgggactcttaatc

SEQ ID NO: 48228 - DNA, 18 bp, Homo sapiens
  source 1..18: mol_type = genomic DNA
gcatgggactcttaatcc

SEQ ID NO: 48229 - DNA, 18 bp, Homo sapiens
  source 1..18: mol_type = genomic DNA
gcatgggtgattcagtgg

SEQ ID NO: 48230 - DNA, 16 bp, Homo sapiens
  source 1..16: mol_type = genomic DNA
gcatgggtggttcagt

SEQ ID NO: 48231 - DNA, 17 bp, Homo sapiens
  source 1..17: mol_type = genomic DNA
gcatgggtggttcagtg

SEQ ID NO: 48232 - DNA, 18 bp, Homo sapiens
  source 1..18: mol_type = genomic DNA
gcatgggtggttcagtgg

SEQ ID NO: 48233 - DNA, 19 bp, Homo sapiens
  source 1..19: mol_type = genomic DNA
gcatgggtggttcagtggt

SEQ ID NO: 48234 - DNA, 20 bp, Homo sapiens
  source 1..20: mol_type = genomic DNA
gcatgggtggttcagtggta

SEQ ID NO: 48235 - DNA, 21 bp, Homo sapiens
  source 1..21: mol_type = genomic DNA
gcatgggtggttcagtggtag

SEQ ID NO: 48236 - DNA, 22 bp, Homo sapiens
  source 1..22: mol_type = genomic DNA
gcatgggtggttcagtggtaga

SEQ ID NO: 48237 - DNA, 23 bp, Homo sapiens
  source 1..23: mol_type = genomic DNA
gcatgggtggttcagtggtagaa

SEQ ID NO: 48238 - DNA, 24 bp, Homo sapiens
  source 1..24: mol_type = genomic DNA
gcatgggtggttcagtggtagaat

SEQ ID NO: 48239 - DNA, 25 bp, Homo sapiens
  source 1..25: mol_type = genomic DNA
gcatgggtggttcagtggtagaatt

SEQ ID NO: 48240 - DNA, 26 bp, Homo sapiens
  source 1..26: mol_type = genomic DNA
gcatgggtggttcagtggtagaattc

SEQ ID NO: 48241 - DNA, 27 bp, Homo sapiens
  source 1..27: mol_type = genomic DNA
gcatgggtggttcagtggtagaattct

SEQ ID NO: 48242 - DNA, 28 bp, Homo sapiens
  source 1..28: mol_type = genomic DNA
gcatgggtggttcagtggtagaattctc

SEQ ID NO: 48243 - DNA, 29 bp, Homo sapiens
  source 1..29: mol_type = genomic DNA
gcatgggtggttcagtggtagaattctcg

SEQ ID NO: 48244 - DNA, 30 bp, Homo sapiens; identical to SEQ ID NO: 16559
  source 1..30: mol_type = genomic DNA

SEQ ID NO: 48245 - DNA, 31 bp, Homo sapiens; identical to SEQ ID NO: 16560
  source 1..31: mol_type = genomic DNA

SEQ ID NO: 48246 - DNA, 32 bp, Homo sapiens; identical to SEQ ID NO: 16561
  source 1..32: mol_type = genomic DNA

SEQ ID NO: 48247 - DNA, 33 bp, Homo sapiens; identical to SEQ ID NO: 16562
  source 1..33: mol_type = genomic DNA

SEQ ID NO: 48248 - DNA, 34 bp, Homo sapiens; identical to SEQ ID NO: 16563
  source 1..34: mol_type = genomic DNA

SEQ ID NO: 48249 - DNA, 35 bp, Homo sapiens; identical to SEQ ID NO: 16564
  source 1..35: mol_type = genomic DNA

SEQ ID NO: 48250 - DNA, 36 bp, Homo sapiens; identical to SEQ ID NO: 16565
  source 1..36: mol_type = genomic DNA

SEQ ID NO: 48251 - DNA, 37 bp, Homo sapiens; identical to SEQ ID NO: 16566
  source 1..37: mol_type = genomic DNA

SEQ ID NO: 48252 - DNA, 38 bp, Homo sapiens; identical to SEQ ID NO: 16567
  source 1..38: mol_type = genomic DNA

SEQ ID NO: 48253 - DNA, 40 bp, Homo sapiens; identical to SEQ ID NO: 16569
  source 1..40: mol_type = genomic DNA

SEQ ID NO: 48254 - DNA, 43 bp, Homo sapiens; identical to SEQ ID NO: 16572
  source 1..43: mol_type = genomic DNA

SEQ ID NO: 48255 - DNA, 36 bp, Homo sapiens; identical to SEQ ID NO: 16599
  source 1..36: mol_type = genomic DNA

SEQ ID NO: 48256 - DNA, 18 bp, Homo sapiens
  source 1..18: mol_type = genomic DNA
gcattggtggttcaatgg

SEQ ID NO: 48257 - DNA, 29 bp, Homo sapiens
  source 1..29: mol_type = genomic DNA
gcattggtggttcaatggtagaattctcg

SEQ ID NO: 48258 - DNA, 30 bp, Homo sapiens; identical to SEQ ID NO: 16612
  source 1..30: mol_type = genomic DNA

SEQ ID NO: 48259 - DNA, 31 bp, Homo sapiens; identical to SEQ ID NO: 16613
  source 1..31: mol_type = genomic DNA

SEQ ID NO: 48260 - DNA, 32 bp, Homo sapiens; identical to SEQ ID NO: 16614
  source 1..32: mol_type = genomic DNA

SEQ ID NO: 48261 - DNA, 16 bp, Homo sapiens
  source 1..16: mol_type = genomic DNA
gcattggtggttcagt

SEQ ID NO: 48262 - DNA, 17 bp, Homo sapiens
  source 1..17: mol_type = genomic DNA
gcattggtggttcagtg

SEQ ID NO: 48263 - DNA, 18 bp, Homo sapiens
  source 1..18: mol_type = genomic DNA
gcattggtggttcagtgg

SEQ ID NO: 48264 - DNA, 19 bp, Homo sapiens
  source 1..19: mol_type = genomic DNA
gcattggtggttcagtggt

SEQ ID NO: 48265 - DNA, 20 bp, Homo sapiens
  source 1..20: mol_type = genomic DNA
gcattggtggttcagtggta

SEQ ID NO: 48266 - DNA, 21 bp, Homo sapiens
  source 1..21: mol_type = genomic DNA
gcattggtggttcagtggtag

SEQ ID NO: 48267 - DNA, 22 bp, Homo sapiens
  source 1..22: mol_type = genomic DNA
gcattggtggttcagtggtaga

SEQ ID NO: 48268 - DNA, 23 bp, Homo sapiens
  source 1..23: mol_type = genomic DNA
gcattggtggttcagtggtagaa

SEQ ID NO: 48269 - DNA, 24 bp, Homo sapiens
  source 1..24: mol_type = genomic DNA
gcattggtggttcagtggtagaat

SEQ ID NO: 48270 - DNA, 25 bp, Homo sapiens
  source 1..25: mol_type = genomic DNA
gcattggtggttcagtggtagaatt

SEQ ID NO: 48271 - DNA, 26 bp, Homo sapiens
  source 1..26: mol_type = genomic DNA
gcattggtggttcagtggtagaattc

SEQ ID NO: 48272 - DNA, 27 bp, Homo sapiens
  source 1..27: mol_type = genomic DNA
gcattggtggttcagtggtagaattct

SEQ ID NO: 48273 - DNA, 28 bp, Homo sapiens
  source 1..28: mol_type = genomic DNA
gcattggtggttcagtggtagaattctc

SEQ ID NO: 48274 - DNA, 29 bp, Homo sapiens
  source 1..29: mol_type = genomic DNA
gcattggtggttcagtggtagaattctcg

SEQ ID NO: 48275 - DNA, 30 bp, Homo sapiens; identical to SEQ ID NO: 16630
  source 1..30: mol_type = genomic DNA

SEQ ID NO: 48276 - DNA, 31 bp, Homo sapiens; identical to SEQ ID NO: 16631
  source 1..31: mol_type = genomic DNA

SEQ ID NO: 48277 - DNA, 32 bp, Homo sapiens; identical to SEQ ID NO: 16632
  source 1..32: mol_type = genomic DNA

SEQ ID NO: 48278 - DNA, 33 bp, Homo sapiens; identical to SEQ ID NO: 16633
  source 1..33: mol_type = genomic DNA

SEQ ID NO: 48279 - DNA, 34 bp, Homo sapiens; identical to SEQ ID NO: 16634
  source 1..34: mol_type = genomic DNA

SEQ ID NO: 48280 - DNA, 35 bp, Homo sapiens; identical to SEQ ID NO: 16635
  source 1..35: mol_type = genomic DNA

SEQ ID NO: 48281 - DNA, 36 bp, Homo sapiens; identical to SEQ ID NO: 16636
  source 1..36: mol_type = genomic DNA

SEQ ID NO: 48282 - DNA, 37 bp, Homo sapiens; identical to SEQ ID NO: 16637
  source 1..37: mol_type = genomic DNA

SEQ ID NO: 48283 - DNA, 38 bp, Homo sapiens; identical to SEQ ID NO: 16638
  source 1..38: mol_type = genomic DNA

SEQ ID NO: 48284 - DNA, 33 bp, Homo sapiens; identical to SEQ ID NO: 16640
  source 1..33: mol_type = genomic DNA

SEQ ID NO: 48285 - DNA, 34 bp, Homo sapiens; identical to SEQ ID NO: 16641
  source 1..34: mol_type = genomic DNA

SEQ ID NO: 48286 - DNA, 35 bp, Homo sapiens; identical to SEQ ID NO: 16642
  source 1..35: mol_type = genomic DNA

SEQ ID NO: 48287 - DNA, 36 bp, Homo sapiens; identical to SEQ ID NO: 16643
  source 1..36: mol_type = genomic DNA

SEQ ID NO: 48288 - DNA, 37 bp, Homo sapiens; identical to SEQ ID NO: 16644
  source 1..37: mol_type = genomic DNA

SEQ ID NO: 48289 - DNA, 38 bp, Homo sapiens; identical to SEQ ID NO: 16645
  source 1..38: mol_type = genomic DNA

SEQ ID NO: 48290 - DNA, 39 bp, Homo sapiens; identical to SEQ ID NO: 16646
  source 1..39: mol_type = genomic DNA

SEQ ID NO: 48291 - DNA, 40 bp, Homo sapiens; identical to SEQ ID NO: 16647
  source 1..40: mol_type = genomic DNA

SEQ ID NO: 48292 - DNA, 41 bp, Homo sapiens; identical to SEQ ID NO: 16648
  source 1..41: mol_type = genomic DNA

SEQ ID NO: 48293 - DNA, 42 bp, Homo sapiens; identical to SEQ ID NO: 16649
  source 1..42: mol_type = genomic DNA

SEQ ID NO: 48294 - DNA, 43 bp, Homo sapiens; identical to SEQ ID NO: 16650
  source 1..43: mol_type = genomic DNA

SEQ ID NO: 48295 - DNA, 44 bp, Homo sapiens; identical to SEQ ID NO: 16651
  source 1..44: mol_type = genomic DNA

SEQ ID NO: 48296 - DNA, 45 bp, Homo sapiens; identical to SEQ ID NO: 16652
  source 1..45: mol_type = genomic DNA

SEQ ID NO: 48297 - DNA, 46 bp, Homo sapiens; identical to SEQ ID NO: 16653
  source 1..46: mol_type = genomic DNA

SEQ ID NO: 48298 - DNA, 47 bp, Homo sapiens; identical to SEQ ID NO: 16654
  source 1..47: mol_type = genomic DNA

SEQ ID NO: 48299 - DNA, 31 bp, Homo sapiens; identical to SEQ ID NO: 37386
  source 1..31: mol_type = genomic DNA

SEQ ID NO: 48300 - DNA, 32 bp, Homo sapiens; identical to SEQ ID NO: 16664
  source 1..32: mol_type = genomic DNA

SEQ ID NO: 48301 - DNA, 36 bp, Homo sapiens; identical to SEQ ID NO: 16666
  source 1..36: mol_type = genomic DNA

SEQ ID NO: 48302 - DNA, 36 bp, Homo sapiens; identical to SEQ ID NO: 16668
  source 1..36: mol_type = genomic DNA

SEQ ID NO: 48303 - DNA, 16 bp, Homo sapiens
  source 1..16: mol_type = genomic DNA
gccacgcgggaggccc

SEQ ID NO: 48304 - DNA, 17 bp, Homo sapiens
  source 1..17: mol_type = genomic DNA
gccacgcgggaggcccg

SEQ ID NO: 48305 - DNA, 18 bp, Homo sapiens
  source 1..18: mol_type = genomic DNA
gccacgcgggaggcccgg

SEQ ID NO: 48306 - DNA, 19 bp, Homo sapiens
  source 1..19: mol_type = genomic DNA
gccacgcgggaggcccggg

SEQ ID NO: 48307 - DNA, 20 bp, Homo sapiens
  source 1..20: mol_type = genomic DNA
gccacgcgggaggcccgggt

SEQ ID NO: 48308 - DNA, 21 bp, Homo sapiens
  source 1..21: mol_type = genomic DNA
gccacgcgggaggcccgggtt

SEQ ID NO: 48309 - DNA, 41 bp, Homo sapiens; identical to SEQ ID NO: 16680
  source 1..41: mol_type = genomic DNA

SEQ ID NO: 48310 - DNA, 42 bp, Homo sapiens; identical to SEQ ID NO: 16681
  source 1..42: mol_type = genomic DNA

SEQ ID NO: 48311 - DNA, 18 bp, Homo sapiens
  source 1..18: mol_type = genomic DNA
gccagggattgtgggttc

SEQ ID NO: 48312 - DNA, 19 bp, Homo sapiens
  source 1..19: mol_type = genomic DNA
gccagggattgtgggttcg

SEQ ID NO: 48313 - DNA, 35 bp, Homo sapiens; identical to SEQ ID NO: 16687
  source 1..35: mol_type = genomic DNA

SEQ ID NO: 48314 - DNA, 37 bp, Homo sapiens; identical to SEQ ID NO: 16693
  source 1..37: mol_type = genomic DNA

SEQ ID NO: 48315 - DNA, 38 bp, Homo sapiens; identical to SEQ ID NO: 16694
  source 1..38: mol_type = genomic DNA

SEQ ID NO: 48316 - DNA, 36 bp, Homo sapiens; identical to SEQ ID NO: 16700
  source 1..36: mol_type = genomic DNA

SEQ ID NO: 48317 - DNA, 37 bp, Homo sapiens; identical to SEQ ID NO: 16701
  source 1..37: mol_type = genomic DNA

SEQ ID NO: 48318 - DNA, 38 bp, Homo sapiens; identical to SEQ ID NO: 16702
  source 1..38: mol_type = genomic DNA

SEQ ID NO: 48319 - DNA, 31 bp, Homo sapiens; identical to SEQ ID NO: 16710
  source 1..31: mol_type = genomic DNA

SEQ ID NO: 48320 - DNA, 16 bp, Homo sapiens
  source 1..16: mol_type = genomic DNA
gcccacccagggacgc

SEQ ID NO: 48321 - DNA, 17 bp, Homo sapiens
  source 1..17: mol_type = genomic DNA
gcccacccagggacgcc

SEQ ID NO: 48322 - DNA, 18 bp, Homo sapiens
  source 1..18: mol_type = genomic DNA
gcccacccagggacgcca

SEQ ID NO: 48323 - DNA, 33 bp, Homo sapiens; identical to SEQ ID NO: 16716
  source 1..33: mol_type = genomic DNA

SEQ ID NO: 48324 - DNA, 22 bp, Homo sapiens
  source 1..22: mol_type = genomic DNA
gcccataccccgaaaatgttgg

SEQ ID NO: 48325 - DNA, 17 bp, Homo sapiens
  source 1..17: mol_type = genomic DNA
gcccatccagggacgcc

SEQ ID NO: 48326 - DNA, 16 bp, Homo sapiens
  source 1..16: mol_type = genomic DNA
gccccacgttgggcgc

SEQ ID NO: 48327 - DNA, 17 bp, Homo sapiens
  source 1..17: mol_type = genomic DNA
gccccacgttgggcgcc

SEQ ID NO: 48328 - DNA, 16 bp, Homo sapiens
  source 1..16: mol_type = genomic DNA
gccccagtggaaccac

SEQ ID NO: 48329 - DNA, 17 bp, Homo sapiens
  source 1..17: mol_type = genomic DNA
gccccagtggaaccacc

SEQ ID NO: 48330 - DNA, 18 bp, Homo sapiens
  source 1..18: mol_type = genomic DNA
gccccagtggaaccacca

SEQ ID NO: 48331 - DNA, 18 bp, Homo sapiens
  source 1..18: mol_type = genomic DNA
gccccagtggcctaatgg

SEQ ID NO: 48332 - DNA, 19 bp, Homo sapiens
  source 1..19: mol_type = genomic DNA
gccccagtggcctaatgga

SEQ ID NO: 48333 - DNA, 27 bp, Homo sapiens
  source 1..27: mol_type = genomic DNA
gccccagtggcctaatggataaggcac

SEQ ID NO: 48334 - DNA, 33 bp, Homo sapiens; identical to SEQ ID NO: 37420
  source 1..33: mol_type = genomic DNA

SEQ ID NO: 48335 - DNA, 33 bp, Homo sapiens; identical to SEQ ID NO: 16746
  source 1..33: mol_type = genomic DNA

SEQ ID NO: 48336 - DNA, 35 bp, Homo sapiens
  source 1..35: mol_type = genomic DNA
gccccagtggcctaatggataaggcattggcctcc

SEQ ID NO: 48337 - DNA, 23 bp, Homo sapiens
  source 1..23: mol_type = genomic DNA
gcccccatgtctaacaacatggc

SEQ ID NO: 48338 - DNA, 24 bp, Homo sapiens
  source 1..24: mol_type = genomic DNA
gcccccatgtctaacaacatggct

SEQ ID NO: 48339 - DNA, 25 bp, Homo sapiens
  source 1..25: mol_type = genomic DNA
gcccccatgtctaacaacatggctt

SEQ ID NO: 48340 - DNA, 30 bp, Homo sapiens; identical to SEQ ID NO: 16767
  source 1..30: mol_type = genomic DNA

SEQ ID NO: 48341 - DNA, 32 bp, Homo sapiens; identical to SEQ ID NO: 16769
  source 1..32: mol_type = genomic DNA

SEQ ID NO: 48342 - DNA, 24 bp, Homo sapiens
  source 1..24: mol_type = genomic DNA
gccccgggttcaatccccggcacc

SEQ ID NO: 48343 - DNA, 25 bp, Homo sapiens
  source 1..25: mol_type = genomic DNA
gccccgggttcaatccccggcacct

SEQ ID NO: 48344 - DNA, 30 bp, Homo sapiens; identical to SEQ ID NO: 16772
  source 1..30: mol_type = genomic DNA

SEQ ID NO: 48345 - DNA, 31 bp, Homo sapiens; identical to SEQ ID NO: 16773
  source 1..31: mol_type = genomic DNA

SEQ ID NO: 48346 - DNA, 30 bp, Homo sapiens; identical to SEQ ID NO: 37434
  source 1..30: mol_type = genomic DNA

SEQ ID NO: 48347 - DNA, 16 bp, Homo sapiens
  source 1..16: mol_type = genomic DNA
gcccgcatcctccacc

SEQ ID NO: 48348 - DNA, 17 bp, Homo sapiens
  source 1..17: mol_type = genomic DNA
gcccgcatcctccacca

SEQ ID NO: 48349 - DNA, 16 bp, Homo sapiens
  source 1..16: mol_type = genomic DNA
gcccgcattctccacc

SEQ ID NO: 48350 - DNA, 16 bp, Homo sapiens
  source 1..16: mol_type = genomic DNA
gcccggatagctcagt

SEQ ID NO: 48351 - DNA, 18 bp, Homo sapiens
  source 1..18: mol_type = genomic DNA
gcccggatagctcagtcg

SEQ ID NO: 48352 - DNA, 19 bp, Homo sapiens
  source 1..19: mol_type = genomic DNA
gcccggatagctcagtcgg

SEQ ID NO: 48353 - DNA, 22 bp, Homo sapiens
  source 1..22: mol_type = genomic DNA
gcccggatagctcagtcggtag

SEQ ID NO: 48354 - DNA, 23 bp, Homo sapiens
  source 1..23: mol_type = genomic DNA
gcccggatagctcagtcggtaga

SEQ ID NO: 48355 - DNA, 24 bp, Homo sapiens
  source 1..24: mol_type = genomic DNA
gcccggatagctcagtcggtagag

SEQ ID NO: 48356 - DNA, 25 bp, Homo sapiens
  source 1..25: mol_type = genomic DNA
gcccggatagctcagtcggtagagc

SEQ ID NO: 48357 - DNA, 26 bp, Homo sapiens
  source 1..26: mol_type = genomic DNA
gcccggatagctcagtcggtagagca

SEQ ID NO: 48358 - DNA, 27 bp, Homo sapiens
  source 1..27: mol_type = genomic DNA
gcccggatagctcagtcggtagagcat

SEQ ID NO: 48359 - DNA, 28 bp, Homo sapiens
  source 1..28: mol_type = genomic DNA
gcccggatagctcagtcggtagagcatc

SEQ ID NO: 48360 - DNA, 29 bp, Homo sapiens
  source 1..29: mol_type = genomic DNA
gcccggatagctcagtcggtagagcatca

SEQ ID NO: 48361 - DNA, 30 bp, Homo sapiens; identical to SEQ ID NO: 16802
  source 1..30: mol_type = genomic DNA

SEQ ID NO: 48362 - DNA, 31 bp, Homo sapiens; identical to SEQ ID NO: 16803
  source 1..31: mol_type = genomic DNA

SEQ ID NO: 48363 - DNA, 32 bp, Homo sapiens; identical to SEQ ID NO: 16804
  source 1..32: mol_type = genomic DNA

SEQ ID NO: 48364 - DNA, 33 bp, Homo sapiens; identical to SEQ ID NO: 16805
  source 1..33: mol_type = genomic DNA

SEQ ID NO: 48365 - DNA, 34 bp, Homo sapiens; identical to SEQ ID NO: 16806
  source 1..34: mol_type = genomic DNA

SEQ ID NO: 48366 - DNA, 35 bp, Homo sapiens; identical to SEQ ID NO: 16807
  source 1..35: mol_type = genomic DNA

SEQ ID NO: 48367 - DNA, 36 bp, Homo sapiens; identical to SEQ ID NO: 16808
  source 1..36: mol_type = genomic DNA

SEQ ID NO: 48368 - DNA, 16 bp, Homo sapiens
  source 1..16: mol_type = genomic DNA
gcccggctagctcagt

SEQ ID NO: 48369 - DNA, 33 bp, Homo sapiens; identical to SEQ ID NO: 16815
  source 1..33: mol_type = genomic DNA

SEQ ID NO: 48370 - DNA, 19 bp, Homo sapiens
  source 1..19: mol_type = genomic DNA
gcccggctagctcagtcgg

SEQ ID NO: 48371 - DNA, 25 bp, Homo sapiens
  source 1..25: mol_type = genomic DNA
gcccggctagctcagtcggtagagc

SEQ ID NO: 48372 - DNA, 26 bp, Homo sapiens
  source 1..26: mol_type = genomic DNA
gcccggctagctcagtcggtagagca

SEQ ID NO: 48373 - DNA, 27 bp, Homo sapiens
  source 1..27: mol_type = genomic DNA
gcccggctagctcagtcggtagagcat

SEQ ID NO: 48374 - DNA, 28 bp, Homo sapiens
  source 1..28: mol_type = genomic DNA
gcccggctagctcagtcggtagagcatg

SEQ ID NO: 48375 - DNA, 30 bp, Homo sapiens; identical to SEQ ID NO: 16827
  source 1..30: mol_type = genomic DNA

SEQ ID NO: 48376 - DNA, 31 bp, Homo sapiens; identical to SEQ ID NO: 16828
  source 1..31: mol_type = genomic DNA

SEQ ID NO: 48377 - DNA, 32 bp, Homo sapiens; identical to SEQ ID NO: 16829
  source 1..32: mol_type = genomic DNA

SEQ ID NO: 48378 - DNA, 33 bp, Homo sapiens; identical to SEQ ID NO: 16830
  source 1..33: mol_type = genomic DNA

SEQ ID NO: 48379 - DNA, 34 bp, Homo sapiens; identical to SEQ ID NO: 16831
  source 1..34: mol_type = genomic DNA

SEQ ID NO: 48380 - DNA, 35 bp, Homo sapiens; identical to SEQ ID NO: 16832
  source 1..35: mol_type = genomic DNA

SEQ ID NO: 48381 - DNA, 33 bp, Homo sapiens; identical to SEQ ID NO: 16835
  source 1..33: mol_type = genomic DNA

SEQ ID NO: 48382 - DNA, 34 bp, Homo sapiens; identical to SEQ ID NO: 16836
  source 1..34: mol_type = genomic DNA

SEQ ID NO: 48383 - DNA, 35 bp, Homo sapiens; identical to SEQ ID NO: 16837
  source 1..35: mol_type = genomic DNA

SEQ ID NO: 48384 - DNA, 36 bp, Homo sapiens; identical to SEQ ID NO: 16838
  source 1..36: mol_type = genomic DNA

SEQ ID NO: 48385 - DNA, 40 bp, Homo sapiens; identical to SEQ ID NO: 16842
  source 1..40: mol_type = genomic DNA

SEQ ID NO: 48386 - DNA, 41 bp, Homo sapiens; identical to SEQ ID NO: 16843
  source 1..41: mol_type = genomic DNA

SEQ ID NO: 48387 - DNA, 29 bp, Homo sapiens
  source 1..29: mol_type = genomic DNA
gcccggctagctcagtcggtagagcatgg

SEQ ID NO: 48388 - DNA, 30 bp, Homo sapiens; identical to SEQ ID NO: 16847
  source 1..30: mol_type = genomic DNA

SEQ ID NO: 48389 - DNA, 31 bp, Homo sapiens; identical to SEQ ID NO: 16848
  source 1..31: mol_type = genomic DNA

SEQ ID NO: 48390 - DNA, 32 bp, Homo sapiens; identical to SEQ ID NO: 16849
  source 1..32: mol_type = genomic DNA

SEQ ID NO: 48391 - DNA, 33 bp, Homo sapiens; identical to SEQ ID NO: 16850
  source 1..33: mol_type = genomic DNA

SEQ ID NO: 48392 - DNA, 34 bp, Homo sapiens; identical to SEQ ID NO: 16851
  source 1..34: mol_type = genomic DNA

SEQ ID NO: 48393 - DNA, 35 bp, Homo sapiens; identical to SEQ ID NO: 16852
  source 1..35: mol_type = genomic DNA

SEQ ID NO: 48394 - DNA, 36 bp, Homo sapiens; identical to SEQ ID NO: 16853
  source 1..36: mol_type = genomic DNA

SEQ ID NO: 48395 - DNA, 37 bp, Homo sapiens; identical to SEQ ID NO: 16854
  source 1..37: mol_type = genomic DNA

SEQ ID NO: 48396 - DNA, 38 bp, Homo sapiens; identical to SEQ ID NO: 16855
  source 1..38: mol_type = genomic DNA

SEQ ID NO: 48397 - DNA, 39 bp, Homo sapiens; identical to SEQ ID NO: 16856
  source 1..39: mol_type = genomic DNA

SEQ ID NO: 48398 - DNA, 40 bp, Homo sapiens; identical to SEQ ID NO: 16857
  source 1..40: mol_type = genomic DNA

SEQ ID NO: 48399 - DNA, 41 bp, Homo sapiens; identical to SEQ ID NO: 16858
  source 1..41: mol_type = genomic DNA

SEQ ID NO: 48400 - DNA, 42 bp, Homo sapiens; identical to SEQ ID NO: 16859
  source 1..42: mol_type = genomic DNA

SEQ ID NO: 48401 - DNA, 25 bp, Homo sapiens
  source 1..25: mol_type = genomic DNA
gcccgggttcgactcccggtgtggg

SEQ ID NO: 48402 - DNA, 26 bp, Homo sapiens
  source 1..26: mol_type = genomic DNA
gcccgggttcgactcccggtgtggga

SEQ ID NO: 48403 - DNA, 27 bp, Homo sapiens
  source 1..27: mol_type = genomic DNA
gcccgggttcgactcccggtgtgggaa

SEQ ID NO: 48404 - DNA, 28 bp, Homo sapiens
  source 1..28: mol_type = genomic DNA
gcccgggttcgactcccggtgtgggaac

SEQ ID NO: 48405 - DNA, 29 bp, Homo sapiens
  source 1..29: mol_type = genomic DNA
gcccgggttcgactcccggtgtgggaacc

SEQ ID NO: 48406 - DNA, 30 bp, Homo sapiens; identical to SEQ ID NO: 16865
  source 1..30: mol_type = genomic DNA

SEQ ID NO: 48407 - DNA, 16 bp, Homo sapiens
  source 1..16: mol_type = genomic DNA
gccctcttagcgcagc

SEQ ID NO: 48408 - DNA, 19 bp, Homo sapiens
  source 1..19: mol_type = genomic DNA
gccgaaatagctcagttgg

SEQ ID NO: 48409 - DNA, 20 bp, Homo sapiens
  source 1..20: mol_type = genomic DNA
gccgaaatagctcagttggg

SEQ ID NO: 48410 - DNA, 21 bp, Homo sapiens
  source 1..21: mol_type = genomic DNA
gccgaaatagctcagttggga

SEQ ID NO: 48411 - DNA, 22 bp, Homo sapiens
  source 1..22: mol_type = genomic DNA
gccgaaatagctcagttgggag

SEQ ID NO: 48412 - DNA, 23 bp, Homo sapiens
  source 1..23: mol_type = genomic DNA
gccgaaatagctcagttgggaga

SEQ ID NO: 48413 - DNA, 24 bp, Homo sapiens
  source 1..24: mol_type = genomic DNA
gccgaaatagctcagttgggagag

SEQ ID NO: 48414 - DNA, 25 bp, Homo sapiens
  source 1..25: mol_type = genomic DNA
gccgaaatagctcagttgggagagc

SEQ ID NO: 48415 - DNA, 33 bp, Homo sapiens; identical to SEQ ID NO: 16890
  source 1..33: mol_type = genomic DNA

SEQ ID NO: 48416 - DNA, 17 bp, Homo sapiens
  source 1..17: mol_type = genomic DNA
gccgagcggtctaaggc

SEQ ID NO: 48417 - DNA, 17 bp, Homo sapiens
  source 1..17: mol_type = genomic DNA
gccgaggttgtgagttc

SEQ ID NO: 48418 - DNA, 38 bp, Homo sapiens; identical to SEQ ID NO: 16903
  source 1..38: mol_type = genomic DNA

SEQ ID NO: 48419 - DNA, 39 bp, Homo sapiens; identical to SEQ ID NO: 16904
  source 1..39: mol_type = genomic DNA

SEQ ID NO: 48420 - DNA, 17 bp, Homo sapiens
  source 1..17: mol_type = genomic DNA
gccgcggcccgggttcg

SEQ ID NO: 48421 - DNA, 33 bp, Homo sapiens
  source 1..33: mol_type = genomic DNA
gccgcggcccgggttcgattcccggccagggaa

SEQ ID NO: 48422 - DNA, 29 bp, Homo sapiens
  source 1..29: mol_type = genomic DNA
gccgcggcccgggttcgattcccggtcag

SEQ ID NO: 48423 - DNA, 30 bp, Homo sapiens; identical to SEQ ID NO: 16909
  source 1..30: mol_type = genomic DNA

SEQ ID NO: 48424 - DNA, 31 bp, Homo sapiens; identical to SEQ ID NO: 16910
  source 1..31: mol_type = genomic DNA

SEQ ID NO: 48425 - DNA, 32 bp, Homo sapiens; identical to SEQ ID NO: 16911
  source 1..32: mol_type = genomic DNA

SEQ ID NO: 48426 - DNA, 33 bp, Homo sapiens; identical to SEQ ID NO: 16912
  source 1..33: mol_type = genomic DNA

SEQ ID NO: 48427 - DNA, 34 bp, Homo sapiens; identical to SEQ ID NO: 16913
  source 1..34: mol_type = genomic DNA

SEQ ID NO: 48428 - DNA, 35 bp, Homo sapiens; identical to SEQ ID NO: 16914
  source 1..35: mol_type = genomic DNA

SEQ ID NO: 48429 - DNA, 36 bp, Homo sapiens; identical to SEQ ID NO: 16915
  source 1..36: mol_type = genomic DNA

SEQ ID NO: 48430 - DNA, 16 bp, Homo sapiens
  source 1..16: mol_type = genomic DNA
gccgctggtgtagtgg

SEQ ID NO: 48431 - DNA, 24 bp, Homo sapiens
  source 1..24: mol_type = genomic DNA
gccgctggtgtagtggtatcatgc

SEQ ID NO: 48432 - DNA, 25 bp, Homo sapiens
  source 1..25: mol_type = genomic DNA
gccgctggtgtagtggtatcatgca

SEQ ID NO: 48433 - DNA, 27 bp, Homo sapiens
  source 1..27: mol_type = genomic DNA
gccgctggtgtagtggtatcatgcaag

SEQ ID NO: 48434 - DNA, 28 bp, Homo sapiens
  source 1..28: mol_type = genomic DNA
gccgctggtgtagtggtatcatgcaaga

SEQ ID NO: 48435 - DNA, 29 bp, Homo sapiens
  source 1..29: mol_type = genomic DNA
gccgctggtgtagtggtatcatgcaagat

SEQ ID NO: 48436 - DNA, 30 bp, Homo sapiens; identical to SEQ ID NO: 16926
  source 1..30: mol_type = genomic DNA

SEQ ID NO: 48437 - DNA, 32 bp, Homo sapiens; identical to SEQ ID NO: 16928
  source 1..32: mol_type = genomic DNA

SEQ ID NO: 48438 - DNA, 33 bp, Homo sapiens; identical to SEQ ID NO: 16929
  source 1..33: mol_type = genomic DNA

SEQ ID NO: 48439 - DNA, 16 bp, Homo sapiens
  source 1..16: mol_type = genomic DNA
gccgtgatcgtatagt

SEQ ID NO: 48440 - DNA, 21 bp, Homo sapiens
  source 1..21: mol_type = genomic DNA
gccgtgatcgtatagtggtta

SEQ ID NO: 48441 - DNA, 22 bp, Homo sapiens
  source 1..22: mol_type = genomic DNA
gccgtgatcgtatagtggttag

SEQ ID NO: 48442 - DNA, 23 bp, Homo sapiens
  source 1..23: mol_type = genomic DNA
gccgtgatcgtatagtggttagt

SEQ ID NO: 48443 - DNA, 24 bp, Homo sapiens
  source 1..24: mol_type = genomic DNA
gccgtgatcgtatagtggttagta

SEQ ID NO: 48444 - DNA, 25 bp, Homo sapiens
  source 1..25: mol_type = genomic DNA
gccgtgatcgtatagtggttagtac

SEQ ID NO: 48445 - DNA, 26 bp, Homo sapiens
  source 1..26: mol_type = genomic DNA
gccgtgatcgtatagtggttagtact

SEQ ID NO: 48446 - DNA, 27 bp, Homo sapiens
  source 1..27: mol_type = genomic DNA
gccgtgatcgtatagtggttagtactc

SEQ ID NO: 48447 - DNA, 28 bp, Homo sapiens
  source 1..28: mol_type = genomic DNA
gccgtgatcgtatagtggttagtactct

SEQ ID NO: 48448 - DNA, 29 bp, Homo sapiens
  source 1..29: mol_type = genomic DNA
gccgtgatcgtatagtggttagtactctg

SEQ ID NO: 48449 - DNA, 30 bp, Homo sapiens; identical to SEQ ID NO: 16951
  source 1..30: mol_type = genomic DNA

SEQ ID NO: 48450 - DNA, 31 bp, Homo sapiens; identical to SEQ ID NO: 16952
  source 1..31: mol_type = genomic DNA

SEQ ID NO: 48451 - DNA, 32 bp, Homo sapiens; identical to SEQ ID NO: 16953
  source 1..32: mol_type = genomic DNA

SEQ ID NO: 48452 - DNA, 33 bp, Homo sapiens; identical to SEQ ID NO: 16954
  source 1..33: mol_type = genomic DNA

SEQ ID NO: 48453 - DNA, 34 bp, Homo sapiens; identical to SEQ ID NO: 16955
  source 1..34: mol_type = genomic DNA

SEQ ID NO: 48454 - DNA, 35 bp, Homo sapiens; identical to SEQ ID NO: 16956
  source 1..35: mol_type = genomic DNA

SEQ ID NO: 48455 - DNA, 36 bp, Homo sapiens; identical to SEQ ID NO: 16957
  source 1..36: mol_type = genomic DNA

SEQ ID NO: 48456 - DNA, 37 bp, Homo sapiens; identical to SEQ ID NO: 16958
  source 1..37: mol_type = genomic DNA

SEQ ID NO: 48457 - DNA, 38 bp, Homo sapiens; identical to SEQ ID NO: 16959
  source 1..38: mol_type = genomic DNA

SEQ ID NO: 48458 - DNA, 39 bp, Homo sapiens; identical to SEQ ID NO: 16960
  source 1..39: mol_type = genomic DNA

SEQ ID NO: 48459 - DNA, 45 bp, Homo sapiens; identical to SEQ ID NO: 16966
  source 1..45: mol_type = genomic DNA

SEQ ID NO: 48460 - DNA, 16 bp, Homo sapiens
  source 1..16: mol_type = genomic DNA
gcctcacctggagcac

SEQ ID NO: 48461 - DNA, 17 bp, Homo sapiens
  source 1..17: mol_type = genomic DNA
gcctcacctggagcacc

SEQ ID NO: 48462 - DNA, 37 bp, Homo sapiens
  source 1..37: mol_type = genomic DNA
gcctcctaagccagggattgtgggttcgagtcccatc

SEQ ID NO: 48463 - DNA, 19 bp, Homo sapiens
  source 1..19: mol_type = genomic DNA
gcctcgttagcgcagtagg

SEQ ID NO: 48464 - DNA, 33 bp, Homo sapiens; identical to SEQ ID NO: 16989
  source 1..33: mol_type = genomic DNA

SEQ ID NO: 48465 - DNA, 16 bp, Homo sapiens
  source 1..16: mol_type = genomic DNA
gcctgccacgcgggag

SEQ ID NO: 48466 - DNA, 24 bp, Homo sapiens
  source 1..24: mol_type = genomic DNA
gcctggatagctcagtcggtagag

SEQ ID NO: 48467 - DNA, 27 bp, Homo sapiens
  source 1..27: mol_type = genomic DNA
gcctggatagctcagtcggtagagcat

SEQ ID NO: 48468 - DNA, 28 bp, Homo sapiens
  source 1..28: mol_type = genomic DNA
gcctggatagctcagtcggtagagcatc

SEQ ID NO: 48469 - DNA, 32 bp, Homo sapiens; identical to SEQ ID NO: 17001
  source 1..32: mol_type = genomic DNA

SEQ ID NO: 48470 - DNA, 33 bp, Homo sapiens; identical to SEQ ID NO: 17002
  source 1..33: mol_type = genomic DNA

SEQ ID NO: 48471 - DNA, 32 bp, Homo sapiens; identical to SEQ ID NO: 17006
  source 1..32: mol_type = genomic DNA

SEQ ID NO: 48472 - DNA, 20 bp, Homo sapiens
  source 1..20: mol_type = genomic DNA
gcctgggtagctcagtcggt

SEQ ID NO: 48473 - DNA, 28 bp, Homo sapiens
  source 1..28: mol_type = genomic DNA
gcctgggtagctcagtcggtagagcatc

SEQ ID NO: 48474 - DNA, 32 bp, Homo sapiens; identical to SEQ ID NO: 17013
  source 1..32: mol_type = genomic DNA

SEQ ID NO: 48475 - DNA, 33 bp, Homo sapiens; identical to SEQ ID NO: 17014
  source 1..33: mol_type = genomic DNA

SEQ ID NO: 48476 - DNA, 20 bp, Homo sapiens
  source 1..20: mol_type = genomic DNA
gcctgtcacgcgggagaccg

SEQ ID NO: 48477 - DNA, 21 bp, Homo sapiens
  source 1..21: mol_type = genomic DNA
gcctgtcacgcgggagaccgg

SEQ ID NO: 48478 - DNA, 22 bp, Homo sapiens
  source 1..22: mol_type = genomic DNA
gcctgtcacgcgggagaccggg

SEQ ID NO: 48479 - DNA, 40 bp, Homo sapiens; identical to SEQ ID NO: 17018
  source 1..40: mol_type = genomic DNA

SEQ ID NO: 48480 - DNA, 44 bp, Homo sapiens; identical to SEQ ID NO: 17019
  source 1..44: mol_type = genomic DNA

SEQ ID NO: 48481 - DNA, 45 bp, Homo sapiens; identical to SEQ ID NO: 17020
  source 1..45: mol_type = genomic DNA

SEQ ID NO: 48482 - DNA, 39 bp, Homo sapiens; identical to SEQ ID NO: 17022
  source 1..39: mol_type = genomic DNA

SEQ ID NO: 48483 - DNA, 40 bp, Homo sapiens; identical to SEQ ID NO: 17023
  source 1..40: mol_type = genomic DNA

SEQ ID NO: 48484 - DNA, 41 bp, Homo sapiens; identical to SEQ ID NO: 17024
  source 1..41: mol_type = genomic DNA

SEQ ID NO: 48485 - DNA, 42 bp, Homo sapiens; identical to SEQ ID NO: 17025
  source 1..42: mol_type = genomic DNA

SEQ ID NO: 48486 - DNA, 43 bp, Homo sapiens; identical to SEQ ID NO: 17026
  source 1..43: mol_type = genomic DNA

SEQ ID NO: 48487 - DNA, 44 bp, Homo sapiens; identical to SEQ ID NO: 17027
  source 1..44: mol_type = genomic DNA

SEQ ID NO: 48488 - DNA, 45 bp, Homo sapiens; identical to SEQ ID NO: 17028
  source 1..45: mol_type = genomic DNA

SEQ ID NO: 48489 - DNA, 46 bp, Homo sapiens; identical to SEQ ID NO: 17029
  source 1..46: mol_type = genomic DNA

SEQ ID NO: 48490 - DNA, 30 bp, Homo sapiens; identical to SEQ ID NO: 37578
  source 1..30: mol_type = genomic DNA

SEQ ID NO: 48491 - DNA, 31 bp, Homo sapiens; identical to SEQ ID NO: 37579
  source 1..31: mol_type = genomic DNA

SEQ ID NO: 48492 - DNA, 32 bp, Homo sapiens; identical to SEQ ID NO: 37580
  source 1..32: mol_type = genomic DNA

SEQ ID NO: 48493 - DNA, 16 bp, Homo sapiens
  source 1..16: mol_type = genomic DNA
gcgaaaggtccccggt

SEQ ID NO: 48494 - DNA, 28 bp, Homo sapiens
  source 1..28: mol_type = genomic DNA
gcgaaaggtccccggttcgaaaccgggc

SEQ ID NO: 48495 - DNA, 36 bp, Homo sapiens; identical to SEQ ID NO: 37585
  source 1..36: mol_type = genomic DNA

SEQ ID NO: 48496 - DNA, 37 bp, Homo sapiens; identical to SEQ ID NO: 17039
  source 1..37: mol_type = genomic DNA

SEQ ID NO: 48497 - DNA, 38 bp, Homo sapiens; identical to SEQ ID NO: 17040
  source 1..38: mol_type = genomic DNA

SEQ ID NO: 48498 - DNA, 29 bp, Homo sapiens
  source 1..29: mol_type = genomic DNA
gcgaaaggtccccggttcgaaaccgggcg

SEQ ID NO: 48499 - DNA, 34 bp, Homo sapiens; identical to SEQ ID NO: 17043
  source 1..34: mol_type = genomic DNA

SEQ ID NO: 48500 - DNA, 35 bp, Homo sapiens; identical to SEQ ID NO: 17044
  source 1..35: mol_type = genomic DNA

SEQ ID NO: 48501 - DNA, 36 bp, Homo sapiens; identical to SEQ ID NO: 17045
  source 1..36: mol_type = genomic DNA

SEQ ID NO: 48502 - DNA, 37 bp, Homo sapiens; identical to SEQ ID NO: 17046
  source 1..37: mol_type = genomic DNA

SEQ ID NO: 48503 - DNA, 38 bp, Homo sapiens; identical to SEQ ID NO: 17047
  source 1..38: mol_type = genomic DNA

SEQ ID NO: 48504 - DNA, 37 bp, Homo sapiens; identical to SEQ ID NO: 17048
  source 1..37: mol_type = genomic DNA

SEQ ID NO: 48505 - DNA, 35 bp, Homo sapiens; identical to SEQ ID NO: 17051
  source 1..35: mol_type = genomic DNA

SEQ ID NO: 48506 - DNA, 36 bp, Homo sapiens; identical to SEQ ID NO: 37596
  source 1..36: mol_type = genomic DNA

SEQ ID NO: 48507 - DNA, 37 bp, Homo sapiens; identical to SEQ ID NO: 17052
  source 1..37: mol_type = genomic DNA

SEQ ID NO: 48508 - DNA, 38 bp, Homo sapiens; identical to SEQ ID NO: 17053
  source 1..38: mol_type = genomic DNA

SEQ ID NO: 48509 - DNA, 27 bp, Homo sapiens
  source 1..27: mol_type = genomic DNA
gcgacccgggttcgattcccgggcggc

SEQ ID NO: 48510 - DNA, 28 bp, Homo sapiens
  source 1..28: mol_type = genomic DNA
gcgacccgggttcgattcccgggcggcg

SEQ ID NO: 48511 - DNA, 16 bp, Homo sapiens
  source 1..16: mol_type = genomic DNA
gcgagaggtagcggga

SEQ ID NO: 48512 - DNA, 17 bp, Homo sapiens
  source 1..17: mol_type = genomic DNA
gcgagaggtagcgggat

SEQ ID NO: 48513 - DNA, 16 bp, Homo sapiens
  source 1..16: mol_type = genomic DNA
gcgagaggtcccgggt

SEQ ID NO: 48514 - DNA, 32 bp, Homo sapiens; identical to SEQ ID NO: 17062
  source 1..32: mol_type = genomic DNA

SEQ ID NO: 48515 - DNA, 33 bp, Homo sapiens; identical to SEQ ID NO: 37605
  source 1..33: mol_type = genomic DNA

SEQ ID NO: 48516 - DNA, 34 bp, Homo sapiens; identical to SEQ ID NO: 17063
  source 1..34: mol_type = genomic DNA

SEQ ID NO: 48517 - DNA, 35 bp, Homo sapiens; identical to SEQ ID NO: 17064
  source 1..35: mol_type = genomic DNA

SEQ ID NO: 48518 - DNA, 36 bp, Homo sapiens; identical to SEQ ID NO: 17065
  source 1..36: mol_type = genomic DNA

SEQ ID NO: 48519 - DNA, 37 bp, Homo sapiens; identical to SEQ ID NO: 17066
  source 1..37: mol_type = genomic DNA

SEQ ID NO: 48520 - DNA, 28 bp, Homo sapiens
  source 1..28: mol_type = genomic DNA
gcgatccgagttcaaatctcggtggaac

SEQ ID NO: 48521 - DNA, 31 bp, Homo sapiens; identical to SEQ ID NO: 17074
  source 1..31: mol_type = genomic DNA

SEQ ID NO: 48522 - DNA, 32 bp, Homo sapiens; identical to SEQ ID NO: 17075
  source 1..32: mol_type = genomic DNA

SEQ ID NO: 48523 - DNA, 28 bp, Homo sapiens
  source 1..28: mol_type = genomic DNA
gcgatccgagttcaaatctcggtgggac

SEQ ID NO: 48524 - DNA, 31 bp, Homo sapiens; identical to SEQ ID NO: 17078
  source 1..31: mol_type = genomic DNA

SEQ ID NO: 48525 - DNA, 33 bp, Homo sapiens
  source 1..33: mol_type = genomic DNA
gcgatccgagttcaaatctcggtgggacctcca

SEQ ID NO: 48526 - DNA, 31 bp, Homo sapiens; identical to SEQ ID NO: 37620
  source 1..31: mol_type = genomic DNA

SEQ ID NO: 48527 - DNA, 31 bp, Homo sapiens; identical to SEQ ID NO: 17081
  source 1..31: mol_type = genomic DNA

SEQ ID NO: 48528 - DNA, 22 bp, Homo sapiens
  source 1..22: mol_type = genomic DNA
gcgcagcggaagcgtgctgggc

SEQ ID NO: 48529 - DNA, 19 bp, Homo sapiens
  source 1..19: mol_type = genomic DNA
gcgcattcggctgttaacc

SEQ ID NO: 48530 - DNA, 16 bp, Homo sapiens
  source 1..16: mol_type = genomic DNA
gcgccgctggtgtagt

SEQ ID NO: 48531 - DNA, 17 bp, Homo sapiens
  source 1..17: mol_type = genomic DNA
gcgccgctggtgtagtg

SEQ ID NO: 48532 - DNA, 18 bp, Homo sapiens
  source 1..18: mol_type = genomic DNA
gcgccgctggtgtagtgg

SEQ ID NO: 48533 - DNA, 20 bp, Homo sapiens
  source 1..20: mol_type = genomic DNA
gcgccgctggtgtagtggta

SEQ ID NO: 48534 - DNA, 21 bp, Homo sapiens
  source 1..21: mol_type = genomic DNA
gcgccgctggtgtagtggtat

SEQ ID NO: 48535 - DNA, 22 bp, Homo sapiens
  source 1..22: mol_type = genomic DNA
gcgccgctggtgtagtggtatc

SEQ ID NO: 48536 - DNA, 23 bp, Homo sapiens
  source 1..23: mol_type = genomic DNA
gcgccgctggtgtagtggtatca

SEQ ID NO: 48537 - DNA, 25 bp, Homo sapiens
  source 1..25: mol_type = genomic DNA
gcgccgctggtgtagtggtatcatg

SEQ ID NO: 48538 - DNA, 26 bp, Homo sapiens
  source 1..26: mol_type = genomic DNA
gcgccgctggtgtagtggtatcatgc

SEQ ID NO: 48539 - DNA, 27 bp, Homo sapiens
  source 1..27: mol_type = genomic DNA
gcgccgctggtgtagtggtatcatgca

SEQ ID NO: 48540 - DNA, 28 bp, Homo sapiens
  source 1..28: mol_type = genomic DNA
gcgccgctggtgtagtggtatcatgcaa

SEQ ID NO: 48541 - DNA, 29 bp, Homo sapiens
  source 1..29: mol_type = genomic DNA
gcgccgctggtgtagtggtatcatgcaag

SEQ ID NO: 48542 - DNA, 30 bp, Homo sapiens; identical to SEQ ID NO: 17110
  source 1..30: mol_type = genomic DNA

SEQ ID NO: 48543 - DNA, 31 bp, Homo sapiens; identical to SEQ ID NO: 17111
  source 1..31: mol_type = genomic DNA

SEQ ID NO: 48544 - DNA, 32 bp, Homo sapiens; identical to SEQ ID NO: 17112
  source 1..32: mol_type = genomic DNA

SEQ ID NO: 48545 - DNA, 33 bp, Homo sapiens; identical to SEQ ID NO: 17113
  source 1..33: mol_type = genomic DNA

SEQ ID NO: 48546 - DNA, 34 bp, Homo sapiens; identical to SEQ ID NO: 17114
  source 1..34: mol_type = genomic DNA

SEQ ID NO: 48547 - DNA, 35 bp, Homo sapiens; identical to SEQ ID NO: 17115
  source 1..35: mol_type = genomic DNA

SEQ ID NO: 48548 - DNA, 36 bp, Homo sapiens; identical to SEQ ID NO: 17116
  source 1..36: mol_type = genomic DNA

SEQ ID NO: 48549 - DNA, 37 bp, Homo sapiens; identical to SEQ ID NO: 17117
  source 1..37: mol_type = genomic DNA

SEQ ID NO: 48550 - DNA, 39 bp, Homo sapiens; identical to SEQ ID NO: 17118
  source 1..39: mol_type = genomic DNA

SEQ ID NO: 48551 - DNA, 40 bp, Homo sapiens; identical to SEQ ID NO: 17119
  source 1..40: mol_type = genomic DNA

SEQ ID NO: 48552 - DNA, 19 bp, Homo sapiens
  source 1..19: mol_type = genomic DNA
gcgcgttcggctgttaacc

SEQ ID NO: 48553 - DNA, 22 bp, Homo sapiens
  source 1..22: mol_type = genomic DNA
gcgcgttcggctgttaaccgga

SEQ ID NO: 48554 - DNA, 23 bp, Homo sapiens
  source 1..23: mol_type = genomic DNA
gcgcgttcggctgttaaccggaa

SEQ ID NO: 48555 - DNA, 17 bp, Homo sapiens
  source 1..17: mol_type = genomic DNA
gcgctctcaccgccgcg

SEQ ID NO: 48556 - DNA, 19 bp, Homo sapiens
  source 1..19: mol_type = genomic DNA
gcgctctcaccgccgcggc

SEQ ID NO: 48557 - DNA, 20 bp, Homo sapiens
  source 1..20: mol_type = genomic DNA
gcgctctcaccgccgcggcc

SEQ ID NO: 48558 - DNA, 21 bp, Homo sapiens
  source 1..21: mol_type = genomic DNA
gcgctctcaccgccgcggccc

SEQ ID NO: 48559 - DNA, 26 bp, Homo sapiens
  source 1..26: mol_type = genomic DNA
gcgctctcaccgccgcggcccgggtt

SEQ ID NO: 48560 - DNA, 33 bp, Homo sapiens; identical to SEQ ID NO: 17144
  source 1..33: mol_type = genomic DNA

SEQ ID NO: 48561 - DNA, 44 bp, Homo sapiens; identical to SEQ ID NO: 17148
  source 1..44: mol_type = genomic DNA

SEQ ID NO: 48562 - DNA, 45 bp, Homo sapiens; identical to SEQ ID NO: 17149
  source 1..45: mol_type = genomic DNA

SEQ ID NO: 48563 - DNA, 46 bp, Homo sapiens; identical to SEQ ID NO: 17150
  source 1..46: mol_type = genomic DNA

SEQ ID NO: 48564 - DNA, 47 bp, Homo sapiens; identical to SEQ ID NO: 17151
  source 1..47: mol_type = genomic DNA

SEQ ID NO: 48565 - DNA, 16 bp, Homo sapiens
  source 1..16: mol_type = genomic DNA
gcggaagcgtgctggg

SEQ ID NO: 48566 - DNA, 17 bp, Homo sapiens
  source 1..17: mol_type = genomic DNA
gcggaagcgtgctgggc

SEQ ID NO: 48567 - DNA, 18 bp, Homo sapiens
  source 1..18: mol_type = genomic DNA
gcggaagcgtgctgggcc

SEQ ID NO: 48568 - DNA, 19 bp, Homo sapiens
  source 1..19: mol_type = genomic DNA
gcggaagcgtgctgggccc

SEQ ID NO: 48569 - DNA, 20 bp, Homo sapiens
  source 1..20: mol_type = genomic DNA
gcggaagcgtgctgggccca

SEQ ID NO: 48570 - DNA, 25 bp, Homo sapiens
  source 1..25: mol_type = genomic DNA
gcggaagcgtgctgggcccataacc

SEQ ID NO: 48571 - DNA, 26 bp, Homo sapiens
  source 1..26: mol_type = genomic DNA
gcggaagcgtgctgggcccataaccc

SEQ ID NO: 48572 - DNA, 16 bp, Homo sapiens
  source 1..16: mol_type = genomic DNA
gcggcccgggttcgac

SEQ ID NO: 48573 - DNA, 17 bp, Homo sapiens
  source 1..17: mol_type = genomic DNA
gcggcccgggttcgact

SEQ ID NO: 48574 - DNA, 18 bp, Homo sapiens
  source 1..18: mol_type = genomic DNA
gcggcccgggttcgactc

SEQ ID NO: 48575 - DNA, 19 bp, Homo sapiens
  source 1..19: mol_type = genomic DNA
gcggcccgggttcgactcc

SEQ ID NO: 48576 - DNA, 20 bp, Homo sapiens
  source 1..20: mol_type = genomic DNA
gcggcccgggttcgactccc

SEQ ID NO: 48577 - DNA, 21 bp, Homo sapiens
  source 1..21: mol_type = genomic DNA
gcggcccgggttcgactcccg

SEQ ID NO: 48578 - DNA, 23 bp, Homo sapiens
  source 1..23: mol_type = genomic DNA
gcggcccgggttcgactcccggt

SEQ ID NO: 48579 - DNA, 24 bp, Homo sapiens
  source 1..24: mol_type = genomic DNA
gcggcccgggttcgactcccggtg

SEQ ID NO: 48580 - DNA, 25 bp, Homo sapiens
  source 1..25: mol_type = genomic DNA
gcggcccgggttcgactcccggtgt

SEQ ID NO: 48581 - DNA, 26 bp, Homo sapiens
  source 1..26: mol_type = genomic DNA
gcggcccgggttcgactcccggtgtg

SEQ ID NO: 48582 - DNA, 28 bp, Homo sapiens
  source 1..28: mol_type = genomic DNA
gcggcccgggttcgactcccggtgtggg

SEQ ID NO: 48583 - DNA, 29 bp, Homo sapiens
  source 1..29: mol_type = genomic DNA
gcggcccgggttcgactcccggtgtggga

SEQ ID NO: 48584 - DNA, 30 bp, Homo sapiens; identical to SEQ ID NO: 17183
  source 1..30: mol_type = genomic DNA

SEQ ID NO: 48585 - DNA, 31 bp, Homo sapiens; identical to SEQ ID NO: 17184
  source 1..31: mol_type = genomic DNA

SEQ ID NO: 48586 - DNA, 32 bp, Homo sapiens; identical to SEQ ID NO: 17185
  source 1..32: mol_type = genomic DNA

SEQ ID NO: 48587 - DNA, 33 bp, Homo sapiens; identical to SEQ ID NO: 17186
  source 1..33: mol_type = genomic DNA

SEQ ID NO: 48588 - DNA, 19 bp, Homo sapiens
  source 1..19: mol_type = genomic DNA
gcggcccgggttcgattcc

SEQ ID NO: 48589 - DNA, 20 bp, Homo sapiens
  source 1..20: mol_type = genomic DNA
gcggcccgggttcgattccc

SEQ ID NO: 48590 - DNA, 23 bp, Homo sapiens
  source 1..23: mol_type = genomic DNA
gcggcccgggttcgattcccggt

SEQ ID NO: 48591 - DNA, 24 bp, Homo sapiens
  source 1..24: mol_type = genomic DNA
gcggcccgggttcgattcccggtc

SEQ ID NO: 48592 - DNA, 25 bp, Homo sapiens
  source 1..25: mol_type = genomic DNA
gcggcccgggttcgattcccggtca

SEQ ID NO: 48593 - DNA, 27 bp, Homo sapiens
  source 1..27: mol_type = genomic DNA
gcggcccgggttcgattcccggtcagg

SEQ ID NO: 48594 - DNA, 30 bp, Homo sapiens; identical to SEQ ID NO: 17201
  source 1..30: mol_type = genomic DNA

SEQ ID NO: 48595 - DNA, 31 bp, Homo sapiens; identical to SEQ ID NO: 17202
  source 1..31: mol_type = genomic DNA

SEQ ID NO: 48596 - DNA, 32 bp, Homo sapiens; identical to SEQ ID NO: 17203
  source 1..32: mol_type = genomic DNA

SEQ ID NO: 48597 - DNA, 33 bp, Homo sapiens; identical to SEQ ID NO: 17204
  source 1..33: mol_type = genomic DNA

SEQ ID NO: 48598 - DNA, 31 bp, Homo sapiens; identical to SEQ ID NO: 17213
  source 1..31: mol_type = genomic DNA

SEQ ID NO: 48599 - DNA, 32 bp, Homo sapiens; identical to SEQ ID NO: 17214
  source 1..32: mol_type = genomic DNA

SEQ ID NO: 48600 - DNA, 35 bp, Homo sapiens; identical to SEQ ID NO: 17217
  source 1..35: mol_type = genomic DNA

SEQ ID NO: 48601 - DNA, 36 bp, Homo sapiens; identical to SEQ ID NO: 17218
  source 1..36: mol_type = genomic DNA

SEQ ID NO: 48602 - DNA, 37 bp, Homo sapiens; identical to SEQ ID NO: 17219
  source 1..37: mol_type = genomic DNA

SEQ ID NO: 48603 - DNA, 36 bp, Homo sapiens; identical to SEQ ID NO: 17222
  source 1..36: mol_type = genomic DNA

SEQ ID NO: 48604 - DNA, 27 bp, Homo sapiens
  source 1..27: mol_type = genomic DNA
gcgggagaccggggttcgattccccga

SEQ ID NO: 48605 - DNA, 28 bp, Homo sapiens
  source 1..28: mol_type = genomic DNA
gcgggagaccggggttcgattccccgac

SEQ ID NO: 48606 - DNA, 29 bp, Homo sapiens
  source 1..29: mol_type = genomic DNA
gcgggagaccggggttcgattccccgacg

SEQ ID NO: 48607 - DNA, 30 bp, Homo sapiens; identical to SEQ ID NO: 17228
  source 1..30: mol_type = genomic DNA

SEQ ID NO: 48608 - DNA, 31 bp, Homo sapiens; identical to SEQ ID NO: 17229
  source 1..31: mol_type = genomic DNA

SEQ ID NO: 48609 - DNA, 32 bp, Homo sapiens; identical to SEQ ID NO: 17230
  source 1..32: mol_type = genomic DNA

SEQ ID NO: 48610 - DNA, 33 bp, Homo sapiens; identical to SEQ ID NO: 17231
  source 1..33: mol_type = genomic DNA

SEQ ID NO: 48611 - DNA, 34 bp, Homo sapiens; identical to SEQ ID NO: 17232
  source 1..34: mol_type = genomic DNA

SEQ ID NO: 48612 - DNA, 35 bp, Homo sapiens; identical to SEQ ID NO: 17233
  source 1..35: mol_type = genomic DNA

SEQ ID NO: 48613 - DNA, 36 bp, Homo sapiens; identical to SEQ ID NO: 17234
  source 1..36: mol_type = genomic DNA

SEQ ID NO: 48614 - DNA, 37 bp, Homo sapiens; identical to SEQ ID NO: 17235
  source 1..37: mol_type = genomic DNA

SEQ ID NO: 48615 - DNA, 16 bp, Homo sapiens
  source 1..16: mol_type = genomic DNA
gcgggaggcccgggtt

SEQ ID NO: 48616 - DNA, 27 bp, Homo sapiens
  source 1..27: mol_type = genomic DNA
gcgggaggcccgggttcgattcccggc

SEQ ID NO: 48617 - DNA, 28 bp, Homo sapiens
  source 1..28: mol_type = genomic DNA
gcgggaggcccgggttcgattcccggcc

SEQ ID NO: 48618 - DNA, 29 bp, Homo sapiens
  source 1..29: mol_type = genomic DNA
gcgggaggcccgggttcgattcccggcca

SEQ ID NO: 48619 - DNA, 30 bp, Homo sapiens; identical to SEQ ID NO: 17241
  source 1..30: mol_type = genomic DNA

SEQ ID NO: 48620 - DNA, 32 bp, Homo sapiens; identical to SEQ ID NO: 17243
  source 1..32: mol_type = genomic DNA

SEQ ID NO: 48621 - DNA, 33 bp, Homo sapiens; identical to SEQ ID NO: 17244
  source 1..33: mol_type = genomic DNA

SEQ ID NO: 48622 - DNA, 34 bp, Homo sapiens; identical to SEQ ID NO: 17245
  source 1..34: mol_type = genomic DNA

SEQ ID NO: 48623 - DNA, 35 bp, Homo sapiens; identical to SEQ ID NO: 17246
  source 1..35: mol_type = genomic DNA

SEQ ID NO: 48624 - DNA, 36 bp, Homo sapiens; identical to SEQ ID NO: 17247
  source 1..36: mol_type = genomic DNA

SEQ ID NO: 48625 - DNA, 37 bp, Homo sapiens; identical to SEQ ID NO: 17248
  source 1..37: mol_type = genomic DNA

SEQ ID NO: 48626 - DNA, 32 bp, Homo sapiens; identical to SEQ ID NO: 17249
  source 1..32: mol_type = genomic DNA

SEQ ID NO: 48627 - DNA, 36 bp, Homo sapiens; identical to SEQ ID NO: 17250
  source 1..36: mol_type = genomic DNA

SEQ ID NO: 48628 - DNA, 37 bp, Homo sapiens
  source 1..37: mol_type = genomic DNA
gcgggaggcccgggttcgattcccggcccatgcacca

SEQ ID NO: 48629 - DNA, 25 bp, Homo sapiens
  source 1..25: mol_type = genomic DNA
gcgggttcgaaccccgtccgtgcct

SEQ ID NO: 48630 - DNA, 18 bp, Homo sapiens
  source 1..18: mol_type = genomic DNA
gcggttaggattcctggt

SEQ ID NO: 48631 - DNA, 19 bp, Homo sapiens
  source 1..19: mol_type = genomic DNA
gcggttaggattcctggtt

SEQ ID NO: 48632 - DNA, 21 bp, Homo sapiens
  source 1..21: mol_type = genomic DNA
gcggttaggattcctggtttt

SEQ ID NO: 48633 - DNA, 19 bp, Homo sapiens
  source 1..19: mol_type = genomic DNA
gcggttatcacgtctgctt

SEQ ID NO: 48634 - DNA, 20 bp, Homo sapiens
  source 1..20: mol_type = genomic DNA
gcggttatcacgtctgcttt

SEQ ID NO: 48635 - DNA, 19 bp, Homo sapiens
  source 1..19: mol_type = genomic DNA
gcgtgctgggcccataacc

SEQ ID NO: 48636 - DNA, 20 bp, Homo sapiens
  source 1..20: mol_type = genomic DNA
gcgtgctgggcccataaccc

SEQ ID NO: 48637 - DNA, 23 bp, Homo sapiens
  source 1..23: mol_type = genomic DNA
gcgtgctgggcccataacccaga

SEQ ID NO: 48638 - DNA, 31 bp, Homo sapiens; identical to SEQ ID NO: 17279
  source 1..31: mol_type = genomic DNA

SEQ ID NO: 48639 - DNA, 33 bp, Homo sapiens; identical to SEQ ID NO: 17280
  source 1..33: mol_type = genomic DNA

SEQ ID NO: 48640 - DNA, 34 bp, Homo sapiens; identical to SEQ ID NO: 17281
  source 1..34: mol_type = genomic DNA

SEQ ID NO: 48641 - DNA, 35 bp, Homo sapiens; identical to SEQ ID NO: 17282
  source 1..35: mol_type = genomic DNA

SEQ ID NO: 48642 - DNA, 16 bp, Homo sapiens
  source 1..16: mol_type = genomic DNA
gcgtggccgagcggtc

SEQ ID NO: 48643 - DNA, 18 bp, Homo sapiens
  source 1..18: mol_type = genomic DNA
gcgtggccgagcggtcta

SEQ ID NO: 48644 - DNA, 20 bp, Homo sapiens
  source 1..20: mol_type = genomic DNA
gcgtggccgagcggtctaag

SEQ ID NO: 48645 - DNA, 22 bp, Homo sapiens
  source 1..22: mol_type = genomic DNA
gcgtggccgagcggtctaaggc

SEQ ID NO: 48646 - DNA, 31 bp, Homo sapiens
  source 1..31: mol_type = genomic DNA
gcgtggcctaatggataaggcgtctgacttc

SEQ ID NO: 48647 - DNA, 29 bp, Homo sapiens
  source 1..29: mol_type = genomic DNA
gcgtgggttcgaatcccaccttcgtcgcc

SEQ ID NO: 48648 - DNA, 28 bp, Homo sapiens
  source 1..28: mol_type = genomic DNA
gcgtgggttcgaatcccatcctcgtcgc

SEQ ID NO: 48649 - DNA, 29 bp, Homo sapiens
  source 1..29: mol_type = genomic DNA
gcgtgggttcgaatcccatcctcgtcgcc

SEQ ID NO: 48650 - DNA, 30 bp, Homo sapiens; identical to SEQ ID NO: 17298
  source 1..30: mol_type = genomic DNA

SEQ ID NO: 48651 - DNA, 21 bp, Homo sapiens
  source 1..21: mol_type = genomic DNA
gcgttcaggtcgcagtctccc

SEQ ID NO: 48652 - DNA, 24 bp, Homo sapiens
  source 1..24: mol_type = genomic DNA
gcgttcgattcccggtcagggaac

SEQ ID NO: 48653 - DNA, 25 bp, Homo sapiens
  source 1..25: mol_type = genomic DNA
gcgttcgattcccggtcagggaacc

SEQ ID NO: 48654 - DNA, 26 bp, Homo sapiens
  source 1..26: mol_type = genomic DNA
gcgttcgattcccggtcagggaacca

SEQ ID NO: 48655 - DNA, 16 bp, Homo sapiens
  source 1..16: mol_type = genomic DNA
gcgttcggctgttaac

SEQ ID NO: 48656 - DNA, 16 bp, Homo sapiens
  source 1..16: mol_type = genomic DNA
gcgttggtggtatagt

SEQ ID NO: 48657 - DNA, 17 bp, Homo sapiens
  source 1..17: mol_type = genomic DNA
gcgttggtggtatagtg

SEQ ID NO: 48658 - DNA, 18 bp, Homo sapiens
  source 1..18: mol_type = genomic DNA
gcgttggtggtatagtgg

SEQ ID NO: 48659 - DNA, 19 bp, Homo sapiens
  source 1..19: mol_type = genomic DNA
gcgttggtggtatagtggt

SEQ ID NO: 48660 - DNA, 28 bp, Homo sapiens
  source 1..28: mol_type = genomic DNA
gcgttggtggtatagtggtaagcatagc

SEQ ID NO: 48661 - DNA, 29 bp, Homo sapiens
  source 1..29: mol_type = genomic DNA
gcgttggtggtatagtggtaagcatagct

SEQ ID NO: 48662 - DNA, 30 bp, Homo sapiens; identical to SEQ ID NO: 17317
  source 1..30: mol_type = genomic DNA

SEQ ID NO: 48663 - DNA, 31 bp, Homo sapiens; identical to SEQ ID NO: 17318
  source 1..31: mol_type = genomic DNA

SEQ ID NO: 48664 - DNA, 32 bp, Homo sapiens; identical to SEQ ID NO: 17319
  source 1..32: mol_type = genomic DNA

SEQ ID NO: 48665 - DNA, 33 bp, Homo sapiens; identical to SEQ ID NO: 17320
  source 1..33: mol_type = genomic DNA

SEQ ID NO: 48666 - DNA, 36 bp, Homo sapiens; identical to SEQ ID NO: 17323
  source 1..36: mol_type = genomic DNA

SEQ ID NO: 48667 - DNA, 22 bp, Homo sapiens
  source 1..22: mol_type = genomic DNA
gcgttggtggtatagtggtgag

SEQ ID NO: 48668 - DNA, 23 bp, Homo sapiens
  source 1..23: mol_type = genomic DNA
gcgttggtggtatagtggtgagc

SEQ ID NO: 48669 - DNA, 24 bp, Homo sapiens
  source 1..24: mol_type = genomic DNA
gcgttggtggtatagtggtgagca

SEQ ID NO: 48670 - DNA, 26 bp, Homo sapiens
  source 1..26: mol_type = genomic DNA
gcgttggtggtatagtggtgagcata

SEQ ID NO: 48671 - DNA, 27 bp, Homo sapiens
  source 1..27: mol_type = genomic DNA
gcgttggtggtatagtggtgagcatag

SEQ ID NO: 48672 - DNA, 28 bp, Homo sapiens
  source 1..28: mol_type = genomic DNA
gcgttggtggtatagtggtgagcatagc

SEQ ID NO: 48673 - DNA, 29 bp, Homo sapiens
  source 1..29: mol_type = genomic DNA
gcgttggtggtatagtggtgagcatagct

SEQ ID NO: 48674 - DNA, 30 bp, Homo sapiens; identical to SEQ ID NO: 17335
  source 1..30: mol_type = genomic DNA

SEQ ID NO: 48675 - DNA, 31 bp, Homo sapiens; identical to SEQ ID NO: 17336
  source 1..31: mol_type = genomic DNA

SEQ ID NO: 48676 - DNA, 32 bp, Homo sapiens; identical to SEQ ID NO: 17337
  source 1..32: mol_type = genomic DNA

SEQ ID NO: 48677 - DNA, 33 bp, Homo sapiens; identical to SEQ ID NO: 17338
  source 1..33: mol_type = genomic DNA

SEQ ID NO: 48678 - DNA, 34 bp, Homo sapiens; identical to SEQ ID NO: 17339
  source 1..34: mol_type = genomic DNA

SEQ ID NO: 48679 - DNA, 35 bp, Homo sapiens; identical to SEQ ID NO: 17340
  source 1..35: mol_type = genomic DNA

SEQ ID NO: 48680 - DNA, 36 bp, Homo sapiens; identical to SEQ ID NO: 17341
  source 1..36: mol_type = genomic DNA

SEQ ID NO: 48681 - DNA, 23 bp, Homo sapiens
  source 1..23: mol_type = genomic DNA
gcgttggtggtatagtggttagc

SEQ ID NO: 48682 - DNA, 26 bp, Homo sapiens
  source 1..26: mol_type = genomic DNA
gcgttggtggtatagtggttagcata

SEQ ID NO: 48683 - DNA, 27 bp, Homo sapiens
  source 1..27: mol_type = genomic DNA
gcgttggtggtatagtggttagcatag

SEQ ID NO: 48684 - DNA, 28 bp, Homo sapiens
  source 1..28: mol_type = genomic DNA
gcgttggtggtatagtggttagcatagc

SEQ ID NO: 48685 - DNA, 29 bp, Homo sapiens
  source 1..29: mol_type = genomic DNA
gcgttggtggtatagtggttagcatagct

SEQ ID NO: 48686 - DNA, 30 bp, Homo sapiens; identical to SEQ ID NO: 17358
  source 1..30: mol_type = genomic DNA

SEQ ID NO: 48687 - DNA, 31 bp, Homo sapiens; identical to SEQ ID NO: 17359
  source 1..31: mol_type = genomic DNA

SEQ ID NO: 48688 - DNA, 32 bp, Homo sapiens; identical to SEQ ID NO: 17360
  source 1..32: mol_type = genomic DNA

SEQ ID NO: 48689 - DNA, 33 bp, Homo sapiens; identical to SEQ ID NO: 17361
  source 1..33: mol_type = genomic DNA

SEQ ID NO: 48690 - DNA, 34 bp, Homo sapiens; identical to SEQ ID NO: 17362
  source 1..34: mol_type = genomic DNA

SEQ ID NO: 48691 - DNA, 35 bp, Homo sapiens; identical to SEQ ID NO: 17363
  source 1..35: mol_type = genomic DNA

SEQ ID NO: 48692 - DNA, 36 bp, Homo sapiens; identical to SEQ ID NO: 17364
  source 1..36: mol_type = genomic DNA

SEQ ID NO: 48693 - DNA, 32 bp, Homo sapiens; identical to SEQ ID NO: 17369
  source 1..32: mol_type = genomic DNA

SEQ ID NO: 48694 - DNA, 18 bp, Homo sapiens
  source 1..18: mol_type = genomic DNA
gctaaataagctatcggg

SEQ ID NO: 48695 - DNA, 34 bp, Homo sapiens; identical to SEQ ID NO: 17405
  source 1..34: mol_type = genomic DNA

SEQ ID NO: 48696 - DNA, 39 bp, Homo sapiens; identical to SEQ ID NO: 17409
  source 1..39: mol_type = genomic DNA

SEQ ID NO: 48697 - DNA, 43 bp, Homo sapiens; identical to SEQ ID NO: 17413
  source 1..43: mol_type = genomic DNA

SEQ ID NO: 48698 - DNA, 16 bp, Homo sapiens
  source 1..16: mol_type = genomic DNA
gctaatccattgtgct

SEQ ID NO: 48699 - DNA, 33 bp, Homo sapiens; identical to SEQ ID NO: 17430
  source 1..33: mol_type = genomic DNA

SEQ ID NO: 48700 - DNA, 34 bp, Homo sapiens; identical to SEQ ID NO: 17431
  source 1..34: mol_type = genomic DNA

SEQ ID NO: 48701 - DNA, 18 bp, Homo sapiens
  source 1..18: mol_type = genomic DNA
gctagctcagtcggtaga

SEQ ID NO: 48702 - DNA, 19 bp, Homo sapiens
  source 1..19: mol_type = genomic DNA
gctagctcagtcggtagag

SEQ ID NO: 48703 - DNA, 28 bp, Homo sapiens
  source 1..28: mol_type = genomic DNA
gctagctcagtcggtagagcatgagact

SEQ ID NO: 48704 - DNA, 29 bp, Homo sapiens
  source 1..29: mol_type = genomic DNA
gctagctcagtcggtagagcatgagactc

SEQ ID NO: 48705 - DNA, 27 bp, Homo sapiens
  source 1..27: mol_type = genomic DNA
gctagctcagtcggtagagcatgggac

SEQ ID NO: 48706 - DNA, 28 bp, Homo sapiens
  source 1..28: mol_type = genomic DNA
gctagctcagtcggtagagcatgggact

SEQ ID NO: 48707 - DNA, 29 bp, Homo sapiens
  source 1..29: mol_type = genomic DNA
gctagctcagtcggtagagcatgggactc

SEQ ID NO: 48708 - DNA, 30 bp, Homo sapiens; identical to SEQ ID NO: 17462
  source 1..30: mol_type = genomic DNA

SEQ ID NO: 48709 - DNA, 31 bp, Homo sapiens; identical to SEQ ID NO: 17463
  source 1..31: mol_type = genomic DNA

SEQ ID NO: 48710 - DNA, 34 bp, Homo sapiens; identical to SEQ ID NO: 17466
  source 1..34: mol_type = genomic DNA

SEQ ID NO: 48711 - DNA, 35 bp, Homo sapiens; identical to SEQ ID NO: 17467
  source 1..35: mol_type = genomic DNA

SEQ ID NO: 48712 - DNA, 36 bp, Homo sapiens; identical to SEQ ID NO: 17468
  source 1..36: mol_type = genomic DNA

SEQ ID NO: 48713 - DNA, 44 bp, Homo sapiens; identical to SEQ ID NO: 17470
  source 1..44: mol_type = genomic DNA

SEQ ID NO: 48714 - DNA, 45 bp, Homo sapiens; identical to SEQ ID NO: 17471
  source 1..45: mol_type = genomic DNA

SEQ ID NO: 48715 - DNA, 16 bp, Homo sapiens
  source 1..16: mol_type = genomic DNA
gctaggattcggcgct

SEQ ID NO: 48716 - DNA, 17 bp, Homo sapiens
  source 1..17: mol_type = genomic DNA
gctatcgggcccatacc

SEQ ID NO: 48717 - DNA, 21 bp, Homo sapiens
  source 1..21: mol_type = genomic DNA
gctatcgggcccataccccga

SEQ ID NO: 48718 - DNA, 47 bp, Homo sapiens; identical to SEQ ID NO: 17537
  source 1..47: mol_type = genomic DNA

SEQ ID NO: 48719 - DNA, 24 bp, Homo sapiens
  source 1..24: mol_type = genomic DNA
gctcacatcaccccataaacacca

SEQ ID NO: 48720 - DNA, 23 bp, Homo sapiens
  source 1..23: mol_type = genomic DNA
gctcaggggtagagcatttgact

SEQ ID NO: 48721 - DNA, 24 bp, Homo sapiens
  source 1..24: mol_type = genomic DNA
gctcagtcggtagagcatgagact

SEQ ID NO: 48722 - DNA, 32 bp, Homo sapiens; identical to SEQ ID NO: 17569
  source 1..32: mol_type = genomic DNA

SEQ ID NO: 48723 - DNA, 24 bp, Homo sapiens
  source 1..24: mol_type = genomic DNA
gctcagtcggtagagcatgggact

SEQ ID NO: 48724 - DNA, 25 bp, Homo sapiens
  source 1..25: mol_type = genomic DNA
gctcagtcggtagagcatgggactc

SEQ ID NO: 48725 - DNA, 26 bp, Homo sapiens
  source 1..26: mol_type = genomic DNA
gctcagtcggtagagcatgggactct

SEQ ID NO: 48726 - DNA, 27 bp, Homo sapiens
  source 1..27: mol_type = genomic DNA
gctcagtcggtagagcatgggactctt

SEQ ID NO: 48727 - DNA, 32 bp, Homo sapiens; identical to SEQ ID NO: 17583
  source 1..32: mol_type = genomic DNA

SEQ ID NO: 48728 - DNA, 33 bp, Homo sapiens; identical to SEQ ID NO: 17584
  source 1..33: mol_type = genomic DNA

SEQ ID NO: 48729 - DNA, 23 bp, Homo sapiens
  source 1..23: mol_type = genomic DNA
gctcagtggtagagcatttgact

SEQ ID NO: 48730 - DNA, 16 bp, Homo sapiens
  source 1..16: mol_type = genomic DNA
gctccatagctcaggg

SEQ ID NO: 48731 - DNA, 23 bp, Homo sapiens
  source 1..23: mol_type = genomic DNA
gctccgaggtgattttcatattg

SEQ ID NO: 48732 - DNA, 30 bp, Homo sapiens; identical to SEQ ID NO: 17645
  source 1..30: mol_type = genomic DNA

SEQ ID NO: 48733 - DNA, 31 bp, Homo sapiens; identical to SEQ ID NO: 17646
  source 1..31: mol_type = genomic DNA

SEQ ID NO: 48734 - DNA, 31 bp, Homo sapiens; identical to SEQ ID NO: 17650
  source 1..31: mol_type = genomic DNA

SEQ ID NO: 48735 - DNA, 16 bp, Homo sapiens
  source 1..16: mol_type = genomic DNA
gctctcaccgccgcgg

SEQ ID NO: 48736 - DNA, 17 bp, Homo sapiens
  source 1..17: mol_type = genomic DNA
gctctcaccgccgcggc

SEQ ID NO: 48737 - DNA, 19 bp, Homo sapiens
  source 1..19: mol_type = genomic DNA
gctctcaccgccgcggccc

SEQ ID NO: 48738 - DNA, 20 bp, Homo sapiens
  source 1..20: mol_type = genomic DNA
gctctcaccgccgcggcccg

SEQ ID NO: 48739 - DNA, 23 bp, Homo sapiens
  source 1..23: mol_type = genomic DNA
gctctcaccgccgcggcccgggt

SEQ ID NO: 48740 - DNA, 42 bp, Homo sapiens; identical to SEQ ID NO: 17670
  source 1..42: mol_type = genomic DNA

SEQ ID NO: 48741 - DNA, 43 bp, Homo sapiens; identical to SEQ ID NO: 17671
  source 1..43: mol_type = genomic DNA

SEQ ID NO: 48742 - DNA, 45 bp, Homo sapiens; identical to SEQ ID NO: 17673
  source 1..45: mol_type = genomic DNA

SEQ ID NO: 48743 - DNA, 19 bp, Homo sapiens
  source 1..19: mol_type = genomic DNA
gctgagtgaagcattggac

SEQ ID NO: 48744 - DNA, 20 bp, Homo sapiens
  source 1..20: mol_type = genomic DNA
gctgagtgaagcattggact

SEQ ID NO: 48745 - DNA, 19 bp, Homo sapiens
  source 1..19: mol_type = genomic DNA
gctggggattgtgggttcg

SEQ ID NO: 48746 - DNA, 36 bp, Homo sapiens; identical to SEQ ID NO: 17706
  source 1..36: mol_type = genomic DNA

SEQ ID NO: 48747 - DNA, 37 bp, Homo sapiens; identical to SEQ ID NO: 17707
  source 1..37: mol_type = genomic DNA

SEQ ID NO: 48748 - DNA, 38 bp, Homo sapiens; identical to SEQ ID NO: 17708
  source 1..38: mol_type = genomic DNA

SEQ ID NO: 48749 - DNA, 24 bp, Homo sapiens
  source 1..24: mol_type = genomic DNA
gctggtgtagtggtatcatgcaag

SEQ ID NO: 48750 - DNA, 25 bp, Homo sapiens
  source 1..25: mol_type = genomic DNA
gctggtgtagtggtatcatgcaaga

SEQ ID NO: 48751 - DNA, 26 bp, Homo sapiens
  source 1..26: mol_type = genomic DNA
gctggtgtagtggtatcatgcaagat

SEQ ID NO: 48752 - DNA, 27 bp, Homo sapiens
  source 1..27: mol_type = genomic DNA
gctggtgtagtggtatcatgcaagatt

SEQ ID NO: 48753 - DNA, 45 bp, Homo sapiens; identical to SEQ ID NO: 17728
  source 1..45: mol_type = genomic DNA

SEQ ID NO: 48754 - DNA, 27 bp, Homo sapiens
  source 1..27: mol_type = genomic DNA
gctggttcgaatccggctcgaaggacc

SEQ ID NO: 48755 - DNA, 27 bp, Homo sapiens
  source 1..27: mol_type = genomic DNA
gctggttcgattccggctcgaaggacc

SEQ ID NO: 48756 - DNA, 16 bp, Homo sapiens
  source 1..16: mol_type = genomic DNA
gctgtgatggccgagt

SEQ ID NO: 48757 - DNA, 17 bp, Homo sapiens
  source 1..17: mol_type = genomic DNA
gctgtgatggccgagtg

SEQ ID NO: 48758 - DNA, 18 bp, Homo sapiens
  source 1..18: mol_type = genomic DNA
gctgtgatggccgagtgg

SEQ ID NO: 48759 - DNA, 22 bp, Homo sapiens
  source 1..22: mol_type = genomic DNA
gctgtgatggccgagtggttaa

SEQ ID NO: 48760 - DNA, 24 bp, Homo sapiens
  source 1..24: mol_type = genomic DNA
gctgtgatggccgagtggttaagg

SEQ ID NO: 48761 - DNA, 25 bp, Homo sapiens
  source 1..25: mol_type = genomic DNA
gctgtgatggccgagtggttaaggc

SEQ ID NO: 48762 - DNA, 18 bp, Homo sapiens
  source 1..18: mol_type = genomic DNA
gcttcaaacctgccgggg

SEQ ID NO: 48763 - DNA, 19 bp, Homo sapiens
  source 1..19: mol_type = genomic DNA
gcttcaaacctgccggggc

SEQ ID NO: 48764 - DNA, 20 bp, Homo sapiens
  source 1..20: mol_type = genomic DNA
gcttcaaacctgccggggct

SEQ ID NO: 48765 - DNA, 21 bp, Homo sapiens
  source 1..21: mol_type = genomic DNA
gcttcaaacctgccggggctt

SEQ ID NO: 48766 - DNA, 23 bp, Homo sapiens
  source 1..23: mol_type = genomic DNA
gcttcaaacctgccggggcttcc

SEQ ID NO: 48767 - DNA, 24 bp, Homo sapiens
  source 1..24: mol_type = genomic DNA
gcttcaaacctgccggggcttcca

SEQ ID NO: 48768 - DNA, 17 bp, Homo sapiens
  source 1..17: mol_type = genomic DNA
gcttctgtagtgtagtg

SEQ ID NO: 48769 - DNA, 18 bp, Homo sapiens
  source 1..18: mol_type = genomic DNA
gcttctgtagtgtagtgg

SEQ ID NO: 48770 - DNA, 19 bp, Homo sapiens
  source 1..19: mol_type = genomic DNA
gcttctgtagtgtagtggt

SEQ ID NO: 48771 - DNA, 23 bp, Homo sapiens
  source 1..23: mol_type = genomic DNA
gcttctgtagtgtagtggttatc

SEQ ID NO: 48772 - DNA, 25 bp, Homo sapiens
  source 1..25: mol_type = genomic DNA
gcttctgtagtgtagtggttatcac

SEQ ID NO: 48773 - DNA, 26 bp, Homo sapiens
  source 1..26: mol_type = genomic DNA
gcttctgtagtgtagtggttatcacg

SEQ ID NO: 48774 - DNA, 29 bp, Homo sapiens
  source 1..29: mol_type = genomic DNA
gcttctgtagtgtagtggttatcacgttc

SEQ ID NO: 48775 - DNA, 30 bp, Homo sapiens; identical to SEQ ID NO: 17799
  source 1..30: mol_type = genomic DNA

SEQ ID NO: 48776 - DNA, 31 bp, Homo sapiens; identical to SEQ ID NO: 17800
  source 1..31: mol_type = genomic DNA

SEQ ID NO: 48777 - DNA, 32 bp, Homo sapiens; identical to SEQ ID NO: 17801
  source 1..32: mol_type = genomic DNA

SEQ ID NO: 48778 - DNA, 33 bp, Homo sapiens; identical to SEQ ID NO: 17802
  source 1..33: mol_type = genomic DNA

SEQ ID NO: 48779 - DNA, 34 bp, Homo sapiens; identical to SEQ ID NO: 17803
  source 1..34: mol_type = genomic DNA

SEQ ID NO: 48780 - DNA, 35 bp, Homo sapiens; identical to SEQ ID NO: 17804
  source 1..35: mol_type = genomic DNA

SEQ ID NO: 48781 - DNA, 36 bp, Homo sapiens; identical to SEQ ID NO: 17805
  source 1..36: mol_type = genomic DNA

SEQ ID NO: 48782 - DNA, 37 bp, Homo sapiens; identical to SEQ ID NO: 17806
  source 1..37: mol_type = genomic DNA

SEQ ID NO: 48783 - DNA, 38 bp, Homo sapiens; identical to SEQ ID NO: 17807
  source 1..38: mol_type = genomic DNA

SEQ ID NO: 48784 - DNA, 39 bp, Homo sapiens; identical to SEQ ID NO: 17808
  source 1..39: mol_type = genomic DNA

SEQ ID NO: 48785 - DNA, 40 bp, Homo sapiens; identical to SEQ ID NO: 17809
  source 1..40: mol_type = genomic DNA

SEQ ID NO: 48786 - DNA, 41 bp, Homo sapiens; identical to SEQ ID NO: 17810
  source 1..41: mol_type = genomic DNA

SEQ ID NO: 48787 - DNA, 43 bp, Homo sapiens; identical to SEQ ID NO: 17811
  source 1..43: mol_type = genomic DNA

SEQ ID NO: 48788 - DNA, 22 bp, Homo sapiens
  source 1..22: mol_type = genomic DNA
gctttacacgcagaaggtcctg

SEQ ID NO: 48789 - DNA, 46 bp, Homo sapiens; identical to SEQ ID NO: 17813
  source 1..46: mol_type = genomic DNA

SEQ ID NO: 48790 - DNA, 38 bp, Homo sapiens; identical to SEQ ID NO: 37914
  source 1..38: mol_type = genomic DNA

SEQ ID NO: 48791 - DNA, 25 bp, Homo sapiens
  source 1..25: mol_type = genomic DNA
gctttgcacgtatgaggccccgggt

SEQ ID NO: 48792 - DNA, 39 bp, Homo sapiens
  source 1..39: mol_type = genomic DNA
gctttgcacgtatgaggccccgggttcaatccccggcat

SEQ ID NO: 48793 - DNA, 40 bp, Homo sapiens; identical to SEQ ID NO: 17827
  source 1..40: mol_type = genomic DNA

SEQ ID NO: 48794 - DNA, 41 bp, Homo sapiens; identical to SEQ ID NO: 17828
  source 1..41: mol_type = genomic DNA

SEQ ID NO: 48795 - DNA, 42 bp, Homo sapiens; identical to SEQ ID NO: 37920
  source 1..42: mol_type = genomic DNA

SEQ ID NO: 48796 - DNA, 46 bp, Homo sapiens
  source 1..46: mol_type = genomic DNA
gctttgcacgtatgaggccccgggttcaatccccggcatctccacc

SEQ ID NO: 48797 - DNA, 41 bp, Homo sapiens; identical to SEQ ID NO: 17862
  source 1..41: mol_type = genomic DNA

SEQ ID NO: 48798 - DNA, 42 bp, Homo sapiens; identical to SEQ ID NO: 17863
  source 1..42: mol_type = genomic DNA

SEQ ID NO: 48799 - DNA, 43 bp, Homo sapiens; identical to SEQ ID NO: 17864
  source 1..43: mol_type = genomic DNA

SEQ ID NO: 48800 - DNA, 44 bp, Homo sapiens; identical to SEQ ID NO: 17865
  source 1..44: mol_type = genomic DNA

SEQ ID NO: 48801 - DNA, 16 bp, Homo sapiens
  source 1..16: mol_type = genomic DNA
ggaagcgtgctgggcc

SEQ ID NO: 48802 - DNA, 17 bp, Homo sapiens
  source 1..17: mol_type = genomic DNA
ggaagcgtgctgggccc

SEQ ID NO: 48803 - DNA, 18 bp, Homo sapiens
  source 1..18: mol_type = genomic DNA
ggaagcgtgctgggccca

SEQ ID NO: 48804 - DNA, 23 bp, Homo sapiens
  source 1..23: mol_type = genomic DNA
ggaagcgtgctgggcccataacc

SEQ ID NO: 48805 - DNA, 24 bp, Homo sapiens
  source 1..24: mol_type = genomic DNA
ggaagcgtgctgggcccataaccc

SEQ ID NO: 48806 - DNA, 27 bp, Homo sapiens
  source 1..27: mol_type = genomic DNA
ggaagcgtgctgggcccataacccaga

SEQ ID NO: 48807 - DNA, 37 bp, Homo sapiens; identical to SEQ ID NO: 17881
  source 1..37: mol_type = genomic DNA

SEQ ID NO: 48808 - DNA, 38 bp, Homo sapiens; identical to SEQ ID NO: 17882
  source 1..38: mol_type = genomic DNA

SEQ ID NO: 48809 - DNA, 25 bp, Homo sapiens
  source 1..25: mol_type = genomic DNA
ggactctgaatccagcgatccgagt

SEQ ID NO: 48810 - DNA, 32 bp, Homo sapiens; identical to SEQ ID NO: 17910
  source 1..32: mol_type = genomic DNA

SEQ ID NO: 48811 - DNA, 33 bp, Homo sapiens; identical to SEQ ID NO: 17911
  source 1..33: mol_type = genomic DNA

SEQ ID NO: 48812 - DNA, 18 bp, Homo sapiens
  source 1..18: mol_type = genomic DNA
ggagaccggggttcgatt

SEQ ID NO: 48813 - DNA, 26 bp, Homo sapiens
  source 1..26: mol_type = genomic DNA
ggagaccggggttcgattccccgacg

SEQ ID NO: 48814 - DNA, 27 bp, Homo sapiens
  source 1..27: mol_type = genomic DNA
ggagaccggggttcgattccccgacgg

SEQ ID NO: 48815 - DNA, 28 bp, Homo sapiens
  source 1..28: mol_type = genomic DNA
ggagaccggggttcgattccccgacggg

SEQ ID NO: 48816 - DNA, 29 bp, Homo sapiens
  source 1..29: mol_type = genomic DNA
ggagaccggggttcgattccccgacgggg

SEQ ID NO: 48817 - DNA, 30 bp, Homo sapiens; identical to SEQ ID NO: 17919
  source 1..30: mol_type = genomic DNA

SEQ ID NO: 48818 - DNA, 31 bp, Homo sapiens; identical to SEQ ID NO: 17920
  source 1..31: mol_type = genomic DNA

SEQ ID NO: 48819 - DNA, 32 bp, Homo sapiens; identical to SEQ ID NO: 17921
  source 1..32: mol_type = genomic DNA

SEQ ID NO: 48820 - DNA, 33 bp, Homo sapiens; identical to SEQ ID NO: 17922
  source 1..33: mol_type = genomic DNA

SEQ ID NO: 48821 - DNA, 34 bp, Homo sapiens; identical to SEQ ID NO: 17923
  source 1..34: mol_type = genomic DNA

SEQ ID NO: 48822 - DNA, 31 bp, Homo sapiens; identical to SEQ ID NO: 17927
  source 1..31: mol_type = genomic DNA

SEQ ID NO: 48823 - DNA, 34 bp, Homo sapiens; identical to SEQ ID NO: 17934
  source 1..34: mol_type = genomic DNA

SEQ ID NO: 48824 - DNA, 26 bp, Homo sapiens
  source 1..26: mol_type = genomic DNA
ggagatgaaaacctttttccaaggac

SEQ ID NO: 48825 - DNA, 27 bp, Homo sapiens
  source 1..27: mol_type = genomic DNA
ggagatgaaaacctttttccaaggaca

SEQ ID NO: 48826 - DNA, 28 bp, Homo sapiens
  source 1..28: mol_type = genomic DNA
ggagatgaaaacctttttccaaggacac

SEQ ID NO: 48827 - DNA, 29 bp, Homo sapiens
  source 1..29: mol_type = genomic DNA
ggagatgaaaacctttttccaaggacacc

SEQ ID NO: 48828 - DNA, 30 bp, Homo sapiens; identical to SEQ ID NO: 17942
  source 1..30: mol_type = genomic DNA

SEQ ID NO: 48829 - DNA, 29 bp, Homo sapiens
  source 1..29: mol_type = genomic DNA
ggagatttcaacttaacttgaccgctctg

SEQ ID NO: 48830 - DNA, 30 bp, Homo sapiens; identical to SEQ ID NO: 17956
  source 1..30: mol_type = genomic DNA

SEQ ID NO: 48831 - DNA, 31 bp, Homo sapiens; identical to SEQ ID NO: 17957
  source 1..31: mol_type = genomic DNA

SEQ ID NO: 48832 - DNA, 32 bp, Homo sapiens; identical to SEQ ID NO: 17958
  source 1..32: mol_type = genomic DNA

SEQ ID NO: 48833 - DNA, 33 bp, Homo sapiens; identical to SEQ ID NO: 17959
  source 1..33: mol_type = genomic DNA

SEQ ID NO: 48834 - DNA, 19 bp, Homo sapiens
  source 1..19: mol_type = genomic DNA
ggagctggggattgtgggt

SEQ ID NO: 48835 - DNA, 21 bp, Homo sapiens
  source 1..21: mol_type = genomic DNA
ggagctggggattgtgggttc

SEQ ID NO: 48836 - DNA, 22 bp, Homo sapiens
  source 1..22: mol_type = genomic DNA
ggagctggggattgtgggttcg

SEQ ID NO: 48837 - DNA, 28 bp, Homo sapiens
  source 1..28: mol_type = genomic DNA
ggagctggggattgtgggttcgagtccc

SEQ ID NO: 48838 - DNA, 38 bp, Homo sapiens
  source 1..38: mol_type = genomic DNA
ggagctggggattgtgggttcgagtcccatctgggtcg

SEQ ID NO: 48839 - DNA, 40 bp, Homo sapiens; identical to SEQ ID NO: 17963
  source 1..40: mol_type = genomic DNA

SEQ ID NO: 48840 - DNA, 16 bp, Homo sapiens
  source 1..16: mol_type = genomic DNA
ggagcttaaaccccct

SEQ ID NO: 48841 - DNA, 26 bp, Homo sapiens
  source 1..26: mol_type = genomic DNA
ggagcttaaacccccttatttctacc

SEQ ID NO: 48842 - DNA, 16 bp, Homo sapiens
  source 1..16: mol_type = genomic DNA
ggaggcccgggttcga

SEQ ID NO: 48843 - DNA, 33 bp, Homo sapiens; identical to SEQ ID NO: 17973
  source 1..33: mol_type = genomic DNA

SEQ ID NO: 48844 - DNA, 24 bp, Homo sapiens
  source 1..24: mol_type = genomic DNA
ggagttaaagactttttctctgac

SEQ ID NO: 48845 - DNA, 25 bp, Homo sapiens
  source 1..25: mol_type = genomic DNA
ggagttaaagactttttctctgacc

SEQ ID NO: 48846 - DNA, 26 bp, Homo sapiens
  source 1..26: mol_type = genomic DNA
ggagttaaagactttttctctgacca

SEQ ID NO: 48847 - DNA, 17 bp, Homo sapiens
  source 1..17: mol_type = genomic DNA
ggataacgcgtctgact

SEQ ID NO: 48848 - DNA, 34 bp, Homo sapiens; identical to SEQ ID NO: 18002
  source 1..34: mol_type = genomic DNA

SEQ ID NO: 48849 - DNA, 17 bp, Homo sapiens
  source 1..17: mol_type = genomic DNA
ggataaggcgtctgact

SEQ ID NO: 48850 - DNA, 16 bp, Homo sapiens
  source 1..16: mol_type = genomic DNA
ggatagcgcattggac

SEQ ID NO: 48851 - DNA, 18 bp, Homo sapiens
  source 1..18: mol_type = genomic DNA
ggatagctcagtcggtag

SEQ ID NO: 48852 - DNA, 19 bp, Homo sapiens
  source 1..19: mol_type = genomic DNA
ggatagctcagtcggtaga

SEQ ID NO: 48853 - DNA, 20 bp, Homo sapiens
  source 1..20: mol_type = genomic DNA
ggatagctcagtcggtagag

SEQ ID NO: 48854 - DNA, 28 bp, Homo sapiens
  source 1..28: mol_type = genomic DNA
ggatagctcagtcggtagagcatcagac

SEQ ID NO: 48855 - DNA, 22 bp, Homo sapiens
  source 1..22: mol_type = genomic DNA
ggatcagaagattctaggttcg

SEQ ID NO: 48856 - DNA, 31 bp, Homo sapiens; identical to SEQ ID NO: 18031
  source 1..31: mol_type = genomic DNA

SEQ ID NO: 48857 - DNA, 16 bp, Homo sapiens
  source 1..16: mol_type = genomic DNA
ggatggaggcgtgggt

SEQ ID NO: 48858 - DNA, 37 bp, Homo sapiens; identical to SEQ ID NO: 18053
  source 1..37: mol_type = genomic DNA

SEQ ID NO: 48859 - DNA, 16 bp, Homo sapiens
  source 1..16: mol_type = genomic DNA
ggatggccgagcggtc

SEQ ID NO: 48860 - DNA, 18 bp, Homo sapiens
  source 1..18: mol_type = genomic DNA
ggatggccgagcggtcta

SEQ ID NO: 48861 - DNA, 20 bp, Homo sapiens
  source 1..20: mol_type = genomic DNA
ggatggccgagcggtctaag

SEQ ID NO: 48862 - DNA, 22 bp, Homo sapiens
  source 1..22: mol_type = genomic DNA
ggatggccgagcggtctaaggc

SEQ ID NO: 48863 - DNA, 28 bp, Homo sapiens
  source 1..28: mol_type = genomic DNA
ggatggccgagcggtctaaggcgctgcg

SEQ ID NO: 48864 - DNA, 29 bp, Homo sapiens
  source 1..29: mol_type = genomic DNA
ggatggggtgtgataggtggcacggagaa

SEQ ID NO: 48865 - DNA, 30 bp, Homo sapiens; identical to SEQ ID NO: 18074
  source 1..30: mol_type = genomic DNA

SEQ ID NO: 48866 - DNA, 34 bp, Homo sapiens; identical to SEQ ID NO: 18078
  source 1..34: mol_type = genomic DNA

SEQ ID NO: 48867 - DNA, 16 bp, Homo sapiens
  source 1..16: mol_type = genomic DNA
ggattcggcgctctca

SEQ ID NO: 48868 - DNA, 18 bp, Homo sapiens
  source 1..18: mol_type = genomic DNA
ggattcggcgctctcacc

SEQ ID NO: 48869 - DNA, 21 bp, Homo sapiens
  source 1..21: mol_type = genomic DNA
ggattcggcgctctcaccgcc

SEQ ID NO: 48870 - DNA, 28 bp, Homo sapiens
  source 1..28: mol_type = genomic DNA
ggattcggcgctctcaccgccgcggccc

SEQ ID NO: 48871 - DNA, 23 bp, Homo sapiens
  source 1..23: mol_type = genomic DNA
ggattgtgggttcgagtcccatc

SEQ ID NO: 48872 - DNA, 31 bp, Homo sapiens; identical to SEQ ID NO: 18115
  source 1..31: mol_type = genomic DNA

SEQ ID NO: 48873 - DNA, 32 bp, Homo sapiens; identical to SEQ ID NO: 18116
  source 1..32: mol_type = genomic DNA

SEQ ID NO: 48874 - DNA, 16 bp, Homo sapiens
  source 1..16: mol_type = genomic DNA
ggcagagcatttgact

SEQ ID NO: 48875 - DNA, 31 bp, Homo sapiens
  source 1..31: mol_type = genomic DNA
ggcagagtggtgcagcggaagcgtgctgggc

SEQ ID NO: 48876 - DNA, 19 bp, Homo sapiens
  source 1..19: mol_type = genomic DNA
ggcagcgatggccgagtgg

SEQ ID NO: 48877 - DNA, 27 bp, Homo sapiens
  source 1..27: mol_type = genomic DNA
ggcatcagcctccggagctggggattg

SEQ ID NO: 48878 - DNA, 28 bp, Homo sapiens
  source 1..28: mol_type = genomic DNA
ggcatcagcctccggagctggggattgt

SEQ ID NO: 48879 - DNA, 32 bp, Homo sapiens; identical to SEQ ID NO: 18136
  source 1..32: mol_type = genomic DNA

SEQ ID NO: 48880 - DNA, 33 bp, Homo sapiens; identical to SEQ ID NO: 18137
  source 1..33: mol_type = genomic DNA

SEQ ID NO: 48881 - DNA, 19 bp, Homo sapiens
  source 1..19: mol_type = genomic DNA
ggcattggtggttcagtgg

SEQ ID NO: 48882 - DNA, 31 bp, Homo sapiens; identical to SEQ ID NO: 38026
  source 1..31: mol_type = genomic DNA

SEQ ID NO: 48883 - DNA, 32 bp, Homo sapiens; identical to SEQ ID NO: 18142
  source 1..32: mol_type = genomic DNA

SEQ ID NO: 48884 - DNA, 33 bp, Homo sapiens; identical to SEQ ID NO: 18143
  source 1..33: mol_type = genomic DNA

SEQ ID NO: 48885 - DNA, 32 bp, Homo sapiens
  source 1..32: mol_type = genomic DNA
ggccatgatcgtatagtggttagtactctgcg

SEQ ID NO: 48886 - DNA, 33 bp, Homo sapiens; identical to SEQ ID NO: 18183
  source 1..33: mol_type = genomic DNA

SEQ ID NO: 48887 - DNA, 34 bp, Homo sapiens; identical to SEQ ID NO: 18184
  source 1..34: mol_type = genomic DNA

SEQ ID NO: 48888 - DNA, 32 bp, Homo sapiens; identical to SEQ ID NO: 18195
  source 1..32: mol_type = genomic DNA

SEQ ID NO: 48889 - DNA, 33 bp, Homo sapiens; identical to SEQ ID NO: 18196
  source 1..33: mol_type = genomic DNA

SEQ ID NO: 48890 - DNA, 36 bp, Homo sapiens; identical to SEQ ID NO: 18199
  source 1..36: mol_type = genomic DNA

SEQ ID NO: 48891 - DNA, 40 bp, Homo sapiens; identical to SEQ ID NO: 18201
  source 1..40: mol_type = genomic DNA

SEQ ID NO: 48892 - DNA, 41 bp, Homo sapiens; identical to SEQ ID NO: 18202
  source 1..41: mol_type = genomic DNA

SEQ ID NO: 48893 - DNA, 31 bp, Homo sapiens; identical to SEQ ID NO: 38039
  source 1..31: mol_type = genomic DNA

SEQ ID NO: 48894 - DNA, 32 bp, Homo sapiens; identical to SEQ ID NO: 18204
  source 1..32: mol_type = genomic DNA

SEQ ID NO: 48895 - DNA, 31 bp, Homo sapiens; identical to SEQ ID NO: 38040
  source 1..31: mol_type = genomic DNA

SEQ ID NO: 48896 - DNA, 32 bp, Homo sapiens
  source 1..32: mol_type = genomic DNA
ggccccgggttcgatccccggcatctccacca

SEQ ID NO: 48897 - DNA, 18 bp, Homo sapiens
  source 1..18: mol_type = genomic DNA
ggcccgggttcgactccc

SEQ ID NO: 48898 - DNA, 27 bp, Homo sapiens
  source 1..27: mol_type = genomic DNA
ggcccgggttcgactcccggtgtggga

SEQ ID NO: 48899 - DNA, 28 bp, Homo sapiens
  source 1..28: mol_type = genomic DNA
ggcccgggttcgactcccggtgtgggaa

SEQ ID NO: 48900 - DNA, 29 bp, Homo sapiens
  source 1..29: mol_type = genomic DNA
ggcccgggttcgactcccggtgtgggaac

SEQ ID NO: 48901 - DNA, 30 bp, Homo sapiens; identical to SEQ ID NO: 18208
  source 1..30: mol_type = genomic DNA

SEQ ID NO: 48902 - DNA, 31 bp, Homo sapiens; identical to SEQ ID NO: 18209
  source 1..31: mol_type = genomic DNA

SEQ ID NO: 48903 - DNA, 29 bp, Homo sapiens
  source 1..29: mol_type = genomic DNA
ggcccgggttcgattcccggtcagggaac

SEQ ID NO: 48904 - DNA, 31 bp, Homo sapiens
  source 1..31: mol_type = genomic DNA
ggcccgggttcgattcccggtcagggaacca

SEQ ID NO: 48905 - DNA, 16 bp, Homo sapiens
  source 1..16: mol_type = genomic DNA
ggccgagcggtctaag

SEQ ID NO: 48906 - DNA, 21 bp, Homo sapiens
  source 1..21: mol_type = genomic DNA
ggccgcagcaacctcggttcg

SEQ ID NO: 48907 - DNA, 18 bp, Homo sapiens
  source 1..18: mol_type = genomic DNA
ggccgcgtggcctaatgg

SEQ ID NO: 48908 - DNA, 19 bp, Homo sapiens
  source 1..19: mol_type = genomic DNA
ggccgcgtggcctaatgga

SEQ ID NO: 48909 - DNA, 30 bp, Homo sapiens; identical to SEQ ID NO: 18240
  source 1..30: mol_type = genomic DNA

SEQ ID NO: 48910 - DNA, 33 bp, Homo sapiens; identical to SEQ ID NO: 18241
  source 1..33: mol_type = genomic DNA

SEQ ID NO: 48911 - DNA, 19 bp, Homo sapiens
  source 1..19: mol_type = genomic DNA
ggccggttagctcagttgg

SEQ ID NO: 48912 - DNA, 20 bp, Homo sapiens
  source 1..20: mol_type = genomic DNA
ggccggttagctcagttggt

SEQ ID NO: 48913 - DNA, 34 bp, Homo sapiens; identical to SEQ ID NO: 18264
  source 1..34: mol_type = genomic DNA

SEQ ID NO: 48914 - DNA, 16 bp, Homo sapiens
  source 1..16: mol_type = genomic DNA
ggccgtgatcgtatag

SEQ ID NO: 48915 - DNA, 17 bp, Homo sapiens
  source 1..17: mol_type = genomic DNA
ggccgtgatcgtatagt

SEQ ID NO: 48916 - DNA, 18 bp, Homo sapiens
  source 1..18: mol_type = genomic DNA
ggccgtgatcgtatagtg

SEQ ID NO: 48917 - DNA, 19 bp, Homo sapiens
  source 1..19: mol_type = genomic DNA
ggccgtgatcgtatagtgg

SEQ ID NO: 48918 - DNA, 20 bp, Homo sapiens
  source 1..20: mol_type = genomic DNA
ggccgtgatcgtatagtggt

SEQ ID NO: 48919 - DNA, 21 bp, Homo sapiens
  source 1..21: mol_type = genomic DNA
ggccgtgatcgtatagtggtt

SEQ ID NO: 48920 - DNA, 22 bp, Homo sapiens
  source 1..22: mol_type = genomic DNA
ggccgtgatcgtatagtggtta

SEQ ID NO: 48921 - DNA, 23 bp, Homo sapiens
  source 1..23: mol_type = genomic DNA
ggccgtgatcgtatagtggttag

SEQ ID NO: 48922 - DNA, 24 bp, Homo sapiens
  source 1..24: mol_type = genomic DNA
ggccgtgatcgtatagtggttagt

SEQ ID NO: 48923 - DNA, 25 bp, Homo sapiens
  source 1..25: mol_type = genomic DNA
ggccgtgatcgtatagtggttagta

SEQ ID NO: 48924 - DNA, 26 bp, Homo sapiens
  source 1..26: mol_type = genomic DNA
ggccgtgatcgtatagtggttagtac

SEQ ID NO: 48925 - DNA, 27 bp, Homo sapiens
  source 1..27: mol_type = genomic DNA
ggccgtgatcgtatagtggttagtact

SEQ ID NO: 48926 - DNA, 28 bp, Homo sapiens
  source 1..28: mol_type = genomic DNA
ggccgtgatcgtatagtggttagtactc

SEQ ID NO: 48927 - DNA, 29 bp, Homo sapiens
  source 1..29: mol_type = genomic DNA
ggccgtgatcgtatagtggttagtactct

SEQ ID NO: 48928 - DNA, 30 bp, Homo sapiens; identical to SEQ ID NO: 18279
  source 1..30: mol_type = genomic DNA

SEQ ID NO: 48929 - DNA, 31 bp, Homo sapiens; identical to SEQ ID NO: 18280
  source 1..31: mol_type = genomic DNA

SEQ ID NO: 48930 - DNA, 32 bp, Homo sapiens; identical to SEQ ID NO: 18281
  source 1..32: mol_type = genomic DNA

SEQ ID NO: 48931 - DNA, 33 bp, Homo sapiens; identical to SEQ ID NO: 18282
  source 1..33: mol_type = genomic DNA

SEQ ID NO: 48932 - DNA, 34 bp, Homo sapiens; identical to SEQ ID NO: 18283
  source 1..34: mol_type = genomic DNA

SEQ ID NO: 48933 - DNA, 35 bp, Homo sapiens; identical to SEQ ID NO: 18284
  source 1..35: mol_type = genomic DNA

SEQ ID NO: 48934 - DNA, 36 bp, Homo sapiens; identical to SEQ ID NO: 18285
  source 1..36: mol_type = genomic DNA

SEQ ID NO: 48935 - DNA, 37 bp, Homo sapiens; identical to SEQ ID NO: 18286
  source 1..37: mol_type = genomic DNA

SEQ ID NO: 48936 - DNA, 46 bp, Homo sapiens
  source 1..46: mol_type = genomic DNA
ggccgtgatcgtatagtggttagtactctgcgttgtggccgcagca

SEQ ID NO: 48937 - DNA, 18 bp, Homo sapiens
  source 1..18: mol_type = genomic DNA
ggcctcgtggcgcaacgg

SEQ ID NO: 48938 - DNA, 31 bp, Homo sapiens; identical to SEQ ID NO: 18293
  source 1..31: mol_type = genomic DNA

SEQ ID NO: 48939 - DNA, 32 bp, Homo sapiens; identical to SEQ ID NO: 18294
  source 1..32: mol_type = genomic DNA

SEQ ID NO: 48940 - DNA, 22 bp, Homo sapiens
  source 1..22: mol_type = genomic DNA
ggcgctctcaccgccgcggccc

SEQ ID NO: 48941 - DNA, 27 bp, Homo sapiens
  source 1..27: mol_type = genomic DNA
ggcgctctcaccgccgcggcccgggtt

SEQ ID NO: 48942 - DNA, 45 bp, Homo sapiens; identical to SEQ ID NO: 38104
  source 1..45: mol_type = genomic DNA

SEQ ID NO: 48943 - DNA, 46 bp, Homo sapiens; identical to SEQ ID NO: 18316
  source 1..46: mol_type = genomic DNA

SEQ ID NO: 48944 - DNA, 24 bp, Homo sapiens
  source 1..24: mol_type = genomic DNA
ggcggcccgggttcgactcccggt

SEQ ID NO: 48945 - DNA, 29 bp, Homo sapiens
  source 1..29: mol_type = genomic DNA
ggcggcccgggttcgactcccggtgtggg

SEQ ID NO: 48946 - DNA, 30 bp, Homo sapiens; identical to SEQ ID NO: 18326
  source 1..30: mol_type = genomic DNA

SEQ ID NO: 48947 - DNA, 31 bp, Homo sapiens; identical to SEQ ID NO: 18327
  source 1..31: mol_type = genomic DNA

SEQ ID NO: 48948 - DNA, 32 bp, Homo sapiens; identical to SEQ ID NO: 18328
  source 1..32: mol_type = genomic DNA

SEQ ID NO: 48949 - DNA, 33 bp, Homo sapiens; identical to SEQ ID NO: 18329
  source 1..33: mol_type = genomic DNA

SEQ ID NO: 48950 - DNA, 18 bp, Homo sapiens
  source 1..18: mol_type = genomic DNA
ggctagctcagtcggtag

SEQ ID NO: 48951 - DNA, 20 bp, Homo sapiens
  source 1..20: mol_type = genomic DNA
ggctagctcagtcggtagag

SEQ ID NO: 48952 - DNA, 29 bp, Homo sapiens
  source 1..29: mol_type = genomic DNA
ggctagctcagtcggtagagcatgagact

SEQ ID NO: 48953 - DNA, 30 bp, Homo sapiens; identical to SEQ ID NO: 18355
  source 1..30: mol_type = genomic DNA

SEQ ID NO: 48954 - DNA, 45 bp, Homo sapiens; identical to SEQ ID NO: 38121
  source 1..45: mol_type = genomic DNA

SEQ ID NO: 48955 - DNA, 28 bp, Homo sapiens
  source 1..28: mol_type = genomic DNA
ggctagctcagtcggtagagcatgggac

SEQ ID NO: 48956 - DNA, 29 bp, Homo sapiens
  source 1..29: mol_type = genomic DNA
ggctagctcagtcggtagagcatgggact

SEQ ID NO: 48957 - DNA, 30 bp, Homo sapiens; identical to SEQ ID NO: 18370
  source 1..30: mol_type = genomic DNA

SEQ ID NO: 48958 - DNA, 31 bp, Homo sapiens; identical to SEQ ID NO: 18371
  source 1..31: mol_type = genomic DNA

SEQ ID NO: 48959 - DNA, 32 bp, Homo sapiens; identical to SEQ ID NO: 18372
  source 1..32: mol_type = genomic DNA

SEQ ID NO: 48960 - DNA, 35 bp, Homo sapiens; identical to SEQ ID NO: 18375
  source 1..35: mol_type = genomic DNA

SEQ ID NO: 48961 - DNA, 37 bp, Homo sapiens; identical to SEQ ID NO: 18377
  source 1..37: mol_type = genomic DNA

SEQ ID NO: 48962 - DNA, 38 bp, Homo sapiens; identical to SEQ ID NO: 18378
  source 1..38: mol_type = genomic DNA

SEQ ID NO: 48963 - DNA, 45 bp, Homo sapiens; identical to SEQ ID NO: 38127
  source 1..45: mol_type = genomic DNA

SEQ ID NO: 48964 - DNA, 17 bp, Homo sapiens
  source 1..17: mol_type = genomic DNA
ggctccatagctcaggg

SEQ ID NO: 48965 - DNA, 18 bp, Homo sapiens
  source 1..18: mol_type = genomic DNA
ggctccatagctcagggg

SEQ ID NO: 48966 - DNA, 19 bp, Homo sapiens
  source 1..19: mol_type = genomic DNA
ggctccatagctcaggggt

SEQ ID NO: 48967 - DNA, 28 bp, Homo sapiens
  source 1..28: mol_type = genomic DNA
ggctccatagctcaggggttagagcact

SEQ ID NO: 48968 - DNA, 32 bp, Homo sapiens; identical to SEQ ID NO: 18410
  source 1..32: mol_type = genomic DNA

SEQ ID NO: 48969 - DNA, 33 bp, Homo sapiens; identical to SEQ ID NO: 18411
  source 1..33: mol_type = genomic DNA

SEQ ID NO: 48970 - DNA, 19 bp, Homo sapiens
  source 1..19: mol_type = genomic DNA
ggctccatagctcagtggt

SEQ ID NO: 48971 - DNA, 18 bp, Homo sapiens
  source 1..18: mol_type = genomic DNA
ggctccgtggcgcaatgg

SEQ ID NO: 48972 - DNA, 19 bp, Homo sapiens
  source 1..19: mol_type = genomic DNA
ggctccgtggcgcaatgga

SEQ ID NO: 48973 - DNA, 20 bp, Homo sapiens
  source 1..20: mol_type = genomic DNA
ggctccgtggcgcaatggat

SEQ ID NO: 48974 - DNA, 22 bp, Homo sapiens
  source 1..22: mol_type = genomic DNA
ggctccgtggcgcaatggatag

SEQ ID NO: 48975 - DNA, 27 bp, Homo sapiens
  source 1..27: mol_type = genomic DNA
ggctccgtggcgcaatggatagcgcat

SEQ ID NO: 48976 - DNA, 29 bp, Homo sapiens
  source 1..29: mol_type = genomic DNA
ggctccgtggcgcaatggatagcgcattg

SEQ ID NO: 48977 - DNA, 32 bp, Homo sapiens; identical to SEQ ID NO: 18427
  source 1..32: mol_type = genomic DNA

SEQ ID NO: 48978 - DNA, 33 bp, Homo sapiens; identical to SEQ ID NO: 18428
  source 1..33: mol_type = genomic DNA

SEQ ID NO: 48979 - DNA, 35 bp, Homo sapiens; identical to SEQ ID NO: 18430
  source 1..35: mol_type = genomic DNA

SEQ ID NO: 48980 - DNA, 36 bp, Homo sapiens; identical to SEQ ID NO: 18431
  source 1..36: mol_type = genomic DNA

SEQ ID NO: 48981 - DNA, 16 bp, Homo sapiens
  source 1..16: mol_type = genomic DNA
ggctcgttggtctagg

SEQ ID NO: 48982 - DNA, 17 bp, Homo sapiens
  source 1..17: mol_type = genomic DNA
ggctcgttggtctaggg

SEQ ID NO: 48983 - DNA, 18 bp, Homo sapiens
  source 1..18: mol_type = genomic DNA
ggctcgttggtctagggg

SEQ ID NO: 48984 - DNA, 20 bp, Homo sapiens
  source 1..20: mol_type = genomic DNA
ggctcgttggtctaggggta

SEQ ID NO: 48985 - DNA, 25 bp, Homo sapiens
  source 1..25: mol_type = genomic DNA
ggctcgttggtctaggggtatgatt

SEQ ID NO: 48986 - DNA, 26 bp, Homo sapiens
  source 1..26: mol_type = genomic DNA
ggctcgttggtctaggggtatgattc

SEQ ID NO: 48987 - DNA, 27 bp, Homo sapiens
  source 1..27: mol_type = genomic DNA
ggctcgttggtctaggggtatgattct

SEQ ID NO: 48988 - DNA, 28 bp, Homo sapiens
  source 1..28: mol_type = genomic DNA
ggctcgttggtctaggggtatgattctc

SEQ ID NO: 48989 - DNA, 29 bp, Homo sapiens
  source 1..29: mol_type = genomic DNA
ggctcgttggtctaggggtatgattctcg

SEQ ID NO: 48990 - DNA, 30 bp, Homo sapiens; identical to SEQ ID NO: 18447
  source 1..30: mol_type = genomic DNA

SEQ ID NO: 48991 - DNA, 31 bp, Homo sapiens; identical to SEQ ID NO: 18448
  source 1..31: mol_type = genomic DNA

SEQ ID NO: 48992 - DNA, 32 bp, Homo sapiens; identical to SEQ ID NO: 18449
  source 1..32: mol_type = genomic DNA

SEQ ID NO: 48993 - DNA, 33 bp, Homo sapiens; identical to SEQ ID NO: 18450
  source 1..33: mol_type = genomic DNA

SEQ ID NO: 48994 - DNA, 35 bp, Homo sapiens; identical to SEQ ID NO: 18452
  source 1..35: mol_type = genomic DNA

SEQ ID NO: 48995 - DNA, 33 bp, Homo sapiens; identical to SEQ ID NO: 18454
  source 1..33: mol_type = genomic DNA

SEQ ID NO: 48996 - DNA, 35 bp, Homo sapiens; identical to SEQ ID NO: 18456
  source 1..35: mol_type = genomic DNA

SEQ ID NO: 48997 - DNA, 30 bp, Homo sapiens; identical to SEQ ID NO: 38166
  source 1..30: mol_type = genomic DNA

SEQ ID NO: 48998 - DNA, 31 bp, Homo sapiens; identical to SEQ ID NO: 18458
  source 1..31: mol_type = genomic DNA

SEQ ID NO: 48999 - DNA, 32 bp, Homo sapiens; identical to SEQ ID NO: 18459
  source 1..32: mol_type = genomic DNA

SEQ ID NO: 49000 - DNA, 33 bp, Homo sapiens; identical to SEQ ID NO: 18460
  source 1..33: mol_type = genomic DNA

SEQ ID NO: 49001 - DNA, 34 bp, Homo sapiens; identical to SEQ ID NO: 18461
  source 1..34: mol_type = genomic DNA

SEQ ID NO: 49002 - DNA, 31 bp, Homo sapiens; identical to SEQ ID NO: 18467
  source 1..31: mol_type = genomic DNA

SEQ ID NO: 49003 - DNA, 32 bp, Homo sapiens; identical to SEQ ID NO: 18468
  source 1..32: mol_type = genomic DNA

SEQ ID NO: 49004 - DNA, 19 bp, Homo sapiens
  source 1..19: mol_type = genomic DNA
ggctctgtggcgcaatgga

SEQ ID NO: 49005 - DNA, 27 bp, Homo sapiens
  source 1..27: mol_type = genomic DNA
ggctctgtggcgcaatggatagcgcat

SEQ ID NO: 49006 - DNA, 32 bp, Homo sapiens; identical to SEQ ID NO: 18474
  source 1..32: mol_type = genomic DNA

SEQ ID NO: 49007 - DNA, 33 bp, Homo sapiens; identical to SEQ ID NO: 18475
  source 1..33: mol_type = genomic DNA

SEQ ID NO: 49008 - DNA, 23 bp, Homo sapiens
  source 1..23: mol_type = genomic DNA
ggctgttaaccgaaaggttggtg

SEQ ID NO: 49009 - DNA, 26 bp, Homo sapiens
  source 1..26: mol_type = genomic DNA
ggctgttaaccgaaaggttggtggtt

SEQ ID NO: 49010 - DNA, 29 bp, Homo sapiens
  source 1..29: mol_type = genomic DNA
gggactcttaatcccagggtcgtgggttc

SEQ ID NO: 49011 - DNA, 26 bp, Homo sapiens
  source 1..26: mol_type = genomic DNA
gggagaccggggttcaattccccgac

SEQ ID NO: 49012 - DNA, 30 bp, Homo sapiens; identical to SEQ ID NO: 18507
  source 1..30: mol_type = genomic DNA

SEQ ID NO: 49013 - DNA, 33 bp, Homo sapiens; identical to SEQ ID NO: 18510
  source 1..33: mol_type = genomic DNA

SEQ ID NO: 49014 - DNA, 34 bp, Homo sapiens; identical to SEQ ID NO: 18511
  source 1..34: mol_type = genomic DNA

SEQ ID NO: 49015 - DNA, 16 bp, Homo sapiens
  source 1..16: mol_type = genomic DNA
gggagaccggggttcg

SEQ ID NO: 49016 - DNA, 20 bp, Homo sapiens
  source 1..20: mol_type = genomic DNA
gggagaccggggttcgattc

SEQ ID NO: 49017 - DNA, 21 bp, Homo sapiens
  source 1..21: mol_type = genomic DNA
gggagaccggggttcgattcc

SEQ ID NO: 49018 - DNA, 26 bp, Homo sapiens
  source 1..26: mol_type = genomic DNA
gggagaccggggttcgattccccgac

SEQ ID NO: 49019 - DNA, 29 bp, Homo sapiens
  source 1..29: mol_type = genomic DNA
gggagaccggggttcgattccccgacggg

SEQ ID NO: 49020 - DNA, 30 bp, Homo sapiens; identical to SEQ ID NO: 18519
  source 1..30: mol_type = genomic DNA

SEQ ID NO: 49021 - DNA, 31 bp, Homo sapiens; identical to SEQ ID NO: 18520
  source 1..31: mol_type = genomic DNA

SEQ ID NO: 49022 - DNA, 32 bp, Homo sapiens; identical to SEQ ID NO: 18521
  source 1..32: mol_type = genomic DNA

SEQ ID NO: 49023 - DNA, 33 bp, Homo sapiens; identical to SEQ ID NO: 18522
  source 1..33: mol_type = genomic DNA

SEQ ID NO: 49024 - DNA, 34 bp, Homo sapiens; identical to SEQ ID NO: 18523
  source 1..34: mol_type = genomic DNA

SEQ ID NO: 49025 - DNA, 35 bp, Homo sapiens; identical to SEQ ID NO: 18524
  source 1..35: mol_type = genomic DNA

SEQ ID NO: 49026 - DNA, 25 bp, Homo sapiens
  source 1..25: mol_type = genomic DNA
gggaggcccgggttcgattcccggc

SEQ ID NO: 49027 - DNA, 16 bp, Homo sapiens
  source 1..16: mol_type = genomic DNA
gggatgggttcgattc

SEQ ID NO: 49028 - DNA, 18 bp, Homo sapiens
  source 1..18: mol_type = genomic DNA
gggatgggttcgattctc

SEQ ID NO: 49029 - DNA, 30 bp, Homo sapiens; identical to SEQ ID NO: 18538
  source 1..30: mol_type = genomic DNA

SEQ ID NO: 49030 - DNA, 17 bp, Homo sapiens
  source 1..17: mol_type = genomic DNA
gggatgtagctcagtgg

SEQ ID NO: 49031 - DNA, 21 bp, Homo sapiens
  source 1..21: mol_type = genomic DNA
gggatgtagctcagtggtaga

SEQ ID NO: 49032 - DNA, 22 bp, Homo sapiens
  source 1..22: mol_type = genomic DNA
gggatgtagctcagtggtagag

SEQ ID NO: 49033 - DNA, 21 bp, Homo sapiens
  source 1..21: mol_type = genomic DNA
gggattagctcaaatggtaga

SEQ ID NO: 49034 - DNA, 18 bp, Homo sapiens
  source 1..18: mol_type = genomic DNA
gggattgtgggttcgagt

SEQ ID NO: 49035 - DNA, 19 bp, Homo sapiens
  source 1..19: mol_type = genomic DNA
gggattgtgggttcgagtc

SEQ ID NO: 49036 - DNA, 20 bp, Homo sapiens
  source 1..20: mol_type = genomic DNA
gggattgtgggttcgagtcc

SEQ ID NO: 49037 - DNA, 21 bp, Homo sapiens
  source 1..21: mol_type = genomic DNA
gggattgtgggttcgagtccc

SEQ ID NO: 49038 - DNA, 22 bp, Homo sapiens
  source 1..22: mol_type = genomic DNA
gggattgtgggttcgagtccca

SEQ ID NO: 49039 - DNA, 24 bp, Homo sapiens
  source 1..24: mol_type = genomic DNA
gggattgtgggttcgagtcccacc

SEQ ID NO: 49040 - DNA, 28 bp, Homo sapiens
  source 1..28: mol_type = genomic DNA
gggattgtgggttcgagtcccacccggg

SEQ ID NO: 49041 - DNA, 29 bp, Homo sapiens
  source 1..29: mol_type = genomic DNA
gggattgtgggttcgagtcccacccgggg

SEQ ID NO: 49042 - DNA, 30 bp, Homo sapiens; identical to SEQ ID NO: 18559
  source 1..30: mol_type = genomic DNA

SEQ ID NO: 49043 - DNA, 31 bp, Homo sapiens; identical to SEQ ID NO: 18560
  source 1..31: mol_type = genomic DNA

SEQ ID NO: 49044 - DNA, 32 bp, Homo sapiens
  source 1..32: mol_type = genomic DNA
gggattgtgggttcgagtcccacccggggtac

SEQ ID NO: 49045 - DNA, 25 bp, Homo sapiens
  source 1..25: mol_type = genomic DNA
gggattgtgggttcgagtcccacct

SEQ ID NO: 49046 - DNA, 26 bp, Homo sapiens
  source 1..26: mol_type = genomic DNA
gggattgtgggttcgagtcccacctg

SEQ ID NO: 49047 - DNA, 29 bp, Homo sapiens
  source 1..29: mol_type = genomic DNA
gggattgtgggttcgagtcccacctgggg

SEQ ID NO: 49048 - DNA, 31 bp, Homo sapiens
  source 1..31: mol_type = genomic DNA
gggattgtgggttcgagtcccacctggggtg

SEQ ID NO: 49049 - DNA, 33 bp, Homo sapiens
  source 1..33: mol_type = genomic DNA
gggattgtgggttcgagtcccacctggggtgcc

SEQ ID NO: 49050 - DNA, 24 bp, Homo sapiens
  source 1..24: mol_type = genomic DNA
gggattgtgggttcgagtcccatc

SEQ ID NO: 49051 - DNA, 26 bp, Homo sapiens
  source 1..26: mol_type = genomic DNA
gggattgtgggttcgagtcccatctg

SEQ ID NO: 49052 - DNA, 28 bp, Homo sapiens
  source 1..28: mol_type = genomic DNA
gggattgtgggttcgagtcccatctggg

SEQ ID NO: 49053 - DNA, 29 bp, Homo sapiens
  source 1..29: mol_type = genomic DNA
gggattgtgggttcgagtcccatctgggg

SEQ ID NO: 49054 - DNA, 30 bp, Homo sapiens
  source 1..30: mol_type = genomic DNA
gggattgtgggttcgagtcccatctggggt

SEQ ID NO: 49055 - DNA, 31 bp, Homo sapiens; identical to SEQ ID NO: 18565
  source 1..31: mol_type = genomic DNA

SEQ ID NO: 49056 - DNA, 32 bp, Homo sapiens; identical to SEQ ID NO: 18566
  source 1..32: mol_type = genomic DNA

SEQ ID NO: 49057 - DNA, 33 bp, Homo sapiens; identical to SEQ ID NO: 18567
  source 1..33: mol_type = genomic DNA

SEQ ID NO: 49058 - DNA, 34 bp, Homo sapiens; identical to SEQ ID NO: 18568
  source 1..34: mol_type = genomic DNA

SEQ ID NO: 49059 - DNA, 33 bp, Homo sapiens; identical to SEQ ID NO: 18570
  source 1..33: mol_type = genomic DNA

SEQ ID NO: 49060 - DNA, 34 bp, Homo sapiens; identical to SEQ ID NO: 18571
  source 1..34: mol_type = genomic DNA

SEQ ID NO: 49061 - DNA, 19 bp, Homo sapiens
  source 1..19: mol_type = genomic DNA
gggccagtggcgcaatgga

SEQ ID NO: 49062 - DNA, 20 bp, Homo sapiens
  source 1..20: mol_type = genomic DNA
gggccagtggcgcaatggat

SEQ ID NO: 49063 - DNA, 24 bp, Homo sapiens
  source 1..24: mol_type = genomic DNA
gggccagtggcgcaatggataacg

SEQ ID NO: 49064 - DNA, 30 bp, Homo sapiens
  source 1..30: mol_type = genomic DNA
gggccagtggcgcaatggataacgcgtctg

SEQ ID NO: 49065 - DNA, 32 bp, Homo sapiens; identical to SEQ ID NO: 18578
  source 1..32: mol_type = genomic DNA

SEQ ID NO: 49066 - DNA, 33 bp, Homo sapiens; identical to SEQ ID NO: 18579
  source 1..33: mol_type = genomic DNA

SEQ ID NO: 49067 - DNA, 27 bp, Homo sapiens
  source 1..27: mol_type = genomic DNA
gggcccataacccagaggtcgatggat

SEQ ID NO: 49068 - DNA, 16 bp, Homo sapiens
  source 1..16: mol_type = genomic DNA
gggcccataccccgaa

SEQ ID NO: 49069 - DNA, 17 bp, Homo sapiens
  source 1..17: mol_type = genomic DNA
gggcccataccccgaaa

SEQ ID NO: 49070 - DNA, 18 bp, Homo sapiens
  source 1..18: mol_type = genomic DNA
gggcccataccccgaaaa

SEQ ID NO: 49071 - DNA, 26 bp, Homo sapiens
  source 1..26: mol_type = genomic DNA
gggcccataccccgaaaatgttggtt

SEQ ID NO: 49072 - DNA, 42 bp, Homo sapiens; identical to SEQ ID NO: 18609
  source 1..42: mol_type = genomic DNA

SEQ ID NO: 49073 - DNA, 45 bp, Homo sapiens; identical to SEQ ID NO: 18612
  source 1..45: mol_type = genomic DNA

SEQ ID NO: 49074 - DNA, 46 bp, Homo sapiens; identical to SEQ ID NO: 18613
  source 1..46: mol_type = genomic DNA

SEQ ID NO: 49075 - DNA, 32 bp, Homo sapiens; identical to SEQ ID NO: 38252
  source 1..32: mol_type = genomic DNA

SEQ ID NO: 49076 - DNA, 19 bp, Homo sapiens
  source 1..19: mol_type = genomic DNA
ggggaattagctcaaatgg

SEQ ID NO: 49077 - DNA, 20 bp, Homo sapiens
  source 1..20: mol_type = genomic DNA
ggggaattagctcaaatggt

SEQ ID NO: 49078 - DNA, 23 bp, Homo sapiens
  source 1..23: mol_type = genomic DNA
ggggaattagctcaaatggtaga

SEQ ID NO: 49079 - DNA, 32 bp, Homo sapiens; identical to SEQ ID NO: 18633
  source 1..32: mol_type = genomic DNA

SEQ ID NO: 49080 - DNA, 33 bp, Homo sapiens; identical to SEQ ID NO: 18634
  source 1..33: mol_type = genomic DNA

SEQ ID NO: 49081 - DNA, 16 bp, Homo sapiens
  source 1..16: mol_type = genomic DNA
ggggatgtagctcagt

SEQ ID NO: 49082 - DNA, 17 bp, Homo sapiens
  source 1..17: mol_type = genomic DNA
ggggatgtagctcagtg

SEQ ID NO: 49083 - DNA, 18 bp, Homo sapiens
  source 1..18: mol_type = genomic DNA
ggggatgtagctcagtgg

SEQ ID NO: 49084 - DNA, 19 bp, Homo sapiens
  source 1..19: mol_type = genomic DNA
ggggatgtagctcagtggt

SEQ ID NO: 49085 - DNA, 20 bp, Homo sapiens
  source 1..20: mol_type = genomic DNA
ggggatgtagctcagtggta

SEQ ID NO: 49086 - DNA, 21 bp, Homo sapiens
  source 1..21: mol_type = genomic DNA
ggggatgtagctcagtggtag

SEQ ID NO: 49087 - DNA, 22 bp, Homo sapiens
  source 1..22: mol_type = genomic DNA
ggggatgtagctcagtggtaga

SEQ ID NO: 49088 - DNA, 23 bp, Homo sapiens
  source 1..23: mol_type = genomic DNA
ggggatgtagctcagtggtagag

SEQ ID NO: 49089 - DNA, 24 bp, Homo sapiens
  source 1..24: mol_type = genomic DNA
ggggatgtagctcagtggtagagc

SEQ ID NO: 49090 - DNA, 26 bp, Homo sapiens
  source 1..26: mol_type = genomic DNA
ggggatgtagctcagtggtagagcgc

SEQ ID NO: 49091 - DNA, 27 bp, Homo sapiens
  source 1..27: mol_type = genomic DNA
ggggatgtagctcagtggtagagcgca

SEQ ID NO: 49092 - DNA, 28 bp, Homo sapiens
  source 1..28: mol_type = genomic DNA
ggggatgtagctcagtggtagagcgcat

SEQ ID NO: 49093 - DNA, 30 bp, Homo sapiens; identical to SEQ ID NO: 18649
  source 1..30: mol_type = genomic DNA

SEQ ID NO: 49094 - DNA, 31 bp, Homo sapiens; identical to SEQ ID NO: 18650
  source 1..31: mol_type = genomic DNA

SEQ ID NO: 49095 - DNA, 32 bp, Homo sapiens; identical to SEQ ID NO: 18651
  source 1..32: mol_type = genomic DNA

SEQ ID NO: 49096 - DNA, 43 bp, Homo sapiens
  source 1..43: mol_type = genomic DNA
ggggatgtagctcagtggtagagcgcatgctttgcacgtatga

SEQ ID NO: 49097 - DNA, 27 bp, Homo sapiens
  source 1..27: mol_type = genomic DNA
ggggatgtagctcagtggtagagcgcg

SEQ ID NO: 49098 - DNA, 28 bp, Homo sapiens
  source 1..28: mol_type = genomic DNA
ggggatgtagctcagtggtagagcgcgc

SEQ ID NO: 49099 - DNA, 29 bp, Homo sapiens
  source 1..29: mol_type = genomic DNA
ggggatgtagctcagtggtagagcgcgcg

SEQ ID NO: 49100 - DNA, 30 bp, Homo sapiens; identical to SEQ ID NO: 18658
  source 1..30: mol_type = genomic DNA

SEQ ID NO: 49101 - DNA, 31 bp, Homo sapiens; identical to SEQ ID NO: 18659
  source 1..31: mol_type = genomic DNA

SEQ ID NO: 49102 - DNA, 32 bp, Homo sapiens; identical to SEQ ID NO: 18660
  source 1..32: mol_type = genomic DNA

SEQ ID NO: 49103 - DNA, 35 bp, Homo sapiens; identical to SEQ ID NO: 18663
  source 1..35: mol_type = genomic DNA

SEQ ID NO: 49104 - DNA, 16 bp, Homo sapiens
  source 1..16: mol_type = genomic DNA
ggggattgtgggttcg

SEQ ID NO: 49105 - DNA, 20 bp, Homo sapiens
  source 1..20: mol_type = genomic DNA
ggggattgtgggttcgagtc

SEQ ID NO: 49106 - DNA, 21 bp, Homo sapiens
  source 1..21: mol_type = genomic DNA
ggggattgtgggttcgagtcc

SEQ ID NO: 49107 - DNA, 22 bp, Homo sapiens
  source 1..22: mol_type = genomic DNA
ggggattgtgggttcgagtccc

SEQ ID NO: 49108 - DNA, 23 bp, Homo sapiens
  source 1..23: mol_type = genomic DNA
ggggattgtgggttcgagtccca

SEQ ID NO: 49109 - DNA, 25 bp, Homo sapiens
  source 1..25: mol_type = genomic DNA
ggggattgtgggttcgagtcccatc

SEQ ID NO: 49110 - DNA, 31 bp, Homo sapiens; identical to SEQ ID NO: 18671
  source 1..31: mol_type = genomic DNA

SEQ ID NO: 49111 - DNA, 32 bp, Homo sapiens; identical to SEQ ID NO: 18672
  source 1..32: mol_type = genomic DNA

SEQ ID NO: 49112 - DNA, 34 bp, Homo sapiens; identical to SEQ ID NO: 18674
  source 1..34: mol_type = genomic DNA

SEQ ID NO: 49113 - DNA, 35 bp, Homo sapiens; identical to SEQ ID NO: 18675
  source 1..35: mol_type = genomic DNA

SEQ ID NO: 49114 - DNA, 16 bp, Homo sapiens
  source 1..16: mol_type = genomic DNA
gggggattagctcaaa

SEQ ID NO: 49115 - DNA, 19 bp, Homo sapiens
  source 1..19: mol_type = genomic DNA
gggggattagctcaaatgg

SEQ ID NO: 49116 - DNA, 20 bp, Homo sapiens
  source 1..20: mol_type = genomic DNA
gggggattagctcaaatggt

SEQ ID NO: 49117 - DNA, 23 bp, Homo sapiens
  source 1..23: mol_type = genomic DNA
gggggattagctcaaatggtaga

SEQ ID NO: 49118 - DNA, 25 bp, Homo sapiens
  source 1..25: mol_type = genomic DNA
gggggattagctcaaatggtagagc

SEQ ID NO: 49119 - DNA, 29 bp, Homo sapiens
  source 1..29: mol_type = genomic DNA
gggggattagctcaaatggtagagcgctc

SEQ ID NO: 49120 - DNA, 31 bp, Homo sapiens; identical to SEQ ID NO: 18691
  source 1..31: mol_type = genomic DNA

SEQ ID NO: 49121 - DNA, 32 bp, Homo sapiens; identical to SEQ ID NO: 18692
  source 1..32: mol_type = genomic DNA

SEQ ID NO: 49122 - DNA, 33 bp, Homo sapiens; identical to SEQ ID NO: 18693
  source 1..33: mol_type = genomic DNA

SEQ ID NO: 49123 - DNA, 24 bp, Homo sapiens
  source 1..24: mol_type = genomic DNA
gggggcatagctcagtggtagagc

SEQ ID NO: 49124 - DNA, 25 bp, Homo sapiens
  source 1..25: mol_type = genomic DNA
gggggcatagctcagtggtagagca

SEQ ID NO: 49125 - DNA, 26 bp, Homo sapiens
  source 1..26: mol_type = genomic DNA
gggggcatagctcagtggtagagcat

SEQ ID NO: 49126 - DNA, 32 bp, Homo sapiens; identical to SEQ ID NO: 18700
  source 1..32: mol_type = genomic DNA

SEQ ID NO: 49127 - DNA, 33 bp, Homo sapiens; identical to SEQ ID NO: 18701
  source 1..33: mol_type = genomic DNA

SEQ ID NO: 49128 - DNA, 34 bp, Homo sapiens; identical to SEQ ID NO: 18702
  source 1..34: mol_type = genomic DNA

SEQ ID NO: 49129 - DNA, 16 bp, Homo sapiens
  source 1..16: mol_type = genomic DNA
gggggtatagctcagc

SEQ ID NO: 49130 - DNA, 17 bp, Homo sapiens
  source 1..17: mol_type = genomic DNA
gggggtatagctcaggg

SEQ ID NO: 49131 - DNA, 18 bp, Homo sapiens
  source 1..18: mol_type = genomic DNA
gggggtatagctcagggg

SEQ ID NO: 49132 - DNA, 24 bp, Homo sapiens
  source 1..24: mol_type = genomic DNA
gggggtatagctcaggggtagagc

SEQ ID NO: 49133 - DNA, 25 bp, Homo sapiens
  source 1..25: mol_type = genomic DNA
gggggtatagctcaggggtagagca

SEQ ID NO: 49134 - DNA, 32 bp, Homo sapiens; identical to SEQ ID NO: 18715
  source 1..32: mol_type = genomic DNA

SEQ ID NO: 49135 - DNA, 26 bp, Homo sapiens
  source 1..26: mol_type = genomic DNA
gggggtatagctcaggggtagagcat

SEQ ID NO: 49136 - DNA, 27 bp, Homo sapiens
  source 1..27: mol_type = genomic DNA
gggggtatagctcaggggtagagcatt

SEQ ID NO: 49137 - DNA, 31 bp, Homo sapiens; identical to SEQ ID NO: 18723
  source 1..31: mol_type = genomic DNA

SEQ ID NO: 49138 - DNA, 32 bp, Homo sapiens; identical to SEQ ID NO: 18724
  source 1..32: mol_type = genomic DNA

SEQ ID NO: 49139 - DNA, 33 bp, Homo sapiens; identical to SEQ ID NO: 18725
  source 1..33: mol_type = genomic DNA

SEQ ID NO: 49140 - DNA, 34 bp, Homo sapiens; identical to SEQ ID NO: 18726
  source 1..34: mol_type = genomic DNA

SEQ ID NO: 49141 - DNA, 33 bp, Homo sapiens; identical to SEQ ID NO: 18729
  source 1..33: mol_type = genomic DNA

SEQ ID NO: 49142 - DNA, 35 bp, Homo sapiens; identical to SEQ ID NO: 18731
  source 1..35: mol_type = genomic DNA

SEQ ID NO: 49143 - DNA, 18 bp, Homo sapiens
  source 1..18: mol_type = genomic DNA
gggggtatagctcagtgg

SEQ ID NO: 49144 - DNA, 19 bp, Homo sapiens
  source 1..19: mol_type = genomic DNA
gggggtatagctcagtggg

SEQ ID NO: 49145 - DNA, 33 bp, Homo sapiens; identical to SEQ ID NO: 18737
  source 1..33: mol_type = genomic DNA

SEQ ID NO: 49146 - DNA, 34 bp, Homo sapiens; identical to SEQ ID NO: 18738
  source 1..34: mol_type = genomic DNA

SEQ ID NO: 49147 - DNA, 35 bp, Homo sapiens; identical to SEQ ID NO: 18739
  source 1..35: mol_type = genomic DNA

SEQ ID NO: 49148 - DNA, 19 bp, Homo sapiens
  source 1..19: mol_type = genomic DNA
gggggtatagctcagtggt

SEQ ID NO: 49149 - DNA, 22 bp, Homo sapiens
  source 1..22: mol_type = genomic DNA
gggggtatagctcagtggtaga

SEQ ID NO: 49150 - DNA, 24 bp, Homo sapiens
  source 1..24: mol_type = genomic DNA
gggggtatagctcagtggtagagc

SEQ ID NO: 49151 - DNA, 25 bp, Homo sapiens
  source 1..25: mol_type = genomic DNA
gggggtatagctcagtggtagagca

SEQ ID NO: 49152 - DNA, 26 bp, Homo sapiens
  source 1..26: mol_type = genomic DNA
gggggtatagctcagtggtagagcat

SEQ ID NO: 49153 - DNA, 27 bp, Homo sapiens
  source 1..27: mol_type = genomic DNA
gggggtatagctcagtggtagagcatt

SEQ ID NO: 49154 - DNA, 29 bp, Homo sapiens
  source 1..29: mol_type = genomic DNA
gggggtatagctcagtggtagagcatttg

SEQ ID NO: 49155 - DNA, 30 bp, Homo sapiens; identical to SEQ ID NO: 18752
  source 1..30: mol_type = genomic DNA

SEQ ID NO: 49156 - DNA, 31 bp, Homo sapiens; identical to SEQ ID NO: 18753
  source 1..31: mol_type = genomic DNA

SEQ ID NO: 49157 - DNA, 32 bp, Homo sapiens; identical to SEQ ID NO: 18754
  source 1..32: mol_type = genomic DNA

SEQ ID NO: 49158 - DNA, 33 bp, Homo sapiens; identical to SEQ ID NO: 18755
  source 1..33: mol_type = genomic DNA

SEQ ID NO: 49159 - DNA, 34 bp, Homo sapiens; identical to SEQ ID NO: 18756
  source 1..34: mol_type = genomic DNA

SEQ ID NO: 49160 - DNA, 35 bp, Homo sapiens; identical to SEQ ID NO: 18757
  source 1..35: mol_type = genomic DNA

SEQ ID NO: 49161 - DNA, 30 bp, Homo sapiens; identical to SEQ ID NO: 38342
  source 1..30: mol_type = genomic DNA

SEQ ID NO: 49162 - DNA, 31 bp, Homo sapiens; identical to SEQ ID NO: 38343
  source 1..31: mol_type = genomic DNA

SEQ ID NO: 49163 - DNA, 32 bp, Homo sapiens; identical to SEQ ID NO: 18765
  source 1..32: mol_type = genomic DNA

SEQ ID NO: 49164 - DNA, 34 bp, Homo sapiens; identical to SEQ ID NO: 18767
  source 1..34: mol_type = genomic DNA

SEQ ID NO: 49165 - DNA, 25 bp, Homo sapiens
  source 1..25: mol_type = genomic DNA
gggggtcgattccccgacggggagc

SEQ ID NO: 49166 - DNA, 26 bp, Homo sapiens
  source 1..26: mol_type = genomic DNA
gggggtcgattccccgacggggagcc

SEQ ID NO: 49167 - DNA, 16 bp, Homo sapiens
  source 1..16: mol_type = genomic DNA
gggggtgtagctcagt

SEQ ID NO: 49168 - DNA, 17 bp, Homo sapiens
  source 1..17: mol_type = genomic DNA
gggggtgtagctcagtg

SEQ ID NO: 49169 - DNA, 18 bp, Homo sapiens
  source 1..18: mol_type = genomic DNA
gggggtgtagctcagtgg

SEQ ID NO: 49170 - DNA, 19 bp, Homo sapiens
  source 1..19: mol_type = genomic DNA
gggggtgtagctcagtggt

SEQ ID NO: 49171 - DNA, 20 bp, Homo sapiens
  source 1..20: mol_type = genomic DNA
gggggtgtagctcagtggta

SEQ ID NO: 49172 - DNA, 21 bp, Homo sapiens
  source 1..21: mol_type = genomic DNA
gggggtgtagctcagtggtag

SEQ ID NO: 49173 - DNA, 22 bp, Homo sapiens
  source 1..22: mol_type = genomic DNA
gggggtgtagctcagtggtaga

SEQ ID NO: 49174 - DNA, 23 bp, Homo sapiens
  source 1..23: mol_type = genomic DNA
gggggtgtagctcagtggtagag

SEQ ID NO: 49175 - DNA, 24 bp, Homo sapiens
  source 1..24: mol_type = genomic DNA
gggggtgtagctcagtggtagagc

SEQ ID NO: 49176 - DNA, 32 bp, Homo sapiens; identical to SEQ ID NO: 18789
  source 1..32: mol_type = genomic DNA

SEQ ID NO: 49177 - DNA, 33 bp, Homo sapiens; identical to SEQ ID NO: 18790
  source 1..33: mol_type = genomic DNA

SEQ ID NO: 49178 - DNA, 26 bp, Homo sapiens
  source 1..26: mol_type = genomic DNA
gggggtgtagctcagtggtagagcgc

SEQ ID NO: 49179 - DNA, 28 bp, Homo sapiens
  source 1..28: mol_type = genomic DNA
gggggtgtagctcagtggtagagcgcat

SEQ ID NO: 49180 - DNA, 31 bp, Homo sapiens; identical to SEQ ID NO: 18794
  source 1..31: mol_type = genomic DNA

SEQ ID NO: 49181 - DNA, 32 bp, Homo sapiens; identical to SEQ ID NO: 18795
  source 1..32: mol_type = genomic DNA

SEQ ID NO: 49182 - DNA, 27 bp, Homo sapiens
  source 1..27: mol_type = genomic DNA
gggggtgtagctcagtggtagagcgcg

SEQ ID NO: 49183 - DNA, 28 bp, Homo sapiens
  source 1..28: mol_type = genomic DNA
gggggtgtagctcagtggtagagcgcgt

SEQ ID NO: 49184 - DNA, 29 bp, Homo sapiens
  source 1..29: mol_type = genomic DNA
gggggtgtagctcagtggtagagcgcgtg

SEQ ID NO: 49185 - DNA, 30 bp, Homo sapiens; identical to SEQ ID NO: 18801
  source 1..30: mol_type = genomic DNA

SEQ ID NO: 49186 - DNA, 31 bp, Homo sapiens; identical to SEQ ID NO: 18802
  source 1..31: mol_type = genomic DNA

SEQ ID NO: 49187 - DNA, 32 bp, Homo sapiens; identical to SEQ ID NO: 18803
  source 1..32: mol_type = genomic DNA

SEQ ID NO: 49188 - DNA, 33 bp, Homo sapiens; identical to SEQ ID NO: 18805
  source 1..33: mol_type = genomic DNA

SEQ ID NO: 49189 - DNA, 33 bp, Homo sapiens; identical to SEQ ID NO: 18820
  source 1..33: mol_type = genomic DNA

SEQ ID NO: 49190 - DNA, 16 bp, Homo sapiens
  source 1..16: mol_type = genomic DNA
ggggtatgattctcgc

SEQ ID NO: 49191 - DNA, 17 bp, Homo sapiens
  source 1..17: mol_type = genomic DNA
ggggtatgattctcgct

SEQ ID NO: 49192 - DNA, 18 bp, Homo sapiens
  source 1..18: mol_type = genomic DNA
ggggtatgattctcgctt

SEQ ID NO: 49193 - DNA, 16 bp, Homo sapiens
  source 1..16: mol_type = genomic DNA
ggggtatgattctcgg

SEQ ID NO: 49194 - DNA, 17 bp, Homo sapiens
  source 1..17: mol_type = genomic DNA
ggggtatgattctcggt

SEQ ID NO: 49195 - DNA, 18 bp, Homo sapiens
  source 1..18: mol_type = genomic DNA
ggggtatgattctcggtt

SEQ ID NO: 49196 - DNA, 24 bp, Homo sapiens
  source 1..24: mol_type = genomic DNA
ggggtcgattccccgacggggagc

SEQ ID NO: 49197 - DNA, 25 bp, Homo sapiens
  source 1..25: mol_type = genomic DNA
ggggtcgattccccgacggggagcc

SEQ ID NO: 49198 - DNA, 26 bp, Homo sapiens
  source 1..26: mol_type = genomic DNA
ggggtcgattccccgacggggagcca

SEQ ID NO: 49199 - DNA, 32 bp, Homo sapiens; identical to SEQ ID NO: 18838
  source 1..32: mol_type = genomic DNA

SEQ ID NO: 49200 - DNA, 32 bp, Homo sapiens; identical to SEQ ID NO: 38395
  source 1..32: mol_type = genomic DNA

SEQ ID NO: 49201 - DNA, 32 bp, Homo sapiens; identical to SEQ ID NO: 38396
  source 1..32: mol_type = genomic DNA

SEQ ID NO: 49202 - DNA, 17 bp, Homo sapiens
  source 1..17: mol_type = genomic DNA
ggggtgtagctcagtgg

SEQ ID NO: 49203 - DNA, 25 bp, Homo sapiens
  source 1..25: mol_type = genomic DNA
ggggtgtgataggtggcacggagaa

SEQ ID NO: 49204 - DNA, 24 bp, Homo sapiens
  source 1..24: mol_type = genomic DNA
ggggttcaattccccgacggggag

SEQ ID NO: 49205 - DNA, 25 bp, Homo sapiens
  source 1..25: mol_type = genomic DNA
ggggttcaattccccgacggggagc

SEQ ID NO: 49206 - DNA, 26 bp, Homo sapiens
  source 1..26: mol_type = genomic DNA
ggggttcaattccccgacggggagcc

SEQ ID NO: 49207 - DNA, 27 bp, Homo sapiens
  source 1..27: mol_type = genomic DNA
ggggttcaattccccgacggggagcca

SEQ ID NO: 49208 - DNA, 25 bp, Homo sapiens
  source 1..25: mol_type = genomic DNA
ggggttcgattccccaacggggagc

SEQ ID NO: 49209 - DNA, 22 bp, Homo sapiens
  source 1..22: mol_type = genomic DNA
ggggttcgattccccgacgggg

SEQ ID NO: 49210 - DNA, 23 bp, Homo sapiens
  source 1..23: mol_type = genomic DNA
ggggttcgattccccgacgggga

SEQ ID NO: 49211 - DNA, 24 bp, Homo sapiens
  source 1..24: mol_type = genomic DNA
ggggttcgattccccgacggggag

SEQ ID NO: 49212 - DNA, 25 bp, Homo sapiens
  source 1..25: mol_type = genomic DNA
ggggttcgattccccgacggggagc

SEQ ID NO: 49213 - DNA, 26 bp, Homo sapiens
  source 1..26: mol_type = genomic DNA
ggggttcgattccccgacggggagcc

SEQ ID NO: 49214 - DNA, 27 bp, Homo sapiens
  source 1..27: mol_type = genomic DNA
ggggttcgattccccgacggggagcca

SEQ ID NO: 49215 - DNA, 16 bp, Homo sapiens
  source 1..16: mol_type = genomic DNA
gggtagctcagtcggt

SEQ ID NO: 49216 - DNA, 22 bp, Homo sapiens
  source 1..22: mol_type = genomic DNA
gggtatagctcagcggtagagc

SEQ ID NO: 49217 - DNA, 16 bp, Homo sapiens
  source 1..16: mol_type = genomic DNA
gggtatagctcagggg

SEQ ID NO: 49218 - DNA, 30 bp, Homo sapiens; identical to SEQ ID NO: 18884
  source 1..30: mol_type = genomic DNA

SEQ ID NO: 49219 - DNA, 16 bp, Homo sapiens
  source 1..16: mol_type = genomic DNA
gggtatagctcagtgg

SEQ ID NO: 49220 - DNA, 32 bp, Homo sapiens; identical to SEQ ID NO: 18903
  source 1..32: mol_type = genomic DNA

SEQ ID NO: 49221 - DNA, 16 bp, Homo sapiens
  source 1..16: mol_type = genomic DNA
gggtatgattctcgct

SEQ ID NO: 49222 - DNA, 17 bp, Homo sapiens
  source 1..17: mol_type = genomic DNA
gggtatgattctcgctt

SEQ ID NO: 49223 - DNA, 16 bp, Homo sapiens
  source 1..16: mol_type = genomic DNA
gggtatgattctcggt

SEQ ID NO: 49224 - DNA, 17 bp, Homo sapiens
  source 1..17: mol_type = genomic DNA
gggtatgattctcggtt

SEQ ID NO: 49225 - DNA, 28 bp, Homo sapiens
  source 1..28: mol_type = genomic DNA
gggtatgattctcggtttgggtccgaga

SEQ ID NO: 49226 - DNA, 29 bp, Homo sapiens
  source 1..29: mol_type = genomic DNA
gggtccagggttcaagtccctgttcgggc

SEQ ID NO: 49227 - DNA, 30 bp, Homo sapiens; identical to SEQ ID NO: 18925
  source 1..30: mol_type = genomic DNA

SEQ ID NO: 49228 - DNA, 31 bp, Homo sapiens; identical to SEQ ID NO: 18926
  source 1..31: mol_type = genomic DNA

SEQ ID NO: 49229 - DNA, 33 bp, Homo sapiens; identical to SEQ ID NO: 18928
  source 1..33: mol_type = genomic DNA

SEQ ID NO: 49230 - DNA, 23 bp, Homo sapiens
  source 1..23: mol_type = genomic DNA
gggtcgattccccgacggggagc

SEQ ID NO: 49231 - DNA, 20 bp, Homo sapiens
  source 1..20: mol_type = genomic DNA
gggtcgtgggttcgagcccc

SEQ ID NO: 49232 - DNA, 29 bp, Homo sapiens
  source 1..29: mol_type = genomic DNA
gggtcgtgggttcgagccccacgttgggc

SEQ ID NO: 49233 - DNA, 30 bp, Homo sapiens; identical to SEQ ID NO: 18937
  source 1..30: mol_type = genomic DNA

SEQ ID NO: 49234 - DNA, 31 bp, Homo sapiens; identical to SEQ ID NO: 18938
  source 1..31: mol_type = genomic DNA

SEQ ID NO: 49235 - DNA, 18 bp, Homo sapiens
  source 1..18: mol_type = genomic DNA
gggtctccccgcgcaggt

SEQ ID NO: 49236 - DNA, 20 bp, Homo sapiens
  source 1..20: mol_type = genomic DNA
gggtgcgagaggtcccgggt

SEQ ID NO: 49237 - DNA, 21 bp, Homo sapiens
  source 1..21: mol_type = genomic DNA
gggtgcgagaggtcccgggtt

SEQ ID NO: 49238 - DNA, 27 bp, Homo sapiens
  source 1..27: mol_type = genomic DNA
gggtggttcagtggtagaattctcgcc

SEQ ID NO: 49239 - DNA, 28 bp, Homo sapiens
  source 1..28: mol_type = genomic DNA
gggtggttcagtggtagaattctcgcct

SEQ ID NO: 49240 - DNA, 16 bp, Homo sapiens
  source 1..16: mol_type = genomic DNA
gggtgtagctcagtgg

SEQ ID NO: 49241 - DNA, 28 bp, Homo sapiens
  source 1..28: mol_type = genomic DNA
gggtgtagctcagtggtagagcgcgtgc

SEQ ID NO: 49242 - DNA, 16 bp, Homo sapiens
  source 1..16: mol_type = genomic DNA
gggtgtgataggtggc

SEQ ID NO: 49243 - DNA, 17 bp, Homo sapiens
  source 1..17: mol_type = genomic DNA
gggtgtgataggtggca

SEQ ID NO: 49244 - DNA, 24 bp, Homo sapiens
  source 1..24: mol_type = genomic DNA
gggtgtgataggtggcacggagaa

SEQ ID NO: 49245 - DNA, 17 bp, Homo sapiens
  source 1..17: mol_type = genomic DNA
gggttagagcactggtc

SEQ ID NO: 49246 - DNA, 23 bp, Homo sapiens
  source 1..23: mol_type = genomic DNA
gggttaggcctctttttaccacc

SEQ ID NO: 49247 - DNA, 22 bp, Homo sapiens
  source 1..22: mol_type = genomic DNA
gggttcaagtccctgttcgggc

SEQ ID NO: 49248 - DNA, 23 bp, Homo sapiens
  source 1..23: mol_type = genomic DNA
gggttcaagtccctgttcgggcg

SEQ ID NO: 49249 - DNA, 24 bp, Homo sapiens
  source 1..24: mol_type = genomic DNA
gggttcaagtccctgttcgggcgc

SEQ ID NO: 49250 - DNA, 25 bp, Homo sapiens
  source 1..25: mol_type = genomic DNA
gggttcaagtccctgttcgggcgcc

SEQ ID NO: 49251 - DNA, 25 bp, Homo sapiens
  source 1..25: mol_type = genomic DNA
gggttcaatccccggcacctccacc

SEQ ID NO: 49252 - DNA, 26 bp, Homo sapiens
  source 1..26: mol_type = genomic DNA
gggttcaatccccggcacctccacca

SEQ ID NO: 49253 - DNA, 19 bp, Homo sapiens
  source 1..19: mol_type = genomic DNA
gggttcaatccccggcatc

SEQ ID NO: 49254 - DNA, 22 bp, Homo sapiens
  source 1..22: mol_type = genomic DNA
gggttcaatccccggcatctcc

SEQ ID NO: 49255 - DNA, 24 bp, Homo sapiens
  source 1..24: mol_type = genomic DNA
gggttcaattccccgacggggagc

SEQ ID NO: 49256 - DNA, 25 bp, Homo sapiens
  source 1..25: mol_type = genomic DNA
gggttcaattccccgacggggagcc

SEQ ID NO: 49257 - DNA, 23 bp, Homo sapiens
  source 1..23: mol_type = genomic DNA
gggttcgaaccccgtccgtgcct

SEQ ID NO: 49258 - DNA, 25 bp, Homo sapiens
  source 1..25: mol_type = genomic DNA
gggttcgaatcccaccgctgccacc

SEQ ID NO: 49259 - DNA, 23 bp, Homo sapiens
  source 1..23: mol_type = genomic DNA
gggttcgaatcccagcggtgcct

SEQ ID NO: 49260 - DNA, 25 bp, Homo sapiens
  source 1..25: mol_type = genomic DNA
gggttcgaatcccatcctcgtcgcc

SEQ ID NO: 49261 - DNA, 17 bp, Homo sapiens
  source 1..17: mol_type = genomic DNA
gggttcgacccccggct

SEQ ID NO: 49262 - DNA, 23 bp, Homo sapiens
  source 1..23: mol_type = genomic DNA
gggttcgactcccggtatgggaa

SEQ ID NO: 49263 - DNA, 24 bp, Homo sapiens
  source 1..24: mol_type = genomic DNA
gggttcgactcccggtatgggaac

SEQ ID NO: 49264 - DNA, 25 bp, Homo sapiens
  source 1..25: mol_type = genomic DNA
gggttcgactcccggtatgggaacc

SEQ ID NO: 49265 - DNA, 17 bp, Homo sapiens
  source 1..17: mol_type = genomic DNA
gggttcgactcccggtg

SEQ ID NO: 49266 - DNA, 20 bp, Homo sapiens
  source 1..20: mol_type = genomic DNA
gggttcgactcccggtgtgg

SEQ ID NO: 49267 - DNA, 21 bp, Homo sapiens
  source 1..21: mol_type = genomic DNA
gggttcgactcccggtgtggg

SEQ ID NO: 49268 - DNA, 22 bp, Homo sapiens
  source 1..22: mol_type = genomic DNA
gggttcgactcccggtgtggga

SEQ ID NO: 49269 - DNA, 23 bp, Homo sapiens
  source 1..23: mol_type = genomic DNA
gggttcgactcccggtgtgggaa

SEQ ID NO: 49270 - DNA, 24 bp, Homo sapiens
  source 1..24: mol_type = genomic DNA
gggttcgactcccggtgtgggaac

SEQ ID NO: 49271 - DNA, 25 bp, Homo sapiens
  source 1..25: mol_type = genomic DNA
gggttcgactcccggtgtgggaacc

SEQ ID NO: 49272 - DNA, 26 bp, Homo sapiens
  source 1..26: mol_type = genomic DNA
gggttcgactcccggtgtgggaacca

SEQ ID NO: 49273 - DNA, 25 bp, Homo sapiens
  source 1..25: mol_type = genomic DNA
gggttcgagccccagtggaaccacc

SEQ ID NO: 49274 - DNA, 25 bp, Homo sapiens
  source 1..25: mol_type = genomic DNA
gggttcgagtcccatctggggtgcc

SEQ ID NO: 49275 - DNA, 24 bp, Homo sapiens
  source 1..24: mol_type = genomic DNA
gggttcgagtcccttcgtggtcgc

SEQ ID NO: 49276 - DNA, 25 bp, Homo sapiens
  source 1..25: mol_type = genomic DNA
gggttcgagtcccttcgtggtcgcc

SEQ ID NO: 49277 - DNA, 16 bp, Homo sapiens
  source 1..16: mol_type = genomic DNA
gggttcgatccccggc

SEQ ID NO: 49278 - DNA, 22 bp, Homo sapiens
  source 1..22: mol_type = genomic DNA
gggttcgatccccggcatctcc

SEQ ID NO: 49279 - DNA, 24 bp, Homo sapiens
  source 1..24: mol_type = genomic DNA
gggttcgatccccggcatctccac

SEQ ID NO: 49280 - DNA, 21 bp, Homo sapiens
  source 1..21: mol_type = genomic DNA
gggttcgatccccgtacgggc

SEQ ID NO: 49281 - DNA, 24 bp, Homo sapiens
  source 1..24: mol_type = genomic DNA
gggttcgattccccaacggggagc

SEQ ID NO: 49282 - DNA, 20 bp, Homo sapiens
  source 1..20: mol_type = genomic DNA
gggttcgattccccgacggg

SEQ ID NO: 49283 - DNA, 21 bp, Homo sapiens
  source 1..21: mol_type = genomic DNA
gggttcgattccccgacgggg

SEQ ID NO: 49284 - DNA, 22 bp, Homo sapiens
  source 1..22: mol_type = genomic DNA
gggttcgattccccgacgggga

SEQ ID NO: 49285 - DNA, 23 bp, Homo sapiens
  source 1..23: mol_type = genomic DNA
gggttcgattccccgacggggag

SEQ ID NO: 49286 - DNA, 24 bp, Homo sapiens
  source 1..24: mol_type = genomic DNA
gggttcgattccccgacggggagc

SEQ ID NO: 49287 - DNA, 25 bp, Homo sapiens
  source 1..25: mol_type = genomic DNA
gggttcgattccccgacggggagcc

SEQ ID NO: 49288 - DNA, 26 bp, Homo sapiens
  source 1..26: mol_type = genomic DNA
gggttcgattccccgacggggagcca

SEQ ID NO: 49289 - DNA, 17 bp, Homo sapiens
  source 1..17: mol_type = genomic DNA
gggttcgattcccggcc

SEQ ID NO: 49290 - DNA, 24 bp, Homo sapiens
  source 1..24: mol_type = genomic DNA
gggttcgattcccggccagggaac

SEQ ID NO: 49291 - DNA, 20 bp, Homo sapiens
  source 1..20: mol_type = genomic DNA
gggttcgattcccgggcggc

SEQ ID NO: 49292 - DNA, 24 bp, Homo sapiens
  source 1..24: mol_type = genomic DNA
gggttcgattcccgggcggcgcac

SEQ ID NO: 49293 - DNA, 20 bp, Homo sapiens
  source 1..20: mol_type = genomic DNA
gggttcgattcccggtcagg

SEQ ID NO: 49294 - DNA, 21 bp, Homo sapiens
  source 1..21: mol_type = genomic DNA
gggttcgattcccggtcaggg

SEQ ID NO: 49295 - DNA, 22 bp, Homo sapiens
  source 1..22: mol_type = genomic DNA
gggttcgattcccggtcaggga

SEQ ID NO: 49296 - DNA, 23 bp, Homo sapiens
  source 1..23: mol_type = genomic DNA
gggttcgattcccggtcagggaa

SEQ ID NO: 49297 - DNA, 24 bp, Homo sapiens
  source 1..24: mol_type = genomic DNA
gggttcgattcccggtcagggaac

SEQ ID NO: 49298 - DNA, 25 bp, Homo sapiens
  source 1..25: mol_type = genomic DNA
gggttcgattcccggtcagggaacc

SEQ ID NO: 49299 - DNA, 26 bp, Homo sapiens
  source 1..26: mol_type = genomic DNA
gggttcgattcccggtcagggaacca

SEQ ID NO: 49300 - DNA, 24 bp, Homo sapiens
  source 1..24: mol_type = genomic DNA
gggttcgattcccggtcatggaac

SEQ ID NO: 49301 - DNA, 18 bp, Homo sapiens
  source 1..18: mol_type = genomic DNA
gggtttccccgcgcaggt

SEQ ID NO: 49302 - DNA, 28 bp, Homo sapiens
  source 1..28: mol_type = genomic DNA
ggtaaaatggctgagtgaagcattggac

SEQ ID NO: 49303 - DNA, 29 bp, Homo sapiens
  source 1..29: mol_type = genomic DNA
ggtaaaatggctgagtgaagcattggact

SEQ ID NO: 49304 - DNA, 30 bp, Homo sapiens; identical to SEQ ID NO: 19118
  source 1..30: mol_type = genomic DNA

SEQ ID NO: 49305 - DNA, 31 bp, Homo sapiens; identical to SEQ ID NO: 19119
  source 1..31: mol_type = genomic DNA

SEQ ID NO: 49306 - DNA, 32 bp, Homo sapiens; identical to SEQ ID NO: 19120
  source 1..32: mol_type = genomic DNA

SEQ ID NO: 49307 - DNA, 33 bp, Homo sapiens; identical to SEQ ID NO: 19121
  source 1..33: mol_type = genomic DNA

SEQ ID NO: 49308 - DNA, 36 bp, Homo sapiens; identical to SEQ ID NO: 19124
  source 1..36: mol_type = genomic DNA

SEQ ID NO: 49309 - DNA, 37 bp, Homo sapiens; identical to SEQ ID NO: 19125
  source 1..37: mol_type = genomic DNA

SEQ ID NO: 49310 - DNA, 38 bp, Homo sapiens; identical to SEQ ID NO: 19143
  source 1..38: mol_type = genomic DNA

SEQ ID NO: 49311 - DNA, 16 bp, Homo sapiens
  source 1..16: mol_type = genomic DNA
ggtagaattctcgcct

SEQ ID NO: 49312 - DNA, 17 bp, Homo sapiens
  source 1..17: mol_type = genomic DNA
ggtagaattctcgcctg

SEQ ID NO: 49313 - DNA, 18 bp, Homo sapiens
  source 1..18: mol_type = genomic DNA
ggtagaattctcgcctgc

SEQ ID NO: 49314 - DNA, 19 bp, Homo sapiens
  source 1..19: mol_type = genomic DNA
ggtagaattctcgcctgcc

SEQ ID NO: 49315 - DNA, 27 bp, Homo sapiens
  source 1..27: mol_type = genomic DNA
ggtagaattctcgcctgccacgcggga

SEQ ID NO: 49316 - DNA, 31 bp, Homo sapiens; identical to SEQ ID NO: 19193
  source 1..31: mol_type = genomic DNA

SEQ ID NO: 49317 - DNA, 32 bp, Homo sapiens; identical to SEQ ID NO: 19194
  source 1..32: mol_type = genomic DNA

SEQ ID NO: 49318 - DNA, 33 bp, Homo sapiens; identical to SEQ ID NO: 19195
  source 1..33: mol_type = genomic DNA

SEQ ID NO: 49319 - DNA, 34 bp, Homo sapiens; identical to SEQ ID NO: 19196
  source 1..34: mol_type = genomic DNA

SEQ ID NO: 49320 - DNA, 36 bp, Homo sapiens; identical to SEQ ID NO: 19198
  source 1..36: mol_type = genomic DNA

SEQ ID NO: 49321 - DNA, 16 bp, Homo sapiens
  source 1..16: mol_type = genomic DNA
ggtagagcatcagact

SEQ ID NO: 49322 - DNA, 16 bp, Homo sapiens
  source 1..16: mol_type = genomic DNA
ggtagagcatgagact

SEQ ID NO: 49323 - DNA, 17 bp, Homo sapiens
  source 1..17: mol_type = genomic DNA
ggtagagcatgagactc

SEQ ID NO: 49324 - DNA, 25 bp, Homo sapiens
  source 1..25: mol_type = genomic DNA
ggtagagcatgagactcttaatctc

SEQ ID NO: 49325 - DNA, 38 bp, Homo sapiens; identical to SEQ ID NO: 19223
  source 1..38: mol_type = genomic DNA

SEQ ID NO: 49326 - DNA, 16 bp, Homo sapiens
  source 1..16: mol_type = genomic DNA
ggtagagcatgggact

SEQ ID NO: 49327 - DNA, 17 bp, Homo sapiens
  source 1..17: mol_type = genomic DNA
ggtagagcatgggactc

SEQ ID NO: 49328 - DNA, 23 bp, Homo sapiens
  source 1..23: mol_type = genomic DNA
ggtagagcatgggactcttaatc

SEQ ID NO: 49329 - DNA, 24 bp, Homo sapiens
  source 1..24: mol_type = genomic DNA
ggtagagcatgggactcttaatcc

SEQ ID NO: 49330 - DNA, 25 bp, Homo sapiens
  source 1..25: mol_type = genomic DNA
ggtagagcatgggactcttaatccc

SEQ ID NO: 49331 - DNA, 34 bp, Homo sapiens; identical to SEQ ID NO: 19239
  source 1..34: mol_type = genomic DNA

SEQ ID NO: 49332 - DNA, 35 bp, Homo sapiens; identical to SEQ ID NO: 19240
  source 1..35: mol_type = genomic DNA

SEQ ID NO: 49333 - DNA, 38 bp, Homo sapiens; identical to SEQ ID NO: 19242
  source 1..38: mol_type = genomic DNA

SEQ ID NO: 49334 - DNA, 16 bp, Homo sapiens
  source 1..16: mol_type = genomic DNA
ggtagagcatttgact

SEQ ID NO: 49335 - DNA, 18 bp, Homo sapiens
  source 1..18: mol_type = genomic DNA
ggtagagcatttgactgc

SEQ ID NO: 49336 - DNA, 16 bp, Homo sapiens
  source 1..16: mol_type = genomic DNA
ggtagcgcgtctgact

SEQ ID NO: 49337 - DNA, 16 bp, Homo sapiens
  source 1..16: mol_type = genomic DNA
ggtagcgtggccgagc

SEQ ID NO: 49338 - DNA, 18 bp, Homo sapiens
  source 1..18: mol_type = genomic DNA
ggtagcgtggccgagcgg

SEQ ID NO: 49339 - DNA, 20 bp, Homo sapiens
  source 1..20: mol_type = genomic DNA
ggtagcgtggccgagcggtc

SEQ ID NO: 49340 - DNA, 21 bp, Homo sapiens
  source 1..21: mol_type = genomic DNA
ggtagcgtggccgagcggtct

SEQ ID NO: 49341 - DNA, 22 bp, Homo sapiens
  source 1..22: mol_type = genomic DNA
ggtagcgtggccgagcggtcta

SEQ ID NO: 49342 - DNA, 24 bp, Homo sapiens
  source 1..24: mol_type = genomic DNA
ggtagcgtggccgagcggtctaag

SEQ ID NO: 49343 - DNA, 25 bp, Homo sapiens
  source 1..25: mol_type = genomic DNA
ggtagcgtggccgagcggtctaagg

SEQ ID NO: 49344 - DNA, 26 bp, Homo sapiens
  source 1..26: mol_type = genomic DNA
ggtagcgtggccgagcggtctaaggc

SEQ ID NO: 49345 - DNA, 29 bp, Homo sapiens
  source 1..29: mol_type = genomic DNA
ggtagcgtggccgagcggtctaaggcgct

SEQ ID NO: 49346 - DNA, 34 bp, Homo sapiens; identical to SEQ ID NO: 19268
  source 1..34: mol_type = genomic DNA

SEQ ID NO: 49347 - DNA, 16 bp, Homo sapiens
  source 1..16: mol_type = genomic DNA
ggtagcgtggccgagt

SEQ ID NO: 49348 - DNA, 18 bp, Homo sapiens
  source 1..18: mol_type = genomic DNA
ggtagcgtggccgagtgg

SEQ ID NO: 49349 - DNA, 19 bp, Homo sapiens
  source 1..19: mol_type = genomic DNA
ggtagcgtggccgagtggt

SEQ ID NO: 49350 - DNA, 21 bp, Homo sapiens
  source 1..21: mol_type = genomic DNA
ggtagcgtggccgagtggtct

SEQ ID NO: 49351 - DNA, 26 bp, Homo sapiens
  source 1..26: mol_type = genomic DNA
ggtagcgtggccgagtggtctaaggc

SEQ ID NO: 49352 - DNA, 28 bp, Homo sapiens
  source 1..28: mol_type = genomic DNA
ggtagcgtggccgagtggtctaaggcgc

SEQ ID NO: 49353 - DNA, 32 bp, Homo sapiens
  source 1..32: mol_type = genomic DNA
ggtagcgtggccgagtggtctaaggcgctgga

SEQ ID NO: 49354 - DNA, 34 bp, Homo sapiens; identical to SEQ ID NO: 19282
  source 1..34: mol_type = genomic DNA

SEQ ID NO: 49355 - DNA, 35 bp, Homo sapiens; identical to SEQ ID NO: 19283
  source 1..35: mol_type = genomic DNA

SEQ ID NO: 49356 - DNA, 16 bp, Homo sapiens
  source 1..16: mol_type = genomic DNA
ggtagtgtggccgagc

SEQ ID NO: 49357 - DNA, 22 bp, Homo sapiens
  source 1..22: mol_type = genomic DNA
ggtagtgtggccgagcggtcta

SEQ ID NO: 49358 - DNA, 26 bp, Homo sapiens
  source 1..26: mol_type = genomic DNA
ggtagtgtggccgagcggtctaaggc

SEQ ID NO: 49359 - DNA, 34 bp, Homo sapiens; identical to SEQ ID NO: 19296
  source 1..34: mol_type = genomic DNA

SEQ ID NO: 49360 - DNA, 29 bp, Homo sapiens
  source 1..29: mol_type = genomic DNA
ggtatagctcaggggtagagcatttgact

SEQ ID NO: 49361 - DNA, 16 bp, Homo sapiens
  source 1..16: mol_type = genomic DNA
ggtatcatgcaagatt

SEQ ID NO: 49362 - DNA, 16 bp, Homo sapiens
  source 1..16: mol_type = genomic DNA
ggtatgattctcgctt

SEQ ID NO: 49363 - DNA, 17 bp, Homo sapiens
  source 1..17: mol_type = genomic DNA
ggtatgattctcgcttc

SEQ ID NO: 49364 - DNA, 18 bp, Homo sapiens
  source 1..18: mol_type = genomic DNA
ggtatgattctcgcttcg

SEQ ID NO: 49365 - DNA, 16 bp, Homo sapiens
  source 1..16: mol_type = genomic DNA
ggtatgattctcggtt

SEQ ID NO: 49366 - DNA, 27 bp, Homo sapiens
  source 1..27: mol_type = genomic DNA
ggtatgattctcggtttgggtccgaga

SEQ ID NO: 49367 - DNA, 17 bp, Homo sapiens
  source 1..17: mol_type = genomic DNA
ggtcatcacgttcgcct

SEQ ID NO: 49368 - DNA, 29 bp, Homo sapiens
  source 1..29: mol_type = genomic DNA
ggtccagggttcaagtccctgttcgggcg

SEQ ID NO: 49369 - DNA, 30 bp, Homo sapiens; identical to SEQ ID NO: 19349
  source 1..30: mol_type = genomic DNA

SEQ ID NO: 49370 - DNA, 31 bp, Homo sapiens; identical to SEQ ID NO: 19350
  source 1..31: mol_type = genomic DNA

SEQ ID NO: 49371 - DNA, 32 bp, Homo sapiens; identical to SEQ ID NO: 19351
  source 1..32: mol_type = genomic DNA

SEQ ID NO: 49372 - DNA, 29 bp, Homo sapiens
  source 1..29: mol_type = genomic DNA
ggtcccatggtgtaatggttagcactctg

SEQ ID NO: 49373 - DNA, 31 bp, Homo sapiens; identical to SEQ ID NO: 19362
  source 1..31: mol_type = genomic DNA

SEQ ID NO: 49374 - DNA, 32 bp, Homo sapiens; identical to SEQ ID NO: 19363
  source 1..32: mol_type = genomic DNA

SEQ ID NO: 49375 - DNA, 33 bp, Homo sapiens; identical to SEQ ID NO: 19364
  source 1..33: mol_type = genomic DNA

SEQ ID NO: 49376 - DNA, 40 bp, Homo sapiens; identical to SEQ ID NO: 19367
  source 1..40: mol_type = genomic DNA

SEQ ID NO: 49377 - DNA, 41 bp, Homo sapiens; identical to SEQ ID NO: 19368
  source 1..41: mol_type = genomic DNA

SEQ ID NO: 49378 - DNA, 19 bp, Homo sapiens
  source 1..19: mol_type = genomic DNA
ggtcccgggttcaaatccc

SEQ ID NO: 49379 - DNA, 31 bp, Homo sapiens; identical to SEQ ID NO: 38652
  source 1..31: mol_type = genomic DNA

SEQ ID NO: 49380 - DNA, 30 bp, Homo sapiens; identical to SEQ ID NO: 38653
  source 1..30: mol_type = genomic DNA

SEQ ID NO: 49381 - DNA, 32 bp, Homo sapiens
  source 1..32: mol_type = genomic DNA
ggtccctggttcgatcccgggtttcggcacca

SEQ ID NO: 49382 - DNA, 16 bp, Homo sapiens
  source 1..16: mol_type = genomic DNA
ggtcctgggttcgagc

SEQ ID NO: 49383 - DNA, 17 bp, Homo sapiens
  source 1..17: mol_type = genomic DNA
ggtcctgggttcgagcc

SEQ ID NO: 49384 - DNA, 31 bp, Homo sapiens; identical to SEQ ID NO: 19381
  source 1..31: mol_type = genomic DNA

SEQ ID NO: 49385 - DNA, 18 bp, Homo sapiens
  source 1..18: mol_type = genomic DNA
ggtcgatggatcgaaacc

SEQ ID NO: 49386 - DNA, 16 bp, Homo sapiens
  source 1..16: mol_type = genomic DNA
ggtcgattccccgacg

SEQ ID NO: 49387 - DNA, 17 bp, Homo sapiens
  source 1..17: mol_type = genomic DNA
ggtcgattccccgacgg

SEQ ID NO: 49388 - DNA, 18 bp, Homo sapiens
  source 1..18: mol_type = genomic DNA
ggtcgattccccgacggg

SEQ ID NO: 49389 - DNA, 19 bp, Homo sapiens
  source 1..19: mol_type = genomic DNA
ggtcgattccccgacgggg

SEQ ID NO: 49390 - DNA, 20 bp, Homo sapiens
  source 1..20: mol_type = genomic DNA
ggtcgattccccgacgggga

SEQ ID NO: 49391 - DNA, 21 bp, Homo sapiens
  source 1..21: mol_type = genomic DNA
ggtcgattccccgacggggag

SEQ ID NO: 49392 - DNA, 22 bp, Homo sapiens
  source 1..22: mol_type = genomic DNA
ggtcgattccccgacggggagc

SEQ ID NO: 49393 - DNA, 23 bp, Homo sapiens
  source 1..23: mol_type = genomic DNA
ggtcgattccccgacggggagcc

SEQ ID NO: 49394 - DNA, 24 bp, Homo sapiens
  source 1..24: mol_type = genomic DNA
ggtcgattccccgacggggagcca

SEQ ID NO: 49395 - DNA, 30 bp, Homo sapiens; identical to SEQ ID NO: 19395
  source 1..30: mol_type = genomic DNA

SEQ ID NO: 49396 - DNA, 27 bp, Homo sapiens
  source 1..27: mol_type = genomic DNA
ggtcgcgggttcgatccccgtacgggc

SEQ ID NO: 49397 - DNA, 28 bp, Homo sapiens
  source 1..28: mol_type = genomic DNA
ggtcgcgggttcgatccccgtacgggcc

SEQ ID NO: 49398 - DNA, 30 bp, Homo sapiens; identical to SEQ ID NO: 19406
  source 1..30: mol_type = genomic DNA

SEQ ID NO: 49399 - DNA, 31 bp, Homo sapiens; identical to SEQ ID NO: 19407
  source 1..31: mol_type = genomic DNA

SEQ ID NO: 49400 - DNA, 32 bp, Homo sapiens; identical to SEQ ID NO: 19408
  source 1..32: mol_type = genomic DNA

SEQ ID NO: 49401 - DNA, 30 bp, Homo sapiens; identical to SEQ ID NO: 19411
  source 1..30: mol_type = genomic DNA

SEQ ID NO: 49402 - DNA, 31 bp, Homo sapiens; identical to SEQ ID NO: 19412
  source 1..31: mol_type = genomic DNA

SEQ ID NO: 49403 - DNA, 29 bp, Homo sapiens
  source 1..29: mol_type = genomic DNA
ggtcgtgggttcgagccccacgttgggcg

SEQ ID NO: 49404 - DNA, 30 bp, Homo sapiens; identical to SEQ ID NO: 19423
  source 1..30: mol_type = genomic DNA

SEQ ID NO: 49405 - DNA, 31 bp, Homo sapiens; identical to SEQ ID NO: 19440
  source 1..31: mol_type = genomic DNA

SEQ ID NO: 49406 - DNA, 16 bp, Homo sapiens
  source 1..16: mol_type = genomic DNA
ggtctaaggcgctgcg

SEQ ID NO: 49407 - DNA, 16 bp, Homo sapiens
  source 1..16: mol_type = genomic DNA
ggtctaaggcgctgga

SEQ ID NO: 49408 - DNA, 18 bp, Homo sapiens
  source 1..18: mol_type = genomic DNA
ggtctagcggttaggatt

SEQ ID NO: 49409 - DNA, 17 bp, Homo sapiens
  source 1..17: mol_type = genomic DNA
ggtgagcactctggact

SEQ ID NO: 49410 - DNA, 24 bp, Homo sapiens
  source 1..24: mol_type = genomic DNA
ggtgagcactctggactctgaatc

SEQ ID NO: 49411 - DNA, 16 bp, Homo sapiens
  source 1..16: mol_type = genomic DNA
ggtgagtatccccgcc

SEQ ID NO: 49412 - DNA, 20 bp, Homo sapiens
  source 1..20: mol_type = genomic DNA
ggtgagtatccccgcctgtc

SEQ ID NO: 49413 - DNA, 22 bp, Homo sapiens
  source 1..22: mol_type = genomic DNA
ggtgagtatccccgcctgtcac

SEQ ID NO: 49414 - DNA, 23 bp, Homo sapiens
  source 1..23: mol_type = genomic DNA
ggtgcagtggtagaattctcgcc

SEQ ID NO: 49415 - DNA, 16 bp, Homo sapiens
  source 1..16: mol_type = genomic DNA
ggtgcgagaggtcccg

SEQ ID NO: 49416 - DNA, 37 bp, Homo sapiens; identical to SEQ ID NO: 19549
  source 1..37: mol_type = genomic DNA

SEQ ID NO: 49417 - DNA, 27 bp, Homo sapiens
  source 1..27: mol_type = genomic DNA
ggtggagttaaagactttttctctgac

SEQ ID NO: 49418 - DNA, 28 bp, Homo sapiens
  source 1..28: mol_type = genomic DNA
ggtggagttaaagactttttctctgacc

SEQ ID NO: 49419 - DNA, 21 bp, Homo sapiens
  source 1..21: mol_type = genomic DNA
ggtggtctagtggttaggatt

SEQ ID NO: 49420 - DNA, 22 bp, Homo sapiens
  source 1..22: mol_type = genomic DNA
ggtggtctagtggttaggattc

SEQ ID NO: 49421 - DNA, 23 bp, Homo sapiens
  source 1..23: mol_type = genomic DNA
ggtggtctagtggttaggattcg

SEQ ID NO: 49422 - DNA, 27 bp, Homo sapiens
  source 1..27: mol_type = genomic DNA
ggtggtctagtggttaggattcggcgc

SEQ ID NO: 49423 - DNA, 28 bp, Homo sapiens
  source 1..28: mol_type = genomic DNA
ggtggtctagtggttaggattcggcgct

SEQ ID NO: 49424 - DNA, 37 bp, Homo sapiens
  source 1..37: mol_type = genomic DNA
ggtggtctagtggttaggattcggcgctctcaccgcc

SEQ ID NO: 49425 - DNA, 22 bp, Homo sapiens
  source 1..22: mol_type = genomic DNA
ggtggttcagtggtagaattct

SEQ ID NO: 49426 - DNA, 25 bp, Homo sapiens
  source 1..25: mol_type = genomic DNA
ggtggttcagtggtagaattctcgc

SEQ ID NO: 49427 - DNA, 26 bp, Homo sapiens
  source 1..26: mol_type = genomic DNA
ggtggttcagtggtagaattctcgcc

SEQ ID NO: 49428 - DNA, 27 bp, Homo sapiens
  source 1..27: mol_type = genomic DNA
ggtggttcagtggtagaattctcgcct

SEQ ID NO: 49429 - DNA, 28 bp, Homo sapiens
  source 1..28: mol_type = genomic DNA
ggtggttcagtggtagaattctcgcctg

SEQ ID NO: 49430 - DNA, 29 bp, Homo sapiens
  source 1..29: mol_type = genomic DNA
ggtggttcagtggtagaattctcgcctgc

SEQ ID NO: 49431 - DNA, 30 bp, Homo sapiens; identical to SEQ ID NO: 19619
  source 1..30: mol_type = genomic DNA

SEQ ID NO: 49432 - DNA, 32 bp, Homo sapiens; identical to SEQ ID NO: 19621
  source 1..32: mol_type = genomic DNA

SEQ ID NO: 49433 - DNA, 33 bp, Homo sapiens; identical to SEQ ID NO: 19622
  source 1..33: mol_type = genomic DNA

SEQ ID NO: 49434 - DNA, 43 bp, Homo sapiens; identical to SEQ ID NO: 19625
  source 1..43: mol_type = genomic DNA

SEQ ID NO: 49435 - DNA, 45 bp, Homo sapiens; identical to SEQ ID NO: 19626
  source 1..45: mol_type = genomic DNA

SEQ ID NO: 49436 - DNA, 23 bp, Homo sapiens
  source 1..23: mol_type = genomic DNA
ggtgtaatggttagcactctgga

SEQ ID NO: 49437 - DNA, 25 bp, Homo sapiens
  source 1..25: mol_type = genomic DNA
ggtgtaatggttagcactctggact

SEQ ID NO: 49438 - DNA, 26 bp, Homo sapiens
  source 1..26: mol_type = genomic DNA
ggtgtaatggttagcactctggactc

SEQ ID NO: 49439 - DNA, 31 bp, Homo sapiens; identical to SEQ ID NO: 38741
  source 1..31: mol_type = genomic DNA

SEQ ID NO: 49440 - DNA, 32 bp, Homo sapiens; identical to SEQ ID NO: 19642
  source 1..32: mol_type = genomic DNA

SEQ ID NO: 49441 - DNA, 33 bp, Homo sapiens; identical to SEQ ID NO: 19643
  source 1..33: mol_type = genomic DNA

SEQ ID NO: 49442 - DNA, 45 bp, Homo sapiens; identical to SEQ ID NO: 19646
  source 1..45: mol_type = genomic DNA

SEQ ID NO: 49443 - DNA, 17 bp, Homo sapiens
  source 1..17: mol_type = genomic DNA
ggtgtagtggtatcatg

SEQ ID NO: 49444 - DNA, 24 bp, Homo sapiens
  source 1..24: mol_type = genomic DNA
ggtgtagtggtatcatgcaagatt

SEQ ID NO: 49445 - DNA, 16 bp, Homo sapiens
  source 1..16: mol_type = genomic DNA
ggttaaggcattggac

SEQ ID NO: 49446 - DNA, 17 bp, Homo sapiens
  source 1..17: mol_type = genomic DNA
ggttagcactctggact

SEQ ID NO: 49447 - DNA, 18 bp, Homo sapiens
  source 1..18: mol_type = genomic DNA
ggttagcactctggactc

SEQ ID NO: 49448 - DNA, 19 bp, Homo sapiens
  source 1..19: mol_type = genomic DNA
ggttagcactctggactct

SEQ ID NO: 49449 - DNA, 20 bp, Homo sapiens
  source 1..20: mol_type = genomic DNA
ggttagcactctggactctg

SEQ ID NO: 49450 - DNA, 21 bp, Homo sapiens
  source 1..21: mol_type = genomic DNA
ggttagcactctggactctga

SEQ ID NO: 49451 - DNA, 22 bp, Homo sapiens
  source 1..22: mol_type = genomic DNA
ggttagcactctggactctgaa

SEQ ID NO: 49452 - DNA, 23 bp, Homo sapiens
  source 1..23: mol_type = genomic DNA
ggttagcactctggactctgaat

SEQ ID NO: 49453 - DNA, 24 bp, Homo sapiens
  source 1..24: mol_type = genomic DNA
ggttagcactctggactctgaatc

SEQ ID NO: 49454 - DNA, 25 bp, Homo sapiens
  source 1..25: mol_type = genomic DNA
ggttagcactctggactctgaatcc

SEQ ID NO: 49455 - DNA, 26 bp, Homo sapiens
  source 1..26: mol_type = genomic DNA
ggttagcactctggactctgaatcca

SEQ ID NO: 49456 - DNA, 28 bp, Homo sapiens
  source 1..28: mol_type = genomic DNA
ggttagcactctggactctgaatccagc

SEQ ID NO: 49457 - DNA, 29 bp, Homo sapiens
  source 1..29: mol_type = genomic DNA
ggttagcactctggactctgaatccagcg

SEQ ID NO: 49458 - DNA, 32 bp, Homo sapiens; identical to SEQ ID NO: 19694
  source 1..32: mol_type = genomic DNA

SEQ ID NO: 49459 - DNA, 33 bp, Homo sapiens; identical to SEQ ID NO: 19695
  source 1..33: mol_type = genomic DNA

SEQ ID NO: 49460 - DNA, 34 bp, Homo sapiens; identical to SEQ ID NO: 19696
  source 1..34: mol_type = genomic DNA

SEQ ID NO: 49461 - DNA, 36 bp, Homo sapiens; identical to SEQ ID NO: 19698
  source 1..36: mol_type = genomic DNA

SEQ ID NO: 49462 - DNA, 37 bp, Homo sapiens; identical to SEQ ID NO: 19699
  source 1..37: mol_type = genomic DNA

SEQ ID NO: 49463 - DNA, 38 bp, Homo sapiens; identical to SEQ ID NO: 19700
  source 1..38: mol_type = genomic DNA

SEQ ID NO: 49464 - DNA, 39 bp, Homo sapiens; identical to SEQ ID NO: 19701
  source 1..39: mol_type = genomic DNA

SEQ ID NO: 49465 - DNA, 22 bp, Homo sapiens
  source 1..22: mol_type = genomic DNA
ggttagcactctggactttgaa

SEQ ID NO: 49466 - DNA, 24 bp, Homo sapiens
  source 1..24: mol_type = genomic DNA
ggttagcactctggactttgaatc

SEQ ID NO: 49467 - DNA, 28 bp, Homo sapiens
  source 1..28: mol_type = genomic DNA
ggttagcactctggactttgaatccagc

SEQ ID NO: 49468 - DNA, 36 bp, Homo sapiens; identical to SEQ ID NO: 19717
  source 1..36: mol_type = genomic DNA

SEQ ID NO: 49469 - DNA, 17 bp, Homo sapiens
  source 1..17: mol_type = genomic DNA
ggttagcgcgcggtact

SEQ ID NO: 49470 - DNA, 17 bp, Homo sapiens
  source 1..17: mol_type = genomic DNA
ggttaggattcctggtt

SEQ ID NO: 49471 - DNA, 19 bp, Homo sapiens
  source 1..19: mol_type = genomic DNA
ggttaggattcctggtttt

SEQ ID NO: 49472 - DNA, 20 bp, Homo sapiens
  source 1..20: mol_type = genomic DNA
ggttaggattcctggttttc

SEQ ID NO: 49473 - DNA, 16 bp, Homo sapiens
  source 1..16: mol_type = genomic DNA
ggttaggattcggcgc

SEQ ID NO: 49474 - DNA, 17 bp, Homo sapiens
  source 1..17: mol_type = genomic DNA
ggttaggattcggcgct

SEQ ID NO: 49475 - DNA, 18 bp, Homo sapiens
  source 1..18: mol_type = genomic DNA
ggttaggattcggcgctc

SEQ ID NO: 49476 - DNA, 19 bp, Homo sapiens
  source 1..19: mol_type = genomic DNA
ggttaggattcggcgctct

SEQ ID NO: 49477 - DNA, 20 bp, Homo sapiens
  source 1..20: mol_type = genomic DNA
ggttaggattcggcgctctc

SEQ ID NO: 49478 - DNA, 23 bp, Homo sapiens
  source 1..23: mol_type = genomic DNA
ggttaggattcggcgctctcacc

SEQ ID NO: 49479 - DNA, 26 bp, Homo sapiens
  source 1..26: mol_type = genomic DNA
ggttaggattcggcgctctcaccgcc

SEQ ID NO: 49480 - DNA, 33 bp, Homo sapiens; identical to SEQ ID NO: 19757
  source 1..33: mol_type = genomic DNA

SEQ ID NO: 49481 - DNA, 38 bp, Homo sapiens; identical to SEQ ID NO: 19762
  source 1..38: mol_type = genomic DNA

SEQ ID NO: 49482 - DNA, 16 bp, Homo sapiens
  source 1..16: mol_type = genomic DNA
ggttagtactctgcgt

SEQ ID NO: 49483 - DNA, 17 bp, Homo sapiens
  source 1..17: mol_type = genomic DNA
ggttagtactctgcgtt

SEQ ID NO: 49484 - DNA, 18 bp, Homo sapiens
  source 1..18: mol_type = genomic DNA
ggttagtactctgcgttg

SEQ ID NO: 49485 - DNA, 19 bp, Homo sapiens
  source 1..19: mol_type = genomic DNA
ggttagtactctgcgttgt

SEQ ID NO: 49486 - DNA, 28 bp, Homo sapiens
  source 1..28: mol_type = genomic DNA
ggttagtactctgcgttgtggccgcagc

SEQ ID NO: 49487 - DNA, 32 bp, Homo sapiens; identical to SEQ ID NO: 19777
  source 1..32: mol_type = genomic DNA

SEQ ID NO: 49488 - DNA, 33 bp, Homo sapiens; identical to SEQ ID NO: 19778
  source 1..33: mol_type = genomic DNA

SEQ ID NO: 49489 - DNA, 16 bp, Homo sapiens
  source 1..16: mol_type = genomic DNA
ggttagtatccccgcc

SEQ ID NO: 49490 - DNA, 21 bp, Homo sapiens
  source 1..21: mol_type = genomic DNA
ggttatacccttcccgtacta

SEQ ID NO: 49491 - DNA, 24 bp, Homo sapiens
  source 1..24: mol_type = genomic DNA
ggttatacccttcccgtactacca

SEQ ID NO: 49492 - DNA, 16 bp, Homo sapiens
  source 1..16: mol_type = genomic DNA
ggttatcacgtctgct

SEQ ID NO: 49493 - DNA, 17 bp, Homo sapiens
  source 1..17: mol_type = genomic DNA
ggttatcacgtctgctt

SEQ ID NO: 49494 - DNA, 18 bp, Homo sapiens
  source 1..18: mol_type = genomic DNA
ggttatcacgtctgcttt

SEQ ID NO: 49495 - DNA, 17 bp, Homo sapiens
  source 1..17: mol_type = genomic DNA
ggttatcacgttcgcct

SEQ ID NO: 49496 - DNA, 18 bp, Homo sapiens
  source 1..18: mol_type = genomic DNA
ggttatcacgttcgcctc

SEQ ID NO: 49497 - DNA, 37 bp, Homo sapiens
  source 1..37: mol_type = genomic DNA
ggttatcacgttcgcctcacacgcgaaaggtccccgg

SEQ ID NO: 49498 - DNA, 16 bp, Homo sapiens
  source 1..16: mol_type = genomic DNA
ggttcaaatcccggac

SEQ ID NO: 49499 - DNA, 17 bp, Homo sapiens
  source 1..17: mol_type = genomic DNA
ggttcaaatcccggacg

SEQ ID NO: 49500 - DNA, 20 bp, Homo sapiens
  source 1..20: mol_type = genomic DNA
ggttcaaatcccggacgagc

SEQ ID NO: 49501 - DNA, 21 bp, Homo sapiens
  source 1..21: mol_type = genomic DNA
ggttcaaatcccggacgagcc

SEQ ID NO: 49502 - DNA, 17 bp, Homo sapiens
  source 1..17: mol_type = genomic DNA
ggttcaaatccgggtgc

SEQ ID NO: 49503 - DNA, 18 bp, Homo sapiens
  source 1..18: mol_type = genomic DNA
ggttcaaatccgggtgcc

SEQ ID NO: 49504 - DNA, 19 bp, Homo sapiens
  source 1..19: mol_type = genomic DNA
ggttcaaatccgggtgccc

SEQ ID NO: 49505 - DNA, 22 bp, Homo sapiens
  source 1..22: mol_type = genomic DNA
ggttcaaatccgggtgccccct

SEQ ID NO: 49506 - DNA, 22 bp, Homo sapiens
  source 1..22: mol_type = genomic DNA
ggttcaagtccctgttcgggcg

SEQ ID NO: 49507 - DNA, 23 bp, Homo sapiens
  source 1..23: mol_type = genomic DNA
ggttcaagtccctgttcgggcgc

SEQ ID NO: 49508 - DNA, 24 bp, Homo sapiens
  source 1..24: mol_type = genomic DNA
ggttcaagtccctgttcgggcgcc

SEQ ID NO: 49509 - DNA, 24 bp, Homo sapiens
  source 1..24: mol_type = genomic DNA
ggttcaatccccggcacctccacc

SEQ ID NO: 49510 - DNA, 25 bp, Homo sapiens
  source 1..25: mol_type = genomic DNA
ggttcaatccccggcacctccacca

SEQ ID NO: 49511 - DNA, 24 bp, Homo sapiens
  source 1..24: mol_type = genomic DNA
ggttcaatccccggcatctccacc

SEQ ID NO: 49512 - DNA, 23 bp, Homo sapiens
  source 1..23: mol_type = genomic DNA
ggttcaattccccgacggggagc

SEQ ID NO: 49513 - DNA, 24 bp, Homo sapiens
  source 1..24: mol_type = genomic DNA
ggttcaattccccgacggggagcc

SEQ ID NO: 49514 - DNA, 18 bp, Homo sapiens
  source 1..18: mol_type = genomic DNA
ggttcagtggtagaattc

SEQ ID NO: 49515 - DNA, 22 bp, Homo sapiens
  source 1..22: mol_type = genomic DNA
ggttcagtggtagaattctcgc

SEQ ID NO: 49516 - DNA, 23 bp, Homo sapiens
  source 1..23: mol_type = genomic DNA
ggttcagtggtagaattctcgcc

SEQ ID NO: 49517 - DNA, 24 bp, Homo sapiens
  source 1..24: mol_type = genomic DNA
ggttcagtggtagaattctcgcct

SEQ ID NO: 49518 - DNA, 27 bp, Homo sapiens
  source 1..27: mol_type = genomic DNA
ggttcagtggtagaattctcgcctgcc

SEQ ID NO: 49519 - DNA, 28 bp, Homo sapiens
  source 1..28: mol_type = genomic DNA
ggttcagtggtagaattctcgcctgcca

SEQ ID NO: 49520 - DNA, 29 bp, Homo sapiens
  source 1..29: mol_type = genomic DNA
ggttcagtggtagaattctcgcctgccac

SEQ ID NO: 49521 - DNA, 30 bp, Homo sapiens; identical to SEQ ID NO: 19851
  source 1..30: mol_type = genomic DNA

SEQ ID NO: 49522 - DNA, 40 bp, Homo sapiens; identical to SEQ ID NO: 19853
  source 1..40: mol_type = genomic DNA

SEQ ID NO: 49523 - DNA, 41 bp, Homo sapiens; identical to SEQ ID NO: 38848
  source 1..41: mol_type = genomic DNA

SEQ ID NO: 49524 - DNA, 42 bp, Homo sapiens; identical to SEQ ID NO: 19854
  source 1..42: mol_type = genomic DNA

SEQ ID NO: 49525 - DNA, 16 bp, Homo sapiens
  source 1..16: mol_type = genomic DNA
ggttccatagtgtagc

SEQ ID NO: 49526 - DNA, 19 bp, Homo sapiens
  source 1..19: mol_type = genomic DNA
ggttccatagtgtagcggt

SEQ ID NO: 49527 - DNA, 29 bp, Homo sapiens
  source 1..29: mol_type = genomic DNA
ggttccatagtgtagcggttatcacgtct

SEQ ID NO: 49528 - DNA, 30 bp, Homo sapiens; identical to SEQ ID NO: 19863
  source 1..30: mol_type = genomic DNA

SEQ ID NO: 49529 - DNA, 31 bp, Homo sapiens; identical to SEQ ID NO: 19864
  source 1..31: mol_type = genomic DNA

SEQ ID NO: 49530 - DNA, 32 bp, Homo sapiens; identical to SEQ ID NO: 19865
  source 1..32: mol_type = genomic DNA

SEQ ID NO: 49531 - DNA, 33 bp, Homo sapiens; identical to SEQ ID NO: 19866
  source 1..33: mol_type = genomic DNA

SEQ ID NO: 49532 - DNA, 34 bp, Homo sapiens; identical to SEQ ID NO: 19867
  source 1..34: mol_type = genomic DNA

SEQ ID NO: 49533 - DNA, 19 bp, Homo sapiens
  source 1..19: mol_type = genomic DNA
ggttccatagtgtagtggt

SEQ ID NO: 49534 - DNA, 23 bp, Homo sapiens
  source 1..23: mol_type = genomic DNA
ggttccatagtgtagtggttatc

SEQ ID NO: 49535 - DNA, 30 bp, Homo sapiens
  source 1..30: mol_type = genomic DNA
ggttccatagtgtagtggttatcacatctg

SEQ ID NO: 49536 - DNA, 31 bp, Homo sapiens; identical to SEQ ID NO: 19882
  source 1..31: mol_type = genomic DNA

SEQ ID NO: 49537 - DNA, 32 bp, Homo sapiens; identical to SEQ ID NO: 19883
  source 1..32: mol_type = genomic DNA

SEQ ID NO: 49538 - DNA, 33 bp, Homo sapiens; identical to SEQ ID NO: 19884
  source 1..33: mol_type = genomic DNA

SEQ ID NO: 49539 - DNA, 34 bp, Homo sapiens; identical to SEQ ID NO: 19885
  source 1..34: mol_type = genomic DNA

SEQ ID NO: 49540 - DNA, 29 bp, Homo sapiens
  source 1..29: mol_type = genomic DNA
ggttccatagtgtagtggttatcacgtct

SEQ ID NO: 49541 - DNA, 30 bp, Homo sapiens; identical to SEQ ID NO: 19892
  source 1..30: mol_type = genomic DNA

SEQ ID NO: 49542 - DNA, 31 bp, Homo sapiens; identical to SEQ ID NO: 19893
  source 1..31: mol_type = genomic DNA

SEQ ID NO: 49543 - DNA, 32 bp, Homo sapiens; identical to SEQ ID NO: 19894
  source 1..32: mol_type = genomic DNA

SEQ ID NO: 49544 - DNA, 33 bp, Homo sapiens; identical to SEQ ID NO: 19895
  source 1..33: mol_type = genomic DNA

SEQ ID NO: 49545 - DNA, 34 bp, Homo sapiens; identical to SEQ ID NO: 19896
  source 1..34: mol_type = genomic DNA

SEQ ID NO: 49546 - DNA, 35 bp, Homo sapiens; identical to SEQ ID NO: 19897
  source 1..35: mol_type = genomic DNA

SEQ ID NO: 49547 - DNA, 36 bp, Homo sapiens; identical to SEQ ID NO: 19898
  source 1..36: mol_type = genomic DNA

SEQ ID NO: 49548 - DNA, 33 bp, Homo sapiens; identical to SEQ ID NO: 19910
  source 1..33: mol_type = genomic DNA

SEQ ID NO: 49549 - DNA, 34 bp, Homo sapiens; identical to SEQ ID NO: 19911
  source 1..34: mol_type = genomic DNA

SEQ ID NO: 49550 - DNA, 32 bp, Homo sapiens; identical to SEQ ID NO: 19919
  source 1..32: mol_type = genomic DNA

SEQ ID NO: 49551 - DNA, 33 bp, Homo sapiens; identical to SEQ ID NO: 19920
  source 1..33: mol_type = genomic DNA

SEQ ID NO: 49552 - DNA, 34 bp, Homo sapiens; identical to SEQ ID NO: 19921
  source 1..34: mol_type = genomic DNA

SEQ ID NO: 49553 - DNA, 27 bp, Homo sapiens
  source 1..27: mol_type = genomic DNA
ggttccatggtgtaatggttagcactc

SEQ ID NO: 49554 - DNA, 29 bp, Homo sapiens
  source 1..29: mol_type = genomic DNA
ggttccatggtgtaatggttagcactctg

SEQ ID NO: 49555 - DNA, 30 bp, Homo sapiens; identical to SEQ ID NO: 19931
  source 1..30: mol_type = genomic DNA

SEQ ID NO: 49556 - DNA, 31 bp, Homo sapiens; identical to SEQ ID NO: 19932
  source 1..31: mol_type = genomic DNA

SEQ ID NO: 49557 - DNA, 32 bp, Homo sapiens; identical to SEQ ID NO: 19933
  source 1..32: mol_type = genomic DNA

SEQ ID NO: 49558 - DNA, 33 bp, Homo sapiens; identical to SEQ ID NO: 19934
  source 1..33: mol_type = genomic DNA

SEQ ID NO: 49559 - DNA, 34 bp, Homo sapiens; identical to SEQ ID NO: 19935
  source 1..34: mol_type = genomic DNA

SEQ ID NO: 49560 - DNA, 35 bp, Homo sapiens; identical to SEQ ID NO: 19936
  source 1..35: mol_type = genomic DNA

SEQ ID NO: 49561 - DNA, 36 bp, Homo sapiens; identical to SEQ ID NO: 19937
  source 1..36: mol_type = genomic DNA

SEQ ID NO: 49562 - DNA, 40 bp, Homo sapiens; identical to SEQ ID NO: 19941
  source 1..40: mol_type = genomic DNA

SEQ ID NO: 49563 - DNA, 41 bp, Homo sapiens; identical to SEQ ID NO: 19942
  source 1..41: mol_type = genomic DNA

SEQ ID NO: 49564 - DNA, 42 bp, Homo sapiens; identical to SEQ ID NO: 19943
  source 1..42: mol_type = genomic DNA

SEQ ID NO: 49565 - DNA, 44 bp, Homo sapiens; identical to SEQ ID NO: 19944
  source 1..44: mol_type = genomic DNA

SEQ ID NO: 49566 - DNA, 45 bp, Homo sapiens; identical to SEQ ID NO: 19945
  source 1..45: mol_type = genomic DNA

SEQ ID NO: 49567 - DNA, 46 bp, Homo sapiens; identical to SEQ ID NO: 19946
  source 1..46: mol_type = genomic DNA

SEQ ID NO: 49568 - DNA, 47 bp, Homo sapiens; identical to SEQ ID NO: 19947
  source 1..47: mol_type = genomic DNA

SEQ ID NO: 49569 - DNA, 17 bp, Homo sapiens
  source 1..17: mol_type = genomic DNA
ggttccgggttcgagtc

SEQ ID NO: 49570 - DNA, 16 bp, Homo sapiens
  source 1..16: mol_type = genomic DNA
ggttcgaaaccgggcg

SEQ ID NO: 49571 - DNA, 18 bp, Homo sapiens
  source 1..18: mol_type = genomic DNA
ggttcgaaaccgggcgga

SEQ ID NO: 49572 - DNA, 22 bp, Homo sapiens
  source 1..22: mol_type = genomic DNA
ggttcgaaaccgggcggaaaca

SEQ ID NO: 49573 - DNA, 24 bp, Homo sapiens
  source 1..24: mol_type = genomic DNA
ggttcgaaaccgggcggaaacacc

SEQ ID NO: 49574 - DNA, 22 bp, Homo sapiens
  source 1..22: mol_type = genomic DNA
ggttcgaaccccgtccgtgcct

SEQ ID NO: 49575 - DNA, 23 bp, Homo sapiens
  source 1..23: mol_type = genomic DNA
ggttcgaaccccgtccgtgcctc

SEQ ID NO: 49576 - DNA, 24 bp, Homo sapiens
  source 1..24: mol_type = genomic DNA
ggttcgaaccctgctcgctgcgcc

SEQ ID NO: 49577 - DNA, 24 bp, Homo sapiens
  source 1..24: mol_type = genomic DNA
ggttcgaatcccaccgctgccacc

SEQ ID NO: 49578 - DNA, 24 bp, Homo sapiens
  source 1..24: mol_type = genomic DNA
ggttcgaatcccactcctgacacc

SEQ ID NO: 49579 - DNA, 24 bp, Homo sapiens
  source 1..24: mol_type = genomic DNA
ggttcgaatcccagcggtgcctcc

SEQ ID NO: 49580 - DNA, 23 bp, Homo sapiens
  source 1..23: mol_type = genomic DNA
ggttcgaatcccatcctcgtcgc

SEQ ID NO: 49581 - DNA, 24 bp, Homo sapiens
  source 1..24: mol_type = genomic DNA
ggttcgaatcccatcctcgtcgcc

SEQ ID NO: 49582 - DNA, 25 bp, Homo sapiens
  source 1..25: mol_type = genomic DNA
ggttcgaatcccatcctcgtcgcca

SEQ ID NO: 49583 - DNA, 21 bp, Homo sapiens
  source 1..21: mol_type = genomic DNA
ggttcgaatccgagtcacggc

SEQ ID NO: 49584 - DNA, 22 bp, Homo sapiens
  source 1..22: mol_type = genomic DNA
ggttcgaatccgagtcacggca

SEQ ID NO: 49585 - DNA, 23 bp, Homo sapiens
  source 1..23: mol_type = genomic DNA
ggttcgaatccgagtcacggcac

SEQ ID NO: 49586 - DNA, 25 bp, Homo sapiens
  source 1..25: mol_type = genomic DNA
ggttcgaatccgagtcacggcacca

SEQ ID NO: 49587 - DNA, 23 bp, Homo sapiens
  source 1..23: mol_type = genomic DNA
ggttcgaatccggctcgaaggac

SEQ ID NO: 49588 - DNA, 23 bp, Homo sapiens
  source 1..23: mol_type = genomic DNA
ggttcgaatccggctcggaggac

SEQ ID NO: 49589 - DNA, 24 bp, Homo sapiens
  source 1..24: mol_type = genomic DNA
ggttcgaatcctgccgactacgcc

SEQ ID NO: 49590 - DNA, 24 bp, Homo sapiens
  source 1..24: mol_type = genomic DNA
ggttcgaatcctgttcgtgacgcc

SEQ ID NO: 49591 - DNA, 16 bp, Homo sapiens
  source 1..16: mol_type = genomic DNA
ggttcgacccccggct

SEQ ID NO: 49592 - DNA, 17 bp, Homo sapiens
  source 1..17: mol_type = genomic DNA
ggttcgacccccggctc

SEQ ID NO: 49593 - DNA, 22 bp, Homo sapiens
  source 1..22: mol_type = genomic DNA
ggttcgactcccggtatgggaa

SEQ ID NO: 49594 - DNA, 23 bp, Homo sapiens
  source 1..23: mol_type = genomic DNA
ggttcgactcccggtatgggaac

SEQ ID NO: 49595 - DNA, 24 bp, Homo sapiens
  source 1..24: mol_type = genomic DNA
ggttcgactcccggtatgggaacc

SEQ ID NO: 49596 - DNA, 16 bp, Homo sapiens
  source 1..16: mol_type = genomic DNA
ggttcgactcccggtg

SEQ ID NO: 49597 - DNA, 17 bp, Homo sapiens
  source 1..17: mol_type = genomic DNA
ggttcgactcccggtgt

SEQ ID NO: 49598 - DNA, 18 bp, Homo sapiens
  source 1..18: mol_type = genomic DNA
ggttcgactcccggtgtg

SEQ ID NO: 49599 - DNA, 20 bp, Homo sapiens
  source 1..20: mol_type = genomic DNA
ggttcgactcccggtgtggg

SEQ ID NO: 49600 - DNA, 21 bp, Homo sapiens
  source 1..21: mol_type = genomic DNA
ggttcgactcccggtgtggga

SEQ ID NO: 49601 - DNA, 22 bp, Homo sapiens
  source 1..22: mol_type = genomic DNA
ggttcgactcccggtgtgggaa

SEQ ID NO: 49602 - DNA, 23 bp, Homo sapiens
  source 1..23: mol_type = genomic DNA
ggttcgactcccggtgtgggaac

SEQ ID NO: 49603 - DNA, 24 bp, Homo sapiens
  source 1..24: mol_type = genomic DNA
ggttcgactcccggtgtgggaacc

SEQ ID NO: 49604 - DNA, 24 bp, Homo sapiens
  source 1..24: mol_type = genomic DNA
ggttcgactcctggctggctcgcc

SEQ ID NO: 49605 - DNA, 24 bp, Homo sapiens
  source 1..24: mol_type = genomic DNA
ggttcgagccccacgttgggcgcc

SEQ ID NO: 49606 - DNA, 24 bp, Homo sapiens
  source 1..24: mol_type = genomic DNA
ggttcgagtcccatctggggtgcc

SEQ ID NO: 49607 - DNA, 16 bp, Homo sapiens
  source 1..16: mol_type = genomic DNA
ggttcgatccccggca

SEQ ID NO: 49608 - DNA, 20 bp, Homo sapiens
  source 1..20: mol_type = genomic DNA
ggttcgatccccggcatctc

SEQ ID NO: 49609 - DNA, 24 bp, Homo sapiens
  source 1..24: mol_type = genomic DNA
ggttcgatccccggcatctccacc

SEQ ID NO: 49610 - DNA, 25 bp, Homo sapiens
  source 1..25: mol_type = genomic DNA
ggttcgatccccggcatctccacca

SEQ ID NO: 49611 - DNA, 20 bp, Homo sapiens
  source 1..20: mol_type = genomic DNA
ggttcgatccccgtacgggc

SEQ ID NO: 49612 - DNA, 18 bp, Homo sapiens
  source 1..18: mol_type = genomic DNA
ggttcgatcccgggcgga

SEQ ID NO: 49613 - DNA, 24 bp, Homo sapiens
  source 1..24: mol_type = genomic DNA
ggttcgatcccgggcggaaacacc

SEQ ID NO: 49614 - DNA, 23 bp, Homo sapiens
  source 1..23: mol_type = genomic DNA
ggttcgatcccgggtttcggcac

SEQ ID NO: 49615 - DNA, 16 bp, Homo sapiens
  source 1..16: mol_type = genomic DNA
ggttcgattccccgac

SEQ ID NO: 49616 - DNA, 17 bp, Homo sapiens
  source 1..17: mol_type = genomic DNA
ggttcgattccccgacg

SEQ ID NO: 49617 - DNA, 18 bp, Homo sapiens
  source 1..18: mol_type = genomic DNA
ggttcgattccccgacgg

SEQ ID NO: 49618 - DNA, 19 bp, Homo sapiens
  source 1..19: mol_type = genomic DNA
ggttcgattccccgacggg

SEQ ID NO: 49619 - DNA, 21 bp, Homo sapiens
  source 1..21: mol_type = genomic DNA
ggttcgattccccgacgggga

SEQ ID NO: 49620 - DNA, 22 bp, Homo sapiens
  source 1..22: mol_type = genomic DNA
ggttcgattccccgacggggag

SEQ ID NO: 49621 - DNA, 23 bp, Homo sapiens
  source 1..23: mol_type = genomic DNA
ggttcgattccccgacggggagc

SEQ ID NO: 49622 - DNA, 24 bp, Homo sapiens
  source 1..24: mol_type = genomic DNA
ggttcgattccccgacggggagcc

SEQ ID NO: 49623 - DNA, 25 bp, Homo sapiens
  source 1..25: mol_type = genomic DNA
ggttcgattccccgacggggagcca

SEQ ID NO: 49624 - DNA, 16 bp, Homo sapiens
  source 1..16: mol_type = genomic DNA
ggttcgattcccggcc

SEQ ID NO: 49625 - DNA, 25 bp, Homo sapiens
  source 1..25: mol_type = genomic DNA
ggttcgattcccggccaacgcacca

SEQ ID NO: 49626 - DNA, 24 bp, Homo sapiens
  source 1..24: mol_type = genomic DNA
ggttcgattcccggccaatgcacc

SEQ ID NO: 49627 - DNA, 16 bp, Homo sapiens
  source 1..16: mol_type = genomic DNA
ggttcgattcccgggc

SEQ ID NO: 49628 - DNA, 17 bp, Homo sapiens
  source 1..17: mol_type = genomic DNA
ggttcgattcccgggcg

SEQ ID NO: 49629 - DNA, 18 bp, Homo sapiens
  source 1..18: mol_type = genomic DNA
ggttcgattcccgggcgg

SEQ ID NO: 49630 - DNA, 19 bp, Homo sapiens
  source 1..19: mol_type = genomic DNA
ggttcgattcccgggcggc

SEQ ID NO: 49631 - DNA, 21 bp, Homo sapiens
  source 1..21: mol_type = genomic DNA
ggttcgattcccgggcggcgc

SEQ ID NO: 49632 - DNA, 24 bp, Homo sapiens
  source 1..24: mol_type = genomic DNA
ggttcgattcccgggcggcgcacc

SEQ ID NO: 49633 - DNA, 16 bp, Homo sapiens
  source 1..16: mol_type = genomic DNA
ggttcgattcccggtc

SEQ ID NO: 49634 - DNA, 18 bp, Homo sapiens
  source 1..18: mol_type = genomic DNA
ggttcgattcccggtcag

SEQ ID NO: 49635 - DNA, 19 bp, Homo sapiens
  source 1..19: mol_type = genomic DNA
ggttcgattcccggtcagg

SEQ ID NO: 49636 - DNA, 20 bp, Homo sapiens
  source 1..20: mol_type = genomic DNA
ggttcgattcccggtcaggg

SEQ ID NO: 49637 - DNA, 21 bp, Homo sapiens
  source 1..21: mol_type = genomic DNA
ggttcgattcccggtcaggga

SEQ ID NO: 49638 - DNA, 22 bp, Homo sapiens
  source 1..22: mol_type = genomic DNA
ggttcgattcccggtcagggaa

SEQ ID NO: 49639 - DNA, 23 bp, Homo sapiens
  source 1..23: mol_type = genomic DNA
ggttcgattcccggtcagggaac

SEQ ID NO: 49640 - DNA, 24 bp, Homo sapiens
  source 1..24: mol_type = genomic DNA
ggttcgattcccggtcagggaacc

SEQ ID NO: 49641 - DNA, 25 bp, Homo sapiens
  source 1..25: mol_type = genomic DNA
ggttcgattcccggtcagggaacca

SEQ ID NO: 49642 - DNA, 23 bp, Homo sapiens
  source 1..23: mol_type = genomic DNA
ggttcgattccggctcgaaggac

SEQ ID NO: 49643 - DNA, 24 bp, Homo sapiens
  source 1..24: mol_type = genomic DNA
ggttcgattccggctcgaaggacc

SEQ ID NO: 49644 - DNA, 20 bp, Homo sapiens
  source 1..20: mol_type = genomic DNA
ggttcgattctcatagtcct

SEQ ID NO: 49645 - DNA, 22 bp, Homo sapiens
  source 1..22: mol_type = genomic DNA
ggttcgattctcatagtcctag

SEQ ID NO: 49646 - DNA, 23 bp, Homo sapiens
  source 1..23: mol_type = genomic DNA
ggttcgattctcatagtcctagc

SEQ ID NO: 49647 - DNA, 31 bp, Homo sapiens; identical to SEQ ID NO: 20118
  source 1..31: mol_type = genomic DNA

SEQ ID NO: 49648 - DNA, 20 bp, Homo sapiens
  source 1..20: mol_type = genomic DNA
ggttgtagtccgtgcgagaa

SEQ ID NO: 49649 - DNA, 22 bp, Homo sapiens
  source 1..22: mol_type = genomic DNA
ggttgtagtccgtgcgagaata

SEQ ID NO: 49650 - DNA, 24 bp, Homo sapiens
  source 1..24: mol_type = genomic DNA
ggttgtagtccgtgcgagaatacc

SEQ ID NO: 49651 - DNA, 25 bp, Homo sapiens
  source 1..25: mol_type = genomic DNA
ggttgtagtccgtgcgagaatacca

SEQ ID NO: 49652 - DNA, 38 bp, Homo sapiens; identical to SEQ ID NO: 39029
  source 1..38: mol_type = genomic DNA

SEQ ID NO: 49653 - DNA, 34 bp, Homo sapiens; identical to SEQ ID NO: 20149
  source 1..34: mol_type = genomic DNA

SEQ ID NO: 49654 - DNA, 34 bp, Homo sapiens; identical to SEQ ID NO: 20154
  source 1..34: mol_type = genomic DNA

SEQ ID NO: 49655 - DNA, 44 bp, Homo sapiens; identical to SEQ ID NO: 20164
  source 1..44: mol_type = genomic DNA

SEQ ID NO: 49656 - DNA, 20 bp, Homo sapiens
  source 1..20: mol_type = genomic DNA
ggtttttcatatcattggtc

SEQ ID NO: 49657 - DNA, 21 bp, Homo sapiens
  source 1..21: mol_type = genomic DNA
ggtttttcatatcattggtcg

SEQ ID NO: 49658 - DNA, 26 bp, Homo sapiens
  source 1..26: mol_type = genomic DNA
ggtttttcatatcattggtcgtggtt

SEQ ID NO: 49659 - DNA, 27 bp, Homo sapiens
  source 1..27: mol_type = genomic DNA
ggtttttcatatcattggtcgtggttg

SEQ ID NO: 49660 - DNA, 28 bp, Homo sapiens
  source 1..28: mol_type = genomic DNA
ggtttttcatatcattggtcgtggttgt

SEQ ID NO: 49661 - DNA, 29 bp, Homo sapiens
  source 1..29: mol_type = genomic DNA
ggtttttcatatcattggtcgtggttgta

SEQ ID NO: 49662 - DNA, 33 bp, Homo sapiens; identical to SEQ ID NO: 20186
  source 1..33: mol_type = genomic DNA

SEQ ID NO: 49663 - DNA, 34 bp, Homo sapiens; identical to SEQ ID NO: 20187
  source 1..34: mol_type = genomic DNA

SEQ ID NO: 49664 - DNA, 36 bp, Homo sapiens; identical to SEQ ID NO: 20189
  source 1..36: mol_type = genomic DNA

SEQ ID NO: 49665 - DNA, 37 bp, Homo sapiens; identical to SEQ ID NO: 20190
  source 1..37: mol_type = genomic DNA

SEQ ID NO: 49666 - DNA, 38 bp, Homo sapiens; identical to SEQ ID NO: 20191
  source 1..38: mol_type = genomic DNA

SEQ ID NO: 49667 - DNA, 39 bp, Homo sapiens; identical to SEQ ID NO: 20192
  source 1..39: mol_type = genomic DNA

SEQ ID NO: 49668 - DNA, 40 bp, Homo sapiens; identical to SEQ ID NO: 20193
  source 1..40: mol_type = genomic DNA

SEQ ID NO: 49669 - DNA, 41 bp, Homo sapiens; identical to SEQ ID NO: 20194
  source 1..41: mol_type = genomic DNA

SEQ ID NO: 49670 - DNA, 42 bp, Homo sapiens; identical to SEQ ID NO: 20195
  source 1..42: mol_type = genomic DNA

SEQ ID NO: 49671 - DNA, 43 bp, Homo sapiens; identical to SEQ ID NO: 20196
  source 1..43: mol_type = genomic DNA

SEQ ID NO: 49672 - DNA, 44 bp, Homo sapiens; identical to SEQ ID NO: 20197
  source 1..44: mol_type = genomic DNA

SEQ ID NO: 49673 - DNA, 45 bp, Homo sapiens; identical to SEQ ID NO: 20198
  source 1..45: mol_type = genomic DNA

SEQ ID NO: 49674 - DNA, 46 bp, Homo sapiens; identical to SEQ ID NO: 20199
  source 1..46: mol_type = genomic DNA

SEQ ID NO: 49675 - DNA, 47 bp, Homo sapiens; identical to SEQ ID NO: 20200
  source 1..47: mol_type = genomic DNA

SEQ ID NO: 49676 - DNA, 39 bp, Homo sapiens; identical to SEQ ID NO: 20214
  source 1..39: mol_type = genomic DNA

SEQ ID NO: 49677 - DNA, 30 bp, Homo sapiens
  source 1..30: mol_type = genomic DNA
gtaaaccgaagatcacgggttcgaaccccg

SEQ ID NO: 49678 - DNA, 42 bp, Homo sapiens
  source 1..42: mol_type = genomic DNA
gtaaaccgaagatcacgggttcgaaccccgtccgtgcctcca

SEQ ID NO: 49679 - DNA, 20 bp, Homo sapiens
  source 1..20: mol_type = genomic DNA
gtaaaccgaagatcgcgggt

SEQ ID NO: 49680 - DNA, 41 bp, Homo sapiens; identical to SEQ ID NO: 20230
  source 1..41: mol_type = genomic DNA

SEQ ID NO: 49681 - DNA, 20 bp, Homo sapiens
  source 1..20: mol_type = genomic DNA
gtaaaccggagatgaaaacc

SEQ ID NO: 49682 - DNA, 35 bp, Homo sapiens; identical to SEQ ID NO: 20242
  source 1..35: mol_type = genomic DNA

SEQ ID NO: 49683 - DNA, 36 bp, Homo sapiens; identical to SEQ ID NO: 20243
  source 1..36: mol_type = genomic DNA

SEQ ID NO: 49684 - DNA, 37 bp, Homo sapiens; identical to SEQ ID NO: 20244
  source 1..37: mol_type = genomic DNA

SEQ ID NO: 49685 - DNA, 29 bp, Homo sapiens
  source 1..29: mol_type = genomic DNA
gtaaggtcagctaaataagctatcgggcc

SEQ ID NO: 49686 - DNA, 30 bp, Homo sapiens; identical to SEQ ID NO: 20279
  source 1..30: mol_type = genomic DNA

SEQ ID NO: 49687 - DNA, 29 bp, Homo sapiens
  source 1..29: mol_type = genomic DNA
gtaatggtgagcactctggactctgaatc

SEQ ID NO: 49688 - DNA, 16 bp, Homo sapiens
  source 1..16: mol_type = genomic DNA
gtaatggttagcactc

SEQ ID NO: 49689 - DNA, 18 bp, Homo sapiens
  source 1..18: mol_type = genomic DNA
gtaatggttagcactctg

SEQ ID NO: 49690 - DNA, 19 bp, Homo sapiens
  source 1..19: mol_type = genomic DNA
gtaatggttagcactctgg

SEQ ID NO: 49691 - DNA, 20 bp, Homo sapiens
  source 1..20: mol_type = genomic DNA
gtaatggttagcactctgga

SEQ ID NO: 49692 - DNA, 21 bp, Homo sapiens
  source 1..21: mol_type = genomic DNA
gtaatggttagcactctggac

SEQ ID NO: 49693 - DNA, 22 bp, Homo sapiens
  source 1..22: mol_type = genomic DNA
gtaatggttagcactctggact

SEQ ID NO: 49694 - DNA, 23 bp, Homo sapiens
  source 1..23: mol_type = genomic DNA
gtaatggttagcactctggactc

SEQ ID NO: 49695 - DNA, 24 bp, Homo sapiens
  source 1..24: mol_type = genomic DNA
gtaatggttagcactctggactct

SEQ ID NO: 49696 - DNA, 25 bp, Homo sapiens
  source 1..25: mol_type = genomic DNA
gtaatggttagcactctggactctg

SEQ ID NO: 49697 - DNA, 27 bp, Homo sapiens
  source 1..27: mol_type = genomic DNA
gtaatggttagcactctggactctgaa

SEQ ID NO: 49698 - DNA, 29 bp, Homo sapiens
  source 1..29: mol_type = genomic DNA
gtaatggttagcactctggactctgaatc

SEQ ID NO: 49699 - DNA, 30 bp, Homo sapiens; identical to SEQ ID NO: 20328
  source 1..30: mol_type = genomic DNA

SEQ ID NO: 49700 - DNA, 34 bp, Homo sapiens; identical to SEQ ID NO: 20329
  source 1..34: mol_type = genomic DNA

SEQ ID NO: 49701 - DNA, 16 bp, Homo sapiens
  source 1..16: mol_type = genomic DNA
gtagaattctcgcctg

SEQ ID NO: 49702 - DNA, 17 bp, Homo sapiens
  source 1..17: mol_type = genomic DNA
gtagaattctcgcctgc

SEQ ID NO: 49703 - DNA, 18 bp, Homo sapiens
  source 1..18: mol_type = genomic DNA
gtagaattctcgcctgcc

SEQ ID NO: 49704 - DNA, 19 bp, Homo sapiens
  source 1..19: mol_type = genomic DNA
gtagaattctcgcctgcca

SEQ ID NO: 49705 - DNA, 20 bp, Homo sapiens
  source 1..20: mol_type = genomic DNA
gtagaattctcgcctgccac

SEQ ID NO: 49706 - DNA, 21 bp, Homo sapiens
  source 1..21: mol_type = genomic DNA
gtagaattctcgcctgccacg

SEQ ID NO: 49707 - DNA, 22 bp, Homo sapiens
  source 1..22: mol_type = genomic DNA
gtagaattctcgcctgccacgc

SEQ ID NO: 49708 - DNA, 24 bp, Homo sapiens
  source 1..24: mol_type = genomic DNA
gtagaattctcgcctgccacgcgg

SEQ ID NO: 49709 - DNA, 25 bp, Homo sapiens
  source 1..25: mol_type = genomic DNA
gtagaattctcgcctgccacgcggg

SEQ ID NO: 49710 - DNA, 26 bp, Homo sapiens
  source 1..26: mol_type = genomic DNA
gtagaattctcgcctgccacgcggga

SEQ ID NO: 49711 - DNA, 27 bp, Homo sapiens
  source 1..27: mol_type = genomic DNA
gtagaattctcgcctgccacgcgggag

SEQ ID NO: 49712 - DNA, 30 bp, Homo sapiens; identical to SEQ ID NO: 20363
  source 1..30: mol_type = genomic DNA

SEQ ID NO: 49713 - DNA, 31 bp, Homo sapiens; identical to SEQ ID NO: 20364
  source 1..31: mol_type = genomic DNA

SEQ ID NO: 49714 - DNA, 32 bp, Homo sapiens; identical to SEQ ID NO: 20365
  source 1..32: mol_type = genomic DNA

SEQ ID NO: 49715 - DNA, 33 bp, Homo sapiens; identical to SEQ ID NO: 20366
  source 1..33: mol_type = genomic DNA

SEQ ID NO: 49716 - DNA, 34 bp, Homo sapiens; identical to SEQ ID NO: 20367
  source 1..34: mol_type = genomic DNA

SEQ ID NO: 49717 - DNA, 35 bp, Homo sapiens; identical to SEQ ID NO: 20368
  source 1..35: mol_type = genomic DNA

SEQ ID NO: 49718 - DNA, 36 bp, Homo sapiens; identical to SEQ ID NO: 20369
  source 1..36: mol_type = genomic DNA

SEQ ID NO: 49719 - DNA, 16 bp, Homo sapiens
  source 1..16: mol_type = genomic DNA
gtagagcatgagactc

SEQ ID NO: 49720 - DNA, 33 bp, Homo sapiens; identical to SEQ ID NO: 20392
  source 1..33: mol_type = genomic DNA

SEQ ID NO: 49721 - DNA, 34 bp, Homo sapiens; identical to SEQ ID NO: 20393
  source 1..34: mol_type = genomic DNA

SEQ ID NO: 49722 - DNA, 36 bp, Homo sapiens; identical to SEQ ID NO: 20395
  source 1..36: mol_type = genomic DNA

SEQ ID NO: 49723 - DNA, 37 bp, Homo sapiens; identical to SEQ ID NO: 20396
  source 1..37: mol_type = genomic DNA

SEQ ID NO: 49724 - DNA, 16 bp, Homo sapiens
  source 1..16: mol_type = genomic DNA
gtagagcatgggactc

SEQ ID NO: 49725 - DNA, 23 bp, Homo sapiens
  source 1..23: mol_type = genomic DNA
gtagagcatgggactcttaatcc

SEQ ID NO: 49726 - DNA, 24 bp, Homo sapiens
  source 1..24: mol_type = genomic DNA
gtagagcatgggactcttaatccc

SEQ ID NO: 49727 - DNA, 34 bp, Homo sapiens; identical to SEQ ID NO: 20409
  source 1..34: mol_type = genomic DNA

SEQ ID NO: 49728 - DNA, 35 bp, Homo sapiens; identical to SEQ ID NO: 20410
  source 1..35: mol_type = genomic DNA

SEQ ID NO: 49729 - DNA, 36 bp, Homo sapiens
  source 1..36: mol_type = genomic DNA
gtagagcatgggactcttaatcccagggtcgtgggt

SEQ ID NO: 49730 - DNA, 37 bp, Homo sapiens; identical to SEQ ID NO: 20411
  source 1..37: mol_type = genomic DNA

SEQ ID NO: 49731 - DNA, 31 bp, Homo sapiens; identical to SEQ ID NO: 20441
  source 1..31: mol_type = genomic DNA

SEQ ID NO: 49732 - DNA, 32 bp, Homo sapiens
  source 1..32: mol_type = genomic DNA
gtaggatggggtgtgataggtggcacggagaa

SEQ ID NO: 49733 - DNA, 33 bp, Homo sapiens
  source 1..33: mol_type = genomic DNA
gtaggatggggtgtgataggtggcacggagaat

SEQ ID NO: 49734 - DNA, 34 bp, Homo sapiens
  source 1..34: mol_type = genomic DNA
gtaggatggggtgtgataggtggcacggagaatt

SEQ ID NO: 49735 - DNA, 36 bp, Homo sapiens
  source 1..36: mol_type = genomic DNA
gtaggatggggtgtgataggtggcacggagaatttt

SEQ ID NO: 49736 - DNA, 37 bp, Homo sapiens
  source 1..37: mol_type = genomic DNA
gtaggatggggtgtgataggtggcacggagaattttg

SEQ ID NO: 49737 - DNA, 18 bp, Homo sapiens
  source 1..18: mol_type = genomic DNA
gtagtccgtgcgagaata

SEQ ID NO: 49738 - DNA, 19 bp, Homo sapiens
  source 1..19: mol_type = genomic DNA
gtagtccgtgcgagaatac

SEQ ID NO: 49739 - DNA, 20 bp, Homo sapiens
  source 1..20: mol_type = genomic DNA
gtagtccgtgcgagaatacc

SEQ ID NO: 49740 - DNA, 21 bp, Homo sapiens
  source 1..21: mol_type = genomic DNA
gtagtccgtgcgagaatacca

SEQ ID NO: 49741 - DNA, 16 bp, Homo sapiens
  source 1..16: mol_type = genomic DNA
gtagtcgtggccgagt

SEQ ID NO: 49742 - DNA, 17 bp, Homo sapiens
  source 1..17: mol_type = genomic DNA
gtagtcgtggccgagtg

SEQ ID NO: 49743 - DNA, 18 bp, Homo sapiens
  source 1..18: mol_type = genomic DNA
gtagtcgtggccgagtgg

SEQ ID NO: 49744 - DNA, 19 bp, Homo sapiens
  source 1..19: mol_type = genomic DNA
gtagtcgtggccgagtggt

SEQ ID NO: 49745 - DNA, 20 bp, Homo sapiens
  source 1..20: mol_type = genomic DNA
gtagtcgtggccgagtggtt

SEQ ID NO: 49746 - DNA, 21 bp, Homo sapiens
  source 1..21: mol_type = genomic DNA
gtagtcgtggccgagtggtta

SEQ ID NO: 49747 - DNA, 22 bp, Homo sapiens
  source 1..22: mol_type = genomic DNA
gtagtcgtggccgagtggttaa

SEQ ID NO: 49748 - DNA, 23 bp, Homo sapiens
  source 1..23: mol_type = genomic DNA
gtagtcgtggccgagtggttaag

SEQ ID NO: 49749 - DNA, 24 bp, Homo sapiens
  source 1..24: mol_type = genomic DNA
gtagtcgtggccgagtggttaagg

SEQ ID NO: 49750 - DNA, 25 bp, Homo sapiens
  source 1..25: mol_type = genomic DNA
gtagtcgtggccgagtggttaaggc

SEQ ID NO: 49751 - DNA, 29 bp, Homo sapiens
  source 1..29: mol_type = genomic DNA
gtagtcgtggccgagtggttaaggcgatg

SEQ ID NO: 49752 - DNA, 32 bp, Homo sapiens; identical to SEQ ID NO: 20460
  source 1..32: mol_type = genomic DNA

SEQ ID NO: 49753 - DNA, 33 bp, Homo sapiens; identical to SEQ ID NO: 20461
  source 1..33: mol_type = genomic DNA

SEQ ID NO: 49754 - DNA, 32 bp, Homo sapiens
  source 1..32: mol_type = genomic DNA
gtagtcgtggccgagtggttaaggtgatggac

SEQ ID NO: 49755 - DNA, 22 bp, Homo sapiens
  source 1..22: mol_type = genomic DNA
gtagtggttatcacgttcgcct

SEQ ID NO: 49756 - DNA, 17 bp, Homo sapiens
  source 1..17: mol_type = genomic DNA
gtagtgtagtggtcatc

SEQ ID NO: 49757 - DNA, 17 bp, Homo sapiens
  source 1..17: mol_type = genomic DNA
gtagtgtagtggttatc

SEQ ID NO: 49758 - DNA, 27 bp, Homo sapiens
  source 1..27: mol_type = genomic DNA
gtagtgtagtggttatcacgttcgcct

SEQ ID NO: 49759 - DNA, 22 bp, Homo sapiens
  source 1..22: mol_type = genomic DNA
gtatagtggtgagcatagctgc

SEQ ID NO: 49760 - DNA, 21 bp, Homo sapiens
  source 1..21: mol_type = genomic DNA
gtatagtggttagtactctgc

SEQ ID NO: 49761 - DNA, 22 bp, Homo sapiens
  source 1..22: mol_type = genomic DNA
gtatagtggttagtactctgcg

SEQ ID NO: 49762 - DNA, 23 bp, Homo sapiens
  source 1..23: mol_type = genomic DNA
gtatagtggttagtactctgcgt

SEQ ID NO: 49763 - DNA, 24 bp, Homo sapiens
  source 1..24: mol_type = genomic DNA
gtatagtggttagtactctgcgtt

SEQ ID NO: 49764 - DNA, 30 bp, Homo sapiens; identical to SEQ ID NO: 20556
  source 1..30: mol_type = genomic DNA

SEQ ID NO: 49765 - DNA, 31 bp, Homo sapiens; identical to SEQ ID NO: 20557
  source 1..31: mol_type = genomic DNA

SEQ ID NO: 49766 - DNA, 39 bp, Homo sapiens; identical to SEQ ID NO: 39162
  source 1..39: mol_type = genomic DNA

SEQ ID NO: 49767 - DNA, 35 bp, Homo sapiens; identical to SEQ ID NO: 39164
  source 1..35: mol_type = genomic DNA

SEQ ID NO: 49768 - DNA, 36 bp, Homo sapiens; identical to SEQ ID NO: 39165
  source 1..36: mol_type = genomic DNA

SEQ ID NO: 49769 - DNA, 37 bp, Homo sapiens; identical to SEQ ID NO: 20577
  source 1..37: mol_type = genomic DNA

SEQ ID NO: 49770 - DNA, 38 bp, Homo sapiens; identical to SEQ ID NO: 20578
  source 1..38: mol_type = genomic DNA

SEQ ID NO: 49771 - DNA, 28 bp, Homo sapiens
  source 1..28: mol_type = genomic DNA
gtatgaggccccgggttcgatccccggc

SEQ ID NO: 49772 - DNA, 34 bp, Homo sapiens; identical to SEQ ID NO: 20586
  source 1..34: mol_type = genomic DNA

SEQ ID NO: 49773 - DNA, 35 bp, Homo sapiens; identical to SEQ ID NO: 20587
  source 1..35: mol_type = genomic DNA

SEQ ID NO: 49774 - DNA, 36 bp, Homo sapiens; identical to SEQ ID NO: 20588
  source 1..36: mol_type = genomic DNA

SEQ ID NO: 49775 - DNA, 37 bp, Homo sapiens; identical to SEQ ID NO: 20589
  source 1..37: mol_type = genomic DNA

SEQ ID NO: 49776 - DNA, 38 bp, Homo sapiens; identical to SEQ ID NO: 20590
  source 1..38: mol_type = genomic DNA

SEQ ID NO: 49777 - DNA, 35 bp, Homo sapiens; identical to SEQ ID NO: 20596
  source 1..35: mol_type = genomic DNA

SEQ ID NO: 49778 - DNA, 36 bp, Homo sapiens; identical to SEQ ID NO: 20597
  source 1..36: mol_type = genomic DNA

SEQ ID NO: 49779 - DNA, 37 bp, Homo sapiens; identical to SEQ ID NO: 20598
  source 1..37: mol_type = genomic DNA

SEQ ID NO: 49780 - DNA, 38 bp, Homo sapiens; identical to SEQ ID NO: 39174
  source 1..38: mol_type = genomic DNA

SEQ ID NO: 49781 - DNA, 17 bp, Homo sapiens
  source 1..17: mol_type = genomic DNA
gtatgattctcgctttg

SEQ ID NO: 49782 - DNA, 22 bp, Homo sapiens
  source 1..22: mol_type = genomic DNA
gtatgattctcggtttgggtcc

SEQ ID NO: 49783 - DNA, 23 bp, Homo sapiens
  source 1..23: mol_type = genomic DNA
gtatgattctcggtttgggtccg

SEQ ID NO: 49784 - DNA, 28 bp, Homo sapiens
  source 1..28: mol_type = genomic DNA
gtcaaagttaaattataggctaaatcct

SEQ ID NO: 49785 - DNA, 16 bp, Homo sapiens
  source 1..16: mol_type = genomic DNA
gtcacgcgggagaccg

SEQ ID NO: 49786 - DNA, 42 bp, Homo sapiens; identical to SEQ ID NO: 20627
  source 1..42: mol_type = genomic DNA

SEQ ID NO: 49787 - DNA, 40 bp, Homo sapiens; identical to SEQ ID NO: 20633
  source 1..40: mol_type = genomic DNA

SEQ ID NO: 49788 - DNA, 41 bp, Homo sapiens; identical to SEQ ID NO: 20634
  source 1..41: mol_type = genomic DNA

SEQ ID NO: 49789 - DNA, 42 bp, Homo sapiens; identical to SEQ ID NO: 20635
  source 1..42: mol_type = genomic DNA

SEQ ID NO: 49790 - DNA, 16 bp, Homo sapiens
  source 1..16: mol_type = genomic DNA
gtcacggtggccgagt

SEQ ID NO: 49791 - DNA, 18 bp, Homo sapiens
  source 1..18: mol_type = genomic DNA
gtcacggtggccgagtgg

SEQ ID NO: 49792 - DNA, 24 bp, Homo sapiens
  source 1..24: mol_type = genomic DNA
gtcacggtggccgagtggttaagg

SEQ ID NO: 49793 - DNA, 16 bp, Homo sapiens
  source 1..16: mol_type = genomic DNA
gtcacgtcggggtcac

SEQ ID NO: 49794 - DNA, 17 bp, Homo sapiens
  source 1..17: mol_type = genomic DNA
gtcacgtcggggtcacc

SEQ ID NO: 49795 - DNA, 18 bp, Homo sapiens
  source 1..18: mol_type = genomic DNA
gtcacgtcggggtcacca

SEQ ID NO: 49796 - DNA, 24 bp, Homo sapiens
  source 1..24: mol_type = genomic DNA
gtcagctaaataagctatcgggcc

SEQ ID NO: 49797 - DNA, 25 bp, Homo sapiens
  source 1..25: mol_type = genomic DNA
gtcagctaaataagctatcgggccc

SEQ ID NO: 49798 - DNA, 16 bp, Homo sapiens
  source 1..16: mol_type = genomic DNA
gtcaggatggccgagc

SEQ ID NO: 49799 - DNA, 17 bp, Homo sapiens
  source 1..17: mol_type = genomic DNA
gtcaggatggccgagcg

SEQ ID NO: 49800 - DNA, 18 bp, Homo sapiens
  source 1..18: mol_type = genomic DNA
gtcaggatggccgagcgg

SEQ ID NO: 49801 - DNA, 19 bp, Homo sapiens
  source 1..19: mol_type = genomic DNA
gtcaggatggccgagcggt

SEQ ID NO: 49802 - DNA, 20 bp, Homo sapiens
  source 1..20: mol_type = genomic DNA
gtcaggatggccgagcggtc

SEQ ID NO: 49803 - DNA, 21 bp, Homo sapiens
  source 1..21: mol_type = genomic DNA
gtcaggatggccgagcggtct

SEQ ID NO: 49804 - DNA, 22 bp, Homo sapiens
  source 1..22: mol_type = genomic DNA
gtcaggatggccgagcggtcta

SEQ ID NO: 49805 - DNA, 23 bp, Homo sapiens
  source 1..23: mol_type = genomic DNA
gtcaggatggccgagcggtctaa

SEQ ID NO: 49806 - DNA, 24 bp, Homo sapiens
  source 1..24: mol_type = genomic DNA
gtcaggatggccgagcggtctaag

SEQ ID NO: 49807 - DNA, 25 bp, Homo sapiens
  source 1..25: mol_type = genomic DNA
gtcaggatggccgagcggtctaagg

SEQ ID NO: 49808 - DNA, 26 bp, Homo sapiens
  source 1..26: mol_type = genomic DNA
gtcaggatggccgagcggtctaaggc

SEQ ID NO: 49809 - DNA, 29 bp, Homo sapiens
  source 1..29: mol_type = genomic DNA
gtcaggatggccgagcggtctaaggcgct

SEQ ID NO: 49810 - DNA, 30 bp, Homo sapiens; identical to SEQ ID NO: 20674
  source 1..30: mol_type = genomic DNA

SEQ ID NO: 49811 - DNA, 31 bp, Homo sapiens; identical to SEQ ID NO: 20675
  source 1..31: mol_type = genomic DNA

SEQ ID NO: 49812 - DNA, 32 bp, Homo sapiens; identical to SEQ ID NO: 20676
  source 1..32: mol_type = genomic DNA

SEQ ID NO: 49813 - DNA, 33 bp, Homo sapiens; identical to SEQ ID NO: 20677
  source 1..33: mol_type = genomic DNA

SEQ ID NO: 49814 - DNA, 34 bp, Homo sapiens; identical to SEQ ID NO: 20678
  source 1..34: mol_type = genomic DNA

SEQ ID NO: 49815 - DNA, 35 bp, Homo sapiens; identical to SEQ ID NO: 20679
  source 1..35: mol_type = genomic DNA

SEQ ID NO: 49816 - DNA, 36 bp, Homo sapiens; identical to SEQ ID NO: 20680
  source 1..36: mol_type = genomic DNA

SEQ ID NO: 49817 - DNA, 16 bp, Homo sapiens
  source 1..16: mol_type = genomic DNA
gtcaggatggccgagt

SEQ ID NO: 49818 - DNA, 17 bp, Homo sapiens
  source 1..17: mol_type = genomic DNA
gtcaggatggccgagtg

SEQ ID NO: 49819 - DNA, 18 bp, Homo sapiens
  source 1..18: mol_type = genomic DNA
gtcaggatggccgagtgg

SEQ ID NO: 49820 - DNA, 19 bp, Homo sapiens
  source 1..19: mol_type = genomic DNA
gtcaggatggccgagtggt

SEQ ID NO: 49821 - DNA, 20 bp, Homo sapiens
  source 1..20: mol_type = genomic DNA
gtcaggatggccgagtggtc

SEQ ID NO: 49822 - DNA, 21 bp, Homo sapiens
  source 1..21: mol_type = genomic DNA
gtcaggatggccgagtggtct

SEQ ID NO: 49823 - DNA, 22 bp, Homo sapiens
  source 1..22: mol_type = genomic DNA
gtcaggatggccgagtggtcta

SEQ ID NO: 49824 - DNA, 24 bp, Homo sapiens
  source 1..24: mol_type = genomic DNA
gtcaggatggccgagtggtctaag

SEQ ID NO: 49825 - DNA, 25 bp, Homo sapiens
  source 1..25: mol_type = genomic DNA
gtcaggatggccgagtggtctaagg

SEQ ID NO: 49826 - DNA, 26 bp, Homo sapiens
  source 1..26: mol_type = genomic DNA
gtcaggatggccgagtggtctaaggc

SEQ ID NO: 49827 - DNA, 32 bp, Homo sapiens; identical to SEQ ID NO: 20695
  source 1..32: mol_type = genomic DNA

SEQ ID NO: 49828 - DNA, 33 bp, Homo sapiens; identical to SEQ ID NO: 20696
  source 1..33: mol_type = genomic DNA

SEQ ID NO: 49829 - DNA, 34 bp, Homo sapiens; identical to SEQ ID NO: 20697
  source 1..34: mol_type = genomic DNA

SEQ ID NO: 49830 - DNA, 18 bp, Homo sapiens
  source 1..18: mol_type = genomic DNA
gtcagtagagcatcagac

SEQ ID NO: 49831 - DNA, 18 bp, Homo sapiens
  source 1..18: mol_type = genomic DNA
gtcatggaggccatgggg

SEQ ID NO: 49832 - DNA, 28 bp, Homo sapiens
  source 1..28: mol_type = genomic DNA
gtccagggttcaagtccctgttcgggcg

SEQ ID NO: 49833 - DNA, 29 bp, Homo sapiens
  source 1..29: mol_type = genomic DNA
gtccagggttcaagtccctgttcgggcgc

SEQ ID NO: 49834 - DNA, 30 bp, Homo sapiens; identical to SEQ ID NO: 20712
  source 1..30: mol_type = genomic DNA

SEQ ID NO: 49835 - DNA, 31 bp, Homo sapiens; identical to SEQ ID NO: 20713
  source 1..31: mol_type = genomic DNA

SEQ ID NO: 49836 - DNA, 17 bp, Homo sapiens
  source 1..17: mol_type = genomic DNA
gtcccaccagagtcgcc

SEQ ID NO: 49837 - DNA, 17 bp, Homo sapiens
  source 1..17: mol_type = genomic DNA
gtcccacctggggtacc

SEQ ID NO: 49838 - DNA, 18 bp, Homo sapiens
  source 1..18: mol_type = genomic DNA
gtcccacctggggtacca

SEQ ID NO: 49839 - DNA, 17 bp, Homo sapiens
  source 1..17: mol_type = genomic DNA
gtcccacctggggtgcc

SEQ ID NO: 49840 - DNA, 18 bp, Homo sapiens
  source 1..18: mol_type = genomic DNA
gtcccacctggggtgcca

SEQ ID NO: 49841 - DNA, 17 bp, Homo sapiens
  source 1..17: mol_type = genomic DNA
gtcccatctggggtgcc

SEQ ID NO: 49842 - DNA, 28 bp, Homo sapiens
  source 1..28: mol_type = genomic DNA
gtcccatggtgtaatggttagcactctg

SEQ ID NO: 49843 - DNA, 16 bp, Homo sapiens
  source 1..16: mol_type = genomic DNA
gtcccggcggagtcgc

SEQ ID NO: 49844 - DNA, 17 bp, Homo sapiens
  source 1..17: mol_type = genomic DNA
gtcccggcggagtcgcc

SEQ ID NO: 49845 - DNA, 18 bp, Homo sapiens
  source 1..18: mol_type = genomic DNA
gtcccggcggagtcgcca

SEQ ID NO: 49846 - DNA, 29 bp, Homo sapiens
  source 1..29: mol_type = genomic DNA
gtccctggttcgatcccgggtttcggcac

SEQ ID NO: 49847 - DNA, 30 bp, Homo sapiens
  source 1..30: mol_type = genomic DNA
gtccctggttcgatcccgggtttcggcacc

SEQ ID NO: 49848 - DNA, 31 bp, Homo sapiens
  source 1..31: mol_type = genomic DNA
gtccctggttcgatcccgggtttcggcacca

SEQ ID NO: 49849 - DNA, 16 bp, Homo sapiens
  source 1..16: mol_type = genomic DNA
gtccctgttcgggcgc

SEQ ID NO: 49850 - DNA, 17 bp, Homo sapiens
  source 1..17: mol_type = genomic DNA
gtccctgttcgggcgcc

SEQ ID NO: 49851 - DNA, 18 bp, Homo sapiens
  source 1..18: mol_type = genomic DNA
gtccctgttcgggcgcca

SEQ ID NO: 49852 - DNA, 16 bp, Homo sapiens
  source 1..16: mol_type = genomic DNA
gtcccttcgtggtcgc

SEQ ID NO: 49853 - DNA, 17 bp, Homo sapiens
  source 1..17: mol_type = genomic DNA
gtcccttcgtggtcgcc

SEQ ID NO: 49854 - DNA, 18 bp, Homo sapiens
  source 1..18: mol_type = genomic DNA
gtcccttcgtggtcgcca

SEQ ID NO: 49855 - DNA, 18 bp, Homo sapiens
  source 1..18: mol_type = genomic DNA
gtccgtgcgagaatacca

SEQ ID NO: 49856 - DNA, 16 bp, Homo sapiens
  source 1..16: mol_type = genomic DNA
gtcctgccgcggtcgc

SEQ ID NO: 49857 - DNA, 17 bp, Homo sapiens
  source 1..17: mol_type = genomic DNA
gtcctgccgcggtcgcc

SEQ ID NO: 49858 - DNA, 18 bp, Homo sapiens
  source 1..18: mol_type = genomic DNA
gtcctgccgcggtcgcca

SEQ ID NO: 49859 - DNA, 16 bp, Homo sapiens
  source 1..16: mol_type = genomic DNA
gtcctgggttcgagcc

SEQ ID NO: 49860 - DNA, 17 bp, Homo sapiens
  source 1..17: mol_type = genomic DNA
gtcctgggttcgagccc

SEQ ID NO: 49861 - DNA, 30 bp, Homo sapiens; identical to SEQ ID NO: 20796
  source 1..30: mol_type = genomic DNA

SEQ ID NO: 49862 - DNA, 17 bp, Homo sapiens
  source 1..17: mol_type = genomic DNA
gtccttgtagtataaac

SEQ ID NO: 49863 - DNA, 18 bp, Homo sapiens
  source 1..18: mol_type = genomic DNA
gtccttgtagtataaact

SEQ ID NO: 49864 - DNA, 26 bp, Homo sapiens
  source 1..26: mol_type = genomic DNA
gtccttgtagtataaactaatacacc

SEQ ID NO: 49865 - DNA, 28 bp, Homo sapiens
  source 1..28: mol_type = genomic DNA
gtccttgtagtataaactaatacaccag

SEQ ID NO: 49866 - DNA, 29 bp, Homo sapiens
  source 1..29: mol_type = genomic DNA
gtccttgtagtataaactaatacaccagt

SEQ ID NO: 49867 - DNA, 28 bp, Homo sapiens
  source 1..28: mol_type = genomic DNA
gtcgcgggttcgatccccgtacgggcca

SEQ ID NO: 49868 - DNA, 30 bp, Homo sapiens; identical to SEQ ID NO: 20845
  source 1..30: mol_type = genomic DNA

SEQ ID NO: 49869 - DNA, 29 bp, Homo sapiens
  source 1..29: mol_type = genomic DNA
gtcgctggttcgaatccggctcgaaggac

SEQ ID NO: 49870 - DNA, 30 bp, Homo sapiens; identical to SEQ ID NO: 20847
  source 1..30: mol_type = genomic DNA

SEQ ID NO: 49871 - DNA, 31 bp, Homo sapiens; identical to SEQ ID NO: 20848
  source 1..31: mol_type = genomic DNA

SEQ ID NO: 49872 - DNA, 29 bp, Homo sapiens
  source 1..29: mol_type = genomic DNA
gtcgctggttcgattccggctcgaaggac

SEQ ID NO: 49873 - DNA, 30 bp, Homo sapiens; identical to SEQ ID NO: 20854
  source 1..30: mol_type = genomic DNA

SEQ ID NO: 49874 - DNA, 31 bp, Homo sapiens; identical to SEQ ID NO: 20855
  source 1..31: mol_type = genomic DNA

SEQ ID NO: 49875 - DNA, 18 bp, Homo sapiens
  source 1..18: mol_type = genomic DNA
gtcggtagagcataagac

SEQ ID NO: 49876 - DNA, 16 bp, Homo sapiens
  source 1..16: mol_type = genomic DNA
gtcggtagagcatcag

SEQ ID NO: 49877 - DNA, 18 bp, Homo sapiens
  source 1..18: mol_type = genomic DNA
gtcggtagagcatcagac

SEQ ID NO: 49878 - DNA, 19 bp, Homo sapiens
  source 1..19: mol_type = genomic DNA
gtcggtagagcatcagact

SEQ ID NO: 49879 - DNA, 17 bp, Homo sapiens
  source 1..17: mol_type = genomic DNA
gtcggtagagcatgaga

SEQ ID NO: 49880 - DNA, 18 bp, Homo sapiens
  source 1..18: mol_type = genomic DNA
gtcggtagagcatgagac

SEQ ID NO: 49881 - DNA, 19 bp, Homo sapiens
  source 1..19: mol_type = genomic DNA
gtcggtagagcatgagacc

SEQ ID NO: 49882 - DNA, 19 bp, Homo sapiens
  source 1..19: mol_type = genomic DNA
gtcggtagagcatgagact

SEQ ID NO: 49883 - DNA, 20 bp, Homo sapiens
  source 1..20: mol_type = genomic DNA
gtcggtagagcatgagactc

SEQ ID NO: 49884 - DNA, 25 bp, Homo sapiens
  source 1..25: mol_type = genomic DNA
gtcggtagagcatgagactcttaat

SEQ ID NO: 49885 - DNA, 26 bp, Homo sapiens
  source 1..26: mol_type = genomic DNA
gtcggtagagcatgagactcttaatc

SEQ ID NO: 49886 - DNA, 27 bp, Homo sapiens
  source 1..27: mol_type = genomic DNA
gtcggtagagcatgagactcttaatct

SEQ ID NO: 49887 - DNA, 28 bp, Homo sapiens
  source 1..28: mol_type = genomic DNA
gtcggtagagcatgagactcttaatctc

SEQ ID NO: 49888 - DNA, 38 bp, Homo sapiens; identical to SEQ ID NO: 20891
  source 1..38: mol_type = genomic DNA

SEQ ID NO: 49889 - DNA, 16 bp, Homo sapiens
  source 1..16: mol_type = genomic DNA
gtcggtagagcatggg

SEQ ID NO: 49890 - DNA, 17 bp, Homo sapiens
  source 1..17: mol_type = genomic DNA
gtcggtagagcatggga

SEQ ID NO: 49891 - DNA, 18 bp, Homo sapiens
  source 1..18: mol_type = genomic DNA
gtcggtagagcatgggac

SEQ ID NO: 49892 - DNA, 19 bp, Homo sapiens
  source 1..19: mol_type = genomic DNA
gtcggtagagcatgggact

SEQ ID NO: 49893 - DNA, 20 bp, Homo sapiens
  source 1..20: mol_type = genomic DNA
gtcggtagagcatgggactc

SEQ ID NO: 49894 - DNA, 21 bp, Homo sapiens
  source 1..21: mol_type = genomic DNA
gtcggtagagcatgggactct

SEQ ID NO: 49895 - DNA, 25 bp, Homo sapiens
  source 1..25: mol_type = genomic DNA
gtcggtagagcatgggactcttaat

SEQ ID NO: 49896 - DNA, 26 bp, Homo sapiens
  source 1..26: mol_type = genomic DNA
gtcggtagagcatgggactcttaatc

SEQ ID NO: 49897 - DNA, 27 bp, Homo sapiens
  source 1..27: mol_type = genomic DNA
gtcggtagagcatgggactcttaatcc

SEQ ID NO: 49898 - DNA, 28 bp, Homo sapiens
  source 1..28: mol_type = genomic DNA
gtcggtagagcatgggactcttaatccc

SEQ ID NO: 49899 - DNA, 29 bp, Homo sapiens
  source 1..29: mol_type = genomic DNA
gtcggtagagcatgggactcttaatccca

SEQ ID NO: 49900 - DNA, 38 bp, Homo sapiens; identical to SEQ ID NO: 20914
  source 1..38: mol_type = genomic DNA

SEQ ID NO: 49901 - DNA, 40 bp, Homo sapiens; identical to SEQ ID NO: 20916
  source 1..40: mol_type = genomic DNA

SEQ ID NO: 49902 - DNA, 27 bp, Homo sapiens
  source 1..27: mol_type = genomic DNA
gtcgtgggttcgagccccacgttgggc

SEQ ID NO: 49903 - DNA, 28 bp, Homo sapiens
  source 1..28: mol_type = genomic DNA
gtcgtgggttcgagccccacgttgggcg

SEQ ID NO: 49904 - DNA, 29 bp, Homo sapiens
  source 1..29: mol_type = genomic DNA
gtcgtgggttcgagccccacgttgggcgc

SEQ ID NO: 49905 - DNA, 30 bp, Homo sapiens; identical to SEQ ID NO: 20938
  source 1..30: mol_type = genomic DNA

SEQ ID NO: 49906 - DNA, 27 bp, Homo sapiens
  source 1..27: mol_type = genomic DNA
gtcgtggttgtagtccgtgcgagaata

SEQ ID NO: 49907 - DNA, 29 bp, Homo sapiens
  source 1..29: mol_type = genomic DNA
gtcgtggttgtagtccgtgcgagaatacc

SEQ ID NO: 49908 - DNA, 30 bp, Homo sapiens; identical to SEQ ID NO: 20954
  source 1..30: mol_type = genomic DNA

SEQ ID NO: 49909 - DNA, 16 bp, Homo sapiens
  source 1..16: mol_type = genomic DNA
gtctagcggttaggat

SEQ ID NO: 49910 - DNA, 17 bp, Homo sapiens
  source 1..17: mol_type = genomic DNA
gtctagcggttaggatt

SEQ ID NO: 49911 - DNA, 21 bp, Homo sapiens
  source 1..21: mol_type = genomic DNA
gtctagcggttaggattcctg

SEQ ID NO: 49912 - DNA, 23 bp, Homo sapiens
  source 1..23: mol_type = genomic DNA
gtctagcggttaggattcctggt

SEQ ID NO: 49913 - DNA, 19 bp, Homo sapiens
  source 1..19: mol_type = genomic DNA
gtctaggggtatgattctc

SEQ ID NO: 49914 - DNA, 23 bp, Homo sapiens
  source 1..23: mol_type = genomic DNA
gtctaggggtatgattctcgctt

SEQ ID NO: 49915 - DNA, 17 bp, Homo sapiens
  source 1..17: mol_type = genomic DNA
gtctagtggttaggatt

SEQ ID NO: 49916 - DNA, 19 bp, Homo sapiens
  source 1..19: mol_type = genomic DNA
gtctagtggttaggattcg

SEQ ID NO: 49917 - DNA, 20 bp, Homo sapiens
  source 1..20: mol_type = genomic DNA
gtctagtggttaggattcgg

SEQ ID NO: 49918 - DNA, 21 bp, Homo sapiens
  source 1..21: mol_type = genomic DNA
gtctagtggttaggattcggc

SEQ ID NO: 49919 - DNA, 22 bp, Homo sapiens
  source 1..22: mol_type = genomic DNA
gtctagtggttaggattcggcg

SEQ ID NO: 49920 - DNA, 23 bp, Homo sapiens
  source 1..23: mol_type = genomic DNA
gtctagtggttaggattcggcgc

SEQ ID NO: 49921 - DNA, 24 bp, Homo sapiens
  source 1..24: mol_type = genomic DNA
gtctagtggttaggattcggcgct

SEQ ID NO: 49922 - DNA, 25 bp, Homo sapiens
  source 1..25: mol_type = genomic DNA
gtctagtggttaggattcggcgctc

SEQ ID NO: 49923 - DNA, 26 bp, Homo sapiens
  source 1..26: mol_type = genomic DNA
gtctagtggttaggattcggcgctct

SEQ ID NO: 49924 - DNA, 22 bp, Homo sapiens
  source 1..22: mol_type = genomic DNA
gtctcataatctgaaggtcctg

SEQ ID NO: 49925 - DNA, 16 bp, Homo sapiens
  source 1..16: mol_type = genomic DNA
gtctcggtggaacctc

SEQ ID NO: 49926 - DNA, 17 bp, Homo sapiens
  source 1..17: mol_type = genomic DNA
gtctcggtggaacctcc

SEQ ID NO: 49927 - DNA, 18 bp, Homo sapiens
  source 1..18: mol_type = genomic DNA
gtctcggtggaacctcca

SEQ ID NO: 49928 - DNA, 20 bp, Homo sapiens
  source 1..20: mol_type = genomic DNA
gtctctgtggcgcaatggac

SEQ ID NO: 49929 - DNA, 16 bp, Homo sapiens
  source 1..16: mol_type = genomic DNA
gtgaatctgacaacag

SEQ ID NO: 49930 - DNA, 29 bp, Homo sapiens
  source 1..29: mol_type = genomic DNA
gtgaatctgacaacagaggcttacgaccc

SEQ ID NO: 49931 - DNA, 40 bp, Homo sapiens; identical to SEQ ID NO: 21097
  source 1..40: mol_type = genomic DNA

SEQ ID NO: 49932 - DNA, 41 bp, Homo sapiens; identical to SEQ ID NO: 21098
  source 1..41: mol_type = genomic DNA

SEQ ID NO: 49933 - DNA, 42 bp, Homo sapiens; identical to SEQ ID NO: 21099
  source 1..42: mol_type = genomic DNA

SEQ ID NO: 49934 - DNA, 36 bp, Homo sapiens; identical to SEQ ID NO: 21101
  source 1..36: mol_type = genomic DNA

SEQ ID NO: 49935 - DNA, 16 bp, Homo sapiens
  source 1..16: mol_type = genomic DNA
gtgagtatccccgcct

SEQ ID NO: 49936 - DNA, 19 bp, Homo sapiens
  source 1..19: mol_type = genomic DNA
gtgagtatccccgcctgtc

SEQ ID NO: 49937 - DNA, 21 bp, Homo sapiens
  source 1..21: mol_type = genomic DNA
gtgagtatccccgcctgtcac

SEQ ID NO: 49938 - DNA, 26 bp, Homo sapiens
  source 1..26: mol_type = genomic DNA
gtgagtatccccgcctgtcacgcggg

SEQ ID NO: 49939 - DNA, 27 bp, Homo sapiens
  source 1..27: mol_type = genomic DNA
gtgagtatccccgcctgtcacgcggga

SEQ ID NO: 49940 - DNA, 27 bp, Homo sapiens
  source 1..27: mol_type = genomic DNA
gtgatcgtatagtggttagtactctgc

SEQ ID NO: 49941 - DNA, 28 bp, Homo sapiens
  source 1..28: mol_type = genomic DNA
gtgatcgtatagtggttagtactctgcg

SEQ ID NO: 49942 - DNA, 29 bp, Homo sapiens
  source 1..29: mol_type = genomic DNA
gtgatcgtatagtggttagtactctgcgt

SEQ ID NO: 49943 - DNA, 30 bp, Homo sapiens; identical to SEQ ID NO: 21138
  source 1..30: mol_type = genomic DNA

SEQ ID NO: 49944 - DNA, 32 bp, Homo sapiens; identical to SEQ ID NO: 21140
  source 1..32: mol_type = genomic DNA

SEQ ID NO: 49945 - DNA, 24 bp, Homo sapiens
  source 1..24: mol_type = genomic DNA
gtgcaactccaaataaaagtacca

SEQ ID NO: 49946 - DNA, 21 bp, Homo sapiens
  source 1..21: mol_type = genomic DNA
gtgcagtggtagaattctcgc

SEQ ID NO: 49947 - DNA, 23 bp, Homo sapiens
  source 1..23: mol_type = genomic DNA
gtgcagtggtagaattctcgcct

SEQ ID NO: 49948 - DNA, 35 bp, Homo sapiens; identical to SEQ ID NO: 21175
  source 1..35: mol_type = genomic DNA

SEQ ID NO: 49949 - DNA, 36 bp, Homo sapiens; identical to SEQ ID NO: 21176
  source 1..36: mol_type = genomic DNA

SEQ ID NO: 49950 - DNA, 37 bp, Homo sapiens; identical to SEQ ID NO: 21177
  source 1..37: mol_type = genomic DNA

SEQ ID NO: 49951 - DNA, 18 bp, Homo sapiens
  source 1..18: mol_type = genomic DNA
gtgctgggcccataaccc

SEQ ID NO: 49952 - DNA, 29 bp, Homo sapiens
  source 1..29: mol_type = genomic DNA
gtgctgggcccataacccagaggtcgatg

SEQ ID NO: 49953 - DNA, 33 bp, Homo sapiens; identical to SEQ ID NO: 21186
  source 1..33: mol_type = genomic DNA

SEQ ID NO: 49954 - DNA, 39 bp, Homo sapiens; identical to SEQ ID NO: 39376
  source 1..39: mol_type = genomic DNA

SEQ ID NO: 49955 - DNA, 40 bp, Homo sapiens; identical to SEQ ID NO: 21196
  source 1..40: mol_type = genomic DNA

SEQ ID NO: 49956 - DNA, 41 bp, Homo sapiens; identical to SEQ ID NO: 21197
  source 1..41: mol_type = genomic DNA

SEQ ID NO: 49957 - DNA, 26 bp, Homo sapiens
  source 1..26: mol_type = genomic DNA
gtggagttaaagactttttctctgac

SEQ ID NO: 49958 - DNA, 27 bp, Homo sapiens
  source 1..27: mol_type = genomic DNA
gtggagttaaagactttttctctgacc

SEQ ID NO: 49959 - DNA, 28 bp, Homo sapiens
  source 1..28: mol_type = genomic DNA
gtggagttaaagactttttctctgacca

SEQ ID NO: 49960 - DNA, 18 bp, Homo sapiens
  source 1..18: mol_type = genomic DNA
gtggcacggagaattttg

SEQ ID NO: 49961 - DNA, 33 bp, Homo sapiens
  source 1..33: mol_type = genomic DNA
gtggcacggagaattttggattctcagggatgg

SEQ ID NO: 49962 - DNA, 17 bp, Homo sapiens
  source 1..17: mol_type = genomic DNA
gtggccgagtggttaag

SEQ ID NO: 49963 - DNA, 16 bp, Homo sapiens
  source 1..16: mol_type = genomic DNA
gtggccgcagcaacct

SEQ ID NO: 49964 - DNA, 25 bp, Homo sapiens
  source 1..25: mol_type = genomic DNA
gtggcgcagcggaagcgtgctgggc

SEQ ID NO: 49965 - DNA, 16 bp, Homo sapiens
  source 1..16: mol_type = genomic DNA
gtggctaggattcggc

SEQ ID NO: 49966 - DNA, 18 bp, Homo sapiens
  source 1..18: mol_type = genomic DNA
gtgggtagagcatcagac

SEQ ID NO: 49967 - DNA, 27 bp, Homo sapiens
  source 1..27: mol_type = genomic DNA
gtgggttcgaatcccaccagagtcgcc

SEQ ID NO: 49968 - DNA, 27 bp, Homo sapiens
  source 1..27: mol_type = genomic DNA
gtgggttcgaatcccaccttcgtcgcc

SEQ ID NO: 49969 - DNA, 26 bp, Homo sapiens
  source 1..26: mol_type = genomic DNA
gtgggttcgaatcccatcctcgtcgc

SEQ ID NO: 49970 - DNA, 27 bp, Homo sapiens
  source 1..27: mol_type = genomic DNA
gtgggttcgaatcccatcctcgtcgcc

SEQ ID NO: 49971 - DNA, 28 bp, Homo sapiens
  source 1..28: mol_type = genomic DNA
gtgggttcgaatcccatcctcgtcgcca

SEQ ID NO: 49972 - DNA, 25 bp, Homo sapiens
  source 1..25: mol_type = genomic DNA
gtgggttcgagccccacgttgggcg

SEQ ID NO: 49973 - DNA, 26 bp, Homo sapiens
  source 1..26: mol_type = genomic DNA
gtgggttcgagccccacgttgggcgc

SEQ ID NO: 49974 - DNA, 27 bp, Homo sapiens
  source 1..27: mol_type = genomic DNA
gtgggttcgagccccacgttgggcgcc

SEQ ID NO: 49975 - DNA, 27 bp, Homo sapiens
  source 1..27: mol_type = genomic DNA
gtgggttcgagtcccaccagagtcgcc

SEQ ID NO: 49976 - DNA, 27 bp, Homo sapiens
  source 1..27: mol_type = genomic DNA
gtgggttcgagtcccatctgggtcgcc

SEQ ID NO: 49977 - DNA, 26 bp, Homo sapiens
  source 1..26: mol_type = genomic DNA
gtgggtttaagtcccattggtctagc

SEQ ID NO: 49978 - DNA, 16 bp, Homo sapiens
  source 1..16: mol_type = genomic DNA
gtggtagaattctcgc

SEQ ID NO: 49979 - DNA, 17 bp, Homo sapiens
  source 1..17: mol_type = genomic DNA
gtggtagaattctcgcc

SEQ ID NO: 49980 - DNA, 18 bp, Homo sapiens
  source 1..18: mol_type = genomic DNA
gtggtagaattctcgcct

SEQ ID NO: 49981 - DNA, 19 bp, Homo sapiens
  source 1..19: mol_type = genomic DNA
gtggtagaattctcgcctg

SEQ ID NO: 49982 - DNA, 20 bp, Homo sapiens
  source 1..20: mol_type = genomic DNA
gtggtagaattctcgcctgc

SEQ ID NO: 49983 - DNA, 21 bp, Homo sapiens
  source 1..21: mol_type = genomic DNA
gtggtagaattctcgcctgcc

SEQ ID NO: 49984 - DNA, 22 bp, Homo sapiens
  source 1..22: mol_type = genomic DNA
gtggtagaattctcgcctgcca

SEQ ID NO: 49985 - DNA, 23 bp, Homo sapiens
  source 1..23: mol_type = genomic DNA
gtggtagaattctcgcctgccac

SEQ ID NO: 49986 - DNA, 29 bp, Homo sapiens
  source 1..29: mol_type = genomic DNA
gtggtagaattctcgcctgccacgcggga

SEQ ID NO: 49987 - DNA, 34 bp, Homo sapiens; identical to SEQ ID NO: 21294
  source 1..34: mol_type = genomic DNA

SEQ ID NO: 49988 - DNA, 38 bp, Homo sapiens; identical to SEQ ID NO: 21297
  source 1..38: mol_type = genomic DNA

SEQ ID NO: 49989 - DNA, 16 bp, Homo sapiens
  source 1..16: mol_type = genomic DNA
gtggtagagcatttga

SEQ ID NO: 49990 - DNA, 18 bp, Homo sapiens
  source 1..18: mol_type = genomic DNA
gtggtagagcatttgact

SEQ ID NO: 49991 - DNA, 20 bp, Homo sapiens
  source 1..20: mol_type = genomic DNA
gtggtagagcatttgactgc

SEQ ID NO: 49992 - DNA, 17 bp, Homo sapiens
  source 1..17: mol_type = genomic DNA
gtggtagagcgcatgct

SEQ ID NO: 49993 - DNA, 16 bp, Homo sapiens
  source 1..16: mol_type = genomic DNA
gtggtagagcgcgtgc

SEQ ID NO: 49994 - DNA, 17 bp, Homo sapiens
  source 1..17: mol_type = genomic DNA
gtggtagagcgcgtgct

SEQ ID NO: 49995 - DNA, 16 bp, Homo sapiens
  source 1..16: mol_type = genomic DNA
gtggtatcatgcaaga

SEQ ID NO: 49996 - DNA, 17 bp, Homo sapiens
  source 1..17: mol_type = genomic DNA
gtggtatcatgcaagat

SEQ ID NO: 49997 - DNA, 18 bp, Homo sapiens
  source 1..18: mol_type = genomic DNA
gtggtatcatgcaagatt

SEQ ID NO: 49998 - DNA, 16 bp, Homo sapiens
  source 1..16: mol_type = genomic DNA
gtggtatgattctcgc

SEQ ID NO: 49999 - DNA, 17 bp, Homo sapiens
  source 1..17: mol_type = genomic DNA
gtggtatgattctcgct

SEQ ID NO: 50000 - DNA, 17 bp, Homo sapiens
  source 1..17: mol_type = genomic DNA
gtggtcatcacgttcgc

SEQ ID NO: 50001 - DNA, 19 bp, Homo sapiens
  source 1..19: mol_type = genomic DNA
gtggtcatcacgttcgcct

SEQ ID NO: 50002 - DNA, 19 bp, Homo sapiens
  source 1..19: mol_type = genomic DNA
gtggtctagtggttaggat

SEQ ID NO: 50003 - DNA, 22 bp, Homo sapiens
  source 1..22: mol_type = genomic DNA
gtggtctagtggttaggattcg

SEQ ID NO: 50004 - DNA, 24 bp, Homo sapiens
  source 1..24: mol_type = genomic DNA
gtggtctagtggttaggattcggc

SEQ ID NO: 50005 - DNA, 25 bp, Homo sapiens
  source 1..25: mol_type = genomic DNA
gtggtctagtggttaggattcggcg

SEQ ID NO: 50006 - DNA, 26 bp, Homo sapiens
  source 1..26: mol_type = genomic DNA
gtggtctagtggttaggattcggcgc

SEQ ID NO: 50007 - DNA, 27 bp, Homo sapiens
  source 1..27: mol_type = genomic DNA
gtggtctagtggttaggattcggcgct

SEQ ID NO: 50008 - DNA, 28 bp, Homo sapiens
  source 1..28: mol_type = genomic DNA
gtggtctagtggttaggattcggcgctc

SEQ ID NO: 50009 - DNA, 29 bp, Homo sapiens
  source 1..29: mol_type = genomic DNA
gtggtctagtggttaggattcggcgctct

SEQ ID NO: 50010 - DNA, 30 bp, Homo sapiens; identical to SEQ ID NO: 21358
  source 1..30: mol_type = genomic DNA

SEQ ID NO: 50011 - DNA, 17 bp, Homo sapiens
  source 1..17: mol_type = genomic DNA
gtggtgagtatccccgc

SEQ ID NO: 50012 - DNA, 18 bp, Homo sapiens
  source 1..18: mol_type = genomic DNA
gtggtgagtatccccgcc

SEQ ID NO: 50013 - DNA, 19 bp, Homo sapiens
  source 1..19: mol_type = genomic DNA
gtggtgagtatccccgcct

SEQ ID NO: 50014 - DNA, 22 bp, Homo sapiens
  source 1..22: mol_type = genomic DNA
gtggtgagtatccccgcctgtc

SEQ ID NO: 50015 - DNA, 24 bp, Homo sapiens
  source 1..24: mol_type = genomic DNA
gtggtgagtatccccgcctgtcac

SEQ ID NO: 50016 - DNA, 18 bp, Homo sapiens
  source 1..18: mol_type = genomic DNA
gtggttaaggcattggac

SEQ ID NO: 50017 - DNA, 16 bp, Homo sapiens
  source 1..16: mol_type = genomic DNA
gtggttaggattcggc

SEQ ID NO: 50018 - DNA, 17 bp, Homo sapiens
  source 1..17: mol_type = genomic DNA
gtggttaggattcggcg

SEQ ID NO: 50019 - DNA, 18 bp, Homo sapiens
  source 1..18: mol_type = genomic DNA
gtggttaggattcggcgc

SEQ ID NO: 50020 - DNA, 19 bp, Homo sapiens
  source 1..19: mol_type = genomic DNA
gtggttaggattcggcgct

SEQ ID NO: 50021 - DNA, 20 bp, Homo sapiens
  source 1..20: mol_type = genomic DNA
gtggttaggattcggcgctc

SEQ ID NO: 50022 - DNA, 21 bp, Homo sapiens
  source 1..21: mol_type = genomic DNA
gtggttaggattcggcgctct

SEQ ID NO: 50023 - DNA, 22 bp, Homo sapiens
  source 1..22: mol_type = genomic DNA
gtggttaggattcggcgctctc

SEQ ID NO: 50024 - DNA, 23 bp, Homo sapiens
  source 1..23: mol_type = genomic DNA
gtggttaggattcggcgctctca

SEQ ID NO: 50025 - DNA, 24 bp, Homo sapiens
  source 1..24: mol_type = genomic DNA
gtggttaggattcggcgctctcac

SEQ ID NO: 50026 - DNA, 25 bp, Homo sapiens
  source 1..25: mol_type = genomic DNA
gtggttaggattcggcgctctcacc

SEQ ID NO: 50027 - DNA, 28 bp, Homo sapiens
  source 1..28: mol_type = genomic DNA
gtggttaggattcggcgctctcaccgcc

SEQ ID NO: 50028 - DNA, 35 bp, Homo sapiens; identical to SEQ ID NO: 21407
  source 1..35: mol_type = genomic DNA

SEQ ID NO: 50029 - DNA, 39 bp, Homo sapiens; identical to SEQ ID NO: 21411
  source 1..39: mol_type = genomic DNA

SEQ ID NO: 50030 - DNA, 16 bp, Homo sapiens
  source 1..16: mol_type = genomic DNA
gtggttagtactctgc

SEQ ID NO: 50031 - DNA, 17 bp, Homo sapiens
  source 1..17: mol_type = genomic DNA
gtggttagtactctgcg

SEQ ID NO: 50032 - DNA, 18 bp, Homo sapiens
  source 1..18: mol_type = genomic DNA
gtggttagtactctgcgt

SEQ ID NO: 50033 - DNA, 19 bp, Homo sapiens
  source 1..19: mol_type = genomic DNA
gtggttagtactctgcgtt

SEQ ID NO: 50034 - DNA, 20 bp, Homo sapiens
  source 1..20: mol_type = genomic DNA
gtggttagtactctgcgttg

SEQ ID NO: 50035 - DNA, 21 bp, Homo sapiens
  source 1..21: mol_type = genomic DNA
gtggttagtactctgcgttgt

SEQ ID NO: 50036 - DNA, 25 bp, Homo sapiens
  source 1..25: mol_type = genomic DNA
gtggttagtactctgcgttgtggcc

SEQ ID NO: 50037 - DNA, 30 bp, Homo sapiens; identical to SEQ ID NO: 39471
  source 1..30: mol_type = genomic DNA

SEQ ID NO: 50038 - DNA, 34 bp, Homo sapiens; identical to SEQ ID NO: 21428
  source 1..34: mol_type = genomic DNA

SEQ ID NO: 50039 - DNA, 35 bp, Homo sapiens; identical to SEQ ID NO: 21429
  source 1..35: mol_type = genomic DNA

SEQ ID NO: 50040 - DNA, 17 bp, Homo sapiens
  source 1..17: mol_type = genomic DNA
gtggttatcacgtctgc

SEQ ID NO: 50041 - DNA, 19 bp, Homo sapiens
  source 1..19: mol_type = genomic DNA
gtggttatcacgtctgctt

SEQ ID NO: 50042 - DNA, 20 bp, Homo sapiens
  source 1..20: mol_type = genomic DNA
gtggttatcacgtctgcttt

SEQ ID NO: 50043 - DNA, 21 bp, Homo sapiens
  source 1..21: mol_type = genomic DNA
gtggttatcacgtctgcttta

SEQ ID NO: 50044 - DNA, 16 bp, Homo sapiens
  source 1..16: mol_type = genomic DNA
gtggttatcacgttcg

SEQ ID NO: 50045 - DNA, 17 bp, Homo sapiens
  source 1..17: mol_type = genomic DNA
gtggttatcacgttcgc

SEQ ID NO: 50046 - DNA, 18 bp, Homo sapiens
  source 1..18: mol_type = genomic DNA
gtggttatcacgttcgcc

SEQ ID NO: 50047 - DNA, 19 bp, Homo sapiens
  source 1..19: mol_type = genomic DNA
gtggttatcacgttcgcct

SEQ ID NO: 50048 - DNA, 20 bp, Homo sapiens
  source 1..20: mol_type = genomic DNA
gtggttatcacgttcgcctc

SEQ ID NO: 50049 - DNA, 40 bp, Homo sapiens
  source 1..40: mol_type = genomic DNA
gtggttatcacgttcgcctcacacgcgaaaggtccccggt

SEQ ID NO: 50050 - DNA, 21 bp, Homo sapiens
  source 1..21: mol_type = genomic DNA
gtggttcagtggtagaattct

SEQ ID NO: 50051 - DNA, 23 bp, Homo sapiens
  source 1..23: mol_type = genomic DNA
gtggttcagtggtagaattctcg

SEQ ID NO: 50052 - DNA, 24 bp, Homo sapiens
  source 1..24: mol_type = genomic DNA
gtggttcagtggtagaattctcgc

SEQ ID NO: 50053 - DNA, 25 bp, Homo sapiens
  source 1..25: mol_type = genomic DNA
gtggttcagtggtagaattctcgcc

SEQ ID NO: 50054 - DNA, 26 bp, Homo sapiens
  source 1..26: mol_type = genomic DNA
gtggttcagtggtagaattctcgcct

SEQ ID NO: 50055 - DNA, 28 bp, Homo sapiens
  source 1..28: mol_type = genomic DNA
gtggttcagtggtagaattctcgcctgc

SEQ ID NO: 50056 - DNA, 29 bp, Homo sapiens
  source 1..29: mol_type = genomic DNA
gtggttcagtggtagaattctcgcctgcc

SEQ ID NO: 50057 - DNA, 30 bp, Homo sapiens; identical to SEQ ID NO: 21489
  source 1..30: mol_type = genomic DNA

SEQ ID NO: 50058 - DNA, 31 bp, Homo sapiens; identical to SEQ ID NO: 21490
  source 1..31: mol_type = genomic DNA

SEQ ID NO: 50059 - DNA, 42 bp, Homo sapiens; identical to SEQ ID NO: 21493
  source 1..42: mol_type = genomic DNA

SEQ ID NO: 50060 - DNA, 44 bp, Homo sapiens; identical to SEQ ID NO: 21494
  source 1..44: mol_type = genomic DNA

SEQ ID NO: 50061 - DNA, 26 bp, Homo sapiens
  source 1..26: mol_type = genomic DNA
gtggttcgagcccacccagggacgcc

SEQ ID NO: 50062 - DNA, 17 bp, Homo sapiens
  source 1..17: mol_type = genomic DNA
gtggttgtagtccgtgc

SEQ ID NO: 50063 - DNA, 18 bp, Homo sapiens
  source 1..18: mol_type = genomic DNA
gtggttgtagtccgtgcg

SEQ ID NO: 50064 - DNA, 20 bp, Homo sapiens
  source 1..20: mol_type = genomic DNA
gtggttgtagtccgtgcgag

SEQ ID NO: 50065 - DNA, 21 bp, Homo sapiens
  source 1..21: mol_type = genomic DNA
gtggttgtagtccgtgcgaga

SEQ ID NO: 50066 - DNA, 22 bp, Homo sapiens
  source 1..22: mol_type = genomic DNA
gtggttgtagtccgtgcgagaa

SEQ ID NO: 50067 - DNA, 23 bp, Homo sapiens
  source 1..23: mol_type = genomic DNA
gtggttgtagtccgtgcgagaat

SEQ ID NO: 50068 - DNA, 24 bp, Homo sapiens
  source 1..24: mol_type = genomic DNA
gtggttgtagtccgtgcgagaata

SEQ ID NO: 50069 - DNA, 25 bp, Homo sapiens
  source 1..25: mol_type = genomic DNA
gtggttgtagtccgtgcgagaatac

SEQ ID NO: 50070 - DNA, 26 bp, Homo sapiens
  source 1..26: mol_type = genomic DNA
gtggttgtagtccgtgcgagaatacc

SEQ ID NO: 50071 - DNA, 27 bp, Homo sapiens
  source 1..27: mol_type = genomic DNA
gtggttgtagtccgtgcgagaatacca

SEQ ID NO: 50072 - DNA, 20 bp, Homo sapiens
  source 1..20: mol_type = genomic DNA
gtgtaatggtgagcactctg

SEQ ID NO: 50073 - DNA, 20 bp, Homo sapiens
  source 1..20: mol_type = genomic DNA
gtgtaatggttagcactctg

SEQ ID NO: 50074 - DNA, 21 bp, Homo sapiens
  source 1..21: mol_type = genomic DNA
gtgtaatggttagcactctgg

SEQ ID NO: 50075 - DNA, 22 bp, Homo sapiens
  source 1..22: mol_type = genomic DNA
gtgtaatggttagcactctgga

SEQ ID NO: 50076 - DNA, 24 bp, Homo sapiens
  source 1..24: mol_type = genomic DNA
gtgtaatggttagcactctggact

SEQ ID NO: 50077 - DNA, 25 bp, Homo sapiens
  source 1..25: mol_type = genomic DNA
gtgtaatggttagcactctggactc

SEQ ID NO: 50078 - DNA, 26 bp, Homo sapiens
  source 1..26: mol_type = genomic DNA
gtgtaatggttagcactctggactct

SEQ ID NO: 50079 - DNA, 31 bp, Homo sapiens; identical to SEQ ID NO: 21537
  source 1..31: mol_type = genomic DNA

SEQ ID NO: 50080 - DNA, 32 bp, Homo sapiens; identical to SEQ ID NO: 21538
  source 1..32: mol_type = genomic DNA

SEQ ID NO: 50081 - DNA, 44 bp, Homo sapiens; identical to SEQ ID NO: 21544
  source 1..44: mol_type = genomic DNA

SEQ ID NO: 50082 - DNA, 45 bp, Homo sapiens; identical to SEQ ID NO: 21545
  source 1..45: mol_type = genomic DNA

SEQ ID NO: 50083 - DNA, 31 bp, Homo sapiens
  source 1..31: mol_type = genomic DNA
gtgtaatggttagcactctggactttgaatc

SEQ ID NO: 50084 - DNA, 32 bp, Homo sapiens; identical to SEQ ID NO: 21550
  source 1..32: mol_type = genomic DNA

SEQ ID NO: 50085 - DNA, 16 bp, Homo sapiens
  source 1..16: mol_type = genomic DNA
gtgtagtggtatcatg

SEQ ID NO: 50086 - DNA, 23 bp, Homo sapiens
  source 1..23: mol_type = genomic DNA
gtgtagtggtatcatgcaagatt

SEQ ID NO: 50087 - DNA, 41 bp, Homo sapiens; identical to SEQ ID NO: 21569
  source 1..41: mol_type = genomic DNA

SEQ ID NO: 50088 - DNA, 43 bp, Homo sapiens; identical to SEQ ID NO: 21571
  source 1..43: mol_type = genomic DNA

SEQ ID NO: 50089 - DNA, 22 bp, Homo sapiens
  source 1..22: mol_type = genomic DNA
gtgtagtggttatcacgttcgc

SEQ ID NO: 50090 - DNA, 23 bp, Homo sapiens
  source 1..23: mol_type = genomic DNA
gtgtagtggttatcacgttcgcc

SEQ ID NO: 50091 - DNA, 24 bp, Homo sapiens
  source 1..24: mol_type = genomic DNA
gtgtagtggttatcacgttcgcct

SEQ ID NO: 50092 - DNA, 25 bp, Homo sapiens
  source 1..25: mol_type = genomic DNA
gtgtagtggttatcacgttcgcctc

SEQ ID NO: 50093 - DNA, 16 bp, Homo sapiens
  source 1..16: mol_type = genomic DNA
gtgtgaggtcccgggt

SEQ ID NO: 50094 - DNA, 22 bp, Homo sapiens
  source 1..22: mol_type = genomic DNA
gtgtgataggtggcacggagaa

SEQ ID NO: 50095 - DNA, 25 bp, Homo sapiens
  source 1..25: mol_type = genomic DNA
gtgttcaagtcacgtcggggtcacc

SEQ ID NO: 50096 - DNA, 21 bp, Homo sapiens
  source 1..21: mol_type = genomic DNA
gtgttcgaatcacgtcggggt

SEQ ID NO: 50097 - DNA, 25 bp, Homo sapiens
  source 1..25: mol_type = genomic DNA
gtgttcgaatcacgtcggggtcacc

SEQ ID NO: 50098 - DNA, 32 bp, Homo sapiens; identical to SEQ ID NO: 21621
  source 1..32: mol_type = genomic DNA

SEQ ID NO: 50099 - DNA, 33 bp, Homo sapiens; identical to SEQ ID NO: 21622
  source 1..33: mol_type = genomic DNA

SEQ ID NO: 50100 - DNA, 17 bp, Homo sapiens
  source 1..17: mol_type = genomic DNA
gttaaagactttttctc

SEQ ID NO: 50101 - DNA, 18 bp, Homo sapiens
  source 1..18: mol_type = genomic DNA
gttaaagactttttctct

SEQ ID NO: 50102 - DNA, 20 bp, Homo sapiens
  source 1..20: mol_type = genomic DNA
gttaaagactttttctctga

SEQ ID NO: 50103 - DNA, 21 bp, Homo sapiens
  source 1..21: mol_type = genomic DNA
gttaaagactttttctctgac

SEQ ID NO: 50104 - DNA, 22 bp, Homo sapiens
  source 1..22: mol_type = genomic DNA
gttaaagactttttctctgacc

SEQ ID NO: 50105 - DNA, 23 bp, Homo sapiens
  source 1..23: mol_type = genomic DNA
gttaaagactttttctctgacca

SEQ ID NO: 50106 - DNA, 19 bp, Homo sapiens
  source 1..19: mol_type = genomic DNA
gttaaagattaagagaacc

SEQ ID NO: 50107 - DNA, 39 bp, Homo sapiens; identical to SEQ ID NO: 21655
  source 1..39: mol_type = genomic DNA

SEQ ID NO: 50108 - DNA, 40 bp, Homo sapiens; identical to SEQ ID NO: 21656
  source 1..40: mol_type = genomic DNA

SEQ ID NO: 50109 - DNA, 16 bp, Homo sapiens
  source 1..16: mol_type = genomic DNA
gttaagatggcagagc

SEQ ID NO: 50110 - DNA, 17 bp, Homo sapiens
  source 1..17: mol_type = genomic DNA
gttaagatggcagagcc

SEQ ID NO: 50111 - DNA, 18 bp, Homo sapiens
  source 1..18: mol_type = genomic DNA
gttaagatggcagagccc

SEQ ID NO: 50112 - DNA, 19 bp, Homo sapiens
  source 1..19: mol_type = genomic DNA
gttaagatggcagagcccg

SEQ ID NO: 50113 - DNA, 20 bp, Homo sapiens
  source 1..20: mol_type = genomic DNA
gttaagatggcagagcccgg

SEQ ID NO: 50114 - DNA, 21 bp, Homo sapiens
  source 1..21: mol_type = genomic DNA
gttaagatggcagagcccggt

SEQ ID NO: 50115 - DNA, 22 bp, Homo sapiens
  source 1..22: mol_type = genomic DNA
gttaagatggcagagcccggta

SEQ ID NO: 50116 - DNA, 23 bp, Homo sapiens
  source 1..23: mol_type = genomic DNA
gttaagatggcagagcccggtaa

SEQ ID NO: 50117 - DNA, 25 bp, Homo sapiens
  source 1..25: mol_type = genomic DNA
gttaagatggcagagcccggtaatc

SEQ ID NO: 50118 - DNA, 28 bp, Homo sapiens
  source 1..28: mol_type = genomic DNA
gttaagatggcagagcccggtaatcgca

SEQ ID NO: 50119 - DNA, 29 bp, Homo sapiens
  source 1..29: mol_type = genomic DNA
gttaagatggcagagcccggtaatcgcat

SEQ ID NO: 50120 - DNA, 30 bp, Homo sapiens; identical to SEQ ID NO: 21718
  source 1..30: mol_type = genomic DNA

SEQ ID NO: 50121 - DNA, 31 bp, Homo sapiens; identical to SEQ ID NO: 21719
  source 1..31: mol_type = genomic DNA

SEQ ID NO: 50122 - DNA, 32 bp, Homo sapiens; identical to SEQ ID NO: 21720
  source 1..32: mol_type = genomic DNA

SEQ ID NO: 50123 - DNA, 35 bp, Homo sapiens; identical to SEQ ID NO: 21723
  source 1..35: mol_type = genomic DNA

SEQ ID NO: 50124 - DNA, 37 bp, Homo sapiens; identical to SEQ ID NO: 21725
  source 1..37: mol_type = genomic DNA

SEQ ID NO: 50125 - DNA, 42 bp, Homo sapiens; identical to SEQ ID NO: 21730
  source 1..42: mol_type = genomic DNA

SEQ ID NO: 50126 - DNA, 43 bp, Homo sapiens; identical to SEQ ID NO: 21731
  source 1..43: mol_type = genomic DNA

SEQ ID NO: 50127 - DNA, 44 bp, Homo sapiens; identical to SEQ ID NO: 21732
  source 1..44: mol_type = genomic DNA

SEQ ID NO: 50128 - DNA, 45 bp, Homo sapiens; identical to SEQ ID NO: 21733
  source 1..45: mol_type = genomic DNA

SEQ ID NO: 50129 - DNA, 46 bp, Homo sapiens; identical to SEQ ID NO: 21734
  source 1..46: mol_type = genomic DNA

SEQ ID NO: 50130 - DNA, 16 bp, Homo sapiens
  source 1..16: mol_type = genomic DNA
gttagcactctggact

SEQ ID NO: 50131 - DNA, 17 bp, Homo sapiens
  source 1..17: mol_type = genomic DNA
gttagcactctggactc

SEQ ID NO: 50132 - DNA, 21 bp, Homo sapiens
  source 1..21: mol_type = genomic DNA
gttagcactctggactctgaa

SEQ ID NO: 50133 - DNA, 22 bp, Homo sapiens
  source 1..22: mol_type = genomic DNA
gttagcactctggactctgaat

SEQ ID NO: 50134 - DNA, 23 bp, Homo sapiens
  source 1..23: mol_type = genomic DNA
gttagcactctggactctgaatc

SEQ ID NO: 50135 - DNA, 24 bp, Homo sapiens
  source 1..24: mol_type = genomic DNA
gttagcactctggactctgaatcc

SEQ ID NO: 50136 - DNA, 25 bp, Homo sapiens
  source 1..25: mol_type = genomic DNA
gttagcactctggactctgaatcca

SEQ ID NO: 50137 - DNA, 27 bp, Homo sapiens
  source 1..27: mol_type = genomic DNA
gttagcactctggactctgaatccagc

SEQ ID NO: 50138 - DNA, 28 bp, Homo sapiens
  source 1..28: mol_type = genomic DNA
gttagcactctggactctgaatccagcg

SEQ ID NO: 50139 - DNA, 35 bp, Homo sapiens; identical to SEQ ID NO: 21756
  source 1..35: mol_type = genomic DNA

SEQ ID NO: 50140 - DNA, 39 bp, Homo sapiens; identical to SEQ ID NO: 21760
  source 1..39: mol_type = genomic DNA

SEQ ID NO: 50141 - DNA, 23 bp, Homo sapiens
  source 1..23: mol_type = genomic DNA
gttagcactctggactttgaatc

SEQ ID NO: 50142 - DNA, 24 bp, Homo sapiens
  source 1..24: mol_type = genomic DNA
gttagcactctggactttgaatcc

SEQ ID NO: 50143 - DNA, 16 bp, Homo sapiens
  source 1..16: mol_type = genomic DNA
gttaggattcctggtt

SEQ ID NO: 50144 - DNA, 26 bp, Homo sapiens
  source 1..26: mol_type = genomic DNA
gttaggattcctggttttcacccagg

SEQ ID NO: 50145 - DNA, 16 bp, Homo sapiens
  source 1..16: mol_type = genomic DNA
gttaggattcggcgct

SEQ ID NO: 50146 - DNA, 17 bp, Homo sapiens
  source 1..17: mol_type = genomic DNA
gttaggattcggcgctc

SEQ ID NO: 50147 - DNA, 18 bp, Homo sapiens
  source 1..18: mol_type = genomic DNA
gttaggattcggcgctct

SEQ ID NO: 50148 - DNA, 19 bp, Homo sapiens
  source 1..19: mol_type = genomic DNA
gttaggattcggcgctctc

SEQ ID NO: 50149 - DNA, 22 bp, Homo sapiens
  source 1..22: mol_type = genomic DNA
gttaggattcggcgctctcacc

SEQ ID NO: 50150 - DNA, 23 bp, Homo sapiens
  source 1..23: mol_type = genomic DNA
gttaggattcggcgctctcaccg

SEQ ID NO: 50151 - DNA, 25 bp, Homo sapiens
  source 1..25: mol_type = genomic DNA
gttaggattcggcgctctcaccgcc

SEQ ID NO: 50152 - DNA, 32 bp, Homo sapiens; identical to SEQ ID NO: 21797
  source 1..32: mol_type = genomic DNA

SEQ ID NO: 50153 - DNA, 21 bp, Homo sapiens
  source 1..21: mol_type = genomic DNA
gttaggcctctttttaccacc

SEQ ID NO: 50154 - DNA, 16 bp, Homo sapiens
  source 1..16: mol_type = genomic DNA
gttagtactctgcgtt

SEQ ID NO: 50155 - DNA, 18 bp, Homo sapiens
  source 1..18: mol_type = genomic DNA
gttagtactctgcgttgt

SEQ ID NO: 50156 - DNA, 27 bp, Homo sapiens
  source 1..27: mol_type = genomic DNA
gttagtactctgcgttgtggccgcagc

SEQ ID NO: 50157 - DNA, 31 bp, Homo sapiens; identical to SEQ ID NO: 21821
  source 1..31: mol_type = genomic DNA

SEQ ID NO: 50158 - DNA, 32 bp, Homo sapiens; identical to SEQ ID NO: 21822
  source 1..32: mol_type = genomic DNA

SEQ ID NO: 50159 - DNA, 23 bp, Homo sapiens
  source 1..23: mol_type = genomic DNA
gttatacccttcccgtactacca

SEQ ID NO: 50160 - DNA, 16 bp, Homo sapiens
  source 1..16: mol_type = genomic DNA
gttatcacgtctgctt

SEQ ID NO: 50161 - DNA, 17 bp, Homo sapiens
  source 1..17: mol_type = genomic DNA
gttatcacgtctgcttt

SEQ ID NO: 50162 - DNA, 16 bp, Homo sapiens
  source 1..16: mol_type = genomic DNA
gttatcacgttcgcct

SEQ ID NO: 50163 - DNA, 23 bp, Homo sapiens
  source 1..23: mol_type = genomic DNA
gttcaaatcacgtcggggtcacc

SEQ ID NO: 50164 - DNA, 16 bp, Homo sapiens
  source 1..16: mol_type = genomic DNA
gttcaaatcccggacg

SEQ ID NO: 50165 - DNA, 17 bp, Homo sapiens
  source 1..17: mol_type = genomic DNA
gttcaaatcccggacga

SEQ ID NO: 50166 - DNA, 18 bp, Homo sapiens
  source 1..18: mol_type = genomic DNA
gttcaaatcccggacgag

SEQ ID NO: 50167 - DNA, 19 bp, Homo sapiens
  source 1..19: mol_type = genomic DNA
gttcaaatcccggacgagc

SEQ ID NO: 50168 - DNA, 20 bp, Homo sapiens
  source 1..20: mol_type = genomic DNA
gttcaaatcccggacgagcc

SEQ ID NO: 50169 - DNA, 21 bp, Homo sapiens
  source 1..21: mol_type = genomic DNA
gttcaaatcccggacgagccc

SEQ ID NO: 50170 - DNA, 22 bp, Homo sapiens
  source 1..22: mol_type = genomic DNA
gttcaaatcccggacgagcccc

SEQ ID NO: 50171 - DNA, 23 bp, Homo sapiens
  source 1..23: mol_type = genomic DNA
gttcaaatcccggacgagccccc

SEQ ID NO: 50172 - DNA, 24 bp, Homo sapiens
  source 1..24: mol_type = genomic DNA
gttcaaatcccggacgagccccca

SEQ ID NO: 50173 - DNA, 16 bp, Homo sapiens
  source 1..16: mol_type = genomic DNA
gttcaaatccgggtgc

SEQ ID NO: 50174 - DNA, 17 bp, Homo sapiens
  source 1..17: mol_type = genomic DNA
gttcaaatccgggtgcc

SEQ ID NO: 50175 - DNA, 18 bp, Homo sapiens
  source 1..18: mol_type = genomic DNA
gttcaaatccgggtgccc

SEQ ID NO: 50176 - DNA, 19 bp, Homo sapiens
  source 1..19: mol_type = genomic DNA
gttcaaatccgggtgcccc

SEQ ID NO: 50177 - DNA, 20 bp, Homo sapiens
  source 1..20: mol_type = genomic DNA
gttcaaatccgggtgccccc

SEQ ID NO: 50178 - DNA, 21 bp, Homo sapiens
  source 1..21: mol_type = genomic DNA
gttcaaatccgggtgccccct

SEQ ID NO: 50179 - DNA, 22 bp, Homo sapiens
  source 1..22: mol_type = genomic DNA
gttcaaatccgggtgccccctc

SEQ ID NO: 50180 - DNA, 23 bp, Homo sapiens
  source 1..23: mol_type = genomic DNA
gttcaaatccgggtgccccctcc

SEQ ID NO: 50181 - DNA, 21 bp, Homo sapiens
  source 1..21: mol_type = genomic DNA
gttcaaatctcgctggggcct

SEQ ID NO: 50182 - DNA, 22 bp, Homo sapiens
  source 1..22: mol_type = genomic DNA
gttcaaatctcgctggggcctc

SEQ ID NO: 50183 - DNA, 23 bp, Homo sapiens
  source 1..23: mol_type = genomic DNA
gttcaaatctcgctggggcctcc

SEQ ID NO: 50184 - DNA, 17 bp, Homo sapiens
  source 1..17: mol_type = genomic DNA
gttcaaatctcggtgga

SEQ ID NO: 50185 - DNA, 21 bp, Homo sapiens
  source 1..21: mol_type = genomic DNA
gttcaaatctcggtggaacct

SEQ ID NO: 50186 - DNA, 22 bp, Homo sapiens
  source 1..22: mol_type = genomic DNA
gttcaaatctcggtggaacctc

SEQ ID NO: 50187 - DNA, 23 bp, Homo sapiens
  source 1..23: mol_type = genomic DNA
gttcaaatctcggtggaacctcc

SEQ ID NO: 50188 - DNA, 24 bp, Homo sapiens
  source 1..24: mol_type = genomic DNA
gttcaaatctcggtggaacctcca

SEQ ID NO: 50189 - DNA, 18 bp, Homo sapiens
  source 1..18: mol_type = genomic DNA
gttcaaatctcggtggga

SEQ ID NO: 50190 - DNA, 21 bp, Homo sapiens
  source 1..21: mol_type = genomic DNA
gttcaaatctcggtgggacct

SEQ ID NO: 50191 - DNA, 22 bp, Homo sapiens
  source 1..22: mol_type = genomic DNA
gttcaaatctcggtgggacctc

SEQ ID NO: 50192 - DNA, 23 bp, Homo sapiens
  source 1..23: mol_type = genomic DNA
gttcaaatctcggtgggacctcc

SEQ ID NO: 50193 - DNA, 23 bp, Homo sapiens
  source 1..23: mol_type = genomic DNA
gttcaagtcacgtcggggtcacc

SEQ ID NO: 50194 - DNA, 20 bp, Homo sapiens
  source 1..20: mol_type = genomic DNA
gttcaagtccctgttcgggc

SEQ ID NO: 50195 - DNA, 21 bp, Homo sapiens
  source 1..21: mol_type = genomic DNA
gttcaagtccctgttcgggcg

SEQ ID NO: 50196 - DNA, 22 bp, Homo sapiens
  source 1..22: mol_type = genomic DNA
gttcaagtccctgttcgggcgc

SEQ ID NO: 50197 - DNA, 23 bp, Homo sapiens
  source 1..23: mol_type = genomic DNA
gttcaagtccctgttcgggcgcc

SEQ ID NO: 50198 - DNA, 24 bp, Homo sapiens
  source 1..24: mol_type = genomic DNA
gttcaagtccctgttcgggcgcca

SEQ ID NO: 50199 - DNA, 17 bp, Homo sapiens
  source 1..17: mol_type = genomic DNA
gttcaatccccagcacc

SEQ ID NO: 50200 - DNA, 16 bp, Homo sapiens
  source 1..16: mol_type = genomic DNA
gttcaatccccggcac

SEQ ID NO: 50201 - DNA, 17 bp, Homo sapiens
  source 1..17: mol_type = genomic DNA
gttcaatccccggcacc

SEQ ID NO: 50202 - DNA, 18 bp, Homo sapiens
  source 1..18: mol_type = genomic DNA
gttcaatccccggcacct

SEQ ID NO: 50203 - DNA, 21 bp, Homo sapiens
  source 1..21: mol_type = genomic DNA
gttcaatccccggcacctcca

SEQ ID NO: 50204 - DNA, 22 bp, Homo sapiens
  source 1..22: mol_type = genomic DNA
gttcaatccccggcacctccac

SEQ ID NO: 50205 - DNA, 23 bp, Homo sapiens
  source 1..23: mol_type = genomic DNA
gttcaatccccggcacctccacc

SEQ ID NO: 50206 - DNA, 24 bp, Homo sapiens
  source 1..24: mol_type = genomic DNA
gttcaatccccggcacctccacca

SEQ ID NO: 50207 - DNA, 17 bp, Homo sapiens
  source 1..17: mol_type = genomic DNA
gttcaatccccggcatc

SEQ ID NO: 50208 - DNA, 23 bp, Homo sapiens
  source 1..23: mol_type = genomic DNA
gttcaatccccggcatctccacc

SEQ ID NO: 50209 - DNA, 24 bp, Homo sapiens
  source 1..24: mol_type = genomic DNA
gttcaatccccggcatctccacca

SEQ ID NO: 50210 - DNA, 22 bp, Homo sapiens
  source 1..22: mol_type = genomic DNA
gttcaatcccgggtttcggcac

SEQ ID NO: 50211 - DNA, 18 bp, Homo sapiens
  source 1..18: mol_type = genomic DNA
gttcaattccccgacggg

SEQ ID NO: 50212 - DNA, 21 bp, Homo sapiens
  source 1..21: mol_type = genomic DNA
gttcaattccccgacggggag

SEQ ID NO: 50213 - DNA, 22 bp, Homo sapiens
  source 1..22: mol_type = genomic DNA
gttcaattccccgacggggagc

SEQ ID NO: 50214 - DNA, 23 bp, Homo sapiens
  source 1..23: mol_type = genomic DNA
gttcaattccccgacggggagcc

SEQ ID NO: 50215 - DNA, 24 bp, Homo sapiens
  source 1..24: mol_type = genomic DNA
gttcaattccccgacggggagcca

SEQ ID NO: 50216 - DNA, 18 bp, Homo sapiens
  source 1..18: mol_type = genomic DNA
gttcaggtcgcagtctcc

SEQ ID NO: 50217 - DNA, 19 bp, Homo sapiens
  source 1..19: mol_type = genomic DNA
gttcaggtcgcagtctccc

SEQ ID NO: 50218 - DNA, 19 bp, Homo sapiens
  source 1..19: mol_type = genomic DNA
gttcagtggtagaattctc

SEQ ID NO: 50219 - DNA, 20 bp, Homo sapiens
  source 1..20: mol_type = genomic DNA
gttcagtggtagaattctcg

SEQ ID NO: 50220 - DNA, 21 bp, Homo sapiens
  source 1..21: mol_type = genomic DNA
gttcagtggtagaattctcgc

SEQ ID NO: 50221 - DNA, 22 bp, Homo sapiens
  source 1..22: mol_type = genomic DNA
gttcagtggtagaattctcgcc

SEQ ID NO: 50222 - DNA, 23 bp, Homo sapiens
  source 1..23: mol_type = genomic DNA
gttcagtggtagaattctcgcct

SEQ ID NO: 50223 - DNA, 24 bp, Homo sapiens
  source 1..24: mol_type = genomic DNA
gttcagtggtagaattctcgcctg

SEQ ID NO: 50224 - DNA, 25 bp, Homo sapiens
  source 1..25: mol_type = genomic DNA
gttcagtggtagaattctcgcctgc

SEQ ID NO: 50225 - DNA, 26 bp, Homo sapiens
  source 1..26: mol_type = genomic DNA
gttcagtggtagaattctcgcctgcc

SEQ ID NO: 50226 - DNA, 27 bp, Homo sapiens
  source 1..27: mol_type = genomic DNA
gttcagtggtagaattctcgcctgcca

SEQ ID NO: 50227 - DNA, 28 bp, Homo sapiens
  source 1..28: mol_type = genomic DNA
gttcagtggtagaattctcgcctgccac

SEQ ID NO: 50228 - DNA, 39 bp, Homo sapiens; identical to SEQ ID NO: 21949
  source 1..39: mol_type = genomic DNA

SEQ ID NO: 50229 - DNA, 40 bp, Homo sapiens; identical to SEQ ID NO: 21950
  source 1..40: mol_type = genomic DNA

SEQ ID NO: 50230 - DNA, 41 bp, Homo sapiens; identical to SEQ ID NO: 21951
  source 1..41: mol_type = genomic DNA

SEQ ID NO: 50231 - DNA, 43 bp, Homo sapiens; identical to SEQ ID NO: 21952
  source 1..43: mol_type = genomic DNA

SEQ ID NO: 50232 - DNA, 30 bp, Homo sapiens; identical to SEQ ID NO: 21980
  source 1..30: mol_type = genomic DNA

SEQ ID NO: 50233 - DNA, 31 bp, Homo sapiens; identical to SEQ ID NO: 21981
  source 1..31: mol_type = genomic DNA

SEQ ID NO: 50234 - DNA, 32 bp, Homo sapiens; identical to SEQ ID NO: 21982
  source 1..32: mol_type = genomic DNA

SEQ ID NO: 50235 - DNA, 28 bp, Homo sapiens
  source 1..28: mol_type = genomic DNA
gttccatggtgtaatggttagcactctg

SEQ ID NO: 50236 - DNA, 32 bp, Homo sapiens; identical to SEQ ID NO: 21997
  source 1..32: mol_type = genomic DNA

SEQ ID NO: 50237 - DNA, 30 bp, Homo sapiens; identical to SEQ ID NO: 22006
  source 1..30: mol_type = genomic DNA

SEQ ID NO: 50238 - DNA, 16 bp, Homo sapiens
  source 1..16: mol_type = genomic DNA
gttcgaaaccgggcgg

SEQ ID NO: 50239 - DNA, 17 bp, Homo sapiens
  source 1..17: mol_type = genomic DNA
gttcgaaaccgggcgga

SEQ ID NO: 50240 - DNA, 21 bp, Homo sapiens
  source 1..21: mol_type = genomic DNA
gttcgaaaccgggcggaaaca

SEQ ID NO: 50241 - DNA, 22 bp, Homo sapiens
  source 1..22: mol_type = genomic DNA
gttcgaaaccgggcggaaacac

SEQ ID NO: 50242 - DNA, 23 bp, Homo sapiens
  source 1..23: mol_type = genomic DNA
gttcgaaaccgggcggaaacacc

SEQ ID NO: 50243 - DNA, 24 bp, Homo sapiens
  source 1..24: mol_type = genomic DNA
gttcgaaaccgggcggaaacacca

SEQ ID NO: 50244 - DNA, 16 bp, Homo sapiens
  source 1..16: mol_type = genomic DNA
gttcgaaccccactcc

SEQ ID NO: 50245 - DNA, 23 bp, Homo sapiens
  source 1..23: mol_type = genomic DNA
gttcgaaccccactcctggtacc

SEQ ID NO: 50246 - DNA, 24 bp, Homo sapiens
  source 1..24: mol_type = genomic DNA
gttcgaaccccactcctggtacca

SEQ ID NO: 50247 - DNA, 21 bp, Homo sapiens
  source 1..21: mol_type = genomic DNA
gttcgaaccccgtccgtgcct

SEQ ID NO: 50248 - DNA, 22 bp, Homo sapiens
  source 1..22: mol_type = genomic DNA
gttcgaaccccgtccgtgcctc

SEQ ID NO: 50249 - DNA, 23 bp, Homo sapiens
  source 1..23: mol_type = genomic DNA
gttcgaaccccgtccgtgcctcc

SEQ ID NO: 50250 - DNA, 24 bp, Homo sapiens
  source 1..24: mol_type = genomic DNA
gttcgaaccccgtccgtgcctcca

SEQ ID NO: 50251 - DNA, 23 bp, Homo sapiens
  source 1..23: mol_type = genomic DNA
gttcgaaccctgctcgctgcgcc

SEQ ID NO: 50252 - DNA, 23 bp, Homo sapiens
  source 1..23: mol_type = genomic DNA
gttcgaacctcagagggggcacc

SEQ ID NO: 50253 - DNA, 24 bp, Homo sapiens
  source 1..24: mol_type = genomic DNA
gttcgaacctcagagggggcacca

SEQ ID NO: 50254 - DNA, 22 bp, Homo sapiens
  source 1..22: mol_type = genomic DNA
gttcgaatcacgtcggggtcac

SEQ ID NO: 50255 - DNA, 23 bp, Homo sapiens
  source 1..23: mol_type = genomic DNA
gttcgaatcacgtcggggtcacc

SEQ ID NO: 50256 - DNA, 24 bp, Homo sapiens
  source 1..24: mol_type = genomic DNA
gttcgaatcacgtcggggtcacca

SEQ ID NO: 50257 - DNA, 23 bp, Homo sapiens
  source 1..23: mol_type = genomic DNA
gttcgaatcccaccagagtcgcc

SEQ ID NO: 50258 - DNA, 16 bp, Homo sapiens
  source 1..16: mol_type = genomic DNA
gttcgaatcccaccgc

SEQ ID NO: 50259 - DNA, 21 bp, Homo sapiens
  source 1..21: mol_type = genomic DNA
gttcgaatcccaccgctgcca

SEQ ID NO: 50260 - DNA, 22 bp, Homo sapiens
  source 1..22: mol_type = genomic DNA
gttcgaatcccaccgctgccac

SEQ ID NO: 50261 - DNA, 23 bp, Homo sapiens
  source 1..23: mol_type = genomic DNA
gttcgaatcccaccgctgccacc

SEQ ID NO: 50262 - DNA, 21 bp, Homo sapiens
  source 1..21: mol_type = genomic DNA
gttcgaatcccactcctgaca

SEQ ID NO: 50263 - DNA, 23 bp, Homo sapiens
  source 1..23: mol_type = genomic DNA
gttcgaatcccactcctgacacc

SEQ ID NO: 50264 - DNA, 24 bp, Homo sapiens
  source 1..24: mol_type = genomic DNA
gttcgaatcccactcctgacacca

SEQ ID NO: 50265 - DNA, 21 bp, Homo sapiens
  source 1..21: mol_type = genomic DNA
gttcgaatcccacttctgaca

SEQ ID NO: 50266 - DNA, 22 bp, Homo sapiens
  source 1..22: mol_type = genomic DNA
gttcgaatcccacttctgacac

SEQ ID NO: 50267 - DNA, 23 bp, Homo sapiens
  source 1..23: mol_type = genomic DNA
gttcgaatcccacttctgacacc

SEQ ID NO: 50268 - DNA, 16 bp, Homo sapiens
  source 1..16: mol_type = genomic DNA
gttcgaatcccagcgg

SEQ ID NO: 50269 - DNA, 20 bp, Homo sapiens
  source 1..20: mol_type = genomic DNA
gttcgaatcccagcggggcc

SEQ ID NO: 50270 - DNA, 21 bp, Homo sapiens
  source 1..21: mol_type = genomic DNA
gttcgaatcccagcggggcct

SEQ ID NO: 50271 - DNA, 22 bp, Homo sapiens
  source 1..22: mol_type = genomic DNA
gttcgaatcccagcggggcctc

SEQ ID NO: 50272 - DNA, 23 bp, Homo sapiens
  source 1..23: mol_type = genomic DNA
gttcgaatcccagcggggcctcc

SEQ ID NO: 50273 - DNA, 24 bp, Homo sapiens
  source 1..24: mol_type = genomic DNA
gttcgaatcccagcggggcctcca

SEQ ID NO: 50274 - DNA, 18 bp, Homo sapiens
  source 1..18: mol_type = genomic DNA
gttcgaatcccagcggtg

SEQ ID NO: 50275 - DNA, 21 bp, Homo sapiens
  source 1..21: mol_type = genomic DNA
gttcgaatcccagcggtgcct

SEQ ID NO: 50276 - DNA, 22 bp, Homo sapiens
  source 1..22: mol_type = genomic DNA
gttcgaatcccagcggtgcctc

SEQ ID NO: 50277 - DNA, 23 bp, Homo sapiens
  source 1..23: mol_type = genomic DNA
gttcgaatcccagcggtgcctcc

SEQ ID NO: 50278 - DNA, 21 bp, Homo sapiens
  source 1..21: mol_type = genomic DNA
gttcgaatcccagtagagcct

SEQ ID NO: 50279 - DNA, 22 bp, Homo sapiens
  source 1..22: mol_type = genomic DNA
gttcgaatcccatcctcgtcgc

SEQ ID NO: 50280 - DNA, 23 bp, Homo sapiens
  source 1..23: mol_type = genomic DNA
gttcgaatcccatcctcgtcgcc

SEQ ID NO: 50281 - DNA, 24 bp, Homo sapiens
  source 1..24: mol_type = genomic DNA
gttcgaatcccatcctcgtcgcca

SEQ ID NO: 50282 - DNA, 23 bp, Homo sapiens
  source 1..23: mol_type = genomic DNA
gttcgaatcccttcgtggttgcc

SEQ ID NO: 50283 - DNA, 20 bp, Homo sapiens
  source 1..20: mol_type = genomic DNA
gttcgaatccgagtcacggc

SEQ ID NO: 50284 - DNA, 22 bp, Homo sapiens
  source 1..22: mol_type = genomic DNA
gttcgaatccgagtcacggcac

SEQ ID NO: 50285 - DNA, 23 bp, Homo sapiens
  source 1..23: mol_type = genomic DNA
gttcgaatccgagtcacggcacc

SEQ ID NO: 50286 - DNA, 24 bp, Homo sapiens
  source 1..24: mol_type = genomic DNA
gttcgaatccgagtcacggcacca

SEQ ID NO: 50287 - DNA, 16 bp, Homo sapiens
  source 1..16: mol_type = genomic DNA
gttcgaatccggctcg

SEQ ID NO: 50288 - DNA, 22 bp, Homo sapiens
  source 1..22: mol_type = genomic DNA
gttcgaatccggctcgaaggac

SEQ ID NO: 50289 - DNA, 23 bp, Homo sapiens
  source 1..23: mol_type = genomic DNA
gttcgaatccggctcgaaggacc

SEQ ID NO: 50290 - DNA, 22 bp, Homo sapiens
  source 1..22: mol_type = genomic DNA
gttcgaatcctgccgactacgc

SEQ ID NO: 50291 - DNA, 23 bp, Homo sapiens
  source 1..23: mol_type = genomic DNA
gttcgaatcctgccgactacgcc

SEQ ID NO: 50292 - DNA, 20 bp, Homo sapiens
  source 1..20: mol_type = genomic DNA
gttcgaatcctgctcacagc

SEQ ID NO: 50293 - DNA, 21 bp, Homo sapiens
  source 1..21: mol_type = genomic DNA
gttcgaatcctgctcacagcg

SEQ ID NO: 50294 - DNA, 22 bp, Homo sapiens
  source 1..22: mol_type = genomic DNA
gttcgaatcctgctcacagcgc

SEQ ID NO: 50295 - DNA, 23 bp, Homo sapiens
  source 1..23: mol_type = genomic DNA
gttcgaatcctgctcacagcgcc

SEQ ID NO: 50296 - DNA, 23 bp, Homo sapiens
  source 1..23: mol_type = genomic DNA
gttcgaatcctgttcgtgacgcc

SEQ ID NO: 50297 - DNA, 16 bp, Homo sapiens
  source 1..16: mol_type = genomic DNA
gttcgactcccagcgg

SEQ ID NO: 50298 - DNA, 17 bp, Homo sapiens
  source 1..17: mol_type = genomic DNA
gttcgactcccggtatg

SEQ ID NO: 50299 - DNA, 19 bp, Homo sapiens
  source 1..19: mol_type = genomic DNA
gttcgactcccggtatggg

SEQ ID NO: 50300 - DNA, 20 bp, Homo sapiens
  source 1..20: mol_type = genomic DNA
gttcgactcccggtatggga

SEQ ID NO: 50301 - DNA, 21 bp, Homo sapiens
  source 1..21: mol_type = genomic DNA
gttcgactcccggtatgggaa

SEQ ID NO: 50302 - DNA, 22 bp, Homo sapiens
  source 1..22: mol_type = genomic DNA
gttcgactcccggtatgggaac

SEQ ID NO: 50303 - DNA, 23 bp, Homo sapiens
  source 1..23: mol_type = genomic DNA
gttcgactcccggtatgggaacc

SEQ ID NO: 50304 - DNA, 24 bp, Homo sapiens
  source 1..24: mol_type = genomic DNA
gttcgactcccggtatgggaacca

SEQ ID NO: 50305 - DNA, 16 bp, Homo sapiens
  source 1..16: mol_type = genomic DNA
gttcgactcccggtgt

SEQ ID NO: 50306 - DNA, 17 bp, Homo sapiens
  source 1..17: mol_type = genomic DNA
gttcgactcccggtgtg

SEQ ID NO: 50307 - DNA, 18 bp, Homo sapiens
  source 1..18: mol_type = genomic DNA
gttcgactcccggtgtgg

SEQ ID NO: 50308 - DNA, 19 bp, Homo sapiens
  source 1..19: mol_type = genomic DNA
gttcgactcccggtgtggg

SEQ ID NO: 50309 - DNA, 20 bp, Homo sapiens
  source 1..20: mol_type = genomic DNA
gttcgactcccggtgtggga

SEQ ID NO: 50310 - DNA, 21 bp, Homo sapiens
  source 1..21: mol_type = genomic DNA
gttcgactcccggtgtgggaa

SEQ ID NO: 50311 - DNA, 22 bp, Homo sapiens
  source 1..22: mol_type = genomic DNA
gttcgactcccggtgtgggaac

SEQ ID NO: 50312 - DNA, 23 bp, Homo sapiens
  source 1..23: mol_type = genomic DNA
gttcgactcccggtgtgggaacc

SEQ ID NO: 50313 - DNA, 24 bp, Homo sapiens
  source 1..24: mol_type = genomic DNA
gttcgactcccggtgtgggaacca

SEQ ID NO: 50314 - DNA, 22 bp, Homo sapiens
  source 1..22: mol_type = genomic DNA
gttcgactcctggctggctcgc

SEQ ID NO: 50315 - DNA, 23 bp, Homo sapiens
  source 1..23: mol_type = genomic DNA
gttcgactcctggctggctcgcc

SEQ ID NO: 50316 - DNA, 18 bp, Homo sapiens
  source 1..18: mol_type = genomic DNA
gttcgagcccacccaggg

SEQ ID NO: 50317 - DNA, 23 bp, Homo sapiens
  source 1..23: mol_type = genomic DNA
gttcgagcccacccagggacgcc

SEQ ID NO: 50318 - DNA, 24 bp, Homo sapiens
  source 1..24: mol_type = genomic DNA
gttcgagcccacccagggacgcca

SEQ ID NO: 50319 - DNA, 18 bp, Homo sapiens
  source 1..18: mol_type = genomic DNA
gttcgagccccacgttgg

SEQ ID NO: 50320 - DNA, 20 bp, Homo sapiens
  source 1..20: mol_type = genomic DNA
gttcgagccccacgttgggc

SEQ ID NO: 50321 - DNA, 21 bp, Homo sapiens
  source 1..21: mol_type = genomic DNA
gttcgagccccacgttgggcg

SEQ ID NO: 50322 - DNA, 22 bp, Homo sapiens
  source 1..22: mol_type = genomic DNA
gttcgagccccacgttgggcgc

SEQ ID NO: 50323 - DNA, 23 bp, Homo sapiens
  source 1..23: mol_type = genomic DNA
gttcgagccccacgttgggcgcc

SEQ ID NO: 50324 - DNA, 24 bp, Homo sapiens
  source 1..24: mol_type = genomic DNA
gttcgagccccacgttgggcgcca

SEQ ID NO: 50325 - DNA, 16 bp, Homo sapiens
  source 1..16: mol_type = genomic DNA
gttcgagccccagtgg

SEQ ID NO: 50326 - DNA, 17 bp, Homo sapiens
  source 1..17: mol_type = genomic DNA
gttcgagccccagtgga

SEQ ID NO: 50327 - DNA, 18 bp, Homo sapiens
  source 1..18: mol_type = genomic DNA
gttcgagccccagtggaa

SEQ ID NO: 50328 - DNA, 19 bp, Homo sapiens
  source 1..19: mol_type = genomic DNA
gttcgagccccagtggaac

SEQ ID NO: 50329 - DNA, 20 bp, Homo sapiens
  source 1..20: mol_type = genomic DNA
gttcgagccccagtggaacc

SEQ ID NO: 50330 - DNA, 21 bp, Homo sapiens
  source 1..21: mol_type = genomic DNA
gttcgagccccagtggaacca

SEQ ID NO: 50331 - DNA, 22 bp, Homo sapiens
  source 1..22: mol_type = genomic DNA
gttcgagccccagtggaaccac

SEQ ID NO: 50332 - DNA, 23 bp, Homo sapiens
  source 1..23: mol_type = genomic DNA
gttcgagccccagtggaaccacc

SEQ ID NO: 50333 - DNA, 24 bp, Homo sapiens
  source 1..24: mol_type = genomic DNA
gttcgagccccagtggaaccacca

SEQ ID NO: 50334 - DNA, 21 bp, Homo sapiens
  source 1..21: mol_type = genomic DNA
gttcgagcctcacacggggca

SEQ ID NO: 50335 - DNA, 22 bp, Homo sapiens
  source 1..22: mol_type = genomic DNA
gttcgagcctcacacggggcac

SEQ ID NO: 50336 - DNA, 24 bp, Homo sapiens
  source 1..24: mol_type = genomic DNA
gttcgagcctcacacggggcacca

SEQ ID NO: 50337 - DNA, 18 bp, Homo sapiens
  source 1..18: mol_type = genomic DNA
gttcgagcctcacctgga

SEQ ID NO: 50338 - DNA, 23 bp, Homo sapiens
  source 1..23: mol_type = genomic DNA
gttcgagcctcacctggagcacc

SEQ ID NO: 50339 - DNA, 24 bp, Homo sapiens
  source 1..24: mol_type = genomic DNA
gttcgagtcccacccggggtacca

SEQ ID NO: 50340 - DNA, 23 bp, Homo sapiens
  source 1..23: mol_type = genomic DNA
gttcgagtcccatctggggtgcc

SEQ ID NO: 50341 - DNA, 24 bp, Homo sapiens
  source 1..24: mol_type = genomic DNA
gttcgagtcccatctggggtgcca

SEQ ID NO: 50342 - DNA, 23 bp, Homo sapiens
  source 1..23: mol_type = genomic DNA
gttcgagtcccatctgggtcgcc

SEQ ID NO: 50343 - DNA, 24 bp, Homo sapiens
  source 1..24: mol_type = genomic DNA
gttcgagtcccatctgggtcgcca

SEQ ID NO: 50344 - DNA, 23 bp, Homo sapiens
  source 1..23: mol_type = genomic DNA
gttcgagtcccggcggagtcgcc

SEQ ID NO: 50345 - DNA, 22 bp, Homo sapiens
  source 1..22: mol_type = genomic DNA
gttcgagtcccttcgtggtcgc

SEQ ID NO: 50346 - DNA, 23 bp, Homo sapiens
  source 1..23: mol_type = genomic DNA
gttcgagtcccttcgtggtcgcc

SEQ ID NO: 50347 - DNA, 24 bp, Homo sapiens
  source 1..24: mol_type = genomic DNA
gttcgagtcccttcgtggtcgcca

SEQ ID NO: 50348 - DNA, 23 bp, Homo sapiens
  source 1..23: mol_type = genomic DNA
gttcgagtcctgccgcggtcgcc

SEQ ID NO: 50349 - DNA, 24 bp, Homo sapiens
  source 1..24: mol_type = genomic DNA
gttcgagtctcggtggaacctcca

SEQ ID NO: 50350 - DNA, 20 bp, Homo sapiens
  source 1..20: mol_type = genomic DNA
gttcgatccccagcatctcc

SEQ ID NO: 50351 - DNA, 21 bp, Homo sapiens
  source 1..21: mol_type = genomic DNA
gttcgatccccagcatctcca

SEQ ID NO: 50352 - DNA, 22 bp, Homo sapiens
  source 1..22: mol_type = genomic DNA
gttcgatccccagcatctccac

SEQ ID NO: 50353 - DNA, 23 bp, Homo sapiens
  source 1..23: mol_type = genomic DNA
gttcgatccccagcatctccacc

SEQ ID NO: 50354 - DNA, 24 bp, Homo sapiens
  source 1..24: mol_type = genomic DNA
gttcgatccccagcatctccacca

SEQ ID NO: 50355 - DNA, 22 bp, Homo sapiens
  source 1..22: mol_type = genomic DNA
gttcgatccccagtacctccac

SEQ ID NO: 50356 - DNA, 24 bp, Homo sapiens
  source 1..24: mol_type = genomic DNA
gttcgatccccagtacctccacca

SEQ ID NO: 50357 - DNA, 17 bp, Homo sapiens
  source 1..17: mol_type = genomic DNA
gttcgatccccggcacc

SEQ ID NO: 50358 - DNA, 23 bp, Homo sapiens
  source 1..23: mol_type = genomic DNA
gttcgatccccggcacctccacc

SEQ ID NO: 50359 - DNA, 17 bp, Homo sapiens
  source 1..17: mol_type = genomic DNA
gttcgatccccggcatc

SEQ ID NO: 50360 - DNA, 18 bp, Homo sapiens
  source 1..18: mol_type = genomic DNA
gttcgatccccggcatct

SEQ ID NO: 50361 - DNA, 19 bp, Homo sapiens
  source 1..19: mol_type = genomic DNA
gttcgatccccggcatctc

SEQ ID NO: 50362 - DNA, 20 bp, Homo sapiens
  source 1..20: mol_type = genomic DNA
gttcgatccccggcatctcc

SEQ ID NO: 50363 - DNA, 21 bp, Homo sapiens
  source 1..21: mol_type = genomic DNA
gttcgatccccggcatctcca

SEQ ID NO: 50364 - DNA, 22 bp, Homo sapiens
  source 1..22: mol_type = genomic DNA
gttcgatccccggcatctccac

SEQ ID NO: 50365 - DNA, 23 bp, Homo sapiens
  source 1..23: mol_type = genomic DNA
gttcgatccccggcatctccacc

SEQ ID NO: 50366 - DNA, 24 bp, Homo sapiens
  source 1..24: mol_type = genomic DNA
gttcgatccccggcatctccacca

SEQ ID NO: 50367 - DNA, 19 bp, Homo sapiens
  source 1..19: mol_type = genomic DNA
gttcgatccccgtacgggc

SEQ ID NO: 50368 - DNA, 22 bp, Homo sapiens
  source 1..22: mol_type = genomic DNA
gttcgatccccgtacgggccac

SEQ ID NO: 50369 - DNA, 23 bp, Homo sapiens
  source 1..23: mol_type = genomic DNA
gttcgatccccgtacgggccacc

SEQ ID NO: 50370 - DNA, 21 bp, Homo sapiens
  source 1..21: mol_type = genomic DNA
gttcgatccccgtactggcca

SEQ ID NO: 50371 - DNA, 17 bp, Homo sapiens
  source 1..17: mol_type = genomic DNA
gttcgatcccgggcgga

SEQ ID NO: 50372 - DNA, 21 bp, Homo sapiens
  source 1..21: mol_type = genomic DNA
gttcgatcccgggcggaaaca

SEQ ID NO: 50373 - DNA, 22 bp, Homo sapiens
  source 1..22: mol_type = genomic DNA
gttcgatcccgggcggaaacac

SEQ ID NO: 50374 - DNA, 23 bp, Homo sapiens
  source 1..23: mol_type = genomic DNA
gttcgatcccgggcggaaacacc

SEQ ID NO: 50375 - DNA, 22 bp, Homo sapiens
  source 1..22: mol_type = genomic DNA
gttcgatcccgggtttcggcac

SEQ ID NO: 50376 - DNA, 23 bp, Homo sapiens
  source 1..23: mol_type = genomic DNA
gttcgatcccgggtttcggcacc

SEQ ID NO: 50377 - DNA, 24 bp, Homo sapiens
  source 1..24: mol_type = genomic DNA
gttcgatcccgggtttcggcacca

SEQ ID NO: 50378 - DNA, 23 bp, Homo sapiens
  source 1..23: mol_type = genomic DNA
gttcgatcctcacacggggcacc

SEQ ID NO: 50379 - DNA, 24 bp, Homo sapiens
  source 1..24: mol_type = genomic DNA
gttcgatcctcacacggggcacca

SEQ ID NO: 50380 - DNA, 23 bp, Homo sapiens
  source 1..23: mol_type = genomic DNA
gttcgatcctcacctggagcacc

SEQ ID NO: 50381 - DNA, 16 bp, Homo sapiens
  source 1..16: mol_type = genomic DNA
gttcgattccccgacg

SEQ ID NO: 50382 - DNA, 17 bp, Homo sapiens
  source 1..17: mol_type = genomic DNA
gttcgattccccgacgg

SEQ ID NO: 50383 - DNA, 18 bp, Homo sapiens
  source 1..18: mol_type = genomic DNA
gttcgattccccgacggg

SEQ ID NO: 50384 - DNA, 19 bp, Homo sapiens
  source 1..19: mol_type = genomic DNA
gttcgattccccgacgggg

SEQ ID NO: 50385 - DNA, 20 bp, Homo sapiens
  source 1..20: mol_type = genomic DNA
gttcgattccccgacgggga

SEQ ID NO: 50386 - DNA, 21 bp, Homo sapiens
  source 1..21: mol_type = genomic DNA
gttcgattccccgacggggag

SEQ ID NO: 50387 - DNA, 22 bp, Homo sapiens
  source 1..22: mol_type = genomic DNA
gttcgattccccgacggggagc

SEQ ID NO: 50388 - DNA, 23 bp, Homo sapiens
  source 1..23: mol_type = genomic DNA
gttcgattccccgacggggagcc

SEQ ID NO: 50389 - DNA, 24 bp, Homo sapiens
  source 1..24: mol_type = genomic DNA
gttcgattccccgacggggagcca

SEQ ID NO: 50390 - DNA, 16 bp, Homo sapiens
  source 1..16: mol_type = genomic DNA
gttcgattcccggcca

SEQ ID NO: 50391 - DNA, 17 bp, Homo sapiens
  source 1..17: mol_type = genomic DNA
gttcgattcccggccaa

SEQ ID NO: 50392 - DNA, 18 bp, Homo sapiens
  source 1..18: mol_type = genomic DNA
gttcgattcccggccaac

SEQ ID NO: 50393 - DNA, 19 bp, Homo sapiens
  source 1..19: mol_type = genomic DNA
gttcgattcccggccaacg

SEQ ID NO: 50394 - DNA, 21 bp, Homo sapiens
  source 1..21: mol_type = genomic DNA
gttcgattcccggccaacgca

SEQ ID NO: 50395 - DNA, 22 bp, Homo sapiens
  source 1..22: mol_type = genomic DNA
gttcgattcccggccaacgcac

SEQ ID NO: 50396 - DNA, 23 bp, Homo sapiens
  source 1..23: mol_type = genomic DNA
gttcgattcccggccaacgcacc

SEQ ID NO: 50397 - DNA, 24 bp, Homo sapiens
  source 1..24: mol_type = genomic DNA
gttcgattcccggccaacgcacca

SEQ ID NO: 50398 - DNA, 18 bp, Homo sapiens
  source 1..18: mol_type = genomic DNA
gttcgattcccggccaat

SEQ ID NO: 50399 - DNA, 19 bp, Homo sapiens
  source 1..19: mol_type = genomic DNA
gttcgattcccggccaatg

SEQ ID NO: 50400 - DNA, 20 bp, Homo sapiens
  source 1..20: mol_type = genomic DNA
gttcgattcccggccaatgc

SEQ ID NO: 50401 - DNA, 21 bp, Homo sapiens
  source 1..21: mol_type = genomic DNA
gttcgattcccggccaatgca

SEQ ID NO: 50402 - DNA, 22 bp, Homo sapiens
  source 1..22: mol_type = genomic DNA
gttcgattcccggccaatgcac

SEQ ID NO: 50403 - DNA, 23 bp, Homo sapiens
  source 1..23: mol_type = genomic DNA
gttcgattcccggccaatgcacc

SEQ ID NO: 50404 - DNA, 24 bp, Homo sapiens
  source 1..24: mol_type = genomic DNA
gttcgattcccggccaatgcacca

SEQ ID NO: 50405 - DNA, 16 bp, Homo sapiens
  source 1..16: mol_type = genomic DNA
gttcgattcccggccc

SEQ ID NO: 50406 - DNA, 23 bp, Homo sapiens
  source 1..23: mol_type = genomic DNA
gttcgattcccggcccatgcacc

SEQ ID NO: 50407 - DNA, 24 bp, Homo sapiens
  source 1..24: mol_type = genomic DNA
gttcgattcccggcccatgcacca

SEQ ID NO: 50408 - DNA, 16 bp, Homo sapiens
  source 1..16: mol_type = genomic DNA
gttcgattcccgggcg

SEQ ID NO: 50409 - DNA, 17 bp, Homo sapiens
  source 1..17: mol_type = genomic DNA
gttcgattcccgggcgg

SEQ ID NO: 50410 - DNA, 18 bp, Homo sapiens
  source 1..18: mol_type = genomic DNA
gttcgattcccgggcggc

SEQ ID NO: 50411 - DNA, 19 bp, Homo sapiens
  source 1..19: mol_type = genomic DNA
gttcgattcccgggcggcg

SEQ ID NO: 50412 - DNA, 20 bp, Homo sapiens
  source 1..20: mol_type = genomic DNA
gttcgattcccgggcggcgc

SEQ ID NO: 50413 - DNA, 21 bp, Homo sapiens
  source 1..21: mol_type = genomic DNA
gttcgattcccgggcggcgca

SEQ ID NO: 50414 - DNA, 22 bp, Homo sapiens
  source 1..22: mol_type = genomic DNA
gttcgattcccgggcggcgcac

SEQ ID NO: 50415 - DNA, 23 bp, Homo sapiens
  source 1..23: mol_type = genomic DNA
gttcgattcccgggcggcgcacc

SEQ ID NO: 50416 - DNA, 24 bp, Homo sapiens
  source 1..24: mol_type = genomic DNA
gttcgattcccgggcggcgcacca

SEQ ID NO: 50417 - DNA, 16 bp, Homo sapiens
  source 1..16: mol_type = genomic DNA
gttcgattcccggtca

SEQ ID NO: 50418 - DNA, 17 bp, Homo sapiens
  source 1..17: mol_type = genomic DNA
gttcgattcccggtcag

SEQ ID NO: 50419 - DNA, 18 bp, Homo sapiens
  source 1..18: mol_type = genomic DNA
gttcgattcccggtcagg

SEQ ID NO: 50420 - DNA, 19 bp, Homo sapiens
  source 1..19: mol_type = genomic DNA
gttcgattcccggtcaggg

SEQ ID NO: 50421 - DNA, 20 bp, Homo sapiens
  source 1..20: mol_type = genomic DNA
gttcgattcccggtcaggga

SEQ ID NO: 50422 - DNA, 21 bp, Homo sapiens
  source 1..21: mol_type = genomic DNA
gttcgattcccggtcagggaa

SEQ ID NO: 50423 - DNA, 22 bp, Homo sapiens
  source 1..22: mol_type = genomic DNA
gttcgattcccggtcagggaac

SEQ ID NO: 50424 - DNA, 23 bp, Homo sapiens
  source 1..23: mol_type = genomic DNA
gttcgattcccggtcagggaacc

SEQ ID NO: 50425 - DNA, 24 bp, Homo sapiens
  source 1..24: mol_type = genomic DNA
gttcgattcccggtcagggaacca

SEQ ID NO: 50426 - DNA, 16 bp, Homo sapiens
  source 1..16: mol_type = genomic DNA
gttcgattccggctcg

SEQ ID NO: 50427 - DNA, 17 bp, Homo sapiens
  source 1..17: mol_type = genomic DNA
gttcgattccggctcga

SEQ ID NO: 50428 - DNA, 22 bp, Homo sapiens
  source 1..22: mol_type = genomic DNA
gttcgattccggctcgaaggac

SEQ ID NO: 50429 - DNA, 23 bp, Homo sapiens
  source 1..23: mol_type = genomic DNA
gttcgattccggctcgaaggacc

SEQ ID NO: 50430 - DNA, 24 bp, Homo sapiens
  source 1..24: mol_type = genomic DNA
gttcgattccggctcgaaggacca

SEQ ID NO: 50431 - DNA, 23 bp, Homo sapiens
  source 1..23: mol_type = genomic DNA
gttcgattccttccttttttgcc

SEQ ID NO: 50432 - DNA, 24 bp, Homo sapiens
  source 1..24: mol_type = genomic DNA
gttcgattccttccttttttgcca

SEQ ID NO: 50433 - DNA, 17 bp, Homo sapiens
  source 1..17: mol_type = genomic DNA
gttcgattctcatagtc

SEQ ID NO: 50434 - DNA, 18 bp, Homo sapiens
  source 1..18: mol_type = genomic DNA
gttcgattctcatagtcc

SEQ ID NO: 50435 - DNA, 19 bp, Homo sapiens
  source 1..19: mol_type = genomic DNA
gttcgattctcatagtcct

SEQ ID NO: 50436 - DNA, 21 bp, Homo sapiens
  source 1..21: mol_type = genomic DNA
gttcgattctcatagtcctag

SEQ ID NO: 50437 - DNA, 22 bp, Homo sapiens
  source 1..22: mol_type = genomic DNA
gttcgattctcatagtcctagc

SEQ ID NO: 50438 - DNA, 23 bp, Homo sapiens
  source 1..23: mol_type = genomic DNA
gttcgattctcatagtcctagcc

SEQ ID NO: 50439 - DNA, 24 bp, Homo sapiens
  source 1..24: mol_type = genomic DNA
gttcgattctcatagtcctagcca

SEQ ID NO: 50440 - DNA, 16 bp, Homo sapiens
  source 1..16: mol_type = genomic DNA
gttcttgtagttgaaa

SEQ ID NO: 50441 - DNA, 17 bp, Homo sapiens
  source 1..17: mol_type = genomic DNA
gttcttgtagttgaaat

SEQ ID NO: 50442 - DNA, 18 bp, Homo sapiens
  source 1..18: mol_type = genomic DNA
gttcttgtagttgaaata

SEQ ID NO: 50443 - DNA, 19 bp, Homo sapiens
  source 1..19: mol_type = genomic DNA
gttcttgtagttgaaatac

SEQ ID NO: 50444 - DNA, 20 bp, Homo sapiens
  source 1..20: mol_type = genomic DNA
gttcttgtagttgaaataca

SEQ ID NO: 50445 - DNA, 22 bp, Homo sapiens
  source 1..22: mol_type = genomic DNA
gttcttgtagttgaaatacaac

SEQ ID NO: 50446 - DNA, 23 bp, Homo sapiens
  source 1..23: mol_type = genomic DNA
gttcttgtagttgaaatacaacg

SEQ ID NO: 50447 - DNA, 24 bp, Homo sapiens
  source 1..24: mol_type = genomic DNA
gttcttgtagttgaaatacaacga

SEQ ID NO: 50448 - DNA, 26 bp, Homo sapiens
  source 1..26: mol_type = genomic DNA
gttcttgtagttgaaatacaacgatg

SEQ ID NO: 50449 - DNA, 27 bp, Homo sapiens
  source 1..27: mol_type = genomic DNA
gttcttgtagttgaaatacaacgatgg

SEQ ID NO: 50450 - DNA, 28 bp, Homo sapiens
  source 1..28: mol_type = genomic DNA
gttcttgtagttgaaatacaacgatggt

SEQ ID NO: 50451 - DNA, 29 bp, Homo sapiens
  source 1..29: mol_type = genomic DNA
gttcttgtagttgaaatacaacgatggtt

SEQ ID NO: 50452 - DNA, 32 bp, Homo sapiens; identical to SEQ ID NO: 22222
  source 1..32: mol_type = genomic DNA

SEQ ID NO: 50453 - DNA, 33 bp, Homo sapiens; identical to SEQ ID NO: 22223
  source 1..33: mol_type = genomic DNA

SEQ ID NO: 50454 - DNA, 35 bp, Homo sapiens; identical to SEQ ID NO: 22225
  source 1..35: mol_type = genomic DNA

SEQ ID NO: 50455 - DNA, 36 bp, Homo sapiens; identical to SEQ ID NO: 22226
  source 1..36: mol_type = genomic DNA

SEQ ID NO: 50456 - DNA, 38 bp, Homo sapiens; identical to SEQ ID NO: 22228
  source 1..38: mol_type = genomic DNA

SEQ ID NO: 50457 - DNA, 39 bp, Homo sapiens; identical to SEQ ID NO: 22229
  source 1..39: mol_type = genomic DNA

SEQ ID NO: 50458 - DNA, 40 bp, Homo sapiens; identical to SEQ ID NO: 22230
  source 1..40: mol_type = genomic DNA

SEQ ID NO: 50459 - DNA, 41 bp, Homo sapiens; identical to SEQ ID NO: 22231
  source 1..41: mol_type = genomic DNA

SEQ ID NO: 50460 - DNA, 42 bp, Homo sapiens; identical to SEQ ID NO: 22232
  source 1..42: mol_type = genomic DNA

SEQ ID NO: 50461 - DNA, 43 bp, Homo sapiens; identical to SEQ ID NO: 22233
  source 1..43: mol_type = genomic DNA

SEQ ID NO: 50462 - DNA, 44 bp, Homo sapiens; identical to SEQ ID NO: 22234
  source 1..44: mol_type = genomic DNA

SEQ ID NO: 50463 - DNA, 45 bp, Homo sapiens; identical to SEQ ID NO: 22235
  source 1..45: mol_type = genomic DNA

SEQ ID NO: 50464 - DNA, 46 bp, Homo sapiens; identical to SEQ ID NO: 22236
  source 1..46: mol_type = genomic DNA

SEQ ID NO: 50465 - DNA, 47 bp, Homo sapiens; identical to SEQ ID NO: 22237
  source 1..47: mol_type = genomic DNA

SEQ ID NO: 50466 - DNA, 20 bp, Homo sapiens
  source 1..20: mol_type = genomic DNA
gttgcaatacttaatttctg

SEQ ID NO: 50467 - DNA, 23 bp, Homo sapiens
  source 1..23: mol_type = genomic DNA
gttgcaatacttaatttctgcca

SEQ ID NO: 50468 - DNA, 22 bp, Homo sapiens
  source 1..22: mol_type = genomic DNA
gttgggagagcgttagactgaa

SEQ ID NO: 50469 - DNA, 30 bp, Homo sapiens; identical to SEQ ID NO: 22329
  source 1..30: mol_type = genomic DNA

SEQ ID NO: 50470 - DNA, 29 bp, Homo sapiens
  source 1..29: mol_type = genomic DNA
gttggtggtatagtggttagcatagctgc

SEQ ID NO: 50471 - DNA, 30 bp, Homo sapiens; identical to SEQ ID NO: 22341
  source 1..30: mol_type = genomic DNA

SEQ ID NO: 50472 - DNA, 31 bp, Homo sapiens; identical to SEQ ID NO: 22342
  source 1..31: mol_type = genomic DNA

SEQ ID NO: 50473 - DNA, 30 bp, Homo sapiens; identical to SEQ ID NO: 22349
  source 1..30: mol_type = genomic DNA

SEQ ID NO: 50474 - DNA, 27 bp, Homo sapiens
  source 1..27: mol_type = genomic DNA
gttggttatacccttcccgtactacca

SEQ ID NO: 50475 - DNA, 17 bp, Homo sapiens
  source 1..17: mol_type = genomic DNA
gttgtagtccgtgcgag

SEQ ID NO: 50476 - DNA, 18 bp, Homo sapiens
  source 1..18: mol_type = genomic DNA
gttgtagtccgtgcgaga

SEQ ID NO: 50477 - DNA, 19 bp, Homo sapiens
  source 1..19: mol_type = genomic DNA
gttgtagtccgtgcgagaa

SEQ ID NO: 50478 - DNA, 20 bp, Homo sapiens
  source 1..20: mol_type = genomic DNA
gttgtagtccgtgcgagaat

SEQ ID NO: 50479 - DNA, 21 bp, Homo sapiens
  source 1..21: mol_type = genomic DNA
gttgtagtccgtgcgagaata

SEQ ID NO: 50480 - DNA, 23 bp, Homo sapiens
  source 1..23: mol_type = genomic DNA
gttgtagtccgtgcgagaatacc

SEQ ID NO: 50481 - DNA, 24 bp, Homo sapiens
  source 1..24: mol_type = genomic DNA
gttgtagtccgtgcgagaatacca

SEQ ID NO: 50482 - DNA, 30 bp, Homo sapiens; identical to SEQ ID NO: 22375
  source 1..30: mol_type = genomic DNA

SEQ ID NO: 50483 - DNA, 28 bp, Homo sapiens
  source 1..28: mol_type = genomic DNA
gtttaaccaaaacatcagattgtgaatc

SEQ ID NO: 50484 - DNA, 41 bp, Homo sapiens; identical to SEQ ID NO: 22410
  source 1..41: mol_type = genomic DNA

SEQ ID NO: 50485 - DNA, 42 bp, Homo sapiens; identical to SEQ ID NO: 22411
  source 1..42: mol_type = genomic DNA

SEQ ID NO: 50486 - DNA, 16 bp, Homo sapiens
  source 1..16: mol_type = genomic DNA
gtttaagtcccattgg

SEQ ID NO: 50487 - DNA, 17 bp, Homo sapiens
  source 1..17: mol_type = genomic DNA
gtttaagtcccattggt

SEQ ID NO: 50488 - DNA, 16 bp, Homo sapiens
  source 1..16: mol_type = genomic DNA
gtttagacgggctcac

SEQ ID NO: 50489 - DNA, 17 bp, Homo sapiens
  source 1..17: mol_type = genomic DNA
gtttagacgggctcaca

SEQ ID NO: 50490 - DNA, 19 bp, Homo sapiens
  source 1..19: mol_type = genomic DNA
gtttagacgggctcacatc

SEQ ID NO: 50491 - DNA, 22 bp, Homo sapiens
  source 1..22: mol_type = genomic DNA
gtttagacgggctcacatcacc

SEQ ID NO: 50492 - DNA, 24 bp, Homo sapiens
  source 1..24: mol_type = genomic DNA
gtttagacgggctcacatcacccc

SEQ ID NO: 50493 - DNA, 25 bp, Homo sapiens
  source 1..25: mol_type = genomic DNA
gtttagacgggctcacatcacccca

SEQ ID NO: 50494 - DNA, 27 bp, Homo sapiens
  source 1..27: mol_type = genomic DNA
gtttagacgggctcacatcaccccata

SEQ ID NO: 50495 - DNA, 28 bp, Homo sapiens
  source 1..28: mol_type = genomic DNA
gtttagacgggctcacatcaccccataa

SEQ ID NO: 50496 - DNA, 29 bp, Homo sapiens
  source 1..29: mol_type = genomic DNA
gtttagacgggctcacatcaccccataaa

SEQ ID NO: 50497 - DNA, 33 bp, Homo sapiens; identical to SEQ ID NO: 22437
  source 1..33: mol_type = genomic DNA

SEQ ID NO: 50498 - DNA, 34 bp, Homo sapiens; identical to SEQ ID NO: 22438
  source 1..34: mol_type = genomic DNA

SEQ ID NO: 50499 - DNA, 22 bp, Homo sapiens
  source 1..22: mol_type = genomic DNA
gtttagtggtagaattctcgcc

SEQ ID NO: 50500 - DNA, 23 bp, Homo sapiens
  source 1..23: mol_type = genomic DNA
gtttagtggtagaattctcgcct

SEQ ID NO: 50501 - DNA, 17 bp, Homo sapiens
  source 1..17: mol_type = genomic DNA
gtttatgtagcttacct

SEQ ID NO: 50502 - DNA, 20 bp, Homo sapiens
  source 1..20: mol_type = genomic DNA
gtttatgtagcttacctcct

SEQ ID NO: 50503 - DNA, 30 bp, Homo sapiens; identical to SEQ ID NO: 22453
  source 1..30: mol_type = genomic DNA

SEQ ID NO: 50504 - DNA, 34 bp, Homo sapiens; identical to SEQ ID NO: 22457
  source 1..34: mol_type = genomic DNA

SEQ ID NO: 50505 - DNA, 16 bp, Homo sapiens
  source 1..16: mol_type = genomic DNA
gtttccccgcgcaggt

SEQ ID NO: 50506 - DNA, 37 bp, Homo sapiens; identical to SEQ ID NO: 22466
  source 1..37: mol_type = genomic DNA

SEQ ID NO: 50507 - DNA, 31 bp, Homo sapiens; identical to SEQ ID NO: 22472
  source 1..31: mol_type = genomic DNA

SEQ ID NO: 50508 - DNA, 32 bp, Homo sapiens; identical to SEQ ID NO: 22473
  source 1..32: mol_type = genomic DNA

SEQ ID NO: 50509 - DNA, 33 bp, Homo sapiens; identical to SEQ ID NO: 22474
  source 1..33: mol_type = genomic DNA

SEQ ID NO: 50510 - DNA, 34 bp, Homo sapiens; identical to SEQ ID NO: 22475
  source 1..34: mol_type = genomic DNA

SEQ ID NO: 50511 - DNA, 35 bp, Homo sapiens; identical to SEQ ID NO: 22476
  source 1..35: mol_type = genomic DNA

SEQ ID NO: 50512 - DNA, 16 bp, Homo sapiens
  source 1..16: mol_type = genomic DNA
gtttccgtagtgtagc

SEQ ID NO: 50513 - DNA, 17 bp, Homo sapiens
  source 1..17: mol_type = genomic DNA
gtttccgtagtgtagcg

SEQ ID NO: 50514 - DNA, 18 bp, Homo sapiens
  source 1..18: mol_type = genomic DNA
gtttccgtagtgtagcgg

SEQ ID NO: 50515 - DNA, 19 bp, Homo sapiens
  source 1..19: mol_type = genomic DNA
gtttccgtagtgtagcggt

SEQ ID NO: 50516 - DNA, 23 bp, Homo sapiens
  source 1..23: mol_type = genomic DNA
gtttccgtagtgtagcggttatc

SEQ ID NO: 50517 - DNA, 26 bp, Homo sapiens
  source 1..26: mol_type = genomic DNA
gtttccgtagtgtagcggttatcaca

SEQ ID NO: 50518 - DNA, 28 bp, Homo sapiens
  source 1..28: mol_type = genomic DNA
gtttccgtagtgtagcggttatcacatt

SEQ ID NO: 50519 - DNA, 29 bp, Homo sapiens
  source 1..29: mol_type = genomic DNA
gtttccgtagtgtagcggttatcacattc

SEQ ID NO: 50520 - DNA, 30 bp, Homo sapiens; identical to SEQ ID NO: 22490
  source 1..30: mol_type = genomic DNA

SEQ ID NO: 50521 - DNA, 31 bp, Homo sapiens; identical to SEQ ID NO: 22491
  source 1..31: mol_type = genomic DNA

SEQ ID NO: 50522 - DNA, 32 bp, Homo sapiens; identical to SEQ ID NO: 22492
  source 1..32: mol_type = genomic DNA

SEQ ID NO: 50523 - DNA, 33 bp, Homo sapiens; identical to SEQ ID NO: 22493
  source 1..33: mol_type = genomic DNA

SEQ ID NO: 50524 - DNA, 34 bp, Homo sapiens; identical to SEQ ID NO: 22494
  source 1..34: mol_type = genomic DNA

SEQ ID NO: 50525 - DNA, 35 bp, Homo sapiens; identical to SEQ ID NO: 22495
  source 1..35: mol_type = genomic DNA

SEQ ID NO: 50526 - DNA, 16 bp, Homo sapiens
  source 1..16: mol_type = genomic DNA
gtttccgtagtgtagt

SEQ ID NO: 50527 - DNA, 17 bp, Homo sapiens
  source 1..17: mol_type = genomic DNA
gtttccgtagtgtagtg

SEQ ID NO: 50528 - DNA, 18 bp, Homo sapiens
  source 1..18: mol_type = genomic DNA
gtttccgtagtgtagtgg

SEQ ID NO: 50529 - DNA, 19 bp, Homo sapiens
  source 1..19: mol_type = genomic DNA
gtttccgtagtgtagtggt

SEQ ID NO: 50530 - DNA, 21 bp, Homo sapiens
  source 1..21: mol_type = genomic DNA
gtttccgtagtgtagtggtca

SEQ ID NO: 50531 - DNA, 22 bp, Homo sapiens
  source 1..22: mol_type = genomic DNA
gtttccgtagtgtagtggtcat

SEQ ID NO: 50532 - DNA, 23 bp, Homo sapiens
  source 1..23: mol_type = genomic DNA
gtttccgtagtgtagtggtcatc

SEQ ID NO: 50533 - DNA, 24 bp, Homo sapiens
  source 1..24: mol_type = genomic DNA
gtttccgtagtgtagtggtcatca

SEQ ID NO: 50534 - DNA, 25 bp, Homo sapiens
  source 1..25: mol_type = genomic DNA
gtttccgtagtgtagtggtcatcac

SEQ ID NO: 50535 - DNA, 26 bp, Homo sapiens
  source 1..26: mol_type = genomic DNA
gtttccgtagtgtagtggtcatcacg

SEQ ID NO: 50536 - DNA, 29 bp, Homo sapiens
  source 1..29: mol_type = genomic DNA
gtttccgtagtgtagtggtcatcacgttc

SEQ ID NO: 50537 - DNA, 30 bp, Homo sapiens; identical to SEQ ID NO: 22515
  source 1..30: mol_type = genomic DNA

SEQ ID NO: 50538 - DNA, 31 bp, Homo sapiens; identical to SEQ ID NO: 22516
  source 1..31: mol_type = genomic DNA

SEQ ID NO: 50539 - DNA, 32 bp, Homo sapiens; identical to SEQ ID NO: 22517
  source 1..32: mol_type = genomic DNA

SEQ ID NO: 50540 - DNA, 33 bp, Homo sapiens; identical to SEQ ID NO: 22518
  source 1..33: mol_type = genomic DNA

SEQ ID NO: 50541 - DNA, 21 bp, Homo sapiens
  source 1..21: mol_type = genomic DNA
gtttccgtagtgtagtggtta

SEQ ID NO: 50542 - DNA, 22 bp, Homo sapiens
  source 1..22: mol_type = genomic DNA
gtttccgtagtgtagtggttat

SEQ ID NO: 50543 - DNA, 23 bp, Homo sapiens
  source 1..23: mol_type = genomic DNA
gtttccgtagtgtagtggttatc

SEQ ID NO: 50544 - DNA, 24 bp, Homo sapiens
  source 1..24: mol_type = genomic DNA
gtttccgtagtgtagtggttatca

SEQ ID NO: 50545 - DNA, 25 bp, Homo sapiens
  source 1..25: mol_type = genomic DNA
gtttccgtagtgtagtggttatcac

SEQ ID NO: 50546 - DNA, 26 bp, Homo sapiens
  source 1..26: mol_type = genomic DNA
gtttccgtagtgtagtggttatcacg

SEQ ID NO: 50547 - DNA, 28 bp, Homo sapiens
  source 1..28: mol_type = genomic DNA
gtttccgtagtgtagtggttatcacgtt

SEQ ID NO: 50548 - DNA, 29 bp, Homo sapiens
  source 1..29: mol_type = genomic DNA
gtttccgtagtgtagtggttatcacgttc

SEQ ID NO: 50549 - DNA, 30 bp, Homo sapiens; identical to SEQ ID NO: 22533
  source 1..30: mol_type = genomic DNA

SEQ ID NO: 50550 - DNA, 31 bp, Homo sapiens; identical to SEQ ID NO: 22534
  source 1..31: mol_type = genomic DNA

SEQ ID NO: 50551 - DNA, 32 bp, Homo sapiens; identical to SEQ ID NO: 22535
  source 1..32: mol_type = genomic DNA

SEQ ID NO: 50552 - DNA, 33 bp, Homo sapiens; identical to SEQ ID NO: 22536
  source 1..33: mol_type = genomic DNA

SEQ ID NO: 50553 - DNA, 36 bp, Homo sapiens; identical to SEQ ID NO: 22539
  source 1..36: mol_type = genomic DNA

SEQ ID NO: 50554 - DNA, 34 bp, Homo sapiens; identical to SEQ ID NO: 22542
  source 1..34: mol_type = genomic DNA

SEQ ID NO: 50555 - DNA, 35 bp, Homo sapiens; identical to SEQ ID NO: 22543
  source 1..35: mol_type = genomic DNA

SEQ ID NO: 50556 - DNA, 36 bp, Homo sapiens; identical to SEQ ID NO: 22544
  source 1..36: mol_type = genomic DNA

SEQ ID NO: 50557 - DNA, 37 bp, Homo sapiens; identical to SEQ ID NO: 22545
  source 1..37: mol_type = genomic DNA

SEQ ID NO: 50558 - DNA, 38 bp, Homo sapiens; identical to SEQ ID NO: 22546
  source 1..38: mol_type = genomic DNA

SEQ ID NO: 50559 - DNA, 39 bp, Homo sapiens; identical to SEQ ID NO: 22547
  source 1..39: mol_type = genomic DNA

SEQ ID NO: 50560 - DNA, 40 bp, Homo sapiens; identical to SEQ ID NO: 22548
  source 1..40: mol_type = genomic DNA

SEQ ID NO: 50561 - DNA, 41 bp, Homo sapiens; identical to SEQ ID NO: 22549
  source 1..41: mol_type = genomic DNA

SEQ ID NO: 50562 - DNA, 42 bp, Homo sapiens; identical to SEQ ID NO: 22550
  source 1..42: mol_type = genomic DNA

SEQ ID NO: 50563 - DNA, 43 bp, Homo sapiens; identical to SEQ ID NO: 22551
  source 1..43: mol_type = genomic DNA

SEQ ID NO: 50564 - DNA, 32 bp, Homo sapiens; identical to SEQ ID NO: 22553
  source 1..32: mol_type = genomic DNA

SEQ ID NO: 50565 - DNA, 33 bp, Homo sapiens; identical to SEQ ID NO: 22554
  source 1..33: mol_type = genomic DNA

SEQ ID NO: 50566 - DNA, 33 bp, Homo sapiens; identical to SEQ ID NO: 22561
  source 1..33: mol_type = genomic DNA

SEQ ID NO: 50567 - DNA, 30 bp, Homo sapiens; identical to SEQ ID NO: 22572
  source 1..30: mol_type = genomic DNA

SEQ ID NO: 50568 - DNA, 31 bp, Homo sapiens; identical to SEQ ID NO: 22573
  source 1..31: mol_type = genomic DNA

SEQ ID NO: 50569 - DNA, 17 bp, Homo sapiens
  source 1..17: mol_type = genomic DNA
gttttcacccaggcggc

SEQ ID NO: 50570 - DNA, 23 bp, Homo sapiens
  source 1..23: mol_type = genomic DNA
gttttcacccaggcggcccgggt

SEQ ID NO: 50571 - DNA, 42 bp, Homo sapiens; identical to SEQ ID NO: 22581
  source 1..42: mol_type = genomic DNA

SEQ ID NO: 50572 - DNA, 43 bp, Homo sapiens; identical to SEQ ID NO: 22582
  source 1..43: mol_type = genomic DNA

SEQ ID NO: 50573 - DNA, 45 bp, Homo sapiens; identical to SEQ ID NO: 22584
  source 1..45: mol_type = genomic DNA

SEQ ID NO: 50574 - DNA, 28 bp, Homo sapiens
  source 1..28: mol_type = genomic DNA
gttttgacaacattcaaaaaagagtacc

SEQ ID NO: 50575 - DNA, 17 bp, Homo sapiens
  source 1..17: mol_type = genomic DNA
gttttgcagtccttacc

SEQ ID NO: 50576 - DNA, 19 bp, Homo sapiens
  source 1..19: mol_type = genomic DNA
gtttttcatatcattggtc

SEQ ID NO: 50577 - DNA, 21 bp, Homo sapiens
  source 1..21: mol_type = genomic DNA
gtttttcatatcattggtcgt

SEQ ID NO: 50578 - DNA, 28 bp, Homo sapiens
  source 1..28: mol_type = genomic DNA
gtttttcatatcattggtcgtggttgta

SEQ ID NO: 50579 - DNA, 31 bp, Homo sapiens; identical to SEQ ID NO: 22605
  source 1..31: mol_type = genomic DNA

SEQ ID NO: 50580 - DNA, 32 bp, Homo sapiens; identical to SEQ ID NO: 22606
  source 1..32: mol_type = genomic DNA

SEQ ID NO: 50581 - DNA, 37 bp, Homo sapiens; identical to SEQ ID NO: 22611
  source 1..37: mol_type = genomic DNA

SEQ ID NO: 50582 - DNA, 40 bp, Homo sapiens; identical to SEQ ID NO: 22614
  source 1..40: mol_type = genomic DNA

SEQ ID NO: 50583 - DNA, 41 bp, Homo sapiens; identical to SEQ ID NO: 22615
  source 1..41: mol_type = genomic DNA

SEQ ID NO: 50584 - DNA, 42 bp, Homo sapiens; identical to SEQ ID NO: 22616
  source 1..42: mol_type = genomic DNA

SEQ ID NO: 50585 - DNA, 43 bp, Homo sapiens; identical to SEQ ID NO: 22617
  source 1..43: mol_type = genomic DNA

SEQ ID NO: 50586 - DNA, 45 bp, Homo sapiens; identical to SEQ ID NO: 22619
  source 1..45: mol_type = genomic DNA

SEQ ID NO: 50587 - DNA, 46 bp, Homo sapiens; identical to SEQ ID NO: 22620
  source 1..46: mol_type = genomic DNA

SEQ ID NO: 50588 - DNA, 29 bp, Homo sapiens
  source 1..29: mol_type = genomic DNA
taaaacttaaaactttacagtcagaggtt

SEQ ID NO: 50589 - DNA, 22 bp, Homo sapiens
  source 1..22: mol_type = genomic DNA
taaacaggagatcctgggttcg

SEQ ID NO: 50590 - DNA, 36 bp, Homo sapiens; identical to SEQ ID NO: 22678
  source 1..36: mol_type = genomic DNA

SEQ ID NO: 50591 - DNA, 37 bp, Homo sapiens; identical to SEQ ID NO: 22679
  source 1..37: mol_type = genomic DNA

SEQ ID NO: 50592 - DNA, 40 bp, Homo sapiens; identical to SEQ ID NO: 22682
  source 1..40: mol_type = genomic DNA

SEQ ID NO: 50593 - DNA, 41 bp, Homo sapiens; identical to SEQ ID NO: 22683
  source 1..41: mol_type = genomic DNA

SEQ ID NO: 50594 - DNA, 37 bp, Homo sapiens; identical to SEQ ID NO: 22687
  source 1..37: mol_type = genomic DNA

SEQ ID NO: 50595 - DNA, 38 bp, Homo sapiens; identical to SEQ ID NO: 22688
  source 1..38: mol_type = genomic DNA

SEQ ID NO: 50596 - DNA, 40 bp, Homo sapiens; identical to SEQ ID NO: 22690
  source 1..40: mol_type = genomic DNA

SEQ ID NO: 50597 - DNA, 41 bp, Homo sapiens; identical to SEQ ID NO: 22691
  source 1..41: mol_type = genomic DNA

SEQ ID NO: 50598 - DNA, 37 bp, Homo sapiens
  source 1..37: mol_type = genomic DNA
taaaccaggggtcgcgagttcaaatctcgctggggcc

SEQ ID NO: 50599 - DNA, 23 bp, Homo sapiens
  source 1..23: mol_type = genomic DNA
taaaccgaagatcacgggttcga

SEQ ID NO: 50600 - DNA, 19 bp, Homo sapiens
  source 1..19: mol_type = genomic DNA
taaaccgaagatcgcgggt

SEQ ID NO: 50601 - DNA, 22 bp, Homo sapiens
  source 1..22: mol_type = genomic DNA
taaaccgaagatcgcgggttcg

SEQ ID NO: 50602 - DNA, 23 bp, Homo sapiens
  source 1..23: mol_type = genomic DNA
taaaccgaagatcgcgggttcga

SEQ ID NO: 50603 - DNA, 38 bp, Homo sapiens; identical to SEQ ID NO: 22727
  source 1..38: mol_type = genomic DNA

SEQ ID NO: 50604 - DNA, 39 bp, Homo sapiens; identical to SEQ ID NO: 22728
  source 1..39: mol_type = genomic DNA

SEQ ID NO: 50605 - DNA, 40 bp, Homo sapiens; identical to SEQ ID NO: 22729
  source 1..40: mol_type = genomic DNA

SEQ ID NO: 50606 - DNA, 34 bp, Homo sapiens; identical to SEQ ID NO: 22746
  source 1..34: mol_type = genomic DNA

SEQ ID NO: 50607 - DNA, 35 bp, Homo sapiens; identical to SEQ ID NO: 22747
  source 1..35: mol_type = genomic DNA

SEQ ID NO: 50608 - DNA, 36 bp, Homo sapiens; identical to SEQ ID NO: 22748
  source 1..36: mol_type = genomic DNA

SEQ ID NO: 50609 - DNA, 32 bp, Homo sapiens; identical to SEQ ID NO: 22763
  source 1..32: mol_type = genomic DNA

SEQ ID NO: 50610 - DNA, 33 bp, Homo sapiens; identical to SEQ ID NO: 22764
  source 1..33: mol_type = genomic DNA

SEQ ID NO: 50611 - DNA, 18 bp, Homo sapiens
  source 1..18: mol_type = genomic DNA
taaagactttttctctga

SEQ ID NO: 50612 - DNA, 19 bp, Homo sapiens
  source 1..19: mol_type = genomic DNA
taaagactttttctctgac

SEQ ID NO: 50613 - DNA, 20 bp, Homo sapiens
  source 1..20: mol_type = genomic DNA
taaagactttttctctgacc

SEQ ID NO: 50614 - DNA, 21 bp, Homo sapiens
  source 1..21: mol_type = genomic DNA
taaagactttttctctgacca

SEQ ID NO: 50615 - DNA, 17 bp, Homo sapiens
  source 1..17: mol_type = genomic DNA
taaagattaagagaacc

SEQ ID NO: 50616 - DNA, 35 bp, Homo sapiens; identical to SEQ ID NO: 22790
  source 1..35: mol_type = genomic DNA

SEQ ID NO: 50617 - DNA, 36 bp, Homo sapiens; identical to SEQ ID NO: 22791
  source 1..36: mol_type = genomic DNA

SEQ ID NO: 50618 - DNA, 37 bp, Homo sapiens; identical to SEQ ID NO: 22792
  source 1..37: mol_type = genomic DNA

SEQ ID NO: 50619 - DNA, 38 bp, Homo sapiens; identical to SEQ ID NO: 22793
  source 1..38: mol_type = genomic DNA

SEQ ID NO: 50620 - DNA, 17 bp, Homo sapiens
  source 1..17: mol_type = genomic DNA
taaaggtccctggttcg

SEQ ID NO: 50621 - DNA, 34 bp, Homo sapiens; identical to SEQ ID NO: 22802
  source 1..34: mol_type = genomic DNA

SEQ ID NO: 50622 - DNA, 36 bp, Homo sapiens
  source 1..36: mol_type = genomic DNA
taaaggtccctggttcgatcccgggtttcggcacca

SEQ ID NO: 50623 - DNA, 16 bp, Homo sapiens
  source 1..16: mol_type = genomic DNA
taaataagctatcggg

SEQ ID NO: 50624 - DNA, 17 bp, Homo sapiens
  source 1..17: mol_type = genomic DNA
taaataagctatcgggc

SEQ ID NO: 50625 - DNA, 18 bp, Homo sapiens
  source 1..18: mol_type = genomic DNA
taaataagctatcgggcc

SEQ ID NO: 50626 - DNA, 20 bp, Homo sapiens
  source 1..20: mol_type = genomic DNA
taaataagctatcgggccca

SEQ ID NO: 50627 - DNA, 26 bp, Homo sapiens
  source 1..26: mol_type = genomic DNA
taaataataggagcttaaaccccctt

SEQ ID NO: 50628 - DNA, 27 bp, Homo sapiens
  source 1..27: mol_type = genomic DNA
taaataataggagcttaaaccccctta

SEQ ID NO: 50629 - DNA, 22 bp, Homo sapiens
  source 1..22: mol_type = genomic DNA
taaatacagaccaagagccttc

SEQ ID NO: 50630 - DNA, 23 bp, Homo sapiens
  source 1..23: mol_type = genomic DNA
taaatacagaccaagagccttca

SEQ ID NO: 50631 - DNA, 35 bp, Homo sapiens; identical to SEQ ID NO: 22858
  source 1..35: mol_type = genomic DNA

SEQ ID NO: 50632 - DNA, 41 bp, Homo sapiens
  source 1..41: mol_type = genomic DNA
taaatacagaccaagagccttcaaagccctcagtaagttgc

SEQ ID NO: 50633 - DNA, 38 bp, Homo sapiens; identical to SEQ ID NO: 22885
  source 1..38: mol_type = genomic DNA

SEQ ID NO: 50634 - DNA, 39 bp, Homo sapiens; identical to SEQ ID NO: 22886
  source 1..39: mol_type = genomic DNA

SEQ ID NO: 50635 - DNA, 24 bp, Homo sapiens
  source 1..24: mol_type = genomic DNA
taaccaaaacatcagattgtgaat

SEQ ID NO: 50636 - DNA, 25 bp, Homo sapiens
  source 1..25: mol_type = genomic DNA
taaccaaaacatcagattgtgaatc

SEQ ID NO: 50637 - DNA, 37 bp, Homo sapiens; identical to SEQ ID NO: 22971
  source 1..37: mol_type = genomic DNA

SEQ ID NO: 50638 - DNA, 20 bp, Homo sapiens
  source 1..20: mol_type = genomic DNA
taacccagaggtcgatggat

SEQ ID NO: 50639 - DNA, 21 bp, Homo sapiens
  source 1..21: mol_type = genomic DNA
taacccagaggtcgatggatc

SEQ ID NO: 50640 - DNA, 22 bp, Homo sapiens
  source 1..22: mol_type = genomic DNA
taacccagaggtcgatggatcg

SEQ ID NO: 50641 - DNA, 23 bp, Homo sapiens
  source 1..23: mol_type = genomic DNA
taacccagaggtcgatggatcga

SEQ ID NO: 50642 - DNA, 23 bp, Homo sapiens
  source 1..23: mol_type = genomic DNA
taaccgaaaggttggtggttcga

SEQ ID NO: 50643 - DNA, 25 bp, Homo sapiens
  source 1..25: mol_type = genomic DNA
taaccgaaaggttggtggttcgagc

SEQ ID NO: 50644 - DNA, 37 bp, Homo sapiens; identical to SEQ ID NO: 22997
  source 1..37: mol_type = genomic DNA

SEQ ID NO: 50645 - DNA, 40 bp, Homo sapiens; identical to SEQ ID NO: 23000
  source 1..40: mol_type = genomic DNA

SEQ ID NO: 50646 - DNA, 41 bp, Homo sapiens; identical to SEQ ID NO: 23001
  source 1..41: mol_type = genomic DNA

SEQ ID NO: 50647 - DNA, 19 bp, Homo sapiens
  source 1..19: mol_type = genomic DNA
taacgccaaggtcgcgggt

SEQ ID NO: 50648 - DNA, 21 bp, Homo sapiens
  source 1..21: mol_type = genomic DNA
taacgccaaggtcgcgggttc

SEQ ID NO: 50649 - DNA, 22 bp, Homo sapiens
  source 1..22: mol_type = genomic DNA
taacgccaaggtcgcgggttcg

SEQ ID NO: 50650 - DNA, 23 bp, Homo sapiens
  source 1..23: mol_type = genomic DNA
taacgccaaggtcgcgggttcga

SEQ ID NO: 50651 - DNA, 24 bp, Homo sapiens
  source 1..24: mol_type = genomic DNA
taacgccaaggtcgcgggttcgat

SEQ ID NO: 50652 - DNA, 36 bp, Homo sapiens; identical to SEQ ID NO: 23027
  source 1..36: mol_type = genomic DNA

SEQ ID NO: 50653 - DNA, 40 bp, Homo sapiens; identical to SEQ ID NO: 23028
  source 1..40: mol_type = genomic DNA

SEQ ID NO: 50654 - DNA, 41 bp, Homo sapiens; identical to SEQ ID NO: 23029
  source 1..41: mol_type = genomic DNA

SEQ ID NO: 50655 - DNA, 34 bp, Homo sapiens; identical to SEQ ID NO: 23053
  source 1..34: mol_type = genomic DNA

SEQ ID NO: 50656 - DNA, 32 bp, Homo sapiens; identical to SEQ ID NO: 23068
  source 1..32: mol_type = genomic DNA

SEQ ID NO: 50657 - DNA, 40 bp, Homo sapiens; identical to SEQ ID NO: 23076
  source 1..40: mol_type = genomic DNA

SEQ ID NO: 50658 - DNA, 16 bp, Homo sapiens
  source 1..16: mol_type = genomic DNA
taacttgaccgctctg

SEQ ID NO: 50659 - DNA, 17 bp, Homo sapiens
  source 1..17: mol_type = genomic DNA
taacttgaccgctctga

SEQ ID NO: 50660 - DNA, 18 bp, Homo sapiens
  source 1..18: mol_type = genomic DNA
taacttgaccgctctgac

SEQ ID NO: 50661 - DNA, 19 bp, Homo sapiens
  source 1..19: mol_type = genomic DNA
taacttgaccgctctgacc

SEQ ID NO: 50662 - DNA, 20 bp, Homo sapiens
  source 1..20: mol_type = genomic DNA
taacttgaccgctctgacca

SEQ ID NO: 50663 - DNA, 29 bp, Homo sapiens
  source 1..29: mol_type = genomic DNA
taagagaaccaacacctctttacagtgac

SEQ ID NO: 50664 - DNA, 30 bp, Homo sapiens; identical to SEQ ID NO: 23119
  source 1..30: mol_type = genomic DNA

SEQ ID NO: 50665 - DNA, 31 bp, Homo sapiens; identical to SEQ ID NO: 23120
  source 1..31: mol_type = genomic DNA

SEQ ID NO: 50666 - DNA, 17 bp, Homo sapiens
  source 1..17: mol_type = genomic DNA
taagccagggattgtgg

SEQ ID NO: 50667 - DNA, 21 bp, Homo sapiens
  source 1..21: mol_type = genomic DNA
taagccagggattgtgggttc

SEQ ID NO: 50668 - DNA, 22 bp, Homo sapiens
  source 1..22: mol_type = genomic DNA
taagccagggattgtgggttcg

SEQ ID NO: 50669 - DNA, 31 bp, Homo sapiens; identical to SEQ ID NO: 23176
  source 1..31: mol_type = genomic DNA

SEQ ID NO: 50670 - DNA, 40 bp, Homo sapiens; identical to SEQ ID NO: 23179
  source 1..40: mol_type = genomic DNA

SEQ ID NO: 50671 - DNA, 41 bp, Homo sapiens; identical to SEQ ID NO: 23180
  source 1..41: mol_type = genomic DNA

SEQ ID NO: 50672 - DNA, 20 bp, Homo sapiens
  source 1..20: mol_type = genomic DNA
taagctatcgggcccatacc

SEQ ID NO: 50673 - DNA, 24 bp, Homo sapiens
  source 1..24: mol_type = genomic DNA
taagctatcgggcccataccccga

SEQ ID NO: 50674 - DNA, 25 bp, Homo sapiens
  source 1..25: mol_type = genomic DNA
taagctatcgggcccataccccgaa

SEQ ID NO: 50675 - DNA, 26 bp, Homo sapiens
  source 1..26: mol_type = genomic DNA
taagctatcgggcccataccccgaaa

SEQ ID NO: 50676 - DNA, 28 bp, Homo sapiens
  source 1..28: mol_type = genomic DNA
taaggtcagctaaataagctatcgggcc

SEQ ID NO: 50677 - DNA, 29 bp, Homo sapiens
  source 1..29: mol_type = genomic DNA
taaggtcagctaaataagctatcgggccc

SEQ ID NO: 50678 - DNA, 31 bp, Homo sapiens; identical to SEQ ID NO: 23226
  source 1..31: mol_type = genomic DNA

SEQ ID NO: 50679 - DNA, 16 bp, Homo sapiens
  source 1..16: mol_type = genomic DNA
taagtgtttgtgggtt

SEQ ID NO: 50680 - DNA, 35 bp, Homo sapiens; identical to SEQ ID NO: 23255
  source 1..35: mol_type = genomic DNA

SEQ ID NO: 50681 - DNA, 30 bp, Homo sapiens; identical to SEQ ID NO: 23269
  source 1..30: mol_type = genomic DNA

SEQ ID NO: 50682 - DNA, 34 bp, Homo sapiens; identical to SEQ ID NO: 23273
  source 1..34: mol_type = genomic DNA

SEQ ID NO: 50683 - DNA, 42 bp, Homo sapiens; identical to SEQ ID NO: 23280
  source 1..42: mol_type = genomic DNA

SEQ ID NO: 50684 - DNA, 17 bp, Homo sapiens
  source 1..17: mol_type = genomic DNA
taataggagcttaaacc

SEQ ID NO: 50685 - DNA, 18 bp, Homo sapiens
  source 1..18: mol_type = genomic DNA
taataggagcttaaaccc

SEQ ID NO: 50686 - DNA, 32 bp, Homo sapiens; identical to SEQ ID NO: 23303
  source 1..32: mol_type = genomic DNA

SEQ ID NO: 50687 - DNA, 19 bp, Homo sapiens
  source 1..19: mol_type = genomic DNA
taatctgaaggtcctgagt

SEQ ID NO: 50688 - DNA, 37 bp, Homo sapiens; identical to SEQ ID NO: 23347
  source 1..37: mol_type = genomic DNA

SEQ ID NO: 50689 - DNA, 39 bp, Homo sapiens; identical to SEQ ID NO: 23349
  source 1..39: mol_type = genomic DNA

SEQ ID NO: 50690 - DNA, 40 bp, Homo sapiens; identical to SEQ ID NO: 23350
  source 1..40: mol_type = genomic DNA

SEQ ID NO: 50691 - DNA, 41 bp, Homo sapiens; identical to SEQ ID NO: 23351
  source 1..41: mol_type = genomic DNA

SEQ ID NO: 50692 - DNA, 37 bp, Homo sapiens; identical to SEQ ID NO: 23362
  source 1..37: mol_type = genomic DNA

SEQ ID NO: 50693 - DNA, 40 bp, Homo sapiens; identical to SEQ ID NO: 23365
  source 1..40: mol_type = genomic DNA

SEQ ID NO: 50694 - DNA, 41 bp, Homo sapiens; identical to SEQ ID NO: 23366
  source 1..41: mol_type = genomic DNA

SEQ ID NO: 50695 - DNA, 37 bp, Homo sapiens; identical to SEQ ID NO: 40294
  source 1..37: mol_type = genomic DNA

SEQ ID NO: 50696 - DNA, 40 bp, Homo sapiens; identical to SEQ ID NO: 23371
  source 1..40: mol_type = genomic DNA

SEQ ID NO: 50697 - DNA, 41 bp, Homo sapiens; identical to SEQ ID NO: 23372
  source 1..41: mol_type = genomic DNA

SEQ ID NO: 50698 - DNA, 21 bp, Homo sapiens
  source 1..21: mol_type = genomic DNA
taatgccgaggttgtgagttc

SEQ ID NO: 50699 - DNA, 37 bp, Homo sapiens
  source 1..37: mol_type = genomic DNA
taatgccgaggttgtgagttcgagcctcacctggagc

SEQ ID NO: 50700 - DNA, 16 bp, Homo sapiens
  source 1..16: mol_type = genomic DNA
taatggataaggcact

SEQ ID NO: 50701 - DNA, 17 bp, Homo sapiens
  source 1..17: mol_type = genomic DNA
taatggataaggcactg

SEQ ID NO: 50702 - DNA, 19 bp, Homo sapiens
  source 1..19: mol_type = genomic DNA
taatggataaggcactggc

SEQ ID NO: 50703 - DNA, 16 bp, Homo sapiens
  source 1..16: mol_type = genomic DNA
taatggataaggcatc

SEQ ID NO: 50704 - DNA, 17 bp, Homo sapiens
  source 1..17: mol_type = genomic DNA
taatggataaggcatca

SEQ ID NO: 50705 - DNA, 21 bp, Homo sapiens
  source 1..21: mol_type = genomic DNA
taatggataaggcatcagcct

SEQ ID NO: 50706 - DNA, 30 bp, Homo sapiens; identical to SEQ ID NO: 23400
  source 1..30: mol_type = genomic DNA

SEQ ID NO: 50707 - DNA, 38 bp, Homo sapiens; identical to SEQ ID NO: 40307
  source 1..38: mol_type = genomic DNA

SEQ ID NO: 50708 - DNA, 16 bp, Homo sapiens
  source 1..16: mol_type = genomic DNA
taatggataaggcatt

SEQ ID NO: 50709 - DNA, 17 bp, Homo sapiens
  source 1..17: mol_type = genomic DNA
taatggataaggcattg

SEQ ID NO: 50710 - DNA, 19 bp, Homo sapiens
  source 1..19: mol_type = genomic DNA
taatggataaggcattggc

SEQ ID NO: 50711 - DNA, 20 bp, Homo sapiens
  source 1..20: mol_type = genomic DNA
taatggataaggcattggcc

SEQ ID NO: 50712 - DNA, 16 bp, Homo sapiens
  source 1..16: mol_type = genomic DNA
taatggataaggcgtc

SEQ ID NO: 50713 - DNA, 19 bp, Homo sapiens
  source 1..19: mol_type = genomic DNA
taatggataaggcgtctga

SEQ ID NO: 50714 - DNA, 23 bp, Homo sapiens
  source 1..23: mol_type = genomic DNA
taatggataaggcgtctgattcc

SEQ ID NO: 50715 - DNA, 31 bp, Homo sapiens; identical to SEQ ID NO: 23440
  source 1..31: mol_type = genomic DNA

SEQ ID NO: 50716 - DNA, 32 bp, Homo sapiens; identical to SEQ ID NO: 23441
  source 1..32: mol_type = genomic DNA

SEQ ID NO: 50717 - DNA, 17 bp, Homo sapiens
  source 1..17: mol_type = genomic DNA
taatggttagcactctg

SEQ ID NO: 50718 - DNA, 18 bp, Homo sapiens
  source 1..18: mol_type = genomic DNA
taatggttagcactctgg

SEQ ID NO: 50719 - DNA, 19 bp, Homo sapiens
  source 1..19: mol_type = genomic DNA
taatggttagcactctgga

SEQ ID NO: 50720 - DNA, 21 bp, Homo sapiens
  source 1..21: mol_type = genomic DNA
taatggttagcactctggact

SEQ ID NO: 50721 - DNA, 22 bp, Homo sapiens
  source 1..22: mol_type = genomic DNA
taatggttagcactctggactc

SEQ ID NO: 50722 - DNA, 25 bp, Homo sapiens
  source 1..25: mol_type = genomic DNA
taatggttagcactctggactctga

SEQ ID NO: 50723 - DNA, 26 bp, Homo sapiens
  source 1..26: mol_type = genomic DNA
taatggttagcactctggactctgaa

SEQ ID NO: 50724 - DNA, 28 bp, Homo sapiens
  source 1..28: mol_type = genomic DNA
taatggttagcactctggactctgaatc

SEQ ID NO: 50725 - DNA, 29 bp, Homo sapiens
  source 1..29: mol_type = genomic DNA
taatggttagcactctggactctgaatcc

SEQ ID NO: 50726 - DNA, 32 bp, Homo sapiens; identical to SEQ ID NO: 40333
  source 1..32: mol_type = genomic DNA

SEQ ID NO: 50727 - DNA, 33 bp, Homo sapiens; identical to SEQ ID NO: 23457
  source 1..33: mol_type = genomic DNA

SEQ ID NO: 50728 - DNA, 41 bp, Homo sapiens; identical to SEQ ID NO: 23459
  source 1..41: mol_type = genomic DNA

SEQ ID NO: 50729 - DNA, 28 bp, Homo sapiens
  source 1..28: mol_type = genomic DNA
taatggttagcactctggactttgaatc

SEQ ID NO: 50730 - DNA, 29 bp, Homo sapiens
  source 1..29: mol_type = genomic DNA
taatggttagcactctggactttgaatcc

SEQ ID NO: 50731 - DNA, 19 bp, Homo sapiens
  source 1..19: mol_type = genomic DNA
taattcaaaggttccgggt

SEQ ID NO: 50732 - DNA, 21 bp, Homo sapiens
  source 1..21: mol_type = genomic DNA
taattcaaaggttccgggttc

SEQ ID NO: 50733 - DNA, 40 bp, Homo sapiens; identical to SEQ ID NO: 23474
  source 1..40: mol_type = genomic DNA

SEQ ID NO: 50734 - DNA, 40 bp, Homo sapiens; identical to SEQ ID NO: 23490
  source 1..40: mol_type = genomic DNA

SEQ ID NO: 50735 - DNA, 42 bp, Homo sapiens; identical to SEQ ID NO: 23499
  source 1..42: mol_type = genomic DNA

SEQ ID NO: 50736 - DNA, 25 bp, Homo sapiens
  source 1..25: mol_type = genomic DNA
tacactgaaaatgtttagacgggct

SEQ ID NO: 50737 - DNA, 34 bp, Homo sapiens; identical to SEQ ID NO: 23531
  source 1..34: mol_type = genomic DNA

SEQ ID NO: 50738 - DNA, 37 bp, Homo sapiens; identical to SEQ ID NO: 23534
  source 1..37: mol_type = genomic DNA

SEQ ID NO: 50739 - DNA, 38 bp, Homo sapiens; identical to SEQ ID NO: 23535
  source 1..38: mol_type = genomic DNA

SEQ ID NO: 50740 - DNA, 39 bp, Homo sapiens; identical to SEQ ID NO: 23536
  source 1..39: mol_type = genomic DNA

SEQ ID NO: 50741 - DNA, 40 bp, Homo sapiens; identical to SEQ ID NO: 23537
  source 1..40: mol_type = genomic DNA

SEQ ID NO: 50742 - DNA, 41 bp, Homo sapiens; identical to SEQ ID NO: 23538
  source 1..41: mol_type = genomic DNA

SEQ ID NO: 50743 - DNA, 27 bp, Homo sapiens
  source 1..27: mol_type = genomic DNA
tacagaccaagagccttcaaagccctc

SEQ ID NO: 50744 - DNA, 39 bp, Homo sapiens; identical to SEQ ID NO: 23572
  source 1..39: mol_type = genomic DNA

SEQ ID NO: 50745 - DNA, 25 bp, Homo sapiens
  source 1..25: mol_type = genomic DNA
tacctcctcaaagcaatacactgaa

SEQ ID NO: 50746 - DNA, 18 bp, Homo sapiens
  source 1..18: mol_type = genomic DNA
tactctgcgttgtggccg

SEQ ID NO: 50747 - DNA, 20 bp, Homo sapiens
  source 1..20: mol_type = genomic DNA
tactctgcgttgtggccgca

SEQ ID NO: 50748 - DNA, 16 bp, Homo sapiens
  source 1..16: mol_type = genomic DNA
tacttaatttctgcca

SEQ ID NO: 50749 - DNA, 28 bp, Homo sapiens
  source 1..28: mol_type = genomic DNA
tagaatcttagctttgggtgctaatggt

SEQ ID NO: 50750 - DNA, 41 bp, Homo sapiens; identical to SEQ ID NO: 23637
  source 1..41: mol_type = genomic DNA

SEQ ID NO: 50751 - DNA, 16 bp, Homo sapiens
  source 1..16: mol_type = genomic DNA
tagaattctcgcctgc

SEQ ID NO: 50752 - DNA, 17 bp, Homo sapiens
  source 1..17: mol_type = genomic DNA
tagaattctcgcctgcc

SEQ ID NO: 50753 - DNA, 18 bp, Homo sapiens
  source 1..18: mol_type = genomic DNA
tagaattctcgcctgcca

SEQ ID NO: 50754 - DNA, 19 bp, Homo sapiens
  source 1..19: mol_type = genomic DNA
tagaattctcgcctgccac

SEQ ID NO: 50755 - DNA, 20 bp, Homo sapiens
  source 1..20: mol_type = genomic DNA
tagaattctcgcctgccacg

SEQ ID NO: 50756 - DNA, 21 bp, Homo sapiens
  source 1..21: mol_type = genomic DNA
tagaattctcgcctgccacgc

SEQ ID NO: 50757 - DNA, 22 bp, Homo sapiens
  source 1..22: mol_type = genomic DNA
tagaattctcgcctgccacgcg

SEQ ID NO: 50758 - DNA, 23 bp, Homo sapiens
  source 1..23: mol_type = genomic DNA
tagaattctcgcctgccacgcgg

SEQ ID NO: 50759 - DNA, 25 bp, Homo sapiens
  source 1..25: mol_type = genomic DNA
tagaattctcgcctgccacgcggga

SEQ ID NO: 50760 - DNA, 29 bp, Homo sapiens
  source 1..29: mol_type = genomic DNA
tagaattctcgcctgccacgcgggaggcc

SEQ ID NO: 50761 - DNA, 30 bp, Homo sapiens; identical to SEQ ID NO: 23652
  source 1..30: mol_type = genomic DNA

SEQ ID NO: 50762 - DNA, 32 bp, Homo sapiens; identical to SEQ ID NO: 23654
  source 1..32: mol_type = genomic DNA

SEQ ID NO: 50763 - DNA, 33 bp, Homo sapiens; identical to SEQ ID NO: 23655
  source 1..33: mol_type = genomic DNA

SEQ ID NO: 50764 - DNA, 34 bp, Homo sapiens; identical to SEQ ID NO: 23656
  source 1..34: mol_type = genomic DNA

SEQ ID NO: 50765 - DNA, 19 bp, Homo sapiens
  source 1..19: mol_type = genomic DNA
tagacgggctcacatcacc

SEQ ID NO: 50766 - DNA, 30 bp, Homo sapiens; identical to SEQ ID NO: 23674
  source 1..30: mol_type = genomic DNA

SEQ ID NO: 50767 - DNA, 31 bp, Homo sapiens; identical to SEQ ID NO: 23675
  source 1..31: mol_type = genomic DNA

SEQ ID NO: 50768 - DNA, 22 bp, Homo sapiens
  source 1..22: mol_type = genomic DNA
tagagcatgagactcttaatct

SEQ ID NO: 50769 - DNA, 30 bp, Homo sapiens; identical to SEQ ID NO: 23689
  source 1..30: mol_type = genomic DNA

SEQ ID NO: 50770 - DNA, 32 bp, Homo sapiens; identical to SEQ ID NO: 23691
  source 1..32: mol_type = genomic DNA

SEQ ID NO: 50771 - DNA, 33 bp, Homo sapiens; identical to SEQ ID NO: 23692
  source 1..33: mol_type = genomic DNA

SEQ ID NO: 50772 - DNA, 34 bp, Homo sapiens; identical to SEQ ID NO: 23693
  source 1..34: mol_type = genomic DNA

SEQ ID NO: 50773 - DNA, 35 bp, Homo sapiens; identical to SEQ ID NO: 23694
  source 1..35: mol_type = genomic DNA

SEQ ID NO: 50774 - DNA, 36 bp, Homo sapiens; identical to SEQ ID NO: 23695
  source 1..36: mol_type = genomic DNA

SEQ ID NO: 50775 - DNA, 37 bp, Homo sapiens; identical to SEQ ID NO: 23696
  source 1..37: mol_type = genomic DNA

SEQ ID NO: 50776 - DNA, 44 bp, Homo sapiens; identical to SEQ ID NO: 23699
  source 1..44: mol_type = genomic DNA

SEQ ID NO: 50777 - DNA, 21 bp, Homo sapiens
  source 1..21: mol_type = genomic DNA
tagagcatgggactcttaatc

SEQ ID NO: 50778 - DNA, 22 bp, Homo sapiens
  source 1..22: mol_type = genomic DNA
tagagcatgggactcttaatcc

SEQ ID NO: 50779 - DNA, 23 bp, Homo sapiens
  source 1..23: mol_type = genomic DNA
tagagcatgggactcttaatccc

SEQ ID NO: 50780 - DNA, 30 bp, Homo sapiens; identical to SEQ ID NO: 23708
  source 1..30: mol_type = genomic DNA

SEQ ID NO: 50781 - DNA, 31 bp, Homo sapiens; identical to SEQ ID NO: 23709
  source 1..31: mol_type = genomic DNA

SEQ ID NO: 50782 - DNA, 32 bp, Homo sapiens; identical to SEQ ID NO: 23710
  source 1..32: mol_type = genomic DNA

SEQ ID NO: 50783 - DNA, 33 bp, Homo sapiens; identical to SEQ ID NO: 23711
  source 1..33: mol_type = genomic DNA

SEQ ID NO: 50784 - DNA, 34 bp, Homo sapiens; identical to SEQ ID NO: 23712
  source 1..34: mol_type = genomic DNA

SEQ ID NO: 50785 - DNA, 35 bp, Homo sapiens; identical to SEQ ID NO: 23713
  source 1..35: mol_type = genomic DNA

SEQ ID NO: 50786 - DNA, 36 bp, Homo sapiens; identical to SEQ ID NO: 23714
  source 1..36: mol_type = genomic DNA

SEQ ID NO: 50787 - DNA, 38 bp, Homo sapiens; identical to SEQ ID NO: 23715
  source 1..38: mol_type = genomic DNA

SEQ ID NO: 50788 - DNA, 42 bp, Homo sapiens; identical to SEQ ID NO: 23716
  source 1..42: mol_type = genomic DNA

SEQ ID NO: 50789 - DNA, 44 bp, Homo sapiens; identical to SEQ ID NO: 23717
  source 1..44: mol_type = genomic DNA

SEQ ID NO: 50790 - DNA, 44 bp, Homo sapiens
  source 1..44: mol_type = genomic DNA
tagagcatgggactcttaatcccagggtcgtgggtttgagcccc

SEQ ID NO: 50791 - DNA, 16 bp, Homo sapiens
  source 1..16: mol_type = genomic DNA
tagagcatttgactgc

SEQ ID NO: 50792 - DNA, 36 bp, Homo sapiens; identical to SEQ ID NO: 23764
  source 1..36: mol_type = genomic DNA

SEQ ID NO: 50793 - DNA, 18 bp, Homo sapiens
  source 1..18: mol_type = genomic DNA
tagcactctggactctga

SEQ ID NO: 50794 - DNA, 19 bp, Homo sapiens
  source 1..19: mol_type = genomic DNA
tagcactctggactctgaa

SEQ ID NO: 50795 - DNA, 20 bp, Homo sapiens
  source 1..20: mol_type = genomic DNA
tagcactctggactctgaat

SEQ ID NO: 50796 - DNA, 21 bp, Homo sapiens
  source 1..21: mol_type = genomic DNA
tagcactctggactctgaatc

SEQ ID NO: 50797 - DNA, 22 bp, Homo sapiens
  source 1..22: mol_type = genomic DNA
tagcactctggactctgaatcc

SEQ ID NO: 50798 - DNA, 23 bp, Homo sapiens
  source 1..23: mol_type = genomic DNA
tagcactctggactctgaatcca

SEQ ID NO: 50799 - DNA, 24 bp, Homo sapiens
  source 1..24: mol_type = genomic DNA
tagcactctggactctgaatccag

SEQ ID NO: 50800 - DNA, 25 bp, Homo sapiens
  source 1..25: mol_type = genomic DNA
tagcactctggactctgaatccagc

SEQ ID NO: 50801 - DNA, 26 bp, Homo sapiens
  source 1..26: mol_type = genomic DNA
tagcactctggactctgaatccagcg

SEQ ID NO: 50802 - DNA, 33 bp, Homo sapiens; identical to SEQ ID NO: 23787
  source 1..33: mol_type = genomic DNA

SEQ ID NO: 50803 - DNA, 34 bp, Homo sapiens; identical to SEQ ID NO: 23788
  source 1..34: mol_type = genomic DNA

SEQ ID NO: 50804 - DNA, 36 bp, Homo sapiens; identical to SEQ ID NO: 23790
  source 1..36: mol_type = genomic DNA

SEQ ID NO: 50805 - DNA, 37 bp, Homo sapiens; identical to SEQ ID NO: 23791
  source 1..37: mol_type = genomic DNA

SEQ ID NO: 50806 - DNA, 45 bp, Homo sapiens; identical to SEQ ID NO: 23794
  source 1..45: mol_type = genomic DNA

SEQ ID NO: 50807 - DNA, 21 bp, Homo sapiens
  source 1..21: mol_type = genomic DNA
tagcactctggactttgaatc

SEQ ID NO: 50808 - DNA, 22 bp, Homo sapiens
  source 1..22: mol_type = genomic DNA
tagcactctggactttgaatcc

SEQ ID NO: 50809 - DNA, 36 bp, Homo sapiens; identical to SEQ ID NO: 23823
  source 1..36: mol_type = genomic DNA

SEQ ID NO: 50810 - DNA, 16 bp, Homo sapiens
  source 1..16: mol_type = genomic DNA
tagcggttaggattcc

SEQ ID NO: 50811 - DNA, 20 bp, Homo sapiens
  source 1..20: mol_type = genomic DNA
tagcggttaggattcctggt

SEQ ID NO: 50812 - DNA, 21 bp, Homo sapiens
  source 1..21: mol_type = genomic DNA
tagcggttaggattcctggtt

SEQ ID NO: 50813 - DNA, 22 bp, Homo sapiens
  source 1..22: mol_type = genomic DNA
tagcggttaggattcctggttt

SEQ ID NO: 50814 - DNA, 23 bp, Homo sapiens
  source 1..23: mol_type = genomic DNA
tagcggttaggattcctggtttt

SEQ ID NO: 50815 - DNA, 30 bp, Homo sapiens; identical to SEQ ID NO: 23856
  source 1..30: mol_type = genomic DNA

SEQ ID NO: 50816 - DNA, 19 bp, Homo sapiens
  source 1..19: mol_type = genomic DNA
tagcgtggccgagcggtct

SEQ ID NO: 50817 - DNA, 20 bp, Homo sapiens
  source 1..20: mol_type = genomic DNA
tagcgtggccgagcggtcta

SEQ ID NO: 50818 - DNA, 22 bp, Homo sapiens
  source 1..22: mol_type = genomic DNA
tagcgtggccgagcggtctaag

SEQ ID NO: 50819 - DNA, 24 bp, Homo sapiens
  source 1..24: mol_type = genomic DNA
tagcgtggccgagcggtctaaggc

SEQ ID NO: 50820 - DNA, 24 bp, Homo sapiens
  source 1..24: mol_type = genomic DNA
tagcgtggccgagtggtctaaggc

SEQ ID NO: 50821 - DNA, 26 bp, Homo sapiens
  source 1..26: mol_type = genomic DNA
tagctcaggggttagagcactggtct

SEQ ID NO: 50822 - DNA, 16 bp, Homo sapiens
  source 1..16: mol_type = genomic DNA
tagctcagtcggtaga

SEQ ID NO: 50823 - DNA, 17 bp, Homo sapiens
  source 1..17: mol_type = genomic DNA
tagctcagtcggtagag

SEQ ID NO: 50824 - DNA, 25 bp, Homo sapiens
  source 1..25: mol_type = genomic DNA
tagctcagtcggtagagcatcagac

SEQ ID NO: 50825 - DNA, 26 bp, Homo sapiens
  source 1..26: mol_type = genomic DNA
tagctcagtcggtagagcatcagact

SEQ ID NO: 50826 - DNA, 26 bp, Homo sapiens
  source 1..26: mol_type = genomic DNA
tagctcagtcggtagagcatgagact

SEQ ID NO: 50827 - DNA, 28 bp, Homo sapiens
  source 1..28: mol_type = genomic DNA
tagctcagtcggtagagcatgagactct

SEQ ID NO: 50828 - DNA, 23 bp, Homo sapiens
  source 1..23: mol_type = genomic DNA
tagctcagtcggtagagcatggg

SEQ ID NO: 50829 - DNA, 25 bp, Homo sapiens
  source 1..25: mol_type = genomic DNA
tagctcagtcggtagagcatgggac

SEQ ID NO: 50830 - DNA, 26 bp, Homo sapiens
  source 1..26: mol_type = genomic DNA
tagctcagtcggtagagcatgggact

SEQ ID NO: 50831 - DNA, 27 bp, Homo sapiens
  source 1..27: mol_type = genomic DNA
tagctcagtcggtagagcatgggactc

SEQ ID NO: 50832 - DNA, 28 bp, Homo sapiens
  source 1..28: mol_type = genomic DNA
tagctcagtcggtagagcatgggactct

SEQ ID NO: 50833 - DNA, 34 bp, Homo sapiens; identical to SEQ ID NO: 23927
  source 1..34: mol_type = genomic DNA

SEQ ID NO: 50834 - DNA, 28 bp, Homo sapiens
  source 1..28: mol_type = genomic DNA
tagctgttaactaagtgtttgtgggttt

SEQ ID NO: 50835 - DNA, 43 bp, Homo sapiens; identical to SEQ ID NO: 23962
  source 1..43: mol_type = genomic DNA

SEQ ID NO: 50836 - DNA, 44 bp, Homo sapiens; identical to SEQ ID NO: 23990
  source 1..44: mol_type = genomic DNA

SEQ ID NO: 50837 - DNA, 45 bp, Homo sapiens; identical to SEQ ID NO: 23991
  source 1..45: mol_type = genomic DNA

SEQ ID NO: 50838 - DNA, 25 bp, Homo sapiens
  source 1..25: mol_type = genomic DNA
taggagatttcaacttaacttgacc

SEQ ID NO: 50839 - DNA, 28 bp, Homo sapiens
  source 1..28: mol_type = genomic DNA
taggagatttcaacttaacttgaccgct

SEQ ID NO: 50840 - DNA, 30 bp, Homo sapiens; identical to SEQ ID NO: 24007
  source 1..30: mol_type = genomic DNA

SEQ ID NO: 50841 - DNA, 31 bp, Homo sapiens; identical to SEQ ID NO: 24008
  source 1..31: mol_type = genomic DNA

SEQ ID NO: 50842 - DNA, 32 bp, Homo sapiens; identical to SEQ ID NO: 24009
  source 1..32: mol_type = genomic DNA

SEQ ID NO: 50843 - DNA, 33 bp, Homo sapiens; identical to SEQ ID NO: 24010
  source 1..33: mol_type = genomic DNA

SEQ ID NO: 50844 - DNA, 34 bp, Homo sapiens; identical to SEQ ID NO: 24011
  source 1..34: mol_type = genomic DNA

SEQ ID NO: 50845 - DNA, 35 bp, Homo sapiens; identical to SEQ ID NO: 24012
  source 1..35: mol_type = genomic DNA

SEQ ID NO: 50846 - DNA, 17 bp, Homo sapiens
  source 1..17: mol_type = genomic DNA
taggagcttaaaccccc

SEQ ID NO: 50847 - DNA, 28 bp, Homo sapiens
  source 1..28: mol_type = genomic DNA
taggagcttaaacccccttatttctacc

SEQ ID NO: 50848 - DNA, 29 bp, Homo sapiens
  source 1..29: mol_type = genomic DNA
taggagcttaaacccccttatttctacca

SEQ ID NO: 50849 - DNA, 16 bp, Homo sapiens
  source 1..16: mol_type = genomic DNA
taggatggggtgtgat

SEQ ID NO: 50850 - DNA, 17 bp, Homo sapiens
  source 1..17: mol_type = genomic DNA
taggatggggtgtgata

SEQ ID NO: 50851 - DNA, 19 bp, Homo sapiens
  source 1..19: mol_type = genomic DNA
taggatggggtgtgatagg

SEQ ID NO: 50852 - DNA, 20 bp, Homo sapiens
  source 1..20: mol_type = genomic DNA
taggatggggtgtgataggt

SEQ ID NO: 50853 - DNA, 21 bp, Homo sapiens
  source 1..21: mol_type = genomic DNA
taggatggggtgtgataggtg

SEQ ID NO: 50854 - DNA, 22 bp, Homo sapiens
  source 1..22: mol_type = genomic DNA
taggatggggtgtgataggtgg

SEQ ID NO: 50855 - DNA, 23 bp, Homo sapiens
  source 1..23: mol_type = genomic DNA
taggatggggtgtgataggtggc

SEQ ID NO: 50856 - DNA, 24 bp, Homo sapiens
  source 1..24: mol_type = genomic DNA
taggatggggtgtgataggtggca

SEQ ID NO: 50857 - DNA, 25 bp, Homo sapiens
  source 1..25: mol_type = genomic DNA
taggatggggtgtgataggtggcac

SEQ ID NO: 50858 - DNA, 26 bp, Homo sapiens
  source 1..26: mol_type = genomic DNA
taggatggggtgtgataggtggcacg

SEQ ID NO: 50859 - DNA, 27 bp, Homo sapiens
  source 1..27: mol_type = genomic DNA
taggatggggtgtgataggtggcacgg

SEQ ID NO: 50860 - DNA, 28 bp, Homo sapiens
  source 1..28: mol_type = genomic DNA
taggatggggtgtgataggtggcacgga

SEQ ID NO: 50861 - DNA, 29 bp, Homo sapiens
  source 1..29: mol_type = genomic DNA
taggatggggtgtgataggtggcacggag

SEQ ID NO: 50862 - DNA, 30 bp, Homo sapiens; identical to SEQ ID NO: 24039
  source 1..30: mol_type = genomic DNA

SEQ ID NO: 50863 - DNA, 31 bp, Homo sapiens; identical to SEQ ID NO: 24040
  source 1..31: mol_type = genomic DNA

SEQ ID NO: 50864 - DNA, 32 bp, Homo sapiens; identical to SEQ ID NO: 24041
  source 1..32: mol_type = genomic DNA

SEQ ID NO: 50865 - DNA, 33 bp, Homo sapiens; identical to SEQ ID NO: 24042
  source 1..33: mol_type = genomic DNA

SEQ ID NO: 50866 - DNA, 34 bp, Homo sapiens; identical to SEQ ID NO: 24043
  source 1..34: mol_type = genomic DNA

SEQ ID NO: 50867 - DNA, 35 bp, Homo sapiens; identical to SEQ ID NO: 24044
  source 1..35: mol_type = genomic DNA

SEQ ID NO: 50868 - DNA, 36 bp, Homo sapiens; identical to SEQ ID NO: 24045
  source 1..36: mol_type = genomic DNA

SEQ ID NO: 50869 - DNA, 37 bp, Homo sapiens; identical to SEQ ID NO: 24046
  source 1..37: mol_type = genomic DNA

SEQ ID NO: 50870 - DNA, 38 bp, Homo sapiens; identical to SEQ ID NO: 24047
  source 1..38: mol_type = genomic DNA

SEQ ID NO: 50871 - DNA, 41 bp, Homo sapiens; identical to SEQ ID NO: 24050
  source 1..41: mol_type = genomic DNA

SEQ ID NO: 50872 - DNA, 42 bp, Homo sapiens; identical to SEQ ID NO: 24051
  source 1..42: mol_type = genomic DNA

SEQ ID NO: 50873 - DNA, 43 bp, Homo sapiens; identical to SEQ ID NO: 24052
  source 1..43: mol_type = genomic DNA

SEQ ID NO: 50874 - DNA, 44 bp, Homo sapiens; identical to SEQ ID NO: 24053
  source 1..44: mol_type = genomic DNA

SEQ ID NO: 50875 - DNA, 24 bp, Homo sapiens
  source 1..24: mol_type = genomic DNA
taggattcctggttttcacccagg

SEQ ID NO: 50876 - DNA, 29 bp, Homo sapiens
  source 1..29: mol_type = genomic DNA
taggattcctggttttcacccaggcggcc

SEQ ID NO: 50877 - DNA, 47 bp, Homo sapiens; identical to SEQ ID NO: 24063
  source 1..47: mol_type = genomic DNA

SEQ ID NO: 50878 - DNA, 26 bp, Homo sapiens
  source 1..26: mol_type = genomic DNA
taggattcctggttttcacccaggtg

SEQ ID NO: 50879 - DNA, 47 bp, Homo sapiens; identical to SEQ ID NO: 40513
  source 1..47: mol_type = genomic DNA

SEQ ID NO: 50880 - DNA, 16 bp, Homo sapiens
  source 1..16: mol_type = genomic DNA
taggattcggcgctct

SEQ ID NO: 50881 - DNA, 17 bp, Homo sapiens
  source 1..17: mol_type = genomic DNA
taggattcggcgctctc

SEQ ID NO: 50882 - DNA, 20 bp, Homo sapiens
  source 1..20: mol_type = genomic DNA
taggattcggcgctctcacc

SEQ ID NO: 50883 - DNA, 21 bp, Homo sapiens
  source 1..21: mol_type = genomic DNA
taggattcggcgctctcaccg

SEQ ID NO: 50884 - DNA, 23 bp, Homo sapiens
  source 1..23: mol_type = genomic DNA
taggattcggcgctctcaccgcc

SEQ ID NO: 50885 - DNA, 29 bp, Homo sapiens
  source 1..29: mol_type = genomic DNA
taggattcggcgctctcaccgccgcggcc

SEQ ID NO: 50886 - DNA, 36 bp, Homo sapiens; identical to SEQ ID NO: 24084
  source 1..36: mol_type = genomic DNA

SEQ ID NO: 50887 - DNA, 16 bp, Homo sapiens
  source 1..16: mol_type = genomic DNA
taggggtatgattctc

SEQ ID NO: 50888 - DNA, 18 bp, Homo sapiens
  source 1..18: mol_type = genomic DNA
taggggtatgattctcgc

SEQ ID NO: 50889 - DNA, 19 bp, Homo sapiens
  source 1..19: mol_type = genomic DNA
taggggtatgattctcgct

SEQ ID NO: 50890 - DNA, 20 bp, Homo sapiens
  source 1..20: mol_type = genomic DNA
taggggtatgattctcgctt

SEQ ID NO: 50891 - DNA, 18 bp, Homo sapiens
  source 1..18: mol_type = genomic DNA
taggggtatgattctcgg

SEQ ID NO: 50892 - DNA, 19 bp, Homo sapiens
  source 1..19: mol_type = genomic DNA
taggggtatgattctcggt

SEQ ID NO: 50893 - DNA, 18 bp, Homo sapiens
  source 1..18: mol_type = genomic DNA
taggtagcgcatcagtct

SEQ ID NO: 50894 - DNA, 32 bp, Homo sapiens; identical to SEQ ID NO: 24135
  source 1..32: mol_type = genomic DNA

SEQ ID NO: 50895 - DNA, 33 bp, Homo sapiens; identical to SEQ ID NO: 24136
  source 1..33: mol_type = genomic DNA

SEQ ID NO: 50896 - DNA, 33 bp, Homo sapiens; identical to SEQ ID NO: 24144
  source 1..33: mol_type = genomic DNA

SEQ ID NO: 50897 - DNA, 34 bp, Homo sapiens
  source 1..34: mol_type = genomic DNA
taggtcgctggttcgattccggctcgaaggacca

SEQ ID NO: 50898 - DNA, 16 bp, Homo sapiens
  source 1..16: mol_type = genomic DNA
taggtggcacggagaa

SEQ ID NO: 50899 - DNA, 20 bp, Homo sapiens
  source 1..20: mol_type = genomic DNA
taggtggcacggagaatttt

SEQ ID NO: 50900 - DNA, 24 bp, Homo sapiens
  source 1..24: mol_type = genomic DNA
taggttcgactcctggctggctcg

SEQ ID NO: 50901 - DNA, 26 bp, Homo sapiens
  source 1..26: mol_type = genomic DNA
taggttcgactcctggctggctcgcc

SEQ ID NO: 50902 - DNA, 27 bp, Homo sapiens
  source 1..27: mol_type = genomic DNA
taggttcgactcctggctggctcgcca

SEQ ID NO: 50903 - DNA, 39 bp, Homo sapiens
  source 1..39: mol_type = genomic DNA
tagtaccgttaacttccaattaactagttttgacaacat

SEQ ID NO: 50904 - DNA, 17 bp, Homo sapiens
  source 1..17: mol_type = genomic DNA
tagtccgtgcgagaata

SEQ ID NO: 50905 - DNA, 19 bp, Homo sapiens
  source 1..19: mol_type = genomic DNA
tagtccgtgcgagaatacc

SEQ ID NO: 50906 - DNA, 20 bp, Homo sapiens
  source 1..20: mol_type = genomic DNA
tagtccgtgcgagaatacca

SEQ ID NO: 50907 - DNA, 22 bp, Homo sapiens
  source 1..22: mol_type = genomic DNA
tagtcgtggccgagtggttaag

SEQ ID NO: 50908 - DNA, 18 bp, Homo sapiens
  source 1..18: mol_type = genomic DNA
tagtggtagaattctcgc

SEQ ID NO: 50909 - DNA, 19 bp, Homo sapiens
  source 1..19: mol_type = genomic DNA
tagtggtagaattctcgcc

SEQ ID NO: 50910 - DNA, 20 bp, Homo sapiens
  source 1..20: mol_type = genomic DNA
tagtggtagaattctcgcct

SEQ ID NO: 50911 - DNA, 17 bp, Homo sapiens
  source 1..17: mol_type = genomic DNA
tagtggtatcatgcaag

SEQ ID NO: 50912 - DNA, 18 bp, Homo sapiens
  source 1..18: mol_type = genomic DNA
tagtggtatcatgcaaga

SEQ ID NO: 50913 - DNA, 19 bp, Homo sapiens
  source 1..19: mol_type = genomic DNA
tagtggtatcatgcaagat

SEQ ID NO: 50914 - DNA, 20 bp, Homo sapiens
  source 1..20: mol_type = genomic DNA
tagtggtatcatgcaagatt

SEQ ID NO: 50915 - DNA, 19 bp, Homo sapiens
  source 1..19: mol_type = genomic DNA
tagtggtatgattctcgct

SEQ ID NO: 50916 - DNA, 20 bp, Homo sapiens
  source 1..20: mol_type = genomic DNA
tagtggtatgattctcgctt

SEQ ID NO: 50917 - DNA, 21 bp, Homo sapiens
  source 1..21: mol_type = genomic DNA
tagtggtcatcacgttcgcct

SEQ ID NO: 50918 - DNA, 19 bp, Homo sapiens
  source 1..19: mol_type = genomic DNA
tagtggtgagtatccccgc

SEQ ID NO: 50919 - DNA, 21 bp, Homo sapiens
  source 1..21: mol_type = genomic DNA
tagtggtgagtatccccgcct

SEQ ID NO: 50920 - DNA, 24 bp, Homo sapiens
  source 1..24: mol_type = genomic DNA
tagtggtgagtatccccgcctgtc

SEQ ID NO: 50921 - DNA, 26 bp, Homo sapiens
  source 1..26: mol_type = genomic DNA
tagtggtgagtatccccgcctgtcac

SEQ ID NO: 50922 - DNA, 28 bp, Homo sapiens
  source 1..28: mol_type = genomic DNA
tagtggtgagtatccccgcctgtcacgc

SEQ ID NO: 50923 - DNA, 34 bp, Homo sapiens
  source 1..34: mol_type = genomic DNA
tagtggtgagtatccccgcctgtcacgcgggaga

SEQ ID NO: 50924 - DNA, 16 bp, Homo sapiens
  source 1..16: mol_type = genomic DNA
tagtggttaggattcg

SEQ ID NO: 50925 - DNA, 17 bp, Homo sapiens
  source 1..17: mol_type = genomic DNA
tagtggttaggattcgg

SEQ ID NO: 50926 - DNA, 18 bp, Homo sapiens
  source 1..18: mol_type = genomic DNA
tagtggttaggattcggc

SEQ ID NO: 50927 - DNA, 19 bp, Homo sapiens
  source 1..19: mol_type = genomic DNA
tagtggttaggattcggcg

SEQ ID NO: 50928 - DNA, 20 bp, Homo sapiens
  source 1..20: mol_type = genomic DNA
tagtggttaggattcggcgc

SEQ ID NO: 50929 - DNA, 21 bp, Homo sapiens
  source 1..21: mol_type = genomic DNA
tagtggttaggattcggcgct

SEQ ID NO: 50930 - DNA, 22 bp, Homo sapiens
  source 1..22: mol_type = genomic DNA
tagtggttaggattcggcgctc

SEQ ID NO: 50931 - DNA, 23 bp, Homo sapiens
  source 1..23: mol_type = genomic DNA
tagtggttaggattcggcgctct

SEQ ID NO: 50932 - DNA, 27 bp, Homo sapiens
  source 1..27: mol_type = genomic DNA
tagtggttaggattcggcgctctcacc

SEQ ID NO: 50933 - DNA, 29 bp, Homo sapiens
  source 1..29: mol_type = genomic DNA
tagtggttaggattcggcgctctcaccgc

SEQ ID NO: 50934 - DNA, 30 bp, Homo sapiens; identical to SEQ ID NO: 24258
  source 1..30: mol_type = genomic DNA

SEQ ID NO: 50935 - DNA, 35 bp, Homo sapiens; identical to SEQ ID NO: 24260
  source 1..35: mol_type = genomic DNA

SEQ ID NO: 50936 - DNA, 37 bp, Homo sapiens; identical to SEQ ID NO: 24261
  source 1..37: mol_type = genomic DNA

SEQ ID NO: 50937 - DNA, 41 bp, Homo sapiens; identical to SEQ ID NO: 24265
  source 1..41: mol_type = genomic DNA

SEQ ID NO: 50938 - DNA, 16 bp, Homo sapiens
  source 1..16: mol_type = genomic DNA
tagtggttagtactct

SEQ ID NO: 50939 - DNA, 17 bp, Homo sapiens
  source 1..17: mol_type = genomic DNA
tagtggttagtactctg

SEQ ID NO: 50940 - DNA, 18 bp, Homo sapiens
  source 1..18: mol_type = genomic DNA
tagtggttagtactctgc

SEQ ID NO: 50941 - DNA, 19 bp, Homo sapiens
  source 1..19: mol_type = genomic DNA
tagtggttagtactctgcg

SEQ ID NO: 50942 - DNA, 20 bp, Homo sapiens
  source 1..20: mol_type = genomic DNA
tagtggttagtactctgcgt

SEQ ID NO: 50943 - DNA, 21 bp, Homo sapiens
  source 1..21: mol_type = genomic DNA
tagtggttagtactctgcgtt

SEQ ID NO: 50944 - DNA, 22 bp, Homo sapiens
  source 1..22: mol_type = genomic DNA
tagtggttagtactctgcgttg

SEQ ID NO: 50945 - DNA, 23 bp, Homo sapiens
  source 1..23: mol_type = genomic DNA
tagtggttagtactctgcgttgt

SEQ ID NO: 50946 - DNA, 24 bp, Homo sapiens
  source 1..24: mol_type = genomic DNA
tagtggttagtactctgcgttgtg

SEQ ID NO: 50947 - DNA, 27 bp, Homo sapiens
  source 1..27: mol_type = genomic DNA
tagtggttagtactctgcgttgtggcc

SEQ ID NO: 50948 - DNA, 32 bp, Homo sapiens; identical to SEQ ID NO: 24283
  source 1..32: mol_type = genomic DNA

SEQ ID NO: 50949 - DNA, 33 bp, Homo sapiens; identical to SEQ ID NO: 24284
  source 1..33: mol_type = genomic DNA

SEQ ID NO: 50950 - DNA, 34 bp, Homo sapiens; identical to SEQ ID NO: 24285
  source 1..34: mol_type = genomic DNA

SEQ ID NO: 50951 - DNA, 36 bp, Homo sapiens; identical to SEQ ID NO: 24286
  source 1..36: mol_type = genomic DNA

SEQ ID NO: 50952 - DNA, 37 bp, Homo sapiens; identical to SEQ ID NO: 24287
  source 1..37: mol_type = genomic DNA

SEQ ID NO: 50953 - DNA, 20 bp, Homo sapiens
  source 1..20: mol_type = genomic DNA
tagtggttatcacgtctgct

SEQ ID NO: 50954 - DNA, 21 bp, Homo sapiens
  source 1..21: mol_type = genomic DNA
tagtggttatcacgtctgctt

SEQ ID NO: 50955 - DNA, 22 bp, Homo sapiens
  source 1..22: mol_type = genomic DNA
tagtggttatcacgtctgcttt

SEQ ID NO: 50956 - DNA, 20 bp, Homo sapiens
  source 1..20: mol_type = genomic DNA
tagtggttatcacgttcgcc

SEQ ID NO: 50957 - DNA, 21 bp, Homo sapiens
  source 1..21: mol_type = genomic DNA
tagtggttatcacgttcgcct

SEQ ID NO: 50958 - DNA, 28 bp, Homo sapiens
  source 1..28: mol_type = genomic DNA
tagtggttatcacgttcgcctcacacgc

SEQ ID NO: 50959 - DNA, 26 bp, Homo sapiens
  source 1..26: mol_type = genomic DNA
tagtgtagcggttatcacgtctgctt

SEQ ID NO: 50960 - DNA, 16 bp, Homo sapiens
  source 1..16: mol_type = genomic DNA
tagtgtagtggtcatc

SEQ ID NO: 50961 - DNA, 25 bp, Homo sapiens
  source 1..25: mol_type = genomic DNA
tagtgtagtggtcatcacgttcgcc

SEQ ID NO: 50962 - DNA, 26 bp, Homo sapiens
  source 1..26: mol_type = genomic DNA
tagtgtagtggtcatcacgttcgcct

SEQ ID NO: 50963 - DNA, 16 bp, Homo sapiens
  source 1..16: mol_type = genomic DNA
tagtgtagtggttatc

SEQ ID NO: 50964 - DNA, 26 bp, Homo sapiens
  source 1..26: mol_type = genomic DNA
tagtgtagtggttatcacgtctgctt

SEQ ID NO: 50965 - DNA, 27 bp, Homo sapiens
  source 1..27: mol_type = genomic DNA
tagtgtagtggttatcacgtctgcttt

SEQ ID NO: 50966 - DNA, 28 bp, Homo sapiens
  source 1..28: mol_type = genomic DNA
tagtgtagtggttatcacgtctgcttta

SEQ ID NO: 50967 - DNA, 25 bp, Homo sapiens
  source 1..25: mol_type = genomic DNA
tagtgtagtggttatcacgttcgcc

SEQ ID NO: 50968 - DNA, 26 bp, Homo sapiens
  source 1..26: mol_type = genomic DNA
tagtgtagtggttatcacgttcgcct

SEQ ID NO: 50969 - DNA, 29 bp, Homo sapiens
  source 1..29: mol_type = genomic DNA
tagtgtagtggttatcacgttcgcctcac

SEQ ID NO: 50970 - DNA, 30 bp, Homo sapiens; identical to SEQ ID NO: 24367
  source 1..30: mol_type = genomic DNA

SEQ ID NO: 50971 - DNA, 23 bp, Homo sapiens
  source 1..23: mol_type = genomic DNA
tataatgccgaggttgtgagttc

SEQ ID NO: 50972 - DNA, 18 bp, Homo sapiens
  source 1..18: mol_type = genomic DNA
tatacccttcccgtacta

SEQ ID NO: 50973 - DNA, 21 bp, Homo sapiens
  source 1..21: mol_type = genomic DNA
tatacccttcccgtactacca

SEQ ID NO: 50974 - DNA, 23 bp, Homo sapiens
  source 1..23: mol_type = genomic DNA
tatagtggtgagtatccccgcct

SEQ ID NO: 50975 - DNA, 17 bp, Homo sapiens
  source 1..17: mol_type = genomic DNA
tatagtggttagtactc

SEQ ID NO: 50976 - DNA, 18 bp, Homo sapiens
  source 1..18: mol_type = genomic DNA
tatagtggttagtactct

SEQ ID NO: 50977 - DNA, 20 bp, Homo sapiens
  source 1..20: mol_type = genomic DNA
tatagtggttagtactctgc

SEQ ID NO: 50978 - DNA, 21 bp, Homo sapiens
  source 1..21: mol_type = genomic DNA
tatagtggttagtactctgcg

SEQ ID NO: 50979 - DNA, 22 bp, Homo sapiens
  source 1..22: mol_type = genomic DNA
tatagtggttagtactctgcgt

SEQ ID NO: 50980 - DNA, 23 bp, Homo sapiens
  source 1..23: mol_type = genomic DNA
tatagtggttagtactctgcgtt

SEQ ID NO: 50981 - DNA, 25 bp, Homo sapiens
  source 1..25: mol_type = genomic DNA
tatagtggttagtactctgcgttgt

SEQ ID NO: 50982 - DNA, 26 bp, Homo sapiens
  source 1..26: mol_type = genomic DNA
tatagtggttagtactctgcgttgtg

SEQ ID NO: 50983 - DNA, 29 bp, Homo sapiens
  source 1..29: mol_type = genomic DNA
tatagtggttagtactctgcgttgtggcc

SEQ ID NO: 50984 - DNA, 39 bp, Homo sapiens; identical to SEQ ID NO: 24436
  source 1..39: mol_type = genomic DNA

SEQ ID NO: 50985 - DNA, 25 bp, Homo sapiens
  source 1..25: mol_type = genomic DNA
tatcattggtcgtggttgtagtccg

SEQ ID NO: 50986 - DNA, 26 bp, Homo sapiens
  source 1..26: mol_type = genomic DNA
tatcattggtcgtggttgtagtccgt

SEQ ID NO: 50987 - DNA, 27 bp, Homo sapiens
  source 1..27: mol_type = genomic DNA
tatcattggtcgtggttgtagtccgtg

SEQ ID NO: 50988 - DNA, 29 bp, Homo sapiens
  source 1..29: mol_type = genomic DNA
tatcattggtcgtggttgtagtccgtgcg

SEQ ID NO: 50989 - DNA, 31 bp, Homo sapiens; identical to SEQ ID NO: 24472
  source 1..31: mol_type = genomic DNA

SEQ ID NO: 50990 - DNA, 32 bp, Homo sapiens; identical to SEQ ID NO: 24473
  source 1..32: mol_type = genomic DNA

SEQ ID NO: 50991 - DNA, 33 bp, Homo sapiens; identical to SEQ ID NO: 24474
  source 1..33: mol_type = genomic DNA

SEQ ID NO: 50992 - DNA, 34 bp, Homo sapiens; identical to SEQ ID NO: 24475
  source 1..34: mol_type = genomic DNA

SEQ ID NO: 50993 - DNA, 35 bp, Homo sapiens; identical to SEQ ID NO: 24476
  source 1..35: mol_type = genomic DNA

SEQ ID NO: 50994 - DNA, 37 bp, Homo sapiens; identical to SEQ ID NO: 24478
  source 1..37: mol_type = genomic DNA

SEQ ID NO: 50995 - DNA, 38 bp, Homo sapiens; identical to SEQ ID NO: 24479
  source 1..38: mol_type = genomic DNA

SEQ ID NO: 50996 - DNA, 34 bp, Homo sapiens; identical to SEQ ID NO: 24530
  source 1..34: mol_type = genomic DNA

SEQ ID NO: 50997 - DNA, 35 bp, Homo sapiens; identical to SEQ ID NO: 24531
  source 1..35: mol_type = genomic DNA

SEQ ID NO: 50998 - DNA, 36 bp, Homo sapiens; identical to SEQ ID NO: 24532
  source 1..36: mol_type = genomic DNA

SEQ ID NO: 50999 - DNA, 37 bp, Homo sapiens
  source 1..37: mol_type = genomic DNA
tatgaggccccgggttcaatccccggcatctccacca

SEQ ID NO: 51000 - DNA, 33 bp, Homo sapiens; identical to SEQ ID NO: 40649
  source 1..33: mol_type = genomic DNA

SEQ ID NO: 51001 - DNA, 34 bp, Homo sapiens; identical to SEQ ID NO: 40650
  source 1..34: mol_type = genomic DNA

SEQ ID NO: 51002 - DNA, 35 bp, Homo sapiens; identical to SEQ ID NO: 24534
  source 1..35: mol_type = genomic DNA

SEQ ID NO: 51003 - DNA, 36 bp, Homo sapiens; identical to SEQ ID NO: 24535
  source 1..36: mol_type = genomic DNA

SEQ ID NO: 51004 - DNA, 37 bp, Homo sapiens; identical to SEQ ID NO: 24536
  source 1..37: mol_type = genomic DNA

SEQ ID NO: 51005 - DNA, 33 bp, Homo sapiens; identical to SEQ ID NO: 40653
  source 1..33: mol_type = genomic DNA

SEQ ID NO: 51006 - DNA, 34 bp, Homo sapiens; identical to SEQ ID NO: 40654
  source 1..34: mol_type = genomic DNA

SEQ ID NO: 51007 - DNA, 35 bp, Homo sapiens; identical to SEQ ID NO: 24537
  source 1..35: mol_type = genomic DNA

SEQ ID NO: 51008 - DNA, 36 bp, Homo sapiens; identical to SEQ ID NO: 24538
  source 1..36: mol_type = genomic DNA

SEQ ID NO: 51009 - DNA, 22 bp, Homo sapiens
  source 1..22: mol_type = genomic DNA
tatgattctcggtttgggtccg

SEQ ID NO: 51010 - DNA, 24 bp, Homo sapiens
  source 1..24: mol_type = genomic DNA
tatggtctagcggttaggattcct

SEQ ID NO: 51011 - DNA, 28 bp, Homo sapiens
  source 1..28: mol_type = genomic DNA
tatggtctagcggttaggattcctggtt

SEQ ID NO: 51012 - DNA, 46 bp, Homo sapiens; identical to SEQ ID NO: 24605
  source 1..46: mol_type = genomic DNA

SEQ ID NO: 51013 - DNA, 47 bp, Homo sapiens; identical to SEQ ID NO: 24606
  source 1..47: mol_type = genomic DNA

SEQ ID NO: 51014 - DNA, 16 bp, Homo sapiens
  source 1..16: mol_type = genomic DNA
tcaaacctgccggggc

SEQ ID NO: 51015 - DNA, 17 bp, Homo sapiens
  source 1..17: mol_type = genomic DNA
tcaaacctgccggggct

SEQ ID NO: 51016 - DNA, 18 bp, Homo sapiens
  source 1..18: mol_type = genomic DNA
tcaaacctgccggggctt

SEQ ID NO: 51017 - DNA, 20 bp, Homo sapiens
  source 1..20: mol_type = genomic DNA
tcaaacctgccggggcttcc

SEQ ID NO: 51018 - DNA, 21 bp, Homo sapiens
  source 1..21: mol_type = genomic DNA
tcaaacctgccggggcttcca

SEQ ID NO: 51019 - DNA, 33 bp, Homo sapiens; identical to SEQ ID NO: 24641
  source 1..33: mol_type = genomic DNA

SEQ ID NO: 51020 - DNA, 35 bp, Homo sapiens; identical to SEQ ID NO: 24643
  source 1..35: mol_type = genomic DNA

SEQ ID NO: 51021 - DNA, 36 bp, Homo sapiens; identical to SEQ ID NO: 24644
  source 1..36: mol_type = genomic DNA

SEQ ID NO: 51022 - DNA, 37 bp, Homo sapiens; identical to SEQ ID NO: 24645
  source 1..37: mol_type = genomic DNA

SEQ ID NO: 51023 - DNA, 35 bp, Homo sapiens; identical to SEQ ID NO: 24646
  source 1..35: mol_type = genomic DNA

SEQ ID NO: 51024 - DNA, 36 bp, Homo sapiens; identical to SEQ ID NO: 24647
  source 1..36: mol_type = genomic DNA

SEQ ID NO: 51025 - DNA, 37 bp, Homo sapiens; identical to SEQ ID NO: 24648
  source 1..37: mol_type = genomic DNA

SEQ ID NO: 51026 - DNA, 36 bp, Homo sapiens; identical to SEQ ID NO: 24650
  source 1..36: mol_type = genomic DNA

SEQ ID NO: 51027 - DNA, 37 bp, Homo sapiens; identical to SEQ ID NO: 24651
  source 1..37: mol_type = genomic DNA

SEQ ID NO: 51028 - DNA, 20 bp, Homo sapiens
  source 1..20: mol_type = genomic DNA
tcaaagttaaattataggct

SEQ ID NO: 51029 - DNA, 21 bp, Homo sapiens
  source 1..21: mol_type = genomic DNA
tcaaatcacgtcggggtcacc

SEQ ID NO: 51030 - DNA, 22 bp, Homo sapiens
  source 1..22: mol_type = genomic DNA
tcaaatcacgtcggggtcacca

SEQ ID NO: 51031 - DNA, 18 bp, Homo sapiens
  source 1..18: mol_type = genomic DNA
tcaaatcccggacgagcc

SEQ ID NO: 51032 - DNA, 19 bp, Homo sapiens
  source 1..19: mol_type = genomic DNA
tcaaatcccggacgagccc

SEQ ID NO: 51033 - DNA, 20 bp, Homo sapiens
  source 1..20: mol_type = genomic DNA
tcaaatcccggacgagcccc

SEQ ID NO: 51034 - DNA, 21 bp, Homo sapiens
  source 1..21: mol_type = genomic DNA
tcaaatcccggacgagccccc

SEQ ID NO: 51035 - DNA, 22 bp, Homo sapiens
  source 1..22: mol_type = genomic DNA
tcaaatcccggacgagccccca

SEQ ID NO: 51036 - DNA, 22 bp, Homo sapiens
  source 1..22: mol_type = genomic DNA
tcaaatccgggtgccccctcca

SEQ ID NO: 51037 - DNA, 19 bp, Homo sapiens
  source 1..19: mol_type = genomic DNA
tcaaatctcgctggggcct

SEQ ID NO: 51038 - DNA, 20 bp, Homo sapiens
  source 1..20: mol_type = genomic DNA
tcaaatctcgctggggcctc

SEQ ID NO: 51039 - DNA, 21 bp, Homo sapiens
  source 1..21: mol_type = genomic DNA
tcaaatctcgctggggcctcc

SEQ ID NO: 51040 - DNA, 22 bp, Homo sapiens
  source 1..22: mol_type = genomic DNA
tcaaatctcgctggggcctcca

SEQ ID NO: 51041 - DNA, 18 bp, Homo sapiens
  source 1..18: mol_type = genomic DNA
tcaaatctcggtggaacc

SEQ ID NO: 51042 - DNA, 19 bp, Homo sapiens
  source 1..19: mol_type = genomic DNA
tcaaatctcggtggaacct

SEQ ID NO: 51043 - DNA, 20 bp, Homo sapiens
  source 1..20: mol_type = genomic DNA
tcaaatctcggtggaacctc

SEQ ID NO: 51044 - DNA, 21 bp, Homo sapiens
  source 1..21: mol_type = genomic DNA
tcaaatctcggtggaacctcc

SEQ ID NO: 51045 - DNA, 22 bp, Homo sapiens
  source 1..22: mol_type = genomic DNA
tcaaatctcggtggaacctcca

SEQ ID NO: 51046 - DNA, 19 bp, Homo sapiens
  source 1..19: mol_type = genomic DNA
tcaaatctcggtgggacct

SEQ ID NO: 51047 - DNA, 20 bp, Homo sapiens
  source 1..20: mol_type = genomic DNA
tcaaatctcggtgggacctc

SEQ ID NO: 51048 - DNA, 21 bp, Homo sapiens
  source 1..21: mol_type = genomic DNA
tcaaatctcggtgggacctcc

SEQ ID NO: 51049 - DNA, 19 bp, Homo sapiens
  source 1..19: mol_type = genomic DNA
tcaacttaacttgaccgct

SEQ ID NO: 51050 - DNA, 20 bp, Homo sapiens
  source 1..20: mol_type = genomic DNA
tcaacttaacttgaccgctc

SEQ ID NO: 51051 - DNA, 22 bp, Homo sapiens
  source 1..22: mol_type = genomic DNA
tcaacttaacttgaccgctctg

SEQ ID NO: 51052 - DNA, 23 bp, Homo sapiens
  source 1..23: mol_type = genomic DNA
tcaacttaacttgaccgctctga

SEQ ID NO: 51053 - DNA, 24 bp, Homo sapiens
  source 1..24: mol_type = genomic DNA
tcaacttaacttgaccgctctgac

SEQ ID NO: 51054 - DNA, 25 bp, Homo sapiens
  source 1..25: mol_type = genomic DNA
tcaacttaacttgaccgctctgacc

SEQ ID NO: 51055 - DNA, 26 bp, Homo sapiens
  source 1..26: mol_type = genomic DNA
tcaacttaacttgaccgctctgacca

SEQ ID NO: 51056 - DNA, 33 bp, Homo sapiens; identical to SEQ ID NO: 40727
  source 1..33: mol_type = genomic DNA

SEQ ID NO: 51057 - DNA, 34 bp, Homo sapiens; identical to SEQ ID NO: 40728
  source 1..34: mol_type = genomic DNA

SEQ ID NO: 51058 - DNA, 35 bp, Homo sapiens; identical to SEQ ID NO: 24715
  source 1..35: mol_type = genomic DNA

SEQ ID NO: 51059 - DNA, 36 bp, Homo sapiens; identical to SEQ ID NO: 24716
  source 1..36: mol_type = genomic DNA

SEQ ID NO: 51060 - DNA, 37 bp, Homo sapiens; identical to SEQ ID NO: 24717
  source 1..37: mol_type = genomic DNA

SEQ ID NO: 51061 - DNA, 36 bp, Homo sapiens; identical to SEQ ID NO: 24720
  source 1..36: mol_type = genomic DNA

SEQ ID NO: 51062 - DNA, 37 bp, Homo sapiens; identical to SEQ ID NO: 24721
  source 1..37: mol_type = genomic DNA

SEQ ID NO: 51063 - DNA, 35 bp, Homo sapiens; identical to SEQ ID NO: 24722
  source 1..35: mol_type = genomic DNA

SEQ ID NO: 51064 - DNA, 36 bp, Homo sapiens; identical to SEQ ID NO: 24723
  source 1..36: mol_type = genomic DNA

SEQ ID NO: 51065 - DNA, 37 bp, Homo sapiens; identical to SEQ ID NO: 24724
  source 1..37: mol_type = genomic DNA

SEQ ID NO: 51066 - DNA, 21 bp, Homo sapiens
  source 1..21: mol_type = genomic DNA
tcaagtcacgtcggggtcacc

SEQ ID NO: 51067 - DNA, 22 bp, Homo sapiens
  source 1..22: mol_type = genomic DNA
tcaagtcacgtcggggtcacca

SEQ ID NO: 51068 - DNA, 19 bp, Homo sapiens
  source 1..19: mol_type = genomic DNA
tcaagtccctgttcgggcg

SEQ ID NO: 51069 - DNA, 20 bp, Homo sapiens
  source 1..20: mol_type = genomic DNA
tcaagtccctgttcgggcgc

SEQ ID NO: 51070 - DNA, 22 bp, Homo sapiens
  source 1..22: mol_type = genomic DNA
tcaagtccctgttcgggcgcca

SEQ ID NO: 51071 - DNA, 21 bp, Homo sapiens
  source 1..21: mol_type = genomic DNA
tcaatccccggcacctccacc

SEQ ID NO: 51072 - DNA, 22 bp, Homo sapiens
  source 1..22: mol_type = genomic DNA
tcaatccccggcacctccacca

SEQ ID NO: 51073 - DNA, 22 bp, Homo sapiens
  source 1..22: mol_type = genomic DNA
tcaatccccggcatctccacca

SEQ ID NO: 51074 - DNA, 20 bp, Homo sapiens
  source 1..20: mol_type = genomic DNA
tcaatcccgggtttcggcac

SEQ ID NO: 51075 - DNA, 22 bp, Homo sapiens
  source 1..22: mol_type = genomic DNA
tcaatcccgggtttcggcacca

SEQ ID NO: 51076 - DNA, 20 bp, Homo sapiens
  source 1..20: mol_type = genomic DNA
tcaatggtagaattctcgcc

SEQ ID NO: 51077 - DNA, 20 bp, Homo sapiens
  source 1..20: mol_type = genomic DNA
tcaattccccgacggggagc

SEQ ID NO: 51078 - DNA, 19 bp, Homo sapiens
  source 1..19: mol_type = genomic DNA
tcacaagaactgctaactc

SEQ ID NO: 51079 - DNA, 45 bp, Homo sapiens; identical to SEQ ID NO: 24782
  source 1..45: mol_type = genomic DNA

SEQ ID NO: 51080 - DNA, 22 bp, Homo sapiens
  source 1..22: mol_type = genomic DNA
tcacacgcgaaaggtccccggt

SEQ ID NO: 51081 - DNA, 22 bp, Homo sapiens
  source 1..22: mol_type = genomic DNA
tcacatcaccccataaacacca

SEQ ID NO: 51082 - DNA, 34 bp, Homo sapiens; identical to SEQ ID NO: 24800
  source 1..34: mol_type = genomic DNA

SEQ ID NO: 51083 - DNA, 36 bp, Homo sapiens; identical to SEQ ID NO: 24802
  source 1..36: mol_type = genomic DNA

SEQ ID NO: 51084 - DNA, 38 bp, Homo sapiens; identical to SEQ ID NO: 24804
  source 1..38: mol_type = genomic DNA

SEQ ID NO: 51085 - DNA, 39 bp, Homo sapiens; identical to SEQ ID NO: 24805
  source 1..39: mol_type = genomic DNA

SEQ ID NO: 51086 - DNA, 40 bp, Homo sapiens; identical to SEQ ID NO: 24806
  source 1..40: mol_type = genomic DNA

SEQ ID NO: 51087 - DNA, 41 bp, Homo sapiens; identical to SEQ ID NO: 24807
  source 1..41: mol_type = genomic DNA

SEQ ID NO: 51088 - DNA, 41 bp, Homo sapiens; identical to SEQ ID NO: 24811
  source 1..41: mol_type = genomic DNA

SEQ ID NO: 51089 - DNA, 16 bp, Homo sapiens
  source 1..16: mol_type = genomic DNA
tcaccccataaacacc

SEQ ID NO: 51090 - DNA, 17 bp, Homo sapiens
  source 1..17: mol_type = genomic DNA
tcaccccataaacacca

SEQ ID NO: 51091 - DNA, 20 bp, Homo sapiens
  source 1..20: mol_type = genomic DNA
tcaccgccgcggcccgggtt

SEQ ID NO: 51092 - DNA, 36 bp, Homo sapiens; identical to SEQ ID NO: 24829
  source 1..36: mol_type = genomic DNA

SEQ ID NO: 51093 - DNA, 37 bp, Homo sapiens; identical to SEQ ID NO: 24830
  source 1..37: mol_type = genomic DNA

SEQ ID NO: 51094 - DNA, 38 bp, Homo sapiens; identical to SEQ ID NO: 24831
  source 1..38: mol_type = genomic DNA

SEQ ID NO: 51095 - DNA, 39 bp, Homo sapiens; identical to SEQ ID NO: 24832
  source 1..39: mol_type = genomic DNA

SEQ ID NO: 51096 - DNA, 40 bp, Homo sapiens; identical to SEQ ID NO: 24833
  source 1..40: mol_type = genomic DNA

SEQ ID NO: 51097 - DNA, 41 bp, Homo sapiens; identical to SEQ ID NO: 24834
  source 1..41: mol_type = genomic DNA

SEQ ID NO: 51098 - DNA, 36 bp, Homo sapiens; identical to SEQ ID NO: 24842
  source 1..36: mol_type = genomic DNA

SEQ ID NO: 51099 - DNA, 39 bp, Homo sapiens; identical to SEQ ID NO: 24845
  source 1..39: mol_type = genomic DNA

SEQ ID NO: 51100 - DNA, 40 bp, Homo sapiens; identical to SEQ ID NO: 24846
  source 1..40: mol_type = genomic DNA

SEQ ID NO: 51101 - DNA, 41 bp, Homo sapiens; identical to SEQ ID NO: 24847
  source 1..41: mol_type = genomic DNA

SEQ ID NO: 51102 - DNA, 35 bp, Homo sapiens; identical to SEQ ID NO: 24855
  source 1..35: mol_type = genomic DNA

SEQ ID NO: 51103 - DNA, 36 bp, Homo sapiens; identical to SEQ ID NO: 24856
  source 1..36: mol_type = genomic DNA

SEQ ID NO: 51104 - DNA, 37 bp, Homo sapiens; identical to SEQ ID NO: 24857
  source 1..37: mol_type = genomic DNA

SEQ ID NO: 51105 - DNA, 38 bp, Homo sapiens; identical to SEQ ID NO: 24858
  source 1..38: mol_type = genomic DNA

SEQ ID NO: 51106 - DNA, 39 bp, Homo sapiens; identical to SEQ ID NO: 24859
  source 1..39: mol_type = genomic DNA

SEQ ID NO: 51107 - DNA, 40 bp, Homo sapiens; identical to SEQ ID NO: 24860
  source 1..40: mol_type = genomic DNA

SEQ ID NO: 51108 - DNA, 41 bp, Homo sapiens; identical to SEQ ID NO: 24861
  source 1..41: mol_type = genomic DNA

SEQ ID NO: 51109 - DNA, 16 bp, Homo sapiens
  source 1..16: mol_type = genomic DNA
tcacgtcggggtcacc

SEQ ID NO: 51110 - DNA, 17 bp, Homo sapiens
  source 1..17: mol_type = genomic DNA
tcacgtcggggtcacca

SEQ ID NO: 51111 - DNA, 35 bp, Homo sapiens; identical to SEQ ID NO: 24879
  source 1..35: mol_type = genomic DNA

SEQ ID NO: 51112 - DNA, 36 bp, Homo sapiens; identical to SEQ ID NO: 24880
  source 1..36: mol_type = genomic DNA

SEQ ID NO: 51113 - DNA, 37 bp, Homo sapiens; identical to SEQ ID NO: 24881
  source 1..37: mol_type = genomic DNA

SEQ ID NO: 51114 - DNA, 38 bp, Homo sapiens; identical to SEQ ID NO: 24882
  source 1..38: mol_type = genomic DNA

SEQ ID NO: 51115 - DNA, 18 bp, Homo sapiens
  source 1..18: mol_type = genomic DNA
tcagaagattctaggttc

SEQ ID NO: 51116 - DNA, 37 bp, Homo sapiens; identical to SEQ ID NO: 24892
  source 1..37: mol_type = genomic DNA

SEQ ID NO: 51117 - DNA, 35 bp, Homo sapiens; identical to SEQ ID NO: 24898
  source 1..35: mol_type = genomic DNA

SEQ ID NO: 51118 - DNA, 37 bp, Homo sapiens; identical to SEQ ID NO: 24900
  source 1..37: mol_type = genomic DNA

SEQ ID NO: 51119 - DNA, 35 bp, Homo sapiens; identical to SEQ ID NO: 24901
  source 1..35: mol_type = genomic DNA

SEQ ID NO: 51120 - DNA, 36 bp, Homo sapiens; identical to SEQ ID NO: 24905
  source 1..36: mol_type = genomic DNA

SEQ ID NO: 51121 - DNA, 37 bp, Homo sapiens; identical to SEQ ID NO: 24906
  source 1..37: mol_type = genomic DNA

SEQ ID NO: 51122 - DNA, 38 bp, Homo sapiens; identical to SEQ ID NO: 24907
  source 1..38: mol_type = genomic DNA

SEQ ID NO: 51123 - DNA, 36 bp, Homo sapiens; identical to SEQ ID NO: 24911
  source 1..36: mol_type = genomic DNA

SEQ ID NO: 51124 - DNA, 37 bp, Homo sapiens; identical to SEQ ID NO: 24912
  source 1..37: mol_type = genomic DNA

SEQ ID NO: 51125 - DNA, 38 bp, Homo sapiens; identical to SEQ ID NO: 24913
  source 1..38: mol_type = genomic DNA

SEQ ID NO: 51126 - DNA, 18 bp, Homo sapiens
  source 1..18: mol_type = genomic DNA
tcagaagattgcaggttc

SEQ ID NO: 51127 - DNA, 34 bp, Homo sapiens; identical to SEQ ID NO: 24920
  source 1..34: mol_type = genomic DNA

SEQ ID NO: 51128 - DNA, 35 bp, Homo sapiens; identical to SEQ ID NO: 24921
  source 1..35: mol_type = genomic DNA

SEQ ID NO: 51129 - DNA, 36 bp, Homo sapiens; identical to SEQ ID NO: 24922
  source 1..36: mol_type = genomic DNA

SEQ ID NO: 51130 - DNA, 37 bp, Homo sapiens; identical to SEQ ID NO: 24923
  source 1..37: mol_type = genomic DNA

SEQ ID NO: 51131 - DNA, 38 bp, Homo sapiens; identical to SEQ ID NO: 24924
  source 1..38: mol_type = genomic DNA

SEQ ID NO: 51132 - DNA, 18 bp, Homo sapiens
  source 1..18: mol_type = genomic DNA
tcagaaggctgcgtgttc

SEQ ID NO: 51133 - DNA, 32 bp, Homo sapiens; identical to SEQ ID NO: 24937
  source 1..32: mol_type = genomic DNA

SEQ ID NO: 51134 - DNA, 33 bp, Homo sapiens; identical to SEQ ID NO: 24938
  source 1..33: mol_type = genomic DNA

SEQ ID NO: 51135 - DNA, 34 bp, Homo sapiens; identical to SEQ ID NO: 24939
  source 1..34: mol_type = genomic DNA

SEQ ID NO: 51136 - DNA, 35 bp, Homo sapiens; identical to SEQ ID NO: 24940
  source 1..35: mol_type = genomic DNA

SEQ ID NO: 51137 - DNA, 36 bp, Homo sapiens; identical to SEQ ID NO: 24941
  source 1..36: mol_type = genomic DNA

SEQ ID NO: 51138 - DNA, 37 bp, Homo sapiens; identical to SEQ ID NO: 24942
  source 1..37: mol_type = genomic DNA

SEQ ID NO: 51139 - DNA, 38 bp, Homo sapiens; identical to SEQ ID NO: 24943
  source 1..38: mol_type = genomic DNA

SEQ ID NO: 51140 - DNA, 33 bp, Homo sapiens; identical to SEQ ID NO: 24951
  source 1..33: mol_type = genomic DNA

SEQ ID NO: 51141 - DNA, 35 bp, Homo sapiens; identical to SEQ ID NO: 24953
  source 1..35: mol_type = genomic DNA

SEQ ID NO: 51142 - DNA, 36 bp, Homo sapiens; identical to SEQ ID NO: 24954
  source 1..36: mol_type = genomic DNA

SEQ ID NO: 51143 - DNA, 37 bp, Homo sapiens; identical to SEQ ID NO: 24955
  source 1..37: mol_type = genomic DNA

SEQ ID NO: 51144 - DNA, 38 bp, Homo sapiens; identical to SEQ ID NO: 24956
  source 1..38: mol_type = genomic DNA

SEQ ID NO: 51145 - DNA, 32 bp, Homo sapiens; identical to SEQ ID NO: 24960
  source 1..32: mol_type = genomic DNA

SEQ ID NO: 51146 - DNA, 34 bp, Homo sapiens; identical to SEQ ID NO: 24962
  source 1..34: mol_type = genomic DNA

SEQ ID NO: 51147 - DNA, 35 bp, Homo sapiens; identical to SEQ ID NO: 24963
  source 1..35: mol_type = genomic DNA

SEQ ID NO: 51148 - DNA, 36 bp, Homo sapiens; identical to SEQ ID NO: 24964
  source 1..36: mol_type = genomic DNA

SEQ ID NO: 51149 - DNA, 37 bp, Homo sapiens; identical to SEQ ID NO: 24965
  source 1..37: mol_type = genomic DNA

SEQ ID NO: 51150 - DNA, 38 bp, Homo sapiens; identical to SEQ ID NO: 24966
  source 1..38: mol_type = genomic DNA

SEQ ID NO: 51151 - DNA, 27 bp, Homo sapiens
  source 1..27: mol_type = genomic DNA
tcagattgtgaatctgacaacagaggc

SEQ ID NO: 51152 - DNA, 28 bp, Homo sapiens
  source 1..28: mol_type = genomic DNA
tcagattgtgaatctgacaacagaggct

SEQ ID NO: 51153 - DNA, 47 bp, Homo sapiens; identical to SEQ ID NO: 24992
  source 1..47: mol_type = genomic DNA

SEQ ID NO: 51154 - DNA, 24 bp, Homo sapiens
  source 1..24: mol_type = genomic DNA
tcagcctccggagctggggattgt

SEQ ID NO: 51155 - DNA, 23 bp, Homo sapiens
  source 1..23: mol_type = genomic DNA
tcagctaaataagctatcgggcc

SEQ ID NO: 51156 - DNA, 17 bp, Homo sapiens
  source 1..17: mol_type = genomic DNA
tcaggatggccgagcgg

SEQ ID NO: 51157 - DNA, 21 bp, Homo sapiens
  source 1..21: mol_type = genomic DNA
tcaggatggccgagcggtcta

SEQ ID NO: 51158 - DNA, 21 bp, Homo sapiens
  source 1..21: mol_type = genomic DNA
tcaggggtagagcatttgact

SEQ ID NO: 51159 - DNA, 22 bp, Homo sapiens
  source 1..22: mol_type = genomic DNA
tcaggggttagagcactggtct

SEQ ID NO: 51160 - DNA, 35 bp, Homo sapiens; identical to SEQ ID NO: 25066
  source 1..35: mol_type = genomic DNA

SEQ ID NO: 51161 - DNA, 27 bp, Homo sapiens
  source 1..27: mol_type = genomic DNA
tcagtaagttgcaatacttaatttctg

SEQ ID NO: 51162 - DNA, 16 bp, Homo sapiens
  source 1..16: mol_type = genomic DNA
tcagtcggtagagcat

SEQ ID NO: 51163 - DNA, 17 bp, Homo sapiens
  source 1..17: mol_type = genomic DNA
tcagtcggtagagcatc

SEQ ID NO: 51164 - DNA, 18 bp, Homo sapiens
  source 1..18: mol_type = genomic DNA
tcagtcggtagagcatca

SEQ ID NO: 51165 - DNA, 20 bp, Homo sapiens
  source 1..20: mol_type = genomic DNA
tcagtcggtagagcatcaga

SEQ ID NO: 51166 - DNA, 21 bp, Homo sapiens
  source 1..21: mol_type = genomic DNA
tcagtcggtagagcatcagac

SEQ ID NO: 51167 - DNA, 22 bp, Homo sapiens
  source 1..22: mol_type = genomic DNA
tcagtcggtagagcatcagact

SEQ ID NO: 51168 - DNA, 24 bp, Homo sapiens
  source 1..24: mol_type = genomic DNA
tcagtcggtagagcatcagacttt

SEQ ID NO: 51169 - DNA, 17 bp, Homo sapiens
  source 1..17: mol_type = genomic DNA
tcagtcggtagagcatg

SEQ ID NO: 51170 - DNA, 21 bp, Homo sapiens
  source 1..21: mol_type = genomic DNA
tcagtcggtagagcatgagac

SEQ ID NO: 51171 - DNA, 22 bp, Homo sapiens
  source 1..22: mol_type = genomic DNA
tcagtcggtagagcatgagact

SEQ ID NO: 51172 - DNA, 31 bp, Homo sapiens; identical to SEQ ID NO: 25110
  source 1..31: mol_type = genomic DNA

SEQ ID NO: 51173 - DNA, 44 bp, Homo sapiens; identical to SEQ ID NO: 25115
  source 1..44: mol_type = genomic DNA

SEQ ID NO: 51174 - DNA, 19 bp, Homo sapiens
  source 1..19: mol_type = genomic DNA
tcagtcggtagagcatggg

SEQ ID NO: 51175 - DNA, 20 bp, Homo sapiens
  source 1..20: mol_type = genomic DNA
tcagtcggtagagcatggga

SEQ ID NO: 51176 - DNA, 21 bp, Homo sapiens
  source 1..21: mol_type = genomic DNA
tcagtcggtagagcatgggac

SEQ ID NO: 51177 - DNA, 22 bp, Homo sapiens
  source 1..22: mol_type = genomic DNA
tcagtcggtagagcatgggact

SEQ ID NO: 51178 - DNA, 23 bp, Homo sapiens
  source 1..23: mol_type = genomic DNA
tcagtcggtagagcatgggactc

SEQ ID NO: 51179 - DNA, 24 bp, Homo sapiens
  source 1..24: mol_type = genomic DNA
tcagtcggtagagcatgggactct

SEQ ID NO: 51180 - DNA, 28 bp, Homo sapiens
  source 1..28: mol_type = genomic DNA
tcagtcggtagagcatgggactcttaat

SEQ ID NO: 51181 - DNA, 29 bp, Homo sapiens
  source 1..29: mol_type = genomic DNA
tcagtcggtagagcatgggactcttaatc

SEQ ID NO: 51182 - DNA, 30 bp, Homo sapiens; identical to SEQ ID NO: 25126
  source 1..30: mol_type = genomic DNA

SEQ ID NO: 51183 - DNA, 31 bp, Homo sapiens; identical to SEQ ID NO: 25127
  source 1..31: mol_type = genomic DNA

SEQ ID NO: 51184 - DNA, 32 bp, Homo sapiens; identical to SEQ ID NO: 25128
  source 1..32: mol_type = genomic DNA

SEQ ID NO: 51185 - DNA, 44 bp, Homo sapiens; identical to SEQ ID NO: 25131
  source 1..44: mol_type = genomic DNA

SEQ ID NO: 51186 - DNA, 16 bp, Homo sapiens
  source 1..16: mol_type = genomic DNA
tcagtctcataatctg

SEQ ID NO: 51187 - DNA, 18 bp, Homo sapiens
  source 1..18: mol_type = genomic DNA
tcagtggtagaattctcg

SEQ ID NO: 51188 - DNA, 19 bp, Homo sapiens
  source 1..19: mol_type = genomic DNA
tcagtggtagaattctcgc

SEQ ID NO: 51189 - DNA, 20 bp, Homo sapiens
  source 1..20: mol_type = genomic DNA
tcagtggtagaattctcgcc

SEQ ID NO: 51190 - DNA, 21 bp, Homo sapiens
  source 1..21: mol_type = genomic DNA
tcagtggtagaattctcgcct

SEQ ID NO: 51191 - DNA, 22 bp, Homo sapiens
  source 1..22: mol_type = genomic DNA
tcagtggtagaattctcgcctg

SEQ ID NO: 51192 - DNA, 23 bp, Homo sapiens
  source 1..23: mol_type = genomic DNA
tcagtggtagaattctcgcctgc

SEQ ID NO: 51193 - DNA, 24 bp, Homo sapiens
  source 1..24: mol_type = genomic DNA
tcagtggtagaattctcgcctgcc

SEQ ID NO: 51194 - DNA, 32 bp, Homo sapiens; identical to SEQ ID NO: 25160
  source 1..32: mol_type = genomic DNA

SEQ ID NO: 51195 - DNA, 37 bp, Homo sapiens; identical to SEQ ID NO: 25162
  source 1..37: mol_type = genomic DNA

SEQ ID NO: 51196 - DNA, 41 bp, Homo sapiens; identical to SEQ ID NO: 25166
  source 1..41: mol_type = genomic DNA

SEQ ID NO: 51197 - DNA, 21 bp, Homo sapiens
  source 1..21: mol_type = genomic DNA
tcagtggtagagcatttgact

SEQ ID NO: 51198 - DNA, 36 bp, Homo sapiens; identical to SEQ ID NO: 25188
  source 1..36: mol_type = genomic DNA

SEQ ID NO: 51199 - DNA, 43 bp, Homo sapiens; identical to SEQ ID NO: 25210
  source 1..43: mol_type = genomic DNA

SEQ ID NO: 51200 - DNA, 44 bp, Homo sapiens; identical to SEQ ID NO: 25211
  source 1..44: mol_type = genomic DNA

SEQ ID NO: 51201 - DNA, 35 bp, Homo sapiens; identical to SEQ ID NO: 25235
  source 1..35: mol_type = genomic DNA

SEQ ID NO: 51202 - DNA, 36 bp, Homo sapiens; identical to SEQ ID NO: 25236
  source 1..36: mol_type = genomic DNA

SEQ ID NO: 51203 - DNA, 37 bp, Homo sapiens; identical to SEQ ID NO: 25237
  source 1..37: mol_type = genomic DNA

SEQ ID NO: 51204 - DNA, 38 bp, Homo sapiens; identical to SEQ ID NO: 25238
  source 1..38: mol_type = genomic DNA

SEQ ID NO: 51205 - DNA, 40 bp, Homo sapiens; identical to SEQ ID NO: 25240
  source 1..40: mol_type = genomic DNA

SEQ ID NO: 51206 - DNA, 41 bp, Homo sapiens; identical to SEQ ID NO: 25241
  source 1..41: mol_type = genomic DNA

SEQ ID NO: 51207 - DNA, 27 bp, Homo sapiens
  source 1..27: mol_type = genomic DNA
tcatgcccccatgtctaacaacatggc

SEQ ID NO: 51208 - DNA, 28 bp, Homo sapiens
  source 1..28: mol_type = genomic DNA
tcatgcccccatgtctaacaacatggct

SEQ ID NO: 51209 - DNA, 29 bp, Homo sapiens
  source 1..29: mol_type = genomic DNA
tcatgcccccatgtctaacaacatggctt

SEQ ID NO: 51210 - DNA, 33 bp, Homo sapiens; identical to SEQ ID NO: 25270
  source 1..33: mol_type = genomic DNA

SEQ ID NO: 51211 - DNA, 34 bp, Homo sapiens; identical to SEQ ID NO: 25271
  source 1..34: mol_type = genomic DNA

SEQ ID NO: 51212 - DNA, 37 bp, Homo sapiens; identical to SEQ ID NO: 25274
  source 1..37: mol_type = genomic DNA

SEQ ID NO: 51213 - DNA, 22 bp, Homo sapiens
  source 1..22: mol_type = genomic DNA
tcattggtcgtggttgtagtcc

SEQ ID NO: 51214 - DNA, 27 bp, Homo sapiens
  source 1..27: mol_type = genomic DNA
tcattggtcgtggttgtagtccgtgcg

SEQ ID NO: 51215 - DNA, 29 bp, Homo sapiens
  source 1..29: mol_type = genomic DNA
tcattggtcgtggttgtagtccgtgcgag

SEQ ID NO: 51216 - DNA, 30 bp, Homo sapiens; identical to SEQ ID NO: 25296
  source 1..30: mol_type = genomic DNA

SEQ ID NO: 51217 - DNA, 31 bp, Homo sapiens; identical to SEQ ID NO: 25297
  source 1..31: mol_type = genomic DNA

SEQ ID NO: 51218 - DNA, 32 bp, Homo sapiens; identical to SEQ ID NO: 25298
  source 1..32: mol_type = genomic DNA

SEQ ID NO: 51219 - DNA, 33 bp, Homo sapiens; identical to SEQ ID NO: 25299
  source 1..33: mol_type = genomic DNA

SEQ ID NO: 51220 - DNA, 35 bp, Homo sapiens; identical to SEQ ID NO: 25301
  source 1..35: mol_type = genomic DNA

SEQ ID NO: 51221 - DNA, 36 bp, Homo sapiens; identical to SEQ ID NO: 25302
  source 1..36: mol_type = genomic DNA

SEQ ID NO: 51222 - DNA, 37 bp, Homo sapiens; identical to SEQ ID NO: 40951
  source 1..37: mol_type = genomic DNA

SEQ ID NO: 51223 - DNA, 38 bp, Homo sapiens; identical to SEQ ID NO: 40952
  source 1..38: mol_type = genomic DNA

SEQ ID NO: 51224 - DNA, 39 bp, Homo sapiens; identical to SEQ ID NO: 25320
  source 1..39: mol_type = genomic DNA

SEQ ID NO: 51225 - DNA, 40 bp, Homo sapiens; identical to SEQ ID NO: 25321
  source 1..40: mol_type = genomic DNA

SEQ ID NO: 51226 - DNA, 46 bp, Homo sapiens; identical to SEQ ID NO: 25326
  source 1..46: mol_type = genomic DNA

SEQ ID NO: 51227 - DNA, 34 bp, Homo sapiens; identical to SEQ ID NO: 25349
  source 1..34: mol_type = genomic DNA

SEQ ID NO: 51228 - DNA, 35 bp, Homo sapiens; identical to SEQ ID NO: 25350
  source 1..35: mol_type = genomic DNA

SEQ ID NO: 51229 - DNA, 34 bp, Homo sapiens; identical to SEQ ID NO: 25361
  source 1..34: mol_type = genomic DNA

SEQ ID NO: 51230 - DNA, 16 bp, Homo sapiens
  source 1..16: mol_type = genomic DNA
tccagctcgaaggacc

SEQ ID NO: 51231 - DNA, 26 bp, Homo sapiens
  source 1..26: mol_type = genomic DNA
tccagggttcaagtccctgttcgggc

SEQ ID NO: 51232 - DNA, 27 bp, Homo sapiens
  source 1..27: mol_type = genomic DNA
tccagggttcaagtccctgttcgggcg

SEQ ID NO: 51233 - DNA, 28 bp, Homo sapiens
  source 1..28: mol_type = genomic DNA
tccagggttcaagtccctgttcgggcgc

SEQ ID NO: 51234 - DNA, 29 bp, Homo sapiens
  source 1..29: mol_type = genomic DNA
tccagggttcaagtccctgttcgggcgcc

SEQ ID NO: 51235 - DNA, 30 bp, Homo sapiens; identical to SEQ ID NO: 25372
  source 1..30: mol_type = genomic DNA

SEQ ID NO: 51236 - DNA, 26 bp, Homo sapiens
  source 1..26: mol_type = genomic DNA
tccaggttcgactcctggctggctcg

SEQ ID NO: 51237 - DNA, 28 bp, Homo sapiens
  source 1..28: mol_type = genomic DNA
tccaggttcgactcctggctggctcgcc

SEQ ID NO: 51238 - DNA, 45 bp, Homo sapiens; identical to SEQ ID NO: 25383
  source 1..45: mol_type = genomic DNA

SEQ ID NO: 51239 - DNA, 45 bp, Homo sapiens; identical to SEQ ID NO: 25385
  source 1..45: mol_type = genomic DNA

SEQ ID NO: 51240 - DNA, 30 bp, Homo sapiens
  source 1..30: mol_type = genomic DNA
tccatagtgtagtggttatcacatctgctt

SEQ ID NO: 51241 - DNA, 17 bp, Homo sapiens
  source 1..17: mol_type = genomic DNA
tccattggggtttcccc

SEQ ID NO: 51242 - DNA, 21 bp, Homo sapiens
  source 1..21: mol_type = genomic DNA
tccattggggtttccccgcgc

SEQ ID NO: 51243 - DNA, 22 bp, Homo sapiens
  source 1..22: mol_type = genomic DNA
tccattggggtttccccgcgca

SEQ ID NO: 51244 - DNA, 24 bp, Homo sapiens
  source 1..24: mol_type = genomic DNA
tccattggggtttccccgcgcagg

SEQ ID NO: 51245 - DNA, 25 bp, Homo sapiens
  source 1..25: mol_type = genomic DNA
tccattggggtttccccgcgcaggt

SEQ ID NO: 51246 - DNA, 46 bp, Homo sapiens; identical to SEQ ID NO: 25444
  source 1..46: mol_type = genomic DNA

SEQ ID NO: 51247 - DNA, 47 bp, Homo sapiens; identical to SEQ ID NO: 25445
  source 1..47: mol_type = genomic DNA

SEQ ID NO: 51248 - DNA, 46 bp, Homo sapiens; identical to SEQ ID NO: 25461
  source 1..46: mol_type = genomic DNA

SEQ ID NO: 51249 - DNA, 47 bp, Homo sapiens; identical to SEQ ID NO: 25462
  source 1..47: mol_type = genomic DNA

SEQ ID NO: 51250 - DNA, 16 bp, Homo sapiens
  source 1..16: mol_type = genomic DNA
tcccacatggtctagc

SEQ ID NO: 51251 - DNA, 17 bp, Homo sapiens
  source 1..17: mol_type = genomic DNA
tcccacatggtctagcg

SEQ ID NO: 51252 - DNA, 18 bp, Homo sapiens
  source 1..18: mol_type = genomic DNA
tcccacatggtctagcgg

SEQ ID NO: 51253 - DNA, 19 bp, Homo sapiens
  source 1..19: mol_type = genomic DNA
tcccacatggtctagcggt

SEQ ID NO: 51254 - DNA, 20 bp, Homo sapiens
  source 1..20: mol_type = genomic DNA
tcccacatggtctagcggtt

SEQ ID NO: 51255 - DNA, 22 bp, Homo sapiens
  source 1..22: mol_type = genomic DNA
tcccacatggtctagcggttag

SEQ ID NO: 51256 - DNA, 23 bp, Homo sapiens
  source 1..23: mol_type = genomic DNA
tcccacatggtctagcggttagg

SEQ ID NO: 51257 - DNA, 25 bp, Homo sapiens
  source 1..25: mol_type = genomic DNA
tcccacatggtctagcggttaggat

SEQ ID NO: 51258 - DNA, 26 bp, Homo sapiens
  source 1..26: mol_type = genomic DNA
tcccacatggtctagcggttaggatt

SEQ ID NO: 51259 - DNA, 27 bp, Homo sapiens
  source 1..27: mol_type = genomic DNA
tcccacatggtctagcggttaggattc

SEQ ID NO: 51260 - DNA, 28 bp, Homo sapiens
  source 1..28: mol_type = genomic DNA
tcccacatggtctagcggttaggattcc

SEQ ID NO: 51261 - DNA, 29 bp, Homo sapiens
  source 1..29: mol_type = genomic DNA
tcccacatggtctagcggttaggattcct

SEQ ID NO: 51262 - DNA, 30 bp, Homo sapiens; identical to SEQ ID NO: 25476
  source 1..30: mol_type = genomic DNA

SEQ ID NO: 51263 - DNA, 31 bp, Homo sapiens; identical to SEQ ID NO: 25477
  source 1..31: mol_type = genomic DNA

SEQ ID NO: 51264 - DNA, 32 bp, Homo sapiens; identical to SEQ ID NO: 25478
  source 1..32: mol_type = genomic DNA

SEQ ID NO: 51265 - DNA, 33 bp, Homo sapiens; identical to SEQ ID NO: 25479
  source 1..33: mol_type = genomic DNA

SEQ ID NO: 51266 - DNA, 34 bp, Homo sapiens; identical to SEQ ID NO: 25480
  source 1..34: mol_type = genomic DNA

SEQ ID NO: 51267 - DNA, 35 bp, Homo sapiens; identical to SEQ ID NO: 25481
  source 1..35: mol_type = genomic DNA

SEQ ID NO: 51268 - DNA, 36 bp, Homo sapiens; identical to SEQ ID NO: 25482
  source 1..36: mol_type = genomic DNA

SEQ ID NO: 51269 - DNA, 37 bp, Homo sapiens; identical to SEQ ID NO: 25483
  source 1..37: mol_type = genomic DNA

SEQ ID NO: 51270 - DNA, 39 bp, Homo sapiens; identical to SEQ ID NO: 25485
  source 1..39: mol_type = genomic DNA

SEQ ID NO: 51271 - DNA, 40 bp, Homo sapiens; identical to SEQ ID NO: 25486
  source 1..40: mol_type = genomic DNA

SEQ ID NO: 51272 - DNA, 41 bp, Homo sapiens; identical to SEQ ID NO: 25487
  source 1..41: mol_type = genomic DNA

SEQ ID NO: 51273 - DNA, 42 bp, Homo sapiens; identical to SEQ ID NO: 25488
  source 1..42: mol_type = genomic DNA

SEQ ID NO: 51274 - DNA, 43 bp, Homo sapiens; identical to SEQ ID NO: 41033
  source 1..43: mol_type = genomic DNA

SEQ ID NO: 51275 - DNA, 16 bp, Homo sapiens
  source 1..16: mol_type = genomic DNA
tcccaccactgccacc

SEQ ID NO: 51276 - DNA, 16 bp, Homo sapiens
  source 1..16: mol_type = genomic DNA
tcccaccagagtcgcc

SEQ ID NO: 51277 - DNA, 17 bp, Homo sapiens
  source 1..17: mol_type = genomic DNA
tcccacccagggacgcc

SEQ ID NO: 51278 - DNA, 18 bp, Homo sapiens
  source 1..18: mol_type = genomic DNA
tcccacccagggacgcca

SEQ ID NO: 51279 - DNA, 16 bp, Homo sapiens
  source 1..16: mol_type = genomic DNA
tcccaccgctgccacc

SEQ ID NO: 51280 - DNA, 17 bp, Homo sapiens
  source 1..17: mol_type = genomic DNA
tcccaccgctgccacca

SEQ ID NO: 51281 - DNA, 16 bp, Homo sapiens
  source 1..16: mol_type = genomic DNA
tcccacctggggtacc

SEQ ID NO: 51282 - DNA, 16 bp, Homo sapiens
  source 1..16: mol_type = genomic DNA
tcccacctggggtgcc

SEQ ID NO: 51283 - DNA, 17 bp, Homo sapiens
  source 1..17: mol_type = genomic DNA
tcccacctggggtgcca

SEQ ID NO: 51284 - DNA, 16 bp, Homo sapiens
  source 1..16: mol_type = genomic DNA
tcccaccttcgtcgcc

SEQ ID NO: 51285 - DNA, 17 bp, Homo sapiens
  source 1..17: mol_type = genomic DNA
tcccaccttcgtcgcca

SEQ ID NO: 51286 - DNA, 16 bp, Homo sapiens
  source 1..16: mol_type = genomic DNA
tcccactcctgacacc

SEQ ID NO: 51287 - DNA, 17 bp, Homo sapiens
  source 1..17: mol_type = genomic DNA
tcccactcctgacacca

SEQ ID NO: 51288 - DNA, 16 bp, Homo sapiens
  source 1..16: mol_type = genomic DNA
tcccacttctgacacc

SEQ ID NO: 51289 - DNA, 17 bp, Homo sapiens
  source 1..17: mol_type = genomic DNA
tcccacttctgacacca

SEQ ID NO: 51290 - DNA, 16 bp, Homo sapiens
  source 1..16: mol_type = genomic DNA
tcccagcggggcctcc

SEQ ID NO: 51291 - DNA, 16 bp, Homo sapiens
  source 1..16: mol_type = genomic DNA
tcccagcggtgcctcc

SEQ ID NO: 51292 - DNA, 37 bp, Homo sapiens; identical to SEQ ID NO: 25512
  source 1..37: mol_type = genomic DNA

SEQ ID NO: 51293 - DNA, 16 bp, Homo sapiens
  source 1..16: mol_type = genomic DNA
tcccagtagagcctcc

SEQ ID NO: 51294 - DNA, 16 bp, Homo sapiens
  source 1..16: mol_type = genomic DNA
tcccatatggtctagc

SEQ ID NO: 51295 - DNA, 17 bp, Homo sapiens
  source 1..17: mol_type = genomic DNA
tcccatatggtctagcg

SEQ ID NO: 51296 - DNA, 18 bp, Homo sapiens
  source 1..18: mol_type = genomic DNA
tcccatatggtctagcgg

SEQ ID NO: 51297 - DNA, 19 bp, Homo sapiens
  source 1..19: mol_type = genomic DNA
tcccatatggtctagcggt

SEQ ID NO: 51298 - DNA, 22 bp, Homo sapiens
  source 1..22: mol_type = genomic DNA
tcccatatggtctagcggttag

SEQ ID NO: 51299 - DNA, 23 bp, Homo sapiens
  source 1..23: mol_type = genomic DNA
tcccatatggtctagcggttagg

SEQ ID NO: 51300 - DNA, 25 bp, Homo sapiens
  source 1..25: mol_type = genomic DNA
tcccatatggtctagcggttaggat

SEQ ID NO: 51301 - DNA, 26 bp, Homo sapiens
  source 1..26: mol_type = genomic DNA
tcccatatggtctagcggttaggatt

SEQ ID NO: 51302 - DNA, 27 bp, Homo sapiens
  source 1..27: mol_type = genomic DNA
tcccatatggtctagcggttaggattc

SEQ ID NO: 51303 - DNA, 28 bp, Homo sapiens
  source 1..28: mol_type = genomic DNA
tcccatatggtctagcggttaggattcc

SEQ ID NO: 51304 - DNA, 29 bp, Homo sapiens
  source 1..29: mol_type = genomic DNA
tcccatatggtctagcggttaggattcct

SEQ ID NO: 51305 - DNA, 30 bp, Homo sapiens; identical to SEQ ID NO: 25530
  source 1..30: mol_type = genomic DNA

SEQ ID NO: 51306 - DNA, 31 bp, Homo sapiens; identical to SEQ ID NO: 25531
  source 1..31: mol_type = genomic DNA

SEQ ID NO: 51307 - DNA, 32 bp, Homo sapiens; identical to SEQ ID NO: 25532
  source 1..32: mol_type = genomic DNA

SEQ ID NO: 51308 - DNA, 33 bp, Homo sapiens; identical to SEQ ID NO: 25533
  source 1..33: mol_type = genomic DNA

SEQ ID NO: 51309 - DNA, 34 bp, Homo sapiens; identical to SEQ ID NO: 25534
  source 1..34: mol_type = genomic DNA

SEQ ID NO: 51310 - DNA, 35 bp, Homo sapiens; identical to SEQ ID NO: 25535
  source 1..35: mol_type = genomic DNA

SEQ ID NO: 51311 - DNA, 36 bp, Homo sapiens; identical to SEQ ID NO: 25536
  source 1..36: mol_type = genomic DNA

SEQ ID NO: 51312 - DNA, 42 bp, Homo sapiens; identical to SEQ ID NO: 25542
  source 1..42: mol_type = genomic DNA

SEQ ID NO: 51313 - DNA, 16 bp, Homo sapiens
  source 1..16: mol_type = genomic DNA
tcccatcctcgtcgcc

SEQ ID NO: 51314 - DNA, 17 bp, Homo sapiens
  source 1..17: mol_type = genomic DNA
tcccatcctcgtcgcca

SEQ ID NO: 51315 - DNA, 16 bp, Homo sapiens
  source 1..16: mol_type = genomic DNA
tcccatctggggtgcc

SEQ ID NO: 51316 - DNA, 16 bp, Homo sapiens
  source 1..16: mol_type = genomic DNA
tcccatctgggtcgcc

SEQ ID NO: 51317 - DNA, 27 bp, Homo sapiens
  source 1..27: mol_type = genomic DNA
tcccatggtgtaatggttagcactctg

SEQ ID NO: 51318 - DNA, 16 bp, Homo sapiens
  source 1..16: mol_type = genomic DNA
tcccattggtctagcc

SEQ ID NO: 51319 - DNA, 16 bp, Homo sapiens
  source 1..16: mol_type = genomic DNA
tccccagcatctccac

SEQ ID NO: 51320 - DNA, 17 bp, Homo sapiens
  source 1..17: mol_type = genomic DNA
tccccagcatctccacc

SEQ ID NO: 51321 - DNA, 18 bp, Homo sapiens
  source 1..18: mol_type = genomic DNA
tccccagcatctccacca

SEQ ID NO: 51322 - DNA, 18 bp, Homo sapiens
  source 1..18: mol_type = genomic DNA
tccccagtacctccacca

SEQ ID NO: 51323 - DNA, 22 bp, Homo sapiens
  source 1..22: mol_type = genomic DNA
tccccgcgcaggttcgaaccct

SEQ ID NO: 51324 - DNA, 22 bp, Homo sapiens
  source 1..22: mol_type = genomic DNA
tccccgcgcaggttcgaatcct

SEQ ID NO: 51325 - DNA, 16 bp, Homo sapiens
  source 1..16: mol_type = genomic DNA
tccccggcacctccac

SEQ ID NO: 51326 - DNA, 17 bp, Homo sapiens
  source 1..17: mol_type = genomic DNA
tccccggcacctccacc

SEQ ID NO: 51327 - DNA, 18 bp, Homo sapiens
  source 1..18: mol_type = genomic DNA
tccccggcacctccacca

SEQ ID NO: 51328 - DNA, 16 bp, Homo sapiens
  source 1..16: mol_type = genomic DNA
tccccggcatctccac

SEQ ID NO: 51329 - DNA, 17 bp, Homo sapiens
  source 1..17: mol_type = genomic DNA
tccccggcatctccacc

SEQ ID NO: 51330 - DNA, 18 bp, Homo sapiens
  source 1..18: mol_type = genomic DNA
tccccggcatctccacca

SEQ ID NO: 51331 - DNA, 23 bp, Homo sapiens
  source 1..23: mol_type = genomic DNA
tccccggttcgaaaccgggcgga

SEQ ID NO: 51332 - DNA, 16 bp, Homo sapiens
  source 1..16: mol_type = genomic DNA
tccccgtacgggccac

SEQ ID NO: 51333 - DNA, 17 bp, Homo sapiens
  source 1..17: mol_type = genomic DNA
tccccgtacgggccacc

SEQ ID NO: 51334 - DNA, 18 bp, Homo sapiens
  source 1..18: mol_type = genomic DNA
tccccgtacgggccacca

SEQ ID NO: 51335 - DNA, 17 bp, Homo sapiens
  source 1..17: mol_type = genomic DNA
tccccgtactggccacc

SEQ ID NO: 51336 - DNA, 16 bp, Homo sapiens
  source 1..16: mol_type = genomic DNA
tcccggacgagccccc

SEQ ID NO: 51337 - DNA, 17 bp, Homo sapiens
  source 1..17: mol_type = genomic DNA
tcccggacgagccccca

SEQ ID NO: 51338 - DNA, 16 bp, Homo sapiens
  source 1..16: mol_type = genomic DNA
tcccggccaacgcacc

SEQ ID NO: 51339 - DNA, 17 bp, Homo sapiens
  source 1..17: mol_type = genomic DNA
tcccggccaacgcacca

SEQ ID NO: 51340 - DNA, 16 bp, Homo sapiens
  source 1..16: mol_type = genomic DNA
tcccggccaatgcacc

SEQ ID NO: 51341 - DNA, 17 bp, Homo sapiens
  source 1..17: mol_type = genomic DNA
tcccggccaatgcacca

SEQ ID NO: 51342 - DNA, 16 bp, Homo sapiens
  source 1..16: mol_type = genomic DNA
tcccggccactgcacc

SEQ ID NO: 51343 - DNA, 17 bp, Homo sapiens
  source 1..17: mol_type = genomic DNA
tcccggccagtgcacca

SEQ ID NO: 51344 - DNA, 16 bp, Homo sapiens
  source 1..16: mol_type = genomic DNA
tcccggcccatgcacc

SEQ ID NO: 51345 - DNA, 17 bp, Homo sapiens
  source 1..17: mol_type = genomic DNA
tcccggcccatgcacca

SEQ ID NO: 51346 - DNA, 16 bp, Homo sapiens
  source 1..16: mol_type = genomic DNA
tcccggcggagtcgcc

SEQ ID NO: 51347 - DNA, 17 bp, Homo sapiens
  source 1..17: mol_type = genomic DNA
tcccggcggagtcgcca

SEQ ID NO: 51348 - DNA, 16 bp, Homo sapiens
  source 1..16: mol_type = genomic DNA
tcccgggcggaaacac

SEQ ID NO: 51349 - DNA, 17 bp, Homo sapiens
  source 1..17: mol_type = genomic DNA
tcccgggcggaaacacc

SEQ ID NO: 51350 - DNA, 16 bp, Homo sapiens
  source 1..16: mol_type = genomic DNA
tcccgggcggcgcacc

SEQ ID NO: 51351 - DNA, 17 bp, Homo sapiens
  source 1..17: mol_type = genomic DNA
tcccgggcggcgcacca

SEQ ID NO: 51352 - DNA, 16 bp, Homo sapiens
  source 1..16: mol_type = genomic DNA
tcccgggtttcggcac

SEQ ID NO: 51353 - DNA, 17 bp, Homo sapiens
  source 1..17: mol_type = genomic DNA
tcccgggtttcggcacc

SEQ ID NO: 51354 - DNA, 18 bp, Homo sapiens
  source 1..18: mol_type = genomic DNA
tcccgggtttcggcacca

SEQ ID NO: 51355 - DNA, 16 bp, Homo sapiens
  source 1..16: mol_type = genomic DNA
tcccggtatgggaacc

SEQ ID NO: 51356 - DNA, 16 bp, Homo sapiens
  source 1..16: mol_type = genomic DNA
tcccggtcagggaacc

SEQ ID NO: 51357 - DNA, 17 bp, Homo sapiens
  source 1..17: mol_type = genomic DNA
tcccggtcagggaacca

SEQ ID NO: 51358 - DNA, 16 bp, Homo sapiens
  source 1..16: mol_type = genomic DNA
tcccggtgtgggaacc

SEQ ID NO: 51359 - DNA, 17 bp, Homo sapiens
  source 1..17: mol_type = genomic DNA
tcccggtgtgggaacca

SEQ ID NO: 51360 - DNA, 19 bp, Homo sapiens
  source 1..19: mol_type = genomic DNA
tccctggtctagtggttag

SEQ ID NO: 51361 - DNA, 22 bp, Homo sapiens
  source 1..22: mol_type = genomic DNA
tccctggtctagtggttaggat

SEQ ID NO: 51362 - DNA, 23 bp, Homo sapiens
  source 1..23: mol_type = genomic DNA
tccctggtctagtggttaggatt

SEQ ID NO: 51363 - DNA, 16 bp, Homo sapiens
  source 1..16: mol_type = genomic DNA
tccctggtggtctagt

SEQ ID NO: 51364 - DNA, 17 bp, Homo sapiens
  source 1..17: mol_type = genomic DNA
tccctggtggtctagtg

SEQ ID NO: 51365 - DNA, 18 bp, Homo sapiens
  source 1..18: mol_type = genomic DNA
tccctggtggtctagtgg

SEQ ID NO: 51366 - DNA, 19 bp, Homo sapiens
  source 1..19: mol_type = genomic DNA
tccctggtggtctagtggc

SEQ ID NO: 51367 - DNA, 20 bp, Homo sapiens
  source 1..20: mol_type = genomic DNA
tccctggtggtctagtggct

SEQ ID NO: 51368 - DNA, 22 bp, Homo sapiens
  source 1..22: mol_type = genomic DNA
tccctggtggtctagtggctag

SEQ ID NO: 51369 - DNA, 27 bp, Homo sapiens
  source 1..27: mol_type = genomic DNA
tccctggtggtctagtggctaggattc

SEQ ID NO: 51370 - DNA, 28 bp, Homo sapiens
  source 1..28: mol_type = genomic DNA
tccctggtggtctagtggctaggattcg

SEQ ID NO: 51371 - DNA, 29 bp, Homo sapiens
  source 1..29: mol_type = genomic DNA
tccctggtggtctagtggctaggattcgg

SEQ ID NO: 51372 - DNA, 30 bp, Homo sapiens; identical to SEQ ID NO: 25675
  source 1..30: mol_type = genomic DNA

SEQ ID NO: 51373 - DNA, 31 bp, Homo sapiens; identical to SEQ ID NO: 25676
  source 1..31: mol_type = genomic DNA

SEQ ID NO: 51374 - DNA, 32 bp, Homo sapiens; identical to SEQ ID NO: 25677
  source 1..32: mol_type = genomic DNA

SEQ ID NO: 51375 - DNA, 33 bp, Homo sapiens; identical to SEQ ID NO: 25678
  source 1..33: mol_type = genomic DNA

SEQ ID NO: 51376 - DNA, 34 bp, Homo sapiens; identical to SEQ ID NO: 25679
  source 1..34: mol_type = genomic DNA

SEQ ID NO: 51377 - DNA, 35 bp, Homo sapiens; identical to SEQ ID NO: 25680
  source 1..35: mol_type = genomic DNA

SEQ ID NO: 51378 - DNA, 36 bp, Homo sapiens; identical to SEQ ID NO: 25681
  source 1..36: mol_type = genomic DNA

SEQ ID NO: 51379 - DNA, 39 bp, Homo sapiens; identical to SEQ ID NO: 25684
  source 1..39: mol_type = genomic DNA

SEQ ID NO: 51380 - DNA, 19 bp, Homo sapiens
  source 1..19: mol_type = genomic DNA
tccctggtggtctagtggt

SEQ ID NO: 51381 - DNA, 20 bp, Homo sapiens
  source 1..20: mol_type = genomic DNA
tccctggtggtctagtggtt

SEQ ID NO: 51382 - DNA, 22 bp, Homo sapiens
  source 1..22: mol_type = genomic DNA
tccctggtggtctagtggttag

SEQ ID NO: 51383 - DNA, 23 bp, Homo sapiens
  source 1..23: mol_type = genomic DNA
tccctggtggtctagtggttagg

SEQ ID NO: 51384 - DNA, 24 bp, Homo sapiens
  source 1..24: mol_type = genomic DNA
tccctggtggtctagtggttagga

SEQ ID NO: 51385 - DNA, 25 bp, Homo sapiens
  source 1..25: mol_type = genomic DNA
tccctggtggtctagtggttaggat

SEQ ID NO: 51386 - DNA, 26 bp, Homo sapiens
  source 1..26: mol_type = genomic DNA
tccctggtggtctagtggttaggatt

SEQ ID NO: 51387 - DNA, 27 bp, Homo sapiens
  source 1..27: mol_type = genomic DNA
tccctggtggtctagtggttaggattc

SEQ ID NO: 51388 - DNA, 28 bp, Homo sapiens
  source 1..28: mol_type = genomic DNA
tccctggtggtctagtggttaggattcg

SEQ ID NO: 51389 - DNA, 29 bp, Homo sapiens
  source 1..29: mol_type = genomic DNA
tccctggtggtctagtggttaggattcgg

SEQ ID NO: 51390 - DNA, 30 bp, Homo sapiens; identical to SEQ ID NO: 25700
  source 1..30: mol_type = genomic DNA

SEQ ID NO: 51391 - DNA, 31 bp, Homo sapiens; identical to SEQ ID NO: 25701
  source 1..31: mol_type = genomic DNA

SEQ ID NO: 51392 - DNA, 32 bp, Homo sapiens; identical to SEQ ID NO: 25702
  source 1..32: mol_type = genomic DNA

SEQ ID NO: 51393 - DNA, 33 bp, Homo sapiens; identical to SEQ ID NO: 25703
  source 1..33: mol_type = genomic DNA

SEQ ID NO: 51394 - DNA, 34 bp, Homo sapiens; identical to SEQ ID NO: 25704
  source 1..34: mol_type = genomic DNA

SEQ ID NO: 51395 - DNA, 35 bp, Homo sapiens; identical to SEQ ID NO: 25705
  source 1..35: mol_type = genomic DNA

SEQ ID NO: 51396 - DNA, 36 bp, Homo sapiens; identical to SEQ ID NO: 25706
  source 1..36: mol_type = genomic DNA

SEQ ID NO: 51397 - DNA, 37 bp, Homo sapiens; identical to SEQ ID NO: 25707
  source 1..37: mol_type = genomic DNA

SEQ ID NO: 51398 - DNA, 38 bp, Homo sapiens; identical to SEQ ID NO: 25708
  source 1..38: mol_type = genomic DNA

SEQ ID NO: 51399 - DNA, 39 bp, Homo sapiens; identical to SEQ ID NO: 25709
  source 1..39: mol_type = genomic DNA

SEQ ID NO: 51400 - DNA, 40 bp, Homo sapiens; identical to SEQ ID NO: 25710
  source 1..40: mol_type = genomic DNA

SEQ ID NO: 51401 - DNA, 41 bp, Homo sapiens; identical to SEQ ID NO: 25711
  source 1..41: mol_type = genomic DNA

SEQ ID NO: 51402 - DNA, 42 bp, Homo sapiens; identical to SEQ ID NO: 25712
  source 1..42: mol_type = genomic DNA

SEQ ID NO: 51403 - DNA, 46 bp, Homo sapiens; identical to SEQ ID NO: 25716
  source 1..46: mol_type = genomic DNA

SEQ ID NO: 51404 - DNA, 47 bp, Homo sapiens; identical to SEQ ID NO: 25717
  source 1..47: mol_type = genomic DNA

SEQ ID NO: 51405 - DNA, 27 bp, Homo sapiens
  source 1..27: mol_type = genomic DNA
tccctggttcgatcccgggtttcggca

SEQ ID NO: 51406 - DNA, 28 bp, Homo sapiens
  source 1..28: mol_type = genomic DNA
tccctggttcgatcccgggtttcggcac

SEQ ID NO: 51407 - DNA, 30 bp, Homo sapiens; identical to SEQ ID NO: 25729
  source 1..30: mol_type = genomic DNA

SEQ ID NO: 51408 - DNA, 16 bp, Homo sapiens
  source 1..16: mol_type = genomic DNA
tccctgtggtctagtg

SEQ ID NO: 51409 - DNA, 17 bp, Homo sapiens
  source 1..17: mol_type = genomic DNA
tccctgtggtctagtgg

SEQ ID NO: 51410 - DNA, 18 bp, Homo sapiens
  source 1..18: mol_type = genomic DNA
tccctgtggtctagtggt

SEQ ID NO: 51411 - DNA, 21 bp, Homo sapiens
  source 1..21: mol_type = genomic DNA
tccctgtggtctagtggttag

SEQ ID NO: 51412 - DNA, 16 bp, Homo sapiens
  source 1..16: mol_type = genomic DNA
tccctgttcgggcgcc

SEQ ID NO: 51413 - DNA, 17 bp, Homo sapiens
  source 1..17: mol_type = genomic DNA
tccctgttcgggcgcca

SEQ ID NO: 51414 - DNA, 16 bp, Homo sapiens
  source 1..16: mol_type = genomic DNA
tcccttcgtggtcgcc

SEQ ID NO: 51415 - DNA, 17 bp, Homo sapiens
  source 1..17: mol_type = genomic DNA
tcccttcgtggtcgcca

SEQ ID NO: 51416 - DNA, 37 bp, Homo sapiens; identical to SEQ ID NO: 25746
  source 1..37: mol_type = genomic DNA

SEQ ID NO: 51417 - DNA, 16 bp, Homo sapiens
  source 1..16: mol_type = genomic DNA
tccgagtcacggcacc

SEQ ID NO: 51418 - DNA, 17 bp, Homo sapiens
  source 1..17: mol_type = genomic DNA
tccgagtcacggcacca

SEQ ID NO: 51419 - DNA, 26 bp, Homo sapiens
  source 1..26: mol_type = genomic DNA
tccgagttcaaatctcggtgggacct

SEQ ID NO: 51420 - DNA, 27 bp, Homo sapiens
  source 1..27: mol_type = genomic DNA
tccgagttcaaatctcggtgggacctc

SEQ ID NO: 51421 - DNA, 19 bp, Homo sapiens
  source 1..19: mol_type = genomic DNA
tccggatggaggcgtgggt

SEQ ID NO: 51422 - DNA, 38 bp, Homo sapiens; identical to SEQ ID NO: 25794
  source 1..38: mol_type = genomic DNA

SEQ ID NO: 51423 - DNA, 39 bp, Homo sapiens; identical to SEQ ID NO: 25795
  source 1..39: mol_type = genomic DNA

SEQ ID NO: 51424 - DNA, 40 bp, Homo sapiens; identical to SEQ ID NO: 25796
  source 1..40: mol_type = genomic DNA

SEQ ID NO: 51425 - DNA, 41 bp, Homo sapiens; identical to SEQ ID NO: 25797
  source 1..41: mol_type = genomic DNA

SEQ ID NO: 51426 - DNA, 16 bp, Homo sapiens
  source 1..16: mol_type = genomic DNA
tccggctcgaaggacc

SEQ ID NO: 51427 - DNA, 17 bp, Homo sapiens
  source 1..17: mol_type = genomic DNA
tccggctcgaaggacca

SEQ ID NO: 51428 - DNA, 16 bp, Homo sapiens
  source 1..16: mol_type = genomic DNA
tccggctcggaggacc

SEQ ID NO: 51429 - DNA, 17 bp, Homo sapiens
  source 1..17: mol_type = genomic DNA
tccggctcggaggacca

SEQ ID NO: 51430 - DNA, 16 bp, Homo sapiens
  source 1..16: mol_type = genomic DNA
tccgggtgccccctcc

SEQ ID NO: 51431 - DNA, 17 bp, Homo sapiens
  source 1..17: mol_type = genomic DNA
tccgggtgccccctcca

SEQ ID NO: 51432 - DNA, 28 bp, Homo sapiens
  source 1..28: mol_type = genomic DNA
tccgggttcgagtcccggcggagtcgcc

SEQ ID NO: 51433 - DNA, 20 bp, Homo sapiens
  source 1..20: mol_type = genomic DNA
tccgtagtgtagtggtcatc

SEQ ID NO: 51434 - DNA, 29 bp, Homo sapiens
  source 1..29: mol_type = genomic DNA
tccgtagtgtagtggtcatcacgttcgcc

SEQ ID NO: 51435 - DNA, 30 bp, Homo sapiens; identical to SEQ ID NO: 25831
  source 1..30: mol_type = genomic DNA

SEQ ID NO: 51436 - DNA, 20 bp, Homo sapiens
  source 1..20: mol_type = genomic DNA
tccgtagtgtagtggttatc

SEQ ID NO: 51437 - DNA, 29 bp, Homo sapiens
  source 1..29: mol_type = genomic DNA
tccgtagtgtagtggttatcacgttcgcc

SEQ ID NO: 51438 - DNA, 30 bp, Homo sapiens; identical to SEQ ID NO: 25843
  source 1..30: mol_type = genomic DNA

SEQ ID NO: 51439 - DNA, 33 bp, Homo sapiens; identical to SEQ ID NO: 25849
  source 1..33: mol_type = genomic DNA

SEQ ID NO: 51440 - DNA, 33 bp, Homo sapiens; identical to SEQ ID NO: 25866
  source 1..33: mol_type = genomic DNA

SEQ ID NO: 51441 - DNA, 43 bp, Homo sapiens; identical to SEQ ID NO: 25873
  source 1..43: mol_type = genomic DNA

SEQ ID NO: 51442 - DNA, 44 bp, Homo sapiens; identical to SEQ ID NO: 25874
  source 1..44: mol_type = genomic DNA

SEQ ID NO: 51443 - DNA, 16 bp, Homo sapiens
  source 1..16: mol_type = genomic DNA
tcctcacacggggcac

SEQ ID NO: 51444 - DNA, 17 bp, Homo sapiens
  source 1..17: mol_type = genomic DNA
tcctcacacggggcacc

SEQ ID NO: 51445 - DNA, 18 bp, Homo sapiens
  source 1..18: mol_type = genomic DNA
tcctcacacggggcacca

SEQ ID NO: 51446 - DNA, 16 bp, Homo sapiens
  source 1..16: mol_type = genomic DNA
tcctcacctggagcac

SEQ ID NO: 51447 - DNA, 17 bp, Homo sapiens
  source 1..17: mol_type = genomic DNA
tcctcacctggagcacc

SEQ ID NO: 51448 - DNA, 18 bp, Homo sapiens
  source 1..18: mol_type = genomic DNA
tcctcacctggagcacca

SEQ ID NO: 51449 - DNA, 16 bp, Homo sapiens
  source 1..16: mol_type = genomic DNA
tcctcgctggggcctc

SEQ ID NO: 51450 - DNA, 16 bp, Homo sapiens
  source 1..16: mol_type = genomic DNA
tcctcgttagtatagt

SEQ ID NO: 51451 - DNA, 17 bp, Homo sapiens
  source 1..17: mol_type = genomic DNA
tcctcgttagtatagtg

SEQ ID NO: 51452 - DNA, 29 bp, Homo sapiens
  source 1..29: mol_type = genomic DNA
tcctcgttagtatagtggtgagtatcccc

SEQ ID NO: 51453 - DNA, 30 bp, Homo sapiens; identical to SEQ ID NO: 25906
  source 1..30: mol_type = genomic DNA

SEQ ID NO: 51454 - DNA, 32 bp, Homo sapiens; identical to SEQ ID NO: 25908
  source 1..32: mol_type = genomic DNA

SEQ ID NO: 51455 - DNA, 33 bp, Homo sapiens; identical to SEQ ID NO: 25909
  source 1..33: mol_type = genomic DNA

SEQ ID NO: 51456 - DNA, 34 bp, Homo sapiens; identical to SEQ ID NO: 25910
  source 1..34: mol_type = genomic DNA

SEQ ID NO: 51457 - DNA, 35 bp, Homo sapiens; identical to SEQ ID NO: 25911
  source 1..35: mol_type = genomic DNA

SEQ ID NO: 51458 - DNA, 36 bp, Homo sapiens; identical to SEQ ID NO: 25912
  source 1..36: mol_type = genomic DNA

SEQ ID NO: 51459 - DNA, 32 bp, Homo sapiens; identical to SEQ ID NO: 25930
  source 1..32: mol_type = genomic DNA

SEQ ID NO: 51460 - DNA, 33 bp, Homo sapiens; identical to SEQ ID NO: 25931
  source 1..33: mol_type = genomic DNA

SEQ ID NO: 51461 - DNA, 34 bp, Homo sapiens; identical to SEQ ID NO: 25932
  source 1..34: mol_type = genomic DNA

SEQ ID NO: 51462 - DNA, 35 bp, Homo sapiens; identical to SEQ ID NO: 25933
  source 1..35: mol_type = genomic DNA

SEQ ID NO: 51463 - DNA, 36 bp, Homo sapiens; identical to SEQ ID NO: 25934
  source 1..36: mol_type = genomic DNA

SEQ ID NO: 51464 - DNA, 16 bp, Homo sapiens
  source 1..16: mol_type = genomic DNA
tcctgccgactacgcc

SEQ ID NO: 51465 - DNA, 17 bp, Homo sapiens
  source 1..17: mol_type = genomic DNA
tcctgccgactacgcca

SEQ ID NO: 51466 - DNA, 16 bp, Homo sapiens
  source 1..16: mol_type = genomic DNA
tcctgccgcggtcgcc

SEQ ID NO: 51467 - DNA, 17 bp, Homo sapiens
  source 1..17: mol_type = genomic DNA
tcctgccgcggtcgcca

SEQ ID NO: 51468 - DNA, 16 bp, Homo sapiens
  source 1..16: mol_type = genomic DNA
tcctgctcacagcgcc

SEQ ID NO: 51469 - DNA, 17 bp, Homo sapiens
  source 1..17: mol_type = genomic DNA
tcctgctcacagcgcca

SEQ ID NO: 51470 - DNA, 16 bp, Homo sapiens
  source 1..16: mol_type = genomic DNA
tcctggctggctcgcc

SEQ ID NO: 51471 - DNA, 17 bp, Homo sapiens
  source 1..17: mol_type = genomic DNA
tcctggctggctcgcca

SEQ ID NO: 51472 - DNA, 29 bp, Homo sapiens
  source 1..29: mol_type = genomic DNA
tcctgggttcgagccccagtggaaccacc

SEQ ID NO: 51473 - DNA, 47 bp, Homo sapiens; identical to SEQ ID NO: 41283
  source 1..47: mol_type = genomic DNA

SEQ ID NO: 51474 - DNA, 16 bp, Homo sapiens
  source 1..16: mol_type = genomic DNA
tcctgtcggctacgcc

SEQ ID NO: 51475 - DNA, 17 bp, Homo sapiens
  source 1..17: mol_type = genomic DNA
tcctgtcggctacgcca

SEQ ID NO: 51476 - DNA, 16 bp, Homo sapiens
  source 1..16: mol_type = genomic DNA
tcctgttcgtgacgcc

SEQ ID NO: 51477 - DNA, 17 bp, Homo sapiens
  source 1..17: mol_type = genomic DNA
tcctgttcgtgacgcca

SEQ ID NO: 51478 - DNA, 36 bp, Homo sapiens
  source 1..36: mol_type = genomic DNA
tccttaggtcgctggttcgaatccggctcgaaggac

SEQ ID NO: 51479 - DNA, 18 bp, Homo sapiens
  source 1..18: mol_type = genomic DNA
tcgaaaccatcctctgct

SEQ ID NO: 51480 - DNA, 21 bp, Homo sapiens
  source 1..21: mol_type = genomic DNA
tcgaaaccatcctctgctacc

SEQ ID NO: 51481 - DNA, 22 bp, Homo sapiens
  source 1..22: mol_type = genomic DNA
tcgaaaccatcctctgctacca

SEQ ID NO: 51482 - DNA, 21 bp, Homo sapiens
  source 1..21: mol_type = genomic DNA
tcgaaaccgggcagaagcacc

SEQ ID NO: 51483 - DNA, 22 bp, Homo sapiens
  source 1..22: mol_type = genomic DNA
tcgaaaccgggcagaagcacca

SEQ ID NO: 51484 - DNA, 16 bp, Homo sapiens
  source 1..16: mol_type = genomic DNA
tcgaaaccgggcggaa

SEQ ID NO: 51485 - DNA, 17 bp, Homo sapiens
  source 1..17: mol_type = genomic DNA
tcgaaaccgggcggaaa

SEQ ID NO: 51486 - DNA, 18 bp, Homo sapiens
  source 1..18: mol_type = genomic DNA
tcgaaaccgggcggaaac

SEQ ID NO: 51487 - DNA, 19 bp, Homo sapiens
  source 1..19: mol_type = genomic DNA
tcgaaaccgggcggaaaca

SEQ ID NO: 51488 - DNA, 20 bp, Homo sapiens
  source 1..20: mol_type = genomic DNA
tcgaaaccgggcggaaacac

SEQ ID NO: 51489 - DNA, 21 bp, Homo sapiens
  source 1..21: mol_type = genomic DNA
tcgaaaccgggcggaaacacc

SEQ ID NO: 51490 - DNA, 22 bp, Homo sapiens
  source 1..22: mol_type = genomic DNA
tcgaaaccgggcggaaacacca

SEQ ID NO: 51491 - DNA, 23 bp, Homo sapiens
  source 1..23: mol_type = genomic DNA
tcgaaatccaatggggtttcccc

SEQ ID NO: 51492 - DNA, 21 bp, Homo sapiens
  source 1..21: mol_type = genomic DNA
tcgaaccccactcctggtacc

SEQ ID NO: 51493 - DNA, 19 bp, Homo sapiens
  source 1..19: mol_type = genomic DNA
tcgaaccccgtccgtgcct

SEQ ID NO: 51494 - DNA, 20 bp, Homo sapiens
  source 1..20: mol_type = genomic DNA
tcgaaccccgtccgtgcctc

SEQ ID NO: 51495 - DNA, 21 bp, Homo sapiens
  source 1..21: mol_type = genomic DNA
tcgaaccctgctcgctgcgcc

SEQ ID NO: 51496 - DNA, 22 bp, Homo sapiens
  source 1..22: mol_type = genomic DNA
tcgaaccctgctcgctgcgcca

SEQ ID NO: 51497 - DNA, 18 bp, Homo sapiens
  source 1..18: mol_type = genomic DNA
tcgaacctcagagggggc

SEQ ID NO: 51498 - DNA, 22 bp, Homo sapiens
  source 1..22: mol_type = genomic DNA
tcgaacctcagagggggcacca

SEQ ID NO: 51499 - DNA, 23 bp, Homo sapiens
  source 1..23: mol_type = genomic DNA
tcgaagaagcagcttcaaacctg

SEQ ID NO: 51500 - DNA, 28 bp, Homo sapiens
  source 1..28: mol_type = genomic DNA
tcgaagaagcagcttcaaacctgccggg

SEQ ID NO: 51501 - DNA, 29 bp, Homo sapiens
  source 1..29: mol_type = genomic DNA
tcgaagaagcagcttcaaacctgccgggg

SEQ ID NO: 51502 - DNA, 30 bp, Homo sapiens; identical to SEQ ID NO: 26039
  source 1..30: mol_type = genomic DNA

SEQ ID NO: 51503 - DNA, 31 bp, Homo sapiens; identical to SEQ ID NO: 26040
  source 1..31: mol_type = genomic DNA

SEQ ID NO: 51504 - DNA, 32 bp, Homo sapiens; identical to SEQ ID NO: 26041
  source 1..32: mol_type = genomic DNA

SEQ ID NO: 51505 - DNA, 33 bp, Homo sapiens; identical to SEQ ID NO: 26042
  source 1..33: mol_type = genomic DNA

SEQ ID NO: 51506 - DNA, 34 bp, Homo sapiens; identical to SEQ ID NO: 26043
  source 1..34: mol_type = genomic DNA

SEQ ID NO: 51507 - DNA, 35 bp, Homo sapiens; identical to SEQ ID NO: 26044
  source 1..35: mol_type = genomic DNA

SEQ ID NO: 51508 - DNA, 16 bp, Homo sapiens
  source 1..16: mol_type = genomic DNA
tcgaatcacgtcgggg

SEQ ID NO: 51509 - DNA, 20 bp, Homo sapiens
  source 1..20: mol_type = genomic DNA
tcgaatcacgtcggggtcac

SEQ ID NO: 51510 - DNA, 21 bp, Homo sapiens
  source 1..21: mol_type = genomic DNA
tcgaatcacgtcggggtcacc

SEQ ID NO: 51511 - DNA, 22 bp, Homo sapiens
  source 1..22: mol_type = genomic DNA
tcgaatcacgtcggggtcacca

SEQ ID NO: 51512 - DNA, 18 bp, Homo sapiens
  source 1..18: mol_type = genomic DNA
tcgaatcccaccgctgcc

SEQ ID NO: 51513 - DNA, 21 bp, Homo sapiens
  source 1..21: mol_type = genomic DNA
tcgaatcccaccgctgccacc

SEQ ID NO: 51514 - DNA, 22 bp, Homo sapiens
  source 1..22: mol_type = genomic DNA
tcgaatcccaccgctgccacca

SEQ ID NO: 51515 - DNA, 20 bp, Homo sapiens
  source 1..20: mol_type = genomic DNA
tcgaatcccactcctgacac

SEQ ID NO: 51516 - DNA, 21 bp, Homo sapiens
  source 1..21: mol_type = genomic DNA
tcgaatcccactcctgacacc

SEQ ID NO: 51517 - DNA, 22 bp, Homo sapiens
  source 1..22: mol_type = genomic DNA
tcgaatcccactcctgacacca

SEQ ID NO: 51518 - DNA, 19 bp, Homo sapiens
  source 1..19: mol_type = genomic DNA
tcgaatcccacttctgaca

SEQ ID NO: 51519 - DNA, 21 bp, Homo sapiens
  source 1..21: mol_type = genomic DNA
tcgaatcccacttctgacacc

SEQ ID NO: 51520 - DNA, 22 bp, Homo sapiens
  source 1..22: mol_type = genomic DNA
tcgaatcccacttctgacacca

SEQ ID NO: 51521 - DNA, 19 bp, Homo sapiens
  source 1..19: mol_type = genomic DNA
tcgaatcccagcggggcct

SEQ ID NO: 51522 - DNA, 20 bp, Homo sapiens
  source 1..20: mol_type = genomic DNA
tcgaatcccagcggggcctc

SEQ ID NO: 51523 - DNA, 22 bp, Homo sapiens
  source 1..22: mol_type = genomic DNA
tcgaatcccagcggggcctcca

SEQ ID NO: 51524 - DNA, 16 bp, Homo sapiens
  source 1..16: mol_type = genomic DNA
tcgaatcccagcggtg

SEQ ID NO: 51525 - DNA, 19 bp, Homo sapiens
  source 1..19: mol_type = genomic DNA
tcgaatcccagcggtgcct

SEQ ID NO: 51526 - DNA, 20 bp, Homo sapiens
  source 1..20: mol_type = genomic DNA
tcgaatcccagcggtgcctc

SEQ ID NO: 51527 - DNA, 21 bp, Homo sapiens
  source 1..21: mol_type = genomic DNA
tcgaatcccagcggtgcctcc

SEQ ID NO: 51528 - DNA, 22 bp, Homo sapiens
  source 1..22: mol_type = genomic DNA
tcgaatcccagcggtgcctcca

SEQ ID NO: 51529 - DNA, 19 bp, Homo sapiens
  source 1..19: mol_type = genomic DNA
tcgaatcccatcctcgtcg

SEQ ID NO: 51530 - DNA, 20 bp, Homo sapiens
  source 1..20: mol_type = genomic DNA
tcgaatcccatcctcgtcgc

SEQ ID NO: 51531 - DNA, 21 bp, Homo sapiens
  source 1..21: mol_type = genomic DNA
tcgaatcccatcctcgtcgcc

SEQ ID NO: 51532 - DNA, 22 bp, Homo sapiens
  source 1..22: mol_type = genomic DNA
tcgaatcccatcctcgtcgcca

SEQ ID NO: 51533 - DNA, 18 bp, Homo sapiens
  source 1..18: mol_type = genomic DNA
tcgaatccgagtcacggc

SEQ ID NO: 51534 - DNA, 19 bp, Homo sapiens
  source 1..19: mol_type = genomic DNA
tcgaatccgagtcacggca

SEQ ID NO: 51535 - DNA, 20 bp, Homo sapiens
  source 1..20: mol_type = genomic DNA
tcgaatccgagtcacggcac

SEQ ID NO: 51536 - DNA, 21 bp, Homo sapiens
  source 1..21: mol_type = genomic DNA
tcgaatccgagtcacggcacc

SEQ ID NO: 51537 - DNA, 22 bp, Homo sapiens
  source 1..22: mol_type = genomic DNA
tcgaatccgagtcacggcacca

SEQ ID NO: 51538 - DNA, 20 bp, Homo sapiens
  source 1..20: mol_type = genomic DNA
tcgaatccggctcgaaggac

SEQ ID NO: 51539 - DNA, 21 bp, Homo sapiens
  source 1..21: mol_type = genomic DNA
tcgaatccggctcgaaggacc

SEQ ID NO: 51540 - DNA, 22 bp, Homo sapiens
  source 1..22: mol_type = genomic DNA
tcgaatccggctcgaaggacca

SEQ ID NO: 51541 - DNA, 21 bp, Homo sapiens
  source 1..21: mol_type = genomic DNA
tcgaatccggctcggaggacc

SEQ ID NO: 51542 - DNA, 21 bp, Homo sapiens
  source 1..21: mol_type = genomic DNA
tcgaatcctgccgactacgcc

SEQ ID NO: 51543 - DNA, 22 bp, Homo sapiens
  source 1..22: mol_type = genomic DNA
tcgaatcctgccgactacgcca

SEQ ID NO: 51544 - DNA, 21 bp, Homo sapiens
  source 1..21: mol_type = genomic DNA
tcgaatcctgctcacagcgcc

SEQ ID NO: 51545 - DNA, 22 bp, Homo sapiens
  source 1..22: mol_type = genomic DNA
tcgaatcctgctcacagcgcca

SEQ ID NO: 51546 - DNA, 22 bp, Homo sapiens
  source 1..22: mol_type = genomic DNA
tcgaatcctgtcggctacgcca

SEQ ID NO: 51547 - DNA, 21 bp, Homo sapiens
  source 1..21: mol_type = genomic DNA
tcgaatcctgttcgtgacgcc

SEQ ID NO: 51548 - DNA, 20 bp, Homo sapiens
  source 1..20: mol_type = genomic DNA
tcgactcccggtatgggaac

SEQ ID NO: 51549 - DNA, 17 bp, Homo sapiens
  source 1..17: mol_type = genomic DNA
tcgactcccggtgtggg

SEQ ID NO: 51550 - DNA, 18 bp, Homo sapiens
  source 1..18: mol_type = genomic DNA
tcgactcccggtgtggga

SEQ ID NO: 51551 - DNA, 19 bp, Homo sapiens
  source 1..19: mol_type = genomic DNA
tcgactcccggtgtgggaa

SEQ ID NO: 51552 - DNA, 20 bp, Homo sapiens
  source 1..20: mol_type = genomic DNA
tcgactcccggtgtgggaac

SEQ ID NO: 51553 - DNA, 21 bp, Homo sapiens
  source 1..21: mol_type = genomic DNA
tcgactcccggtgtgggaacc

SEQ ID NO: 51554 - DNA, 22 bp, Homo sapiens
  source 1..22: mol_type = genomic DNA
tcgactcccggtgtgggaacca

SEQ ID NO: 51555 - DNA, 16 bp, Homo sapiens
  source 1..16: mol_type = genomic DNA
tcgactcctggctggc

SEQ ID NO: 51556 - DNA, 17 bp, Homo sapiens
  source 1..17: mol_type = genomic DNA
tcgactcctggctggct

SEQ ID NO: 51557 - DNA, 19 bp, Homo sapiens
  source 1..19: mol_type = genomic DNA
tcgactcctggctggctcg

SEQ ID NO: 51558 - DNA, 20 bp, Homo sapiens
  source 1..20: mol_type = genomic DNA
tcgactcctggctggctcgc

SEQ ID NO: 51559 - DNA, 21 bp, Homo sapiens
  source 1..21: mol_type = genomic DNA
tcgactcctggctggctcgcc

SEQ ID NO: 51560 - DNA, 22 bp, Homo sapiens
  source 1..22: mol_type = genomic DNA
tcgactcctggctggctcgcca

SEQ ID NO: 51561 - DNA, 21 bp, Homo sapiens
  source 1..21: mol_type = genomic DNA
tcgagcccacccagggacgcc

SEQ ID NO: 51562 - DNA, 22 bp, Homo sapiens
  source 1..22: mol_type = genomic DNA
tcgagccccacgttgggcgcca

SEQ ID NO: 51563 - DNA, 17 bp, Homo sapiens
  source 1..17: mol_type = genomic DNA
tcgagccccagtggaac

SEQ ID NO: 51564 - DNA, 18 bp, Homo sapiens
  source 1..18: mol_type = genomic DNA
tcgagccccagtggaacc

SEQ ID NO: 51565 - DNA, 20 bp, Homo sapiens
  source 1..20: mol_type = genomic DNA
tcgagccccagtggaaccac

SEQ ID NO: 51566 - DNA, 21 bp, Homo sapiens
  source 1..21: mol_type = genomic DNA
tcgagccccagtggaaccacc

SEQ ID NO: 51567 - DNA, 22 bp, Homo sapiens
  source 1..22: mol_type = genomic DNA
tcgagccccagtggaaccacca

SEQ ID NO: 51568 - DNA, 21 bp, Homo sapiens
  source 1..21: mol_type = genomic DNA
tcgagcctcacctggagcacc

SEQ ID NO: 51569 - DNA, 21 bp, Homo sapiens
  source 1..21: mol_type = genomic DNA
tcgagtcccacctggggtacc

SEQ ID NO: 51570 - DNA, 19 bp, Homo sapiens
  source 1..19: mol_type = genomic DNA
tcgagtcccatctggggtg

SEQ ID NO: 51571 - DNA, 21 bp, Homo sapiens
  source 1..21: mol_type = genomic DNA
tcgagtcccatctggggtgcc

SEQ ID NO: 51572 - DNA, 21 bp, Homo sapiens
  source 1..21: mol_type = genomic DNA
tcgagtcccatctgggtcgcc

SEQ ID NO: 51573 - DNA, 22 bp, Homo sapiens
  source 1..22: mol_type = genomic DNA
tcgagtcccatctgggtcgcca

SEQ ID NO: 51574 - DNA, 20 bp, Homo sapiens
  source 1..20: mol_type = genomic DNA
tcgagtcccggcggagtcgc

SEQ ID NO: 51575 - DNA, 21 bp, Homo sapiens
  source 1..21: mol_type = genomic DNA
tcgagtcccggcggagtcgcc

SEQ ID NO: 51576 - DNA, 22 bp, Homo sapiens
  source 1..22: mol_type = genomic DNA
tcgagtcccggcggagtcgcca

SEQ ID NO: 51577 - DNA, 21 bp, Homo sapiens
  source 1..21: mol_type = genomic DNA
tcgagtcccttcgtggtcgcc

SEQ ID NO: 51578 - DNA, 22 bp, Homo sapiens
  source 1..22: mol_type = genomic DNA
tcgagtcccttcgtggtcgcca

SEQ ID NO: 51579 - DNA, 20 bp, Homo sapiens
  source 1..20: mol_type = genomic DNA
tcgagtcctgccgcggtcgc

SEQ ID NO: 51580 - DNA, 21 bp, Homo sapiens
  source 1..21: mol_type = genomic DNA
tcgagtcctgccgcggtcgcc

SEQ ID NO: 51581 - DNA, 19 bp, Homo sapiens
  source 1..19: mol_type = genomic DNA
tcgagtctcggtggaacct

SEQ ID NO: 51582 - DNA, 19 bp, Homo sapiens
  source 1..19: mol_type = genomic DNA
tcgatagagcatgagactc

SEQ ID NO: 51583 - DNA, 22 bp, Homo sapiens
  source 1..22: mol_type = genomic DNA
tcgatccccagcatctccacca

SEQ ID NO: 51584 - DNA, 21 bp, Homo sapiens
  source 1..21: mol_type = genomic DNA
tcgatccccggcacctccacc

SEQ ID NO: 51585 - DNA, 21 bp, Homo sapiens
  source 1..21: mol_type = genomic DNA
tcgatccccggcatctccacc

SEQ ID NO: 51586 - DNA, 22 bp, Homo sapiens
  source 1..22: mol_type = genomic DNA
tcgatccccggcatctccacca

SEQ ID NO: 51587 - DNA, 18 bp, Homo sapiens
  source 1..18: mol_type = genomic DNA
tcgatccccgtacgggcc

SEQ ID NO: 51588 - DNA, 21 bp, Homo sapiens
  source 1..21: mol_type = genomic DNA
tcgatccccgtacgggccacc

SEQ ID NO: 51589 - DNA, 22 bp, Homo sapiens
  source 1..22: mol_type = genomic DNA
tcgatccccgtacgggccacca

SEQ ID NO: 51590 - DNA, 21 bp, Homo sapiens
  source 1..21: mol_type = genomic DNA
tcgatcccgggcggaaacacc

SEQ ID NO: 51591 - DNA, 20 bp, Homo sapiens
  source 1..20: mol_type = genomic DNA
tcgatcccgggtttcggcac

SEQ ID NO: 51592 - DNA, 22 bp, Homo sapiens
  source 1..22: mol_type = genomic DNA
tcgatcccgggtttcggcacca

SEQ ID NO: 51593 - DNA, 21 bp, Homo sapiens
  source 1..21: mol_type = genomic DNA
tcgatcctcacacggggcacc

SEQ ID NO: 51594 - DNA, 21 bp, Homo sapiens
  source 1..21: mol_type = genomic DNA
tcgatcctcacctggagcacc

SEQ ID NO: 51595 - DNA, 21 bp, Homo sapiens
  source 1..21: mol_type = genomic DNA
tcgatgcccgcatcctccacc

SEQ ID NO: 51596 - DNA, 22 bp, Homo sapiens
  source 1..22: mol_type = genomic DNA
tcgatgcccgcatcctccacca

SEQ ID NO: 51597 - DNA, 16 bp, Homo sapiens
  source 1..16: mol_type = genomic DNA
tcgatggatcgaaacc

SEQ ID NO: 51598 - DNA, 29 bp, Homo sapiens
  source 1..29: mol_type = genomic DNA
tcgatggatcgaaaccatcctctgctacc

SEQ ID NO: 51599 - DNA, 16 bp, Homo sapiens
  source 1..16: mol_type = genomic DNA
tcgatggcgtgggttc

SEQ ID NO: 51600 - DNA, 17 bp, Homo sapiens
  source 1..17: mol_type = genomic DNA
tcgatggcgtgggttcg

SEQ ID NO: 51601 - DNA, 26 bp, Homo sapiens
  source 1..26: mol_type = genomic DNA
tcgatggcgtgggttcgaatcccacc

SEQ ID NO: 51602 - DNA, 30 bp, Homo sapiens; identical to SEQ ID NO: 26211
  source 1..30: mol_type = genomic DNA

SEQ ID NO: 51603 - DNA, 22 bp, Homo sapiens
  source 1..22: mol_type = genomic DNA
tcgattccagctcgaaggacca

SEQ ID NO: 51604 - DNA, 16 bp, Homo sapiens
  source 1..16: mol_type = genomic DNA
tcgattccccgacggg

SEQ ID NO: 51605 - DNA, 17 bp, Homo sapiens
  source 1..17: mol_type = genomic DNA
tcgattccccgacgggg

SEQ ID NO: 51606 - DNA, 18 bp, Homo sapiens
  source 1..18: mol_type = genomic DNA
tcgattccccgacgggga

SEQ ID NO: 51607 - DNA, 19 bp, Homo sapiens
  source 1..19: mol_type = genomic DNA
tcgattccccgacggggag

SEQ ID NO: 51608 - DNA, 20 bp, Homo sapiens
  source 1..20: mol_type = genomic DNA
tcgattccccgacggggagc

SEQ ID NO: 51609 - DNA, 21 bp, Homo sapiens
  source 1..21: mol_type = genomic DNA
tcgattccccgacggggagcc

SEQ ID NO: 51610 - DNA, 22 bp, Homo sapiens
  source 1..22: mol_type = genomic DNA
tcgattccccgacggggagcca

SEQ ID NO: 51611 - DNA, 17 bp, Homo sapiens
  source 1..17: mol_type = genomic DNA
tcgattcccggccaacg

SEQ ID NO: 51612 - DNA, 20 bp, Homo sapiens
  source 1..20: mol_type = genomic DNA
tcgattcccggccaacgcac

SEQ ID NO: 51613 - DNA, 21 bp, Homo sapiens
  source 1..21: mol_type = genomic DNA
tcgattcccggccaacgcacc

SEQ ID NO: 51614 - DNA, 22 bp, Homo sapiens
  source 1..22: mol_type = genomic DNA
tcgattcccggccaacgcacca

SEQ ID NO: 51615 - DNA, 19 bp, Homo sapiens
  source 1..19: mol_type = genomic DNA
tcgattcccggccaatgca

SEQ ID NO: 51616 - DNA, 20 bp, Homo sapiens
  source 1..20: mol_type = genomic DNA
tcgattcccggccaatgcac

SEQ ID NO: 51617 - DNA, 21 bp, Homo sapiens
  source 1..21: mol_type = genomic DNA
tcgattcccggccaatgcacc

SEQ ID NO: 51618 - DNA, 22 bp, Homo sapiens
  source 1..22: mol_type = genomic DNA
tcgattcccggccaatgcacca

SEQ ID NO: 51619 - DNA, 21 bp, Homo sapiens
  source 1..21: mol_type = genomic DNA
tcgattcccggcccatgcacc

SEQ ID NO: 51620 - DNA, 22 bp, Homo sapiens
  source 1..22: mol_type = genomic DNA
tcgattcccggcccatgcacca

SEQ ID NO: 51621 - DNA, 16 bp, Homo sapiens
  source 1..16: mol_type = genomic DNA
tcgattcccgggcggc

SEQ ID NO: 51622 - DNA, 17 bp, Homo sapiens
  source 1..17: mol_type = genomic DNA
tcgattcccgggcggcg

SEQ ID NO: 51623 - DNA, 19 bp, Homo sapiens
  source 1..19: mol_type = genomic DNA
tcgattcccgggcggcgca

SEQ ID NO: 51624 - DNA, 20 bp, Homo sapiens
  source 1..20: mol_type = genomic DNA
tcgattcccgggcggcgcac

SEQ ID NO: 51625 - DNA, 21 bp, Homo sapiens
  source 1..21: mol_type = genomic DNA
tcgattcccgggcggcgcacc

SEQ ID NO: 51626 - DNA, 22 bp, Homo sapiens
  source 1..22: mol_type = genomic DNA
tcgattcccgggcggcgcacca

SEQ ID NO: 51627 - DNA, 16 bp, Homo sapiens
  source 1..16: mol_type = genomic DNA
tcgattcccggtcagg

SEQ ID NO: 51628 - DNA, 21 bp, Homo sapiens
  source 1..21: mol_type = genomic DNA
tcgattcccggtcagggaacc

SEQ ID NO: 51629 - DNA, 20 bp, Homo sapiens
  source 1..20: mol_type = genomic DNA
tcgattccggctcgaaggac

SEQ ID NO: 51630 - DNA, 21 bp, Homo sapiens
  source 1..21: mol_type = genomic DNA
tcgattccggctcgaaggacc

SEQ ID NO: 51631 - DNA, 22 bp, Homo sapiens
  source 1..22: mol_type = genomic DNA
tcgattccggctcgaaggacca

SEQ ID NO: 51632 - DNA, 16 bp, Homo sapiens
  source 1..16: mol_type = genomic DNA
tcgattctcatagtcc

SEQ ID NO: 51633 - DNA, 17 bp, Homo sapiens
  source 1..17: mol_type = genomic DNA
tcgattctcatagtcct

SEQ ID NO: 51634 - DNA, 19 bp, Homo sapiens
  source 1..19: mol_type = genomic DNA
tcgattctcatagtcctag

SEQ ID NO: 51635 - DNA, 20 bp, Homo sapiens
  source 1..20: mol_type = genomic DNA
tcgattctcatagtcctagc

SEQ ID NO: 51636 - DNA, 21 bp, Homo sapiens
  source 1..21: mol_type = genomic DNA
tcgattctcatagtcctagcc

SEQ ID NO: 51637 - DNA, 22 bp, Homo sapiens
  source 1..22: mol_type = genomic DNA
tcgattctcatagtcctagcca

SEQ ID NO: 51638 - DNA, 22 bp, Homo sapiens
  source 1..22: mol_type = genomic DNA
tcgcctgccacgcgggaggccc

SEQ ID NO: 51639 - DNA, 26 bp, Homo sapiens
  source 1..26: mol_type = genomic DNA
tcgcctgccacgcgggaggcccgggt

SEQ ID NO: 51640 - DNA, 28 bp, Homo sapiens
  source 1..28: mol_type = genomic DNA
tcgcgagttcaattctcgctggggcctc

SEQ ID NO: 51641 - DNA, 25 bp, Homo sapiens
  source 1..25: mol_type = genomic DNA
tcgcgggttcgatccccgtacgggc

SEQ ID NO: 51642 - DNA, 26 bp, Homo sapiens
  source 1..26: mol_type = genomic DNA
tcgcgggttcgatccccgtacgggcc

SEQ ID NO: 51643 - DNA, 27 bp, Homo sapiens
  source 1..27: mol_type = genomic DNA
tcgcgggttcgatccccgtacgggcca

SEQ ID NO: 51644 - DNA, 28 bp, Homo sapiens
  source 1..28: mol_type = genomic DNA
tcgcgggttcgatccccgtacgggccac

SEQ ID NO: 51645 - DNA, 29 bp, Homo sapiens
  source 1..29: mol_type = genomic DNA
tcgcgggttcgatccccgtacgggccacc

SEQ ID NO: 51646 - DNA, 30 bp, Homo sapiens; identical to SEQ ID NO: 26297
  source 1..30: mol_type = genomic DNA

SEQ ID NO: 51647 - DNA, 28 bp, Homo sapiens
  source 1..28: mol_type = genomic DNA
tcgctggttcgaatccggctcgaaggac

SEQ ID NO: 51648 - DNA, 29 bp, Homo sapiens
  source 1..29: mol_type = genomic DNA
tcgctggttcgaatccggctcgaaggacc

SEQ ID NO: 51649 - DNA, 30 bp, Homo sapiens; identical to SEQ ID NO: 26303
  source 1..30: mol_type = genomic DNA

SEQ ID NO: 51650 - DNA, 29 bp, Homo sapiens
  source 1..29: mol_type = genomic DNA
tcgctggttcgaatccggctcggaggacc

SEQ ID NO: 51651 - DNA, 30 bp, Homo sapiens; identical to SEQ ID NO: 26307
  source 1..30: mol_type = genomic DNA

SEQ ID NO: 51652 - DNA, 30 bp, Homo sapiens
  source 1..30: mol_type = genomic DNA
tcgctggttcgattccagctcgaaggacca

SEQ ID NO: 51653 - DNA, 28 bp, Homo sapiens
  source 1..28: mol_type = genomic DNA
tcgctggttcgattccggctcgaaggac

SEQ ID NO: 51654 - DNA, 29 bp, Homo sapiens
  source 1..29: mol_type = genomic DNA
tcgctggttcgattccggctcgaaggacc

SEQ ID NO: 51655 - DNA, 30 bp, Homo sapiens; identical to SEQ ID NO: 26315
  source 1..30: mol_type = genomic DNA

SEQ ID NO: 51656 - DNA, 24 bp, Homo sapiens
  source 1..24: mol_type = genomic DNA
tcggaggcgtgggttcgaatccca

SEQ ID NO: 51657 - DNA, 41 bp, Homo sapiens; identical to SEQ ID NO: 26329
  source 1..41: mol_type = genomic DNA

SEQ ID NO: 51658 - DNA, 17 bp, Homo sapiens
  source 1..17: mol_type = genomic DNA
tcggcgctctcaccgcc

SEQ ID NO: 51659 - DNA, 24 bp, Homo sapiens
  source 1..24: mol_type = genomic DNA
tcggcgctctcaccgccgcggccc

SEQ ID NO: 51660 - DNA, 47 bp, Homo sapiens; identical to SEQ ID NO: 41496
  source 1..47: mol_type = genomic DNA

SEQ ID NO: 51661 - DNA, 18 bp, Homo sapiens
  source 1..18: mol_type = genomic DNA
tcggctagcgcgtttggc

SEQ ID NO: 51662 - DNA, 27 bp, Homo sapiens
  source 1..27: mol_type = genomic DNA
tcggctgttaaccgaaaggttggtggt

SEQ ID NO: 51663 - DNA, 38 bp, Homo sapiens
  source 1..38: mol_type = genomic DNA
tcggctgttaaccgaaaggttggtggttcgagcccacc

SEQ ID NO: 51664 - DNA, 39 bp, Homo sapiens
  source 1..39: mol_type = genomic DNA
tcggctgttaaccgaaaggttggtggttcgagcccaccc

SEQ ID NO: 51665 - DNA, 47 bp, Homo sapiens; identical to SEQ ID NO: 41500
  source 1..47: mol_type = genomic DNA

SEQ ID NO: 51666 - DNA, 16 bp, Homo sapiens
  source 1..16: mol_type = genomic DNA
tcggctgttaaccgga

SEQ ID NO: 51667 - DNA, 16 bp, Homo sapiens
  source 1..16: mol_type = genomic DNA
tcgggcccataccccg

SEQ ID NO: 51668 - DNA, 19 bp, Homo sapiens
  source 1..19: mol_type = genomic DNA
tcgggcccataccccgaaa

SEQ ID NO: 51669 - DNA, 18 bp, Homo sapiens
  source 1..18: mol_type = genomic DNA
tcgggtgcgagaggtccc

SEQ ID NO: 51670 - DNA, 19 bp, Homo sapiens
  source 1..19: mol_type = genomic DNA
tcgggtgcgagaggtcccg

SEQ ID NO: 51671 - DNA, 22 bp, Homo sapiens
  source 1..22: mol_type = genomic DNA
tcgggtgcgagaggtcccgggt

SEQ ID NO: 51672 - DNA, 23 bp, Homo sapiens
  source 1..23: mol_type = genomic DNA
tcgggtgcgagaggtcccgggtt

SEQ ID NO: 51673 - DNA, 34 bp, Homo sapiens
  source 1..34: mol_type = genomic DNA
tcgggtgcgagaggtcccgggttcaaatcccgga

SEQ ID NO: 51674 - DNA, 17 bp, Homo sapiens
  source 1..17: mol_type = genomic DNA
tcggtagagcatcagac

SEQ ID NO: 51675 - DNA, 18 bp, Homo sapiens
  source 1..18: mol_type = genomic DNA
tcggtagagcatcagact

SEQ ID NO: 51676 - DNA, 16 bp, Homo sapiens
  source 1..16: mol_type = genomic DNA
tcggtagagcatgaga

SEQ ID NO: 51677 - DNA, 17 bp, Homo sapiens
  source 1..17: mol_type = genomic DNA
tcggtagagcatgagac

SEQ ID NO: 51678 - DNA, 18 bp, Homo sapiens
  source 1..18: mol_type = genomic DNA
tcggtagagcatgagacc

SEQ ID NO: 51679 - DNA, 19 bp, Homo sapiens
  source 1..19: mol_type = genomic DNA
tcggtagagcatgagaccc

SEQ ID NO: 51680 - DNA, 25 bp, Homo sapiens
  source 1..25: mol_type = genomic DNA
tcggtagagcatgagacccttaatc

SEQ ID NO: 51681 - DNA, 18 bp, Homo sapiens
  source 1..18: mol_type = genomic DNA
tcggtagagcatgagact

SEQ ID NO: 51682 - DNA, 19 bp, Homo sapiens
  source 1..19: mol_type = genomic DNA
tcggtagagcatgagactc

SEQ ID NO: 51683 - DNA, 20 bp, Homo sapiens
  source 1..20: mol_type = genomic DNA
tcggtagagcatgagactct

SEQ ID NO: 51684 - DNA, 25 bp, Homo sapiens
  source 1..25: mol_type = genomic DNA
tcggtagagcatgagactcttaatc

SEQ ID NO: 51685 - DNA, 26 bp, Homo sapiens
  source 1..26: mol_type = genomic DNA
tcggtagagcatgagactcttaatct

SEQ ID NO: 51686 - DNA, 27 bp, Homo sapiens
  source 1..27: mol_type = genomic DNA
tcggtagagcatgagactcttaatctc

SEQ ID NO: 51687 - DNA, 37 bp, Homo sapiens; identical to SEQ ID NO: 26409
  source 1..37: mol_type = genomic DNA

SEQ ID NO: 51688 - DNA, 40 bp, Homo sapiens; identical to SEQ ID NO: 26412
  source 1..40: mol_type = genomic DNA

SEQ ID NO: 51689 - DNA, 16 bp, Homo sapiens
  source 1..16: mol_type = genomic DNA
tcggtagagcatggga

SEQ ID NO: 51690 - DNA, 17 bp, Homo sapiens
  source 1..17: mol_type = genomic DNA
tcggtagagcatgggac

SEQ ID NO: 51691 - DNA, 18 bp, Homo sapiens
  source 1..18: mol_type = genomic DNA
tcggtagagcatgggact

SEQ ID NO: 51692 - DNA, 19 bp, Homo sapiens
  source 1..19: mol_type = genomic DNA
tcggtagagcatgggactc

SEQ ID NO: 51693 - DNA, 20 bp, Homo sapiens
  source 1..20: mol_type = genomic DNA
tcggtagagcatgggactct

SEQ ID NO: 51694 - DNA, 24 bp, Homo sapiens
  source 1..24: mol_type = genomic DNA
tcggtagagcatgggactcttaat

SEQ ID NO: 51695 - DNA, 25 bp, Homo sapiens
  source 1..25: mol_type = genomic DNA
tcggtagagcatgggactcttaatc

SEQ ID NO: 51696 - DNA, 26 bp, Homo sapiens
  source 1..26: mol_type = genomic DNA
tcggtagagcatgggactcttaatcc

SEQ ID NO: 51697 - DNA, 27 bp, Homo sapiens
  source 1..27: mol_type = genomic DNA
tcggtagagcatgggactcttaatccc

SEQ ID NO: 51698 - DNA, 37 bp, Homo sapiens; identical to SEQ ID NO: 26429
  source 1..37: mol_type = genomic DNA

SEQ ID NO: 51699 - DNA, 38 bp, Homo sapiens; identical to SEQ ID NO: 26430
  source 1..38: mol_type = genomic DNA

SEQ ID NO: 51700 - DNA, 40 bp, Homo sapiens; identical to SEQ ID NO: 26432
  source 1..40: mol_type = genomic DNA

SEQ ID NO: 51701 - DNA, 24 bp, Homo sapiens
  source 1..24: mol_type = genomic DNA
tcggttcgaatccgagtcacggca

SEQ ID NO: 51702 - DNA, 25 bp, Homo sapiens
  source 1..25: mol_type = genomic DNA
tcggttcgaatccgagtcacggcac

SEQ ID NO: 51703 - DNA, 22 bp, Homo sapiens
  source 1..22: mol_type = genomic DNA
tcgtaaaccgaagatcacgggt

SEQ ID NO: 51704 - DNA, 20 bp, Homo sapiens
  source 1..20: mol_type = genomic DNA
tcgtaaaccgaagatcgcgg

SEQ ID NO: 51705 - DNA, 21 bp, Homo sapiens
  source 1..21: mol_type = genomic DNA
tcgtaaaccgaagatcgcggg

SEQ ID NO: 51706 - DNA, 22 bp, Homo sapiens
  source 1..22: mol_type = genomic DNA
tcgtaaaccgaagatcgcgggt

SEQ ID NO: 51707 - DNA, 18 bp, Homo sapiens
  source 1..18: mol_type = genomic DNA
tcgtatagtggttagtac

SEQ ID NO: 51708 - DNA, 19 bp, Homo sapiens
  source 1..19: mol_type = genomic DNA
tcgtatagtggttagtact

SEQ ID NO: 51709 - DNA, 20 bp, Homo sapiens
  source 1..20: mol_type = genomic DNA
tcgtatagtggttagtactc

SEQ ID NO: 51710 - DNA, 21 bp, Homo sapiens
  source 1..21: mol_type = genomic DNA
tcgtatagtggttagtactct

SEQ ID NO: 51711 - DNA, 22 bp, Homo sapiens
  source 1..22: mol_type = genomic DNA
tcgtatagtggttagtactctg

SEQ ID NO: 51712 - DNA, 23 bp, Homo sapiens
  source 1..23: mol_type = genomic DNA
tcgtatagtggttagtactctgc

SEQ ID NO: 51713 - DNA, 24 bp, Homo sapiens
  source 1..24: mol_type = genomic DNA
tcgtatagtggttagtactctgcg

SEQ ID NO: 51714 - DNA, 25 bp, Homo sapiens
  source 1..25: mol_type = genomic DNA
tcgtatagtggttagtactctgcgt

SEQ ID NO: 51715 - DNA, 26 bp, Homo sapiens
  source 1..26: mol_type = genomic DNA
tcgtatagtggttagtactctgcgtt

SEQ ID NO: 51716 - DNA, 32 bp, Homo sapiens; identical to SEQ ID NO: 26476
  source 1..32: mol_type = genomic DNA

SEQ ID NO: 51717 - DNA, 41 bp, Homo sapiens; identical to SEQ ID NO: 26478
  source 1..41: mol_type = genomic DNA

SEQ ID NO: 51718 - DNA, 42 bp, Homo sapiens; identical to SEQ ID NO: 26479
  source 1..42: mol_type = genomic DNA

SEQ ID NO: 51719 - DNA, 46 bp, Homo sapiens; identical to SEQ ID NO: 26482
  source 1..46: mol_type = genomic DNA

SEQ ID NO: 51720 - DNA, 19 bp, Homo sapiens
  source 1..19: mol_type = genomic DNA
tcgtggccgagtggttaag

SEQ ID NO: 51721 - DNA, 26 bp, Homo sapiens
  source 1..26: mol_type = genomic DNA
tcgtgggttcgagccccacgttgggc

SEQ ID NO: 51722 - DNA, 27 bp, Homo sapiens
  source 1..27: mol_type = genomic DNA
tcgtgggttcgagccccacgttgggcg

SEQ ID NO: 51723 - DNA, 28 bp, Homo sapiens
  source 1..28: mol_type = genomic DNA
tcgtgggttcgagccccacgttgggcgc

SEQ ID NO: 51724 - DNA, 29 bp, Homo sapiens
  source 1..29: mol_type = genomic DNA
tcgtgggttcgagccccacgttgggcgcc

SEQ ID NO: 51725 - DNA, 30 bp, Homo sapiens; identical to SEQ ID NO: 26498
  source 1..30: mol_type = genomic DNA

SEQ ID NO: 51726 - DNA, 19 bp, Homo sapiens
  source 1..19: mol_type = genomic DNA
tcgtggttgtagtccgtgc

SEQ ID NO: 51727 - DNA, 20 bp, Homo sapiens
  source 1..20: mol_type = genomic DNA
tcgtggttgtagtccgtgcg

SEQ ID NO: 51728 - DNA, 23 bp, Homo sapiens
  source 1..23: mol_type = genomic DNA
tcgtggttgtagtccgtgcgaga

SEQ ID NO: 51729 - DNA, 24 bp, Homo sapiens
  source 1..24: mol_type = genomic DNA
tcgtggttgtagtccgtgcgagaa

SEQ ID NO: 51730 - DNA, 25 bp, Homo sapiens
  source 1..25: mol_type = genomic DNA
tcgtggttgtagtccgtgcgagaat

SEQ ID NO: 51731 - DNA, 26 bp, Homo sapiens
  source 1..26: mol_type = genomic DNA
tcgtggttgtagtccgtgcgagaata

SEQ ID NO: 51732 - DNA, 27 bp, Homo sapiens
  source 1..27: mol_type = genomic DNA
tcgtggttgtagtccgtgcgagaatac

SEQ ID NO: 51733 - DNA, 28 bp, Homo sapiens
  source 1..28: mol_type = genomic DNA
tcgtggttgtagtccgtgcgagaatacc

SEQ ID NO: 51734 - DNA, 29 bp, Homo sapiens
  source 1..29: mol_type = genomic DNA
tcgtggttgtagtccgtgcgagaatacca

SEQ ID NO: 51735 - DNA, 30 bp, Homo sapiens; identical to SEQ ID NO: 26522
  source 1..30: mol_type = genomic DNA

SEQ ID NO: 51736 - DNA, 27 bp, Homo sapiens
  source 1..27: mol_type = genomic DNA
tcgttggtctaggggtatgattctcgc

SEQ ID NO: 51737 - DNA, 28 bp, Homo sapiens
  source 1..28: mol_type = genomic DNA
tcgttggtctaggggtatgattctcgct

SEQ ID NO: 51738 - DNA, 35 bp, Homo sapiens; identical to SEQ ID NO: 26559
  source 1..35: mol_type = genomic DNA

SEQ ID NO: 51739 - DNA, 36 bp, Homo sapiens; identical to SEQ ID NO: 41589
  source 1..36: mol_type = genomic DNA

SEQ ID NO: 51740 - DNA, 37 bp, Homo sapiens; identical to SEQ ID NO: 26560
  source 1..37: mol_type = genomic DNA

SEQ ID NO: 51741 - DNA, 19 bp, Homo sapiens
  source 1..19: mol_type = genomic DNA
tctaaaggtccctggttcg

SEQ ID NO: 51742 - DNA, 33 bp, Homo sapiens; identical to SEQ ID NO: 41591
  source 1..33: mol_type = genomic DNA

SEQ ID NO: 51743 - DNA, 34 bp, Homo sapiens; identical to SEQ ID NO: 41592
  source 1..34: mol_type = genomic DNA

SEQ ID NO: 51744 - DNA, 35 bp, Homo sapiens; identical to SEQ ID NO: 26564
  source 1..35: mol_type = genomic DNA

SEQ ID NO: 51745 - DNA, 36 bp, Homo sapiens; identical to SEQ ID NO: 26565
  source 1..36: mol_type = genomic DNA

SEQ ID NO: 51746 - DNA, 37 bp, Homo sapiens; identical to SEQ ID NO: 26566
  source 1..37: mol_type = genomic DNA

SEQ ID NO: 51747 - DNA, 38 bp, Homo sapiens; identical to SEQ ID NO: 26567
  source 1..38: mol_type = genomic DNA

SEQ ID NO: 51748 - DNA, 20 bp, Homo sapiens
  source 1..20: mol_type = genomic DNA
tctaacaacatggctttctc

SEQ ID NO: 51749 - DNA, 23 bp, Homo sapiens
  source 1..23: mol_type = genomic DNA
tctaacaacatggctttctcacc

SEQ ID NO: 51750 - DNA, 24 bp, Homo sapiens
  source 1..24: mol_type = genomic DNA
tctaacaacatggctttctcacca

SEQ ID NO: 51751 - DNA, 17 bp, Homo sapiens
  source 1..17: mol_type = genomic DNA
tctagcggttaggattc

SEQ ID NO: 51752 - DNA, 18 bp, Homo sapiens
  source 1..18: mol_type = genomic DNA
tctagcggttaggattcc

SEQ ID NO: 51753 - DNA, 19 bp, Homo sapiens
  source 1..19: mol_type = genomic DNA
tctagcggttaggattcct

SEQ ID NO: 51754 - DNA, 21 bp, Homo sapiens
  source 1..21: mol_type = genomic DNA
tctagcggttaggattcctgg

SEQ ID NO: 51755 - DNA, 22 bp, Homo sapiens
  source 1..22: mol_type = genomic DNA
tctagcggttaggattcctggt

SEQ ID NO: 51756 - DNA, 23 bp, Homo sapiens
  source 1..23: mol_type = genomic DNA
tctagcggttaggattcctggtt

SEQ ID NO: 51757 - DNA, 26 bp, Homo sapiens
  source 1..26: mol_type = genomic DNA
tctagcggttaggattcctggttttc

SEQ ID NO: 51758 - DNA, 32 bp, Homo sapiens
  source 1..32: mol_type = genomic DNA
tctagcggttaggattcctggttttcacccag

SEQ ID NO: 51759 - DNA, 18 bp, Homo sapiens
  source 1..18: mol_type = genomic DNA
tctaggggtatgattctc

SEQ ID NO: 51760 - DNA, 21 bp, Homo sapiens
  source 1..21: mol_type = genomic DNA
tctaggggtatgattctcgct

SEQ ID NO: 51761 - DNA, 22 bp, Homo sapiens
  source 1..22: mol_type = genomic DNA
tctaggggtatgattctcgctt

SEQ ID NO: 51762 - DNA, 27 bp, Homo sapiens
  source 1..27: mol_type = genomic DNA
tctaggttcgactcctggctggctcgc

SEQ ID NO: 51763 - DNA, 28 bp, Homo sapiens
  source 1..28: mol_type = genomic DNA
tctaggttcgactcctggctggctcgcc

SEQ ID NO: 51764 - DNA, 18 bp, Homo sapiens
  source 1..18: mol_type = genomic DNA
tctagtggtatgattctc

SEQ ID NO: 51765 - DNA, 20 bp, Homo sapiens
  source 1..20: mol_type = genomic DNA
tctagtggttaggattcggc

SEQ ID NO: 51766 - DNA, 21 bp, Homo sapiens
  source 1..21: mol_type = genomic DNA
tctagtggttaggattcggcg

SEQ ID NO: 51767 - DNA, 22 bp, Homo sapiens
  source 1..22: mol_type = genomic DNA
tctagtggttaggattcggcgc

SEQ ID NO: 51768 - DNA, 23 bp, Homo sapiens
  source 1..23: mol_type = genomic DNA
tctagtggttaggattcggcgct

SEQ ID NO: 51769 - DNA, 25 bp, Homo sapiens
  source 1..25: mol_type = genomic DNA
tctagtggttaggattcggcgctct

SEQ ID NO: 51770 - DNA, 29 bp, Homo sapiens
  source 1..29: mol_type = genomic DNA
tctagtggttaggattcggcgctctcacc

SEQ ID NO: 51771 - DNA, 31 bp, Homo sapiens; identical to SEQ ID NO: 26642
  source 1..31: mol_type = genomic DNA

SEQ ID NO: 51772 - DNA, 32 bp, Homo sapiens; identical to SEQ ID NO: 26643
  source 1..32: mol_type = genomic DNA

SEQ ID NO: 51773 - DNA, 39 bp, Homo sapiens; identical to SEQ ID NO: 26644
  source 1..39: mol_type = genomic DNA

SEQ ID NO: 51774 - DNA, 17 bp, Homo sapiens
  source 1..17: mol_type = genomic DNA
tctcaccgccgcggccc

SEQ ID NO: 51775 - DNA, 23 bp, Homo sapiens
  source 1..23: mol_type = genomic DNA
tctcaccgccgcggcccgggttc

SEQ ID NO: 51776 - DNA, 40 bp, Homo sapiens; identical to SEQ ID NO: 26665
  source 1..40: mol_type = genomic DNA

SEQ ID NO: 51777 - DNA, 41 bp, Homo sapiens; identical to SEQ ID NO: 26666
  source 1..41: mol_type = genomic DNA

SEQ ID NO: 51778 - DNA, 42 bp, Homo sapiens; identical to SEQ ID NO: 26667
  source 1..42: mol_type = genomic DNA

SEQ ID NO: 51779 - DNA, 43 bp, Homo sapiens; identical to SEQ ID NO: 26668
  source 1..43: mol_type = genomic DNA

SEQ ID NO: 51780 - DNA, 25 bp, Homo sapiens
  source 1..25: mol_type = genomic DNA
tctcagggatgggttcgattctcat

SEQ ID NO: 51781 - DNA, 30 bp, Homo sapiens; identical to SEQ ID NO: 26673
  source 1..30: mol_type = genomic DNA

SEQ ID NO: 51782 - DNA, 31 bp, Homo sapiens; identical to SEQ ID NO: 26674
  source 1..31: mol_type = genomic DNA

SEQ ID NO: 51783 - DNA, 34 bp, Homo sapiens; identical to SEQ ID NO: 26677
  source 1..34: mol_type = genomic DNA

SEQ ID NO: 51784 - DNA, 36 bp, Homo sapiens; identical to SEQ ID NO: 26685
  source 1..36: mol_type = genomic DNA

SEQ ID NO: 51785 - DNA, 37 bp, Homo sapiens; identical to SEQ ID NO: 26686
  source 1..37: mol_type = genomic DNA

SEQ ID NO: 51786 - DNA, 38 bp, Homo sapiens; identical to SEQ ID NO: 26687
  source 1..38: mol_type = genomic DNA

SEQ ID NO: 51787 - DNA, 19 bp, Homo sapiens
  source 1..19: mol_type = genomic DNA
tctcataatctgaaggtcg

SEQ ID NO: 51788 - DNA, 16 bp, Homo sapiens
  source 1..16: mol_type = genomic DNA
tctcatagtcctagcc

SEQ ID NO: 51789 - DNA, 21 bp, Homo sapiens
  source 1..21: mol_type = genomic DNA
tctccggatggaggcgtgggt

SEQ ID NO: 51790 - DNA, 41 bp, Homo sapiens; identical to SEQ ID NO: 26727
  source 1..41: mol_type = genomic DNA

SEQ ID NO: 51791 - DNA, 42 bp, Homo sapiens; identical to SEQ ID NO: 26728
  source 1..42: mol_type = genomic DNA

SEQ ID NO: 51792 - DNA, 26 bp, Homo sapiens
  source 1..26: mol_type = genomic DNA
tctcgcctcccacgcgggagacccgg

SEQ ID NO: 51793 - DNA, 24 bp, Homo sapiens
  source 1..24: mol_type = genomic DNA
tctcgcctgccacgcgggaggccc

SEQ ID NO: 51794 - DNA, 27 bp, Homo sapiens
  source 1..27: mol_type = genomic DNA
tctcgcctgccacgcgggaggcccggg

SEQ ID NO: 51795 - DNA, 28 bp, Homo sapiens
  source 1..28: mol_type = genomic DNA
tctcgcctgccacgcgggaggcccgggt

SEQ ID NO: 51796 - DNA, 16 bp, Homo sapiens
  source 1..16: mol_type = genomic DNA
tctcgctggggcctcc

SEQ ID NO: 51797 - DNA, 17 bp, Homo sapiens
  source 1..17: mol_type = genomic DNA
tctcgctggggcctcca

SEQ ID NO: 51798 - DNA, 16 bp, Homo sapiens
  source 1..16: mol_type = genomic DNA
tctcggtggaacctcc

SEQ ID NO: 51799 - DNA, 17 bp, Homo sapiens
  source 1..17: mol_type = genomic DNA
tctcggtggaacctcca

SEQ ID NO: 51800 - DNA, 16 bp, Homo sapiens
  source 1..16: mol_type = genomic DNA
tctcggtgggacctcc

SEQ ID NO: 51801 - DNA, 17 bp, Homo sapiens
  source 1..17: mol_type = genomic DNA
tctcggtgggacctcca

SEQ ID NO: 51802 - DNA, 18 bp, Homo sapiens
  source 1..18: mol_type = genomic DNA
tctcttcgggggcgtggg

SEQ ID NO: 51803 - DNA, 19 bp, Homo sapiens
  source 1..19: mol_type = genomic DNA
tctcttcgggggcgtgggt

SEQ ID NO: 51804 - DNA, 16 bp, Homo sapiens
  source 1..16: mol_type = genomic DNA
tctgaaggtcctgagt

SEQ ID NO: 51805 - DNA, 19 bp, Homo sapiens
  source 1..19: mol_type = genomic DNA
tctgaaggtcctgagttcg

SEQ ID NO: 51806 - DNA, 35 bp, Homo sapiens; identical to SEQ ID NO: 26765
  source 1..35: mol_type = genomic DNA

SEQ ID NO: 51807 - DNA, 36 bp, Homo sapiens; identical to SEQ ID NO: 26766
  source 1..36: mol_type = genomic DNA

SEQ ID NO: 51808 - DNA, 37 bp, Homo sapiens; identical to SEQ ID NO: 26767
  source 1..37: mol_type = genomic DNA

SEQ ID NO: 51809 - DNA, 38 bp, Homo sapiens; identical to SEQ ID NO: 26768
  source 1..38: mol_type = genomic DNA

SEQ ID NO: 51810 - DNA, 16 bp, Homo sapiens
  source 1..16: mol_type = genomic DNA
tctgaaggtcgtgagt

SEQ ID NO: 51811 - DNA, 18 bp, Homo sapiens
  source 1..18: mol_type = genomic DNA
tctgaaggtcgtgagttc

SEQ ID NO: 51812 - DNA, 19 bp, Homo sapiens
  source 1..19: mol_type = genomic DNA
tctgaaggtcgtgagttcg

SEQ ID NO: 51813 - DNA, 35 bp, Homo sapiens; identical to SEQ ID NO: 26790
  source 1..35: mol_type = genomic DNA

SEQ ID NO: 51814 - DNA, 36 bp, Homo sapiens; identical to SEQ ID NO: 26791
  source 1..36: mol_type = genomic DNA

SEQ ID NO: 51815 - DNA, 37 bp, Homo sapiens; identical to SEQ ID NO: 26792
  source 1..37: mol_type = genomic DNA

SEQ ID NO: 51816 - DNA, 38 bp, Homo sapiens; identical to SEQ ID NO: 26793
  source 1..38: mol_type = genomic DNA

SEQ ID NO: 51817 - DNA, 32 bp, Homo sapiens; identical to SEQ ID NO: 26794
  source 1..32: mol_type = genomic DNA

SEQ ID NO: 51818 - DNA, 35 bp, Homo sapiens; identical to SEQ ID NO: 26797
  source 1..35: mol_type = genomic DNA

SEQ ID NO: 51819 - DNA, 36 bp, Homo sapiens; identical to SEQ ID NO: 26798
  source 1..36: mol_type = genomic DNA

SEQ ID NO: 51820 - DNA, 37 bp, Homo sapiens; identical to SEQ ID NO: 26799
  source 1..37: mol_type = genomic DNA

SEQ ID NO: 51821 - DNA, 38 bp, Homo sapiens; identical to SEQ ID NO: 26800
  source 1..38: mol_type = genomic DNA

SEQ ID NO: 51822 - DNA, 17 bp, Homo sapiens
  source 1..17: mol_type = genomic DNA
tctgaatccagcgatcc

SEQ ID NO: 51823 - DNA, 18 bp, Homo sapiens
  source 1..18: mol_type = genomic DNA
tctgaatccagcgatccg

SEQ ID NO: 51824 - DNA, 19 bp, Homo sapiens
  source 1..19: mol_type = genomic DNA
tctgaatccagcgatccga

SEQ ID NO: 51825 - DNA, 20 bp, Homo sapiens
  source 1..20: mol_type = genomic DNA
tctgaatccagcgatccgag

SEQ ID NO: 51826 - DNA, 21 bp, Homo sapiens
  source 1..21: mol_type = genomic DNA
tctgaatccagcgatccgagt

SEQ ID NO: 51827 - DNA, 22 bp, Homo sapiens
  source 1..22: mol_type = genomic DNA
tctgaatccagcgatccgagtt

SEQ ID NO: 51828 - DNA, 23 bp, Homo sapiens
  source 1..23: mol_type = genomic DNA
tctgaatccagcgatccgagttc

SEQ ID NO: 51829 - DNA, 40 bp, Homo sapiens; identical to SEQ ID NO: 26818
  source 1..40: mol_type = genomic DNA

SEQ ID NO: 51830 - DNA, 41 bp, Homo sapiens; identical to SEQ ID NO: 26819
  source 1..41: mol_type = genomic DNA

SEQ ID NO: 51831 - DNA, 43 bp, Homo sapiens; identical to SEQ ID NO: 26821
  source 1..43: mol_type = genomic DNA

SEQ ID NO: 51832 - DNA, 34 bp, Homo sapiens; identical to SEQ ID NO: 26851
  source 1..34: mol_type = genomic DNA

SEQ ID NO: 51833 - DNA, 35 bp, Homo sapiens; identical to SEQ ID NO: 26852
  source 1..35: mol_type = genomic DNA

SEQ ID NO: 51834 - DNA, 36 bp, Homo sapiens; identical to SEQ ID NO: 26853
  source 1..36: mol_type = genomic DNA

SEQ ID NO: 51835 - DNA, 37 bp, Homo sapiens; identical to SEQ ID NO: 26854
  source 1..37: mol_type = genomic DNA

SEQ ID NO: 51836 - DNA, 22 bp, Homo sapiens
  source 1..22: mol_type = genomic DNA
tctgagggtccagggttcaagt

SEQ ID NO: 51837 - DNA, 37 bp, Homo sapiens; identical to SEQ ID NO: 26865
  source 1..37: mol_type = genomic DNA

SEQ ID NO: 51838 - DNA, 37 bp, Homo sapiens; identical to SEQ ID NO: 26870
  source 1..37: mol_type = genomic DNA

SEQ ID NO: 51839 - DNA, 37 bp, Homo sapiens; identical to SEQ ID NO: 26873
  source 1..37: mol_type = genomic DNA

SEQ ID NO: 51840 - DNA, 32 bp, Homo sapiens; identical to SEQ ID NO: 26876
  source 1..32: mol_type = genomic DNA

SEQ ID NO: 51841 - DNA, 33 bp, Homo sapiens; identical to SEQ ID NO: 26877
  source 1..33: mol_type = genomic DNA

SEQ ID NO: 51842 - DNA, 35 bp, Homo sapiens; identical to SEQ ID NO: 26879
  source 1..35: mol_type = genomic DNA

SEQ ID NO: 51843 - DNA, 36 bp, Homo sapiens; identical to SEQ ID NO: 26880
  source 1..36: mol_type = genomic DNA

SEQ ID NO: 51844 - DNA, 37 bp, Homo sapiens; identical to SEQ ID NO: 26881
  source 1..37: mol_type = genomic DNA

SEQ ID NO: 51845 - DNA, 38 bp, Homo sapiens; identical to SEQ ID NO: 26882
  source 1..38: mol_type = genomic DNA

SEQ ID NO: 51846 - DNA, 37 bp, Homo sapiens; identical to SEQ ID NO: 26889
  source 1..37: mol_type = genomic DNA

SEQ ID NO: 51847 - DNA, 16 bp, Homo sapiens
  source 1..16: mol_type = genomic DNA
tctgcgttgtggccgc

SEQ ID NO: 51848 - DNA, 16 bp, Homo sapiens
  source 1..16: mol_type = genomic DNA
tctggactctgaatcc

SEQ ID NO: 51849 - DNA, 17 bp, Homo sapiens
  source 1..17: mol_type = genomic DNA
tctggactctgaatcca

SEQ ID NO: 51850 - DNA, 19 bp, Homo sapiens
  source 1..19: mol_type = genomic DNA
tctggactctgaatccagc

SEQ ID NO: 51851 - DNA, 24 bp, Homo sapiens
  source 1..24: mol_type = genomic DNA
tctggactctgaatccagcgatcc

SEQ ID NO: 51852 - DNA, 26 bp, Homo sapiens
  source 1..26: mol_type = genomic DNA
tctggactctgaatccagcgatccga

SEQ ID NO: 51853 - DNA, 27 bp, Homo sapiens
  source 1..27: mol_type = genomic DNA
tctggactctgaatccagcgatccgag

SEQ ID NO: 51854 - DNA, 28 bp, Homo sapiens
  source 1..28: mol_type = genomic DNA
tctggactctgaatccagcgatccgagt

SEQ ID NO: 51855 - DNA, 29 bp, Homo sapiens
  source 1..29: mol_type = genomic DNA
tctggactctgaatccagcgatccgagtt

SEQ ID NO: 51856 - DNA, 30 bp, Homo sapiens; identical to SEQ ID NO: 26910
  source 1..30: mol_type = genomic DNA

SEQ ID NO: 51857 - DNA, 47 bp, Homo sapiens; identical to SEQ ID NO: 26914
  source 1..47: mol_type = genomic DNA

SEQ ID NO: 51858 - DNA, 16 bp, Homo sapiens
  source 1..16: mol_type = genomic DNA
tctggactttgaatcc

SEQ ID NO: 51859 - DNA, 44 bp, Homo sapiens; identical to SEQ ID NO: 41748
  source 1..44: mol_type = genomic DNA

SEQ ID NO: 51860 - DNA, 45 bp, Homo sapiens; identical to SEQ ID NO: 41749
  source 1..45: mol_type = genomic DNA

SEQ ID NO: 51861 - DNA, 46 bp, Homo sapiens; identical to SEQ ID NO: 26920
  source 1..46: mol_type = genomic DNA

SEQ ID NO: 51862 - DNA, 45 bp, Homo sapiens; identical to SEQ ID NO: 41752
  source 1..45: mol_type = genomic DNA

SEQ ID NO: 51863 - DNA, 47 bp, Homo sapiens; identical to SEQ ID NO: 26925
  source 1..47: mol_type = genomic DNA

SEQ ID NO: 51864 - DNA, 30 bp, Homo sapiens; identical to SEQ ID NO: 26928
  source 1..30: mol_type = genomic DNA

SEQ ID NO: 51865 - DNA, 17 bp, Homo sapiens
  source 1..17: mol_type = genomic DNA
tcttaatcccagggtcg

SEQ ID NO: 51866 - DNA, 18 bp, Homo sapiens
  source 1..18: mol_type = genomic DNA
tcttaatcccagggtcgt

SEQ ID NO: 51867 - DNA, 19 bp, Homo sapiens
  source 1..19: mol_type = genomic DNA
tcttaatcccagggtcgtg

SEQ ID NO: 51868 - DNA, 17 bp, Homo sapiens
  source 1..17: mol_type = genomic DNA
tcttaatctcagggtcg

SEQ ID NO: 51869 - DNA, 18 bp, Homo sapiens
  source 1..18: mol_type = genomic DNA
tcttaatctcagggtcgt

SEQ ID NO: 51870 - DNA, 19 bp, Homo sapiens
  source 1..19: mol_type = genomic DNA
tcttaatctcagggtcgtg

SEQ ID NO: 51871 - DNA, 35 bp, Homo sapiens; identical to SEQ ID NO: 26971
  source 1..35: mol_type = genomic DNA

SEQ ID NO: 51872 - DNA, 17 bp, Homo sapiens
  source 1..17: mol_type = genomic DNA
tcttcggaggcgtgggt

SEQ ID NO: 51873 - DNA, 18 bp, Homo sapiens
  source 1..18: mol_type = genomic DNA
tcttcggaggcgtgggtt

SEQ ID NO: 51874 - DNA, 16 bp, Homo sapiens
  source 1..16: mol_type = genomic DNA
tcttcgggggcgtggg

SEQ ID NO: 51875 - DNA, 17 bp, Homo sapiens
  source 1..17: mol_type = genomic DNA
tcttcgggggcgtgggt

SEQ ID NO: 51876 - DNA, 18 bp, Homo sapiens
  source 1..18: mol_type = genomic DNA
tcttcgggggcgtgggtt

SEQ ID NO: 51877 - DNA, 16 bp, Homo sapiens
  source 1..16: mol_type = genomic DNA
tcttgcgacccgggtt

SEQ ID NO: 51878 - DNA, 29 bp, Homo sapiens
  source 1..29: mol_type = genomic DNA
tcttgcgacccgggttcgattcccgggcg

SEQ ID NO: 51879 - DNA, 30 bp, Homo sapiens; identical to SEQ ID NO: 26998
  source 1..30: mol_type = genomic DNA

SEQ ID NO: 51880 - DNA, 31 bp, Homo sapiens; identical to SEQ ID NO: 26999
  source 1..31: mol_type = genomic DNA

SEQ ID NO: 51881 - DNA, 32 bp, Homo sapiens; identical to SEQ ID NO: 27000
  source 1..32: mol_type = genomic DNA

SEQ ID NO: 51882 - DNA, 33 bp, Homo sapiens; identical to SEQ ID NO: 27001
  source 1..33: mol_type = genomic DNA

SEQ ID NO: 51883 - DNA, 34 bp, Homo sapiens; identical to SEQ ID NO: 27002
  source 1..34: mol_type = genomic DNA

SEQ ID NO: 51884 - DNA, 35 bp, Homo sapiens; identical to SEQ ID NO: 27003
  source 1..35: mol_type = genomic DNA

SEQ ID NO: 51885 - DNA, 36 bp, Homo sapiens; identical to SEQ ID NO: 27004
  source 1..36: mol_type = genomic DNA

SEQ ID NO: 51886 - DNA, 37 bp, Homo sapiens; identical to SEQ ID NO: 27005
  source 1..37: mol_type = genomic DNA

SEQ ID NO: 51887 - DNA, 16 bp, Homo sapiens
  source 1..16: mol_type = genomic DNA
tcttggtgggacctcc

SEQ ID NO: 51888 - DNA, 19 bp, Homo sapiens
  source 1..19: mol_type = genomic DNA
tgaaaacctttttccaagg

SEQ ID NO: 51889 - DNA, 20 bp, Homo sapiens
  source 1..20: mol_type = genomic DNA
tgaaaacctttttccaagga

SEQ ID NO: 51890 - DNA, 21 bp, Homo sapiens
  source 1..21: mol_type = genomic DNA
tgaaaacctttttccaaggac

SEQ ID NO: 51891 - DNA, 22 bp, Homo sapiens
  source 1..22: mol_type = genomic DNA
tgaaaacctttttccaaggaca

SEQ ID NO: 51892 - DNA, 23 bp, Homo sapiens
  source 1..23: mol_type = genomic DNA
tgaaaacctttttccaaggacac

SEQ ID NO: 51893 - DNA, 24 bp, Homo sapiens
  source 1..24: mol_type = genomic DNA
tgaaaacctttttccaaggacacc

SEQ ID NO: 51894 - DNA, 25 bp, Homo sapiens
  source 1..25: mol_type = genomic DNA
tgaaaacctttttccaaggacacca

SEQ ID NO: 51895 - DNA, 19 bp, Homo sapiens
  source 1..19: mol_type = genomic DNA
tgaaaatgtttagacgggc

SEQ ID NO: 51896 - DNA, 20 bp, Homo sapiens
  source 1..20: mol_type = genomic DNA
tgaaaatgtttagacgggct

SEQ ID NO: 51897 - DNA, 16 bp, Homo sapiens
  source 1..16: mol_type = genomic DNA
tgaaggtcctgagttc

SEQ ID NO: 51898 - DNA, 17 bp, Homo sapiens
  source 1..17: mol_type = genomic DNA
tgaaggtcctgagttcg

SEQ ID NO: 51899 - DNA, 32 bp, Homo sapiens; identical to SEQ ID NO: 27087
  source 1..32: mol_type = genomic DNA

SEQ ID NO: 51900 - DNA, 17 bp, Homo sapiens
  source 1..17: mol_type = genomic DNA
tgaaggtcgtgagttcg

SEQ ID NO: 51901 - DNA, 16 bp, Homo sapiens
  source 1..16: mol_type = genomic DNA
tgaatccagcgatccg

SEQ ID NO: 51902 - DNA, 17 bp, Homo sapiens
  source 1..17: mol_type = genomic DNA
tgaatccagcgatccga

SEQ ID NO: 51903 - DNA, 18 bp, Homo sapiens
  source 1..18: mol_type = genomic DNA
tgaatccagcgatccgag

SEQ ID NO: 51904 - DNA, 19 bp, Homo sapiens
  source 1..19: mol_type = genomic DNA
tgaatccagcgatccgagt

SEQ ID NO: 51905 - DNA, 20 bp, Homo sapiens
  source 1..20: mol_type = genomic DNA
tgaatccagcgatccgagtt

SEQ ID NO: 51906 - DNA, 21 bp, Homo sapiens
  source 1..21: mol_type = genomic DNA
tgaatccagcgatccgagttc

SEQ ID NO: 51907 - DNA, 22 bp, Homo sapiens
  source 1..22: mol_type = genomic DNA
tgaatccagcgatccgagttca

SEQ ID NO: 51908 - DNA, 21 bp, Homo sapiens
  source 1..21: mol_type = genomic DNA
tgaatctgacaacagaggctt

SEQ ID NO: 51909 - DNA, 26 bp, Homo sapiens
  source 1..26: mol_type = genomic DNA
tgaatctgacaacagaggcttacgac

SEQ ID NO: 51910 - DNA, 27 bp, Homo sapiens
  source 1..27: mol_type = genomic DNA
tgaatctgacaacagaggcttacgacc

SEQ ID NO: 51911 - DNA, 28 bp, Homo sapiens
  source 1..28: mol_type = genomic DNA
tgaatctgacaacagaggcttacgaccc

SEQ ID NO: 51912 - DNA, 29 bp, Homo sapiens
  source 1..29: mol_type = genomic DNA
tgaatctgacaacagaggcttacgacccc

SEQ ID NO: 51913 - DNA, 30 bp, Homo sapiens; identical to SEQ ID NO: 27160
  source 1..30: mol_type = genomic DNA

SEQ ID NO: 51914 - DNA, 31 bp, Homo sapiens; identical to SEQ ID NO: 27161
  source 1..31: mol_type = genomic DNA

SEQ ID NO: 51915 - DNA, 32 bp, Homo sapiens; identical to SEQ ID NO: 27162
  source 1..32: mol_type = genomic DNA

SEQ ID NO: 51916 - DNA, 33 bp, Homo sapiens; identical to SEQ ID NO: 27163
  source 1..33: mol_type = genomic DNA

SEQ ID NO: 51917 - DNA, 34 bp, Homo sapiens; identical to SEQ ID NO: 27164
  source 1..34: mol_type = genomic DNA

SEQ ID NO: 51918 - DNA, 35 bp, Homo sapiens; identical to SEQ ID NO: 27165
  source 1..35: mol_type = genomic DNA

SEQ ID NO: 51919 - DNA, 36 bp, Homo sapiens; identical to SEQ ID NO: 27166
  source 1..36: mol_type = genomic DNA

SEQ ID NO: 51920 - DNA, 37 bp, Homo sapiens; identical to SEQ ID NO: 27167
  source 1..37: mol_type = genomic DNA

SEQ ID NO: 51921 - DNA, 38 bp, Homo sapiens; identical to SEQ ID NO: 27168
  source 1..38: mol_type = genomic DNA

SEQ ID NO: 51922 - DNA, 39 bp, Homo sapiens; identical to SEQ ID NO: 27169
  source 1..39: mol_type = genomic DNA

SEQ ID NO: 51923 - DNA, 40 bp, Homo sapiens; identical to SEQ ID NO: 27170
  source 1..40: mol_type = genomic DNA

SEQ ID NO: 51924 - DNA, 41 bp, Homo sapiens; identical to SEQ ID NO: 27171
  source 1..41: mol_type = genomic DNA

SEQ ID NO: 51925 - DNA, 43 bp, Homo sapiens; identical to SEQ ID NO: 27176
  source 1..43: mol_type = genomic DNA

SEQ ID NO: 51926 - DNA, 22 bp, Homo sapiens
  source 1..22: mol_type = genomic DNA
tgacaacagaggcttacgaccc

SEQ ID NO: 51927 - DNA, 33 bp, Homo sapiens; identical to SEQ ID NO: 27196
  source 1..33: mol_type = genomic DNA

SEQ ID NO: 51928 - DNA, 34 bp, Homo sapiens; identical to SEQ ID NO: 27197
  source 1..34: mol_type = genomic DNA

SEQ ID NO: 51929 - DNA, 35 bp, Homo sapiens; identical to SEQ ID NO: 27198
  source 1..35: mol_type = genomic DNA

SEQ ID NO: 51930 - DNA, 32 bp, Homo sapiens; identical to SEQ ID NO: 27208
  source 1..32: mol_type = genomic DNA

SEQ ID NO: 51931 - DNA, 22 bp, Homo sapiens
  source 1..22: mol_type = genomic DNA
tgactccagatcagaaggctgc

SEQ ID NO: 51932 - DNA, 21 bp, Homo sapiens
  source 1..21: mol_type = genomic DNA
tgactccagatcagaaggttg

SEQ ID NO: 51933 - DNA, 22 bp, Homo sapiens
  source 1..22: mol_type = genomic DNA
tgactgcagatcaagaggtccc

SEQ ID NO: 51934 - DNA, 23 bp, Homo sapiens
  source 1..23: mol_type = genomic DNA
tgactgcagatcaagaggtcccc

SEQ ID NO: 51935 - DNA, 24 bp, Homo sapiens
  source 1..24: mol_type = genomic DNA
tgactgcagatcaagaggtccccg

SEQ ID NO: 51936 - DNA, 26 bp, Homo sapiens
  source 1..26: mol_type = genomic DNA
tgactgcagatcaagaggtccccggt

SEQ ID NO: 51937 - DNA, 24 bp, Homo sapiens
  source 1..24: mol_type = genomic DNA
tgactgcagatcaagaggtccctg

SEQ ID NO: 51938 - DNA, 26 bp, Homo sapiens
  source 1..26: mol_type = genomic DNA
tgacttcggatcagaagattgagggt

SEQ ID NO: 51939 - DNA, 27 bp, Homo sapiens
  source 1..27: mol_type = genomic DNA
tgacttcggatcagaagattgagggtt

SEQ ID NO: 51940 - DNA, 22 bp, Homo sapiens
  source 1..22: mol_type = genomic DNA
tgagcactctggactctgaatc

SEQ ID NO: 51941 - DNA, 35 bp, Homo sapiens; identical to SEQ ID NO: 27238
  source 1..35: mol_type = genomic DNA

SEQ ID NO: 51942 - DNA, 33 bp, Homo sapiens; identical to SEQ ID NO: 27242
  source 1..33: mol_type = genomic DNA

SEQ ID NO: 51943 - DNA, 30 bp, Homo sapiens; identical to SEQ ID NO: 27252
  source 1..30: mol_type = genomic DNA

SEQ ID NO: 51944 - DNA, 35 bp, Homo sapiens; identical to SEQ ID NO: 27257
  source 1..35: mol_type = genomic DNA

SEQ ID NO: 51945 - DNA, 16 bp, Homo sapiens
  source 1..16: mol_type = genomic DNA
tgagggtccagggttc

SEQ ID NO: 51946 - DNA, 32 bp, Homo sapiens; identical to SEQ ID NO: 27268
  source 1..32: mol_type = genomic DNA

SEQ ID NO: 51947 - DNA, 33 bp, Homo sapiens; identical to SEQ ID NO: 27269
  source 1..33: mol_type = genomic DNA

SEQ ID NO: 51948 - DNA, 34 bp, Homo sapiens; identical to SEQ ID NO: 27270
  source 1..34: mol_type = genomic DNA

SEQ ID NO: 51949 - DNA, 35 bp, Homo sapiens; identical to SEQ ID NO: 27271
  source 1..35: mol_type = genomic DNA

SEQ ID NO: 51950 - DNA, 36 bp, Homo sapiens; identical to SEQ ID NO: 27272
  source 1..36: mol_type = genomic DNA

SEQ ID NO: 51951 - DNA, 27 bp, Homo sapiens
  source 1..27: mol_type = genomic DNA
tgagggttcgaatcccttcgtggttgc

SEQ ID NO: 51952 - DNA, 28 bp, Homo sapiens
  source 1..28: mol_type = genomic DNA
tgagggttcgaatcccttcgtggttgcc

SEQ ID NO: 51953 - DNA, 27 bp, Homo sapiens
  source 1..27: mol_type = genomic DNA
tgagggttcgagtcccttcgtggtcgc

SEQ ID NO: 51954 - DNA, 28 bp, Homo sapiens
  source 1..28: mol_type = genomic DNA
tgagggttcgagtcccttcgtggtcgcc

SEQ ID NO: 51955 - DNA, 29 bp, Homo sapiens
  source 1..29: mol_type = genomic DNA
tgagggttcgagtcccttcgtggtcgcca

SEQ ID NO: 51956 - DNA, 35 bp, Homo sapiens
  source 1..35: mol_type = genomic DNA
tgaggtcccgggttcgatccccagcatctccacca

SEQ ID NO: 51957 - DNA, 17 bp, Homo sapiens
  source 1..17: mol_type = genomic DNA
tgagtgaagcattggac

SEQ ID NO: 51958 - DNA, 23 bp, Homo sapiens
  source 1..23: mol_type = genomic DNA
tgagttcgaacctcagagggggc

SEQ ID NO: 51959 - DNA, 24 bp, Homo sapiens
  source 1..24: mol_type = genomic DNA
tgagttcgaacctcagagggggca

SEQ ID NO: 51960 - DNA, 33 bp, Homo sapiens; identical to SEQ ID NO: 27345
  source 1..33: mol_type = genomic DNA

SEQ ID NO: 51961 - DNA, 24 bp, Homo sapiens
  source 1..24: mol_type = genomic DNA
tgatcgtatagtggttagtactct

SEQ ID NO: 51962 - DNA, 25 bp, Homo sapiens
  source 1..25: mol_type = genomic DNA
tgatcgtatagtggttagtactctg

SEQ ID NO: 51963 - DNA, 27 bp, Homo sapiens
  source 1..27: mol_type = genomic DNA
tgatcgtatagtggttagtactctgcg

SEQ ID NO: 51964 - DNA, 28 bp, Homo sapiens
  source 1..28: mol_type = genomic DNA
tgatcgtatagtggttagtactctgcgt

SEQ ID NO: 51965 - DNA, 29 bp, Homo sapiens
  source 1..29: mol_type = genomic DNA
tgatcgtatagtggttagtactctgcgtt

SEQ ID NO: 51966 - DNA, 26 bp, Homo sapiens
  source 1..26: mol_type = genomic DNA
tgattccggatcagaagattgagggt

SEQ ID NO: 51967 - DNA, 19 bp, Homo sapiens
  source 1..19: mol_type = genomic DNA
tgattctcggtttgggtcc

SEQ ID NO: 51968 - DNA, 20 bp, Homo sapiens
  source 1..20: mol_type = genomic DNA
tgattctcggtttgggtccg

SEQ ID NO: 51969 - DNA, 30 bp, Homo sapiens; identical to SEQ ID NO: 27440
  source 1..30: mol_type = genomic DNA

SEQ ID NO: 51970 - DNA, 36 bp, Homo sapiens; identical to SEQ ID NO: 27441
  source 1..36: mol_type = genomic DNA

SEQ ID NO: 51971 - DNA, 37 bp, Homo sapiens; identical to SEQ ID NO: 27442
  source 1..37: mol_type = genomic DNA

SEQ ID NO: 51972 - DNA, 38 bp, Homo sapiens; identical to SEQ ID NO: 27443
  source 1..38: mol_type = genomic DNA

SEQ ID NO: 51973 - DNA, 39 bp, Homo sapiens; identical to SEQ ID NO: 27444
  source 1..39: mol_type = genomic DNA

SEQ ID NO: 51974 - DNA, 40 bp, Homo sapiens; identical to SEQ ID NO: 27445
  source 1..40: mol_type = genomic DNA

SEQ ID NO: 51975 - DNA, 22 bp, Homo sapiens
  source 1..22: mol_type = genomic DNA
tgcaactccaaataaaagtacc

SEQ ID NO: 51976 - DNA, 23 bp, Homo sapiens
  source 1..23: mol_type = genomic DNA
tgcaactccaaataaaagtacca

SEQ ID NO: 51977 - DNA, 21 bp, Homo sapiens
  source 1..21: mol_type = genomic DNA
tgcaatacttaatttctgcca

SEQ ID NO: 51978 - DNA, 32 bp, Homo sapiens; identical to SEQ ID NO: 27466
  source 1..32: mol_type = genomic DNA

SEQ ID NO: 51979 - DNA, 33 bp, Homo sapiens; identical to SEQ ID NO: 27467
  source 1..33: mol_type = genomic DNA

SEQ ID NO: 51980 - DNA, 34 bp, Homo sapiens; identical to SEQ ID NO: 27468
  source 1..34: mol_type = genomic DNA

SEQ ID NO: 51981 - DNA, 35 bp, Homo sapiens; identical to SEQ ID NO: 27469
  source 1..35: mol_type = genomic DNA

SEQ ID NO: 51982 - DNA, 36 bp, Homo sapiens; identical to SEQ ID NO: 41903
  source 1..36: mol_type = genomic DNA

SEQ ID NO: 51983 - DNA, 37 bp, Homo sapiens; identical to SEQ ID NO: 27470
  source 1..37: mol_type = genomic DNA

SEQ ID NO: 51984 - DNA, 38 bp, Homo sapiens; identical to SEQ ID NO: 27471
  source 1..38: mol_type = genomic DNA

SEQ ID NO: 51985 - DNA, 39 bp, Homo sapiens; identical to SEQ ID NO: 27472
  source 1..39: mol_type = genomic DNA

SEQ ID NO: 51986 - DNA, 34 bp, Homo sapiens; identical to SEQ ID NO: 27482
  source 1..34: mol_type = genomic DNA

SEQ ID NO: 51987 - DNA, 25 bp, Homo sapiens
  source 1..25: mol_type = genomic DNA
tgcaggttcgagtcctgccgcggtc

SEQ ID NO: 51988 - DNA, 27 bp, Homo sapiens
  source 1..27: mol_type = genomic DNA
tgcaggttcgagtcctgccgcggtcgc

SEQ ID NO: 51989 - DNA, 28 bp, Homo sapiens
  source 1..28: mol_type = genomic DNA
tgcaggttcgagtcctgccgcggtcgcc

SEQ ID NO: 51990 - DNA, 20 bp, Homo sapiens
  source 1..20: mol_type = genomic DNA
tgcagtggtagaattctcgc

SEQ ID NO: 51991 - DNA, 21 bp, Homo sapiens
  source 1..21: mol_type = genomic DNA
tgcagtggtagaattctcgcc

SEQ ID NO: 51992 - DNA, 22 bp, Homo sapiens
  source 1..22: mol_type = genomic DNA
tgcagtggtagaattctcgcct

SEQ ID NO: 51993 - DNA, 36 bp, Homo sapiens; identical to SEQ ID NO: 27494
  source 1..36: mol_type = genomic DNA

SEQ ID NO: 51994 - DNA, 37 bp, Homo sapiens; identical to SEQ ID NO: 27495
  source 1..37: mol_type = genomic DNA

SEQ ID NO: 51995 - DNA, 38 bp, Homo sapiens; identical to SEQ ID NO: 27496
  source 1..38: mol_type = genomic DNA

SEQ ID NO: 51996 - DNA, 33 bp, Homo sapiens; identical to SEQ ID NO: 27500
  source 1..33: mol_type = genomic DNA

SEQ ID NO: 51997 - DNA, 17 bp, Homo sapiens
  source 1..17: mol_type = genomic DNA
tgccacgcgggaggccc

SEQ ID NO: 51998 - DNA, 21 bp, Homo sapiens
  source 1..21: mol_type = genomic DNA
tgccacgcgggaggcccgggt

SEQ ID NO: 51999 - DNA, 24 bp, Homo sapiens
  source 1..24: mol_type = genomic DNA
tgcccccatgtctaacaacatggc

SEQ ID NO: 52000 - DNA, 25 bp, Homo sapiens
  source 1..25: mol_type = genomic DNA
tgcccccatgtctaacaacatggct

SEQ ID NO: 52001 - DNA, 31 bp, Homo sapiens; identical to SEQ ID NO: 27530
  source 1..31: mol_type = genomic DNA

SEQ ID NO: 52002 - DNA, 17 bp, Homo sapiens
  source 1..17: mol_type = genomic DNA
tgcccgcatcctccacc

SEQ ID NO: 52003 - DNA, 18 bp, Homo sapiens
  source 1..18: mol_type = genomic DNA
tgcccgcatcctccacca

SEQ ID NO: 52004 - DNA, 17 bp, Homo sapiens
  source 1..17: mol_type = genomic DNA
tgcccgcattctccacc

SEQ ID NO: 52005 - DNA, 18 bp, Homo sapiens
  source 1..18: mol_type = genomic DNA
tgcccgcattctccacca

SEQ ID NO: 52006 - DNA, 37 bp, Homo sapiens; identical to SEQ ID NO: 27542
  source 1..37: mol_type = genomic DNA

SEQ ID NO: 52007 - DNA, 16 bp, Homo sapiens
  source 1..16: mol_type = genomic DNA
tgccgtgatcgtatag

SEQ ID NO: 52008 - DNA, 17 bp, Homo sapiens
  source 1..17: mol_type = genomic DNA
tgccgtgatcgtatagt

SEQ ID NO: 52009 - DNA, 18 bp, Homo sapiens
  source 1..18: mol_type = genomic DNA
tgccgtgatcgtatagtg

SEQ ID NO: 52010 - DNA, 19 bp, Homo sapiens
  source 1..19: mol_type = genomic DNA
tgccgtgatcgtatagtgg

SEQ ID NO: 52011 - DNA, 21 bp, Homo sapiens
  source 1..21: mol_type = genomic DNA
tgccgtgatcgtatagtggtt

SEQ ID NO: 52012 - DNA, 22 bp, Homo sapiens
  source 1..22: mol_type = genomic DNA
tgccgtgatcgtatagtggtta

SEQ ID NO: 52013 - DNA, 23 bp, Homo sapiens
  source 1..23: mol_type = genomic DNA
tgccgtgatcgtatagtggttag

SEQ ID NO: 52014 - DNA, 24 bp, Homo sapiens
  source 1..24: mol_type = genomic DNA
tgccgtgatcgtatagtggttagt

SEQ ID NO: 52015 - DNA, 25 bp, Homo sapiens
  source 1..25: mol_type = genomic DNA
tgccgtgatcgtatagtggttagta

SEQ ID NO: 52016 - DNA, 26 bp, Homo sapiens
  source 1..26: mol_type = genomic DNA
tgccgtgatcgtatagtggttagtac

SEQ ID NO: 52017 - DNA, 27 bp, Homo sapiens
  source 1..27: mol_type = genomic DNA
tgccgtgatcgtatagtggttagtact

SEQ ID NO: 52018 - DNA, 28 bp, Homo sapiens
  source 1..28: mol_type = genomic DNA
tgccgtgatcgtatagtggttagtactc

SEQ ID NO: 52019 - DNA, 29 bp, Homo sapiens
  source 1..29: mol_type = genomic DNA
tgccgtgatcgtatagtggttagtactct

SEQ ID NO: 52020 - DNA, 30 bp, Homo sapiens; identical to SEQ ID NO: 27558
  source 1..30: mol_type = genomic DNA

SEQ ID NO: 52021 - DNA, 31 bp, Homo sapiens; identical to SEQ ID NO: 27559
  source 1..31: mol_type = genomic DNA

SEQ ID NO: 52022 - DNA, 32 bp, Homo sapiens; identical to SEQ ID NO: 27560
  source 1..32: mol_type = genomic DNA

SEQ ID NO: 52023 - DNA, 33 bp, Homo sapiens; identical to SEQ ID NO: 27561
  source 1..33: mol_type = genomic DNA

SEQ ID NO: 52024 - DNA, 34 bp, Homo sapiens; identical to SEQ ID NO: 27562
  source 1..34: mol_type = genomic DNA

SEQ ID NO: 52025 - DNA, 35 bp, Homo sapiens; identical to SEQ ID NO: 27563
  source 1..35: mol_type = genomic DNA

SEQ ID NO: 52026 - DNA, 36 bp, Homo sapiens; identical to SEQ ID NO: 27564
  source 1..36: mol_type = genomic DNA

SEQ ID NO: 52027 - DNA, 37 bp, Homo sapiens; identical to SEQ ID NO: 27565
  source 1..37: mol_type = genomic DNA

SEQ ID NO: 52028 - DNA, 23 bp, Homo sapiens
  source 1..23: mol_type = genomic DNA
tgccttccaagcagttgacccgg

SEQ ID NO: 52029 - DNA, 28 bp, Homo sapiens
  source 1..28: mol_type = genomic DNA
tgcgacccgggttcgattcccgggcggc

SEQ ID NO: 52030 - DNA, 34 bp, Homo sapiens; identical to SEQ ID NO: 27585
  source 1..34: mol_type = genomic DNA

SEQ ID NO: 52031 - DNA, 35 bp, Homo sapiens; identical to SEQ ID NO: 27586
  source 1..35: mol_type = genomic DNA

SEQ ID NO: 52032 - DNA, 36 bp, Homo sapiens; identical to SEQ ID NO: 27587
  source 1..36: mol_type = genomic DNA

SEQ ID NO: 52033 - DNA, 37 bp, Homo sapiens; identical to SEQ ID NO: 27588
  source 1..37: mol_type = genomic DNA

SEQ ID NO: 52034 - DNA, 38 bp, Homo sapiens; identical to SEQ ID NO: 27589
  source 1..38: mol_type = genomic DNA

SEQ ID NO: 52035 - DNA, 16 bp, Homo sapiens
  source 1..16: mol_type = genomic DNA
tgctaatccattgtgc

SEQ ID NO: 52036 - DNA, 17 bp, Homo sapiens
  source 1..17: mol_type = genomic DNA
tgctaatccattgtgct

SEQ ID NO: 52037 - DNA, 21 bp, Homo sapiens
  source 1..21: mol_type = genomic DNA
tgctaatccattgtgctttgc

SEQ ID NO: 52038 - DNA, 34 bp, Homo sapiens; identical to SEQ ID NO: 27658
  source 1..34: mol_type = genomic DNA

SEQ ID NO: 52039 - DNA, 35 bp, Homo sapiens; identical to SEQ ID NO: 27659
  source 1..35: mol_type = genomic DNA

SEQ ID NO: 52040 - DNA, 26 bp, Homo sapiens
  source 1..26: mol_type = genomic DNA
tgctttacacgcagaaggtcctgggt

SEQ ID NO: 52041 - DNA, 47 bp, Homo sapiens; identical to SEQ ID NO: 27672
  source 1..47: mol_type = genomic DNA

SEQ ID NO: 52042 - DNA, 18 bp, Homo sapiens
  source 1..18: mol_type = genomic DNA
tgctttgcacgcgtgggt

SEQ ID NO: 52043 - DNA, 39 bp, Homo sapiens; identical to SEQ ID NO: 41976
  source 1..39: mol_type = genomic DNA

SEQ ID NO: 52044 - DNA, 21 bp, Homo sapiens
  source 1..21: mol_type = genomic DNA
tggacatatgtccgcgtgggt

SEQ ID NO: 52045 - DNA, 23 bp, Homo sapiens
  source 1..23: mol_type = genomic DNA
tggacatatgtccgcgtgggttc

SEQ ID NO: 52046 - DNA, 17 bp, Homo sapiens
  source 1..17: mol_type = genomic DNA
tggactctgaatccagc

SEQ ID NO: 52047 - DNA, 24 bp, Homo sapiens
  source 1..24: mol_type = genomic DNA
tggactctgaatccagcgatccga

SEQ ID NO: 52048 - DNA, 25 bp, Homo sapiens
  source 1..25: mol_type = genomic DNA
tggactctgaatccagcgatccgag

SEQ ID NO: 52049 - DNA, 26 bp, Homo sapiens
  source 1..26: mol_type = genomic DNA
tggactctgaatccagcgatccgagt

SEQ ID NO: 52050 - DNA, 27 bp, Homo sapiens
  source 1..27: mol_type = genomic DNA
tggactctgaatccagcgatccgagtt

SEQ ID NO: 52051 - DNA, 28 bp, Homo sapiens
  source 1..28: mol_type = genomic DNA
tggactctgaatccagcgatccgagttc

SEQ ID NO: 52052 - DNA, 45 bp, Homo sapiens; identical to SEQ ID NO: 27695
  source 1..45: mol_type = genomic DNA

SEQ ID NO: 52053 - DNA, 16 bp, Homo sapiens
  source 1..16: mol_type = genomic DNA
tggaggcgtgggttcg

SEQ ID NO: 52054 - DNA, 22 bp, Homo sapiens
  source 1..22: mol_type = genomic DNA
tggaggcgtgggttcgaatccc

SEQ ID NO: 52055 - DNA, 34 bp, Homo sapiens; identical to SEQ ID NO: 27711
  source 1..34: mol_type = genomic DNA

SEQ ID NO: 52056 - DNA, 26 bp, Homo sapiens
  source 1..26: mol_type = genomic DNA
tggagttaaagactttttctctgacc

SEQ ID NO: 52057 - DNA, 27 bp, Homo sapiens
  source 1..27: mol_type = genomic DNA
tggagttaaagactttttctctgacca

SEQ ID NO: 52058 - DNA, 18 bp, Homo sapiens
  source 1..18: mol_type = genomic DNA
tggataacgcgtctgact

SEQ ID NO: 52059 - DNA, 16 bp, Homo sapiens
  source 1..16: mol_type = genomic DNA
tggataaggcactggc

SEQ ID NO: 52060 - DNA, 35 bp, Homo sapiens; identical to SEQ ID NO: 42001
  source 1..35: mol_type = genomic DNA

SEQ ID NO: 52061 - DNA, 16 bp, Homo sapiens
  source 1..16: mol_type = genomic DNA
tggataaggcattggc

SEQ ID NO: 52062 - DNA, 26 bp, Homo sapiens
  source 1..26: mol_type = genomic DNA
tggataaggcattggcctcctaagcc

SEQ ID NO: 52063 - DNA, 16 bp, Homo sapiens
  source 1..16: mol_type = genomic DNA
tggataaggcgtctga

SEQ ID NO: 52064 - DNA, 18 bp, Homo sapiens
  source 1..18: mol_type = genomic DNA
tggataaggcgtctgact

SEQ ID NO: 52065 - DNA, 20 bp, Homo sapiens
  source 1..20: mol_type = genomic DNA
tggataaggcgtctgattcc

SEQ ID NO: 52066 - DNA, 16 bp, Homo sapiens
  source 1..16: mol_type = genomic DNA
tggatagcgcattgga

SEQ ID NO: 52067 - DNA, 29 bp, Homo sapiens
  source 1..29: mol_type = genomic DNA
tggatagctcagtcggtagagcatcagac

SEQ ID NO: 52068 - DNA, 25 bp, Homo sapiens
  source 1..25: mol_type = genomic DNA
tggatcgaaaccatcctctgctacc

SEQ ID NO: 52069 - DNA, 16 bp, Homo sapiens
  source 1..16: mol_type = genomic DNA
tggccgagtggttaag

SEQ ID NO: 52070 - DNA, 21 bp, Homo sapiens
  source 1..21: mol_type = genomic DNA
tggccgcagcaacctcggttc

SEQ ID NO: 52071 - DNA, 22 bp, Homo sapiens
  source 1..22: mol_type = genomic DNA
tggccgcagcaacctcggttcg

SEQ ID NO: 52072 - DNA, 23 bp, Homo sapiens
  source 1..23: mol_type = genomic DNA
tggccgcagcaacctcggttcga

SEQ ID NO: 52073 - DNA, 40 bp, Homo sapiens; identical to SEQ ID NO: 27765
  source 1..40: mol_type = genomic DNA

SEQ ID NO: 52074 - DNA, 41 bp, Homo sapiens; identical to SEQ ID NO: 27766
  source 1..41: mol_type = genomic DNA

SEQ ID NO: 52075 - DNA, 24 bp, Homo sapiens
  source 1..24: mol_type = genomic DNA
tggcgcagcggaagcgtgctgggc

SEQ ID NO: 52076 - DNA, 26 bp, Homo sapiens
  source 1..26: mol_type = genomic DNA
tggcgcagcggaagcgtgctgggccc

SEQ ID NO: 52077 - DNA, 20 bp, Homo sapiens
  source 1..20: mol_type = genomic DNA
tggcgtgggttcgaatccca

SEQ ID NO: 52078 - DNA, 16 bp, Homo sapiens
  source 1..16: mol_type = genomic DNA
tggctaggattcggcg

SEQ ID NO: 52079 - DNA, 17 bp, Homo sapiens
  source 1..17: mol_type = genomic DNA
tggctaggattcggcgc

SEQ ID NO: 52080 - DNA, 22 bp, Homo sapiens
  source 1..22: mol_type = genomic DNA
tggctaggattcggcgctttca

SEQ ID NO: 52081 - DNA, 21 bp, Homo sapiens
  source 1..21: mol_type = genomic DNA
tggctgagtgaagcattggac

SEQ ID NO: 52082 - DNA, 25 bp, Homo sapiens
  source 1..25: mol_type = genomic DNA
tggctgagtgaagcattggactgta

SEQ ID NO: 52083 - DNA, 27 bp, Homo sapiens
  source 1..27: mol_type = genomic DNA
tgggcccataacccagaggtcgatgga

SEQ ID NO: 52084 - DNA, 28 bp, Homo sapiens
  source 1..28: mol_type = genomic DNA
tgggcccataacccagaggtcgatggat

SEQ ID NO: 52085 - DNA, 16 bp, Homo sapiens
  source 1..16: mol_type = genomic DNA
tggggattgtgggttc

SEQ ID NO: 52086 - DNA, 17 bp, Homo sapiens
  source 1..17: mol_type = genomic DNA
tggggattgtgggttcg

SEQ ID NO: 52087 - DNA, 21 bp, Homo sapiens
  source 1..21: mol_type = genomic DNA
tggggattgtgggttcgagtc

SEQ ID NO: 52088 - DNA, 22 bp, Homo sapiens
  source 1..22: mol_type = genomic DNA
tggggattgtgggttcgagtcc

SEQ ID NO: 52089 - DNA, 23 bp, Homo sapiens
  source 1..23: mol_type = genomic DNA
tggggattgtgggttcgagtccc

SEQ ID NO: 52090 - DNA, 26 bp, Homo sapiens
  source 1..26: mol_type = genomic DNA
tggggattgtgggttcgagtcccatc

SEQ ID NO: 52091 - DNA, 34 bp, Homo sapiens; identical to SEQ ID NO: 27816
  source 1..34: mol_type = genomic DNA

SEQ ID NO: 52092 - DNA, 35 bp, Homo sapiens; identical to SEQ ID NO: 27817
  source 1..35: mol_type = genomic DNA

SEQ ID NO: 52093 - DNA, 36 bp, Homo sapiens; identical to SEQ ID NO: 27818
  source 1..36: mol_type = genomic DNA

SEQ ID NO: 52094 - DNA, 20 bp, Homo sapiens
  source 1..20: mol_type = genomic DNA
tggggtctccccgcgcaggt

SEQ ID NO: 52095 - DNA, 26 bp, Homo sapiens
  source 1..26: mol_type = genomic DNA
tggggtgtgataggtggcacggagaa

SEQ ID NO: 52096 - DNA, 20 bp, Homo sapiens
  source 1..20: mol_type = genomic DNA
tggggtttccccgcgcaggt

SEQ ID NO: 52097 - DNA, 16 bp, Homo sapiens
  source 1..16: mol_type = genomic DNA
tggggttttgcagtcc

SEQ ID NO: 52098 - DNA, 21 bp, Homo sapiens
  source 1..21: mol_type = genomic DNA
tgggtgcgagaggtcccgggt

SEQ ID NO: 52099 - DNA, 22 bp, Homo sapiens
  source 1..22: mol_type = genomic DNA
tgggtgcgagaggtcccgggtt

SEQ ID NO: 52100 - DNA, 17 bp, Homo sapiens
  source 1..17: mol_type = genomic DNA
tgggtggttcagtggta

SEQ ID NO: 52101 - DNA, 23 bp, Homo sapiens
  source 1..23: mol_type = genomic DNA
tgggtggttcagtggtagaattc

SEQ ID NO: 52102 - DNA, 27 bp, Homo sapiens
  source 1..27: mol_type = genomic DNA
tgggtggttcagtggtagaattctcgc

SEQ ID NO: 52103 - DNA, 28 bp, Homo sapiens
  source 1..28: mol_type = genomic DNA
tgggtggttcagtggtagaattctcgcc

SEQ ID NO: 52104 - DNA, 29 bp, Homo sapiens
  source 1..29: mol_type = genomic DNA
tgggtggttcagtggtagaattctcgcct

SEQ ID NO: 52105 - DNA, 31 bp, Homo sapiens; identical to SEQ ID NO: 27860
  source 1..31: mol_type = genomic DNA

SEQ ID NO: 52106 - DNA, 32 bp, Homo sapiens; identical to SEQ ID NO: 27861
  source 1..32: mol_type = genomic DNA

SEQ ID NO: 52107 - DNA, 45 bp, Homo sapiens; identical to SEQ ID NO: 42058
  source 1..45: mol_type = genomic DNA

SEQ ID NO: 52108 - DNA, 26 bp, Homo sapiens
  source 1..26: mol_type = genomic DNA
tgggttcgaatcccaccgctgccacc

SEQ ID NO: 52109 - DNA, 26 bp, Homo sapiens
  source 1..26: mol_type = genomic DNA
tgggttcgaatcccaccttcgtcgcc

SEQ ID NO: 52110 - DNA, 26 bp, Homo sapiens
  source 1..26: mol_type = genomic DNA
tgggttcgaatcccactcctgacacc

SEQ ID NO: 52111 - DNA, 24 bp, Homo sapiens
  source 1..24: mol_type = genomic DNA
tgggttcgaatcccacttctgaca

SEQ ID NO: 52112 - DNA, 25 bp, Homo sapiens
  source 1..25: mol_type = genomic DNA
tgggttcgaatcccagcggggcctc

SEQ ID NO: 52113 - DNA, 21 bp, Homo sapiens
  source 1..21: mol_type = genomic DNA
tgggttcgaatcccagcggtg

SEQ ID NO: 52114 - DNA, 24 bp, Homo sapiens
  source 1..24: mol_type = genomic DNA
tgggttcgaatcccagcggtgcct

SEQ ID NO: 52115 - DNA, 25 bp, Homo sapiens
  source 1..25: mol_type = genomic DNA
tgggttcgaatcccagcggtgcctc

SEQ ID NO: 52116 - DNA, 26 bp, Homo sapiens
  source 1..26: mol_type = genomic DNA
tgggttcgaatcccagcggtgcctcc

SEQ ID NO: 52117 - DNA, 24 bp, Homo sapiens
  source 1..24: mol_type = genomic DNA
tgggttcgaatcccatcctcgtcg

SEQ ID NO: 52118 - DNA, 25 bp, Homo sapiens
  source 1..25: mol_type = genomic DNA
tgggttcgaatcccatcctcgtcgc

SEQ ID NO: 52119 - DNA, 26 bp, Homo sapiens
  source 1..26: mol_type = genomic DNA
tgggttcgaatcccatcctcgtcgcc

SEQ ID NO: 52120 - DNA, 27 bp, Homo sapiens
  source 1..27: mol_type = genomic DNA
tgggttcgaatcccatcctcgtcgcca

SEQ ID NO: 52121 - DNA, 25 bp, Homo sapiens
  source 1..25: mol_type = genomic DNA
tgggttcgagccccacgttgggcgc

SEQ ID NO: 52122 - DNA, 23 bp, Homo sapiens
  source 1..23: mol_type = genomic DNA
tgggttcgagccccagtggaacc

SEQ ID NO: 52123 - DNA, 26 bp, Homo sapiens
  source 1..26: mol_type = genomic DNA
tgggttcgagccccagtggaaccacc

SEQ ID NO: 52124 - DNA, 24 bp, Homo sapiens
  source 1..24: mol_type = genomic DNA
tgggttcgattctcatagtcctag

SEQ ID NO: 52125 - DNA, 25 bp, Homo sapiens
  source 1..25: mol_type = genomic DNA
tgggttcgattctcatagtcctagc

SEQ ID NO: 52126 - DNA, 25 bp, Homo sapiens
  source 1..25: mol_type = genomic DNA
tgggtttaagtcccattggtctagc

SEQ ID NO: 52127 - DNA, 24 bp, Homo sapiens
  source 1..24: mol_type = genomic DNA
tggtaagcactctggactctgaat

SEQ ID NO: 52128 - DNA, 16 bp, Homo sapiens
  source 1..16: mol_type = genomic DNA
tggtagaattctcgcc

SEQ ID NO: 52129 - DNA, 17 bp, Homo sapiens
  source 1..17: mol_type = genomic DNA
tggtagaattctcgcct

SEQ ID NO: 52130 - DNA, 20 bp, Homo sapiens
  source 1..20: mol_type = genomic DNA
tggtagaattctcgcctccc

SEQ ID NO: 52131 - DNA, 33 bp, Homo sapiens; identical to SEQ ID NO: 42090
  source 1..33: mol_type = genomic DNA

SEQ ID NO: 52132 - DNA, 35 bp, Homo sapiens; identical to SEQ ID NO: 27904
  source 1..35: mol_type = genomic DNA

SEQ ID NO: 52133 - DNA, 33 bp, Homo sapiens
  source 1..33: mol_type = genomic DNA
tggtagaattctcgcctcccatgcgggagaccc

SEQ ID NO: 52134 - DNA, 18 bp, Homo sapiens
  source 1..18: mol_type = genomic DNA
tggtagaattctcgcctg

SEQ ID NO: 52135 - DNA, 19 bp, Homo sapiens
  source 1..19: mol_type = genomic DNA
tggtagaattctcgcctgc

SEQ ID NO: 52136 - DNA, 20 bp, Homo sapiens
  source 1..20: mol_type = genomic DNA
tggtagaattctcgcctgcc

SEQ ID NO: 52137 - DNA, 21 bp, Homo sapiens
  source 1..21: mol_type = genomic DNA
tggtagaattctcgcctgcca

SEQ ID NO: 52138 - DNA, 22 bp, Homo sapiens
  source 1..22: mol_type = genomic DNA
tggtagaattctcgcctgccac

SEQ ID NO: 52139 - DNA, 23 bp, Homo sapiens
  source 1..23: mol_type = genomic DNA
tggtagaattctcgcctgccacg

SEQ ID NO: 52140 - DNA, 24 bp, Homo sapiens
  source 1..24: mol_type = genomic DNA
tggtagaattctcgcctgccacgc

SEQ ID NO: 52141 - DNA, 25 bp, Homo sapiens
  source 1..25: mol_type = genomic DNA
tggtagaattctcgcctgccacgcg

SEQ ID NO: 52142 - DNA, 26 bp, Homo sapiens
  source 1..26: mol_type = genomic DNA
tggtagaattctcgcctgccacgcgg

SEQ ID NO: 52143 - DNA, 27 bp, Homo sapiens
  source 1..27: mol_type = genomic DNA
tggtagaattctcgcctgccacgcggg

SEQ ID NO: 52144 - DNA, 28 bp, Homo sapiens
  source 1..28: mol_type = genomic DNA
tggtagaattctcgcctgccacgcggga

SEQ ID NO: 52145 - DNA, 29 bp, Homo sapiens
  source 1..29: mol_type = genomic DNA
tggtagaattctcgcctgccacgcgggag

SEQ ID NO: 52146 - DNA, 31 bp, Homo sapiens; identical to SEQ ID NO: 27918
  source 1..31: mol_type = genomic DNA

SEQ ID NO: 52147 - DNA, 32 bp, Homo sapiens; identical to SEQ ID NO: 27919
  source 1..32: mol_type = genomic DNA

SEQ ID NO: 52148 - DNA, 33 bp, Homo sapiens; identical to SEQ ID NO: 27920
  source 1..33: mol_type = genomic DNA

SEQ ID NO: 52149 - DNA, 34 bp, Homo sapiens; identical to SEQ ID NO: 27921
  source 1..34: mol_type = genomic DNA

SEQ ID NO: 52150 - DNA, 35 bp, Homo sapiens; identical to SEQ ID NO: 27922
  source 1..35: mol_type = genomic DNA

SEQ ID NO: 52151 - DNA, 36 bp, Homo sapiens; identical to SEQ ID NO: 27923
  source 1..36: mol_type = genomic DNA

SEQ ID NO: 52152 - DNA, 37 bp, Homo sapiens; identical to SEQ ID NO: 27924
  source 1..37: mol_type = genomic DNA

SEQ ID NO: 52153 - DNA, 38 bp, Homo sapiens; identical to SEQ ID NO: 27925
  source 1..38: mol_type = genomic DNA

SEQ ID NO: 52154 - DNA, 39 bp, Homo sapiens; identical to SEQ ID NO: 27927
  source 1..39: mol_type = genomic DNA

SEQ ID NO: 52155 - DNA, 16 bp, Homo sapiens
  source 1..16: mol_type = genomic DNA
tggtagaattcttgcc

SEQ ID NO: 52156 - DNA, 20 bp, Homo sapiens
  source 1..20: mol_type = genomic DNA
tggtagaattcttgcctgcc

SEQ ID NO: 52157 - DNA, 16 bp, Homo sapiens
  source 1..16: mol_type = genomic DNA
tggtagagcatttgac

SEQ ID NO: 52158 - DNA, 17 bp, Homo sapiens
  source 1..17: mol_type = genomic DNA
tggtagagcatttgact

SEQ ID NO: 52159 - DNA, 19 bp, Homo sapiens
  source 1..19: mol_type = genomic DNA
tggtagagcatttgactgc

SEQ ID NO: 52160 - DNA, 24 bp, Homo sapiens
  source 1..24: mol_type = genomic DNA
tggtagagcatttgactgcagatc

SEQ ID NO: 52161 - DNA, 27 bp, Homo sapiens
  source 1..27: mol_type = genomic DNA
tggtagagcatttgactgcagatcaag

SEQ ID NO: 52162 - DNA, 16 bp, Homo sapiens
  source 1..16: mol_type = genomic DNA
tggtagagcgcatgct

SEQ ID NO: 52163 - DNA, 20 bp, Homo sapiens
  source 1..20: mol_type = genomic DNA
tggtagagcgcgcgcttcgc

SEQ ID NO: 52164 - DNA, 16 bp, Homo sapiens
  source 1..16: mol_type = genomic DNA
tggtagagcgcgtgct

SEQ ID NO: 52165 - DNA, 17 bp, Homo sapiens
  source 1..17: mol_type = genomic DNA
tggtagagcgcgtgctt

SEQ ID NO: 52166 - DNA, 16 bp, Homo sapiens
  source 1..16: mol_type = genomic DNA
tggtagagcgctcgct

SEQ ID NO: 52167 - DNA, 44 bp, Homo sapiens; identical to SEQ ID NO: 27956
  source 1..44: mol_type = genomic DNA

SEQ ID NO: 52168 - DNA, 46 bp, Homo sapiens; identical to SEQ ID NO: 42128
  source 1..46: mol_type = genomic DNA

SEQ ID NO: 52169 - DNA, 44 bp, Homo sapiens; identical to SEQ ID NO: 27961
  source 1..44: mol_type = genomic DNA

SEQ ID NO: 52170 - DNA, 36 bp, Homo sapiens; identical to SEQ ID NO: 27963
  source 1..36: mol_type = genomic DNA

SEQ ID NO: 52171 - DNA, 37 bp, Homo sapiens; identical to SEQ ID NO: 27964
  source 1..37: mol_type = genomic DNA

SEQ ID NO: 52172 - DNA, 17 bp, Homo sapiens
  source 1..17: mol_type = genomic DNA
tggtatcatgcaagatt

SEQ ID NO: 52173 - DNA, 16 bp, Homo sapiens
  source 1..16: mol_type = genomic DNA
tggtcatcacgttcgc

SEQ ID NO: 52174 - DNA, 17 bp, Homo sapiens
  source 1..17: mol_type = genomic DNA
tggtcatcacgttcgcc

SEQ ID NO: 52175 - DNA, 18 bp, Homo sapiens
  source 1..18: mol_type = genomic DNA
tggtcatcacgttcgcct

SEQ ID NO: 52176 - DNA, 16 bp, Homo sapiens
  source 1..16: mol_type = genomic DNA
tggtcgtggttgtagt

SEQ ID NO: 52177 - DNA, 17 bp, Homo sapiens
  source 1..17: mol_type = genomic DNA
tggtcgtggttgtagtc

SEQ ID NO: 52178 - DNA, 18 bp, Homo sapiens
  source 1..18: mol_type = genomic DNA
tggtcgtggttgtagtcc

SEQ ID NO: 52179 - DNA, 19 bp, Homo sapiens
  source 1..19: mol_type = genomic DNA
tggtcgtggttgtagtccg

SEQ ID NO: 52180 - DNA, 20 bp, Homo sapiens
  source 1..20: mol_type = genomic DNA
tggtcgtggttgtagtccgt

SEQ ID NO: 52181 - DNA, 22 bp, Homo sapiens
  source 1..22: mol_type = genomic DNA
tggtcgtggttgtagtccgtgc

SEQ ID NO: 52182 - DNA, 23 bp, Homo sapiens
  source 1..23: mol_type = genomic DNA
tggtcgtggttgtagtccgtgcg

SEQ ID NO: 52183 - DNA, 24 bp, Homo sapiens
  source 1..24: mol_type = genomic DNA
tggtcgtggttgtagtccgtgcga

SEQ ID NO: 52184 - DNA, 26 bp, Homo sapiens
  source 1..26: mol_type = genomic DNA
tggtcgtggttgtagtccgtgcgaga

SEQ ID NO: 52185 - DNA, 27 bp, Homo sapiens
  source 1..27: mol_type = genomic DNA
tggtcgtggttgtagtccgtgcgagaa

SEQ ID NO: 52186 - DNA, 28 bp, Homo sapiens
  source 1..28: mol_type = genomic DNA
tggtcgtggttgtagtccgtgcgagaat

SEQ ID NO: 52187 - DNA, 29 bp, Homo sapiens
  source 1..29: mol_type = genomic DNA
tggtcgtggttgtagtccgtgcgagaata

SEQ ID NO: 52188 - DNA, 31 bp, Homo sapiens; identical to SEQ ID NO: 27987
  source 1..31: mol_type = genomic DNA

SEQ ID NO: 52189 - DNA, 32 bp, Homo sapiens; identical to SEQ ID NO: 27988
  source 1..32: mol_type = genomic DNA

SEQ ID NO: 52190 - DNA, 17 bp, Homo sapiens
  source 1..17: mol_type = genomic DNA
tggtctaaggcgctgga

SEQ ID NO: 52191 - DNA, 19 bp, Homo sapiens
  source 1..19: mol_type = genomic DNA
tggtctagcggttaggatt

SEQ ID NO: 52192 - DNA, 20 bp, Homo sapiens
  source 1..20: mol_type = genomic DNA
tggtctagcggttaggattc

SEQ ID NO: 52193 - DNA, 21 bp, Homo sapiens
  source 1..21: mol_type = genomic DNA
tggtctagcggttaggattcc

SEQ ID NO: 52194 - DNA, 22 bp, Homo sapiens
  source 1..22: mol_type = genomic DNA
tggtctagcggttaggattcct

SEQ ID NO: 52195 - DNA, 23 bp, Homo sapiens
  source 1..23: mol_type = genomic DNA
tggtctagcggttaggattcctg

SEQ ID NO: 52196 - DNA, 24 bp, Homo sapiens
  source 1..24: mol_type = genomic DNA
tggtctagcggttaggattcctgg

SEQ ID NO: 52197 - DNA, 26 bp, Homo sapiens
  source 1..26: mol_type = genomic DNA
tggtctagcggttaggattcctggtt

SEQ ID NO: 52198 - DNA, 27 bp, Homo sapiens
  source 1..27: mol_type = genomic DNA
tggtctagcggttaggattcctggttt

SEQ ID NO: 52199 - DNA, 33 bp, Homo sapiens; identical to SEQ ID NO: 28006
  source 1..33: mol_type = genomic DNA

SEQ ID NO: 52200 - DNA, 35 bp, Homo sapiens; identical to SEQ ID NO: 42166
  source 1..35: mol_type = genomic DNA

SEQ ID NO: 52201 - DNA, 42 bp, Homo sapiens; identical to SEQ ID NO: 28008
  source 1..42: mol_type = genomic DNA

SEQ ID NO: 52202 - DNA, 45 bp, Homo sapiens
  source 1..45: mol_type = genomic DNA
tggtctagcggttaggattcctggttttcacccaggtggcccggg

SEQ ID NO: 52203 - DNA, 16 bp, Homo sapiens
  source 1..16: mol_type = genomic DNA
tggtctaggggtatga

SEQ ID NO: 52204 - DNA, 21 bp, Homo sapiens
  source 1..21: mol_type = genomic DNA
tggtctaggggtatgattctc

SEQ ID NO: 52205 - DNA, 23 bp, Homo sapiens
  source 1..23: mol_type = genomic DNA
tggtctaggggtatgattctcgc

SEQ ID NO: 52206 - DNA, 24 bp, Homo sapiens
  source 1..24: mol_type = genomic DNA
tggtctaggggtatgattctcgct

SEQ ID NO: 52207 - DNA, 25 bp, Homo sapiens
  source 1..25: mol_type = genomic DNA
tggtctaggggtatgattctcgctt

SEQ ID NO: 52208 - DNA, 23 bp, Homo sapiens
  source 1..23: mol_type = genomic DNA
tggtctagtggctaggattcggc

SEQ ID NO: 52209 - DNA, 18 bp, Homo sapiens
  source 1..18: mol_type = genomic DNA
tggtctagtggttaggat

SEQ ID NO: 52210 - DNA, 19 bp, Homo sapiens
  source 1..19: mol_type = genomic DNA
tggtctagtggttaggatt

SEQ ID NO: 52211 - DNA, 20 bp, Homo sapiens
  source 1..20: mol_type = genomic DNA
tggtctagtggttaggattc

SEQ ID NO: 52212 - DNA, 23 bp, Homo sapiens
  source 1..23: mol_type = genomic DNA
tggtctagtggttaggattcggc

SEQ ID NO: 52213 - DNA, 24 bp, Homo sapiens
  source 1..24: mol_type = genomic DNA
tggtctagtggttaggattcggcg

SEQ ID NO: 52214 - DNA, 25 bp, Homo sapiens
  source 1..25: mol_type = genomic DNA
tggtctagtggttaggattcggcgc

SEQ ID NO: 52215 - DNA, 26 bp, Homo sapiens
  source 1..26: mol_type = genomic DNA
tggtctagtggttaggattcggcgct

SEQ ID NO: 52216 - DNA, 27 bp, Homo sapiens
  source 1..27: mol_type = genomic DNA
tggtctagtggttaggattcggcgctc

SEQ ID NO: 52217 - DNA, 30 bp, Homo sapiens; identical to SEQ ID NO: 28039
  source 1..30: mol_type = genomic DNA

SEQ ID NO: 52218 - DNA, 32 bp, Homo sapiens; identical to SEQ ID NO: 28040
  source 1..32: mol_type = genomic DNA

SEQ ID NO: 52219 - DNA, 33 bp, Homo sapiens; identical to SEQ ID NO: 42186
  source 1..33: mol_type = genomic DNA

SEQ ID NO: 52220 - DNA, 35 bp, Homo sapiens; identical to SEQ ID NO: 28041
  source 1..35: mol_type = genomic DNA

SEQ ID NO: 52221 - DNA, 42 bp, Homo sapiens; identical to SEQ ID NO: 28043
  source 1..42: mol_type = genomic DNA

SEQ ID NO: 52222 - DNA, 17 bp, Homo sapiens
  source 1..17: mol_type = genomic DNA
tggtgagcactctggac

SEQ ID NO: 52223 - DNA, 16 bp, Homo sapiens
  source 1..16: mol_type = genomic DNA
tggtgagtatccccgc

SEQ ID NO: 52224 - DNA, 17 bp, Homo sapiens
  source 1..17: mol_type = genomic DNA
tggtgagtatccccgcc

SEQ ID NO: 52225 - DNA, 18 bp, Homo sapiens
  source 1..18: mol_type = genomic DNA
tggtgagtatccccgcct

SEQ ID NO: 52226 - DNA, 21 bp, Homo sapiens
  source 1..21: mol_type = genomic DNA
tggtgagtatccccgcctgtc

SEQ ID NO: 52227 - DNA, 23 bp, Homo sapiens
  source 1..23: mol_type = genomic DNA
tggtgagtatccccgcctgtcac

SEQ ID NO: 52228 - DNA, 24 bp, Homo sapiens
  source 1..24: mol_type = genomic DNA
tggtgagtatccccgcctgtcacg

SEQ ID NO: 52229 - DNA, 25 bp, Homo sapiens
  source 1..25: mol_type = genomic DNA
tggtgagtatccccgcctgtcacgc

SEQ ID NO: 52230 - DNA, 29 bp, Homo sapiens
  source 1..29: mol_type = genomic DNA
tggtgagtatccccgcctgtcacgcggga

SEQ ID NO: 52231 - DNA, 31 bp, Homo sapiens
  source 1..31: mol_type = genomic DNA
tggtgagtatccccgcctgtcacgcgggaga

SEQ ID NO: 52232 - DNA, 38 bp, Homo sapiens
  source 1..38: mol_type = genomic DNA
tggtgagtatccccgcctgtcacgcgggagaccggggt

SEQ ID NO: 52233 - DNA, 24 bp, Homo sapiens
  source 1..24: mol_type = genomic DNA
tggtggagttaaagactttttctc

SEQ ID NO: 52234 - DNA, 28 bp, Homo sapiens
  source 1..28: mol_type = genomic DNA
tggtggagttaaagactttttctctgac

SEQ ID NO: 52235 - DNA, 29 bp, Homo sapiens
  source 1..29: mol_type = genomic DNA
tggtggagttaaagactttttctctgacc

SEQ ID NO: 52236 - DNA, 30 bp, Homo sapiens; identical to SEQ ID NO: 28095
  source 1..30: mol_type = genomic DNA

SEQ ID NO: 52237 - DNA, 17 bp, Homo sapiens
  source 1..17: mol_type = genomic DNA
tggtggtctagtggcta

SEQ ID NO: 52238 - DNA, 21 bp, Homo sapiens
  source 1..21: mol_type = genomic DNA
tggtggtctagtggttaggat

SEQ ID NO: 52239 - DNA, 22 bp, Homo sapiens
  source 1..22: mol_type = genomic DNA
tggtggtctagtggttaggatt

SEQ ID NO: 52240 - DNA, 23 bp, Homo sapiens
  source 1..23: mol_type = genomic DNA
tggtggtctagtggttaggattc

SEQ ID NO: 52241 - DNA, 24 bp, Homo sapiens
  source 1..24: mol_type = genomic DNA
tggtggtctagtggttaggattcg

SEQ ID NO: 52242 - DNA, 26 bp, Homo sapiens
  source 1..26: mol_type = genomic DNA
tggtggtctagtggttaggattcggc

SEQ ID NO: 52243 - DNA, 29 bp, Homo sapiens
  source 1..29: mol_type = genomic DNA
tggtggtctagtggttaggattcggcgct

SEQ ID NO: 52244 - DNA, 30 bp, Homo sapiens; identical to SEQ ID NO: 28133
  source 1..30: mol_type = genomic DNA

SEQ ID NO: 52245 - DNA, 32 bp, Homo sapiens; identical to SEQ ID NO: 28135
  source 1..32: mol_type = genomic DNA

SEQ ID NO: 52246 - DNA, 35 bp, Homo sapiens; identical to SEQ ID NO: 28138
  source 1..35: mol_type = genomic DNA

SEQ ID NO: 52247 - DNA, 38 bp, Homo sapiens; identical to SEQ ID NO: 28140
  source 1..38: mol_type = genomic DNA

SEQ ID NO: 52248 - DNA, 45 bp, Homo sapiens; identical to SEQ ID NO: 28141
  source 1..45: mol_type = genomic DNA

SEQ ID NO: 52249 - DNA, 47 bp, Homo sapiens; identical to SEQ ID NO: 28142
  source 1..47: mol_type = genomic DNA

SEQ ID NO: 52250 - DNA, 16 bp, Homo sapiens
  source 1..16: mol_type = genomic DNA
tggtggttcagtggta

SEQ ID NO: 52251 - DNA, 26 bp, Homo sapiens
  source 1..26: mol_type = genomic DNA
tggtggttcagtggtagaattctcgc

SEQ ID NO: 52252 - DNA, 27 bp, Homo sapiens
  source 1..27: mol_type = genomic DNA
tggtggttcagtggtagaattctcgcc

SEQ ID NO: 52253 - DNA, 28 bp, Homo sapiens
  source 1..28: mol_type = genomic DNA
tggtggttcagtggtagaattctcgcct

SEQ ID NO: 52254 - DNA, 31 bp, Homo sapiens; identical to SEQ ID NO: 28160
  source 1..31: mol_type = genomic DNA

SEQ ID NO: 52255 - DNA, 44 bp, Homo sapiens; identical to SEQ ID NO: 28162
  source 1..44: mol_type = genomic DNA

SEQ ID NO: 52256 - DNA, 28 bp, Homo sapiens
  source 1..28: mol_type = genomic DNA
tggtggttcgagcccacccagggacgcc

SEQ ID NO: 52257 - DNA, 46 bp, Homo sapiens
  source 1..46: mol_type = genomic DNA
tggtgtaatggtgagcactctggactctgaatccagcgatccgagt

SEQ ID NO: 52258 - DNA, 16 bp, Homo sapiens
  source 1..16: mol_type = genomic DNA
tggtgtaatggttagc

SEQ ID NO: 52259 - DNA, 24 bp, Homo sapiens
  source 1..24: mol_type = genomic DNA
tggtgtaatggttagcactctgga

SEQ ID NO: 52260 - DNA, 25 bp, Homo sapiens
  source 1..25: mol_type = genomic DNA
tggtgtaatggttagcactctggac

SEQ ID NO: 52261 - DNA, 26 bp, Homo sapiens
  source 1..26: mol_type = genomic DNA
tggtgtaatggttagcactctggact

SEQ ID NO: 52262 - DNA, 27 bp, Homo sapiens
  source 1..27: mol_type = genomic DNA
tggtgtaatggttagcactctggactc

SEQ ID NO: 52263 - DNA, 31 bp, Homo sapiens; identical to SEQ ID NO: 28194
  source 1..31: mol_type = genomic DNA

SEQ ID NO: 52264 - DNA, 32 bp, Homo sapiens; identical to SEQ ID NO: 42246
  source 1..32: mol_type = genomic DNA

SEQ ID NO: 52265 - DNA, 33 bp, Homo sapiens; identical to SEQ ID NO: 28195
  source 1..33: mol_type = genomic DNA

SEQ ID NO: 52266 - DNA, 34 bp, Homo sapiens; identical to SEQ ID NO: 28196
  source 1..34: mol_type = genomic DNA

SEQ ID NO: 52267 - DNA, 35 bp, Homo sapiens; identical to SEQ ID NO: 28197
  source 1..35: mol_type = genomic DNA

SEQ ID NO: 52268 - DNA, 44 bp, Homo sapiens; identical to SEQ ID NO: 28198
  source 1..44: mol_type = genomic DNA

SEQ ID NO: 52269 - DNA, 45 bp, Homo sapiens; identical to SEQ ID NO: 28199
  source 1..45: mol_type = genomic DNA

SEQ ID NO: 52270 - DNA, 46 bp, Homo sapiens; identical to SEQ ID NO: 28200
  source 1..46: mol_type = genomic DNA

SEQ ID NO: 52271 - DNA, 47 bp, Homo sapiens; identical to SEQ ID NO: 28201
  source 1..47: mol_type = genomic DNA

SEQ ID NO: 52272 - DNA, 33 bp, Homo sapiens; identical to SEQ ID NO: 28204
  source 1..33: mol_type = genomic DNA

SEQ ID NO: 52273 - DNA, 34 bp, Homo sapiens; identical to SEQ ID NO: 42258
  source 1..34: mol_type = genomic DNA

SEQ ID NO: 52274 - DNA, 35 bp, Homo sapiens; identical to SEQ ID NO: 42259
  source 1..35: mol_type = genomic DNA

SEQ ID NO: 52275 - DNA, 18 bp, Homo sapiens
  source 1..18: mol_type = genomic DNA
tggtgtagtggtatcatg

SEQ ID NO: 52276 - DNA, 20 bp, Homo sapiens
  source 1..20: mol_type = genomic DNA
tggtgtagtggtatcatgca

SEQ ID NO: 52277 - DNA, 22 bp, Homo sapiens
  source 1..22: mol_type = genomic DNA
tggtgtagtggtatcatgcaag

SEQ ID NO: 52278 - DNA, 23 bp, Homo sapiens
  source 1..23: mol_type = genomic DNA
tggtgtagtggtatcatgcaaga

SEQ ID NO: 52279 - DNA, 25 bp, Homo sapiens
  source 1..25: mol_type = genomic DNA
tggtgtagtggtatcatgcaagatt

SEQ ID NO: 52280 - DNA, 27 bp, Homo sapiens
  source 1..27: mol_type = genomic DNA
tggtgtagtggtatcatgcaagattcc

SEQ ID NO: 52281 - DNA, 28 bp, Homo sapiens
  source 1..28: mol_type = genomic DNA
tggtgtagtggtatcatgcaagattccc

SEQ ID NO: 52282 - DNA, 32 bp, Homo sapiens; identical to SEQ ID NO: 28214
  source 1..32: mol_type = genomic DNA

SEQ ID NO: 52283 - DNA, 43 bp, Homo sapiens; identical to SEQ ID NO: 28217
  source 1..43: mol_type = genomic DNA

SEQ ID NO: 52284 - DNA, 16 bp, Homo sapiens
  source 1..16: mol_type = genomic DNA
tggttaaggcattgga

SEQ ID NO: 52285 - DNA, 17 bp, Homo sapiens
  source 1..17: mol_type = genomic DNA
tggttaaggcattggac

SEQ ID NO: 52286 - DNA, 20 bp, Homo sapiens
  source 1..20: mol_type = genomic DNA
tggttaaggcattggactta

SEQ ID NO: 52287 - DNA, 16 bp, Homo sapiens
  source 1..16: mol_type = genomic DNA
tggttaaggcgttgga

SEQ ID NO: 52288 - DNA, 17 bp, Homo sapiens
  source 1..17: mol_type = genomic DNA
tggttaaggcgttggac

SEQ ID NO: 52289 - DNA, 16 bp, Homo sapiens
  source 1..16: mol_type = genomic DNA
tggttagcactctgga

SEQ ID NO: 52290 - DNA, 17 bp, Homo sapiens
  source 1..17: mol_type = genomic DNA
tggttagcactctggac

SEQ ID NO: 52291 - DNA, 18 bp, Homo sapiens
  source 1..18: mol_type = genomic DNA
tggttagcactctggact

SEQ ID NO: 52292 - DNA, 23 bp, Homo sapiens
  source 1..23: mol_type = genomic DNA
tggttagcactctggactctgaa

SEQ ID NO: 52293 - DNA, 24 bp, Homo sapiens
  source 1..24: mol_type = genomic DNA
tggttagcactctggactctgaat

SEQ ID NO: 52294 - DNA, 25 bp, Homo sapiens
  source 1..25: mol_type = genomic DNA
tggttagcactctggactctgaatc

SEQ ID NO: 52295 - DNA, 26 bp, Homo sapiens
  source 1..26: mol_type = genomic DNA
tggttagcactctggactctgaatcc

SEQ ID NO: 52296 - DNA, 27 bp, Homo sapiens
  source 1..27: mol_type = genomic DNA
tggttagcactctggactctgaatcca

SEQ ID NO: 52297 - DNA, 38 bp, Homo sapiens; identical to SEQ ID NO: 28243
  source 1..38: mol_type = genomic DNA

SEQ ID NO: 52298 - DNA, 25 bp, Homo sapiens
  source 1..25: mol_type = genomic DNA
tggttagcactctggactttgaatc

SEQ ID NO: 52299 - DNA, 26 bp, Homo sapiens
  source 1..26: mol_type = genomic DNA
tggttagcactctggactttgaatcc

SEQ ID NO: 52300 - DNA, 39 bp, Homo sapiens
  source 1..39: mol_type = genomic DNA
tggttagcactctggactttgaatccagcgatccgagtt

SEQ ID NO: 52301 - DNA, 16 bp, Homo sapiens
  source 1..16: mol_type = genomic DNA
tggttaggattcggcg

SEQ ID NO: 52302 - DNA, 17 bp, Homo sapiens
  source 1..17: mol_type = genomic DNA
tggttaggattcggcgc

SEQ ID NO: 52303 - DNA, 18 bp, Homo sapiens
  source 1..18: mol_type = genomic DNA
tggttaggattcggcgct

SEQ ID NO: 52304 - DNA, 19 bp, Homo sapiens
  source 1..19: mol_type = genomic DNA
tggttaggattcggcgctc

SEQ ID NO: 52305 - DNA, 20 bp, Homo sapiens
  source 1..20: mol_type = genomic DNA
tggttaggattcggcgctct

SEQ ID NO: 52306 - DNA, 21 bp, Homo sapiens
  source 1..21: mol_type = genomic DNA
tggttaggattcggcgctctc

SEQ ID NO: 52307 - DNA, 22 bp, Homo sapiens
  source 1..22: mol_type = genomic DNA
tggttaggattcggcgctctca

SEQ ID NO: 52308 - DNA, 23 bp, Homo sapiens
  source 1..23: mol_type = genomic DNA
tggttaggattcggcgctctcac

SEQ ID NO: 52309 - DNA, 24 bp, Homo sapiens
  source 1..24: mol_type = genomic DNA
tggttaggattcggcgctctcacc

SEQ ID NO: 52310 - DNA, 25 bp, Homo sapiens
  source 1..25: mol_type = genomic DNA
tggttaggattcggcgctctcaccg

SEQ ID NO: 52311 - DNA, 26 bp, Homo sapiens
  source 1..26: mol_type = genomic DNA
tggttaggattcggcgctctcaccgc

SEQ ID NO: 52312 - DNA, 27 bp, Homo sapiens
  source 1..27: mol_type = genomic DNA
tggttaggattcggcgctctcaccgcc

SEQ ID NO: 52313 - DNA, 33 bp, Homo sapiens; identical to SEQ ID NO: 28279
  source 1..33: mol_type = genomic DNA

SEQ ID NO: 52314 - DNA, 34 bp, Homo sapiens; identical to SEQ ID NO: 28280
  source 1..34: mol_type = genomic DNA

SEQ ID NO: 52315 - DNA, 37 bp, Homo sapiens; identical to SEQ ID NO: 28283
  source 1..37: mol_type = genomic DNA

SEQ ID NO: 52316 - DNA, 38 bp, Homo sapiens; identical to SEQ ID NO: 28284
  source 1..38: mol_type = genomic DNA

SEQ ID NO: 52317 - DNA, 39 bp, Homo sapiens; identical to SEQ ID NO: 28285
  source 1..39: mol_type = genomic DNA

SEQ ID NO: 52318 - DNA, 16 bp, Homo sapiens
  source 1..16: mol_type = genomic DNA
tggttagtactctgcg

SEQ ID NO: 52319 - DNA, 17 bp, Homo sapiens
  source 1..17: mol_type = genomic DNA
tggttagtactctgcgt

SEQ ID NO: 52320 - DNA, 18 bp, Homo sapiens
  source 1..18: mol_type = genomic DNA
tggttagtactctgcgtt

SEQ ID NO: 52321 - DNA, 19 bp, Homo sapiens
  source 1..19: mol_type = genomic DNA
tggttagtactctgcgttg

SEQ ID NO: 52322 - DNA, 20 bp, Homo sapiens
  source 1..20: mol_type = genomic DNA
tggttagtactctgcgttgt

SEQ ID NO: 52323 - DNA, 24 bp, Homo sapiens
  source 1..24: mol_type = genomic DNA
tggttagtactctgcgttgtggcc

SEQ ID NO: 52324 - DNA, 27 bp, Homo sapiens
  source 1..27: mol_type = genomic DNA
tggttagtactctgcgttgtggccgca

SEQ ID NO: 52325 - DNA, 29 bp, Homo sapiens
  source 1..29: mol_type = genomic DNA
tggttagtactctgcgttgtggccgcagc

SEQ ID NO: 52326 - DNA, 33 bp, Homo sapiens; identical to SEQ ID NO: 28298
  source 1..33: mol_type = genomic DNA

SEQ ID NO: 52327 - DNA, 34 bp, Homo sapiens; identical to SEQ ID NO: 28299
  source 1..34: mol_type = genomic DNA

SEQ ID NO: 52328 - DNA, 16 bp, Homo sapiens
  source 1..16: mol_type = genomic DNA
tggttagtatccccgc

SEQ ID NO: 52329 - DNA, 23 bp, Homo sapiens
  source 1..23: mol_type = genomic DNA
tggttagtatccccgcctgtcac

SEQ ID NO: 52330 - DNA, 25 bp, Homo sapiens
  source 1..25: mol_type = genomic DNA
tggttatacccttcccgtactacca

SEQ ID NO: 52331 - DNA, 16 bp, Homo sapiens
  source 1..16: mol_type = genomic DNA
tggttatcacgtctgc

SEQ ID NO: 52332 - DNA, 17 bp, Homo sapiens
  source 1..17: mol_type = genomic DNA
tggttatcacgtctgct

SEQ ID NO: 52333 - DNA, 16 bp, Homo sapiens
  source 1..16: mol_type = genomic DNA
tggttatcacgttcgc

SEQ ID NO: 52334 - DNA, 17 bp, Homo sapiens
  source 1..17: mol_type = genomic DNA
tggttatcacgttcgcc

SEQ ID NO: 52335 - DNA, 18 bp, Homo sapiens
  source 1..18: mol_type = genomic DNA
tggttatcacgttcgcct

SEQ ID NO: 52336 - DNA, 19 bp, Homo sapiens
  source 1..19: mol_type = genomic DNA
tggttatcacgttcgcctc

SEQ ID NO: 52337 - DNA, 21 bp, Homo sapiens
  source 1..21: mol_type = genomic DNA
tggttatcacgttcgcctcac

SEQ ID NO: 52338 - DNA, 23 bp, Homo sapiens
  source 1..23: mol_type = genomic DNA
tggttatcacgttcgcctcacac

SEQ ID NO: 52339 - DNA, 28 bp, Homo sapiens
  source 1..28: mol_type = genomic DNA
tggttatcacgttcgcctcacacgcgaa

SEQ ID NO: 52340 - DNA, 19 bp, Homo sapiens
  source 1..19: mol_type = genomic DNA
tggttcaaatccgggtgcc

SEQ ID NO: 52341 - DNA, 20 bp, Homo sapiens
  source 1..20: mol_type = genomic DNA
tggttcaaatccgggtgccc

SEQ ID NO: 52342 - DNA, 16 bp, Homo sapiens
  source 1..16: mol_type = genomic DNA
tggttcagtggtagaa

SEQ ID NO: 52343 - DNA, 19 bp, Homo sapiens
  source 1..19: mol_type = genomic DNA
tggttcagtggtagaattc

SEQ ID NO: 52344 - DNA, 20 bp, Homo sapiens
  source 1..20: mol_type = genomic DNA
tggttcagtggtagaattct

SEQ ID NO: 52345 - DNA, 21 bp, Homo sapiens
  source 1..21: mol_type = genomic DNA
tggttcagtggtagaattctc

SEQ ID NO: 52346 - DNA, 22 bp, Homo sapiens
  source 1..22: mol_type = genomic DNA
tggttcagtggtagaattctcg

SEQ ID NO: 52347 - DNA, 23 bp, Homo sapiens
  source 1..23: mol_type = genomic DNA
tggttcagtggtagaattctcgc

SEQ ID NO: 52348 - DNA, 24 bp, Homo sapiens
  source 1..24: mol_type = genomic DNA
tggttcagtggtagaattctcgcc

SEQ ID NO: 52349 - DNA, 25 bp, Homo sapiens
  source 1..25: mol_type = genomic DNA
tggttcagtggtagaattctcgcct

SEQ ID NO: 52350 - DNA, 26 bp, Homo sapiens
  source 1..26: mol_type = genomic DNA
tggttcagtggtagaattctcgcctg

SEQ ID NO: 52351 - DNA, 27 bp, Homo sapiens
  source 1..27: mol_type = genomic DNA
tggttcagtggtagaattctcgcctgc

SEQ ID NO: 52352 - DNA, 28 bp, Homo sapiens
  source 1..28: mol_type = genomic DNA
tggttcagtggtagaattctcgcctgcc

SEQ ID NO: 52353 - DNA, 29 bp, Homo sapiens
  source 1..29: mol_type = genomic DNA
tggttcagtggtagaattctcgcctgcca

SEQ ID NO: 52354 - DNA, 30 bp, Homo sapiens; identical to SEQ ID NO: 28340
  source 1..30: mol_type = genomic DNA

SEQ ID NO: 52355 - DNA, 31 bp, Homo sapiens; identical to SEQ ID NO: 28341
  source 1..31: mol_type = genomic DNA

SEQ ID NO: 52356 - DNA, 32 bp, Homo sapiens; identical to SEQ ID NO: 28342
  source 1..32: mol_type = genomic DNA

SEQ ID NO: 52357 - DNA, 36 bp, Homo sapiens; identical to SEQ ID NO: 42370
  source 1..36: mol_type = genomic DNA

SEQ ID NO: 52358 - DNA, 40 bp, Homo sapiens; identical to SEQ ID NO: 28344
  source 1..40: mol_type = genomic DNA

SEQ ID NO: 52359 - DNA, 41 bp, Homo sapiens; identical to SEQ ID NO: 28345
  source 1..41: mol_type = genomic DNA

SEQ ID NO: 52360 - DNA, 42 bp, Homo sapiens; identical to SEQ ID NO: 28346
  source 1..42: mol_type = genomic DNA

SEQ ID NO: 52361 - DNA, 43 bp, Homo sapiens; identical to SEQ ID NO: 28347
  source 1..43: mol_type = genomic DNA

SEQ ID NO: 52362 - DNA, 44 bp, Homo sapiens; identical to SEQ ID NO: 28348
  source 1..44: mol_type = genomic DNA

SEQ ID NO: 52363 - DNA, 45 bp, Homo sapiens; identical to SEQ ID NO: 28349
  source 1..45: mol_type = genomic DNA

SEQ ID NO: 52364 - DNA, 24 bp, Homo sapiens
  source 1..24: mol_type = genomic DNA
tggttcgaatccggctcgaaggac

SEQ ID NO: 52365 - DNA, 25 bp, Homo sapiens
  source 1..25: mol_type = genomic DNA
tggttcgaatccggctcgaaggacc

SEQ ID NO: 52366 - DNA, 24 bp, Homo sapiens
  source 1..24: mol_type = genomic DNA
tggttcgaatccggctcggaggac

SEQ ID NO: 52367 - DNA, 25 bp, Homo sapiens
  source 1..25: mol_type = genomic DNA
tggttcgagcccacccagggacgcc

SEQ ID NO: 52368 - DNA, 21 bp, Homo sapiens
  source 1..21: mol_type = genomic DNA
tggttcgatcccgggtttcgg

SEQ ID NO: 52369 - DNA, 24 bp, Homo sapiens
  source 1..24: mol_type = genomic DNA
tggttcgatcccgggtttcggcac

SEQ ID NO: 52370 - DNA, 19 bp, Homo sapiens
  source 1..19: mol_type = genomic DNA
tggttcgattccggctcga

SEQ ID NO: 52371 - DNA, 24 bp, Homo sapiens
  source 1..24: mol_type = genomic DNA
tggttcgattccggctcgaaggac

SEQ ID NO: 52372 - DNA, 25 bp, Homo sapiens
  source 1..25: mol_type = genomic DNA
tggttcgattccggctcgaaggacc

SEQ ID NO: 52373 - DNA, 16 bp, Homo sapiens
  source 1..16: mol_type = genomic DNA
tggttgtagtccgtgc

SEQ ID NO: 52374 - DNA, 20 bp, Homo sapiens
  source 1..20: mol_type = genomic DNA
tggttgtagtccgtgcgaga

SEQ ID NO: 52375 - DNA, 21 bp, Homo sapiens
  source 1..21: mol_type = genomic DNA
tggttgtagtccgtgcgagaa

SEQ ID NO: 52376 - DNA, 22 bp, Homo sapiens
  source 1..22: mol_type = genomic DNA
tggttgtagtccgtgcgagaat

SEQ ID NO: 52377 - DNA, 23 bp, Homo sapiens
  source 1..23: mol_type = genomic DNA
tggttgtagtccgtgcgagaata

SEQ ID NO: 52378 - DNA, 24 bp, Homo sapiens
  source 1..24: mol_type = genomic DNA
tggttgtagtccgtgcgagaatac

SEQ ID NO: 52379 - DNA, 25 bp, Homo sapiens
  source 1..25: mol_type = genomic DNA
tggttgtagtccgtgcgagaatacc

SEQ ID NO: 52380 - DNA, 26 bp, Homo sapiens
  source 1..26: mol_type = genomic DNA
tggttgtagtccgtgcgagaatacca

SEQ ID NO: 52381 - DNA, 25 bp, Homo sapiens
  source 1..25: mol_type = genomic DNA
tggtttagtggtagaattctcgcct

SEQ ID NO: 52382 - DNA, 32 bp, Homo sapiens
  source 1..32: mol_type = genomic DNA
tggtttttcatatcattggtcgtggttgtagt

SEQ ID NO: 52383 - DNA, 36 bp, Homo sapiens
  source 1..36: mol_type = genomic DNA
tggtttttcatatcattggtcgtggttgtagtccgt

SEQ ID NO: 52384 - DNA, 38 bp, Homo sapiens
  source 1..38: mol_type = genomic DNA
tggtttttcatatcattggtcgtggttgtagtccgtgc

SEQ ID NO: 52385 - DNA, 43 bp, Homo sapiens; identical to SEQ ID NO: 28388
  source 1..43: mol_type = genomic DNA

SEQ ID NO: 52386 - DNA, 44 bp, Homo sapiens; identical to SEQ ID NO: 28389
  source 1..44: mol_type = genomic DNA

SEQ ID NO: 52387 - DNA, 45 bp, Homo sapiens; identical to SEQ ID NO: 28390
  source 1..45: mol_type = genomic DNA

SEQ ID NO: 52388 - DNA, 47 bp, Homo sapiens; identical to SEQ ID NO: 28391
  source 1..47: mol_type = genomic DNA

SEQ ID NO: 52389 - DNA, 34 bp, Homo sapiens; identical to SEQ ID NO: 28407
  source 1..34: mol_type = genomic DNA

SEQ ID NO: 52390 - DNA, 37 bp, Homo sapiens; identical to SEQ ID NO: 28410
  source 1..37: mol_type = genomic DNA

SEQ ID NO: 52391 - DNA, 38 bp, Homo sapiens; identical to SEQ ID NO: 28411
  source 1..38: mol_type = genomic DNA

SEQ ID NO: 52392 - DNA, 17 bp, Homo sapiens
  source 1..17: mol_type = genomic DNA
tgtaatggttagcactc

SEQ ID NO: 52393 - DNA, 20 bp, Homo sapiens
  source 1..20: mol_type = genomic DNA
tgtaatggttagcactctgg

SEQ ID NO: 52394 - DNA, 21 bp, Homo sapiens
  source 1..21: mol_type = genomic DNA
tgtaatggttagcactctgga

SEQ ID NO: 52395 - DNA, 22 bp, Homo sapiens
  source 1..22: mol_type = genomic DNA
tgtaatggttagcactctggac

SEQ ID NO: 52396 - DNA, 23 bp, Homo sapiens
  source 1..23: mol_type = genomic DNA
tgtaatggttagcactctggact

SEQ ID NO: 52397 - DNA, 24 bp, Homo sapiens
  source 1..24: mol_type = genomic DNA
tgtaatggttagcactctggactc

SEQ ID NO: 52398 - DNA, 27 bp, Homo sapiens
  source 1..27: mol_type = genomic DNA
tgtaatggttagcactctggactctga

SEQ ID NO: 52399 - DNA, 29 bp, Homo sapiens
  source 1..29: mol_type = genomic DNA
tgtaatggttagcactctggactctgaat

SEQ ID NO: 52400 - DNA, 30 bp, Homo sapiens; identical to SEQ ID NO: 28440
  source 1..30: mol_type = genomic DNA

SEQ ID NO: 52401 - DNA, 32 bp, Homo sapiens; identical to SEQ ID NO: 28442
  source 1..32: mol_type = genomic DNA

SEQ ID NO: 52402 - DNA, 43 bp, Homo sapiens; identical to SEQ ID NO: 28443
  source 1..43: mol_type = genomic DNA

SEQ ID NO: 52403 - DNA, 43 bp, Homo sapiens; identical to SEQ ID NO: 28453
  source 1..43: mol_type = genomic DNA

SEQ ID NO: 52404 - DNA, 20 bp, Homo sapiens
  source 1..20: mol_type = genomic DNA
tgtagcggttatcacattcg

SEQ ID NO: 52405 - DNA, 21 bp, Homo sapiens
  source 1..21: mol_type = genomic DNA
tgtagcggttatcacattcgc

SEQ ID NO: 52406 - DNA, 23 bp, Homo sapiens
  source 1..23: mol_type = genomic DNA
tgtagcggttatcacattcgcct

SEQ ID NO: 52407 - DNA, 16 bp, Homo sapiens
  source 1..16: mol_type = genomic DNA
tgtagtccgtgcgaga

SEQ ID NO: 52408 - DNA, 17 bp, Homo sapiens
  source 1..17: mol_type = genomic DNA
tgtagtccgtgcgagaa

SEQ ID NO: 52409 - DNA, 18 bp, Homo sapiens
  source 1..18: mol_type = genomic DNA
tgtagtccgtgcgagaat

SEQ ID NO: 52410 - DNA, 19 bp, Homo sapiens
  source 1..19: mol_type = genomic DNA
tgtagtccgtgcgagaata

SEQ ID NO: 52411 - DNA, 21 bp, Homo sapiens
  source 1..21: mol_type = genomic DNA
tgtagtccgtgcgagaatacc

SEQ ID NO: 52412 - DNA, 22 bp, Homo sapiens
  source 1..22: mol_type = genomic DNA
tgtagtccgtgcgagaatacca

SEQ ID NO: 52413 - DNA, 21 bp, Homo sapiens
  source 1..21: mol_type = genomic DNA
tgtagtggtcatcacgttcgc

SEQ ID NO: 52414 - DNA, 23 bp, Homo sapiens
  source 1..23: mol_type = genomic DNA
tgtagtggtcatcacgttcgcct

SEQ ID NO: 52415 - DNA, 21 bp, Homo sapiens
  source 1..21: mol_type = genomic DNA
tgtagtggttatcacgtctgc

SEQ ID NO: 52416 - DNA, 21 bp, Homo sapiens
  source 1..21: mol_type = genomic DNA
tgtagtggttatcacgttcgc

SEQ ID NO: 52417 - DNA, 22 bp, Homo sapiens
  source 1..22: mol_type = genomic DNA
tgtagtggttatcacgttcgcc

SEQ ID NO: 52418 - DNA, 23 bp, Homo sapiens
  source 1..23: mol_type = genomic DNA
tgtagtggttatcacgttcgcct

SEQ ID NO: 52419 - DNA, 35 bp, Homo sapiens; identical to SEQ ID NO: 28530
  source 1..35: mol_type = genomic DNA

SEQ ID NO: 52420 - DNA, 36 bp, Homo sapiens; identical to SEQ ID NO: 28531
  source 1..36: mol_type = genomic DNA

SEQ ID NO: 52421 - DNA, 37 bp, Homo sapiens; identical to SEQ ID NO: 28532
  source 1..37: mol_type = genomic DNA

SEQ ID NO: 52422 - DNA, 38 bp, Homo sapiens; identical to SEQ ID NO: 28533
  source 1..38: mol_type = genomic DNA

SEQ ID NO: 52423 - DNA, 39 bp, Homo sapiens; identical to SEQ ID NO: 28534
  source 1..39: mol_type = genomic DNA

SEQ ID NO: 52424 - DNA, 36 bp, Homo sapiens; identical to SEQ ID NO: 28541
  source 1..36: mol_type = genomic DNA

SEQ ID NO: 52425 - DNA, 37 bp, Homo sapiens; identical to SEQ ID NO: 28542
  source 1..37: mol_type = genomic DNA

SEQ ID NO: 52426 - DNA, 38 bp, Homo sapiens; identical to SEQ ID NO: 28543
  source 1..38: mol_type = genomic DNA

SEQ ID NO: 52427 - DNA, 39 bp, Homo sapiens
  source 1..39: mol_type = genomic DNA
tgtatgaggtcccgggttcgatccccggcatctccacca

SEQ ID NO: 52428 - DNA, 16 bp, Homo sapiens
  source 1..16: mol_type = genomic DNA
tgtcacgcgggagacc

SEQ ID NO: 52429 - DNA, 17 bp, Homo sapiens
  source 1..17: mol_type = genomic DNA
tgtcacgcgggagaccg

SEQ ID NO: 52430 - DNA, 21 bp, Homo sapiens
  source 1..21: mol_type = genomic DNA
tgtcacgcgggagaccggggt

SEQ ID NO: 52431 - DNA, 41 bp, Homo sapiens; identical to SEQ ID NO: 28550
  source 1..41: mol_type = genomic DNA

SEQ ID NO: 52432 - DNA, 42 bp, Homo sapiens; identical to SEQ ID NO: 28551
  source 1..42: mol_type = genomic DNA

SEQ ID NO: 52433 - DNA, 37 bp, Homo sapiens; identical to SEQ ID NO: 28554
  source 1..37: mol_type = genomic DNA

SEQ ID NO: 52434 - DNA, 41 bp, Homo sapiens; identical to SEQ ID NO: 28557
  source 1..41: mol_type = genomic DNA

SEQ ID NO: 52435 - DNA, 42 bp, Homo sapiens; identical to SEQ ID NO: 28558
  source 1..42: mol_type = genomic DNA

SEQ ID NO: 52436 - DNA, 43 bp, Homo sapiens; identical to SEQ ID NO: 28559
  source 1..43: mol_type = genomic DNA

SEQ ID NO: 52437 - DNA, 34 bp, Homo sapiens; identical to SEQ ID NO: 28570
  source 1..34: mol_type = genomic DNA

SEQ ID NO: 52438 - DNA, 41 bp, Homo sapiens; identical to SEQ ID NO: 28601
  source 1..41: mol_type = genomic DNA

SEQ ID NO: 52439 - DNA, 42 bp, Homo sapiens; identical to SEQ ID NO: 28602
  source 1..42: mol_type = genomic DNA

SEQ ID NO: 52440 - DNA, 37 bp, Homo sapiens; identical to SEQ ID NO: 42452
  source 1..37: mol_type = genomic DNA

SEQ ID NO: 52441 - DNA, 21 bp, Homo sapiens
  source 1..21: mol_type = genomic DNA
tgtgatggccgagtggttaag

SEQ ID NO: 52442 - DNA, 20 bp, Homo sapiens
  source 1..20: mol_type = genomic DNA
tgtgctttgcacgcgtgggt

SEQ ID NO: 52443 - DNA, 41 bp, Homo sapiens; identical to SEQ ID NO: 28610
  source 1..41: mol_type = genomic DNA

SEQ ID NO: 52444 - DNA, 17 bp, Homo sapiens
  source 1..17: mol_type = genomic DNA
tgtggccgcagcaacct

SEQ ID NO: 52445 - DNA, 28 bp, Homo sapiens
  source 1..28: mol_type = genomic DNA
tgtgggttcgaatcccaccagagtcgcc

SEQ ID NO: 52446 - DNA, 28 bp, Homo sapiens
  source 1..28: mol_type = genomic DNA
tgtgggttcgagtcccaccagagtcgcc

SEQ ID NO: 52447 - DNA, 26 bp, Homo sapiens
  source 1..26: mol_type = genomic DNA
tgtgggttcgagtcccatctggggtg

SEQ ID NO: 52448 - DNA, 27 bp, Homo sapiens
  source 1..27: mol_type = genomic DNA
tgtgggttcgagtcccatctgggtcgc

SEQ ID NO: 52449 - DNA, 28 bp, Homo sapiens
  source 1..28: mol_type = genomic DNA
tgtgggttcgagtcccatctgggtcgcc

SEQ ID NO: 52450 - DNA, 27 bp, Homo sapiens
  source 1..27: mol_type = genomic DNA
tgtgggtttaagtcccattggtctagc

SEQ ID NO: 52451 - DNA, 28 bp, Homo sapiens
  source 1..28: mol_type = genomic DNA
tgtgggtttaagtcccattggtctagcc

SEQ ID NO: 52452 - DNA, 24 bp, Homo sapiens
  source 1..24: mol_type = genomic DNA
tgttcaaatcacgtcggggtcacc

SEQ ID NO: 52453 - DNA, 24 bp, Homo sapiens
  source 1..24: mol_type = genomic DNA
tgttcaagtcacgtcggggtcacc

SEQ ID NO: 52454 - DNA, 24 bp, Homo sapiens
  source 1..24: mol_type = genomic DNA
tgttcgaatcacgtcggggtcacc

SEQ ID NO: 52455 - DNA, 25 bp, Homo sapiens
  source 1..25: mol_type = genomic DNA
tgttggttatacccttcccgtacta

SEQ ID NO: 52456 - DNA, 26 bp, Homo sapiens
  source 1..26: mol_type = genomic DNA
tgttggttatacccttcccgtactac

SEQ ID NO: 52457 - DNA, 27 bp, Homo sapiens
  source 1..27: mol_type = genomic DNA
tgttggttatacccttcccgtactacc

SEQ ID NO: 52458 - DNA, 28 bp, Homo sapiens
  source 1..28: mol_type = genomic DNA
tgttggttatacccttcccgtactacca

SEQ ID NO: 52459 - DNA, 16 bp, Homo sapiens
  source 1..16: mol_type = genomic DNA
tgtttagacgggctca

SEQ ID NO: 52460 - DNA, 17 bp, Homo sapiens
  source 1..17: mol_type = genomic DNA
tgtttagacgggctcac

SEQ ID NO: 52461 - DNA, 23 bp, Homo sapiens
  source 1..23: mol_type = genomic DNA
tgtttagacgggctcacatcacc

SEQ ID NO: 52462 - DNA, 24 bp, Homo sapiens
  source 1..24: mol_type = genomic DNA
tgtttagacgggctcacatcaccc

SEQ ID NO: 52463 - DNA, 27 bp, Homo sapiens
  source 1..27: mol_type = genomic DNA
tgtttagacgggctcacatcaccccat

SEQ ID NO: 52464 - DNA, 30 bp, Homo sapiens; identical to SEQ ID NO: 28691
  source 1..30: mol_type = genomic DNA

SEQ ID NO: 52465 - DNA, 34 bp, Homo sapiens; identical to SEQ ID NO: 28695
  source 1..34: mol_type = genomic DNA

SEQ ID NO: 52466 - DNA, 31 bp, Homo sapiens; identical to SEQ ID NO: 28706
  source 1..31: mol_type = genomic DNA

SEQ ID NO: 52467 - DNA, 32 bp, Homo sapiens; identical to SEQ ID NO: 28707
  source 1..32: mol_type = genomic DNA

SEQ ID NO: 52468 - DNA, 33 bp, Homo sapiens; identical to SEQ ID NO: 28708
  source 1..33: mol_type = genomic DNA

SEQ ID NO: 52469 - DNA, 16 bp, Homo sapiens
  source 1..16: mol_type = genomic DNA
ttaaagactttttctc

SEQ ID NO: 52470 - DNA, 19 bp, Homo sapiens
  source 1..19: mol_type = genomic DNA
ttaaagactttttctctga

SEQ ID NO: 52471 - DNA, 20 bp, Homo sapiens
  source 1..20: mol_type = genomic DNA
ttaaagactttttctctgac

SEQ ID NO: 52472 - DNA, 21 bp, Homo sapiens
  source 1..21: mol_type = genomic DNA
ttaaagactttttctctgacc

SEQ ID NO: 52473 - DNA, 22 bp, Homo sapiens
  source 1..22: mol_type = genomic DNA
ttaaagactttttctctgacca

SEQ ID NO: 52474 - DNA, 18 bp, Homo sapiens
  source 1..18: mol_type = genomic DNA
ttaaagattaagagaacc

SEQ ID NO: 52475 - DNA, 36 bp, Homo sapiens; identical to SEQ ID NO: 28753
  source 1..36: mol_type = genomic DNA

SEQ ID NO: 52476 - DNA, 38 bp, Homo sapiens; identical to SEQ ID NO: 28755
  source 1..38: mol_type = genomic DNA

SEQ ID NO: 52477 - DNA, 39 bp, Homo sapiens; identical to SEQ ID NO: 28756
  source 1..39: mol_type = genomic DNA

SEQ ID NO: 52478 - DNA, 18 bp, Homo sapiens
  source 1..18: mol_type = genomic DNA
ttaaagtggctgatttgc

SEQ ID NO: 52479 - DNA, 19 bp, Homo sapiens
  source 1..19: mol_type = genomic DNA
ttaaatacagaccaagagc

SEQ ID NO: 52480 - DNA, 18 bp, Homo sapiens
  source 1..18: mol_type = genomic DNA
ttaacacaaagcacccaa

SEQ ID NO: 52481 - DNA, 26 bp, Homo sapiens
  source 1..26: mol_type = genomic DNA
ttaaccaaaacatcagattgtgaatc

SEQ ID NO: 52482 - DNA, 21 bp, Homo sapiens
  source 1..21: mol_type = genomic DNA
ttaaccgaaaggttggtggtt

SEQ ID NO: 52483 - DNA, 22 bp, Homo sapiens
  source 1..22: mol_type = genomic DNA
ttaaccgaaaggttggtggttc

SEQ ID NO: 52484 - DNA, 23 bp, Homo sapiens
  source 1..23: mol_type = genomic DNA
ttaaccgaaaggttggtggttcg

SEQ ID NO: 52485 - DNA, 24 bp, Homo sapiens
  source 1..24: mol_type = genomic DNA
ttaaccgaaaggttggtggttcga

SEQ ID NO: 52486 - DNA, 26 bp, Homo sapiens
  source 1..26: mol_type = genomic DNA
ttaaccgaaaggttggtggttcgagc

SEQ ID NO: 52487 - DNA, 37 bp, Homo sapiens; identical to SEQ ID NO: 28873
  source 1..37: mol_type = genomic DNA

SEQ ID NO: 52488 - DNA, 38 bp, Homo sapiens; identical to SEQ ID NO: 28874
  source 1..38: mol_type = genomic DNA

SEQ ID NO: 52489 - DNA, 39 bp, Homo sapiens; identical to SEQ ID NO: 28875
  source 1..39: mol_type = genomic DNA

SEQ ID NO: 52490 - DNA, 40 bp, Homo sapiens; identical to SEQ ID NO: 28876
  source 1..40: mol_type = genomic DNA

SEQ ID NO: 52491 - DNA, 41 bp, Homo sapiens; identical to SEQ ID NO: 28877
  source 1..41: mol_type = genomic DNA

SEQ ID NO: 52492 - DNA, 42 bp, Homo sapiens; identical to SEQ ID NO: 28878
  source 1..42: mol_type = genomic DNA

SEQ ID NO: 52493 - DNA, 41 bp, Homo sapiens; identical to SEQ ID NO: 28879
  source 1..41: mol_type = genomic DNA

SEQ ID NO: 52494 - DNA, 19 bp, Homo sapiens
  source 1..19: mol_type = genomic DNA
ttaactaagtgtttgtggg

SEQ ID NO: 52495 - DNA, 32 bp, Homo sapiens; identical to SEQ ID NO: 28902
  source 1..32: mol_type = genomic DNA

SEQ ID NO: 52496 - DNA, 36 bp, Homo sapiens; identical to SEQ ID NO: 28906
  source 1..36: mol_type = genomic DNA

SEQ ID NO: 52497 - DNA, 37 bp, Homo sapiens; identical to SEQ ID NO: 28907
  source 1..37: mol_type = genomic DNA

SEQ ID NO: 52498 - DNA, 38 bp, Homo sapiens; identical to SEQ ID NO: 28908
  source 1..38: mol_type = genomic DNA

SEQ ID NO: 52499 - DNA, 39 bp, Homo sapiens; identical to SEQ ID NO: 28909
  source 1..39: mol_type = genomic DNA

SEQ ID NO: 52500 - DNA, 40 bp, Homo sapiens; identical to SEQ ID NO: 28910
  source 1..40: mol_type = genomic DNA

SEQ ID NO: 52501 - DNA, 41 bp, Homo sapiens; identical to SEQ ID NO: 28911
  source 1..41: mol_type = genomic DNA

SEQ ID NO: 52502 - DNA, 42 bp, Homo sapiens; identical to SEQ ID NO: 28912
  source 1..42: mol_type = genomic DNA

SEQ ID NO: 52503 - DNA, 26 bp, Homo sapiens
  source 1..26: mol_type = genomic DNA
ttaacttccaattaactagttttgac

SEQ ID NO: 52504 - DNA, 17 bp, Homo sapiens
  source 1..17: mol_type = genomic DNA
ttaacttgaccgctctg

SEQ ID NO: 52505 - DNA, 18 bp, Homo sapiens
  source 1..18: mol_type = genomic DNA
ttaacttgaccgctctga

SEQ ID NO: 52506 - DNA, 19 bp, Homo sapiens
  source 1..19: mol_type = genomic DNA
ttaacttgaccgctctgac

SEQ ID NO: 52507 - DNA, 20 bp, Homo sapiens
  source 1..20: mol_type = genomic DNA
ttaacttgaccgctctgacc

SEQ ID NO: 52508 - DNA, 21 bp, Homo sapiens
  source 1..21: mol_type = genomic DNA
ttaacttgaccgctctgacca

SEQ ID NO: 52509 - DNA, 30 bp, Homo sapiens; identical to SEQ ID NO: 28943
  source 1..30: mol_type = genomic DNA

SEQ ID NO: 52510 - DNA, 31 bp, Homo sapiens; identical to SEQ ID NO: 28944
  source 1..31: mol_type = genomic DNA

SEQ ID NO: 52511 - DNA, 32 bp, Homo sapiens; identical to SEQ ID NO: 28945
  source 1..32: mol_type = genomic DNA

SEQ ID NO: 52512 - DNA, 20 bp, Homo sapiens
  source 1..20: mol_type = genomic DNA
ttaagtcccattggtctagc

SEQ ID NO: 52513 - DNA, 21 bp, Homo sapiens
  source 1..21: mol_type = genomic DNA
ttaagtcccattggtctagcc

SEQ ID NO: 52514 - DNA, 23 bp, Homo sapiens
  source 1..23: mol_type = genomic DNA
ttaagttaaagattaagagaacc

SEQ ID NO: 52515 - DNA, 29 bp, Homo sapiens
  source 1..29: mol_type = genomic DNA
ttaagttaaagattaagagaaccaacacc

SEQ ID NO: 52516 - DNA, 41 bp, Homo sapiens; identical to SEQ ID NO: 28999
  source 1..41: mol_type = genomic DNA

SEQ ID NO: 52517 - DNA, 42 bp, Homo sapiens; identical to SEQ ID NO: 29000
  source 1..42: mol_type = genomic DNA

SEQ ID NO: 52518 - DNA, 43 bp, Homo sapiens; identical to SEQ ID NO: 29001
  source 1..43: mol_type = genomic DNA

SEQ ID NO: 52519 - DNA, 44 bp, Homo sapiens; identical to SEQ ID NO: 29002
  source 1..44: mol_type = genomic DNA

SEQ ID NO: 52520 - DNA, 16 bp, Homo sapiens
  source 1..16: mol_type = genomic DNA
ttaatcccagggtcgt

SEQ ID NO: 52521 - DNA, 37 bp, Homo sapiens
  source 1..37: mol_type = genomic DNA
ttaatctcagggtcgtgggttcgagccccacgttggg

SEQ ID NO: 52522 - DNA, 24 bp, Homo sapiens
  source 1..24: mol_type = genomic DNA
ttaatctgagggtccagggttcaa

SEQ ID NO: 52523 - DNA, 41 bp, Homo sapiens; identical to SEQ ID NO: 29026
  source 1..41: mol_type = genomic DNA

SEQ ID NO: 52524 - DNA, 42 bp, Homo sapiens; identical to SEQ ID NO: 29027
  source 1..42: mol_type = genomic DNA

SEQ ID NO: 52525 - DNA, 18 bp, Homo sapiens
  source 1..18: mol_type = genomic DNA
ttaattaaagtggctgat

SEQ ID NO: 52526 - DNA, 19 bp, Homo sapiens
  source 1..19: mol_type = genomic DNA
ttacacgcagaaggtcctg

SEQ ID NO: 52527 - DNA, 43 bp, Homo sapiens; identical to SEQ ID NO: 29038
  source 1..43: mol_type = genomic DNA

SEQ ID NO: 52528 - DNA, 30 bp, Homo sapiens; identical to SEQ ID NO: 29053
  source 1..30: mol_type = genomic DNA

SEQ ID NO: 52529 - DNA, 38 bp, Homo sapiens; identical to SEQ ID NO: 29061
  source 1..38: mol_type = genomic DNA

SEQ ID NO: 52530 - DNA, 39 bp, Homo sapiens; identical to SEQ ID NO: 29062
  source 1..39: mol_type = genomic DNA

SEQ ID NO: 52531 - DNA, 40 bp, Homo sapiens; identical to SEQ ID NO: 29063
  source 1..40: mol_type = genomic DNA

SEQ ID NO: 52532 - DNA, 41 bp, Homo sapiens; identical to SEQ ID NO: 29064
  source 1..41: mol_type = genomic DNA

SEQ ID NO: 52533 - DNA, 42 bp, Homo sapiens; identical to SEQ ID NO: 29065
  source 1..42: mol_type = genomic DNA

SEQ ID NO: 52534 - DNA, 21 bp, Homo sapiens
  source 1..21: mol_type = genomic DNA
ttacgaccccttatttacccc

SEQ ID NO: 52535 - DNA, 42 bp, Homo sapiens; identical to SEQ ID NO: 29121
  source 1..42: mol_type = genomic DNA

SEQ ID NO: 52536 - DNA, 20 bp, Homo sapiens
  source 1..20: mol_type = genomic DNA
ttagacgggctcacatcacc

SEQ ID NO: 52537 - DNA, 21 bp, Homo sapiens
  source 1..21: mol_type = genomic DNA
ttagacgggctcacatcaccc

SEQ ID NO: 52538 - DNA, 26 bp, Homo sapiens
  source 1..26: mol_type = genomic DNA
ttagacgggctcacatcaccccataa

SEQ ID NO: 52539 - DNA, 29 bp, Homo sapiens
  source 1..29: mol_type = genomic DNA
ttagacgggctcacatcaccccataaaca

SEQ ID NO: 52540 - DNA, 31 bp, Homo sapiens; identical to SEQ ID NO: 29141
  source 1..31: mol_type = genomic DNA

SEQ ID NO: 52541 - DNA, 32 bp, Homo sapiens; identical to SEQ ID NO: 29142
  source 1..32: mol_type = genomic DNA

SEQ ID NO: 52542 - DNA, 16 bp, Homo sapiens
  source 1..16: mol_type = genomic DNA
ttagcactctggactc

SEQ ID NO: 52543 - DNA, 19 bp, Homo sapiens
  source 1..19: mol_type = genomic DNA
ttagcactctggactctga

SEQ ID NO: 52544 - DNA, 20 bp, Homo sapiens
  source 1..20: mol_type = genomic DNA
ttagcactctggactctgaa

SEQ ID NO: 52545 - DNA, 21 bp, Homo sapiens
  source 1..21: mol_type = genomic DNA
ttagcactctggactctgaat

SEQ ID NO: 52546 - DNA, 22 bp, Homo sapiens
  source 1..22: mol_type = genomic DNA
ttagcactctggactctgaatc

SEQ ID NO: 52547 - DNA, 23 bp, Homo sapiens
  source 1..23: mol_type = genomic DNA
ttagcactctggactctgaatcc

SEQ ID NO: 52548 - DNA, 24 bp, Homo sapiens
  source 1..24: mol_type = genomic DNA
ttagcactctggactctgaatcca

SEQ ID NO: 52549 - DNA, 26 bp, Homo sapiens
  source 1..26: mol_type = genomic DNA
ttagcactctggactctgaatccagc

SEQ ID NO: 52550 - DNA, 27 bp, Homo sapiens
  source 1..27: mol_type = genomic DNA
ttagcactctggactctgaatccagcg

SEQ ID NO: 52551 - DNA, 34 bp, Homo sapiens; identical to SEQ ID NO: 29169
  source 1..34: mol_type = genomic DNA

SEQ ID NO: 52552 - DNA, 35 bp, Homo sapiens; identical to SEQ ID NO: 29170
  source 1..35: mol_type = genomic DNA

SEQ ID NO: 52553 - DNA, 38 bp, Homo sapiens; identical to SEQ ID NO: 29173
  source 1..38: mol_type = genomic DNA

SEQ ID NO: 52554 - DNA, 46 bp, Homo sapiens; identical to SEQ ID NO: 29176
  source 1..46: mol_type = genomic DNA

SEQ ID NO: 52555 - DNA, 19 bp, Homo sapiens
  source 1..19: mol_type = genomic DNA
ttagcactctggactttga

SEQ ID NO: 52556 - DNA, 20 bp, Homo sapiens
  source 1..20: mol_type = genomic DNA
ttagcactctggactttgaa

SEQ ID NO: 52557 - DNA, 22 bp, Homo sapiens
  source 1..22: mol_type = genomic DNA
ttagcactctggactttgaatc

SEQ ID NO: 52558 - DNA, 23 bp, Homo sapiens
  source 1..23: mol_type = genomic DNA
ttagcactctggactttgaatcc

SEQ ID NO: 52559 - DNA, 47 bp, Homo sapiens; identical to SEQ ID NO: 29230
  source 1..47: mol_type = genomic DNA

SEQ ID NO: 52560 - DNA, 44 bp, Homo sapiens; identical to SEQ ID NO: 29243
  source 1..44: mol_type = genomic DNA

SEQ ID NO: 52561 - DNA, 45 bp, Homo sapiens; identical to SEQ ID NO: 29244
  source 1..45: mol_type = genomic DNA

SEQ ID NO: 52562 - DNA, 46 bp, Homo sapiens; identical to SEQ ID NO: 29245
  source 1..46: mol_type = genomic DNA

SEQ ID NO: 52563 - DNA, 32 bp, Homo sapiens; identical to SEQ ID NO: 29262
  source 1..32: mol_type = genomic DNA

SEQ ID NO: 52564 - DNA, 33 bp, Homo sapiens; identical to SEQ ID NO: 29263
  source 1..33: mol_type = genomic DNA

SEQ ID NO: 52565 - DNA, 34 bp, Homo sapiens; identical to SEQ ID NO: 29264
  source 1..34: mol_type = genomic DNA

SEQ ID NO: 52566 - DNA, 35 bp, Homo sapiens; identical to SEQ ID NO: 29265
  source 1..35: mol_type = genomic DNA

SEQ ID NO: 52567 - DNA, 36 bp, Homo sapiens; identical to SEQ ID NO: 29266
  source 1..36: mol_type = genomic DNA

SEQ ID NO: 52568 - DNA, 30 bp, Homo sapiens
  source 1..30: mol_type = genomic DNA
ttaggattcctggttttcacccaggcggcc

SEQ ID NO: 52569 - DNA, 42 bp, Homo sapiens; identical to SEQ ID NO: 29275
  source 1..42: mol_type = genomic DNA

SEQ ID NO: 52570 - DNA, 16 bp, Homo sapiens
  source 1..16: mol_type = genomic DNA
ttaggattcggcgctc

SEQ ID NO: 52571 - DNA, 17 bp, Homo sapiens
  source 1..17: mol_type = genomic DNA
ttaggattcggcgctct

SEQ ID NO: 52572 - DNA, 18 bp, Homo sapiens
  source 1..18: mol_type = genomic DNA
ttaggattcggcgctctc

SEQ ID NO: 52573 - DNA, 21 bp, Homo sapiens
  source 1..21: mol_type = genomic DNA
ttaggattcggcgctctcacc

SEQ ID NO: 52574 - DNA, 22 bp, Homo sapiens
  source 1..22: mol_type = genomic DNA
ttaggattcggcgctctcaccg

SEQ ID NO: 52575 - DNA, 24 bp, Homo sapiens
  source 1..24: mol_type = genomic DNA
ttaggattcggcgctctcaccgcc

SEQ ID NO: 52576 - DNA, 30 bp, Homo sapiens; identical to SEQ ID NO: 29291
  source 1..30: mol_type = genomic DNA

SEQ ID NO: 52577 - DNA, 34 bp, Homo sapiens; identical to SEQ ID NO: 29295
  source 1..34: mol_type = genomic DNA

SEQ ID NO: 52578 - DNA, 37 bp, Homo sapiens; identical to SEQ ID NO: 29298
  source 1..37: mol_type = genomic DNA

SEQ ID NO: 52579 - DNA, 20 bp, Homo sapiens
  source 1..20: mol_type = genomic DNA
ttaggcctctttttaccacc

SEQ ID NO: 52580 - DNA, 33 bp, Homo sapiens; identical to SEQ ID NO: 29341
  source 1..33: mol_type = genomic DNA

SEQ ID NO: 52581 - DNA, 34 bp, Homo sapiens; identical to SEQ ID NO: 29342
  source 1..34: mol_type = genomic DNA

SEQ ID NO: 52582 - DNA, 35 bp, Homo sapiens; identical to SEQ ID NO: 29343
  source 1..35: mol_type = genomic DNA

SEQ ID NO: 52583 - DNA, 34 bp, Homo sapiens; identical to SEQ ID NO: 29352
  source 1..34: mol_type = genomic DNA

SEQ ID NO: 52584 - DNA, 35 bp, Homo sapiens; identical to SEQ ID NO: 29353
  source 1..35: mol_type = genomic DNA

SEQ ID NO: 52585 - DNA, 31 bp, Homo sapiens; identical to SEQ ID NO: 29365
  source 1..31: mol_type = genomic DNA

SEQ ID NO: 52586 - DNA, 19 bp, Homo sapiens
  source 1..19: mol_type = genomic DNA
ttagtggtagaattctcgc

SEQ ID NO: 52587 - DNA, 20 bp, Homo sapiens
  source 1..20: mol_type = genomic DNA
ttagtggtagaattctcgcc

SEQ ID NO: 52588 - DNA, 21 bp, Homo sapiens
  source 1..21: mol_type = genomic DNA
ttagtggtagaattctcgcct

SEQ ID NO: 52589 - DNA, 19 bp, Homo sapiens
  source 1..19: mol_type = genomic DNA
ttatacccttcccgtacta

SEQ ID NO: 52590 - DNA, 21 bp, Homo sapiens
  source 1..21: mol_type = genomic DNA
ttatacccttcccgtactacc

SEQ ID NO: 52591 - DNA, 22 bp, Homo sapiens
  source 1..22: mol_type = genomic DNA
ttatacccttcccgtactacca

SEQ ID NO: 52592 - DNA, 17 bp, Homo sapiens
  source 1..17: mol_type = genomic DNA
ttcaaacctgccggggc

SEQ ID NO: 52593 - DNA, 18 bp, Homo sapiens
  source 1..18: mol_type = genomic DNA
ttcaaacctgccggggct

SEQ ID NO: 52594 - DNA, 19 bp, Homo sapiens
  source 1..19: mol_type = genomic DNA
ttcaaacctgccggggctt

SEQ ID NO: 52595 - DNA, 21 bp, Homo sapiens
  source 1..21: mol_type = genomic DNA
ttcaaacctgccggggcttcc

SEQ ID NO: 52596 - DNA, 34 bp, Homo sapiens; identical to SEQ ID NO: 29429
  source 1..34: mol_type = genomic DNA

SEQ ID NO: 52597 - DNA, 36 bp, Homo sapiens; identical to SEQ ID NO: 29431
  source 1..36: mol_type = genomic DNA

SEQ ID NO: 52598 - DNA, 37 bp, Homo sapiens; identical to SEQ ID NO: 29432
  source 1..37: mol_type = genomic DNA

SEQ ID NO: 52599 - DNA, 38 bp, Homo sapiens; identical to SEQ ID NO: 29433
  source 1..38: mol_type = genomic DNA

SEQ ID NO: 52600 - DNA, 36 bp, Homo sapiens; identical to SEQ ID NO: 42660
  source 1..36: mol_type = genomic DNA

SEQ ID NO: 52601 - DNA, 37 bp, Homo sapiens; identical to SEQ ID NO: 29434
  source 1..37: mol_type = genomic DNA

SEQ ID NO: 52602 - DNA, 38 bp, Homo sapiens; identical to SEQ ID NO: 29435
  source 1..38: mol_type = genomic DNA

SEQ ID NO: 52603 - DNA, 36 bp, Homo sapiens; identical to SEQ ID NO: 42665
  source 1..36: mol_type = genomic DNA

SEQ ID NO: 52604 - DNA, 37 bp, Homo sapiens; identical to SEQ ID NO: 29436
  source 1..37: mol_type = genomic DNA

SEQ ID NO: 52605 - DNA, 38 bp, Homo sapiens; identical to SEQ ID NO: 29437
  source 1..38: mol_type = genomic DNA

SEQ ID NO: 52606 - DNA, 22 bp, Homo sapiens
  source 1..22: mol_type = genomic DNA
ttcaaatcacgtcggggtcacc

SEQ ID NO: 52607 - DNA, 23 bp, Homo sapiens
  source 1..23: mol_type = genomic DNA
ttcaaatcacgtcggggtcacca

SEQ ID NO: 52608 - DNA, 17 bp, Homo sapiens
  source 1..17: mol_type = genomic DNA
ttcaaatcccggacgag

SEQ ID NO: 52609 - DNA, 18 bp, Homo sapiens
  source 1..18: mol_type = genomic DNA
ttcaaatcccggacgagc

SEQ ID NO: 52610 - DNA, 19 bp, Homo sapiens
  source 1..19: mol_type = genomic DNA
ttcaaatcccggacgagcc

SEQ ID NO: 52611 - DNA, 20 bp, Homo sapiens
  source 1..20: mol_type = genomic DNA
ttcaaatcccggacgagccc

SEQ ID NO: 52612 - DNA, 21 bp, Homo sapiens
  source 1..21: mol_type = genomic DNA
ttcaaatcccggacgagcccc

SEQ ID NO: 52613 - DNA, 22 bp, Homo sapiens
  source 1..22: mol_type = genomic DNA
ttcaaatcccggacgagccccc

SEQ ID NO: 52614 - DNA, 23 bp, Homo sapiens
  source 1..23: mol_type = genomic DNA
ttcaaatcccggacgagccccca

SEQ ID NO: 52615 - DNA, 20 bp, Homo sapiens
  source 1..20: mol_type = genomic DNA
ttcaaatctcgctggggcct

SEQ ID NO: 52616 - DNA, 21 bp, Homo sapiens
  source 1..21: mol_type = genomic DNA
ttcaaatctcgctggggcctc

SEQ ID NO: 52617 - DNA, 17 bp, Homo sapiens
  source 1..17: mol_type = genomic DNA
ttcaaatctcggtggaa

SEQ ID NO: 52618 - DNA, 19 bp, Homo sapiens
  source 1..19: mol_type = genomic DNA
ttcaaatctcggtggaacc

SEQ ID NO: 52619 - DNA, 20 bp, Homo sapiens
  source 1..20: mol_type = genomic DNA
ttcaaatctcggtggaacct

SEQ ID NO: 52620 - DNA, 21 bp, Homo sapiens
  source 1..21: mol_type = genomic DNA
ttcaaatctcggtggaacctc

SEQ ID NO: 52621 - DNA, 22 bp, Homo sapiens
  source 1..22: mol_type = genomic DNA
ttcaaatctcggtggaacctcc

SEQ ID NO: 52622 - DNA, 23 bp, Homo sapiens
  source 1..23: mol_type = genomic DNA
ttcaaatctcggtggaacctcca

SEQ ID NO: 52623 - DNA, 17 bp, Homo sapiens
  source 1..17: mol_type = genomic DNA
ttcaaatctcggtggga

SEQ ID NO: 52624 - DNA, 20 bp, Homo sapiens
  source 1..20: mol_type = genomic DNA
ttcaaatctcggtgggacct

SEQ ID NO: 52625 - DNA, 21 bp, Homo sapiens
  source 1..21: mol_type = genomic DNA
ttcaaatctcggtgggacctc

SEQ ID NO: 52626 - DNA, 22 bp, Homo sapiens
  source 1..22: mol_type = genomic DNA
ttcaaatctcggtgggacctcc

SEQ ID NO: 52627 - DNA, 23 bp, Homo sapiens
  source 1..23: mol_type = genomic DNA
ttcaacttaacttgaccgctctg

SEQ ID NO: 52628 - DNA, 24 bp, Homo sapiens
  source 1..24: mol_type = genomic DNA
ttcaacttaacttgaccgctctga

SEQ ID NO: 52629 - DNA, 25 bp, Homo sapiens
  source 1..25: mol_type = genomic DNA
ttcaacttaacttgaccgctctgac

SEQ ID NO: 52630 - DNA, 26 bp, Homo sapiens
  source 1..26: mol_type = genomic DNA
ttcaacttaacttgaccgctctgacc

SEQ ID NO: 52631 - DNA, 27 bp, Homo sapiens
  source 1..27: mol_type = genomic DNA
ttcaacttaacttgaccgctctgacca

SEQ ID NO: 52632 - DNA, 20 bp, Homo sapiens
  source 1..20: mol_type = genomic DNA
ttcaagtcacgtcggggtca

SEQ ID NO: 52633 - DNA, 22 bp, Homo sapiens
  source 1..22: mol_type = genomic DNA
ttcaagtcacgtcggggtcacc

SEQ ID NO: 52634 - DNA, 23 bp, Homo sapiens
  source 1..23: mol_type = genomic DNA
ttcaagtcacgtcggggtcacca

SEQ ID NO: 52635 - DNA, 19 bp, Homo sapiens
  source 1..19: mol_type = genomic DNA
ttcaagtccctgttcgggc

SEQ ID NO: 52636 - DNA, 20 bp, Homo sapiens
  source 1..20: mol_type = genomic DNA
ttcaagtccctgttcgggcg

SEQ ID NO: 52637 - DNA, 20 bp, Homo sapiens
  source 1..20: mol_type = genomic DNA
ttcaagtctcggtggaacct

SEQ ID NO: 52638 - DNA, 22 bp, Homo sapiens
  source 1..22: mol_type = genomic DNA
ttcaatccccggcacctccacc

SEQ ID NO: 52639 - DNA, 23 bp, Homo sapiens
  source 1..23: mol_type = genomic DNA
ttcaatccccggcacctccacca

SEQ ID NO: 52640 - DNA, 39 bp, Homo sapiens; identical to SEQ ID NO: 29495
  source 1..39: mol_type = genomic DNA

SEQ ID NO: 52641 - DNA, 40 bp, Homo sapiens; identical to SEQ ID NO: 29496
  source 1..40: mol_type = genomic DNA

SEQ ID NO: 52642 - DNA, 42 bp, Homo sapiens; identical to SEQ ID NO: 29498
  source 1..42: mol_type = genomic DNA

SEQ ID NO: 52643 - DNA, 16 bp, Homo sapiens
  source 1..16: mol_type = genomic DNA
ttcaggtcgcagtctc

SEQ ID NO: 52644 - DNA, 17 bp, Homo sapiens
  source 1..17: mol_type = genomic DNA
ttcaggtcgcagtctcc

SEQ ID NO: 52645 - DNA, 18 bp, Homo sapiens
  source 1..18: mol_type = genomic DNA
ttcaggtcgcagtctccc

SEQ ID NO: 52646 - DNA, 19 bp, Homo sapiens
  source 1..19: mol_type = genomic DNA
ttcaggtcgcagtctcccc

SEQ ID NO: 52647 - DNA, 19 bp, Homo sapiens
  source 1..19: mol_type = genomic DNA
ttcagtggtagaattctcg

SEQ ID NO: 52648 - DNA, 20 bp, Homo sapiens
  source 1..20: mol_type = genomic DNA
ttcagtggtagaattctcgc

SEQ ID NO: 52649 - DNA, 21 bp, Homo sapiens
  source 1..21: mol_type = genomic DNA
ttcagtggtagaattctcgcc

SEQ ID NO: 52650 - DNA, 22 bp, Homo sapiens
  source 1..22: mol_type = genomic DNA
ttcagtggtagaattctcgcct

SEQ ID NO: 52651 - DNA, 23 bp, Homo sapiens
  source 1..23: mol_type = genomic DNA
ttcagtggtagaattctcgcctg

SEQ ID NO: 52652 - DNA, 24 bp, Homo sapiens
  source 1..24: mol_type = genomic DNA
ttcagtggtagaattctcgcctgc

SEQ ID NO: 52653 - DNA, 25 bp, Homo sapiens
  source 1..25: mol_type = genomic DNA
ttcagtggtagaattctcgcctgcc

SEQ ID NO: 52654 - DNA, 26 bp, Homo sapiens
  source 1..26: mol_type = genomic DNA
ttcagtggtagaattctcgcctgcca

SEQ ID NO: 52655 - DNA, 29 bp, Homo sapiens
  source 1..29: mol_type = genomic DNA
ttcagtggtagaattctcgcctgccacgc

SEQ ID NO: 52656 - DNA, 33 bp, Homo sapiens; identical to SEQ ID NO: 29526
  source 1..33: mol_type = genomic DNA

SEQ ID NO: 52657 - DNA, 38 bp, Homo sapiens; identical to SEQ ID NO: 29527
  source 1..38: mol_type = genomic DNA

SEQ ID NO: 52658 - DNA, 41 bp, Homo sapiens; identical to SEQ ID NO: 29530
  source 1..41: mol_type = genomic DNA

SEQ ID NO: 52659 - DNA, 42 bp, Homo sapiens; identical to SEQ ID NO: 29531
  source 1..42: mol_type = genomic DNA

SEQ ID NO: 52660 - DNA, 43 bp, Homo sapiens
  source 1..43: mol_type = genomic DNA
ttcagtggtagaattctcgcctgccacgcgggaggcccgggtt

SEQ ID NO: 52661 - DNA, 20 bp, Homo sapiens
  source 1..20: mol_type = genomic DNA
ttcagtggtagaattcttgc

SEQ ID NO: 52662 - DNA, 31 bp, Homo sapiens; identical to SEQ ID NO: 29546
  source 1..31: mol_type = genomic DNA

SEQ ID NO: 52663 - DNA, 33 bp, Homo sapiens; identical to SEQ ID NO: 29548
  source 1..33: mol_type = genomic DNA

SEQ ID NO: 52664 - DNA, 32 bp, Homo sapiens; identical to SEQ ID NO: 29556
  source 1..32: mol_type = genomic DNA

SEQ ID NO: 52665 - DNA, 33 bp, Homo sapiens; identical to SEQ ID NO: 29574
  source 1..33: mol_type = genomic DNA

SEQ ID NO: 52666 - DNA, 34 bp, Homo sapiens; identical to SEQ ID NO: 29575
  source 1..34: mol_type = genomic DNA

SEQ ID NO: 52667 - DNA, 35 bp, Homo sapiens; identical to SEQ ID NO: 29576
  source 1..35: mol_type = genomic DNA

SEQ ID NO: 52668 - DNA, 36 bp, Homo sapiens; identical to SEQ ID NO: 29577
  source 1..36: mol_type = genomic DNA

SEQ ID NO: 52669 - DNA, 37 bp, Homo sapiens; identical to SEQ ID NO: 29578
  source 1..37: mol_type = genomic DNA

SEQ ID NO: 52670 - DNA, 38 bp, Homo sapiens; identical to SEQ ID NO: 29579
  source 1..38: mol_type = genomic DNA

SEQ ID NO: 52671 - DNA, 39 bp, Homo sapiens; identical to SEQ ID NO: 29580
  source 1..39: mol_type = genomic DNA

SEQ ID NO: 52672 - DNA, 41 bp, Homo sapiens; identical to SEQ ID NO: 29582
  source 1..41: mol_type = genomic DNA

SEQ ID NO: 52673 - DNA, 42 bp, Homo sapiens; identical to SEQ ID NO: 29583
  source 1..42: mol_type = genomic DNA

SEQ ID NO: 52674 - DNA, 18 bp, Homo sapiens
  source 1..18: mol_type = genomic DNA
ttccaagcagttgacccg

SEQ ID NO: 52675 - DNA, 19 bp, Homo sapiens
  source 1..19: mol_type = genomic DNA
ttccaagcagttgacccgg

SEQ ID NO: 52676 - DNA, 37 bp, Homo sapiens; identical to SEQ ID NO: 29594
  source 1..37: mol_type = genomic DNA

SEQ ID NO: 52677 - DNA, 42 bp, Homo sapiens; identical to SEQ ID NO: 29597
  source 1..42: mol_type = genomic DNA

SEQ ID NO: 52678 - DNA, 16 bp, Homo sapiens
  source 1..16: mol_type = genomic DNA
ttccagctcgaaggac

SEQ ID NO: 52679 - DNA, 29 bp, Homo sapiens
  source 1..29: mol_type = genomic DNA
ttccaggttcgactcctggctggctcgcc

SEQ ID NO: 52680 - DNA, 31 bp, Homo sapiens; identical to SEQ ID NO: 29645
  source 1..31: mol_type = genomic DNA

SEQ ID NO: 52681 - DNA, 31 bp, Homo sapiens; identical to SEQ ID NO: 29658
  source 1..31: mol_type = genomic DNA

SEQ ID NO: 52682 - DNA, 19 bp, Homo sapiens
  source 1..19: mol_type = genomic DNA
ttcccattcttgcgacccg

SEQ ID NO: 52683 - DNA, 21 bp, Homo sapiens
  source 1..21: mol_type = genomic DNA
ttcccattcttgcgacccggg

SEQ ID NO: 52684 - DNA, 22 bp, Homo sapiens
  source 1..22: mol_type = genomic DNA
ttcccattcttgcgacccgggt

SEQ ID NO: 52685 - DNA, 16 bp, Homo sapiens
  source 1..16: mol_type = genomic DNA
ttccccgacggggagc

SEQ ID NO: 52686 - DNA, 20 bp, Homo sapiens
  source 1..20: mol_type = genomic DNA
ttccccgcacaggttcgaat

SEQ ID NO: 52687 - DNA, 22 bp, Homo sapiens
  source 1..22: mol_type = genomic DNA
ttccccgcacaggttcgaatcc

SEQ ID NO: 52688 - DNA, 23 bp, Homo sapiens
  source 1..23: mol_type = genomic DNA
ttccccgcacaggttcgaatcct

SEQ ID NO: 52689 - DNA, 16 bp, Homo sapiens
  source 1..16: mol_type = genomic DNA
ttcccggccaacgcac

SEQ ID NO: 52690 - DNA, 17 bp, Homo sapiens
  source 1..17: mol_type = genomic DNA
ttcccggccaacgcacc

SEQ ID NO: 52691 - DNA, 18 bp, Homo sapiens
  source 1..18: mol_type = genomic DNA
ttcccggccaacgcacca

SEQ ID NO: 52692 - DNA, 16 bp, Homo sapiens
  source 1..16: mol_type = genomic DNA
ttcccggccaatgcac

SEQ ID NO: 52693 - DNA, 17 bp, Homo sapiens
  source 1..17: mol_type = genomic DNA
ttcccggccaatgcacc

SEQ ID NO: 52694 - DNA, 18 bp, Homo sapiens
  source 1..18: mol_type = genomic DNA
ttcccggccaatgcacca

SEQ ID NO: 52695 - DNA, 18 bp, Homo sapiens
  source 1..18: mol_type = genomic DNA
ttcccggccagtgcacca

SEQ ID NO: 52696 - DNA, 17 bp, Homo sapiens
  source 1..17: mol_type = genomic DNA
ttcccggcccatgcacc

SEQ ID NO: 52697 - DNA, 18 bp, Homo sapiens
  source 1..18: mol_type = genomic DNA
ttcccggcccatgcacca

SEQ ID NO: 52698 - DNA, 16 bp, Homo sapiens
  source 1..16: mol_type = genomic DNA
ttcccgggcggcgcac

SEQ ID NO: 52699 - DNA, 17 bp, Homo sapiens
  source 1..17: mol_type = genomic DNA
ttcccgggcggcgcacc

SEQ ID NO: 52700 - DNA, 18 bp, Homo sapiens
  source 1..18: mol_type = genomic DNA
ttcccgggcggcgcacca

SEQ ID NO: 52701 - DNA, 16 bp, Homo sapiens
  source 1..16: mol_type = genomic DNA
ttcccggtcagggaac

SEQ ID NO: 52702 - DNA, 17 bp, Homo sapiens
  source 1..17: mol_type = genomic DNA
ttcccggtcagggaacc

SEQ ID NO: 52703 - DNA, 19 bp, Homo sapiens
  source 1..19: mol_type = genomic DNA
ttccggatcagaagattga

SEQ ID NO: 52704 - DNA, 20 bp, Homo sapiens
  source 1..20: mol_type = genomic DNA
ttccggatcagaagattgag

SEQ ID NO: 52705 - DNA, 23 bp, Homo sapiens
  source 1..23: mol_type = genomic DNA
ttccggatcagaagattgagggt

SEQ ID NO: 52706 - DNA, 24 bp, Homo sapiens
  source 1..24: mol_type = genomic DNA
ttccggatcagaagattgagggtt

SEQ ID NO: 52707 - DNA, 33 bp, Homo sapiens; identical to SEQ ID NO: 29741
  source 1..33: mol_type = genomic DNA

SEQ ID NO: 52708 - DNA, 16 bp, Homo sapiens
  source 1..16: mol_type = genomic DNA
ttccggctcgaaggac

SEQ ID NO: 52709 - DNA, 17 bp, Homo sapiens
  source 1..17: mol_type = genomic DNA
ttccggctcgaaggacc

SEQ ID NO: 52710 - DNA, 18 bp, Homo sapiens
  source 1..18: mol_type = genomic DNA
ttccggctcgaaggacca

SEQ ID NO: 52711 - DNA, 23 bp, Homo sapiens
  source 1..23: mol_type = genomic DNA
ttccgggttcgagtcccggcgga

SEQ ID NO: 52712 - DNA, 26 bp, Homo sapiens
  source 1..26: mol_type = genomic DNA
ttccgggttcgagtcccggcggagtc

SEQ ID NO: 52713 - DNA, 28 bp, Homo sapiens
  source 1..28: mol_type = genomic DNA
ttccgggttcgagtcccggcggagtcgc

SEQ ID NO: 52714 - DNA, 29 bp, Homo sapiens
  source 1..29: mol_type = genomic DNA
ttccgggttcgagtcccggcggagtcgcc

SEQ ID NO: 52715 - DNA, 30 bp, Homo sapiens; identical to SEQ ID NO: 29758
  source 1..30: mol_type = genomic DNA

SEQ ID NO: 52716 - DNA, 31 bp, Homo sapiens; identical to SEQ ID NO: 29766
  source 1..31: mol_type = genomic DNA

SEQ ID NO: 52717 - DNA, 21 bp, Homo sapiens
  source 1..21: mol_type = genomic DNA
ttccgtagtgtagtggtcatc

SEQ ID NO: 52718 - DNA, 30 bp, Homo sapiens; identical to SEQ ID NO: 29780
  source 1..30: mol_type = genomic DNA

SEQ ID NO: 52719 - DNA, 31 bp, Homo sapiens; identical to SEQ ID NO: 29781
  source 1..31: mol_type = genomic DNA

SEQ ID NO: 52720 - DNA, 21 bp, Homo sapiens
  source 1..21: mol_type = genomic DNA
ttccgtagtgtagtggttatc

SEQ ID NO: 52721 - DNA, 29 bp, Homo sapiens
  source 1..29: mol_type = genomic DNA
ttccgtagtgtagtggttatcacgttcgc

SEQ ID NO: 52722 - DNA, 30 bp, Homo sapiens; identical to SEQ ID NO: 29794
  source 1..30: mol_type = genomic DNA

SEQ ID NO: 52723 - DNA, 31 bp, Homo sapiens; identical to SEQ ID NO: 29795
  source 1..31: mol_type = genomic DNA

SEQ ID NO: 52724 - DNA, 32 bp, Homo sapiens; identical to SEQ ID NO: 29799
  source 1..32: mol_type = genomic DNA

SEQ ID NO: 52725 - DNA, 35 bp, Homo sapiens; identical to SEQ ID NO: 29802
  source 1..35: mol_type = genomic DNA

SEQ ID NO: 52726 - DNA, 17 bp, Homo sapiens
  source 1..17: mol_type = genomic DNA
ttcctggtcagggaacc

SEQ ID NO: 52727 - DNA, 20 bp, Homo sapiens
  source 1..20: mol_type = genomic DNA
ttcgaaaccgggcggaaaca

SEQ ID NO: 52728 - DNA, 21 bp, Homo sapiens
  source 1..21: mol_type = genomic DNA
ttcgaaaccgggcggaaacac

SEQ ID NO: 52729 - DNA, 22 bp, Homo sapiens
  source 1..22: mol_type = genomic DNA
ttcgaaaccgggcggaaacacc

SEQ ID NO: 52730 - DNA, 23 bp, Homo sapiens
  source 1..23: mol_type = genomic DNA
ttcgaaaccgggcggaaacacca

SEQ ID NO: 52731 - DNA, 23 bp, Homo sapiens
  source 1..23: mol_type = genomic DNA
ttcgaaccccgtccgtgcctcca

SEQ ID NO: 52732 - DNA, 32 bp, Homo sapiens; identical to SEQ ID NO: 29841
  source 1..32: mol_type = genomic DNA

SEQ ID NO: 52733 - DNA, 33 bp, Homo sapiens; identical to SEQ ID NO: 29842
  source 1..33: mol_type = genomic DNA

SEQ ID NO: 52734 - DNA, 34 bp, Homo sapiens; identical to SEQ ID NO: 29843
  source 1..34: mol_type = genomic DNA

SEQ ID NO: 52735 - DNA, 36 bp, Homo sapiens; identical to SEQ ID NO: 29845
  source 1..36: mol_type = genomic DNA

SEQ ID NO: 52736 - DNA, 22 bp, Homo sapiens
  source 1..22: mol_type = genomic DNA
ttcgaatcacgtcggggtcacc

SEQ ID NO: 52737 - DNA, 22 bp, Homo sapiens
  source 1..22: mol_type = genomic DNA
ttcgaatcccaccgctgccacc

SEQ ID NO: 52738 - DNA, 20 bp, Homo sapiens
  source 1..20: mol_type = genomic DNA
ttcgaatcccactcctgaca

SEQ ID NO: 52739 - DNA, 22 bp, Homo sapiens
  source 1..22: mol_type = genomic DNA
ttcgaatcccacttctgacacc

SEQ ID NO: 52740 - DNA, 17 bp, Homo sapiens
  source 1..17: mol_type = genomic DNA
ttcgaatcccagcggtg

SEQ ID NO: 52741 - DNA, 21 bp, Homo sapiens
  source 1..21: mol_type = genomic DNA
ttcgaatcccagcggtgcctc

SEQ ID NO: 52742 - DNA, 22 bp, Homo sapiens
  source 1..22: mol_type = genomic DNA
ttcgaatcccagcggtgcctcc

SEQ ID NO: 52743 - DNA, 22 bp, Homo sapiens
  source 1..22: mol_type = genomic DNA
ttcgaatcccatcctcgtcgcc

SEQ ID NO: 52744 - DNA, 21 bp, Homo sapiens
  source 1..21: mol_type = genomic DNA
ttcgaatccgagtcacggcac

SEQ ID NO: 52745 - DNA, 23 bp, Homo sapiens
  source 1..23: mol_type = genomic DNA
ttcgaatccgagtcacggcacca

SEQ ID NO: 52746 - DNA, 21 bp, Homo sapiens
  source 1..21: mol_type = genomic DNA
ttcgaatccggctcgaaggac

SEQ ID NO: 52747 - DNA, 22 bp, Homo sapiens
  source 1..22: mol_type = genomic DNA
ttcgaatccggctcgaaggacc

SEQ ID NO: 52748 - DNA, 22 bp, Homo sapiens
  source 1..22: mol_type = genomic DNA
ttcgaatccggctcggaggacc

SEQ ID NO: 52749 - DNA, 22 bp, Homo sapiens
  source 1..22: mol_type = genomic DNA
ttcgaatcctgccgactacgcc

SEQ ID NO: 52750 - DNA, 22 bp, Homo sapiens
  source 1..22: mol_type = genomic DNA
ttcgaatcctgttcgtgacgcc

SEQ ID NO: 52751 - DNA, 38 bp, Homo sapiens; identical to SEQ ID NO: 29898
  source 1..38: mol_type = genomic DNA

SEQ ID NO: 52752 - DNA, 21 bp, Homo sapiens
  source 1..21: mol_type = genomic DNA
ttcgactcccggtatgggaac

SEQ ID NO: 52753 - DNA, 22 bp, Homo sapiens
  source 1..22: mol_type = genomic DNA
ttcgactcccggtatgggaacc

SEQ ID NO: 52754 - DNA, 16 bp, Homo sapiens
  source 1..16: mol_type = genomic DNA
ttcgactcccggtgtg

SEQ ID NO: 52755 - DNA, 18 bp, Homo sapiens
  source 1..18: mol_type = genomic DNA
ttcgactcccggtgtggg

SEQ ID NO: 52756 - DNA, 19 bp, Homo sapiens
  source 1..19: mol_type = genomic DNA
ttcgactcccggtgtggga

SEQ ID NO: 52757 - DNA, 20 bp, Homo sapiens
  source 1..20: mol_type = genomic DNA
ttcgactcccggtgtgggaa

SEQ ID NO: 52758 - DNA, 21 bp, Homo sapiens
  source 1..21: mol_type = genomic DNA
ttcgactcccggtgtgggaac

SEQ ID NO: 52759 - DNA, 22 bp, Homo sapiens
  source 1..22: mol_type = genomic DNA
ttcgactcccggtgtgggaacc

SEQ ID NO: 52760 - DNA, 23 bp, Homo sapiens
  source 1..23: mol_type = genomic DNA
ttcgactcccggtgtgggaacca

SEQ ID NO: 52761 - DNA, 16 bp, Homo sapiens
  source 1..16: mol_type = genomic DNA
ttcgactcctggctgg

SEQ ID NO: 52762 - DNA, 21 bp, Homo sapiens
  source 1..21: mol_type = genomic DNA
ttcgactcctggctggctcgc

SEQ ID NO: 52763 - DNA, 22 bp, Homo sapiens
  source 1..22: mol_type = genomic DNA
ttcgactcctggctggctcgcc

SEQ ID NO: 52764 - DNA, 23 bp, Homo sapiens
  source 1..23: mol_type = genomic DNA
ttcgactcctggctggctcgcca

SEQ ID NO: 52765 - DNA, 22 bp, Homo sapiens
  source 1..22: mol_type = genomic DNA
ttcgagcccacccagggacgcc

SEQ ID NO: 52766 - DNA, 19 bp, Homo sapiens
  source 1..19: mol_type = genomic DNA
ttcgagccccagtggaacc

SEQ ID NO: 52767 - DNA, 20 bp, Homo sapiens
  source 1..20: mol_type = genomic DNA
ttcgagccccagtggaacca

SEQ ID NO: 52768 - DNA, 21 bp, Homo sapiens
  source 1..21: mol_type = genomic DNA
ttcgagccccagtggaaccac

SEQ ID NO: 52769 - DNA, 22 bp, Homo sapiens
  source 1..22: mol_type = genomic DNA
ttcgagccccagtggaaccacc

SEQ ID NO: 52770 - DNA, 23 bp, Homo sapiens
  source 1..23: mol_type = genomic DNA
ttcgagccccagtggaaccacca

SEQ ID NO: 52771 - DNA, 22 bp, Homo sapiens
  source 1..22: mol_type = genomic DNA
ttcgagtcccggcggagtcgcc

SEQ ID NO: 52772 - DNA, 20 bp, Homo sapiens
  source 1..20: mol_type = genomic DNA
ttcgagtctcggtggaacct

SEQ ID NO: 52773 - DNA, 23 bp, Homo sapiens
  source 1..23: mol_type = genomic DNA
ttcgagtctcggtggaacctcca

SEQ ID NO: 52774 - DNA, 21 bp, Homo sapiens
  source 1..21: mol_type = genomic DNA
ttcgatccccggcatctccac

SEQ ID NO: 52775 - DNA, 22 bp, Homo sapiens
  source 1..22: mol_type = genomic DNA
ttcgatccccggcatctccacc

SEQ ID NO: 52776 - DNA, 23 bp, Homo sapiens
  source 1..23: mol_type = genomic DNA
ttcgatccccggcatctccacca

SEQ ID NO: 52777 - DNA, 20 bp, Homo sapiens
  source 1..20: mol_type = genomic DNA
ttcgatccccgtacgggcca

SEQ ID NO: 52778 - DNA, 22 bp, Homo sapiens
  source 1..22: mol_type = genomic DNA
ttcgatccccgtacgggccacc

SEQ ID NO: 52779 - DNA, 22 bp, Homo sapiens
  source 1..22: mol_type = genomic DNA
ttcgatccccgtactggccacc

SEQ ID NO: 52780 - DNA, 21 bp, Homo sapiens
  source 1..21: mol_type = genomic DNA
ttcgatcccgggcggaaacac

SEQ ID NO: 52781 - DNA, 22 bp, Homo sapiens
  source 1..22: mol_type = genomic DNA
ttcgatcccgggcggaaacacc

SEQ ID NO: 52782 - DNA, 21 bp, Homo sapiens
  source 1..21: mol_type = genomic DNA
ttcgatcccgggtttcggcac

SEQ ID NO: 52783 - DNA, 22 bp, Homo sapiens
  source 1..22: mol_type = genomic DNA
ttcgatcccgggtttcggcacc

SEQ ID NO: 52784 - DNA, 16 bp, Homo sapiens
  source 1..16: mol_type = genomic DNA
ttcgattccccgacgg

SEQ ID NO: 52785 - DNA, 19 bp, Homo sapiens
  source 1..19: mol_type = genomic DNA
ttcgattccccgacgggga

SEQ ID NO: 52786 - DNA, 21 bp, Homo sapiens
  source 1..21: mol_type = genomic DNA
ttcgattccccgacggggagc

SEQ ID NO: 52787 - DNA, 22 bp, Homo sapiens
  source 1..22: mol_type = genomic DNA
ttcgattccccgacggggagcc

SEQ ID NO: 52788 - DNA, 23 bp, Homo sapiens
  source 1..23: mol_type = genomic DNA
ttcgattccccgacggggagcca

SEQ ID NO: 52789 - DNA, 18 bp, Homo sapiens
  source 1..18: mol_type = genomic DNA
ttcgattcccggccaacg

SEQ ID NO: 52790 - DNA, 22 bp, Homo sapiens
  source 1..22: mol_type = genomic DNA
ttcgattcccggccaacgcacc

SEQ ID NO: 52791 - DNA, 23 bp, Homo sapiens
  source 1..23: mol_type = genomic DNA
ttcgattcccggccaacgcacca

SEQ ID NO: 52792 - DNA, 21 bp, Homo sapiens
  source 1..21: mol_type = genomic DNA
ttcgattcccggccaatgcac

SEQ ID NO: 52793 - DNA, 22 bp, Homo sapiens
  source 1..22: mol_type = genomic DNA
ttcgattcccggccaatgcacc

SEQ ID NO: 52794 - DNA, 23 bp, Homo sapiens
  source 1..23: mol_type = genomic DNA
ttcgattcccggccaatgcacca

SEQ ID NO: 52795 - DNA, 16 bp, Homo sapiens
  source 1..16: mol_type = genomic DNA
ttcgattcccgggcgg

SEQ ID NO: 52796 - DNA, 17 bp, Homo sapiens
  source 1..17: mol_type = genomic DNA
ttcgattcccgggcggc

SEQ ID NO: 52797 - DNA, 18 bp, Homo sapiens
  source 1..18: mol_type = genomic DNA
ttcgattcccgggcggcg

SEQ ID NO: 52798 - DNA, 19 bp, Homo sapiens
  source 1..19: mol_type = genomic DNA
ttcgattcccgggcggcgc

SEQ ID NO: 52799 - DNA, 22 bp, Homo sapiens
  source 1..22: mol_type = genomic DNA
ttcgattcccgggcggcgcacc

SEQ ID NO: 52800 - DNA, 23 bp, Homo sapiens
  source 1..23: mol_type = genomic DNA
ttcgattcccgggcggcgcacca

SEQ ID NO: 52801 - DNA, 16 bp, Homo sapiens
  source 1..16: mol_type = genomic DNA
ttcgattcccggtcag

SEQ ID NO: 52802 - DNA, 17 bp, Homo sapiens
  source 1..17: mol_type = genomic DNA
ttcgattcccggtcagg

SEQ ID NO: 52803 - DNA, 21 bp, Homo sapiens
  source 1..21: mol_type = genomic DNA
ttcgattcccggtcagggaac

SEQ ID NO: 52804 - DNA, 22 bp, Homo sapiens
  source 1..22: mol_type = genomic DNA
ttcgattcccggtcagggaacc

SEQ ID NO: 52805 - DNA, 23 bp, Homo sapiens
  source 1..23: mol_type = genomic DNA
ttcgattcccggtcagggaacca

SEQ ID NO: 52806 - DNA, 21 bp, Homo sapiens
  source 1..21: mol_type = genomic DNA
ttcgattccggctcgaaggac

SEQ ID NO: 52807 - DNA, 22 bp, Homo sapiens
  source 1..22: mol_type = genomic DNA
ttcgattccggctcgaaggacc

SEQ ID NO: 52808 - DNA, 23 bp, Homo sapiens
  source 1..23: mol_type = genomic DNA
ttcgattccggctcgaaggacca

SEQ ID NO: 52809 - DNA, 18 bp, Homo sapiens
  source 1..18: mol_type = genomic DNA
ttcgattctcatagtcct

SEQ ID NO: 52810 - DNA, 23 bp, Homo sapiens
  source 1..23: mol_type = genomic DNA
ttcgattctcatagtcctagcca

SEQ ID NO: 52811 - DNA, 43 bp, Homo sapiens; identical to SEQ ID NO: 42916
  source 1..43: mol_type = genomic DNA

SEQ ID NO: 52812 - DNA, 43 bp, Homo sapiens; identical to SEQ ID NO: 30025
  source 1..43: mol_type = genomic DNA

SEQ ID NO: 52813 - DNA, 18 bp, Homo sapiens
  source 1..18: mol_type = genomic DNA
ttcggcgctctcaccgcc

SEQ ID NO: 52814 - DNA, 25 bp, Homo sapiens
  source 1..25: mol_type = genomic DNA
ttcggcgctctcaccgccgcggccc

SEQ ID NO: 52815 - DNA, 30 bp, Homo sapiens; identical to SEQ ID NO: 30035
  source 1..30: mol_type = genomic DNA

SEQ ID NO: 52816 - DNA, 17 bp, Homo sapiens
  source 1..17: mol_type = genomic DNA
ttcggctgttaaccgga

SEQ ID NO: 52817 - DNA, 18 bp, Homo sapiens
  source 1..18: mol_type = genomic DNA
ttcggctgttaaccggaa

SEQ ID NO: 52818 - DNA, 19 bp, Homo sapiens
  source 1..19: mol_type = genomic DNA
ttcgggtgcgagaggtccc

SEQ ID NO: 52819 - DNA, 43 bp, Homo sapiens; identical to SEQ ID NO: 42929
  source 1..43: mol_type = genomic DNA

SEQ ID NO: 52820 - DNA, 29 bp, Homo sapiens
  source 1..29: mol_type = genomic DNA
ttctaggttcgactcctggctggctcgcc

SEQ ID NO: 52821 - DNA, 37 bp, Homo sapiens; identical to SEQ ID NO: 30078
  source 1..37: mol_type = genomic DNA

SEQ ID NO: 52822 - DNA, 16 bp, Homo sapiens
  source 1..16: mol_type = genomic DNA
ttctcatagtcctagc

SEQ ID NO: 52823 - DNA, 17 bp, Homo sapiens
  source 1..17: mol_type = genomic DNA
ttctcatagtcctagcc

SEQ ID NO: 52824 - DNA, 16 bp, Homo sapiens
  source 1..16: mol_type = genomic DNA
ttctcgcctgccacgc

SEQ ID NO: 52825 - DNA, 25 bp, Homo sapiens
  source 1..25: mol_type = genomic DNA
ttctcgcctgccacgcgggaggccc

SEQ ID NO: 52826 - DNA, 27 bp, Homo sapiens
  source 1..27: mol_type = genomic DNA
ttctcgcctgccacgcgggaggcccgg

SEQ ID NO: 52827 - DNA, 29 bp, Homo sapiens
  source 1..29: mol_type = genomic DNA
ttctcgcctgccacgcgggaggcccgggt

SEQ ID NO: 52828 - DNA, 16 bp, Homo sapiens
  source 1..16: mol_type = genomic DNA
ttctcgctggggcctc

SEQ ID NO: 52829 - DNA, 17 bp, Homo sapiens
  source 1..17: mol_type = genomic DNA
ttctcgctggggcctcc

SEQ ID NO: 52830 - DNA, 18 bp, Homo sapiens
  source 1..18: mol_type = genomic DNA
ttctcgctggggcctcca

SEQ ID NO: 52831 - DNA, 16 bp, Homo sapiens
  source 1..16: mol_type = genomic DNA
ttctcgctttgggtgc

SEQ ID NO: 52832 - DNA, 17 bp, Homo sapiens
  source 1..17: mol_type = genomic DNA
ttctcggtttgggtccg

SEQ ID NO: 52833 - DNA, 45 bp, Homo sapiens; identical to SEQ ID NO: 42950
  source 1..45: mol_type = genomic DNA

SEQ ID NO: 52834 - DNA, 46 bp, Homo sapiens; identical to SEQ ID NO: 42951
  source 1..46: mol_type = genomic DNA

SEQ ID NO: 52835 - DNA, 47 bp, Homo sapiens; identical to SEQ ID NO: 30094
  source 1..47: mol_type = genomic DNA

SEQ ID NO: 52836 - DNA, 18 bp, Homo sapiens
  source 1..18: mol_type = genomic DNA
ttctggtctccggatgga

SEQ ID NO: 52837 - DNA, 19 bp, Homo sapiens
  source 1..19: mol_type = genomic DNA
ttctggtctccggatggag

SEQ ID NO: 52838 - DNA, 46 bp, Homo sapiens; identical to SEQ ID NO: 42954
  source 1..46: mol_type = genomic DNA

SEQ ID NO: 52839 - DNA, 47 bp, Homo sapiens; identical to SEQ ID NO: 42955
  source 1..47: mol_type = genomic DNA

SEQ ID NO: 52840 - DNA, 31 bp, Homo sapiens; identical to SEQ ID NO: 30106
  source 1..31: mol_type = genomic DNA

SEQ ID NO: 52841 - DNA, 31 bp, Homo sapiens; identical to SEQ ID NO: 30114
  source 1..31: mol_type = genomic DNA

SEQ ID NO: 52842 - DNA, 32 bp, Homo sapiens; identical to SEQ ID NO: 30115
  source 1..32: mol_type = genomic DNA

SEQ ID NO: 52843 - DNA, 33 bp, Homo sapiens; identical to SEQ ID NO: 30116
  source 1..33: mol_type = genomic DNA

SEQ ID NO: 52844 - DNA, 34 bp, Homo sapiens; identical to SEQ ID NO: 30117
  source 1..34: mol_type = genomic DNA

SEQ ID NO: 52845 - DNA, 35 bp, Homo sapiens; identical to SEQ ID NO: 30118
  source 1..35: mol_type = genomic DNA

SEQ ID NO: 52846 - DNA, 36 bp, Homo sapiens; identical to SEQ ID NO: 30119
  source 1..36: mol_type = genomic DNA

SEQ ID NO: 52847 - DNA, 37 bp, Homo sapiens; identical to SEQ ID NO: 30120
  source 1..37: mol_type = genomic DNA

SEQ ID NO: 52848 - DNA, 38 bp, Homo sapiens; identical to SEQ ID NO: 30121
  source 1..38: mol_type = genomic DNA

SEQ ID NO: 52849 - DNA, 31 bp, Homo sapiens
  source 1..31: mol_type = genomic DNA
ttgaaatccattggggtttccccgcgcaggt

SEQ ID NO: 52850 - DNA, 20 bp, Homo sapiens
  source 1..20: mol_type = genomic DNA
ttgaatccagcgatccgagt

SEQ ID NO: 52851 - DNA, 22 bp, Homo sapiens
  source 1..22: mol_type = genomic DNA
ttgaatccagcgatccgagttc

SEQ ID NO: 52852 - DNA, 43 bp, Homo sapiens; identical to SEQ ID NO: 30151
  source 1..43: mol_type = genomic DNA

SEQ ID NO: 52853 - DNA, 44 bp, Homo sapiens; identical to SEQ ID NO: 30152
  source 1..44: mol_type = genomic DNA

SEQ ID NO: 52854 - DNA, 45 bp, Homo sapiens; identical to SEQ ID NO: 30153
  source 1..45: mol_type = genomic DNA

SEQ ID NO: 52855 - DNA, 28 bp, Homo sapiens
  source 1..28: mol_type = genomic DNA
ttgacccgggttcgattcccggccaacg

SEQ ID NO: 52856 - DNA, 32 bp, Homo sapiens; identical to SEQ ID NO: 30165
  source 1..32: mol_type = genomic DNA

SEQ ID NO: 52857 - DNA, 33 bp, Homo sapiens; identical to SEQ ID NO: 30166
  source 1..33: mol_type = genomic DNA

SEQ ID NO: 52858 - DNA, 16 bp, Homo sapiens
  source 1..16: mol_type = genomic DNA
ttgaccgctctgacca

SEQ ID NO: 52859 - DNA, 23 bp, Homo sapiens
  source 1..23: mol_type = genomic DNA
ttgactgcagatcaagaggtccc

SEQ ID NO: 52860 - DNA, 27 bp, Homo sapiens
  source 1..27: mol_type = genomic DNA
ttgactgcagatcaagaggtccccggt

SEQ ID NO: 52861 - DNA, 24 bp, Homo sapiens
  source 1..24: mol_type = genomic DNA
ttgactgcagatcaagaggtccct

SEQ ID NO: 52862 - DNA, 28 bp, Homo sapiens
  source 1..28: mol_type = genomic DNA
ttgagggttcgaatcccttcgtggttgc

SEQ ID NO: 52863 - DNA, 29 bp, Homo sapiens
  source 1..29: mol_type = genomic DNA
ttgagggttcgaatcccttcgtggttgcc

SEQ ID NO: 52864 - DNA, 27 bp, Homo sapiens
  source 1..27: mol_type = genomic DNA
ttgagggttcgagtcccttcgtggtcg

SEQ ID NO: 52865 - DNA, 28 bp, Homo sapiens
  source 1..28: mol_type = genomic DNA
ttgagggttcgagtcccttcgtggtcgc

SEQ ID NO: 52866 - DNA, 29 bp, Homo sapiens
  source 1..29: mol_type = genomic DNA
ttgagggttcgagtcccttcgtggtcgcc

SEQ ID NO: 52867 - DNA, 30 bp, Homo sapiens; identical to SEQ ID NO: 30176
  source 1..30: mol_type = genomic DNA

SEQ ID NO: 52868 - DNA, 31 bp, Homo sapiens; identical to SEQ ID NO: 30190
  source 1..31: mol_type = genomic DNA

SEQ ID NO: 52869 - DNA, 36 bp, Homo sapiens; identical to SEQ ID NO: 30195
  source 1..36: mol_type = genomic DNA

SEQ ID NO: 52870 - DNA, 32 bp, Homo sapiens; identical to SEQ ID NO: 30209
  source 1..32: mol_type = genomic DNA

SEQ ID NO: 52871 - DNA, 18 bp, Homo sapiens
  source 1..18: mol_type = genomic DNA
ttgattagggtgcttagc

SEQ ID NO: 52872 - DNA, 20 bp, Homo sapiens
  source 1..20: mol_type = genomic DNA
ttgattagggtgcttagctg

SEQ ID NO: 52873 - DNA, 23 bp, Homo sapiens
  source 1..23: mol_type = genomic DNA
ttgattagggtgcttagctgtta

SEQ ID NO: 52874 - DNA, 24 bp, Homo sapiens
  source 1..24: mol_type = genomic DNA
ttgattagggtgcttagctgttaa

SEQ ID NO: 52875 - DNA, 25 bp, Homo sapiens
  source 1..25: mol_type = genomic DNA
ttgattagggtgcttagctgttaac

SEQ ID NO: 52876 - DNA, 26 bp, Homo sapiens
  source 1..26: mol_type = genomic DNA
ttgattagggtgcttagctgttaact

SEQ ID NO: 52877 - DNA, 28 bp, Homo sapiens
  source 1..28: mol_type = genomic DNA
ttgattagggtgcttagctgttaactaa

SEQ ID NO: 52878 - DNA, 21 bp, Homo sapiens
  source 1..21: mol_type = genomic DNA
ttgcaaattcgaagaagcagc

SEQ ID NO: 52879 - DNA, 31 bp, Homo sapiens; identical to SEQ ID NO: 30232
  source 1..31: mol_type = genomic DNA

SEQ ID NO: 52880 - DNA, 38 bp, Homo sapiens; identical to SEQ ID NO: 30234
  source 1..38: mol_type = genomic DNA

SEQ ID NO: 52881 - DNA, 39 bp, Homo sapiens; identical to SEQ ID NO: 30235
  source 1..39: mol_type = genomic DNA

SEQ ID NO: 52882 - DNA, 40 bp, Homo sapiens; identical to SEQ ID NO: 30236
  source 1..40: mol_type = genomic DNA

SEQ ID NO: 52883 - DNA, 28 bp, Homo sapiens
  source 1..28: mol_type = genomic DNA
ttgcacgcgtgggttcgaatcccatcct

SEQ ID NO: 52884 - DNA, 30 bp, Homo sapiens; identical to SEQ ID NO: 30248
  source 1..30: mol_type = genomic DNA

SEQ ID NO: 52885 - DNA, 35 bp, Homo sapiens; identical to SEQ ID NO: 30250
  source 1..35: mol_type = genomic DNA

SEQ ID NO: 52886 - DNA, 36 bp, Homo sapiens; identical to SEQ ID NO: 30251
  source 1..36: mol_type = genomic DNA

SEQ ID NO: 52887 - DNA, 28 bp, Homo sapiens
  source 1..28: mol_type = genomic DNA
ttgcaggttcgagtcctgccgcggtcgc

SEQ ID NO: 52888 - DNA, 29 bp, Homo sapiens
  source 1..29: mol_type = genomic DNA
ttgcaggttcgagtcctgccgcggtcgcc

SEQ ID NO: 52889 - DNA, 21 bp, Homo sapiens
  source 1..21: mol_type = genomic DNA
ttgcgacccgggttcgattcc

SEQ ID NO: 52890 - DNA, 23 bp, Homo sapiens
  source 1..23: mol_type = genomic DNA
ttgcgacccgggttcgattcccg

SEQ ID NO: 52891 - DNA, 28 bp, Homo sapiens
  source 1..28: mol_type = genomic DNA
ttgcgacccgggttcgattcccgggcgg

SEQ ID NO: 52892 - DNA, 29 bp, Homo sapiens
  source 1..29: mol_type = genomic DNA
ttgcgacccgggttcgattcccgggcggc

SEQ ID NO: 52893 - DNA, 30 bp, Homo sapiens; identical to SEQ ID NO: 30268
  source 1..30: mol_type = genomic DNA

SEQ ID NO: 52894 - DNA, 34 bp, Homo sapiens; identical to SEQ ID NO: 30271
  source 1..34: mol_type = genomic DNA

SEQ ID NO: 52895 - DNA, 26 bp, Homo sapiens
  source 1..26: mol_type = genomic DNA
ttgcgtgttcaaatcacgtcggggtc

SEQ ID NO: 52896 - DNA, 27 bp, Homo sapiens
  source 1..27: mol_type = genomic DNA
ttgcgtgttcaagtcacgtcggggtca

SEQ ID NO: 52897 - DNA, 29 bp, Homo sapiens
  source 1..29: mol_type = genomic DNA
ttgcgtgttcaagtcacgtcggggtcacc

SEQ ID NO: 52898 - DNA, 16 bp, Homo sapiens
  source 1..16: mol_type = genomic DNA
ttgcgttcagttgatg

SEQ ID NO: 52899 - DNA, 35 bp, Homo sapiens; identical to SEQ ID NO: 30296
  source 1..35: mol_type = genomic DNA

SEQ ID NO: 52900 - DNA, 40 bp, Homo sapiens; identical to SEQ ID NO: 30306
  source 1..40: mol_type = genomic DNA

SEQ ID NO: 52901 - DNA, 23 bp, Homo sapiens
  source 1..23: mol_type = genomic DNA
ttgggagagcgttagactgaaga

SEQ ID NO: 52902 - DNA, 22 bp, Homo sapiens
  source 1..22: mol_type = genomic DNA
ttgggtccgagaggtcccgggt

SEQ ID NO: 52903 - DNA, 18 bp, Homo sapiens
  source 1..18: mol_type = genomic DNA
ttgggtgcgagaggtccc

SEQ ID NO: 52904 - DNA, 19 bp, Homo sapiens
  source 1..19: mol_type = genomic DNA
ttgggtgcgagaggtcccg

SEQ ID NO: 52905 - DNA, 22 bp, Homo sapiens
  source 1..22: mol_type = genomic DNA
ttgggtgcgagaggtcccgggt

SEQ ID NO: 52906 - DNA, 23 bp, Homo sapiens
  source 1..23: mol_type = genomic DNA
ttgggtgcgagaggtcccgggtt

SEQ ID NO: 52907 - DNA, 28 bp, Homo sapiens
  source 1..28: mol_type = genomic DNA
ttgggtgctaatggtggagttaaagact

SEQ ID NO: 52908 - DNA, 39 bp, Homo sapiens; identical to SEQ ID NO: 30353
  source 1..39: mol_type = genomic DNA

SEQ ID NO: 52909 - DNA, 40 bp, Homo sapiens; identical to SEQ ID NO: 30354
  source 1..40: mol_type = genomic DNA

SEQ ID NO: 52910 - DNA, 41 bp, Homo sapiens; identical to SEQ ID NO: 30355
  source 1..41: mol_type = genomic DNA

SEQ ID NO: 52911 - DNA, 19 bp, Homo sapiens
  source 1..19: mol_type = genomic DNA
ttggtagagcatgggactc

SEQ ID NO: 52912 - DNA, 26 bp, Homo sapiens
  source 1..26: mol_type = genomic DNA
ttggtagagcatgggactcttaatcc

SEQ ID NO: 52913 - DNA, 16 bp, Homo sapiens
  source 1..16: mol_type = genomic DNA
ttggtcgtggttgtag

SEQ ID NO: 52914 - DNA, 17 bp, Homo sapiens
  source 1..17: mol_type = genomic DNA
ttggtcgtggttgtagt

SEQ ID NO: 52915 - DNA, 18 bp, Homo sapiens
  source 1..18: mol_type = genomic DNA
ttggtcgtggttgtagtc

SEQ ID NO: 52916 - DNA, 19 bp, Homo sapiens
  source 1..19: mol_type = genomic DNA
ttggtcgtggttgtagtcc

SEQ ID NO: 52917 - DNA, 20 bp, Homo sapiens
  source 1..20: mol_type = genomic DNA
ttggtcgtggttgtagtccg

SEQ ID NO: 52918 - DNA, 21 bp, Homo sapiens
  source 1..21: mol_type = genomic DNA
ttggtcgtggttgtagtccgt

SEQ ID NO: 52919 - DNA, 22 bp, Homo sapiens
  source 1..22: mol_type = genomic DNA
ttggtcgtggttgtagtccgtg

SEQ ID NO: 52920 - DNA, 23 bp, Homo sapiens
  source 1..23: mol_type = genomic DNA
ttggtcgtggttgtagtccgtgc

SEQ ID NO: 52921 - DNA, 24 bp, Homo sapiens
  source 1..24: mol_type = genomic DNA
ttggtcgtggttgtagtccgtgcg

SEQ ID NO: 52922 - DNA, 25 bp, Homo sapiens
  source 1..25: mol_type = genomic DNA
ttggtcgtggttgtagtccgtgcga

SEQ ID NO: 52923 - DNA, 26 bp, Homo sapiens
  source 1..26: mol_type = genomic DNA
ttggtcgtggttgtagtccgtgcgag

SEQ ID NO: 52924 - DNA, 27 bp, Homo sapiens
  source 1..27: mol_type = genomic DNA
ttggtcgtggttgtagtccgtgcgaga

SEQ ID NO: 52925 - DNA, 28 bp, Homo sapiens
  source 1..28: mol_type = genomic DNA
ttggtcgtggttgtagtccgtgcgagaa

SEQ ID NO: 52926 - DNA, 29 bp, Homo sapiens
  source 1..29: mol_type = genomic DNA
ttggtcgtggttgtagtccgtgcgagaat

SEQ ID NO: 52927 - DNA, 30 bp, Homo sapiens; identical to SEQ ID NO: 30377
  source 1..30: mol_type = genomic DNA

SEQ ID NO: 52928 - DNA, 31 bp, Homo sapiens; identical to SEQ ID NO: 30378
  source 1..31: mol_type = genomic DNA

SEQ ID NO: 52929 - DNA, 32 bp, Homo sapiens; identical to SEQ ID NO: 30379
  source 1..32: mol_type = genomic DNA

SEQ ID NO: 52930 - DNA, 33 bp, Homo sapiens; identical to SEQ ID NO: 30380
  source 1..33: mol_type = genomic DNA

SEQ ID NO: 52931 - DNA, 22 bp, Homo sapiens
  source 1..22: mol_type = genomic DNA
ttggtctaggggtatgattctc

SEQ ID NO: 52932 - DNA, 24 bp, Homo sapiens
  source 1..24: mol_type = genomic DNA
ttggtctaggggtatgattctcgc

SEQ ID NO: 52933 - DNA, 25 bp, Homo sapiens
  source 1..25: mol_type = genomic DNA
ttggtctaggggtatgattctcgct

SEQ ID NO: 52934 - DNA, 26 bp, Homo sapiens
  source 1..26: mol_type = genomic DNA
ttggtctaggggtatgattctcgctt

SEQ ID NO: 52935 - DNA, 26 bp, Homo sapiens
  source 1..26: mol_type = genomic DNA
ttggtggtatagtggtgagcatagct

SEQ ID NO: 52936 - DNA, 29 bp, Homo sapiens
  source 1..29: mol_type = genomic DNA
ttggtggttcaatggtagaattctcgcct

SEQ ID NO: 52937 - DNA, 17 bp, Homo sapiens
  source 1..17: mol_type = genomic DNA
ttggtggttcagtggta

SEQ ID NO: 52938 - DNA, 20 bp, Homo sapiens
  source 1..20: mol_type = genomic DNA
ttggtggttcagtggtagaa

SEQ ID NO: 52939 - DNA, 21 bp, Homo sapiens
  source 1..21: mol_type = genomic DNA
ttggtggttcagtggtagaat

SEQ ID NO: 52940 - DNA, 23 bp, Homo sapiens
  source 1..23: mol_type = genomic DNA
ttggtggttcagtggtagaattc

SEQ ID NO: 52941 - DNA, 24 bp, Homo sapiens
  source 1..24: mol_type = genomic DNA
ttggtggttcagtggtagaattct

SEQ ID NO: 52942 - DNA, 25 bp, Homo sapiens
  source 1..25: mol_type = genomic DNA
ttggtggttcagtggtagaattctc

SEQ ID NO: 52943 - DNA, 26 bp, Homo sapiens
  source 1..26: mol_type = genomic DNA
ttggtggttcagtggtagaattctcg

SEQ ID NO: 52944 - DNA, 27 bp, Homo sapiens
  source 1..27: mol_type = genomic DNA
ttggtggttcagtggtagaattctcgc

SEQ ID NO: 52945 - DNA, 28 bp, Homo sapiens
  source 1..28: mol_type = genomic DNA
ttggtggttcagtggtagaattctcgcc

SEQ ID NO: 52946 - DNA, 29 bp, Homo sapiens
  source 1..29: mol_type = genomic DNA
ttggtggttcagtggtagaattctcgcct

SEQ ID NO: 52947 - DNA, 30 bp, Homo sapiens; identical to SEQ ID NO: 30459
  source 1..30: mol_type = genomic DNA

SEQ ID NO: 52948 - DNA, 31 bp, Homo sapiens; identical to SEQ ID NO: 30460
  source 1..31: mol_type = genomic DNA

SEQ ID NO: 52949 - DNA, 32 bp, Homo sapiens; identical to SEQ ID NO: 30461
  source 1..32: mol_type = genomic DNA

SEQ ID NO: 52950 - DNA, 33 bp, Homo sapiens; identical to SEQ ID NO: 30462
  source 1..33: mol_type = genomic DNA

SEQ ID NO: 52951 - DNA, 34 bp, Homo sapiens; identical to SEQ ID NO: 30463
  source 1..34: mol_type = genomic DNA

SEQ ID NO: 52952 - DNA, 35 bp, Homo sapiens; identical to SEQ ID NO: 30464
  source 1..35: mol_type = genomic DNA

SEQ ID NO: 52953 - DNA, 44 bp, Homo sapiens; identical to SEQ ID NO: 30473
  source 1..44: mol_type = genomic DNA

SEQ ID NO: 52954 - DNA, 45 bp, Homo sapiens; identical to SEQ ID NO: 30474
  source 1..45: mol_type = genomic DNA

SEQ ID NO: 52955 - DNA, 46 bp, Homo sapiens; identical to SEQ ID NO: 30475
  source 1..46: mol_type = genomic DNA

SEQ ID NO: 52956 - DNA, 47 bp, Homo sapiens; identical to SEQ ID NO: 30476
  source 1..47: mol_type = genomic DNA

SEQ ID NO: 52957 - DNA, 26 bp, Homo sapiens
  source 1..26: mol_type = genomic DNA
ttggtggttcgagcccacccagggac

SEQ ID NO: 52958 - DNA, 28 bp, Homo sapiens
  source 1..28: mol_type = genomic DNA
ttggtggttcgagcccacccagggacgc

SEQ ID NO: 52959 - DNA, 29 bp, Homo sapiens
  source 1..29: mol_type = genomic DNA
ttggtggttcgagcccacccagggacgcc

SEQ ID NO: 52960 - DNA, 30 bp, Homo sapiens; identical to SEQ ID NO: 30485
  source 1..30: mol_type = genomic DNA

SEQ ID NO: 52961 - DNA, 29 bp, Homo sapiens
  source 1..29: mol_type = genomic DNA
ttggtggttcgatcccacccagggacgcc

SEQ ID NO: 52962 - DNA, 26 bp, Homo sapiens
  source 1..26: mol_type = genomic DNA
ttggttatacccttcccgtactacca

SEQ ID NO: 52963 - DNA, 17 bp, Homo sapiens
  source 1..17: mol_type = genomic DNA
ttgtaaacaggagatcc

SEQ ID NO: 52964 - DNA, 22 bp, Homo sapiens
  source 1..22: mol_type = genomic DNA
ttgtaaaccaggggtcgcgagt

SEQ ID NO: 52965 - DNA, 43 bp, Homo sapiens; identical to SEQ ID NO: 30509
  source 1..43: mol_type = genomic DNA

SEQ ID NO: 52966 - DNA, 21 bp, Homo sapiens
  source 1..21: mol_type = genomic DNA
ttgtaaaccggagatgaaaac

SEQ ID NO: 52967 - DNA, 22 bp, Homo sapiens
  source 1..22: mol_type = genomic DNA
ttgtaaaccggagatgaaaacc

SEQ ID NO: 52968 - DNA, 32 bp, Homo sapiens; identical to SEQ ID NO: 30527
  source 1..32: mol_type = genomic DNA

SEQ ID NO: 52969 - DNA, 35 bp, Homo sapiens; identical to SEQ ID NO: 30530
  source 1..35: mol_type = genomic DNA

SEQ ID NO: 52970 - DNA, 36 bp, Homo sapiens; identical to SEQ ID NO: 30531
  source 1..36: mol_type = genomic DNA

SEQ ID NO: 52971 - DNA, 37 bp, Homo sapiens; identical to SEQ ID NO: 30532
  source 1..37: mol_type = genomic DNA

SEQ ID NO: 52972 - DNA, 38 bp, Homo sapiens; identical to SEQ ID NO: 30533
  source 1..38: mol_type = genomic DNA

SEQ ID NO: 52973 - DNA, 39 bp, Homo sapiens; identical to SEQ ID NO: 30534
  source 1..39: mol_type = genomic DNA

SEQ ID NO: 52974 - DNA, 18 bp, Homo sapiens
  source 1..18: mol_type = genomic DNA
ttgtagtccgtgcgagaa

SEQ ID NO: 52975 - DNA, 19 bp, Homo sapiens
  source 1..19: mol_type = genomic DNA
ttgtagtccgtgcgagaat

SEQ ID NO: 52976 - DNA, 20 bp, Homo sapiens
  source 1..20: mol_type = genomic DNA
ttgtagtccgtgcgagaata

SEQ ID NO: 52977 - DNA, 21 bp, Homo sapiens
  source 1..21: mol_type = genomic DNA
ttgtagtccgtgcgagaatac

SEQ ID NO: 52978 - DNA, 22 bp, Homo sapiens
  source 1..22: mol_type = genomic DNA
ttgtagtccgtgcgagaatacc

SEQ ID NO: 52979 - DNA, 23 bp, Homo sapiens
  source 1..23: mol_type = genomic DNA
ttgtagtccgtgcgagaatacca

SEQ ID NO: 52980 - DNA, 16 bp, Homo sapiens
  source 1..16: mol_type = genomic DNA
ttgtgaatctgacaac

SEQ ID NO: 52981 - DNA, 17 bp, Homo sapiens
  source 1..17: mol_type = genomic DNA
ttgtgaatctgacaaca

SEQ ID NO: 52982 - DNA, 18 bp, Homo sapiens
  source 1..18: mol_type = genomic DNA
ttgtgaatctgacaacag

SEQ ID NO: 52983 - DNA, 19 bp, Homo sapiens
  source 1..19: mol_type = genomic DNA
ttgtgaatctgacaacaga

SEQ ID NO: 52984 - DNA, 22 bp, Homo sapiens
  source 1..22: mol_type = genomic DNA
ttgtgaatctgacaacagaggc

SEQ ID NO: 52985 - DNA, 23 bp, Homo sapiens
  source 1..23: mol_type = genomic DNA
ttgtgaatctgacaacagaggct

SEQ ID NO: 52986 - DNA, 24 bp, Homo sapiens
  source 1..24: mol_type = genomic DNA
ttgtgaatctgacaacagaggctt

SEQ ID NO: 52987 - DNA, 27 bp, Homo sapiens
  source 1..27: mol_type = genomic DNA
ttgtgaatctgacaacagaggcttacg

SEQ ID NO: 52988 - DNA, 29 bp, Homo sapiens
  source 1..29: mol_type = genomic DNA
ttgtgaatctgacaacagaggcttacgac

SEQ ID NO: 52989 - DNA, 30 bp, Homo sapiens; identical to SEQ ID NO: 30580
  source 1..30: mol_type = genomic DNA

SEQ ID NO: 52990 - DNA, 31 bp, Homo sapiens; identical to SEQ ID NO: 30581
  source 1..31: mol_type = genomic DNA

SEQ ID NO: 52991 - DNA, 32 bp, Homo sapiens; identical to SEQ ID NO: 30582
  source 1..32: mol_type = genomic DNA

SEQ ID NO: 52992 - DNA, 33 bp, Homo sapiens; identical to SEQ ID NO: 30583
  source 1..33: mol_type = genomic DNA

SEQ ID NO: 52993 - DNA, 34 bp, Homo sapiens; identical to SEQ ID NO: 30584
  source 1..34: mol_type = genomic DNA

SEQ ID NO: 52994 - DNA, 35 bp, Homo sapiens; identical to SEQ ID NO: 30585
  source 1..35: mol_type = genomic DNA

SEQ ID NO: 52995 - DNA, 37 bp, Homo sapiens; identical to SEQ ID NO: 30587
  source 1..37: mol_type = genomic DNA

SEQ ID NO: 52996 - DNA, 40 bp, Homo sapiens; identical to SEQ ID NO: 30590
  source 1..40: mol_type = genomic DNA

SEQ ID NO: 52997 - DNA, 41 bp, Homo sapiens; identical to SEQ ID NO: 30591
  source 1..41: mol_type = genomic DNA

SEQ ID NO: 52998 - DNA, 42 bp, Homo sapiens; identical to SEQ ID NO: 30592
  source 1..42: mol_type = genomic DNA

SEQ ID NO: 52999 - DNA, 43 bp, Homo sapiens; identical to SEQ ID NO: 30593
  source 1..43: mol_type = genomic DNA

SEQ ID NO: 53000 - DNA, 44 bp, Homo sapiens; identical to SEQ ID NO: 30594
  source 1..44: mol_type = genomic DNA

SEQ ID NO: 53001 - DNA, 29 bp, Homo sapiens
  source 1..29: mol_type = genomic DNA
ttgtgagttcgatcctcacctggagcacc

SEQ ID NO: 53002 - DNA, 30 bp, Homo sapiens
  source 1..30: mol_type = genomic DNA
ttgtgagttcgatcctcacctggagcacca

SEQ ID NO: 53003 - DNA, 23 bp, Homo sapiens
  source 1..23: mol_type = genomic DNA
ttgtgctttgcacgcgtgggttc

SEQ ID NO: 53004 - DNA, 24 bp, Homo sapiens
  source 1..24: mol_type = genomic DNA
ttgtgctttgcacgcgtgggttcg

SEQ ID NO: 53005 - DNA, 42 bp, Homo sapiens; identical to SEQ ID NO: 30607
  source 1..42: mol_type = genomic DNA

SEQ ID NO: 53006 - DNA, 17 bp, Homo sapiens
  source 1..17: mol_type = genomic DNA
ttgtggccgcagcaacc

SEQ ID NO: 53007 - DNA, 18 bp, Homo sapiens
  source 1..18: mol_type = genomic DNA
ttgtggccgcagcaacct

SEQ ID NO: 53008 - DNA, 28 bp, Homo sapiens
  source 1..28: mol_type = genomic DNA
ttgtgggttcgaatcccaccagagtcgc

SEQ ID NO: 53009 - DNA, 29 bp, Homo sapiens
  source 1..29: mol_type = genomic DNA
ttgtgggttcgaatcccaccagagtcgcc

SEQ ID NO: 53010 - DNA, 29 bp, Homo sapiens
  source 1..29: mol_type = genomic DNA
ttgtgggttcgagtcccaccagagtcgcc

SEQ ID NO: 53011 - DNA, 27 bp, Homo sapiens
  source 1..27: mol_type = genomic DNA
ttgtgggttcgagtcccatctggggtg

SEQ ID NO: 53012 - DNA, 26 bp, Homo sapiens
  source 1..26: mol_type = genomic DNA
ttgtgggttcgagtcccatctgggtc

SEQ ID NO: 53013 - DNA, 28 bp, Homo sapiens
  source 1..28: mol_type = genomic DNA
ttgtgggttcgagtcccatctgggtcgc

SEQ ID NO: 53014 - DNA, 29 bp, Homo sapiens
  source 1..29: mol_type = genomic DNA
ttgtgggttcgagtcccatctgggtcgcc

SEQ ID NO: 53015 - DNA, 28 bp, Homo sapiens
  source 1..28: mol_type = genomic DNA
ttgtgggtttaagtcccattggtctagc

SEQ ID NO: 53016 - DNA, 29 bp, Homo sapiens
  source 1..29: mol_type = genomic DNA
ttgtgggtttaagtcccattggtctagcc

SEQ ID NO: 53017 - DNA, 27 bp, Homo sapiens
  source 1..27: mol_type = genomic DNA
tttaaccaaaacatcagattgtgaatc

SEQ ID NO: 53018 - DNA, 24 bp, Homo sapiens
  source 1..24: mol_type = genomic DNA
tttaactgtagatcaagaggtccc

SEQ ID NO: 53019 - DNA, 18 bp, Homo sapiens
  source 1..18: mol_type = genomic DNA
tttaagtcccattggtct

SEQ ID NO: 53020 - DNA, 24 bp, Homo sapiens
  source 1..24: mol_type = genomic DNA
tttaagttaaagattaagagaacc

SEQ ID NO: 53021 - DNA, 30 bp, Homo sapiens; identical to SEQ ID NO: 30700
  source 1..30: mol_type = genomic DNA

SEQ ID NO: 53022 - DNA, 43 bp, Homo sapiens; identical to SEQ ID NO: 30710
  source 1..43: mol_type = genomic DNA

SEQ ID NO: 53023 - DNA, 44 bp, Homo sapiens; identical to SEQ ID NO: 30711
  source 1..44: mol_type = genomic DNA

SEQ ID NO: 53024 - DNA, 45 bp, Homo sapiens; identical to SEQ ID NO: 30712
  source 1..45: mol_type = genomic DNA

SEQ ID NO: 53025 - DNA, 20 bp, Homo sapiens
  source 1..20: mol_type = genomic DNA
tttacacgcagaaggtcctg

SEQ ID NO: 53026 - DNA, 40 bp, Homo sapiens; identical to SEQ ID NO: 30721
  source 1..40: mol_type = genomic DNA

SEQ ID NO: 53027 - DNA, 44 bp, Homo sapiens; identical to SEQ ID NO: 30722
  source 1..44: mol_type = genomic DNA

SEQ ID NO: 53028 - DNA, 16 bp, Homo sapiens
  source 1..16: mol_type = genomic DNA
tttacagtcagaggtt

SEQ ID NO: 53029 - DNA, 18 bp, Homo sapiens
  source 1..18: mol_type = genomic DNA
tttagacgggctcacatc

SEQ ID NO: 53030 - DNA, 21 bp, Homo sapiens
  source 1..21: mol_type = genomic DNA
tttagacgggctcacatcacc

SEQ ID NO: 53031 - DNA, 22 bp, Homo sapiens
  source 1..22: mol_type = genomic DNA
tttagacgggctcacatcaccc

SEQ ID NO: 53032 - DNA, 30 bp, Homo sapiens; identical to SEQ ID NO: 30752
  source 1..30: mol_type = genomic DNA

SEQ ID NO: 53033 - DNA, 32 bp, Homo sapiens; identical to SEQ ID NO: 30754
  source 1..32: mol_type = genomic DNA

SEQ ID NO: 53034 - DNA, 33 bp, Homo sapiens; identical to SEQ ID NO: 30755
  source 1..33: mol_type = genomic DNA

SEQ ID NO: 53035 - DNA, 17 bp, Homo sapiens
  source 1..17: mol_type = genomic DNA
tttaggctccagtctct

SEQ ID NO: 53036 - DNA, 17 bp, Homo sapiens
  source 1..17: mol_type = genomic DNA
tttcaacttaacttgac

SEQ ID NO: 53037 - DNA, 19 bp, Homo sapiens
  source 1..19: mol_type = genomic DNA
tttcaacttaacttgaccg

SEQ ID NO: 53038 - DNA, 22 bp, Homo sapiens
  source 1..22: mol_type = genomic DNA
tttcaacttaacttgaccgctc

SEQ ID NO: 53039 - DNA, 24 bp, Homo sapiens
  source 1..24: mol_type = genomic DNA
tttcaacttaacttgaccgctctg

SEQ ID NO: 53040 - DNA, 25 bp, Homo sapiens
  source 1..25: mol_type = genomic DNA
tttcaacttaacttgaccgctctga

SEQ ID NO: 53041 - DNA, 26 bp, Homo sapiens
  source 1..26: mol_type = genomic DNA
tttcaacttaacttgaccgctctgac

SEQ ID NO: 53042 - DNA, 27 bp, Homo sapiens
  source 1..27: mol_type = genomic DNA
tttcaacttaacttgaccgctctgacc

SEQ ID NO: 53043 - DNA, 28 bp, Homo sapiens
  source 1..28: mol_type = genomic DNA
tttcaacttaacttgaccgctctgacca

SEQ ID NO: 53044 - DNA, 36 bp, Homo sapiens; identical to SEQ ID NO: 30790
  source 1..36: mol_type = genomic DNA

SEQ ID NO: 53045 - DNA, 40 bp, Homo sapiens; identical to SEQ ID NO: 30793
  source 1..40: mol_type = genomic DNA

SEQ ID NO: 53046 - DNA, 41 bp, Homo sapiens; identical to SEQ ID NO: 30794
  source 1..41: mol_type = genomic DNA

SEQ ID NO: 53047 - DNA, 42 bp, Homo sapiens; identical to SEQ ID NO: 30795
  source 1..42: mol_type = genomic DNA

SEQ ID NO: 53048 - DNA, 33 bp, Homo sapiens; identical to SEQ ID NO: 30803
  source 1..33: mol_type = genomic DNA

SEQ ID NO: 53049 - DNA, 34 bp, Homo sapiens; identical to SEQ ID NO: 30821
  source 1..34: mol_type = genomic DNA

SEQ ID NO: 53050 - DNA, 37 bp, Homo sapiens; identical to SEQ ID NO: 30824
  source 1..37: mol_type = genomic DNA

SEQ ID NO: 53051 - DNA, 38 bp, Homo sapiens; identical to SEQ ID NO: 30825
  source 1..38: mol_type = genomic DNA

SEQ ID NO: 53052 - DNA, 39 bp, Homo sapiens; identical to SEQ ID NO: 30826
  source 1..39: mol_type = genomic DNA

SEQ ID NO: 53053 - DNA, 40 bp, Homo sapiens; identical to SEQ ID NO: 30827
  source 1..40: mol_type = genomic DNA

SEQ ID NO: 53054 - DNA, 42 bp, Homo sapiens; identical to SEQ ID NO: 30829
  source 1..42: mol_type = genomic DNA

SEQ ID NO: 53055 - DNA, 43 bp, Homo sapiens; identical to SEQ ID NO: 30830
  source 1..43: mol_type = genomic DNA

SEQ ID NO: 53056 - DNA, 36 bp, Homo sapiens; identical to SEQ ID NO: 30844
  source 1..36: mol_type = genomic DNA

SEQ ID NO: 53057 - DNA, 21 bp, Homo sapiens
  source 1..21: mol_type = genomic DNA
tttccccgcgcaggttcgaat

SEQ ID NO: 53058 - DNA, 36 bp, Homo sapiens; identical to SEQ ID NO: 30851
  source 1..36: mol_type = genomic DNA

SEQ ID NO: 53059 - DNA, 31 bp, Homo sapiens; identical to SEQ ID NO: 30860
  source 1..31: mol_type = genomic DNA

SEQ ID NO: 53060 - DNA, 32 bp, Homo sapiens; identical to SEQ ID NO: 30861
  source 1..32: mol_type = genomic DNA

SEQ ID NO: 53061 - DNA, 22 bp, Homo sapiens
  source 1..22: mol_type = genomic DNA
tttccgtagtgtagtggtcatc

SEQ ID NO: 53062 - DNA, 30 bp, Homo sapiens; identical to SEQ ID NO: 30871
  source 1..30: mol_type = genomic DNA

SEQ ID NO: 53063 - DNA, 31 bp, Homo sapiens; identical to SEQ ID NO: 30872
  source 1..31: mol_type = genomic DNA

SEQ ID NO: 53064 - DNA, 32 bp, Homo sapiens; identical to SEQ ID NO: 30873
  source 1..32: mol_type = genomic DNA

SEQ ID NO: 53065 - DNA, 22 bp, Homo sapiens
  source 1..22: mol_type = genomic DNA
tttccgtagtgtagtggttatc

SEQ ID NO: 53066 - DNA, 23 bp, Homo sapiens
  source 1..23: mol_type = genomic DNA
tttccgtagtgtagtggttatca

SEQ ID NO: 53067 - DNA, 28 bp, Homo sapiens
  source 1..28: mol_type = genomic DNA
tttccgtagtgtagtggttatcacgttc

SEQ ID NO: 53068 - DNA, 29 bp, Homo sapiens
  source 1..29: mol_type = genomic DNA
tttccgtagtgtagtggttatcacgttcg

SEQ ID NO: 53069 - DNA, 30 bp, Homo sapiens; identical to SEQ ID NO: 30883
  source 1..30: mol_type = genomic DNA

SEQ ID NO: 53070 - DNA, 31 bp, Homo sapiens; identical to SEQ ID NO: 30884
  source 1..31: mol_type = genomic DNA

SEQ ID NO: 53071 - DNA, 32 bp, Homo sapiens; identical to SEQ ID NO: 30885
  source 1..32: mol_type = genomic DNA

SEQ ID NO: 53072 - DNA, 33 bp, Homo sapiens; identical to SEQ ID NO: 30887
  source 1..33: mol_type = genomic DNA

SEQ ID NO: 53073 - DNA, 34 bp, Homo sapiens; identical to SEQ ID NO: 30888
  source 1..34: mol_type = genomic DNA

SEQ ID NO: 53074 - DNA, 23 bp, Homo sapiens
  source 1..23: mol_type = genomic DNA
tttgatagagtaaataataggag

SEQ ID NO: 53075 - DNA, 25 bp, Homo sapiens
  source 1..25: mol_type = genomic DNA
tttgatagagtaaataataggagct

SEQ ID NO: 53076 - DNA, 32 bp, Homo sapiens; identical to SEQ ID NO: 30951
  source 1..32: mol_type = genomic DNA

SEQ ID NO: 53077 - DNA, 35 bp, Homo sapiens; identical to SEQ ID NO: 30954
  source 1..35: mol_type = genomic DNA

SEQ ID NO: 53078 - DNA, 22 bp, Homo sapiens
  source 1..22: mol_type = genomic DNA
tttgcacgcgtgggttcgaatc

SEQ ID NO: 53079 - DNA, 36 bp, Homo sapiens; identical to SEQ ID NO: 30968
  source 1..36: mol_type = genomic DNA

SEQ ID NO: 53080 - DNA, 19 bp, Homo sapiens
  source 1..19: mol_type = genomic DNA
tttgcacgtatgaggcccc

SEQ ID NO: 53081 - DNA, 38 bp, Homo sapiens
  source 1..38: mol_type = genomic DNA
tttgcacgtatgaggccccgggttcaatccccggcatc

SEQ ID NO: 53082 - DNA, 40 bp, Homo sapiens; identical to SEQ ID NO: 30982
  source 1..40: mol_type = genomic DNA

SEQ ID NO: 53083 - DNA, 41 bp, Homo sapiens; identical to SEQ ID NO: 30983
  source 1..41: mol_type = genomic DNA

SEQ ID NO: 53084 - DNA, 19 bp, Homo sapiens
  source 1..19: mol_type = genomic DNA
tttgggtccgagaggtccc

SEQ ID NO: 53085 - DNA, 23 bp, Homo sapiens
  source 1..23: mol_type = genomic DNA
tttgggtccgagaggtcccgggt

SEQ ID NO: 53086 - DNA, 19 bp, Homo sapiens
  source 1..19: mol_type = genomic DNA
tttgggtgcgagaggtccc

SEQ ID NO: 53087 - DNA, 20 bp, Homo sapiens
  source 1..20: mol_type = genomic DNA
tttgggtgcgagaggtcccg

SEQ ID NO: 53088 - DNA, 23 bp, Homo sapiens
  source 1..23: mol_type = genomic DNA
tttgggtgcgagaggtcccgggt

SEQ ID NO: 53089 - DNA, 24 bp, Homo sapiens
  source 1..24: mol_type = genomic DNA
tttgggtgcgagaggtcccgggtt

SEQ ID NO: 53090 - DNA, 35 bp, Homo sapiens
  source 1..35: mol_type = genomic DNA
tttgggtgcgagaggtcccgggttcaaatcccgga

SEQ ID NO: 53091 - DNA, 36 bp, Homo sapiens
  source 1..36: mol_type = genomic DNA
tttgggtgctaatggtggagttaaagactttttctc

SEQ ID NO: 53092 - DNA, 41 bp, Homo sapiens; identical to SEQ ID NO: 31016
  source 1..41: mol_type = genomic DNA

SEQ ID NO: 53093 - DNA, 42 bp, Homo sapiens; identical to SEQ ID NO: 31017
  source 1..42: mol_type = genomic DNA

SEQ ID NO: 53094 - DNA, 22 bp, Homo sapiens
  source 1..22: mol_type = genomic DNA
tttgtcaaagttaaattatagg

SEQ ID NO: 53095 - DNA, 29 bp, Homo sapiens
  source 1..29: mol_type = genomic DNA
tttgtgggtttaagtcccattggtctagc

SEQ ID NO: 53096 - DNA, 30 bp, Homo sapiens; identical to SEQ ID NO: 31052
  source 1..30: mol_type = genomic DNA

SEQ ID NO: 53097 - DNA, 25 bp, Homo sapiens
  source 1..25: mol_type = genomic DNA
ttttaagttaaagattaagagaacc

SEQ ID NO: 53098 - DNA, 32 bp, Homo sapiens; identical to SEQ ID NO: 31082
  source 1..32: mol_type = genomic DNA

SEQ ID NO: 53099 - DNA, 16 bp, Homo sapiens
  source 1..16: mol_type = genomic DNA
ttttcacccaggcggc

SEQ ID NO: 53100 - DNA, 17 bp, Homo sapiens
  source 1..17: mol_type = genomic DNA
ttttcacccaggcggcc

SEQ ID NO: 53101 - DNA, 19 bp, Homo sapiens
  source 1..19: mol_type = genomic DNA
ttttcacccaggcggcccg

SEQ ID NO: 53102 - DNA, 21 bp, Homo sapiens
  source 1..21: mol_type = genomic DNA
ttttcacccaggcggcccggg

SEQ ID NO: 53103 - DNA, 22 bp, Homo sapiens
  source 1..22: mol_type = genomic DNA
ttttcacccaggcggcccgggt

SEQ ID NO: 53104 - DNA, 36 bp, Homo sapiens; identical to SEQ ID NO: 31108
  source 1..36: mol_type = genomic DNA

SEQ ID NO: 53105 - DNA, 37 bp, Homo sapiens; identical to SEQ ID NO: 31109
  source 1..37: mol_type = genomic DNA

SEQ ID NO: 53106 - DNA, 41 bp, Homo sapiens; identical to SEQ ID NO: 31112
  source 1..41: mol_type = genomic DNA

SEQ ID NO: 53107 - DNA, 42 bp, Homo sapiens; identical to SEQ ID NO: 31113
  source 1..42: mol_type = genomic DNA

SEQ ID NO: 53108 - DNA, 43 bp, Homo sapiens; identical to SEQ ID NO: 31114
  source 1..43: mol_type = genomic DNA

SEQ ID NO: 53109 - DNA, 44 bp, Homo sapiens; identical to SEQ ID NO: 31115
  source 1..44: mol_type = genomic DNA

SEQ ID NO: 53110 - DNA, 17 bp, Homo sapiens
  source 1..17: mol_type = genomic DNA
ttttcatatcattggtc

SEQ ID NO: 53111 - DNA, 38 bp, Homo sapiens; identical to SEQ ID NO: 31139
  source 1..38: mol_type = genomic DNA

SEQ ID NO: 53112 - DNA, 39 bp, Homo sapiens; identical to SEQ ID NO: 31140
  source 1..39: mol_type = genomic DNA

SEQ ID NO: 53113 - DNA, 40 bp, Homo sapiens; identical to SEQ ID NO: 31141
  source 1..40: mol_type = genomic DNA

SEQ ID NO: 53114 - DNA, 41 bp, Homo sapiens; identical to SEQ ID NO: 31142
  source 1..41: mol_type = genomic DNA

SEQ ID NO: 53115 - DNA, 43 bp, Homo sapiens; identical to SEQ ID NO: 31144
  source 1..43: mol_type = genomic DNA

SEQ ID NO: 53116 - DNA, 44 bp, Homo sapiens; identical to SEQ ID NO: 31145
  source 1..44: mol_type = genomic DNA

SEQ ID NO: 53117 - DNA, 16 bp, Homo sapiens
  source 1..16: mol_type = genomic DNA
ttttccaaggacacca

SEQ ID NO: 53118 - DNA, 16 bp, Homo sapiens
  source 1..16: mol_type = genomic DNA
ttttgcagtccttacc

SEQ ID NO: 53119 - DNA, 41 bp, Homo sapiens; identical to SEQ ID NO: 31159
  source 1..41: mol_type = genomic DNA

SEQ ID NO: 53120 - DNA, 42 bp, Homo sapiens; identical to SEQ ID NO: 31160
  source 1..42: mol_type = genomic DNA

SEQ ID NO: 53121 - DNA, 18 bp, Homo sapiens
  source 1..18: mol_type = genomic DNA
tttttcatatcattggtc

SEQ ID NO: 53122 - DNA, 19 bp, Homo sapiens
  source 1..19: mol_type = genomic DNA
tttttcatatcattggtcg

SEQ ID NO: 53123 - DNA, 29 bp, Homo sapiens
  source 1..29: mol_type = genomic DNA
tttttcatatcattggtcgtggttgtagt

SEQ ID NO: 53124 - DNA, 31 bp, Homo sapiens; identical to SEQ ID NO: 31182
  source 1..31: mol_type = genomic DNA

SEQ ID NO: 53125 - DNA, 35 bp, Homo sapiens; identical to SEQ ID NO: 31186
  source 1..35: mol_type = genomic DNA

SEQ ID NO: 53126 - DNA, 36 bp, Homo sapiens; identical to SEQ ID NO: 31187
  source 1..36: mol_type = genomic DNA

SEQ ID NO: 53127 - DNA, 39 bp, Homo sapiens; identical to SEQ ID NO: 31189
  source 1..39: mol_type = genomic DNA

SEQ ID NO: 53128 - DNA, 40 bp, Homo sapiens; identical to SEQ ID NO: 31190
  source 1..40: mol_type = genomic DNA

SEQ ID NO: 53129 - DNA, 41 bp, Homo sapiens; identical to SEQ ID NO: 31191
  source 1..41: mol_type = genomic DNA

SEQ ID NO: 53130 - DNA, 42 bp, Homo sapiens; identical to SEQ ID NO: 31192
  source 1..42: mol_type = genomic DNA

SEQ ID NO: 53131 - DNA, 44 bp, Homo sapiens; identical to SEQ ID NO: 31194
  source 1..44: mol_type = genomic DNA

SEQ ID NO: 53132 - DNA, 45 bp, Homo sapiens; identical to SEQ ID NO: 31195
  source 1..45: mol_type = genomic DNA

SEQ ID NO: 53133 - DNA, 16 bp, Homo sapiens
  source 1..16: mol_type = genomic DNA
tttttccaaggacacc

SEQ ID NO: 53134 - DNA, 17 bp, Homo sapiens
  source 1..17: mol_type = genomic DNA
tttttccaaggacacca

SEQ ID NO: 53135 - DNA, 27 bp, Homo sapiens
  source 1..27: mol_type = genomic DNA
tgagggttcgaatcccttcgtggttgc

SEQ ID NO: 53136 - DNA, 27 bp, Homo sapiens
  source 1..27: mol_type = genomic DNA
aggcggcccgggttcgactcccggtgt

SEQ ID NO: 53137 - DNA, 24 bp, Homo sapiens
  source 1..24: mol_type = genomic DNA
cgggttcgactcccggtatgggaa

SEQ ID NO: 53138 - DNA, 17 bp, Homo sapiens
  source 1..17: mol_type = genomic DNA
aatctcggtgggacctc

SEQ ID NO: 53139 - DNA, 33 bp, Homo sapiens; identical to SEQ ID NO: 15309
  source 1..33: mol_type = genomic DNA

SEQ ID NO: 53140 - DNA, 38 bp, Homo sapiens; identical to SEQ ID NO: 33911
  source 1..38: mol_type = genomic DNA

SEQ ID NO: 53141 - DNA, 22 bp, Homo sapiens
  source 1..22: mol_type = genomic DNA
gttcgagcctcagagagggcac

SEQ ID NO: 53142 - DNA, 31 bp, Homo sapiens; identical to SEQ ID NO: 31615
  source 1..31: mol_type = genomic DNA

SEQ ID NO: 53143 - DNA, 38 bp, Homo sapiens; identical to SEQ ID NO: 33917
  source 1..38: mol_type = genomic DNA

SEQ ID NO: 53144 - DNA, 37 bp, Homo sapiens; identical to SEQ ID NO: 36634
  source 1..37: mol_type = genomic DNA

SEQ ID NO: 53145 - DNA, 37 bp, Homo sapiens; identical to SEQ ID NO: 19938
  source 1..37: mol_type = genomic DNA

SEQ ID NO: 53146 - DNA, 28 bp, Homo sapiens
  source 1..28: mol_type = genomic DNA
ttgagggttcgaatcccttcgtggttgc

SEQ ID NO: 53147 - DNA, 29 bp, Homo sapiens
  source 1..29: mol_type = genomic DNA
gtcgctggttcgattccggctcgaaggac

SEQ ID NO: 53148 - DNA, 20 bp, Homo sapiens
  source 1..20: mol_type = genomic DNA
gagtggttaaggcattggac

SEQ ID NO: 53149 - DNA, 28 bp, Homo sapiens
  source 1..28: mol_type = genomic DNA
ttgtgggttcgagtcccaccagagtcgc

SEQ ID NO: 53150 - DNA, 30 bp, Homo sapiens; identical to SEQ ID NO: 1566
  source 1..30: mol_type = genomic DNA

SEQ ID NO: 53151 - DNA, 22 bp, Homo sapiens
  source 1..22: mol_type = genomic DNA
gggttcgactcccggtatggga

SEQ ID NO: 53152 - DNA, 25 bp, Homo sapiens
  source 1..25: mol_type = genomic DNA
gcgggttcgaaccccgtccgtgcct

SEQ ID NO: 53153 - DNA, 36 bp, Homo sapiens; identical to SEQ ID NO: 11790
  source 1..36: mol_type = genomic DNA

SEQ ID NO: 53154 - DNA, 26 bp, Homo sapiens
  source 1..26: mol_type = genomic DNA
cctcggttcgaatccgagtcacggca

SEQ ID NO: 53155 - DNA, 20 bp, Homo sapiens
  source 1..20: mol_type = genomic DNA
tcgaatcccagtagagcctc

SEQ ID NO: 53156 - DNA, 26 bp, Homo sapiens
  source 1..26: mol_type = genomic DNA
cgtgttcaaatcacgtcggggtcacc

SEQ ID NO: 53157 - DNA, 20 bp, Homo sapiens
  source 1..20: mol_type = genomic DNA
cgggttcgactcccggtgtg

SEQ ID NO: 53158 - DNA, 40 bp, Homo sapiens; identical to SEQ ID NO: 11506
  source 1..40: mol_type = genomic DNA

SEQ ID NO: 53159 - DNA, 25 bp, Homo sapiens
  source 1..25: mol_type = genomic DNA
cgtgttcaaatcacgtcggggtcac

SEQ ID NO: 53160 - DNA, 31 bp, Homo sapiens; identical to SEQ ID NO: 10480
  source 1..31: mol_type = genomic DNA

SEQ ID NO: 53161 - DNA, 38 bp, Homo sapiens; identical to SEQ ID NO: 28300
  source 1..38: mol_type = genomic DNA

SEQ ID NO: 53162 - DNA, 26 bp, Homo sapiens
  source 1..26: mol_type = genomic DNA
ctggttcgatcccgggtttcggcacc

SEQ ID NO: 53163 - DNA, 28 bp, Homo sapiens
  source 1..28: mol_type = genomic DNA
cgcagaaggtcctgggttcgagccccag

SEQ ID NO: 53164 - DNA, 25 bp, Homo sapiens
  source 1..25: mol_type = genomic DNA
aggcggcccgggttcgactcccggt

SEQ ID NO: 53165 - DNA, 32 bp, Homo sapiens; identical to SEQ ID NO: 5157
  source 1..32: mol_type = genomic DNA

SEQ ID NO: 53166 - DNA, 44 bp, Homo sapiens; identical to SEQ ID NO: 4242
  source 1..44: mol_type = genomic DNA

SEQ ID NO: 53167 - DNA, 32 bp, Homo sapiens; identical to SEQ ID NO: 17569
  source 1..32: mol_type = genomic DNA

SEQ ID NO: 53168 - DNA, 29 bp, Homo sapiens
  source 1..29: mol_type = genomic DNA
agattgcaggttcgagtcctgccgcggtc

SEQ ID NO: 53169 - DNA, 29 bp, Homo sapiens
  source 1..29: mol_type = genomic DNA
aggatggggtgtgataggtggcacggaga

SEQ ID NO: 53170 - DNA, 32 bp, Homo sapiens; identical to SEQ ID NO: 12458
  source 1..32: mol_type = genomic DNA

SEQ ID NO: 53171 - DNA, 38 bp, Homo sapiens; identical to SEQ ID NO: 19939
  source 1..38: mol_type = genomic DNA

SEQ ID NO: 53172 - DNA, 43 bp, Homo sapiens; identical to SEQ ID NO: 42190
  source 1..43: mol_type = genomic DNA

SEQ ID NO: 53173 - DNA, 41 bp, Homo sapiens; identical to SEQ ID NO: 18202
  source 1..41: mol_type = genomic DNA

SEQ ID NO: 53174 - DNA, 41 bp, Homo sapiens; identical to SEQ ID NO: 19531
  source 1..41: mol_type = genomic DNA

SEQ ID NO: 53175 - DNA, 34 bp, Homo sapiens; identical to SEQ ID NO: 22746
  source 1..34: mol_type = genomic DNA

SEQ ID NO: 53176 - DNA, 34 bp, Homo sapiens; identical to SEQ ID NO: 10160
  source 1..34: mol_type = genomic DNA

SEQ ID NO: 53177 - DNA, 33 bp, Homo sapiens; identical to SEQ ID NO: 20345
  source 1..33: mol_type = genomic DNA

SEQ ID NO: 53178 - DNA, 26 bp, Homo sapiens
  source 1..26: mol_type = genomic DNA
tgggttcgaatcccaccttcgtcgcc

SEQ ID NO: 53179 - DNA, 31 bp, Homo sapiens; identical to SEQ ID NO: 15176
  source 1..31: mol_type = genomic DNA

SEQ ID NO: 53180 - DNA, 32 bp, Homo sapiens; identical to SEQ ID NO: 8715
  source 1..32: mol_type = genomic DNA

SEQ ID NO: 53181 - DNA, 27 bp, Homo sapiens
  source 1..27: mol_type = genomic DNA
gcgtgggttcgaatcccatcctcgtcg

SEQ ID NO: 53182 - DNA, 34 bp, Homo sapiens; identical to SEQ ID NO: 11168
  source 1..34: mol_type = genomic DNA

SEQ ID NO: 53183 - DNA, 37 bp, Homo sapiens; identical to SEQ ID NO: 8944
  source 1..37: mol_type = genomic DNA

SEQ ID NO: 53184 - DNA, 31 bp, Homo sapiens; identical to SEQ ID NO: 38652
  source 1..31: mol_type = genomic DNA

SEQ ID NO: 53185 - DNA, 34 bp, Homo sapiens; identical to SEQ ID NO: 5860
  source 1..34: mol_type = genomic DNA

SEQ ID NO: 53186 - DNA, 42 bp, Homo sapiens; identical to SEQ ID NO: 41602
  source 1..42: mol_type = genomic DNA

SEQ ID NO: 53187 - DNA, 20 bp, Homo sapiens
  source 1..20: mol_type = genomic DNA
cgatgcccgcattctccacc

SEQ ID NO: 53188 - DNA, 37 bp, Homo sapiens; identical to SEQ ID NO: 9195
  source 1..37: mol_type = genomic DNA

SEQ ID NO: 53189 - DNA, 34 bp, Homo sapiens; identical to SEQ ID NO: 30117
  source 1..34: mol_type = genomic DNA

SEQ ID NO: 53190 - DNA, 25 bp, Homo sapiens
  source 1..25: mol_type = genomic DNA
tgggttcgaatcccagcggggcctc

SEQ ID NO: 53191 - DNA, 33 bp, Homo sapiens; identical to SEQ ID NO: 26788
  source 1..33: mol_type = genomic DNA

SEQ ID NO: 53192 - DNA, 32 bp, Homo sapiens; identical to SEQ ID NO: 8367
  source 1..32: mol_type = genomic DNA

SEQ ID NO: 53193 - DNA, 17 bp, Homo sapiens
  source 1..17: mol_type = genomic DNA
gttcaaatccaggtgcc

SEQ ID NO: 53194 - DNA, 21 bp, Homo sapiens
  source 1..21: mol_type = genomic DNA
gcaatggtagcgcgtctgact

SEQ ID NO: 53195 - DNA, 25 bp, Homo sapiens
  source 1..25: mol_type = genomic DNA
gggttcgaatcccaccgctgccacc

SEQ ID NO: 53196 - DNA, 36 bp, Homo sapiens; identical to SEQ ID NO: 34630
  source 1..36: mol_type = genomic DNA

SEQ ID NO: 53197 - DNA, 17 bp, Homo sapiens
  source 1..17: mol_type = genomic DNA
gccaaggtcgcgggttc

SEQ ID NO: 53198 - DNA, 43 bp, Homo sapiens; identical to SEQ ID NO: 41033
  source 1..43: mol_type = genomic DNA

SEQ ID NO: 53199 - DNA, 25 bp, Homo sapiens
  source 1..25: mol_type = genomic DNA
cgagttcgaatctcggtgggacctc

SEQ ID NO: 53200 - DNA, 45 bp, Homo sapiens; identical to SEQ ID NO: 4700
  source 1..45: mol_type = genomic DNA

SEQ ID NO: 53201 - DNA, 38 bp, Homo sapiens; identical to SEQ ID NO: 38057
  source 1..38: mol_type = genomic DNA

SEQ ID NO: 53202 - DNA, 29 bp, Homo sapiens
  source 1..29: mol_type = genomic DNA
gcgtgggttcgaatcccaccttcgtcgcc

SEQ ID NO: 53203 - DNA, 21 bp, Homo sapiens
  source 1..21: mol_type = genomic DNA
ggttcaaatccgggtgccccc

SEQ ID NO: 53204 - DNA, 39 bp, Homo sapiens; identical to SEQ ID NO: 19940
  source 1..39: mol_type = genomic DNA

SEQ ID NO: 53205 - DNA, 24 bp, Homo sapiens
  source 1..24: mol_type = genomic DNA
ggttcgatcccgggtttcggcacc

SEQ ID NO: 53206 - DNA, 17 bp, Homo sapiens
  source 1..17: mol_type = genomic DNA
cccatatggtctagcgg

SEQ ID NO: 53207 - DNA, 17 bp, Homo sapiens
  source 1..17: mol_type = genomic DNA
cagagtggcgcagcgga

SEQ ID NO: 53208 - DNA, 45 bp, Homo sapiens; identical to SEQ ID NO: 32206
  source 1..45: mol_type = genomic DNA

SEQ ID NO: 53209 - DNA, 29 bp, Homo sapiens
  source 1..29: mol_type = genomic DNA
tcagtcggtagagcatgagactcttaatc

SEQ ID NO: 53210 - DNA, 41 bp, Homo sapiens; identical to SEQ ID NO: 12419
  source 1..41: mol_type = genomic DNA

SEQ ID NO: 53211 - DNA, 19 bp, Homo sapiens
  source 1..19: mol_type = genomic DNA
caagtctcggtggaacctc

SEQ ID NO: 53212 - DNA, 33 bp, Homo sapiens; identical to SEQ ID NO: 8581
  source 1..33: mol_type = genomic DNA

SEQ ID NO: 53213 - DNA, 43 bp, Homo sapiens; identical to SEQ ID NO: 25543
  source 1..43: mol_type = genomic DNA

SEQ ID NO: 53214 - DNA, 29 bp, Homo sapiens
  source 1..29: mol_type = genomic DNA
cactctggactttgaatccagcgatccga

SEQ ID NO: 53215 - DNA, 16 bp, Homo sapiens
  source 1..16: mol_type = genomic DNA
ttcggcgctctcaccg

SEQ ID NO: 53216 - DNA, 32 bp, Homo sapiens; identical to SEQ ID NO: 5956
  source 1..32: mol_type = genomic DNA

SEQ ID NO: 53217 - DNA, 31 bp, Homo sapiens; identical to SEQ ID NO: 26956
  source 1..31: mol_type = genomic DNA

SEQ ID NO: 53218 - DNA, 28 bp, Homo sapiens
  source 1..28: mol_type = genomic DNA
cctggtggtctagtggctaggattcggc

SEQ ID NO: 53219 - DNA, 16 bp, Homo sapiens
  source 1..16: mol_type = genomic DNA
ggttaaggcattggac

SEQ ID NO: 53220 - DNA, 18 bp, Homo sapiens
  source 1..18: mol_type = genomic DNA
cgagccccacgttgggcg

SEQ ID NO: 53221 - DNA, 16 bp, Homo sapiens
  source 1..16: mol_type = genomic DNA
tcagtctcataatctg

SEQ ID NO: 53222 - DNA, 16 bp, Homo sapiens
  source 1..16: mol_type = genomic DNA
cgttcggctgttaacc

SEQ ID NO: 53223 - DNA, 30 bp, Homo sapiens; identical to SEQ ID NO: 28193
  source 1..30: mol_type = genomic DNA

SEQ ID NO: 53224 - DNA, 19 bp, Homo sapiens
  source 1..19: mol_type = genomic DNA
cggtagagcatgagactct

SEQ ID NO: 53225 - DNA, 17 bp, Homo sapiens
  source 1..17: mol_type = genomic DNA
aaccaggcggaaacacc

SEQ ID NO: 53226 - DNA, 21 bp, Homo sapiens
  source 1..21: mol_type = genomic DNA
gcaatggatagcgcattggac

SEQ ID NO: 53227 - DNA, 16 bp, Homo sapiens
  source 1..16: mol_type = genomic DNA
ccatatggtctagcgg

SEQ ID NO: 53228 - DNA, 16 bp, Homo sapiens
  source 1..16: mol_type = genomic DNA
ggtagagcagaggact

SEQ ID NO: 53229 - DNA, 45 bp, Homo sapiens; identical to SEQ ID NO: 19945
  source 1..45: mol_type = genomic DNA

SEQ ID NO: 53230 - DNA, 42 bp, Homo sapiens; identical to SEQ ID NO: 19943
  source 1..42: mol_type = genomic DNA

SEQ ID NO: 53231 - DNA, 26 bp, Homo sapiens
  source 1..26: mol_type = genomic DNA
cgtgttcgaatcacgtcggggtcacc

SEQ ID NO: 53232 - DNA, 22 bp, Homo sapiens
  source 1..22: mol_type = genomic DNA
aagattgagggttcgagtccct

SEQ ID NO: 53233 - DNA, 26 bp, Homo sapiens
  source 1..26: mol_type = genomic DNA
caggttcgaaccctgctcgctgcgcc

SEQ ID NO: 53234 - DNA, 38 bp, Homo sapiens; identical to SEQ ID NO: 7116
  source 1..38: mol_type = genomic DNA

SEQ ID NO: 53235 - DNA, 34 bp, Homo sapiens; identical to SEQ ID NO: 9470
  source 1..34: mol_type = genomic DNA

SEQ ID NO: 53236 - DNA, 39 bp, Homo sapiens; identical to SEQ ID NO: 30826
  source 1..39: mol_type = genomic DNA

SEQ ID NO: 53237 - DNA, 30 bp, Homo sapiens; identical to SEQ ID NO: 14908
  source 1..30: mol_type = genomic DNA

SEQ ID NO: 53238 - DNA, 18 bp, Homo sapiens
  source 1..18: mol_type = genomic DNA
aatcctgctcacagcgcc

SEQ ID NO: 53239 - DNA, 34 bp, Homo sapiens; identical to SEQ ID NO: 25932
  source 1..34: mol_type = genomic DNA

SEQ ID NO: 53240 - DNA, 21 bp, Homo sapiens
  source 1..21: mol_type = genomic DNA
aggtggcccgggttcgactcc

SEQ ID NO: 53241 - DNA, 39 bp, Homo sapiens; identical to SEQ ID NO: 23349
  source 1..39: mol_type = genomic DNA

SEQ ID NO: 53242 - DNA, 39 bp, Homo sapiens; identical to SEQ ID NO: 17808
  source 1..39: mol_type = genomic DNA

SEQ ID NO: 53243 - DNA, 23 bp, Homo sapiens
  source 1..23: mol_type = genomic DNA
gggttcgaatcccttcgtggttg

SEQ ID NO: 53244 - DNA, 36 bp, Homo sapiens; identical to SEQ ID NO: 3549
  source 1..36: mol_type = genomic DNA

SEQ ID NO: 53245 - DNA, 23 bp, Homo sapiens
  source 1..23: mol_type = genomic DNA
agttcgaatctcggtgggacctc

SEQ ID NO: 53246 - DNA, 34 bp, Homo sapiens; identical to SEQ ID NO: 42258
  source 1..34: mol_type = genomic DNA

SEQ ID NO: 53247 - DNA, 18 bp, Homo sapiens
  source 1..18: mol_type = genomic DNA
tcagaagattccaggttc

SEQ ID NO: 53248 - DNA, 22 bp, Homo sapiens
  source 1..22: mol_type = genomic DNA
tagagcatgagactcttaatct

SEQ ID NO: 53249 - DNA, 20 bp, Homo sapiens
  source 1..20: mol_type = genomic DNA
cgaatcctgttcgtgacgcc

SEQ ID NO: 53250 - DNA, 47 bp, Homo sapiens; identical to SEQ ID NO: 8258
  source 1..47: mol_type = genomic DNA

SEQ ID NO: 53251 - DNA, 21 bp, Homo sapiens
  source 1..21: mol_type = genomic DNA
gtcggtagagcatgagactct

SEQ ID NO: 53252 - DNA, 35 bp, Homo sapiens; identical to SEQ ID NO: 14588
  source 1..35: mol_type = genomic DNA

SEQ ID NO: 53253 - DNA, 37 bp, Homo sapiens; identical to SEQ ID NO: 14224
  source 1..37: mol_type = genomic DNA

SEQ ID NO: 53254 - DNA, 20 bp, Homo sapiens
  source 1..20: mol_type = genomic DNA
tgactccagatcagaaggct

SEQ ID NO: 53255 - DNA, 21 bp, Homo sapiens
  source 1..21: mol_type = genomic DNA
gcggcccgggttcgattcccg

SEQ ID NO: 53256 - DNA, 27 bp, Homo sapiens
  source 1..27: mol_type = genomic DNA
aggagcttaaacccccttatttctacc

SEQ ID NO: 53257 - DNA, 25 bp, Homo sapiens
  source 1..25: mol_type = genomic DNA
aggttcgaatcctgccgactacgcc

SEQ ID NO: 53258 - DNA, 26 bp, Homo sapiens
  source 1..26: mol_type = genomic DNA
caggttcgaatcctgccgactacgcc

SEQ ID NO: 53259 - DNA, 25 bp, Homo sapiens
  source 1..25: mol_type = genomic DNA
cgagttcaaatctcgctggggcctc

SEQ ID NO: 53260 - DNA, 32 bp, Homo sapiens; identical to SEQ ID NO: 9989
  source 1..32: mol_type = genomic DNA

SEQ ID NO: 53261 - DNA, 27 bp, Homo sapiens
  source 1..27: mol_type = genomic DNA
cggttaggattcctggttttcacccag

SEQ ID NO: 53262 - DNA, 25 bp, Homo sapiens
  source 1..25: mol_type = genomic DNA
gggttcgaatcccttcgtggttgcc

SEQ ID NO: 53263 - DNA, 20 bp, Homo sapiens
  source 1..20: mol_type = genomic DNA
ttcgaatcctgccgactacg

SEQ ID NO: 53264 - DNA, 17 bp, Homo sapiens
  source 1..17: mol_type = genomic DNA
tcgtatagtggttagta

SEQ ID NO: 53265 - DNA, 46 bp, Homo sapiens; identical to SEQ ID NO: 10365
  source 1..46: mol_type = genomic DNA

SEQ ID NO: 53266 - DNA, 34 bp, Homo sapiens; identical to SEQ ID NO: 4922
  source 1..34: mol_type = genomic DNA

SEQ ID NO: 53267 - DNA, 22 bp, Homo sapiens
  source 1..22: mol_type = genomic DNA
ttcgagtcctgccgcggtcgcc

SEQ ID NO: 53268 - DNA, 44 bp, Homo sapiens; identical to SEQ ID NO: 13883
  source 1..44: mol_type = genomic DNA

SEQ ID NO: 53269 - DNA, 29 bp, Homo sapiens
  source 1..29: mol_type = genomic DNA
gctagctcagtcggtagagcatgagactc

SEQ ID NO: 53270 - DNA, 21 bp, Homo sapiens
  source 1..21: mol_type = genomic DNA
agggattgtgggttcgagtcc

SEQ ID NO: 53271 - DNA, 38 bp, Homo sapiens; identical to SEQ ID NO: 2930
  source 1..38: mol_type = genomic DNA

SEQ ID NO: 53272 - DNA, 16 bp, Homo sapiens
  source 1..16: mol_type = genomic DNA
aaaggtccctggttcg

SEQ ID NO: 53273 - DNA, 24 bp, Homo sapiens
  source 1..24: mol_type = genomic DNA
cagctaaataagctatcgggccca

SEQ ID NO: 53274 - DNA, 33 bp, Homo sapiens; identical to SEQ ID NO: 16830
  source 1..33: mol_type = genomic DNA

SEQ ID NO: 53275 - DNA, 25 bp, Homo sapiens
  source 1..25: mol_type = genomic DNA
cgagttcaaatctcggtggaacctc

SEQ ID NO: 53276 - DNA, 31 bp, Homo sapiens; identical to SEQ ID NO: 18659
  source 1..31: mol_type = genomic DNA

SEQ ID NO: 53277 - DNA, 19 bp, Homo sapiens
  source 1..19: mol_type = genomic DNA
gttcgattcccggccaatg

SEQ ID NO: 53278 - DNA, 37 bp, Homo sapiens; identical to SEQ ID NO: 24651
  source 1..37: mol_type = genomic DNA

SEQ ID NO: 53279 - DNA, 16 bp, Homo sapiens
  source 1..16: mol_type = genomic DNA
ccccactcctggtacc

SEQ ID NO: 53280 - DNA, 17 bp, Homo sapiens
  source 1..17: mol_type = genomic DNA
gtggtatcatgcaagat

SEQ ID NO: 53281 - DNA, 27 bp, Homo sapiens
  source 1..27: mol_type = genomic DNA
tctaggttcgactcctggctggctcgc

SEQ ID NO: 53282 - DNA, 39 bp, Homo sapiens; identical to SEQ ID NO: 8314
  source 1..39: mol_type = genomic DNA

SEQ ID NO: 53283 - DNA, 23 bp, Homo sapiens
  source 1..23: mol_type = genomic DNA
ttccccgcacaggttcgaatcct

SEQ ID NO: 53284 - DNA, 28 bp, Homo sapiens
  source 1..28: mol_type = genomic DNA
cgatggatcgaaaccatcctctgctacc

SEQ ID NO: 53285 - DNA, 38 bp, Homo sapiens; identical to SEQ ID NO: 3099
  source 1..38: mol_type = genomic DNA

SEQ ID NO: 53286 - DNA, 39 bp, Homo sapiens; identical to SEQ ID NO: 3177
  source 1..39: mol_type = genomic DNA

SEQ ID NO: 53287 - DNA, 19 bp, Homo sapiens
  source 1..19: mol_type = genomic DNA
ccaacttacacttaggaga

SEQ ID NO: 53288 - DNA, 41 bp, Homo sapiens; identical to SEQ ID NO: 8330
  source 1..41: mol_type = genomic DNA

SEQ ID NO: 53289 - DNA, 31 bp, Homo sapiens; identical to SEQ ID NO: 18802
  source 1..31: mol_type = genomic DNA

SEQ ID NO: 53290 - DNA, 26 bp, Homo sapiens
  source 1..26: mol_type = genomic DNA
tgggttcgaatcccatcctcgtcgcc

SEQ ID NO: 53291 - DNA, 18 bp, Homo sapiens
  source 1..18: mol_type = genomic DNA
cgaatcccactcctgaca

SEQ ID NO: 53292 - DNA, 18 bp, Homo sapiens
  source 1..18: mol_type = genomic DNA
tttgggtgcgagaggtcc

SEQ ID NO: 53293 - DNA, 38 bp, Homo sapiens; identical to SEQ ID NO: 8486
  source 1..38: mol_type = genomic DNA

SEQ ID NO: 53294 - DNA, 31 bp, Homo sapiens; identical to SEQ ID NO: 19932
  source 1..31: mol_type = genomic DNA

SEQ ID NO: 53295 - DNA, 22 bp, Homo sapiens
  source 1..22: mol_type = genomic DNA
tccccgcgcaggttcgaatcct

SEQ ID NO: 53296 - DNA, 23 bp, Homo sapiens
  source 1..23: mol_type = genomic DNA
ggttcaagtccctgttcgggcgc

SEQ ID NO: 53297 - DNA, 25 bp, Homo sapiens
  source 1..25: mol_type = genomic DNA
gcctggatagctcagttggtagagc

SEQ ID NO: 53298 - DNA, 24 bp, Homo sapiens
  source 1..24: mol_type = genomic DNA
cagtggtagaattctcgcctgcca

SEQ ID NO: 53299 - DNA, 17 bp, Homo sapiens
  source 1..17: mol_type = genomic DNA
tggtcatcacgttcgcc

SEQ ID NO: 53300 - DNA, 17 bp, Homo sapiens
  source 1..17: mol_type = genomic DNA
atggataaggcattggc

SEQ ID NO: 53301 - DNA, 19 bp, Homo sapiens
  source 1..19: mol_type = genomic DNA
aagtcacgtcggggtcacc

SEQ ID NO: 53302 - DNA, 18 bp, Homo sapiens
  source 1..18: mol_type = genomic DNA
cccacatggtctagcggt

SEQ ID NO: 53303 - DNA, 29 bp, Homo sapiens
  source 1..29: mol_type = genomic DNA
ttggtggttcgagcccacccagggacgcc

SEQ ID NO: 53304 - DNA, 22 bp, Homo sapiens
  source 1..22: mol_type = genomic DNA
ttcaaatcacgtcggggtcacc

SEQ ID NO: 53305 - DNA, 26 bp, Homo sapiens
  source 1..26: mol_type = genomic DNA
tggtgtaatggtaagcactctggact

SEQ ID NO: 53306 - DNA, 29 bp, Homo sapiens
  source 1..29: mol_type = genomic DNA
ctgcgtgttcgaatcacgtcggggtcacc

SEQ ID NO: 53307 - DNA, 37 bp, Homo sapiens; identical to SEQ ID NO: 19699
  source 1..37: mol_type = genomic DNA

SEQ ID NO: 53308 - DNA, 19 bp, Homo sapiens
  source 1..19: mol_type = genomic DNA
gatcccgggtttcggcacc

SEQ ID NO: 53309 - DNA, 37 bp, Homo sapiens; identical to SEQ ID NO: 25707
  source 1..37: mol_type = genomic DNA

SEQ ID NO: 53310 - DNA, 46 bp, Homo sapiens; identical to SEQ ID NO: 7964
  source 1..46: mol_type = genomic DNA

SEQ ID NO: 53311 - DNA, 47 bp, Homo sapiens; identical to SEQ ID NO: 9935
  source 1..47: mol_type = genomic DNA

SEQ ID NO: 53312 - DNA, 25 bp, Homo sapiens
  source 1..25: mol_type = genomic DNA
tagtgtagtggttatcacgttcgcc

SEQ ID NO: 53313 - DNA, 26 bp, Homo sapiens
  source 1..26: mol_type = genomic DNA
gggttcgactcccggtgtgggaacca

SEQ ID NO: 53314 - DNA, 16 bp, Homo sapiens
  source 1..16: mol_type = genomic DNA
ccctgctcgctgcgcc

SEQ ID NO: 53315 - DNA, 27 bp, Homo sapiens
  source 1..27: mol_type = genomic DNA
ggggatgtagctcagtggtagagcgcg

SEQ ID NO: 53316 - DNA, 27 bp, Homo sapiens
  source 1..27: mol_type = genomic DNA
cgcgggttcgatccccgtacgggccac

SEQ ID NO: 53317 - DNA, 21 bp, Homo sapiens
  source 1..21: mol_type = genomic DNA
aagaactgctaactcatgccc

SEQ ID NO: 53318 - DNA, 16 bp, Homo sapiens
  source 1..16: mol_type = genomic DNA
ggccggttagctcagt

SEQ ID NO: 53319 - DNA, 28 bp, Homo sapiens
  source 1..28: mol_type = genomic DNA
gggggtgtagctcagtggtagagcgcgt

SEQ ID NO: 53320 - DNA, 22 bp, Homo sapiens
  source 1..22: mol_type = genomic DNA
gggttcgattccccgacgggga

SEQ ID NO: 53321 - DNA, 28 bp, Homo sapiens
  source 1..28: mol_type = genomic DNA
gcgccgctggtgtagtggtatcatgcaa

SEQ ID NO: 53322 - DNA, 32 bp, Homo sapiens; identical to SEQ ID NO: 42246
  source 1..32: mol_type = genomic DNA

SEQ ID NO: 53323 - DNA, 25 bp, Homo sapiens
  source 1..25: mol_type = genomic DNA
tcggctgttaaccgaaaggttggtg

SEQ ID NO: 53324 - DNA, 17 bp, Homo sapiens
  source 1..17: mol_type = genomic DNA
tagtcgtggccgagtgg

SEQ ID NO: 53325 - DNA, 22 bp, Homo sapiens
  source 1..22: mol_type = genomic DNA
agtggttaggattcggcgctct

SEQ ID NO: 53326 - DNA, 27 bp, Homo sapiens
  source 1..27: mol_type = genomic DNA
ggggatgtagctcagtggtagagcgca

SEQ ID NO: 53327 - DNA, 27 bp, Homo sapiens
  source 1..27: mol_type = genomic DNA
gttcagtggtagaattctcgcctgcca

SEQ ID NO: 53328 - DNA, 16 bp, Homo sapiens
  source 1..16: mol_type = genomic DNA
cccggtgtgggaacca

SEQ ID NO: 53329 - DNA, 19 bp, Homo sapiens
  source 1..19: mol_type = genomic DNA
aatcctgccgactacgcca

SEQ ID NO: 53330 - DNA, 27 bp, Homo sapiens
  source 1..27: mol_type = genomic DNA
ctccgaggtgattttcatattgaattg

SEQ ID NO: 53331 - DNA, 31 bp, Homo sapiens; identical to SEQ ID NO: 1255
  source 1..31: mol_type = genomic DNA

SEQ ID NO: 53332 - DNA, 21 bp, Homo sapiens
  source 1..21: mol_type = genomic DNA
tcgaatcccaccgctgccacc

SEQ ID NO: 53333 - DNA, 18 bp, Homo sapiens
  source 1..18: mol_type = genomic DNA
ggctagctcagtcggtag

SEQ ID NO: 53334 - DNA, 16 bp, Homo sapiens
  source 1..16: mol_type = genomic DNA
ccgggcagaagcacca

SEQ ID NO: 53335 - DNA, 16 bp, Homo sapiens
  source 1..16: mol_type = genomic DNA
tagtggttaggattcg

SEQ ID NO: 53336 - DNA, 16 bp, Homo sapiens
  source 1..16: mol_type = genomic DNA
tagctcagtcggtaga

SEQ ID NO: 53337 - DNA, 30 bp, Homo sapiens; identical to SEQ ID NO: 25296
  source 1..30: mol_type = genomic DNA

SEQ ID NO: 53338 - DNA, 32 bp, Homo sapiens; identical to SEQ ID NO: 132
  source 1..32: mol_type = genomic DNA

SEQ ID NO: 53339 - DNA, 33 bp, Homo sapiens; identical to SEQ ID NO: 10729
  source 1..33: mol_type = genomic DNA

SEQ ID NO: 53340 - DNA, 36 bp, Homo sapiens; identical to SEQ ID NO: 9472
  source 1..36: mol_type = genomic DNA

SEQ ID NO: 53341 - DNA, 36 bp, Homo sapiens; identical to SEQ ID NO: 2957
  source 1..36: mol_type = genomic DNA

SEQ ID NO: 53342 - DNA, 17 bp, Homo sapiens
  source 1..17: mol_type = genomic DNA
ggtagaattctcgcctg

SEQ ID NO: 53343 - DNA, 16 bp, Homo sapiens
  source 1..16: mol_type = genomic DNA
cctgctcacagcgcca

SEQ ID NO: 53344 - DNA, 33 bp, Homo sapiens; identical to SEQ ID NO: 25909
  source 1..33: mol_type = genomic DNA

SEQ ID NO: 53345 - DNA, 17 bp, Homo sapiens
  source 1..17: mol_type = genomic DNA
accgggcagaagcacca

SEQ ID NO: 53346 - DNA, 36 bp, Homo sapiens; identical to SEQ ID NO: 24045
  source 1..36: mol_type = genomic DNA

SEQ ID NO: 53347 - DNA, 21 bp, Homo sapiens
  source 1..21: mol_type = genomic DNA
gtttccgtagtgtagtggtca

SEQ ID NO: 53348 - DNA, 30 bp, Homo sapiens; identical to SEQ ID NO: 24039
  source 1..30: mol_type = genomic DNA

SEQ ID NO: 53349 - DNA, 33 bp, Homo sapiens; identical to SEQ ID NO: 22518
  source 1..33: mol_type = genomic DNA

SEQ ID NO: 53350 - DNA, 23 bp, Homo sapiens
  source 1..23: mol_type = genomic DNA
ggttagcactctggactttgaat

SEQ ID NO: 53351 - DNA, 21 bp, Homo sapiens
  source 1..21: mol_type = genomic DNA
cgaaaccgggcggaaacacca

SEQ ID NO: 53352 - DNA, 18 bp, Homo sapiens
  source 1..18: mol_type = genomic DNA
gtggttatcacgttcgcc

SEQ ID NO: 53353 - DNA, 28 bp, Homo sapiens
  source 1..28: mol_type = genomic DNA
ggggatgtagctcagtggtagagcgcgc

SEQ ID NO: 53354 - DNA, 30 bp, Homo sapiens; identical to SEQ ID NO: 18658
  source 1..30: mol_type = genomic DNA

SEQ ID NO: 53355 - DNA, 27 bp, Homo sapiens
  source 1..27: mol_type = genomic DNA
gggggtgtagctcagtggtagagcgcg

SEQ ID NO: 53356 - DNA, 20 bp, Homo sapiens
  source 1..20: mol_type = genomic DNA
cgattccggctcgaaggacc

SEQ ID NO: 53357 - DNA, 17 bp, Homo sapiens
  source 1..17: mol_type = genomic DNA
gcccggatagctcagtc

SEQ ID NO: 53358 - DNA, 16 bp, Homo sapiens
  source 1..16: mol_type = genomic DNA
cccggcccatgcacca

SEQ ID NO: 53359 - DNA, 17 bp, Homo sapiens
  source 1..17: mol_type = genomic DNA
tccgagtcacggcacca

SEQ ID NO: 53360 - DNA, 20 bp, Homo sapiens
  source 1..20: mol_type = genomic DNA
cggttaggattcctggtttt

SEQ ID NO: 53361 - DNA, 22 bp, Homo sapiens
  source 1..22: mol_type = genomic DNA
gactctgaatccagcgatccga

SEQ ID NO: 53362 - DNA, 20 bp, Homo sapiens
  source 1..20: mol_type = genomic DNA
tacgaccccttatttacccc

SEQ ID NO: 53363 - DNA, 16 bp, Homo sapiens
  source 1..16: mol_type = genomic DNA
cccgtccgtgcctcca

SEQ ID NO: 53364 - DNA, 21 bp, Homo sapiens
  source 1..21: mol_type = genomic DNA
cgaatcccatcctcgtcgcca

SEQ ID NO: 53365 - DNA, 17 bp, Homo sapiens
  source 1..17: mol_type = genomic DNA
accatcctctgctacca

SEQ ID NO: 53366 - DNA, 27 bp, Homo sapiens
  source 1..27: mol_type = genomic DNA
gtttccgtagtgtagtggttatcacgt

SEQ ID NO: 53367 - DNA, 22 bp, Homo sapiens
  source 1..22: mol_type = genomic DNA
aatggttagcactctggactct

SEQ ID NO: 53368 - DNA, 17 bp, Homo sapiens
  source 1..17: mol_type = genomic DNA
tgcccgcatcctccacc

SEQ ID NO: 53369 - DNA, 23 bp, Homo sapiens
  source 1..23: mol_type = genomic DNA
ttgggtgcgagaggtcccgggtt

SEQ ID NO: 53370 - DNA, 23 bp, Homo sapiens
  source 1..23: mol_type = genomic DNA
gggccagtggcgcaatggataac

SEQ ID NO: 53371 - DNA, 19 bp, Homo sapiens
  source 1..19: mol_type = genomic DNA
gtagtcgtggccgagtggt

SEQ ID NO: 53372 - DNA, 19 bp, Homo sapiens
  source 1..19: mol_type = genomic DNA
ttggtggttcagtggtaga

SEQ ID NO: 53373 - DNA, 17 bp, Homo sapiens
  source 1..17: mol_type = genomic DNA
accgggcggaaacacca

SEQ ID NO: 53374 - DNA, 17 bp, Homo sapiens
  source 1..17: mol_type = genomic DNA
cactgtaaagctaactt

SEQ ID NO: 53375 - DNA, 23 bp, Homo sapiens
  source 1..23: mol_type = genomic DNA
ctaacaacatggctttctcacca

SEQ ID NO: 53376 - DNA, 29 bp, Homo sapiens
  source 1..29: mol_type = genomic DNA
ggcggcccgggttcgactcccggtgtggg

SEQ ID NO: 53377 - DNA, 29 bp, Homo sapiens
  source 1..29: mol_type = genomic DNA
taggatggggtgtgataggtggcacggag

SEQ ID NO: 53378 - DNA, 18 bp, Homo sapiens
  source 1..18: mol_type = genomic DNA
tggtagaattctcgcctg

SEQ ID NO: 53379 - DNA, 17 bp, Homo sapiens
  source 1..17: mol_type = genomic DNA
ccccgtccgtgcctcca

SEQ ID NO: 53380 - DNA, 23 bp, Homo sapiens
  source 1..23: mol_type = genomic DNA
atggttagcactctggactctga

SEQ ID NO: 53381 - DNA, 18 bp, Homo sapiens
  source 1..18: mol_type = genomic DNA
gaccgcgtggcctaatgg

SEQ ID NO: 53382 - DNA, 26 bp, Homo sapiens
  source 1..26: mol_type = genomic DNA
cgtgatcgtatagtggttagtactct

SEQ ID NO: 53383 - DNA, 17 bp, Homo sapiens
  source 1..17: mol_type = genomic DNA
ccctgctcgctgcgcca

SEQ ID NO: 53384 - DNA, 22 bp, Homo sapiens
  source 1..22: mol_type = genomic DNA
ggttagcactctggactctgaa

SEQ ID NO: 53385 - DNA, 17 bp, Homo sapiens
  source 1..17: mol_type = genomic DNA
tcctgctcacagcgcca

SEQ ID NO: 53386 - DNA, 26 bp, Homo sapiens
  source 1..26: mol_type = genomic DNA
attggtcgtggttgtagtccgtgcga

SEQ ID NO: 53387 - DNA, 18 bp, Homo sapiens
  source 1..18: mol_type = genomic DNA
atcctgctcacagcgcca

SEQ ID NO: 53388 - DNA, 19 bp, Homo sapiens
  source 1..19: mol_type = genomic DNA
ggccggttagctcagttgg

SEQ ID NO: 53389 - DNA, 26 bp, Homo sapiens
  source 1..26: mol_type = genomic DNA
gtgatcgtatagtggttagtactctg

SEQ ID NO: 53390 - DNA, 23 bp, Homo sapiens
  source 1..23: mol_type = genomic DNA
tttgggtgcgagaggtcccgggt

SEQ ID NO: 53391 - DNA, 17 bp, Homo sapiens
  source 1..17: mol_type = genomic DNA
aatggttagcactctgg

SEQ ID NO: 53392 - DNA, 20 bp, Homo sapiens
  source 1..20: mol_type = genomic DNA
agtggttagtactctgcgtt

SEQ ID NO: 53393 - DNA, 30 bp, Homo sapiens; identical to SEQ ID NO: 4283
  source 1..30: mol_type = genomic DNA

SEQ ID NO: 53394 - DNA, 20 bp, Homo sapiens
  source 1..20: mol_type = genomic DNA
tgtaatggttagcactctgg

SEQ ID NO: 53395 - DNA, 22 bp, Homo sapiens
  source 1..22: mol_type = genomic DNA
tcgtatagtggttagtactctg

SEQ ID NO: 53396 - DNA, 22 bp, Homo sapiens
  source 1..22: mol_type = genomic DNA
gttaagatggcagagcccggta

SEQ ID NO: 53397 - DNA, 21 bp, Homo sapiens
  source 1..21: mol_type = genomic DNA
attggtcgtggttgtagtccg

SEQ ID NO: 53398 - DNA, 18 bp, Homo sapiens
  source 1..18: mol_type = genomic DNA
ttcaggtcgcagtctccc

SEQ ID NO: 53399 - DNA, 26 bp, Homo sapiens
  source 1..26: mol_type = genomic DNA
tcaacttaacttgaccgctctgacca

SEQ ID NO: 53400 - DNA, 18 bp, Homo sapiens
  source 1..18: mol_type = genomic DNA
acttgaccgctctgacca

SEQ ID NO: 53401 - DNA, 32 bp, Homo sapiens; identical to SEQ ID NO: 8225
  source 1..32: mol_type = genomic DNA

SEQ ID NO: 53402 - DNA, 43 bp, Homo sapiens; identical to SEQ ID NO: 35270
  source 1..43: mol_type = genomic DNA

SEQ ID NO: 53403 - DNA, 47 bp, Homo sapiens; identical to SEQ ID NO: 11328
  source 1..47: mol_type = genomic DNA

SEQ ID NO: 53404 - DNA, 27 bp, Homo sapiens
  source 1..27: mol_type = genomic DNA
gactccagatcagaaggctgcgtgttc

SEQ ID NO: 53405 - DNA, 28 bp, Homo sapiens
  source 1..28: mol_type = genomic DNA
agctcacaagaactgctaactcatgccc

SEQ ID NO: 53406 - DNA, 40 bp, Homo sapiens; identical to SEQ ID NO: 12892
  source 1..40: mol_type = genomic DNA

SEQ ID NO: 53407 - DNA, 33 bp, Homo sapiens; identical to SEQ ID NO: 12208
  source 1..33: mol_type = genomic DNA

SEQ ID NO: 53408 - DNA, 34 bp, Homo sapiens; identical to SEQ ID NO: 5022
  source 1..34: mol_type = genomic DNA

SEQ ID NO: 53409 - DNA, 31 bp, Homo sapiens; identical to SEQ ID NO: 15332
  source 1..31: mol_type = genomic DNA

SEQ ID NO: 53410 - DNA, 26 bp, Homo sapiens
  source 1..26: mol_type = genomic DNA
ttaaccgaaaggttggtggttcgagc

SEQ ID NO: 53411 - DNA, 28 bp, Homo sapiens
  source 1..28: mol_type = genomic DNA
tagtgtagtggttatcacgtctgcttta

SEQ ID NO: 53412 - DNA, 43 bp, Homo sapiens; identical to SEQ ID NO: 22582
  source 1..43: mol_type = genomic DNA

SEQ ID NO: 53413 - DNA, 36 bp, Homo sapiens; identical to SEQ ID NO: 8601
  source 1..36: mol_type = genomic DNA

SEQ ID NO: 53414 - DNA, 19 bp, Homo sapiens
  source 1..19: mol_type = genomic DNA
cgatccccgtacgggccac

SEQ ID NO: 53415 - DNA, 31 bp, Homo sapiens; identical to SEQ ID NO: 37579
  source 1..31: mol_type = genomic DNA

SEQ ID NO: 53416 - DNA, 32 bp, Homo sapiens; identical to SEQ ID NO: 37580
  source 1..32: mol_type = genomic DNA

SEQ ID NO: 53417 - DNA, 23 bp, Homo sapiens
  source 1..23: mol_type = genomic DNA
agcagcttcaaacctgccggggc

SEQ ID NO: 53418 - DNA, 25 bp, Homo sapiens
  source 1..25: mol_type = genomic DNA
cggagaattttggattctcagggat

SEQ ID NO: 53419 - DNA, 16 bp, Homo sapiens
  source 1..16: mol_type = genomic DNA
agaaggctgcgtgttc

SEQ ID NO: 53420 - DNA, 30 bp, Homo sapiens; identical to SEQ ID NO: 3776
  source 1..30: mol_type = genomic DNA

SEQ ID NO: 53421 - DNA, 18 bp, Homo sapiens
  source 1..18: mol_type = genomic DNA
gcgtggccgagcggtcta

SEQ ID NO: 53422 - DNA, 19 bp, Homo sapiens
  source 1..19: mol_type = genomic DNA
agccagggattgtgggttc

SEQ ID NO: 53423 - DNA, 37 bp, Homo sapiens; identical to SEQ ID NO: 22687
  source 1..37: mol_type = genomic DNA

SEQ ID NO: 53424 - DNA, 37 bp, Homo sapiens; identical to SEQ ID NO: 9473
  source 1..37: mol_type = genomic DNA

SEQ ID NO: 53425 - DNA, 44 bp, Homo sapiens; identical to SEQ ID NO: 218
  source 1..44: mol_type = genomic DNA

SEQ ID NO: 53426 - DNA, 37 bp, Homo sapiens; identical to SEQ ID NO: 24830
  source 1..37: mol_type = genomic DNA

SEQ ID NO: 53427 - DNA, 33 bp, Homo sapiens; identical to SEQ ID NO: 30462
  source 1..33: mol_type = genomic DNA

SEQ ID NO: 53428 - DNA, 33 bp, Homo sapiens; identical to SEQ ID NO: 16890
  source 1..33: mol_type = genomic DNA

SEQ ID NO: 53429 - DNA, 39 bp, Homo sapiens; identical to SEQ ID NO: 24832
  source 1..39: mol_type = genomic DNA

SEQ ID NO: 53430 - DNA, 37 bp, Homo sapiens; identical to SEQ ID NO: 10522
  source 1..37: mol_type = genomic DNA

SEQ ID NO: 53431 - DNA, 35 bp, Homo sapiens; identical to SEQ ID NO: 12110
  source 1..35: mol_type = genomic DNA

SEQ ID NO: 53432 - DNA, 38 bp, Homo sapiens; identical to SEQ ID NO: 16291
  source 1..38: mol_type = genomic DNA

SEQ ID NO: 53433 - DNA, 26 bp, Homo sapiens
  source 1..26: mol_type = genomic DNA
agaagcagcttcaaacctgccggggc

SEQ ID NO: 53434 - DNA, 26 bp, Homo sapiens
  source 1..26: mol_type = genomic DNA
ggagaccggggttcgattccccgacg

SEQ ID NO: 53435 - DNA, 17 bp, Homo sapiens
  source 1..17: mol_type = genomic DNA
acgcgggagaccggggt

SEQ ID NO: 53436 - DNA, 19 bp, Homo sapiens
  source 1..19: mol_type = genomic DNA
attgcaggttcgagtcctg

SEQ ID NO: 53437 - DNA, 32 bp, Homo sapiens; identical to SEQ ID NO: 18795
  source 1..32: mol_type = genomic DNA

SEQ ID NO: 53438 - DNA, 26 bp, Homo sapiens
  source 1..26: mol_type = genomic DNA
gaagcagcttcaaacctgccggggct

SEQ ID NO: 53439 - DNA, 32 bp, Homo sapiens; identical to SEQ ID NO: 15365
  source 1..32: mol_type = genomic DNA

SEQ ID NO: 53440 - DNA, 17 bp, Homo sapiens
  source 1..17: mol_type = genomic DNA
gttcaatccccggcacc

SEQ ID NO: 53441 - DNA, 16 bp, Homo sapiens
  source 1..16: mol_type = genomic DNA
caggatggccgagcgg

SEQ ID NO: 53442 - DNA, 22 bp, Homo sapiens
  source 1..22: mol_type = genomic DNA
cggcccgggttcgattcccggt

SEQ ID NO: 53443 - DNA, 23 bp, Homo sapiens
  source 1..23: mol_type = genomic DNA
agtggtagaattctcgcctgcca

SEQ ID NO: 53444 - DNA, 16 bp, Homo sapiens
  source 1..16: mol_type = genomic DNA
gaagcgtgctgggccc

SEQ ID NO: 53445 - DNA, 27 bp, Homo sapiens
  source 1..27: mol_type = genomic DNA
gtcggtagagcatgggactcttaatcc

SEQ ID NO: 53446 - DNA, 31 bp, Homo sapiens; identical to SEQ ID NO: 20675
  source 1..31: mol_type = genomic DNA

SEQ ID NO: 53447 - DNA, 34 bp, Homo sapiens; identical to SEQ ID NO: 13076
  source 1..34: mol_type = genomic DNA

SEQ ID NO: 53448 - DNA, 35 bp, Homo sapiens; identical to SEQ ID NO: 4153
  source 1..35: mol_type = genomic DNA

SEQ ID NO: 53449 - DNA, 32 bp, Homo sapiens; identical to SEQ ID NO: 18195
  source 1..32: mol_type = genomic DNA

SEQ ID NO: 53450 - DNA, 19 bp, Homo sapiens
  source 1..19: mol_type = genomic DNA
cctgtcacgcgggagaccg

SEQ ID NO: 53451 - DNA, 16 bp, Homo sapiens
  source 1..16: mol_type = genomic DNA
agttctggtctccgga

SEQ ID NO: 53452 - DNA, 17 bp, Homo sapiens
  source 1..17: mol_type = genomic DNA
aggattcggcgctctca

SEQ ID NO: 53453 - DNA, 27 bp, Homo sapiens
  source 1..27: mol_type = genomic DNA
agtggttatcacgttcgcctcacacgc

SEQ ID NO: 53454 - DNA, 32 bp, Homo sapiens; identical to SEQ ID NO: 26041
  source 1..32: mol_type = genomic DNA

SEQ ID NO: 53455 - DNA, 34 bp, Homo sapiens; identical to SEQ ID NO: 12109
  source 1..34: mol_type = genomic DNA

SEQ ID NO: 53456 - DNA, 25 bp, Homo sapiens
  source 1..25: mol_type = genomic DNA
acatggtctagcggttaggattcct

SEQ ID NO: 53457 - DNA, 34 bp, Homo sapiens; identical to SEQ ID NO: 17923
  source 1..34: mol_type = genomic DNA

SEQ ID NO: 53458 - DNA, 25 bp, Homo sapiens
  source 1..25: mol_type = genomic DNA
tggtctaggggtatgattctcgctt

SEQ ID NO: 53459 - DNA, 22 bp, Homo sapiens
  source 1..22: mol_type = genomic DNA
ttggtctaggggtatgattctc

SEQ ID NO: 53460 - DNA, 18 bp, Homo sapiens
  source 1..18: mol_type = genomic DNA
aggatggccgagcggtct

SEQ ID NO: 53461 - DNA, 21 bp, Homo sapiens
  source 1..21: mol_type = genomic DNA
agcagagtggcgcagcggaag

SEQ ID NO: 53462 - DNA, 16 bp, Homo sapiens
  source 1..16: mol_type = genomic DNA
gccacgcgggaggccc

SEQ ID NO: 53463 - DNA, 17 bp, Homo sapiens
  source 1..17: mol_type = genomic DNA
cctgtcacgcgggagac

SEQ ID NO: 53464 - DNA, 22 bp, Homo sapiens
  source 1..22: mol_type = genomic DNA
tttccgtagtgtagtggtcatc

SEQ ID NO: 53465 - DNA, 36 bp, Homo sapiens; identical to SEQ ID NO: 27564
  source 1..36: mol_type = genomic DNA

SEQ ID NO: 53466 - DNA, 32 bp, Homo sapiens; identical to SEQ ID NO: 18449
  source 1..32: mol_type = genomic DNA

SEQ ID NO: 53467 - DNA, 34 bp, Homo sapiens; identical to SEQ ID NO: 27562
  source 1..34: mol_type = genomic DNA

SEQ ID NO: 53468 - DNA, 17 bp, Homo sapiens
  source 1..17: mol_type = genomic DNA
acatcagattgtgaatc

SEQ ID NO: 53469 - DNA, 38 bp, Homo sapiens; identical to SEQ ID NO: 22793
  source 1..38: mol_type = genomic DNA

SEQ ID NO: 53470 - DNA, 19 bp, Homo sapiens
  source 1..19: mol_type = genomic DNA
gtagaattctcgcctgcca

SEQ ID NO: 53471 - DNA, 16 bp, Homo sapiens
  source 1..16: mol_type = genomic DNA
ggccgtgatcgtatag

SEQ ID NO: 53472 - DNA, 16 bp, Homo sapiens
  source 1..16: mol_type = genomic DNA
gagtgaagcattggac

SEQ ID NO: 53473 - DNA, 20 bp, Homo sapiens
  source 1..20: mol_type = genomic DNA
ttcgagtctcggtggaacct

SEQ ID NO: 53474 - DNA, 39 bp, Homo sapiens; identical to SEQ ID NO: 808
  source 1..39: mol_type = genomic DNA

SEQ ID NO: 53475 - DNA, 18 bp, Homo sapiens
  source 1..18: mol_type = genomic DNA
ctgaatccagcgatccga

SEQ ID NO: 53476 - DNA, 18 bp, Homo sapiens
  source 1..18: mol_type = genomic DNA
gtcccacctggggtgcca

SEQ ID NO: 53477 - DNA, 17 bp, Homo sapiens
  source 1..17: mol_type = genomic DNA
ttaggattcggcgctct

SEQ ID NO: 53478 - DNA, 40 bp, Homo sapiens; identical to SEQ ID NO: 8315
  source 1..40: mol_type = genomic DNA

SEQ ID NO: 53479 - DNA, 17 bp, Homo sapiens
  source 1..17: mol_type = genomic DNA
ctgaatccagcgatccg

SEQ ID NO: 53480 - DNA, 20 bp, Homo sapiens
  source 1..20: mol_type = genomic DNA
atctaaaggtccctggttcg

SEQ ID NO: 53481 - DNA, 23 bp, Homo sapiens
  source 1..23: mol_type = genomic DNA
ccataacccagaggtcgatggat

SEQ ID NO: 53482 - DNA, 35 bp, Homo sapiens; identical to SEQ ID NO: 16852
  source 1..35: mol_type = genomic DNA

SEQ ID NO: 53483 - DNA, 22 bp, Homo sapiens
  source 1..22: mol_type = genomic DNA
caggatggccgagcggtctaag

SEQ ID NO: 53484 - DNA, 24 bp, Homo sapiens
  source 1..24: mol_type = genomic DNA
gttcttgtagttgaaatacaacga

SEQ ID NO: 53485 - DNA, 16 bp, Homo sapiens
  source 1..16: mol_type = genomic DNA
gtcaggatggccgagt

SEQ ID NO: 53486 - DNA, 24 bp, Homo sapiens
  source 1..24: mol_type = genomic DNA
caggatggccgagcggtctaaggc

SEQ ID NO: 53487 - DNA, 29 bp, Homo sapiens
  source 1..29: mol_type = genomic DNA
cctggtggtctagtggttaggattcggcg

SEQ ID NO: 53488 - DNA, 22 bp, Homo sapiens
  source 1..22: mol_type = genomic DNA
gggttcgattccccgacgggga

SEQ ID NO: 53489 - DNA, 21 bp, Homo sapiens
  source 1..21: mol_type = genomic DNA
gcttcaaacctgccggggctt

SEQ ID NO: 53490 - DNA, 17 bp, Homo sapiens
  source 1..17: mol_type = genomic DNA
actcaagttctggtctc

SEQ ID NO: 53491 - DNA, 16 bp, Homo sapiens
  source 1..16: mol_type = genomic DNA
ggtatgattctcgctt

SEQ ID NO: 53492 - DNA, 20 bp, Homo sapiens
  source 1..20: mol_type = genomic DNA
ctgtcacgcgggagaccggg

SEQ ID NO: 53493 - DNA, 26 bp, Homo sapiens
  source 1..26: mol_type = genomic DNA
agctcagtcggtagagcatgggactc

SEQ ID NO: 53494 - DNA, 30 bp, Homo sapiens; identical to SEQ ID NO: 18370
  source 1..30: mol_type = genomic DNA

SEQ ID NO: 53495 - DNA, 16 bp, Homo sapiens
  source 1..16: mol_type = genomic DNA
cggtagagcatgggac

SEQ ID NO: 53496 - DNA, 18 bp, Homo sapiens
  source 1..18: mol_type = genomic DNA
cggtagagcatgggactc

SEQ ID NO: 53497 - DNA, 36 bp, Homo sapiens; identical to SEQ ID NO: 19198
  source 1..36: mol_type = genomic DNA

SEQ ID NO: 53498 - DNA, 22 bp, Homo sapiens
  source 1..22: mol_type = genomic DNA
tgaatccagcgatccgagttca

SEQ ID NO: 53499 - DNA, 28 bp, Homo sapiens
  source 1..28: mol_type = genomic DNA
ggtaaaatggctgagtgaagcattggac

SEQ ID NO: 53500 - DNA, 18 bp, Homo sapiens
  source 1..18: mol_type = genomic DNA
tcagaaggctgcgtgttc

SEQ ID NO: 53501 - DNA, 27 bp, Homo sapiens
  source 1..27: mol_type = genomic DNA
ggccgtgatcgtatagtggttagtact

SEQ ID NO: 53502 - DNA, 27 bp, Homo sapiens
  source 1..27: mol_type = genomic DNA
gttcagtggtagaattctcgcctgcca

SEQ ID NO: 53503 - DNA, 31 bp, Homo sapiens; identical to SEQ ID NO: 20364
  source 1..31: mol_type = genomic DNA

SEQ ID NO: 53504 - DNA, 22 bp, Homo sapiens
  source 1..22: mol_type = genomic DNA
gtcaggatggccgagtggtcta

SEQ ID NO: 53505 - DNA, 27 bp, Homo sapiens
  source 1..27: mol_type = genomic DNA
tcgtggttgtagtccgtgcgagaatac

SEQ ID NO: 53506 - DNA, 18 bp, Homo sapiens
  source 1..18: mol_type = genomic DNA
gtcaggatggccgagtgg

SEQ ID NO: 53507 - DNA, 31 bp, Homo sapiens; identical to SEQ ID NO: 8714
  source 1..31: mol_type = genomic DNA

SEQ ID NO: 53508 - DNA, 23 bp, Homo sapiens
  source 1..23: mol_type = genomic DNA
ctgaatccagcgatccgagttca

SEQ ID NO: 53509 - DNA, 23 bp, Homo sapiens
  source 1..23: mol_type = genomic DNA
aagaactgctaactcatgccccc

SEQ ID NO: 53510 - DNA, 25 bp, Homo sapiens
  source 1..25: mol_type = genomic DNA
gtgtagtggttatcacgttcgcctc

SEQ ID NO: 53511 - DNA, 18 bp, Homo sapiens
  source 1..18: mol_type = genomic DNA
accaggatggccgagtgg

SEQ ID NO: 53512 - DNA, 22 bp, Homo sapiens
  source 1..22: mol_type = genomic DNA
tctgaatccagcgatccgagtt

SEQ ID NO: 53513 - DNA, 20 bp, Homo sapiens
  source 1..20: mol_type = genomic DNA
gtggttatcacgttcgcctc

SEQ ID NO: 53514 - DNA, 17 bp, Homo sapiens
  source 1..17: mol_type = genomic DNA
gtcggtagagcatggga

SEQ ID NO: 53515 - DNA, 36 bp, Homo sapiens; identical to SEQ ID NO: 11014
  source 1..36: mol_type = genomic DNA

SEQ ID NO: 53516 - DNA, 28 bp, Homo sapiens
  source 1..28: mol_type = genomic DNA
ccgtagtgtagtggtcatcacgttcgcc

SEQ ID NO: 53517 - DNA, 23 bp, Homo sapiens
  source 1..23: mol_type = genomic DNA
ccggatagctcagtcggtagagc

SEQ ID NO: 53518 - DNA, 33 bp, Homo sapiens; identical to SEQ ID NO: 13256
  source 1..33: mol_type = genomic DNA

SEQ ID NO: 53519 - DNA, 32 bp, Homo sapiens; identical to SEQ ID NO: 17958
  source 1..32: mol_type = genomic DNA

SEQ ID NO: 53520 - DNA, 22 bp, Homo sapiens
  source 1..22: mol_type = genomic DNA
cggctagctcagtcggtagagc

SEQ ID NO: 53521 - DNA, 36 bp, Homo sapiens; identical to SEQ ID NO: 16838
  source 1..36: mol_type = genomic DNA

SEQ ID NO: 53522 - DNA, 31 bp, Homo sapiens; identical to SEQ ID NO: 19440
  source 1..31: mol_type = genomic DNA

SEQ ID NO: 53523 - DNA, 29 bp, Homo sapiens
  source 1..29: mol_type = genomic DNA
ggctagctcagtcggtagagcatgggact

SEQ ID NO: 53524 - DNA, 18 bp, Homo sapiens
  source 1..18: mol_type = genomic DNA
tcggtagagcatgggact

SEQ ID NO: 53525 - DNA, 28 bp, Homo sapiens
  source 1..28: mol_type = genomic DNA
ccggctagctcagtcggtagagcatggg

SEQ ID NO: 53526 - DNA, 31 bp, Homo sapiens; identical to SEQ ID NO: 25477
  source 1..31: mol_type = genomic DNA

SEQ ID NO: 53527 - DNA, 31 bp, Homo sapiens; identical to SEQ ID NO: 13558
  source 1..31: mol_type = genomic DNA

SEQ ID NO: 53528 - DNA, 31 bp, Homo sapiens; identical to SEQ ID NO: 2233
  source 1..31: mol_type = genomic DNA

SEQ ID NO: 53529 - DNA, 19 bp, Homo sapiens
  source 1..19: mol_type = genomic DNA
tcggtagagcatgggactc

SEQ ID NO: 53530 - DNA, 31 bp, Homo sapiens; identical to SEQ ID NO: 15584
  source 1..31: mol_type = genomic DNA

SEQ ID NO: 53531 - DNA, 31 bp, Homo sapiens; identical to SEQ ID NO: 11180
  source 1..31: mol_type = genomic DNA

SEQ ID NO: 53532 - DNA, 36 bp, Homo sapiens; identical to SEQ ID NO: 16853
  source 1..36: mol_type = genomic DNA

SEQ ID NO: 53533 - DNA, 33 bp, Homo sapiens; identical to SEQ ID NO: 22493
  source 1..33: mol_type = genomic DNA

SEQ ID NO: 53534 - DNA, 33 bp, Homo sapiens; identical to SEQ ID NO: 25533
  source 1..33: mol_type = genomic DNA

SEQ ID NO: 53535 - DNA, 20 bp, Homo sapiens
  source 1..20: mol_type = genomic DNA
gtcggtagagcatgggactc

SEQ ID NO: 53536 - DNA, 32 bp, Homo sapiens; identical to SEQ ID NO: 27988
  source 1..32: mol_type = genomic DNA

SEQ ID NO: 53537 - DNA, 18 bp, Homo sapiens
  source 1..18: mol_type = genomic DNA
gttaggattcggcgctct

SEQ ID NO: 53538 - DNA, 22 bp, Homo sapiens
  source 1..22: mol_type = genomic DNA
ccggatagctcagtcggtagag

SEQ ID NO: 53539 - DNA, 26 bp, Homo sapiens
  source 1..26: mol_type = genomic DNA
gccgtgatcgtatagtggttagtact

SEQ ID NO: 53540 - DNA, 22 bp, Homo sapiens
  source 1..22: mol_type = genomic DNA
agtggtagaattctcgcctgcc

SEQ ID NO: 53541 - DNA, 29 bp, Homo sapiens
  source 1..29: mol_type = genomic DNA
cagagtggcgcagcggaagcgtgctgggc

SEQ ID NO: 53542 - DNA, 30 bp, Homo sapiens; identical to SEQ ID NO: 11179
  source 1..30: mol_type = genomic DNA

SEQ ID NO: 53543 - DNA, 21 bp, Homo sapiens
  source 1..21: mol_type = genomic DNA
tcaaatcccggacgagccccc

SEQ ID NO: 53544 - DNA, 26 bp, Homo sapiens
  source 1..26: mol_type = genomic DNA
tcggtagagcatgggactcttaatcc

SEQ ID NO: 53545 - DNA, 19 bp, Homo sapiens
  source 1..19: mol_type = genomic DNA
gtcggtagagcatgggact

SEQ ID NO: 53546 - DNA, 25 bp, Homo sapiens
  source 1..25: mol_type = genomic DNA
gtggcgcagcggaagcgtgctgggc

SEQ ID NO: 53547 - DNA, 24 bp, Homo sapiens
  source 1..24: mol_type = genomic DNA
gtctagtggttaggattcggcgct

SEQ ID NO: 53548 - DNA, 29 bp, Homo sapiens
  source 1..29: mol_type = genomic DNA
gtttccgtagtgtagcggttatcacattc

SEQ ID NO: 53549 - DNA, 16 bp, Homo sapiens
  source 1..16: mol_type = genomic DNA
atggtagagcgctcgc

SEQ ID NO: 53550 - DNA, 28 bp, Homo sapiens
  source 1..28: mol_type = genomic DNA
ggtggagttaaagactttttctctgacc

SEQ ID NO: 53551 - DNA, 25 bp, Homo sapiens
  source 1..25: mol_type = genomic DNA
gaaaaagtcatggaggccatggggt

SEQ ID NO: 53552 - DNA, 20 bp, Homo sapiens
  source 1..20: mol_type = genomic DNA
tcgaatcccatcctcgtcgc

SEQ ID NO: 53553 - DNA, 21 bp, Homo sapiens
  source 1..21: mol_type = genomic DNA
tctgaatccagcgatccgagt

SEQ ID NO: 53554 - DNA, 19 bp, Homo sapiens
  source 1..19: mol_type = genomic DNA
gaaaatgtttagacgggct

SEQ ID NO: 53555 - DNA, 29 bp, Homo sapiens
  source 1..29: mol_type = genomic DNA
tggtggagttaaagactttttctctgacc

SEQ ID NO: 53556 - DNA, 18 bp, Homo sapiens
  source 1..18: mol_type = genomic DNA
cattcttgcgacccgggt

SEQ ID NO: 53557 - DNA, 22 bp, Homo sapiens
  source 1..22: mol_type = genomic DNA
ctgaatccagcgatccgagttc

SEQ ID NO: 53558 - DNA, 29 bp, Homo sapiens
  source 1..29: mol_type = genomic DNA
atgttggttatacccttcccgtactacca

SEQ ID NO: 53559 - DNA, 24 bp, Homo sapiens
  source 1..24: mol_type = genomic DNA
agctccgaggtgattttcatattg

SEQ ID NO: 53560 - DNA, 18 bp, Homo sapiens
  source 1..18: mol_type = genomic DNA
actcaagttctggtctcc

SEQ ID NO: 53561 - DNA, 16 bp, Homo sapiens
  source 1..16: mol_type = genomic DNA
ctctgtggaacctcca

SEQ ID NO: 53562 - DNA, 19 bp, Homo sapiens
  source 1..19: mol_type = genomic DNA
cagtcggtagagcatggga

SEQ ID NO: 53563 - DNA, 28 bp, Homo sapiens
  source 1..28: mol_type = genomic DNA
tggtggagttaaagactttttctctgac

SEQ ID NO: 53564 - DNA, 17 bp, Homo sapiens
  source 1..17: mol_type = genomic DNA
tagaattctcgcctgcc

SEQ ID NO: 53565 - DNA, 16 bp, Homo sapiens
  source 1..16: mol_type = genomic DNA
ggtagaattctcgcct

SEQ ID NO: 53566 - DNA, 21 bp, Homo sapiens
  source 1..21: mol_type = genomic DNA
ctgaatccagcgatccgagtt

SEQ ID NO: 53567 - DNA, 23 bp, Homo sapiens
  source 1..23: mol_type = genomic DNA
actttgaatccagcgatccgagt

SEQ ID NO: 53568 - DNA, 21 bp, Homo sapiens
  source 1..21: mol_type = genomic DNA
gtggtagaattctcgcctgcc

SEQ ID NO: 53569 - DNA, 25 bp, Homo sapiens
  source 1..25: mol_type = genomic DNA
tggtctagtggttaggattcggcgc

SEQ ID NO: 53570 - DNA, 18 bp, Homo sapiens
  source 1..18: mol_type = genomic DNA
gtcggtagagcatgggac

SEQ ID NO: 53571 - DNA, 27 bp, Homo sapiens
  source 1..27: mol_type = genomic DNA
ggtggagttaaagactttttctctgac

SEQ ID NO: 53572 - DNA, 16 bp, Homo sapiens
  source 1..16: mol_type = genomic DNA
ggttaggattcggcgc

SEQ ID NO: 53573 - DNA, 23 bp, Homo sapiens
  source 1..23: mol_type = genomic DNA
ctttgaatccagcgatccgagtt

SEQ ID NO: 53574 - DNA, 27 bp, Homo sapiens
  source 1..27: mol_type = genomic DNA
gagtggcgcagcggaagcgtgctgggc

SEQ ID NO: 53575 - DNA, 24 bp, Homo sapiens
  source 1..24: mol_type = genomic DNA
ttggtctaggggtatgattctcgc

SEQ ID NO: 53576 - DNA, 27 bp, Homo sapiens
  source 1..27: mol_type = genomic DNA
atcgtatagtggttagtactctgcgtt

SEQ ID NO: 53577 - DNA, 17 bp, Homo sapiens
  source 1..17: mol_type = genomic DNA
tcggtagagcatgggac

SEQ ID NO: 53578 - DNA, 18 bp, Homo sapiens
  source 1..18: mol_type = genomic DNA
ctgccacgcgggaggccc

SEQ ID NO: 53579 - DNA, 22 bp, Homo sapiens
  source 1..22: mol_type = genomic DNA
ttgtagtccgtgcgagaatacc

SEQ ID NO: 53580 - DNA, 17 bp, Homo sapiens
  source 1..17: mol_type = genomic DNA
ctcaagttctggtctcc

SEQ ID NO: 53581 - DNA, 28 bp, Homo sapiens
  source 1..28: mol_type = genomic DNA
ttggtggttcagtggtagaattctcgcc

SEQ ID NO: 53582 - DNA, 22 bp, Homo sapiens
  source 1..22: mol_type = genomic DNA
ttgtaaaccaggggtcgcgagt

SEQ ID NO: 53583 - DNA, 18 bp, Homo sapiens
  source 1..18: mol_type = genomic DNA
gtggtagagcatttgact

SEQ ID NO: 53584 - DNA, 24 bp, Homo sapiens
  source 1..24: mol_type = genomic DNA
gtgtagtggttatcacgttcgcct

SEQ ID NO: 53585 - DNA, 19 bp, Homo sapiens
  source 1..19: mol_type = genomic DNA
agtggtagagcatttgact

SEQ ID NO: 53586 - DNA, 21 bp, Homo sapiens
  source 1..21: mol_type = genomic DNA
tcgaatcccatcctcgtcgcc

SEQ ID NO: 53587 - DNA, 23 bp, Homo sapiens
  source 1..23: mol_type = genomic DNA
gtttccgtagtgtagcggttatc

SEQ ID NO: 53588 - DNA, 19 bp, Homo sapiens
  source 1..19: mol_type = genomic DNA
agtcggtagagcatgggac

SEQ ID NO: 53589 - DNA, 19 bp, Homo sapiens
  source 1..19: mol_type = genomic DNA
actctggactctgaatcca

SEQ ID NO: 53590 - DNA, 30 bp, Homo sapiens; identical to SEQ ID NO: 11496
  source 1..30: mol_type = genomic DNA

SEQ ID NO: 53591 - DNA, 20 bp, Homo sapiens
  source 1..20: mol_type = genomic DNA
gagaaagctcacaagaactg

SEQ ID NO: 53592 - DNA, 17 bp, Homo sapiens
  source 1..17: mol_type = genomic DNA
gtttccgtagtgtagcg

SEQ ID NO: 53593 - DNA, 27 bp, Homo sapiens
  source 1..27: mol_type = genomic DNA
ggtggttcagtggtagaattctcgcct

SEQ ID NO: 53594 - DNA, 17 bp, Homo sapiens
  source 1..17: mol_type = genomic DNA
gtcaggatggccgagcg

SEQ ID NO: 53595 - DNA, 25 bp, Homo sapiens
  source 1..25: mol_type = genomic DNA
tccctggtggtctagtggttaggat

SEQ ID NO: 53596 - DNA, 16 bp, Homo sapiens
  source 1..16: mol_type = genomic DNA
gtcaggatggccgagc

SEQ ID NO: 53597 - DNA, 27 bp, Homo sapiens
  source 1..27: mol_type = genomic DNA
gtggagttaaagactttttctctgacc

SEQ ID NO: 53598 - DNA, 21 bp, Homo sapiens
  source 1..21: mol_type = genomic DNA
agcactctggactctgaatcc

SEQ ID NO: 53599 - DNA, 17 bp, Homo sapiens
  source 1..17: mol_type = genomic DNA
gttaagatggcagagcc

SEQ ID NO: 53600 - DNA, 25 bp, Homo sapiens
  source 1..25: mol_type = genomic DNA
ggagttaaagactttttctctgacc

SEQ ID NO: 53601 - DNA, 21 bp, Homo sapiens
  source 1..21: mol_type = genomic DNA
tatagtggttagtactctgcg

SEQ ID NO: 53602 - DNA, 20 bp, Homo sapiens
  source 1..20: mol_type = genomic DNA
cagtcggtagagcatgggac

SEQ ID NO: 53603 - DNA, 20 bp, Homo sapiens
  source 1..20: mol_type = genomic DNA
cagtggtagagcatttgact

SEQ ID NO: 53604 - DNA, 21 bp, Homo sapiens
  source 1..21: mol_type = genomic DNA
tcagtcggtagagcatgggac

SEQ ID NO: 53605 - DNA, 16 bp, Homo sapiens
  source 1..16: mol_type = genomic DNA
acttgaccgctctgac

SEQ ID NO: 53606 - DNA, 20 bp, Homo sapiens
  source 1..20: mol_type = genomic DNA
ctgaatccagcgatccgagt

SEQ ID NO: 53607 - DNA, 21 bp, Homo sapiens
  source 1..21: mol_type = genomic DNA
tcagtcggtagagcatcagac

SEQ ID NO: 53608 - DNA, 20 bp, Homo sapiens
  source 1..20: mol_type = genomic DNA
agcactctggactctgaatc

SEQ ID NO: 53609 - DNA, 18 bp, Homo sapiens
  source 1..18: mol_type = genomic DNA
gttaagatggcagagccc

SEQ ID NO: 53610 - DNA, 18 bp, Homo sapiens
  source 1..18: mol_type = genomic DNA
gtcaggatggccgagcgg

SEQ ID NO: 53611 - DNA, 24 bp, Homo sapiens
  source 1..24: mol_type = genomic DNA
gtcaggatggccgagcggtctaag

SEQ ID NO: 53612 - DNA, 21 bp, Homo sapiens
  source 1..21: mol_type = genomic DNA
gtcaggatggccgagcggtct

SEQ ID NO: 53613 - DNA, 17 bp, Homo sapiens
  source 1..17: mol_type = genomic DNA
cctctttacagtgacca

SEQ ID NO: 53614 - DNA, 20 bp, Homo sapiens
  source 1..20: mol_type = genomic DNA
gtcaggatggccgagcggtc

SEQ ID NO: 53615 - DNA, 22 bp, Homo sapiens
  source 1..22: mol_type = genomic DNA
gtcaggatggccgagcggtcta

SEQ ID NO: 53616 - DNA, 22 bp, Homo sapiens
  source 1..22: mol_type = genomic DNA
ctttgaatccagcgatccgagt

SEQ ID NO: 53617 - DNA, 25 bp, Homo sapiens
  source 1..25: mol_type = genomic DNA
cgtatagtggttagtactctgcgtt

SEQ ID NO: 53618 - DNA, 24 bp, Homo sapiens
  source 1..24: mol_type = genomic DNA
gcattggtggttcagtggtagaat

SEQ ID NO: 53619 - DNA, 22 bp, Homo sapiens
  source 1..22: mol_type = genomic DNA
ttcagtggtagaattctcgcct

SEQ ID NO: 53620 - DNA, 19 bp, Homo sapiens
  source 1..19: mol_type = genomic DNA
cagtggtagaattctcgcc

SEQ ID NO: 53621 - DNA, 22 bp, Homo sapiens
  source 1..22: mol_type = genomic DNA
tcgaaaccgggcggaaacacca

SEQ ID NO: 53622 - DNA, 26 bp, Homo sapiens
  source 1..26: mol_type = genomic DNA
gagaaagctcacaagaactgctaact

SEQ ID NO: 53623 - DNA, 22 bp, Homo sapiens
  source 1..22: mol_type = genomic DNA
gagaaagctcacaagaactgct

SEQ ID NO: 53624 - DNA, 18 bp, Homo sapiens
  source 1..18: mol_type = genomic DNA
ggctcgttggtctagggg

SEQ ID NO: 53625 - DNA, 18 bp, Homo sapiens
  source 1..18: mol_type = genomic DNA
cagtggtagaattctcgc

SEQ ID NO: 53626 - DNA, 22 bp, Homo sapiens
  source 1..22: mol_type = genomic DNA
tcgaatcccatcctcgtcgcca

SEQ ID NO: 53627 - DNA, 20 bp, Homo sapiens
  source 1..20: mol_type = genomic DNA
cagtggtagaattctcgcct

SEQ ID NO: 53628 - DNA, 22 bp, Homo sapiens
  source 1..22: mol_type = genomic DNA
gttaaagactttttctctgacc

SEQ ID NO: 53629 - DNA, 26 bp, Homo sapiens
  source 1..26: mol_type = genomic DNA
gtcaggatggccgagcggtctaaggc

SEQ ID NO: 53630 - DNA, 23 bp, Homo sapiens
  source 1..23: mol_type = genomic DNA
tcagtggtagaattctcgcctgc

SEQ ID NO: 53631 - DNA, 21 bp, Homo sapiens
  source 1..21: mol_type = genomic DNA
tcagtggtagaattctcgcct

SEQ ID NO: 53632 - DNA, 23 bp, Homo sapiens
  source 1..23: mol_type = genomic DNA
gtttccgtagtgtagtggtcatc

SEQ ID NO: 53633 - DNA, 25 bp, Homo sapiens
  source 1..25: mol_type = genomic DNA
gtagtcgtggccgagtggttaaggc

SEQ ID NO: 53634 - DNA, 23 bp, Homo sapiens
  source 1..23: mol_type = genomic DNA
gttcagtggtagaattctcgcct

SEQ ID NO: 53635 - DNA, 23 bp, Homo sapiens
  source 1..23: mol_type = genomic DNA
agttaaagactttttctctgacc

SEQ ID NO: 53636 - DNA, 25 bp, Homo sapiens
  source 1..25: mol_type = genomic DNA
ggttcgattccccgacggggagcca

SEQ ID NO: 53637 - DNA, 18 bp, Homo sapiens
  source 1..18: mol_type = genomic DNA
tggttagtactctgcgtt

SEQ ID NO: 53638 - DNA, 25 bp, Homo sapiens
  source 1..25: mol_type = genomic DNA
gtcaggatggccgagcggtctaagg

SEQ ID NO: 53639 - DNA, 17 bp, Homo sapiens
  source 1..17: mol_type = genomic DNA
agactttttctctgacc

SEQ ID NO: 53640 - DNA, 19 bp, Homo sapiens
  source 1..19: mol_type = genomic DNA
tggttagtactctgcgttg

SEQ ID NO: 53641 - DNA, 18 bp, Homo sapiens
  source 1..18: mol_type = genomic DNA
aagactttttctctgacc

SEQ ID NO: 53642 - DNA, 19 bp, Homo sapiens
  source 1..19: mol_type = genomic DNA
aaagactttttctctgacc

SEQ ID NO: 53643 - DNA, 18 bp, Homo sapiens
  source 1..18: mol_type = genomic DNA
ggggatgtagctcagtgg

SEQ ID NO: 53644 - DNA, 20 bp, Homo sapiens
  source 1..20: mol_type = genomic DNA
taaagactttttctctgacc

SEQ ID NO: 53645 - DNA, 18 bp, Homo sapiens
  source 1..18: mol_type = genomic DNA
cgaaaccgggcggaaaca

SEQ ID NO: 53646 - DNA, 17 bp, Homo sapiens
  source 1..17: mol_type = genomic DNA
aaaccgggcggaaacac

SEQ ID NO: 53647 - DNA, 37 bp, Homo sapiens; identical to SEQ ID NO: 26686
  source 1..37: mol_type = genomic DNA

SEQ ID NO: 53648 - DNA, 36 bp, Homo sapiens; identical to SEQ ID NO: 24647
  source 1..36: mol_type = genomic DNA

SEQ ID NO: 53649 - DNA, 33 bp, Homo sapiens; identical to SEQ ID NO: 1379
  source 1..33: mol_type = genomic DNA

SEQ ID NO: 53650 - DNA, 43 bp, Homo sapiens; identical to SEQ ID NO: 7621
  source 1..43: mol_type = genomic DNA

SEQ ID NO: 53651 - DNA, 18 bp, Homo sapiens
  source 1..18: mol_type = genomic DNA
gaaaccgggcggaaacac

SEQ ID NO: 53652 - DNA, 23 bp, Homo sapiens
  source 1..23: mol_type = genomic DNA
ggttcgaatccgagtcacggcac

SEQ ID NO: 53653 - DNA, 38 bp, Homo sapiens; identical to SEQ ID NO: 12444
  source 1..38: mol_type = genomic DNA

SEQ ID NO: 53654 - DNA, 36 bp, Homo sapiens; identical to SEQ ID NO: 29983
  source 1..36: mol_type = genomic DNA

SEQ ID NO: 53655 - DNA, 19 bp, Homo sapiens
  source 1..19: mol_type = genomic DNA
caatcccgggtttcggcac

SEQ ID NO: 53656 - DNA, 33 bp, Homo sapiens; identical to SEQ ID NO: 1674
  source 1..33: mol_type = genomic DNA

SEQ ID NO: 53657 - DNA, 17 bp, Homo sapiens
  source 1..17: mol_type = genomic DNA
gaaaccgggcggaaaca

SEQ ID NO: 53658 - DNA, 37 bp, Homo sapiens; identical to SEQ ID NO: 9966
  source 1..37: mol_type = genomic DNA

SEQ ID NO: 53659 - DNA, 38 bp, Homo sapiens; identical to SEQ ID NO: 9967
  source 1..38: mol_type = genomic DNA

SEQ ID NO: 53660 - DNA, 35 bp, Homo sapiens; identical to SEQ ID NO: 8007
  source 1..35: mol_type = genomic DNA

SEQ ID NO: 53661 - DNA, 19 bp, Homo sapiens
  source 1..19: mol_type = genomic DNA
cgattcccggccaacgcac

SEQ ID NO: 53662 - DNA, 37 bp, Homo sapiens; identical to SEQ ID NO: 6717
  source 1..37: mol_type = genomic DNA

SEQ ID NO: 53663 - DNA, 34 bp, Homo sapiens; identical to SEQ ID NO: 29342
  source 1..34: mol_type = genomic DNA

SEQ ID NO: 53664 - DNA, 23 bp, Homo sapiens
  source 1..23: mol_type = genomic DNA
ggttcgaatccggctcggaggac

SEQ ID NO: 53665 - DNA, 33 bp, Homo sapiens; identical to SEQ ID NO: 24144
  source 1..33: mol_type = genomic DNA

SEQ ID NO: 53666 - DNA, 31 bp, Homo sapiens; identical to SEQ ID NO: 2705
  source 1..31: mol_type = genomic DNA

SEQ ID NO: 53667 - DNA, 35 bp, Homo sapiens; identical to SEQ ID NO: 7816
  source 1..35: mol_type = genomic DNA

SEQ ID NO: 53668 - DNA, 33 bp, Homo sapiens; identical to SEQ ID NO: 24136
  source 1..33: mol_type = genomic DNA

SEQ ID NO: 53669 - DNA, 35 bp, Homo sapiens; identical to SEQ ID NO: 8582
  source 1..35: mol_type = genomic DNA

SEQ ID NO: 53670 - DNA, 31 bp, Homo sapiens; identical to SEQ ID NO: 5138
  source 1..31: mol_type = genomic DNA

SEQ ID NO: 53671 - DNA, 37 bp, Homo sapiens; identical to SEQ ID NO: 8107
  source 1..37: mol_type = genomic DNA

SEQ ID NO: 53672 - DNA, 16 bp, Homo sapiens
  source 1..16: mol_type = genomic DNA
aatctcggtgggacct

SEQ ID NO: 53673 - DNA, 17 bp, Homo sapiens
  source 1..17: mol_type = genomic DNA
cgaaaccgggcggaaac

SEQ ID NO: 53674 - DNA, 36 bp, Homo sapiens; identical to SEQ ID NO: 24723
  source 1..36: mol_type = genomic DNA

SEQ ID NO: 53675 - DNA, 35 bp, Homo sapiens; identical to SEQ ID NO: 16416
  source 1..35: mol_type = genomic DNA

SEQ ID NO: 53676 - DNA, 18 bp, Homo sapiens
  source 1..18: mol_type = genomic DNA
aaaccgggcagaagcacc

SEQ ID NO: 53677 - DNA, 30 bp, Homo sapiens; identical to SEQ ID NO: 5130
  source 1..30: mol_type = genomic DNA

SEQ ID NO: 53678 - DNA, 20 bp, Homo sapiens
  source 1..20: mol_type = genomic DNA
cgatccccgtacgggccacc

SEQ ID NO: 53679 - DNA, 33 bp, Homo sapiens; identical to SEQ ID NO: 1664
  source 1..33: mol_type = genomic DNA

SEQ ID NO: 53680 - DNA, 18 bp, Homo sapiens
  source 1..18: mol_type = genomic DNA
gaaaccgggcagaagcac

SEQ ID NO: 53681 - DNA, 35 bp, Homo sapiens; identical to SEQ ID NO: 24649
  source 1..35: mol_type = genomic DNA

SEQ ID NO: 53682 - DNA, 36 bp, Homo sapiens; identical to SEQ ID NO: 8583
  source 1..36: mol_type = genomic DNA

SEQ ID NO: 53683 - DNA, 35 bp, Homo sapiens; identical to SEQ ID NO: 30250
  source 1..35: mol_type = genomic DNA

SEQ ID NO: 53684 - DNA, 35 bp, Homo sapiens; identical to SEQ ID NO: 10938
  source 1..35: mol_type = genomic DNA

SEQ ID NO: 53685 - DNA, 35 bp, Homo sapiens; identical to SEQ ID NO: 24646
  source 1..35: mol_type = genomic DNA

SEQ ID NO: 53686 - DNA, 44 bp, Homo sapiens; identical to SEQ ID NO: 13630
  source 1..44: mol_type = genomic DNA

SEQ ID NO: 53687 - DNA, 43 bp, Homo sapiens; identical to SEQ ID NO: 9261
  source 1..43: mol_type = genomic DNA

SEQ ID NO: 53688 - DNA, 32 bp, Homo sapiens; identical to SEQ ID NO: 1378
  source 1..32: mol_type = genomic DNA

SEQ ID NO: 53689 - DNA, 28 bp, Homo sapiens
  source 1..28: mol_type = genomic DNA
gcgtgggttcgaatcccatcctcgtcgc

SEQ ID NO: 53690 - DNA, 19 bp, Homo sapiens
  source 1..19: mol_type = genomic DNA
tcaaatctcggtgggacct

SEQ ID NO: 53691 - DNA, 40 bp, Homo sapiens; identical to SEQ ID NO: 8340
  source 1..40: mol_type = genomic DNA

SEQ ID NO: 53692 - DNA, 35 bp, Homo sapiens; identical to SEQ ID NO: 3787
  source 1..35: mol_type = genomic DNA

SEQ ID NO: 53693 - DNA, 36 bp, Homo sapiens; identical to SEQ ID NO: 20597
  source 1..36: mol_type = genomic DNA

SEQ ID NO: 53694 - DNA, 39 bp, Homo sapiens; identical to SEQ ID NO: 36385
  source 1..39: mol_type = genomic DNA

SEQ ID NO: 53695 - DNA, 37 bp, Homo sapiens; identical to SEQ ID NO: 36634
  source 1..37: mol_type = genomic DNA

SEQ ID NO: 53696 - DNA, 31 bp, Homo sapiens; identical to SEQ ID NO: 20118
  source 1..31: mol_type = genomic DNA

SEQ ID NO: 53697 - DNA, 35 bp, Homo sapiens; identical to SEQ ID NO: 24722
  source 1..35: mol_type = genomic DNA

SEQ ID NO: 53698 - DNA, 33 bp, Homo sapiens; identical to SEQ ID NO: 37605
  source 1..33: mol_type = genomic DNA

SEQ ID NO: 53699 - DNA, 34 bp, Homo sapiens; identical to SEQ ID NO: 8589
  source 1..34: mol_type = genomic DNA

SEQ ID NO: 53700 - DNA, 33 bp, Homo sapiens; identical to SEQ ID NO: 1576
  source 1..33: mol_type = genomic DNA

SEQ ID NO: 53701 - DNA, 37 bp, Homo sapiens; identical to SEQ ID NO: 6703
  source 1..37: mol_type = genomic DNA

SEQ ID NO: 53702 - DNA, 31 bp, Homo sapiens; identical to SEQ ID NO: 8397
  source 1..31: mol_type = genomic DNA

SEQ ID NO: 53703 - DNA, 18 bp, Homo sapiens
  source 1..18: mol_type = genomic DNA
atcccgggcggaaacacc

SEQ ID NO: 53704 - DNA, 43 bp, Homo sapiens; identical to SEQ ID NO: 36499
  source 1..43: mol_type = genomic DNA

SEQ ID NO: 53705 - DNA, 32 bp, Homo sapiens; identical to SEQ ID NO: 1371
  source 1..32: mol_type = genomic DNA

SEQ ID NO: 53706 - DNA, 30 bp, Homo sapiens; identical to SEQ ID NO: 16772
  source 1..30: mol_type = genomic DNA

SEQ ID NO: 53707 - DNA, 29 bp, Homo sapiens
  source 1..29: mol_type = genomic DNA
gtcgctggttcgaatccggctcgaaggac

SEQ ID NO: 53708 - DNA, 44 bp, Homo sapiens; identical to SEQ ID NO: 10204
  source 1..44: mol_type = genomic DNA

SEQ ID NO: 53709 - DNA, 35 bp, Homo sapiens; identical to SEQ ID NO: 29703
  source 1..35: mol_type = genomic DNA

SEQ ID NO: 53710 - DNA, 29 bp, Homo sapiens
  source 1..29: mol_type = genomic DNA
gatccgagttcaaatctcggtgggacctc

SEQ ID NO: 53711 - DNA, 34 bp, Homo sapiens; identical to SEQ ID NO: 8006
  source 1..34: mol_type = genomic DNA

SEQ ID NO: 53712 - DNA, 33 bp, Homo sapiens; identical to SEQ ID NO: 29341
  source 1..33: mol_type = genomic DNA

SEQ ID NO: 53713 - DNA, 35 bp, Homo sapiens; identical to SEQ ID NO: 2161
  source 1..35: mol_type = genomic DNA

SEQ ID NO: 53714 - DNA, 18 bp, Homo sapiens
  source 1..18: mol_type = genomic DNA
attcccgggcggcgcacc

SEQ ID NO: 53715 - DNA, 25 bp, Homo sapiens
  source 1..25: mol_type = genomic DNA
gtgttcaagtcacgtcggggtcacc

SEQ ID NO: 53716 - DNA, 31 bp, Homo sapiens; identical to SEQ ID NO: 19388
  source 1..31: mol_type = genomic DNA

SEQ ID NO: 53717 - DNA, 32 bp, Homo sapiens; identical to SEQ ID NO: 5171
  source 1..32: mol_type = genomic DNA

SEQ ID NO: 53718 - DNA, 17 bp, Homo sapiens
  source 1..17: mol_type = genomic DNA
atcccgggcggaaacac

SEQ ID NO: 53719 - DNA, 36 bp, Homo sapiens; identical to SEQ ID NO: 42660
  source 1..36: mol_type = genomic DNA

SEQ ID NO: 53720 - DNA, 25 bp, Homo sapiens
  source 1..25: mol_type = genomic DNA
cgggttcgattcccgggcggcgcac

SEQ ID NO: 53721 - DNA, 32 bp, Homo sapiens; identical to SEQ ID NO: 1634
  source 1..32: mol_type = genomic DNA

SEQ ID NO: 53722 - DNA, 42 bp, Homo sapiens; identical to SEQ ID NO: 9260
  source 1..42: mol_type = genomic DNA

SEQ ID NO: 53723 - DNA, 35 bp, Homo sapiens; identical to SEQ ID NO: 26765
  source 1..35: mol_type = genomic DNA

SEQ ID NO: 53724 - DNA, 34 bp, Homo sapiens; identical to SEQ ID NO: 15557
  source 1..34: mol_type = genomic DNA

SEQ ID NO: 53725 - DNA, 20 bp, Homo sapiens
  source 1..20: mol_type = genomic DNA
tcgatccccgtacgggccac

SEQ ID NO: 53726 - DNA, 27 bp, Homo sapiens
  source 1..27: mol_type = genomic DNA
aggcggcccgggttcgactcccggtgt

SEQ ID NO: 53727 - DNA, 41 bp, Homo sapiens; identical to SEQ ID NO: 36336
  source 1..41: mol_type = genomic DNA

SEQ ID NO: 53728 - DNA, 38 bp, Homo sapiens; identical to SEQ ID NO: 37914
  source 1..38: mol_type = genomic DNA

SEQ ID NO: 53729 - DNA, 43 bp, Homo sapiens; identical to SEQ ID NO: 41033
  source 1..43: mol_type = genomic DNA

SEQ ID NO: 53730 - DNA, 35 bp, Homo sapiens; identical to SEQ ID NO: 33804
  source 1..35: mol_type = genomic DNA

SEQ ID NO: 53731 - DNA, 41 bp, Homo sapiens; identical to SEQ ID NO: 26819
  source 1..41: mol_type = genomic DNA

SEQ ID NO: 53732 - DNA, 36 bp, Homo sapiens; identical to SEQ ID NO: 918
  source 1..36: mol_type = genomic DNA

SEQ ID NO: 53733 - DNA, 33 bp, Homo sapiens; identical to SEQ ID NO: 444
  source 1..33: mol_type = genomic DNA

SEQ ID NO: 53734 - DNA, 30 bp, Homo sapiens; identical to SEQ ID NO: 3185
  source 1..30: mol_type = genomic DNA

SEQ ID NO: 53735 - DNA, 30 bp, Homo sapiens; identical to SEQ ID NO: 1632
  source 1..30: mol_type = genomic DNA

SEQ ID NO: 53736 - DNA, 27 bp, Homo sapiens
  source 1..27: mol_type = genomic DNA
tatggtctagcggttaggattcctggt

SEQ ID NO: 53737 - DNA, 36 bp, Homo sapiens; identical to SEQ ID NO: 26864
  source 1..36: mol_type = genomic DNA

SEQ ID NO: 53738 - DNA, 34 bp, Homo sapiens; identical to SEQ ID NO: 8551
  source 1..34: mol_type = genomic DNA

SEQ ID NO: 53739 - DNA, 35 bp, Homo sapiens; identical to SEQ ID NO: 11540
  source 1..35: mol_type = genomic DNA

SEQ ID NO: 53740 - DNA, 37 bp, Homo sapiens; identical to SEQ ID NO: 14763
  source 1..37: mol_type = genomic DNA

SEQ ID NO: 53741 - DNA, 19 bp, Homo sapiens
  source 1..19: mol_type = genomic DNA
gaaaccgggcagaagcacc

SEQ ID NO: 53742 - DNA, 36 bp, Homo sapiens; identical to SEQ ID NO: 24532
  source 1..36: mol_type = genomic DNA

SEQ ID NO: 53743 - DNA, 37 bp, Homo sapiens; identical to SEQ ID NO: 12157
  source 1..37: mol_type = genomic DNA

SEQ ID NO: 53744 - DNA, 25 bp, Homo sapiens
  source 1..25: mol_type = genomic DNA
cgtgttcgaatcacgtcggggtcac

SEQ ID NO: 53745 - DNA, 24 bp, Homo sapiens
  source 1..24: mol_type = genomic DNA
tggttcgatcccgggtttcggcac

SEQ ID NO: 53746 - DNA, 35 bp, Homo sapiens; identical to SEQ ID NO: 26797
  source 1..35: mol_type = genomic DNA

SEQ ID NO: 53747 - DNA, 32 bp, Homo sapiens; identical to SEQ ID NO: 1663
  source 1..32: mol_type = genomic DNA

SEQ ID NO: 53748 - DNA, 34 bp, Homo sapiens; identical to SEQ ID NO: 6891
  source 1..34: mol_type = genomic DNA

SEQ ID NO: 53749 - DNA, 36 bp, Homo sapiens; identical to SEQ ID NO: 16007
  source 1..36: mol_type = genomic DNA

SEQ ID NO: 53750 - DNA, 30 bp, Homo sapiens; identical to SEQ ID NO: 11877
  source 1..30: mol_type = genomic DNA

SEQ ID NO: 53751 - DNA, 32 bp, Homo sapiens; identical to SEQ ID NO: 15533
  source 1..32: mol_type = genomic DNA

SEQ ID NO: 53752 - DNA, 44 bp, Homo sapiens; identical to SEQ ID NO: 41748
  source 1..44: mol_type = genomic DNA

SEQ ID NO: 53753 - DNA, 41 bp, Homo sapiens; identical to SEQ ID NO: 26727
  source 1..41: mol_type = genomic DNA

SEQ ID NO: 53754 - DNA, 30 bp, Homo sapiens; identical to SEQ ID NO: 7470
  source 1..30: mol_type = genomic DNA

SEQ ID NO: 53755 - DNA, 18 bp, Homo sapiens
  source 1..18: mol_type = genomic DNA
agtggcgcagcggaagcg

SEQ ID NO: 53756 - DNA, 34 bp, Homo sapiens; identical to SEQ ID NO: 7815
  source 1..34: mol_type = genomic DNA

SEQ ID NO: 53757 - DNA, 35 bp, Homo sapiens; identical to SEQ ID NO: 24531
  source 1..35: mol_type = genomic DNA

SEQ ID NO: 53758 - DNA, 32 bp, Homo sapiens; identical to SEQ ID NO: 5167
  source 1..32: mol_type = genomic DNA

SEQ ID NO: 53759 - DNA, 31 bp, Homo sapiens; identical to SEQ ID NO: 27207
  source 1..31: mol_type = genomic DNA

SEQ ID NO: 53760 - DNA, 38 bp, Homo sapiens; identical to SEQ ID NO: 27496
  source 1..38: mol_type = genomic DNA

SEQ ID NO: 53761 - DNA, 34 bp, Homo sapiens; identical to SEQ ID NO: 11965
  source 1..34: mol_type = genomic DNA

SEQ ID NO: 53762 - DNA, 29 bp, Homo sapiens
  source 1..29: mol_type = genomic DNA
ttgagggttcgaatcccttcgtggttgcc

SEQ ID NO: 53763 - DNA, 33 bp, Homo sapiens; identical to SEQ ID NO: 10094
  source 1..33: mol_type = genomic DNA

SEQ ID NO: 53764 - DNA, 35 bp, Homo sapiens; identical to SEQ ID NO: 14222
  source 1..35: mol_type = genomic DNA

SEQ ID NO: 53765 - DNA, 46 bp, Homo sapiens; identical to SEQ ID NO: 14304
  source 1..46: mol_type = genomic DNA

SEQ ID NO: 53766 - DNA, 33 bp, Homo sapiens; identical to SEQ ID NO: 5217
  source 1..33: mol_type = genomic DNA

SEQ ID NO: 53767 - DNA, 19 bp, Homo sapiens
  source 1..19: mol_type = genomic DNA
agcatgggactcttcatcc

SEQ ID NO: 53768 - DNA, 36 bp, Homo sapiens; identical to SEQ ID NO: 6716
  source 1..36: mol_type = genomic DNA

SEQ ID NO: 53769 - DNA, 37 bp, Homo sapiens; identical to SEQ ID NO: 22466
  source 1..37: mol_type = genomic DNA

SEQ ID NO: 53770 - DNA, 45 bp, Homo sapiens; identical to SEQ ID NO: 3509
  source 1..45: mol_type = genomic DNA

SEQ ID NO: 53771 - DNA, 37 bp, Homo sapiens; identical to SEQ ID NO: 30923
  source 1..37: mol_type = genomic DNA

SEQ ID NO: 53772 - DNA, 45 bp, Homo sapiens; identical to SEQ ID NO: 42950
  source 1..45: mol_type = genomic DNA

SEQ ID NO: 53773 - DNA, 40 bp, Homo sapiens; identical to SEQ ID NO: 36335
  source 1..40: mol_type = genomic DNA

SEQ ID NO: 53774 - DNA, 25 bp, Homo sapiens
  source 1..25: mol_type = genomic DNA
acgggttcgaaccccgtccgtgcct

SEQ ID NO: 53775 - DNA, 27 bp, Homo sapiens
  source 1..27: mol_type = genomic DNA
tccgggttcgagtcccggcggagtcgc

SEQ ID NO: 53776 - DNA, 36 bp, Homo sapiens; identical to SEQ ID NO: 10916
  source 1..36: mol_type = genomic DNA

SEQ ID NO: 53777 - DNA, 32 bp, Homo sapiens; identical to SEQ ID NO: 5157
  source 1..32: mol_type = genomic DNA

SEQ ID NO: 53778 - DNA, 31 bp, Homo sapiens; identical to SEQ ID NO: 3852
  source 1..31: mol_type = genomic DNA

SEQ ID NO: 53779 - DNA, 26 bp, Homo sapiens
  source 1..26: mol_type = genomic DNA
gcggaagcgtgctgggcccataaccc

SEQ ID NO: 53780 - DNA, 38 bp, Homo sapiens; identical to SEQ ID NO: 26993
  source 1..38: mol_type = genomic DNA

SEQ ID NO: 53781 - DNA, 19 bp, Homo sapiens
  source 1..19: mol_type = genomic DNA
gatccccgtacgggccacc

SEQ ID NO: 53782 - DNA, 36 bp, Homo sapiens; identical to SEQ ID NO: 39165
  source 1..36: mol_type = genomic DNA

SEQ ID NO: 53783 - DNA, 22 bp, Homo sapiens
  source 1..22: mol_type = genomic DNA
atctaaaccatcctctgctacc

SEQ ID NO: 53784 - DNA, 43 bp, Homo sapiens; identical to SEQ ID NO: 30025
  source 1..43: mol_type = genomic DNA

SEQ ID NO: 53785 - DNA, 30 bp, Homo sapiens; identical to SEQ ID NO: 7490
  source 1..30: mol_type = genomic DNA

SEQ ID NO: 53786 - DNA, 35 bp, Homo sapiens; identical to SEQ ID NO: 20587
  source 1..35: mol_type = genomic DNA

SEQ ID NO: 53787 - DNA, 34 bp, Homo sapiens; identical to SEQ ID NO: 8012
  source 1..34: mol_type = genomic DNA

SEQ ID NO: 53788 - DNA, 43 bp, Homo sapiens; identical to SEQ ID NO: 42929
  source 1..43: mol_type = genomic DNA

SEQ ID NO: 53789 - DNA, 29 bp, Homo sapiens
  source 1..29: mol_type = genomic DNA
ggtccccggttcgaaaccgggcggaaaca

SEQ ID NO: 53790 - DNA, 36 bp, Homo sapiens; identical to SEQ ID NO: 6723
  source 1..36: mol_type = genomic DNA

SEQ ID NO: 53791 - DNA, 33 bp, Homo sapiens; identical to SEQ ID NO: 3961
  source 1..33: mol_type = genomic DNA

SEQ ID NO: 53792 - DNA, 34 bp, Homo sapiens; identical to SEQ ID NO: 9059
  source 1..34: mol_type = genomic DNA

SEQ ID NO: 53793 - DNA, 34 bp, Homo sapiens; identical to SEQ ID NO: 14594
  source 1..34: mol_type = genomic DNA

SEQ ID NO: 53794 - DNA, 31 bp, Homo sapiens; identical to SEQ ID NO: 27918
  source 1..31: mol_type = genomic DNA

SEQ ID NO: 53795 - DNA, 37 bp, Homo sapiens; identical to SEQ ID NO: 919
  source 1..37: mol_type = genomic DNA

SEQ ID NO: 53796 - DNA, 44 bp, Homo sapiens; identical to SEQ ID NO: 14776
  source 1..44: mol_type = genomic DNA

SEQ ID NO: 53797 - DNA, 21 bp, Homo sapiens
  source 1..21: mol_type = genomic DNA
ttcaatcccgggtttcggcac

SEQ ID NO: 53798 - DNA, 32 bp, Homo sapiens; identical to SEQ ID NO: 24135
  source 1..32: mol_type = genomic DNA

SEQ ID NO: 53799 - DNA, 36 bp, Homo sapiens; identical to SEQ ID NO: 24720
  source 1..36: mol_type = genomic DNA

SEQ ID NO: 53800 - DNA, 34 bp, Homo sapiens; identical to SEQ ID NO: 8833
  source 1..34: mol_type = genomic DNA

SEQ ID NO: 53801 - DNA, 29 bp, Homo sapiens
  source 1..29: mol_type = genomic DNA
atcctgggttcgaatcccagcggggcctc

SEQ ID NO: 53802 - DNA, 29 bp, Homo sapiens
  source 1..29: mol_type = genomic DNA
attgcaggttcgagtcctgccgcggtcgc

SEQ ID NO: 53803 - DNA, 33 bp, Homo sapiens; identical to SEQ ID NO: 36994
  source 1..33: mol_type = genomic DNA

SEQ ID NO: 53804 - DNA, 44 bp, Homo sapiens; identical to SEQ ID NO: 36577
  source 1..44: mol_type = genomic DNA

SEQ ID NO: 53805 - DNA, 24 bp, Homo sapiens
  source 1..24: mol_type = genomic DNA
ggttcaaatcccggacgagccccc

SEQ ID NO: 53806 - DNA, 41 bp, Homo sapiens; identical to SEQ ID NO: 28610
  source 1..41: mol_type = genomic DNA

SEQ ID NO: 53807 - DNA, 45 bp, Homo sapiens; identical to SEQ ID NO: 7361
  source 1..45: mol_type = genomic DNA

SEQ ID NO: 53808 - DNA, 23 bp, Homo sapiens
  source 1..23: mol_type = genomic DNA
gtatgattctcggtttgggtccg

SEQ ID NO: 53809 - DNA, 41 bp, Homo sapiens; identical to SEQ ID NO: 8767
  source 1..41: mol_type = genomic DNA

SEQ ID NO: 53810 - DNA, 40 bp, Homo sapiens; identical to SEQ ID NO: 41654
  source 1..40: mol_type = genomic DNA

SEQ ID NO: 53811 - DNA, 47 bp, Homo sapiens; identical to SEQ ID NO: 14567
  source 1..47: mol_type = genomic DNA

SEQ ID NO: 53812 - DNA, 35 bp, Homo sapiens; identical to SEQ ID NO: 9089
  source 1..35: mol_type = genomic DNA

SEQ ID NO: 53813 - DNA, 43 bp, Homo sapiens; identical to SEQ ID NO: 25543
  source 1..43: mol_type = genomic DNA

SEQ ID NO: 53814 - DNA, 38 bp, Homo sapiens; identical to SEQ ID NO: 6336
  source 1..38: mol_type = genomic DNA

SEQ ID NO: 53815 - DNA, 45 bp, Homo sapiens; identical to SEQ ID NO: 35291
  source 1..45: mol_type = genomic DNA

SEQ ID NO: 53816 - DNA, 36 bp, Homo sapiens; identical to SEQ ID NO: 42926
  source 1..36: mol_type = genomic DNA

SEQ ID NO: 53817 - DNA, 42 bp, Homo sapiens; identical to SEQ ID NO: 43037
  source 1..42: mol_type = genomic DNA

SEQ ID NO: 53818 - DNA, 36 bp, Homo sapiens; identical to SEQ ID NO: 42915
  source 1..36: mol_type = genomic DNA

SEQ ID NO: 53819 - DNA, 34 bp, Homo sapiens; identical to SEQ ID NO: 35054
  source 1..34: mol_type = genomic DNA

SEQ ID NO: 53820 - DNA, 18 bp, Homo sapiens
  source 1..18: mol_type = genomic DNA
cgaatctcggtgggacct

SEQ ID NO: 53821 - DNA, 21 bp, Homo sapiens
  source 1..21: mol_type = genomic DNA
aggtcgatggatcgaaaccat

SEQ ID NO: 53822 - DNA, 34 bp, Homo sapiens; identical to SEQ ID NO: 24642
  source 1..34: mol_type = genomic DNA

SEQ ID NO: 53823 - DNA, 43 bp, Homo sapiens; identical to SEQ ID NO: 36291
  source 1..43: mol_type = genomic DNA

SEQ ID NO: 53824 - DNA, 36 bp, Homo sapiens; identical to SEQ ID NO: 36662
  source 1..36: mol_type = genomic DNA

SEQ ID NO: 53825 - DNA, 29 bp, Homo sapiens
  source 1..29: mol_type = genomic DNA
aaaatgttggttatacccttcccgtacta

SEQ ID NO: 53826 - DNA, 32 bp, Homo sapiens; identical to SEQ ID NO: 32760
  source 1..32: mol_type = genomic DNA

SEQ ID NO: 53827 - DNA, 25 bp, Homo sapiens
  source 1..25: mol_type = genomic DNA
attcggcgctctcaccgccgcggcc

SEQ ID NO: 53828 - DNA, 31 bp, Homo sapiens; identical to SEQ ID NO: 5228
  source 1..31: mol_type = genomic DNA

SEQ ID NO: 53829 - DNA, 40 bp, Homo sapiens; identical to SEQ ID NO: 10297
  source 1..40: mol_type = genomic DNA

SEQ ID NO: 53830 - DNA, 31 bp, Homo sapiens; identical to SEQ ID NO: 1353
  source 1..31: mol_type = genomic DNA

SEQ ID NO: 53831 - DNA, 33 bp, Homo sapiens; identical to SEQ ID NO: 1355
  source 1..33: mol_type = genomic DNA

SEQ ID NO: 53832 - DNA, 35 bp, Homo sapiens; identical to SEQ ID NO: 24537
  source 1..35: mol_type = genomic DNA

SEQ ID NO: 53833 - DNA, 34 bp, Homo sapiens; identical to SEQ ID NO: 27101
  source 1..34: mol_type = genomic DNA

SEQ ID NO: 53834 - DNA, 18 bp, Homo sapiens
  source 1..18: mol_type = genomic DNA
aggtcgtgagttcgagcc

SEQ ID NO: 53835 - DNA, 40 bp, Homo sapiens; identical to SEQ ID NO: 20625
  source 1..40: mol_type = genomic DNA

SEQ ID NO: 53836 - DNA, 44 bp, Homo sapiens; identical to SEQ ID NO: 22583
  source 1..44: mol_type = genomic DNA

SEQ ID NO: 53837 - DNA, 37 bp, Homo sapiens; identical to SEQ ID NO: 6335
  source 1..37: mol_type = genomic DNA

SEQ ID NO: 53838 - DNA, 46 bp, Homo sapiens; identical to SEQ ID NO: 29176
  source 1..46: mol_type = genomic DNA

SEQ ID NO: 53839 - DNA, 31 bp, Homo sapiens; identical to SEQ ID NO: 19409
  source 1..31: mol_type = genomic DNA

SEQ ID NO: 53840 - DNA, 42 bp, Homo sapiens; identical to SEQ ID NO: 7620
  source 1..42: mol_type = genomic DNA

SEQ ID NO: 53841 - DNA, 20 bp, Homo sapiens
  source 1..20: mol_type = genomic DNA
ctaaaccatcctctgctacc

SEQ ID NO: 53842 - DNA, 34 bp, Homo sapiens; identical to SEQ ID NO: 8555
  source 1..34: mol_type = genomic DNA

SEQ ID NO: 53843 - DNA, 29 bp, Homo sapiens
  source 1..29: mol_type = genomic DNA
gggattgtgggttcgagtcccacccgggg

SEQ ID NO: 53844 - DNA, 35 bp, Homo sapiens; identical to SEQ ID NO: 20596
  source 1..35: mol_type = genomic DNA

SEQ ID NO: 53845 - DNA, 44 bp, Homo sapiens; identical to SEQ ID NO: 36500
  source 1..44: mol_type = genomic DNA

SEQ ID NO: 53846 - DNA, 40 bp, Homo sapiens; identical to SEQ ID NO: 26752
  source 1..40: mol_type = genomic DNA

SEQ ID NO: 53847 - DNA, 28 bp, Homo sapiens
  source 1..28: mol_type = genomic DNA
tcctgggttcgaatcccagcggggcctc

SEQ ID NO: 53848 - DNA, 29 bp, Homo sapiens
  source 1..29: mol_type = genomic DNA
atcctgggttcgaatcccagcggtgcctc

SEQ ID NO: 53849 - DNA, 18 bp, Homo sapiens
  source 1..18: mol_type = genomic DNA
gatcccgggcggaaacac

SEQ ID NO: 53850 - DNA, 39 bp, Homo sapiens; identical to SEQ ID NO: 28285
  source 1..39: mol_type = genomic DNA

SEQ ID NO: 53851 - DNA, 35 bp, Homo sapiens; identical to SEQ ID NO: 5027
  source 1..35: mol_type = genomic DNA

SEQ ID NO: 53852 - DNA, 23 bp, Homo sapiens
  source 1..23: mol_type = genomic DNA
cataatctgaaggtcctgagttc

SEQ ID NO: 53853 - DNA, 44 bp, Homo sapiens; identical to SEQ ID NO: 36502
  source 1..44: mol_type = genomic DNA

SEQ ID NO: 53854 - DNA, 42 bp, Homo sapiens; identical to SEQ ID NO: 41507
  source 1..42: mol_type = genomic DNA

SEQ ID NO: 53855 - DNA, 44 bp, Homo sapiens; identical to SEQ ID NO: 29744
  source 1..44: mol_type = genomic DNA

SEQ ID NO: 53856 - DNA, 17 bp, Homo sapiens
  source 1..17: mol_type = genomic DNA
gcggcccgggttcgact

SEQ ID NO: 53857 - DNA, 34 bp, Homo sapiens; identical to SEQ ID NO: 40728
  source 1..34: mol_type = genomic DNA

SEQ ID NO: 53858 - DNA, 34 bp, Homo sapiens; identical to SEQ ID NO: 24530
  source 1..34: mol_type = genomic DNA

SEQ ID NO: 53859 - DNA, 17 bp, Homo sapiens
  source 1..17: mol_type = genomic DNA
attctcggtttgggtcc

SEQ ID NO: 53860 - DNA, 23 bp, Homo sapiens
  source 1..23: mol_type = genomic DNA
gttcgaatccctccgtggttacc

SEQ ID NO: 53861 - DNA, 46 bp, Homo sapiens; identical to SEQ ID NO: 42954
  source 1..46: mol_type = genomic DNA

SEQ ID NO: 53862 - DNA, 39 bp, Homo sapiens; identical to SEQ ID NO: 33918
  source 1..39: mol_type = genomic DNA

SEQ ID NO: 53863 - DNA, 30 bp, Homo sapiens; identical to SEQ ID NO: 18559
  source 1..30: mol_type = genomic DNA

SEQ ID NO: 53864 - DNA, 39 bp, Homo sapiens; identical to SEQ ID NO: 15929
  source 1..39: mol_type = genomic DNA

SEQ ID NO: 53865 - DNA, 18 bp, Homo sapiens
  source 1..18: mol_type = genomic DNA
aattctcgctggggcctc

SEQ ID NO: 53866 - DNA, 22 bp, Homo sapiens
  source 1..22: mol_type = genomic DNA
ttcgaatcccagtagagcctcc

SEQ ID NO: 53867 - DNA, 17 bp, Homo sapiens
  source 1..17: mol_type = genomic DNA
attcggcgctctcaccg

SEQ ID NO: 53868 - DNA, 47 bp, Homo sapiens; identical to SEQ ID NO: 8720
  source 1..47: mol_type = genomic DNA

SEQ ID NO: 53869 - DNA, 34 bp, Homo sapiens; identical to SEQ ID NO: 17216
  source 1..34: mol_type = genomic DNA

SEQ ID NO: 53870 - DNA, 32 bp, Homo sapiens; identical to SEQ ID NO: 17062
  source 1..32: mol_type = genomic DNA

SEQ ID NO: 53871 - DNA, 36 bp, Homo sapiens; identical to SEQ ID NO: 6702
  source 1..36: mol_type = genomic DNA

SEQ ID NO: 53872 - DNA, 32 bp, Homo sapiens; identical to SEQ ID NO: 5174
  source 1..32: mol_type = genomic DNA

SEQ ID NO: 53873 - DNA, 33 bp, Homo sapiens; identical to SEQ ID NO: 38314
  source 1..33: mol_type = genomic DNA

SEQ ID NO: 53874 - DNA, 25 bp, Homo sapiens
  source 1..25: mol_type = genomic DNA
cgggttcaatccccggcatctccac

SEQ ID NO: 53875 - DNA, 17 bp, Homo sapiens
  source 1..17: mol_type = genomic DNA
gtggcgcagcggaagcg

SEQ ID NO: 53876 - DNA, 19 bp, Homo sapiens
  source 1..19: mol_type = genomic DNA
cgaatcccttcgtggttgc

SEQ ID NO: 53877 - DNA, 35 bp, Homo sapiens; identical to SEQ ID NO: 37088
  source 1..35: mol_type = genomic DNA

SEQ ID NO: 53878 - DNA, 20 bp, Homo sapiens
  source 1..20: mol_type = genomic DNA
caagtccctgtccaggcgcc

SEQ ID NO: 53879 - DNA, 40 bp, Homo sapiens; identical to SEQ ID NO: 19702
  source 1..40: mol_type = genomic DNA

SEQ ID NO: 53880 - DNA, 27 bp, Homo sapiens
  source 1..27: mol_type = genomic DNA
gagatgaaaacctttttccaaggacac

SEQ ID NO: 53881 - DNA, 33 bp, Homo sapiens; identical to SEQ ID NO: 8581
  source 1..33: mol_type = genomic DNA

SEQ ID NO: 53882 - DNA, 16 bp, Homo sapiens
  source 1..16: mol_type = genomic DNA
gatccttaggtcgctg

SEQ ID NO: 53883 - DNA, 34 bp, Homo sapiens; identical to SEQ ID NO: 40650
  source 1..34: mol_type = genomic DNA

SEQ ID NO: 53884 - DNA, 24 bp, Homo sapiens
  source 1..24: mol_type = genomic DNA
tggggattgtgggttcgagtccca

SEQ ID NO: 53885 - DNA, 16 bp, Homo sapiens
  source 1..16: mol_type = genomic DNA
tctaaggcgctgcgtt

SEQ ID NO: 53886 - DNA, 33 bp, Homo sapiens; identical to SEQ ID NO: 15179
  source 1..33: mol_type = genomic DNA

SEQ ID NO: 53887 - DNA, 34 bp, Homo sapiens; identical to SEQ ID NO: 36723
  source 1..34: mol_type = genomic DNA

SEQ ID NO: 53888 - DNA, 34 bp, Homo sapiens; identical to SEQ ID NO: 8933
  source 1..34: mol_type = genomic DNA

SEQ ID NO: 53889 - DNA, 36 bp, Homo sapiens; identical to SEQ ID NO: 42451
  source 1..36: mol_type = genomic DNA

SEQ ID NO: 53890 - DNA, 34 bp, Homo sapiens; identical to SEQ ID NO: 20146
  source 1..34: mol_type = genomic DNA

SEQ ID NO: 53891 - DNA, 41 bp, Homo sapiens; identical to SEQ ID NO: 35134
  source 1..41: mol_type = genomic DNA

SEQ ID NO: 53892 - DNA, 38 bp, Homo sapiens; identical to SEQ ID NO: 35078
  source 1..38: mol_type = genomic DNA

SEQ ID NO: 53893 - DNA, 33 bp, Homo sapiens; identical to SEQ ID NO: 10190
  source 1..33: mol_type = genomic DNA

SEQ ID NO: 53894 - DNA, 34 bp, Homo sapiens; identical to SEQ ID NO: 35413
  source 1..34: mol_type = genomic DNA

SEQ ID NO: 53895 - DNA, 35 bp, Homo sapiens; identical to SEQ ID NO: 24719
  source 1..35: mol_type = genomic DNA

SEQ ID NO: 53896 - DNA, 24 bp, Homo sapiens
  source 1..24: mol_type = genomic DNA
gggttcaagtccctgtccaggcgc

SEQ ID NO: 53897 - DNA, 33 bp, Homo sapiens; identical to SEQ ID NO: 5168
  source 1..33: mol_type = genomic DNA

SEQ ID NO: 53898 - DNA, 22 bp, Homo sapiens
  source 1..22: mol_type = genomic DNA
cggttcgaaaccgggcggaaac

SEQ ID NO: 53899 - DNA, 21 bp, Homo sapiens
  source 1..21: mol_type = genomic DNA
gttcgagcctcagagagggca

SEQ ID NO: 53900 - DNA, 34 bp, Homo sapiens; identical to SEQ ID NO: 14221
  source 1..34: mol_type = genomic DNA

SEQ ID NO: 53901 - DNA, 35 bp, Homo sapiens; identical to SEQ ID NO: 16532
  source 1..35: mol_type = genomic DNA

SEQ ID NO: 53902 - DNA, 34 bp, Homo sapiens; identical to SEQ ID NO: 40691
  source 1..34: mol_type = genomic DNA

SEQ ID NO: 53903 - DNA, 39 bp, Homo sapiens; identical to SEQ ID NO: 2259
  source 1..39: mol_type = genomic DNA

SEQ ID NO: 53904 - DNA, 31 bp, Homo sapiens; identical to SEQ ID NO: 13229
  source 1..31: mol_type = genomic DNA

SEQ ID NO: 53905 - DNA, 35 bp, Homo sapiens; identical to SEQ ID NO: 2800
  source 1..35: mol_type = genomic DNA

SEQ ID NO: 53906 - DNA, 34 bp, Homo sapiens; identical to SEQ ID NO: 8544
  source 1..34: mol_type = genomic DNA

SEQ ID NO: 53907 - DNA, 33 bp, Homo sapiens; identical to SEQ ID NO: 24938
  source 1..33: mol_type = genomic DNA

SEQ ID NO: 53908 - DNA, 36 bp, Homo sapiens; identical to SEQ ID NO: 9937
  source 1..36: mol_type = genomic DNA

SEQ ID NO: 53909 - DNA, 36 bp, Homo sapiens; identical to SEQ ID NO: 14075
  source 1..36: mol_type = genomic DNA

SEQ ID NO: 53910 - DNA, 18 bp, Homo sapiens
  source 1..18: mol_type = genomic DNA
cttaagatccaatggatt

SEQ ID NO: 53911 - DNA, 33 bp, Homo sapiens; identical to SEQ ID NO: 3746
  source 1..33: mol_type = genomic DNA

SEQ ID NO: 53912 - DNA, 36 bp, Homo sapiens; identical to SEQ ID NO: 28541
  source 1..36: mol_type = genomic DNA

SEQ ID NO: 53913 - DNA, 33 bp, Homo sapiens; identical to SEQ ID NO: 24951
  source 1..33: mol_type = genomic DNA

SEQ ID NO: 53914 - DNA, 21 bp, Homo sapiens
  source 1..21: mol_type = genomic DNA
gcgttcgattcccggtcaggg

SEQ ID NO: 53915 - DNA, 33 bp, Homo sapiens; identical to SEQ ID NO: 8573
  source 1..33: mol_type = genomic DNA

SEQ ID NO: 53916 - DNA, 30 bp, Homo sapiens; identical to SEQ ID NO: 34870
  source 1..30: mol_type = genomic DNA

SEQ ID NO: 53917 - DNA, 33 bp, Homo sapiens; identical to SEQ ID NO: 39346
  source 1..33: mol_type = genomic DNA

SEQ ID NO: 53918 - DNA, 35 bp, Homo sapiens; identical to SEQ ID NO: 40729
  source 1..35: mol_type = genomic DNA

SEQ ID NO: 53919 - DNA, 29 bp, Homo sapiens
  source 1..29: mol_type = genomic DNA
tcagaagattgagggttcgaatcccttcg

SEQ ID NO: 53920 - DNA, 34 bp, Homo sapiens; identical to SEQ ID NO: 35653
  source 1..34: mol_type = genomic DNA

SEQ ID NO: 53921 - DNA, 36 bp, Homo sapiens; identical to SEQ ID NO: 26872
  source 1..36: mol_type = genomic DNA

SEQ ID NO: 53922 - DNA, 17 bp, Homo sapiens
  source 1..17: mol_type = genomic DNA
aattccccgacggggag

SEQ ID NO: 53923 - DNA, 35 bp, Homo sapiens; identical to SEQ ID NO: 25745
  source 1..35: mol_type = genomic DNA

SEQ ID NO: 53924 - DNA, 36 bp, Homo sapiens; identical to SEQ ID NO: 26869
  source 1..36: mol_type = genomic DNA

SEQ ID NO: 53925 - DNA, 21 bp, Homo sapiens
  source 1..21: mol_type = genomic DNA
tctggtctccggatggaggcg

SEQ ID NO: 53926 - DNA, 31 bp, Homo sapiens; identical to SEQ ID NO: 22605
  source 1..31: mol_type = genomic DNA

SEQ ID NO: 53927 - DNA, 34 bp, Homo sapiens; identical to SEQ ID NO: 37247
  source 1..34: mol_type = genomic DNA

SEQ ID NO: 53928 - DNA, 37 bp, Homo sapiens; identical to SEQ ID NO: 7569
  source 1..37: mol_type = genomic DNA

SEQ ID NO: 53929 - DNA, 36 bp, Homo sapiens; identical to SEQ ID NO: 6259
  source 1..36: mol_type = genomic DNA

SEQ ID NO: 53930 - DNA, 34 bp, Homo sapiens; identical to SEQ ID NO: 33907
  source 1..34: mol_type = genomic DNA

SEQ ID NO: 53931 - DNA, 31 bp, Homo sapiens; identical to SEQ ID NO: 34894
  source 1..31: mol_type = genomic DNA

SEQ ID NO: 53932 - DNA, 24 bp, Homo sapiens
  source 1..24: mol_type = genomic DNA
ggctgttaaccgaaaggttggtgg

SEQ ID NO: 53933 - DNA, 17 bp, Homo sapiens
  source 1..17: mol_type = genomic DNA
aatccgagtcacggcac

SEQ ID NO: 53934 - DNA, 16 bp, Homo sapiens
  source 1..16: mol_type = genomic DNA
aaaccgggcggaaaca

SEQ ID NO: 53935 - DNA, 17 bp, Homo sapiens
  source 1..17: mol_type = genomic DNA
aaaccgggcagaagcac

SEQ ID NO: 53936 - DNA, 18 bp, Homo sapiens
  source 1..18: mol_type = genomic DNA
atccccgtacgggccacc

SEQ ID NO: 53937 - DNA, 16 bp, Homo sapiens
  source 1..16: mol_type = genomic DNA
tcccggccactgcacc

SEQ ID NO: 53938 - DNA, 20 bp, Homo sapiens
  source 1..20: mol_type = genomic DNA
tcgaatcctgttcgtgacgc

SEQ ID NO: 53939 - DNA, 19 bp, Homo sapiens
  source 1..19: mol_type = genomic DNA
cgaatcctgttcgtgacgc

SEQ ID NO: 53940 - DNA, 16 bp, Homo sapiens
  source 1..16: mol_type = genomic DNA
atccccgtacgggcca

SEQ ID NO: 53941 - DNA, 16 bp, Homo sapiens
  source 1..16: mol_type = genomic DNA
aatccgagtcacggca

SEQ ID NO: 53942 - DNA, 16 bp, Homo sapiens
  source 1..16: mol_type = genomic DNA
aaaccgggcagaagca

SEQ ID NO: 53943 - DNA, 16 bp, Homo sapiens
  source 1..16: mol_type = genomic DNA
tagagcatttgactgc

SEQ ID NO: 53944 - DNA, 47 bp, Homo sapiens; identical to SEQ ID NO: 24606
  source 1..47: mol_type = genomic DNA

SEQ ID NO: 53945 - DNA, 16 bp, Homo sapiens
  source 1..16: mol_type = genomic DNA
tcaggatggccgagtg

SEQ ID NO: 53946 - DNA, 34 bp, Homo sapiens; identical to SEQ ID NO: 20393
  source 1..34: mol_type = genomic DNA

SEQ ID NO: 53947 - DNA, 38 bp, Homo sapiens; identical to SEQ ID NO: 9926
  source 1..38: mol_type = genomic DNA

SEQ ID NO: 53948 - DNA, 17 bp, Homo sapiens
  source 1..17: mol_type = genomic DNA
catgggactcttcatcc

SEQ ID NO: 53949 - DNA, 25 bp, Homo sapiens
  source 1..25: mol_type = genomic DNA
ggctgtgatggccgagtggttaagg

SEQ ID NO: 53950 - DNA, 18 bp, Homo sapiens
  source 1..18: mol_type = genomic DNA
gaatccgagtcacggcac

SEQ ID NO: 53951 - DNA, 36 bp, Homo sapiens; identical to SEQ ID NO: 17065
  source 1..36: mol_type = genomic DNA

SEQ ID NO: 53952 - DNA, 24 bp, Homo sapiens
  source 1..24: mol_type = genomic DNA
cggttcgaatccgagtcacggcac

SEQ ID NO: 53953 - DNA, 35 bp, Homo sapiens; identical to SEQ ID NO: 24715
  source 1..35: mol_type = genomic DNA

SEQ ID NO: 53954 - DNA, 19 bp, Homo sapiens
  source 1..19: mol_type = genomic DNA
gaaaccgggcggaaacacc

SEQ ID NO: 53955 - DNA, 31 bp, Homo sapiens; identical to SEQ ID NO: 16192
  source 1..31: mol_type = genomic DNA

SEQ ID NO: 53956 - DNA, 37 bp, Homo sapiens; identical to SEQ ID NO: 6724
  source 1..37: mol_type = genomic DNA

SEQ ID NO: 53957 - DNA, 31 bp, Homo sapiens; identical to SEQ ID NO: 12457
  source 1..31: mol_type = genomic DNA

SEQ ID NO: 53958 - DNA, 23 bp, Homo sapiens
  source 1..23: mol_type = genomic DNA
cggttcgaatccgagtcacggca

SEQ ID NO: 53959 - DNA, 20 bp, Homo sapiens
  source 1..20: mol_type = genomic DNA
caaatccgggtgccccctcc

SEQ ID NO: 53960 - DNA, 35 bp, Homo sapiens; identical to SEQ ID NO: 8950
  source 1..35: mol_type = genomic DNA

SEQ ID NO: 53961 - DNA, 25 bp, Homo sapiens
  source 1..25: mol_type = genomic DNA
tggttcgaatccggctcgaaggacc

SEQ ID NO: 53962 - DNA, 35 bp, Homo sapiens; identical to SEQ ID NO: 24643
  source 1..35: mol_type = genomic DNA

SEQ ID NO: 53963 - DNA, 35 bp, Homo sapiens; identical to SEQ ID NO: 2917
  source 1..35: mol_type = genomic DNA

SEQ ID NO: 53964 - DNA, 19 bp, Homo sapiens
  source 1..19: mol_type = genomic DNA
cgaatcccagcggggcctc

SEQ ID NO: 53965 - DNA, 36 bp, Homo sapiens; identical to SEQ ID NO: 29431
  source 1..36: mol_type = genomic DNA

SEQ ID NO: 53966 - DNA, 41 bp, Homo sapiens; identical to SEQ ID NO: 2514
  source 1..41: mol_type = genomic DNA

SEQ ID NO: 53967 - DNA, 21 bp, Homo sapiens
  source 1..21: mol_type = genomic DNA
tcgaaaccgggcagaagcacc

SEQ ID NO: 53968 - DNA, 24 bp, Homo sapiens
  source 1..24: mol_type = genomic DNA
atggatcgaaaccatcctctgcta

SEQ ID NO: 53969 - DNA, 33 bp, Homo sapiens; identical to SEQ ID NO: 11630
  source 1..33: mol_type = genomic DNA

SEQ ID NO: 53970 - DNA, 24 bp, Homo sapiens
  source 1..24: mol_type = genomic DNA
agttcaaatctcgctggggcctcc

SEQ ID NO: 53971 - DNA, 21 bp, Homo sapiens
  source 1..21: mol_type = genomic DNA
tcgagtcccatctgggtcgcc

SEQ ID NO: 53972 - DNA, 34 bp, Homo sapiens; identical to SEQ ID NO: 18568
  source 1..34: mol_type = genomic DNA

SEQ ID NO: 53973 - DNA, 29 bp, Homo sapiens
  source 1..29: mol_type = genomic DNA
aacctcggttcgaatccgagtcacggcac

SEQ ID NO: 53974 - DNA, 22 bp, Homo sapiens
  source 1..22: mol_type = genomic DNA
ttcgatccccgtacgggccacc

SEQ ID NO: 53975 - DNA, 26 bp, Homo sapiens
  source 1..26: mol_type = genomic DNA
aggcggcccgggttcgactcccggtg

SEQ ID NO: 53976 - DNA, 29 bp, Homo sapiens
  source 1..29: mol_type = genomic DNA
gttccgggttcgagtcccggcggagtcgc

SEQ ID NO: 53977 - DNA, 22 bp, Homo sapiens
  source 1..22: mol_type = genomic DNA
gttcaatcccgggtttcggcac

SEQ ID NO: 53978 - DNA, 18 bp, Homo sapiens
  source 1..18: mol_type = genomic DNA
aaatccgggtgccccctc

SEQ ID NO: 53979 - DNA, 28 bp, Homo sapiens
  source 1..28: mol_type = genomic DNA
acctcggttcgaatccgagtcacggcac

SEQ ID NO: 53980 - DNA, 22 bp, Homo sapiens
  source 1..22: mol_type = genomic DNA
gttcgattcccggtcatggaac

SEQ ID NO: 53981 - DNA, 21 bp, Homo sapiens
  source 1..21: mol_type = genomic DNA
ttcgaatcccagcggggcctc

SEQ ID NO: 53982 - DNA, 24 bp, Homo sapiens
  source 1..24: mol_type = genomic DNA
aggttcgagtcctgccgcggtcgc

SEQ ID NO: 53983 - DNA, 20 bp, Homo sapiens
  source 1..20: mol_type = genomic DNA
tcgaatcccagcggggcctc

SEQ ID NO: 53984 - DNA, 18 bp, Homo sapiens
  source 1..18: mol_type = genomic DNA
gggttcgactcccggtgt

SEQ ID NO: 53985 - DNA, 21 bp, Homo sapiens
  source 1..21: mol_type = genomic DNA
tcaattccccgacggggagcc

SEQ ID NO: 53986 - DNA, 41 bp, Homo sapiens; identical to SEQ ID NO: 28601
  source 1..41: mol_type = genomic DNA

SEQ ID NO: 53987 - DNA, 22 bp, Homo sapiens
  source 1..22: mol_type = genomic DNA
gttcgatcctcacctggagcac

SEQ ID NO: 53988 - DNA, 41 bp, Homo sapiens; identical to SEQ ID NO: 5913
  source 1..41: mol_type = genomic DNA

SEQ ID NO: 53989 - DNA, 33 bp, Homo sapiens; identical to SEQ ID NO: 8948
  source 1..33: mol_type = genomic DNA

SEQ ID NO: 53990 - DNA, 17 bp, Homo sapiens
  source 1..17: mol_type = genomic DNA
aggagatcctgggttcg

SEQ ID NO: 53991 - DNA, 39 bp, Homo sapiens; identical to SEQ ID NO: 19701
  source 1..39: mol_type = genomic DNA

SEQ ID NO: 53992 - DNA, 24 bp, Homo sapiens
  source 1..24: mol_type = genomic DNA
ggttcgaatcccagcggggcctcc

SEQ ID NO: 53993 - DNA, 37 bp, Homo sapiens; identical to SEQ ID NO: 7459
  source 1..37: mol_type = genomic DNA

SEQ ID NO: 53994 - DNA, 22 bp, Homo sapiens
  source 1..22: mol_type = genomic DNA
cggaagcgtgctgggcccataa

SEQ ID NO: 53995 - DNA, 20 bp, Homo sapiens
  source 1..20: mol_type = genomic DNA
gttcgagcctcacacggggc

SEQ ID NO: 53996 - DNA, 32 bp, Homo sapiens; identical to SEQ ID NO: 29841
  source 1..32: mol_type = genomic DNA

SEQ ID NO: 53997 - DNA, 41 bp, Homo sapiens; identical to SEQ ID NO: 3454
  source 1..41: mol_type = genomic DNA

SEQ ID NO: 53998 - DNA, 31 bp, Homo sapiens; identical to SEQ ID NO: 17646
  source 1..31: mol_type = genomic DNA

SEQ ID NO: 53999 - DNA, 46 bp, Homo sapiens; identical to SEQ ID NO: 24605
  source 1..46: mol_type = genomic DNA

SEQ ID NO: 54000 - DNA, 21 bp, Homo sapiens
  source 1..21: mol_type = genomic DNA
gtcggtagagcatgagactct

SEQ ID NO: 54001 - DNA, 44 bp, Homo sapiens; identical to SEQ ID NO: 30152
  source 1..44: mol_type = genomic DNA

SEQ ID NO: 54002 - DNA, 36 bp, Homo sapiens; identical to SEQ ID NO: 24716
  source 1..36: mol_type = genomic DNA

SEQ ID NO: 54003 - DNA, 35 bp, Homo sapiens; identical to SEQ ID NO: 17217
  source 1..35: mol_type = genomic DNA

SEQ ID NO: 54004 - DNA, 24 bp, Homo sapiens
  source 1..24: mol_type = genomic DNA
tgttcaaatcacgtcggggtcacc

SEQ ID NO: 54005 - DNA, 30 bp, Homo sapiens; identical to SEQ ID NO: 2992
  source 1..30: mol_type = genomic DNA

SEQ ID NO: 54006 - DNA, 23 bp, Homo sapiens
  source 1..23: mol_type = genomic DNA
gttcgaaccccactcctggtacc

SEQ ID NO: 54007 - DNA, 46 bp, Homo sapiens; identical to SEQ ID NO: 25461
  source 1..46: mol_type = genomic DNA

SEQ ID NO: 54008 - DNA, 30 bp, Homo sapiens; identical to SEQ ID NO: 5165
  source 1..30: mol_type = genomic DNA

SEQ ID NO: 54009 - DNA, 19 bp, Homo sapiens
  source 1..19: mol_type = genomic DNA
gagccccagtggaaccacc

SEQ ID NO: 54010 - DNA, 24 bp, Homo sapiens
  source 1..24: mol_type = genomic DNA
agttcgaacctcagagggggcacc

SEQ ID NO: 54011 - DNA, 44 bp, Homo sapiens; identical to SEQ ID NO: 16226
  source 1..44: mol_type = genomic DNA

SEQ ID NO: 54012 - DNA, 32 bp, Homo sapiens; identical to SEQ ID NO: 17006
  source 1..32: mol_type = genomic DNA

SEQ ID NO: 54013 - DNA, 24 bp, Homo sapiens
  source 1..24: mol_type = genomic DNA
ggttcgagtcccatctggggtgcc

SEQ ID NO: 54014 - DNA, 19 bp, Homo sapiens
  source 1..19: mol_type = genomic DNA
aaatctcggtgggacctcc

SEQ ID NO: 54015 - DNA, 29 bp, Homo sapiens
  source 1..29: mol_type = genomic DNA
aggtcctgagttcgaacctcagagggggc

SEQ ID NO: 54016 - DNA, 28 bp, Homo sapiens
  source 1..28: mol_type = genomic DNA
ttcggcgctctcaccgccgcggcccggg

SEQ ID NO: 54017 - DNA, 21 bp, Homo sapiens
  source 1..21: mol_type = genomic DNA
ttcgattcccgggcggcgcac

SEQ ID NO: 54018 - DNA, 24 bp, Homo sapiens
  source 1..24: mol_type = genomic DNA
ggttcgagtcccatctgggtcgcc

SEQ ID NO: 54019 - DNA, 24 bp, Homo sapiens
  source 1..24: mol_type = genomic DNA
gggttcgaatcccttcgtggttgc

SEQ ID NO: 54020 - DNA, 18 bp, Homo sapiens
  source 1..18: mol_type = genomic DNA
gtatgattctcgctttgg

SEQ ID NO: 54021 - DNA, 16 bp, Homo sapiens
  source 1..16: mol_type = genomic DNA
tgaaggtcgtgagttc

SEQ ID NO: 54022 - DNA, 17 bp, Homo sapiens
  source 1..17: mol_type = genomic DNA
cgcattggacttctaat

SEQ ID NO: 54023 - DNA, 31 bp, Homo sapiens; identical to SEQ ID NO: 18467
  source 1..31: mol_type = genomic DNA

SEQ ID NO: 54024 - DNA, 31 bp, Homo sapiens; identical to SEQ ID NO: 33842
  source 1..31: mol_type = genomic DNA

SEQ ID NO: 54025 - DNA, 17 bp, Homo sapiens
  source 1..17: mol_type = genomic DNA
agggatgggttcgattc

SEQ ID NO: 54026 - DNA, 16 bp, Homo sapiens
  source 1..16: mol_type = genomic DNA
gttaggattcctggtt

SEQ ID NO: 54027 - DNA, 38 bp, Homo sapiens; identical to SEQ ID NO: 16291
  source 1..38: mol_type = genomic DNA

SEQ ID NO: 54028 - DNA, 18 bp, Homo sapiens
  source 1..18: mol_type = genomic DNA
gaatcccacttctgacac

SEQ ID NO: 54029 - DNA, 38 bp, Homo sapiens; identical to SEQ ID NO: 29061
  source 1..38: mol_type = genomic DNA

SEQ ID NO: 54030 - DNA, 19 bp, Homo sapiens
  source 1..19: mol_type = genomic DNA
cgaatccgagtcacggcac

SEQ ID NO: 54031 - DNA, 30 bp, Homo sapiens; identical to SEQ ID NO: 12456
  source 1..30: mol_type = genomic DNA

SEQ ID NO: 54032 - DNA, 18 bp, Homo sapiens
  source 1..18: mol_type = genomic DNA
gattcccggtcagggaac

SEQ ID NO: 54033 - DNA, 37 bp, Homo sapiens; identical to SEQ ID NO: 29434
  source 1..37: mol_type = genomic DNA

SEQ ID NO: 54034 - DNA, 31 bp, Homo sapiens; identical to SEQ ID NO: 3862
  source 1..31: mol_type = genomic DNA

SEQ ID NO: 54035 - DNA, 23 bp, Homo sapiens
  source 1..23: mol_type = genomic DNA
ggttcgatcccgggtttcggcac

SEQ ID NO: 54036 - DNA, 30 bp, Homo sapiens; identical to SEQ ID NO: 7417
  source 1..30: mol_type = genomic DNA

SEQ ID NO: 54037 - DNA, 20 bp, Homo sapiens
  source 1..20: mol_type = genomic DNA
cgagcctcacctggagcacc

SEQ ID NO: 54038 - DNA, 23 bp, Homo sapiens
  source 1..23: mol_type = genomic DNA
ggttcgaatcccttcgtggttgc

SEQ ID NO: 54039 - DNA, 33 bp, Homo sapiens; identical to SEQ ID NO: 17002
  source 1..33: mol_type = genomic DNA

SEQ ID NO: 54040 - DNA, 23 bp, Homo sapiens
  source 1..23: mol_type = genomic DNA
gttcaaatctcgctggggcctcc

SEQ ID NO: 54041 - DNA, 23 bp, Homo sapiens
  source 1..23: mol_type = genomic DNA
gttcgaacctcagagggggcacc

SEQ ID NO: 54042 - DNA, 35 bp, Homo sapiens; identical to SEQ ID NO: 11966
  source 1..35: mol_type = genomic DNA

SEQ ID NO: 54043 - DNA, 31 bp, Homo sapiens; identical to SEQ ID NO: 7478
  source 1..31: mol_type = genomic DNA

SEQ ID NO: 54044 - DNA, 34 bp, Homo sapiens; identical to SEQ ID NO: 18702
  source 1..34: mol_type = genomic DNA

SEQ ID NO: 54045 - DNA, 28 bp, Homo sapiens
  source 1..28: mol_type = genomic DNA
tatggtctagcggttaggattcctggtt

SEQ ID NO: 54046 - DNA, 30 bp, Homo sapiens; identical to SEQ ID NO: 20825
  source 1..30: mol_type = genomic DNA

SEQ ID NO: 54047 - DNA, 20 bp, Homo sapiens
  source 1..20: mol_type = genomic DNA
cgaatcccagcggggcctcc

SEQ ID NO: 54048 - DNA, 24 bp, Homo sapiens
  source 1..24: mol_type = genomic DNA
ggttcgagcccacccagggacgcc

SEQ ID NO: 54049 - DNA, 16 bp, Homo sapiens
  source 1..16: mol_type = genomic DNA
ggtgcgagaggtcccg

SEQ ID NO: 54050 - DNA, 20 bp, Homo sapiens
  source 1..20: mol_type = genomic DNA
attccggatcagaagattga

SEQ ID NO: 54051 - DNA, 43 bp, Homo sapiens; identical to SEQ ID NO: 17864
  source 1..43: mol_type = genomic DNA

SEQ ID NO: 54052 - DNA, 25 bp, Homo sapiens
  source 1..25: mol_type = genomic DNA
gggttcgaatcccttcgtggttgcc

SEQ ID NO: 54053 - DNA, 26 bp, Homo sapiens
  source 1..26: mol_type = genomic DNA
ggagaccggggttcgattccccgacg

SEQ ID NO: 54054 - DNA, 19 bp, Homo sapiens
  source 1..19: mol_type = genomic DNA
agtggttatcacgtctgct

SEQ ID NO: 54055 - DNA, 26 bp, Homo sapiens
  source 1..26: mol_type = genomic DNA
agccgtgatcgtatagtggttagtac

SEQ ID NO: 54056 - DNA, 31 bp, Homo sapiens; identical to SEQ ID NO: 26040
  source 1..31: mol_type = genomic DNA

SEQ ID NO: 54057 - DNA, 29 bp, Homo sapiens
  source 1..29: mol_type = genomic DNA
gaagaagcagcttcaaacctgccggggct

SEQ ID NO: 54058 - DNA, 34 bp, Homo sapiens; identical to SEQ ID NO: 2354
  source 1..34: mol_type = genomic DNA

SEQ ID NO: 54059 - DNA, 19 bp, Homo sapiens
  source 1..19: mol_type = genomic DNA
cgaaaccgggcggaaacac

SEQ ID NO: 54060 - DNA, 32 bp, Homo sapiens; identical to SEQ ID NO: 15365
  source 1..32: mol_type = genomic DNA

SEQ ID NO: 54061 - DNA, 33 bp, Homo sapiens; identical to SEQ ID NO: 1372
  source 1..33: mol_type = genomic DNA

SEQ ID NO: 54062 - DNA, 21 bp, Homo sapiens
  source 1..21: mol_type = genomic DNA
ttcgaaaccgggcagaagcac

SEQ ID NO: 54063 - DNA, 36 bp, Homo sapiens; identical to SEQ ID NO: 14082
  source 1..36: mol_type = genomic DNA

SEQ ID NO: 54064 - DNA, 24 bp, Homo sapiens
  source 1..24: mol_type = genomic DNA
tgttcgaatcacgtcggggtcacc

SEQ ID NO: 54065 - DNA, 42 bp, Homo sapiens; identical to SEQ ID NO: 30795
  source 1..42: mol_type = genomic DNA

SEQ ID NO: 54066 - DNA, 24 bp, Homo sapiens
  source 1..24: mol_type = genomic DNA
agttcgagcctcacctggagcacc

SEQ ID NO: 54067 - DNA, 20 bp, Homo sapiens
  source 1..20: mol_type = genomic DNA
cgaatcctgctcacagcgcc

SEQ ID NO: 54068 - DNA, 25 bp, Homo sapiens
  source 1..25: mol_type = genomic DNA
agggattgtgggttcgagtcccatc

SEQ ID NO: 54069 - DNA, 23 bp, Homo sapiens
  source 1..23: mol_type = genomic DNA
gttcaaatcccggacgagccccc

SEQ ID NO: 54070 - DNA, 22 bp, Homo sapiens
  source 1..22: mol_type = genomic DNA
gttcgaatcccactcctgacac

SEQ ID NO: 54071 - DNA, 19 bp, Homo sapiens
  source 1..19: mol_type = genomic DNA
cagagtggcgcagcggaag

SEQ ID NO: 54072 - DNA, 20 bp, Homo sapiens
  source 1..20: mol_type = genomic DNA
gttcaagtccctgttcgggc

SEQ ID NO: 54073 - DNA, 22 bp, Homo sapiens
  source 1..22: mol_type = genomic DNA
ttcgagtcctgccgcggtcgcc

SEQ ID NO: 54074 - DNA, 30 bp, Homo sapiens; identical to SEQ ID NO: 24572
  source 1..30: mol_type = genomic DNA

SEQ ID NO: 54075 - DNA, 33 bp, Homo sapiens; identical to SEQ ID NO: 24641
  source 1..33: mol_type = genomic DNA

SEQ ID NO: 54076 - DNA, 27 bp, Homo sapiens
  source 1..27: mol_type = genomic DNA
gtgggtttaagtcccattggtctagcc

SEQ ID NO: 54077 - DNA, 21 bp, Homo sapiens
  source 1..21: mol_type = genomic DNA
tcgagtcccttcgtggtcgcc

SEQ ID NO: 54078 - DNA, 18 bp, Homo sapiens
  source 1..18: mol_type = genomic DNA
attcccggccaatgcacc

SEQ ID NO: 54079 - DNA, 17 bp, Homo sapiens
  source 1..17: mol_type = genomic DNA
gggtagagcatttgact

SEQ ID NO: 54080 - DNA, 34 bp, Homo sapiens; identical to SEQ ID NO: 17232
  source 1..34: mol_type = genomic DNA

SEQ ID NO: 54081 - DNA, 24 bp, Homo sapiens
  source 1..24: mol_type = genomic DNA
ggttcgaatcccacttctgacacc

SEQ ID NO: 54082 - DNA, 22 bp, Homo sapiens
  source 1..22: mol_type = genomic DNA
gttcgaatccgagtcacggcac

SEQ ID NO: 54083 - DNA, 37 bp, Homo sapiens; identical to SEQ ID NO: 29436
  source 1..37: mol_type = genomic DNA

SEQ ID NO: 54084 - DNA, 20 bp, Homo sapiens
  source 1..20: mol_type = genomic DNA
cgaatccggctcggaggacc

SEQ ID NO: 54085 - DNA, 17 bp, Homo sapiens
  source 1..17: mol_type = genomic DNA
aatccgggtgccccctc

SEQ ID NO: 54086 - DNA, 22 bp, Homo sapiens
  source 1..22: mol_type = genomic DNA
atcgatgcccgcatcctccacc

SEQ ID NO: 54087 - DNA, 23 bp, Homo sapiens
  source 1..23: mol_type = genomic DNA
gttcgagtcccatctgggtcgcc

SEQ ID NO: 54088 - DNA, 20 bp, Homo sapiens
  source 1..20: mol_type = genomic DNA
cgagcccacccagggacgcc

SEQ ID NO: 54089 - DNA, 40 bp, Homo sapiens; identical to SEQ ID NO: 23000
  source 1..40: mol_type = genomic DNA

SEQ ID NO: 54090 - DNA, 27 bp, Homo sapiens
  source 1..27: mol_type = genomic DNA
agctcagtcggtagagcatgggactct

SEQ ID NO: 54091 - DNA, 19 bp, Homo sapiens
  source 1..19: mol_type = genomic DNA
tctgaaggtcctgagttcg

SEQ ID NO: 54092 - DNA, 24 bp, Homo sapiens
  source 1..24: mol_type = genomic DNA
cggggttcgattccccgacgggga

SEQ ID NO: 54093 - DNA, 18 bp, Homo sapiens
  source 1..18: mol_type = genomic DNA
atccccagcatctccacc

SEQ ID NO: 54094 - DNA, 23 bp, Homo sapiens
  source 1..23: mol_type = genomic DNA
gttcgaatcccacttctgacacc

SEQ ID NO: 54095 - DNA, 36 bp, Homo sapiens; identical to SEQ ID NO: 24650
  source 1..36: mol_type = genomic DNA

SEQ ID NO: 54096 - DNA, 16 bp, Homo sapiens
  source 1..16: mol_type = genomic DNA
aatccggctcgaagga

SEQ ID NO: 54097 - DNA, 42 bp, Homo sapiens; identical to SEQ ID NO: 9435
  source 1..42: mol_type = genomic DNA

SEQ ID NO: 54098 - DNA, 22 bp, Homo sapiens
  source 1..22: mol_type = genomic DNA
gttcgattcccggccaacgcac

SEQ ID NO: 54099 - DNA, 21 bp, Homo sapiens
  source 1..21: mol_type = genomic DNA
ttcaaatcacgtcggggtcac

SEQ ID NO: 54100 - DNA, 24 bp, Homo sapiens
  source 1..24: mol_type = genomic DNA
ggttcgaatcccactcctgacacc

SEQ ID NO: 54101 - DNA, 37 bp, Homo sapiens; identical to SEQ ID NO: 24648
  source 1..37: mol_type = genomic DNA

SEQ ID NO: 54102 - DNA, 29 bp, Homo sapiens
  source 1..29: mol_type = genomic DNA
atggtctagcggttaggattcctggtttt

SEQ ID NO: 54103 - DNA, 24 bp, Homo sapiens
  source 1..24: mol_type = genomic DNA
ggttcaagtccctgttcgggcgcc

SEQ ID NO: 54104 - DNA, 23 bp, Homo sapiens
  source 1..23: mol_type = genomic DNA
gttcgaaccccgtccgtgcctcc

SEQ ID NO: 54105 - DNA, 17 bp, Homo sapiens
  source 1..17: mol_type = genomic DNA
gggtgtgataggtggca

SEQ ID NO: 54106 - DNA, 16 bp, Homo sapiens
  source 1..16: mol_type = genomic DNA
aaatgtttagacgggc

SEQ ID NO: 54107 - DNA, 41 bp, Homo sapiens; identical to SEQ ID NO: 23029
  source 1..41: mol_type = genomic DNA

SEQ ID NO: 54108 - DNA, 20 bp, Homo sapiens
  source 1..20: mol_type = genomic DNA
gtagaattctcgcctgccac

SEQ ID NO: 54109 - DNA, 17 bp, Homo sapiens
  source 1..17: mol_type = genomic DNA
aatcccactcctgacac

SEQ ID NO: 54110 - DNA, 28 bp, Homo sapiens
  source 1..28: mol_type = genomic DNA
agaagcagcttcaaacctgccggggctt

SEQ ID NO: 54111 - DNA, 16 bp, Homo sapiens
  source 1..16: mol_type = genomic DNA
tgagggtccagggttc

SEQ ID NO: 54112 - DNA, 17 bp, Homo sapiens
  source 1..17: mol_type = genomic DNA
atcccgggtttcggcac

SEQ ID NO: 54113 - DNA, 20 bp, Homo sapiens
  source 1..20: mol_type = genomic DNA
caaatctcggtgggacctcc

SEQ ID NO: 54114 - DNA, 23 bp, Homo sapiens
  source 1..23: mol_type = genomic DNA
agttcaaatctcgctggggcctc

SEQ ID NO: 54115 - DNA, 20 bp, Homo sapiens
  source 1..20: mol_type = genomic DNA
aggtcgatggatcgaaacca

SEQ ID NO: 54116 - DNA, 32 bp, Homo sapiens; identical to SEQ ID NO: 12011
  source 1..32: mol_type = genomic DNA

SEQ ID NO: 54117 - DNA, 24 bp, Homo sapiens
  source 1..24: mol_type = genomic DNA
agttcaaatctcggtggaacctcc

SEQ ID NO: 54118 - DNA, 18 bp, Homo sapiens
  source 1..18: mol_type = genomic DNA
tcgaaaccatcctctgct

SEQ ID NO: 54119 - DNA, 22 bp, Homo sapiens
  source 1..22: mol_type = genomic DNA
agaggtcgatggatcgaaacca

SEQ ID NO: 54120 - DNA, 33 bp, Homo sapiens; identical to SEQ ID NO: 11964
  source 1..33: mol_type = genomic DNA

SEQ ID NO: 54121 - DNA, 19 bp, Homo sapiens
  source 1..19: mol_type = genomic DNA
cttcaaacctgccggggct

SEQ ID NO: 54122 - DNA, 23 bp, Homo sapiens
  source 1..23: mol_type = genomic DNA
gttcgaatcccactcctgacacc

SEQ ID NO: 54123 - DNA, 36 bp, Homo sapiens; identical to SEQ ID NO: 2162
  source 1..36: mol_type = genomic DNA

SEQ ID NO: 54124 - DNA, 23 bp, Homo sapiens
  source 1..23: mol_type = genomic DNA
gttcgaatcccagcggggcctcc

SEQ ID NO: 54125 - DNA, 22 bp, Homo sapiens
  source 1..22: mol_type = genomic DNA
ttcaaatctcggtgggacctcc

SEQ ID NO: 54126 - DNA, 19 bp, Homo sapiens
  source 1..19: mol_type = genomic DNA
gaatcccaccgctgccacc

SEQ ID NO: 54127 - DNA, 17 bp, Homo sapiens
  source 1..17: mol_type = genomic DNA
tggttatcacgtctgct

SEQ ID NO: 54128 - DNA, 20 bp, Homo sapiens
  source 1..20: mol_type = genomic DNA
cgcgaaaggtccccggttcg

SEQ ID NO: 54129 - DNA, 21 bp, Homo sapiens
  source 1..21: mol_type = genomic DNA
tcgtaaaccgaagatcgcggg

SEQ ID NO: 54130 - DNA, 18 bp, Homo sapiens
  source 1..18: mol_type = genomic DNA
attcccggtcagggaacc

SEQ ID NO: 54131 - DNA, 37 bp, Homo sapiens; identical to SEQ ID NO: 11015
  source 1..37: mol_type = genomic DNA

SEQ ID NO: 54132 - DNA, 29 bp, Homo sapiens
  source 1..29: mol_type = genomic DNA
gattccaggttcgactcctggctggctcg

SEQ ID NO: 54133 - DNA, 31 bp, Homo sapiens; identical to SEQ ID NO: 17229
  source 1..31: mol_type = genomic DNA

SEQ ID NO: 54134 - DNA, 20 bp, Homo sapiens
  source 1..20: mol_type = genomic DNA
cgactcccggtgtgggaacc

SEQ ID NO: 54135 - DNA, 22 bp, Homo sapiens
  source 1..22: mol_type = genomic DNA
gttcaaatcccggacgagcccc

SEQ ID NO: 54136 - DNA, 23 bp, Homo sapiens
  source 1..23: mol_type = genomic DNA
gttcgaatcccttcgtggttgcc

SEQ ID NO: 54137 - DNA, 23 bp, Homo sapiens
  source 1..23: mol_type = genomic DNA
gttcgattcccggccaacgcacc

SEQ ID NO: 54138 - DNA, 18 bp, Homo sapiens
  source 1..18: mol_type = genomic DNA
aatccgggtgccccctcc

SEQ ID NO: 54139 - DNA, 37 bp, Homo sapiens; identical to SEQ ID NO: 14083
  source 1..37: mol_type = genomic DNA

SEQ ID NO: 54140 - DNA, 21 bp, Homo sapiens
  source 1..21: mol_type = genomic DNA
tcaaatctcggtgggacctcc

SEQ ID NO: 54141 - DNA, 37 bp, Homo sapiens; identical to SEQ ID NO: 14011
  source 1..37: mol_type = genomic DNA

SEQ ID NO: 54142 - DNA, 18 bp, Homo sapiens
  source 1..18: mol_type = genomic DNA
gttcaaatctcgctgggg

SEQ ID NO: 54143 - DNA, 16 bp, Homo sapiens
  source 1..16: mol_type = genomic DNA
ggtagagcatgagact

SEQ ID NO: 54144 - DNA, 26 bp, Homo sapiens
  source 1..26: mol_type = genomic DNA
aagcagcttcaaacctgccggggctt

SEQ ID NO: 54145 - DNA, 37 bp, Homo sapiens; identical to SEQ ID NO: 10422
  source 1..37: mol_type = genomic DNA

SEQ ID NO: 54146 - DNA, 47 bp, Homo sapiens; identical to SEQ ID NO: 15057
  source 1..47: mol_type = genomic DNA

SEQ ID NO: 54147 - DNA, 25 bp, Homo sapiens
  source 1..25: mol_type = genomic DNA
tggtctaggggtatgattctcgctt

SEQ ID NO: 54148 - DNA, 19 bp, Homo sapiens
  source 1..19: mol_type = genomic DNA
agcatgggactcttaatcc

SEQ ID NO: 54149 - DNA, 28 bp, Homo sapiens
  source 1..28: mol_type = genomic DNA
accttttaagttaaagattaagagaacc

SEQ ID NO: 54150 - DNA, 32 bp, Homo sapiens; identical to SEQ ID NO: 18724
  source 1..32: mol_type = genomic DNA

SEQ ID NO: 54151 - DNA, 34 bp, Homo sapiens; identical to SEQ ID NO: 8949
  source 1..34: mol_type = genomic DNA

SEQ ID NO: 54152 - DNA, 25 bp, Homo sapiens
  source 1..25: mol_type = genomic DNA
tggtgtagtggtatcatgcaagatt

SEQ ID NO: 54153 - DNA, 23 bp, Homo sapiens
  source 1..23: mol_type = genomic DNA
ggttcgagtcccttcgtggtcgc

SEQ ID NO: 54154 - DNA, 19 bp, Homo sapiens
  source 1..19: mol_type = genomic DNA
atgtagctcagtggtagag

SEQ ID NO: 54155 - DNA, 29 bp, Homo sapiens
  source 1..29: mol_type = genomic DNA
aagaagcagcttcaaacctgccggggctt

SEQ ID NO: 54156 - DNA, 17 bp, Homo sapiens
  source 1..17: mol_type = genomic DNA
aacgaatgatttcgact

SEQ ID NO: 54157 - DNA, 19 bp, Homo sapiens
  source 1..19: mol_type = genomic DNA
cgatcccgggtttcggcac

SEQ ID NO: 54158 - DNA, 28 bp, Homo sapiens
  source 1..28: mol_type = genomic DNA
cgatggatcgaaaccatcctctgctacc

SEQ ID NO: 54159 - DNA, 16 bp, Homo sapiens
  source 1..16: mol_type = genomic DNA
agctatccattggtct

SEQ ID NO: 54160 - DNA, 20 bp, Homo sapiens
  source 1..20: mol_type = genomic DNA
tcgatcccgggtttcggcac

SEQ ID NO: 54161 - DNA, 38 bp, Homo sapiens; identical to SEQ ID NO: 3099
  source 1..38: mol_type = genomic DNA

SEQ ID NO: 54162 - DNA, 34 bp, Homo sapiens; identical to SEQ ID NO: 4971
  source 1..34: mol_type = genomic DNA

SEQ ID NO: 54163 - DNA, 23 bp, Homo sapiens
  source 1..23: mol_type = genomic DNA
gttcgaatcacgtcggggtcacc

SEQ ID NO: 54164 - DNA, 23 bp, Homo sapiens
  source 1..23: mol_type = genomic DNA
gttcgagtcccatctggggtgcc

SEQ ID NO: 54165 - DNA, 27 bp, Homo sapiens
  source 1..27: mol_type = genomic DNA
atggtctagcggttaggattcctggtt

SEQ ID NO: 54166 - DNA, 18 bp, Homo sapiens
  source 1..18: mol_type = genomic DNA
cgatcccgggtttcggca

SEQ ID NO: 54167 - DNA, 22 bp, Homo sapiens
  source 1..22: mol_type = genomic DNA
ggttcgaatcccaccgctgcca

SEQ ID NO: 54168 - DNA, 17 bp, Homo sapiens
  source 1..17: mol_type = genomic DNA
cgaaaccatcctctgct

SEQ ID NO: 54169 - DNA, 37 bp, Homo sapiens; identical to SEQ ID NO: 26881
  source 1..37: mol_type = genomic DNA

SEQ ID NO: 54170 - DNA, 23 bp, Homo sapiens
  source 1..23: mol_type = genomic DNA
gttcgaatcctgccgactacgcc

SEQ ID NO: 54171 - DNA, 22 bp, Homo sapiens
  source 1..22: mol_type = genomic DNA
ggggtgtagctcagtggtagag

SEQ ID NO: 54172 - DNA, 19 bp, Homo sapiens
  source 1..19: mol_type = genomic DNA
cgaatcccacttctgacac

SEQ ID NO: 54173 - DNA, 21 bp, Homo sapiens
  source 1..21: mol_type = genomic DNA
tcgaatcctgttcgtgacgcc

SEQ ID NO: 54174 - DNA, 20 bp, Homo sapiens
  source 1..20: mol_type = genomic DNA
cgaatccgagtcacggcacc

SEQ ID NO: 54175 - DNA, 24 bp, Homo sapiens
  source 1..24: mol_type = genomic DNA
ggttcgaatcccaccgctgccacc

SEQ ID NO: 54176 - DNA, 23 bp, Homo sapiens
  source 1..23: mol_type = genomic DNA
gatcgatgcccgcatcctccacc

SEQ ID NO: 54177 - DNA, 18 bp, Homo sapiens
  source 1..18: mol_type = genomic DNA
cgaatcccacttctgaca

SEQ ID NO: 54178 - DNA, 23 bp, Homo sapiens
  source 1..23: mol_type = genomic DNA
ggttcgaatcccagcggtgcctc

SEQ ID NO: 54179 - DNA, 21 bp, Homo sapiens
  source 1..21: mol_type = genomic DNA
gttcgattcccggccaacgca

SEQ ID NO: 54180 - DNA, 35 bp, Homo sapiens; identical to SEQ ID NO: 17233
  source 1..35: mol_type = genomic DNA

SEQ ID NO: 54181 - DNA, 22 bp, Homo sapiens
  source 1..22: mol_type = genomic DNA
ttcgaatcccaccgctgccacc

SEQ ID NO: 54182 - DNA, 21 bp, Homo sapiens
  source 1..21: mol_type = genomic DNA
tggtctaggggtatgattctc

SEQ ID NO: 54183 - DNA, 18 bp, Homo sapiens
  source 1..18: mol_type = genomic DNA
aaaccatcctctgctacc

SEQ ID NO: 54184 - DNA, 20 bp, Homo sapiens
  source 1..20: mol_type = genomic DNA
acttaagatccaatggacat

SEQ ID NO: 54185 - DNA, 22 bp, Homo sapiens
  source 1..22: mol_type = genomic DNA
ttcgaatcccagcggtgcctcc

SEQ ID NO: 54186 - DNA, 22 bp, Homo sapiens
  source 1..22: mol_type = genomic DNA
tttccgtagtgtagtggtcatc

SEQ ID NO: 54187 - DNA, 39 bp, Homo sapiens; identical to SEQ ID NO: 3100
  source 1..39: mol_type = genomic DNA

SEQ ID NO: 54188 - DNA, 18 bp, Homo sapiens
  source 1..18: mol_type = genomic DNA
ccgaaaggttggtggttc

SEQ ID NO: 54189 - DNA, 36 bp, Homo sapiens; identical to SEQ ID NO: 16643
  source 1..36: mol_type = genomic DNA

SEQ ID NO: 54190 - DNA, 18 bp, Homo sapiens
  source 1..18: mol_type = genomic DNA
gatcccgggtttcggcac

SEQ ID NO: 54191 - DNA, 21 bp, Homo sapiens
  source 1..21: mol_type = genomic DNA
gttcgagcctcacctggagca

SEQ ID NO: 54192 - DNA, 21 bp, Homo sapiens
  source 1..21: mol_type = genomic DNA
agaggtcgatggatcgaaacc

SEQ ID NO: 54193 - DNA, 18 bp, Homo sapiens
  source 1..18: mol_type = genomic DNA
agccccagtggaaccacc

SEQ ID NO: 54194 - DNA, 24 bp, Homo sapiens
  source 1..24: mol_type = genomic DNA
atggccgagcggtctaaggcgctg

SEQ ID NO: 54195 - DNA, 22 bp, Homo sapiens
  source 1..22: mol_type = genomic DNA
ttcgaatcccacttctgacacc

SEQ ID NO: 54196 - DNA, 20 bp, Homo sapiens
  source 1..20: mol_type = genomic DNA
caaatctcgctggggcctcc

SEQ ID NO: 54197 - DNA, 22 bp, Homo sapiens
  source 1..22: mol_type = genomic DNA
ggttcgaaaccgggcggaaaca

SEQ ID NO: 54198 - DNA, 22 bp, Homo sapiens
  source 1..22: mol_type = genomic DNA
gcagcgatggccgagtggttaa

SEQ ID NO: 54199 - DNA, 20 bp, Homo sapiens
  source 1..20: mol_type = genomic DNA
tcgaatcctgccgactacgc

SEQ ID NO: 54200 - DNA, 23 bp, Homo sapiens
  source 1..23: mol_type = genomic DNA
accaggatggccgagtggttaag

SEQ ID NO: 54201 - DNA, 18 bp, Homo sapiens
  source 1..18: mol_type = genomic DNA
ggtctagcggttaggatt

SEQ ID NO: 54202 - DNA, 23 bp, Homo sapiens
  source 1..23: mol_type = genomic DNA
aggttcgactcctggctggctcg

SEQ ID NO: 54203 - DNA, 20 bp, Homo sapiens
  source 1..20: mol_type = genomic DNA
tcgagtcctgccgcggtcgc

SEQ ID NO: 54204 - DNA, 32 bp, Homo sapiens; identical to SEQ ID NO: 18754
  source 1..32: mol_type = genomic DNA

SEQ ID NO: 54205 - DNA, 33 bp, Homo sapiens; identical to SEQ ID NO: 16633
  source 1..33: mol_type = genomic DNA

SEQ ID NO: 54206 - DNA, 16 bp, Homo sapiens
  source 1..16: mol_type = genomic DNA
agctcagtcggtagag

SEQ ID NO: 54207 - DNA, 21 bp, Homo sapiens
  source 1..21: mol_type = genomic DNA
gttcgaatcccaccgctgcca

SEQ ID NO: 54208 - DNA, 16 bp, Homo sapiens
  source 1..16: mol_type = genomic DNA
ggccgtgatcgtatag

SEQ ID NO: 54209 - DNA, 18 bp, Homo sapiens
  source 1..18: mol_type = genomic DNA
aggtcgatggatcgaaac

SEQ ID NO: 54210 - DNA, 29 bp, Homo sapiens
  source 1..29: mol_type = genomic DNA
atatggtctagcggttaggattcctggtt

SEQ ID NO: 54211 - DNA, 21 bp, Homo sapiens
  source 1..21: mol_type = genomic DNA
ttcgatcccgggtttcggcac

SEQ ID NO: 54212 - DNA, 27 bp, Homo sapiens
  source 1..27: mol_type = genomic DNA
gccgctggtgtagtggtatcatgcaag

SEQ ID NO: 54213 - DNA, 24 bp, Homo sapiens
  source 1..24: mol_type = genomic DNA
cctggtggtctagtggttaggatt

SEQ ID NO: 54214 - DNA, 17 bp, Homo sapiens
  source 1..17: mol_type = genomic DNA
taggattcggcgctctc

SEQ ID NO: 54215 - DNA, 19 bp, Homo sapiens
  source 1..19: mol_type = genomic DNA
ttgggtgcgagaggtcccg

SEQ ID NO: 54216 - DNA, 24 bp, Homo sapiens
  source 1..24: mol_type = genomic DNA
gggttcgagtcccttcgtggtcgc

SEQ ID NO: 54217 - DNA, 23 bp, Homo sapiens
  source 1..23: mol_type = genomic DNA
gttcaatccccggcacctccacc

SEQ ID NO: 54218 - DNA, 23 bp, Homo sapiens
  source 1..23: mol_type = genomic DNA
ggttcgaaaccgggcggaaacac

SEQ ID NO: 54219 - DNA, 20 bp, Homo sapiens
  source 1..20: mol_type = genomic DNA
caagtcacgtcggggtcacc

SEQ ID NO: 54220 - DNA, 18 bp, Homo sapiens
  source 1..18: mol_type = genomic DNA
agcatgggactcttaatc

SEQ ID NO: 54221 - DNA, 19 bp, Homo sapiens
  source 1..19: mol_type = genomic DNA
aatcctgttcgtgacgcca

SEQ ID NO: 54222 - DNA, 25 bp, Homo sapiens
  source 1..25: mol_type = genomic DNA
gatggccgagcggtctaaggcgctg

SEQ ID NO: 54223 - DNA, 20 bp, Homo sapiens
  source 1..20: mol_type = genomic DNA
cgaatcctgccgactacgcc

SEQ ID NO: 54224 - DNA, 21 bp, Homo sapiens
  source 1..21: mol_type = genomic DNA
tcaagtcacgtcggggtcacc

SEQ ID NO: 54225 - DNA, 18 bp, Homo sapiens
  source 1..18: mol_type = genomic DNA
caagttctggtctccgga

SEQ ID NO: 54226 - DNA, 26 bp, Homo sapiens
  source 1..26: mol_type = genomic DNA
ctggtgtagtggtatcatgcaagatt

SEQ ID NO: 54227 - DNA, 19 bp, Homo sapiens
  source 1..19: mol_type = genomic DNA
tcgaatccgagtcacggca

SEQ ID NO: 54228 - DNA, 24 bp, Homo sapiens
  source 1..24: mol_type = genomic DNA
ggtctaggggtatgattctcgctt

SEQ ID NO: 54229 - DNA, 21 bp, Homo sapiens
  source 1..21: mol_type = genomic DNA
tcgagcctcacctggagcacc

SEQ ID NO: 54230 - DNA, 20 bp, Homo sapiens
  source 1..20: mol_type = genomic DNA
tcgaatcacgtcggggtcac

SEQ ID NO: 54231 - DNA, 20 bp, Homo sapiens
  source 1..20: mol_type = genomic DNA
tcgaatcccacttctgacac

SEQ ID NO: 54232 - DNA, 23 bp, Homo sapiens
  source 1..23: mol_type = genomic DNA
gttcgaatcccagcggtgcctcc

SEQ ID NO: 54233 - DNA, 19 bp, Homo sapiens
  source 1..19: mol_type = genomic DNA
aatccgagtcacggcacca

SEQ ID NO: 54234 - DNA, 25 bp, Homo sapiens
  source 1..25: mol_type = genomic DNA
ggtgagcactctggactctgaatcc

SEQ ID NO: 54235 - DNA, 26 bp, Homo sapiens
  source 1..26: mol_type = genomic DNA
tggtgtaatggtaagcactctggact

SEQ ID NO: 54236 - DNA, 18 bp, Homo sapiens
  source 1..18: mol_type = genomic DNA
gtatagtggttagtactc

SEQ ID NO: 54237 - DNA, 23 bp, Homo sapiens
  source 1..23: mol_type = genomic DNA
gttcgaatcccaccgctgccacc

SEQ ID NO: 54238 - DNA, 19 bp, Homo sapiens
  source 1..19: mol_type = genomic DNA
aaatctcggtggaacctcc

SEQ ID NO: 54239 - DNA, 22 bp, Homo sapiens
  source 1..22: mol_type = genomic DNA
ttcgaatccggctcgaaggacc

SEQ ID NO: 54240 - DNA, 29 bp, Homo sapiens
  source 1..29: mol_type = genomic DNA
ctgcgtgttcgaatcacgtcggggtcacc

SEQ ID NO: 54241 - DNA, 19 bp, Homo sapiens
  source 1..19: mol_type = genomic DNA
gattcccggtcagggaacc

SEQ ID NO: 54242 - DNA, 37 bp, Homo sapiens; identical to SEQ ID NO: 19699
  source 1..37: mol_type = genomic DNA

SEQ ID NO: 54243 - DNA, 24 bp, Homo sapiens
  source 1..24: mol_type = genomic DNA
ggttcgagccccacgttgggcgcc

SEQ ID NO: 54244 - DNA, 22 bp, Homo sapiens
  source 1..22: mol_type = genomic DNA
ttcaaatcccggacgagccccc

SEQ ID NO: 54245 - DNA, 16 bp, Homo sapiens
  source 1..16: mol_type = genomic DNA
cgattcccggtcaggg

SEQ ID NO: 54246 - DNA, 36 bp, Homo sapiens; identical to SEQ ID NO: 26685
  source 1..36: mol_type = genomic DNA

SEQ ID NO: 54247 - DNA, 36 bp, Homo sapiens; identical to SEQ ID NO: 42665
  source 1..36: mol_type = genomic DNA

SEQ ID NO: 54248 - DNA, 22 bp, Homo sapiens
  source 1..22: mol_type = genomic DNA
tccctggtctagtggttaggat

SEQ ID NO: 54249 - DNA, 18 bp, Homo sapiens
  source 1..18: mol_type = genomic DNA
ggatagctcagtcggtag

SEQ ID NO: 54250 - DNA, 22 bp, Homo sapiens
  source 1..22: mol_type = genomic DNA
accaggatggccgagtggttaa

SEQ ID NO: 54251 - DNA, 23 bp, Homo sapiens
  source 1..23: mol_type = genomic DNA
gctagctcagtcggtagagcatg

SEQ ID NO: 54252 - DNA, 19 bp, Homo sapiens
  source 1..19: mol_type = genomic DNA
gatcccgggtttcggcacc

SEQ ID NO: 54253 - DNA, 18 bp, Homo sapiens
  source 1..18: mol_type = genomic DNA
aaatctcggtggaacctc

SEQ ID NO: 54254 - DNA, 22 bp, Homo sapiens
  source 1..22: mol_type = genomic DNA
ttcgattccggctcgaaggacc

SEQ ID NO: 54255 - DNA, 19 bp, Homo sapiens
  source 1..19: mol_type = genomic DNA
cgagtcctgccgcggtcgc

SEQ ID NO: 54256 - DNA, 16 bp, Homo sapiens
  source 1..16: mol_type = genomic DNA
ccattcttgcgacccg

SEQ ID NO: 54257 - DNA, 19 bp, Homo sapiens
  source 1..19: mol_type = genomic DNA
gctttcaccgccgcggccc

SEQ ID NO: 54258 - DNA, 21 bp, Homo sapiens
  source 1..21: mol_type = genomic DNA
tcaaatctcggtggaacctcc

SEQ ID NO: 54259 - DNA, 22 bp, Homo sapiens
  source 1..22: mol_type = genomic DNA
gttcgaatcccagcggtgcctc

SEQ ID NO: 54260 - DNA, 19 bp, Homo sapiens
  source 1..19: mol_type = genomic DNA
agtccctgttcgggcgcca

SEQ ID NO: 54261 - DNA, 21 bp, Homo sapiens
  source 1..21: mol_type = genomic DNA
tctagtggttaggattcggcg

SEQ ID NO: 54262 - DNA, 24 bp, Homo sapiens
  source 1..24: mol_type = genomic DNA
agcagagtggcgcagcggaagcgt

SEQ ID NO: 54263 - DNA, 20 bp, Homo sapiens
  source 1..20: mol_type = genomic DNA
ggatagctcagtcggtagag

SEQ ID NO: 54264 - DNA, 16 bp, Homo sapiens
  source 1..16: mol_type = genomic DNA
attgtgaatctgacaa

SEQ ID NO: 54265 - DNA, 24 bp, Homo sapiens
  source 1..24: mol_type = genomic DNA
ggttcaattccccgacggggagcc

SEQ ID NO: 54266 - DNA, 20 bp, Homo sapiens
  source 1..20: mol_type = genomic DNA
tcgaatccgagtcacggcac

SEQ ID NO: 54267 - DNA, 19 bp, Homo sapiens
  source 1..19: mol_type = genomic DNA
cgaatccggctcgaaggac

SEQ ID NO: 54268 - DNA, 20 bp, Homo sapiens
  source 1..20: mol_type = genomic DNA
cgattcccggtcagggaacc

SEQ ID NO: 54269 - DNA, 22 bp, Homo sapiens
  source 1..22: mol_type = genomic DNA
gtctagtggttaggattcggcg

SEQ ID NO: 54270 - DNA, 17 bp, Homo sapiens
  source 1..17: mol_type = genomic DNA
gcactctggactttgaa

SEQ ID NO: 54271 - DNA, 17 bp, Homo sapiens
  source 1..17: mol_type = genomic DNA
ggccgtgatcgtatagt

SEQ ID NO: 54272 - DNA, 18 bp, Homo sapiens
  source 1..18: mol_type = genomic DNA
aatctcggtggaacctcc

SEQ ID NO: 54273 - DNA, 21 bp, Homo sapiens
  source 1..21: mol_type = genomic DNA
ttcaaatcccggacgagcccc

SEQ ID NO: 54274 - DNA, 16 bp, Homo sapiens
  source 1..16: mol_type = genomic DNA
gttcgactcccggtgt

SEQ ID NO: 54275 - DNA, 23 bp, Homo sapiens
  source 1..23: mol_type = genomic DNA
gttcgaatccggctcgaaggacc

SEQ ID NO: 54276 - DNA, 20 bp, Homo sapiens
  source 1..20: mol_type = genomic DNA
ttcgaaaccgggcggaaaca

SEQ ID NO: 54277 - DNA, 24 bp, Homo sapiens
  source 1..24: mol_type = genomic DNA
gtcaggatggccgagtggtctaag

SEQ ID NO: 54278 - DNA, 19 bp, Homo sapiens
  source 1..19: mol_type = genomic DNA
tgattctcggtttgggtcc

SEQ ID NO: 54279 - DNA, 20 bp, Homo sapiens
  source 1..20: mol_type = genomic DNA
cgattccccgacggggagcc

SEQ ID NO: 54280 - DNA, 22 bp, Homo sapiens
  source 1..22: mol_type = genomic DNA
gttcgaatccggctcgaaggac

SEQ ID NO: 54281 - DNA, 29 bp, Homo sapiens
  source 1..29: mol_type = genomic DNA
tcgatggatcgaaaccatcctctgctacc

SEQ ID NO: 54282 - DNA, 20 bp, Homo sapiens
  source 1..20: mol_type = genomic DNA
gaggtcgatggatcgaaacc

SEQ ID NO: 54283 - DNA, 17 bp, Homo sapiens
  source 1..17: mol_type = genomic DNA
cggttaggattcctggt

SEQ ID NO: 54284 - DNA, 21 bp, Homo sapiens
  source 1..21: mol_type = genomic DNA
tcgaaaccgggcggaaacacc

SEQ ID NO: 54285 - DNA, 33 bp, Homo sapiens; identical to SEQ ID NO: 17231
  source 1..33: mol_type = genomic DNA

SEQ ID NO: 54286 - DNA, 17 bp, Homo sapiens
  source 1..17: mol_type = genomic DNA
gtctagtggttaggatt

SEQ ID NO: 54287 - DNA, 17 bp, Homo sapiens
  source 1..17: mol_type = genomic DNA
ctttttccaaggacacc

SEQ ID NO: 54288 - DNA, 21 bp, Homo sapiens
  source 1..21: mol_type = genomic DNA
gttcgaatcccatcctcgtcg

SEQ ID NO: 54289 - DNA, 25 bp, Homo sapiens
  source 1..25: mol_type = genomic DNA
gggttcgagtcccttcgtggtcgcc

SEQ ID NO: 54290 - DNA, 16 bp, Homo sapiens
  source 1..16: mol_type = genomic DNA
ccggagatgaaaacct

SEQ ID NO: 54291 - DNA, 24 bp, Homo sapiens
  source 1..24: mol_type = genomic DNA
ggttcgaatcccatcctcgtcgcc

SEQ ID NO: 54292 - DNA, 21 bp, Homo sapiens
  source 1..21: mol_type = genomic DNA
gaggtggccgagtggttaagg

SEQ ID NO: 54293 - DNA, 17 bp, Homo sapiens
  source 1..17: mol_type = genomic DNA
tggtagagcatttgact

SEQ ID NO: 54294 - DNA, 22 bp, Homo sapiens
  source 1..22: mol_type = genomic DNA
ttcgaaaccgggcggaaacacc

SEQ ID NO: 54295 - DNA, 22 bp, Homo sapiens
  source 1..22: mol_type = genomic DNA
gggatgtagctcagtggtagag

SEQ ID NO: 54296 - DNA, 21 bp, Homo sapiens
  source 1..21: mol_type = genomic DNA
ttcgaaaccgggcggaaacac

SEQ ID NO: 54297 - DNA, 19 bp, Homo sapiens
  source 1..19: mol_type = genomic DNA
tcgaaaccgggcggaaaca

SEQ ID NO: 54298 - DNA, 23 bp, Homo sapiens
  source 1..23: mol_type = genomic DNA
gttcgaatcccatcctcgtcgcc

SEQ ID NO: 54299 - DNA, 18 bp, Homo sapiens
  source 1..18: mol_type = genomic DNA
aaaccgggcggaaacacc

SEQ ID NO: 54300 - DNA, 23 bp, Homo sapiens
  source 1..23: mol_type = genomic DNA
atgaaaacctttttccaaggaca

SEQ ID NO: 54301 - DNA, 24 bp, Homo sapiens
  source 1..24: mol_type = genomic DNA
ctagtggttaggattcggcgctct

SEQ ID NO: 54302 - DNA, 28 bp, Homo sapiens
  source 1..28: mol_type = genomic DNA
cccggctagctcagtcggtagagcatgg

SEQ ID NO: 54303 - DNA, 22 bp, Homo sapiens
  source 1..22: mol_type = genomic DNA
ttcgattccccgacggggagcc

SEQ ID NO: 54304 - DNA, 17 bp, Homo sapiens
  source 1..17: mol_type = genomic DNA
gggtatgattctcgctt

SEQ ID NO: 54305 - DNA, 22 bp, Homo sapiens
  source 1..22: mol_type = genomic DNA
ctcagtggtagagcatttgact

SEQ ID NO: 54306 - DNA, 20 bp, Homo sapiens
  source 1..20: mol_type = genomic DNA
cgagtcctgccgcggtcgcc

SEQ ID NO: 54307 - DNA, 21 bp, Homo sapiens
  source 1..21: mol_type = genomic DNA
tcgaatcccaccgctgccacc

SEQ ID NO: 54308 - DNA, 16 bp, Homo sapiens
  source 1..16: mol_type = genomic DNA
ccgggcagaagcacca

SEQ ID NO: 54309 - DNA, 20 bp, Homo sapiens
  source 1..20: mol_type = genomic DNA
tcgaaaccgggcggaaacac

SEQ ID NO: 54310 - DNA, 18 bp, Homo sapiens
  source 1..18: mol_type = genomic DNA
gttagcactctggactct

SEQ ID NO: 54311 - DNA, 18 bp, Homo sapiens
  source 1..18: mol_type = genomic DNA
cttccaagcagttgaccc

SEQ ID NO: 54312 - DNA, 36 bp, Homo sapiens; identical to SEQ ID NO: 26880
  source 1..36: mol_type = genomic DNA

SEQ ID NO: 54313 - DNA, 25 bp, Homo sapiens
  source 1..25: mol_type = genomic DNA
aaggataacagctatccattggtct

SEQ ID NO: 54314 - DNA, 22 bp, Homo sapiens
  source 1..22: mol_type = genomic DNA
gttcgaatcccatcctcgtcgc

SEQ ID NO: 54315 - DNA, 36 bp, Homo sapiens; identical to SEQ ID NO: 25536
  source 1..36: mol_type = genomic DNA

SEQ ID NO: 54316 - DNA, 36 bp, Homo sapiens; identical to SEQ ID NO: 22610
  source 1..36: mol_type = genomic DNA

SEQ ID NO: 54317 - DNA, 21 bp, Homo sapiens
  source 1..21: mol_type = genomic DNA
cggatagctcagtcggtagag

SEQ ID NO: 54318 - DNA, 20 bp, Homo sapiens
  source 1..20: mol_type = genomic DNA
ttaggcctctttttaccacc

SEQ ID NO: 54319 - DNA, 17 bp, Homo sapiens
  source 1..17: mol_type = genomic DNA
ctcccggtgtgggaacc

SEQ ID NO: 54320 - DNA, 24 bp, Homo sapiens
  source 1..24: mol_type = genomic DNA
cgtggttgtagtccgtgcgagaat

SEQ ID NO: 54321 - DNA, 27 bp, Homo sapiens
  source 1..27: mol_type = genomic DNA
tagctcagtcggtagagcatgggactc

SEQ ID NO: 54322 - DNA, 23 bp, Homo sapiens
  source 1..23: mol_type = genomic DNA
cagtcggtagagcatgggactct

SEQ ID NO: 54323 - DNA, 23 bp, Homo sapiens
  source 1..23: mol_type = genomic DNA
gatcgaaaccatcctctgctacc

SEQ ID NO: 54324 - DNA, 25 bp, Homo sapiens
  source 1..25: mol_type = genomic DNA
gctcagtcggtagagcatgggactc

SEQ ID NO: 54325 - DNA, 22 bp, Homo sapiens
  source 1..22: mol_type = genomic DNA
tgaaaacctttttccaaggaca

SEQ ID NO: 54326 - DNA, 32 bp, Homo sapiens; identical to SEQ ID NO: 9765
  source 1..32: mol_type = genomic DNA

SEQ ID NO: 54327 - DNA, 31 bp, Homo sapiens; identical to SEQ ID NO: 27987
  source 1..31: mol_type = genomic DNA

SEQ ID NO: 54328 - DNA, 33 bp, Homo sapiens; identical to SEQ ID NO: 25909
  source 1..33: mol_type = genomic DNA

SEQ ID NO: 54329 - DNA, 18 bp, Homo sapiens
  source 1..18: mol_type = genomic DNA
aatcccactcctgacacc

SEQ ID NO: 54330 - DNA, 31 bp, Homo sapiens; identical to SEQ ID NO: 2233
  source 1..31: mol_type = genomic DNA

SEQ ID NO: 54331 - DNA, 23 bp, Homo sapiens
  source 1..23: mol_type = genomic DNA
ttcaaatcccggacgagccccca

SEQ ID NO: 54332 - DNA, 21 bp, Homo sapiens
  source 1..21: mol_type = genomic DNA
gtagtggtatcatgcaagatt

SEQ ID NO: 54333 - DNA, 19 bp, Homo sapiens
  source 1..19: mol_type = genomic DNA
aaaccgggcggaaacacca

SEQ ID NO: 54334 - DNA, 23 bp, Homo sapiens
  source 1..23: mol_type = genomic DNA
cgtggttgtagtccgtgcgagaa

SEQ ID NO: 54335 - DNA, 16 bp, Homo sapiens
  source 1..16: mol_type = genomic DNA
tagcactctggactct

SEQ ID NO: 54336 - DNA, 22 bp, Homo sapiens
  source 1..22: mol_type = genomic DNA
agtggtagaattctcgcctgcc

SEQ ID NO: 54337 - DNA, 29 bp, Homo sapiens
  source 1..29: mol_type = genomic DNA
cagagtggcgcagcggaagcgtgctgggc

SEQ ID NO: 54338 - DNA, 16 bp, Homo sapiens
  source 1..16: mol_type = genomic DNA
ccttcgatagctcagc

SEQ ID NO: 54339 - DNA, 19 bp, Homo sapiens
  source 1..19: mol_type = genomic DNA
gtcggtagagcatgggact

SEQ ID NO: 54340 - DNA, 22 bp, Homo sapiens
  source 1..22: mol_type = genomic DNA
tggtagaattctcgcctgccac

SEQ ID NO: 54341 - DNA, 16 bp, Homo sapiens
  source 1..16: mol_type = genomic DNA
cccggcccatgcacca

SEQ ID NO: 54342 - DNA, 17 bp, Homo sapiens
  source 1..17: mol_type = genomic DNA
ctctgcgttgtggccgc

SEQ ID NO: 54343 - DNA, 21 bp, Homo sapiens
  source 1..21: mol_type = genomic DNA
gttaggcctctttttaccacc

SEQ ID NO: 54344 - DNA, 22 bp, Homo sapiens
  source 1..22: mol_type = genomic DNA
ctagcggttaggattcctggtt

SEQ ID NO: 54345 - DNA, 27 bp, Homo sapiens
  source 1..27: mol_type = genomic DNA
gggggtatagctcagtggtagagcatt

SEQ ID NO: 54346 - DNA, 27 bp, Homo sapiens
  source 1..27: mol_type = genomic DNA
tcattggtcgtggttgtagtccgtgcg

SEQ ID NO: 54347 - DNA, 19 bp, Homo sapiens
  source 1..19: mol_type = genomic DNA
cggatagctcagtcggtag

SEQ ID NO: 54348 - DNA, 21 bp, Homo sapiens
  source 1..21: mol_type = genomic DNA
ttcgattccccgacggggagc

SEQ ID NO: 54349 - DNA, 16 bp, Homo sapiens
  source 1..16: mol_type = genomic DNA
tagaattctcgcctgc

SEQ ID NO: 54350 - DNA, 20 bp, Homo sapiens
  source 1..20: mol_type = genomic DNA
aaatcccggacgagccccca

SEQ ID NO: 54351 - DNA, 25 bp, Homo sapiens
  source 1..25: mol_type = genomic DNA
gccccagtggcctaatggataaggc

SEQ ID NO: 54352 - DNA, 23 bp, Homo sapiens
  source 1..23: mol_type = genomic DNA
ggttcgactcccggtatgggaac

SEQ ID NO: 54353 - DNA, 22 bp, Homo sapiens
  source 1..22: mol_type = genomic DNA
gggggattagctcaaatggtag

SEQ ID NO: 54354 - DNA, 21 bp, Homo sapiens
  source 1..21: mol_type = genomic DNA
tggtctagcggttaggattcc

SEQ ID NO: 54355 - DNA, 25 bp, Homo sapiens
  source 1..25: mol_type = genomic DNA
tgtaatggttagcactctggactct

SEQ ID NO: 54356 - DNA, 17 bp, Homo sapiens
  source 1..17: mol_type = genomic DNA
atccgggtgccccctcc

SEQ ID NO: 54357 - DNA, 16 bp, Homo sapiens
  source 1..16: mol_type = genomic DNA
ggggtatgattctcgc

SEQ ID NO: 54358 - DNA, 22 bp, Homo sapiens
  source 1..22: mol_type = genomic DNA
ggttgtagtccgtgcgagaata

SEQ ID NO: 54359 - DNA, 25 bp, Homo sapiens
  source 1..25: mol_type = genomic DNA
gggttcgattcccggtcagggaacc

SEQ ID NO: 54360 - DNA, 25 bp, Homo sapiens
  source 1..25: mol_type = genomic DNA
ctggtggtctagtggttaggattcg

SEQ ID NO: 54361 - DNA, 30 bp, Homo sapiens; identical to SEQ ID NO: 2232
  source 1..30: mol_type = genomic DNA

SEQ ID NO: 54362 - DNA, 19 bp, Homo sapiens
  source 1..19: mol_type = genomic DNA
ggtagaattctcgcctgcc

SEQ ID NO: 54363 - DNA, 30 bp, Homo sapiens; identical to SEQ ID NO: 12384
  source 1..30: mol_type = genomic DNA

SEQ ID NO: 54364 - DNA, 17 bp, Homo sapiens
  source 1..17: mol_type = genomic DNA
gtttatgtagcttacct

SEQ ID NO: 54365 - DNA, 21 bp, Homo sapiens
  source 1..21: mol_type = genomic DNA
tagtggttatcacgttcgcct

SEQ ID NO: 54366 - DNA, 18 bp, Homo sapiens
  source 1..18: mol_type = genomic DNA
gtcggtagagcatgggac

SEQ ID NO: 54367 - DNA, 27 bp, Homo sapiens
  source 1..27: mol_type = genomic DNA
tggttaggattcggcgctctcaccgcc

SEQ ID NO: 54368 - DNA, 23 bp, Homo sapiens
  source 1..23: mol_type = genomic DNA
gttcgactcccggtgtgggaacc

SEQ ID NO: 54369 - DNA, 27 bp, Homo sapiens
  source 1..27: mol_type = genomic DNA
tatagctcagtggtagagcatttgact

SEQ ID NO: 54370 - DNA, 25 bp, Homo sapiens
  source 1..25: mol_type = genomic DNA
ggttagcactctggactctgaatcc

SEQ ID NO: 54371 - DNA, 22 bp, Homo sapiens
  source 1..22: mol_type = genomic DNA
tcctcgttagtatagtggtgag

SEQ ID NO: 54372 - DNA, 22 bp, Homo sapiens
  source 1..22: mol_type = genomic DNA
ttgtagtccgtgcgagaatacc

SEQ ID NO: 54373 - DNA, 25 bp, Homo sapiens
  source 1..25: mol_type = genomic DNA
tggttgtagtccgtgcgagaatacc

SEQ ID NO: 54374 - DNA, 17 bp, Homo sapiens
  source 1..17: mol_type = genomic DNA
ttcaaatcccggacgag

SEQ ID NO: 54375 - DNA, 27 bp, Homo sapiens
  source 1..27: mol_type = genomic DNA
ggtggtctagtggttaggattcggcgc

SEQ ID NO: 54376 - DNA, 18 bp, Homo sapiens
  source 1..18: mol_type = genomic DNA
ggggtatgattctcgctt

SEQ ID NO: 54377 - DNA, 19 bp, Homo sapiens
  source 1..19: mol_type = genomic DNA
ggcgcggtggccaagtggt

SEQ ID NO: 54378 - DNA, 25 bp, Homo sapiens
  source 1..25: mol_type = genomic DNA
tcccacatggtctagcggttaggat

SEQ ID NO: 54379 - DNA, 22 bp, Homo sapiens
  source 1..22: mol_type = genomic DNA
gttcgactcccggtatgggaac

SEQ ID NO: 54380 - DNA, 20 bp, Homo sapiens
  source 1..20: mol_type = genomic DNA
tggttagcactctggactct

SEQ ID NO: 54381 - DNA, 21 bp, Homo sapiens
  source 1..21: mol_type = genomic DNA
gggggtgtagctcagtggtag

SEQ ID NO: 54382 - DNA, 26 bp, Homo sapiens
  source 1..26: mol_type = genomic DNA
gatttcaacttaacttgaccgctctg

SEQ ID NO: 54383 - DNA, 23 bp, Homo sapiens
  source 1..23: mol_type = genomic DNA
gtttccgtagtgtagcggttatc

SEQ ID NO: 54384 - DNA, 24 bp, Homo sapiens
  source 1..24: mol_type = genomic DNA
tggttaggattcggcgctctcacc

SEQ ID NO: 54385 - DNA, 21 bp, Homo sapiens
  source 1..21: mol_type = genomic DNA
cgattcccggccaacgcacca

SEQ ID NO: 54386 - DNA, 23 bp, Homo sapiens
  source 1..23: mol_type = genomic DNA
tcgtggttgtagtccgtgcgaga

SEQ ID NO: 54387 - DNA, 26 bp, Homo sapiens
  source 1..26: mol_type = genomic DNA
gttcagtggtagaattctcgcctgcc

SEQ ID NO: 54388 - DNA, 28 bp, Homo sapiens
  source 1..28: mol_type = genomic DNA
gtttccgtagtgtagtggttatcacgtt

SEQ ID NO: 54389 - DNA, 17 bp, Homo sapiens
  source 1..17: mol_type = genomic DNA
ggctcgttggtctaggg

SEQ ID NO: 54390 - DNA, 23 bp, Homo sapiens
  source 1..23: mol_type = genomic DNA
gttcgattcccggtcagggaacc

SEQ ID NO: 54391 - DNA, 26 bp, Homo sapiens
  source 1..26: mol_type = genomic DNA
gggttcgattcccggtcagggaacca

SEQ ID NO: 54392 - DNA, 23 bp, Homo sapiens
  source 1..23: mol_type = genomic DNA
ggtgtaatggttagcactctgga

SEQ ID NO: 54393 - DNA, 29 bp, Homo sapiens
  source 1..29: mol_type = genomic DNA
gtcgtggttgtagtccgtgcgagaatacc

SEQ ID NO: 54394 - DNA, 23 bp, Homo sapiens
  source 1..23: mol_type = genomic DNA
tggttcagtggtagaattctcgc

SEQ ID NO: 54395 - DNA, 19 bp, Homo sapiens
  source 1..19: mol_type = genomic DNA
cttaacttgaccgctctga

SEQ ID NO: 54396 - DNA, 22 bp, Homo sapiens
  source 1..22: mol_type = genomic DNA
gtttccgtagtgtagtggttat

SEQ ID NO: 54397 - DNA, 23 bp, Homo sapiens
  source 1..23: mol_type = genomic DNA
ggttcgattcccggtcagggaac

SEQ ID NO: 54398 - DNA, 22 bp, Homo sapiens
  source 1..22: mol_type = genomic DNA
ggttcagtggtagaattctcgc

SEQ ID NO: 54399 - DNA, 24 bp, Homo sapiens
  source 1..24: mol_type = genomic DNA
ggttagcactctggactctgaatc

SEQ ID NO: 54400 - DNA, 24 bp, Homo sapiens
  source 1..24: mol_type = genomic DNA
ggttcgattccccgacggggagcc

SEQ ID NO: 54401 - DNA, 23 bp, Homo sapiens
  source 1..23: mol_type = genomic DNA
ggttcgactcccggtgtgggaac

SEQ ID NO: 54402 - DNA, 17 bp, Homo sapiens
  source 1..17: mol_type = genomic DNA
agtggtagaattctcgc

SEQ ID NO: 54403 - DNA, 22 bp, Homo sapiens
  source 1..22: mol_type = genomic DNA
gcccggatagctcagtcggtag

SEQ ID NO: 54404 - DNA, 19 bp, Homo sapiens
  source 1..19: mol_type = genomic DNA
gtttatgtagcttacctcc

SEQ ID NO: 54405 - DNA, 30 bp, Homo sapiens; identical to SEQ ID NO: 17335
  source 1..30: mol_type = genomic DNA

SEQ ID NO: 54406 - DNA, 21 bp, Homo sapiens
  source 1..21: mol_type = genomic DNA
aacttaacttgaccgctctga

SEQ ID NO: 54407 - DNA, 26 bp, Homo sapiens
  source 1..26: mol_type = genomic DNA
gagaaagctcacaagaactgctaact

SEQ ID NO: 54408 - DNA, 18 bp, Homo sapiens
  source 1..18: mol_type = genomic DNA
ggctcgttggtctagggg

SEQ ID NO: 54409 - DNA, 30 bp, Homo sapiens; identical to SEQ ID NO: 19439
  source 1..30: mol_type = genomic DNA

SEQ ID NO: 54410 - DNA, 23 bp, Homo sapiens
  source 1..23: mol_type = genomic DNA
tccctggtggtctagtggttagg

SEQ ID NO: 54411 - DNA, 22 bp, Homo sapiens
  source 1..22: mol_type = genomic DNA
tcccacatggtctagcggttag

SEQ ID NO: 54412 - DNA, 19 bp, Homo sapiens
  source 1..19: mol_type = genomic DNA
ggggatgtagctcagtggt

SEQ ID NO: 54413 - DNA, 30 bp, Homo sapiens; identical to SEQ ID NO: 25530
  source 1..30: mol_type = genomic DNA

SEQ ID NO: 54414 - DNA, 39 bp, Homo sapiens; identical to SEQ ID NO: 23536
  source 1..39: mol_type = genomic DNA

SEQ ID NO: 54415 - DNA, 34 bp, Homo sapiens; identical to SEQ ID NO: 11183
  source 1..34: mol_type = genomic DNA

SEQ ID NO: 54416 - DNA, 37 bp, Homo sapiens; identical to SEQ ID NO: 11954
  source 1..37: mol_type = genomic DNA

SEQ ID NO: 54417 - DNA, 32 bp, Homo sapiens; identical to SEQ ID NO: 11629
  source 1..32: mol_type = genomic DNA

SEQ ID NO: 54418 - DNA, 17 bp, Homo sapiens
  source 1..17: mol_type = genomic DNA
cgagccccagtggaacc

SEQ ID NO: 54419 - DNA, 37 bp, Homo sapiens; identical to SEQ ID NO: 6739
  source 1..37: mol_type = genomic DNA

SEQ ID NO: 54420 - DNA, 24 bp, Homo sapiens
  source 1..24: mol_type = genomic DNA
gcgttcgattcccggtcagggaac

SEQ ID NO: 54421 - DNA, 31 bp, Homo sapiens; identical to SEQ ID NO: 17081
  source 1..31: mol_type = genomic DNA

SEQ ID NO: 54422 - DNA, 43 bp, Homo sapiens; identical to SEQ ID NO: 15425
  source 1..43: mol_type = genomic DNA

SEQ ID NO: 54423 - DNA, 38 bp, Homo sapiens; identical to SEQ ID NO: 931
  source 1..38: mol_type = genomic DNA

SEQ ID NO: 54424 - DNA, 26 bp, Homo sapiens
  source 1..26: mol_type = genomic DNA
agggattgtgggttcgagtcccatct

SEQ ID NO: 54425 - DNA, 34 bp, Homo sapiens; identical to SEQ ID NO: 13539
  source 1..34: mol_type = genomic DNA

SEQ ID NO: 54426 - DNA, 43 bp, Homo sapiens; identical to SEQ ID NO: 25210
  source 1..43: mol_type = genomic DNA

SEQ ID NO: 54427 - DNA, 38 bp, Homo sapiens; identical to SEQ ID NO: 7865
  source 1..38: mol_type = genomic DNA

SEQ ID NO: 54428 - DNA, 27 bp, Homo sapiens
  source 1..27: mol_type = genomic DNA
cagattgtgaatctgacaacagaggct

SEQ ID NO: 54429 - DNA, 32 bp, Homo sapiens; identical to SEQ ID NO: 18765
  source 1..32: mol_type = genomic DNA

SEQ ID NO: 54430 - DNA, 22 bp, Homo sapiens
  source 1..22: mol_type = genomic DNA
cggaagcgtgctgggcccataa

SEQ ID NO: 54431 - DNA, 38 bp, Homo sapiens; identical to SEQ ID NO: 27471
  source 1..38: mol_type = genomic DNA

SEQ ID NO: 54432 - DNA, 42 bp, Homo sapiens; identical to SEQ ID NO: 28602
  source 1..42: mol_type = genomic DNA

SEQ ID NO: 54433 - DNA, 34 bp, Homo sapiens; identical to SEQ ID NO: 18726
  source 1..34: mol_type = genomic DNA

SEQ ID NO: 54434 - DNA, 16 bp, Homo sapiens
  source 1..16: mol_type = genomic DNA
gttcgattcccgggcg

SEQ ID NO: 54435 - DNA, 34 bp, Homo sapiens; identical to SEQ ID NO: 11951
  source 1..34: mol_type = genomic DNA

SEQ ID NO: 54436 - DNA, 36 bp, Homo sapiens; identical to SEQ ID NO: 2928
  source 1..36: mol_type = genomic DNA

SEQ ID NO: 54437 - DNA, 35 bp, Homo sapiens; identical to SEQ ID NO: 12243
  source 1..35: mol_type = genomic DNA

SEQ ID NO: 54438 - DNA, 33 bp, Homo sapiens; identical to SEQ ID NO: 29548
  source 1..33: mol_type = genomic DNA

SEQ ID NO: 54439 - DNA, 45 bp, Homo sapiens; identical to SEQ ID NO: 12132
  source 1..45: mol_type = genomic DNA

SEQ ID NO: 54440 - DNA, 36 bp, Homo sapiens; identical to SEQ ID NO: 22226
  source 1..36: mol_type = genomic DNA

SEQ ID NO: 54441 - DNA, 17 bp, Homo sapiens
  source 1..17: mol_type = genomic DNA
aaaatgttggttatacc

SEQ ID NO: 54442 - DNA, 37 bp, Homo sapiens; identical to SEQ ID NO: 17052
  source 1..37: mol_type = genomic DNA

SEQ ID NO: 54443 - DNA, 20 bp, Homo sapiens
  source 1..20: mol_type = genomic DNA
caggatggccgagcggtcta

SEQ ID NO: 54444 - DNA, 16 bp, Homo sapiens
  source 1..16: mol_type = genomic DNA
gtggtatgattctcgc

SEQ ID NO: 54445 - DNA, 26 bp, Homo sapiens
  source 1..26: mol_type = genomic DNA
gggagaccggggttcgattccccgac

SEQ ID NO: 54446 - DNA, 36 bp, Homo sapiens; identical to SEQ ID NO: 14223
  source 1..36: mol_type = genomic DNA

SEQ ID NO: 54447 - DNA, 37 bp, Homo sapiens; identical to SEQ ID NO: 16701
  source 1..37: mol_type = genomic DNA

SEQ ID NO: 54448 - DNA, 42 bp, Homo sapiens; identical to SEQ ID NO: 29000
  source 1..42: mol_type = genomic DNA

SEQ ID NO: 54449 - DNA, 45 bp, Homo sapiens; identical to SEQ ID NO: 16227
  source 1..45: mol_type = genomic DNA

SEQ ID NO: 54450 - DNA, 38 bp, Homo sapiens; identical to SEQ ID NO: 28874
  source 1..38: mol_type = genomic DNA

SEQ ID NO: 54451 - DNA, 33 bp, Homo sapiens; identical to SEQ ID NO: 2952
  source 1..33: mol_type = genomic DNA

SEQ ID NO: 54452 - DNA, 31 bp, Homo sapiens; identical to SEQ ID NO: 12560
  source 1..31: mol_type = genomic DNA

SEQ ID NO: 54453 - DNA, 36 bp, Homo sapiens; identical to SEQ ID NO: 27004
  source 1..36: mol_type = genomic DNA

SEQ ID NO: 54454 - DNA, 31 bp, Homo sapiens; identical to SEQ ID NO: 22573
  source 1..31: mol_type = genomic DNA

SEQ ID NO: 54455 - DNA, 37 bp, Homo sapiens; identical to SEQ ID NO: 3146
  source 1..37: mol_type = genomic DNA

SEQ ID NO: 54456 - DNA, 38 bp, Homo sapiens; identical to SEQ ID NO: 7460
  source 1..38: mol_type = genomic DNA

SEQ ID NO: 54457 - DNA, 38 bp, Homo sapiens; identical to SEQ ID NO: 11955
  source 1..38: mol_type = genomic DNA

SEQ ID NO: 54458 - DNA, 35 bp, Homo sapiens; identical to SEQ ID NO: 12227
  source 1..35: mol_type = genomic DNA

SEQ ID NO: 54459 - DNA, 39 bp, Homo sapiens; identical to SEQ ID NO: 1484
  source 1..39: mol_type = genomic DNA

SEQ ID NO: 54460 - DNA, 33 bp, Homo sapiens; identical to SEQ ID NO: 12012
  source 1..33: mol_type = genomic DNA

SEQ ID NO: 54461 - DNA, 34 bp, Homo sapiens; identical to SEQ ID NO: 3172
  source 1..34: mol_type = genomic DNA

SEQ ID NO: 54462 - DNA, 41 bp, Homo sapiens; identical to SEQ ID NO: 23351
  source 1..41: mol_type = genomic DNA

SEQ ID NO: 54463 - DNA, 38 bp, Homo sapiens; identical to SEQ ID NO: 3176
  source 1..38: mol_type = genomic DNA

SEQ ID NO: 54464 - DNA, 45 bp, Homo sapiens; identical to SEQ ID NO: 22619
  source 1..45: mol_type = genomic DNA

SEQ ID NO: 54465 - DNA, 34 bp, Homo sapiens; identical to SEQ ID NO: 13078
  source 1..34: mol_type = genomic DNA

SEQ ID NO: 54466 - DNA, 35 bp, Homo sapiens; identical to SEQ ID NO: 24012
  source 1..35: mol_type = genomic DNA

SEQ ID NO: 54467 - DNA, 42 bp, Homo sapiens; identical to SEQ ID NO: 25712
  source 1..42: mol_type = genomic DNA

SEQ ID NO: 54468 - DNA, 33 bp, Homo sapiens; identical to SEQ ID NO: 5303
  source 1..33: mol_type = genomic DNA

SEQ ID NO: 54469 - DNA, 37 bp, Homo sapiens; identical to SEQ ID NO: 3162
  source 1..37: mol_type = genomic DNA

SEQ ID NO: 54470 - DNA, 40 bp, Homo sapiens; identical to SEQ ID NO: 24860
  source 1..40: mol_type = genomic DNA

SEQ ID NO: 54471 - DNA, 39 bp, Homo sapiens; identical to SEQ ID NO: 3100
  source 1..39: mol_type = genomic DNA

SEQ ID NO: 54472 - DNA, 42 bp, Homo sapiens; identical to SEQ ID NO: 13511
  source 1..42: mol_type = genomic DNA

SEQ ID NO: 54473 - DNA, 24 bp, Homo sapiens
  source 1..24: mol_type = genomic DNA
cggatagctcagtcggtagagcat

SEQ ID NO: 54474 - DNA, 42 bp, Homo sapiens; identical to SEQ ID NO: 29065
  source 1..42: mol_type = genomic DNA

SEQ ID NO: 54475 - DNA, 18 bp, Homo sapiens
  source 1..18: mol_type = genomic DNA
aggtcgatggatcgaaac

SEQ ID NO: 54476 - DNA, 23 bp, Homo sapiens
  source 1..23: mol_type = genomic DNA
ctcagtcggtagagcatgagact

SEQ ID NO: 54477 - DNA, 21 bp, Homo sapiens
  source 1..21: mol_type = genomic DNA
tcgattcccggcccatgcacc

SEQ ID NO: 54478 - DNA, 19 bp, Homo sapiens
  source 1..19: mol_type = genomic DNA
cgattctcatagtcctagc

SEQ ID NO: 54479 - DNA, 19 bp, Homo sapiens
  source 1..19: mol_type = genomic DNA
attcccgggcggcgcacca

SEQ ID NO: 54480 - DNA, 35 bp, Homo sapiens; identical to SEQ ID NO: 17115
  source 1..35: mol_type = genomic DNA

SEQ ID NO: 54481 - DNA, 19 bp, Homo sapiens
  source 1..19: mol_type = genomic DNA
cgaaaatgttggttatacc

SEQ ID NO: 54482 - DNA, 16 bp, Homo sapiens
  source 1..16: mol_type = genomic DNA
atggatagcgcattgg

SEQ ID NO: 54483 - DNA, 26 bp, Homo sapiens
  source 1..26: mol_type = genomic DNA
ccgggttcgactcccggtgtgggaac

SEQ ID NO: 54484 - DNA, 32 bp, Homo sapiens; identical to SEQ ID NO: 11010
  source 1..32: mol_type = genomic DNA

SEQ ID NO: 54485 - DNA, 36 bp, Homo sapiens; identical to SEQ ID NO: 12244
  source 1..36: mol_type = genomic DNA

SEQ ID NO: 54486 - DNA, 16 bp, Homo sapiens
  source 1..16: mol_type = genomic DNA
tcccgggcggcgcacc

SEQ ID NO: 54487 - DNA, 30 bp, Homo sapiens; identical to SEQ ID NO: 31052
  source 1..30: mol_type = genomic DNA

SEQ ID NO: 54488 - DNA, 23 bp, Homo sapiens
  source 1..23: mol_type = genomic DNA
ctagtggttaggattcggcgctc

SEQ ID NO: 54489 - DNA, 32 bp, Homo sapiens; identical to SEQ ID NO: 6210
  source 1..32: mol_type = genomic DNA

SEQ ID NO: 54490 - DNA, 32 bp, Homo sapiens; identical to SEQ ID NO: 11098
  source 1..32: mol_type = genomic DNA

SEQ ID NO: 54491 - DNA, 36 bp, Homo sapiens; identical to SEQ ID NO: 12228
  source 1..36: mol_type = genomic DNA

SEQ ID NO: 54492 - DNA, 36 bp, Homo sapiens; identical to SEQ ID NO: 3161
  source 1..36: mol_type = genomic DNA

SEQ ID NO: 54493 - DNA, 28 bp, Homo sapiens
  source 1..28: mol_type = genomic DNA
gagaaagctcacaagaactgctaactca

SEQ ID NO: 54494 - DNA, 32 bp, Homo sapiens; identical to SEQ ID NO: 30754
  source 1..32: mol_type = genomic DNA

SEQ ID NO: 54495 - DNA, 31 bp, Homo sapiens; identical to SEQ ID NO: 11165
  source 1..31: mol_type = genomic DNA

SEQ ID NO: 54496 - DNA, 21 bp, Homo sapiens
  source 1..21: mol_type = genomic DNA
cgatcccgggtttcggcacca

SEQ ID NO: 54497 - DNA, 32 bp, Homo sapiens; identical to SEQ ID NO: 27988
  source 1..32: mol_type = genomic DNA

SEQ ID NO: 54498 - DNA, 32 bp, Homo sapiens; identical to SEQ ID NO: 29142
  source 1..32: mol_type = genomic DNA

SEQ ID NO: 54499 - DNA, 32 bp, Homo sapiens; identical to SEQ ID NO: 16561
  source 1..32: mol_type = genomic DNA

SEQ ID NO: 54500 - DNA, 33 bp, Homo sapiens; identical to SEQ ID NO: 16835
  source 1..33: mol_type = genomic DNA

SEQ ID NO: 54501 - DNA, 21 bp, Homo sapiens
  source 1..21: mol_type = genomic DNA
cgaaaccgggcggaaacacca

SEQ ID NO: 54502 - DNA, 17 bp, Homo sapiens
  source 1..17: mol_type = genomic DNA
cccgggcggaaacacca

SEQ ID NO: 54503 - DNA, 17 bp, Homo sapiens
  source 1..17: mol_type = genomic DNA
tcccggcccatgcacca

SEQ ID NO: 54504 - DNA, 28 bp, Homo sapiens
  source 1..28: mol_type = genomic DNA
cactgtaaagctaacttagcattaacct

SEQ ID NO: 54505 - DNA, 19 bp, Homo sapiens
  source 1..19: mol_type = genomic DNA
caatacttaatttctgcca

SEQ ID NO: 54506 - DNA, 20 bp, Homo sapiens
  source 1..20: mol_type = genomic DNA
cggttaggattcctggtttt

SEQ ID NO: 54507 - DNA, 22 bp, Homo sapiens
  source 1..22: mol_type = genomic DNA
ccaacacctctttacagtgacc

SEQ ID NO: 54508 - DNA, 16 bp, Homo sapiens
  source 1..16: mol_type = genomic DNA
gtagtcgtggccgagt

SEQ ID NO: 54509 - DNA, 18 bp, Homo sapiens
  source 1..18: mol_type = genomic DNA
ttcccggccaatgcacca

SEQ ID NO: 54510 - DNA, 18 bp, Homo sapiens
  source 1..18: mol_type = genomic DNA
ttcccggccaacgcacca

SEQ ID NO: 54511 - DNA, 21 bp, Homo sapiens
  source 1..21: mol_type = genomic DNA
ctagtggttaggattcggcgc

SEQ ID NO: 54512 - DNA, 20 bp, Homo sapiens
  source 1..20: mol_type = genomic DNA
agtggttagtactctgcgtt

SEQ ID NO: 54513 - DNA, 17 bp, Homo sapiens
  source 1..17: mol_type = genomic DNA
tctcgctggggcctcca

SEQ ID NO: 54514 - DNA, 18 bp, Homo sapiens
  source 1..18: mol_type = genomic DNA
ggttagcactctggactc

SEQ ID NO: 54515 - DNA, 18 bp, Homo sapiens
  source 1..18: mol_type = genomic DNA
tggttagtactctgcgtt

SEQ ID NO: 54516 - DNA, 19 bp, Homo sapiens
  source 1..19: mol_type = genomic DNA
tggttagtactctgcgttg

SEQ ID NO: 54517 - DNA, 48 bp, Homo sapiens; identical to SEQ ID NO: 15503
  source 1..48: mol_type = genomic DNA

SEQ ID NO: 54518 - DNA, 48 bp, Homo sapiens; identical to SEQ ID NO: 3720
  source 1..48: mol_type = genomic DNA

SEQ ID NO: 54519 - DNA, 48 bp, Homo sapiens; identical to SEQ ID NO: 2836
  source 1..48: mol_type = genomic DNA

SEQ ID NO: 54520 - DNA, 48 bp, Homo sapiens; identical to SEQ ID NO: 7156
  source 1..48: mol_type = genomic DNA

SEQ ID NO: 54521 - DNA, 48 bp, Homo sapiens; identical to SEQ ID NO: 8259
  source 1..48: mol_type = genomic DNA

SEQ ID NO: 54522 - DNA, 36 bp, Homo sapiens; identical to SEQ ID NO: 8927
  source 1..36: mol_type = genomic DNA

SEQ ID NO: 54523 - DNA, 37 bp, Homo sapiens; identical to SEQ ID NO: 2889
  source 1..37: mol_type = genomic DNA

SEQ ID NO: 54524 - DNA, 48 bp, Homo sapiens; identical to SEQ ID NO: 8201
  source 1..48: mol_type = genomic DNA

SEQ ID NO: 54525 - DNA, 48 bp, Homo sapiens; identical to SEQ ID NO: 10367
  source 1..48: mol_type = genomic DNA

SEQ ID NO: 54526 - DNA, 29 bp, Homo sapiens
  source 1..29: mol_type = genomic DNA
gtcggtagagcatgggactcttaatccca

SEQ ID NO: 54527 - DNA, 33 bp, Homo sapiens; identical to SEQ ID NO: 21141
  source 1..33: mol_type = genomic DNA

SEQ ID NO: 54528 - DNA, 34 bp, Homo sapiens; identical to SEQ ID NO: 15089
  source 1..34: mol_type = genomic DNA

SEQ ID NO: 54529 - DNA, 29 bp, Homo sapiens
  source 1..29: mol_type = genomic DNA
gtcggtagagcatgagactcttaatctca

SEQ ID NO: 54530 - DNA, 34 bp, Homo sapiens; identical to SEQ ID NO: 27658
  source 1..34: mol_type = genomic DNA

SEQ ID NO: 54531 - DNA, 34 bp, Homo sapiens; identical to SEQ ID NO: 29264
  source 1..34: mol_type = genomic DNA

SEQ ID NO: 54532 - DNA, 35 bp, Homo sapiens; identical to SEQ ID NO: 274
  source 1..35: mol_type = genomic DNA

SEQ ID NO: 54533 - DNA, 48 bp, Homo sapiens; identical to SEQ ID NO: 24993
  source 1..48: mol_type = genomic DNA

SEQ ID NO: 54534 - DNA, 34 bp, Homo sapiens; identical to SEQ ID NO: 27197
  source 1..34: mol_type = genomic DNA

SEQ ID NO: 54535 - DNA, 38 bp, Homo sapiens; identical to SEQ ID NO: 8791
  source 1..38: mol_type = genomic DNA

SEQ ID NO: 54536 - DNA, 35 bp, Homo sapiens; identical to SEQ ID NO: 10673
  source 1..35: mol_type = genomic DNA

SEQ ID NO: 54537 - DNA, 31 bp, Homo sapiens; identical to SEQ ID NO: 10276
  source 1..31: mol_type = genomic DNA

SEQ ID NO: 54538 - DNA, 32 bp, Homo sapiens; identical to SEQ ID NO: 10829
  source 1..32: mol_type = genomic DNA

SEQ ID NO: 54539 - DNA, 46 bp, Homo sapiens; identical to SEQ ID NO: 543
  source 1..46: mol_type = genomic DNA

SEQ ID NO: 54540 - DNA, 36 bp, Homo sapiens; identical to SEQ ID NO: 7250
  source 1..36: mol_type = genomic DNA

SEQ ID NO: 54541 - DNA, 48 bp, Homo sapiens; identical to SEQ ID NO: 3036
  source 1..48: mol_type = genomic DNA

SEQ ID NO: 54542 - DNA, 34 bp, Homo sapiens; identical to SEQ ID NO: 10908
  source 1..34: mol_type = genomic DNA

SEQ ID NO: 54543 - DNA, 48 bp, Homo sapiens; identical to SEQ ID NO: 15058
  source 1..48: mol_type = genomic DNA

SEQ ID NO: 54544 - DNA, 46 bp, Homo sapiens; identical to SEQ ID NO: 58
  source 1..46: mol_type = genomic DNA

SEQ ID NO: 54545 - DNA, 48 bp, Homo sapiens; identical to SEQ ID NO: 24785
  source 1..48: mol_type = genomic DNA

SEQ ID NO: 54546 - DNA, 34 bp, Homo sapiens; identical to SEQ ID NO: 4435
  source 1..34: mol_type = genomic DNA

SEQ ID NO: 54547 - DNA, 48 bp, Homo sapiens; identical to SEQ ID NO: 29231
  source 1..48: mol_type = genomic DNA

SEQ ID NO: 54548 - DNA, 34 bp, Homo sapiens; identical to SEQ ID NO: 18791
  source 1..34: mol_type = genomic DNA

SEQ ID NO: 54549 - DNA, 27 bp, Homo sapiens
  source 1..27: mol_type = genomic DNA
agtaagttgcaatacttaatttctgcc

SEQ ID NO: 54550 - DNA, 32 bp, Homo sapiens; identical to SEQ ID NO: 13255
  source 1..32: mol_type = genomic DNA

SEQ ID NO: 54551 - DNA, 34 bp, Homo sapiens; identical to SEQ ID NO: 273
  source 1..34: mol_type = genomic DNA

SEQ ID NO: 54552 - DNA, 48 bp, Homo sapiens; identical to SEQ ID NO: 30101
  source 1..48: mol_type = genomic DNA

SEQ ID NO: 54553 - DNA, 33 bp, Homo sapiens; identical to SEQ ID NO: 2782
  source 1..33: mol_type = genomic DNA

SEQ ID NO: 54554 - DNA, 34 bp, Homo sapiens; identical to SEQ ID NO: 16880
  source 1..34: mol_type = genomic DNA

SEQ ID NO: 54555 - DNA, 33 bp, Homo sapiens; identical to SEQ ID NO: 16879
  source 1..33: mol_type = genomic DNA

SEQ ID NO: 54556 - DNA, 18 bp, Homo sapiens
  source 1..18: mol_type = genomic DNA
aaccgggcagaaacacca

SEQ ID NO: 54557 - DNA, 27 bp, Homo sapiens
  source 1..27: mol_type = genomic DNA
atgggttcgattctcatagtcctagcc

SEQ ID NO: 54558 - DNA, 37 bp, Homo sapiens; identical to SEQ ID NO: 2311
  source 1..37: mol_type = genomic DNA

SEQ ID NO: 54559 - DNA, 33 bp, Homo sapiens; identical to SEQ ID NO: 24144
  source 1..33: mol_type = genomic DNA

SEQ ID NO: 54560 - DNA, 41 bp, Homo sapiens; identical to SEQ ID NO: 23279
  source 1..41: mol_type = genomic DNA

SEQ ID NO: 54561 - DNA, 48 bp, Homo sapiens; identical to SEQ ID NO: 1967
  source 1..48: mol_type = genomic DNA

SEQ ID NO: 54562 - DNA, 36 bp, Homo sapiens; identical to SEQ ID NO: 30077
  source 1..36: mol_type = genomic DNA

SEQ ID NO: 54563 - DNA, 33 bp, Homo sapiens; identical to SEQ ID NO: 15287
  source 1..33: mol_type = genomic DNA

SEQ ID NO: 54564 - DNA, 48 bp, Homo sapiens; identical to SEQ ID NO: 7997
  source 1..48: mol_type = genomic DNA

SEQ ID NO: 54565 - DNA, 30 bp, Homo sapiens; identical to SEQ ID NO: 2590
  source 1..30: mol_type = genomic DNA

SEQ ID NO: 54566 - DNA, 48 bp, Homo sapiens; identical to SEQ ID NO: 978
  source 1..48: mol_type = genomic DNA

SEQ ID NO: 54567 - DNA, 33 bp, Homo sapiens; identical to SEQ ID NO: 2707
  source 1..33: mol_type = genomic DNA

SEQ ID NO: 54568 - DNA, 35 bp, Homo sapiens; identical to SEQ ID NO: 8926
  source 1..35: mol_type = genomic DNA

SEQ ID NO: 54569 - DNA, 29 bp, Homo sapiens
  source 1..29: mol_type = genomic DNA
aacagaggcttacgaccccttatttaccc

SEQ ID NO: 54570 - DNA, 32 bp, Homo sapiens; identical to SEQ ID NO: 21140
  source 1..32: mol_type = genomic DNA

SEQ ID NO: 54571 - DNA, 31 bp, Homo sapiens; identical to SEQ ID NO: 16238
  source 1..31: mol_type = genomic DNA

SEQ ID NO: 54572 - DNA, 38 bp, Homo sapiens; identical to SEQ ID NO: 20914
  source 1..38: mol_type = genomic DNA

SEQ ID NO: 54573 - DNA, 45 bp, Homo sapiens; identical to SEQ ID NO: 8798
  source 1..45: mol_type = genomic DNA

SEQ ID NO: 54574 - DNA, 31 bp, Homo sapiens; identical to SEQ ID NO: 747
  source 1..31: mol_type = genomic DNA

SEQ ID NO: 54575 - DNA, 28 bp, Homo sapiens
  source 1..28: mol_type = genomic DNA
gatgggttcgattctcatagtcctagcc

SEQ ID NO: 54576 - DNA, 32 bp, Homo sapiens; identical to SEQ ID NO: 23654
  source 1..32: mol_type = genomic DNA

SEQ ID NO: 54577 - DNA, 40 bp, Homo sapiens; identical to SEQ ID NO: 22230
  source 1..40: mol_type = genomic DNA

SEQ ID NO: 54578 - DNA, 31 bp, Homo sapiens; identical to SEQ ID NO: 15486
  source 1..31: mol_type = genomic DNA

SEQ ID NO: 54579 - DNA, 48 bp, Homo sapiens; identical to SEQ ID NO: 23915
  source 1..48: mol_type = genomic DNA

SEQ ID NO: 54580 - DNA, 41 bp, Homo sapiens; identical to SEQ ID NO: 13897
  source 1..41: mol_type = genomic DNA

SEQ ID NO: 54581 - DNA, 18 bp, Homo sapiens
  source 1..18: mol_type = genomic DNA
tggttatcacgtctgctt

SEQ ID NO: 54582 - DNA, 37 bp, Homo sapiens; identical to SEQ ID NO: 13206
  source 1..37: mol_type = genomic DNA

SEQ ID NO: 54583 - DNA, 26 bp, Homo sapiens
  source 1..26: mol_type = genomic DNA
tgcaggttcgagtcctgccgcggtcg

SEQ ID NO: 54584 - DNA, 37 bp, Homo sapiens; identical to SEQ ID NO: 22497
  source 1..37: mol_type = genomic DNA

SEQ ID NO: 54585 - DNA, 48 bp, Homo sapiens; identical to SEQ ID NO: 1020
  source 1..48: mol_type = genomic DNA

SEQ ID NO: 54586 - DNA, 37 bp, Homo sapiens; identical to SEQ ID NO: 26409
  source 1..37: mol_type = genomic DNA

SEQ ID NO: 54587 - DNA, 40 bp, Homo sapiens; identical to SEQ ID NO: 10736
  source 1..40: mol_type = genomic DNA

SEQ ID NO: 54588 - DNA, 31 bp, Homo sapiens; identical to SEQ ID NO: 131
  source 1..31: mol_type = genomic DNA

SEQ ID NO: 54589 - DNA, 45 bp, Homo sapiens; identical to SEQ ID NO: 14160
  source 1..45: mol_type = genomic DNA

SEQ ID NO: 54590 - DNA, 42 bp, Homo sapiens; identical to SEQ ID NO: 9544
  source 1..42: mol_type = genomic DNA

SEQ ID NO: 54591 - DNA, 32 bp, Homo sapiens; identical to SEQ ID NO: 14910
  source 1..32: mol_type = genomic DNA

SEQ ID NO: 54592 - DNA, 33 bp, Homo sapiens; identical to SEQ ID NO: 11073
  source 1..33: mol_type = genomic DNA

SEQ ID NO: 54593 - DNA, 35 bp, Homo sapiens; identical to SEQ ID NO: 28919
  source 1..35: mol_type = genomic DNA

SEQ ID NO: 54594 - DNA, 41 bp, Homo sapiens; identical to SEQ ID NO: 31016
  source 1..41: mol_type = genomic DNA

SEQ ID NO: 54595 - DNA, 48 bp, Homo sapiens; identical to SEQ ID NO: 23967
  source 1..48: mol_type = genomic DNA

SEQ ID NO: 54596 - DNA, 48 bp, Homo sapiens; identical to SEQ ID NO: 23932
  source 1..48: mol_type = genomic DNA

SEQ ID NO: 54597 - DNA, 31 bp, Homo sapiens; identical to SEQ ID NO: 17568
  source 1..31: mol_type = genomic DNA

SEQ ID NO: 54598 - DNA, 34 bp, Homo sapiens; identical to SEQ ID NO: 30584
  source 1..34: mol_type = genomic DNA

SEQ ID NO: 54599 - DNA, 48 bp, Homo sapiens; identical to SEQ ID NO: 26979
  source 1..48: mol_type = genomic DNA

SEQ ID NO: 54600 - DNA, 40 bp, Homo sapiens; identical to SEQ ID NO: 25685
  source 1..40: mol_type = genomic DNA

SEQ ID NO: 54601 - DNA, 31 bp, Homo sapiens; identical to SEQ ID NO: 17920
  source 1..31: mol_type = genomic DNA

SEQ ID NO: 54602 - DNA, 25 bp, Homo sapiens
  source 1..25: mol_type = genomic DNA
gagatgaaaacctttttccaaggac

SEQ ID NO: 54603 - DNA, 28 bp, Homo sapiens
  source 1..28: mol_type = genomic DNA
atgggttcgattctcatagtcctagcca

SEQ ID NO: 54604 - DNA, 26 bp, Homo sapiens
  source 1..26: mol_type = genomic DNA
ccgggttcgattcccgggcggcgcac

SEQ ID NO: 54605 - DNA, 48 bp, Homo sapiens; identical to SEQ ID NO: 4619
  source 1..48: mol_type = genomic DNA

SEQ ID NO: 54606 - DNA, 34 bp, Homo sapiens; identical to SEQ ID NO: 18767
  source 1..34: mol_type = genomic DNA

SEQ ID NO: 54607 - DNA, 26 bp, Homo sapiens
  source 1..26: mol_type = genomic DNA
agaaagctcacaagaactgctaactc

SEQ ID NO: 54608 - DNA, 26 bp, Homo sapiens
  source 1..26: mol_type = genomic DNA
tttgacaacattcaaaaaagagtacc

SEQ ID NO: 54609 - DNA, 32 bp, Homo sapiens; identical to SEQ ID NO: 10481
  source 1..32: mol_type = genomic DNA

SEQ ID NO: 54610 - DNA, 28 bp, Homo sapiens
  source 1..28: mol_type = genomic DNA
gtccgcgtgggttcgaaccccactcctg

SEQ ID NO: 54611 - DNA, 31 bp, Homo sapiens; identical to SEQ ID NO: 4233
  source 1..31: mol_type = genomic DNA

SEQ ID NO: 54612 - DNA, 48 bp, Homo sapiens; identical to SEQ ID NO: 8496
  source 1..48: mol_type = genomic DNA

SEQ ID NO: 54613 - DNA, 30 bp, Homo sapiens; identical to SEQ ID NO: 3839
  source 1..30: mol_type = genomic DNA

SEQ ID NO: 54614 - DNA, 48 bp, Homo sapiens; identical to SEQ ID NO: 1823
  source 1..48: mol_type = genomic DNA

SEQ ID NO: 54615 - DNA, 31 bp, Homo sapiens; identical to SEQ ID NO: 10570
  source 1..31: mol_type = genomic DNA

SEQ ID NO: 54616 - DNA, 36 bp, Homo sapiens; identical to SEQ ID NO: 9299
  source 1..36: mol_type = genomic DNA

SEQ ID NO: 54617 - DNA, 48 bp, Homo sapiens; identical to SEQ ID NO: 11026
  source 1..48: mol_type = genomic DNA

SEQ ID NO: 54618 - DNA, 43 bp, Homo sapiens; identical to SEQ ID NO: 28652
  source 1..43: mol_type = genomic DNA

SEQ ID NO: 54619 - DNA, 48 bp, Homo sapiens; identical to SEQ ID NO: 1961
  source 1..48: mol_type = genomic DNA

SEQ ID NO: 54620 - DNA, 48 bp, Homo sapiens; identical to SEQ ID NO: 30128
  source 1..48: mol_type = genomic DNA

SEQ ID NO: 54621 - DNA, 34 bp, Homo sapiens; identical to SEQ ID NO: 10672
  source 1..34: mol_type = genomic DNA

SEQ ID NO: 54622 - DNA, 31 bp, Homo sapiens; identical to SEQ ID NO: 15332
  source 1..31: mol_type = genomic DNA

SEQ ID NO: 54623 - DNA, 31 bp, Homo sapiens; identical to SEQ ID NO: 2978
  source 1..31: mol_type = genomic DNA

SEQ ID NO: 54624 - DNA, 21 bp, Homo sapiens
  source 1..21: mol_type = genomic DNA
agagtaaataataggagctta

SEQ ID NO: 54625 - DNA, 21 bp, Homo sapiens
  source 1..21: mol_type = genomic DNA
agcgcattggacttctaattc

SEQ ID NO: 54626 - DNA, 31 bp, Homo sapiens; identical to SEQ ID NO: 2705
  source 1..31: mol_type = genomic DNA

SEQ ID NO: 54627 - DNA, 18 bp, Homo sapiens
  source 1..18: mol_type = genomic DNA
aactgggcggaaacacca

SEQ ID NO: 54628 - DNA, 30 bp, Homo sapiens; identical to SEQ ID NO: 4474
  source 1..30: mol_type = genomic DNA

SEQ ID NO: 54629 - DNA, 37 bp, Homo sapiens; identical to SEQ ID NO: 2795
  source 1..37: mol_type = genomic DNA

SEQ ID NO: 54630 - DNA, 32 bp, Homo sapiens; identical to SEQ ID NO: 415
  source 1..32: mol_type = genomic DNA

SEQ ID NO: 54631 - DNA, 23 bp, Homo sapiens
  source 1..23: mol_type = genomic DNA
agtctcataatctgaaggtcgtg

SEQ ID NO: 54632 - DNA, 43 bp, Homo sapiens; identical to SEQ ID NO: 7621
  source 1..43: mol_type = genomic DNA

SEQ ID NO: 54633 - DNA, 34 bp, Homo sapiens; identical to SEQ ID NO: 771
  source 1..34: mol_type = genomic DNA

SEQ ID NO: 54634 - DNA, 33 bp, Homo sapiens; identical to SEQ ID NO: 18221
  source 1..33: mol_type = genomic DNA

SEQ ID NO: 54635 - DNA, 48 bp, Homo sapiens; identical to SEQ ID NO: 16655
  source 1..48: mol_type = genomic DNA

SEQ ID NO: 54636 - DNA, 32 bp, Homo sapiens; identical to SEQ ID NO: 21185
  source 1..32: mol_type = genomic DNA

SEQ ID NO: 54637 - DNA, 39 bp, Homo sapiens; identical to SEQ ID NO: 7909
  source 1..39: mol_type = genomic DNA

SEQ ID NO: 54638 - DNA, 18 bp, Homo sapiens
  source 1..18: mol_type = genomic DNA
aaccgagcggaaacacca

SEQ ID NO: 54639 - DNA, 34 bp, Homo sapiens; identical to SEQ ID NO: 15079
  source 1..34: mol_type = genomic DNA

SEQ ID NO: 54640 - DNA, 30 bp, Homo sapiens; identical to SEQ ID NO: 5865
  source 1..30: mol_type = genomic DNA

SEQ ID NO: 54641 - DNA, 39 bp, Homo sapiens; identical to SEQ ID NO: 17118
  source 1..39: mol_type = genomic DNA

SEQ ID NO: 54642 - DNA, 37 bp, Homo sapiens; identical to SEQ ID NO: 2042
  source 1..37: mol_type = genomic DNA

SEQ ID NO: 54643 - DNA, 48 bp, Homo sapiens; identical to SEQ ID NO: 6485
  source 1..48: mol_type = genomic DNA

SEQ ID NO: 54644 - DNA, 48 bp, Homo sapiens; identical to SEQ ID NO: 28392
  source 1..48: mol_type = genomic DNA

SEQ ID NO: 54645 - DNA, 26 bp, Homo sapiens
  source 1..26: mol_type = genomic DNA
agaggcttacgaccccttatttaccc

SEQ ID NO: 54646 - DNA, 48 bp, Homo sapiens; identical to SEQ ID NO: 3091
  source 1..48: mol_type = genomic DNA

SEQ ID NO: 54647 - DNA, 45 bp, Homo sapiens; identical to SEQ ID NO: 20165
  source 1..45: mol_type = genomic DNA

SEQ ID NO: 54648 - DNA, 48 bp, Homo sapiens; identical to SEQ ID NO: 16576
  source 1..48: mol_type = genomic DNA

SEQ ID NO: 54649 - DNA, 34 bp, Homo sapiens; identical to SEQ ID NO: 20815
  source 1..34: mol_type = genomic DNA

SEQ ID NO: 54650 - DNA, 29 bp, Homo sapiens
  source 1..29: mol_type = genomic DNA
ctccctggtggtctagtggttaggattcg

SEQ ID NO: 54651 - DNA, 42 bp, Homo sapiens; identical to SEQ ID NO: 11550
  source 1..42: mol_type = genomic DNA

SEQ ID NO: 54652 - DNA, 31 bp, Homo sapiens; identical to SEQ ID NO: 10815
  source 1..31: mol_type = genomic DNA

SEQ ID NO: 54653 - DNA, 37 bp, Homo sapiens; identical to SEQ ID NO: 6717
  source 1..37: mol_type = genomic DNA

SEQ ID NO: 54654 - DNA, 34 bp, Homo sapiens; identical to SEQ ID NO: 19196
  source 1..34: mol_type = genomic DNA

SEQ ID NO: 54655 - DNA, 35 bp, Homo sapiens; identical to SEQ ID NO: 8131
  source 1..35: mol_type = genomic DNA

SEQ ID NO: 54656 - DNA, 48 bp, Homo sapiens; identical to SEQ ID NO: 8801
  source 1..48: mol_type = genomic DNA

SEQ ID NO: 54657 - DNA, 34 bp, Homo sapiens; identical to SEQ ID NO: 8787
  source 1..34: mol_type = genomic DNA

SEQ ID NO: 54658 - DNA, 44 bp, Homo sapiens; identical to SEQ ID NO: 11532
  source 1..44: mol_type = genomic DNA

SEQ ID NO: 54659 - DNA, 33 bp, Homo sapiens; identical to SEQ ID NO: 14966
  source 1..33: mol_type = genomic DNA

SEQ ID NO: 54660 - DNA, 48 bp, Homo sapiens; identical to SEQ ID NO: 9894
  source 1..48: mol_type = genomic DNA

SEQ ID NO: 54661 - DNA, 46 bp, Homo sapiens; identical to SEQ ID NO: 7746
  source 1..46: mol_type = genomic DNA

SEQ ID NO: 54662 - DNA, 18 bp, Homo sapiens
  source 1..18: mol_type = genomic DNA
gtcccggcagagatgcca

SEQ ID NO: 54663 - DNA, 18 bp, Homo sapiens
  source 1..18: mol_type = genomic DNA
aaaccggagatgaaaacc

SEQ ID NO: 54664 - DNA, 48 bp, Homo sapiens; identical to SEQ ID NO: 7748
  source 1..48: mol_type = genomic DNA

SEQ ID NO: 54665 - DNA, 17 bp, Homo sapiens
  source 1..17: mol_type = genomic DNA
ctggttcgattccggct

SEQ ID NO: 54666 - DNA, 46 bp, Homo sapiens; identical to SEQ ID NO: 2803
  source 1..46: mol_type = genomic DNA

SEQ ID NO: 54667 - DNA, 30 bp, Homo sapiens; identical to SEQ ID NO: 25643
  source 1..30: mol_type = genomic DNA

SEQ ID NO: 54668 - DNA, 33 bp, Homo sapiens; identical to SEQ ID NO: 4645
  source 1..33: mol_type = genomic DNA

SEQ ID NO: 54669 - DNA, 42 bp, Homo sapiens; identical to SEQ ID NO: 26330
  source 1..42: mol_type = genomic DNA

SEQ ID NO: 54670 - DNA, 35 bp, Homo sapiens; identical to SEQ ID NO: 7424
  source 1..35: mol_type = genomic DNA

SEQ ID NO: 54671 - DNA, 42 bp, Homo sapiens; identical to SEQ ID NO: 14975
  source 1..42: mol_type = genomic DNA

SEQ ID NO: 54672 - DNA, 45 bp, Homo sapiens; identical to SEQ ID NO: 12307
  source 1..45: mol_type = genomic DNA

SEQ ID NO: 54673 - DNA, 25 bp, Homo sapiens
  source 1..25: mol_type = genomic DNA
ccccgcgcaggttcgaatcctgccg

SEQ ID NO: 54674 - DNA, 34 bp, Homo sapiens; identical to SEQ ID NO: 21187
  source 1..34: mol_type = genomic DNA

SEQ ID NO: 54675 - DNA, 46 bp, Homo sapiens; identical to SEQ ID NO: 4928
  source 1..46: mol_type = genomic DNA

SEQ ID NO: 54676 - DNA, 41 bp, Homo sapiens; identical to SEQ ID NO: 8794
  source 1..41: mol_type = genomic DNA

SEQ ID NO: 54677 - DNA, 36 bp, Homo sapiens; identical to SEQ ID NO: 4000
  source 1..36: mol_type = genomic DNA

SEQ ID NO: 54678 - DNA, 35 bp, Homo sapiens; identical to SEQ ID NO: 30464
  source 1..35: mol_type = genomic DNA

SEQ ID NO: 54679 - DNA, 33 bp, Homo sapiens; identical to SEQ ID NO: 26525
  source 1..33: mol_type = genomic DNA

SEQ ID NO: 54680 - DNA, 28 bp, Homo sapiens
  source 1..28: mol_type = genomic DNA
gttttgacaacattcaaaaaagagtacc

SEQ ID NO: 54681 - DNA, 31 bp, Homo sapiens; identical to SEQ ID NO: 5004
  source 1..31: mol_type = genomic DNA

SEQ ID NO: 54682 - DNA, 36 bp, Homo sapiens; identical to SEQ ID NO: 6656
  source 1..36: mol_type = genomic DNA

SEQ ID NO: 54683 - DNA, 38 bp, Homo sapiens; identical to SEQ ID NO: 7812
  source 1..38: mol_type = genomic DNA

SEQ ID NO: 54684 - DNA, 44 bp, Homo sapiens; identical to SEQ ID NO: 14399
  source 1..44: mol_type = genomic DNA

SEQ ID NO: 54685 - DNA, 38 bp, Homo sapiens; identical to SEQ ID NO: 8357
  source 1..38: mol_type = genomic DNA

SEQ ID NO: 54686 - DNA, 48 bp, Homo sapiens; identical to SEQ ID NO: 19948
  source 1..48: mol_type = genomic DNA

SEQ ID NO: 54687 - DNA, 31 bp, Homo sapiens; identical to SEQ ID NO: 25127
  source 1..31: mol_type = genomic DNA

SEQ ID NO: 54688 - DNA, 48 bp, Homo sapiens; identical to SEQ ID NO: 21736
  source 1..48: mol_type = genomic DNA

SEQ ID NO: 54689 - DNA, 30 bp, Homo sapiens; identical to SEQ ID NO: 25109
  source 1..30: mol_type = genomic DNA

SEQ ID NO: 54690 - DNA, 34 bp, Homo sapiens; identical to SEQ ID NO: 12000
  source 1..34: mol_type = genomic DNA

SEQ ID NO: 54691 - DNA, 39 bp, Homo sapiens; identical to SEQ ID NO: 30353
  source 1..39: mol_type = genomic DNA

SEQ ID NO: 54692 - DNA, 29 bp, Homo sapiens
  source 1..29: mol_type = genomic DNA
gtggtagaattctcgcctgccacgcggga

SEQ ID NO: 54693 - DNA, 17 bp, Homo sapiens
  source 1..17: mol_type = genomic DNA
aactgggcggaaacacc

SEQ ID NO: 54694 - DNA, 24 bp, Homo sapiens
  source 1..24: mol_type = genomic DNA
agcgtgctgggcccataacccaga

SEQ ID NO: 54695 - DNA, 26 bp, Homo sapiens
  source 1..26: mol_type = genomic DNA
aaggctgcgtgttcgaatcacgtcgg

SEQ ID NO: 54696 - DNA, 42 bp, Homo sapiens; identical to SEQ ID NO: 25542
  source 1..42: mol_type = genomic DNA

SEQ ID NO: 54697 - DNA, 33 bp, Homo sapiens; identical to SEQ ID NO: 1052
  source 1..33: mol_type = genomic DNA

SEQ ID NO: 54698 - DNA, 45 bp, Homo sapiens; identical to SEQ ID NO: 57
  source 1..45: mol_type = genomic DNA

SEQ ID NO: 54699 - DNA, 34 bp, Homo sapiens; identical to SEQ ID NO: 23053
  source 1..34: mol_type = genomic DNA

SEQ ID NO: 54700 - DNA, 46 bp, Homo sapiens; identical to SEQ ID NO: 27701
  source 1..46: mol_type = genomic DNA

SEQ ID NO: 54701 - DNA, 30 bp, Homo sapiens; identical to SEQ ID NO: 7630
  source 1..30: mol_type = genomic DNA

SEQ ID NO: 54702 - DNA, 34 bp, Homo sapiens; identical to SEQ ID NO: 16184
  source 1..34: mol_type = genomic DNA

SEQ ID NO: 54703 - DNA, 30 bp, Homo sapiens; identical to SEQ ID NO: 20796
  source 1..30: mol_type = genomic DNA

SEQ ID NO: 54704 - DNA, 34 bp, Homo sapiens; identical to SEQ ID NO: 4780
  source 1..34: mol_type = genomic DNA

SEQ ID NO: 54705 - DNA, 41 bp, Homo sapiens; identical to SEQ ID NO: 4159
  source 1..41: mol_type = genomic DNA

SEQ ID NO: 54706 - DNA, 17 bp, Homo sapiens
  source 1..17: mol_type = genomic DNA
aaccgggcagaaacacc

SEQ ID NO: 54707 - DNA, 37 bp, Homo sapiens; identical to SEQ ID NO: 398
  source 1..37: mol_type = genomic DNA

SEQ ID NO: 54708 - DNA, 29 bp, Homo sapiens
  source 1..29: mol_type = genomic DNA
ttggtctaggggtatgattctcgctttgg

SEQ ID NO: 54709 - DNA, 17 bp, Homo sapiens
  source 1..17: mol_type = genomic DNA
ttcccggccagggaacc

SEQ ID NO: 54710 - DNA, 34 bp, Homo sapiens; identical to SEQ ID NO: 8925
  source 1..34: mol_type = genomic DNA

SEQ ID NO: 54711 - DNA, 32 bp, Homo sapiens; identical to SEQ ID NO: 10582
  source 1..32: mol_type = genomic DNA

SEQ ID NO: 54712 - DNA, 32 bp, Homo sapiens; identical to SEQ ID NO: 15286
  source 1..32: mol_type = genomic DNA

SEQ ID NO: 54713 - DNA, 32 bp, Homo sapiens; identical to SEQ ID NO: 13378
  source 1..32: mol_type = genomic DNA

SEQ ID NO: 54714 - DNA, 48 bp, Homo sapiens; identical to SEQ ID NO: 848
  source 1..48: mol_type = genomic DNA

SEQ ID NO: 54715 - DNA, 32 bp, Homo sapiens; identical to SEQ ID NO: 8617
  source 1..32: mol_type = genomic DNA

SEQ ID NO: 54716 - DNA, 28 bp, Homo sapiens
  source 1..28: mol_type = genomic DNA
agaaagctcacaagaactgctaactcat

SEQ ID NO: 54717 - DNA, 30 bp, Homo sapiens; identical to SEQ ID NO: 18538
  source 1..30: mol_type = genomic DNA

SEQ ID NO: 54718 - DNA, 44 bp, Homo sapiens; identical to SEQ ID NO: 8797
  source 1..44: mol_type = genomic DNA

SEQ ID NO: 54719 - DNA, 34 bp, Homo sapiens; identical to SEQ ID NO: 25300
  source 1..34: mol_type = genomic DNA

SEQ ID NO: 54720 - DNA, 26 bp, Homo sapiens
  source 1..26: mol_type = genomic DNA
ccagggttcaagtccctgttcaggcg

SEQ ID NO: 54721 - DNA, 30 bp, Homo sapiens; identical to SEQ ID NO: 10503
  source 1..30: mol_type = genomic DNA

SEQ ID NO: 54722 - DNA, 48 bp, Homo sapiens
  source 1..48: mol_type = genomic DNA
atccattggggtttccccgcgcaggttcgaatcctgccgactacgcca

SEQ ID NO: 54723 - DNA, 37 bp, Homo sapiens; identical to SEQ ID NO: 6215
  source 1..37: mol_type = genomic DNA

SEQ ID NO: 54724 - DNA, 46 bp, Homo sapiens; identical to SEQ ID NO: 19946
  source 1..46: mol_type = genomic DNA

SEQ ID NO: 54725 - DNA, 28 bp, Homo sapiens
  source 1..28: mol_type = genomic DNA
ttttgacaacattcaaaaaagagtacca

SEQ ID NO: 54726 - DNA, 38 bp, Homo sapiens; identical to SEQ ID NO: 3115
  source 1..38: mol_type = genomic DNA

SEQ ID NO: 54727 - DNA, 32 bp, Homo sapiens; identical to SEQ ID NO: 8806
  source 1..32: mol_type = genomic DNA

SEQ ID NO: 54728 - DNA, 17 bp, Homo sapiens
  source 1..17: mol_type = genomic DNA
agttctggtctccggat

SEQ ID NO: 54729 - DNA, 47 bp, Homo sapiens; identical to SEQ ID NO: 8235
  source 1..47: mol_type = genomic DNA

SEQ ID NO: 54730 - DNA, 35 bp, Homo sapiens; identical to SEQ ID NO: 29550
  source 1..35: mol_type = genomic DNA

SEQ ID NO: 54731 - DNA, 17 bp, Homo sapiens
  source 1..17: mol_type = genomic DNA
aaccgagcggaaacacc

SEQ ID NO: 54732 - DNA, 39 bp, Homo sapiens; identical to SEQ ID NO: 14693
  source 1..39: mol_type = genomic DNA

SEQ ID NO: 54733 - DNA, 44 bp, Homo sapiens; identical to SEQ ID NO: 22552
  source 1..44: mol_type = genomic DNA

SEQ ID NO: 54734 - DNA, 33 bp, Homo sapiens; identical to SEQ ID NO: 10496
  source 1..33: mol_type = genomic DNA

SEQ ID NO: 54735 - DNA, 46 bp, Homo sapiens; identical to SEQ ID NO: 17021
  source 1..46: mol_type = genomic DNA

SEQ ID NO: 54736 - DNA, 34 bp, Homo sapiens; identical to SEQ ID NO: 9708
  source 1..34: mol_type = genomic DNA

SEQ ID NO: 54737 - DNA, 31 bp, Homo sapiens; identical to SEQ ID NO: 15076
  source 1..31: mol_type = genomic DNA

SEQ ID NO: 54738 - DNA, 31 bp, Homo sapiens; identical to SEQ ID NO: 7037
  source 1..31: mol_type = genomic DNA

SEQ ID NO: 54739 - DNA, 26 bp, Homo sapiens
  source 1..26: mol_type = genomic DNA
cggtagagcatgggactcttaatccc

SEQ ID NO: 54740 - DNA, 28 bp, Homo sapiens
  source 1..28: mol_type = genomic DNA
cgttaacttccaattaactagttttgac

SEQ ID NO: 54741 - DNA, 48 bp, Homo sapiens; identical to SEQ ID NO: 22979
  source 1..48: mol_type = genomic DNA

SEQ ID NO: 54742 - DNA, 43 bp, Homo sapiens; identical to SEQ ID NO: 1550
  source 1..43: mol_type = genomic DNA

SEQ ID NO: 54743 - DNA, 46 bp, Homo sapiens; identical to SEQ ID NO: 23097
  source 1..46: mol_type = genomic DNA

SEQ ID NO: 54744 - DNA, 27 bp, Homo sapiens
  source 1..27: mol_type = genomic DNA
aatgttggttatacccttcccgtacta

SEQ ID NO: 54745 - DNA, 31 bp, Homo sapiens; identical to SEQ ID NO: 3827
  source 1..31: mol_type = genomic DNA

SEQ ID NO: 54746 - DNA, 31 bp, Homo sapiens; identical to SEQ ID NO: 22605
  source 1..31: mol_type = genomic DNA

SEQ ID NO: 54747 - DNA, 33 bp, Homo sapiens; identical to SEQ ID NO: 29168
  source 1..33: mol_type = genomic DNA

SEQ ID NO: 54748 - DNA, 37 bp, Homo sapiens; identical to SEQ ID NO: 7426
  source 1..37: mol_type = genomic DNA

SEQ ID NO: 54749 - DNA, 39 bp, Homo sapiens; identical to SEQ ID NO: 11188
  source 1..39: mol_type = genomic DNA

SEQ ID NO: 54750 - DNA, 34 bp, Homo sapiens; identical to SEQ ID NO: 25424
  source 1..34: mol_type = genomic DNA

SEQ ID NO: 54751 - DNA, 31 bp, Homo sapiens; identical to SEQ ID NO: 14878
  source 1..31: mol_type = genomic DNA

SEQ ID NO: 54752 - DNA, 48 bp, Homo sapiens; identical to SEQ ID NO: 2491
  source 1..48: mol_type = genomic DNA

SEQ ID NO: 54753 - DNA, 32 bp, Homo sapiens; identical to SEQ ID NO: 26542
  source 1..32: mol_type = genomic DNA

SEQ ID NO: 54754 - DNA, 37 bp, Homo sapiens; identical to SEQ ID NO: 24900
  source 1..37: mol_type = genomic DNA

SEQ ID NO: 54755 - DNA, 40 bp, Homo sapiens; identical to SEQ ID NO: 26752
  source 1..40: mol_type = genomic DNA

SEQ ID NO: 54756 - DNA, 29 bp, Homo sapiens
  source 1..29: mol_type = genomic DNA
cccaggcggcccgggttcgactcccggtg

SEQ ID NO: 54757 - DNA, 48 bp, Homo sapiens; identical to SEQ ID NO: 1245
  source 1..48: mol_type = genomic DNA

SEQ ID NO: 54758 - DNA, 29 bp, Homo sapiens
  source 1..29: mol_type = genomic DNA
caacagaggcttacgaccccttatttacc

SEQ ID NO: 54759 - DNA, 38 bp, Homo sapiens; identical to SEQ ID NO: 30362
  source 1..38: mol_type = genomic DNA

SEQ ID NO: 54760 - DNA, 48 bp, Homo sapiens; identical to SEQ ID NO: 9730
  source 1..48: mol_type = genomic DNA

SEQ ID NO: 54761 - DNA, 31 bp, Homo sapiens; identical to SEQ ID NO: 1853
  source 1..31: mol_type = genomic DNA

SEQ ID NO: 54762 - DNA, 21 bp, Homo sapiens
  source 1..21: mol_type = genomic DNA
tctcataatctgaaggtcgtg

SEQ ID NO: 54763 - DNA, 33 bp, Homo sapiens; identical to SEQ ID NO: 19195
  source 1..33: mol_type = genomic DNA

SEQ ID NO: 54764 - DNA, 39 bp, Homo sapiens; identical to SEQ ID NO: 5421
  source 1..39: mol_type = genomic DNA

SEQ ID NO: 54765 - DNA, 42 bp, Homo sapiens; identical to SEQ ID NO: 16485
  source 1..42: mol_type = genomic DNA

SEQ ID NO: 54766 - DNA, 23 bp, Homo sapiens
  source 1..23: mol_type = genomic DNA
gttcgagtcccacctggggtgcc

SEQ ID NO: 54767 - DNA, 33 bp, Homo sapiens; identical to SEQ ID NO: 23457
  source 1..33: mol_type = genomic DNA

SEQ ID NO: 54768 - DNA, 31 bp, Homo sapiens; identical to SEQ ID NO: 17725
  source 1..31: mol_type = genomic DNA

SEQ ID NO: 54769 - DNA, 32 bp, Homo sapiens; identical to SEQ ID NO: 6370
  source 1..32: mol_type = genomic DNA

SEQ ID NO: 54770 - DNA, 27 bp, Homo sapiens
  source 1..27: mol_type = genomic DNA
cagctttggggggttcgattccttcct

SEQ ID NO: 54771 - DNA, 36 bp, Homo sapiens; identical to SEQ ID NO: 24964
  source 1..36: mol_type = genomic DNA

SEQ ID NO: 54772 - DNA, 44 bp, Homo sapiens; identical to SEQ ID NO: 21494
  source 1..44: mol_type = genomic DNA

SEQ ID NO: 54773 - DNA, 34 bp, Homo sapiens; identical to SEQ ID NO: 29549
  source 1..34: mol_type = genomic DNA

SEQ ID NO: 54774 - DNA, 48 bp, Homo sapiens; identical to SEQ ID NO: 6415
  source 1..48: mol_type = genomic DNA

SEQ ID NO: 54775 - DNA, 32 bp, Homo sapiens; identical to SEQ ID NO: 17569
  source 1..32: mol_type = genomic DNA

SEQ ID NO: 54776 - DNA, 34 bp, Homo sapiens; identical to SEQ ID NO: 14368
  source 1..34: mol_type = genomic DNA

SEQ ID NO: 54777 - DNA, 41 bp, Homo sapiens; identical to SEQ ID NO: 21061
  source 1..41: mol_type = genomic DNA

SEQ ID NO: 54778 - DNA, 18 bp, Homo sapiens
  source 1..18: mol_type = genomic DNA
tcggtagagcatgagacc

SEQ ID NO: 54779 - DNA, 41 bp, Homo sapiens; identical to SEQ ID NO: 2455
  source 1..41: mol_type = genomic DNA

SEQ ID NO: 54780 - DNA, 25 bp, Homo sapiens
  source 1..25: mol_type = genomic DNA
ttagaatcttagctttgggtgctaa

SEQ ID NO: 54781 - DNA, 41 bp, Homo sapiens; identical to SEQ ID NO: 20626
  source 1..41: mol_type = genomic DNA

SEQ ID NO: 54782 - DNA, 32 bp, Homo sapiens; identical to SEQ ID NO: 9679
  source 1..32: mol_type = genomic DNA

SEQ ID NO: 54783 - DNA, 35 bp, Homo sapiens; identical to SEQ ID NO: 12001
  source 1..35: mol_type = genomic DNA

SEQ ID NO: 54784 - DNA, 19 bp, Homo sapiens
  source 1..19: mol_type = genomic DNA
gattcccgggcggcgcacc

SEQ ID NO: 54785 - DNA, 35 bp, Homo sapiens; identical to SEQ ID NO: 14369
  source 1..35: mol_type = genomic DNA

SEQ ID NO: 54786 - DNA, 17 bp, Homo sapiens
  source 1..17: mol_type = genomic DNA
gcagcgatggccgagtg

SEQ ID NO: 54787 - DNA, 43 bp, Homo sapiens; identical to SEQ ID NO: 28347
  source 1..43: mol_type = genomic DNA

SEQ ID NO: 54788 - DNA, 39 bp, Homo sapiens; identical to SEQ ID NO: 16062
  source 1..39: mol_type = genomic DNA

SEQ ID NO: 54789 - DNA, 31 bp, Homo sapiens; identical to SEQ ID NO: 30294
  source 1..31: mol_type = genomic DNA

SEQ ID NO: 54790 - DNA, 39 bp, Homo sapiens; identical to SEQ ID NO: 6035
  source 1..39: mol_type = genomic DNA

SEQ ID NO: 54791 - DNA, 44 bp, Homo sapiens; identical to SEQ ID NO: 20164
  source 1..44: mol_type = genomic DNA

SEQ ID NO: 54792 - DNA, 24 bp, Homo sapiens
  source 1..24: mol_type = genomic DNA
tccgaggtgattttcatattgaat

SEQ ID NO: 54793 - DNA, 46 bp, Homo sapiens; identical to SEQ ID NO: 29176
  source 1..46: mol_type = genomic DNA

SEQ ID NO: 54794 - DNA, 48 bp, Homo sapiens; identical to SEQ ID NO: 7292
  source 1..48: mol_type = genomic DNA

SEQ ID NO: 54795 - DNA, 35 bp, Homo sapiens; identical to SEQ ID NO: 10988
  source 1..35: mol_type = genomic DNA

SEQ ID NO: 54796 - DNA, 24 bp, Homo sapiens
  source 1..24: mol_type = genomic DNA
cccattcttgcgacccgggttcga

SEQ ID NO: 54797 - DNA, 40 bp, Homo sapiens; identical to SEQ ID NO: 25305
  source 1..40: mol_type = genomic DNA

SEQ ID NO: 54798 - DNA, 48 bp, Homo sapiens; identical to SEQ ID NO: 10752
  source 1..48: mol_type = genomic DNA

SEQ ID NO: 54799 - DNA, 26 bp, Homo sapiens
  source 1..26: mol_type = genomic DNA
agtcggtagagcatgagacccttaat

SEQ ID NO: 54800 - DNA, 40 bp, Homo sapiens; identical to SEQ ID NO: 19702
  source 1..40: mol_type = genomic DNA

SEQ ID NO: 54801 - DNA, 35 bp, Homo sapiens; identical to SEQ ID NO: 8027
  source 1..35: mol_type = genomic DNA

SEQ ID NO: 54802 - DNA, 44 bp, Homo sapiens; identical to SEQ ID NO: 7693
  source 1..44: mol_type = genomic DNA

SEQ ID NO: 54803 - DNA, 18 bp, Homo sapiens
  source 1..18: mol_type = genomic DNA
ttcgattcccggccaacg

SEQ ID NO: 54804 - DNA, 24 bp, Homo sapiens
  source 1..24: mol_type = genomic DNA
tccaggttcgactcctggctggct

SEQ ID NO: 54805 - DNA, 36 bp, Homo sapiens; identical to SEQ ID NO: 16666
  source 1..36: mol_type = genomic DNA

SEQ ID NO: 54806 - DNA, 20 bp, Homo sapiens
  source 1..20: mol_type = genomic DNA
caattcctcttcttaacacc

SEQ ID NO: 54807 - DNA, 36 bp, Homo sapiens; identical to SEQ ID NO: 4716
  source 1..36: mol_type = genomic DNA

SEQ ID NO: 54808 - DNA, 38 bp, Homo sapiens; identical to SEQ ID NO: 16176
  source 1..38: mol_type = genomic DNA

SEQ ID NO: 54809 - DNA, 43 bp, Homo sapiens; identical to SEQ ID NO: 15425
  source 1..43: mol_type = genomic DNA

SEQ ID NO: 54810 - DNA, 35 bp, Homo sapiens; identical to SEQ ID NO: 22476
  source 1..35: mol_type = genomic DNA

SEQ ID NO: 54811 - DNA, 42 bp, Homo sapiens; identical to SEQ ID NO: 30984
  source 1..42: mol_type = genomic DNA

SEQ ID NO: 54812 - DNA, 34 bp, Homo sapiens; identical to SEQ ID NO: 17216
  source 1..34: mol_type = genomic DNA

SEQ ID NO: 54813 - DNA, 35 bp, Homo sapiens; identical to SEQ ID NO: 19221
  source 1..35: mol_type = genomic DNA

SEQ ID NO: 54814 - DNA, 28 bp, Homo sapiens
  source 1..28: mol_type = genomic DNA
ggcgctctcaccgccgcggcccgggttc

SEQ ID NO: 54815 - DNA, 32 bp, Homo sapiens; identical to SEQ ID NO: 7775
  source 1..32: mol_type = genomic DNA

SEQ ID NO: 54816 - DNA, 48 bp, Homo sapiens; identical to SEQ ID NO: 7580
  source 1..48: mol_type = genomic DNA

SEQ ID NO: 54817 - DNA, 36 bp, Homo sapiens; identical to SEQ ID NO: 26428
  source 1..36: mol_type = genomic DNA

SEQ ID NO: 54818 - DNA, 34 bp, Homo sapiens; identical to SEQ ID NO: 21799
  source 1..34: mol_type = genomic DNA

SEQ ID NO: 54819 - DNA, 22 bp, Homo sapiens
  source 1..22: mol_type = genomic DNA
tcagttggtagagcatcagact

SEQ ID NO: 54820 - DNA, 22 bp, Homo sapiens
  source 1..22: mol_type = genomic DNA
gacttaagatccaatggacata

SEQ ID NO: 54821 - DNA, 16 bp, Homo sapiens
  source 1..16: mol_type = genomic DNA
cgattcccggccaacg

SEQ ID NO: 54822 - DNA, 33 bp, Homo sapiens; identical to SEQ ID NO: 3238
  source 1..33: mol_type = genomic DNA

SEQ ID NO: 54823 - DNA, 27 bp, Homo sapiens
  source 1..27: mol_type = genomic DNA
cataaaacttaaaactttacagtcaga

SEQ ID NO: 54824 - DNA, 16 bp, Homo sapiens
  source 1..16: mol_type = genomic DNA
cacgcgggagaccggg

SEQ ID NO: 54825 - DNA, 16 bp, Homo sapiens
  source 1..16: mol_type = genomic DNA
cataatctgaaggtcg

SEQ ID NO: 54826 - DNA, 44 bp, Homo sapiens; identical to SEQ ID NO: 22002
  source 1..44: mol_type = genomic DNA

SEQ ID NO: 54827 - DNA, 31 bp, Homo sapiens; identical to SEQ ID NO: 18539
  source 1..31: mol_type = genomic DNA

SEQ ID NO: 54828 - DNA, 32 bp, Homo sapiens; identical to SEQ ID NO: 1540
  source 1..32: mol_type = genomic DNA

SEQ ID NO: 54829 - DNA, 35 bp, Homo sapiens; identical to SEQ ID NO: 28571
  source 1..35: mol_type = genomic DNA

SEQ ID NO: 54830 - DNA, 33 bp, Homo sapiens; identical to SEQ ID NO: 7166
  source 1..33: mol_type = genomic DNA

SEQ ID NO: 54831 - DNA, 48 bp, Homo sapiens; identical to SEQ ID NO: 16071
  source 1..48: mol_type = genomic DNA

SEQ ID NO: 54832 - DNA, 33 bp, Homo sapiens; identical to SEQ ID NO: 13751
  source 1..33: mol_type = genomic DNA

SEQ ID NO: 54833 - DNA, 40 bp, Homo sapiens; identical to SEQ ID NO: 25916
  source 1..40: mol_type = genomic DNA

SEQ ID NO: 54834 - DNA, 48 bp, Homo sapiens; identical to SEQ ID NO: 4702
  source 1..48: mol_type = genomic DNA

SEQ ID NO: 54835 - DNA, 25 bp, Homo sapiens
  source 1..25: mol_type = genomic DNA
ttggtgcaactccaaataaaagtac

SEQ ID NO: 54836 - DNA, 36 bp, Homo sapiens; identical to SEQ ID NO: 10748
  source 1..36: mol_type = genomic DNA

SEQ ID NO: 54837 - DNA, 45 bp, Homo sapiens; identical to SEQ ID NO: 21545
  source 1..45: mol_type = genomic DNA

SEQ ID NO: 54838 - DNA, 33 bp, Homo sapiens; identical to SEQ ID NO: 28596
  source 1..33: mol_type = genomic DNA

SEQ ID NO: 54839 - DNA, 40 bp, Homo sapiens; identical to SEQ ID NO: 21196
  source 1..40: mol_type = genomic DNA

SEQ ID NO: 54840 - DNA, 33 bp, Homo sapiens; identical to SEQ ID NO: 18417
  source 1..33: mol_type = genomic DNA

SEQ ID NO: 54841 - DNA, 36 bp, Homo sapiens; identical to SEQ ID NO: 6797
  source 1..36: mol_type = genomic DNA

SEQ ID NO: 54842 - DNA, 26 bp, Homo sapiens
  source 1..26: mol_type = genomic DNA
cgtgagttcgagcctcacacggggca

SEQ ID NO: 54843 - DNA, 48 bp, Homo sapiens; identical to SEQ ID NO: 11909
  source 1..48: mol_type = genomic DNA

SEQ ID NO: 54844 - DNA, 39 bp, Homo sapiens; identical to SEQ ID NO: 18109
  source 1..39: mol_type = genomic DNA

SEQ ID NO: 54845 - DNA, 48 bp, Homo sapiens; identical to SEQ ID NO: 23640
  source 1..48: mol_type = genomic DNA

SEQ ID NO: 54846 - DNA, 37 bp, Homo sapiens; identical to SEQ ID NO: 26829
  source 1..37: mol_type = genomic DNA

SEQ ID NO: 54847 - DNA, 28 bp, Homo sapiens
  source 1..28: mol_type = genomic DNA
ggtccagggttcaagtccctgttcgggc

SEQ ID NO: 54848 - DNA, 44 bp, Homo sapiens; identical to SEQ ID NO: 10204
  source 1..44: mol_type = genomic DNA

SEQ ID NO: 54849 - DNA, 46 bp, Homo sapiens; identical to SEQ ID NO: 8234
  source 1..46: mol_type = genomic DNA

SEQ ID NO: 54850 - DNA, 25 bp, Homo sapiens
  source 1..25: mol_type = genomic DNA
tagaattctcgcctgccacgcggga

SEQ ID NO: 54851 - DNA, 38 bp, Homo sapiens; identical to SEQ ID NO: 19223
  source 1..38: mol_type = genomic DNA

SEQ ID NO: 54852 - DNA, 23 bp, Homo sapiens
  source 1..23: mol_type = genomic DNA
cggcccgggttcgactcccggtg

SEQ ID NO: 54853 - DNA, 26 bp, Homo sapiens
  source 1..26: mol_type = genomic DNA
aggtggcccgggttcgactcccggta

SEQ ID NO: 54854 - DNA, 48 bp, Homo sapiens; identical to SEQ ID NO: 7509
  source 1..48: mol_type = genomic DNA

SEQ ID NO: 54855 - DNA, 33 bp, Homo sapiens; identical to SEQ ID NO: 4660
  source 1..33: mol_type = genomic DNA

SEQ ID NO: 54856 - DNA, 16 bp, Homo sapiens
  source 1..16: mol_type = genomic DNA
ttcggcgctctcaccg

SEQ ID NO: 54857 - DNA, 26 bp, Homo sapiens
  source 1..26: mol_type = genomic DNA
tttgatagagtaaataataggagctt

SEQ ID NO: 54858 - DNA, 32 bp, Homo sapiens; identical to SEQ ID NO: 12597
  source 1..32: mol_type = genomic DNA

SEQ ID NO: 54859 - DNA, 27 bp, Homo sapiens
  source 1..27: mol_type = genomic DNA
gtgtagtggttatcacgtctgctttac

SEQ ID NO: 54860 - DNA, 17 bp, Homo sapiens
  source 1..17: mol_type = genomic DNA
cgcgggttcgatccccg

SEQ ID NO: 54861 - DNA, 47 bp, Homo sapiens; identical to SEQ ID NO: 3056
  source 1..47: mol_type = genomic DNA

SEQ ID NO: 54862 - DNA, 33 bp, Homo sapiens; identical to SEQ ID NO: 8308
  source 1..33: mol_type = genomic DNA

SEQ ID NO: 54863 - DNA, 36 bp, Homo sapiens; identical to SEQ ID NO: 10144
  source 1..36: mol_type = genomic DNA

SEQ ID NO: 54864 - DNA, 41 bp, Homo sapiens; identical to SEQ ID NO: 21569
  source 1..41: mol_type = genomic DNA

SEQ ID NO: 54865 - DNA, 37 bp, Homo sapiens; identical to SEQ ID NO: 14563
  source 1..37: mol_type = genomic DNA

SEQ ID NO: 54866 - DNA, 42 bp, Homo sapiens; identical to SEQ ID NO: 11530
  source 1..42: mol_type = genomic DNA

SEQ ID NO: 54867 - DNA, 36 bp, Homo sapiens; identical to SEQ ID NO: 17283
  source 1..36: mol_type = genomic DNA

SEQ ID NO: 54868 - DNA, 39 bp, Homo sapiens; identical to SEQ ID NO: 25164
  source 1..39: mol_type = genomic DNA

SEQ ID NO: 54869 - DNA, 32 bp, Homo sapiens; identical to SEQ ID NO: 16878
  source 1..32: mol_type = genomic DNA

SEQ ID NO: 54870 - DNA, 43 bp, Homo sapiens; identical to SEQ ID NO: 16845
  source 1..43: mol_type = genomic DNA

SEQ ID NO: 54871 - DNA, 27 bp, Homo sapiens
  source 1..27: mol_type = genomic DNA
gaaagctcacaagaactgctaactcat

SEQ ID NO: 54872 - DNA, 34 bp, Homo sapiens; identical to SEQ ID NO: 13705
  source 1..34: mol_type = genomic DNA

SEQ ID NO: 54873 - DNA, 33 bp, Homo sapiens; identical to SEQ ID NO: 27100
  source 1..33: mol_type = genomic DNA

SEQ ID NO: 54874 - DNA, 44 bp, Homo sapiens; identical to SEQ ID NO: 28044
  source 1..44: mol_type = genomic DNA

SEQ ID NO: 54875 - DNA, 48 bp, Homo sapiens; identical to SEQ ID NO: 2026
  source 1..48: mol_type = genomic DNA

SEQ ID NO: 54876 - DNA, 29 bp, Homo sapiens
  source 1..29: mol_type = genomic DNA
acaggagatcctgggttcgaatcccagcg

SEQ ID NO: 54877 - DNA, 40 bp, Homo sapiens; identical to SEQ ID NO: 25616
  source 1..40: mol_type = genomic DNA

SEQ ID NO: 54878 - DNA, 33 bp, Homo sapiens; identical to SEQ ID NO: 30192
  source 1..33: mol_type = genomic DNA

SEQ ID NO: 54879 - DNA, 48 bp, Homo sapiens; identical to SEQ ID NO: 14568
  source 1..48: mol_type = genomic DNA

SEQ ID NO: 54880 - DNA, 21 bp, Homo sapiens
  source 1..21: mol_type = genomic DNA
cttaagatccaatggacatat

SEQ ID NO: 54881 - DNA, 37 bp, Homo sapiens; identical to SEQ ID NO: 647
  source 1..37: mol_type = genomic DNA

SEQ ID NO: 54882 - DNA, 39 bp, Homo sapiens; identical to SEQ ID NO: 3083
  source 1..39: mol_type = genomic DNA

SEQ ID NO: 54883 - DNA, 18 bp, Homo sapiens
  source 1..18: mol_type = genomic DNA
ccaagcagttgacccggg

SEQ ID NO: 54884 - DNA, 48 bp, Homo sapiens; identical to SEQ ID NO: 3634
  source 1..48: mol_type = genomic DNA

SEQ ID NO: 54885 - DNA, 34 bp, Homo sapiens; identical to SEQ ID NO: 16913
  source 1..34: mol_type = genomic DNA

SEQ ID NO: 54886 - DNA, 35 bp, Homo sapiens; identical to SEQ ID NO: 23040
  source 1..35: mol_type = genomic DNA

SEQ ID NO: 54887 - DNA, 30 bp, Homo sapiens; identical to SEQ ID NO: 15773
  source 1..30: mol_type = genomic DNA

SEQ ID NO: 54888 - DNA, 33 bp, Homo sapiens; identical to SEQ ID NO: 23909
  source 1..33: mol_type = genomic DNA

SEQ ID NO: 54889 - DNA, 40 bp, Homo sapiens; identical to SEQ ID NO: 20621
  source 1..40: mol_type = genomic DNA

SEQ ID NO: 54890 - DNA, 33 bp, Homo sapiens; identical to SEQ ID NO: 13202
  source 1..33: mol_type = genomic DNA

SEQ ID NO: 54891 - DNA, 32 bp, Homo sapiens; identical to SEQ ID NO: 25128
  source 1..32: mol_type = genomic DNA

SEQ ID NO: 54892 - DNA, 42 bp, Homo sapiens; identical to SEQ ID NO: 25918
  source 1..42: mol_type = genomic DNA

SEQ ID NO: 54893 - DNA, 48 bp, Homo sapiens; identical to SEQ ID NO: 13480
  source 1..48: mol_type = genomic DNA

SEQ ID NO: 54894 - DNA, 40 bp, Homo sapiens; identical to SEQ ID NO: 28499
  source 1..40: mol_type = genomic DNA

SEQ ID NO: 54895 - DNA, 38 bp, Homo sapiens; identical to SEQ ID NO: 12098
  source 1..38: mol_type = genomic DNA

SEQ ID NO: 54896 - DNA, 28 bp, Homo sapiens
  source 1..28: mol_type = genomic DNA
agtcggtagagcatgagacccttaatct

SEQ ID NO: 54897 - DNA, 25 bp, Homo sapiens
  source 1..25: mol_type = genomic DNA
gagttcaaatctcgctggggcctcc

SEQ ID NO: 54898 - DNA, 35 bp, Homo sapiens; identical to SEQ ID NO: 23054
  source 1..35: mol_type = genomic DNA

SEQ ID NO: 54899 - DNA, 45 bp, Homo sapiens; identical to SEQ ID NO: 15427
  source 1..45: mol_type = genomic DNA

SEQ ID NO: 54900 - DNA, 48 bp, Homo sapiens; identical to SEQ ID NO: 22200
  source 1..48: mol_type = genomic DNA

SEQ ID NO: 54901 - DNA, 43 bp, Homo sapiens; identical to SEQ ID NO: 17586
  source 1..43: mol_type = genomic DNA

SEQ ID NO: 54902 - DNA, 29 bp, Homo sapiens
  source 1..29: mol_type = genomic DNA
agcgatccgagttcaaatctcggtggaac

SEQ ID NO: 54903 - DNA, 23 bp, Homo sapiens
  source 1..23: mol_type = genomic DNA
ttaagatggcagagcccggtaat

SEQ ID NO: 54904 - DNA, 39 bp, Homo sapiens; identical to SEQ ID NO: 13177
  source 1..39: mol_type = genomic DNA

SEQ ID NO: 54905 - DNA, 38 bp, Homo sapiens; identical to SEQ ID NO: 23348
  source 1..38: mol_type = genomic DNA

SEQ ID NO: 54906 - DNA, 48 bp, Homo sapiens; identical to SEQ ID NO: 545
  source 1..48: mol_type = genomic DNA

SEQ ID NO: 54907 - DNA, 31 bp, Homo sapiens; identical to SEQ ID NO: 13601
  source 1..31: mol_type = genomic DNA

SEQ ID NO: 54908 - DNA, 34 bp, Homo sapiens; identical to SEQ ID NO: 6230
  source 1..34: mol_type = genomic DNA

SEQ ID NO: 54909 - DNA, 37 bp, Homo sapiens; identical to SEQ ID NO: 2770
  source 1..37: mol_type = genomic DNA

SEQ ID NO: 54910 - DNA, 28 bp, Homo sapiens
  source 1..28: mol_type = genomic DNA
aacagaggcttacgaccccttatttacc

SEQ ID NO: 54911 - DNA, 48 bp, Homo sapiens; identical to SEQ ID NO: 18364
  source 1..48: mol_type = genomic DNA

SEQ ID NO: 54912 - DNA, 31 bp, Homo sapiens; identical to SEQ ID NO: 28341
  source 1..31: mol_type = genomic DNA

SEQ ID NO: 54913 - DNA, 22 bp, Homo sapiens
  source 1..22: mol_type = genomic DNA
ttcgaatccggctcggaggacc

SEQ ID NO: 54914 - DNA, 37 bp, Homo sapiens; identical to SEQ ID NO: 8387
  source 1..37: mol_type = genomic DNA

SEQ ID NO: 54915 - DNA, 34 bp, Homo sapiens; identical to SEQ ID NO: 8039
  source 1..34: mol_type = genomic DNA

SEQ ID NO: 54916 - DNA, 38 bp, Homo sapiens; identical to SEQ ID NO: 9196
  source 1..38: mol_type = genomic DNA

SEQ ID NO: 54917 - DNA, 37 bp, Homo sapiens; identical to SEQ ID NO: 21409
  source 1..37: mol_type = genomic DNA

SEQ ID NO: 54918 - DNA, 33 bp, Homo sapiens; identical to SEQ ID NO: 15078
  source 1..33: mol_type = genomic DNA

SEQ ID NO: 54919 - DNA, 41 bp, Homo sapiens; identical to SEQ ID NO: 22936
  source 1..41: mol_type = genomic DNA

SEQ ID NO: 54920 - DNA, 24 bp, Homo sapiens
  source 1..24: mol_type = genomic DNA
acaacagaggcttacgacccctta

SEQ ID NO: 54921 - DNA, 48 bp, Homo sapiens; identical to SEQ ID NO: 30477
  source 1..48: mol_type = genomic DNA

SEQ ID NO: 54922 - DNA, 39 bp, Homo sapiens; identical to SEQ ID NO: 3182
  source 1..39: mol_type = genomic DNA

SEQ ID NO: 54923 - DNA, 40 bp, Homo sapiens; identical to SEQ ID NO: 1023
  source 1..40: mol_type = genomic DNA

SEQ ID NO: 54924 - DNA, 22 bp, Homo sapiens
  source 1..22: mol_type = genomic DNA
gtggttatcacatctgctttac

SEQ ID NO: 54925 - DNA, 37 bp, Homo sapiens; identical to SEQ ID NO: 16932
  source 1..37: mol_type = genomic DNA

SEQ ID NO: 54926 - DNA, 23 bp, Homo sapiens
  source 1..23: mol_type = genomic DNA
ctcagtcggtagagcatgagacc

SEQ ID NO: 54927 - DNA, 48 bp, Homo sapiens; identical to SEQ ID NO: 6383
  source 1..48: mol_type = genomic DNA

SEQ ID NO: 54928 - DNA, 44 bp, Homo sapiens; identical to SEQ ID NO: 2136
  source 1..44: mol_type = genomic DNA

SEQ ID NO: 54929 - DNA, 42 bp, Homo sapiens; identical to SEQ ID NO: 17025
  source 1..42: mol_type = genomic DNA

SEQ ID NO: 54930 - DNA, 46 bp, Homo sapiens; identical to SEQ ID NO: 4104
  source 1..46: mol_type = genomic DNA

SEQ ID NO: 54931 - DNA, 27 bp, Homo sapiens
  source 1..27: mol_type = genomic DNA
gcagcttcaaacctgccggggcttcca

SEQ ID NO: 54932 - DNA, 27 bp, Homo sapiens
  source 1..27: mol_type = genomic DNA
cctcgttagtatagtggttagtatccc

SEQ ID NO: 54933 - DNA, 45 bp, Homo sapiens; identical to SEQ ID NO: 2458
  source 1..45: mol_type = genomic DNA

SEQ ID NO: 54934 - DNA, 25 bp, Homo sapiens
  source 1..25: mol_type = genomic DNA
taacgccaaggtcgcgggttcgaac

SEQ ID NO: 54935 - DNA, 16 bp, Homo sapiens
  source 1..16: mol_type = genomic DNA
cgcccggctagctcag

SEQ ID NO: 54936 - DNA, 32 bp, Homo sapiens; identical to SEQ ID NO: 25111
  source 1..32: mol_type = genomic DNA

SEQ ID NO: 54937 - DNA, 29 bp, Homo sapiens
  source 1..29: mol_type = genomic DNA
ttggtggtgcagtggtagaattctcgcct

SEQ ID NO: 54938 - DNA, 48 bp, Homo sapiens; identical to SEQ ID NO: 9548
  source 1..48: mol_type = genomic DNA

SEQ ID NO: 54939 - DNA, 24 bp, Homo sapiens
  source 1..24: mol_type = genomic DNA
cagtctcataatctgaaggtcgtg

SEQ ID NO: 54940 - DNA, 39 bp, Homo sapiens; identical to SEQ ID NO: 20817
  source 1..39: mol_type = genomic DNA

SEQ ID NO: 54941 - DNA, 40 bp, Homo sapiens; identical to SEQ ID NO: 10749
  source 1..40: mol_type = genomic DNA

SEQ ID NO: 54942 - DNA, 43 bp, Homo sapiens; identical to SEQ ID NO: 28443
  source 1..43: mol_type = genomic DNA

SEQ ID NO: 54943 - DNA, 48 bp, Homo sapiens; identical to SEQ ID NO: 13764
  source 1..48: mol_type = genomic DNA

SEQ ID NO: 54944 - DNA, 37 bp, Homo sapiens; identical to SEQ ID NO: 7569
  source 1..37: mol_type = genomic DNA

SEQ ID NO: 54945 - DNA, 33 bp, Homo sapiens; identical to SEQ ID NO: 29187
  source 1..33: mol_type = genomic DNA

SEQ ID NO: 54946 - DNA, 40 bp, Homo sapiens; identical to SEQ ID NO: 20160
  source 1..40: mol_type = genomic DNA

SEQ ID NO: 54947 - DNA, 25 bp, Homo sapiens
  source 1..25: mol_type = genomic DNA
gctcagtcggtagagcatgagaccc

SEQ ID NO: 54948 - DNA, 30 bp, Homo sapiens; identical to SEQ ID NO: 23456
  source 1..30: mol_type = genomic DNA

SEQ ID NO: 54949 - DNA, 31 bp, Homo sapiens; identical to SEQ ID NO: 4805
  source 1..31: mol_type = genomic DNA

SEQ ID NO: 54950 - DNA, 31 bp, Homo sapiens; identical to SEQ ID NO: 13047
  source 1..31: mol_type = genomic DNA

SEQ ID NO: 54951 - DNA, 24 bp, Homo sapiens
  source 1..24: mol_type = genomic DNA
tcggtagagcatgagacccttaat

SEQ ID NO: 54952 - DNA, 33 bp, Homo sapiens; identical to SEQ ID NO: 19576
  source 1..33: mol_type = genomic DNA

SEQ ID NO: 54953 - DNA, 33 bp, Homo sapiens; identical to SEQ ID NO: 20206
  source 1..33: mol_type = genomic DNA

SEQ ID NO: 54954 - DNA, 19 bp, Homo sapiens
  source 1..19: mol_type = genomic DNA
cgattcccggccaacgcac

SEQ ID NO: 54955 - DNA, 46 bp, Homo sapiens; identical to SEQ ID NO: 10036
  source 1..46: mol_type = genomic DNA

SEQ ID NO: 54956 - DNA, 42 bp, Homo sapiens; identical to SEQ ID NO: 21062
  source 1..42: mol_type = genomic DNA

SEQ ID NO: 54957 - DNA, 40 bp, Homo sapiens; identical to SEQ ID NO: 15200
  source 1..40: mol_type = genomic DNA

SEQ ID NO: 54958 - DNA, 25 bp, Homo sapiens
  source 1..25: mol_type = genomic DNA
tggtggagttaaagactttttctct

SEQ ID NO: 54959 - DNA, 25 bp, Homo sapiens
  source 1..25: mol_type = genomic DNA
tagtaccgttaacttccaattaact

SEQ ID NO: 54960 - DNA, 32 bp, Homo sapiens; identical to SEQ ID NO: 1423
  source 1..32: mol_type = genomic DNA

SEQ ID NO: 54961 - DNA, 27 bp, Homo sapiens
  source 1..27: mol_type = genomic DNA
ttggtggttcgatcccacccagggacg

SEQ ID NO: 54962 - DNA, 29 bp, Homo sapiens
  source 1..29: mol_type = genomic DNA
cgcgggagaccggggttcaattccccgac

SEQ ID NO: 54963 - DNA, 33 bp, Homo sapiens; identical to SEQ ID NO: 4184
  source 1..33: mol_type = genomic DNA

SEQ ID NO: 54964 - DNA, 25 bp, Homo sapiens
  source 1..25: mol_type = genomic DNA
tggctaggattcggcgctttcaccg

SEQ ID NO: 54965 - DNA, 19 bp, Homo sapiens
  source 1..19: mol_type = genomic DNA
gttcgactcccagtggggc

SEQ ID NO: 54966 - DNA, 45 bp, Homo sapiens; identical to SEQ ID NO: 28053
  source 1..45: mol_type = genomic DNA

SEQ ID NO: 54967 - DNA, 28 bp, Homo sapiens
  source 1..28: mol_type = genomic DNA
aatgttggttatacccttcccgtactac

SEQ ID NO: 54968 - DNA, 39 bp, Homo sapiens; identical to SEQ ID NO: 10651
  source 1..39: mol_type = genomic DNA

SEQ ID NO: 54969 - DNA, 31 bp, Homo sapiens; identical to SEQ ID NO: 26642
  source 1..31: mol_type = genomic DNA

SEQ ID NO: 54970 - DNA, 46 bp, Homo sapiens; identical to SEQ ID NO: 22941
  source 1..46: mol_type = genomic DNA

SEQ ID NO: 54971 - DNA, 33 bp, Homo sapiens; identical to SEQ ID NO: 2572
  source 1..33: mol_type = genomic DNA

SEQ ID NO: 54972 - DNA, 40 bp, Homo sapiens; identical to SEQ ID NO: 30469
  source 1..40: mol_type = genomic DNA

SEQ ID NO: 54973 - DNA, 35 bp, Homo sapiens; identical to SEQ ID NO: 14393
  source 1..35: mol_type = genomic DNA

SEQ ID NO: 54974 - DNA, 30 bp, Homo sapiens; identical to SEQ ID NO: 18082
  source 1..30: mol_type = genomic DNA

SEQ ID NO: 54975 - DNA, 30 bp, Homo sapiens; identical to SEQ ID NO: 16867
  source 1..30: mol_type = genomic DNA

SEQ ID NO: 54976 - DNA, 27 bp, Homo sapiens
  source 1..27: mol_type = genomic DNA
cttacctcctcaaagcaatacactgaa

SEQ ID NO: 54977 - DNA, 35 bp, Homo sapiens; identical to SEQ ID NO: 28871
  source 1..35: mol_type = genomic DNA

SEQ ID NO: 54978 - DNA, 29 bp, Homo sapiens
  source 1..29: mol_type = genomic DNA
tacactgaaaatgtttagacgggctcaca

SEQ ID NO: 54979 - DNA, 44 bp, Homo sapiens; identical to SEQ ID NO: 17121
  source 1..44: mol_type = genomic DNA

SEQ ID NO: 54980 - DNA, 23 bp, Homo sapiens
  source 1..23: mol_type = genomic DNA
tcggtagagcatgggactcttaa

SEQ ID NO: 54981 - DNA, 33 bp, Homo sapiens; identical to SEQ ID NO: 4383
  source 1..33: mol_type = genomic DNA

SEQ ID NO: 54982 - DNA, 29 bp, Homo sapiens
  source 1..29: mol_type = genomic DNA
agagcccggtaatcgcataaaacttaaaa

SEQ ID NO: 54983 - DNA, 48 bp, Homo sapiens; identical to SEQ ID NO: 29337
  source 1..48: mol_type = genomic DNA

SEQ ID NO: 54984 - DNA, 40 bp, Homo sapiens; identical to SEQ ID NO: 20625
  source 1..40: mol_type = genomic DNA

SEQ ID NO: 54985 - DNA, 38 bp, Homo sapiens; identical to SEQ ID NO: 13731
  source 1..38: mol_type = genomic DNA

SEQ ID NO: 54986 - DNA, 48 bp, Homo sapiens; identical to SEQ ID NO: 15008
  source 1..48: mol_type = genomic DNA

SEQ ID NO: 54987 - DNA, 21 bp, Homo sapiens
  source 1..21: mol_type = genomic DNA
aaccggagatgaaaacctttt

SEQ ID NO: 54988 - DNA, 21 bp, Homo sapiens
  source 1..21: mol_type = genomic DNA
cagtcggtagagcataagact

SEQ ID NO: 54989 - DNA, 41 bp, Homo sapiens; identical to SEQ ID NO: 11549
  source 1..41: mol_type = genomic DNA

SEQ ID NO: 54990 - DNA, 40 bp, Homo sapiens; identical to SEQ ID NO: 29730
  source 1..40: mol_type = genomic DNA

SEQ ID NO: 54991 - DNA, 30 bp, Homo sapiens; identical to SEQ ID NO: 8406
  source 1..30: mol_type = genomic DNA

SEQ ID NO: 54992 - DNA, 25 bp, Homo sapiens
  source 1..25: mol_type = genomic DNA
tttccgtagtgtagcggttatcaca

SEQ ID NO: 54993 - DNA, 22 bp, Homo sapiens
  source 1..22: mol_type = genomic DNA
aaagacaggggttaggcctctt

SEQ ID NO: 54994 - DNA, 39 bp, Homo sapiens; identical to SEQ ID NO: 13185
  source 1..39: mol_type = genomic DNA

SEQ ID NO: 54995 - DNA, 33 bp, Homo sapiens; identical to SEQ ID NO: 18529
  source 1..33: mol_type = genomic DNA

SEQ ID NO: 54996 - DNA, 32 bp, Homo sapiens; identical to SEQ ID NO: 4659
  source 1..32: mol_type = genomic DNA

SEQ ID NO: 54997 - DNA, 31 bp, Homo sapiens; identical to SEQ ID NO: 9565
  source 1..31: mol_type = genomic DNA

SEQ ID NO: 54998 - DNA, 33 bp, Homo sapiens; identical to SEQ ID NO: 1306
  source 1..33: mol_type = genomic DNA

SEQ ID NO: 54999 - DNA, 30 bp, Homo sapiens; identical to SEQ ID NO: 30647
  source 1..30: mol_type = genomic DNA

SEQ ID NO: 55000 - DNA, 27 bp, Homo sapiens
  source 1..27: mol_type = genomic DNA
tcctgagttcgagcctcagagagggca

SEQ ID NO: 55001 - DNA, 48 bp, Homo sapiens; identical to SEQ ID NO: 29125
  source 1..48: mol_type = genomic DNA

SEQ ID NO: 55002 - DNA, 31 bp, Homo sapiens; identical to SEQ ID NO: 15255
  source 1..31: mol_type = genomic DNA

SEQ ID NO: 55003 - DNA, 48 bp, Homo sapiens; identical to SEQ ID NO: 16967
  source 1..48: mol_type = genomic DNA

SEQ ID NO: 55004 - DNA, 26 bp, Homo sapiens
  source 1..26: mol_type = genomic DNA
taaaccaggggtcgcgagttcaaatc

SEQ ID NO: 55005 - DNA, 35 bp, Homo sapiens; identical to SEQ ID NO: 2871
  source 1..35: mol_type = genomic DNA

SEQ ID NO: 55006 - DNA, 34 bp, Homo sapiens; identical to SEQ ID NO: 27243
  source 1..34: mol_type = genomic DNA

SEQ ID NO: 55007 - DNA, 29 bp, Homo sapiens
  source 1..29: mol_type = genomic DNA
attctcgcctgccacgcgggaggcccggg

SEQ ID NO: 55008 - DNA, 35 bp, Homo sapiens; identical to SEQ ID NO: 24953
  source 1..35: mol_type = genomic DNA

SEQ ID NO: 55009 - DNA, 36 bp, Homo sapiens; identical to SEQ ID NO: 6344
  source 1..36: mol_type = genomic DNA

SEQ ID NO: 55010 - DNA, 16 bp, Homo sapiens
  source 1..16: mol_type = genomic DNA
tttccgtagtgtagcg

SEQ ID NO: 55011 - DNA, 41 bp, Homo sapiens; identical to SEQ ID NO: 14374
  source 1..41: mol_type = genomic DNA

SEQ ID NO: 55012 - DNA, 24 bp, Homo sapiens
  source 1..24: mol_type = genomic DNA
ttgacccgggttcgattcccggcc

SEQ ID NO: 55013 - DNA, 38 bp, Homo sapiens; identical to SEQ ID NO: 31188
  source 1..38: mol_type = genomic DNA

SEQ ID NO: 55014 - DNA, 34 bp, Homo sapiens; identical to SEQ ID NO: 8564
  source 1..34: mol_type = genomic DNA

SEQ ID NO: 55015 - DNA, 17 bp, Homo sapiens
  source 1..17: mol_type = genomic DNA
cgtcaggatggccgagc

SEQ ID NO: 55016 - DNA, 32 bp, Homo sapiens; identical to SEQ ID NO: 25184
  source 1..32: mol_type = genomic DNA

SEQ ID NO: 55017 - DNA, 44 bp, Homo sapiens; identical to SEQ ID NO: 13369
  source 1..44: mol_type = genomic DNA

SEQ ID NO: 55018 - DNA, 27 bp, Homo sapiens
  source 1..27: mol_type = genomic DNA
cagtcggtagagcatgagacccttaat

SEQ ID NO: 55019 - DNA, 19 bp, Homo sapiens
  source 1..19: mol_type = genomic DNA
aggcttacgaccccttatt

SEQ ID NO: 55020 - DNA, 18 bp, Homo sapiens
  source 1..18: mol_type = genomic DNA
ctcagggatgggttcgat

SEQ ID NO: 55021 - DNA, 26 bp, Homo sapiens
  source 1..26: mol_type = genomic DNA
cgcgggagaccggggttcaattcccc

SEQ ID NO: 55022 - DNA, 28 bp, Homo sapiens
  source 1..28: mol_type = genomic DNA
ttaacttccaattaactagttttgacaa

SEQ ID NO: 55023 - DNA, 21 bp, Homo sapiens
  source 1..21: mol_type = genomic DNA
tgtagtcgtggccgagtggtt

SEQ ID NO: 55024 - DNA, 48 bp, Homo sapiens; identical to SEQ ID NO: 222
  source 1..48: mol_type = genomic DNA

SEQ ID NO: 55025 - DNA, 48 bp, Homo sapiens; identical to SEQ ID NO: 10739
  source 1..48: mol_type = genomic DNA

SEQ ID NO: 55026 - DNA, 48 bp, Homo sapiens; identical to SEQ ID NO: 29305
  source 1..48: mol_type = genomic DNA

SEQ ID NO: 55027 - DNA, 27 bp, Homo sapiens
  source 1..27: mol_type = genomic DNA
tgaatccagcgatccgagttcgagtct

SEQ ID NO: 55028 - DNA, 42 bp, Homo sapiens; identical to SEQ ID NO: 29008
  source 1..42: mol_type = genomic DNA

SEQ ID NO: 55029 - DNA, 35 bp, Homo sapiens; identical to SEQ ID NO: 24904
  source 1..35: mol_type = genomic DNA

SEQ ID NO: 55030 - DNA, 48 bp, Homo sapiens; identical to SEQ ID NO: 998
  source 1..48: mol_type = genomic DNA

SEQ ID NO: 55031 - DNA, 16 bp, Homo sapiens
  source 1..16: mol_type = genomic DNA
gatccttaggtcgctg

SEQ ID NO: 55032 - DNA, 37 bp, Homo sapiens; identical to SEQ ID NO: 24085
  source 1..37: mol_type = genomic DNA

SEQ ID NO: 55033 - DNA, 34 bp, Homo sapiens; identical to SEQ ID NO: 24592
  source 1..34: mol_type = genomic DNA

SEQ ID NO: 55034 - DNA, 16 bp, Homo sapiens
  source 1..16: mol_type = genomic DNA
aatcccaccgctgcca

SEQ ID NO: 55035 - DNA, 48 bp, Homo sapiens; identical to SEQ ID NO: 6628
  source 1..48: mol_type = genomic DNA

SEQ ID NO: 55036 - DNA, 35 bp, Homo sapiens; identical to SEQ ID NO: 25357
  source 1..35: mol_type = genomic DNA

SEQ ID NO: 55037 - DNA, 24 bp, Homo sapiens
  source 1..24: mol_type = genomic DNA
taggattcctggttttcacccagg

SEQ ID NO: 55038 - DNA, 26 bp, Homo sapiens
  source 1..26: mol_type = genomic DNA
tgaaaatgtttagacgggctcacatc

SEQ ID NO: 55039 - DNA, 37 bp, Homo sapiens; identical to SEQ ID NO: 18089
  source 1..37: mol_type = genomic DNA

SEQ ID NO: 55040 - DNA, 31 bp, Homo sapiens; identical to SEQ ID NO: 2621
  source 1..31: mol_type = genomic DNA

SEQ ID NO: 55041 - DNA, 28 bp, Homo sapiens
  source 1..28: mol_type = genomic DNA
gtagcttacctcctcaaagcaatacact

SEQ ID NO: 55042 - DNA, 39 bp, Homo sapiens; identical to SEQ ID NO: 14373
  source 1..39: mol_type = genomic DNA

SEQ ID NO: 55043 - DNA, 24 bp, Homo sapiens
  source 1..24: mol_type = genomic DNA
taagttgcaatacttaatttctgc

SEQ ID NO: 55044 - DNA, 30 bp, Homo sapiens; identical to SEQ ID NO: 12052
  source 1..30: mol_type = genomic DNA

SEQ ID NO: 55045 - DNA, 19 bp, Homo sapiens
  source 1..19: mol_type = genomic DNA
agtggttaaggcgttggac

SEQ ID NO: 55046 - DNA, 48 bp, Homo sapiens; identical to SEQ ID NO: 26362
  source 1..48: mol_type = genomic DNA

SEQ ID NO: 55047 - DNA, 35 bp, Homo sapiens; identical to SEQ ID NO: 14411
  source 1..35: mol_type = genomic DNA

SEQ ID NO: 55048 - DNA, 27 bp, Homo sapiens
  source 1..27: mol_type = genomic DNA
tagtggttatcacgttcgcctcacacg

SEQ ID NO: 55049 - DNA, 48 bp, Homo sapiens; identical to SEQ ID NO: 25718
  source 1..48: mol_type = genomic DNA

SEQ ID NO: 55050 - DNA, 48 bp, Homo sapiens; identical to SEQ ID NO: 12321
  source 1..48: mol_type = genomic DNA

SEQ ID NO: 55051 - DNA, 28 bp, Homo sapiens
  source 1..28: mol_type = genomic DNA
acgcgggagaccggggttcgattccccg

SEQ ID NO: 55052 - DNA, 28 bp, Homo sapiens
  source 1..28: mol_type = genomic DNA
tcccgggttcgatccccagcatctccac

SEQ ID NO: 55053 - DNA, 34 bp, Homo sapiens; identical to SEQ ID NO: 28804
  source 1..34: mol_type = genomic DNA

SEQ ID NO: 55054 - DNA, 42 bp, Homo sapiens; identical to SEQ ID NO: 24990
  source 1..42: mol_type = genomic DNA

SEQ ID NO: 55055 - DNA, 30 bp, Homo sapiens; identical to SEQ ID NO: 20531
  source 1..30: mol_type = genomic DNA

SEQ ID NO: 55056 - DNA, 48 bp, Homo sapiens; identical to SEQ ID NO: 12371
  source 1..48: mol_type = genomic DNA

SEQ ID NO: 55057 - DNA, 48 bp, Homo sapiens; identical to SEQ ID NO: 11606
  source 1..48: mol_type = genomic DNA

SEQ ID NO: 55058 - DNA, 42 bp, Homo sapiens; identical to SEQ ID NO: 13423
  source 1..42: mol_type = genomic DNA

SEQ ID NO: 55059 - DNA, 46 bp, Homo sapiens; identical to SEQ ID NO: 1288
  source 1..46: mol_type = genomic DNA

SEQ ID NO: 55060 - DNA, 23 bp, Homo sapiens
  source 1..23: mol_type = genomic DNA
acacgcgaaaggtccccggttcg

SEQ ID NO: 55061 - DNA, 41 bp, Homo sapiens; identical to SEQ ID NO: 9223
  source 1..41: mol_type = genomic DNA

SEQ ID NO: 55062 - DNA, 17 bp, Homo sapiens
  source 1..17: mol_type = genomic DNA
aaccctgctcgctgcgc

SEQ ID NO: 55063 - DNA, 29 bp, Homo sapiens
  source 1..29: mol_type = genomic DNA
gctctcaccgccgcggcccgggttcgatt

SEQ ID NO: 55064 - DNA, 44 bp, Homo sapiens; identical to SEQ ID NO: 15465
  source 1..44: mol_type = genomic DNA

SEQ ID NO: 55065 - DNA, 28 bp, Homo sapiens
  source 1..28: mol_type = genomic DNA
gcagttgacccgggttcgattcccggcc

SEQ ID NO: 55066 - DNA, 48 bp, Homo sapiens; identical to SEQ ID NO: 30397
  source 1..48: mol_type = genomic DNA

SEQ ID NO: 55067 - DNA, 29 bp, Homo sapiens
  source 1..29: mol_type = genomic DNA
gctgggcccataacccagaggtcgatgga

SEQ ID NO: 55068 - DNA, 24 bp, Homo sapiens
  source 1..24: mol_type = genomic DNA
aacagaggcttacgaccccttatt

SEQ ID NO: 55069 - DNA, 33 bp, Homo sapiens; identical to SEQ ID NO: 29376
  source 1..33: mol_type = genomic DNA

SEQ ID NO: 55070 - DNA, 25 bp, Homo sapiens
  source 1..25: mol_type = genomic DNA
atcctgggttcgaatcccagcggtg

SEQ ID NO: 55071 - DNA, 17 bp, Homo sapiens
  source 1..17: mol_type = genomic DNA
cgcgggttcgaaccccg

SEQ ID NO: 55072 - DNA, 21 bp, Homo sapiens
  source 1..21: mol_type = genomic DNA
cagtcggtggagcatgggact

SEQ ID NO: 55073 - DNA, 37 bp, Homo sapiens; identical to SEQ ID NO: 5442
  source 1..37: mol_type = genomic DNA

SEQ ID NO: 55074 - DNA, 46 bp, Homo sapiens; identical to SEQ ID NO: 14566
  source 1..46: mol_type = genomic DNA

SEQ ID NO: 55075 - DNA, 39 bp, Homo sapiens; identical to SEQ ID NO: 22579
  source 1..39: mol_type = genomic DNA

SEQ ID NO: 55076 - DNA, 48 bp, Homo sapiens; identical to SEQ ID NO: 22238
  source 1..48: mol_type = genomic DNA

SEQ ID NO: 55077 - DNA, 47 bp, Homo sapiens; identical to SEQ ID NO: 29124
  source 1..47: mol_type = genomic DNA

SEQ ID NO: 55078 - DNA, 37 bp, Homo sapiens; identical to SEQ ID NO: 10835
  source 1..37: mol_type = genomic DNA

SEQ ID NO: 55079 - DNA, 33 bp, Homo sapiens; identical to SEQ ID NO: 24447
  source 1..33: mol_type = genomic DNA

SEQ ID NO: 55080 - DNA, 36 bp, Homo sapiens; identical to SEQ ID NO: 6784
  source 1..36: mol_type = genomic DNA

SEQ ID NO: 55081 - DNA, 48 bp, Homo sapiens; identical to SEQ ID NO: 14981
  source 1..48: mol_type = genomic DNA

SEQ ID NO: 55082 - DNA, 29 bp, Homo sapiens
  source 1..29: mol_type = genomic DNA
cataatctgaaggtcgtgagttcgagcct

SEQ ID NO: 55083 - DNA, 17 bp, Homo sapiens
  source 1..17: mol_type = genomic DNA
ttcgaatccgagtcacg

SEQ ID NO: 55084 - DNA, 33 bp, Homo sapiens; identical to SEQ ID NO: 21970
  source 1..33: mol_type = genomic DNA

SEQ ID NO: 55085 - DNA, 38 bp, Homo sapiens; identical to SEQ ID NO: 7403
  source 1..38: mol_type = genomic DNA

SEQ ID NO: 55086 - DNA, 28 bp, Homo sapiens
  source 1..28: mol_type = genomic DNA
tccagggttcaagtccctgttcaggcgc

SEQ ID NO: 55087 - DNA, 26 bp, Homo sapiens
  source 1..26: mol_type = genomic DNA
catatgtccgcgtgggttcgaacccc

SEQ ID NO: 55088 - DNA, 33 bp, Homo sapiens; identical to SEQ ID NO: 23655
  source 1..33: mol_type = genomic DNA

SEQ ID NO: 55089 - DNA, 33 bp, Homo sapiens; identical to SEQ ID NO: 23722
  source 1..33: mol_type = genomic DNA

SEQ ID NO: 55090 - DNA, 31 bp, Homo sapiens; identical to SEQ ID NO: 15203
  source 1..31: mol_type = genomic DNA

SEQ ID NO: 55091 - DNA, 36 bp, Homo sapiens; identical to SEQ ID NO: 4924
  source 1..36: mol_type = genomic DNA

SEQ ID NO: 55092 - DNA, 37 bp, Homo sapiens; identical to SEQ ID NO: 420
  source 1..37: mol_type = genomic DNA

SEQ ID NO: 55093 - DNA, 28 bp, Homo sapiens
  source 1..28: mol_type = genomic DNA
cgcgggaggcccgggttcgattcccggc

SEQ ID NO: 55094 - DNA, 38 bp, Homo sapiens; identical to SEQ ID NO: 11948
  source 1..38: mol_type = genomic DNA

SEQ ID NO: 55095 - DNA, 33 bp, Homo sapiens; identical to SEQ ID NO: 14409
  source 1..33: mol_type = genomic DNA

SEQ ID NO: 55096 - DNA, 48 bp, Homo sapiens; identical to SEQ ID NO: 3325
  source 1..48: mol_type = genomic DNA

SEQ ID NO: 55097 - DNA, 32 bp, Homo sapiens; identical to SEQ ID NO: 17143
  source 1..32: mol_type = genomic DNA

SEQ ID NO: 55098 - DNA, 48 bp, Homo sapiens; identical to SEQ ID NO: 59
  source 1..48: mol_type = genomic DNA

SEQ ID NO: 55099 - DNA, 36 bp, Homo sapiens; identical to SEQ ID NO: 20623
  source 1..36: mol_type = genomic DNA

SEQ ID NO: 55100 - DNA, 32 bp, Homo sapiens; identical to SEQ ID NO: 16529
  source 1..32: mol_type = genomic DNA

SEQ ID NO: 55101 - DNA, 16 bp, Homo sapiens
  source 1..16: mol_type = genomic DNA
gggagaccggggttcg

SEQ ID NO: 55102 - DNA, 31 bp, Homo sapiens; identical to SEQ ID NO: 15196
  source 1..31: mol_type = genomic DNA

SEQ ID NO: 55103 - DNA, 34 bp, Homo sapiens; identical to SEQ ID NO: 4263
  source 1..34: mol_type = genomic DNA

SEQ ID NO: 55104 - DNA, 32 bp, Homo sapiens; identical to SEQ ID NO: 10725
  source 1..32: mol_type = genomic DNA

SEQ ID NO: 55105 - DNA, 27 bp, Homo sapiens
  source 1..27: mol_type = genomic DNA
tacactgaaaatgtttagacgggctca

SEQ ID NO: 55106 - DNA, 30 bp, Homo sapiens; identical to SEQ ID NO: 9228
  source 1..30: mol_type = genomic DNA

SEQ ID NO: 55107 - DNA, 48 bp, Homo sapiens; identical to SEQ ID NO: 1555
  source 1..48: mol_type = genomic DNA

SEQ ID NO: 55108 - DNA, 41 bp, Homo sapiens; identical to SEQ ID NO: 20161
  source 1..41: mol_type = genomic DNA

SEQ ID NO: 55109 - DNA, 19 bp, Homo sapiens
  source 1..19: mol_type = genomic DNA
tctcagggatgggttcgat

SEQ ID NO: 55110 - DNA, 20 bp, Homo sapiens
  source 1..20: mol_type = genomic DNA
tcgaaaccgggcagaagcac

SEQ ID NO: 55111 - DNA, 48 bp, Homo sapiens; identical to SEQ ID NO: 8079
  source 1..48: mol_type = genomic DNA

SEQ ID NO: 55112 - DNA, 48 bp, Homo sapiens; identical to SEQ ID NO: 28863
  source 1..48: mol_type = genomic DNA

SEQ ID NO: 55113 - DNA, 31 bp, Homo sapiens; identical to SEQ ID NO: 9949
  source 1..31: mol_type = genomic DNA

SEQ ID NO: 55114 - DNA, 37 bp, Homo sapiens; identical to SEQ ID NO: 16382
  source 1..37: mol_type = genomic DNA

SEQ ID NO: 55115 - DNA, 24 bp, Homo sapiens
  source 1..24: mol_type = genomic DNA
aaccggagatgaaaacctttttcc

SEQ ID NO: 55116 - DNA, 22 bp, Homo sapiens
  source 1..22: mol_type = genomic DNA
ttaaatacagaccaagagcctt

SEQ ID NO: 55117 - DNA, 16 bp, Homo sapiens
  source 1..16: mol_type = genomic DNA
cagcgatccgagttcg

SEQ ID NO: 55118 - DNA, 48 bp, Homo sapiens; identical to SEQ ID NO: 22254
  source 1..48: mol_type = genomic DNA

SEQ ID NO: 55119 - DNA, 32 bp, Homo sapiens; identical to SEQ ID NO: 17841
  source 1..32: mol_type = genomic DNA

SEQ ID NO: 55120 - DNA, 31 bp, Homo sapiens; identical to SEQ ID NO: 1050
  source 1..31: mol_type = genomic DNA

SEQ ID NO: 55121 - DNA, 46 bp, Homo sapiens; identical to SEQ ID NO: 13307
  source 1..46: mol_type = genomic DNA

SEQ ID NO: 55122 - DNA, 32 bp, Homo sapiens; identical to SEQ ID NO: 8562
  source 1..32: mol_type = genomic DNA

SEQ ID NO: 55123 - DNA, 31 bp, Homo sapiens; identical to SEQ ID NO: 18101
  source 1..31: mol_type = genomic DNA

SEQ ID NO: 55124 - DNA, 29 bp, Homo sapiens
  source 1..29: mol_type = genomic DNA
agcactctggactttgaatccagcgatcc

SEQ ID NO: 55125 - DNA, 22 bp, Homo sapiens
  source 1..22: mol_type = genomic DNA
ccctcagtaagttgcaatactt

SEQ ID NO: 55126 - DNA, 43 bp, Homo sapiens; identical to SEQ ID NO: 8796
  source 1..43: mol_type = genomic DNA

SEQ ID NO: 55127 - DNA, 18 bp, Homo sapiens
  source 1..18: mol_type = genomic DNA
cgaaaaagtcatggaggc

SEQ ID NO: 55128 - DNA, 48 bp, Homo sapiens; identical to SEQ ID NO: 8654
  source 1..48: mol_type = genomic DNA

SEQ ID NO: 55129 - DNA, 28 bp, Homo sapiens
  source 1..28: mol_type = genomic DNA
ggttaggattcggcgctctcaccgccgc

SEQ ID NO: 55130 - DNA, 48 bp, Homo sapiens; identical to SEQ ID NO: 12483
  source 1..48: mol_type = genomic DNA

SEQ ID NO: 55131 - DNA, 39 bp, Homo sapiens; identical to SEQ ID NO: 26817
  source 1..39: mol_type = genomic DNA

SEQ ID NO: 55132 - DNA, 17 bp, Homo sapiens
  source 1..17: mol_type = genomic DNA
gccccgggttcgatccc

SEQ ID NO: 55133 - DNA, 16 bp, Homo sapiens
  source 1..16: mol_type = genomic DNA
accgagcggaaacacc

SEQ ID NO: 55134 - DNA, 39 bp, Homo sapiens; identical to SEQ ID NO: 20159
  source 1..39: mol_type = genomic DNA

SEQ ID NO: 55135 - DNA, 30 bp, Homo sapiens; identical to SEQ ID NO: 26320
  source 1..30: mol_type = genomic DNA

SEQ ID NO: 55136 - DNA, 22 bp, Homo sapiens
  source 1..22: mol_type = genomic DNA
gggattagctcaaatggtagag

SEQ ID NO: 55137 - DNA, 33 bp, Homo sapiens; identical to SEQ ID NO: 9500
  source 1..33: mol_type = genomic DNA

SEQ ID NO: 55138 - DNA, 32 bp, Homo sapiens; identical to SEQ ID NO: 15801
  source 1..32: mol_type = genomic DNA

SEQ ID NO: 55139 - DNA, 31 bp, Homo sapiens; identical to SEQ ID NO: 8938
  source 1..31: mol_type = genomic DNA

SEQ ID NO: 55140 - DNA, 33 bp, Homo sapiens; identical to SEQ ID NO: 30347
  source 1..33: mol_type = genomic DNA

SEQ ID NO: 55141 - DNA, 35 bp, Homo sapiens; identical to SEQ ID NO: 16405
  source 1..35: mol_type = genomic DNA

SEQ ID NO: 55142 - DNA, 36 bp, Homo sapiens; identical to SEQ ID NO: 11445
  source 1..36: mol_type = genomic DNA

SEQ ID NO: 55143 - DNA, 28 bp, Homo sapiens
  source 1..28: mol_type = genomic DNA
tcagtggtagaattctcgcctgccacgc

SEQ ID NO: 55144 - DNA, 33 bp, Homo sapiens; identical to SEQ ID NO: 6349
  source 1..33: mol_type = genomic DNA

SEQ ID NO: 55145 - DNA, 41 bp, Homo sapiens; identical to SEQ ID NO: 28215
  source 1..41: mol_type = genomic DNA

SEQ ID NO: 55146 - DNA, 28 bp, Homo sapiens
  source 1..28: mol_type = genomic DNA
cgggagaccggggttcaattccccgacg

SEQ ID NO: 55147 - DNA, 34 bp, Homo sapiens; identical to SEQ ID NO: 25596
  source 1..34: mol_type = genomic DNA

SEQ ID NO: 55148 - DNA, 25 bp, Homo sapiens
  source 1..25: mol_type = genomic DNA
agtcggtagagcatgagacccttaa

SEQ ID NO: 55149 - DNA, 46 bp, Homo sapiens; identical to SEQ ID NO: 17899
  source 1..46: mol_type = genomic DNA

SEQ ID NO: 55150 - DNA, 48 bp, Homo sapiens; identical to SEQ ID NO: 1889
  source 1..48: mol_type = genomic DNA

SEQ ID NO: 55151 - DNA, 30 bp, Homo sapiens; identical to SEQ ID NO: 3304
  source 1..30: mol_type = genomic DNA

SEQ ID NO: 55152 - DNA, 48 bp, Homo sapiens; identical to SEQ ID NO: 14547
  source 1..48: mol_type = genomic DNA

SEQ ID NO: 55153 - DNA, 24 bp, Homo sapiens
  source 1..24: mol_type = genomic DNA
tcgtaaaccgaagatcgcgggttc

SEQ ID NO: 55154 - DNA, 27 bp, Homo sapiens
  source 1..27: mol_type = genomic DNA
caggtggcccgggttcgactcccggta

SEQ ID NO: 55155 - DNA, 48 bp, Homo sapiens; identical to SEQ ID NO: 18379
  source 1..48: mol_type = genomic DNA

SEQ ID NO: 55156 - DNA, 35 bp, Homo sapiens; identical to SEQ ID NO: 1481
  source 1..35: mol_type = genomic DNA

SEQ ID NO: 55157 - DNA, 25 bp, Homo sapiens
  source 1..25: mol_type = genomic DNA
gtggtagaattctcgcctgccacgc

SEQ ID NO: 55158 - DNA, 44 bp, Homo sapiens; identical to SEQ ID NO: 28389
  source 1..44: mol_type = genomic DNA

SEQ ID NO: 55159 - DNA, 38 bp, Homo sapiens; identical to SEQ ID NO: 16162
  source 1..38: mol_type = genomic DNA

SEQ ID NO: 55160 - DNA, 29 bp, Homo sapiens
  source 1..29: mol_type = genomic DNA
ccgtagtggagtggttatcacgttcgcct

SEQ ID NO: 55161 - DNA, 28 bp, Homo sapiens
  source 1..28: mol_type = genomic DNA
agtcggtagagcatgggactcttaatct

SEQ ID NO: 55162 - DNA, 29 bp, Homo sapiens
  source 1..29: mol_type = genomic DNA
gaaggctgcgtgttcgaatcacgtcgggg

SEQ ID NO: 55163 - DNA, 48 bp, Homo sapiens; identical to SEQ ID NO: 30047
  source 1..48: mol_type = genomic DNA

SEQ ID NO: 55164 - DNA, 28 bp, Homo sapiens
  source 1..28: mol_type = genomic DNA
cgtgggttcgaatcccaccctcgtcgcc

SEQ ID NO: 55165 - DNA, 44 bp, Homo sapiens; identical to SEQ ID NO: 28348
  source 1..44: mol_type = genomic DNA

SEQ ID NO: 55166 - DNA, 48 bp, Homo sapiens; identical to SEQ ID NO: 11342
  source 1..48: mol_type = genomic DNA

SEQ ID NO: 55167 - DNA, 48 bp, Homo sapiens; identical to SEQ ID NO: 18318
  source 1..48: mol_type = genomic DNA

SEQ ID NO: 55168 - DNA, 47 bp, Homo sapiens; identical to SEQ ID NO: 17155
  source 1..47: mol_type = genomic DNA

SEQ ID NO: 55169 - DNA, 35 bp, Homo sapiens; identical to SEQ ID NO: 24059
  source 1..35: mol_type = genomic DNA

SEQ ID NO: 55170 - DNA, 37 bp, Homo sapiens; identical to SEQ ID NO: 12903
  source 1..37: mol_type = genomic DNA

SEQ ID NO: 55171 - DNA, 48 bp, Homo sapiens; identical to SEQ ID NO: 13921
  source 1..48: mol_type = genomic DNA

SEQ ID NO: 55172 - DNA, 38 bp, Homo sapiens; identical to SEQ ID NO: 13878
  source 1..38: mol_type = genomic DNA

SEQ ID NO: 55173 - DNA, 27 bp, Homo sapiens
  source 1..27: mol_type = genomic DNA
aggcatcagcctccggagctggggatt

SEQ ID NO: 55174 - DNA, 37 bp, Homo sapiens; identical to SEQ ID NO: 20631
  source 1..37: mol_type = genomic DNA

SEQ ID NO: 55175 - DNA, 26 bp, Homo sapiens
  source 1..26: mol_type = genomic DNA
taatggtggagttaaagactttttct

SEQ ID NO: 55176 - DNA, 32 bp, Homo sapiens; identical to SEQ ID NO: 23721
  source 1..32: mol_type = genomic DNA

SEQ ID NO: 55177 - DNA, 29 bp, Homo sapiens
  source 1..29: mol_type = genomic DNA
ggattcctggttttcacccaggcggcccg

SEQ ID NO: 55178 - DNA, 48 bp, Homo sapiens; identical to SEQ ID NO: 17689
  source 1..48: mol_type = genomic DNA

SEQ ID NO: 55179 - DNA, 30 bp, Homo sapiens; identical to SEQ ID NO: 16394
  source 1..30: mol_type = genomic DNA

SEQ ID NO: 55180 - DNA, 42 bp, Homo sapiens; identical to SEQ ID NO: 10751
  source 1..42: mol_type = genomic DNA

SEQ ID NO: 55181 - DNA, 27 bp, Homo sapiens
  source 1..27: mol_type = genomic DNA
agcttacctcctcaaagcaatacactg

SEQ ID NO: 55182 - DNA, 31 bp, Homo sapiens; identical to SEQ ID NO: 3523
  source 1..31: mol_type = genomic DNA

SEQ ID NO: 55183 - DNA, 33 bp, Homo sapiens; identical to SEQ ID NO: 8819
  source 1..33: mol_type = genomic DNA

SEQ ID NO: 55184 - DNA, 37 bp, Homo sapiens; identical to SEQ ID NO: 911
  source 1..37: mol_type = genomic DNA

SEQ ID NO: 55185 - DNA, 48 bp, Homo sapiens; identical to SEQ ID NO: 10680
  source 1..48: mol_type = genomic DNA

SEQ ID NO: 55186 - DNA, 19 bp, Homo sapiens
  source 1..19: mol_type = genomic DNA
taaataataggagcttaaa

SEQ ID NO: 55187 - DNA, 30 bp, Homo sapiens; identical to SEQ ID NO: 17141
  source 1..30: mol_type = genomic DNA

SEQ ID NO: 55188 - DNA, 45 bp, Homo sapiens; identical to SEQ ID NO: 16995
  source 1..45: mol_type = genomic DNA

SEQ ID NO: 55189 - DNA, 48 bp, Homo sapiens; identical to SEQ ID NO: 6769
  source 1..48: mol_type = genomic DNA

SEQ ID NO: 55190 - DNA, 30 bp, Homo sapiens; identical to SEQ ID NO: 5130
  source 1..30: mol_type = genomic DNA

SEQ ID NO: 55191 - DNA, 29 bp, Homo sapiens
  source 1..29: mol_type = genomic DNA
ctcctcgttagtatagtggtgagtatccc

SEQ ID NO: 55192 - DNA, 27 bp, Homo sapiens
  source 1..27: mol_type = genomic DNA
tttacagtcagaggttcaattcctctt

SEQ ID NO: 55193 - DNA, 32 bp, Homo sapiens; identical to SEQ ID NO: 30922
  source 1..32: mol_type = genomic DNA

SEQ ID NO: 55194 - DNA, 48 bp, Homo sapiens; identical to SEQ ID NO: 2740
  source 1..48: mol_type = genomic DNA

SEQ ID NO: 55195 - DNA, 34 bp, Homo sapiens; identical to SEQ ID NO: 3107
  source 1..34: mol_type = genomic DNA

SEQ ID NO: 55196 - DNA, 48 bp, Homo sapiens; identical to SEQ ID NO: 16444
  source 1..48: mol_type = genomic DNA

SEQ ID NO: 55197 - DNA, 16 bp, Homo sapiens
  source 1..16: mol_type = genomic DNA
tttaatctgagggtcc

SEQ ID NO: 55198 - DNA, 31 bp, Homo sapiens; identical to SEQ ID NO: 8322
  source 1..31: mol_type = genomic DNA

SEQ ID NO: 55199 - DNA, 48 bp, Homo sapiens; identical to SEQ ID NO: 23495
  source 1..48: mol_type = genomic DNA

SEQ ID NO: 55200 - DNA, 33 bp, Homo sapiens; identical to SEQ ID NO: 20573
  source 1..33: mol_type = genomic DNA

SEQ ID NO: 55201 - DNA, 30 bp, Homo sapiens; identical to SEQ ID NO: 11357
  source 1..30: mol_type = genomic DNA

SEQ ID NO: 55202 - DNA, 32 bp, Homo sapiens; identical to SEQ ID NO: 17641
  source 1..32: mol_type = genomic DNA

SEQ ID NO: 55203 - DNA, 36 bp, Homo sapiens; identical to SEQ ID NO: 20912
  source 1..36: mol_type = genomic DNA

SEQ ID NO: 55204 - DNA, 35 bp, Homo sapiens; identical to SEQ ID NO: 1919
  source 1..35: mol_type = genomic DNA

SEQ ID NO: 55205 - DNA, 29 bp, Homo sapiens
  source 1..29: mol_type = genomic DNA
tctgaaggtcgtgagttcgagcctcacac

SEQ ID NO: 55206 - DNA, 32 bp, Homo sapiens; identical to SEQ ID NO: 12032
  source 1..32: mol_type = genomic DNA

SEQ ID NO: 55207 - DNA, 39 bp, Homo sapiens; identical to SEQ ID NO: 30468
  source 1..39: mol_type = genomic DNA

SEQ ID NO: 55208 - DNA, 47 bp, Homo sapiens; identical to SEQ ID NO: 21547
  source 1..47: mol_type = genomic DNA

SEQ ID NO: 55209 - DNA, 31 bp, Homo sapiens; identical to SEQ ID NO: 4260
  source 1..31: mol_type = genomic DNA

SEQ ID NO: 55210 - DNA, 37 bp, Homo sapiens; identical to SEQ ID NO: 9433
  source 1..37: mol_type = genomic DNA

SEQ ID NO: 55211 - DNA, 29 bp, Homo sapiens
  source 1..29: mol_type = genomic DNA
cagttgacccgggttcgattcccggccaa

SEQ ID NO: 55212 - DNA, 33 bp, Homo sapiens; identical to SEQ ID NO: 28539
  source 1..33: mol_type = genomic DNA

SEQ ID NO: 55213 - DNA, 19 bp, Homo sapiens
  source 1..19: mol_type = genomic DNA
tcgtaaaccgaagatcgcg

SEQ ID NO: 55214 - DNA, 29 bp, Homo sapiens
  source 1..29: mol_type = genomic DNA
ttagtatagtggtgagtatccccgcctgt

SEQ ID NO: 55215 - DNA, 23 bp, Homo sapiens
  source 1..23: mol_type = genomic DNA
cctcctcaaagcaatacactgaa

SEQ ID NO: 55216 - DNA, 34 bp, Homo sapiens; identical to SEQ ID NO: 783
  source 1..34: mol_type = genomic DNA

SEQ ID NO: 55217 - DNA, 37 bp, Homo sapiens; identical to SEQ ID NO: 28255
  source 1..37: mol_type = genomic DNA

SEQ ID NO: 55218 - DNA, 25 bp, Homo sapiens
  source 1..25: mol_type = genomic DNA
tggcagagcccggtaatcgcataaa

SEQ ID NO: 55219 - DNA, 26 bp, Homo sapiens
  source 1..26: mol_type = genomic DNA
ctaatggtggagttaaagactttttc

SEQ ID NO: 55220 - DNA, 48 bp, Homo sapiens; identical to SEQ ID NO: 24088
  source 1..48: mol_type = genomic DNA

SEQ ID NO: 55221 - DNA, 38 bp, Homo sapiens; identical to SEQ ID NO: 25440
  source 1..38: mol_type = genomic DNA

SEQ ID NO: 55222 - DNA, 29 bp, Homo sapiens
  source 1..29: mol_type = genomic DNA
atccattggtcttaggccccaaaaatttt

SEQ ID NO: 55223 - DNA, 48 bp, Homo sapiens; identical to SEQ ID NO: 16935
  source 1..48: mol_type = genomic DNA

SEQ ID NO: 55224 - DNA, 32 bp, Homo sapiens; identical to SEQ ID NO: 24640
  source 1..32: mol_type = genomic DNA

SEQ ID NO: 55225 - DNA, 19 bp, Homo sapiens
  source 1..19: mol_type = genomic DNA
agcatgggactcttaatct

SEQ ID NO: 55226 - DNA, 31 bp, Homo sapiens; identical to SEQ ID NO: 14000
  source 1..31: mol_type = genomic DNA

SEQ ID NO: 55227 - DNA, 25 bp, Homo sapiens
  source 1..25: mol_type = genomic DNA
tcataatctgaaggtcgtgagttcg

SEQ ID NO: 55228 - DNA, 23 bp, Homo sapiens
  source 1..23: mol_type = genomic DNA
tctgaaggtcgtgagttcgagcc

SEQ ID NO: 55229 - DNA, 45 bp, Homo sapiens; identical to SEQ ID NO: 15466
  source 1..45: mol_type = genomic DNA

SEQ ID NO: 55230 - DNA, 43 bp, Homo sapiens; identical to SEQ ID NO: 30472
  source 1..43: mol_type = genomic DNA

SEQ ID NO: 55231 - DNA, 41 bp, Homo sapiens; identical to SEQ ID NO: 7573
  source 1..41: mol_type = genomic DNA

SEQ ID NO: 55232 - DNA, 33 bp, Homo sapiens; identical to SEQ ID NO: 13075
  source 1..33: mol_type = genomic DNA

SEQ ID NO: 55233 - DNA, 32 bp, Homo sapiens; identical to SEQ ID NO: 18677
  source 1..32: mol_type = genomic DNA

SEQ ID NO: 55234 - DNA, 40 bp, Homo sapiens; identical to SEQ ID NO: 20229
  source 1..40: mol_type = genomic DNA

SEQ ID NO: 55235 - DNA, 42 bp, Homo sapiens; identical to SEQ ID NO: 23928
  source 1..42: mol_type = genomic DNA

SEQ ID NO: 55236 - DNA, 30 bp, Homo sapiens; identical to SEQ ID NO: 8321
  source 1..30: mol_type = genomic DNA

SEQ ID NO: 55237 - DNA, 45 bp, Homo sapiens; identical to SEQ ID NO: 15432
  source 1..45: mol_type = genomic DNA

SEQ ID NO: 55238 - DNA, 34 bp, Homo sapiens; identical to SEQ ID NO: 15596
  source 1..34: mol_type = genomic DNA

SEQ ID NO: 55239 - DNA, 33 bp, Homo sapiens; identical to SEQ ID NO: 8120
  source 1..33: mol_type = genomic DNA

SEQ ID NO: 55240 - DNA, 34 bp, Homo sapiens; identical to SEQ ID NO: 14626
  source 1..34: mol_type = genomic DNA

SEQ ID NO: 55241 - DNA, 36 bp, Homo sapiens; identical to SEQ ID NO: 19222
  source 1..36: mol_type = genomic DNA

SEQ ID NO: 55242 - DNA, 34 bp, Homo sapiens; identical to SEQ ID NO: 4416
  source 1..34: mol_type = genomic DNA

SEQ ID NO: 55243 - DNA, 37 bp, Homo sapiens; identical to SEQ ID NO: 1427
  source 1..37: mol_type = genomic DNA

SEQ ID NO: 55244 - DNA, 32 bp, Homo sapiens; identical to SEQ ID NO: 31106
  source 1..32: mol_type = genomic DNA

SEQ ID NO: 55245 - DNA, 33 bp, Homo sapiens; identical to SEQ ID NO: 9964
  source 1..33: mol_type = genomic DNA

SEQ ID NO: 55246 - DNA, 26 bp, Homo sapiens
  source 1..26: mol_type = genomic DNA
tcacacgcgaaaggtccccggttcga

SEQ ID NO: 55247 - DNA, 27 bp, Homo sapiens
  source 1..27: mol_type = genomic DNA
agatcctgggttcgaatcccagcggtg

SEQ ID NO: 55248 - DNA, 19 bp, Homo sapiens
  source 1..19: mol_type = genomic DNA
taggattcggcgctttcac

SEQ ID NO: 55249 - DNA, 35 bp, Homo sapiens; identical to SEQ ID NO: 14359
  source 1..35: mol_type = genomic DNA

SEQ ID NO: 55250 - DNA, 35 bp, Homo sapiens; identical to SEQ ID NO: 12750
  source 1..35: mol_type = genomic DNA

SEQ ID NO: 55251 - DNA, 36 bp, Homo sapiens; identical to SEQ ID NO: 8433
  source 1..36: mol_type = genomic DNA

SEQ ID NO: 55252 - DNA, 42 bp, Homo sapiens; identical to SEQ ID NO: 23938
  source 1..42: mol_type = genomic DNA

SEQ ID NO: 55253 - DNA, 37 bp, Homo sapiens; identical to SEQ ID NO: 14327
  source 1..37: mol_type = genomic DNA

SEQ ID NO: 55254 - DNA, 40 bp, Homo sapiens; identical to SEQ ID NO: 19243
  source 1..40: mol_type = genomic DNA

SEQ ID NO: 55255 - DNA, 32 bp, Homo sapiens; identical to SEQ ID NO: 1917
  source 1..32: mol_type = genomic DNA

SEQ ID NO: 55256 - DNA, 31 bp, Homo sapiens; identical to SEQ ID NO: 10931
  source 1..31: mol_type = genomic DNA

SEQ ID NO: 55257 - DNA, 23 bp, Homo sapiens
  source 1..23: mol_type = genomic DNA
taggattcggcgctttcaccgcc

SEQ ID NO: 55258 - DNA, 29 bp, Homo sapiens
  source 1..29: mol_type = genomic DNA
tggaggcgtgggttcgaatcccacttctg

SEQ ID NO: 55259 - DNA, 31 bp, Homo sapiens; identical to SEQ ID NO: 26658
  source 1..31: mol_type = genomic DNA

SEQ ID NO: 55260 - DNA, 48 bp, Homo sapiens; identical to SEQ ID NO: 7916
  source 1..48: mol_type = genomic DNA

SEQ ID NO: 55261 - DNA, 35 bp, Homo sapiens; identical to SEQ ID NO: 4954
  source 1..35: mol_type = genomic DNA

SEQ ID NO: 55262 - DNA, 19 bp, Homo sapiens
  source 1..19: mol_type = genomic DNA
agtcggtggagcatgggac

SEQ ID NO: 55263 - DNA, 30 bp, Homo sapiens; identical to SEQ ID NO: 26623
  source 1..30: mol_type = genomic DNA

SEQ ID NO: 55264 - DNA, 35 bp, Homo sapiens; identical to SEQ ID NO: 16692
  source 1..35: mol_type = genomic DNA

SEQ ID NO: 55265 - DNA, 34 bp, Homo sapiens; identical to SEQ ID NO: 28007
  source 1..34: mol_type = genomic DNA

SEQ ID NO: 55266 - DNA, 33 bp, Homo sapiens; identical to SEQ ID NO: 21754
  source 1..33: mol_type = genomic DNA

SEQ ID NO: 55267 - DNA, 48 bp, Homo sapiens; identical to SEQ ID NO: 10037
  source 1..48: mol_type = genomic DNA

SEQ ID NO: 55268 - DNA, 37 bp, Homo sapiens; identical to SEQ ID NO: 4001
  source 1..37: mol_type = genomic DNA

SEQ ID NO: 55269 - DNA, 34 bp, Homo sapiens; identical to SEQ ID NO: 26407
  source 1..34: mol_type = genomic DNA

SEQ ID NO: 55270 - DNA, 40 bp, Homo sapiens; identical to SEQ ID NO: 27866
  source 1..40: mol_type = genomic DNA

SEQ ID NO: 55271 - DNA, 48 bp, Homo sapiens; identical to SEQ ID NO: 6004
  source 1..48: mol_type = genomic DNA

SEQ ID NO: 55272 - DNA, 27 bp, Homo sapiens
  source 1..27: mol_type = genomic DNA
gtcggtagagcatgagacccttaatct

SEQ ID NO: 55273 - DNA, 33 bp, Homo sapiens; identical to SEQ ID NO: 6748
  source 1..33: mol_type = genomic DNA

SEQ ID NO: 55274 - DNA, 25 bp, Homo sapiens
  source 1..25: mol_type = genomic DNA
ggaagcgtgctgggcccataaccca

SEQ ID NO: 55275 - DNA, 40 bp, Homo sapiens; identical to SEQ ID NO: 26823
  source 1..40: mol_type = genomic DNA

SEQ ID NO: 55276 - DNA, 23 bp, Homo sapiens
  source 1..23: mol_type = genomic DNA
gtagagcatgagacccttaatct

SEQ ID NO: 55277 - DNA, 32 bp, Homo sapiens; identical to SEQ ID NO: 10687
  source 1..32: mol_type = genomic DNA

SEQ ID NO: 55278 - DNA, 42 bp, Homo sapiens; identical to SEQ ID NO: 6380
  source 1..42: mol_type = genomic DNA

SEQ ID NO: 55279 - DNA, 31 bp, Homo sapiens; identical to SEQ ID NO: 4348
  source 1..31: mol_type = genomic DNA

SEQ ID NO: 55280 - DNA, 48 bp, Homo sapiens; identical to SEQ ID NO: 13308
  source 1..48: mol_type = genomic DNA

SEQ ID NO: 55281 - DNA, 36 bp, Homo sapiens; identical to SEQ ID NO: 20889
  source 1..36: mol_type = genomic DNA

SEQ ID NO: 55282 - DNA, 35 bp, Homo sapiens; identical to SEQ ID NO: 25187
  source 1..35: mol_type = genomic DNA

SEQ ID NO: 55283 - DNA, 27 bp, Homo sapiens
  source 1..27: mol_type = genomic DNA
atcagaagattctaggttcgactcctg

SEQ ID NO: 55284 - DNA, 34 bp, Homo sapiens; identical to SEQ ID NO: 12822
  source 1..34: mol_type = genomic DNA

SEQ ID NO: 55285 - DNA, 19 bp, Homo sapiens
  source 1..19: mol_type = genomic DNA
cgcattggtggttcagtgg

SEQ ID NO: 55286 - DNA, 40 bp, Homo sapiens; identical to SEQ ID NO: 19720
  source 1..40: mol_type = genomic DNA

SEQ ID NO: 55287 - DNA, 39 bp, Homo sapiens; identical to SEQ ID NO: 25112
  source 1..39: mol_type = genomic DNA

SEQ ID NO: 55288 - DNA, 37 bp, Homo sapiens; identical to SEQ ID NO: 20913
  source 1..37: mol_type = genomic DNA

SEQ ID NO: 55289 - DNA, 31 bp, Homo sapiens; identical to SEQ ID NO: 12247
  source 1..31: mol_type = genomic DNA

SEQ ID NO: 55290 - DNA, 17 bp, Homo sapiens
  source 1..17: mol_type = genomic DNA
tatagtggttagtatcc

SEQ ID NO: 55291 - DNA, 32 bp, Homo sapiens; identical to SEQ ID NO: 14659
  source 1..32: mol_type = genomic DNA

SEQ ID NO: 55292 - DNA, 16 bp, Homo sapiens
  source 1..16: mol_type = genomic DNA
gttcgagcctcacctg

SEQ ID NO: 55293 - DNA, 23 bp, Homo sapiens
  source 1..23: mol_type = genomic DNA
tagagcatgggactcttaatctc

SEQ ID NO: 55294 - DNA, 33 bp, Homo sapiens; identical to SEQ ID NO: 27144
  source 1..33: mol_type = genomic DNA

SEQ ID NO: 55295 - DNA, 40 bp, Homo sapiens; identical to SEQ ID NO: 11417
  source 1..40: mol_type = genomic DNA

SEQ ID NO: 55296 - DNA, 39 bp, Homo sapiens; identical to SEQ ID NO: 29037
  source 1..39: mol_type = genomic DNA

SEQ ID NO: 55297 - DNA, 32 bp, Homo sapiens; identical to SEQ ID NO: 12248
  source 1..32: mol_type = genomic DNA

SEQ ID NO: 55298 - DNA, 33 bp, Homo sapiens; identical to SEQ ID NO: 18716
  source 1..33: mol_type = genomic DNA

SEQ ID NO: 55299 - DNA, 16 bp, Homo sapiens
  source 1..16: mol_type = genomic DNA
tggttcgagcccaccc

SEQ ID NO: 55300 - DNA, 28 bp, Homo sapiens
  source 1..28: mol_type = genomic DNA
ttggcctcctaagccagggattgtgggt

SEQ ID NO: 55301 - DNA, 17 bp, Homo sapiens
  source 1..17: mol_type = genomic DNA
tagctcaggcggtagag

SEQ ID NO: 55302 - DNA, 27 bp, Homo sapiens
  source 1..27: mol_type = genomic DNA
ggggcgtgggttcgaatcccaccgctg

SEQ ID NO: 55303 - DNA, 20 bp, Homo sapiens
  source 1..20: mol_type = genomic DNA
tgtagtggtcatcacgttcg

SEQ ID NO: 55304 - DNA, 32 bp, Homo sapiens; identical to SEQ ID NO: 11544
  source 1..32: mol_type = genomic DNA

SEQ ID NO: 55305 - DNA, 31 bp, Homo sapiens; identical to SEQ ID NO: 26321
  source 1..31: mol_type = genomic DNA

SEQ ID NO: 55306 - DNA, 17 bp, Homo sapiens
  source 1..17: mol_type = genomic DNA
gttcgatccccgtacgg

SEQ ID NO: 55307 - DNA, 48 bp, Homo sapiens; identical to SEQ ID NO: 12102
  source 1..48: mol_type = genomic DNA

SEQ ID NO: 55308 - DNA, 29 bp, Homo sapiens
  source 1..29: mol_type = genomic DNA
cagcggaagcgtgctgggcccataaccca

SEQ ID NO: 55309 - DNA, 36 bp, Homo sapiens; identical to SEQ ID NO: 23843
  source 1..36: mol_type = genomic DNA

SEQ ID NO: 55310 - DNA, 16 bp, Homo sapiens
  source 1..16: mol_type = genomic DNA
ccggggttcgattccc

SEQ ID NO: 55311 - DNA, 17 bp, Homo sapiens
  source 1..17: mol_type = genomic DNA
tggttaggattcagcgc

SEQ ID NO: 55312 - DNA, 32 bp, Homo sapiens; identical to SEQ ID NO: 21510
  source 1..32: mol_type = genomic DNA

SEQ ID NO: 55313 - DNA, 32 bp, Homo sapiens; identical to SEQ ID NO: 17588
  source 1..32: mol_type = genomic DNA

SEQ ID NO: 55314 - DNA, 32 bp, Homo sapiens; identical to SEQ ID NO: 11353
  source 1..32: mol_type = genomic DNA

SEQ ID NO: 55315 - DNA, 45 bp, Homo sapiens; identical to SEQ ID NO: 17637
  source 1..45: mol_type = genomic DNA

SEQ ID NO: 55316 - DNA, 33 bp, Homo sapiens; identical to SEQ ID NO: 3335
  source 1..33: mol_type = genomic DNA

SEQ ID NO: 55317 - DNA, 33 bp, Homo sapiens; identical to SEQ ID NO: 17570
  source 1..33: mol_type = genomic DNA

SEQ ID NO: 55318 - DNA, 34 bp, Homo sapiens; identical to SEQ ID NO: 28918
  source 1..34: mol_type = genomic DNA

SEQ ID NO: 55319 - DNA, 47 bp, Homo sapiens; identical to SEQ ID NO: 816
  source 1..47: mol_type = genomic DNA

SEQ ID NO: 55320 - DNA, 26 bp, Homo sapiens
  source 1..26: mol_type = genomic DNA
cagtcggtagagcatgagacccttaa

SEQ ID NO: 55321 - DNA, 27 bp, Homo sapiens
  source 1..27: mol_type = genomic DNA
tagctcagtcggtagagcatgagaccc

SEQ ID NO: 55322 - DNA, 25 bp, Homo sapiens
  source 1..25: mol_type = genomic DNA
caatacactgaaaatgtttagacgg

SEQ ID NO: 55323 - DNA, 48 bp, Homo sapiens; identical to SEQ ID NO: 28350
  source 1..48: mol_type = genomic DNA

SEQ ID NO: 55324 - DNA, 25 bp, Homo sapiens
  source 1..25: mol_type = genomic DNA
ttagctgttaactaagtgtttgtgg

SEQ ID NO: 55325 - DNA, 39 bp, Homo sapiens; identical to SEQ ID NO: 10310
  source 1..39: mol_type = genomic DNA

SEQ ID NO: 55326 - DNA, 48 bp, Homo sapiens; identical to SEQ ID NO: 17348
  source 1..48: mol_type = genomic DNA

SEQ ID NO: 55327 - DNA, 48 bp, Homo sapiens; identical to SEQ ID NO: 23772
  source 1..48: mol_type = genomic DNA

SEQ ID NO: 55328 - DNA, 48 bp, Homo sapiens; identical to SEQ ID NO: 6258
  source 1..48: mol_type = genomic DNA

SEQ ID NO: 55329 - DNA, 34 bp, Homo sapiens; identical to SEQ ID NO: 29843
  source 1..34: mol_type = genomic DNA

SEQ ID NO: 55330 - DNA, 33 bp, Homo sapiens; identical to SEQ ID NO: 23692
  source 1..33: mol_type = genomic DNA

SEQ ID NO: 55331 - DNA, 25 bp, Homo sapiens
  source 1..25: mol_type = genomic DNA
agcagcttcaaacctgccggggctt

SEQ ID NO: 55332 - DNA, 34 bp, Homo sapiens; identical to SEQ ID NO: 19911
  source 1..34: mol_type = genomic DNA

SEQ ID NO: 55333 - DNA, 32 bp, Homo sapiens; identical to SEQ ID NO: 23710
  source 1..32: mol_type = genomic DNA

SEQ ID NO: 55334 - DNA, 16 bp, Homo sapiens
  source 1..16: mol_type = genomic DNA
taactagttttgacaa

SEQ ID NO: 55335 - DNA, 34 bp, Homo sapiens; identical to SEQ ID NO: 20409
  source 1..34: mol_type = genomic DNA

SEQ ID NO: 55336 - DNA, 48 bp, Homo sapiens; identical to SEQ ID NO: 9513
  source 1..48: mol_type = genomic DNA

SEQ ID NO: 55337 - DNA, 26 bp, Homo sapiens
  source 1..26: mol_type = genomic DNA
agcagcttcaaacctgccggggcttc

SEQ ID NO: 55338 - DNA, 48 bp, Homo sapiens; identical to SEQ ID NO: 5318
  source 1..48: mol_type = genomic DNA

SEQ ID NO: 55339 - DNA, 32 bp, Homo sapiens; identical to SEQ ID NO: 3921
  source 1..32: mol_type = genomic DNA

SEQ ID NO: 55340 - DNA, 27 bp, Homo sapiens
  source 1..27: mol_type = genomic DNA
tagctcagtcggtagagcatgagactc

SEQ ID NO: 55341 - DNA, 38 bp, Homo sapiens; identical to SEQ ID NO: 14505
  source 1..38: mol_type = genomic DNA

SEQ ID NO: 55342 - DNA, 34 bp, Homo sapiens; identical to SEQ ID NO: 20393
  source 1..34: mol_type = genomic DNA

SEQ ID NO: 55343 - DNA, 28 bp, Homo sapiens
  source 1..28: mol_type = genomic DNA
agaaatatgtctgataaaagagttactt

SEQ ID NO: 55344 - DNA, 21 bp, Homo sapiens
  source 1..21: mol_type = genomic DNA
tcaaagttaaattataggcta

SEQ ID NO: 55345 - DNA, 32 bp, Homo sapiens; identical to SEQ ID NO: 23691
  source 1..32: mol_type = genomic DNA

SEQ ID NO: 55346 - DNA, 17 bp, Homo sapiens
  source 1..17: mol_type = genomic DNA
tcttaatctcagggtcg

SEQ ID NO: 55347 - DNA, 18 bp, Homo sapiens
  source 1..18: mol_type = genomic DNA
ggggttcgattccttcct

SEQ ID NO: 55348 - DNA, 44 bp, Homo sapiens; identical to SEQ ID NO: 14846
  source 1..44: mol_type = genomic DNA

SEQ ID NO: 55349 - DNA, 30 bp, Homo sapiens; identical to SEQ ID NO: 22648
  source 1..30: mol_type = genomic DNA

SEQ ID NO: 55350 - DNA, 35 bp, Homo sapiens; identical to SEQ ID NO: 18413
  source 1..35: mol_type = genomic DNA

SEQ ID NO: 55351 - DNA, 26 bp, Homo sapiens
  source 1..26: mol_type = genomic DNA
gctcagtcggtagagcatgagactct

SEQ ID NO: 55352 - DNA, 17 bp, Homo sapiens
  source 1..17: mol_type = genomic DNA
ggggttcgattccttcc

SEQ ID NO: 55353 - DNA, 48 bp, Homo sapiens; identical to SEQ ID NO: 16352
  source 1..48: mol_type = genomic DNA

SEQ ID NO: 55354 - DNA, 23 bp, Homo sapiens
  source 1..23: mol_type = genomic DNA
gtagagcatgagactcttaatct

SEQ ID NO: 55355 - DNA, 27 bp, Homo sapiens
  source 1..27: mol_type = genomic DNA
aagagaaccaacacctctttacagtga

SEQ ID NO: 55356 - DNA, 48 bp, Homo sapiens; identical to SEQ ID NO: 25250
  source 1..48: mol_type = genomic DNA

SEQ ID NO: 55357 - DNA, 17 bp, Homo sapiens
  source 1..17: mol_type = genomic DNA
ttaactagttttgacaa

SEQ ID NO: 55358 - DNA, 25 bp, Homo sapiens
  source 1..25: mol_type = genomic DNA
cgggcccataccccgaaaatgttgg

SEQ ID NO: 55359 - DNA, 48 bp, Homo sapiens; identical to SEQ ID NO: 24607
  source 1..48: mol_type = genomic DNA

SEQ ID NO: 55360 - DNA, 26 bp, Homo sapiens
  source 1..26: mol_type = genomic DNA
gtagtggttatcacgttcgcctcaca

SEQ ID NO: 55361 - DNA, 35 bp, Homo sapiens; identical to SEQ ID NO: 13650
  source 1..35: mol_type = genomic DNA

SEQ ID NO: 55362 - DNA, 31 bp, Homo sapiens; identical to SEQ ID NO: 29261
  source 1..31: mol_type = genomic DNA

SEQ ID NO: 55363 - DNA, 25 bp, Homo sapiens
  source 1..25: mol_type = genomic DNA
cagattgtgaatctgacaacagagg

SEQ ID NO: 55364 - DNA, 29 bp, Homo sapiens
  source 1..29: mol_type = genomic DNA
ttaagagaaccaacacctctttacagtga

SEQ ID NO: 55365 - DNA, 34 bp, Homo sapiens; identical to SEQ ID NO: 23693
  source 1..34: mol_type = genomic DNA

SEQ ID NO: 55366 - DNA, 35 bp, Homo sapiens; identical to SEQ ID NO: 3924
  source 1..35: mol_type = genomic DNA

SEQ ID NO: 55367 - DNA, 31 bp, Homo sapiens; identical to SEQ ID NO: 1153
  source 1..31: mol_type = genomic DNA

SEQ ID NO: 55368 - DNA, 41 bp, Homo sapiens; identical to SEQ ID NO: 19129
  source 1..41: mol_type = genomic DNA

SEQ ID NO: 55369 - DNA, 33 bp, Homo sapiens; identical to SEQ ID NO: 14500
  source 1..33: mol_type = genomic DNA

SEQ ID NO: 55370 - DNA, 16 bp, Homo sapiens
  source 1..16: mol_type = genomic DNA
aaagcacccaacttac

SEQ ID NO: 55371 - DNA, 18 bp, Homo sapiens
  source 1..18: mol_type = genomic DNA
cctcaaagcaatacactg

SEQ ID NO: 55372 - DNA, 17 bp, Homo sapiens
  source 1..17: mol_type = genomic DNA
caactccaaataaaagt

SEQ ID NO: 55373 - DNA, 24 bp, Homo sapiens
  source 1..24: mol_type = genomic DNA
ttggtgcaactccaaataaaagta

SEQ ID NO: 55374 - DNA, 17 bp, Homo sapiens
  source 1..17: mol_type = genomic DNA
aaagctcacaagaactg

SEQ ID NO: 55375 - DNA, 32 bp, Homo sapiens; identical to SEQ ID NO: 836
  source 1..32: mol_type = genomic DNA

SEQ ID NO: 55376 - DNA, 27 bp, Homo sapiens
  source 1..27: mol_type = genomic DNA
tcagctaaataagctatcgggcccata

SEQ ID NO: 55377 - DNA, 17 bp, Homo sapiens
  source 1..17: mol_type = genomic DNA
gtcaggatggccgagca

SEQ ID NO: 55378 - DNA, 24 bp, Homo sapiens
  source 1..24: mol_type = genomic DNA
agattaagagaaccaacacctctt

SEQ ID NO: 55379 - DNA, 33 bp, Homo sapiens; identical to SEQ ID NO: 3077
  source 1..33: mol_type = genomic DNA

SEQ ID NO: 55380 - DNA, 18 bp, Homo sapiens
  source 1..18: mol_type = genomic DNA
attaactagttttgacaa

SEQ ID NO: 55381 - DNA, 31 bp, Homo sapiens; identical to SEQ ID NO: 10266
  source 1..31: mol_type = genomic DNA

SEQ ID NO: 55382 - DNA, 32 bp, Homo sapiens; identical to SEQ ID NO: 3076
  source 1..32: mol_type = genomic DNA

SEQ ID NO: 55383 - DNA, 16 bp, Homo sapiens
  source 1..16: mol_type = genomic DNA
ttaggagatttcaact

SEQ ID NO: 55384 - DNA, 44 bp, Homo sapiens; identical to SEQ ID NO: 15269
  source 1..44: mol_type = genomic DNA

SEQ ID NO: 55385 - DNA, 31 bp, Homo sapiens; identical to SEQ ID NO: 3920
  source 1..31: mol_type = genomic DNA

SEQ ID NO: 55386 - DNA, 34 bp, Homo sapiens; identical to SEQ ID NO: 13417
  source 1..34: mol_type = genomic DNA

SEQ ID NO: 55387 - DNA, 18 bp, Homo sapiens
  source 1..18: mol_type = genomic DNA
tgtctaacaacatggctt

SEQ ID NO: 55388 - DNA, 20 bp, Homo sapiens
  source 1..20: mol_type = genomic DNA
cttaggagatttcaacttaa

SEQ ID NO: 55389 - DNA, 38 bp, Homo sapiens; identical to SEQ ID NO: 17343
  source 1..38: mol_type = genomic DNA

SEQ ID NO: 55390 - DNA, 32 bp, Homo sapiens; identical to SEQ ID NO: 22222
  source 1..32: mol_type = genomic DNA

SEQ ID NO: 55391 - DNA, 17 bp, Homo sapiens
  source 1..17: mol_type = genomic DNA
ttcgaatcccactcctg

SEQ ID NO: 55392 - DNA, 30 bp, Homo sapiens; identical to SEQ ID NO: 23689
  source 1..30: mol_type = genomic DNA

SEQ ID NO: 55393 - DNA, 25 bp, Homo sapiens
  source 1..25: mol_type = genomic DNA
gaattgcaaattcgaagaagcagct

SEQ ID NO: 55394 - DNA, 16 bp, Homo sapiens
  source 1..16: mol_type = genomic DNA
agcttcaaacctgccg

SEQ ID NO: 55395 - DNA, 16 bp, Homo sapiens
  source 1..16: mol_type = genomic DNA
cttaatctcagggtcg

SEQ ID NO: 55396 - DNA, 33 bp, Homo sapiens; identical to SEQ ID NO: 1625
  source 1..33: mol_type = genomic DNA

SEQ ID NO: 55397 - DNA, 32 bp, Homo sapiens; identical to SEQ ID NO: 10267
  source 1..32: mol_type = genomic DNA

SEQ ID NO: 55398 - DNA, 34 bp, Homo sapiens; identical to SEQ ID NO: 23712
  source 1..34: mol_type = genomic DNA

SEQ ID NO: 55399 - DNA, 16 bp, Homo sapiens
  source 1..16: mol_type = genomic DNA
gtcgcagtctcccctg

SEQ ID NO: 55400 - DNA, 47 bp, Homo sapiens; identical to SEQ ID NO: 977
  source 1..47: mol_type = genomic DNA

SEQ ID NO: 55401 - DNA, 48 bp, Homo sapiens; identical to SEQ ID NO: 3662
  source 1..48: mol_type = genomic DNA

SEQ ID NO: 55402 - DNA, 26 bp, Homo sapiens
  source 1..26: mol_type = genomic DNA
agaaatatgtctgataaaagagttac

SEQ ID NO: 55403 - DNA, 37 bp, Homo sapiens; identical to SEQ ID NO: 17342
  source 1..37: mol_type = genomic DNA

SEQ ID NO: 55404 - DNA, 17 bp, Homo sapiens
  source 1..17: mol_type = genomic DNA
tgatttcgactcattaa

SEQ ID NO: 55405 - DNA, 44 bp, Homo sapiens; identical to SEQ ID NO: 27177
  source 1..44: mol_type = genomic DNA

SEQ ID NO: 55406 - DNA, 28 bp, Homo sapiens
  source 1..28: mol_type = genomic DNA
tatagtttaaccaaaacatcagattgtg

SEQ ID NO: 55407 - DNA, 19 bp, Homo sapiens
  source 1..19: mol_type = genomic DNA
agagaaccaacacctcttt

SEQ ID NO: 55408 - DNA, 16 bp, Homo sapiens
  source 1..16: mol_type = genomic DNA
ttaatctcagggtcgt

SEQ ID NO: 55409 - DNA, 17 bp, Homo sapiens
  source 1..17: mol_type = genomic DNA
atcagattgtgaatctg

SEQ ID NO: 55410 - DNA, 19 bp, Homo sapiens
  source 1..19: mol_type = genomic DNA
cccataccccgaaaatgtt

SEQ ID NO: 55411 - DNA, 20 bp, Homo sapiens
  source 1..20: mol_type = genomic DNA
gagcatgggactcttaatcc

SEQ ID NO: 55412 - DNA, 40 bp, Homo sapiens; identical to SEQ ID NO: 538
  source 1..40: mol_type = genomic DNA

SEQ ID NO: 55413 - DNA, 48 bp, Homo sapiens; identical to SEQ ID NO: 29587
  source 1..48: mol_type = genomic DNA

SEQ ID NO: 55414 - DNA, 32 bp, Homo sapiens; identical to SEQ ID NO: 3911
  source 1..32: mol_type = genomic DNA

SEQ ID NO: 55415 - DNA, 19 bp, Homo sapiens
  source 1..19: mol_type = genomic DNA
taagctatcgggcccatac

SEQ ID NO: 55416 - DNA, 48 bp, Homo sapiens; identical to SEQ ID NO: 5129
  source 1..48: mol_type = genomic DNA

SEQ ID NO: 55417 - DNA, 36 bp, Homo sapiens; identical to SEQ ID NO: 1009
  source 1..36: mol_type = genomic DNA

SEQ ID NO: 55418 - DNA, 38 bp, Homo sapiens; identical to SEQ ID NO: 23697
  source 1..38: mol_type = genomic DNA

SEQ ID NO: 55419 - DNA, 24 bp, Homo sapiens
  source 1..24: mol_type = genomic DNA
cagtctcataatctgaaggtcctg

SEQ ID NO: 55420 - DNA, 32 bp, Homo sapiens; identical to SEQ ID NO: 1154
  source 1..32: mol_type = genomic DNA

SEQ ID NO: 55421 - DNA, 41 bp, Homo sapiens; identical to SEQ ID NO: 14156
  source 1..41: mol_type = genomic DNA

SEQ ID NO: 55422 - DNA, 38 bp, Homo sapiens; identical to SEQ ID NO: 28996
  source 1..38: mol_type = genomic DNA

SEQ ID NO: 55423 - DNA, 32 bp, Homo sapiens; identical to SEQ ID NO: 9799
  source 1..32: mol_type = genomic DNA

SEQ ID NO: 55424 - DNA, 18 bp, Homo sapiens
  source 1..18: mol_type = genomic DNA
caaagcaatacactgaaa

SEQ ID NO: 55425 - DNA, 23 bp, Homo sapiens
  source 1..23: mol_type = genomic DNA
aaaaaccatttcataactttgtc

SEQ ID NO: 55426 - DNA, 33 bp, Homo sapiens; identical to SEQ ID NO: 10211
  source 1..33: mol_type = genomic DNA

SEQ ID NO: 55427 - DNA, 19 bp, Homo sapiens
  source 1..19: mol_type = genomic DNA
aagaagcagcttcaaacct

SEQ ID NO: 55428 - DNA, 16 bp, Homo sapiens
  source 1..16: mol_type = genomic DNA
gtcccttcgtggtcgc

SEQ ID NO: 55429 - DNA, 30 bp, Homo sapiens; identical to SEQ ID NO: 23107
  source 1..30: mol_type = genomic DNA

SEQ ID NO: 55430 - DNA, 25 bp, Homo sapiens
  source 1..25: mol_type = genomic DNA
cccgaaaatgttggttatacccttc

SEQ ID NO: 55431 - DNA, 35 bp, Homo sapiens; identical to SEQ ID NO: 9802
  source 1..35: mol_type = genomic DNA

SEQ ID NO: 55432 - DNA, 34 bp, Homo sapiens; identical to SEQ ID NO: 8877
  source 1..34: mol_type = genomic DNA

SEQ ID NO: 55433 - DNA, 18 bp, Homo sapiens
  source 1..18: mol_type = genomic DNA
agtggtagaattctcacc

SEQ ID NO: 55434 - DNA, 16 bp, Homo sapiens
  source 1..16: mol_type = genomic DNA
aacccccttatttcta

SEQ ID NO: 55435 - DNA, 29 bp, Homo sapiens
  source 1..29: mol_type = genomic DNA
cagctaaataagctatcgggcccataccc

SEQ ID NO: 55436 - DNA, 31 bp, Homo sapiens; identical to SEQ ID NO: 24360
  source 1..31: mol_type = genomic DNA

SEQ ID NO: 55437 - DNA, 16 bp, Homo sapiens
  source 1..16: mol_type = genomic DNA
atcctatatatcttac

SEQ ID NO: 55438 - DNA, 33 bp, Homo sapiens; identical to SEQ ID NO: 23198
  source 1..33: mol_type = genomic DNA

SEQ ID NO: 55439 - DNA, 17 bp, Homo sapiens
  source 1..17: mol_type = genomic DNA
tcctcacacggggcacc

SEQ ID NO: 55440 - DNA, 16 bp, Homo sapiens
  source 1..16: mol_type = genomic DNA
tggtgagcatagctgc

SEQ ID NO: 55441 - DNA, 17 bp, Homo sapiens
  source 1..17: mol_type = genomic DNA
attagaatcttagcttt

SEQ ID NO: 55442 - DNA, 16 bp, Homo sapiens
  source 1..16: mol_type = genomic DNA
tcttaatcccagggtc

SEQ ID NO: 55443 - DNA, 27 bp, Homo sapiens
  source 1..27: mol_type = genomic DNA
atcgggcccataccccgaaaatgttgg

SEQ ID NO: 55444 - DNA, 21 bp, Homo sapiens
  source 1..21: mol_type = genomic DNA
tggaggcgtgggttcgaatcc

SEQ ID NO: 55445 - DNA, 37 bp, Homo sapiens; identical to SEQ ID NO: 20619
  source 1..37: mol_type = genomic DNA

SEQ ID NO: 55446 - DNA, 25 bp, Homo sapiens
  source 1..25: mol_type = genomic DNA
gctaaataagctatcgggcccatac

SEQ ID NO: 55447 - DNA, 26 bp, Homo sapiens
  source 1..26: mol_type = genomic DNA
tactttgatagagtaaataataggag

SEQ ID NO: 55448 - DNA, 17 bp, Homo sapiens
  source 1..17: mol_type = genomic DNA
ccagagtgtagcttaac

SEQ ID NO: 55449 - DNA, 21 bp, Homo sapiens
  source 1..21: mol_type = genomic DNA
tctcataatctgaaggtcctg

SEQ ID NO: 55450 - DNA, 18 bp, Homo sapiens
  source 1..18: mol_type = genomic DNA
gggttcgattcccggtca

SEQ ID NO: 55451 - DNA, 35 bp, Homo sapiens; identical to SEQ ID NO: 20410
  source 1..35: mol_type = genomic DNA

SEQ ID NO: 55452 - DNA, 17 bp, Homo sapiens
  source 1..17: mol_type = genomic DNA
aaaagagttactttgat

SEQ ID NO: 55453 - DNA, 18 bp, Homo sapiens
  source 1..18: mol_type = genomic DNA
ggatggccgagtggtcta

SEQ ID NO: 55454 - DNA, 37 bp, Homo sapiens; identical to SEQ ID NO: 28995
  source 1..37: mol_type = genomic DNA

SEQ ID NO: 55455 - DNA, 31 bp, Homo sapiens; identical to SEQ ID NO: 22926
  source 1..31: mol_type = genomic DNA

SEQ ID NO: 55456 - DNA, 33 bp, Homo sapiens; identical to SEQ ID NO: 20408
  source 1..33: mol_type = genomic DNA

SEQ ID NO: 55457 - DNA, 26 bp, Homo sapiens
  source 1..26: mol_type = genomic DNA
gaattgcaaattcgaagaagcagctt

SEQ ID NO: 55458 - DNA, 48 bp, Homo sapiens; identical to SEQ ID NO: 23010
  source 1..48: mol_type = genomic DNA

SEQ ID NO: 55459 - DNA, 47 bp, Homo sapiens; identical to SEQ ID NO: 19346
  source 1..47: mol_type = genomic DNA

SEQ ID NO: 55460 - DNA, 16 bp, Homo sapiens
  source 1..16: mol_type = genomic DNA
tcagtctcataatctg

SEQ ID NO: 55461 - DNA, 37 bp, Homo sapiens; identical to SEQ ID NO: 16346
  source 1..37: mol_type = genomic DNA

SEQ ID NO: 55462 - DNA, 25 bp, Homo sapiens
  source 1..25: mol_type = genomic DNA
tcagtctcataatctgaaggtcctg

SEQ ID NO: 55463 - DNA, 27 bp, Homo sapiens
  source 1..27: mol_type = genomic DNA
ctaaataagctatcgggcccatacccc

SEQ ID NO: 55464 - DNA, 36 bp, Homo sapiens; identical to SEQ ID NO: 13155
  source 1..36: mol_type = genomic DNA

SEQ ID NO: 55465 - DNA, 16 bp, Homo sapiens
  source 1..16: mol_type = genomic DNA
tccctgttcaggcgcc

SEQ ID NO: 55466 - DNA, 21 bp, Homo sapiens
  source 1..21: mol_type = genomic DNA
gggtggttcagtggtagaatt

SEQ ID NO: 55467 - DNA, 16 bp, Homo sapiens
  source 1..16: mol_type = genomic DNA
ttagcgcagtaggtag

SEQ ID NO: 55468 - DNA, 19 bp, Homo sapiens
  source 1..19: mol_type = genomic DNA
aaccatttcataactttgt

SEQ ID NO: 55469 - DNA, 48 bp, Homo sapiens; identical to SEQ ID NO: 4219
  source 1..48: mol_type = genomic DNA

SEQ ID NO: 55470 - DNA, 23 bp, Homo sapiens
  source 1..23: mol_type = genomic DNA
acccaacttacacttaggagatt

SEQ ID NO: 55471 - DNA, 48 bp, Homo sapiens; identical to SEQ ID NO: 23238
  source 1..48: mol_type = genomic DNA

SEQ ID NO: 55472 - DNA, 16 bp, Homo sapiens
  source 1..16: mol_type = genomic DNA
tcgaacctcagagggg

SEQ ID NO: 55473 - DNA, 16 bp, Homo sapiens
  source 1..16: mol_type = genomic DNA
cagagcatttgactgc

SEQ ID NO: 55474 - DNA, 18 bp, Homo sapiens
  source 1..18: mol_type = genomic DNA
gattttcatattgaattg

SEQ ID NO: 55475 - DNA, 48 bp, Homo sapiens; identical to SEQ ID NO: 8764
  source 1..48: mol_type = genomic DNA

SEQ ID NO: 55476 - DNA, 48 bp, Homo sapiens; identical to SEQ ID NO: 1630
  source 1..48: mol_type = genomic DNA

SEQ ID NO: 55477 - DNA, 16 bp, Homo sapiens
  source 1..16: mol_type = genomic DNA
agaaagctcacaagaa

SEQ ID NO: 55478 - DNA, 19 bp, Homo sapiens
  source 1..19: mol_type = genomic DNA
cttaattaaagtggctgat

SEQ ID NO: 55479 - DNA, 32 bp, Homo sapiens; identical to SEQ ID NO: 17616
  source 1..32: mol_type = genomic DNA

SEQ ID NO: 55480 - DNA, 27 bp, Homo sapiens
  source 1..27: mol_type = genomic DNA
ttcgaagaagcagcttcaaacctgccg

SEQ ID NO: 55481 - DNA, 16 bp, Homo sapiens
  source 1..16: mol_type = genomic DNA
gttatcacatctgctt

SEQ ID NO: 55482 - DNA, 19 bp, Homo sapiens
  source 1..19: mol_type = genomic DNA
atgcccccatgtctaacaa

SEQ ID NO: 55483 - DNA, 33 bp, Homo sapiens; identical to SEQ ID NO: 503
  source 1..33: mol_type = genomic DNA

SEQ ID NO: 55484 - DNA, 36 bp, Homo sapiens; identical to SEQ ID NO: 9686
  source 1..36: mol_type = genomic DNA

SEQ ID NO: 55485 - DNA, 18 bp, Homo sapiens
  source 1..18: mol_type = genomic DNA
aaaaaccatttcataact

SEQ ID NO: 55486 - DNA, 31 bp, Homo sapiens; identical to SEQ ID NO: 8886
  source 1..31: mol_type = genomic DNA

SEQ ID NO: 55487 - DNA, 34 bp, Homo sapiens; identical to SEQ ID NO: 391
  source 1..34: mol_type = genomic DNA

SEQ ID NO: 55488 - DNA, 29 bp, Homo sapiens
  source 1..29: mol_type = genomic DNA
tcttaatctcagggtcgtgggttcgagcc

SEQ ID NO: 55489 - DNA, 19 bp, Homo sapiens
  source 1..19: mol_type = genomic DNA
agctgttaactaagtgttt

SEQ ID NO: 55490 - DNA, 23 bp, Homo sapiens
  source 1..23: mol_type = genomic DNA
taagagaaccaacacctctttac

SEQ ID NO: 55491 - DNA, 26 bp, Homo sapiens
  source 1..26: mol_type = genomic DNA
tgaattgcaaattcgaagaagcagct

SEQ ID NO: 55492 - DNA, 32 bp, Homo sapiens; identical to SEQ ID NO: 30424
  source 1..32: mol_type = genomic DNA

SEQ ID NO: 55493 - DNA, 17 bp, Homo sapiens
  source 1..17: mol_type = genomic DNA
aaaacttaaaactttac

SEQ ID NO: 55494 - DNA, 24 bp, Homo sapiens
  source 1..24: mol_type = genomic DNA
tcagattgtgaatctgacaacaga

SEQ ID NO: 55495 - DNA, 29 bp, Homo sapiens
  source 1..29: mol_type = genomic DNA
ttaacacaaagcacccaacttacacttag

SEQ ID NO: 55496 - DNA, 16 bp, Homo sapiens
  source 1..16: mol_type = genomic DNA
atagctcagtggtaga

SEQ ID NO: 55497 - DNA, 19 bp, Homo sapiens
  source 1..19: mol_type = genomic DNA
cctggtggtctagtggcta

SEQ ID NO: 55498 - DNA, 18 bp, Homo sapiens
  source 1..18: mol_type = genomic DNA
aatggtagaattctcgcc

SEQ ID NO: 55499 - DNA, 41 bp, Homo sapiens; identical to SEQ ID NO: 14844
  source 1..41: mol_type = genomic DNA

SEQ ID NO: 55500 - DNA, 33 bp, Homo sapiens; identical to SEQ ID NO: 15757
  source 1..33: mol_type = genomic DNA

SEQ ID NO: 55501 - DNA, 35 bp, Homo sapiens; identical to SEQ ID NO: 27074
  source 1..35: mol_type = genomic DNA

SEQ ID NO: 55502 - DNA, 26 bp, Homo sapiens
  source 1..26: mol_type = genomic DNA
aattgcaaattcgaagaagcagcttc

SEQ ID NO: 55503 - DNA, 17 bp, Homo sapiens
  source 1..17: mol_type = genomic DNA
ggttagcgcgttcggct

SEQ ID NO: 55504 - DNA, 27 bp, Homo sapiens
  source 1..27: mol_type = genomic DNA
agaggcttacgaccccttatttacccc

SEQ ID NO: 55505 - DNA, 30 bp, Homo sapiens; identical to SEQ ID NO: 746
  source 1..30: mol_type = genomic DNA

SEQ ID NO: 55506 - DNA, 17 bp, Homo sapiens
  source 1..17: mol_type = genomic DNA
aatagtaccgttaactt

SEQ ID NO: 55507 - DNA, 33 bp, Homo sapiens; identical to SEQ ID NO: 949
  source 1..33: mol_type = genomic DNA

SEQ ID NO: 55508 - DNA, 37 bp, Homo sapiens; identical to SEQ ID NO: 10990
  source 1..37: mol_type = genomic DNA

SEQ ID NO: 55509 - DNA, 35 bp, Homo sapiens; identical to SEQ ID NO: 4436
  source 1..35: mol_type = genomic DNA

SEQ ID NO: 55510 - DNA, 28 bp, Homo sapiens
  source 1..28: mol_type = genomic DNA
taggagcttaaacccccttatttctacc

SEQ ID NO: 55511 - DNA, 42 bp, Homo sapiens; identical to SEQ ID NO: 23280
  source 1..42: mol_type = genomic DNA

SEQ ID NO: 55512 - DNA, 33 bp, Homo sapiens; identical to SEQ ID NO: 11630
  source 1..33: mol_type = genomic DNA

SEQ ID NO: 55513 - DNA, 38 bp, Homo sapiens; identical to SEQ ID NO: 6718
  source 1..38: mol_type = genomic DNA

SEQ ID NO: 55514 - DNA, 31 bp, Homo sapiens; identical to SEQ ID NO: 628
  source 1..31: mol_type = genomic DNA

SEQ ID NO: 55515 - DNA, 37 bp, Homo sapiens; identical to SEQ ID NO: 26429
  source 1..37: mol_type = genomic DNA

SEQ ID NO: 55516 - DNA, 22 bp, Homo sapiens
  source 1..22: mol_type = genomic DNA
gcggttatcacgtctgctttac

SEQ ID NO: 55517 - DNA, 37 bp, Homo sapiens; identical to SEQ ID NO: 10600
  source 1..37: mol_type = genomic DNA

SEQ ID NO: 55518 - DNA, 32 bp, Homo sapiens; identical to SEQ ID NO: 30037
  source 1..32: mol_type = genomic DNA

SEQ ID NO: 55519 - DNA, 28 bp, Homo sapiens
  source 1..28: mol_type = genomic DNA
acagaggcttacgaccccttatttaccc

SEQ ID NO: 55520 - DNA, 46 bp, Homo sapiens; identical to SEQ ID NO: 3398
  source 1..46: mol_type = genomic DNA

SEQ ID NO: 55521 - DNA, 37 bp, Homo sapiens; identical to SEQ ID NO: 13652
  source 1..37: mol_type = genomic DNA

SEQ ID NO: 55522 - DNA, 37 bp, Homo sapiens; identical to SEQ ID NO: 29552
  source 1..37: mol_type = genomic DNA

SEQ ID NO: 55523 - DNA, 46 bp, Homo sapiens; identical to SEQ ID NO: 17150
  source 1..46: mol_type = genomic DNA

SEQ ID NO: 55524 - DNA, 34 bp, Homo sapiens; identical to SEQ ID NO: 18726
  source 1..34: mol_type = genomic DNA

SEQ ID NO: 55525 - DNA, 21 bp, Homo sapiens
  source 1..21: mol_type = genomic DNA
tcgagtctcggtggaacctcc

SEQ ID NO: 55526 - DNA, 47 bp, Homo sapiens; identical to SEQ ID NO: 1244
  source 1..47: mol_type = genomic DNA

SEQ ID NO: 55527 - DNA, 23 bp, Homo sapiens
  source 1..23: mol_type = genomic DNA
tgtagtggttatcacgtctgctt

SEQ ID NO: 55528 - DNA, 27 bp, Homo sapiens
  source 1..27: mol_type = genomic DNA
tttgacaacattcaaaaaagagtacca

SEQ ID NO: 55529 - DNA, 37 bp, Homo sapiens; identical to SEQ ID NO: 3225
  source 1..37: mol_type = genomic DNA

SEQ ID NO: 55530 - DNA, 26 bp, Homo sapiens
  source 1..26: mol_type = genomic DNA
atgggttcgattctcatagtcctagc

SEQ ID NO: 55531 - DNA, 25 bp, Homo sapiens
  source 1..25: mol_type = genomic DNA
ttgacaacattcaaaaaagagtacc

SEQ ID NO: 55532 - DNA, 37 bp, Homo sapiens; identical to SEQ ID NO: 6724
  source 1..37: mol_type = genomic DNA

SEQ ID NO: 55533 - DNA, 45 bp, Homo sapiens; identical to SEQ ID NO: 17149
  source 1..45: mol_type = genomic DNA

SEQ ID NO: 55534 - DNA, 34 bp, Homo sapiens; identical to SEQ ID NO: 8270
  source 1..34: mol_type = genomic DNA

SEQ ID NO: 55535 - DNA, 18 bp, Homo sapiens
  source 1..18: mol_type = genomic DNA
agattgagggttcgagtc

SEQ ID NO: 55536 - DNA, 32 bp, Homo sapiens; identical to SEQ ID NO: 16988
  source 1..32: mol_type = genomic DNA

SEQ ID NO: 55537 - DNA, 43 bp, Homo sapiens; identical to SEQ ID NO: 217
  source 1..43: mol_type = genomic DNA

SEQ ID NO: 55538 - DNA, 21 bp, Homo sapiens
  source 1..21: mol_type = genomic DNA
tagcggttatcacattcgcct

SEQ ID NO: 55539 - DNA, 25 bp, Homo sapiens
  source 1..25: mol_type = genomic DNA
taagttgcaatacttaatttctgcc

SEQ ID NO: 55540 - DNA, 42 bp, Homo sapiens; identical to SEQ ID NO: 19943
  source 1..42: mol_type = genomic DNA

SEQ ID NO: 55541 - DNA, 29 bp, Homo sapiens
  source 1..29: mol_type = genomic DNA
ccatagtgtagtggttatcacgtctgctt

SEQ ID NO: 55542 - DNA, 34 bp, Homo sapiens; identical to SEQ ID NO: 27921
  source 1..34: mol_type = genomic DNA

SEQ ID NO: 55543 - DNA, 47 bp, Homo sapiens; identical to SEQ ID NO: 19947
  source 1..47: mol_type = genomic DNA

SEQ ID NO: 55544 - DNA, 26 bp, Homo sapiens
  source 1..26: mol_type = genomic DNA
gatgggttcgattctcatagtcctag

SEQ ID NO: 55545 - DNA, 28 bp, Homo sapiens
  source 1..28: mol_type = genomic DNA
cgcgggagaccggggttcgattccccga

SEQ ID NO: 55546 - DNA, 29 bp, Homo sapiens
  source 1..29: mol_type = genomic DNA
cagtcggtagagcatgggactcttaatcc

SEQ ID NO: 55547 - DNA, 40 bp, Homo sapiens; identical to SEQ ID NO: 23028
  source 1..40: mol_type = genomic DNA

SEQ ID NO: 55548 - DNA, 34 bp, Homo sapiens; identical to SEQ ID NO: 29575
  source 1..34: mol_type = genomic DNA

SEQ ID NO: 55549 - DNA, 26 bp, Homo sapiens
  source 1..26: mol_type = genomic DNA
aggcggcccgggttcgactcccggtg

SEQ ID NO: 55550 - DNA, 38 bp, Homo sapiens; identical to SEQ ID NO: 1483
  source 1..38: mol_type = genomic DNA

SEQ ID NO: 55551 - DNA, 28 bp, Homo sapiens
  source 1..28: mol_type = genomic DNA
ggtagaattctcgcctgccacgcgggag

SEQ ID NO: 55552 - DNA, 32 bp, Homo sapiens; identical to SEQ ID NO: 12093
  source 1..32: mol_type = genomic DNA

SEQ ID NO: 55553 - DNA, 44 bp, Homo sapiens; identical to SEQ ID NO: 19944
  source 1..44: mol_type = genomic DNA

SEQ ID NO: 55554 - DNA, 35 bp, Homo sapiens; identical to SEQ ID NO: 18739
  source 1..35: mol_type = genomic DNA

SEQ ID NO: 55555 - DNA, 18 bp, Homo sapiens
  source 1..18: mol_type = genomic DNA
gcggcccgggttcgactc

SEQ ID NO: 55556 - DNA, 21 bp, Homo sapiens
  source 1..21: mol_type = genomic DNA
tagctgttaactaagtgtttg

SEQ ID NO: 55557 - DNA, 33 bp, Homo sapiens; identical to SEQ ID NO: 449
  source 1..33: mol_type = genomic DNA

SEQ ID NO: 55558 - DNA, 37 bp, Homo sapiens; identical to SEQ ID NO: 22611
  source 1..37: mol_type = genomic DNA

SEQ ID NO: 55559 - DNA, 16 bp, Homo sapiens
  source 1..16: mol_type = genomic DNA
tagtatccccgcctgt

SEQ ID NO: 55560 - DNA, 35 bp, Homo sapiens; identical to SEQ ID NO: 8385
  source 1..35: mol_type = genomic DNA

SEQ ID NO: 55561 - DNA, 25 bp, Homo sapiens
  source 1..25: mol_type = genomic DNA
cagaccaagagccttcaaagccctc

SEQ ID NO: 55562 - DNA, 16 bp, Homo sapiens
  source 1..16: mol_type = genomic DNA
ttcgatccccggcatc

SEQ ID NO: 55563 - DNA, 29 bp, Homo sapiens
  source 1..29: mol_type = genomic DNA
gttttgacaacattcaaaaaagagtacca

SEQ ID NO: 55564 - DNA, 26 bp, Homo sapiens
  source 1..26: mol_type = genomic DNA
tgcgtgttcaagtcacgtcggggtca

SEQ ID NO: 55565 - DNA, 20 bp, Homo sapiens
  source 1..20: mol_type = genomic DNA
agtggttatcacgtctgctt

SEQ ID NO: 55566 - DNA, 41 bp, Homo sapiens; identical to SEQ ID NO: 22706
  source 1..41: mol_type = genomic DNA

SEQ ID NO: 55567 - DNA, 27 bp, Homo sapiens
  source 1..27: mol_type = genomic DNA
gatggggtgtgataggtggcacggaga

SEQ ID NO: 55568 - DNA, 24 bp, Homo sapiens
  source 1..24: mol_type = genomic DNA
tcggtagagcatgggactcttaat

SEQ ID NO: 55569 - DNA, 18 bp, Homo sapiens
  source 1..18: mol_type = genomic DNA
aaacccccttatttctac

SEQ ID NO: 55570 - DNA, 29 bp, Homo sapiens
  source 1..29: mol_type = genomic DNA
tgtagctcagtggtagagcatttgactgc

SEQ ID NO: 55571 - DNA, 37 bp, Homo sapiens; identical to SEQ ID NO: 19718
  source 1..37: mol_type = genomic DNA

SEQ ID NO: 55572 - DNA, 26 bp, Homo sapiens
  source 1..26: mol_type = genomic DNA
cataaaacttaaaactttacagtcag

SEQ ID NO: 55573 - DNA, 28 bp, Homo sapiens
  source 1..28: mol_type = genomic DNA
tagctgttaactaagtgtttgtgggttt

SEQ ID NO: 55574 - DNA, 23 bp, Homo sapiens
  source 1..23: mol_type = genomic DNA
tctcagggatgggttcgattctc

SEQ ID NO: 55575 - DNA, 29 bp, Homo sapiens
  source 1..29: mol_type = genomic DNA
agcagttgacccgggttcgattcccggcc

SEQ ID NO: 55576 - DNA, 20 bp, Homo sapiens
  source 1..20: mol_type = genomic DNA
ttcgagccccagtggaacca

SEQ ID NO: 55577 - DNA, 22 bp, Homo sapiens
  source 1..22: mol_type = genomic DNA
gaggtcgatggatcgaaaccat

SEQ ID NO: 55578 - DNA, 31 bp, Homo sapiens; identical to SEQ ID NO: 3156
  source 1..31: mol_type = genomic DNA

SEQ ID NO: 55579 - DNA, 23 bp, Homo sapiens
  source 1..23: mol_type = genomic DNA
tcaggatggccgagtggtctaag

SEQ ID NO: 55580 - DNA, 26 bp, Homo sapiens
  source 1..26: mol_type = genomic DNA
cagttgatgcagagtggggttttgca

SEQ ID NO: 55581 - DNA, 30 bp, Homo sapiens; identical to SEQ ID NO: 8278
  source 1..30: mol_type = genomic DNA

SEQ ID NO: 55582 - DNA, 29 bp, Homo sapiens
  source 1..29: mol_type = genomic DNA
actaagtgtttgtgggtttaagtcccatt

SEQ ID NO: 55583 - DNA, 24 bp, Homo sapiens
  source 1..24: mol_type = genomic DNA
tctgacaacagaggcttacgaccc

SEQ ID NO: 55584 - DNA, 34 bp, Homo sapiens; identical to SEQ ID NO: 12250
  source 1..34: mol_type = genomic DNA

SEQ ID NO: 55585 - DNA, 26 bp, Homo sapiens
  source 1..26: mol_type = genomic DNA
cggcccgggttcgactcccggtgtgg

SEQ ID NO: 55586 - DNA, 23 bp, Homo sapiens
  source 1..23: mol_type = genomic DNA
cgctctcaccgccgcggcccggg

SEQ ID NO: 55587 - DNA, 22 bp, Homo sapiens
  source 1..22: mol_type = genomic DNA
agctttggggggttcgattcct

SEQ ID NO: 55588 - DNA, 25 bp, Homo sapiens
  source 1..25: mol_type = genomic DNA
gagaccggggttcgattccccgacg

SEQ ID NO: 55589 - DNA, 27 bp, Homo sapiens
  source 1..27: mol_type = genomic DNA
tctcgcctgccacgcgggaggcccggg

SEQ ID NO: 55590 - DNA, 18 bp, Homo sapiens
  source 1..18: mol_type = genomic DNA
ctgttaactaagtgtttg

SEQ ID NO: 55591 - DNA, 16 bp, Homo sapiens
  source 1..16: mol_type = genomic DNA
cgtagtgtagtggtca

SEQ ID NO: 55592 - DNA, 20 bp, Homo sapiens
  source 1..20: mol_type = genomic DNA
atccttaggtcgctggttcg

SEQ ID NO: 55593 - DNA, 17 bp, Homo sapiens
  source 1..17: mol_type = genomic DNA
gcggcccgggttcgatt

SEQ ID NO: 55594 - DNA, 29 bp, Homo sapiens
  source 1..29: mol_type = genomic DNA
tcgcgggttcgaaccccgtacgggccacc

SEQ ID NO: 55595 - DNA, 28 bp, Homo sapiens
  source 1..28: mol_type = genomic DNA
ggagaccggggttcaattccccgacggg

SEQ ID NO: 55596 - DNA, 18 bp, Homo sapiens
  source 1..18: mol_type = genomic DNA
cgagtcccggcggagtcg

SEQ ID NO: 55597 - DNA, 39 bp, Homo sapiens; identical to SEQ ID NO: 12137
  source 1..39: mol_type = genomic DNA

SEQ ID NO: 55598 - DNA, 20 bp, Homo sapiens
  source 1..20: mol_type = genomic DNA
gtcagaggttcaattcctct

SEQ ID NO: 55599 - DNA, 22 bp, Homo sapiens
  source 1..22: mol_type = genomic DNA
gtagtgtagcggttatcacatt

SEQ ID NO: 55600 - DNA, 16 bp, Homo sapiens
  source 1..16: mol_type = genomic DNA
ctcgcctgccacgcgg

SEQ ID NO: 55601 - DNA, 23 bp, Homo sapiens
  source 1..23: mol_type = genomic DNA
tctgaaggtcctgagttcgaacc

SEQ ID NO: 55602 - DNA, 19 bp, Homo sapiens
  source 1..19: mol_type = genomic DNA
cacgttcgcctcacacgcg

SEQ ID NO: 55603 - DNA, 25 bp, Homo sapiens
  source 1..25: mol_type = genomic DNA
acttcggatcagaagattgcaggtt

SEQ ID NO: 55604 - DNA, 17 bp, Homo sapiens
  source 1..17: mol_type = genomic DNA
ggttcgatcccgggttt

SEQ ID NO: 55605 - DNA, 21 bp, Homo sapiens
  source 1..21: mol_type = genomic DNA
tctcagggatgggttcgattc

SEQ ID NO: 55606 - DNA, 20 bp, Homo sapiens
  source 1..20: mol_type = genomic DNA
accagaatggccgagtggtt

SEQ ID NO: 55607 - DNA, 23 bp, Homo sapiens
  source 1..23: mol_type = genomic DNA
cttagcattaaccttttaagtta

SEQ ID NO: 55608 - DNA, 33 bp, Homo sapiens; identical to SEQ ID NO: 23711
  source 1..33: mol_type = genomic DNA

SEQ ID NO: 55609 - DNA, 35 bp, Homo sapiens; identical to SEQ ID NO: 9807
  source 1..35: mol_type = genomic DNA

SEQ ID NO: 55610 - DNA, 37 bp, Homo sapiens; identical to SEQ ID NO: 21653
  source 1..37: mol_type = genomic DNA

SEQ ID NO: 55611 - DNA, 36 bp, Homo sapiens; identical to SEQ ID NO: 23695
  source 1..36: mol_type = genomic DNA

SEQ ID NO: 55612 - DNA, 26 bp, Homo sapiens
  source 1..26: mol_type = genomic DNA
gcccccatgtctaacaacatggcttt

SEQ ID NO: 55613 - DNA, 23 bp, Homo sapiens
  source 1..23: mol_type = genomic DNA
gtagagcatgggactcttaatcc

SEQ ID NO: 55614 - DNA, 16 bp, Homo sapiens
  source 1..16: mol_type = genomic DNA
agagaaccaacacctc

SEQ ID NO: 55615 - DNA, 31 bp, Homo sapiens; identical to SEQ ID NO: 27530
  source 1..31: mol_type = genomic DNA

SEQ ID NO: 55616 - DNA, 32 bp, Homo sapiens; identical to SEQ ID NO: 206
  source 1..32: mol_type = genomic DNA

SEQ ID NO: 55617 - DNA, 25 bp, Homo sapiens
  source 1..25: mol_type = genomic DNA
agaaatatgtctgataaaagagtta

SEQ ID NO: 55618 - DNA, 24 bp, Homo sapiens
  source 1..24: mol_type = genomic DNA
gcagcttcaaacctgccggggctt

SEQ ID NO: 55619 - DNA, 28 bp, Homo sapiens
  source 1..28: mol_type = genomic DNA
ctagctcagtcggtagagcatgagactc

SEQ ID NO: 55620 - DNA, 16 bp, Homo sapiens
  source 1..16: mol_type = genomic DNA
tccaggtgccccctcc

SEQ ID NO: 55621 - DNA, 26 bp, Homo sapiens
  source 1..26: mol_type = genomic DNA
gtggtatagtggtgagcatagctgcc

SEQ ID NO: 55622 - DNA, 25 bp, Homo sapiens
  source 1..25: mol_type = genomic DNA
gcagcttcaaacctgccggggcttc

SEQ ID NO: 55623 - DNA, 31 bp, Homo sapiens; identical to SEQ ID NO: 205
  source 1..31: mol_type = genomic DNA

SEQ ID NO: 55624 - DNA, 18 bp, Homo sapiens
  source 1..18: mol_type = genomic DNA
aatggatagcgcattgga

SEQ ID NO: 55625 - DNA, 16 bp, Homo sapiens
  source 1..16: mol_type = genomic DNA
ctggtgtagtggtatc

SEQ ID NO: 55626 - DNA, 17 bp, Homo sapiens
  source 1..17: mol_type = genomic DNA
aacccccttatttctac

SEQ ID NO: 55627 - DNA, 18 bp, Homo sapiens
  source 1..18: mol_type = genomic DNA
agatttcaacttaacttg

SEQ ID NO: 55628 - DNA, 21 bp, Homo sapiens
  source 1..21: mol_type = genomic DNA
aaccaacacctctttacagtg

SEQ ID NO: 55629 - DNA, 19 bp, Homo sapiens
  source 1..19: mol_type = genomic DNA
aataagctatcgggcccat

SEQ ID NO: 55630 - DNA, 17 bp, Homo sapiens
  source 1..17: mol_type = genomic DNA
tggtctagtggttagga

SEQ ID NO: 55631 - DNA, 27 bp, Homo sapiens
  source 1..27: mol_type = genomic DNA
taacacaaagcacccaacttacactta

SEQ ID NO: 55632 - DNA, 17 bp, Homo sapiens
  source 1..17: mol_type = genomic DNA
gtcccatctggggtgcc

SEQ ID NO: 55633 - DNA, 20 bp, Homo sapiens
  source 1..20: mol_type = genomic DNA
ccaacttacacttaggagat

SEQ ID NO: 55634 - DNA, 34 bp, Homo sapiens; identical to SEQ ID NO: 18264
  source 1..34: mol_type = genomic DNA

SEQ ID NO: 55635 - DNA, 16 bp, Homo sapiens
  source 1..16: mol_type = genomic DNA
cgatccccagtacctc

SEQ ID NO: 55636 - DNA, 21 bp, Homo sapiens
  source 1..21: mol_type = genomic DNA
cattaaattatgataatcata

SEQ ID NO: 55637 - DNA, 27 bp, Homo sapiens
  source 1..27: mol_type = genomic DNA
taaattagaatcttagctttgggtgct

SEQ ID NO: 55638 - DNA, 18 bp, Homo sapiens
  source 1..18: mol_type = genomic DNA
cttataatgccgaggttg

SEQ ID NO: 55639 - DNA, 25 bp, Homo sapiens
  source 1..25: mol_type = genomic DNA
agaagcagcttcaaacctgccgggg

SEQ ID NO: 55640 - DNA, 21 bp, Homo sapiens
  source 1..21: mol_type = genomic DNA
gggctcacatcaccccataaa

SEQ ID NO: 55641 - DNA, 16 bp, Homo sapiens
  source 1..16: mol_type = genomic DNA
gtggtatagtggtgag

SEQ ID NO: 55642 - DNA, 20 bp, Homo sapiens
  source 1..20: mol_type = genomic DNA
ggtatagctcagtggtagag

SEQ ID NO: 55643 - DNA, 25 bp, Homo sapiens
  source 1..25: mol_type = genomic DNA
agtttaaattagaatcttagctttg

SEQ ID NO: 55644 - DNA, 18 bp, Homo sapiens
  source 1..18: mol_type = genomic DNA
ctttgatagagtaaataa

SEQ ID NO: 55645 - DNA, 35 bp, Homo sapiens; identical to SEQ ID NO: 14588
  source 1..35: mol_type = genomic DNA

SEQ ID NO: 55646 - DNA, 31 bp, Homo sapiens; identical to SEQ ID NO: 21139
  source 1..31: mol_type = genomic DNA

SEQ ID NO: 55647 - DNA, 37 bp, Homo sapiens; identical to SEQ ID NO: 19549
  source 1..37: mol_type = genomic DNA

SEQ ID NO: 55648 - DNA, 39 bp, Homo sapiens; identical to SEQ ID NO: 5705
  source 1..39: mol_type = genomic DNA

SEQ ID NO: 55649 - DNA, 33 bp, Homo sapiens; identical to SEQ ID NO: 11999
  source 1..33: mol_type = genomic DNA

SEQ ID NO: 55650 - DNA, 42 bp, Homo sapiens; identical to SEQ ID NO: 3455
  source 1..42: mol_type = genomic DNA

SEQ ID NO: 55651 - DNA, 40 bp, Homo sapiens; identical to SEQ ID NO: 5706
  source 1..40: mol_type = genomic DNA

SEQ ID NO: 55652 - DNA, 46 bp, Homo sapiens; identical to SEQ ID NO: 8799
  source 1..46: mol_type = genomic DNA

SEQ ID NO: 55653 - DNA, 33 bp, Homo sapiens; identical to SEQ ID NO: 29548
  source 1..33: mol_type = genomic DNA

SEQ ID NO: 55654 - DNA, 44 bp, Homo sapiens; identical to SEQ ID NO: 14159
  source 1..44: mol_type = genomic DNA

SEQ ID NO: 55655 - DNA, 36 bp, Homo sapiens; identical to SEQ ID NO: 10158
  source 1..36: mol_type = genomic DNA

SEQ ID NO: 55656 - DNA, 27 bp, Homo sapiens
  source 1..27: mol_type = genomic DNA
agatgaaaacctttttccaaggacacc

SEQ ID NO: 55657 - DNA, 27 bp, Homo sapiens
  source 1..27: mol_type = genomic DNA
aggagcttaaacccccttatttctacc

SEQ ID NO: 55658 - DNA, 31 bp, Homo sapiens; identical to SEQ ID NO: 25557
  source 1..31: mol_type = genomic DNA

SEQ ID NO: 55659 - DNA, 32 bp, Homo sapiens; identical to SEQ ID NO: 17006
  source 1..32: mol_type = genomic DNA

SEQ ID NO: 55660 - DNA, 43 bp, Homo sapiens; identical to SEQ ID NO: 17413
  source 1..43: mol_type = genomic DNA

SEQ ID NO: 55661 - DNA, 26 bp, Homo sapiens
  source 1..26: mol_type = genomic DNA
tagtgtagtggtcatcacgttcgcct

SEQ ID NO: 55662 - DNA, 20 bp, Homo sapiens
  source 1..20: mol_type = genomic DNA
gtggttatcacgttcgccta

SEQ ID NO: 55663 - DNA, 30 bp, Homo sapiens; identical to SEQ ID NO: 2977
  source 1..30: mol_type = genomic DNA

SEQ ID NO: 55664 - DNA, 31 bp, Homo sapiens; identical to SEQ ID NO: 11009
  source 1..31: mol_type = genomic DNA

SEQ ID NO: 55665 - DNA, 43 bp, Homo sapiens; identical to SEQ ID NO: 16572
  source 1..43: mol_type = genomic DNA

SEQ ID NO: 55666 - DNA, 38 bp, Homo sapiens; identical to SEQ ID NO: 3226
  source 1..38: mol_type = genomic DNA

SEQ ID NO: 55667 - DNA, 26 bp, Homo sapiens
  source 1..26: mol_type = genomic DNA
gagatgaaaacctttttccaaggaca

SEQ ID NO: 55668 - DNA, 28 bp, Homo sapiens
  source 1..28: mol_type = genomic DNA
ttcggcgctctcaccgccgcggcccggg

SEQ ID NO: 55669 - DNA, 42 bp, Homo sapiens; identical to SEQ ID NO: 16649
  source 1..42: mol_type = genomic DNA

SEQ ID NO: 55670 - DNA, 41 bp, Homo sapiens; identical to SEQ ID NO: 16648
  source 1..41: mol_type = genomic DNA

SEQ ID NO: 55671 - DNA, 33 bp, Homo sapiens; identical to SEQ ID NO: 18701
  source 1..33: mol_type = genomic DNA

SEQ ID NO: 55672 - DNA, 28 bp, Homo sapiens
  source 1..28: mol_type = genomic DNA
aggagcttaaacccccttatttctacca

SEQ ID NO: 55673 - DNA, 34 bp, Homo sapiens; identical to SEQ ID NO: 18738
  source 1..34: mol_type = genomic DNA

SEQ ID NO: 55674 - DNA, 30 bp, Homo sapiens; identical to SEQ ID NO: 15331
  source 1..30: mol_type = genomic DNA

SEQ ID NO: 55675 - DNA, 40 bp, Homo sapiens; identical to SEQ ID NO: 2342
  source 1..40: mol_type = genomic DNA

SEQ ID NO: 55676 - DNA, 34 bp, Homo sapiens; identical to SEQ ID NO: 10156
  source 1..34: mol_type = genomic DNA

SEQ ID NO: 55677 - DNA, 44 bp, Homo sapiens; identical to SEQ ID NO: 12142
  source 1..44: mol_type = genomic DNA

SEQ ID NO: 55678 - DNA, 27 bp, Homo sapiens
  source 1..27: mol_type = genomic DNA
caggcggcccgggttcgactcccggtg

SEQ ID NO: 55679 - DNA, 33 bp, Homo sapiens; identical to SEQ ID NO: 27269
  source 1..33: mol_type = genomic DNA

SEQ ID NO: 55680 - DNA, 35 bp, Homo sapiens; identical to SEQ ID NO: 8310
  source 1..35: mol_type = genomic DNA

SEQ ID NO: 55681 - DNA, 24 bp, Homo sapiens
  source 1..24: mol_type = genomic DNA
gagttcaaatctcgctggggcctc

SEQ ID NO: 55682 - DNA, 25 bp, Homo sapiens
  source 1..25: mol_type = genomic DNA
tctgacaacagaggcttacgacccc

SEQ ID NO: 55683 - DNA, 34 bp, Homo sapiens; identical to SEQ ID NO: 30039
  source 1..34: mol_type = genomic DNA

SEQ ID NO: 55684 - DNA, 17 bp, Homo sapiens
  source 1..17: mol_type = genomic DNA
aagttctggtctccgga

SEQ ID NO: 55685 - DNA, 19 bp, Homo sapiens
  source 1..19: mol_type = genomic DNA
gttcaatccccggcatctc

SEQ ID NO: 55686 - DNA, 21 bp, Homo sapiens
  source 1..21: mol_type = genomic DNA
gcggcccgggttcgattcccg

SEQ ID NO: 55687 - DNA, 32 bp, Homo sapiens; identical to SEQ ID NO: 18633
  source 1..32: mol_type = genomic DNA

SEQ ID NO: 55688 - DNA, 29 bp, Homo sapiens
  source 1..29: mol_type = genomic DNA
atagtggttagtactctgcgttgtggccg

SEQ ID NO: 55689 - DNA, 23 bp, Homo sapiens
  source 1..23: mol_type = genomic DNA
gtcggtagagcatgggactctta

SEQ ID NO: 55690 - DNA, 21 bp, Homo sapiens
  source 1..21: mol_type = genomic DNA
actcaagttctggtctccgga

SEQ ID NO: 55691 - DNA, 35 bp, Homo sapiens; identical to SEQ ID NO: 21800
  source 1..35: mol_type = genomic DNA

SEQ ID NO: 55692 - DNA, 23 bp, Homo sapiens
  source 1..23: mol_type = genomic DNA
ggtagaattctcgcctgccacgc

SEQ ID NO: 55693 - DNA, 26 bp, Homo sapiens
  source 1..26: mol_type = genomic DNA
gtggttatcacgttcgcctcacacgc

SEQ ID NO: 55694 - DNA, 32 bp, Homo sapiens; identical to SEQ ID NO: 11412
  source 1..32: mol_type = genomic DNA

SEQ ID NO: 55695 - DNA, 21 bp, Homo sapiens
  source 1..21: mol_type = genomic DNA
gtggtagagcgcatgctttgc

SEQ ID NO: 55696 - DNA, 22 bp, Homo sapiens
  source 1..22: mol_type = genomic DNA
gacccgggttcgattcccggcc

SEQ ID NO: 55697 - DNA, 22 bp, Homo sapiens
  source 1..22: mol_type = genomic DNA
gtctcataatctgaaggtcgtg

SEQ ID NO: 55698 - DNA, 20 bp, Homo sapiens
  source 1..20: mol_type = genomic DNA
gtggttatcacatctgcttt

SEQ ID NO: 55699 - DNA, 20 bp, Homo sapiens
  source 1..20: mol_type = genomic DNA
tcgagtctcggtggaacctc

SEQ ID NO: 55700 - DNA, 26 bp, Homo sapiens
  source 1..26: mol_type = genomic DNA
aattatgataatcatatttaccaacc

SEQ ID NO: 55701 - DNA, 21 bp, Homo sapiens
  source 1..21: mol_type = genomic DNA
tcgagtcccaccagagtcgcc

SEQ ID NO: 55702 - DNA, 25 bp, Homo sapiens
  source 1..25: mol_type = genomic DNA
atggggtgtgataggtggcacggag

SEQ ID NO: 55703 - DNA, 19 bp, Homo sapiens
  source 1..19: mol_type = genomic DNA
tgcacgaggccccgggttc

SEQ ID NO: 55704 - DNA, 21 bp, Homo sapiens
  source 1..21: mol_type = genomic DNA
gaaaacctttttccaaggaca

SEQ ID NO: 55705 - DNA, 23 bp, Homo sapiens
  source 1..23: mol_type = genomic DNA
gttcgattccccaacggggagcc

SEQ ID NO: 55706 - DNA, 24 bp, Homo sapiens
  source 1..24: mol_type = genomic DNA
ggttcgattcccggccaatgcacc

SEQ ID NO: 55707 - DNA, 23 bp, Homo sapiens
  source 1..23: mol_type = genomic DNA
gttatcacgtctgctttacacgc

SEQ ID NO: 55708 - DNA, 20 bp, Homo sapiens
  source 1..20: mol_type = genomic DNA
ggatggccgagtggtctaag

SEQ ID NO: 55709 - DNA, 21 bp, Homo sapiens
  source 1..21: mol_type = genomic DNA
agttcgagtctcggtggaacc

SEQ ID NO: 55710 - DNA, 30 bp, Homo sapiens; identical to SEQ ID NO: 18787
  source 1..30: mol_type = genomic DNA

SEQ ID NO: 55711 - DNA, 23 bp, Homo sapiens
  source 1..23: mol_type = genomic DNA
taaaccgaagatcacgggttcga

SEQ ID NO: 55712 - DNA, 23 bp, Homo sapiens
  source 1..23: mol_type = genomic DNA
taggtcgctggttcgaatccggc

SEQ ID NO: 55713 - DNA, 18 bp, Homo sapiens
  source 1..18: mol_type = genomic DNA
cgatgcccgcatcctcca

SEQ ID NO: 55714 - DNA, 38 bp, Homo sapiens; identical to SEQ ID NO: 16291
  source 1..38: mol_type = genomic DNA

SEQ ID NO: 55715 - DNA, 16 bp, Homo sapiens
  source 1..16: mol_type = genomic DNA
gttaggattcctggtt

SEQ ID NO: 55716 - DNA, 26 bp, Homo sapiens
  source 1..26: mol_type = genomic DNA
gtgtagtggttatcacgttcgcctca

SEQ ID NO: 55717 - DNA, 27 bp, Homo sapiens
  source 1..27: mol_type = genomic DNA
gcccccatgtctaacaacatggctttc

SEQ ID NO: 55718 - DNA, 26 bp, Homo sapiens
  source 1..26: mol_type = genomic DNA
cagattgtgaatctgacaacagaggc

SEQ ID NO: 55719 - DNA, 28 bp, Homo sapiens
  source 1..28: mol_type = genomic DNA
taactttgtcaaagttaaattataggct

SEQ ID NO: 55720 - DNA, 16 bp, Homo sapiens
  source 1..16: mol_type = genomic DNA
cttaatcccagggtcg

SEQ ID NO: 55721 - DNA, 18 bp, Homo sapiens
  source 1..18: mol_type = genomic DNA
tttgcgttcagttgatgc

SEQ ID NO: 55722 - DNA, 17 bp, Homo sapiens
  source 1..17: mol_type = genomic DNA
aaaatgttggttatacc

SEQ ID NO: 55723 - DNA, 16 bp, Homo sapiens
  source 1..16: mol_type = genomic DNA
aaatgttggttatacc

SEQ ID NO: 55724 - DNA, 22 bp, Homo sapiens
  source 1..22: mol_type = genomic DNA
ttaggagatttcaacttaactt

SEQ ID NO: 55725 - DNA, 16 bp, Homo sapiens
  source 1..16: mol_type = genomic DNA
ttcctcttcttaacac

SEQ ID NO: 55726 - DNA, 17 bp, Homo sapiens
  source 1..17: mol_type = genomic DNA
aagacaggggttaggcc

SEQ ID NO: 55727 - DNA, 17 bp, Homo sapiens
  source 1..17: mol_type = genomic DNA
gtcccatctgggtcgcc

SEQ ID NO: 55728 - DNA, 22 bp, Homo sapiens
  source 1..22: mol_type = genomic DNA
cagcttcaaacctgccggggct

SEQ ID NO: 55729 - DNA, 18 bp, Homo sapiens
  source 1..18: mol_type = genomic DNA
aagaagcagcttcaaacc

SEQ ID NO: 55730 - DNA, 27 bp, Homo sapiens
  source 1..27: mol_type = genomic DNA
tgcccccatgtctaacaacatggcttt

SEQ ID NO: 55731 - DNA, 20 bp, Homo sapiens
  source 1..20: mol_type = genomic DNA
cttttaagttaaagattaag

SEQ ID NO: 55732 - DNA, 18 bp, Homo sapiens
  source 1..18: mol_type = genomic DNA
tgtagtgtagtggttatc

SEQ ID NO: 55733 - DNA, 16 bp, Homo sapiens
  source 1..16: mol_type = genomic DNA
ctaggggtatgattct

SEQ ID NO: 55734 - DNA, 16 bp, Homo sapiens
  source 1..16: mol_type = genomic DNA
gttaaagactttttct

SEQ ID NO: 55735 - DNA, 22 bp, Homo sapiens
  source 1..22: mol_type = genomic DNA
ttcgaagaagcagcttcaaacc

SEQ ID NO: 55736 - DNA, 30 bp, Homo sapiens; identical to SEQ ID NO: 4209
  source 1..30: mol_type = genomic DNA

SEQ ID NO: 55737 - DNA, 19 bp, Homo sapiens
  source 1..19: mol_type = genomic DNA
cgtggccgagtggttaagg

SEQ ID NO: 55738 - DNA, 28 bp, Homo sapiens
  source 1..28: mol_type = genomic DNA
gtgagcactctggactctgaatccagcg

SEQ ID NO: 55739 - DNA, 23 bp, Homo sapiens
  source 1..23: mol_type = genomic DNA
tggaggcgtgggttcgaatccca

SEQ ID NO: 55740 - DNA, 19 bp, Homo sapiens
  source 1..19: mol_type = genomic DNA
gtagtgtagtggttatcac

SEQ ID NO: 55741 - DNA, 35 bp, Homo sapiens; identical to SEQ ID NO: 12014
  source 1..35: mol_type = genomic DNA

SEQ ID NO: 55742 - DNA, 35 bp, Homo sapiens; identical to SEQ ID NO: 27922
  source 1..35: mol_type = genomic DNA

SEQ ID NO: 55743 - DNA, 36 bp, Homo sapiens; identical to SEQ ID NO: 11967
  source 1..36: mol_type = genomic DNA

SEQ ID NO: 55744 - DNA, 47 bp, Homo sapiens; identical to SEQ ID NO: 1114
  source 1..47: mol_type = genomic DNA

SEQ ID NO: 55745 - DNA, 30 bp, Homo sapiens; identical to SEQ ID NO: 7417
  source 1..30: mol_type = genomic DNA

SEQ ID NO: 55746 - DNA, 35 bp, Homo sapiens; identical to SEQ ID NO: 6213
  source 1..35: mol_type = genomic DNA

SEQ ID NO: 55747 - DNA, 27 bp, Homo sapiens
  source 1..27: mol_type = genomic DNA
ggtagaattctcgcctgccacgcggga

SEQ ID NO: 55748 - DNA, 23 bp, Homo sapiens
  source 1..23: mol_type = genomic DNA
agactcaagttctggtctccgga

SEQ ID NO: 55749 - DNA, 30 bp, Homo sapiens; identical to SEQ ID NO: 18355
  source 1..30: mol_type = genomic DNA

SEQ ID NO: 55750 - DNA, 35 bp, Homo sapiens; identical to SEQ ID NO: 26852
  source 1..35: mol_type = genomic DNA

SEQ ID NO: 55751 - DNA, 32 bp, Homo sapiens; identical to SEQ ID NO: 4132
  source 1..32: mol_type = genomic DNA

SEQ ID NO: 55752 - DNA, 36 bp, Homo sapiens; identical to SEQ ID NO: 8576
  source 1..36: mol_type = genomic DNA

SEQ ID NO: 55753 - DNA, 44 bp, Homo sapiens; identical to SEQ ID NO: 27629
  source 1..44: mol_type = genomic DNA

SEQ ID NO: 55754 - DNA, 29 bp, Homo sapiens
  source 1..29: mol_type = genomic DNA
gatgggttcgattctcatagtcctagcca

SEQ ID NO: 55755 - DNA, 44 bp, Homo sapiens; identical to SEQ ID NO: 16651
  source 1..44: mol_type = genomic DNA

SEQ ID NO: 55756 - DNA, 43 bp, Homo sapiens; identical to SEQ ID NO: 17864
  source 1..43: mol_type = genomic DNA

SEQ ID NO: 55757 - DNA, 26 bp, Homo sapiens
  source 1..26: mol_type = genomic DNA
gtagaattctcgcctgccacgcggga

SEQ ID NO: 55758 - DNA, 21 bp, Homo sapiens
  source 1..21: mol_type = genomic DNA
aaacctttttccaaggacacc

SEQ ID NO: 55759 - DNA, 33 bp, Homo sapiens; identical to SEQ ID NO: 22561
  source 1..33: mol_type = genomic DNA

SEQ ID NO: 55760 - DNA, 46 bp, Homo sapiens; identical to SEQ ID NO: 25716
  source 1..46: mol_type = genomic DNA

SEQ ID NO: 55761 - DNA, 42 bp, Homo sapiens; identical to SEQ ID NO: 25488
  source 1..42: mol_type = genomic DNA

SEQ ID NO: 55762 - DNA, 42 bp, Homo sapiens; identical to SEQ ID NO: 216
  source 1..42: mol_type = genomic DNA

SEQ ID NO: 55763 - DNA, 32 bp, Homo sapiens; identical to SEQ ID NO: 20365
  source 1..32: mol_type = genomic DNA

SEQ ID NO: 55764 - DNA, 24 bp, Homo sapiens
  source 1..24: mol_type = genomic DNA
ccatatggtctagcggttaggatt

SEQ ID NO: 55765 - DNA, 21 bp, Homo sapiens
  source 1..21: mol_type = genomic DNA
acagaggcttacgacccctta

SEQ ID NO: 55766 - DNA, 32 bp, Homo sapiens; identical to SEQ ID NO: 22553
  source 1..32: mol_type = genomic DNA

SEQ ID NO: 55767 - DNA, 38 bp, Homo sapiens; identical to SEQ ID NO: 3082
  source 1..38: mol_type = genomic DNA

SEQ ID NO: 55768 - DNA, 26 bp, Homo sapiens
  source 1..26: mol_type = genomic DNA
cggagatgaaaacctttttccaagga

SEQ ID NO: 55769 - DNA, 42 bp, Homo sapiens; identical to SEQ ID NO: 22550
  source 1..42: mol_type = genomic DNA

SEQ ID NO: 55770 - DNA, 25 bp, Homo sapiens
  source 1..25: mol_type = genomic DNA
agctcacaagaactgctaactcatg

SEQ ID NO: 55771 - DNA, 24 bp, Homo sapiens
  source 1..24: mol_type = genomic DNA
tgtagcggttatcacattcgcctc

SEQ ID NO: 55772 - DNA, 27 bp, Homo sapiens
  source 1..27: mol_type = genomic DNA
gtagaattctcgcctgccacgcgggag

SEQ ID NO: 55773 - DNA, 19 bp, Homo sapiens
  source 1..19: mol_type = genomic DNA
aagacaggggttaggcctc

SEQ ID NO: 55774 - DNA, 30 bp, Homo sapiens; identical to SEQ ID NO: 8396
  source 1..30: mol_type = genomic DNA

SEQ ID NO: 55775 - DNA, 29 bp, Homo sapiens
  source 1..29: mol_type = genomic DNA
tcagaaggctgcgtgttcgaatcacgtcg

SEQ ID NO: 55776 - DNA, 28 bp, Homo sapiens
  source 1..28: mol_type = genomic DNA
cgcggcccgggttcgattcccggtcagg

SEQ ID NO: 55777 - DNA, 27 bp, Homo sapiens
  source 1..27: mol_type = genomic DNA
atgttggttatacccttcccgtactac

SEQ ID NO: 55778 - DNA, 22 bp, Homo sapiens
  source 1..22: mol_type = genomic DNA
tatccattggtcttaggcccca

SEQ ID NO: 55779 - DNA, 26 bp, Homo sapiens
  source 1..26: mol_type = genomic DNA
gctctcaccgccgcggcccgggttcg

SEQ ID NO: 55780 - DNA, 24 bp, Homo sapiens
  source 1..24: mol_type = genomic DNA
ggttcaattcctcttcttaacacc

SEQ ID NO: 55781 - DNA, 23 bp, Homo sapiens
  source 1..23: mol_type = genomic DNA
gccacgcgggaggcccgggttcg

SEQ ID NO: 55782 - DNA, 20 bp, Homo sapiens
  source 1..20: mol_type = genomic DNA
gctttgcacgtatgaggccc

SEQ ID NO: 55783 - DNA, 18 bp, Homo sapiens
  source 1..18: mol_type = genomic DNA
catttcgatggcgtgggt

SEQ ID NO: 55784 - DNA, 25 bp, Homo sapiens
  source 1..25: mol_type = genomic DNA
ggggttcgattccttccttttttgc

SEQ ID NO: 55785 - DNA, 21 bp, Homo sapiens
  source 1..21: mol_type = genomic DNA
gctaaatcctatatatcttac

SEQ ID NO: 55786 - DNA, 25 bp, Homo sapiens
  source 1..25: mol_type = genomic DNA
cgctggttcgaatccggctcggagg

SEQ ID NO: 55787 - DNA, 22 bp, Homo sapiens
  source 1..22: mol_type = genomic DNA
gacaacattcaaaaaagagtac

SEQ ID NO: 55788 - DNA, 36 bp, Homo sapiens; identical to SEQ ID NO: 23714
  source 1..36: mol_type = genomic DNA

SEQ ID NO: 55789 - DNA, 27 bp, Homo sapiens
  source 1..27: mol_type = genomic DNA
aactttgtcaaagttaaattataggct

SEQ ID NO: 55790 - DNA, 16 bp, Homo sapiens
  source 1..16: mol_type = genomic DNA
aatacagaccaagagc

SEQ ID NO: 55791 - DNA, 16 bp, Homo sapiens
  source 1..16: mol_type = genomic DNA
acccccttatttctac

SEQ ID NO: 55792 - DNA, 17 bp, Homo sapiens
  source 1..17: mol_type = genomic DNA
caagtccctgttcgggc

SEQ ID NO: 55793 - DNA, 20 bp, Homo sapiens
  source 1..20: mol_type = genomic DNA
ttaaagattaagagaaccaa

SEQ ID NO: 55794 - DNA, 16 bp, Homo sapiens
  source 1..16: mol_type = genomic DNA
aggtcagctaaataag

SEQ ID NO: 55795 - DNA, 17 bp, Homo sapiens
  source 1..17: mol_type = genomic DNA
ttgcgttcagttgatgc

SEQ ID NO: 55796 - DNA, 19 bp, Homo sapiens
  source 1..19: mol_type = genomic DNA
ctcataatctgaaggtcct

SEQ ID NO: 55797 - DNA, 29 bp, Homo sapiens
  source 1..29: mol_type = genomic DNA
agattaagagaaccaacacctctttacag

SEQ ID NO: 55798 - DNA, 16 bp, Homo sapiens
  source 1..16: mol_type = genomic DNA
gttatacccttcccgt

SEQ ID NO: 55799 - DNA, 19 bp, Homo sapiens
  source 1..19: mol_type = genomic DNA
gggtggttcagtggtagaa

SEQ ID NO: 55800 - DNA, 45 bp, Homo sapiens; identical to SEQ ID NO: 9933
  source 1..45: mol_type = genomic DNA

SEQ ID NO: 55801 - DNA, 34 bp, Homo sapiens; identical to SEQ ID NO: 24475
  source 1..34: mol_type = genomic DNA

SEQ ID NO: 55802 - DNA, 27 bp, Homo sapiens
  source 1..27: mol_type = genomic DNA
gtgggtttaagtcccattggtctagcc

SEQ ID NO: 55803 - DNA, 34 bp, Homo sapiens; identical to SEQ ID NO: 15099
  source 1..34: mol_type = genomic DNA

SEQ ID NO: 55804 - DNA, 41 bp, Homo sapiens; identical to SEQ ID NO: 13160
  source 1..41: mol_type = genomic DNA

SEQ ID NO: 55805 - DNA, 34 bp, Homo sapiens; identical to SEQ ID NO: 4152
  source 1..34: mol_type = genomic DNA

SEQ ID NO: 55806 - DNA, 35 bp, Homo sapiens; identical to SEQ ID NO: 8271
  source 1..35: mol_type = genomic DNA

SEQ ID NO: 55807 - DNA, 30 bp, Homo sapiens; identical to SEQ ID NO: 10569
  source 1..30: mol_type = genomic DNA

SEQ ID NO: 55808 - DNA, 16 bp, Homo sapiens
  source 1..16: mol_type = genomic DNA
ttcccattcttgcgac

SEQ ID NO: 55809 - DNA, 25 bp, Homo sapiens
  source 1..25: mol_type = genomic DNA
atgggttcgattctcatagtcctag

SEQ ID NO: 55810 - DNA, 46 bp, Homo sapiens; identical to SEQ ID NO: 17029
  source 1..46: mol_type = genomic DNA

SEQ ID NO: 55811 - DNA, 28 bp, Homo sapiens
  source 1..28: mol_type = genomic DNA
agaggcttacgaccccttatttacccca

SEQ ID NO: 55812 - DNA, 22 bp, Homo sapiens
  source 1..22: mol_type = genomic DNA
ttaggattcggcgctctcaccg

SEQ ID NO: 55813 - DNA, 34 bp, Homo sapiens; identical to SEQ ID NO: 8369
  source 1..34: mol_type = genomic DNA

SEQ ID NO: 55814 - DNA, 26 bp, Homo sapiens
  source 1..26: mol_type = genomic DNA
tgtgggttcgagtcccatctggggtg

SEQ ID NO: 55815 - DNA, 33 bp, Homo sapiens; identical to SEQ ID NO: 18725
  source 1..33: mol_type = genomic DNA

SEQ ID NO: 55816 - DNA, 33 bp, Homo sapiens; identical to SEQ ID NO: 11011
  source 1..33: mol_type = genomic DNA

SEQ ID NO: 55817 - DNA, 39 bp, Homo sapiens; identical to SEQ ID NO: 1012
  source 1..39: mol_type = genomic DNA

SEQ ID NO: 55818 - DNA, 23 bp, Homo sapiens
  source 1..23: mol_type = genomic DNA
gttcgaatccgagtcacggcacc

SEQ ID NO: 55819 - DNA, 26 bp, Homo sapiens
  source 1..26: mol_type = genomic DNA
tgtctaacaacatggctttctcacca

SEQ ID NO: 55820 - DNA, 20 bp, Homo sapiens
  source 1..20: mol_type = genomic DNA
aggattcggcgctctcaccg

SEQ ID NO: 55821 - DNA, 26 bp, Homo sapiens
  source 1..26: mol_type = genomic DNA
agtcggtagagcatgagactcttaat

SEQ ID NO: 55822 - DNA, 22 bp, Homo sapiens
  source 1..22: mol_type = genomic DNA
agtctcataatctgaaggtcgt

SEQ ID NO: 55823 - DNA, 29 bp, Homo sapiens
  source 1..29: mol_type = genomic DNA
ttcatatcattggtcgtggttgtagtccg

SEQ ID NO: 55824 - DNA, 18 bp, Homo sapiens
  source 1..18: mol_type = genomic DNA
ttgtaaaccaggggtcgc

SEQ ID NO: 55825 - DNA, 29 bp, Homo sapiens
  source 1..29: mol_type = genomic DNA
ttggtggttcgatcccacccagggacgcc

SEQ ID NO: 55826 - DNA, 16 bp, Homo sapiens
  source 1..16: mol_type = genomic DNA
agcagttgacccgggt

SEQ ID NO: 55827 - DNA, 34 bp, Homo sapiens; identical to SEQ ID NO: 2160
  source 1..34: mol_type = genomic DNA

SEQ ID NO: 55828 - DNA, 37 bp, Homo sapiens; identical to SEQ ID NO: 31109
  source 1..37: mol_type = genomic DNA

SEQ ID NO: 55829 - DNA, 25 bp, Homo sapiens
  source 1..25: mol_type = genomic DNA
ctcagtcggtagagcatcagacttt

SEQ ID NO: 55830 - DNA, 16 bp, Homo sapiens
  source 1..16: mol_type = genomic DNA
gttccatagtgtagcg

SEQ ID NO: 55831 - DNA, 18 bp, Homo sapiens
  source 1..18: mol_type = genomic DNA
ctgcgtgttcgaatcacg

SEQ ID NO: 55832 - DNA, 21 bp, Homo sapiens
  source 1..21: mol_type = genomic DNA
tggggttttgcagtccttacc

SEQ ID NO: 55833 - DNA, 29 bp, Homo sapiens
  source 1..29: mol_type = genomic DNA
tgcgacccgggttcgattcccgggcggcg

SEQ ID NO: 55834 - DNA, 23 bp, Homo sapiens
  source 1..23: mol_type = genomic DNA
gttcaattcctcttcttaacacc

SEQ ID NO: 55835 - DNA, 19 bp, Homo sapiens
  source 1..19: mol_type = genomic DNA
cttaaacccccttatttct

SEQ ID NO: 55836 - DNA, 19 bp, Homo sapiens
  source 1..19: mol_type = genomic DNA
gggtatgattctcgcttcg

SEQ ID NO: 55837 - DNA, 18 bp, Homo sapiens
  source 1..18: mol_type = genomic DNA
gttcgattcccggccaat

SEQ ID NO: 55838 - DNA, 24 bp, Homo sapiens
  source 1..24: mol_type = genomic DNA
tggtctagtggctaggattcggcg

SEQ ID NO: 55839 - DNA, 27 bp, Homo sapiens
  source 1..27: mol_type = genomic DNA
cgctctcaccgccgcggcccgggttcg

SEQ ID NO: 55840 - DNA, 21 bp, Homo sapiens
  source 1..21: mol_type = genomic DNA
ctcagggatgggttcgattct

SEQ ID NO: 55841 - DNA, 28 bp, Homo sapiens
  source 1..28: mol_type = genomic DNA
gggagaccggggttcgattccccgacgg

SEQ ID NO: 55842 - DNA, 23 bp, Homo sapiens
  source 1..23: mol_type = genomic DNA
tggttcgattccggctcgaagga

SEQ ID NO: 55843 - DNA, 24 bp, Homo sapiens
  source 1..24: mol_type = genomic DNA
ctcgttagtatagtggtgagtatc

SEQ ID NO: 55844 - DNA, 33 bp, Homo sapiens; identical to SEQ ID NO: 18411
  source 1..33: mol_type = genomic DNA

SEQ ID NO: 55845 - DNA, 17 bp, Homo sapiens
  source 1..17: mol_type = genomic DNA
atccgagtcacggcacc

SEQ ID NO: 55846 - DNA, 29 bp, Homo sapiens
  source 1..29: mol_type = genomic DNA
gctagctcagtcggtagagcatgagactc

SEQ ID NO: 55847 - DNA, 32 bp, Homo sapiens; identical to SEQ ID NO: 19919
  source 1..32: mol_type = genomic DNA

SEQ ID NO: 55848 - DNA, 16 bp, Homo sapiens
  source 1..16: mol_type = genomic DNA
agtgaagcattggact

SEQ ID NO: 55849 - DNA, 16 bp, Homo sapiens
  source 1..16: mol_type = genomic DNA
ctcagtcggtagagca

SEQ ID NO: 55850 - DNA, 16 bp, Homo sapiens
  source 1..16: mol_type = genomic DNA
atggataaggcactgg

SEQ ID NO: 55851 - DNA, 30 bp, Homo sapiens; identical to SEQ ID NO: 23708
  source 1..30: mol_type = genomic DNA
